United States Patent Application Publication US 2006/0003322 A1 - sequence listing, part 17

SEQ ID NO: 695846 - RNA, 23 nt, Human
ucagucucuaagcaguuuuuaaa

SEQ ID NO: 695847 - RNA, 21 nt, Human
ugccucugcccccgcgaacuc

SEQ ID NO: 695848 - RNA, 21 nt, Human
uggcacacuacuguuugguau

SEQ ID NO: 695849 - RNA, 23 nt, Human
uuuuuuuuuuuuuuuuuacuugg

SEQ ID NO: 695850 - RNA, 25 nt, Human
uuuuuuuuuuuuuuuuuuuacuugg

SEQ ID NO: 695851 - RNA, 19 nt, Human
acaaacuaggaguggaaau

SEQ ID NO: 695852 - RNA, 21 nt, Human
agacacagaaaaugggugccc

SEQ ID NO: 695853 - RNA, 22 nt, Human
agggaagaacaaaaauuaucca

SEQ ID NO: 695854 - RNA, 18 nt, Human
aucacacagggaagaaca

SEQ ID NO: 695855 - RNA, 21 nt, Human
ccugaaccuccuucuaaauca

SEQ ID NO: 695856 - RNA, 23 nt, Human
cguagccugaaccuccuucuaaa

SEQ ID NO: 695857 - RNA, 28 nt, Human
cucaccguagccugaaccuccuucuaaa

SEQ ID NO: 695858 - RNA, 18 nt, Human
gaauccuggguuucccuc

SEQ ID NO: 695859 - RNA, 22 nt, Human
ggagacacagaaaaugggugcc

SEQ ID NO: 695860 - RNA, 25 nt, Human
gggaagaacaaaaauuauccaugac

SEQ ID NO: 695861 - RNA, 24 nt, Human
uacagccggaaguuguacggcgcc

SEQ ID NO: 695862 - RNA, 19 nt, Human
ucccuccuaggacccugca

SEQ ID NO: 695863 - RNA, 23 nt, Human
uuuuuuuuuuuuaacgagucuca

SEQ ID NO: 695864 - RNA, 24 nt, Human
uuuuuuuuuuuuaacgagucucaa

SEQ ID NO: 695865 - RNA, 20 nt, Human
uuuuuuuuuuuuuuuuuaac

SEQ ID NO: 695866 - RNA, 23 nt, Human
aaaaaguacacaaaaaccacuga

SEQ ID NO: 695867 - RNA, 23 nt, Human
aaucaacggagauacaagaaaga

SEQ ID NO: 695868 - RNA, 22 nt, Human
acaagcccagguaagcauacca

SEQ ID NO: 695869 - RNA, 27 nt, Human
agcauaccaagcaagcccccucacacc

SEQ ID NO: 695870 - RNA, 24 nt, Human
aggcaacgagaggcagccuagaac

SEQ ID NO: 695871 - RNA, 20 nt, Human
auggaggcaacgagaggcag

SEQ ID NO: 695872 - RNA, 18 nt, Human
caagcccccucacaccuu

SEQ ID NO: 695873 - RNA, 18 nt, Human
ccagcagcaguaucucag

SEQ ID NO: 695874 - RNA, 21 nt, Human
ccuccaaaacccgcgcagagc

SEQ ID NO: 695875 - RNA, 23 nt, Human
cucaaauccuucccuccguuauc

SEQ ID NO: 695876 - RNA, 19 nt, Human
cugaauggauaaucuagau

SEQ ID NO: 695877 - RNA, 26 nt, Human
gcuacagacccaacacucugcagacu

SEQ ID NO: 695878 - RNA, 22 nt, Human
ggcaacgagaggcagccuagaa

SEQ ID NO: 695879 - RNA, 22 nt, Human
guaagcauaccaagcaagcccc

SEQ ID NO: 695880 - RNA, 23 nt, Human
gucuccaacuuuugcgaaacaca

SEQ ID NO: 695881 - RNA, 20 nt, Human
uaccaagcaagcccccucac

SEQ ID NO: 695882 - RNA, 24 nt, Human
uaccaagcaagcccccucacaccu

SEQ ID NO: 695883 - RNA, 21 nt, Human
ucacugggaaguggcuccaca

SEQ ID NO: 695884 - RNA, 23 nt, Human
ucacugggaaguggcuccacaga

SEQ ID NO: 695885 - RNA, 18 nt, Human
uccagcagcaguaucuca

SEQ ID NO: 695886 - RNA, 25 nt, Human
uccuccaaaacccgcgcagagcgag

SEQ ID NO: 695887 - RNA, 22 nt, Human
ucuuugcagcaaugucucgccc

SEQ ID NO: 695888 - RNA, 18 nt, Human
ucuuuuuuuuuuuuuuuu

SEQ ID NO: 695889 - RNA, 28 nt, Human
ugaaaaaagcuugacuucuuugcagcag

SEQ ID NO: 695890 - RNA, 22 nt, Human
ugaauggauaaucuagaugaug

SEQ ID NO: 695891 - RNA, 20 nt, Human
ugagguacacaagcccaggu

SEQ ID NO: 695892 - RNA, 23 nt, Human
ugccccuaaacucuucucgguuc

SEQ ID NO: 695893 - RNA, 23 nt, Human
ugcuaauguccuccaaaacccgc

SEQ ID NO: 695894 - RNA, 18 nt, Human
uggcuccacagagacacu

SEQ ID NO: 695895 - RNA, 20 nt, Human
ugggaaguggcuccacagag

SEQ ID NO: 695896 - RNA, 27 nt, Human
ugucucgcccauuccagcagcaguauc

SEQ ID NO: 695897 - RNA, 22 nt, Human
ugucugaaaaaagcuugacuuc

SEQ ID NO: 695898 - RNA, 24 nt, Human
uucucgguucuguccuugguccuu

SEQ ID NO: 695899 - RNA, 22 nt, Human
uugaaaaaaguacacaaaaacc

SEQ ID NO: 695900 - RNA, 23 nt, Human
uugaaaaaaguacacaaaaacca

SEQ ID NO: 695901 - RNA, 23 nt, Human
uuuuuuuuuuuuuuuuucuuuuu

SEQ ID NO: 695902 - RNA, 23 nt, Human
aaaagaaaaaaaaacucauaaaa

SEQ ID NO: 695903 - RNA, 20 nt, Human
cacacacaauuuagacaggg

SEQ ID NO: 695904 - RNA, 22 nt, Human
caggaaaacauaucacuggaaa

SEQ ID NO: 695905 - RNA, 21 nt, Human
cgaagaucauacagacgccau

SEQ ID NO: 695906 - RNA, 20 nt, Human
gaaaagaaaaaaaaacucau

SEQ ID NO: 695907 - RNA, 23 nt, Human
ggaaaagaaaaaaaaacucauaa

SEQ ID NO: 695908 - RNA, 19 nt, Human
uaagguaucacuaaagaaa

SEQ ID NO: 695909 - RNA, 22 nt, Human
uagacaggggaaaagaaaaaaa

SEQ ID NO: 695910 - RNA, 23 nt, Human
uaucacuggaaacauuuggagaa

SEQ ID NO: 695911 - RNA, 21 nt, Human
ucacuaaagaaaaagauagga

SEQ ID NO: 695912 - RNA, 18 nt, Human
uuggagaaugcaaacugg

SEQ ID NO: 695913 - RNA, 21 nt, Human
uuuuuuuuuuuuuuuuuauuu

SEQ ID NO: 695914 - RNA, 19 nt, Human
aagguaggcaacuuagauc

SEQ ID NO: 695915 - RNA, 21 nt, Human
agcugacaccccucacaacgc

SEQ ID NO: 695916 - RNA, 22 nt, Human
agcugccugggaugcacugagc

SEQ ID NO: 695917 - RNA, 24 nt, Human
aucaccuuggcaaagaacacauua

SEQ ID NO: 695918 - RNA, 21 nt, Human
caaaauacauauguacaagau

SEQ ID NO: 695919 - RNA, 21 nt, Human
caacgcagcaacgcgcggacc

SEQ ID NO: 695920 - RNA, 21 nt, Human
caagauaaauaaacuacacaa

SEQ ID NO: 695921 - RNA, 21 nt, Human
caagguaggcaacuuagauca

SEQ ID NO: 695922 - RNA, 25 nt, Human
caccccucacaacgcagcaacgcgc

SEQ ID NO: 695923 - RNA, 22 nt, Human
caccuuggcaaagaacacauua

SEQ ID NO: 695924 - RNA, 22 nt, Human
gggaugcacugagcugacaccc

SEQ ID NO: 695925 - RNA, 22 nt, Human
uaagaugaaccaggacaagucc

SEQ ID NO: 695926 - RNA, 22 nt, Human
uagaaggaaccacacacaguuc

SEQ ID NO: 695927 - RNA, 18 nt, Human
ugcacugagcugacaccc

SEQ ID NO: 695928 - RNA, 18 nt, Human
ugccugggaugcacugag

SEQ ID NO: 695929 - RNA, 18 nt, Human
ugggaugcacugagcuga

SEQ ID NO: 695930 - RNA, 24 nt, Human
agaucaacaaaaauacacagucau

SEQ ID NO: 695931 - RNA, 23 nt, Human
auacacacggcagaauucggaaa

SEQ ID NO: 695932 - RNA, 18 nt, Human
caagaaaaacuggcgccu

SEQ ID NO: 695933 - RNA, 22 nt, Human
caagaaaaacuggcgccuggca

SEQ ID NO: 695934 - RNA, 25 nt, Human
gauacacacggcagaauucggaaac

SEQ ID NO: 695935 - RNA, 23 nt, Human
uacacagucauaacaagaaaaac

SEQ ID NO: 695936 - RNA, 19 nt, Human
ucgccaggccggaaccgga

SEQ ID NO: 695937 - RNA, 18 nt, Human
ugagaaaaaaauauauaa

SEQ ID NO: 695938 - RNA, 21 nt, Human
ugagaaaaaaauauauaauac

SEQ ID NO: 695939 - RNA, 24 nt, Human
ugagaaaaaaauauauaauaccga

SEQ ID NO: 695940 - RNA, 18 nt, Human
uuuuugguuuuaaaccuu

SEQ ID NO: 695941 - RNA, 22 nt, Human
uuuuuuuuuuuuuugguuuuaa

SEQ ID NO: 695942 - RNA, 18 nt, Human
uuuuuuuuuuuuuuuuug

SEQ ID NO: 695943 - RNA, 24 nt, Human
uuuuuuuuuuuuuuuuuugguuuu

SEQ ID NO: 695944 - RNA, 21 nt, Human
aaaugaauacaauacuaaaau

SEQ ID NO: 695945 - RNA, 20 nt, Human
caacaaauacuguauuagau

SEQ ID NO: 695946 - RNA, 22 nt, Human
caacauccaucagaaaccugcu

SEQ ID NO: 695947 - RNA, 19 nt, Human
cacuuuauaagccauacac

SEQ ID NO: 695948 - RNA, 21 nt, Human
ccaauaacaaacauuucuaau

SEQ ID NO: 695949 - RNA, 18 nt, Human
cggccggacacguacuca

SEQ ID NO: 695950 - RNA, 21 nt, Human
cuccagggagaaccugauguc

SEQ ID NO: 695951 - RNA, 22 nt, Human
ggaaagcuuuaggguucacuac

SEQ ID NO: 695952 - RNA, 19 nt, Human
uaaaaugaauacaauacua

SEQ ID NO: 695953 - RNA, 19 nt, Human
uaugcuguauuucauaauu

SEQ ID NO: 695954 - RNA, 19 nt, Human
ucuccagggagaaccugau

SEQ ID NO: 695955 - RNA, 23 nt, Human
ucuuucuuuugaacacauucugg

SEQ ID NO: 695956 - RNA, 24 nt, Human
ugcggccggacacguacucaagcc

SEQ ID NO: 695957 - RNA, 20 nt, Human
ugucaugauugagucaaugg

SEQ ID NO: 695958 - RNA, 21 nt, Human
uguuaggcaaaaacgucaguu

SEQ ID NO: 695959 - RNA, 19 nt, Human
uuaaagcagaaauauuguc

SEQ ID NO: 695960 - RNA, 22 nt, Human
aaggucccucugcccugccuca

SEQ ID NO: 695961 - RNA, 22 nt, Human
agaagaacagaauguaaacaga

SEQ ID NO: 695962 - RNA, 19 nt, Human
aggaagcagcuuuuauuga

SEQ ID NO: 695963 - RNA, 19 nt, Human
ccaaagcccagucuuuccc

SEQ ID NO: 695964 - RNA, 19 nt, Human
cccccgugccuccagaauc

SEQ ID NO: 695965 - RNA, 20 nt, Human
ccgcuugugagugcaucgag

SEQ ID NO: 695966 - RNA, 22 nt, Human
ccuccagaaucgcauguugcuc

SEQ ID NO: 695967 - RNA, 24 nt, Human
ccucugcccugccucaguggcuug

SEQ ID NO: 695968 - RNA, 19 nt, Human
ccugugcagccuuagaaac

SEQ ID NO: 695969 - RNA, 20 nt, Human
ccuucccugugcagccuuag

SEQ ID NO: 695970 - RNA, 22 nt, Human
cgagaagaacagaauguaaaca

SEQ ID NO: 695971 - RNA, 25 nt, Human
cgagaagaacagaauguaaacagau

SEQ ID NO: 695972 - RNA, 19 nt, Human
cuccaccugggggcggaua

SEQ ID NO: 695973 - RNA, 22 nt, Human
cucuagauuguccaaagcccag

SEQ ID NO: 695974 - RNA, 23 nt, Human
gcaagagaaacgcggaaguggug

SEQ ID NO: 695975 - RNA, 18 nt, Human
gccuccagaaucgcaugu

SEQ ID NO: 695976 - RNA, 19 nt, Human
gcgcaagagaaacgcggaa

SEQ ID NO: 695977 - RNA, 19 nt, Human
ggauauaaauuaccucuag

SEQ ID NO: 695978 - RNA, 25 nt, Human
gggaagaugagacguuggguugcug

SEQ ID NO: 695979 - RNA, 24 nt, Human
ggggcggauauaaauuaccucuag

SEQ ID NO: 695980 - RNA, 18 nt, Human
uagagguggagggugucc

SEQ ID NO: 695981 - RNA, 22 nt, Human
uagaugaguuaagugugaugca

SEQ ID NO: 695982 - RNA, 28 nt, Human
ucaaaggucccucugcccugccucaggg

SEQ ID NO: 695983 - RNA, 21 nt, Human
uccccagcaaugccuacugca

SEQ ID NO: 695984 - RNA, 23 nt, Human
uguuuguuucuuccccagcaaug

SEQ ID NO: 695985 - RNA, 23 nt, Human
uuaguaacaacuagagguggagg

SEQ ID NO: 695986 - RNA, 19 nt, Human
uucccuucccugugcagcc

SEQ ID NO: 695987 - RNA, 22 nt, Human
uugguguguguuuguuucuucc

SEQ ID NO: 695988 - RNA, 19 nt, Human
uuucuugucaccuaguuac

SEQ ID NO: 695989 - RNA, 22 nt, Human
uuuuuuuuuuuuuuuuaccaga

SEQ ID NO: 695990 - RNA, 25 nt, Human
uuuuuuuuuuuuuuuuuuuuaccag

SEQ ID NO: 695991 - RNA, 23 nt, Human
aaaaacccaaaaugaagcugaug

SEQ ID NO: 695992 - RNA, 26 nt, Human
aaaaacccaaaaugaagcugaugcua

SEQ ID NO: 695993 - RNA, 25 nt, Human
aaaacccaaaaugaagcugaugcua

SEQ ID NO: 695994 - RNA, 28 nt, Human
aacauacauauacacacauacacacagu

SEQ ID NO: 695995 - RNA, 27 nt, Human
aacauauucaaaacauacauauacaca

SEQ ID NO: 695996 - RNA, 20 nt, Human
aacccaaaaugaagcugaug

SEQ ID NO: 695997 - RNA, 21 nt, Human
aagaaaaaacaaaaaccacuc

SEQ ID NO: 695998 - RNA, 22 nt, Human
aaggagcagaacuuucuaaaca

SEQ ID NO: 695999 - RNA, 24 nt, Human
acaucugaaaagaaaaaacaaaaa

SEQ ID NO: 696000 - RNA, 30 nt, Human
acucuaaguguccaaauauuggaaaaaaag

SEQ ID NO: 696001 - RNA, 19 nt, Human
agccggcccgggugcuggc

SEQ ID NO: 696002 - RNA, 22 nt, Human
agccgugccagugcgcggcacg

SEQ ID NO: 696003 - RNA, 18 nt, Human
agggaaauguaaaaaugc

SEQ ID NO: 696004 - RNA, 22 nt, Human
auauacacacauacacacagug

SEQ ID NO: 696005 - RNA, 21 nt, Human
augguucaugcaaaagauuac

SEQ ID NO: 696006 - RNA, 18 nt, Human
caaaaucuaagacugcug

SEQ ID NO: 696007 - RNA, 26 nt, Human
caaacucuucaguuucucuuaagaag

SEQ ID NO: 696008 - RNA, 25 nt, Human
cacauuaacaucugaaaagaaaaaa

SEQ ID NO: 696009 - RNA, 21 nt, Human
cagagcacgaggcuccucccc

SEQ ID NO: 696010 - RNA, 20 nt, Human
cagccgugccagugcgcggc

SEQ ID NO: 696011 - RNA, 21 nt, Human
ccaaaaugaagcugaugcuau

SEQ ID NO: 696012 - RNA, 19 nt, Human
ccgcgccggcuccugcugc

SEQ ID NO: 696013 - RNA, 22 nt, Human
ccugcuuaauaucagagaaaaa

SEQ ID NO: 696014 - RNA, 18 nt, Human
ccuggcucgcgccccagc

SEQ ID NO: 696015 - RNA, 19 nt, Human
cgcggggcuccgggcuccg

SEQ ID NO: 696016 - RNA, 20 nt, Human
cggcucccgcgccggcuccu

SEQ ID NO: 696017 - RNA, 18 nt, Human
cuccacacacaaagcacc

SEQ ID NO: 696018 - RNA, 19 nt, Human
cucccgcgccggcuccugc

SEQ ID NO: 696019 - RNA, 23 nt, Human
cuccggacaaggcuuagccggcc

SEQ ID NO: 696020 - RNA, 18 nt, Human
cuccgggcuccgggcucc

SEQ ID NO: 696021 - RNA, 22 nt, Human
gaaaaaaaagaagcaagcggag

SEQ ID NO: 696022 - RNA, 20 nt, Human
gcgcggggcuccgggcuccg

SEQ ID NO: 696023 - RNA, 24 nt, Human
gcuccuccccggggggcugccccg

SEQ ID NO: 696024 - RNA, 22 nt, Human
ggaaaacuccacacacaaagca

SEQ ID NO: 696025 - RNA, 18 nt, Human
ggaaacgugcagccuggc

SEQ ID NO: 696026 - RNA, 23 nt, Human
ggaaauguaaaaaugcaacaccc

SEQ ID NO: 696027 - RNA, 21 nt, Human
ggaggaggcaaaaacccaaaa

SEQ ID NO: 696028 - RNA, 21 nt, Human
gugcagccuggcucgcgcccc

SEQ ID NO: 696029 - RNA, 20 nt, Human
uacacacauacacacagugg

SEQ ID NO: 696030 - RNA, 25 nt, Human
uacauauacacacauacacacagug

SEQ ID NO: 696031 - RNA, 22 nt, Human
uacauguugccaguuuagacuc

SEQ ID NO: 696032 - RNA, 21 nt, Human
uagcaagaucauuagggaaau

SEQ ID NO: 696033 - RNA, 23 nt, Human
ucauuagggaaauguaaaaaugc

SEQ ID NO: 696034 - RNA, 24 nt, Human
uccccggggggcugccccgcgcgg

SEQ ID NO: 696035 - RNA, 22 nt, Human
ucgcggcucccgcgccggcucc

SEQ ID NO: 696036 - RNA, 22 nt, Human
ucuaggaaaaauaacaucugau

SEQ ID NO: 696037 - RNA, 21 nt, Human
ugcgcggcacgcgucccagag

SEQ ID NO: 696038 - RNA, 23 nt, Human
uggaaaacuccacacacaaagca

SEQ ID NO: 696039 - RNA, 20 nt, Human
uuagggaaauguaaaaaugc

SEQ ID NO: 696040 - RNA, 18 nt, Human
uuuaauaaagaaaacaua

SEQ ID NO: 696041 - RNA, 21 nt, Human
uuuuauuuucaucuaggaaaa

SEQ ID NO: 696042 - RNA, 18 nt, Human
uuuuuuuuuuuuuuuuug

SEQ ID NO: 696043 - RNA, 20 nt, Human
aagggcaccccaaaugaguu

SEQ ID NO: 696044 - RNA, 19 nt, Human
acucccacaaaugacucca

SEQ ID NO: 696045 - RNA, 18 nt, Human
aggacgggggagcggggg

SEQ ID NO: 696046 - RNA, 20 nt, Human
aggacgggggagcgggggac

SEQ ID NO: 696047 - RNA, 18 nt, Human
cagcugccaccucggagg

SEQ ID NO: 696048 - RNA, 21 nt, Human
cauagcagaacuuccugaacc

SEQ ID NO: 696049 - RNA, 28 nt, Human
ccuaacucccacaaaugaccgggugucc

SEQ ID NO: 696050 - RNA, 22 nt, Human
ccucggaggacgggggagcggg

SEQ ID NO: 696051 - RNA, 23 nt, Human
ccucggaggacgggggagcgggg

SEQ ID NO: 696052 - RNA, 22 nt, Human
ccugaaccucugccgggaggcu

SEQ ID NO: 696053 - RNA, 21 nt, Human
cucauagcagaacuuccugaa

SEQ ID NO: 696054 - RNA, 22 nt, Human
cugagggucucuggugggagcc

SEQ ID NO: 696055 - RNA, 24 nt, Human
cuuaaagucuucaacagagucuuc

SEQ ID NO: 696056 - RNA, 22 nt, Human
gcgggggacgaggaaagaucag

SEQ ID NO: 696057 - RNA, 19 nt, Human
ggaccuggaaagcagguag

SEQ ID NO: 696058 - RNA, 26 nt, Human
uaagacccuaacucccacaaaugacu

SEQ ID NO: 696059 - RNA, 21 nt, Human
uauuucaagggcaccccaaau

SEQ ID NO: 696060 - RNA, 23 nt, Human
ucacugagggucucuggugggag

SEQ ID NO: 696061 - RNA, 18 nt, Human
ucccuggggccagcugca

SEQ ID NO: 696062 - RNA, 21 nt, Human
ucccuggggccagcugcaucc

SEQ ID NO: 696063 - RNA, 21 nt, Human
uccucggccuaucauuucauu

SEQ ID NO: 696064 - RNA, 22 nt, Human
ucuaagaaaaaacguuccagac

SEQ ID NO: 696065 - RNA, 22 nt, Human
ucucuggguacacuucagucac

SEQ ID NO: 696066 - RNA, 21 nt, Human
ucucuggugggagcccagaag

SEQ ID NO: 696067 - RNA, 24 nt, Human
ugacuccaggaaagggagacaacc

SEQ ID NO: 696068 - RNA, 20 nt, Human
uggaaagcagguaguaggac

SEQ ID NO: 696069 - RNA, 20 nt, Human
uggaaagcagguaguaggac

SEQ ID NO: 696070 - RNA, 24 nt, Human
uggaaagcagguaguaggacaauu

SEQ ID NO: 696071 - RNA, 19 nt, Human
uggggccagcugcauccuc

SEQ ID NO: 696072 - RNA, 23 nt, Human
uuuuuuuuuuuuuugauugagga

SEQ ID NO: 696073 - RNA, 18 nt, Human
uuuuuuuuuuuuuuuuug

SEQ ID NO: 696074 - RNA, 19 nt, Human
ccagaccaacagucagaua

SEQ ID NO: 696075 - RNA, 21 nt, Human
cuugcuaggacacuucuucca

SEQ ID NO: 696076 - RNA, 23 nt, Human
cuuuuuaagucuccagaucuugc

SEQ ID NO: 696077 - RNA, 20 nt, Human
gguauaauggcucggugucu

SEQ ID NO: 696078 - RNA, 22 nt, Human
ggugucuuugucccaacagcuu

SEQ ID NO: 696079 - RNA, 24 nt, Human
ugaaacuugccauuuguuuuuguu

SEQ ID NO: 696080 - RNA, 25 nt, Human
uggguauaauggcucggugucuuug

SEQ ID NO: 696081 - RNA, 20 nt, Human
cgccgccgcuccuuccgucc

SEQ ID NO: 696082 - RNA, 19 nt, Human
cuccucaacugugcacugu

SEQ ID NO: 696083 - RNA, 23 nt, Human
cuccuccgucgccgccgcuccuu

SEQ ID NO: 696084 - RNA, 22 nt, Human
gaaaauauauacugcuaugguc

SEQ ID NO: 696085 - RNA, 18 nt, Human
ggcuccucaacugugcac

SEQ ID NO: 696086 - RNA, 20 nt, Human
guaguguaggcugacuucaa

SEQ ID NO: 696087 - RNA, 23 nt, Human
uccuccgucgccgccgcuccuuc

SEQ ID NO: 696088 - RNA, 21 nt, Human
ucgccgccgcuccuuccgucc

SEQ ID NO: 696089 - RNA, 24 nt, Human
ugacuucaaccacggcuucuccag

SEQ ID NO: 696090 - RNA, 18 nt, Human
uuuuuuuuuuuuuuccug

SEQ ID NO: 696091 - RNA, 26 nt, Human
uuuuuuuuuuuuuuuuuccuguuuuu

SEQ ID NO: 696092 - RNA, 18 nt, Human
aagggcagccugcauaug

SEQ ID NO: 696093 - RNA, 21 nt, Human
acuuccuacacugaagagggg

SEQ ID NO: 696094 - RNA, 24 nt, Human
acuuccuacacugaagagggguuc

SEQ ID NO: 696095 - RNA, 20 nt, Human
aggaacugcuggcaucaccu

SEQ ID NO: 696096 - RNA, 19 nt, Human
cagcugggucauggcagug

SEQ ID NO: 696097 - RNA, 21 nt, Human
caguggcccuggcaagcuggc

SEQ ID NO: 696098 - RNA, 23 nt, Human
caguggcccuggcaagcuggcug

SEQ ID NO: 696099 - RNA, 20 nt, Human
ccaacuguaacuucuggaug

SEQ ID NO: 696100 - RNA, 26 nt, Human
cccugcuguccccaccauccugccug

SEQ ID NO: 696101 - RNA, 22 nt, Human
ccugccuguugucagcugcagc

SEQ ID NO: 696102 - RNA, 21 nt, Human
gaagagggguuccaguauggu

SEQ ID NO: 696103 - RNA, 21 nt, Human
gagaacagcgggggaucuggc

SEQ ID NO: 696104 - RNA, 22 nt, Human
gcaguagcccccugcugucccc

SEQ ID NO: 696105 - RNA, 21 nt, Human
ucaaacagcuaugcagaggca

SEQ ID NO: 696106 - RNA, 20 nt, Human
ucacucaugagcagcugggu

SEQ ID NO: 696107 - RNA, 18 nt, Human
ucccuccauguguucugg

SEQ ID NO: 696108 - RNA, 22 nt, Human
ucccugacagaggagcaggaac

SEQ ID NO: 696109 - RNA, 21 nt, Human
ucugugggcucugccuggcuu

SEQ ID NO: 696110 - RNA, 23 nt, Human
uggauaggcugcaugauuugggc

SEQ ID NO: 696111 - RNA, 18 nt, Human
uggugguaauuaaguugc

SEQ ID NO: 696112 - RNA, 19 nt, Human
uguccccaccauccugccu

SEQ ID NO: 696113 - RNA, 21 nt, Human
uguccccaccauccugccugu

SEQ ID NO: 696114 - RNA, 20 nt, Human
uguccgauucccuccaugug

SEQ ID NO: 696115 - RNA, 18 nt, Human
uguugucagcugcagcug

SEQ ID NO: 696116 - RNA, 19 nt, Human
uguugucagcugcagcugc

SEQ ID NO: 696117 - RNA, 27 nt, Human
uucagaaagagaaagaagaugagugag

SEQ ID NO: 696118 - RNA, 18 nt, Human
uuuuuuuuuuuuuuuuug

SEQ ID NO: 696119 - RNA, 22 nt, Human
aaaccgcaaucacuaagcacca

SEQ ID NO: 696120 - RNA, 20 nt, Human
acagagccacccagggccag

SEQ ID NO: 696121 - RNA, 24 nt, Human
accgcaaucacuaagcaccacauc

SEQ ID NO: 696122 - RNA, 19 nt, Human
aguggccuguggccacaau

SEQ ID NO: 696123 - RNA, 21 nt, Human
auaaguauacccaauaccuca

SEQ ID NO: 696124 - RNA, 22 nt, Human
caccacaucggcagcucaugca

SEQ ID NO: 696125 - RNA, 21 nt, Human
cacuaagcaccacaucggcag

SEQ ID NO: 696126 - RNA, 22 nt, Human
cacuaagcaccacaucggcagc

SEQ ID NO: 696127 - RNA, 23 nt, Human
cacugucugcagugaaccagggg

SEQ ID NO: 696128 - RNA, 26 nt, Human
cccuggacuagacccucauugcuccc

SEQ ID NO: 696129 - RNA, 18 nt, Human
ccucagacugcuuuuggc

SEQ ID NO: 696130 - RNA, 21 nt, Human
ccucagacugcuuuuggcccc

SEQ ID NO: 696131 - RNA, 25 nt, Human
cgaggcaaauacccagcccgggaaa

SEQ ID NO: 696132 - RNA, 19 nt, Human
cucauugugcucuggugcu

SEQ ID NO: 696133 - RNA, 18 nt, Human
cuuccggcgcagaccgaa

SEQ ID NO: 696134 - RNA, 21 nt, Human
gagccacccagggccaguggc

SEQ ID NO: 696135 - RNA, 19 nt, Human
ggaaacacgggagagcgac

SEQ ID NO: 696136 - RNA, 25 nt, Human
ggccacaaugucaauggcuauaacc

SEQ ID NO: 696137 - RNA, 21 nt, Human
ggcugugcacccugacagagc

SEQ ID NO: 696138 - RNA, 24 nt, Human
ucuaagccauuuauucaacgaccc

SEQ ID NO: 696139 - RNA, 19 nt, Human
ugacagagccacccagggc

SEQ ID NO: 696140 - RNA, 19 nt, Human
ugaggggcugugcacccug

SEQ ID NO: 696141 - RNA, 20 nt, Human
uggccccuggacuagacccu

SEQ ID NO: 696142 - RNA, 24 nt, Human
uggggugccacugucugcagugaa

SEQ ID NO: 696143 - RNA, 23 nt, Human
uuuuuuuuuuuuuuuuucacauu

SEQ ID NO: 696144 - RNA, 21 nt, Human
aaaccagaaacggaagcagag

SEQ ID NO: 696145 - RNA, 24 nt, Human
aacacuagagcaaaaccagaaacg

SEQ ID NO: 696146 - RNA, 21 nt, Human
acaaaacccaucaaaaaggcc

SEQ ID NO: 696147 - RNA, 27 nt, Human
acaaaacccaucaaaaaggccaucacu

SEQ ID NO: 696148 - RNA, 21 nt, Human
acaauagaaaaugauucugaa

SEQ ID NO: 696149 - RNA, 18 nt, Human
accauagaaucaaaauac

SEQ ID NO: 696150 - RNA, 18 nt, Human
agaaaaugauucugaauc

SEQ ID NO: 696151 - RNA, 19 nt, Human
agacuguagaguuacacug

SEQ ID NO: 696152 - RNA, 19 nt, Human
aggaaagaaaccuaaaucu

SEQ ID NO: 696153 - RNA, 20 nt, Human
auuaaacuuuccuucaaagg

SEQ ID NO: 696154 - RNA, 19 nt, Human
caaaaccagaaacggaagc

SEQ ID NO: 696155 - RNA, 20 nt, Human
caaaacccaucaaaaaggcc

SEQ ID NO: 696156 - RNA, 24 nt, Human
caacaaaacccaucaaaaaggcca

SEQ ID NO: 696157 - RNA, 23 nt, Human
caaccuauaauaccacaauagaa

SEQ ID NO: 696158 - RNA, 18 nt, Human
caagacacaacaaaaccc

SEQ ID NO: 696159 - RNA, 25 nt, Human
caagacacaacaaaacccaucaaaa

SEQ ID NO: 696160 - RNA, 22 nt, Human
cacaacaaaacccaucaaaaag

SEQ ID NO: 696161 - RNA, 23 nt, Human
cagccgcgaagaaacccaaacac

SEQ ID NO: 696162 - RNA, 19 nt, Human
cuucaaagaaaggaaagaa

SEQ ID NO: 696163 - RNA, 25 nt, Human
cuuguucacaagacacaacaaaacc

SEQ ID NO: 696164 - RNA, 18 nt, Human
gagcagccgcgaagaaac

SEQ ID NO: 696165 - RNA, 23 nt, Human
gauuuuuuuuuuuuuccuuuuga

SEQ ID NO: 696166 - RNA, 25 nt, Human
gccgcgaagaaacccaaacacuaga

SEQ ID NO: 696167 - RNA, 25 nt, Human
uaaacuuuccuucaaagaaaggaaa

SEQ ID NO: 696168 - RNA, 21 nt, Human
uaaauaaauguccuauacauu

SEQ ID NO: 696169 - RNA, 21 nt, Human
uaaauauuuccuagucccaua

SEQ ID NO: 696170 - RNA, 21 nt, Human
uaagauuccauuuccuuaguu

SEQ ID NO: 696171 - RNA, 23 nt, Human
uagagcaaaaccagaaacggaag

SEQ ID NO: 696172 - RNA, 18 nt, Human
uauggcaaauuuggaaag

SEQ ID NO: 696173 - RNA, 24 nt, Human
ucaaaauacccacucaugauacag

SEQ ID NO: 696174 - RNA, 18 nt, Human
ucaaagaaaggaaagaaa

SEQ ID NO: 696175 - RNA, 21 nt, Human
ucccaagcaaugagucucuua

SEQ ID NO: 696176 - RNA, 22 nt, Human
ugagggaaccauagaaucaaaa

SEQ ID NO: 696177 - RNA, 20 nt, Human
uggaaaaaauaaaagagcaa

SEQ ID NO: 696178 - RNA, 21 nt, Human
uucaaagaaaggaaagaaacc

SEQ ID NO: 696179 - RNA, 24 nt, Human
uucacaagacacaacaaaacccau

SEQ ID NO: 696180 - RNA, 25 nt, Human
uuccaauaauggacacaggguaccc

SEQ ID NO: 696181 - RNA, 19 nt, Human
uuccuagucccauaauaug

SEQ ID NO: 696182 - RNA, 22 nt, Human
uugauuuuuuuuuuuuuccuuu

SEQ ID NO: 696183 - RNA, 24 nt, Human
uuuugauuuuuuuuuuuuuccuuu

SEQ ID NO: 696184 - RNA, 22 nt, Human
uuuuuuugauuuuuuuuuuuuu

SEQ ID NO: 696185 - RNA, 25 nt, Human
uuuuuuuuuuuuuuuuuugauuuuu

SEQ ID NO: 696186 - RNA, 27 nt, Human
uuuuuuuuuuuuuuuuuuuuuuugggg

SEQ ID NO: 696187 - RNA, 21 nt, Human
aacuuuguaaucaauaucccg

SEQ ID NO: 696188 - RNA, 22 nt, Human
agaacaccuguaaguaaaaaca

SEQ ID NO: 696189 - RNA, 18 nt, Human
agggagggaaggcaggca

SEQ ID NO: 696190 - RNA, 18 nt, Human
aguaaaaguggaaaagaa

SEQ ID NO: 696191 - RNA, 23 nt, Human
augaacaacaggaagcuccagag

SEQ ID NO: 696192 - RNA, 20 nt, Human
caauuccaggucauuccuaa

SEQ ID NO: 696193 - RNA, 18 nt, Human
cagcagggcucuguacag

SEQ ID NO: 696194 - RNA, 21 nt, Human
ccuaccgcggcuuccgcgcga

SEQ ID NO: 696195 - RNA, 21 nt, Human
cgcaaaucccgcggcucuccc

SEQ ID NO: 696196 - RNA, 18 nt, Human
cgggaagugcacacaaac

SEQ ID NO: 696197 - RNA, 21 nt, Human
cuuuuugguuaaagaagaaaa

SEQ ID NO: 696198 - RNA, 26 nt, Human
ggaaggcaggcacacgaagacacagg

SEQ ID NO: 696199 - RNA, 19 nt, Human
gggaggagggagggaaggc

SEQ ID NO: 696200 - RNA, 21 nt, Human
guaaguaaaaacaaaugucag

SEQ ID NO: 696201 - RNA, 21 nt, Human
guuuuggcaucuccucuccca

SEQ ID NO: 696202 - RNA, 21 nt, Human
uaaagaagaaaaacuuuguaa

SEQ ID NO: 696203 - RNA, 22 nt, Human
uaacacgccgcagcagggcucu

SEQ ID NO: 696204 - RNA, 22 nt, Human
uaaguaaaaguggaaaagaaga

SEQ ID NO: 696205 - RNA, 22 nt, Human
uaucccgcucauaaguaaaagu

SEQ ID NO: 696206 - RNA, 23 nt, Human
uaugaacaacaggaagcuccaga

SEQ ID NO: 696207 - RNA, 20 nt, Human
ucccgcuuggguucccaccc

SEQ ID NO: 696208 - RNA, 19 nt, Human
uggggaggagggagggaag

SEQ ID NO: 696209 - RNA, 20 nt, Human
ugguuaaagaagaaaaacuu

SEQ ID NO: 696210 - RNA, 21 nt, Human
uugguuaaagaagaaaaacuu

SEQ ID NO: 696211 - RNA, 26 nt, Human
uuuuugguuaaagaagaaaaacuuug

SEQ ID NO: 696212 - RNA, 22 nt, Human
uuuuuuuuuuuuuuuuugacag

SEQ ID NO: 696213 - RNA, 19 nt, Human
aacagcugauaucuuuagg

SEQ ID NO: 696214 - RNA, 19 nt, Human
acaccacacuccccaccuc

SEQ ID NO: 696215 - RNA, 18 nt, Human
acucacggauuccuccuu

SEQ ID NO: 696216 - RNA, 23 nt, Human
agcgcagaagccccaggaagaug

SEQ ID NO: 696217 - RNA, 19 nt, Human
aggcagggcucugccuuug

SEQ ID NO: 696218 - RNA, 19 nt, Human
aggcccagugcagcagccu

SEQ ID NO: 696219 - RNA, 20 nt, Human
aggcggcggcgagaagggga

SEQ ID NO: 696220 - RNA, 22 nt, Human
agggaaggaagguuggggcggg

SEQ ID NO: 696221 - RNA, 22 nt, Human
caacaacagcgcagaagcccca

SEQ ID NO: 696222 - RNA, 23 nt, Human
caccacacuccccaccuccaucc

SEQ ID NO: 696223 - RNA, 18 nt, Human
cagccucaggcucucacc

SEQ ID NO: 696224 - RNA, 22 nt, Human
cauucccaucucagcuccagaa

SEQ ID NO: 696225 - RNA, 22 nt, Human
ccaggaagauggcgcagauucc

SEQ ID NO: 696226 - RNA, 21 nt, Human
ccagggcccugaacaccagcc

SEQ ID NO: 696227 - RNA, 18 nt, Human
ccccaacaacagcgcaga

SEQ ID NO: 696228 - RNA, 23 nt, Human
ccccaacaacagcgcagaagccc

SEQ ID NO: 696229 - RNA, 23 nt, Human
cccugaacaccagccucaggcuc

SEQ ID NO: 696230 - RNA, 22 nt, Human
ccuccuucaggcagggcucugc

SEQ ID NO: 696231 - RNA, 20 nt, Human
ccucucagguccgggcgacc

SEQ ID NO: 696232 - RNA, 18 nt, Human
cgggcgacuccaagcggc

SEQ ID NO: 696233 - RNA, 19 nt, Human
cugggugugccccaggaac

SEQ ID NO: 696234 - RNA, 20 nt, Human
cuuuacacaccacacucccc

SEQ ID NO: 696235 - RNA, 18 nt, Human
gaagccccaggaagaugg

SEQ ID NO: 696236 - RNA, 21 nt, Human
gaaggaagguuggggcggggc

SEQ ID NO: 696237 - RNA, 18 nt, Human
gacuccaagcggccccgg

SEQ ID NO: 696238 - RNA, 19 nt, Human
gccgaaagagagaagccga

SEQ ID NO: 696239 - RNA, 18 nt, Human
gcggcggcgagaagggga

SEQ ID NO: 696240 - RNA, 20 nt, Human
gcggcugcucugugucugug

SEQ ID NO: 696241 - RNA, 19 nt, Human
ggaccucugggugugcccc

SEQ ID NO: 696242 - RNA, 20 nt, Human
ggaccucugggugugcccca

SEQ ID NO: 696243 - RNA, 19 nt, Human
ggacuggggucccuucccc

SEQ ID NO: 696244 - RNA, 20 nt, Human
ggccugguugggggguggaa

SEQ ID NO: 696245 - RNA, 21 nt, Human
ggcgacuccaagcggccccgg

SEQ ID NO: 696246 - RNA, 21 nt, Human
ggcggcgccggccgaaagaga

SEQ ID NO: 696247 - RNA, 22 nt, Human
gggcgacuccaagcggccccgg

SEQ ID NO: 696248 - RNA, 20 nt, Human
gguggaaggcaggacugggg

SEQ ID NO: 696249 - RNA, 21 nt, Human
uacacaccacacuccccaccu

SEQ ID NO: 696250 - RNA, 18 nt, Human
uagaggacuccauucugu

SEQ ID NO: 696251 - RNA, 24 nt, Human
ucauucccaucucagcuccagaac

SEQ ID NO: 696252 - RNA, 24 nt, Human
uccagaacacggaggaccugaaga

SEQ ID NO: 696253 - RNA, 21 nt, Human
uccagggcccugaacaccagc

SEQ ID NO: 696254 - RNA, 19 nt, Human
uccccaacaacagcgcaga

SEQ ID NO: 696255 - RNA, 21 nt, Human
uccccaacaacagcgcagaag

SEQ ID NO: 696256 - RNA, 19 nt, Human
uccccaccuccauccaguc

SEQ ID NO: 696257 - RNA, 19 nt, Human
ucucagguccgggcgacuc

SEQ ID NO: 696258 - RNA, 18 nt, Human
ucuggacaggaguccagg

SEQ ID NO: 696259 - RNA, 20 nt, Human
ucugggugugccccaggaac

SEQ ID NO: 696260 - RNA, 20 nt, Human
ucuguguccagggcccugaa

SEQ ID NO: 696261 - RNA, 18 nt, Human
ugccuuugagaugcggcu

SEQ ID NO: 696262 - RNA, 22 nt, Human
aaaaaacaacaaaaagcaacua

SEQ ID NO: 696263 - RNA, 27 nt, Human
aaaaaacaacaaaaagcaacuaaucac

SEQ ID NO: 696264 - RNA, 30 nt, Human
aaaaaacaacaaaaagcaacuaaucacccu

SEQ ID NO: 696265 - RNA, 19 nt, Human
aaaagcaacuaaucacccc

SEQ ID NO: 696266 - RNA, 22 nt, Human
aaacagccugguuuccuaaaac

SEQ ID NO: 696267 - RNA, 18 nt, Human
aaacaggaaugaaaucug

SEQ ID NO: 696268 - RNA, 18 nt, Human
aaacaggaaugaaaucug

SEQ ID NO: 696269 - RNA, 18 nt, Human
aaacaggaaugaaaucug

SEQ ID NO: 696270 - RNA, 24 nt, Human
aaacaggaaugaaaucugugagag

SEQ ID NO: 696271 - RNA, 19 nt, Human
aaagcaacuaaucaccccc

SEQ ID NO: 696272 - RNA, 21 nt, Human
aaauuaaaaaacaacaaaaag

SEQ ID NO: 696273 - RNA, 24 nt, Human
aacauucucuuuaugaacgugagu

SEQ ID NO: 696274 - RNA, 19 nt, Human
acaaaacagccugguuucc

SEQ ID NO: 696275 - RNA, 27 nt, Human
acaaaacagccugguuuccuaaaacaa

SEQ ID NO: 696276 - RNA, 23 nt, Human
acugugggugcagcucagcuggc

SEQ ID NO: 696277 - RNA, 26 nt, Human
agagggagccugccaacugccgaggg

SEQ ID NO: 696278 - RNA, 21 nt, Human
agcagugcccggguccggagc

SEQ ID NO: 696279 - RNA, 21 nt, Human
agcaguuuaaauuuuuuucuu

SEQ ID NO: 696280 - RNA, 23 nt, Human
aggaagcuggccgugggcagggg

SEQ ID NO: 696281 - RNA, 20 nt, Human
aggaaugaaaucugugagag

SEQ ID NO: 696282 - RNA, 20 nt, Human
aggcggggaggggggggagc

SEQ ID NO: 696283 - RNA, 21 nt, Human
cacaaaaacugcaucuccugc

SEQ ID NO: 696284 - RNA, 22 nt, Human
cagaccaggaccuggcccugcu

SEQ ID NO: 696285 - RNA, 24 nt, Human
cagcagugcccggguccggagccc

SEQ ID NO: 696286 - RNA, 18 nt, Human
caggcacauggucaggug

SEQ ID NO: 696287 - RNA, 19 nt, Human
caggggggcccaggccgca

SEQ ID NO: 696288 - RNA, 25 nt, Human
cauccccgcucaggcucagccgccu

SEQ ID NO: 696289 - RNA, 19 nt, Human
ccaccgccgccgucgccgc

SEQ ID NO: 696290 - RNA, 22 nt, Human
ccaccgccgcggugcgcuccgc

SEQ ID NO: 696291 - RNA, 24 nt, Human
ccagugccgccucugcugccgccg

SEQ ID NO: 696292 - RNA, 21 nt, Human
cccacccccaccagcagggga

SEQ ID NO: 696293 - RNA, 23 nt, Human
cccacccccaccagcaggggacc

SEQ ID NO: 696294 - RNA, 24 nt, Human
cccacccccaccagcaggggacca

SEQ ID NO: 696295 - RNA, 19 nt, Human
cccagaccccacugcagag

SEQ ID NO: 696296 - RNA, 20 nt, Human
cccaggccgcagggggcccc

SEQ ID NO: 696297 - RNA, 18 nt, Human
ccccuccucccccucccc

SEQ ID NO: 696298 - RNA, 20 nt, Human
ccccuccucccccuccccgc

SEQ ID NO: 696299 - RNA, 20 nt, Human
ccccuggggacccaccccca

SEQ ID NO: 696300 - RNA, 22 nt, Human
ccccuggggacccacccccacc

SEQ ID NO: 696301 - RNA, 18 nt, Human
cccuuucuucuguugcca

SEQ ID NO: 696302 - RNA, 23 nt, Human
ccgccgccgucgccgcgaggccg

SEQ ID NO: 696303 - RNA, 20 nt, Human
ccgccucugcugccgccgcc

SEQ ID NO: 696304 - RNA, 18 nt, Human
ccgcgcgcccgcccgggc

SEQ ID NO: 696305 - RNA, 18 nt, Human
ccgcuccagccgccagca

SEQ ID NO: 696306 - RNA, 18 nt, Human
ccuggcccugcugcccac

SEQ ID NO: 696307 - RNA, 24 nt, Human
ccuggcccugcugcccacaacaga

SEQ ID NO: 696308 - RNA, 28 nt, Human
ccuucugugagcucccugcuggcagcuc

SEQ ID NO: 696309 - RNA, 21 nt, Human
cgagcagugacauugcacgga

SEQ ID NO: 696310 - RNA, 23 nt, Human
cgcccgaaucccuugcuggagac

SEQ ID NO: 696311 - RNA, 21 nt, Human
cgccucugccgccgccgccgc

SEQ ID NO: 696312 - RNA, 26 nt, Human
cgccucugcugccgccgccucuacau

SEQ ID NO: 696313 - RNA, 23 nt, Human
cggcccaaauuaaaaaacaacaa

SEQ ID NO: 696314 - RNA, 20 nt, Human
cggugcgcuccgcuccagcc

SEQ ID NO: 696315 - RNA, 21 nt, Human
cgugggcaggggggcccaggc

SEQ ID NO: 696316 - RNA, 26 nt, Human
cuccagccgccagcagugcccggguc

SEQ ID NO: 696317 - RNA, 27 nt, Human
cuccccagaucgcaauggauaaacgaa

SEQ ID NO: 696318 - RNA, 23 nt, Human
cucuacacaaaaacugcaucucc

SEQ ID NO: 696319 - RNA, 20 nt, Human
cucugccgccgccgccgcgc

SEQ ID NO: 696320 - RNA, 23 nt, Human
cugcacagacaacaucgacaucg

SEQ ID NO: 696321 - RNA, 22 nt, Human
cugcagcaccugccccuccucc

SEQ ID NO: 696322 - RNA, 21 nt, Human
cugcccgggggcugccggcaa

SEQ ID NO: 696323 - RNA, 25 nt, Human
gacccacccccaccagcaggggacc

SEQ ID NO: 696324 - RNA, 22 nt, Human
gaccuggcccugcugcccacaa

SEQ ID NO: 696325 - RNA, 20 nt, Human
gaggguggaguuaaacugug

SEQ ID NO: 696326 - RNA, 19 nt, Human
gcccaggccgcagggggcc

SEQ ID NO: 696327 - RNA, 20 nt, Human
gcccggguccggagcccgag

SEQ ID NO: 696328 - RNA, 20 nt, Human
gcccugcugcccacaacagg

SEQ ID NO: 696329 - RNA, 24 nt, Human
gccgccaccgccgccgucgccggc

SEQ ID NO: 696330 - RNA, 19 nt, Human
gccgccgccgccgcgcgcc

SEQ ID NO: 696331 - RNA, 23 nt, Human
gccgccgccgccgcgcgcccgcc

SEQ ID NO: 696332 - RNA, 22 nt, Human
gccgccucugccgccgccgccg

SEQ ID NO: 696333 - RNA, 19 nt, Human
gccgccucugcugccgccg

SEQ ID NO: 696334 - RNA, 21 nt, Human
gccugcagcaccugccccucc

SEQ ID NO: 696335 - RNA, 19 nt, Human
gcgcggcucgcgggcggag

SEQ ID NO: 696336 - RNA, 22 nt, Human
gcuccgcuccagccgccagcag

SEQ ID NO: 696337 - RNA, 21 nt, Human
gcugggacgcggggcccggcu

SEQ ID NO: 696338 - RNA, 26 nt, Human
ggagcuaugaacgcugcccgggggcu

SEQ ID NO: 696339 - RNA, 21 nt, Human
ggcccaggccgcagggggccc

SEQ ID NO: 696340 - RNA, 21 nt, Human
ggccgugggcaggggggccca

SEQ ID NO: 696341 - RNA, 20 nt, Human
ggcugggcagggcugggacg

SEQ ID NO: 696342 - RNA, 21 nt, Human
gggcagggcugggacgcgggg

SEQ ID NO: 696343 - RNA, 18 nt, Human
gggcggggcagggagcug

SEQ ID NO: 696344 - RNA, 23 nt, Human
ggggcccaggccgcagggggccc

SEQ ID NO: 696345 - RNA, 18 nt, Human
ggggggcccaggccgcag

SEQ ID NO: 696346 - RNA, 22 nt, Human
gucgcgccgccgcggcuggccc

SEQ ID NO: 696347 - RNA, 19 nt, Human
gugcagcucagcuggccug

SEQ ID NO: 696348 - RNA, 20 nt, Human
gugcagcucagcuggccugg

SEQ ID NO: 696349 - RNA, 21 nt, Human
guugccauuagcaaggccaga

SEQ ID NO: 696350 - RNA, 21 nt, Human
uacacggcgccaucaacauuc

SEQ ID NO: 696351 - RNA, 22 nt, Human
uagcaaggccagaaaaaaagga

SEQ ID NO: 696352 - RNA, 19 nt, Human
uauagauucgucuuuaccu

SEQ ID NO: 696353 - RNA, 23 nt, Human
uauauaaaaacaggaaugaaauc

SEQ ID NO: 696354 - RNA, 23 nt, Human
uaugaacgcugcccgggggcugc

SEQ ID NO: 696355 - RNA, 20 nt, Human
uaugcuagggacguggagau

SEQ ID NO: 696356 - RNA, 23 nt, Human
uauuaguaacuagauuucaaaag

SEQ ID NO: 696357 - RNA, 19 nt, Human
ucacuguugggguggggga

SEQ ID NO: 696358 - RNA, 20 nt, Human
ucagcaggaagcuggccgug

SEQ ID NO: 696359 - RNA, 21 nt, Human
ucagcuggccuggugcucccu

SEQ ID NO: 696360 - RNA, 21 nt, Human
uccacagaccaggaccuggcc

SEQ ID NO: 696361 - RNA, 22 nt, Human
uccacagaccaggaccuggccc

SEQ ID NO: 696362 - RNA, 23 nt, Human
uccacagaccaggaccuggcccu

SEQ ID NO: 696363 - RNA, 19 nt, Human
uccauucuuugcccaggaa

SEQ ID NO: 696364 - RNA, 23 nt, Human
ucccagucucgggacugugggug

SEQ ID NO: 696365 - RNA, 21 nt, Human
ucgacacaggaaggaaacuga

SEQ ID NO: 696366 - RNA, 20 nt, Human
ucgcgggcggagggcucagc

SEQ ID NO: 696367 - RNA, 21 nt, Human
ugaaaucugugagagaauauu

SEQ ID NO: 696368 - RNA, 21 nt, Human
ugagcucccugcuggcagcuc

SEQ ID NO: 696369 - RNA, 19 nt, Human
ugcacagacaacaucgaca

SEQ ID NO: 696370 - RNA, 20 nt, Human
ugccccuccucccccucccc

SEQ ID NO: 696371 - RNA, 24 nt, Human
ugcucagggcaggcacauggucag

SEQ ID NO: 696372 - RNA, 21 nt, Human
ugcuuauuaguaacuagauuu

SEQ ID NO: 696373 - RNA, 24 nt, Human
uggcccugcugcccacaacagaga

SEQ ID NO: 696374 - RNA, 26 nt, Human
uggccuggugcucccuccccuucugu

SEQ ID NO: 696375 - RNA, 20 nt, Human
uggcugggcgcgggcugggc

SEQ ID NO: 696376 - RNA, 24 nt, Human
uggggccgaggcccagaccccacu

SEQ ID NO: 696377 - RNA, 22 nt, Human
ugggugcagcucagcuggccug

SEQ ID NO: 696378 - RNA, 18 nt, Human
uucaaaagguuacagaaa

SEQ ID NO: 696379 - RNA, 23 nt, Human
uucuuccgaaaaagcaguuuaaa

SEQ ID NO: 696380 - RNA, 19 nt, Human
uucuuuuuaugcuagggac

SEQ ID NO: 696381 - RNA, 23 nt, Human
uuuuucuuuuuaugcuagggacg

SEQ ID NO: 696382 - RNA, 20 nt, Human
uuuuuuguuguuguucuucc

SEQ ID NO: 696383 - RNA, 25 nt, Human
uuuuuuguuguuguucuuccgaaaa

SEQ ID NO: 696384 - RNA, 21 nt, Human
aaacaaaacaaagacaaaccc

SEQ ID NO: 696385 - RNA, 22 nt, Human
aaacaaaacaaagacaaaccca

SEQ ID NO: 696386 - RNA, 23 nt, Human
aaacaaaacaaagacaaacccaa

SEQ ID NO: 696387 - RNA, 24 nt, Human
aaacaaaacaaagacaaacccaaa

SEQ ID NO: 696388 - RNA, 19 nt, Human
aaacaaacugaaacacaac

SEQ ID NO: 696389 - RNA, 23 nt, Human
aaccauaaacaaaacaaagacaa

SEQ ID NO: 696390 - RNA, 24 nt, Human
acaaaacaaagacaaacccaaaca

SEQ ID NO: 696391 - RNA, 27 nt, Human
acaaguauguuuguuuuucuucugagg

SEQ ID NO: 696392 - RNA, 19 nt, Human
acaggaacaauaauccaaa

SEQ ID NO: 696393 - RNA, 22 nt, Human
acaggaacaauaauccaaacaa

SEQ ID NO: 696394 - RNA, 18 nt, Human
agaaaaccuguuauauaa

SEQ ID NO: 696395 - RNA, 20 nt, Human
agagaagcgagggcuuccua

SEQ ID NO: 696396 - RNA, 24 nt, Human
agguuuuuggcauuucacaugucu

SEQ ID NO: 696397 - RNA, 18 nt, Human
caaaacaaagacaaaccc

SEQ ID NO: 696398 - RNA, 21 nt, Human
caaaacaaagacaaacccaaa

SEQ ID NO: 696399 - RNA, 18 nt, Human
caaucuauaaacagaaaa

SEQ ID NO: 696400 - RNA, 20 nt, Human
cauccgggccacagcgagcu

SEQ ID NO: 696401 - RNA, 23 nt, Human
ccaaacauuaagauauacugaca

SEQ ID NO: 696402 - RNA, 18 nt, Human
ccuaaagaacagcugaac

SEQ ID NO: 696403 - RNA, 22 nt, Human
cugaaacacaacagguacguac

SEQ ID NO: 696404 - RNA, 18 nt, Human
cuucucagguuuuuggca

SEQ ID NO: 696405 - RNA, 27 nt, Human
cuuuuuauuauuguuuucuuuacagga

SEQ ID NO: 696406 - RNA, 25 nt, Human
gaguuuugcauuuuccaagucugua

SEQ ID NO: 696407 - RNA, 22 nt, Human
gcacuagaucagcggaucuggc

SEQ ID NO: 696408 - RNA, 25 nt, Human
uaaacaaaacaaagacaaacccaaa

SEQ ID NO: 696409 - RNA, 20 nt, Human
uaaauagauaacaaaaaaca

SEQ ID NO: 696410 - RNA, 24 nt, Human
uaaauagauaacaaaaaacaauau

SEQ ID NO: 696411 - RNA, 24 nt, Human
uaauccaaacaaaucuugaaccaa

SEQ ID NO: 696412 - RNA, 19 nt, Human
uacccuguguaacagagua

SEQ ID NO: 696413 - RNA, 23 nt, Human
uauuacagaguuuugcauuuucc

SEQ ID NO: 696414 - RNA, 19 nt, Human
ugaaaaacaaacugaaaca

SEQ ID NO: 696415 - RNA, 26 nt, Human
ugaaaauaaauagauaacaaaaaaca

SEQ ID NO: 696416 - RNA, 20 nt, Human
ugcccuaaagaacagcugaa

SEQ ID NO: 696417 - RNA, 20 nt, Human
uuucgagaagcacuagauca

SEQ ID NO: 696418 - RNA, 18 nt, Human
uuuuuuuuuuuuuuuuug

SEQ ID NO: 696419 - RNA, 25 nt, Human
uuuuuuuuuuuuuuuuuuguaauuu

SEQ ID NO: 696420 - RNA, 23 nt, Human
aaaaagucacucucauuccagcu

SEQ ID NO: 696421 - RNA, 25 nt, Human
aaccccacacuccuuuaacagaacu

SEQ ID NO: 696422 - RNA, 24 nt, Human
agaacaggaaaaacuuaggggagc

SEQ ID NO: 696423 - RNA, 20 nt, Human
agcugaccgaaaggaacuca

SEQ ID NO: 696424 - RNA, 23 nt, Human
aucccugaaaggaaacgggucuc

SEQ ID NO: 696425 - RNA, 22 nt, Human
cacuccuuuaacagaaccaugc

SEQ ID NO: 696426 - RNA, 21 nt, Human
cagaacacugcuccacauuga

SEQ ID NO: 696427 - RNA, 24 nt, Human
ccccuacggcaaacgcuugucccu

SEQ ID NO: 696428 - RNA, 18 nt, Human
gcugaaauggguggucag

SEQ ID NO: 696429 - RNA, 23 nt, Human
ucacucucauuccagcuaucucc

SEQ ID NO: 696430 - RNA, 18 nt, Human
ucucucagccagaugcag

SEQ ID NO: 696431 - RNA, 20 nt, Human
uugcugcccuuacccugucc

SEQ ID NO: 696432 - RNA, 18 nt, Human
aaacauuuugaacagccc

SEQ ID NO: 696433 - RNA, 18 nt, Human
aaagacaugagggaggcu

SEQ ID NO: 696434 - RNA, 20 nt, Human
aauccaaaagccacauccaa

SEQ ID NO: 696435 - RNA, 18 nt, Human
accuuaaagacaugaggg

SEQ ID NO: 696436 - RNA, 27 nt, Human
agaaaauccaaaagccacauccaaaga

SEQ ID NO: 696437 - RNA, 20 nt, Human
agaucaaaaagcauuuggug

SEQ ID NO: 696438 - RNA, 19 nt, Human
ccuuccgcuuccgcucucc

SEQ ID NO: 696439 - RNA, 21 nt, Human
cugcuaaguuuauuaauguau

SEQ ID NO: 696440 - RNA, 21 nt, Human
uccaaaagccacauccaaaga

SEQ ID NO: 696441 - RNA, 20 nt, Human
uguucagaaaauccaaaagc

SEQ ID NO: 696442 - RNA, 26 nt, Human
uuucaaauaaacauuuugaacagccc

SEQ ID NO: 696443 - RNA, 24 nt, Human
uuuuuuuuuuuuuuucaccuuuug

SEQ ID NO: 696444 - RNA, 25 nt, Human
uuuuuuuuuuuuuuuuucaccuuuu

SEQ ID NO: 696445 - RNA, 28 nt, Human
uuuuuuuuuuuuuuuuuucaccuuuuga

SEQ ID NO: 696446 - RNA, 21 nt, Human
aaaacaaaaaacaaaaaaccu

SEQ ID NO: 696447 - RNA, 21 nt, Human
aaacaaaaaacaaaaaaccug

SEQ ID NO: 696448 - RNA, 25 nt, Human
aaauguucauaccucuuguaaaaga

SEQ ID NO: 696449 - RNA, 22 nt, Human
aaccacagacaaaacauaaaug

SEQ ID NO: 696450 - RNA, 28 nt, Human
aacccuacaaauguucauaccucuugua

SEQ ID NO: 696451 - RNA, 18 nt, Human
aacugccuaugaagcaaa

SEQ ID NO: 696452 - RNA, 20 nt, Human
aagaaggcguuuuuaagcac

SEQ ID NO: 696453 - RNA, 24 nt, Human
aauggacaaugaaaacugguugag

SEQ ID NO: 696454 - RNA, 21 nt, Human
aaugucuuuucagauucaucc

SEQ ID NO: 696455 - RNA, 19 nt, Human
acacaguaaguucauaauu

SEQ ID NO: 696456 - RNA, 19 nt, Human
acagacaaaacauaaauga

SEQ ID NO: 696457 - RNA, 24 nt, Human
acaguaaguucauaauuccccaca

SEQ ID NO: 696458 - RNA, 20 nt, Human
acauuacagauuuuaaaaaa

SEQ ID NO: 696459 - RNA, 19 nt, Human
accaaacccuguacaauag

SEQ ID NO: 696460 - RNA, 19 nt, Human
accaagucuuccuuaaaac

SEQ ID NO: 696461 - RNA, 20 nt, Human
agagguguguuuucauuuuu

SEQ ID NO: 696462 - RNA, 24 nt, Human
agugauuuguuuuuucccaaaagg

SEQ ID NO: 696463 - RNA, 26 nt, Human
auaaaaaucugauacacacagauuuc

SEQ ID NO: 696464 - RNA, 20 nt, Human
aucuauuuccucccuuuuag

SEQ ID NO: 696465 - RNA, 23 nt, Human
caccaugcagcccacuaccagcg

SEQ ID NO: 696466 - RNA, 21 nt, Human
caggcaaauaaaaacagacau

SEQ ID NO: 696467 - RNA, 23 nt, Human
cauuuuacagagaagggcucugu

SEQ ID NO: 696468 - RNA, 24 nt, Human
cauuuuacagagaagggcucuguc

SEQ ID NO: 696469 - RNA, 21 nt, Human
ccaaacccuguacaauagcau

SEQ ID NO: 696470 - RNA, 22 nt, Human
ccuauagaaacacccauauucc

SEQ ID NO: 696471 - RNA, 31 nt, Human
cuaauccuacuguuacaucagaacacauugu

SEQ ID NO: 696472 - RNA, 18 nt, Human
cuuuucagauucauccag

SEQ ID NO: 696473 - RNA, 19 nt, Human
gaagauagaguaauggacu

SEQ ID NO: 696474 - RNA, 22 nt, Human
gaagcaaauaccaauucaucuu

SEQ ID NO: 696475 - RNA, 23 nt, Human
gaagguaggguauaaaauaggag

SEQ ID NO: 696476 - RNA, 19 nt, Human
gagcauuggauuucuagau

SEQ ID NO: 696477 - RNA, 23 nt, Human
gcagucaaacugccuaugaagca

SEQ ID NO: 696478 - RNA, 20 nt, Human
gcgcuaagcacuucagguac

SEQ ID NO: 696479 - RNA, 19 nt, Human
gcuaacaucagcccuauau

SEQ ID NO: 696480 - RNA, 22 nt, Human
ggugucauuuccauuuuacaga

SEQ ID NO: 696481 - RNA, 19 nt, Human
gugauucuaccucuuuacc

SEQ ID NO: 696482 - RNA, 21 nt, Human
uaaaaaucugauacacacaga

SEQ ID NO: 696483 - RNA, 23 nt, Human
uaaaauggaccagauaaauuuca

SEQ ID NO: 696484 - RNA, 22 nt, Human
uaaacgaauccuuguauuuauu

SEQ ID NO: 696485 - RNA, 23 nt, Human
uacaauagcauuacauuuaugca

SEQ ID NO: 696486 - RNA, 20 nt, Human
uacagcagcagaggaguacc

SEQ ID NO: 696487 - RNA, 18 nt, Human
uagaugcaaauguggaac

SEQ ID NO: 696488 - RNA, 22 nt, Human
uagaugcaaauguggaacccua

SEQ ID NO: 696489 - RNA, 20 nt, Human
uagcaugaauaaaauggacc

SEQ ID NO: 696490 - RNA, 23 nt, Human
uagcaugaauaaaauggaccaga

SEQ ID NO: 696491 - RNA, 19 nt, Human
uaggaaaauguuuuuuagg

SEQ ID NO: 696492 - RNA, 18 nt, Human
uaguauugacacuaaaca

SEQ ID NO: 696493 - RNA, 19 nt, Human
uauaggaaaaaauacaaau

SEQ ID NO: 696494 - RNA, 21 nt, Human
uaucaagguuugaauuaaaau

SEQ ID NO: 696495 - RNA, 27 nt, Human
uaucuuaaaaaacaaaaaacaaaaaac

SEQ ID NO: 696496 - RNA, 23 nt, Human
uauuagggaaauaaauuauuaac

SEQ ID NO: 696497 - RNA, 22 nt, Human
ucauguaacacuaaaggucauc

SEQ ID NO: 696498 - RNA, 25 nt, Human
uccaggcauuacuacaaauaucuuc

SEQ ID NO: 696499 - RNA, 21 nt, Human
uccauucuacagcagcagagg

SEQ ID NO: 696500 - RNA, 19 nt, Human
ucuagaugcaaauguggaa

SEQ ID NO: 696501 - RNA, 18 nt, Human
ucuaugagggagggacuu

SEQ ID NO: 696502 - RNA, 24 nt, Human
ucugaaucacccauagcuauccac

SEQ ID NO: 696503 - RNA, 19 nt, Human
ugaaaugcuaccaugcgcu

SEQ ID NO: 696504 - RNA, 23 nt, Human
ugaaugcuucaauaaaaaucuga

SEQ ID NO: 696505 - RNA, 22 nt, Human
ugacuuuuaaaaaagacaaucc

SEQ ID NO: 696506 - RNA, 18 nt, Human
ugagggagggacuuuuuu

SEQ ID NO: 696507 - RNA, 22 nt, Human
ugaguuagugauuuguuuuuuc

SEQ ID NO: 696508 - RNA, 22 nt, Human
ugcuucaauaaaaaucugauac

SEQ ID NO: 696509 - RNA, 21 nt, Human
uggcuaguggugucauuucca

SEQ ID NO: 696510 - RNA, 19 nt, Human
ugggauuuccugauauuag

SEQ ID NO: 696511 - RNA, 26 nt, Human
uguuaguuccucaugccaaaaauaca

SEQ ID NO: 696512 - RNA, 18 nt, Human
uuagugauuuguuuuuuc

SEQ ID NO: 696513 - RNA, 19 nt, Human
uuucacacagcacaaaugc

SEQ ID NO: 696514 - RNA, 19 nt, Human
uuuucagauucauccagca

SEQ ID NO: 696515 - RNA, 23 nt, Human
uuuuuuuuuuuuuuuuuuaaaug

SEQ ID NO: 696516 - RNA, 18 nt, Human
aaacauuuuaaacagacc

SEQ ID NO: 696517 - RNA, 22 nt, Human
aaauacaaaaauuugaaucaaa

SEQ ID NO: 696518 - RNA, 18 nt, Human
aacacuuugagaggcuga

SEQ ID NO: 696519 - RNA, 19 nt, Human
aacauggugaaccccaucu

SEQ ID NO: 696520 - RNA, 20 nt, Human
aacauggugaaccccaucuc

SEQ ID NO: 696521 - RNA, 20 nt, Human
aagaaaaagcaagcaacaaa

SEQ ID NO: 696522 - RNA, 23 nt, Human
aagccacgacucuggcccuccgg

SEQ ID NO: 696523 - RNA, 23 nt, Human
accccguaaaugcagccguccgc

SEQ ID NO: 696524 - RNA, 21 nt, Human
acugaaauguugucaacuauc

SEQ ID NO: 696525 - RNA, 24 nt, Human
agagacuagccuggccaacauggu

SEQ ID NO: 696526 - RNA, 23 nt, Human
agccuggccaacauggugaaccc

SEQ ID NO: 696527 - RNA, 21 nt, Human
agcgguggcucacgccuguaa

SEQ ID NO: 696528 - RNA, 22 nt, Human
aggaaaaaaaauuuuuagaaac

SEQ ID NO: 696529 - RNA, 21 nt, Human
aggcaggcagaucacuugagg

SEQ ID NO: 696530 - RNA, 26 nt, Human
aggcaggcagaucacuugaggccagg

SEQ ID NO: 696531 - RNA, 24 nt, Human
aggcugaggcaggcagaucacuug

SEQ ID NO: 696532 - RNA, 20 nt, Human
aucacuugaggccaggaguu

SEQ ID NO: 696533 - RNA, 22 nt, Human
auuacaaguuacaaagccuaag

SEQ ID NO: 696534 - RNA, 24 nt, Human
caacacuuugagaggcugaggcag

SEQ ID NO: 696535 - RNA, 19 nt, Human
caacauggugaaccccauc

SEQ ID NO: 696536 - RNA, 24 nt, Human
cacgccuguaaucucaacacuuug

SEQ ID NO: 696537 - RNA, 27 nt, Human
cagaucacuugaggccaggaguuagag

SEQ ID NO: 696538 - RNA, 24 nt, Human
caggcagaucacuugaggccagga

SEQ ID NO: 696539 - RNA, 18 nt, Human
ccuggccaacauggugaa

SEQ ID NO: 696540 - RNA, 23 nt, Human
ccuggccaacauggugaacccca

SEQ ID NO: 696541 - RNA, 23 nt, Human
cgccuguaaucucaacacuuuga

SEQ ID NO: 696542 - RNA, 19 nt, Human
cgggagaccccguaaaugc

SEQ ID NO: 696543 - RNA, 22 nt, Human
cucacgccuguaaucucaacac

SEQ ID NO: 696544 - RNA, 24 nt, Human
cucacgccuguaaucucaacacuu

SEQ ID NO: 696545 - RNA, 18 nt, Human
gaucacuugaggccagga

SEQ ID NO: 696546 - RNA, 24 nt, Human
gaucacuugaggccaggaguuaga

SEQ ID NO: 696547 - RNA, 19 nt, Human
gcagggagcgguggcucac

SEQ ID NO: 696548 - RNA, 23 nt, Human
gccaacauggugaaccccaucuc

SEQ ID NO: 696549 - RNA, 18 nt, Human
ggcagggagcgguggcuc

SEQ ID NO: 696550 - RNA, 18 nt, Human
gggagaccccguaaaugc

SEQ ID NO: 696551 - RNA, 23 nt, Human
gguggcucacgccuguaaucuca

SEQ ID NO: 696552 - RNA, 23 nt, Human
uagccuggccaacauggugaacc

SEQ ID NO: 696553 - RNA, 21 nt, Human
uaggauaguacacuuuaacau

SEQ ID NO: 696554 - RNA, 24 nt, Human
uccaggaaaaaaaauuuuuagaaa

SEQ ID NO: 696555 - RNA, 25 nt, Human
uccgcucgccgccguuaucccaggu

SEQ ID NO: 696556 - RNA, 18 nt, Human
ugagaggcugaggcaggc

SEQ ID NO: 696557 - RNA, 20 nt, Human
ugagaggcugaggcaggcag

SEQ ID NO: 696558 - RNA, 24 nt, Human
ugagaggcugaggcaggcagauca

SEQ ID NO: 696559 - RNA, 20 nt, Human
ugaggcaggcagaucacuug

SEQ ID NO: 696560 - RNA, 26 nt, Human
ugaggcaggcagaucacuugaggcca

SEQ ID NO: 696561 - RNA, 24 nt, Human
uggcucacgccuguaaucucaaca

SEQ ID NO: 696562 - RNA, 19 nt, Human
ugggcagggagcgguggcu

SEQ ID NO: 696563 - RNA, 18 nt, Human
ugguauauguguugggca

SEQ ID NO: 696564 - RNA, 18 nt, Human
uguguugggcagggagcg

SEQ ID NO: 696565 - RNA, 24 nt, Human
uucucugcaucacaaaaauuccau

SEQ ID NO: 696566 - RNA, 25 nt, Human
uugagaggcugaggcaggcagauca

SEQ ID NO: 696567 - RNA, 21 nt, Human
uugaggccaggaguuagagac

SEQ ID NO: 696568 - RNA, 18 nt, Human
uuucucugcaucacaaaa

SEQ ID NO: 696569 - RNA, 24 nt, Human
aacucaccuccacaacagucucug

SEQ ID NO: 696570 - RNA, 18 nt, Human
acagaccaauaggaaggg

SEQ ID NO: 696571 - RNA, 23 nt, Human
accacccccuacacucuuuauac

SEQ ID NO: 696572 - RNA, 22 nt, Human
agagaucacccaccaguuggcc

SEQ ID NO: 696573 - RNA, 23 nt, Human
aggagucucaaggcacaaggcuc

SEQ ID NO: 696574 - RNA, 18 nt, Human
auggcuccuccauuucuc

SEQ ID NO: 696575 - RNA, 20 nt, Human
caaagggaccaggagugaua

SEQ ID NO: 696576 - RNA, 19 nt, Human
cacaaggcuccugguuucu

SEQ ID NO: 696577 - RNA, 18 nt, Human
caccuccacaacagucuc

SEQ ID NO: 696578 - RNA, 20 nt, Human
caccuccacaacagucucug

SEQ ID NO: 696579 - RNA, 18 nt, Human
cagccgaacucaccucca

SEQ ID NO: 696580 - RNA, 24 nt, Human
caggagucucaaggcacaaggcuc

SEQ ID NO: 696581 - RNA, 20 nt, Human
caguggcagcuggagagggu

SEQ ID NO: 696582 - RNA, 18 nt, Human
ccagucucugcucccaug

SEQ ID NO: 696583 - RNA, 24 nt, Human
ccuccacaacagucucuguggcuc

SEQ ID NO: 696584 - RNA, 23 nt, Human
ccuccugcugccagucucugcuc

SEQ ID NO: 696585 - RNA, 25 nt, Human
ccugcugaaugaaggaaguugggug

SEQ ID NO: 696586 - RNA, 19 nt, Human
cuccagguccccgagucgc

SEQ ID NO: 696587 - RNA, 21 nt, Human
cucccaaaccugccuguugca

SEQ ID NO: 696588 - RNA, 25 nt, Human
cucucaaccacccccuacacucuuu

SEQ ID NO: 696589 - RNA, 24 nt, Human
cugaaguagaaucaacugauucac

SEQ ID NO: 696590 - RNA, 19 nt, Human
cuguggccgcuggaugccc

SEQ ID NO: 696591 - RNA, 22 nt, Human
gcugaacuaaacgccgacccca

SEQ ID NO: 696592 - RNA, 23 nt, Human
ggaggaaugggaaaagugagcac

SEQ ID NO: 696593 - RNA, 21 nt, Human
guggcucuagccuggacuccc

SEQ ID NO: 696594 - RNA, 20 nt, Human
uacaagugucuaggcgucag

SEQ ID NO: 696595 - RNA, 21 nt, Human
uacucucaaccacccccuaca

SEQ ID NO: 696596 - RNA, 20 nt, Human
uaggaggaaugggaaaagug

SEQ ID NO: 696597 - RNA, 23 nt, Human
ucauucaggcagcugcuuuugac

SEQ ID NO: 696598 - RNA, 19 nt, Human
uccacaacagucucugugg

SEQ ID NO: 696599 - RNA, 23 nt, Human
uccacaacagucucuguggcucu

SEQ ID NO: 696600 - RNA, 21 nt, Human
uccccccuccugcugccaguc

SEQ ID NO: 696601 - RNA, 18 nt, Human
ucucccaugggagcgaag

SEQ ID NO: 696602 - RNA, 19 nt, Human
ucuuggcuucgcugucugg

SEQ ID NO: 696603 - RNA, 20 nt, Human
ucuuuccaggagucucaagg

SEQ ID NO: 696604 - RNA, 22 nt, Human
ugaaugaaugggugagcugcag

SEQ ID NO: 696605 - RNA, 21 nt, Human
ugaccucuaacucccaaaccu

SEQ ID NO: 696606 - RNA, 21 nt, Human
uggaugccacuucuagcauag

SEQ ID NO: 696607 - RNA, 18 nt, Human
uguuaggaggaaugggaa

SEQ ID NO: 696608 - RNA, 20 nt, Human
uuaggaggaaugggaaaagu

SEQ ID NO: 696609 - RNA, 21 nt, Human
uugcaugaggggaagccaucu

SEQ ID NO: 696610 - RNA, 26 nt, Human
cagccacaccgggacgcugaagcaac

SEQ ID NO: 696611 - RNA, 22 nt, Human
ccacaccgggacgcugaagcaa

SEQ ID NO: 696612 - RNA, 20 nt, Human
ccgcacaggaccaacggcac

SEQ ID NO: 696613 - RNA, 23 nt, Human
cggcacagccacaccgggacgcu

SEQ ID NO: 696614 - RNA, 24 nt, Human
gcacaggaccaacggcacagccac

SEQ ID NO: 696615 - RNA, 22 nt, Human
gccacaccgggacgcugaagca

SEQ ID NO: 696616 - RNA, 20 nt, Human
aaaaaguagauccuacaaga

SEQ ID NO: 696617 - RNA, 19 nt, Human
aaagaaaaacauccuugaa

SEQ ID NO: 696618 - RNA, 22 nt, Human
aacuuugcuccuccaaacaaua

SEQ ID NO: 696619 - RNA, 21 nt, Human
acaaauacuuuucuaaacauc

SEQ ID NO: 696620 - RNA, 24 nt, Human
acaagcccuguggagagauccuuc

SEQ ID NO: 696621 - RNA, 25 nt, Human
acacaguacucaucaaugggcucaa

SEQ ID NO: 696622 - RNA, 24 nt, Human
acagcaacaccaggaugcugaagc

SEQ ID NO: 696623 - RNA, 23 nt, Human
acaggagugcaguuucguaaagc

SEQ ID NO: 696624 - RNA, 19 nt, Human
accaggaugcugaagcaac

SEQ ID NO: 696625 - RNA, 19 nt, Human
acccacggcacagcaacac

SEQ ID NO: 696626 - RNA, 23 nt, Human
agagaaaccaucucaucaccaga

SEQ ID NO: 696627 - RNA, 18 nt, Human
agagauccuuccaucaag

SEQ ID NO: 696628 - RNA, 20 nt, Human
agauguaacaaauacuuuuc

SEQ ID NO: 696629 - RNA, 19 nt, Human
agcaagaugagcagauccu

SEQ ID NO: 696630 - RNA, 21 nt, Human
aggcugaguuagcuaccuggu

SEQ ID NO: 696631 - RNA, 21 nt, Human
aucaaguugcuucaguuuaac

SEQ ID NO: 696632 - RNA, 28 nt, Human
auguuacauacaucuuacaacgcacggu

SEQ ID NO: 696633 - RNA, 22 nt, Human
auuugauguuguucuuuuucuu

SEQ ID NO: 696634 - RNA, 24 nt, Human
auuuugagagucuucuuguauucc

SEQ ID NO: 696635 - RNA, 22 nt, Human
caaucgguuugacacaaccacc

SEQ ID NO: 696636 - RNA, 23 nt, Human
caaugggcucaaucauauagauc

SEQ ID NO: 696637 - RNA, 24 nt, Human
cacagcaacaccaggaugcugaag

SEQ ID NO: 696638 - RNA, 22 nt, Human
caccaaucgguuugacacaacc

SEQ ID NO: 696639 - RNA, 22 nt, Human
cacggcacagcaacaccaggau

SEQ ID NO: 696640 - RNA, 21 nt, Human
cacuaaagucuuccccucaaa

SEQ ID NO: 696641 - RNA, 20 nt, Human
cacuuuagaccacaaaguua

SEQ ID NO: 696642 - RNA, 19 nt, Human
caucaagguauagcucagg

SEQ ID NO: 696643 - RNA, 20 nt, Human
caucaaguugcuucaguuua

SEQ ID NO: 696644 - RNA, 22 nt, Human
cauuuccauccacaagaccggg

SEQ ID NO: 696645 - RNA, 18 nt, Human
ccagaagacaggagugca

SEQ ID NO: 696646 - RNA, 19 nt, Human
ccucacaguuauccaugau

SEQ ID NO: 696647 - RNA, 21 nt, Human
ccuccaaacaauacuuuucuu

SEQ ID NO: 696648 - RNA, 18 nt, Human
ccuccgagucuaccaccc

SEQ ID NO: 696649 - RNA, 19 nt, Human
ccuccgagucuaccacccc

SEQ ID NO: 696650 - RNA, 21 nt, Human
ccuccgagucuaccaccccuc

SEQ ID NO: 696651 - RNA, 21 nt, Human
ccuugagagaaaccaucucau

SEQ ID NO: 696652 - RNA, 20 nt, Human
cggcuugacagcuaaacacu

SEQ ID NO: 696653 - RNA, 20 nt, Human
cuccgagucuaccaccccuc

SEQ ID NO: 696654 - RNA, 18 nt, Human
cucuuuaucuuccgccag

SEQ ID NO: 696655 - RNA, 19 nt, Human
cuggggaucuuccagacug

SEQ ID NO: 696656 - RNA, 22 nt, Human
cuggggaucuuccagacugaag

SEQ ID NO: 696657 - RNA, 22 nt, Human
cuuaucagccucugccuuuugc

SEQ ID NO: 696658 - RNA, 18 nt, Human
gaagccagaagacaggag

SEQ ID NO: 696659 - RNA, 23 nt, Human
gacuugucauucuuaucagccuc

SEQ ID NO: 696660 - RNA, 19 nt, Human
gagaaaccaucucaucacc

SEQ ID NO: 696661 - RNA, 23 nt, Human
gagauccuuccaucaaguugcuu

SEQ ID NO: 696662 - RNA, 20 nt, Human
gauauaauagauauguuucu

SEQ ID NO: 696663 - RNA, 21 nt, Human
gcaagaugagcagauccuuca

SEQ ID NO: 696664 - RNA, 22 nt, Human
ggaucuuccagacugaagccag

SEQ ID NO: 696665 - RNA, 19 nt, Human
guaaagcaagaugagcaga

SEQ ID NO: 696666 - RNA, 26 nt, Human
uaaaccgacgugaaacucaaaaagca

SEQ ID NO: 696667 - RNA, 21 nt, Human
uaaagcaagaugagcagaucc

SEQ ID NO: 696668 - RNA, 23 nt, Human
uaagaagaaugugacucgagcac

SEQ ID NO: 696669 - RNA, 18 nt, Human
uaccugguccuuggucuc

SEQ ID NO: 696670 - RNA, 19 nt, Human
uagcucaggaacacuucga

SEQ ID NO: 696671 - RNA, 24 nt, Human
ucacagcaucacuuaguagacaga

SEQ ID NO: 696672 - RNA, 22 nt, Human
ucacuucuaagccauguuuccc

SEQ ID NO: 696673 - RNA, 19 nt, Human
uccagacugaagccagaag

SEQ ID NO: 696674 - RNA, 21 nt, Human
uccagacugaagccagaagac

SEQ ID NO: 696675 - RNA, 18 nt, Human
uccagguguuucuuggcu

SEQ ID NO: 696676 - RNA, 19 nt, Human
uccaugaugaaaucucugc

SEQ ID NO: 696677 - RNA, 22 nt, Human
uccuuccaucaaguugcuucag

SEQ ID NO: 696678 - RNA, 24 nt, Human
ucuaagcauuuuuugaccaaauuu

SEQ ID NO: 696679 - RNA, 22 nt, Human
ucuccagguguuucuuggcugc

SEQ ID NO: 696680 - RNA, 19 nt, Human
ucugcuuuagugccuaagg

SEQ ID NO: 696681 - RNA, 21 nt, Human
ucuuccgauuuugagagucuu

SEQ ID NO: 696682 - RNA, 22 nt, Human
ucuuucaugguuuugcagaggu

SEQ ID NO: 696683 - RNA, 18 nt, Human
ucuuuggaaaacaagccc

SEQ ID NO: 696684 - RNA, 21 nt, Human
ucuuuggugacuggcacuaaa

SEQ ID NO: 696685 - RNA, 23 nt, Human
ucuuuuucuuuucuucauccucu

SEQ ID NO: 696686 - RNA, 18 nt, Human
ugguuuugcagagguucu

SEQ ID NO: 696687 - RNA, 21 nt, Human
ugugaaaauaaaccgacguga

SEQ ID NO: 696688 - RNA, 18 nt, Human
uucaugguuuugcagagg

SEQ ID NO: 696689 - RNA, 20 nt, Human
uucaugguuuugcagagguu

SEQ ID NO: 696690 - RNA, 27 nt, Human
uuccccuuaaaguaguuguugucaugc

SEQ ID NO: 696691 - RNA, 20 nt, Human
uuggucucaccugugauaua

SEQ ID NO: 696692 - RNA, 18 nt, Human
uuugcagagguucucaaa

SEQ ID NO: 696693 - RNA, 19 nt, Human
aaaaaacugauuccuggac

SEQ ID NO: 696694 - RNA, 23 nt, Human
aaaaaacugauuccuggacaggc

SEQ ID NO: 696695 - RNA, 19 nt, Human
aagcacacccccacuggcu

SEQ ID NO: 696696 - RNA, 21 nt, Human
aagcaguuuuagcuugagaga

SEQ ID NO: 696697 - RNA, 25 nt, Human
aagcccagcccaucagacaggaccc

SEQ ID NO: 696698 - RNA, 19 nt, Human
aagcccuccccaccugcca

SEQ ID NO: 696699 - RNA, 19 nt, Human
aagcuagcuuugcccugcc

SEQ ID NO: 696700 - RNA, 20 nt, Human
aagcuagcuuugcccugccu

SEQ ID NO: 696701 - RNA, 18 nt, Human
aaguggaguccaaaaacu

SEQ ID NO: 696702 - RNA, 20 nt, Human
aaguggaguccaaaaacuug

SEQ ID NO: 696703 - RNA, 19 nt, Human
accucuuuggacuuggaga

SEQ ID NO: 696704 - RNA, 18 nt, Human
agaaaaccaagcccagcc

SEQ ID NO: 696705 - RNA, 19 nt, Human
agacaggaccccuggcucc

SEQ ID NO: 696706 - RNA, 25 nt, Human
aggcaggcaggucaagaaaaccaag

SEQ ID NO: 696707 - RNA, 26 nt, Human
aggcaggucaagaaaaccaagcccag

SEQ ID NO: 696708 - RNA, 19 nt, Human
aggcgcgguggcucacgcc

SEQ ID NO: 696709 - RNA, 21 nt, Human
aggucaagaaaaccaagccca

SEQ ID NO: 696710 - RNA, 24 nt, Human
auccacccaccagggcuccaguca

SEQ ID NO: 696711 - RNA, 18 nt, Human
augcuggucuacuccugg

SEQ ID NO: 696712 - RNA, 18 nt, Human
caaaccuugcaggggcug

SEQ ID NO: 696713 - RNA, 24 nt, Human
caaaguggaguccaaaaacuuguu

SEQ ID NO: 696714 - RNA, 22 nt, Human
caagaaaaccaagcccagccca

SEQ ID NO: 696715 - RNA, 19 nt, Human
cacacccuucaacucagcc

SEQ ID NO: 696716 - RNA, 19 nt, Human
caccaggagcugacagggc

SEQ ID NO: 696717 - RNA, 19 nt, Human
cacccccacuggcucaaag

SEQ ID NO: 696718 - RNA, 21 nt, Human
cagaggcccugccuggucagu

SEQ ID NO: 696719 - RNA, 22 nt, Human
caggcgcgguggcucacgccuc

SEQ ID NO: 696720 - RNA, 22 nt, Human
caggucaggauuucucaaagug

SEQ ID NO: 696721 - RNA, 18 nt, Human
caggucccaggacagauc

SEQ ID NO: 696722 - RNA, 20 nt, Human
ccagaucagcacccccuuug

SEQ ID NO: 696723 - RNA, 20 nt, Human
ccagcccaucagacaggacc

SEQ ID NO: 696724 - RNA, 25 nt, Human
ccagcccccugcauucaccauaugc

SEQ ID NO: 696725 - RNA, 18 nt, Human
cccagaagcuagcuuugc

SEQ ID NO: 696726 - RNA, 26 nt, Human
ccccuaccauugagcaccugccacuc

SEQ ID NO: 696727 - RNA, 22 nt, Human
cccucacucaggccugcccacu

SEQ ID NO: 696728 - RNA, 18 nt, Human
cccuuugcccaucacccc

SEQ ID NO: 696729 - RNA, 24 nt, Human
ccucacucaggccugcccacuccu

SEQ ID NO: 696730 - RNA, 24 nt, Human
ccuccugcccuuugcccaucaccc

SEQ ID NO: 696731 - RNA, 21 nt, Human
ccugcauucaccauaugcccu

SEQ ID NO: 696732 - RNA, 23 nt, Human
ccugccagcccccugcauucacc

SEQ ID NO: 696733 - RNA, 18 nt, Human
ccugcccacagccuuucc

SEQ ID NO: 696734 - RNA, 24 nt, Human
ccuggacaggcgcgguggcucacg

SEQ ID NO: 696735 - RNA, 18 nt, Human
cucaaaguggaguccaaa

SEQ ID NO: 696736 - RNA, 23 nt, Human
cucaggccugcccacuccucaga

SEQ ID NO: 696737 - RNA, 19 nt, Human
cucccccuccccaccucag

SEQ ID NO: 696738 - RNA, 19 nt, Human
cugccagcccccugcauuc

SEQ ID NO: 696739 - RNA, 23 nt, Human
cugcucccccuccccaccucagg

SEQ ID NO: 696740 - RNA, 24 nt, Human
cugucuccagaucagcacccccuu

SEQ ID NO: 696741 - RNA, 21 nt, Human
gaauucacccacccuccugcc

SEQ ID NO: 696742 - RNA, 25 nt, Human
gaccccuggcuccugcccacagccu

SEQ ID NO: 696743 - RNA, 19 nt, Human
gaccuguggacagaguccc

SEQ ID NO: 696744 - RNA, 21 nt, Human
gcccuccccaccugccagccc

SEQ ID NO: 696745 - RNA, 24 nt, Human
gccugcccacuccucagaaggcca

SEQ ID NO: 696746 - RNA, 22 nt, Human
gcgcugccuuuaauaaguaagg

SEQ ID NO: 696747 - RNA, 23 nt, Human
ggaauucacccacccuccugccc

SEQ ID NO: 696748 - RNA, 19 nt, Human
gggcuccagucauacccag

SEQ ID NO: 696749 - RNA, 22 nt, Human
gggcugaaggaacccagaagcu

SEQ ID NO: 696750 - RNA, 23 nt, Human
ggucaggauuucucaaaguggag

SEQ ID NO: 696751 - RNA, 24 nt, Human
gucccaggacagaucugucuccag

SEQ ID NO: 696752 - RNA, 19 nt, Human
guguucaagcccuccccac

SEQ ID NO: 696753 - RNA, 21 nt, Human
guuccugcucccccuccccac

SEQ ID NO: 696754 - RNA, 20 nt, Human
uaaggagagguccagagacc

SEQ ID NO: 696755 - RNA, 21 nt, Human
uacggguaccucuuuggacuu

SEQ ID NO: 696756 - RNA, 24 nt, Human
uaugagggcugaaaaaauguggca

SEQ ID NO: 696757 - RNA, 22 nt, Human
ucccaggacagaucugucucca

SEQ ID NO: 696758 - RNA, 22 nt, Human
ucccccuccccaccucaggggu

SEQ ID NO: 696759 - RNA, 23 nt, Human
ucuccagaucagcacccccuuug

SEQ ID NO: 696760 - RNA, 27 nt, Human
ugaaacaggucccaggacagaucuguc

SEQ ID NO: 696761 - RNA, 21 nt, Human
ugaagcacacccccacuggcu

SEQ ID NO: 696762 - RNA, 23 nt, Human
ugaagcacacccccacuggcuca

SEQ ID NO: 696763 - RNA, 22 nt, Human
ugacagggcugaaacagguccc

SEQ ID NO: 696764 - RNA, 19 nt, Human
ugcccugccuuuugggcca

SEQ ID NO: 696765 - RNA, 23 nt, Human
uggaaaaaacugauuccuggaca

SEQ ID NO: 696766 - RNA, 23 nt, Human
uguggacagagucccaaaccuug

SEQ ID NO: 696767 - RNA, 21 nt, Human
uuccccuaccauugagcaccu

SEQ ID NO: 696768 - RNA, 23 nt, Human
uuccugcucccccuccccaccuc

SEQ ID NO: 696769 - RNA, 24 nt, Human
uugcccugccuuuugggccacacu

SEQ ID NO: 696770 - RNA, 21 nt, Human
uuuagcuugagagacacaaga

SEQ ID NO: 696771 - RNA, 23 nt, Human
uuuuuuuuuuuuggugcagcgcu

SEQ ID NO: 696772 - RNA, 23 nt, Human
aaagcgcugccgccucggccccc

SEQ ID NO: 696773 - RNA, 18 nt, Human
aaggaggagaagacggcg

SEQ ID NO: 696774 - RNA, 18 nt, Human
accccgcccccgccccuc

SEQ ID NO: 696775 - RNA, 24 nt, Human
accccgcccccgccccucuuaucg

SEQ ID NO: 696776 - RNA, 19 nt, Human
agaaaaaaggugaaagagg

SEQ ID NO: 696777 - RNA, 21 nt, Human
agaagaaaaaaggugaaagag

SEQ ID NO: 696778 - RNA, 18 nt, Human
agagcccuucuuccaguc

SEQ ID NO: 696779 - RNA, 25 nt, Human
agcaaaagugggaaaagauuuggca

SEQ ID NO: 696780 - RNA, 24 nt, Human
agccaagcgcacccggcagccccc

SEQ ID NO: 696781 - RNA, 20 nt, Human
agcgcacccggcagcccccc

SEQ ID NO: 696782 - RNA, 21 nt, Human
aggaccccgcccccgccccuc

SEQ ID NO: 696783 - RNA, 23 nt, Human
aggagaagacggcgccggguccg

SEQ ID NO: 696784 - RNA, 18 nt, Human
aggagccaggcggaaaug

SEQ ID NO: 696785 - RNA, 18 nt, Human
aggcgugcgggcgaggcc

SEQ ID NO: 696786 - RNA, 21 nt, Human
agugguggggagacaagagag

SEQ ID NO: 696787 - RNA, 25 nt, Human
aucgcaauaaagucuccaacgcgcc

SEQ ID NO: 696788 - RNA, 21 nt, Human
caagcgcacccggcagccccc

SEQ ID NO: 696789 - RNA, 24 nt, Human
cacagccaagcgcacccggcagcc

SEQ ID NO: 696790 - RNA, 23 nt, Human
caccaaaccugcucaggucccag

SEQ ID NO: 696791 - RNA, 23 nt, Human
cacccggcagccccccgcgcccc

SEQ ID NO: 696792 - RNA, 27 nt, Human
caccucggaccccagcagccacagccc

SEQ ID NO: 696793 - RNA, 19 nt, Human
cagccaagcgcacccggca

SEQ ID NO: 696794 - RNA, 22 nt, Human
caggaccccgcccccgccccuc

SEQ ID NO: 696795 - RNA, 22 nt, Human
ccaaaccugcucaggucccagg

SEQ ID NO: 696796 - RNA, 24 nt, Human
ccaacgcgccgcgccacagccaag

SEQ ID NO: 696797 - RNA, 20 nt, Human
ccaccucggaccccagcagc

SEQ ID NO: 696798 - RNA, 20 nt, Human
ccccaggaccccgcccccgc

SEQ ID NO: 696799 - RNA, 22 nt, Human
cccccaggaccccgcccccgcc

SEQ ID NO: 696800 - RNA, 21 nt, Human
ccccccgcgccccgcagccgg

SEQ ID NO: 696801 - RNA, 19 nt, Human
cccccgcgccccgcagccg

SEQ ID NO: 696802 - RNA, 22 nt, Human
cccccgcgcggcccggggccgc

SEQ ID NO: 696803 - RNA, 24 nt, Human
cccccgcgcggcccggggccgcaa

SEQ ID NO: 696804 - RNA, 20 nt, Human
ccccgcccccgccccucuua

SEQ ID NO: 696805 - RNA, 19 nt, Human
cccgcgcggcccggggccg

SEQ ID NO: 696806 - RNA, 21 nt, Human
cccgcgcggcccggggccgca

SEQ ID NO: 696807 - RNA, 24 nt, Human
cccggccccaccucggaccccagc

SEQ ID NO: 696808 - RNA, 22 nt, Human
cccuccggcccccgcgcggccc

SEQ ID NO: 696809 - RNA, 19 nt, Human
ccgcccgaagcgaccgcgg

SEQ ID NO: 696810 - RNA, 21 nt, Human
ccgccggggacugggcggugg

SEQ ID NO: 696811 - RNA, 20 nt, Human
ccggcagccccccgcgcccc

SEQ ID NO: 696812 - RNA, 21 nt, Human
ccuagaagaaaaaaggugaaa

SEQ ID NO: 696813 - RNA, 23 nt, Human
ccuccacgugcugaggugggagc

SEQ ID NO: 696814 - RNA, 21 nt, Human
ccucccuagagcccuucuucc

SEQ ID NO: 696815 - RNA, 22 nt, Human
ccuccgggaccuggagaccuag

SEQ ID NO: 696816 - RNA, 25 nt, Human
cgcccccgccccucuuaucguccca

SEQ ID NO: 696817 - RNA, 19 nt, Human
cgccggggacugggcggug

SEQ ID NO: 696818 - RNA, 22 nt, Human
cggcccccaggaccccgccccc

SEQ ID NO: 696819 - RNA, 20 nt, Human
cggcccccgcgcggcccggg

SEQ ID NO: 696820 - RNA, 21 nt, Human
cggcccggggccgcaauuucc

SEQ ID NO: 696821 - RNA, 18 nt, Human
cgggagggggcagcccgg

SEQ ID NO: 696822 - RNA, 20 nt, Human
cgggagggggcagcccgggc

SEQ ID NO: 696823 - RNA, 21 nt, Human
cgggagggggcagcccgggcg

SEQ ID NO: 696824 - RNA, 20 nt, Human
cgguggcaccgauccccgcc

SEQ ID NO: 696825 - RNA, 23 nt, Human
cucccgggcccuccccgggaugc

SEQ ID NO: 696826 - RNA, 22 nt, Human
cuuucaccaaaccugcucaggu

SEQ ID NO: 696827 - RNA, 22 nt, Human
gaaagggucagaaacacaccgg

SEQ ID NO: 696828 - RNA, 18 nt, Human
gaccccagcagccacagc

SEQ ID NO: 696829 - RNA, 19 nt, Human
gaccccgcccccgccccuc

SEQ ID NO: 696830 - RNA, 19 nt, Human
gaccuagaagaaaaaaggu

SEQ ID NO: 696831 - RNA, 20 nt, Human
gacugcggggugggacagga

SEQ ID NO: 696832 - RNA, 23 nt, Human
gagcuuuaauggggcugaaaggg

SEQ ID NO: 696833 - RNA, 23 nt, Human
gaguguggggacaggaggaaggg

SEQ ID NO: 696834 - RNA, 21 nt, Human
gccaagcgcacccggcagccc

SEQ ID NO: 696835 - RNA, 20 nt, Human
gccccaccucggaccccagc

SEQ ID NO: 696836 - RNA, 20 nt, Human
gccuggcgggagggggcagc

SEQ ID NO: 696837 - RNA, 19 nt, Human
gcgggagggggcagcccgg

SEQ ID NO: 696838 - RNA, 25 nt, Human
gcguggcggggguugcggggggguc

SEQ ID NO: 696839 - RNA, 20 nt, Human
ggacaggaggaagggggccg

SEQ ID NO: 696840 - RNA, 21 nt, Human
ggaccccagcagccacagccc

SEQ ID NO: 696841 - RNA, 23 nt, Human
ggaguguggggacaggaggaagg

SEQ ID NO: 696842 - RNA, 18 nt, Human
ggaguuucuccugggagu

SEQ ID NO: 696843 - RNA, 20 nt, Human
ggaucgggcgagacucuagg

SEQ ID NO: 696844 - RNA, 18 nt, Human
ggccaugugcccugaugg

SEQ ID NO: 696845 - RNA, 18 nt, Human
gggacaggaggaaggggg

SEQ ID NO: 696846 - RNA, 19 nt, Human
gggagggggcagcccgggc

SEQ ID NO: 696847 - RNA, 23 nt, Human
gggccuggcgggagggggcagcc

SEQ ID NO: 696848 - RNA, 20 nt, Human
ggggacugggcggugggaga

SEQ ID NO: 696849 - RNA, 21 nt, Human
ggggcagcccgggcguggcgg

SEQ ID NO: 696850 - RNA, 18 nt, Human
ggucccgucccccugcua

SEQ ID NO: 696851 - RNA, 22 nt, Human
guggcggggguugcgggggggu

SEQ ID NO: 696852 - RNA, 24 nt, Human
ucacggaggacgguggcuuucacc

SEQ ID NO: 696853 - RNA, 19 nt, Human
uccaacgcgccgcgccaca

SEQ ID NO: 696854 - RNA, 23 nt, Human
uccaacgcgccgcgccacagcca

SEQ ID NO: 696855 - RNA, 19 nt, Human
ucccaggaaggaggaccgu

SEQ ID NO: 696856 - RNA, 18 nt, Human
ucccuagagcccuucuuc

SEQ ID NO: 696857 - RNA, 19 nt, Human
ucccuagagcccuucuucc

SEQ ID NO: 696858 - RNA, 21 nt, Human
ucgcccuccucaggggacugc

SEQ ID NO: 696859 - RNA, 20 nt, Human
ucggcccccaggaccccgcc

SEQ ID NO: 696860 - RNA, 19 nt, Human
ucggcucccgcuccacucg

SEQ ID NO: 696861 - RNA, 18 nt, Human
ucgguggcaccgaucccc

SEQ ID NO: 696862 - RNA, 25 nt, Human
ucgguggcaccgauccccgcccgaa

SEQ ID NO: 696863 - RNA, 18 nt, Human
ucuccugggagugugggg

SEQ ID NO: 696864 - RNA, 22 nt, Human
ucucugcaaacagugauggggc

SEQ ID NO: 696865 - RNA, 19 nt, Human
ugacaaggaggagaagacg

SEQ ID NO: 696866 - RNA, 22 nt, Human
ugacggaggcucccgggcccuc

SEQ ID NO: 696867 - RNA, 18 nt, Human
ugcggggggguccuggag

SEQ ID NO: 696868 - RNA, 23 nt, Human
uggcaccgauccccgcccgaagc

SEQ ID NO: 696869 - RNA, 25 nt, Human
uggcaccgauccccgcccgaagcga

SEQ ID NO: 696870 - RNA, 21 nt, Human
uggcgggagggggcagcccgg

SEQ ID NO: 696871 - RNA, 18 nt, Human
ugggagaugggggggacg

SEQ ID NO: 696872 - RNA, 22 nt, Human
ugggcggugggagauggggggg

SEQ ID NO: 696873 - RNA, 22 nt, Human
uggggacaggaggaagggggcc

SEQ ID NO: 696874 - RNA, 22 nt, Human
uuccuuggggaagagcaaaagu

SEQ ID NO: 696875 - RNA, 22 nt, Human
uuuuuuuuuuuuugagagcuca

SEQ ID NO: 696876 - RNA, 18 nt, Human
uuuuuuuuuuuuuuuuug

SEQ ID NO: 696877 - RNA, 24 nt, Human
acuucuagcugaacucaucuugau

SEQ ID NO: 696878 - RNA, 27 nt, Human
cacuucagaaagaaaaaaguuguuggg

SEQ ID NO: 696879 - RNA, 18 nt, Human
gguaugacuucuagcuga

SEQ ID NO: 696880 - RNA, 23 nt, Human
uaacgugcauugauuugcuaaaa

SEQ ID NO: 696881 - RNA, 24 nt, Human
uaagaacauccuccuggacuuugg

SEQ ID NO: 696882 - RNA, 19 nt, Human
uguaaaacuauuuccaaga

SEQ ID NO: 696883 - RNA, 21 nt, Human
uuuuguaagaacauccuccug

SEQ ID NO: 696884 - RNA, 24 nt, Human
uuuuuaaauccauuuuuguaaaac

SEQ ID NO: 696885 - RNA, 24 nt, Human
uuuuuuuuuuuuuuuuuuuauuuu

SEQ ID NO: 696886 - RNA, 22 nt, Human
accgcggccccgcucgcacguc

SEQ ID NO: 696887 - RNA, 23 nt, Human
caccccucccccugcagggccca

SEQ ID NO: 696888 - RNA, 18 nt, Human
cagcccggggacccaggc

SEQ ID NO: 696889 - RNA, 19 nt, Human
caggccugucccuccgcug

SEQ ID NO: 696890 - RNA, 24 nt, Human
cccacgcgcgcagccgccgccgca

SEQ ID NO: 696891 - RNA, 24 nt, Human
cccacgcgcgcagccgccgccgca

SEQ ID NO: 696892 - RNA, 18 nt, Human
cccacggccucgccccgc

SEQ ID NO: 696893 - RNA, 21 nt, Human
cccacggccucgccccgcgcc

SEQ ID NO: 696894 - RNA, 24 nt, Human
cccaggcuugagccagccacuccc

SEQ ID NO: 696895 - RNA, 21 nt, Human
ccccacgauacccaauccagg

SEQ ID NO: 696896 - RNA, 18 nt, Human
ccccacggccucgccccg

SEQ ID NO: 696897 - RNA, 20 nt, Human
cccccgagccccaccgcggc

SEQ ID NO: 696898 - RNA, 26 nt, Human
cccccgagccccaccgcggccccgcu

SEQ ID NO: 696899 - RNA, 21 nt, Human
ccccgagccccaccgcggccc

SEQ ID NO: 696900 - RNA, 22 nt, Human
ccccgagccccaccgcggcccc

SEQ ID NO: 696901 - RNA, 18 nt, Human
ccccucccccugcagggc

SEQ ID NO: 696902 - RNA, 24 nt, Human
ccccuccucaccgauuccaccacc

SEQ ID NO: 696903 - RNA, 21 nt, Human
cccggggacccaggcuugagc

SEQ ID NO: 696904 - RNA, 22 nt, Human
ccgcgccuggggacaggccugu

SEQ ID NO: 696905 - RNA, 20 nt, Human
ccgcggccccgcucgcacgu

SEQ ID NO: 696906 - RNA, 24 nt, Human
ccgcuggcuccggguggccgcccu

SEQ ID NO: 696907 - RNA, 24 nt, Human
cgcccccgagccccaccgcggccc

SEQ ID NO: 696908 - RNA, 25 nt, Human
cgcccccgagccccaccgcggcccc

SEQ ID NO: 696909 - RNA, 22 nt, Human
cgccccgcgccccgggccccac

SEQ ID NO: 696910 - RNA, 24 nt, Human
cgccccgggccccacgcgcgcagc

SEQ ID NO: 696911 - RNA, 22 nt, Human
cgccgcagccaccacacacuuu

SEQ ID NO: 696912 - RNA, 21 nt, Human
cgccuggggacaggccugucc

SEQ ID NO: 696913 - RNA, 24 nt, Human
cgccuggggacaggccugucccuc

SEQ ID NO: 696914 - RNA, 22 nt, Human
cgcucgcacguccccacggccu

SEQ ID NO: 696915 - RNA, 20 nt, Human
cuccggguggccgcccucug

SEQ ID NO: 696916 - RNA, 22 nt, Human
cucgcccugucaccccuccccc

SEQ ID NO: 696917 - RNA, 23 nt, Human
cucgcccugucaccccucccccu

SEQ ID NO: 696918 - RNA, 21 nt, Human
cugagaagcccccuccucacc

SEQ ID NO: 696919 - RNA, 21 nt, Human
gagaagcccccuccucaccga

SEQ ID NO: 696920 - RNA, 23 nt, Human
gcccugucaccccucccccugca

SEQ ID NO: 696921 - RNA, 22 nt, Human
ggacugagaagcccccuccuca

SEQ ID NO: 696922 - RNA, 21 nt, Human
guggacgcgcccccgagcccc

SEQ ID NO: 696923 - RNA, 21 nt, Human
ucaccccucccccugcagggc

SEQ ID NO: 696924 - RNA, 19 nt, Human
ugagaagcccccuccucac

SEQ ID NO: 696925 - RNA, 24 nt, Human
uggacgcgcccccgagccccaccg

SEQ ID NO: 696926 - RNA, 20 nt, Human
uggaugggaggacggcacag

SEQ ID NO: 696927 - RNA, 24 nt, Human
uggccagggugaccugccccacgg

SEQ ID NO: 696928 - RNA, 18 nt, Human
uggcuccggguggccgcc

SEQ ID NO: 696929 - RNA, 20 nt, Human
uggcuccggguggccgcccu

SEQ ID NO: 696930 - RNA, 22 nt, Human
uggcuccggguggccgcccucu

SEQ ID NO: 696931 - RNA, 18 nt, Human
uggggugggggcucgccc

SEQ ID NO: 696932 - RNA, 22 nt, Human
uggggugggggcucgcccuguc

SEQ ID NO: 696933 - RNA, 19 nt, Human
ugucaccccucccccugca

SEQ ID NO: 696934 - RNA, 27 nt, Human
ugucaccccucccccugcagggcccaa

SEQ ID NO: 696935 - RNA, 18 nt, Human
aaguaaauaaaggagcaa

SEQ ID NO: 696936 - RNA, 19 nt, Human
aauaaguaaauaaaggagc

SEQ ID NO: 696937 - RNA, 18 nt, Human
aauguaaaauguugcagu

SEQ ID NO: 696938 - RNA, 23 nt, Human
auaaguaaauaaaggagcaaugu

SEQ ID NO: 696939 - RNA, 18 nt, Human
uccugcugcauuugcugc

SEQ ID NO: 696940 - RNA, 18 nt, Human
uccugcugcauuugcugc

SEQ ID NO: 696941 - RNA, 22 nt, Human
uguaaaauguugcaguuugcuu

SEQ ID NO: 696942 - RNA, 23 nt, Human
uuucuucuucuuucggaacuuuu

SEQ ID NO: 696943 - RNA, 20 nt, Human
aagaagccuuucccaacauc

SEQ ID NO: 696944 - RNA, 20 nt, Human
aagaagcuccaacacaauua

SEQ ID NO: 696945 - RNA, 21 nt, Human
aagcuccaacacaauuaaaua

SEQ ID NO: 696946 - RNA, 22 nt, Human
agccagucagggucggccaccu

SEQ ID NO: 696947 - RNA, 18 nt, Human
ccagccagucagggucgg

SEQ ID NO: 696948 - RNA, 20 nt, Human
cgaguugacaaagaaugcca

SEQ ID NO: 696949 - RNA, 22 nt, Human
cgucuggggcuccacggacggc

SEQ ID NO: 696950 - RNA, 21 nt, Human
cgugacaagcgucacgcuacc

SEQ ID NO: 696951 - RNA, 22 nt, Human
cuaaaaagucaacaggucaaaa

SEQ ID NO: 696952 - RNA, 19 nt, Human
cuguaguuuuucuuccccg

SEQ ID NO: 696953 - RNA, 24 nt, Human
cuuugaguucuccacagaaggcuu

SEQ ID NO: 696954 - RNA, 22 nt, Human
gaaaaguucaaagcaguuagaa

SEQ ID NO: 696955 - RNA, 23 nt, Human
gaagccuuucccaacaucucuau

SEQ ID NO: 696956 - RNA, 26 nt, Human
gaaggugggcuuuggcucgucugggg

SEQ ID NO: 696957 - RNA, 20 nt, Human
gagaaggugggcuuuggcuc

SEQ ID NO: 696958 - RNA, 18 nt, Human
gcucgucuggggcuccac

SEQ ID NO: 696959 - RNA, 23 nt, Human
guaauuucaagaagccuuuccca

SEQ ID NO: 696960 - RNA, 26 nt, Human
uagaaaagcagcgaguugacaaagaa

SEQ ID NO: 696961 - RNA, 23 nt, Human
ucaauuuauccaucaccgucucu

SEQ ID NO: 696962 - RNA, 19 nt, Human
uccacagaaggcuucgagc

SEQ ID NO: 696963 - RNA, 21 nt, Human
uccccgaaaaucauguuucca

SEQ ID NO: 696964 - RNA, 22 nt, Human
ucgcauaauccuucccugcgug

SEQ ID NO: 696965 - RNA, 18 nt, Human
ucgcuggcucccugacug

SEQ ID NO: 696966 - RNA, 20 nt, Human
ucgcuggcucccugacugcc

SEQ ID NO: 696967 - RNA, 20 nt, Human
ugcuaguaaauccuacagag

SEQ ID NO: 696968 - RNA, 19 nt, Human
ugggaggcugaggacguga

SEQ ID NO: 696969 - RNA, 23 nt, Human
uucaaauacagaaaauccgaaaa

SEQ ID NO: 696970 - RNA, 19 nt, Human
uuccagccagucagggucg

SEQ ID NO: 696971 - RNA, 20 nt, Human
uucuccacagaaggcuucga

SEQ ID NO: 696972 - RNA, 19 nt, Human
uuucaagaagccuuuccca

SEQ ID NO: 696973 - RNA, 20 nt, Human
uuuuuuuuuuuuuuuuuugg

SEQ ID NO: 696974 - RNA, 25 nt, Human
uuuuuuuuuuuuuuuuuugucuuuu

SEQ ID NO: 696975 - RNA, 19 nt, Human
aaggagcuggcucagccac

SEQ ID NO: 696976 - RNA, 21 nt, Human
caagauggccuuccacaaguc

SEQ ID NO: 696977 - RNA, 18 nt, Human
cagcggggccccguccca

SEQ ID NO: 696978 - RNA, 25 nt, Human
cagcugccagauccagcuucuucaa

SEQ ID NO: 696979 - RNA, 19 nt, Human
cccaaccccaccauccucu

SEQ ID NO: 696980 - RNA, 19 nt, Human
cccagcuccccaggccugg

SEQ ID NO: 696981 - RNA, 21 nt, Human
ccuccccugccauuucuguuc

SEQ ID NO: 696982 - RNA, 22 nt, Human
cuccccaggccuggugagcucc

SEQ ID NO: 696983 - RNA, 21 nt, Human
cuggcaucaagauggccuucc

SEQ ID NO: 696984 - RNA, 21 nt, Human
cuguucugcuccugaugucac

SEQ ID NO: 696985 - RNA, 24 nt, Human
cuguucugcuccugaugucacacu

SEQ ID NO: 696986 - RNA, 21 nt, Human
gagcuccaggcuagccugugc

SEQ ID NO: 696987 - RNA, 20 nt, Human
gcacagacugggagagagga

SEQ ID NO: 696988 - RNA, 21 nt, Human
gcuacaaagaaggugugugcu

SEQ ID NO: 696989 - RNA, 21 nt, Human
ggacagagagcuugcuguucu

SEQ ID NO: 696990 - RNA, 22 nt, Human
uagguccccaagaugguggggg

SEQ ID NO: 696991 - RNA, 21 nt, Human
ucaacugaggaggcgaaggga

SEQ ID NO: 696992 - RNA, 21 nt, Human
uccaggcuagccugugcacug

SEQ ID NO: 696993 - RNA, 20 nt, Human
ucccaaccccaccauccucu

SEQ ID NO: 696994 - RNA, 21 nt, Human
ucccaaccccaccauccucuu

SEQ ID NO: 696995 - RNA, 23 nt, Human
ucccaaccccaccauccucuuca

SEQ ID NO: 696996 - RNA, 19 nt, Human
uccccugccauuucuguuc

SEQ ID NO: 696997 - RNA, 18 nt, Human
uggcaucaagauggccuu

SEQ ID NO: 696998 - RNA, 24 nt, Human
ugucacacaggggcuuccugugug

SEQ ID NO: 696999 - RNA, 20 nt, Human
uguccucugaguccaggccc

SEQ ID NO: 697000 - RNA, 18 nt, Human
uguccuggcaucaagaug

SEQ ID NO: 697001 - RNA, 19 nt, Human
uucuguucagggaggcaca

SEQ ID NO: 697002 - RNA, 26 nt, Human
aacccagccuccagaaccagaaccaa

SEQ ID NO: 697003 - RNA, 18 nt, Human
agaaccagaaccaagagc

SEQ ID NO: 697004 - RNA, 21 nt, Human
caacccagccuccagaaccag

SEQ ID NO: 697005 - RNA, 22 nt, Human
caacccagccuccagaaccaga

SEQ ID NO: 697006 - RNA, 25 nt, Human
caaccgccgaggacagucggaccgg

SEQ ID NO: 697007 - RNA, 19 nt, Human
ccagccuccagaaccagaa

SEQ ID NO: 697008 - RNA, 21 nt, Human
cgccgaggacagucggaccgg

SEQ ID NO: 697009 - RNA, 21 nt, Human
cucaacccagccuccagaacc

SEQ ID NO: 697010 - RNA, 21 nt, Human
gaaccagaaccaagagcagca

SEQ ID NO: 697011 - RNA, 25 nt, Human
ggggcggggagcaacugcagcuguc

SEQ ID NO: 697012 - RNA, 23 nt, Human
aaaaaaaaaaaaaaaaaaaagag

SEQ ID NO: 697013 - RNA, 21 nt, Human
aaaaaaaaaaaaaaaagagga

SEQ ID NO: 697014 - RNA, 26 nt, Human
aaaaaaaaaaagaggaaaaaaaaugu

SEQ ID NO: 697015 - RNA, 26 nt, Human
aaaaaaaaggaacucaugauaaaugc

SEQ ID NO: 697016 - RNA, 19 nt, Human
aaaacagcaacacaacuga

SEQ ID NO: 697017 - RNA, 24 nt, Human
aaagcaaaaaaaaaaauuuacaaa

SEQ ID NO: 697018 - RNA, 25 nt, Human
acaaaagaagcuuuaaaaagacagu

SEQ ID NO: 697019 - RNA, 22 nt, Human
acagccgcuccacuccacuccc

SEQ ID NO: 697020 - RNA, 20 nt, Human
accacagccgcuccacucca

SEQ ID NO: 697021 - RNA, 24 nt, Human
accguggggaagaggaaagagucg

SEQ ID NO: 697022 - RNA, 20 nt, Human
acuccacucccacucggcua

SEQ ID NO: 697023 - RNA, 19 nt, Human
acuuucaacuaccugacug

SEQ ID NO: 697024 - RNA, 23 nt, Human
agcaaaaaaaaaaauuuacaaag

SEQ ID NO: 697025 - RNA, 21 nt, Human
agcaacacaacugacaaaagu

SEQ ID NO: 697026 - RNA, 19 nt, Human
aggaacucaugauaaaugc

SEQ ID NO: 697027 - RNA, 27 nt, Human
agguaaaagcaaaaaaaaaaauuuacu

SEQ ID NO: 697028 - RNA, 22 nt, Human
auaagagacaagucucggcucg

SEQ ID NO: 697029 - RNA, 30 nt, Human
aucucagaauuaaaaaaaaaaaaaaaaaaa

SEQ ID NO: 697030 - RNA, 19 nt, Human
cagcaacacaacugacaaa

SEQ ID NO: 697031 - RNA, 19 nt, Human
ccagaacuaaauaagagac

SEQ ID NO: 697032 - RNA, 22 nt, Human
ccauuccaccccagacaaaccu

SEQ ID NO: 697033 - RNA, 26 nt, Human
ccgcuccacuccacucccacucggcc

SEQ ID NO: 697034 - RNA, 21 nt, Human
cgacgaggcgcuccccagaac

SEQ ID NO: 697035 - RNA, 24 nt, Human
cgacgaggcgcuccccagaacuaa

SEQ ID NO: 697036 - RNA, 23 nt, Human
cucagaauuaaaaaaaaaaaaaa

SEQ ID NO: 697037 - RNA, 24 nt, Human
cucagaauuaaaaaaaaaaaaaaa

SEQ ID NO: 697038 - RNA, 21 nt, Human
cuguuccauuccaccccagac

SEQ ID NO: 697039 - RNA, 18 nt, Human
gaagaauccacagcuugg

SEQ ID NO: 697040 - RNA, 18 nt, Human
gcauguuuuacaggaguu

SEQ ID NO: 697041 - RNA, 22 nt, Human
ggaaaucucagaauuaaaaaaa

SEQ ID NO: 697042 - RNA, 18 nt, Human
ggccuaauuaacccgcug

SEQ ID NO: 697043 - RNA, 22 nt, Human
guuaaaaaaaaaaaaaggaacu

SEQ ID NO: 697044 - RNA, 20 nt, Human
uaaaaaaaaacuuucaacua

SEQ ID NO: 697045 - RNA, 19 nt, Human
uaaauaagagacaagucuc

SEQ ID NO: 697046 - RNA, 18 nt, Human
uaacauaacauugggguu

SEQ ID NO: 697047 - RNA, 22 nt, Human
uauaauaaaauggguggaaaac

SEQ ID NO: 697048 - RNA, 23 nt, Human
ucagaauuaaaaaaaaaaaaaaa

SEQ ID NO: 697049 - RNA, 24 nt, Human
uccccagaacuaaauaagagacaa

SEQ ID NO: 697050 - RNA, 21 nt, Human
ucucagaauuaaaaaaaaaaa

SEQ ID NO: 697051 - RNA, 22 nt, Human
uggaaaacagcaacacaacuga

SEQ ID NO: 697052 - RNA, 21 nt, Human
uguagaugcuaaauaaaccaa

SEQ ID NO: 697053 - RNA, 21 nt, Human
uguuccauuccaccccagaca

SEQ ID NO: 697054 - RNA, 20 nt, Human
uuaaaaaaaaaaaaaaaaaa

SEQ ID NO: 697055 - RNA, 24 nt, Human
uuaaaaaaaaaaaaaggaacucau

SEQ ID NO: 697056 - RNA, 22 nt, Human
uuaaggaguaggaagaauccac

SEQ ID NO: 697057 - RNA, 20 nt, Human
uugauuagcuagaaguuuau

SEQ ID NO: 697058 - RNA, 23 nt, Human
uuggggaaaucucagaauuaaaa

SEQ ID NO: 697059 - RNA, 22 nt, Human
auacauccuaagcuccugauuc

SEQ ID NO: 697060 - RNA, 23 nt, Human
ugcuauaaauucuccuuuuaagg

SEQ ID NO: 697061 - RNA, 24 nt, Human
uguauuacagugcuauaaauucuc

SEQ ID NO: 697062 - RNA, 18 nt, Human
ugugccaauccaguccuu

SEQ ID NO: 697063 - RNA, 22 nt, Human
uuuuaagcuguauuacagugcu

SEQ ID NO: 697064 - RNA, 20 nt, Human
aaaagggggcaggugcagaa

SEQ ID NO: 697065 - RNA, 20 nt, Human
aagaguuacugaacaggaag

SEQ ID NO: 697066 - RNA, 18 nt, Human
aaggcagaguagugggga

SEQ ID NO: 697067 - RNA, 23 nt, Human
acaaaaaucucuagauggagaag

SEQ ID NO: 697068 - RNA, 18 nt, Human
acucauuugccuuccuua

SEQ ID NO: 697069 - RNA, 24 nt, Human
acucugucacccaggcuggacucc

SEQ ID NO: 697070 - RNA, 25 nt, Human
acucugucacccaggcuggacucca

SEQ ID NO: 697071 - RNA, 18 nt, Human
agaguaguggggaaaguu

SEQ ID NO: 697072 - RNA, 18 nt, Human
agauggcagcaaaaagaa

SEQ ID NO: 697073 - RNA, 22 nt, Human
aggaagauggcagcaaaaagaa

SEQ ID NO: 697074 - RNA, 22 nt, Human
aggaccagcgcugagaguucac

SEQ ID NO: 697075 - RNA, 24 nt, Human
aggcaaaaguaagaguuacugaac

SEQ ID NO: 697076 - RNA, 20 nt, Human
agguggccgggacccaggag

SEQ ID NO: 697077 - RNA, 20 nt, Human
aucucaaaaaaaaaaaaaag

SEQ ID NO: 697078 - RNA, 23 nt, Human
caaacccaccaggaccagcgcug

SEQ ID NO: 697079 - RNA, 19 nt, Human
caaggagaaaaaggacagc

SEQ ID NO: 697080 - RNA, 22 nt, Human
cacacacacaaaaaucucuaga

SEQ ID NO: 697081 - RNA, 19 nt, Human
cacucugucacccaggcug

SEQ ID NO: 697082 - RNA, 31 nt, Human
cacucugucacccaggcuggacuccaucucu

SEQ ID NO: 697083 - RNA, 18 nt, Human
caggaaggcagaguagug

SEQ ID NO: 697084 - RNA, 23 nt, Human
ccaaaauaaacucuggaauuuau

SEQ ID NO: 697085 - RNA, 19 nt, Human
ccaccaggaccagcgcuga

SEQ ID NO: 697086 - RNA, 23 nt, Human
cccaccaggaccagcgcugagag

SEQ ID NO: 697087 - RNA, 21 nt, Human
ccccaaagauuuaaaaaaggg

SEQ ID NO: 697088 - RNA, 24 nt, Human
ccuauguuccacacuuuaugauga

SEQ ID NO: 697089 - RNA, 22 nt, Human
cucaaaaaaaaaaaaaaggaau

SEQ ID NO: 697090 - RNA, 19 nt, Human
cuccaucucaaaaaaaaaa

SEQ ID NO: 697091 - RNA, 22 nt, Human
cucuagauggagaaguagaaga

SEQ ID NO: 697092 - RNA, 20 nt, Human
cugggccucagggcuaagcu

SEQ ID NO: 697093 - RNA, 26 nt, Human
cuuccuuguaaaaugacaaaguuaug

SEQ ID NO: 697094 - RNA, 23 nt, Human
gagcuucaacauuuauuuaaaua

SEQ ID NO: 697095 - RNA, 23 nt, Human
gaggaagauggcagcaaaaagaa

SEQ ID NO: 697096 - RNA, 26 nt, Human
gaugaggaagauggcagcaaaaagaa

SEQ ID NO: 697097 - RNA, 24 nt, Human
gcuucuuuaaacuugagcuucaac

SEQ ID NO: 697098 - RNA, 21 nt, Human
ggcaacagaggagaaccaaaa

SEQ ID NO: 697099 - RNA, 21 nt, Human
gucauggucagcaaacccacc

SEQ ID NO: 697100 - RNA, 21 nt, Human
uaaccaagcauguaaagaaaa

SEQ ID NO: 697101 - RNA, 19 nt, Human
uaggaagggcaacagagga

SEQ ID NO: 697102 - RNA, 24 nt, Human
uagggucucacucugucacccagg

SEQ ID NO: 697103 - RNA, 22 nt, Human
uccaucucaaaaaaaaaaaaaa

SEQ ID NO: 697104 - RNA, 23 nt, Human
uccaucucaaaaaaaaaaaaaag

SEQ ID NO: 697105 - RNA, 19 nt, Human
uccccaaagauuuaaaaaa

SEQ ID NO: 697106 - RNA, 19 nt, Human
uccgcaguuuuauuuccuc

SEQ ID NO: 697107 - RNA, 19 nt, Human
uccgcaguuuuauuuccuc

SEQ ID NO: 697108 - RNA, 27 nt, Human
uccuuaaaugacaauuacacucaacuu

SEQ ID NO: 697109 - RNA, 23 nt, Human
ucucacucugucacccaggcugg

SEQ ID NO: 697110 - RNA, 24 nt, Human
ucucacucugucacccaggcugga

SEQ ID NO: 697111 - RNA, 26 nt, Human
ucucacucugucacccaggcuggacu

SEQ ID NO: 697112 - RNA, 27 nt, Human
ucucacucugucacccaggcuggacuc

SEQ ID NO: 697113 - RNA, 18 nt, Human
ucucugggccucagggcc

SEQ ID NO: 697114 - RNA, 18 nt, Human
ucugucacccaggcugga

SEQ ID NO: 697115 - RNA, 21 nt, Human
ucugucacccaggcuggacuc

SEQ ID NO: 697116 - RNA, 22 nt, Human
ugaaauagggucucacucuguc

SEQ ID NO: 697117 - RNA, 24 nt, Human
ugauggcacacacacaaaaaucuc

SEQ ID NO: 697118 - RNA, 23 nt, Human
uggacagguggccgggacccagg

SEQ ID NO: 697119 - RNA, 22 nt, Human
ugucaucuucagcucauuuuuu

SEQ ID NO: 697120 - RNA, 21 nt, Human
uguggaauauggacagguggc

SEQ ID NO: 697121 - RNA, 25 nt, Human
uguuacuucaggcaaaaguaagagu

SEQ ID NO: 697122 - RNA, 23 nt, Human
uucuauccaagaaucucaaagca

SEQ ID NO: 697123 - RNA, 23 nt, Human
uuuaagcucuucuuccaauuuuu

SEQ ID NO: 697124 - RNA, 24 nt, Human
uuuauuuuuuugaaauagggucuc

SEQ ID NO: 697125 - RNA, 26 nt, Human
uuuuauuuuuuugaaauagggucuca

SEQ ID NO: 697126 - RNA, 20 nt, Human
uuuuuaggaagggcaacaga

SEQ ID NO: 697127 - RNA, 25 nt, Human
uuuuuuguuggaaaggagauguuua

SEQ ID NO: 697128 - RNA, 20 nt, Human
uuuuuuuuuuuuuuguugga

SEQ ID NO: 697129 - RNA, 18 nt, Human
uuuuuuuuuuuuuuuuug

SEQ ID NO: 697130 - RNA, 20 nt, Human
uuuuuuuuuuuuuuuuuguu

SEQ ID NO: 697131 - RNA, 22 nt, Human
uuuuuuuuuuuuuuuuuguugg

SEQ ID NO: 697132 - RNA, 25 nt, Human
acaaguuccuuuuauuaccuggaaa

SEQ ID NO: 697133 - RNA, 19 nt, Human
acccaggucuguccgugcc

SEQ ID NO: 697134 - RNA, 23 nt, Human
accucuguccucucacccagucc

SEQ ID NO: 697135 - RNA, 25 nt, Human
aggaacacaacucucuccucuccgu

SEQ ID NO: 697136 - RNA, 23 nt, Human
aggcaaggucuggcccuuggggg

SEQ ID NO: 697137 - RNA, 19 nt, Human
caaggucuggcccuugggg

SEQ ID NO: 697138 - RNA, 26 nt, Human
cacugcacagcgcaacuuggcagguu

SEQ ID NO: 697139 - RNA, 24 nt, Human
cacugcguuguaguccagcuacgc

SEQ ID NO: 697140 - RNA, 25 nt, Human
cacugcguuguaguccagcuacgcc

SEQ ID NO: 697141 - RNA, 23 nt, Human
caggaacacaacucucuccucuc

SEQ ID NO: 697142 - RNA, 19 nt, Human
caggcgggcagcauugccc

SEQ ID NO: 697143 - RNA, 27 nt, Human
cccagaggcaaggucuggcccuugggg

SEQ ID NO: 697144 - RNA, 20 nt, Human
ccgugcccucaucuuccucc

SEQ ID NO: 697145 - RNA, 19 nt, Human
ccucaggaacacaacucuc

SEQ ID NO: 697146 - RNA, 23 nt, Human
ccucuguccucucacccagucca

SEQ ID NO: 697147 - RNA, 20 nt, Human
ccuggcacaggucccgugcu

SEQ ID NO: 697148 - RNA, 21 nt, Human
cgaccccucaggaacacaacu

SEQ ID NO: 697149 - RNA, 22 nt, Human
cgagaugcacugcguuguaguc

SEQ ID NO: 697150 - RNA, 27 nt, Human
cgcccaucgagccaccucuguccucuc

SEQ ID NO: 697151 - RNA, 18 nt, Human
cucuccucuccguccaag

SEQ ID NO: 697152 - RNA, 20 nt, Human
cugcacagcgcaacuuggca

SEQ ID NO: 697153 - RNA, 21 nt, Human
cugcacagcgcaacuuggcag

SEQ ID NO: 697154 - RNA, 19 nt, Human
cuggagcagacggaacagg

SEQ ID NO: 697155 - RNA, 18 nt, Human
cuggcccaguccuggggc

SEQ ID NO: 697156 - RNA, 20 nt, Human
cuuccuccucugccaugacc

SEQ ID NO: 697157 - RNA, 22 nt, Human
gagaugcacugcguuguagucc

SEQ ID NO: 697158 - RNA, 22 nt, Human
gcgaagcgggccagggcuuccc

SEQ ID NO: 697159 - RNA, 18 nt, Human
gcucugggaggcucacgc

SEQ ID NO: 697160 - RNA, 20 nt, Human
ggccaagagguugaccauga

SEQ ID NO: 697161 - RNA, 26 nt, Human
uaaaggcacgagcgaagcuggagacc

SEQ ID NO: 697162 - RNA, 18 nt, Human
uaccuggaaaccauggaa

SEQ ID NO: 697163 - RNA, 19 nt, Human
uagcgaccccucaggaaca

SEQ ID NO: 697164 - RNA, 23 nt, Human
ucacgcucccuccucaggcuggg

SEQ ID NO: 697165 - RNA, 22 nt, Human
ucagcuucgcgcgcuccccuua

SEQ ID NO: 697166 - RNA, 21 nt, Human
ucaggaacacaacucucuccu

SEQ ID NO: 697167 - RNA, 21 nt, Human
ucccugaguccauccagggcc

SEQ ID NO: 697168 - RNA, 19 nt, Human
uccuggggcucugggaggc

SEQ ID NO: 697169 - RNA, 18 nt, Human
ucugccaugaccaccucc

SEQ ID NO: 697170 - RNA, 22 nt, Human
ucugccaugaccaccuccucca

SEQ ID NO: 697171 - RNA, 23 nt, Human
ucugggaggcucacgcucccucc

SEQ ID NO: 697172 - RNA, 19 nt, Human
ugcacguacuggcaggcgg

SEQ ID NO: 697173 - RNA, 19 nt, Human
uggaaaaagaaaccuaagu

SEQ ID NO: 697174 - RNA, 22 nt, Human
uggaaaccauggaaaaagaaac

SEQ ID NO: 697175 - RNA, 27 nt, Human
uggcacugcacagcgcaacuuggcaac

SEQ ID NO: 697176 - RNA, 21 nt, Human
uggcaggcgguagcccuuccu

SEQ ID NO: 697177 - RNA, 20 nt, Human
uggcccacauggcacugcac

SEQ ID NO: 697178 - RNA, 23 nt, Human
uucccugaguccauccagggcca

SEQ ID NO: 697179 - RNA, 20 nt, Human
uuccuccacguagcgacccc

SEQ ID NO: 697180 - RNA, 24 nt, Human
uuccuccacguagcgaccccucag

SEQ ID NO: 697181 - RNA, 22 nt, Human
uuuuuuuuuuuuuuuuuaccaa

SEQ ID NO: 697182 - RNA, 19 nt, Human
aaacaagaggugccuucca

SEQ ID NO: 697183 - RNA, 25 nt, Human
aaugauuuaauaaauaacaauacca

SEQ ID NO: 697184 - RNA, 19 nt, Human
aggcggcucggaugcuggc

SEQ ID NO: 697185 - RNA, 18 nt, Human
auacaggacacaacucac

SEQ ID NO: 697186 - RNA, 24 nt, Human
augcuccccaaaacaagaggugcc

SEQ ID NO: 697187 - RNA, 23 nt, Human
caaacgucugcacgcaaaccacg

SEQ ID NO: 697188 - RNA, 19 nt, Human
cacaacucacaaccccuuu

SEQ ID NO: 697189 - RNA, 30 nt, Human
cacgcaaaccacggaccgaagcacguggcu

SEQ ID NO: 697190 - RNA, 23 nt, Human
cacguggcgcaaggaugcggagc

SEQ ID NO: 697191 - RNA, 20 nt, Human
caggacacaacucacaaccc

SEQ ID NO: 697192 - RNA, 25 nt, Human
caggucaaacgucugcacgcaaacc

SEQ ID NO: 697193 - RNA, 18 nt, Human
ccccggaguuacgguggg

SEQ ID NO: 697194 - RNA, 23 nt, Human
cucacaaccccuuacccucaccu

SEQ ID NO: 697195 - RNA, 18 nt, Human
cuggcuucucgccccucc

SEQ ID NO: 697196 - RNA, 24 nt, Human
gaggugccuuccacuucaguauuc

SEQ ID NO: 697197 - RNA, 21 nt, Human
ggagagcggggcgggcagauc

SEQ ID NO: 697198 - RNA, 23 nt, Human
ggcgggcagauccgcgaccccgg

SEQ ID NO: 697199 - RNA, 24 nt, Human
gggcagauccgcgaccccggaguu

SEQ ID NO: 697200 - RNA, 18 nt, Human
ggggaggggcaggagcgc

SEQ ID NO: 697201 - RNA, 23 nt, Human
uacccucaccuuuggcacgaauu

SEQ ID NO: 697202 - RNA, 23 nt, Human
ucacaaccccuuacccucaccuu

SEQ ID NO: 697203 - RNA, 20 nt, Human
uccagauccucagcacauuu

SEQ ID NO: 697204 - RNA, 19 nt, Human
ugcccgaacagcuucggga

SEQ ID NO: 697205 - RNA, 23 nt, Human
uuaauaaauaacaauaccauccu

SEQ ID NO: 697206 - RNA, 20 nt, Human
uuugcaccucucuguggaag

SEQ ID NO: 697207 - RNA, 18 nt, Human
uuuuuuuuuuuuuuuuug

SEQ ID NO: 697208 - RNA, 19 nt, Human
aagcagcagagggugcugg

SEQ ID NO: 697209 - RNA, 20 nt, Human
aagcagcagagggugcuggc

SEQ ID NO: 697210 - RNA, 24 nt, Human
acucagugcugaguggagggggau

SEQ ID NO: 697211 - RNA, 24 nt, Human
agaugugaccagaggagaaaugcu

SEQ ID NO: 697212 - RNA, 20 nt, Human
agcagccagaggcugagggc

SEQ ID NO: 697213 - RNA, 23 nt, Human
aggccuucacagggaaguggagg

SEQ ID NO: 697214 - RNA, 26 nt, Human
aggcggagaugcugaagcagcagagg

SEQ ID NO: 697215 - RNA, 19 nt, Human
aggggaaggaggaaaggag

SEQ ID NO: 697216 - RNA, 20 nt, Human
caaugaccucccucuguccu

SEQ ID NO: 697217 - RNA, 19 nt, Human
cacaccuucuucucagcag

SEQ ID NO: 697218 - RNA, 24 nt, Human
cacaccuucuucucagcaguccca

SEQ ID NO: 697219 - RNA, 21 nt, Human
cacagccugccucaggccuuc

SEQ ID NO: 697220 - RNA, 18 nt, Human
cagaagccauaaggcagc

SEQ ID NO: 697221 - RNA, 20 nt, Human
cagcagagggugcuggcucc

SEQ ID NO: 697222 - RNA, 18 nt, Human
cagccagaggcugagggc

SEQ ID NO: 697223 - RNA, 20 nt, Human
ccacacucccuuucugcaca

SEQ ID NO: 697224 - RNA, 28 nt, Human
ccaugagccccuccucccuuuguggccu

SEQ ID NO: 697225 - RNA, 19 nt, Human
cccacagucagggccugag

SEQ ID NO: 697226 - RNA, 20 nt, Human
cccgguaggacacacacgca

SEQ ID NO: 697227 - RNA, 21 nt, Human
cucccucuguccuguccugcc

SEQ ID NO: 697228 - RNA, 25 nt, Human
cuguccugcccgguaggacacacac

SEQ ID NO: 697229 - RNA, 19 nt, Human
cuugaccuccuuucaggua

SEQ ID NO: 697230 - RNA, 20 nt, Human
gacguagaugugaccagagg

SEQ ID NO: 697231 - RNA, 18 nt, Human
gagacacagaagccauaa

SEQ ID NO: 697232 - RNA, 23 nt, Human
gagagcagccagaggcugagggc

SEQ ID NO: 697233 - RNA, 20 nt, Human
gagcagccagaggcugaggg

SEQ ID NO: 697234 - RNA, 21 nt, Human
gaggggaaggaggaaaggagg

SEQ ID NO: 697235 - RNA, 20 nt, Human
gagggugcuggcuccacuga

SEQ ID NO: 697236 - RNA, 18 nt, Human
gcccccacccagcucuaa

SEQ ID NO: 697237 - RNA, 22 nt, Human
gcugaagcagcagagggugcug

SEQ ID NO: 697238 - RNA, 21 nt, Human
ggagccccugcacacagccuu

SEQ ID NO: 697239 - RNA, 22 nt, Human
ggaggggaaggaggaaaggagg

SEQ ID NO: 697240 - RNA, 23 nt, Human
ggaggggaaggaggaaaggaggg

SEQ ID NO: 697241 - RNA, 22 nt, Human
ggccugagccuggccacagccu

SEQ ID NO: 697242 - RNA, 22 nt, Human
ggcugagggcuguuggagacac

SEQ ID NO: 697243 - RNA, 23 nt, Human
gguaacagaggcuuuuuaaagga

SEQ ID NO: 697244 - RNA, 19 nt, Human
gugaaggcagacaugcccc

SEQ ID NO: 697245 - RNA, 23 nt, Human
guggaggggaaggaggaaaggag

SEQ ID NO: 697246 - RNA, 18 nt, Human
uaacucagugcugagugg

SEQ ID NO: 697247 - RNA, 18 nt, Human
uauugggaaggagagcag

SEQ ID NO: 697248 - RNA, 23 nt, Human
ucagcagucccaugagccccucc

SEQ ID NO: 697249 - RNA, 22 nt, Human
ucccugguguguaccccacagu

SEQ ID NO: 697250 - RNA, 24 nt, Human
ucucagcagucccaugagccccuc

SEQ ID NO: 697251 - RNA, 20 nt, Human
ugaagcagcagagggugcug

SEQ ID NO: 697252 - RNA, 24 nt, Human
uguccuguccugcccgguaggaca

SEQ ID NO: 697253 - RNA, 24 nt, Human
uugcagcugagacacaaaauggga

SEQ ID NO: 697254 - RNA, 21 nt, Human
uuuguggccuucuugcagcug

SEQ ID NO: 697255 - RNA, 24 nt, Human
aaagcgccuccgacuagcaccucc

SEQ ID NO: 697256 - RNA, 20 nt, Human
aagcagcggcgggaguacuc

SEQ ID NO: 697257 - RNA, 18 nt, Human
aagcggaagggggugccg

SEQ ID NO: 697258 - RNA, 22 nt, Human
aaggggccgcggccgguccggg

SEQ ID NO: 697259 - RNA, 23 nt, Human
acccgcgaacaggcggggcggca

SEQ ID NO: 697260 - RNA, 21 nt, Human
accuucuugagcgucucgucg

SEQ ID NO: 697261 - RNA, 23 nt, Human
acucgcugccucucccgggccuu

SEQ ID NO: 697262 - RNA, 25 nt, Human
agcgcccacccacccgcgaacaggc

SEQ ID NO: 697263 - RNA, 21 nt, Human
aggaggggcaggggcgcggcg

SEQ ID NO: 697264 - RNA, 20 nt, Human
agucgggccaggcuagcgcc

SEQ ID NO: 697265 - RNA, 26 nt, Human
caaagcgccuccgacuagcaccuccc

SEQ ID NO: 697266 - RNA, 19 nt, Human
caccgggguccacggggga

SEQ ID NO: 697267 - RNA, 24 nt, Human
caccucggccagcuucucgggggc

SEQ ID NO: 697268 - RNA, 22 nt, Human
cacgcgguggugcucgaaggcc

SEQ ID NO: 697269 - RNA, 21 nt, Human
cagaggaccccgucggcgucc

SEQ ID NO: 697270 - RNA, 19 nt, Human
cagcagccgagggccucag

SEQ ID NO: 697271 - RNA, 19 nt, Human
cagccgagggccucagggg

SEQ ID NO: 697272 - RNA, 20 nt, Human
ccacccgcgaacaggcgggg

SEQ ID NO: 697273 - RNA, 19 nt, Human
ccaggaucuucuuguaccg

SEQ ID NO: 697274 - RNA, 19 nt, Human
cccaaagcgccuccgacua

SEQ ID NO: 697275 - RNA, 22 nt, Human
cccaaagcgccuccgacuagca

SEQ ID NO: 697276 - RNA, 23 nt, Human
cccagucgggccaggcuagcgcc

SEQ ID NO: 697277 - RNA, 20 nt, Human
ccccagcagccgagggccuc

SEQ ID NO: 697278 - RNA, 21 nt, Human
ccccggguccaggugaggccc

SEQ ID NO: 697279 - RNA, 24 nt, Human
cccgccugccugguuuuccaggag

SEQ ID NO: 697280 - RNA, 24 nt, Human
cccgcgaacaggcggggcggcagg

SEQ ID NO: 697281 - RNA, 21 nt, Human
ccuccgcggggccagggcgga

SEQ ID NO: 697282 - RNA, 24 nt, Human
ccuccgcggggccagggcggagac

SEQ ID NO: 697283 - RNA, 22 nt, Human
ccuucacucgcugccucucccg

SEQ ID NO: 697284 - RNA, 19 nt, Human
cgagggccucaggggcacc

SEQ ID NO: 697285 - RNA, 25 nt, Human
cgcggaggcguggugcgaucaccgc

SEQ ID NO: 697286 - RNA, 20 nt, Human
cgcggcggggagaggggcag

SEQ ID NO: 697287 - RNA, 18 nt, Human
cggaagggggugccggcg

SEQ ID NO: 697288 - RNA, 19 nt, Human
cggaccccagcagccgagg

SEQ ID NO: 697289 - RNA, 21 nt, Human
cggcucggggaccgacggcgg

SEQ ID NO: 697290 - RNA, 23 nt, Human
cgggaaucaggugggcagcuccu

SEQ ID NO: 697291 - RNA, 21 nt, Human
cgggcagggacgcggggacuc

SEQ ID NO: 697292 - RNA, 18 nt, Human
cggggcggcaggggagcg

SEQ ID NO: 697293 - RNA, 19 nt, Human
cgggguccacgggggagga

SEQ ID NO: 697294 - RNA, 23 nt, Human
cguccagggccagaaagcagcgg

SEQ ID NO: 697295 - RNA, 20 nt, Human
cgucgcgcuugggggcccgg

SEQ ID NO: 697296 - RNA, 22 nt, Human
gaacaggcggggcggcagggga

SEQ ID NO: 697297 - RNA, 19 nt, Human
gaacucgcccaccucggcc

SEQ ID NO: 697298 - RNA, 20 nt, Human
gagcgugucguggaacugag

SEQ ID NO: 697299 - RNA, 19 nt, Human
gccucucccgggccuuggg

SEQ ID NO: 697300 - RNA, 22 nt, Human
gccuugggcuucccaaagcgcc

SEQ ID NO: 697301 - RNA, 23 nt, Human
gcgacaugcucuugagcuucugg

SEQ ID NO: 697302 - RNA, 18 nt, Human
ggagcgaggaggaggggc

SEQ ID NO: 697303 - RNA, 24 nt, Human
ggcaggggcgcggcggggagaggg

SEQ ID NO: 697304 - RNA, 19 nt, Human
ggcaggucauccaccgggg

SEQ ID NO: 697305 - RNA, 19 nt, Human
gggaagcgcccacccaccc

SEQ ID NO: 697306 - RNA, 19 nt, Human
gggcagcagcagcuugcuc

SEQ ID NO: 697307 - RNA, 19 nt, Human
gggccgcggccgguccggg

SEQ ID NO: 697308 - RNA, 18 nt, Human
uaagggagcccccaaccc

SEQ ID NO: 697309 - RNA, 20 nt, Human
uccacgggggaggaaggccc

SEQ ID NO: 697310 - RNA, 21 nt, Human
uccccggguccaggugaggcc

SEQ ID NO: 697311 - RNA, 18 nt, Human
ucgcugccucucccgggc

SEQ ID NO: 697312 - RNA, 24 nt, Human
ucggcguccuucacucgcugccuc

SEQ ID NO: 697313 - RNA, 20 nt, Human
ugagcgacggaacgggcagg

SEQ ID NO: 697314 - RNA, 24 nt, Human
ugggggcccggcuaagggagcccc

SEQ ID NO: 697315 - RNA, 23 nt, Human
aagaagucuaucuuuccacauaa

SEQ ID NO: 697316 - RNA, 21 nt, Human
acacaauguaguaggaaaacc

SEQ ID NO: 697317 - RNA, 19 nt, Human
acggggcugcgagcaacga

SEQ ID NO: 697318 - RNA, 23 nt, Human
acuacauauaugaagaaguucua

SEQ ID NO: 697319 - RNA, 19 nt, Human
agcuacagagacagaggga

SEQ ID NO: 697320 - RNA, 23 nt, Human
agguucuugggcaucaacaguuu

SEQ ID NO: 697321 - RNA, 18 nt, Human
augaagaaguucuaauuc

SEQ ID NO: 697322 - RNA, 20 nt, Human
cacuuguagccgaacggggc

SEQ ID NO: 697323 - RNA, 23 nt, Human
ccagcuacagagacagagggagg

SEQ ID NO: 697324 - RNA, 19 nt, Human
ccuggaaacuaccuucucc

SEQ ID NO: 697325 - RNA, 21 nt, Human
cggggcugcgagcaacgagca

SEQ ID NO: 697326 - RNA, 23 nt, Human
cucacuuguagccgaacggggcu

SEQ ID NO: 697327 - RNA, 18 nt, Human
cuggccgcgguggccccu

SEQ ID NO: 697328 - RNA, 21 nt, Human
gagacugcucgucgccgcgga

SEQ ID NO: 697329 - RNA, 19 nt, Human
gaggauggccccugcccga

SEQ ID NO: 697330 - RNA, 21 nt, Human
gcgaaaggcagccucacaccc

SEQ ID NO: 697331 - RNA, 20 nt, Human
gcggacccagagaccacugg

SEQ ID NO: 697332 - RNA, 23 nt, Human
ggggaccgaggauggccccugcc

SEQ ID NO: 697333 - RNA, 21 nt, Human
uacagagacagagggaggagc

SEQ ID NO: 697334 - RNA, 26 nt, Human
uaggaaaaccacuacauauaugaaga

SEQ ID NO: 697335 - RNA, 20 nt, Human
uaguaggaaaaccacuacau

SEQ ID NO: 697336 - RNA, 22 nt, Human
ucacacccggcuggccgcggug

SEQ ID NO: 697337 - RNA, 18 nt, Human
ucuggacaaauuuuguuu

SEQ ID NO: 697338 - RNA, 23 nt, Human
ucuugggcaucaacaguuucaug

SEQ ID NO: 697339 - RNA, 18 nt, Human
uggaaaaacuacaacauu

SEQ ID NO: 697340 - RNA, 25 nt, Human
uggaaaaacuacaacauucuuugca

SEQ ID NO: 697341 - RNA, 22 nt, Human
uggccccuggccaugacgcccu

SEQ ID NO: 697342 - RNA, 22 nt, Human
uuuuuuuuuagguguaaaugug

SEQ ID NO: 697343 - RNA, 25 nt, Human
caacgaauaaaacccaucaccuuuc

SEQ ID NO: 697344 - RNA, 20 nt, Human
caccacagcaaguaggcagg

SEQ ID NO: 697345 - RNA, 22 nt, Human
ccaacgaauaaaacccaucacc

SEQ ID NO: 697346 - RNA, 23 nt, Human
cccaacgaauaaaacccaucacc

SEQ ID NO: 697347 - RNA, 18 nt, Human
cugccaaaccuuuucuuu

SEQ ID NO: 697348 - RNA, 21 nt, Human
gcaaguaggcaggaaugccag

SEQ ID NO: 697349 - RNA, 18 nt, Human
gccuuuuacuucuuucuc

SEQ ID NO: 697350 - RNA, 19 nt, Human
uaacaugaagucaaguuga

SEQ ID NO: 697351 - RNA, 26 nt, Human
uagauggcucuuauuauuuugaggua

SEQ ID NO: 697352 - RNA, 19 nt, Human
ucuuauuauuuugagguau

SEQ ID NO: 697353 - RNA, 25 nt, Human
ugagguauguuccuucgacgccugg

SEQ ID NO: 697354 - RNA, 23 nt, Human
ugcuguggcgagacuuccaguac

SEQ ID NO: 697355 - RNA, 23 nt, Human
uggcugugguuuugucauagaug

SEQ ID NO: 697356 - RNA, 24 nt, Human
uuaaagcccaacgaauaaaacccc

SEQ ID NO: 697357 - RNA, 25 nt, Human
uuaaagcccaacgaauaaaaccccc

SEQ ID NO: 697358 - RNA, 22 nt, Human
aaggaagagagaucacuaaagg

SEQ ID NO: 697359 - RNA, 19 nt, Human
aaggcuuuaccacauuguu

SEQ ID NO: 697360 - RNA, 22 nt, Human
agccagugugggucccagcgcg

SEQ ID NO: 697361 - RNA, 24 nt, Human
agcuuccagguguccggguguccu

SEQ ID NO: 697362 - RNA, 18 nt, Human
aggguuucacuccagugu

SEQ ID NO: 697363 - RNA, 18 nt, Human
cacucaccacugucacau

SEQ ID NO: 697364 - RNA, 19 nt, Human
cagcuuccagguguccggg

SEQ ID NO: 697365 - RNA, 19 nt, Human
caugucuuagauagguacu

SEQ ID NO: 697366 - RNA, 26 nt, Human
ccaagacgacuucuccacacucacca

SEQ ID NO: 697367 - RNA, 23 nt, Human
cguuuucccacauugcuuacaug

SEQ ID NO: 697368 - RNA, 21 nt, Human
cuaaaggcuuucccacacuga

SEQ ID NO: 697369 - RNA, 23 nt, Human
cuaaaggcuuucccacacugaca

SEQ ID NO: 697370 - RNA, 24 nt, Human
cuaggacaaucaaagccuuuccca

SEQ ID NO: 697371 - RNA, 21 nt, Human
cucaccacugucacauggauu

SEQ ID NO: 697372 - RNA, 25 nt, Human
cuccacauugacugucaucuuuaau

SEQ ID NO: 697373 - RNA, 21 nt, Human
cuccagugugaguaguuucau

SEQ ID NO: 697374 - RNA, 23 nt, Human
cuccagugugaguaguuucauga

SEQ ID NO: 697375 - RNA, 21 nt, Human
cuccagugugaguugucucau

SEQ ID NO: 697376 - RNA, 23 nt, Human
cuccagugugaguugucucauga

SEQ ID NO: 697377 - RNA, 25 nt, Human
cuuguucacaauacuaucuggaauc

SEQ ID NO: 697378 - RNA, 22 nt, Human
gacaaucaaagccuuucccaca

SEQ ID NO: 697379 - RNA, 20 nt, Human
gagccaagagaaugcuuuuc

SEQ ID NO: 697380 - RNA, 24 nt, Human
gaucacuaaaggcuuucccacacu

SEQ ID NO: 697381 - RNA, 22 nt, Human
gcgacagacgcugauacagacc

SEQ ID NO: 697382 - RNA, 23 nt, Human
ggguguccuccuuaaaagccagu

SEQ ID NO: 697383 - RNA, 20 nt, Human
gucaacucugauguugcaau

SEQ ID NO: 697384 - RNA, 23 nt, Human
gugugaguugcuucaugucuucg

SEQ ID NO: 697385 - RNA, 22 nt, Human
uaagagacgaaugacccaagac

SEQ ID NO: 697386 - RNA, 20 nt, Human
uaaguuacugaaaugacuga

SEQ ID NO: 697387 - RNA, 21 nt, Human
uacuguguggguccuuuuaug

SEQ ID NO: 697388 - RNA, 18 nt, Human
uauaggguuucucuccgg

SEQ ID NO: 697389 - RNA, 21 nt, Human
ucacauggauuuacucgagga

SEQ ID NO: 697390 - RNA, 22 nt, Human
ucacauggauuuacucgaggag

SEQ ID NO: 697391 - RNA, 23 nt, Human
ucacauguaugacuucauuuccc

SEQ ID NO: 697392 - RNA, 21 nt, Human
uccacacucaccacugucaca

SEQ ID NO: 697393 - RNA, 23 nt, Human
uccugaugcucacaugauuugug

SEQ ID NO: 697394 - RNA, 21 nt, Human
ucuccacacucaccacuguca

SEQ ID NO: 697395 - RNA, 20 nt, Human
ucugggguccaucuccugug

SEQ ID NO: 697396 - RNA, 18 nt, Human
ucuugcauuucugggguc

SEQ ID NO: 697397 - RNA, 19 nt, Human
ucuugcauuucuggggucc

SEQ ID NO: 697398 - RNA, 19 nt, Human
ucuuuaauuucacauguau

SEQ ID NO: 697399 - RNA, 19 nt, Human
ugaauccuuucauggacuu

SEQ ID NO: 697400 - RNA, 21 nt, Human
ugacuucauuucccagcuucc

SEQ ID NO: 697401 - RNA, 19 nt, Human
ugauacagaccuuccaggg

SEQ ID NO: 697402 - RNA, 18 nt, Human
uggaaucuggccaaaagu

SEQ ID NO: 697403 - RNA, 19 nt, Human
uggaaucuggccaaaaguu

SEQ ID NO: 697404 - RNA, 18 nt, Human
uguccggguguccuccuu

SEQ ID NO: 697405 - RNA, 24 nt, Human
uguccggguguccuccuuaaaagc

SEQ ID NO: 697406 - RNA, 18 nt, Human
ugugaguucucucauguc

SEQ ID NO: 697407 - RNA, 22 nt, Human
ugugucuucgaaagcuugugug

SEQ ID NO: 697408 - RNA, 21 nt, Human
uucccacauaucuuacauuua

SEQ ID NO: 697409 - RNA, 25 nt, Human
uuguucacaauacuaucuggaaucu

SEQ ID NO: 697410 - RNA, 20 nt, Human
aaccaagauucaaggcaucu

SEQ ID NO: 697411 - RNA, 23 nt, Human
aauacaaaauaacuuggaauuca

SEQ ID NO: 697412 - RNA, 22 nt, Human
agcuaaagccacuaauacccau

SEQ ID NO: 697413 - RNA, 18 nt, Human
aggaccaaagcaucacug

SEQ ID NO: 697414 - RNA, 19 nt, Human
auggaacagcagagaagga

SEQ ID NO: 697415 - RNA, 20 nt, Human
ccuguagcuucaccugggac

SEQ ID NO: 697416 - RNA, 18 nt, Human
cuaaagccacuaauaccc

SEQ ID NO: 697417 - RNA, 20 nt, Human
gaaguuccuuaacauuuucu

SEQ ID NO: 697418 - RNA, 23 nt, Human
gauuauugugauguuuauccccu

SEQ ID NO: 697419 - RNA, 22 nt, Human
ggaagaaugguccgucuuagga

SEQ ID NO: 697420 - RNA, 19 nt, Human
guauucuuccauggaacag

SEQ ID NO: 697421 - RNA, 23 nt, Human
gucaguccuaaagaaaaagcuaa

SEQ ID NO: 697422 - RNA, 23 nt, Human
uaacaggucaguccuaaagaaaa

SEQ ID NO: 697423 - RNA, 25 nt, Human
ucaagggugguaacggaagaauuuu

SEQ ID NO: 697424 - RNA, 18 nt, Human
uccuaaagaaaaagcuaa

SEQ ID NO: 697425 - RNA, 19 nt, Human
uccuguagcuucaccuggg

SEQ ID NO: 697426 - RNA, 22 nt, Human
ugaaaggagauagcuggccuuu

SEQ ID NO: 697427 - RNA, 25 nt, Human
uggaacagcagagaaguuccuuaac

SEQ ID NO: 697428 - RNA, 24 nt, Human
ugugggaagaaugguccgucuuag

SEQ ID NO: 697429 - RNA, 18 nt, Human
ugugugggaagaaugguc

SEQ ID NO: 697430 - RNA, 24 nt, Human
ugugugggaagaaugguccgucuu

SEQ ID NO: 697431 - RNA, 18 nt, Human
aacacggugaaacccugu

SEQ ID NO: 697432 - RNA, 21 nt, Human
aacacggugaaacccuguggc

SEQ ID NO: 697433 - RNA, 23 nt, Human
aacugucaaaggcucugccuucu

SEQ ID NO: 697434 - RNA, 21 nt, Human
aagcagcggccuggauuguca

SEQ ID NO: 697435 - RNA, 24 nt, Human
aagcagggccgugccccccugugg

SEQ ID NO: 697436 - RNA, 21 nt, Human
aagcaggggagguggccaggu

SEQ ID NO: 697437 - RNA, 20 nt, Human
aagccggaucugaaugggac

SEQ ID NO: 697438 - RNA, 21 nt, Human
aaggagcugggaagcagcggc

SEQ ID NO: 697439 - RNA, 20 nt, Human
aagguaaaaaguaugaaacc

SEQ ID NO: 697440 - RNA, 20 nt, Human
acuguguuuccaaacaaggu

SEQ ID NO: 697441 - RNA, 19 nt, Human
acuuuccucagaauccugg

SEQ ID NO: 697442 - RNA, 18 nt, Human
agagaagcccaccccagg

SEQ ID NO: 697443 - RNA, 25 nt, Human
agcagccaggaggcagcugaggggg

SEQ ID NO: 697444 - RNA, 21 nt, Human
agcccagggagaagcagggga

SEQ ID NO: 697445 - RNA, 21 nt, Human
agccccagggaagaagucagu

SEQ ID NO: 697446 - RNA, 20 nt, Human
agccccugaccccgcagccc

SEQ ID NO: 697447 - RNA, 21 nt, Human
agccgggcaugguggcucacg

SEQ ID NO: 697448 - RNA, 23 nt, Human
agcgauuugggaggccgaggugg

SEQ ID NO: 697449 - RNA, 24 nt, Human
agcgauuugggaggccgagguggg

SEQ ID NO: 697450 - RNA, 22 nt, Human
agcggccuggauugucagccuc

SEQ ID NO: 697451 - RNA, 21 nt, Human
agcggcgaagcagccuuuccu

SEQ ID NO: 697452 - RNA, 21 nt, Human
aggccgaggugggcggaucac

SEQ ID NO: 697453 - RNA, 19 nt, Human
aggcuuuagggaaggaucc

SEQ ID NO: 697454 - RNA, 19 nt, Human
aggggccaccccagugacc

SEQ ID NO: 697455 - RNA, 24 nt, Human
aggugggcggaucacgaggucagg

SEQ ID NO: 697456 - RNA, 24 nt, Human
aguugcugcugggucaucaccguc

SEQ ID NO: 697457 - RNA, 21 nt, Human
auccuggccaacacggugaaa

SEQ ID NO: 697458 - RNA, 20 nt, Human
caaguuggcagcagcagcca

SEQ ID NO: 697459 - RNA, 24 nt, Human
caauccgugguagcuucccacccu

SEQ ID NO: 697460 - RNA, 23 nt, Human
cacagaacccagcccugccccag

SEQ ID NO: 697461 - RNA, 20 nt, Human
cacagcccagggagaagcag

SEQ ID NO: 697462 - RNA, 25 nt, Human
cacccccagcucgggagggagacuc

SEQ ID NO: 697463 - RNA, 21 nt, Human
caccuggcgccggcaaucccc

SEQ ID NO: 697464 - RNA, 22 nt, Human
caccuggggccucacagugcuc

SEQ ID NO: 697465 - RNA, 24 nt, Human
cagaaaggaagccccucaccuccc

SEQ ID NO: 697466 - RNA, 21 nt, Human
cagaauccuggcuuuggagac

SEQ ID NO: 697467 - RNA, 21 nt, Human
cagcaagcagggccgugcccc

SEQ ID NO: 697468 - RNA, 23 nt, Human
cagcaagcagggccgugcccccc

SEQ ID NO: 697469 - RNA, 22 nt, Human
cagcagcagccaggaggcagcu

SEQ ID NO: 697470 - RNA, 21 nt, Human
cagcagccaggaggcagcuga

SEQ ID NO: 697471 - RNA, 18 nt, Human
cagcccagggagaagcag

SEQ ID NO: 697472 - RNA, 23 nt, Human
cagcccagggagaagcaggggag

SEQ ID NO: 697473 - RNA, 20 nt, Human
cagccccagggaagaaguca

SEQ ID NO: 697474 - RNA, 23 nt, Human
cagccucuugaaagucagggaga

SEQ ID NO: 697475 - RNA, 21 nt, Human
cagcucggaugcuggagcccc

SEQ ID NO: 697476 - RNA, 21 nt, Human
caggggagguggccaggugca

SEQ ID NO: 697477 - RNA, 24 nt, Human
cagugcucagugcaacuauccugg

SEQ ID NO: 697478 - RNA, 19 nt, Human
caucuccuuagaaggacac

SEQ ID NO: 697479 - RNA, 23 nt, Human
caucugggcagucccgggcugaa

SEQ ID NO: 697480 - RNA, 20 nt, Human
ccaagaccuucaccaaggac

SEQ ID NO: 697481 - RNA, 19 nt, Human
ccaagccggaucugaaugg

SEQ ID NO: 697482 - RNA, 23 nt, Human
ccaauccgugguagcuucccacc

SEQ ID NO: 697483 - RNA, 19 nt, Human
ccacgcacagcccagggag

SEQ ID NO: 697484 - RNA, 25 nt, Human
ccacugccuccggcaucagcuccug

SEQ ID NO: 697485 - RNA, 21 nt, Human
ccagcaccuggcgccggcaau

SEQ ID NO: 697486 - RNA, 23 nt, Human
cccagcccugccccagcaaugaa

SEQ ID NO: 697487 - RNA, 21 nt, Human
ccccacaggacuuuccucaga

SEQ ID NO: 697488 - RNA, 21 nt, Human
ccccacgcucccgcuguccga

SEQ ID NO: 697489 - RNA, 23 nt, Human
ccccugaccccgcagcccaaucc

SEQ ID NO: 697490 - RNA, 18 nt, Human
cccgcaguauccagagcu

SEQ ID NO: 697491 - RNA, 21 nt, Human
cccgggcugaaagugacaggc

SEQ ID NO: 697492 - RNA, 21 nt, Human
ccgugguagcuucccacccuu

SEQ ID NO: 697493 - RNA, 21 nt, Human
ccguguguugugguugcaucc

SEQ ID NO: 697494 - RNA, 24 nt, Human
ccuaaaaucagaauccuaugggac

SEQ ID NO: 697495 - RNA, 22 nt, Human
ccuaaccagggcacccacugcc

SEQ ID NO: 697496 - RNA, 19 nt, Human
ccucacucugaucuccgac

SEQ ID NO: 697497 - RNA, 23 nt, Human
ccucaugggaagggcagggcugu

SEQ ID NO: 697498 - RNA, 19 nt, Human
ccucuugaaagucagggag

SEQ ID NO: 697499 - RNA, 25 nt, Human
ccugcagcagggcaggaccgggguc

SEQ ID NO: 697500 - RNA, 23 nt, Human
ccugcugggcaggcgcccggccu

SEQ ID NO: 697501 - RNA, 22 nt, Human
ccuggccaacacggugaaaccc

SEQ ID NO: 697502 - RNA, 24 nt, Human
ccuggccaacacggugaaacccug

SEQ ID NO: 697503 - RNA, 24 nt, Human
ccuggcgccggcaauccccggcuu

SEQ ID NO: 697504 - RNA, 24 nt, Human
cgagaccauccuggccaacacggu

SEQ ID NO: 697505 - RNA, 24 nt, Human
cgaggugggcggaucacgagguca

SEQ ID NO: 697506 - RNA, 27 nt, Human
cgcccccagcaccuggcgccggcaauc

SEQ ID NO: 697507 - RNA, 26 nt, Human
cgggcgcuccuccgcggaaaagcccc

SEQ ID NO: 697508 - RNA, 19 nt, Human
cguggagccgggcauggug

SEQ ID NO: 697509 - RNA, 21 nt, Human
cucacagugcucagugcaacu

SEQ ID NO: 697510 - RNA, 19 nt, Human
cuccaccccacgcucccgc

SEQ ID NO: 697511 - RNA, 19 nt, Human
cuccuccgcggaaaagccc

SEQ ID NO: 697512 - RNA, 20 nt, Human
cuccuccgcggaaaagcccc

SEQ ID NO: 697513 - RNA, 23 nt, Human
cuccuucacacggcugccuucuc

SEQ ID NO: 697514 - RNA, 21 nt, Human
cugaaaccggggggucagcaa

SEQ ID NO: 697515 - RNA, 21 nt, Human
cugcagcagggcaggaccagg

SEQ ID NO: 697516 - RNA, 18 nt, Human
cugcuccccugcuuagcc

SEQ ID NO: 697517 - RNA, 22 nt, Human
cugcuuccucuuugaucagcca

SEQ ID NO: 697518 - RNA, 21 nt, Human
cuggaaggccuccugggggcc

SEQ ID NO: 697519 - RNA, 25 nt, Human
cuggagccccugaccccgcagccca

SEQ ID NO: 697520 - RNA, 18 nt, Human
cuggccaacacggugaaa

SEQ ID NO: 697521 - RNA, 24 nt, Human
cuggccaacacggugaaacccugu

SEQ ID NO: 697522 - RNA, 19 nt, Human
cuggucuugcuuugucucc

SEQ ID NO: 697523 - RNA, 22 nt, Human
cuuccagccuuguuuccucauc

SEQ ID NO: 697524 - RNA, 20 nt, Human
gaacugucaaaggcucugcc

SEQ ID NO: 697525 - RNA, 21 nt, Human
gacaguggucagaaucucccc

SEQ ID NO: 697526 - RNA, 18 nt, Human
gagaagcaggggaggugg

SEQ ID NO: 697527 - RNA, 21 nt, Human
gagccacuucagauaucgcuu

SEQ ID NO: 697528 - RNA, 23 nt, Human
gagccccugaccccgcagcccaa

SEQ ID NO: 697529 - RNA, 23 nt, Human
gcacagcccagggagaagcaggg

SEQ ID NO: 697530 - RNA, 24 nt, Human
gcacagcccagggagaagcagggg

SEQ ID NO: 697531 - RNA, 21 nt, Human
gcagcagcagccaggaggcag

SEQ ID NO: 697532 - RNA, 18 nt, Human
gcagcugagggggcuggg

SEQ ID NO: 697533 - RNA, 18 nt, Human
gccaacacggugaaaccc

SEQ ID NO: 697534 - RNA, 19 nt, Human
gcccaccccagggaguagc

SEQ ID NO: 697535 - RNA, 21 nt, Human
gcuucaaguuaggacuucagc

SEQ ID NO: 697536 - RNA, 20 nt, Human
gcuuguaggggccucgggaa

SEQ ID NO: 697537 - RNA, 23 nt, Human
ggagaagcaggggagguggccag

SEQ ID NO: 697538 - RNA, 21 nt, Human
ggagaugggucugcgugcauc

SEQ ID NO: 697539 - RNA, 23 nt, Human
ggaguagccaugaacggccuagg

SEQ ID NO: 697540 - RNA, 21 nt, Human
ggcaggcgcccggccuggugc

SEQ ID NO: 697541 - RNA, 21 nt, Human
ggcggaucacgaggucaggag

SEQ ID NO: 697542 - RNA, 18 nt, Human
ggcuuguaggggccucgg

SEQ ID NO: 697543 - RNA, 20 nt, Human
gggaggccgaggugggcgga

SEQ ID NO: 697544 - RNA, 18 nt, Human
gggauguaaggagcuggg

SEQ ID NO: 697545 - RNA, 21 nt, Human
gggcaugguggcucacgccgg

SEQ ID NO: 697546 - RNA, 19 nt, Human
ggugacuaauuaaucugca

SEQ ID NO: 697547 - RNA, 19 nt, Human
ggugcucugcuccccugcu

SEQ ID NO: 697548 - RNA, 22 nt, Human
ggugcuucaaguuaggacuuca

SEQ ID NO: 697549 - RNA, 19 nt, Human
guagucuuaucauuucucu

SEQ ID NO: 697550 - RNA, 18 nt, Human
gugaggacauggacaucc

SEQ ID NO: 697551 - RNA, 24 nt, Human
uagcgauuugggaggccgaggugg

SEQ ID NO: 697552 - RNA, 18 nt, Human
uaggauggaccucucugc

SEQ ID NO: 697553 - RNA, 19 nt, Human
uauccagagcucuccgaac

SEQ ID NO: 697554 - RNA, 22 nt, Human
uaugaaaccacuuuugagaacu

SEQ ID NO: 697555 - RNA, 20 nt, Human
uauuucagauucuacgauua

SEQ ID NO: 697556 - RNA, 18 nt, Human
ucacgaggucaggagauc

SEQ ID NO: 697557 - RNA, 24 nt, Human
ucacgaggucaggagaucgagacc

SEQ ID NO: 697558 - RNA, 21 nt, Human
ucagaacucagacccuguacu

SEQ ID NO: 697559 - RNA, 23 nt, Human
ucagaacucagacccuguacugu

SEQ ID NO: 697560 - RNA, 26 nt, Human
ucagcuccugcugggcaggcgcccgg

SEQ ID NO: 697561 - RNA, 21 nt, Human
ucaguguggucuuagaggugg

SEQ ID NO: 697562 - RNA, 20 nt, Human
uccaaaauaacuguuugaau

SEQ ID NO: 697563 - RNA, 21 nt, Human
uccagaaggaacgcagauguc

SEQ ID NO: 697564 - RNA, 22 nt, Human
uccauccuacuccaccccacgc

SEQ ID NO: 697565 - RNA, 19 nt, Human
ucccuuucaguugcugcca

SEQ ID NO: 697566 - RNA, 18 nt, Human
ucccuuucaguugcugcu

SEQ ID NO: 697567 - RNA, 19 nt, Human
uccgaacacagcggcgaag

SEQ ID NO: 697568 - RNA, 23 nt, Human
uccuaggcccacacccccagcuc

SEQ ID NO: 697569 - RNA, 27 nt, Human
uccucagcccuaaccagggcacccacu

SEQ ID NO: 697570 - RNA, 19 nt, Human
uccugcugggcaggcgccc

SEQ ID NO: 697571 - RNA, 19 nt, Human
uccuuggguuccuuggcuu

SEQ ID NO: 697572 - RNA, 20 nt, Human
uccuuggguuccuuggcuug

SEQ ID NO: 697573 - RNA, 18 nt, Human
ucgccagcucggaugcug

SEQ ID NO: 697574 - RNA, 25 nt, Human
ucuacgauuaggacugaaaaugagc

SEQ ID NO: 697575 - RNA, 21 nt, Human
ucucagcugcagaaaggaagc

SEQ ID NO: 697576 - RNA, 23 nt, Human
ucucaggugccuguccaagccgg

SEQ ID NO: 697577 - RNA, 21 nt, Human
ucuccgggcagcuggugguuu

SEQ ID NO: 697578 - RNA, 24 nt, Human
ucugcaacgacuguguuuccaaac

SEQ ID NO: 697579 - RNA, 20 nt, Human
ucuggaaggccuccuggggg

SEQ ID NO: 697580 - RNA, 20 nt, Human
ucuugcuuugucuccuuugc

SEQ ID NO: 697581 - RNA, 22 nt, Human
ucuugggguccucagcccuaac

SEQ ID NO: 697582 - RNA, 24 nt, Human
ugaaaaugagcaggccugugagga

SEQ ID NO: 697583 - RNA, 20 nt, Human
ugaccucauggugacuaauu

SEQ ID NO: 697584 - RNA, 22 nt, Human
ugaggagacugugguucccaag

SEQ ID NO: 697585 - RNA, 19 nt, Human
ugagggggcuggguccugc

SEQ ID NO: 697586 - RNA, 20 nt, Human
ugccccacaccagugccugu

SEQ ID NO: 697587 - RNA, 24 nt, Human
ugccucuccgggcagcuggugguu

SEQ ID NO: 697588 - RNA, 18 nt, Human
ugcgugguugugguugug

SEQ ID NO: 697589 - RNA, 24 nt, Human
ugcuggagccccugaccccgcagc

SEQ ID NO: 697590 - RNA, 20 nt, Human
ugcugggcaggcgcccggcc

SEQ ID NO: 697591 - RNA, 19 nt, Human
uggacauccuaaaaucaga

SEQ ID NO: 697592 - RNA, 22 nt, Human
uggauugucagccucuugaaag

SEQ ID NO: 697593 - RNA, 19 nt, Human
uggcagcagcagccaggag

SEQ ID NO: 697594 - RNA, 19 nt, Human
uggcagcagcagccaggag

SEQ ID NO: 697595 - RNA, 24 nt, Human
uggcucacgccggccauucuagcg

SEQ ID NO: 697596 - RNA, 20 nt, Human
uggcuugugguugcgucccu

SEQ ID NO: 697597 - RNA, 19 nt, Human
ugggaggccgaggugggcg

SEQ ID NO: 697598 - RNA, 24 nt, Human
ugggaggccgaggugggcggauca

SEQ ID NO: 697599 - RNA, 18 nt, Human
uggguccugcucagagaa

SEQ ID NO: 697600 - RNA, 24 nt, Human
uggucagaaucuccccacaggacu

SEQ ID NO: 697601 - RNA, 19 nt, Human
uggugacuaauuaaucugc

SEQ ID NO: 697602 - RNA, 23 nt, Human
ugguggggaccgugguugucaug

SEQ ID NO: 697603 - RNA, 20 nt, Human
uguagucuuaucauuucucu

SEQ ID NO: 697604 - RNA, 18 nt, Human
ugucccagagaugcgagg

SEQ ID NO: 697605 - RNA, 20 nt, Human
ugucucacagcuguggaggc

SEQ ID NO: 697606 - RNA, 21 nt, Human
ugucuggaaggccuccugggg

SEQ ID NO: 697607 - RNA, 23 nt, Human
ugucuggaaggccuccugggggc

SEQ ID NO: 697608 - RNA, 20 nt, Human
uguggaggccggaaaucuga

SEQ ID NO: 697609 - RNA, 23 nt, Human
uuaaucugcaacgacuguguuuc

SEQ ID NO: 697610 - RNA, 23 nt, Human
uucucugagcacagggccuaagg

SEQ ID NO: 697611 - RNA, 19 nt, Human
uugcuuugucuccuuugcc

SEQ ID NO: 697612 - RNA, 25 nt, Human
uugggaggccgaggugggcggauca

SEQ ID NO: 697613 - RNA, 22 nt, Human
uuucugauucugaggucugguu

SEQ ID NO: 697614 - RNA, 18 nt, Human
agaaacuucauuuugcua

SEQ ID NO: 697615 - RNA, 22 nt, Human
agcucuucagguggggaggugg

SEQ ID NO: 697616 - RNA, 19 nt, Human
aggcaaaaggcacagaagg

SEQ ID NO: 697617 - RNA, 24 nt, Human
aggcaaaauggacacaccaucagg

SEQ ID NO: 697618 - RNA, 22 nt, Human
agguggggagguggaaacagug

SEQ ID NO: 697619 - RNA, 20 nt, Human
auaccaggcaaaauggacac

SEQ ID NO: 697620 - RNA, 18 nt, Human
caaaauggacacaccauc

SEQ ID NO: 697621 - RNA, 19 nt, Human
cacaccaucaggagauaag

SEQ ID NO: 697622 - RNA, 21 nt, Human
cagcaaugccugagucggcgc

SEQ ID NO: 697623 - RNA, 21 nt, Human
ccacaccugaaucccuuggcu

SEQ ID NO: 697624 - RNA, 23 nt, Human
ccagccucauacccgaacaccac

SEQ ID NO: 697625 - RNA, 24 nt, Human
ccaggcaaaauggacacaccauca

SEQ ID NO: 697626 - RNA, 18 nt, Human
ccucauacccgaacacca

SEQ ID NO: 697627 - RNA, 18 nt, Human
uaacucuuucagcaaugc

SEQ ID NO: 697628 - RNA, 24 nt, Human
uaccaggcaaaaggcacagaacaa

SEQ ID NO: 697629 - RNA, 25 nt, Human
uauaccaggcaaaaggcacagaaca

SEQ ID NO: 697630 - RNA, 23 nt, Human
ucagcaaugccugaguccucuuu

SEQ ID NO: 697631 - RNA, 24 nt, Human
ucauuuccuugggcgcuuccucag

SEQ ID NO: 697632 - RNA, 21 nt, Human
ucccagccucauacccgaaca

SEQ ID NO: 697633 - RNA, 19 nt, Human
uccucaguuucucaugaaa

SEQ ID NO: 697634 - RNA, 22 nt, Human
uccuugggcgcuuccucaguuc

SEQ ID NO: 697635 - RNA, 20 nt, Human
ugauugaauuauugaauacu

SEQ ID NO: 697636 - RNA, 18 nt, Human
uggcuuagucccagccuc

SEQ ID NO: 697637 - RNA, 18 nt, Human
ugggcgcuuccucaguuc

SEQ ID NO: 697638 - RNA, 21 nt, Human
uggggagguggaaacaguggc

SEQ ID NO: 697639 - RNA, 26 nt, Human
uguuucauuuccuugggcgcuuccuc

SEQ ID NO: 697640 - RNA, 24 nt, Human
uuaguccgagcucagaaccgaaag

SEQ ID NO: 697641 - RNA, 24 nt, Human
uuuuuuauuguuacauuuauugac

SEQ ID NO: 697642 - RNA, 24 nt, Human
aacauucugacacaaaugcacaaa

SEQ ID NO: 697643 - RNA, 19 nt, Human
aaccccacacauccagcuc

SEQ ID NO: 697644 - RNA, 20 nt, Human
aacuaaacauucugacacag

SEQ ID NO: 697645 - RNA, 24 nt, Human
aacuggcucuggcuuucuaacccc

SEQ ID NO: 697646 - RNA, 24 nt, Human
aagaaccccacacauccagcucga

SEQ ID NO: 697647 - RNA, 19 nt, Human
aaucccacuguccuuaccc

SEQ ID NO: 697648 - RNA, 19 nt, Human
acaccucacaguggaaugg

SEQ ID NO: 697649 - RNA, 20 nt, Human
acaguugucacuagaugcag

SEQ ID NO: 697650 - RNA, 21 nt, Human
accgaaaugaaaaggcucaca

SEQ ID NO: 697651 - RNA, 18 nt, Human
agaauuccucuccccacc

SEQ ID NO: 697652 - RNA, 19 nt, Human
agaauuccucuccccaccc

SEQ ID NO: 697653 - RNA, 18 nt, Human
agagggcagaagcagucc

SEQ ID NO: 697654 - RNA, 21 nt, Human
aguauagaagugaaaaagucc

SEQ ID NO: 697655 - RNA, 19 nt, Human
aucccacuguccuuaccca

SEQ ID NO: 697656 - RNA, 18 nt, Human
auucaagauuagcuagcc

SEQ ID NO: 697657 - RNA, 24 nt, Human
caaacuuuuggucuugacucuuga

SEQ ID NO: 697658 - RNA, 23 nt, Human
cacaaacauggguagacuuuuaa

SEQ ID NO: 697659 - RNA, 21 nt, Human
cacagaauuccucuccccacc

SEQ ID NO: 697660 - RNA, 23 nt, Human
cagaauuccucuccccacccucc

SEQ ID NO: 697661 - RNA, 20 nt, Human
cagagggcagaagcaguccu

SEQ ID NO: 697662 - RNA, 21 nt, Human
cagauggcggccaagaacccc

SEQ ID NO: 697663 - RNA, 18 nt, Human
cagcaggcaauccagaca

SEQ ID NO: 697664 - RNA, 25 nt, Human
caggaaaacauucaagauuagcuag

SEQ ID NO: 697665 - RNA, 26 nt, Human
ccacacauccagcucgaugucacaau

SEQ ID NO: 697666 - RNA, 20 nt, Human
cccaaucagauuaacaaacu

SEQ ID NO: 697667 - RNA, 23 nt, Human
cccacccuccagacacauugcac

SEQ ID NO: 697668 - RNA, 22 nt, Human
cccauauaaaccuggaggacac

SEQ ID NO: 697669 - RNA, 21 nt, Human
cccaucccaucuguaugagag

SEQ ID NO: 697670 - RNA, 22 nt, Human
ccuacacaacgaaaaaucagaa

SEQ ID NO: 697671 - RNA, 21 nt, Human
cucacagaauuccucucccca

SEQ ID NO: 697672 - RNA, 22 nt, Human
cucacagaauuccucuccccac

SEQ ID NO: 697673 - RNA, 18 nt, Human
cuuuuggucuugacucuu

SEQ ID NO: 697674 - RNA, 22 nt, Human
gaaaaaucagaacaguacacca

SEQ ID NO: 697675 - RNA, 20 nt, Human
gaaaugaaaaggcucacaga

SEQ ID NO: 697676 - RNA, 18 nt, Human
gcucuggcuuucuaaccc

SEQ ID NO: 697677 - RNA, 22 nt, Human
ggcacuggcaggcagagggcag

SEQ ID NO: 697678 - RNA, 22 nt, Human
ggucuugacucuugaaauaauu

SEQ ID NO: 697679 - RNA, 18 nt, Human
gugaccaggacacgugga

SEQ ID NO: 697680 - RNA, 21 nt, Human
gugguuguaccucauugguga

SEQ ID NO: 697681 - RNA, 24 nt, Human
guuggcaacauuaauuuugagaug

SEQ ID NO: 697682 - RNA, 18 nt, Human
uaaaaaaccacuauuagc

SEQ ID NO: 697683 - RNA, 18 nt, Human
uaaaccuggaggacacag

SEQ ID NO: 697684 - RNA, 22 nt, Human
uaacuucuggauccaccaugau

SEQ ID NO: 697685 - RNA, 19 nt, Human
uaagaaacaguagcugugg

SEQ ID NO: 697686 - RNA, 19 nt, Human
uaaggguucaaacauguuu

SEQ ID NO: 697687 - RNA, 21 nt, Human
uacaaaguauagaagugaaaa

SEQ ID NO: 697688 - RNA, 23 nt, Human
uacaaaguauagaagugaaaaag

SEQ ID NO: 697689 - RNA, 23 nt, Human
uacacaacgaaaaaucagaacag

SEQ ID NO: 697690 - RNA, 20 nt, Human
ucaggaagggaaaucugccc

SEQ ID NO: 697691 - RNA, 19 nt, Human
uccacugugcaccggcugc

SEQ ID NO: 697692 - RNA, 23 nt, Human
uccacugugcaccggcugccuga

SEQ ID NO: 697693 - RNA, 18 nt, Human
uccagcucgaugucacaa

SEQ ID NO: 697694 - RNA, 20 nt, Human
ucccauauaaaccuggagga

SEQ ID NO: 697695 - RNA, 22 nt, Human
ucucuucugucaccgaaaugaa

SEQ ID NO: 697696 - RNA, 18 nt, Human
ugaaaggcuugggauggu

SEQ ID NO: 697697 - RNA, 25 nt, Human
ugaagaaaagcuuuggaggaguaga

SEQ ID NO: 697698 - RNA, 24 nt, Human
ugaccaggacacguggacucugac

SEQ ID NO: 697699 - RNA, 21 nt, Human
ugagcaaacuuuuggucuuga

SEQ ID NO: 697700 - RNA, 23 nt, Human
ugcaagcgauuuuaaauccccac

SEQ ID NO: 697701 - RNA, 23 nt, Human
ugcucugcccaucucuucuguca

SEQ ID NO: 697702 - RNA, 18 nt, Human
ugcugagcaaacuuuugg

SEQ ID NO: 697703 - RNA, 19 nt, Human
ugcuucccaaaugcacaau

SEQ ID NO: 697704 - RNA, 26 nt, Human
uggaauggucaaacaauuuaagucaa

SEQ ID NO: 697705 - RNA, 21 nt, Human
uggaggaguagaggaggcaag

SEQ ID NO: 697706 - RNA, 23 nt, Human
uggaggaguagaggaggcaaguu

SEQ ID NO: 697707 - RNA, 23 nt, Human
uggguagacuuuuaaaagccaug

SEQ ID NO: 697708 - RNA, 19 nt, Human
ugucaccgaaaugaaaagg

SEQ ID NO: 697709 - RNA, 21 nt, Human
uguggaaaauaaguugcucug

SEQ ID NO: 697710 - RNA, 21 nt, Human
uucccauauaaaccuggagga

SEQ ID NO: 697711 - RNA, 26 nt, Human
uuguucagcuuugcucuuacugugcu

SEQ ID NO: 697712 - RNA, 26 nt, Human
uuugagauguagugugaugcugagca

SEQ ID NO: 697713 - RNA, 18 nt, Human
uuugauguuuucacauac

SEQ ID NO: 697714 - RNA, 21 nt, Human
aaaugacaauaaaauuggagc

SEQ ID NO: 697715 - RNA, 23 nt, Human
caauaaaauuggagcugagacca

SEQ ID NO: 697716 - RNA, 26 nt, Human
cagaucagacauuuuguaaugaugcc

SEQ ID NO: 697717 - RNA, 20 nt, Human
cagggcugcugcaccgagcc

SEQ ID NO: 697718 - RNA, 20 nt, Human
cagggcugcugcaccgagcc

SEQ ID NO: 697719 - RNA, 23 nt, Human
cccugcguggguuggggcuccac

SEQ ID NO: 697720 - RNA, 20 nt, Human
gacaauaaaauuggagcuga

SEQ ID NO: 697721 - RNA, 21 nt, Human
gacaauaaaauuggagcugag

SEQ ID NO: 697722 - RNA, 19 nt, Human
gagcugagaccaagaagaa

SEQ ID NO: 697723 - RNA, 24 nt, Human
gaucagacauuuuguaaugaugcc

SEQ ID NO: 697724 - RNA, 18 nt, Human
gguuggggcuccacuccu

SEQ ID NO: 697725 - RNA, 22 nt, Human
uaaccaccucgacaagcaacag

SEQ ID NO: 697726 - RNA, 24 nt, Human
uaaccaccucgacaagcaacaggu

SEQ ID NO: 697727 - RNA, 23 nt, Human
uacagcagaggucggacacgaaa

SEQ ID NO: 697728 - RNA, 22 nt, Human
uauccuuauugaugaaaaugac

SEQ ID NO: 697729 - RNA, 19 nt, Human
uccuuugcagggcugcugc

SEQ ID NO: 697730 - RNA, 21 nt, Human
ugaaauaaacacuaaccaccu

SEQ ID NO: 697731 - RNA, 23 nt, Human
ugaaauaaacacuaaccaccucg

SEQ ID NO: 697732 - RNA, 22 nt, Human
uggcagagauguguauccuuau

SEQ ID NO: 697733 - RNA, 20 nt, Human
uggguuggggcuccacuccu

SEQ ID NO: 697734 - RNA, 24 nt, Human
uguaaugaugccugaaauaaacac

SEQ ID NO: 697735 - RNA, 18 nt, Human
uuccuggugaguccguuc

SEQ ID NO: 697736 - RNA, 20 nt, Human
uuccuggugaguccguucaa

SEQ ID NO: 697737 - RNA, 19 nt, Human
uuggagcugagaccaagaa

SEQ ID NO: 697738 - RNA, 21 nt, Human
uuggagcugagaccaagaaga

SEQ ID NO: 697739 - RNA, 20 nt, Human
uuuguaaugaugccugaaau

SEQ ID NO: 697740 - RNA, 24 nt, Human
uuuuuuuuuuuuucuuucucuuuu

SEQ ID NO: 697741 - RNA, 19 nt, Human
aaacauacaaauacagagg

SEQ ID NO: 697742 - RNA, 23 nt, Human
aaaccaaaagauggaaaggcaga

SEQ ID NO: 697743 - RNA, 25 nt, Human
aaagauacacaauacugaaucugca

SEQ ID NO: 697744 - RNA, 20 nt, Human
acaguacaacaucaaucauu

SEQ ID NO: 697745 - RNA, 18 nt, Human
accaaaagauggaaaggc

SEQ ID NO: 697746 - RNA, 21 nt, Human
agacagauggcaccggccaga

SEQ ID NO: 697747 - RNA, 19 nt, Human
aucaugaacuacucugaac

SEQ ID NO: 697748 - RNA, 22 nt, Human
caacuuuauuggcaaaaaagaa

SEQ ID NO: 697749 - RNA, 21 nt, Human
ccuccagaaucagcauaggaa

SEQ ID NO: 697750 - RNA, 23 nt, Human
cuaguucauccaaauccucucca

SEQ ID NO: 697751 - RNA, 18 nt, Human
cugcggcaggacgaggag

SEQ ID NO: 697752 - RNA, 24 nt, Human
gauacacaauacugaaucugcaua

SEQ ID NO: 697753 - RNA, 18 nt, Human
gauggcaccggccagacu

SEQ ID NO: 697754 - RNA, 20 nt, Human
gcauaggaaauaaacauccu

SEQ ID NO: 697755 - RNA, 23 nt, Human
gcggagcugcgcgugcgcgccac

SEQ ID NO: 697756 - RNA, 24 nt, Human
ggcauuguagcugauccugucaga

SEQ ID NO: 697757 - RNA, 22 nt, Human
gggaaacuuuuaaacaauuuaa

SEQ ID NO: 697758 - RNA, 23 nt, Human
uacacaauacugaaucugcauac

SEQ ID NO: 697759 - RNA, 18 nt, Human
ucacucauuaaaaacugu

SEQ ID NO: 697760 - RNA, 21 nt, Human
uccaaagauacacaauacuga

SEQ ID NO: 697761 - RNA, 19 nt, Human
uccaucuaauuguccaaag

SEQ ID NO: 697762 - RNA, 23 nt, Human
ucugcauacgcaguuuccuuuau

SEQ ID NO: 697763 - RNA, 21 nt, Human
ugacuuaauuuuuucagcgag

SEQ ID NO: 697764 - RNA, 22 nt, Human
ugagauguagccaaagucagaa

SEQ ID NO: 697765 - RNA, 18 nt, Human
uggcaaaaaagaaaaggg

SEQ ID NO: 697766 - RNA, 21 nt, Human
uguagggacaagaugccuuuu

SEQ ID NO: 697767 - RNA, 20 nt, Human
ugucagauaaaagaaguucc

SEQ ID NO: 697768 - RNA, 24 nt, Human
uuuauuggcaaaaaagaaaaggga

SEQ ID NO: 697769 - RNA, 19 nt, Human
uuuuuuuuuuuuuuuuuaa

SEQ ID NO: 697770 - RNA, 21 nt, Human
aagcaacguuucaggcagcuu

SEQ ID NO: 697771 - RNA, 22 nt, Human
acacagcgagacaaacuggaac

SEQ ID NO: 697772 - RNA, 19 nt, Human
aggcaggaagcuaaucagc

SEQ ID NO: 697773 - RNA, 18 nt, Human
caaagcaacguuucaggc

SEQ ID NO: 697774 - RNA, 19 nt, Human
caucacacgucucuacccc

SEQ ID NO: 697775 - RNA, 22 nt, Human
caugccagaaacacaacaccca

SEQ ID NO: 697776 - RNA, 19 nt, Human
cauuuggggccacagaauc

SEQ ID NO: 697777 - RNA, 19 nt, Human
ccagaaacacaacacccau

SEQ ID NO: 697778 - RNA, 22 nt, Human
ccagaaacacaacacccaucau

SEQ ID NO: 697779 - RNA, 24 nt, Human
ccccaggaccucuagcuguucugu

SEQ ID NO: 697780 - RNA, 21 nt, Human
ccuagaagaauacaaagcaac

SEQ ID NO: 697781 - RNA, 22 nt, Human
ggccacagaauccauuguggag

SEQ ID NO: 697782 - RNA, 20 nt, Human
guaauaaugaaggcuuucac

SEQ ID NO: 697783 - RNA, 18 nt, Human
uaaaccauuagcuuaugc

SEQ ID NO: 697784 - RNA, 25 nt, Human
uaaaccauuagcuuaugccuacaca

SEQ ID NO: 697785 - RNA, 27 nt, Human
uaccccagggucucucaacuuuggcac

SEQ ID NO: 697786 - RNA, 20 nt, Human
uauagcacuucguccagcac

SEQ ID NO: 697787 - RNA, 21 nt, Human
ugaaugaucuucuagacaguu

SEQ ID NO: 697788 - RNA, 24 nt, Human
ugcaaauaaaucauuaaaaagaua

SEQ ID NO: 697789 - RNA, 24 nt, Human
uggcacuauuaacauuuggggcca

SEQ ID NO: 697790 - RNA, 18 nt, Human
uggggccacagaauccau

SEQ ID NO: 697791 - RNA, 22 nt, Human
uguugugaugugcuuuuuuucu

SEQ ID NO: 697792 - RNA, 20 nt, Human
uuccuagaagaauacaaagc

SEQ ID NO: 697793 - RNA, 26 nt, Human
aagaaggaggacacaaagggcgaaga

SEQ ID NO: 697794 - RNA, 27 nt, Human
aagaaggaggacacaaagggcgaagaa

SEQ ID NO: 697795 - RNA, 19 nt, Human
aagaggccgggagucaggc

SEQ ID NO: 697796 - RNA, 22 nt, Human
aagaggccgggagucaggcgag

SEQ ID NO: 697797 - RNA, 22 nt, Human
agagcuggaaaguccagaaguu

SEQ ID NO: 697798 - RNA, 23 nt, Human
agccuuugggcuuugcgcaagaa

SEQ ID NO: 697799 - RNA, 20 nt, Human
agcuggaaaguccagaaguu

SEQ ID NO: 697800 - RNA, 22 nt, Human
cccgcacccuucuccgccccua

SEQ ID NO: 697801 - RNA, 21 nt, Human
cccggugguccgcgauuugcu

SEQ ID NO: 697802 - RNA, 19 nt, Human
ccgcacccuucuccgcccc

SEQ ID NO: 697803 - RNA, 19 nt, Human
ccgcacccuucuccgcccc

SEQ ID NO: 697804 - RNA, 21 nt, Human
ccuuugggcuuugcgcaagaa

SEQ ID NO: 697805 - RNA, 22 nt, Human
gaacgaacuucggaagagcugg

SEQ ID NO: 697806 - RNA, 18 nt, Human
gcgcaagaggccgggagu

SEQ ID NO: 697807 - RNA, 21 nt, Human
ugaaagaaggaggacacaaag

SEQ ID NO: 697808 - RNA, 22 nt, Human
ugaaagaaggaggacacaaagg

SEQ ID NO: 697809 - RNA, 22 nt, Human
uggaaaguccagaaguuaguga

SEQ ID NO: 697810 - RNA, 25 nt, Human
uggaaaguccagaaguuagugaaag

SEQ ID NO: 697811 - RNA, 18 nt, Human
uuuuuuuuuuuuuuucug

SEQ ID NO: 697812 - RNA, 25 nt, Human
uuuuuuuuuuuuuuuuucugguuuu

SEQ ID NO: 697813 - RNA, 25 nt, Human
uuuuuuuuuuuuuuuuuucugguuu

SEQ ID NO: 697814 - RNA, 26 nt, Human
uuuuuuuuuuuuuuuuuuucugguuu

SEQ ID NO: 697815 - RNA, 22 nt, Human
uuuuuuuuuuuuuuuuuuuucu

SEQ ID NO: 697816 - RNA, 22 nt, Human
aaaacaaaaacaaaaacaaaaa

SEQ ID NO: 697817 - RNA, 27 nt, Human
aaaacaaaaacaaaaacaaaaaaacaa

SEQ ID NO: 697818 - RNA, 22 nt, Human
aaacaagucacacaacaaucuu

SEQ ID NO: 697819 - RNA, 20 nt, Human
aacaaugagaggggaaagga

SEQ ID NO: 697820 - RNA, 19 nt, Human
aagucuggcaaggauuuau

SEQ ID NO: 697821 - RNA, 23 nt, Human
acaaagcaacaugacacuuggaa

SEQ ID NO: 697822 - RNA, 22 nt, Human
acauuaaggaauuuccaagggg

SEQ ID NO: 697823 - RNA, 20 nt, Human
acugccagaugccacccagc

SEQ ID NO: 697824 - RNA, 24 nt, Human
agaaaguuuccuauagcccacaaa

SEQ ID NO: 697825 - RNA, 21 nt, Human
agaugccacccagcccaagac

SEQ ID NO: 697826 - RNA, 18 nt, Human
agguuucugcagcaagcc

SEQ ID NO: 697827 - RNA, 23 nt, Human
agugaauaaaagccaugaaaaga

SEQ ID NO: 697828 - RNA, 24 nt, Human
auaaaagccaugaaaagaagaacu

SEQ ID NO: 697829 - RNA, 24 nt, Human
caaaaacaaaaaaacaagucacac

SEQ ID NO: 697830 - RNA, 30 nt, Human
caagccccaaagacaaagcuuggcagaggg

SEQ ID NO: 697831 - RNA, 22 nt, Human
cagaaaguuuccuauagcccac

SEQ ID NO: 697832 - RNA, 21 nt, Human
cagacaacuccaagcugggca

SEQ ID NO: 697833 - RNA, 19 nt, Human
cagcaagccccaaagacaa

SEQ ID NO: 697834 - RNA, 19 nt, Human
cagcaagccccaaagacaa

SEQ ID NO: 697835 - RNA, 24 nt, Human
cagcaagccccaaagacaaagcuu

SEQ ID NO: 697836 - RNA, 22 nt, Human
cagccaacucucucuggagccu

SEQ ID NO: 697837 - RNA, 20 nt, Human
cagcgccucuaugggagccu

SEQ ID NO: 697838 - RNA, 24 nt, Human
ccaaagacaaagcuuggcagaggc

SEQ ID NO: 697839 - RNA, 22 nt, Human
ccacaaauaguuuccuuuaaaa

SEQ ID NO: 697840 - RNA, 24 nt, Human
ccacacacauagaaaugaucccca

SEQ ID NO: 697841 - RNA, 19 nt, Human
ccacagcgcccuagagaac

SEQ ID NO: 697842 - RNA, 18 nt, Human
ccacccagcccaagaccc

SEQ ID NO: 697843 - RNA, 19 nt, Human
ccaguggugucguaucuuc

SEQ ID NO: 697844 - RNA, 18 nt, Human
cccacacacauagaaauu

SEQ ID NO: 697845 - RNA, 18 nt, Human
ccgccgcgcucgcucggc

SEQ ID NO: 697846 - RNA, 19 nt, Human
ccgccgcgcucgcucggcu

SEQ ID NO: 697847 - RNA, 22 nt, Human
ccuuuaaaaaaacaaaaacaaa

SEQ ID NO: 697848 - RNA, 19 nt, Human
cgcgccgcgccugccgccc

SEQ ID NO: 697849 - RNA, 20 nt, Human
cuauaaccacaggacacaug

SEQ ID NO: 697850 - RNA, 20 nt, Human
cuccccagacugcuuagcua

SEQ ID NO: 697851 - RNA, 24 nt, Human
cuuuaaaaaaacaaaaacaaaaac

SEQ ID NO: 697852 - RNA, 26 nt, Human
cuuuaaaaaaacaaaaacaaaaacaa

SEQ ID NO: 697853 - RNA, 24 nt, Human
gaaaugauccccaugcucucccca

SEQ ID NO: 697854 - RNA, 24 nt, Human
gcccaagacccaauuuccacagcg

SEQ ID NO: 697855 - RNA, 23 nt, Human
gccucaucccuuuguccuuccca

SEQ ID NO: 697856 - RNA, 18 nt, Human
gcgccgcgccugccgccc

SEQ ID NO: 697857 - RNA, 22 nt, Human
gcgccucuaugggagccuuggc

SEQ ID NO: 697858 - RNA, 22 nt, Human
ggggaaucuuaacuaagucuca

SEQ ID NO: 697859 - RNA, 21 nt, Human
guggaaaagaccuucucccca

SEQ ID NO: 697860 - RNA, 24 nt, Human
uacccacacacauagaaaugaucc

SEQ ID NO: 697861 - RNA, 24 nt, Human
uagucacagugaauaaaagccaug

SEQ ID NO: 697862 - RNA, 25 nt, Human
uauaaccacaggacacaugugcgug

SEQ ID NO: 697863 - RNA, 20 nt, Human
ucacacaacaaucuugccac

SEQ ID NO: 697864 - RNA, 23 nt, Human
ucacacaacaaucuugccacaaa

SEQ ID NO: 697865 - RNA, 22 nt, Human
uccaugacugccagaugccacc

SEQ ID NO: 697866 - RNA, 19 nt, Human
uccccaagcuuaagcuauc

SEQ ID NO: 697867 - RNA, 23 nt, Human
ucggccccaccgccgcgcucgcu

SEQ ID NO: 697868 - RNA, 18 nt, Human
ucuggagccucaucccuu

SEQ ID NO: 697869 - RNA, 23 nt, Human
ucuggcaaggauuuauuaggaag

SEQ ID NO: 697870 - RNA, 19 nt, Human
ugauccccaugcucucccc

SEQ ID NO: 697871 - RNA, 19 nt, Human
uggaaaagcaaguguuauc

SEQ ID NO: 697872 - RNA, 25 nt, Human
uggagccucaucccuuuguccuucc

SEQ ID NO: 697873 - RNA, 21 nt, Human
uggcaaggauuuauuaggaag

SEQ ID NO: 697874 - RNA, 25 nt, Human
ugguccccuggcaccuacacaaccc

SEQ ID NO: 697875 - RNA, 24 nt, Human
uuagcuaggcaguggaaaagaccu

SEQ ID NO: 697876 - RNA, 21 nt, Human
uuccuuuaaaaaaacaaaaac

SEQ ID NO: 697877 - RNA, 21 nt, Human
uuggcagaggcuguggcagcc

SEQ ID NO: 697878 - RNA, 24 nt, Human
uuucugcagcaagccccaaagaca

SEQ ID NO: 697879 - RNA, 19 nt, Human
aaagcaaauucaugaccuu

SEQ ID NO: 697880 - RNA, 20 nt, Human
aauuccuaaaguuccugcaa

SEQ ID NO: 697881 - RNA, 20 nt, Human
agauaaucgaagaauaugaa

SEQ ID NO: 697882 - RNA, 18 nt, Human
cagcuuuauuaaacaggc

SEQ ID NO: 697883 - RNA, 18 nt, Human
caugugacuugccaguaa

SEQ ID NO: 697884 - RNA, 24 nt, Human
ccaaaacugcaggcaacucaucug

SEQ ID NO: 697885 - RNA, 24 nt, Human
ccuccaaaacugcaggcaacucau

SEQ ID NO: 697886 - RNA, 19 nt, Human
cucugaaggccuccaaaac

SEQ ID NO: 697887 - RNA, 21 nt, Human
cugcaauaaccuacauacacc

SEQ ID NO: 697888 - RNA, 22 nt, Human
gcccgagcccgccucugagccc

SEQ ID NO: 697889 - RNA, 19 nt, Human
ggcuuaaaagguuaaagug

SEQ ID NO: 697890 - RNA, 18 nt, Human
uaaagacacuggaccgac

SEQ ID NO: 697891 - RNA, 27 nt, Human
uaucuucacugucacuuaggagauaau

SEQ ID NO: 697892 - RNA, 18 nt, Human
ucacugucacuuaggaga

SEQ ID NO: 697893 - RNA, 21 nt, Human
ucugaaggccuccaaaacugc

SEQ ID NO: 697894 - RNA, 18 nt, Human
uggguuugguagaaagca

SEQ ID NO: 697895 - RNA, 22 nt, Human
uucguguuuaacacaucuaugg

SEQ ID NO: 697896 - RNA, 28 nt, Human
uuuaacacaucuauggguuugguagaaa

SEQ ID NO: 697897 - RNA, 19 nt, Human
aaaacggaguguuacaagc

SEQ ID NO: 697898 - RNA, 23 nt, Human
acccagcugcgaggggcaagacu

SEQ ID NO: 697899 - RNA, 23 nt, Human
agaagccagaaauuuuugcagcc

SEQ ID NO: 697900 - RNA, 22 nt, Human
agagcucccccauccggauccc

SEQ ID NO: 697901 - RNA, 27 nt, Human
agcacccaccccacccccaacuucuac

SEQ ID NO: 697902 - RNA, 22 nt, Human
agcccggagcucgccuuggugc

SEQ ID NO: 697903 - RNA, 19 nt, Human
aguuggucugagcccggag

SEQ ID NO: 697904 - RNA, 21 nt, Human
caccccacccccaacuucuac

SEQ ID NO: 697905 - RNA, 21 nt, Human
cacuuccggccccucugggag

SEQ ID NO: 697906 - RNA, 24 nt, Human
cagaaauuuuugcagccagcaccc

SEQ ID NO: 697907 - RNA, 19 nt, Human
cagcacccaccccaccccc

SEQ ID NO: 697908 - RNA, 18 nt, Human
cagccagcacccacccca

SEQ ID NO: 697909 - RNA, 25 nt, Human
ccacugccacuuccggccccucugg

SEQ ID NO: 697910 - RNA, 21 nt, Human
ccccaguccugcugccgucuu

SEQ ID NO: 697911 - RNA, 21 nt, Human
cccucccuccacugccacuuc

SEQ ID NO: 697912 - RNA, 19 nt, Human
cccugcuucagaggaggcc

SEQ ID NO: 697913 - RNA, 23 nt, Human
cccugcuucagaggaggccuggg

SEQ ID NO: 697914 - RNA, 21 nt, Human
cccugugggcccgggccucac

SEQ ID NO: 697915 - RNA, 20 nt, Human
cccuucucacuguacacagc

SEQ ID NO: 697916 - RNA, 19 nt, Human
ccggagcucgccuuggugc

SEQ ID NO: 697917 - RNA, 28 nt, Human
ccugugacucgggggaaaaccggggucc

SEQ ID NO: 697918 - RNA, 21 nt, Human
cgagcccuagguggaaacccc

SEQ ID NO: 697919 - RNA, 24 nt, Human
cgcgacccagcugcgaggggcaag

SEQ ID NO: 697920 - RNA, 18 nt, Human
cucacuguacacagcugc

SEQ ID NO: 697921 - RNA, 22 nt, Human
cuccacugccacuuccggcccc

SEQ ID NO: 697922 - RNA, 20 nt, Human
cucccuccacugccacuucc

SEQ ID NO: 697923 - RNA, 22 nt, Human
cucccuccacugccacuuccgg

SEQ ID NO: 697924 - RNA, 18 nt, Human
cucuguacagagcucccc

SEQ ID NO: 697925 - RNA, 19 nt, Human
cugaccuuggaguuggucu

SEQ ID NO: 697926 - RNA, 18 nt, Human
cuuugagagacaccgcga

SEQ ID NO: 697927 - RNA, 19 nt, Human
gcccugugggcccgggccc

SEQ ID NO: 697928 - RNA, 24 nt, Human
gcccugugggcccgggccucacga

SEQ ID NO: 697929 - RNA, 21 nt, Human
ggccgagcccuagguggaaac

SEQ ID NO: 697930 - RNA, 25 nt, Human
uacaaaagaaauuuuuacaaucacc

SEQ ID NO: 697931 - RNA, 20 nt, Human
ucagaggaggccugggcugu

SEQ ID NO: 697932 - RNA, 18 nt, Human
ucccccauccggaucccu

SEQ ID NO: 697933 - RNA, 21 nt, Human
ucccuuagagugcuuuguggg

SEQ ID NO: 697934 - RNA, 24 nt, Human
ucccuuagagugcuuugugggagc

SEQ ID NO: 697935 - RNA, 20 nt, Human
ugagagacaccgcgacccag

SEQ ID NO: 697936 - RNA, 24 nt, Human
uggcauauagaaacaauuuauugc

SEQ ID NO: 697937 - RNA, 23 nt, Human
uggccagcugaccuuggaguugg

SEQ ID NO: 697938 - RNA, 23 nt, Human
ugggggcggggugggcuaucagc

SEQ ID NO: 697939 - RNA, 22 nt, Human
uugugggagcugcagugggggc

SEQ ID NO: 697940 - RNA, 24 nt, Human
agcacuuuuguaacucagagacau

SEQ ID NO: 697941 - RNA, 20 nt, Human
agccaguggcaucggaaccg

SEQ ID NO: 697942 - RNA, 22 nt, Human
cacgacgcagcaggagcagggc

SEQ ID NO: 697943 - RNA, 21 nt, Human
cagcccccggccccggguccu

SEQ ID NO: 697944 - RNA, 23 nt, Human
ccacaccccagaaauuuugauuc

SEQ ID NO: 697945 - RNA, 19 nt, Human
ccaggcucugaaccacuga

SEQ ID NO: 697946 - RNA, 21 nt, Human
cccacaccccagaaauuuuga

SEQ ID NO: 697947 - RNA, 19 nt, Human
cccccggccccggguccuc

SEQ ID NO: 697948 - RNA, 19 nt, Human
cccggccccggguccucac

SEQ ID NO: 697949 - RNA, 20 nt, Human
ccgccgcgcucagcgccgca

SEQ ID NO: 697950 - RNA, 23 nt, Human
cgauuuggugauggguguuaagg

SEQ ID NO: 697951 - RNA, 19 nt, Human
cgccagagcagccgccgcc

SEQ ID NO: 697952 - RNA, 24 nt, Human
cucagcgccgcaggcccggccauc

SEQ ID NO: 697953 - RNA, 21 nt, Human
gcucauuugcacggucauaag

SEQ ID NO: 697954 - RNA, 22 nt, Human
gcucauuugcacggucauaaga

SEQ ID NO: 697955 - RNA, 19 nt, Human
ggugauggguguuaagguu

SEQ ID NO: 697956 - RNA, 21 nt, Human
uaaacaaagaaaauuacagau

SEQ ID NO: 697957 - RNA, 18 nt, Human
uauugugcccacacccca

SEQ ID NO: 697958 - RNA, 24 nt, Human
ucaggggaaguauaaacaaagaaa

SEQ ID NO: 697959 - RNA, 18 nt, Human
uccucacgacgcagcagg

SEQ ID NO: 697960 - RNA, 23 nt, Human
uccucacgacgcagcaggagcug

SEQ ID NO: 697961 - RNA, 22 nt, Human
ucugaaccacugaugcagagca

SEQ ID NO: 697962 - RNA, 20 nt, Human
ucuuuauuccuuuauuuaau

SEQ ID NO: 697963 - RNA, 22 nt, Human
ugaauuagcacuuuuguaacuc

SEQ ID NO: 697964 - RNA, 27 nt, Human
ugacaaaucuuuauuuuuccaaagcuc

SEQ ID NO: 697965 - RNA, 22 nt, Human
ugcagacaagcauuucaaagca

SEQ ID NO: 697966 - RNA, 18 nt, Human
ugcccacaccccagaaau

SEQ ID NO: 697967 - RNA, 19 nt, Human
uggggccagcccccggccc

SEQ ID NO: 697968 - RNA, 22 nt, Human
uguuuacuuacacaauuacaug

SEQ ID NO: 697969 - RNA, 19 nt, Human
uuagacccugaaauuaccg

SEQ ID NO: 697970 - RNA, 24 nt, Human
uugagauagggcugacaaaucuuu

SEQ ID NO: 697971 - RNA, 18 nt, Human
uuuuuuuuuuuuuuuuug

SEQ ID NO: 697972 - RNA, 23 nt, Human
uuuuuuuuuuuuuuuuuggaguu

SEQ ID NO: 697973 - RNA, 26 nt, Human
aagaggccgaaaugacgcugguggga

SEQ ID NO: 697974 - RNA, 19 nt, Human
accgcgcucugcucgcgcc

SEQ ID NO: 697975 - RNA, 22 nt, Human
aggacucucccuaaaaagcaag

SEQ ID NO: 697976 - RNA, 26 nt, Human
aguauccaguuuacuugcauuguaac

SEQ ID NO: 697977 - RNA, 23 nt, Human
ccccccggcccgccuccccgcug

SEQ ID NO: 697978 - RNA, 20 nt, Human
cccccggcccgccuccccgc

SEQ ID NO: 697979 - RNA, 24 nt, Human
cccgccuccccgcugccggggccg

SEQ ID NO: 697980 - RNA, 18 nt, Human
cccgcugcgccccagcag

SEQ ID NO: 697981 - RNA, 23 nt, Human
cccuaaaaagcaaguuuaaggga

SEQ ID NO: 697982 - RNA, 20 nt, Human
ccgccgccccccggcccgcc

SEQ ID NO: 697983 - RNA, 20 nt, Human
cugcucgcgccccgccgccc

SEQ ID NO: 697984 - RNA, 19 nt, Human
gcccgccuccccgcugcgc

SEQ ID NO: 697985 - RNA, 21 nt, Human
gccuccccgcugcgccccagc

SEQ ID NO: 697986 - RNA, 21 nt, Human
gcucgcgccccgccgcccccc

SEQ ID NO: 697987 - RNA, 23 nt, Human
uacccugaagcacaggcaaaugu

SEQ ID NO: 697988 - RNA, 18 nt, Human
uagcucaggagcaggguu

SEQ ID NO: 697989 - RNA, 22 nt, Human
uccuaccacuaugcacauguuc

SEQ ID NO: 697990 - RNA, 20 nt, Human
ucgcgccccgccgccccccc

SEQ ID NO: 697991 - RNA, 20 nt, Human
ugacaaaagaacaaguaucc

SEQ ID NO: 697992 - RNA, 21 nt, Human
ugagcagagaaagggagguca

SEQ ID NO: 697993 - RNA, 20 nt, Human
ugcauuuaacaaaucugaca

SEQ ID NO: 697994 - RNA, 22 nt, Human
aaaaaaaauggggagacucuac

SEQ ID NO: 697995 - RNA, 19 nt, Human
aaaaaagagauugacaaga

SEQ ID NO: 697996 - RNA, 22 nt, Human
aaccacacagaaauacagacaa

SEQ ID NO: 697997 - RNA, 20 nt, Human
aagaaacagccaggccaccu

SEQ ID NO: 697998 - RNA, 25 nt, Human
aagaggcagaucacagaauaccagg

SEQ ID NO: 697999 - RNA, 19 nt, Human
aauacagagaagcagagga

SEQ ID NO: 698000 - RNA, 22 nt, Human
aaucuccaaacaucucaaaaca

SEQ ID NO: 698001 - RNA, 18 nt, Human
aauggcagcaagaggcag

SEQ ID NO: 698002 - RNA, 22 nt, Human
acacgccaugaaccacaccccu

SEQ ID NO: 698003 - RNA, 21 nt, Human
acagauacugguucuguucaa

SEQ ID NO: 698004 - RNA, 19 nt, Human
agaaauacagacaaucaag

SEQ ID NO: 698005 - RNA, 19 nt, Human
agaagaaaaauacagagaa

SEQ ID NO: 698006 - RNA, 23 nt, Human
agacaaucaagugaaccugagca

SEQ ID NO: 698007 - RNA, 18 nt, Human
agagaagcagaggagaga

SEQ ID NO: 698008 - RNA, 19 nt, Human
agagauuagggggaaaagg

SEQ ID NO: 698009 - RNA, 20 nt, Human
agagauugacaagaaauuga

SEQ ID NO: 698010 - RNA, 21 nt, Human
agaggccagagucaggaggcg

SEQ ID NO: 698011 - RNA, 18 nt, Human
agauuagggggaaaaggu

SEQ ID NO: 698012 - RNA, 21 nt, Human
agcugcuuucuuucacuuuuu

SEQ ID NO: 698013 - RNA, 21 nt, Human
aggaaaaaaagagauugacaa

SEQ ID NO: 698014 - RNA, 18 nt, Human
aggagagaaagaauggca

SEQ ID NO: 698015 - RNA, 20 nt, Human
aggcgggacucgaacccgcc

SEQ ID NO: 698016 - RNA, 23 nt, Human
aggugccccuggucgaggagagg

SEQ ID NO: 698017 - RNA, 18 nt, Human
agugggagggagugcucu

SEQ ID NO: 698018 - RNA, 18 nt, Human
augaagcccaaaguacgc

SEQ ID NO: 698019 - RNA, 24 nt, Human
augcagcccgcccgggacucaggg

SEQ ID NO: 698020 - RNA, 26 nt, Human
auggagaccaucgaugaauguucagu

SEQ ID NO: 698021 - RNA, 26 nt, Human
caaaauaaaguacccaaguuacaaaa

SEQ ID NO: 698022 - RNA, 20 nt, Human
caaccacacagaaauacaga

SEQ ID NO: 698023 - RNA, 25 nt, Human
caaucaagugaaccugagcaccccc

SEQ ID NO: 698024 - RNA, 24 nt, Human
cacacagaaauacagacaaucaag

SEQ ID NO: 698025 - RNA, 21 nt, Human
cacugugcugggacugcagau

SEQ ID NO: 698026 - RNA, 20 nt, Human
cagacaucacacccucaaag

SEQ ID NO: 698027 - RNA, 22 nt, Human
cagacccaggccucucauucca

SEQ ID NO: 698028 - RNA, 22 nt, Human
cagcaagaggcagaucacagaa

SEQ ID NO: 698029 - RNA, 22 nt, Human
caggagacagacccaggccucu

SEQ ID NO: 698030 - RNA, 21 nt, Human
cagggaacaccuaguccaaac

SEQ ID NO: 698031 - RNA, 19 nt, Human
cauagcuacagacaucaca

SEQ ID NO: 698032 - RNA, 21 nt, Human
ccaaaaccaucacauacccca

SEQ ID NO: 698033 - RNA, 20 nt, Human
ccaaaauacauaguuuaugg

SEQ ID NO: 698034 - RNA, 20 nt, Human
ccaaaguacgccgucgcccc

SEQ ID NO: 698035 - RNA, 22 nt, Human
ccaaaguacgccgucgccccug

SEQ ID NO: 698036 - RNA, 28 nt, Human
ccacacagaaauacagacaacgucaccg

SEQ ID NO: 698037 - RNA, 22 nt, Human
cccacuguucagugaaacuguu

SEQ ID NO: 698038 - RNA, 18 nt, Human
ccccuggucgaguagagg

SEQ ID NO: 698039 - RNA, 19 nt, Human
ccucacccacuaccuccuc

SEQ ID NO: 698040 - RNA, 19 nt, Human
ccuggucgaguagaggugc

SEQ ID NO: 698041 - RNA, 25 nt, Human
ccuuugguucaugaucacaccacuu

SEQ ID NO: 698042 - RNA, 18 nt, Human
cgaacccgccacacggcg

SEQ ID NO: 698043 - RNA, 20 nt, Human
cgggaggaacugcguaagcg

SEQ ID NO: 698044 - RNA, 20 nt, Human
cucaaagugaagucaaacug

SEQ ID NO: 698045 - RNA, 25 nt, Human
cugcugggucaacacgccaugaacc

SEQ ID NO: 698046 - RNA, 19 nt, Human
gacaauggccucuaaucug

SEQ ID NO: 698047 - RNA, 21 nt, Human
gagaagcagaggagagaaaga

SEQ ID NO: 698048 - RNA, 18 nt, Human
gagcaaggaaaaaaagag

SEQ ID NO: 698049 - RNA, 24 nt, Human
gaguccuugcuacaaccacacaga

SEQ ID NO: 698050 - RNA, 23 nt, Human
gcaaugaagacagaauugcugaa

SEQ ID NO: 698051 - RNA, 21 nt, Human
gcagcccgcccgggacucagg

SEQ ID NO: 698052 - RNA, 24 nt, Human
gccaugaaccacaccccuauucgu

SEQ ID NO: 698053 - RNA, 19 nt, Human
gcuacagacaucacacccu

SEQ ID NO: 698054 - RNA, 22 nt, Human
ggaggcgggacucgaacccgcc

SEQ ID NO: 698055 - RNA, 21 nt, Human
ggcagaaagaaaagucaccga

SEQ ID NO: 698056 - RNA, 20 nt, Human
ggccucuaaucuguucccaa

SEQ ID NO: 698057 - RNA, 18 nt, Human
ggguggcucugggacaga

SEQ ID NO: 698058 - RNA, 21 nt, Human
gguagccucacccacuaccuc

SEQ ID NO: 698059 - RNA, 20 nt, Human
gguaggaaaaaggggaaagg

SEQ ID NO: 698060 - RNA, 25 nt, Human
gguaggaaaaaggggaaaggguugc

SEQ ID NO: 698061 - RNA, 19 nt, Human
gguggcucugggacagagg

SEQ ID NO: 698062 - RNA, 25 nt, Human
gugcugggacugcagauaugucaca

SEQ ID NO: 698063 - RNA, 23 nt, Human
guggcucugggacagagggaucc

SEQ ID NO: 698064 - RNA, 18 nt, Human
uaaauuuccaaagcgcac

SEQ ID NO: 698065 - RNA, 23 nt, Human
uaugggagcauuagaacuccaug

SEQ ID NO: 698066 - RNA, 21 nt, Human
ucaaacugucccccucauacu

SEQ ID NO: 698067 - RNA, 23 nt, Human
ucacaauaagcuaagaauagaaa

SEQ ID NO: 698068 - RNA, 20 nt, Human
ucacacccucaaagugaagu

SEQ ID NO: 698069 - RNA, 21 nt, Human
ucacauaccccacuguucagu

SEQ ID NO: 698070 - RNA, 21 nt, Human
ucagggacuagaggccagagu

SEQ ID NO: 698071 - RNA, 23 nt, Human
ucaugaucacaccacuauuuuua

SEQ ID NO: 698072 - RNA, 23 nt, Human
uccaaagaaacagccaggccacc

SEQ ID NO: 698073 - RNA, 18 nt, Human
uccaaagcgcacucucuu

SEQ ID NO: 698074 - RNA, 20 nt, Human
uccggaguccggcgucgccc

SEQ ID NO: 698075 - RNA, 20 nt, Human
uccuggagcaaugaagacag

SEQ ID NO: 698076 - RNA, 23 nt, Human
uccuugcuacaaccacacagaaa

SEQ ID NO: 698077 - RNA, 22 nt, Human
ucugaaacagucacaauaagcu

SEQ ID NO: 698078 - RNA, 20 nt, Human
ucuggguguuuucuugauuc

SEQ ID NO: 698079 - RNA, 19 nt, Human
ucuuuuuggaagagugccu

SEQ ID NO: 698080 - RNA, 18 nt, Human
ugaagugucuugccaaaa

SEQ ID NO: 698081 - RNA, 25 nt, Human
ugaauaaaugaauacauggagacca

SEQ ID NO: 698082 - RNA, 22 nt, Human
ugacagauacugguucuguuca

SEQ ID NO: 698083 - RNA, 19 nt, Human
ugaucaggacagaagacaa

SEQ ID NO: 698084 - RNA, 18 nt, Human
ugcugaaucuccaaacau

SEQ ID NO: 698085 - RNA, 18 nt, Human
ugcugggacugcagauau

SEQ ID NO: 698086 - RNA, 19 nt, Human
uggaaaaccauucuuaaag

SEQ ID NO: 698087 - RNA, 18 nt, Human
uggagcaaugaagacaga

SEQ ID NO: 698088 - RNA, 20 nt, Human
uggaguagugaagugucuug

SEQ ID NO: 698089 - RNA, 20 nt, Human
uggccucuaaucuguucccu

SEQ ID NO: 698090 - RNA, 21 nt, Human
ugggacagagggauccaaaga

SEQ ID NO: 698091 - RNA, 19 nt, Human
ugggacugcagauauguca

SEQ ID NO: 698092 - RNA, 20 nt, Human
ugggagggagugcucugcug

SEQ ID NO: 698093 - RNA, 20 nt, Human
ugggagggagugcucugcug

SEQ ID NO: 698094 - RNA, 21 nt, Human
ugggagggagugcucugcugg

SEQ ID NO: 698095 - RNA, 23 nt, Human
ugggagggagugcucugcugggu

SEQ ID NO: 698096 - RNA, 22 nt, Human
ugucccacugugcugggacugc

SEQ ID NO: 698097 - RNA, 20 nt, Human
uguugucuuuuuggaagagu

SEQ ID NO: 698098 - RNA, 24 nt, Human
uuaaggccuuucuggguguuuucu

SEQ ID NO: 698099 - RNA, 21 nt, Human
uuacauggaacagagcugugg

SEQ ID NO: 698100 - RNA, 20 nt, Human
uuagggggaaaagguggaaa

SEQ ID NO: 698101 - RNA, 22 nt, Human
uuagugggagggagugcucugc

SEQ ID NO: 698102 - RNA, 19 nt, Human
uuccaguucuguugucuuu

SEQ ID NO: 698103 - RNA, 20 nt, Human
uucccaaacuagaucugaaa

SEQ ID NO: 698104 - RNA, 23 nt, Human
uugaaugaacaagugaauaaaug

SEQ ID NO: 698105 - RNA, 22 nt, Human
uuggaagagugccuaugagguc

SEQ ID NO: 698106 - RNA, 24 nt, Human
uugguucaugaucacaccacuauu

SEQ ID NO: 698107 - RNA, 21 nt, Human
aaacaacuacaagcugccccu

SEQ ID NO: 698108 - RNA, 27 nt, Human
aaacagaaaacugaggaggggggaccc

SEQ ID NO: 698109 - RNA, 21 nt, Human
aaagccaaacucgaccuaagu

SEQ ID NO: 698110 - RNA, 21 nt, Human
aaaggauaugcaacuugaaca

SEQ ID NO: 698111 - RNA, 19 nt, Human
aaagucuuuccagucuacu

SEQ ID NO: 698112 - RNA, 23 nt, Human
aacaaaugcaagucaacuaaaaa

SEQ ID NO: 698113 - RNA, 21 nt, Human
aacaacuacaagcugccccuu

SEQ ID NO: 698114 - RNA, 20 nt, Human
aacauuguaucuauuuuuau

SEQ ID NO: 698115 - RNA, 20 nt, Human
aagccaaacucgaccuaagu

SEQ ID NO: 698116 - RNA, 20 nt, Human
aaggauaugcaacuugaaca

SEQ ID NO: 698117 - RNA, 24 nt, Human
aauuuuuccuguggacucagcgug

SEQ ID NO: 698118 - RNA, 22 nt, Human
accaccuccaaaguccugaacc

SEQ ID NO: 698119 - RNA, 24 nt, Human
accggcucaggacccaggggaguu

SEQ ID NO: 698120 - RNA, 19 nt, Human
acuacagcuuguguccuuc

SEQ ID NO: 698121 - RNA, 22 nt, Human
acugcaauucacaggggauguu

SEQ ID NO: 698122 - RNA, 23 nt, Human
agaucuuuuuuuccaguggagac

SEQ ID NO: 698123 - RNA, 22 nt, Human
agcaauccuaggaucuuuagau

SEQ ID NO: 698124 - RNA, 20 nt, Human
agcacaguuuuauuauauuc

SEQ ID NO: 698125 - RNA, 18 nt, Human
agcaucuuuuuuaaauau

SEQ ID NO: 698126 - RNA, 20 nt, Human
agcauuugaaaaaaaaaagg

SEQ ID NO: 698127 - RNA, 18 nt, Human
aggagaaaacagugaugg

SEQ ID NO: 698128 - RNA, 18 nt, Human
agguguuguccaaguaca

SEQ ID NO: 698129 - RNA, 20 nt, Human
aguagucaagagaaacagcu

SEQ ID NO: 698130 - RNA, 18 nt, Human
aguuuacagauauguuuc

SEQ ID NO: 698131 - RNA, 19 nt, Human
auaaagaacaaauaugaau

SEQ ID NO: 698132 - RNA, 21 nt, Human
auaaagaacaaauaugaauua

SEQ ID NO: 698133 - RNA, 20 nt, Human
auacagcauuucugcccucu

SEQ ID NO: 698134 - RNA, 21 nt, Human
aucauccuucacucuaaaucc

SEQ ID NO: 698135 - RNA, 20 nt, Human
aucuaucuguaucugauaca

SEQ ID NO: 698136 - RNA, 21 nt, Human
auucuaucuaucuguccuuca

SEQ ID NO: 698137 - RNA, 23 nt, Human
caaaugggaauauucacugaacc

SEQ ID NO: 698138 - RNA, 23 nt, Human
caagcaauuucacaguuaaguga

SEQ ID NO: 698139 - RNA, 20 nt, Human
caccuccaaaguccugaacc

SEQ ID NO: 698140 - RNA, 20 nt, Human
cagagaacacagauuucaac

SEQ ID NO: 698141 - RNA, 22 nt, Human
cccagcgaaaagacuacagcuu

SEQ ID NO: 698142 - RNA, 18 nt, Human
ccgggcccucucugacuc

SEQ ID NO: 698143 - RNA, 26 nt, Human
ccucaaaaagccgacucaccccuuuu

SEQ ID NO: 698144 - RNA, 21 nt, Human
ccucagcucaaaaccuggcau

SEQ ID NO: 698145 - RNA, 25 nt, Human
ccugaaccccuucucaaguguacca

SEQ ID NO: 698146 - RNA, 19 nt, Human
ccugucucuucuuucauca

SEQ ID NO: 698147 - RNA, 24 nt, Human
ccugucucuucuuucaucauuucc

SEQ ID NO: 698148 - RNA, 22 nt, Human
ccuuuacugcaauucacagggg

SEQ ID NO: 698149 - RNA, 20 nt, Human
cggugcagccgcaaaaggga

SEQ ID NO: 698150 - RNA, 23 nt, Human
cuacagcuuguguccuucauagg

SEQ ID NO: 698151 - RNA, 19 nt, Human
cuagccucacuuaucuggc

SEQ ID NO: 698152 - RNA, 23 nt, Human
cucaccacuugcugucccucaaa

SEQ ID NO: 698153 - RNA, 24 nt, Human
cucagccucagcucaaaaccuggc

SEQ ID NO: 698154 - RNA, 21 nt, Human
cucccagcgaaaagacuacag

SEQ ID NO: 698155 - RNA, 26 nt, Human
cucucaccacuugcugucccucaaaa

SEQ ID NO: 698156 - RNA, 20 nt, Human
cugacucuaucagcacauac

SEQ ID NO: 698157 - RNA, 21 nt, Human
cuuugcaggcucagccucagc

SEQ ID NO: 698158 - RNA, 19 nt, Human
gaacaaauaugaauuagau

SEQ ID NO: 698159 - RNA, 24 nt, Human
gaacaaaugcaagucaacuaaaaa

SEQ ID NO: 698160 - RNA, 24 nt, Human
gagcauuugaaaaaaaaaaggguu

SEQ ID NO: 698161 - RNA, 21 nt, Human
gaugggagccucucccagcga

SEQ ID NO: 698162 - RNA, 18 nt, Human
gcucaggacccaggggag

SEQ ID NO: 698163 - RNA, 24 nt, Human
ggaaauaccggcucaggacccagg

SEQ ID NO: 698164 - RNA, 18 nt, Human
ggaauauucacugaaccc

SEQ ID NO: 698165 - RNA, 20 nt, Human
ggauguuggcuguuuuucaa

SEQ ID NO: 698166 - RNA, 19 nt, Human
gggaauauucacugaaccc

SEQ ID NO: 698167 - RNA, 18 nt, Human
ggggauugugagugggaa

SEQ ID NO: 698168 - RNA, 21 nt, Human
guaagacaaaaaucugccucu

SEQ ID NO: 698169 - RNA, 22 nt, Human
gucagagaacacagauuucaac

SEQ ID NO: 698170 - RNA, 19 nt, Human
guccaaguacaucuauguc

SEQ ID NO: 698171 - RNA, 18 nt, Human
uaaaaacagaaaacugag

SEQ ID NO: 698172 - RNA, 23 nt, Human
uaaaagccaaacucgaccuaagu

SEQ ID NO: 698173 - RNA, 31 nt, Human
uaaaauggagauguaagacaaaaaucugccu

SEQ ID NO: 698174 - RNA, 20 nt, Human
uaacuucugucagcuuucuc

SEQ ID NO: 698175 - RNA, 21 nt, Human
uaagacaaaaaucugccucuc

SEQ ID NO: 698176 - RNA, 21 nt, Human
uaauaagacucugcuuuggca

SEQ ID NO: 698177 - RNA, 21 nt, Human
uacagagaaaggcagauggga

SEQ ID NO: 698178 - RNA, 19 nt, Human
uacagcauuucugcccucu

SEQ ID NO: 698179 - RNA, 24 nt, Human
uacagcuuguguccuucauaggag

SEQ ID NO: 698180 - RNA, 23 nt, Human
uacugcaauucacaggggauguu

SEQ ID NO: 698181 - RNA, 24 nt, Human
uagaaaggauaugcaacuugaaca

SEQ ID NO: 698182 - RNA, 18 nt, Human
uagaggaggcugauggca

SEQ ID NO: 698183 - RNA, 20 nt, Human
uagaugauguaccccaggcc

SEQ ID NO: 698184 - RNA, 20 nt, Human
uaggcggcaggcacaacuaa

SEQ ID NO: 698185 - RNA, 19 nt, Human
uaugucagucugcucaguc

SEQ ID NO: 698186 - RNA, 24 nt, Human
ucaaauuaaaaacagaaaacugag

SEQ ID NO: 698187 - RNA, 20 nt, Human
ucaagaucuuuuuuuccagu

SEQ ID NO: 698188 - RNA, 23 nt, Human
ucacaggggauguuggcuguugc

SEQ ID NO: 698189 - RNA, 18 nt, Human
ucagcucaacaacacguc

SEQ ID NO: 698190 - RNA, 19 nt, Human
ucagcucaacaacacgucu

SEQ ID NO: 698191 - RNA, 22 nt, Human
ucaguccucaagccuccuuugu

SEQ ID NO: 698192 - RNA, 21 nt, Human
ucagugaucuucccuuccucu

SEQ ID NO: 698193 - RNA, 22 nt, Human
ucauccuucacucuaaauccau

SEQ ID NO: 698194 - RNA, 20 nt, Human
uccaaagaaaucauuauuug

SEQ ID NO: 698195 - RNA, 18 nt, Human
uccaaaguccugaacccc

SEQ ID NO: 698196 - RNA, 23 nt, Human
uccaccaccuccaaaguccugaa

SEQ ID NO: 698197 - RNA, 23 nt, Human
ucccagcgaaaagacuacagcuu

SEQ ID NO: 698198 - RNA, 24 nt, Human
ucccucaaaaagccgacucacccc

SEQ ID NO: 698199 - RNA, 19 nt, Human
uccucuguuccaccaccuc

SEQ ID NO: 698200 - RNA, 18 nt, Human
uccuguggacucagcgug

SEQ ID NO: 698201 - RNA, 24 nt, Human
ucuagccugaguuuacugugaugu

SEQ ID NO: 698202 - RNA, 20 nt, Human
ucugucagugaucuucccuu

SEQ ID NO: 698203 - RNA, 22 nt, Human
ugacucagggcaaguaacuucu

SEQ ID NO: 698204 - RNA, 18 nt, Human
ugagaauaaaaacugucu

SEQ ID NO: 698205 - RNA, 24 nt, Human
ugagacuauucccuguugaacccc

SEQ ID NO: 698206 - RNA, 24 nt, Human
ugaggaggguagaauuucaaguuc

SEQ ID NO: 698207 - RNA, 22 nt, Human
ugauaucuguauucacauauca

SEQ ID NO: 698208 - RNA, 23 nt, Human
ugauggcaacacaaaugaaaacu

SEQ ID NO: 698209 - RNA, 24 nt, Human
ugauggcaacacaaaugaaaacua

SEQ ID NO: 698210 - RNA, 19 nt, Human
ugauuagacugugagcuuu

SEQ ID NO: 698211 - RNA, 19 nt, Human
ugcauguucugggcucuca

SEQ ID NO: 698212 - RNA, 23 nt, Human
ugccugucucuucuuucaucauu

SEQ ID NO: 698213 - RNA, 26 nt, Human
ugcucccuacagaguauuucacacca

SEQ ID NO: 698214 - RNA, 18 nt, Human
ugcuuuguuccuuuacug

SEQ ID NO: 698215 - RNA, 21 nt, Human
uggacucagcgugaaccacug

SEQ ID NO: 698216 - RNA, 26 nt, Human
uggagauguaagacaaaaaucugccu

SEQ ID NO: 698217 - RNA, 19 nt, Human
uggaugguggugggagggc

SEQ ID NO: 698218 - RNA, 18 nt, Human
ugggaagagacaugcucc

SEQ ID NO: 698219 - RNA, 21 nt, Human
ugggaagagacaugcuccuug

SEQ ID NO: 698220 - RNA, 22 nt, Human
ugggaauauucacugaacccug

SEQ ID NO: 698221 - RNA, 24 nt, Human
ugggagccucucccagcgaaaaga

SEQ ID NO: 698222 - RNA, 20 nt, Human
ugggagggcuagcaggaaac

SEQ ID NO: 698223 - RNA, 23 nt, Human
ugggagggcuagcaggaaacuag

SEQ ID NO: 698224 - RNA, 22 nt, Human
uggugagguguuguccaaguac

SEQ ID NO: 698225 - RNA, 18 nt, Human
uguaagacaaaaaucugc

SEQ ID NO: 698226 - RNA, 22 nt, Human
uguaagacagaauaacaagcaa

SEQ ID NO: 698227 - RNA, 19 nt, Human
uguccacuuaacggaugac

SEQ ID NO: 698228 - RNA, 19 nt, Human
uuaaauaucugccauaaca

SEQ ID NO: 698229 - RNA, 21 nt, Human
uuacagagaaaggcagauggg

SEQ ID NO: 698230 - RNA, 19 nt, Human
uuagauguaaagagcuugg

SEQ ID NO: 698231 - RNA, 21 nt, Human
uucacuauggcguucucucca

SEQ ID NO: 698232 - RNA, 19 nt, Human
uucugucagcuuucucauc

SEQ ID NO: 698233 - RNA, 21 nt, Human
uugaaaaaaaaaaggguucac

SEQ ID NO: 698234 - RNA, 21 nt, Human
uugcucccuacagaguauuuc

SEQ ID NO: 698235 - RNA, 23 nt, Human
uuuacagauauguuuccuuuaua

SEQ ID NO: 698236 - RNA, 19 nt, Human
uuuagaguucaaaggaugg

SEQ ID NO: 698237 - RNA, 20 nt, Human
uuucucaucuauaaaaugga

SEQ ID NO: 698238 - RNA, 22 nt, Human
uuuguugggaaaaggauaugcc

SEQ ID NO: 698239 - RNA, 23 nt, Human
aagccaugccuuccccgccccug

SEQ ID NO: 698240 - RNA, 22 nt, Human
aggcuuggggcuguaccgcccg

SEQ ID NO: 698241 - RNA, 19 nt, Human
aggguguuaucuggggguc

SEQ ID NO: 698242 - RNA, 22 nt, Human
caagccaugccuuccccgcccc

SEQ ID NO: 698243 - RNA, 22 nt, Human
caccucguccugggccugucac

SEQ ID NO: 698244 - RNA, 22 nt, Human
cauuggggugcuccacccucuc

SEQ ID NO: 698245 - RNA, 24 nt, Human
ccacccccggcuucgccccaggcg

SEQ ID NO: 698246 - RNA, 19 nt, Human
ccacucuuaguccgccagc

SEQ ID NO: 698247 - RNA, 21 nt, Human
cccgccccuggggcccuggga

SEQ ID NO: 698248 - RNA, 25 nt, Human
cccggcuucgccccaggcgggggag

SEQ ID NO: 698249 - RNA, 24 nt, Human
ccucugaauauccuggccagcaag

SEQ ID NO: 698250 - RNA, 23 nt, Human
ccugggagcccuucagcuccugu

SEQ ID NO: 698251 - RNA, 24 nt, Human
ccuguccccauaauggguccuggg

SEQ ID NO: 698252 - RNA, 20 nt, Human
cgggaacagguccacugcca

SEQ ID NO: 698253 - RNA, 22 nt, Human
cuggccccuagcagcaggccaa

SEQ ID NO: 698254 - RNA, 21 nt, Human
cuuccuggucagggccccugg

SEQ ID NO: 698255 - RNA, 18 nt, Human
gccccaagaccccugugc

SEQ ID NO: 698256 - RNA, 25 nt, Human
gccuagaccagggacgccauggggg

SEQ ID NO: 698257 - RNA, 26 nt, Human
gccuagaccagggacgccaugggggc

SEQ ID NO: 698258 - RNA, 19 nt, Human
gccuggccaccucguccug

SEQ ID NO: 698259 - RNA, 19 nt, Human
gcuuggggcuguaccgccc

SEQ ID NO: 698260 - RNA, 20 nt, Human
ggacgccaugggggccgccu

SEQ ID NO: 698261 - RNA, 23 nt, Human
ggccccuagcagcaggccaaucc

SEQ ID NO: 698262 - RNA, 18 nt, Human
ggccugucacaagggaag

SEQ ID NO: 698263 - RNA, 18 nt, Human
ggcuguaccgcccgcccg

SEQ ID NO: 698264 - RNA, 26 nt, Human
ggcuguggggccccaagaccccugug

SEQ ID NO: 698265 - RNA, 21 nt, Human
ggcuuggggcuguaccgcccg

SEQ ID NO: 698266 - RNA, 20 nt, Human
gggccccuggccccuagcag

SEQ ID NO: 698267 - RNA, 24 nt, Human
gggcuguggggccccaagaccccu

SEQ ID NO: 698268 - RNA, 19 nt, Human
guggguugagcuggagggc

SEQ ID NO: 698269 - RNA, 22 nt, Human
uccccgccccuggggcccuggg

SEQ ID NO: 698270 - RNA, 27 nt, Human
ucgccgccacccccggcuucgccccag

SEQ ID NO: 698271 - RNA, 23 nt, Human
ucucacagugcggggucugcggg

SEQ ID NO: 698272 - RNA, 19 nt, Human
ucugaauauccuggccagc

SEQ ID NO: 698273 - RNA, 21 nt, Human
ucuggcccucacagccuuggc

SEQ ID NO: 698274 - RNA, 22 nt, Human
ucuuccuggucagggccccugg

SEQ ID NO: 698275 - RNA, 22 nt, Human
ugagcuggagggcuguggggcc

SEQ ID NO: 698276 - RNA, 22 nt, Human
uggccagcaagccaugccuucc

SEQ ID NO: 698277 - RNA, 25 nt, Human
uggccccuagcagcaggccaauccu

SEQ ID NO: 698278 - RNA, 18 nt, Human
uggguugagcuggagggc

SEQ ID NO: 698279 - RNA, 22 nt, Human
uuccccgccccuggggcccugg

SEQ ID NO: 698280 - RNA, 26 nt, Human
uuucuuguaggguguuaucugggggu

SEQ ID NO: 698281 - RNA, 23 nt, Human
aaaaaacaaaaacaaagaaaaca

SEQ ID NO: 698282 - RNA, 18 nt, Human
aaaaagucaagcaaauaa

SEQ ID NO: 698283 - RNA, 19 nt, Human
aaacaaagaaaacaagugu

SEQ ID NO: 698284 - RNA, 19 nt, Human
aaacaauaaaaacuaacag

SEQ ID NO: 698285 - RNA, 18 nt, Human
aacauuuuaucuaugucc

SEQ ID NO: 698286 - RNA, 18 nt, Human
aagcaaauaaaauuacau

SEQ ID NO: 698287 - RNA, 23 nt, Human
aagcaaauaaaauuacauaagca

SEQ ID NO: 698288 - RNA, 21 nt, Human
acagacauaaaugaaucccau

SEQ ID NO: 698289 - RNA, 18 nt, Human
accaugguucaaaucaca

SEQ ID NO: 698290 - RNA, 20 nt, Human
agaaagacagacauaaauga

SEQ ID NO: 698291 - RNA, 21 nt, Human
agggagggaguugccgcuagg

SEQ ID NO: 698292 - RNA, 19 nt, Human
auacaaacaacuucauuca

SEQ ID NO: 698293 - RNA, 19 nt, Human
aucuaaaaauauccaaagc

SEQ ID NO: 698294 - RNA, 24 nt, Human
caaaaaaauaguaucucuguaaca

SEQ ID NO: 698295 - RNA, 22 nt, Human
caaaagagagacucaccucuca

SEQ ID NO: 698296 - RNA, 19 nt, Human
caaacaacuucauucaggu

SEQ ID NO: 698297 - RNA, 25 nt, Human
cacaauaucauauaaaaagucaagc

SEQ ID NO: 698298 - RNA, 23 nt, Human
ccaaagcaccaaggcaaaagaga

SEQ ID NO: 698299 - RNA, 18 nt, Human
cccacuggcucacccggg

SEQ ID NO: 698300 - RNA, 21 nt, Human
cuaggcucuacgccaugaggu

SEQ ID NO: 698301 - RNA, 19 nt, Human
gaaggaaggauugcaggga

SEQ ID NO: 698302 - RNA, 19 nt, Human
gacagacauaaaugaaucc

SEQ ID NO: 698303 - RNA, 20 nt, Human
gauugcagggagggagggag

SEQ ID NO: 698304 - RNA, 24 nt, Human
gcaguuuucuuggaagaaaaaaaa

SEQ ID NO: 698305 - RNA, 23 nt, Human
gccaugaggucagacgccgcggc

SEQ ID NO: 698306 - RNA, 22 nt, Human
gcccucggcacauacgucccag

SEQ ID NO: 698307 - RNA, 19 nt, Human
ggacucggcugggagccug

SEQ ID NO: 698308 - RNA, 23 nt, Human
ggagggagggaguugccgcuagg

SEQ ID NO: 698309 - RNA, 24 nt, Human
gggagggagggaguugccgcuagg

SEQ ID NO: 698310 - RNA, 23 nt, Human
gguucagggguauuuccauugug

SEQ ID NO: 698311 - RNA, 23 nt, Human
uaaacucugcccauugcuugaaa

SEQ ID NO: 698312 - RNA, 21 nt, Human
uaacaguguaaauauaaggua

SEQ ID NO: 698313 - RNA, 21 nt, Human
uacaaacaacuucauucaggu

SEQ ID NO: 698314 - RNA, 23 nt, Human
uacauuacaguuuggggaacaaa

SEQ ID NO: 698315 - RNA, 27 nt, Human
uagaaagacagacauaaaugaauccca

SEQ ID NO: 698316 - RNA, 20 nt, Human
uauacaaacaacuucauuca

SEQ ID NO: 698317 - RNA, 25 nt, Human
ucaagcaaauaaaauuacauaagcc

SEQ ID NO: 698318 - RNA, 22 nt, Human
uccagaagaagcauaauaaauc

SEQ ID NO: 698319 - RNA, 20 nt, Human
ucuacgccaugaggucagac

SEQ ID NO: 698320 - RNA, 21 nt, Human
ugaggucagacgccgcggccc

SEQ ID NO: 698321 - RNA, 21 nt, Human
ugccauaaaaaacaaaaacaa

SEQ ID NO: 698322 - RNA, 24 nt, Human
ugccauaaaaaacaaaaacaaaga

SEQ ID NO: 698323 - RNA, 27 nt, Human
ugccauaaaaaacaaaaacaaagaaaa

SEQ ID NO: 698324 - RNA, 18 nt, Human
uggaggaacccaugcuac

SEQ ID NO: 698325 - RNA, 24 nt, Human
uggggaacaaaaaaaaaaugugga

SEQ ID NO: 698326 - RNA, 20 nt, Human
uucaaauuuacuguaaaaua

SEQ ID NO: 698327 - RNA, 21 nt, Human
uugccauaaaaaacaaaaaca

SEQ ID NO: 698328 - RNA, 19 nt, Human
uugcuugaaaccuuggagg

SEQ ID NO: 698329 - RNA, 20 nt, Human
uuggacaccugauuaaacuc

SEQ ID NO: 698330 - RNA, 24 nt, Human
uuguacacaaauauccuuuaugua

SEQ ID NO: 698331 - RNA, 26 nt, Human
uuuaauauaguaauuccaaccaaaaa

SEQ ID NO: 698332 - RNA, 25 nt, Human
aaaaaagcaaaaacugaggcuugaa

SEQ ID NO: 698333 - RNA, 22 nt, Human
aaaagaagaguacagaagaaaa

SEQ ID NO: 698334 - RNA, 23 nt, Human
aaacaauuaacugcuuccucuca

SEQ ID NO: 698335 - RNA, 19 nt, Human
aaaccaagccccuuuccca

SEQ ID NO: 698336 - RNA, 21 nt, Human
aaagaagccacagcuggccug

SEQ ID NO: 698337 - RNA, 23 nt, Human
aaagaagccacagcuggccugag

SEQ ID NO: 698338 - RNA, 21 nt, Human
aaagcugcagaggcaggcuga

SEQ ID NO: 698339 - RNA, 18 nt, Human
aaauauucuaagccgugg

SEQ ID NO: 698340 - RNA, 24 nt, Human
aaaugacaaagaaaagcaaauucc

SEQ ID NO: 698341 - RNA, 19 nt, Human
aaaugcuggugauuagcuu

SEQ ID NO: 698342 - RNA, 24 nt, Human
aacaacuaucccuaaagcacaaaa

SEQ ID NO: 698343 - RNA, 21 nt, Human
aacucuugccuuccccgcggc

SEQ ID NO: 698344 - RNA, 21 nt, Human
aagaaaaaaaaaaaauggcug

SEQ ID NO: 698345 - RNA, 19 nt, Human
aagaagaguacagaagaaa

SEQ ID NO: 698346 - RNA, 19 nt, Human
aagacacagaggaaaugaa

SEQ ID NO: 698347 - RNA, 19 nt, Human
aagagaacccuggccaagc

SEQ ID NO: 698348 - RNA, 23 nt, Human
aagcagcuuggcaucuuuccucu

SEQ ID NO: 698349 - RNA, 23 nt, Human
aagcggcaaugcuaugcgugggc

SEQ ID NO: 698350 - RNA, 24 nt, Human
aagcggcaaugcuaugcgugggcu

SEQ ID NO: 698351 - RNA, 18 nt, Human
aagcugaagcggcaaugc

SEQ ID NO: 698352 - RNA, 24 nt, Human
aagcugcagaggcaggcugagagg

SEQ ID NO: 698353 - RNA, 21 nt, Human
aauccagccuuacaaccaccc

SEQ ID NO: 698354 - RNA, 24 nt, Human
accaccccaugggcuaaaaggaug

SEQ ID NO: 698355 - RNA, 25 nt, Human
accccaugggcuaaaaggauggagg

SEQ ID NO: 698356 - RNA, 19 nt, Human
acccugagauauucagaaa

SEQ ID NO: 698357 - RNA, 18 nt, Human
agacaguccucagcaagc

SEQ ID NO: 698358 - RNA, 20 nt, Human
agagagagagaacuaacauu

SEQ ID NO: 698359 - RNA, 18 nt, Human
agauccagaggacuuggc

SEQ ID NO: 698360 - RNA, 19 nt, Human
agccacagcuggccugaga

SEQ ID NO: 698361 - RNA, 20 nt, Human
agcuccuuucucacuggcuu

SEQ ID NO: 698362 - RNA, 18 nt, Human
aggcaaaagaagaguaca

SEQ ID NO: 698363 - RNA, 21 nt, Human
aggcaaaagaagaguacagaa

SEQ ID NO: 698364 - RNA, 23 nt, Human
aggcaagacacucagaaaccaag

SEQ ID NO: 698365 - RNA, 20 nt, Human
aggcaggcugagagguggcu

SEQ ID NO: 698366 - RNA, 20 nt, Human
aggcugaccucagcaacacu

SEQ ID NO: 698367 - RNA, 21 nt, Human
agguaggaggaaggugguaga

SEQ ID NO: 698368 - RNA, 21 nt, Human
aguaaaugacagaaaugcuga

SEQ ID NO: 698369 - RNA, 25 nt, Human
aguaauccacccaaaauaaggcaac

SEQ ID NO: 698370 - RNA, 18 nt, Human
aguguuccagagcuguaa

SEQ ID NO: 698371 - RNA, 21 nt, Human
caaagaaaagcaaauucccac

SEQ ID NO: 698372 - RNA, 22 nt, Human
caaugggccaacaccacuugaa

SEQ ID NO: 698373 - RNA, 23 nt, Human
cacaguccgucgcagaacugccc

SEQ ID NO: 698374 - RNA, 20 nt, Human
caccaggaugacugggaaug

SEQ ID NO: 698375 - RNA, 18 nt, Human
caccuagauuggaagauu

SEQ ID NO: 698376 - RNA, 19 nt, Human
cagaaaccaagccccuuuc

SEQ ID NO: 698377 - RNA, 21 nt, Human
cagaaaccaagccccuuuccc

SEQ ID NO: 698378 - RNA, 18 nt, Human
cagcaacaccuagaauca

SEQ ID NO: 698379 - RNA, 21 nt, Human
cagcaacaccuagaaucaucu

SEQ ID NO: 698380 - RNA, 20 nt, Human
caguccgucgcagaacugcc

SEQ ID NO: 698381 - RNA, 19 nt, Human
caguccucagcaagcugaa

SEQ ID NO: 698382 - RNA, 18 nt, Human
caugauugagccaggugc

SEQ ID NO: 698383 - RNA, 18 nt, Human
cauuguaaagacaaagug

SEQ ID NO: 698384 - RNA, 22 nt, Human
ccaggugcuucccuguggucag

SEQ ID NO: 698385 - RNA, 22 nt, Human
ccaucucagcaaagaagccaca

SEQ ID NO: 698386 - RNA, 18 nt, Human
cccaaaaugacaaagaaa

SEQ ID NO: 698387 - RNA, 19 nt, Human
cccaaagacacagaggaaa

SEQ ID NO: 698388 - RNA, 19 nt, Human
cccaaaguguuccagagcu

SEQ ID NO: 698389 - RNA, 22 nt, Human
cccacccucuuugccuugauuu

SEQ ID NO: 698390 - RNA, 26 nt, Human
ccccuagauauccaaggacuugguuc

SEQ ID NO: 698391 - RNA, 20 nt, Human
cccuggacccaggccuuccc

SEQ ID NO: 698392 - RNA, 20 nt, Human
ccgucgcagaacugcccucc

SEQ ID NO: 698393 - RNA, 21 nt, Human
ccuccaucucagcaaagaagc

SEQ ID NO: 698394 - RNA, 21 nt, Human
ccucgggaaagaugggcugcu

SEQ ID NO: 698395 - RNA, 21 nt, Human
ccugagagcuugggggcuucu

SEQ ID NO: 698396 - RNA, 18 nt, Human
ccugugacuauggggaac

SEQ ID NO: 698397 - RNA, 23 nt, Human
ccuguggucagggaauguguggc

SEQ ID NO: 698398 - RNA, 19 nt, Human
ccuuguguggcccugugac

SEQ ID NO: 698399 - RNA, 23 nt, Human
ccuuuaaaaaagcaaaaacugag

SEQ ID NO: 698400 - RNA, 25 nt, Human
cggaacuuguaagaaacugccuuuu

SEQ ID NO: 698401 - RNA, 22 nt, Human
cgucgcagaacugcccuccuua

SEQ ID NO: 698402 - RNA, 24 nt, Human
cuacuccacagaguagauacagcc

SEQ ID NO: 698403 - RNA, 23 nt, Human
cuauaaguaucaaagccaaggcc

SEQ ID NO: 698404 - RNA, 23 nt, Human
cucacacauccugcauaaguuuc

SEQ ID NO: 698405 - RNA, 23 nt, Human
cucuggaugaucaacaaucggcc

SEQ ID NO: 698406 - RNA, 20 nt, Human
cugaggcuugaaaauguuaa

SEQ ID NO: 698407 - RNA, 23 nt, Human
cugcagaggcaggcugagaggug

SEQ ID NO: 698408 - RNA, 23 nt, Human
cugcugcauggccgacguguaug

SEQ ID NO: 698409 - RNA, 22 nt, Human
cugcuggaugaacuuaagaugc

SEQ ID NO: 698410 - RNA, 18 nt, Human
cuuaagaugcccuggacc

SEQ ID NO: 698411 - RNA, 24 nt, Human
cuuccccgcggccccccaucuuua

SEQ ID NO: 698412 - RNA, 22 nt, Human
cuugcaccaggcugaccucagc

SEQ ID NO: 698413 - RNA, 24 nt, Human
cuuggcccauuccugugguccugu

SEQ ID NO: 698414 - RNA, 20 nt, Human
cuuuaaaaaagcaaaaacug

SEQ ID NO: 698415 - RNA, 22 nt, Human
cuuucugccaaacagcuuuccc

SEQ ID NO: 698416 - RNA, 20 nt, Human
gaaaaaaaaagaugagaagg

SEQ ID NO: 698417 - RNA, 20 nt, Human
gaacaguuaaccgacaaagc

SEQ ID NO: 698418 - RNA, 21 nt, Human
gaaccaggcugccuggaagcc

SEQ ID NO: 698419 - RNA, 21 nt, Human
gaaccuucuucguacacugcc

SEQ ID NO: 698420 - RNA, 19 nt, Human
gaagcagcuuggcaucuuu

SEQ ID NO: 698421 - RNA, 19 nt, Human
gaagccacagcuggccuga

SEQ ID NO: 698422 - RNA, 18 nt, Human
gaaggcaaaagaagagua

SEQ ID NO: 698423 - RNA, 24 nt, Human
gacacagaggaaaugaaacucaua

SEQ ID NO: 698424 - RNA, 21 nt, Human
gacacauguuagaaggaaguc

SEQ ID NO: 698425 - RNA, 24 nt, Human
gagaaaggaauauuuucuaggaua

SEQ ID NO: 698426 - RNA, 22 nt, Human
gagaaguacaagcaccaggaug

SEQ ID NO: 698427 - RNA, 19 nt, Human
gaggcucuggaugaucaac

SEQ ID NO: 698428 - RNA, 20 nt, Human
gauaugaaaaaaaaagauga

SEQ ID NO: 698429 - RNA, 22 nt, Human
gccaaggccacggcugaguucu

SEQ ID NO: 698430 - RNA, 24 nt, Human
gccauggagaaaguuuguccuaaa

SEQ ID NO: 698431 - RNA, 21 nt, Human
gccuuccccgcggccccccau

SEQ ID NO: 698432 - RNA, 24 nt, Human
gcggccccccaucuuuacuuucaa

SEQ ID NO: 698433 - RNA, 21 nt, Human
gcucagugguaggugugacuu

SEQ ID NO: 698434 - RNA, 21 nt, Human
gcuggggauggauuggaaaau

SEQ ID NO: 698435 - RNA, 21 nt, Human
ggauaagagaaagcuggaggg

SEQ ID NO: 698436 - RNA, 19 nt, Human
ggaucauaggccauggaga

SEQ ID NO: 698437 - RNA, 20 nt, Human
gggaauguguggcuccacau

SEQ ID NO: 698438 - RNA, 20 nt, Human
ggggauggauuggaaaaugg

SEQ ID NO: 698439 - RNA, 20 nt, Human
gguccucuugauuuuucuuu

SEQ ID NO: 698440 - RNA, 22 nt, Human
guccuucuuacuuuucaggcug

SEQ ID NO: 698441 - RNA, 20 nt, Human
uaaaaauggcuaaaucugcu

SEQ ID NO: 698442 - RNA, 21 nt, Human
uaaagagacaaaucagcccca

SEQ ID NO: 698443 - RNA, 23 nt, Human
uaagaugcccuggacccaggccu

SEQ ID NO: 698444 - RNA, 21 nt, Human
uaagguaauuagauccagagg

SEQ ID NO: 698445 - RNA, 19 nt, Human
uaaguagcagacacuuccc

SEQ ID NO: 698446 - RNA, 23 nt, Human
uacccugagauauucagaaacaa

SEQ ID NO: 698447 - RNA, 19 nt, Human
uagauccagaggacuuggc

SEQ ID NO: 698448 - RNA, 21 nt, Human
uagccaagcccucaguccauc

SEQ ID NO: 698449 - RNA, 21 nt, Human
uaggagcaaugaaugaugugu

SEQ ID NO: 698450 - RNA, 20 nt, Human
uaucccaacuugcaccaggc

SEQ ID NO: 698451 - RNA, 20 nt, Human
ucacauguacuaacuaaagc

SEQ ID NO: 698452 - RNA, 19 nt, Human
ucagagguaucauaauguc

SEQ ID NO: 698453 - RNA, 22 nt, Human
ucagccccaaaguguuccagag

SEQ ID NO: 698454 - RNA, 21 nt, Human
uccuucuuacuuuucaggcug

SEQ ID NO: 698455 - RNA, 19 nt, Human
uccuuggcccauuccugug

SEQ ID NO: 698456 - RNA, 24 nt, Human
ucuugguuauucagggaagagggg

SEQ ID NO: 698457 - RNA, 20 nt, Human
ugaccucagcaacacuucca

SEQ ID NO: 698458 - RNA, 21 nt, Human
ugaccucagcaacacuuccau

SEQ ID NO: 698459 - RNA, 26 nt, Human
ugagaaggcaagacacucagaaacca

SEQ ID NO: 698460 - RNA, 21 nt, Human
ugagagguggcuccaagagaa

SEQ ID NO: 698461 - RNA, 18 nt, Human
ugaggaacugccaucaga

SEQ ID NO: 698462 - RNA, 20 nt, Human
ugaggaacugccaucagagg

SEQ ID NO: 698463 - RNA, 22 nt, Human
ugcugcauggccgacguguaug

SEQ ID NO: 698464 - RNA, 21 nt, Human
ugcugugugacaugauugagc

SEQ ID NO: 698465 - RNA, 19 nt, Human
uggaguaauccacccaaaa

SEQ ID NO: 698466 - RNA, 19 nt, Human
uggcacaaaacugaguuuc

SEQ ID NO: 698467 - RNA, 18 nt, Human
uggcaucuuuccucucca

SEQ ID NO: 698468 - RNA, 24 nt, Human
uggccaagccauuuauggucaggg

SEQ ID NO: 698469 - RNA, 25 nt, Human
uggccaagccauuuauggucagggg

SEQ ID NO: 698470 - RNA, 21 nt, Human
uggccugguucacccacccuc

SEQ ID NO: 698471 - RNA, 19 nt, Human
ugggaagaggaguuacugg

SEQ ID NO: 698472 - RNA, 24 nt, Human
ugggaggccuggccugcuagaggg

SEQ ID NO: 698473 - RNA, 21 nt, Human
ugggcuaaaaggauggaggau

SEQ ID NO: 698474 - RNA, 25 nt, Human
ugguaagcuccuuucucacuggcuu

SEQ ID NO: 698475 - RNA, 21 nt, Human
uggucaggggaguagccaagc

SEQ ID NO: 698476 - RNA, 24 nt, Human
uguaagaaacugccuuuuccugau

SEQ ID NO: 698477 - RNA, 19 nt, Human
uguacuaacuaaagcacaa

SEQ ID NO: 698478 - RNA, 23 nt, Human
ugucuccauccccuuggguccuc

SEQ ID NO: 698479 - RNA, 22 nt, Human
uguggcuccacaugguuccuac

SEQ ID NO: 698480 - RNA, 20 nt, Human
uguguaucauagcagaagua

SEQ ID NO: 698481 - RNA, 22 nt, Human
uguuccagagcuguaaaugaaa

SEQ ID NO: 698482 - RNA, 19 nt, Human
uuagauccagaggacuugg

SEQ ID NO: 698483 - RNA, 21 nt, Human
uucccaaaaugacaaagaaaa

SEQ ID NO: 698484 - RNA, 23 nt, Human
uucccaaaaugacaaagaaaagc

SEQ ID NO: 698485 - RNA, 19 nt, Human
uuccccuccuuuaaaaaag

SEQ ID NO: 698486 - RNA, 21 nt, Human
uuccucucacacauccugcau

SEQ ID NO: 698487 - RNA, 18 nt, Human
uugguucuuuucuccaag

SEQ ID NO: 698488 - RNA, 23 nt, Human
uuuucuguccuucuuacuuuuca

SEQ ID NO: 698489 - RNA, 18 nt, Human
aacucagaagaguaacaa

SEQ ID NO: 698490 - RNA, 22 nt, Human
acagcgcgagccgcacgcccac

SEQ ID NO: 698491 - RNA, 20 nt, Human
acucagaagaguaacaaagg

SEQ ID NO: 698492 - RNA, 24 nt, Human
agucucuggaacggggggagcagc

SEQ ID NO: 698493 - RNA, 18 nt, Human
aguguacuaaauuagaau

SEQ ID NO: 698494 - RNA, 24 nt, Human
gaacagcgcgagccgcacgcccac

SEQ ID NO: 698495 - RNA, 23 nt, Human
gcagcuccgucaccaggaaggcc

SEQ ID NO: 698496 - RNA, 20 nt, Human
gcuggaugagucucuggaac

SEQ ID NO: 698497 - RNA, 19 nt, Human
ggagcagcuccgucaccag

SEQ ID NO: 698498 - RNA, 19 nt, Human
ucaaaacacaucuuaagua

SEQ ID NO: 698499 - RNA, 23 nt, Human
uccuccggcuggaugagucucug

SEQ ID NO: 698500 - RNA, 21 nt, Human
ucugaacaccaaaucaaaaca

SEQ ID NO: 698501 - RNA, 28 nt, Human
ugagucucuggaacggggggagcagcuc

SEQ ID NO: 698502 - RNA, 27 nt, Human
aaaaaaaagacacuagggguuagagaa

SEQ ID NO: 698503 - RNA, 25 nt, Human
aaccuaaaagcaaaguugugaaaga

SEQ ID NO: 698504 - RNA, 19 nt, Human
aagaaaaaaaagacacuag

SEQ ID NO: 698505 - RNA, 19 nt, Human
aagggccagcuugccugcc

SEQ ID NO: 698506 - RNA, 22 nt, Human
acucccugggccaccaagguug

SEQ ID NO: 698507 - RNA, 19 nt, Human
agaaaaaaaagacacuagg

SEQ ID NO: 698508 - RNA, 24 nt, Human
agaaauccucuguccccaccuaac

SEQ ID NO: 698509 - RNA, 23 nt, Human
agacacuagggguuagagaagcc

SEQ ID NO: 698510 - RNA, 21 nt, Human
agcugcugggggugggacaag

SEQ ID NO: 698511 - RNA, 26 nt, Human
agcugcugggggugggacaagggugu

SEQ ID NO: 698512 - RNA, 18 nt, Human
aggguguaagggccuuga

SEQ ID NO: 698513 - RNA, 22 nt, Human
agugaggugaagaaaaaaaaga

SEQ ID NO: 698514 - RNA, 20 nt, Human
auuuuauucuucccacuccc

SEQ ID NO: 698515 - RNA, 19 nt, Human
caagguuggggagcugcca

SEQ ID NO: 698516 - RNA, 22 nt, Human
cacucccaucaucugauggggg

SEQ ID NO: 698517 - RNA, 26 nt, Human
caggacuguacccccuccuccacugg

SEQ ID NO: 698518 - RNA, 23 nt, Human
ccaccuaaccaggacuguacccc

SEQ ID NO: 698519 - RNA, 18 nt, Human
ccacucccaucaucugau

SEQ ID NO: 698520 - RNA, 19 nt, Human
ccauggugagcugcugggg

SEQ ID NO: 698521 - RNA, 19 nt, Human
cccuggguccugaggggcc

SEQ ID NO: 698522 - RNA, 21 nt, Human
ccuccgagugcucagggcgag

SEQ ID NO: 698523 - RNA, 19 nt, Human
ccucucguggccacugcuc

SEQ ID NO: 698524 - RNA, 21 nt, Human
ccucucguggccacugcucac

SEQ ID NO: 698525 - RNA, 20 nt, Human
ccuucaaccuaaaagcaaag

SEQ ID NO: 698526 - RNA, 18 nt, Human
cuccacugggcuguaccc

SEQ ID NO: 698527 - RNA, 26 nt, Human
cugaggcugcagccucacacucccug

SEQ ID NO: 698528 - RNA, 24 nt, Human
cugcagccucacacucccugggcc

SEQ ID NO: 698529 - RNA, 20 nt, Human
cuguacccccuccuccacug

SEQ ID NO: 698530 - RNA, 20 nt, Human
gaaauccucuguccccaccu

SEQ ID NO: 698531 - RNA, 18 nt, Human
gacaaggguguaagggcc

SEQ ID NO: 698532 - RNA, 19 nt, Human
gacuuugucugugucuuga

SEQ ID NO: 698533 - RNA, 20 nt, Human
gagagcauguuuuaaagcca

SEQ ID NO: 698534 - RNA, 20 nt, Human
gagcugccaaguuuuccugc

SEQ ID NO: 698535 - RNA, 23 nt, Human
gagcugcugggggugggacaagg

SEQ ID NO: 698536 - RNA, 18 nt, Human
gccauggugagcugcugg

SEQ ID NO: 698537 - RNA, 20 nt, Human
gccauggugagcugcugggg

SEQ ID NO: 698538 - RNA, 20 nt, Human
ggggaugaguguucagggaa

SEQ ID NO: 698539 - RNA, 20 nt, Human
gggggugggacaagggugua

SEQ ID NO: 698540 - RNA, 18 nt, Human
gucccuggcauucccugg

SEQ ID NO: 698541 - RNA, 23 nt, Human
uaagagagcauguuuuaaagcca

SEQ ID NO: 698542 - RNA, 23 nt, Human
uaguagagaguugguuuugccuu

SEQ ID NO: 698543 - RNA, 22 nt, Human
ucacugcauuuuauucuuccca

SEQ ID NO: 698544 - RNA, 24 nt, Human
ucccagccagccugccucucgugg

SEQ ID NO: 698545 - RNA, 21 nt, Human
ucccuggguccugaggggccu

SEQ ID NO: 698546 - RNA, 20 nt, Human
ucccuuauucaggugagggu

SEQ ID NO: 698547 - RNA, 25 nt, Human
ugaagaaaaaaaagacacuaggggu

SEQ ID NO: 698548 - RNA, 24 nt, Human
ugccaaccucaugucccagccagc

SEQ ID NO: 698549 - RNA, 19 nt, Human
ugccucucguggccacugc

SEQ ID NO: 698550 - RNA, 21 nt, Human
ugccuucaaccuaaaagcaaa

SEQ ID NO: 698551 - RNA, 21 nt, Human
ugcugggggugggacaagggu

SEQ ID NO: 698552 - RNA, 20 nt, Human
ugggggugggacaagggugu

SEQ ID NO: 698553 - RNA, 24 nt, Human
uguacccccuccuccacugggcug

SEQ ID NO: 698554 - RNA, 18 nt, Human
uucaggugagggucaaug

SEQ ID NO: 698555 - RNA, 19 nt, Human
uuccaagcauaggagugcc

SEQ ID NO: 698556 - RNA, 19 nt, Human
uugguggaaggguucagac

SEQ ID NO: 698557 - RNA, 20 nt, Human
accagcaggacccagcgggc

SEQ ID NO: 698558 - RNA, 21 nt, Human
acccugggcccuuuuugcccu

SEQ ID NO: 698559 - RNA, 20 nt, Human
accuggguccgcgggggccc

SEQ ID NO: 698560 - RNA, 19 nt, Human
agcccaggugagaaggugg

SEQ ID NO: 698561 - RNA, 20 nt, Human
aggcuccgaagcccacaacc

SEQ ID NO: 698562 - RNA, 19 nt, Human
aggcugaacgaggguggga

SEQ ID NO: 698563 - RNA, 19 nt, Human
aggcuucaucuucccucaa

SEQ ID NO: 698564 - RNA, 18 nt, Human
agggaccgugacccagag

SEQ ID NO: 698565 - RNA, 18 nt, Human
aggggagagagccugagg

SEQ ID NO: 698566 - RNA, 22 nt, Human
agguagaggugggagagcaggg

SEQ ID NO: 698567 - RNA, 19 nt, Human
auaacccugggcccuuuuu

SEQ ID NO: 698568 - RNA, 19 nt, Human
cacccccauuucuuugggg

SEQ ID NO: 698569 - RNA, 27 nt, Human
caccuucagcuccugguacaucaguuu

SEQ ID NO: 698570 - RNA, 21 nt, Human
cagcaugcacccccauuucuu

SEQ ID NO: 698571 - RNA, 25 nt, Human
cagcgggcuuucuuuuccgcagccu

SEQ ID NO: 698572 - RNA, 19 nt, Human
caggacccagcgggcuuuc

SEQ ID NO: 698573 - RNA, 24 nt, Human
cagugcgugccccaguccgggcuc

SEQ ID NO: 698574 - RNA, 21 nt, Human
ccaaacccugagggccucggc

SEQ ID NO: 698575 - RNA, 23 nt, Human
cccccauuucuuugggggcugau

SEQ ID NO: 698576 - RNA, 18 nt, Human
cccucccccagcucugcu

SEQ ID NO: 698577 - RNA, 19 nt, Human
ccgcagcgagaagcggggc

SEQ ID NO: 698578 - RNA, 21 nt, Human
ccucaaggcugggggauacgc

SEQ ID NO: 698579 - RNA, 21 nt, Human
ccuccgcugggccccagcuuc

SEQ ID NO: 698580 - RNA, 22 nt, Human
cucccccagcucugcugggucc

SEQ ID NO: 698581 - RNA, 18 nt, Human
cucucaggcgucugcugc

SEQ ID NO: 698582 - RNA, 19 nt, Human
cugcugcuaccuccgcugg

SEQ ID NO: 698583 - RNA, 21 nt, Human
cugggccccagcuucugucug

SEQ ID NO: 698584 - RNA, 19 nt, Human
cuggguccgcgggggccca

SEQ ID NO: 698585 - RNA, 22 nt, Human
gacagggaccgugacccagagc

SEQ ID NO: 698586 - RNA, 18 nt, Human
gacccagcgggcuuucuu

SEQ ID NO: 698587 - RNA, 20 nt, Human
gagaaggugggugugucagg

SEQ ID NO: 698588 - RNA, 19 nt, Human
gagcaccuggguccgcggg

SEQ ID NO: 698589 - RNA, 21 nt, Human
gagcaccuggguccgcggggg

SEQ ID NO: 698590 - RNA, 19 nt, Human
gccuuccacgccucaaucu

SEQ ID NO: 698591 - RNA, 21 nt, Human
gcggggccugugggacuccgc

SEQ ID NO: 698592 - RNA, 18 nt, Human
ggcucggcuccccagaca

SEQ ID NO: 698593 - RNA, 20 nt, Human
gggccagggggcaggccagc

SEQ ID NO: 698594 - RNA, 19 nt, Human
gggguggagguagaggugg

SEQ ID NO: 698595 - RNA, 18 nt, Human
ggggugggccagggggca

SEQ ID NO: 698596 - RNA, 21 nt, Human
gggugggaggaggggcggggc

SEQ ID NO: 698597 - RNA, 23 nt, Human
gguggagguagaggugggagagc

SEQ ID NO: 698598 - RNA, 21 nt, Human
ggugggaggaggggcggggcc

SEQ ID NO: 698599 - RNA, 23 nt, Human
uaacccugggcccuuuuugcccu

SEQ ID NO: 698600 - RNA, 22 nt, Human
uacgcagagcccaggugagaag

SEQ ID NO: 698601 - RNA, 24 nt, Human
ucaugggcagcucauuggcgggcu

SEQ ID NO: 698602 - RNA, 21 nt, Human
uccccagacacggucgcucca

SEQ ID NO: 698603 - RNA, 21 nt, Human
ucccccagcucugcugggucc

SEQ ID NO: 698604 - RNA, 21 nt, Human
uccgcugggccccagcuucug

SEQ ID NO: 698605 - RNA, 20 nt, Human
ucggcuccccagacacgguc

SEQ ID NO: 698606 - RNA, 24 nt, Human
ucugcaggcaccuucagcuccugg

SEQ ID NO: 698607 - RNA, 20 nt, Human
ucugcugggucccggggcca

SEQ ID NO: 698608 - RNA, 18 nt, Human
ucugucuggacaggcuga

SEQ ID NO: 698609 - RNA, 19 nt, Human
ugccccaguccgggcucac

SEQ ID NO: 698610 - RNA, 19 nt, Human
ugggaggaggggcggggcc

SEQ ID NO: 698611 - RNA, 22 nt, Human
ugggccccagcuucugucugga

SEQ ID NO: 698612 - RNA, 20 nt, Human
uggggcagacagaagcgggg

SEQ ID NO: 698613 - RNA, 20 nt, Human
uggggcagacagaagcgggg

SEQ ID NO: 698614 - RNA, 18 nt, Human
ugggggugggccaggggg

SEQ ID NO: 698615 - RNA, 22 nt, Human
ugucuggacaggcugaacgagg

SEQ ID NO: 698616 - RNA, 22 nt, Human
uucaugggcagcucauuggcgg

SEQ ID NO: 698617 - RNA, 24 nt, Human
uuuuuuuuuuuuacagacaaguua

SEQ ID NO: 698618 - RNA, 24 nt, Human
uuuuuuuuuuuuuuuuuuuuacag

SEQ ID NO: 698619 - RNA, 21 nt, Human
aaaaaaaaaaaucccccaaaa

SEQ ID NO: 698620 - RNA, 23 nt, Human
aaagcggucaaauccucgggcca

SEQ ID NO: 698621 - RNA, 21 nt, Human
aagcggcggcgcugcugcugc

SEQ ID NO: 698622 - RNA, 23 nt, Human
acaaacaugacgcugggaaagac

SEQ ID NO: 698623 - RNA, 20 nt, Human
acgcgcgaggcgccccaaac

SEQ ID NO: 698624 - RNA, 20 nt, Human
acgcggcgggcggcgggcgg

SEQ ID NO: 698625 - RNA, 20 nt, Human
agcacaggcggccugggcag

SEQ ID NO: 698626 - RNA, 20 nt, Human
agcucaggcgugugcgacag

SEQ ID NO: 698627 - RNA, 26 nt, Human
auccccacccaaaugaaccaaaauaa

SEQ ID NO: 698628 - RNA, 22 nt, Human
aucuccuuugacgugaucaaug

SEQ ID NO: 698629 - RNA, 24 nt, Human
augacgcugggaaagacaggcuug

SEQ ID NO: 698630 - RNA, 19 nt, Human
caccaagggaaaaccccuc

SEQ ID NO: 698631 - RNA, 22 nt, Human
cacccagagacgaguggugggg

SEQ ID NO: 698632 - RNA, 19 nt, Human
caccgcgcgaguagcgggc

SEQ ID NO: 698633 - RNA, 20 nt, Human
cagaaccacagcagacagua

SEQ ID NO: 698634 - RNA, 18 nt, Human
cagagacgaguggugggg

SEQ ID NO: 698635 - RNA, 21 nt, Human
cagcgcccgggcgaccuuggc

SEQ ID NO: 698636 - RNA, 22 nt, Human
cagcugccgggccagggcgugc

SEQ ID NO: 698637 - RNA, 22 nt, Human
cagguuuaaaaauccaucucuc

SEQ ID NO: 698638 - RNA, 21 nt, Human
caugacgcugggaaagacagg

SEQ ID NO: 698639 - RNA, 21 nt, Human
ccagggcccgcucccggacag

SEQ ID NO: 698640 - RNA, 18 nt, Human
ccaguccccuuccaaaaa

SEQ ID NO: 698641 - RNA, 21 nt, Human
cccaaacacgccgggcgacca

SEQ ID NO: 698642 - RNA, 21 nt, Human
cccacccaaaugaaccaaaau

SEQ ID NO: 698643 - RNA, 19 nt, Human
cccaggccacccacccaga

SEQ ID NO: 698644 - RNA, 21 nt, Human
cccaggccacccacccagaga

SEQ ID NO: 698645 - RNA, 25 nt, Human
cccccaaaaucuaagaacuuaguuu

SEQ ID NO: 698646 - RNA, 18 nt, Human
ccccccaacgcucaccac

SEQ ID NO: 698647 - RNA, 20 nt, Human
ccccccaacgcucaccacuc

SEQ ID NO: 698648 - RNA, 20 nt, Human
cccccgcgcgucuccucugc

SEQ ID NO: 698649 - RNA, 28 nt, Human
cccccgcgcgucuccucugccgccgccu

SEQ ID NO: 698650 - RNA, 20 nt, Human
cccgcgugucccggcucauc

SEQ ID NO: 698651 - RNA, 19 nt, Human
cccggcucauccgcggccg

SEQ ID NO: 698652 - RNA, 21 nt, Human
cccggcucauccgcggccgcg

SEQ ID NO: 698653 - RNA, 19 nt, Human
cccguaguaguccagggcc

SEQ ID NO: 698654 - RNA, 21 nt, Human
cccuggccacgggcaggccuc

SEQ ID NO: 698655 - RNA, 18 nt, Human
ccgagcccgcgugucccg

SEQ ID NO: 698656 - RNA, 18 nt, Human
ccgccgccuccgccaccg

SEQ ID NO: 698657 - RNA, 21 nt, Human
ccgcuggggccgagcccgcgu

SEQ ID NO: 698658 - RNA, 18 nt, Human
ccggcgcuggcggcgggg

SEQ ID NO: 698659 - RNA, 18 nt, Human
ccucgggggucccgggcg

SEQ ID NO: 698660 - RNA, 22 nt, Human
ccucgggggucccgggcgccuc

SEQ ID NO: 698661 - RNA, 18 nt, Human
ccugggggaggcguggaa

SEQ ID NO: 698662 - RNA, 24 nt, Human
ccuuggacccccccacuggcaagc

SEQ ID NO: 698663 - RNA, 25 nt, Human
cgccccaaacacgccgggcgaccau

SEQ ID NO: 698664 - RNA, 19 nt, Human
cgcggagcugcggucugga

SEQ ID NO: 698665 - RNA, 23 nt, Human
cgcgucuccucugccgccgccuc

SEQ ID NO: 698666 - RNA, 18 nt, Human
cggcccgcaaacagcgcc

SEQ ID NO: 698667 - RNA, 18 nt, Human
cggccugggcagcgucca

SEQ ID NO: 698668 - RNA, 28 nt, Human
cggcggcagcagcggcauccaggcgaag

SEQ ID NO: 698669 - RNA, 24 nt, Human
cgggcacggggcucccgcaggggc

SEQ ID NO: 698670 - RNA, 21 nt, Human
cgggccagggcgugcuggcgg

SEQ ID NO: 698671 - RNA, 22 nt, Human
cgggcgccuccggcaugucgcc

SEQ ID NO: 698672 - RNA, 19 nt, Human
cguccugugggugccggaa

SEQ ID NO: 698673 - RNA, 23 nt, Human
cucaucguuuaaaaaaaaaaauc

SEQ ID NO: 698674 - RNA, 21 nt, Human
cuccaccucagauacgcugug

SEQ ID NO: 698675 - RNA, 19 nt, Human
cuccucugccgccgccucc

SEQ ID NO: 698676 - RNA, 22 nt, Human
cucgggggucccgggcgccucc

SEQ ID NO: 698677 - RNA, 19 nt, Human
cucugcccuuggacccccc

SEQ ID NO: 698678 - RNA, 24 nt, Human
cucugcuuuggcaaaauccacgcg

SEQ ID NO: 698679 - RNA, 20 nt, Human
cugccgccgccuccgccacc

SEQ ID NO: 698680 - RNA, 20 nt, Human
cugcggucuggaccaccaag

SEQ ID NO: 698681 - RNA, 23 nt, Human
cuggggcugguccaguccccuuc

SEQ ID NO: 698682 - RNA, 29 nt, Human
gaaaaccccucauuuuagcacaggcggcc

SEQ ID NO: 698683 - RNA, 23 nt, Human
gaaggcccuucgcagcuccaccu

SEQ ID NO: 698684 - RNA, 19 nt, Human
gagcagcagcugccgggcc

SEQ ID NO: 698685 - RNA, 23 nt, Human
gcacgcgcgaggcgccccaaaca

SEQ ID NO: 698686 - RNA, 22 nt, Human
gcagcagcugccgggccagggc

SEQ ID NO: 698687 - RNA, 22 nt, Human
gccccaaacacgccgggcgacc

SEQ ID NO: 698688 - RNA, 19 nt, Human
gcccgggcgaccuuggccc

SEQ ID NO: 698689 - RNA, 18 nt, Human
gccgccgccuccgccacc

SEQ ID NO: 698690 - RNA, 21 nt, Human
gccugggcagcguccaagcuc

SEQ ID NO: 698691 - RNA, 20 nt, Human
gcucaccacuccggcugcgc

SEQ ID NO: 698692 - RNA, 23 nt, Human
gcucccgcaggggcggggcagcg

SEQ ID NO: 698693 - RNA, 22 nt, Human
ggaaagacaggcuugggcuagg

SEQ ID NO: 698694 - RNA, 20 nt, Human
ggcccagcucaggcgugugc

SEQ ID NO: 698695 - RNA, 21 nt, Human
gggacggcgggcgcgggcggc

SEQ ID NO: 698696 - RNA, 21 nt, Human
gggaguggcgagggcugguac

SEQ ID NO: 698697 - RNA, 19 nt, Human
gggcaaagcuaucuccuuu

SEQ ID NO: 698698 - RNA, 21 nt, Human
gggcgcgggcggcccuggggg

SEQ ID NO: 698699 - RNA, 23 nt, Human
gggcgcgggcggcccugggggag

SEQ ID NO: 698700 - RNA, 23 nt, Human
gggcgggcggaggccggaggcac

SEQ ID NO: 698701 - RNA, 19 nt, Human
gggguuggccuugccauag

SEQ ID NO: 698702 - RNA, 21 nt, Human
gggucgcggcggcaaggccuc

SEQ ID NO: 698703 - RNA, 18 nt, Human
gguaggguagagagggga

SEQ ID NO: 698704 - RNA, 22 nt, Human
ggugccggaaauucacguagcc

SEQ ID NO: 698705 - RNA, 19 nt, Human
guagagcaugccuugugcc

SEQ ID NO: 698706 - RNA, 19 nt, Human
gucccaggccacccaccca

SEQ ID NO: 698707 - RNA, 23 nt, Human
gucguacagcccguaguagucca

SEQ ID NO: 698708 - RNA, 18 nt, Human
gucuccucugccgccgcc

SEQ ID NO: 698709 - RNA, 20 nt, Human
uacugcugggggguaccgag

SEQ ID NO: 698710 - RNA, 19 nt, Human
uaucuccuuugacgugauc

SEQ ID NO: 698711 - RNA, 20 nt, Human
ucaccauguguucuucuucu

SEQ ID NO: 698712 - RNA, 19 nt, Human
ucagguccuccucacacac

SEQ ID NO: 698713 - RNA, 18 nt, Human
uccucgggcaucaggucc

SEQ ID NO: 698714 - RNA, 22 nt, Human
ucgccgacugcucccgccgccg

SEQ ID NO: 698715 - RNA, 18 nt, Human
ucucugcccuuggacccc

SEQ ID NO: 698716 - RNA, 24 nt, Human
ucuggaccaccaagggaaaacccc

SEQ ID NO: 698717 - RNA, 21 nt, Human
ugaccaccuccucgaugaugc

SEQ ID NO: 698718 - RNA, 18 nt, Human
ugaggaaggcauaggcac

SEQ ID NO: 698719 - RNA, 20 nt, Human
ugaguacagaaggugugggg

SEQ ID NO: 698720 - RNA, 19 nt, Human
ugcccuuggacccccccac

SEQ ID NO: 698721 - RNA, 23 nt, Human
ugccgggccagggcgugcuggcg

SEQ ID NO: 698722 - RNA, 18 nt, Human
ugcugggggguaccgagg

SEQ ID NO: 698723 - RNA, 21 nt, Human
uggcaaaauccacgcggagcu

SEQ ID NO: 698724 - RNA, 19 nt, Human
ugggaaaagucgcagggug

SEQ ID NO: 698725 - RNA, 23 nt, Human
ugggaaagacaggcuugggcuag

SEQ ID NO: 698726 - RNA, 19 nt, Human
ugggccauguccagguucu

SEQ ID NO: 698727 - RNA, 18 nt, Human
ugggugccggaaauucac

SEQ ID NO: 698728 - RNA, 23 nt, Human
uguccagguucuggaacuugagg

SEQ ID NO: 698729 - RNA, 21 nt, Human
uuggcaaaauccacgcggagc

SEQ ID NO: 698730 - RNA, 18 nt, Human
uuuacuggggcuggucca

SEQ ID NO: 698731 - RNA, 18 nt, Human
accggagugcgagguccg

SEQ ID NO: 698732 - RNA, 20 nt, Human
agaccgggaccggagugcga

SEQ ID NO: 698733 - RNA, 23 nt, Human
cgggaccggagugcgagguccgg

SEQ ID NO: 698734 - RNA, 20 nt, Human
uuacguggugaaacaaacuu

SEQ ID NO: 698735 - RNA, 21 nt, Human
uuuuuuuuuuuuuuuugccug

SEQ ID NO: 698736 - RNA, 21 nt, Human
uuuuuuuuuuuuuuuuugccu

SEQ ID NO: 698737 - RNA, 24 nt, Human
uuuuuuuuuuuuuuuuugccuguu

SEQ ID NO: 698738 - RNA, 20 nt, Human
uuuuuuuuuuuuuuuuuugg

SEQ ID NO: 698739 - RNA, 21 nt, Human
aaauauugccaaaugcuuucc

SEQ ID NO: 698740 - RNA, 21 nt, Human
aaauauugccaaaugcuuucc

SEQ ID NO: 698741 - RNA, 20 nt, Human
aacaacaaaagccaaccaaa

SEQ ID NO: 698742 - RNA, 20 nt, Human
aacaacaaaagccaaccaaa

SEQ ID NO: 698743 - RNA, 25 nt, Human
aacaacaaaagccaaccaaaaacaa

SEQ ID NO: 698744 - RNA, 25 nt, Human
aacaacaaaagccaaccaaaaacaa

SEQ ID NO: 698745 - RNA, 23 nt, Human
aagcccagcagguccugagugaa

SEQ ID NO: 698746 - RNA, 23 nt, Human
aagcccagcagguccugagugaa

SEQ ID NO: 698747 - RNA, 19 nt, Human
aaguaagaggaacaacaac

SEQ ID NO: 698748 - RNA, 19 nt, Human
aaguaagaggaacaacaac

SEQ ID NO: 698749 - RNA, 21 nt, Human
aauucacuucugccuuccuca

SEQ ID NO: 698750 - RNA, 21 nt, Human
aauucacuucugccuuccuca

SEQ ID NO: 698751 - RNA, 21 nt, Human
acaacaacaaaagccaaccaa

SEQ ID NO: 698752 - RNA, 22 nt, Human
acaacaacaaaagccaaccaaa

SEQ ID NO: 698753 - RNA, 22 nt, Human
acaacaacaaaagccaaccaaa

SEQ ID NO: 698754 - RNA, 20 nt, Human
acccagugcucugguuuaug

SEQ ID NO: 698755 - RNA, 20 nt, Human
acccagugcucugguuuaug

SEQ ID NO: 698756 - RNA, 19 nt, Human
acccccagccaccagcccu

SEQ ID NO: 698757 - RNA, 22 nt, Human
aggaacaacaacaaaagccaac

SEQ ID NO: 698758 - RNA, 22 nt, Human
aggaacaacaacaaaagccaac

SEQ ID NO: 698759 - RNA, 25 nt, Human
agguagccagugcaagacaucucac

SEQ ID NO: 698760 - RNA, 25 nt, Human
agguagccagugcaagacaucucac

SEQ ID NO: 698761 - RNA, 23 nt, Human
auugccaaaugcuuuccuuuagc

SEQ ID NO: 698762 - RNA, 27 nt, Human
caaaaacaagguagccagugcaagaca

SEQ ID NO: 698763 - RNA, 27 nt, Human
caaaaacaagguagccagugcaagaca

SEQ ID NO: 698764 - RNA, 21 nt, Human
caacaaaagccaaccaaaaac

SEQ ID NO: 698765 - RNA, 21 nt, Human
caacaaaagccaaccaaaaac

SEQ ID NO: 698766 - RNA, 20 nt, Human
caacaacaaaagccaaccaa

SEQ ID NO: 698767 - RNA, 20 nt, Human
caacaacaaaagccaaccaa

SEQ ID NO: 698768 - RNA, 21 nt, Human
caacaacaaaagccaaccaaa

SEQ ID NO: 698769 - RNA, 22 nt, Human
caagcauaucuuggccucuccc

SEQ ID NO: 698770 - RNA, 22 nt, Human
caagcauaucuuggccucuccc

SEQ ID NO: 698771 - RNA, 22 nt, Human
caccagcccucauccucucuac

SEQ ID NO: 698772 - RNA, 22 nt, Human
caccagcccucauccucucuac

SEQ ID NO: 698773 - RNA, 18 nt, Human
cacccuuucugucaagca

SEQ ID NO: 698774 - RNA, 18 nt, Human
cacccuuucugucaagca

SEQ ID NO: 698775 - RNA, 18 nt, Human
cacccuuucugucaagca

SEQ ID NO: 698776 - RNA, 25 nt, Human
ccaccagcccucauccucucuaccc

SEQ ID NO: 698777 - RNA, 24 nt, Human
ccaccaguccugaccgugggcccc

SEQ ID NO: 698778 - RNA, 24 nt, Human
ccaccaguccugaccgugggcccc

SEQ ID NO: 698779 - RNA, 19 nt, Human
ccacccaacucagaaagcc

SEQ ID NO: 698780 - RNA, 19 nt, Human
ccacccaacucagaaagcc

SEQ ID NO: 698781 - RNA, 22 nt, Human
ccagcagguccugagugaagcc

SEQ ID NO: 698782 - RNA, 22 nt, Human
ccagcagguccugagugaagcc

SEQ ID NO: 698783 - RNA, 21 nt, Human
ccccagccaccagcccucauc

SEQ ID NO: 698784 - RNA, 21 nt, Human
ccccagccaccagcccucauc

SEQ ID NO: 698785 - RNA, 19 nt, Human
cccucauccucucuaccca

SEQ ID NO: 698786 - RNA, 19 nt, Human
cccucauccucucuaccca

SEQ ID NO: 698787 - RNA, 21 nt, Human
ccgugggccccucaggggucu

SEQ ID NO: 698788 - RNA, 19 nt, Human
ccugcaguccccaccaguc

SEQ ID NO: 698789 - RNA, 22 nt, Human
cgccuuucccgccacccaacuc

SEQ ID NO: 698790 - RNA, 24 nt, Human
cuacccagugcucugguuuaugcu

SEQ ID NO: 698791 - RNA, 27 nt, Human
cucucucuacccuaguucuccaaauuc

SEQ ID NO: 698792 - RNA, 27 nt, Human
cucucucuacccuaguucuccaaauuc

SEQ ID NO: 698793 - RNA, 18 nt, Human
cugagugaagccgugggc

SEQ ID NO: 698794 - RNA, 18 nt, Human
cugagugaagccgugggc

SEQ ID NO: 698795 - RNA, 26 nt, Human
gccaccagcccucauccucucuaccc

SEQ ID NO: 698796 - RNA, 19 nt, Human
gccccucaggggucuggga

SEQ ID NO: 698797 - RNA, 24 nt, Human
gccucaaaaucacccuuucuguca

SEQ ID NO: 698798 - RNA, 24 nt, Human
gccucaaaaucacccuuucuguca

SEQ ID NO: 698799 - RNA, 21 nt, Human
gccuuucccgccacccaacuc

SEQ ID NO: 698800 - RNA, 20 nt, Human
gcuugucuccugacugcucu

SEQ ID NO: 698801 - RNA, 20 nt, Human
gcuugucuccugacugcucu

SEQ ID NO: 698802 - RNA, 24 nt, Human
ggucuacccccagccaccagcccu

SEQ ID NO: 698803 - RNA, 19 nt, Human
uaacugagccucaaaauca

SEQ ID NO: 698804 - RNA, 19 nt, Human
uaacugagccucaaaauca

SEQ ID NO: 698805 - RNA, 24 nt, Human
uaagaggaacaacaacaaaagcca

SEQ ID NO: 698806 - RNA, 24 nt, Human
uaagaggaacaacaacaaaagcca

SEQ ID NO: 698807 - RNA, 20 nt, Human
uaauaaauauugccaaaugc

SEQ ID NO: 698808 - RNA, 20 nt, Human
uaauaaauauugccaaaugc

SEQ ID NO: 698809 - RNA, 23 nt, Human
uacccagugcucugguuuaugcu

SEQ ID NO: 698810 - RNA, 21 nt, Human
uacccuaguucuccaaauuca

SEQ ID NO: 698811 - RNA, 21 nt, Human
uacccuaguucuccaaauuca

SEQ ID NO: 698812 - RNA, 23 nt, Human
uagcaaccucucucuacccuagu

SEQ ID NO: 698813 - RNA, 23 nt, Human
uagcaaccucucucuacccuagu

SEQ ID NO: 698814 - RNA, 25 nt, Human
uagcaaccucucucuacccuaguuc

SEQ ID NO: 698815 - RNA, 25 nt, Human
uagcaaccucucucuacccuaguuc

SEQ ID NO: 698816 - RNA, 24 nt, Human
uauugccaaaugcuuuccuuuagc

SEQ ID NO: 698817 - RNA, 22 nt, Human
ucauccucucuacccagugcuc

SEQ ID NO: 698818 - RNA, 22 nt, Human
ucauccucucuacccagugcuc

SEQ ID NO: 698819 - RNA, 18 nt, Human
uccugaccgugggccccu

SEQ ID NO: 698820 - RNA, 23 nt, Human
uccugagugaagccgugggcccu

SEQ ID NO: 698821 - RNA, 23 nt, Human
uccugagugaagccgugggcccu

SEQ ID NO: 698822 - RNA, 20 nt, Human
ugaaaagcguacaaaagaua

SEQ ID NO: 698823 - RNA, 20 nt, Human
ugaaaagcguacaaaagaua

SEQ ID NO: 698824 - RNA, 21 nt, Human
ugaagccgugggcccuccaaa

SEQ ID NO: 698825 - RNA, 21 nt, Human
ugaagccgugggcccuccaaa

SEQ ID NO: 698826 - RNA, 19 nt, Human
ugacauccugcaguccccc

SEQ ID NO: 698827 - RNA, 19 nt, Human
ugacauccugcaguccccc

SEQ ID NO: 698828 - RNA, 21 nt, Human
ugagugaagccgugggcccuc

SEQ ID NO: 698829 - RNA, 21 nt, Human
ugagugaagccgugggcccuc

SEQ ID NO: 698830 - RNA, 20 nt, Human
ugccuggucuguugguucgu

SEQ ID NO: 698831 - RNA, 27 nt, Human
ugccuggucuguugguucguuuuggga

SEQ ID NO: 698832 - RNA, 18 nt, Human
uggggguggggugaaaag

SEQ ID NO: 698833 - RNA, 18 nt, Human
uggggguggggugaaaag

SEQ ID NO: 698834 - RNA, 20 nt, Human
uuaaaagggcuccuggggua

SEQ ID NO: 698835 - RNA, 20 nt, Human
uuaaaagggcuccuggggua

SEQ ID NO: 698836 - RNA, 22 nt, Human
uuccucagguuugauaucuggc

SEQ ID NO: 698837 - RNA, 22 nt, Human
uuccucagguuugauaucuggc

SEQ ID NO: 698838 - RNA, 23 nt, Human
uuccucagguuugauaucuggca

SEQ ID NO: 698839 - RNA, 23 nt, Human
uuccucagguuugauaucuggca

SEQ ID NO: 698840 - RNA, 22 nt, Human
uugaaauauuaacugagccuca

SEQ ID NO: 698841 - RNA, 22 nt, Human
uugaaauauuaacugagccuca

SEQ ID NO: 698842 - RNA, 23 nt, Human
uugugcugaugccuggucuguug

SEQ ID NO: 698843 - RNA, 23 nt, Human
aagcgucgggcagcggaggcccg

SEQ ID NO: 698844 - RNA, 18 nt, Human
caaggcagcggcaccggc

SEQ ID NO: 698845 - RNA, 19 nt, Human
ccggcuggaaagaagcaag

SEQ ID NO: 698846 - RNA, 20 nt, Human
gcagcggcaccggcuggaaa

SEQ ID NO: 698847 - RNA, 23 nt, Human
gggcagcggaggcccgcgggugc

SEQ ID NO: 698848 - RNA, 19 nt, Human
gggggcaaggcagcggcac

SEQ ID NO: 698849 - RNA, 18 nt, Human
uccggggggcaaggcagc

SEQ ID NO: 698850 - RNA, 23 nt, Human
aagaggacauccuguugcaggcc

SEQ ID NO: 698851 - RNA, 21 nt, Human
accagccccacgcugaaggcc

SEQ ID NO: 698852 - RNA, 19 nt, Human
agccaggcgcccgccagca

SEQ ID NO: 698853 - RNA, 20 nt, Human
aggcggcgggcaggcagagc

SEQ ID NO: 698854 - RNA, 23 nt, Human
agggggccugcauggucugggcc

SEQ ID NO: 698855 - RNA, 22 nt, Human
caaggagaagcccagggccguc

SEQ ID NO: 698856 - RNA, 26 nt, Human
caccagccccacgcugaaggccgcgc

SEQ ID NO: 698857 - RNA, 22 nt, Human
caccaggaagcaguagggcccc

SEQ ID NO: 698858 - RNA, 22 nt, Human
caccggccgcacgcgcacgucc

SEQ ID NO: 698859 - RNA, 28 nt, Human
cagcaccaggaagcaguagggcccccag

SEQ ID NO: 698860 - RNA, 19 nt, Human
cagcagaugacgaagacga

SEQ ID NO: 698861 - RNA, 19 nt, Human
cagcagcagaugacgaagg

SEQ ID NO: 698862 - RNA, 20 nt, Human
cagcagcugcagcgcgcggc

SEQ ID NO: 698863 - RNA, 23 nt, Human
caggaaagcguccacauuccuag

SEQ ID NO: 698864 - RNA, 21 nt, Human
caggaagggcagcagguagca

SEQ ID NO: 698865 - RNA, 22 nt, Human
cagggcaaggagaagcccaggg

SEQ ID NO: 698866 - RNA, 24 nt, Human
ccagccccacgcugaaggccgcgc

SEQ ID NO: 698867 - RNA, 21 nt, Human
cccacauggccacguccccug

SEQ ID NO: 698868 - RNA, 23 nt, Human
cccacauggccacguccccugcc

SEQ ID NO: 698869 - RNA, 18 nt, Human
ccccaucaccgcgcaguu

SEQ ID NO: 698870 - RNA, 21 nt, Human
ccccaucaccgcgcaguugcc

SEQ ID NO: 698871 - RNA, 21 nt, Human
cccccagcagcagaugacgaa

SEQ ID NO: 698872 - RNA, 22 nt, Human
ccgcgcccagcugcgcgggguc

SEQ ID NO: 698873 - RNA, 21 nt, Human
ccugcauggucugggccugcc

SEQ ID NO: 698874 - RNA, 21 nt, Human
cgaagcacgagcugaagaagc

SEQ ID NO: 698875 - RNA, 22 nt, Human
cgcaccucgcugaagaagcgca

SEQ ID NO: 698876 - RNA, 21 nt, Human
cgcaguaacgguccaacgaga

SEQ ID NO: 698877 - RNA, 22 nt, Human
cgccagggccccgcggcggcgg

SEQ ID NO: 698878 - RNA, 18 nt, Human
gaagcacgagcugaagaa

SEQ ID NO: 698879 - RNA, 21 nt, Human
gacagcgacaggaugaaggcg

SEQ ID NO: 698880 - RNA, 20 nt, Human
gaggacggugguggccgugc

SEQ ID NO: 698881 - RNA, 23 nt, Human
gcagcaccaggaagcaguagggc

SEQ ID NO: 698882 - RNA, 23 nt, Human
gcaggccaccaccagccccacgc

SEQ ID NO: 698883 - RNA, 19 nt, Human
gcaguagggcccccagcag

SEQ ID NO: 698884 - RNA, 18 nt, Human
gccagggccccgcggcgg

SEQ ID NO: 698885 - RNA, 18 nt, Human
gcgcagcacgcgcgcgua

SEQ ID NO: 698886 - RNA, 18 nt, Human
ggaaagcguccacauucc

SEQ ID NO: 698887 - RNA, 24 nt, Human
ggcgcagaagccgcgccagggccc

SEQ ID NO: 698888 - RNA, 20 nt, Human
ggcuucuggcuugcagaccc

SEQ ID NO: 698889 - RNA, 22 nt, Human
gggguccggggagguccgguag

SEQ ID NO: 698890 - RNA, 24 nt, Human
guagcaggccaccaccagccccac

SEQ ID NO: 698891 - RNA, 22 nt, Human
ucacaaucacccccaucaccgc

SEQ ID NO: 698892 - RNA, 25 nt, Human
ucagccaggcgcccgccagcagcug

SEQ ID NO: 698893 - RNA, 20 nt, Human
ucccagggcaaggagaagcc

SEQ ID NO: 698894 - RNA, 22 nt, Human
ucccucucggcagaaaaguaca

SEQ ID NO: 698895 - RNA, 21 nt, Human
ugaagaagcgcagcacgcgcg

SEQ ID NO: 698896 - RNA, 20 nt, Human
ugaagagguccaggaaggcg

SEQ ID NO: 698897 - RNA, 19 nt, Human
ugagcguggacacgaugcc

SEQ ID NO: 698898 - RNA, 20 nt, Human
ugaugaggacggugguggcc

SEQ ID NO: 698899 - RNA, 23 nt, Human
ugccggugcuucacaaucacccc

SEQ ID NO: 698900 - RNA, 21 nt, Human
uggcccaggucagccagacgg

SEQ ID NO: 698901 - RNA, 18 nt, Human
uggcuugcagacccgggc

SEQ ID NO: 698902 - RNA, 20 nt, Human
uugcagaugugguaguggca

SEQ ID NO: 698903 - RNA, 19 nt, Human
uuuugcgggcccacauggc

SEQ ID NO: 698904 - RNA, 25 nt, Human
aacagcaggaaucccgaguaagacg

SEQ ID NO: 698905 - RNA, 21 nt, Human
aaugcaggaacagcaccagga

SEQ ID NO: 698906 - RNA, 19 nt, Human
acccaaggccacaacaaca

SEQ ID NO: 698907 - RNA, 19 nt, Human
accuugacggcagggaagg

SEQ ID NO: 698908 - RNA, 19 nt, Human
aggugaacaguaaggugag

SEQ ID NO: 698909 - RNA, 18 nt, Human
aggugggaaaggccagug

SEQ ID NO: 698910 - RNA, 22 nt, Human
caacaacagcaggaaucccgag

SEQ ID NO: 698911 - RNA, 26 nt, Human
caaggccacaacaacagcaggaaucc

SEQ ID NO: 698912 - RNA, 19 nt, Human
cacaacaacagcaggaauc

SEQ ID NO: 698913 - RNA, 26 nt, Human
caccccucagauuccccaguggccca

SEQ ID NO: 698914 - RNA, 23 nt, Human
cagcaccaggagcuagagcccaa

SEQ ID NO: 698915 - RNA, 21 nt, Human
cagcaggccuguccuguguuc

SEQ ID NO: 698916 - RNA, 20 nt, Human
caguggcccaggaaaaaaua

SEQ ID NO: 698917 - RNA, 18 nt, Human
ccaaggccacaacaacag

SEQ ID NO: 698918 - RNA, 25 nt, Human
ccacaacaacagcaggaaucccgag

SEQ ID NO: 698919 - RNA, 21 nt, Human
cccucagauuccccaguggcc

SEQ ID NO: 698920 - RNA, 18 nt, Human
cggcagggaaggcuggau

SEQ ID NO: 698921 - RNA, 20 nt, Human
cgggcacagaggccuagcag

SEQ ID NO: 698922 - RNA, 22 nt, Human
cuagagcccaacucuggccugu

SEQ ID NO: 698923 - RNA, 21 nt, Human
cugcauuuuauuugcaccuca

SEQ ID NO: 698924 - RNA, 20 nt, Human
cuuggucuuugccaagguag

SEQ ID NO: 698925 - RNA, 25 nt, Human
gaacagcaccaggagcuagagccca

SEQ ID NO: 698926 - RNA, 21 nt, Human
gaucagaccagcaaguauggg

SEQ ID NO: 698927 - RNA, 20 nt, Human
gccaccuugacggcagggaa

SEQ ID NO: 698928 - RNA, 19 nt, Human
uaagacgccaccuugacgg

SEQ ID NO: 698929 - RNA, 19 nt, Human
uacccaaggccacaacaac

SEQ ID NO: 698930 - RNA, 23 nt, Human
ugagcagaggugggaaaggccag

SEQ ID NO: 698931 - RNA, 20 nt, Human
uggccugugggcugucuccc

SEQ ID NO: 698932 - RNA, 22 nt, Human
uggccugugggcugucucccgg

SEQ ID NO: 698933 - RNA, 18 nt, Human
ugggaaaggccagugggu

SEQ ID NO: 698934 - RNA, 19 nt, Human
ugggaaaggccagugggug

SEQ ID NO: 698935 - RNA, 22 nt, Human
uuacccaaggccacaacaacag

SEQ ID NO: 698936 - RNA, 23 nt, Human
uuuuuuuuuuuuuuuuuucaaag

SEQ ID NO: 698937 - RNA, 24 nt, Human
aaccaaguccacuccuggccagua

SEQ ID NO: 698938 - RNA, 19 nt, Human
aaccaaugagaagguagcc

SEQ ID NO: 698939 - RNA, 21 nt, Human
aaccagaugcccgggagccug

SEQ ID NO: 698940 - RNA, 18 nt, Human
aagaggccggggcgcggc

SEQ ID NO: 698941 - RNA, 19 nt, Human
agaccagcccuccucccca

SEQ ID NO: 698942 - RNA, 18 nt, Human
agccagaggcaccaggcc

SEQ ID NO: 698943 - RNA, 21 nt, Human
agcccuaaccaaguccacucu

SEQ ID NO: 698944 - RNA, 20 nt, Human
agccuccagccagaggcacc

SEQ ID NO: 698945 - RNA, 23 nt, Human
agccuggccaguggaaguagccc

SEQ ID NO: 698946 - RNA, 21 nt, Human
aggcccccaaucucgccccgg

SEQ ID NO: 698947 - RNA, 19 nt, Human
agggaagggaagggguggg

SEQ ID NO: 698948 - RNA, 19 nt, Human
aggggccugggcccggggc

SEQ ID NO: 698949 - RNA, 18 nt, Human
aucuccucaggccacuag

SEQ ID NO: 698950 - RNA, 20 nt, Human
caaccagaugcccgggagcc

SEQ ID NO: 698951 - RNA, 18 nt, Human
caccaggcccuagcgggg

SEQ ID NO: 698952 - RNA, 22 nt, Human
caccuuaggcuugguggcgggg

SEQ ID NO: 698953 - RNA, 22 nt, Human
cacggccagcugcagcggcgcu

SEQ ID NO: 698954 - RNA, 21 nt, Human
cagcgagggcugucgccuccu

SEQ ID NO: 698955 - RNA, 19 nt, Human
cagcugacagcugaggggc

SEQ ID NO: 698956 - RNA, 20 nt, Human
ccaggacaccuuaggcuugg

SEQ ID NO: 698957 - RNA, 21 nt, Human
cccccgccgggaggagcccau

SEQ ID NO: 698958 - RNA, 25 nt, Human
ccccugaggagcggagaccagcccu

SEQ ID NO: 698959 - RNA, 24 nt, Human
cccucccaucuuuggccaaugaga

SEQ ID NO: 698960 - RNA, 20 nt, Human
cccuggaggucccgcggcgu

SEQ ID NO: 698961 - RNA, 23 nt, Human
ccucaggccacuagagucgcccc

SEQ ID NO: 698962 - RNA, 23 nt, Human
ccucgaccaacgggaugggcccu

SEQ ID NO: 698963 - RNA, 22 nt, Human
ccucggagccuggcggcggugg

SEQ ID NO: 698964 - RNA, 22 nt, Human
ccuggccaguggaaguagcccc

SEQ ID NO: 698965 - RNA, 23 nt, Human
ccuggccaguggaaguagccccg

SEQ ID NO: 698966 - RNA, 21 nt, Human
cgcaaccuccgcuagccgcgc

SEQ ID NO: 698967 - RNA, 23 nt, Human
cgccagagcacacugcuccaauc

SEQ ID NO: 698968 - RNA, 22 nt, Human
cggccgaggggggagcagcccu

SEQ ID NO: 698969 - RNA, 18 nt, Human
cggccucggagccuggcg

SEQ ID NO: 698970 - RNA, 19 nt, Human
cggccucggagccuggcgg

SEQ ID NO: 698971 - RNA, 19 nt, Human
cgggaugggcccuucccgc

SEQ ID NO: 698972 - RNA, 19 nt, Human
cguggauccaggacaccuu

SEQ ID NO: 698973 - RNA, 22 nt, Human
cguguggggcagugggaggcca

SEQ ID NO: 698974 - RNA, 19 nt, Human
cucgggcccugggcggcga

SEQ ID NO: 698975 - RNA, 23 nt, Human
cucuugcuggggcugggcgcggc

SEQ ID NO: 698976 - RNA, 18 nt, Human
cugacagcugaggggccu

SEQ ID NO: 698977 - RNA, 22 nt, Human
cugagccaaugagacgcaaccu

SEQ ID NO: 698978 - RNA, 23 nt, Human
cugcgaagcugagggagcugcgc

SEQ ID NO: 698979 - RNA, 18 nt, Human
cuggggcugggcgcggcc

SEQ ID NO: 698980 - RNA, 21 nt, Human
cugucuggucggagcgcucca

SEQ ID NO: 698981 - RNA, 19 nt, Human
gagccuccagccagaggca

SEQ ID NO: 698982 - RNA, 22 nt, Human
gagcggcugcaggaccugagcc

SEQ ID NO: 698983 - RNA, 20 nt, Human
gccacuagagucgccccugg

SEQ ID NO: 698984 - RNA, 24 nt, Human
gccagagcacacugcuccaaucca

SEQ ID NO: 698985 - RNA, 18 nt, Human
gcgcggcgcgcgcucggg

SEQ ID NO: 698986 - RNA, 20 nt, Human
gcgcggcguugggucgcggg

SEQ ID NO: 698987 - RNA, 21 nt, Human
gcgcggugcccggccaauagg

SEQ ID NO: 698988 - RNA, 23 nt, Human
gcggagaccagcccuccucccca

SEQ ID NO: 698989 - RNA, 18 nt, Human
ggagcagcccugcugggg

SEQ ID NO: 698990 - RNA, 25 nt, Human
ggcagaagugccucuggcugcaacc

SEQ ID NO: 698991 - RNA, 21 nt, Human
ggcgcugcgaagcugagggag

SEQ ID NO: 698992 - RNA, 21 nt, Human
ggcggggucagguggcggcgg

SEQ ID NO: 698993 - RNA, 19 nt, Human
ggcuccaagaggccggggc

SEQ ID NO: 698994 - RNA, 19 nt, Human
ggcuugguggcggggucag

SEQ ID NO: 698995 - RNA, 23 nt, Human
gggagccuccagccagaggcacc

SEQ ID NO: 698996 - RNA, 18 nt, Human
gggcagugggaggccauc

SEQ ID NO: 698997 - RNA, 23 nt, Human
ggggagaggcagcccgggcagaa

SEQ ID NO: 698998 - RNA, 22 nt, Human
uaagaaagcuuuggccaagccc

SEQ ID NO: 698999 - RNA, 19 nt, Human
uacaucuccucaggccacu

SEQ ID NO: 699000 - RNA, 21 nt, Human
ucaaccagaugcccgggagcc

SEQ ID NO: 699001 - RNA, 24 nt, Human
ucaggccacuagagucgccccugg

SEQ ID NO: 699002 - RNA, 22 nt, Human
ucgccuccucgggcagccccgg

SEQ ID NO: 699003 - RNA, 19 nt, Human
ucuauugggacggccaagg

SEQ ID NO: 699004 - RNA, 19 nt, Human
ucuggcugcaaccaaugag

SEQ ID NO: 699005 - RNA, 22 nt, Human
ugagccaaugagacgcaaccuc

SEQ ID NO: 699006 - RNA, 19 nt, Human
ugcccgggagccuggccag

SEQ ID NO: 699007 - RNA, 19 nt, Human
ugcuggggcugggcgcggc

SEQ ID NO: 699008 - RNA, 21 nt, Human
uggcgacagcgacaggccccc

SEQ ID NO: 699009 - RNA, 19 nt, Human
uggcggcgguggugagggc

SEQ ID NO: 699010 - RNA, 23 nt, Human
ugggacggacuaagccccugagg

SEQ ID NO: 699011 - RNA, 21 nt, Human
ugggaggccaucaaaaccaac

SEQ ID NO: 699012 - RNA, 21 nt, Human
uggggucaaccagaugcccgg

SEQ ID NO: 699013 - RNA, 21 nt, Human
ugggguggcgggcggcgcugc

SEQ ID NO: 699014 - RNA, 22 nt, Human
ugggucgcggguccgggggcug

SEQ ID NO: 699015 - RNA, 26 nt, Human
ugucgcugggcguccguuuccucuug

SEQ ID NO: 699016 - RNA, 20 nt, Human
uuaagaaagcuuuggccaag

SEQ ID NO: 699017 - RNA, 24 nt, Human
aaaaaaaaaaaaaaaugaaaaaaa

SEQ ID NO: 699018 - RNA, 18 nt, Human
aaaaaaccaaacaccgca

SEQ ID NO: 699019 - RNA, 20 nt, Human
aaaaaaccaaacaccgcaua

SEQ ID NO: 699020 - RNA, 21 nt, Human
aagaacaaaaaaccaaacacc

SEQ ID NO: 699021 - RNA, 26 nt, Human
aagaacaaaaaaccaaacaccgcaua

SEQ ID NO: 699022 - RNA, 22 nt, Human
aagcagcuuagaucucugagcu

SEQ ID NO: 699023 - RNA, 27 nt, Human
aauaaaaaaaaaaaaaaaugaaaaaaa

SEQ ID NO: 699024 - RNA, 25 nt, Human
acaauaacagagaugacauaagcac

SEQ ID NO: 699025 - RNA, 21 nt, Human
acagagucaguguccuggggc

SEQ ID NO: 699026 - RNA, 18 nt, Human
accaaacaccgcauauuc

SEQ ID NO: 699027 - RNA, 23 nt, Human
acuucccaucccacuucccaaac

SEQ ID NO: 699028 - RNA, 21 nt, Human
agcacagagagguacaaaguu

SEQ ID NO: 699029 - RNA, 20 nt, Human
agggaaguggggguuuggag

SEQ ID NO: 699030 - RNA, 21 nt, Human
aguuuguuuuucccauucuuc

SEQ ID NO: 699031 - RNA, 21 nt, Human
auaauaaaaaaaaaaaaaaau

SEQ ID NO: 699032 - RNA, 24 nt, Human
auauacaccauggaauacuaugca

SEQ ID NO: 699033 - RNA, 21 nt, Human
auguugcccauguacccuaaa

SEQ ID NO: 699034 - RNA, 22 nt, Human
caagaacaaaaaaccaaacacc

SEQ ID NO: 699035 - RNA, 24 nt, Human
caagaacaaaaaaccaaacaccgc

SEQ ID NO: 699036 - RNA, 22 nt, Human
caauagcaaagacuuggaacca

SEQ ID NO: 699037 - RNA, 21 nt, Human
cacauguauacauauguuacu

SEQ ID NO: 699038 - RNA, 22 nt, Human
ccaaacaccgcauauucucacu

SEQ ID NO: 699039 - RNA, 24 nt, Human
ccauaucuuuccuaacuucccauc

SEQ ID NO: 699040 - RNA, 24 nt, Human
cgcaccagcauggcacauguauac

SEQ ID NO: 699041 - RNA, 22 nt, Human
cuucccaucccacuucccaaac

SEQ ID NO: 699042 - RNA, 22 nt, Human
gaacaaaaaaccaaacaccgca

SEQ ID NO: 699043 - RNA, 21 nt, Human
gaaggaaagaagacaacgugg

SEQ ID NO: 699044 - RNA, 21 nt, Human
gagucaguguccuggggcugg

SEQ ID NO: 699045 - RNA, 19 nt, Human
gaugacauaagcacagaga

SEQ ID NO: 699046 - RNA, 22 nt, Human
gcaagaacaaaaaaccaaacac

SEQ ID NO: 699047 - RNA, 26 nt, Human
gcccauguacccuaaacuuuagagua

SEQ ID NO: 699048 - RNA, 20 nt, Human
ggaauggaacaaaugaagug

SEQ ID NO: 699049 - RNA, 19 nt, Human
ggacauggaugaaauugga

SEQ ID NO: 699050 - RNA, 18 nt, Human
gggaauaucacacucuug

SEQ ID NO: 699051 - RNA, 18 nt, Human
gggagggauagcauuggg

SEQ ID NO: 699052 - RNA, 22 nt, Human
gggucgggggaugggggaggga

SEQ ID NO: 699053 - RNA, 19 nt, Human
uaacagagaugacauaagc

SEQ ID NO: 699054 - RNA, 21 nt, Human
uaacagagaugacauaagcac

SEQ ID NO: 699055 - RNA, 22 nt, Human
uaacagagaugacauaagcaca

SEQ ID NO: 699056 - RNA, 24 nt, Human
uaacuucccaucccacuucccaaa

SEQ ID NO: 699057 - RNA, 18 nt, Human
uacccuaaacuuuagagu

SEQ ID NO: 699058 - RNA, 22 nt, Human
ucaguaaacuaucgcaagaaca

SEQ ID NO: 699059 - RNA, 28 nt, Human
ucccauaucuuuccuaacuucccauccc

SEQ ID NO: 699060 - RNA, 25 nt, Human
ucgcaagaacaaaaaaccaaacacc

SEQ ID NO: 699061 - RNA, 22 nt, Human
ucgggggaugggggagggauag

SEQ ID NO: 699062 - RNA, 20 nt, Human
ucucacucauaggugggaau

SEQ ID NO: 699063 - RNA, 24 nt, Human
ugaacaaugagaucacguggacac

SEQ ID NO: 699064 - RNA, 18 nt, Human
ugaagugggacguuugag

SEQ ID NO: 699065 - RNA, 18 nt, Human
ugaagugggacguuugag

SEQ ID NO: 699066 - RNA, 23 nt, Human
ugagggaaguggggguuuggagu

SEQ ID NO: 699067 - RNA, 24 nt, Human
ugagggaaguggggguuuggagug

SEQ ID NO: 699068 - RNA, 25 nt, Human
ugagggaaguggggguuuggagugu

SEQ ID NO: 699069 - RNA, 27 nt, Human
ugagggaaguggggguuuggaguguca

SEQ ID NO: 699070 - RNA, 19 nt, Human
uggaacaaaugaaguggga

SEQ ID NO: 699071 - RNA, 20 nt, Human
uggaauacuaugcagccaua

SEQ ID NO: 699072 - RNA, 20 nt, Human
uggauuaagaaaauguggcc

SEQ ID NO: 699073 - RNA, 19 nt, Human
uggcacauguauacauaug

SEQ ID NO: 699074 - RNA, 23 nt, Human
uggggucgggggaugggggaggg

SEQ ID NO: 699075 - RNA, 18 nt, Human
ugguggggucgggggaug

SEQ ID NO: 699076 - RNA, 24 nt, Human
ugguggugaaggaaagaagacaac

SEQ ID NO: 699077 - RNA, 27 nt, Human
uguauacauauguuacuaaccugcaca

SEQ ID NO: 699078 - RNA, 18 nt, Human
uuacugucauggucacaa

SEQ ID NO: 699079 - RNA, 19 nt, Human
uucuugguugggacccugg

SEQ ID NO: 699080 - RNA, 22 nt, Human
uuuauuacccaagaaucaggaa

SEQ ID NO: 699081 - RNA, 20 nt, Human
uuucuugguugggacccugg

SEQ ID NO: 699082 - RNA, 21 nt, Human
aggggcggccgcgcgcgcggg

SEQ ID NO: 699083 - RNA, 22 nt, Human
ccccggagccgcgccgaccucc

SEQ ID NO: 699084 - RNA, 22 nt, Human
ccgccgcgggcucugcccgcuc

SEQ ID NO: 699085 - RNA, 19 nt, Human
cgcgcgcgcgggggcccgg

SEQ ID NO: 699086 - RNA, 18 nt, Human
ugaguggaggggcggccg

SEQ ID NO: 699087 - RNA, 18 nt, Human
aaguggacacagaccaga

SEQ ID NO: 699088 - RNA, 18 nt, Human
aagugguggagccucagg

SEQ ID NO: 699089 - RNA, 21 nt, Human
acaggagcagcucugccuugg

SEQ ID NO: 699090 - RNA, 23 nt, Human
accuugagaggugccaacaaugg

SEQ ID NO: 699091 - RNA, 20 nt, Human
agaccccuucucucacacuu

SEQ ID NO: 699092 - RNA, 20 nt, Human
agacccgaggcagagaacag

SEQ ID NO: 699093 - RNA, 21 nt, Human
agacccgaggcagagaacagc

SEQ ID NO: 699094 - RNA, 26 nt, Human
aggcagacggugaggguggcccagga

SEQ ID NO: 699095 - RNA, 28 nt, Human
aggcagacggugaggguggcccaggagc

SEQ ID NO: 699096 - RNA, 19 nt, Human
aggcauuggaggggacagc

SEQ ID NO: 699097 - RNA, 21 nt, Human
aggccugugggcacuggggug

SEQ ID NO: 699098 - RNA, 24 nt, Human
auaguaauaagguuugccuguguc

SEQ ID NO: 699099 - RNA, 22 nt, Human
auggugugcugggggugggguu

SEQ ID NO: 699100 - RNA, 18 nt, Human
cagcgggacucuuuacuc

SEQ ID NO: 699101 - RNA, 24 nt, Human
caggcaggagcaggcacugaugcu

SEQ ID NO: 699102 - RNA, 21 nt, Human
caggcuguggcugagguggcu

SEQ ID NO: 699103 - RNA, 23 nt, Human
caucucuggucuggggcugaggg

SEQ ID NO: 699104 - RNA, 23 nt, Human
caucuggggccacaugcucacuc

SEQ ID NO: 699105 - RNA, 21 nt, Human
cauuccuggcaucaucggagg

SEQ ID NO: 699106 - RNA, 20 nt, Human
cauuggaggggacagccuug

SEQ ID NO: 699107 - RNA, 23 nt, Human
ccaccccacauggcauauaccac

SEQ ID NO: 699108 - RNA, 23 nt, Human
ccagaacugcuggggcccuccuc

SEQ ID NO: 699109 - RNA, 21 nt, Human
ccagauccuugggccgggucc

SEQ ID NO: 699110 - RNA, 18 nt, Human
ccccacauggcauauacc

SEQ ID NO: 699111 - RNA, 26 nt, Human
ccucugccacccaggcugcguccaac

SEQ ID NO: 699112 - RNA, 25 nt, Human
ccuggagaccccuucucucacacuu

SEQ ID NO: 699113 - RNA, 23 nt, Human
ccuugaacaccaagagcaaccuu

SEQ ID NO: 699114 - RNA, 24 nt, Human
ccuugaaugccugcuuugccuucu

SEQ ID NO: 699115 - RNA, 20 nt, Human
ccuuggacuugagcacgcug

SEQ ID NO: 699116 - RNA, 25 nt, Human
ccuuggacuugagcacgcugggcuu

SEQ ID NO: 699117 - RNA, 20 nt, Human
cgaggcagagaacagcucau

SEQ ID NO: 699118 - RNA, 18 nt, Human
cugacucaugggggguag

SEQ ID NO: 699119 - RNA, 21 nt, Human
cugcuguggcugaugcugucc

SEQ ID NO: 699120 - RNA, 27 nt, Human
cugcuguuuccugcagccucuuguuug

SEQ ID NO: 699121 - RNA, 20 nt, Human
cuuguacucuuuccagggac

SEQ ID NO: 699122 - RNA, 22 nt, Human
gagcaaccuugagaggugccaa

SEQ ID NO: 699123 - RNA, 19 nt, Human
gagcuggcgguguccgcac

SEQ ID NO: 699124 - RNA, 22 nt, Human
gaggccugugggcacuggggug

SEQ ID NO: 699125 - RNA, 22 nt, Human
gcacgcugggcuucucccacac

SEQ ID NO: 699126 - RNA, 21 nt, Human
gccugugggcacugggguggg

SEQ ID NO: 699127 - RNA, 21 nt, Human
gcuuugauuccuccuccuccu

SEQ ID NO: 699128 - RNA, 23 nt, Human
ggacacagaccagacuaaggaag

SEQ ID NO: 699129 - RNA, 18 nt, Human
ggaggccugugggcacug

SEQ ID NO: 699130 - RNA, 21 nt, Human
ggcaaggacugcacuagucca

SEQ ID NO: 699131 - RNA, 19 nt, Human
ggcauauaccacccaucuc

SEQ ID NO: 699132 - RNA, 19 nt, Human
ggccaggaggcacaggugg

SEQ ID NO: 699133 - RNA, 22 nt, Human
ggccaggaggcacagguggggg

SEQ ID NO: 699134 - RNA, 22 nt, Human
ggccuccaacacaucacaaucu

SEQ ID NO: 699135 - RNA, 18 nt, Human
gggccagggcaggcagga

SEQ ID NO: 699136 - RNA, 18 nt, Human
ggggcaggaugccaggug

SEQ ID NO: 699137 - RNA, 23 nt, Human
gguggggccaggaggcacaggug

SEQ ID NO: 699138 - RNA, 24 nt, Human
ggugggguuacuuuagaaaaagug

SEQ ID NO: 699139 - RNA, 24 nt, Human
gguuacuuuagaaaaaguggacac

SEQ ID NO: 699140 - RNA, 20 nt, Human
guccagaacugcuggggccc

SEQ ID NO: 699141 - RNA, 23 nt, Human
uaccacccaucucuggucugggg

SEQ ID NO: 699142 - RNA, 23 nt, Human
uagaaccucuaggucauccagau

SEQ ID NO: 699143 - RNA, 25 nt, Human
uagccccaucggaggaaaggguggg

SEQ ID NO: 699144 - RNA, 20 nt, Human
ucacacagacccgaggcaga

SEQ ID NO: 699145 - RNA, 19 nt, Human
uccagaacugcuggggccc

SEQ ID NO: 699146 - RNA, 19 nt, Human
uccaggaggccugugggca

SEQ ID NO: 699147 - RNA, 22 nt, Human
ucccuggagaccccuucucucc

SEQ ID NO: 699148 - RNA, 21 nt, Human
uccugcuguggcugaugcugu

SEQ ID NO: 699149 - RNA, 23 nt, Human
ucugccacccaggcugcguccaa

SEQ ID NO: 699150 - RNA, 22 nt, Human
ugaagugucuguggcagcugcu

SEQ ID NO: 699151 - RNA, 19 nt, Human
ugacaggcaccgcuggcau

SEQ ID NO: 699152 - RNA, 20 nt, Human
ugaggcagacggugagggug

SEQ ID NO: 699153 - RNA, 24 nt, Human
ugaggcagacggugaggguggccc

SEQ ID NO: 699154 - RNA, 23 nt, Human
ugagguggcuguggcugaagugu

SEQ ID NO: 699155 - RNA, 21 nt, Human
ugaguggugguggcgccccca

SEQ ID NO: 699156 - RNA, 18 nt, Human
ugcugcaggaaccccugu

SEQ ID NO: 699157 - RNA, 19 nt, Human
ugcugcugcuguuuccugc

SEQ ID NO: 699158 - RNA, 21 nt, Human
ugcugcugcuguuuccugcag

SEQ ID NO: 699159 - RNA, 24 nt, Human
ugcuuugccuucucccgguugcuc

SEQ ID NO: 699160 - RNA, 26 nt, Human
ugcuuugccuucucccgguugcucca

SEQ ID NO: 699161 - RNA, 22 nt, Human
uggaagcauugggggcaggaug

SEQ ID NO: 699162 - RNA, 24 nt, Human
uggccuccaacacaucacaaucuu

SEQ ID NO: 699163 - RNA, 21 nt, Human
uggcugagguggcuguggcug

SEQ ID NO: 699164 - RNA, 21 nt, Human
ugggacaggagcagcucugcc

SEQ ID NO: 699165 - RNA, 19 nt, Human
uggggccaggaggcacagg

SEQ ID NO: 699166 - RNA, 19 nt, Human
ugggggcaggaugccaggu

SEQ ID NO: 699167 - RNA, 19 nt, Human
ugggguggggccaggaggc

SEQ ID NO: 699168 - RNA, 20 nt, Human
uggugugcuggggguggggu

SEQ ID NO: 699169 - RNA, 20 nt, Human
uguggcagcugcugcugcug

SEQ ID NO: 699170 - RNA, 20 nt, Human
uuagguccuggguggaggaa

SEQ ID NO: 699171 - RNA, 19 nt, Human
uugauuccuccuccuccug

SEQ ID NO: 699172 - RNA, 18 nt, Human
uugucccucagcaguucc

SEQ ID NO: 699173 - RNA, 18 nt, Human
accccaaccgccuucccc

SEQ ID NO: 699174 - RNA, 19 nt, Human
agaaccccaaccgccuucc

SEQ ID NO: 699175 - RNA, 23 nt, Human
agaaccccaaccgccuuccccgc

SEQ ID NO: 699176 - RNA, 22 nt, Human
caaccgccuuccccgcgcuccc

SEQ ID NO: 699177 - RNA, 20 nt, Human
ucagaaccccaaccgccuuc

SEQ ID NO: 699178 - RNA, 22 nt, Human
ucagaaccccaaccgccuuccc

SEQ ID NO: 699179 - RNA, 23 nt, Human
ucgcgcgcagcugucagaacccc

SEQ ID NO: 699180 - RNA, 21 nt, Human
ucuggacucaggagagggccc

SEQ ID NO: 699181 - RNA, 20 nt, Human
ugagagagagcaggaucgcg

SEQ ID NO: 699182 - RNA, 20 nt, Human
ugcgcauguccacaggcggc

SEQ ID NO: 699183 - RNA, 20 nt, Human
uuuuuuuuuuuuuuuuuccu

SEQ ID NO: 699184 - RNA, 22 nt, Human
aaaaauaaaguacauaugccaa

SEQ ID NO: 699185 - RNA, 24 nt, Human
aaacaugacuuacuauacucaugc

SEQ ID NO: 699186 - RNA, 25 nt, Human
aaagagaaaacuauuugauaaauua

SEQ ID NO: 699187 - RNA, 24 nt, Human
aaagcguuucacccucccggggcu

SEQ ID NO: 699188 - RNA, 23 nt, Human
aacaaaaagaaaauuuuuucuaa

SEQ ID NO: 699189 - RNA, 22 nt, Human
aagcaucagacaugcagugaac

SEQ ID NO: 699190 - RNA, 23 nt, Human
aagcaucagacaugcagugaacu

SEQ ID NO: 699191 - RNA, 18 nt, Human
aagcauucacauugcuag

SEQ ID NO: 699192 - RNA, 24 nt, Human
aauaaagaaaauauaaaauaaaaa

SEQ ID NO: 699193 - RNA, 24 nt, Human
acaacaaaaauaugaaugaaaaaa

SEQ ID NO: 699194 - RNA, 23 nt, Human
acaaugcuauugccaccccacac

SEQ ID NO: 699195 - RNA, 23 nt, Human
acacccaucucuucccuuuucaa

SEQ ID NO: 699196 - RNA, 22 nt, Human
accaccauucccccacaucucc

SEQ ID NO: 699197 - RNA, 28 nt, Human
accaugaagguaugaaaaugcugugacc

SEQ ID NO: 699198 - RNA, 18 nt, Human
accccauucccucucaca

SEQ ID NO: 699199 - RNA, 19 nt, Human
acuaacacagacacaaaga

SEQ ID NO: 699200 - RNA, 23 nt, Human
acuauauaaaaaugguacuugga

SEQ ID NO: 699201 - RNA, 20 nt, Human
agaauaacacgguaaguagc

SEQ ID NO: 699202 - RNA, 22 nt, Human
agacaacaucacaguagauccc

SEQ ID NO: 699203 - RNA, 20 nt, Human
agcccuacacauagcaugcu

SEQ ID NO: 699204 - RNA, 21 nt, Human
aggcggagggcgagcgcgggg

SEQ ID NO: 699205 - RNA, 21 nt, Human
agggcuaauuuauuaaacacu

SEQ ID NO: 699206 - RNA, 23 nt, Human
auaaauuccuggaaacaacaaaa

SEQ ID NO: 699207 - RNA, 19 nt, Human
aucagaccguaaaaccuca

SEQ ID NO: 699208 - RNA, 24 nt, Human
aucagaccguaaaaccucagagua

SEQ ID NO: 699209 - RNA, 26 nt, Human
auggcacaaugcuauugccaccccac

SEQ ID NO: 699210 - RNA, 20 nt, Human
auugcuuuaauaccuguaau

SEQ ID NO: 699211 - RNA, 22 nt, Human
cacaaacaaagaagaugguaac

SEQ ID NO: 699212 - RNA, 21 nt, Human
cacaaugcuauugccacccca

SEQ ID NO: 699213 - RNA, 20 nt, Human
cacacacaggaccuacaaaa

SEQ ID NO: 699214 - RNA, 19 nt, Human
cacagacacaaagagaaaa

SEQ ID NO: 699215 - RNA, 20 nt, Human
cacagacacaaagagaaaac

SEQ ID NO: 699216 - RNA, 19 nt, Human
cacaggaccuacaaaauaa

SEQ ID NO: 699217 - RNA, 20 nt, Human
cacccaucucuucccuuuuc

SEQ ID NO: 699218 - RNA, 22 nt, Human
cacccaucucuucccuuuucaa

SEQ ID NO: 699219 - RNA, 27 nt, Human
caccccacacccaucucuucccuuuuc

SEQ ID NO: 699220 - RNA, 26 nt, Human
cagucugaccaccauucccccacauc

SEQ ID NO: 699221 - RNA, 21 nt, Human
caucacauuuaacaaaaagaa

SEQ ID NO: 699222 - RNA, 23 nt, Human
cauucccccacaucucccacccc

SEQ ID NO: 699223 - RNA, 20 nt, Human
cauucuuagccaaacucuga

SEQ ID NO: 699224 - RNA, 18 nt, Human
cauuuuacagggaagacu

SEQ ID NO: 699225 - RNA, 23 nt, Human
cccaaucacaugauuuucaucac

SEQ ID NO: 699226 - RNA, 19 nt, Human
cccaccccauucccucuca

SEQ ID NO: 699227 - RNA, 24 nt, Human
ccggaggcgacgcgggccuccucc

SEQ ID NO: 699228 - RNA, 21 nt, Human
ccuuuuuuugugaaaaauacu

SEQ ID NO: 699229 - RNA, 22 nt, Human
ccuuuuuuugugaaaaauacug

SEQ ID NO: 699230 - RNA, 20 nt, Human
cgguaaguagcaaaauaaua

SEQ ID NO: 699231 - RNA, 20 nt, Human
cuaaaauuucccccaauuag

SEQ ID NO: 699232 - RNA, 18 nt, Human
cucccggggcucgggcga

SEQ ID NO: 699233 - RNA, 24 nt, Human
cucgaaccacaguuugcuacagca

SEQ ID NO: 699234 - RNA, 25 nt, Human
cugaaugacaucucuuuugcacuga

SEQ ID NO: 699235 - RNA, 18 nt, Human
cuggguuuauaguugguu

SEQ ID NO: 699236 - RNA, 18 nt, Human
cuuagaucaugcuccauc

SEQ ID NO: 699237 - RNA, 18 nt, Human
gaaaaaaaacuccaagga

SEQ ID NO: 699238 - RNA, 23 nt, Human
gaccaccauucccccacaucucc

SEQ ID NO: 699239 - RNA, 21 nt, Human
gagcagcuuuaaaaacacuaa

SEQ ID NO: 699240 - RNA, 22 nt, Human
gcaacagcugauagaaacaaaa

SEQ ID NO: 699241 - RNA, 21 nt, Human
gcacaaugcuauugccacccc

SEQ ID NO: 699242 - RNA, 18 nt, Human
gcgcggggcgagcgcgag

SEQ ID NO: 699243 - RNA, 23 nt, Human
ggcuccugaccaucugaccauuu

SEQ ID NO: 699244 - RNA, 22 nt, Human
ggggcgagcgcgagccccgccg

SEQ ID NO: 699245 - RNA, 18 nt, Human
uaaaaacacuaacacaga

SEQ ID NO: 699246 - RNA, 21 nt, Human
uaaaaacacuaacacagacac

SEQ ID NO: 699247 - RNA, 22 nt, Human
uaaaaacauccauagcuuaagu

SEQ ID NO: 699248 - RNA, 21 nt, Human
uaaaaauggaacuguuuuuga

SEQ ID NO: 699249 - RNA, 18 nt, Human
uaaaaguguugaaaaaaa

SEQ ID NO: 699250 - RNA, 23 nt, Human
uaaaaguguugaaaaaaagacug

SEQ ID NO: 699251 - RNA, 23 nt, Human
uaaauaaagaaaauauaaaauaa

SEQ ID NO: 699252 - RNA, 19 nt, Human
uaacacagacacaaagaga

SEQ ID NO: 699253 - RNA, 26 nt, Human
uaacacagacacaaagagaaaacuau

SEQ ID NO: 699254 - RNA, 23 nt, Human
uaagaugaauaaaccaaaucuca

SEQ ID NO: 699255 - RNA, 23 nt, Human
uaauaacuagucaaucaacuuaa

SEQ ID NO: 699256 - RNA, 26 nt, Human
uacaccaugucugucaauagaauaag

SEQ ID NO: 699257 - RNA, 19 nt, Human
uacucaugcaagugcuuca

SEQ ID NO: 699258 - RNA, 21 nt, Human
uaguagucaaaacuagcugac

SEQ ID NO: 699259 - RNA, 21 nt, Human
uaugaaugaaaaaaaacucca

SEQ ID NO: 699260 - RNA, 22 nt, Human
uauuaaacacuuuacagguuuu

SEQ ID NO: 699261 - RNA, 18 nt, Human
ucaaucaacuuaaaacaa

SEQ ID NO: 699262 - RNA, 22 nt, Human
ucacaguagaucccaaucacau

SEQ ID NO: 699263 - RNA, 23 nt, Human
ucccaccccauucccucucacag

SEQ ID NO: 699264 - RNA, 21 nt, Human
ucuacaauuauuuugcagcug

SEQ ID NO: 699265 - RNA, 24 nt, Human
ucucacagauuucccacagguugc

SEQ ID NO: 699266 - RNA, 20 nt, Human
ucucccuuuucuuuuugguu

SEQ ID NO: 699267 - RNA, 19 nt, Human
ucucuucccuuuucaaaaa

SEQ ID NO: 699268 - RNA, 24 nt, Human
ucugauaggucauuuuauugaaac

SEQ ID NO: 699269 - RNA, 23 nt, Human
ugaaaaaaaacuccaaggaagua

SEQ ID NO: 699270 - RNA, 24 nt, Human
ugaaaauaccaccuuaacccuuaa

SEQ ID NO: 699271 - RNA, 18 nt, Human
ugaaaaugcugugacaaa

SEQ ID NO: 699272 - RNA, 22 nt, Human
ugaaauguacauaauaacuagu

SEQ ID NO: 699273 - RNA, 20 nt, Human
ugaaauucuacuuucugaua

SEQ ID NO: 699274 - RNA, 19 nt, Human
ugaacaucacuagaagcuc

SEQ ID NO: 699275 - RNA, 23 nt, Human
ugaacuagaaauauaucagcauu

SEQ ID NO: 699276 - RNA, 18 nt, Human
ugaagguaugaaaaugcu

SEQ ID NO: 699277 - RNA, 23 nt, Human
ugaauaaaccaaaucucacccug

SEQ ID NO: 699278 - RNA, 18 nt, Human
ugaaugaaaaaaaacucc

SEQ ID NO: 699279 - RNA, 23 nt, Human
ugagaaagacacggacagacaca

SEQ ID NO: 699280 - RNA, 20 nt, Human
ugagaacaaaacccaaaagu

SEQ ID NO: 699281 - RNA, 23 nt, Human
ugagaacaaaacccaaaaguuga

SEQ ID NO: 699282 - RNA, 20 nt, Human
ugccuuugaagacaacauca

SEQ ID NO: 699283 - RNA, 20 nt, Human
ugcuauugccaccccacacc

SEQ ID NO: 699284 - RNA, 19 nt, Human
ugcucgaaccacaguuugc

SEQ ID NO: 699285 - RNA, 24 nt, Human
ugcuuuaauaccuguaaucugcau

SEQ ID NO: 699286 - RNA, 23 nt, Human
uggcacaaugcuauugccacccc

SEQ ID NO: 699287 - RNA, 24 nt, Human
uggcacaguuauaaauaaagaaaa

SEQ ID NO: 699288 - RNA, 19 nt, Human
ugguacuuggaaauacuga

SEQ ID NO: 699289 - RNA, 19 nt, Human
ugucuacaauuauuuugca

SEQ ID NO: 699290 - RNA, 24 nt, Human
uguguacauucugaaauguacaua

SEQ ID NO: 699291 - RNA, 24 nt, Human
uuaaaaauuaucuaaaauuucccc

SEQ ID NO: 699292 - RNA, 22 nt, Human
uuacuaaggcaaggggcgggua

SEQ ID NO: 699293 - RNA, 19 nt, Human
uucacugcuccucuuacua

SEQ ID NO: 699294 - RNA, 18 nt, Human
uuccacacacaggaccua

SEQ ID NO: 699295 - RNA, 23 nt, Human
uucccucucacagauuucccaca

SEQ ID NO: 699296 - RNA, 19 nt, Human
uuccuggaaacaacaaaaa

SEQ ID NO: 699297 - RNA, 22 nt, Human
uugucuacaauuauuuugcagc

SEQ ID NO: 699298 - RNA, 20 nt, Human
uuuauaguugguuccacaca

SEQ ID NO: 699299 - RNA, 24 nt, Human
uuucacagguacuacaagaugguu

SEQ ID NO: 699300 - RNA, 25 nt, Human
uuugaacaaaaaaacaugacuuacu

SEQ ID NO: 699301 - RNA, 24 nt, Human
aaaacugaaaaagacaaaaaaaaa

SEQ ID NO: 699302 - RNA, 24 nt, Human
aaagugcugggauuagaggcguga

SEQ ID NO: 699303 - RNA, 23 nt, Human
aagcgauuccugccucagccucc

SEQ ID NO: 699304 - RNA, 19 nt, Human
aagugcugggauuagaggc

SEQ ID NO: 699305 - RNA, 26 nt, Human
aagugcugggauuagaggcgugagcc

SEQ ID NO: 699306 - RNA, 18 nt, Human
aauagcugggauuauagg

SEQ ID NO: 699307 - RNA, 28 nt, Human
aaucacucaaaaucaagcauguuguagg

SEQ ID NO: 699308 - RNA, 24 nt, Human
acaucuaucuauauauauaguggc

SEQ ID NO: 699309 - RNA, 19 nt, Human
acgggguuucacauguugg

SEQ ID NO: 699310 - RNA, 22 nt, Human
acgggguuucacauguuggcca

SEQ ID NO: 699311 - RNA, 23 nt, Human
acgggguuucacauguuggccag

SEQ ID NO: 699312 - RNA, 24 nt, Human
acgggguuucacauguuggccagg

SEQ ID NO: 699313 - RNA, 19 nt, Human
agaugauaaaacugaaaaa

SEQ ID NO: 699314 - RNA, 21 nt, Human
agaugauaaaacugaaaaaga

SEQ ID NO: 699315 - RNA, 18 nt, Human
agccuccagaauagcugg

SEQ ID NO: 699316 - RNA, 24 nt, Human
aguagugugaucucagcucacugc

SEQ ID NO: 699317 - RNA, 22 nt, Human
aguucuagaagcuucagggagg

SEQ ID NO: 699318 - RNA, 18 nt, Human
auagcugggauuauaggc

SEQ ID NO: 699319 - RNA, 24 nt, Human
caaagugcugggauuagaggcgug

SEQ ID NO: 699320 - RNA, 18 nt, Human
caagcgauuccugccuca

SEQ ID NO: 699321 - RNA, 22 nt, Human
cacauguuggccaggcuggucu

SEQ ID NO: 699322 - RNA, 21 nt, Human
caccacgccgccgcauaagcc

SEQ ID NO: 699323 - RNA, 24 nt, Human
cacugcaaccucugcuuuccaauu

SEQ ID NO: 699324 - RNA, 24 nt, Human
cacugcaaccucugcuuugggccu

SEQ ID NO: 699325 - RNA, 18 nt, Human
cagcuuccgcccggggag

SEQ ID NO: 699326 - RNA, 23 nt, Human
caguggagacgggguuucacaug

SEQ ID NO: 699327 - RNA, 18 nt, Human
cauguuggccaggcuggu

SEQ ID NO: 699328 - RNA, 20 nt, Human
cauguuggccaggcuggucu

SEQ ID NO: 699329 - RNA, 20 nt, Human
cauguuggccaggcuggucu

SEQ ID NO: 699330 - RNA, 24 nt, Human
cauguuggccaggcuggucuugaa

SEQ ID NO: 699331 - RNA, 22 nt, Human
ccaaagugcugggauuagaggc

SEQ ID NO: 699332 - RNA, 24 nt, Human
ccaaagugcugggauuagaggcgu

SEQ ID NO: 699333 - RNA, 21 nt, Human
ccacaccuucuuucugcucca

SEQ ID NO: 699334 - RNA, 23 nt, Human
ccagaauagcugggauuauaggc

SEQ ID NO: 699335 - RNA, 23 nt, Human
ccagaauagcugggauuauaggc

SEQ ID NO: 699336 - RNA, 19 nt, Human
ccauaaauuaauccaguag

SEQ ID NO: 699337 - RNA, 22 nt, Human
cccaagaugauaaaacugaaaa

SEQ ID NO: 699338 - RNA, 19 nt, Human
ccccaggcuggaguacagu

SEQ ID NO: 699339 - RNA, 23 nt, Human
ccgcauaagccccaccucacgcc

SEQ ID NO: 699340 - RNA, 21 nt, Human
ccugaccucgugaucuaccug

SEQ ID NO: 699341 - RNA, 24 nt, Human
cgacuuccggcaacugacacagcu

SEQ ID NO: 699342 - RNA, 18 nt, Human
cgcccggggaggaggcgg

SEQ ID NO: 699343 - RNA, 21 nt, Human
cggggaggaggcggggcuggc

SEQ ID NO: 699344 - RNA, 22 nt, Human
cucacugcaaccucugcuuucc

SEQ ID NO: 699345 - RNA, 24 nt, Human
cuccagaauagcugggauuauagg

SEQ ID NO: 699346 - RNA, 20 nt, Human
cugaaaaagacaaaaaaaaa

SEQ ID NO: 699347 - RNA, 19 nt, Human
cugcaaccucugcuuucca

SEQ ID NO: 699348 - RNA, 20 nt, Human
cugcaaccucugcuuuccaa

SEQ ID NO: 699349 - RNA, 23 nt, Human
cugccucagccuccagaauagcu

SEQ ID NO: 699350 - RNA, 24 nt, Human
cugccucgaccucccaaagugcug

SEQ ID NO: 699351 - RNA, 22 nt, Human
cuuucugcuccaguucuagaag

SEQ ID NO: 699352 - RNA, 18 nt, Human
gaccucgugaucuaccug

SEQ ID NO: 699353 - RNA, 22 nt, Human
gaccucgugaucuaccugccuc

SEQ ID NO: 699354 - RNA, 24 nt, Human
gacuuccggcaacugacacagcuu

SEQ ID NO: 699355 - RNA, 23 nt, Human
gagacgggguuucacauguuggc

SEQ ID NO: 699356 - RNA, 18 nt, Human
gauuagaggcgugagcca

SEQ ID NO: 699357 - RNA, 24 nt, Human
gauuauaggcgcccaccaccaugc

SEQ ID NO: 699358 - RNA, 22 nt, Human
gcaaccucugcuuuccaauuuc

SEQ ID NO: 699359 - RNA, 22 nt, Human
ggaguuucacucuuucccccag

SEQ ID NO: 699360 - RNA, 24 nt, Human
ggcuggucuugaauuccugaccuc

SEQ ID NO: 699361 - RNA, 22 nt, Human
gggguuucacauguuggccagg

SEQ ID NO: 699362 - RNA, 19 nt, Human
ggucuugaauuccugaccu

SEQ ID NO: 699363 - RNA, 22 nt, Human
guggagacgggguuucacaugu

SEQ ID NO: 699364 - RNA, 22 nt, Human
uaaauucuccacaacauaggau

SEQ ID NO: 699365 - RNA, 24 nt, Human
uaauuuuucuauuuucaguggaga

SEQ ID NO: 699366 - RNA, 23 nt, Human
uacaguagugugaucucagcucc

SEQ ID NO: 699367 - RNA, 19 nt, Human
uaccaaaauucuaacucaa

SEQ ID NO: 699368 - RNA, 23 nt, Human
uaccugccucgaccucccaaagu

SEQ ID NO: 699369 - RNA, 19 nt, Human
uagauauucauaagcuguc

SEQ ID NO: 699370 - RNA, 19 nt, Human
uaggcgcccaccaccaugc

SEQ ID NO: 699371 - RNA, 24 nt, Human
uagugugaucucagcucacugcaa

SEQ ID NO: 699372 - RNA, 19 nt, Human
uauuucaccacgccgccgc

SEQ ID NO: 699373 - RNA, 20 nt, Human
ucacucuuucccccaggcug

SEQ ID NO: 699374 - RNA, 22 nt, Human
ucacucuuucccccaggcugga

SEQ ID NO: 699375 - RNA, 23 nt, Human
ucacugcaaccucugcuuuccaa

SEQ ID NO: 699376 - RNA, 26 nt, Human
ucacugcaaccucugcuuugggcccu

SEQ ID NO: 699377 - RNA, 28 nt, Human
ucacugcaaccucugcuuugggcccucc

SEQ ID NO: 699378 - RNA, 25 nt, Human
ucacugcaaccucugcuuugggccu

SEQ ID NO: 699379 - RNA, 24 nt, Human
ucacugcaaccucugcuuugggcu

SEQ ID NO: 699380 - RNA, 26 nt, Human
ucacugcaaccucugcuuuggguacu

SEQ ID NO: 699381 - RNA, 26 nt, Human
ucacugcaaccucugcuuuggguccu

SEQ ID NO: 699382 - RNA, 28 nt, Human
ucacugcaaccucugcuuuggguccucc

SEQ ID NO: 699383 - RNA, 25 nt, Human
ucacugcaaccucugcuuugggucu

SEQ ID NO: 699384 - RNA, 23 nt, Human
ucaguggagacgggguuucacau

SEQ ID NO: 699385 - RNA, 24 nt, Human
uccagaauagcugggauuauaggc

SEQ ID NO: 699386 - RNA, 24 nt, Human
ucccaaagugcugggauuagaggc

SEQ ID NO: 699387 - RNA, 21 nt, Human
uccuaggcagguagcuggccu

SEQ ID NO: 699388 - RNA, 23 nt, Human
ucuacacugauuuuucauacagg

SEQ ID NO: 699389 - RNA, 23 nt, Human
ucucucagacuuccuuucggguu

SEQ ID NO: 699390 - RNA, 18 nt, Human
ucuuggagacacaugcca

SEQ ID NO: 699391 - RNA, 26 nt, Human
ugaacuggguucauaaccuacaucua

SEQ ID NO: 699392 - RNA, 26 nt, Human
ugauaaaacugaaaaagacaaaaaaa

SEQ ID NO: 699393 - RNA, 24 nt, Human
ugccucagccuccagaauagcugg

SEQ ID NO: 699394 - RNA, 24 nt, Human
ugccucgaccucccaaagugcugg

SEQ ID NO: 699395 - RNA, 22 nt, Human
ugcuccaguucuagaagcuuca

SEQ ID NO: 699396 - RNA, 24 nt, Human
uggccaggcuggucuugaauuccu

SEQ ID NO: 699397 - RNA, 18 nt, Human
uggcccugggccacaccu

SEQ ID NO: 699398 - RNA, 18 nt, Human
ugggauuagaggcgugag

SEQ ID NO: 699399 - RNA, 19 nt, Human
ugggauuagaggcgugagc

SEQ ID NO: 699400 - RNA, 22 nt, Human
ugggauuagaggcgugagccac

SEQ ID NO: 699401 - RNA, 24 nt, Human
ugggauuagaggcgugagccacag

SEQ ID NO: 699402 - RNA, 21 nt, Human
ugggauuauaggcgcccacca

SEQ ID NO: 699403 - RNA, 24 nt, Human
ugggauuauaggcgcccaccacca

SEQ ID NO: 699404 - RNA, 25 nt, Human
ugggauuauaggcgcccaccaccau

SEQ ID NO: 699405 - RNA, 21 nt, Human
uuaaucacucaaaaucaagca

SEQ ID NO: 699406 - RNA, 25 nt, Human
uuaaucacucaaaaucaagcauguu

SEQ ID NO: 699407 - RNA, 21 nt, Human
uucauaagcugucuuggagac

SEQ ID NO: 699408 - RNA, 24 nt, Human
uuccugaccucgugaucuaccugc

SEQ ID NO: 699409 - RNA, 18 nt, Human
uugacccaagaugauaaa

SEQ ID NO: 699410 - RNA, 21 nt, Human
uuucacauguuggccaggcug

SEQ ID NO: 699411 - RNA, 23 nt, Human
uuucacauguuggccaggcuggu

SEQ ID NO: 699412 - RNA, 23 nt, Human
uuucacucuuucccccaggcugg

SEQ ID NO: 699413 - RNA, 24 nt, Human
uuucacucuuucccccaggcugga

SEQ ID NO: 699414 - RNA, 24 nt, Human
uuuucaguggagacgggguuucac

SEQ ID NO: 699415 - RNA, 26 nt, Human
uuuuuuuuuuuugagauggaguuuca

SEQ ID NO: 699416 - RNA, 22 nt, Human
uuuuuuuuuuuuuugagaugga

SEQ ID NO: 699417 - RNA, 23 nt, Human
uuuuuuuuuuuuuuuuuuuuggg

SEQ ID NO: 699418 - RNA, 21 nt, Human
aagccugugagguucccuuca

SEQ ID NO: 699419 - RNA, 22 nt, Human
cccuggcuaagccugugagguu

SEQ ID NO: 699420 - RNA, 22 nt, Human
ccuucaaggcucugggacccag

SEQ ID NO: 699421 - RNA, 20 nt, Human
gcccuggcuaagccugugag

SEQ ID NO: 699422 - RNA, 20 nt, Human
aaguauuugaccagcagagc

SEQ ID NO: 699423 - RNA, 19 nt, Human
acaaaauaaauaacccaaa

SEQ ID NO: 699424 - RNA, 23 nt, Human
agcccuucuggagcuaggagugg

SEQ ID NO: 699425 - RNA, 22 nt, Human
aggaggagagaggggaaauagc

SEQ ID NO: 699426 - RNA, 18 nt, Human
aggaguggcaagaguggg

SEQ ID NO: 699427 - RNA, 18 nt, Human
agggagggaggaggcucc

SEQ ID NO: 699428 - RNA, 23 nt, Human
cacccccaaaaagcagcugcagg

SEQ ID NO: 699429 - RNA, 19 nt, Human
caggaaguacuguaguagc

SEQ ID NO: 699430 - RNA, 21 nt, Human
ccccacccccagauccugcaa

SEQ ID NO: 699431 - RNA, 19 nt, Human
cccccaaaaagcagcugca

SEQ ID NO: 699432 - RNA, 21 nt, Human
cccccagauccugcaaaagag

SEQ ID NO: 699433 - RNA, 19 nt, Human
cccuccccacccccagauc

SEQ ID NO: 699434 - RNA, 19 nt, Human
cuugucccuccccaccccc

SEQ ID NO: 699435 - RNA, 21 nt, Human
gaacuagcuugucccucccca

SEQ ID NO: 699436 - RNA, 19 nt, Human
gagaaguuucaagaagguu

SEQ ID NO: 699437 - RNA, 22 nt, Human
gcccagaccagagucaagccuc

SEQ ID NO: 699438 - RNA, 21 nt, Human
gcccugagcccuucuggagcu

SEQ ID NO: 699439 - RNA, 21 nt, Human
ggagaaguuucaagaagguuc

SEQ ID NO: 699440 - RNA, 20 nt, Human
ggcucccacgggagguaaac

SEQ ID NO: 699441 - RNA, 20 nt, Human
gggccaguggccgggccaaa

SEQ ID NO: 699442 - RNA, 24 nt, Human
ggggagaaguuucaagaagguucu

SEQ ID NO: 699443 - RNA, 22 nt, Human
gucccuccccacccccagaucc

SEQ ID NO: 699444 - RNA, 20 nt, Human
uaaacaccaggccuugcgua

SEQ ID NO: 699445 - RNA, 18 nt, Human
uaggagguuggggaacua

SEQ ID NO: 699446 - RNA, 18 nt, Human
ucacuuuaccaauacuga

SEQ ID NO: 699447 - RNA, 22 nt, Human
ucccacgggagguaaacaccag

SEQ ID NO: 699448 - RNA, 18 nt, Human
ucccagagggccacaggg

SEQ ID NO: 699449 - RNA, 23 nt, Human
ucucauuauuuuggggcgaaaau

SEQ ID NO: 699450 - RNA, 18 nt, Human
ugaaugggagaagucagg

SEQ ID NO: 699451 - RNA, 20 nt, Human
uggauuugguuuugagcagg

SEQ ID NO: 699452 - RNA, 19 nt, Human
ugggagaagucaggaagua

SEQ ID NO: 699453 - RNA, 22 nt, Human
ugggagaagucaggaaguacug

SEQ ID NO: 699454 - RNA, 21 nt, Human
uugguuuugagcagggacgug

SEQ ID NO: 699455 - RNA, 19 nt, Human
cacaaacaauugcaagggu

SEQ ID NO: 699456 - RNA, 21 nt, Human
cagggcccuggugucacaaag

SEQ ID NO: 699457 - RNA, 19 nt, Human
ccuaguuaaagcaccaggg

SEQ ID NO: 699458 - RNA, 20 nt, Human
uaaagcaccagggcccuggu

SEQ ID NO: 699459 - RNA, 24 nt, Human
uaagcgucacauauucacaaacaa

SEQ ID NO: 699460 - RNA, 22 nt, Human
uuuuuuuuuuuuuuuuuuacag

SEQ ID NO: 699461 - RNA, 21 nt, Human
aagagacccggagcucaaaua

SEQ ID NO: 699462 - RNA, 19 nt, Human
acaaugccagggaggaaga

SEQ ID NO: 699463 - RNA, 19 nt, Human
accccacaaugccagggag

SEQ ID NO: 699464 - RNA, 23 nt, Human
acgcaguuaaggaggagccaugu

SEQ ID NO: 699465 - RNA, 21 nt, Human
agagaucuuccauccccaccu

SEQ ID NO: 699466 - RNA, 22 nt, Human
aggaagacagguucuaucuaag

SEQ ID NO: 699467 - RNA, 20 nt, Human
aggaaggugaaguggcagca

SEQ ID NO: 699468 - RNA, 22 nt, Human
agucuaucaggaagaaggggaa

SEQ ID NO: 699469 - RNA, 21 nt, Human
agugucacgcccagaccccac

SEQ ID NO: 699470 - RNA, 23 nt, Human
agugucacgcccagaccccacaa

SEQ ID NO: 699471 - RNA, 24 nt, Human
auggggugauacauuagaagugcu

SEQ ID NO: 699472 - RNA, 19 nt, Human
cacacagcuccaagucuau

SEQ ID NO: 699473 - RNA, 25 nt, Human
cacacagcuccaagucuaucaggau

SEQ ID NO: 699474 - RNA, 19 nt, Human
cacagacagcaagcagcau

SEQ ID NO: 699475 - RNA, 21 nt, Human
cagaccccacaaugccaggga

SEQ ID NO: 699476 - RNA, 18 nt, Human
cagcaagcagcaugcucc

SEQ ID NO: 699477 - RNA, 22 nt, Human
cagcugcacaaaaagaaaagua

SEQ ID NO: 699478 - RNA, 24 nt, Human
caggcagccuuggaguggaggcac

SEQ ID NO: 699479 - RNA, 18 nt, Human
cccacaccucugcggacu

SEQ ID NO: 699480 - RNA, 24 nt, Human
ccccacaccucugcggacuaggac

SEQ ID NO: 699481 - RNA, 21 nt, Human
cggagcucaaauagcuuaaau

SEQ ID NO: 699482 - RNA, 18 nt, Human
cuggccgcugguccucuc

SEQ ID NO: 699483 - RNA, 22 nt, Human
gagaguccugcucugcgucugu

SEQ ID NO: 699484 - RNA, 23 nt, Human
ggcaggcugcagggcugguggcu

SEQ ID NO: 699485 - RNA, 19 nt, Human
gggcucagggggccccaac

SEQ ID NO: 699486 - RNA, 19 nt, Human
gguagaagagacccggagc

SEQ ID NO: 699487 - RNA, 24 nt, Human
gguagaagagacccggagcucaaa

SEQ ID NO: 699488 - RNA, 22 nt, Human
guggcucagggcucagggggcc

SEQ ID NO: 699489 - RNA, 19 nt, Human
uagaacaaugacuccaugg

SEQ ID NO: 699490 - RNA, 24 nt, Human
uagaaugcagguagaagagacccg

SEQ ID NO: 699491 - RNA, 18 nt, Human
ucacugaggcucuggccg

SEQ ID NO: 699492 - RNA, 22 nt, Human
ucacugaggcucuggccgcugg

SEQ ID NO: 699493 - RNA, 22 nt, Human
ucaggaagaaggggaaauggga

SEQ ID NO: 699494 - RNA, 20 nt, Human
ucaggaaggugaaguggcag

SEQ ID NO: 699495 - RNA, 19 nt, Human
ucccagugucacgcccaga

SEQ ID NO: 699496 - RNA, 23 nt, Human
ugaaguggcagcagagagagucc

SEQ ID NO: 699497 - RNA, 20 nt, Human
ugccagggaggaagacaggu

SEQ ID NO: 699498 - RNA, 22 nt, Human
ugcccuguccuccaggguggca

SEQ ID NO: 699499 - RNA, 19 nt, Human
uggcagcacaaagcugcug

SEQ ID NO: 699500 - RNA, 21 nt, Human
uggccgcugguccucucucag

SEQ ID NO: 699501 - RNA, 20 nt, Human
ugguggcucagggcucaggg

SEQ ID NO: 699502 - RNA, 20 nt, Human
uuagaagugcuccagggucc

SEQ ID NO: 699503 - RNA, 23 nt, Human
uuggaguggaggcacacagcucc

SEQ ID NO: 699504 - RNA, 19 nt, Human
uugugcccuguccuccagg

SEQ ID NO: 699505 - RNA, 22 nt, Human
aaaaagccaggacacaaaggug

SEQ ID NO: 699506 - RNA, 24 nt, Human
aaaaauaacccacaaugacuccaa

SEQ ID NO: 699507 - RNA, 27 nt, Human
aaauaacccacaaugacuccaaaucuu

SEQ ID NO: 699508 - RNA, 21 nt, Human
aacaacacauacuuggcaaaa

SEQ ID NO: 699509 - RNA, 19 nt, Human
aagauccuccaucccacca

SEQ ID NO: 699510 - RNA, 20 nt, Human
aagauccuccaucccaccaa

SEQ ID NO: 699511 - RNA, 23 nt, Human
aagauccuccaucccaccaaaaa

SEQ ID NO: 699512 - RNA, 21 nt, Human
aagcaacaacacauacuuggc

SEQ ID NO: 699513 - RNA, 26 nt, Human
aagcaacaagaauggugacacaacua

SEQ ID NO: 699514 - RNA, 20 nt, Human
acacaaaggugcuauugagg

SEQ ID NO: 699515 - RNA, 24 nt, Human
acccucuuccaaacuauuuaauuc

SEQ ID NO: 699516 - RNA, 24 nt, Human
acucuacugcucaaugcaaaaugg

SEQ ID NO: 699517 - RNA, 28 nt, Human
aggguccacauagagccacaaagggacu

SEQ ID NO: 699518 - RNA, 21 nt, Human
aguccccagacccgggucagu

SEQ ID NO: 699519 - RNA, 19 nt, Human
auaauuauguaaaaugcau

SEQ ID NO: 699520 - RNA, 23 nt, Human
augcaaaauggagaauauguggu

SEQ ID NO: 699521 - RNA, 26 nt, Human
caaaaauaacccacaaugacuccaaa

SEQ ID NO: 699522 - RNA, 22 nt, Human
caaaauggagaauauguggucc

SEQ ID NO: 699523 - RNA, 22 nt, Human
caacaacacauacuuggcaaaa

SEQ ID NO: 699524 - RNA, 23 nt, Human
caacaagaauggugacacaacua

SEQ ID NO: 699525 - RNA, 19 nt, Human
cacaaagggacucauccuc

SEQ ID NO: 699526 - RNA, 23 nt, Human
cacauacuuggcaaaaucuucua

SEQ ID NO: 699527 - RNA, 20 nt, Human
cacugucugacccuuuuaaa

SEQ ID NO: 699528 - RNA, 22 nt, Human
cagaaacaaaccaaacaacauc

SEQ ID NO: 699529 - RNA, 25 nt, Human
cagaaacaaaccaaacaacauccua

SEQ ID NO: 699530 - RNA, 23 nt, Human
caggacacaaaggugcuauugag

SEQ ID NO: 699531 - RNA, 19 nt, Human
caucccaccaaaaauaacc

SEQ ID NO: 699532 - RNA, 21 nt, Human
cauggaccacaugauuagccu

SEQ ID NO: 699533 - RNA, 18 nt, Human
ccacauagagccacaaag

SEQ ID NO: 699534 - RNA, 23 nt, Human
ccaccaaaaauaacccacaauga

SEQ ID NO: 699535 - RNA, 21 nt, Human
cccaggcuuaccuuccagaaa

SEQ ID NO: 699536 - RNA, 22 nt, Human
cccccuccacacugucugaccc

SEQ ID NO: 699537 - RNA, 28 nt, Human
ccccuccacacugucugacccuuuuaaa

SEQ ID NO: 699538 - RNA, 19 nt, Human
cggcaggcggcugcaauac

SEQ ID NO: 699539 - RNA, 21 nt, Human
cuacaggaaucgggaacgggg

SEQ ID NO: 699540 - RNA, 23 nt, Human
cucaaguuaucaaacaaaaaagu

SEQ ID NO: 699541 - RNA, 23 nt, Human
cuccaucccaccaaaaauaaccc

SEQ ID NO: 699542 - RNA, 18 nt, Human
cuugggacuaaacuguuc

SEQ ID NO: 699543 - RNA, 20 nt, Human
cuuuccacuguacucuacug

SEQ ID NO: 699544 - RNA, 20 nt, Human
gagaacuucugauuauacag

SEQ ID NO: 699545 - RNA, 21 nt, Human
gagccacaaagggacucaucc

SEQ ID NO: 699546 - RNA, 25 nt, Human
gcucuauaaaguucauaucaaauac

SEQ ID NO: 699547 - RNA, 19 nt, Human
ggcaauaagagaaaccgaa

SEQ ID NO: 699548 - RNA, 21 nt, Human
gggaacggggauguagaggaa

SEQ ID NO: 699549 - RNA, 23 nt, Human
gggaacucccccuccacacuguc

SEQ ID NO: 699550 - RNA, 21 nt, Human
uaaaaagcaacaagaauggug

SEQ ID NO: 699551 - RNA, 28 nt, Human
uaaaaagcaacaagaauggugacacaaa

SEQ ID NO: 699552 - RNA, 23 nt, Human
uaaauucaucaaugccauauuua

SEQ ID NO: 699553 - RNA, 24 nt, Human
uaacccacaaugacuccaaaucuu

SEQ ID NO: 699554 - RNA, 21 nt, Human
uaagagaaaccgaacggcgcc

SEQ ID NO: 699555 - RNA, 19 nt, Human
uaauccaacccucuuccaa

SEQ ID NO: 699556 - RNA, 21 nt, Human
uacaauugagguucagagaac

SEQ ID NO: 699557 - RNA, 23 nt, Human
uagccugauuuuuaaaaagcaac

SEQ ID NO: 699558 - RNA, 18 nt, Human
uauaucuuuauacaauuu

SEQ ID NO: 699559 - RNA, 24 nt, Human
uauuuuuaauacuuuaccccccuu

SEQ ID NO: 699560 - RNA, 21 nt, Human
ucagaaacaaaccaaacaaca

SEQ ID NO: 699561 - RNA, 19 nt, Human
uccacauagagccacaaag

SEQ ID NO: 699562 - RNA, 27 nt, Human
uccacuguacucuacugagcggguccg

SEQ ID NO: 699563 - RNA, 20 nt, Human
uccacuguacucuacugcuc

SEQ ID NO: 699564 - RNA, 18 nt, Human
uccccagacccgggucag

SEQ ID NO: 699565 - RNA, 18 nt, Human
ucgcuagaugaaacugcg

SEQ ID NO: 699566 - RNA, 20 nt, Human
ucucccaggcuuaccuuccc

SEQ ID NO: 699567 - RNA, 23 nt, Human
ugaaaaagccaggacacaaaggu

SEQ ID NO: 699568 - RNA, 24 nt, Human
ugaacaaacucauaauuauguaaa

SEQ ID NO: 699569 - RNA, 22 nt, Human
ugaaggcaauaagagaaaccga

SEQ ID NO: 699570 - RNA, 27 nt, Human
ugcaaaauuuaaacacucagaaacaaa

SEQ ID NO: 699571 - RNA, 18 nt, Human
ugcaauacagccgcuacu

SEQ ID NO: 699572 - RNA, 24 nt, Human
uggcauuugugcaggucaagcuuu

SEQ ID NO: 699573 - RNA, 23 nt, Human
ugucugcugcuuuugggcagagu

SEQ ID NO: 699574 - RNA, 21 nt, Human
uuaaauauccauaauugcaag

SEQ ID NO: 699575 - RNA, 31 nt, Human
uuaacacuuucagcaauugauucucucacag

SEQ ID NO: 699576 - RNA, 23 nt, Human
uuccagaaacuagaacauuaacc

SEQ ID NO: 699577 - RNA, 22 nt, Human
uugcuuaugugucucccaggcu

SEQ ID NO: 699578 - RNA, 25 nt, Human
uugucucacacauuuuauauaaagu

SEQ ID NO: 699579 - RNA, 21 nt, Human
uuuaaaaaaugaaaaagccag

SEQ ID NO: 699580 - RNA, 18 nt, Human
uuuaagauccuccauccc

SEQ ID NO: 699581 - RNA, 19 nt, Human
uuuaagauccuccauccca

SEQ ID NO: 699582 - RNA, 18 nt, Human
uuuuacaucaacuaaauu

SEQ ID NO: 699583 - RNA, 20 nt, Human
aaagugcugggauuacaggc

SEQ ID NO: 699584 - RNA, 20 nt, Human
aaagugcugggauuacaggc

SEQ ID NO: 699585 - RNA, 24 nt, Human
aaagugcugggauuacaggcguca

SEQ ID NO: 699586 - RNA, 24 nt, Human
aaagugcugggauuacaggcguca

SEQ ID NO: 699587 - RNA, 27 nt, Human
aagcgauucuccugccucggccuccca

SEQ ID NO: 699588 - RNA, 24 nt, Human
aaggauccucccaacucagccucc

SEQ ID NO: 699589 - RNA, 24 nt, Human
aaggauccucccaacucagccucc

SEQ ID NO: 699590 - RNA, 19 nt, Human
aagugcugggauuacaggc

SEQ ID NO: 699591 - RNA, 19 nt, Human
aagugcugggauuacaggc

SEQ ID NO: 699592 - RNA, 19 nt, Human
aagugcugggauuacaggc

SEQ ID NO: 699593 - RNA, 19 nt, Human
aagugcugggauuacaggc

SEQ ID NO: 699594 - RNA, 19 nt, Human
acggggucucacuauguug

SEQ ID NO: 699595 - RNA, 19 nt, Human
acggggucucacuauguug

SEQ ID NO: 699596 - RNA, 20 nt, Human
acggggucucacuauguugu

SEQ ID NO: 699597 - RNA, 20 nt, Human
acggggucucacuauguugu

SEQ ID NO: 699598 - RNA, 24 nt, Human
acggggucucacuauguuguccag

SEQ ID NO: 699599 - RNA, 24 nt, Human
acggggucucacuauguuguccag

SEQ ID NO: 699600 - RNA, 24 nt, Human
acuauguuguccaggcuggucucg

SEQ ID NO: 699601 - RNA, 24 nt, Human
acuauguuguccaggcuggucucg

SEQ ID NO: 699602 - RNA, 24 nt, Human
acuccugggcucaagcgauucucc

SEQ ID NO: 699603 - RNA, 24 nt, Human
acuccugggcucaagcgauucucc

SEQ ID NO: 699604 - RNA, 20 nt, Human
acucucucugcccccuuccu

SEQ ID NO: 699605 - RNA, 19 nt, Human
aggcuggagugcaguggca

SEQ ID NO: 699606 - RNA, 19 nt, Human
aggcuggagugcaguggca

SEQ ID NO: 699607 - RNA, 20 nt, Human
agugcaguggcacgaucaag

SEQ ID NO: 699608 - RNA, 20 nt, Human
agugcaguggcacgaucaag

SEQ ID NO: 699609 - RNA, 18 nt, Human
agugcugggauuacaggc

SEQ ID NO: 699610 - RNA, 18 nt, Human
agugcugggauuacaggc

SEQ ID NO: 699611 - RNA, 22 nt, Human
auuuuuauuuuauuuuuggaga

SEQ ID NO: 699612 - RNA, 19 nt, Human
caaaggauccucccaacuc

SEQ ID NO: 699613 - RNA, 19 nt, Human
caaaggauccucccaacuc

SEQ ID NO: 699614 - RNA, 25 nt, Human
caaagugcugggauuacaggcguca

SEQ ID NO: 699615 - RNA, 25 nt, Human
caaagugcugggauuacaggcguca

SEQ ID NO: 699616 - RNA, 24 nt, Human
caacucagccucccggguagcugg

SEQ ID NO: 699617 - RNA, 22 nt, Human
caagcgauucuccugccucggc

SEQ ID NO: 699618 - RNA, 22 nt, Human
caagcgauucuccugccucggc

SEQ ID NO: 699619 - RNA, 28 nt, Human
caagcgauucuccugccucggccuccca

SEQ ID NO: 699620 - RNA, 21 nt, Human
cacaccaggcuaauuugugua

SEQ ID NO: 699621 - RNA, 21 nt, Human
cacaccaggcuaauuugugua

SEQ ID NO: 699622 - RNA, 23 nt, Human
cacgaucaaggcucacugcaacc

SEQ ID NO: 699623 - RNA, 23 nt, Human
cacgaucaaggcucacugcaacc

SEQ ID NO: 699624 - RNA, 24 nt, Human
cacuauguuguccaggcuggucuc

SEQ ID NO: 699625 - RNA, 24 nt, Human
cacuauguuguccaggcuggucuc

SEQ ID NO: 699626 - RNA, 19 nt, Human
cagccaccauguauggcca

SEQ ID NO: 699627 - RNA, 19 nt, Human
cagggcucaaaggauccuc

SEQ ID NO: 699628 - RNA, 19 nt, Human
cagggcucaaaggauccuc

SEQ ID NO: 699629 - RNA, 22 nt, Human
cagggcucaaaggauccuccca

SEQ ID NO: 699630 - RNA, 20 nt, Human
cauaacucucucugcccccu

SEQ ID NO: 699631 - RNA, 23 nt, Human
ccaaagcugugggcgcggggcuc

SEQ ID NO: 699632 - RNA, 20 nt, Human
ccaaagugcugggauuacag

SEQ ID NO: 699633 - RNA, 22 nt, Human
ccaaagugcugggauuacaggc

SEQ ID NO: 699634 - RNA, 22 nt, Human
ccaaagugcugggauuacaggc

SEQ ID NO: 699635 - RNA, 22 nt, Human
ccaaagugcugggauuacaggc

SEQ ID NO: 699636 - RNA, 22 nt, Human
ccaaagugcugggauuacaggc

SEQ ID NO: 699637 - RNA, 24 nt, Human
ccaaagugcugggauuacaggcgu

SEQ ID NO: 699638 - RNA, 24 nt, Human
ccaaagugcugggauuacaggcgu

SEQ ID NO: 699639 - RNA, 19 nt, Human
ccccaggcuggagugcagu

SEQ ID NO: 699640 - RNA, 19 nt, Human
ccccaggcuggagugcagu

SEQ ID NO: 699641 - RNA, 19 nt, Human
cccccuuccuccuaguccc

SEQ ID NO: 699642 - RNA, 20 nt, Human
ccccuuccuccuagucccca

SEQ ID NO: 699643 - RNA, 24 nt, Human
ccucccaacucagccucccgggua

SEQ ID NO: 699644 - RNA, 24 nt, Human
ccucccaacucagccucccgggua

SEQ ID NO: 699645 - RNA, 27 nt, Human
ccucccaacucagccucccggguagcu

SEQ ID NO: 699646 - RNA, 27 nt, Human
ccucccaacucagccucccggguagcu

SEQ ID NO: 699647 - RNA, 20 nt, Human
ccucccggguagcugggacc

SEQ ID NO: 699648 - RNA, 20 nt, Human
ccucccggguagcugggacc

SEQ ID NO: 699649 - RNA, 20 nt, Human
ccugggcucaagcgauucuc

SEQ ID NO: 699650 - RNA, 20 nt, Human
ccugggcucaagcgauucuc

SEQ ID NO: 699651 - RNA, 23 nt, Human
ccugggcucaagcgauucuccug

SEQ ID NO: 699652 - RNA, 23 nt, Human
ccugggcucaagcgauucuccug

SEQ ID NO: 699653 - RNA, 21 nt, Human
cgaucaaggcucacugcaacc

SEQ ID NO: 699654 - RNA, 24 nt, Human
cggggucucacuauguuguccagg

SEQ ID NO: 699655 - RNA, 24 nt, Human
cggggucucacuauguuguccagg

SEQ ID NO: 699656 - RNA, 25 nt, Human
cguggagcucacgcuuggucugugc

SEQ ID NO: 699657 - RNA, 24 nt, Human
cucaagcgauucuccugccucggc

SEQ ID NO: 699658 - RNA, 24 nt, Human
cucaagcgauucuccugccucggc

SEQ ID NO: 699659 - RNA, 21 nt, Human
cucagccucccggguagcugg

SEQ ID NO: 699660 - RNA, 24 nt, Human
cucagccucccggguagcugggac

SEQ ID NO: 699661 - RNA, 24 nt, Human
cucagccucccggguagcugggac

SEQ ID NO: 699662 - RNA, 24 nt, Human
cucccggguagcugggaccacagg

SEQ ID NO: 699663 - RNA, 24 nt, Human
cucccggguagcugggaccacagg

SEQ ID NO: 699664 - RNA, 21 nt, Human
cuccugggcucaagcgauucu

SEQ ID NO: 699665 - RNA, 21 nt, Human
cuccugggcucaagcgauucu

SEQ ID NO: 699666 - RNA, 23 nt, Human
cuccugggcucaagcgauucucc

SEQ ID NO: 699667 - RNA, 25 nt, Human
cuccugggcucaagcgauucuccug

SEQ ID NO: 699668 - RNA, 19 nt, Human
cucucugcccccuuccucc

SEQ ID NO: 699669 - RNA, 23 nt, Human
cugccucggccucccaaagugcu

SEQ ID NO: 699670 - RNA, 23 nt, Human
cugccucggccucccaaagugcu

SEQ ID NO: 699671 - RNA, 18 nt, Human
cugucccccaggcuggag

SEQ ID NO: 699672 - RNA, 23 nt, Human
gacccgcguggagcucacgcuug

SEQ ID NO: 699673 - RNA, 20 nt, Human
gagacagggucgugcucugu

SEQ ID NO: 699674 - RNA, 18 nt, Human
gauuacaggcgucagcca

SEQ ID NO: 699675 - RNA, 18 nt, Human
gauuacaggcgucagcca

SEQ ID NO: 699676 - RNA, 21 nt, Human
gauuacaggcgucagccacca

SEQ ID NO: 699677 - RNA, 21 nt, Human
gauuacaggcgucagccacca

SEQ ID NO: 699678 - RNA, 24 nt, Human
gauuacaggcgucagccaccaugu

SEQ ID NO: 699679 - RNA, 24 nt, Human
gauuacaggcgucagccaccaugu

SEQ ID NO: 699680 - RNA, 24 nt, Human
gcgauggaaccggaggccaaagcu

SEQ ID NO: 699681 - RNA, 19 nt, Human
gcgggccaccacaccaggc

SEQ ID NO: 699682 - RNA, 19 nt, Human
gcgggccaccacaccaggc

SEQ ID NO: 699683 - RNA, 20 nt, Human
gcgucagccaccauguaugg

SEQ ID NO: 699684 - RNA, 20 nt, Human
gcgucagccaccauguaugg

SEQ ID NO: 699685 - RNA, 19 nt, Human
gcucugucccccaggcugg

SEQ ID NO: 699686 - RNA, 19 nt, Human
gcucugucccccaggcugg

SEQ ID NO: 699687 - RNA, 20 nt, Human
gcucugucccccaggcugga

SEQ ID NO: 699688 - RNA, 20 nt, Human
gcucugucccccaggcugga

SEQ ID NO: 699689 - RNA, 19 nt, Human
gcuggagugcaguggcacg

SEQ ID NO: 699690 - RNA, 19 nt, Human
gcuggagugcaguggcacg

SEQ ID NO: 699691 - RNA, 20 nt, Human
gcugggauuacaggcgucag

SEQ ID NO: 699692 - RNA, 20 nt, Human
gcugggauuacaggcgucag

SEQ ID NO: 699693 - RNA, 18 nt, Human
ggagacagggucgugcuc

SEQ ID NO: 699694 - RNA, 18 nt, Human
ggagacagggucgugcuc

SEQ ID NO: 699695 - RNA, 22 nt, Human
ggagacagggucgugcucuguc

SEQ ID NO: 699696 - RNA, 22 nt, Human
ggagacagggucgugcucuguc

SEQ ID NO: 699697 - RNA, 24 nt, Human
ggauuacaggcgucagccaccaug

SEQ ID NO: 699698 - RNA, 24 nt, Human
ggauuacaggcgucagccaccaug

SEQ ID NO: 699699 - RNA, 20 nt, Human
ggcauagaacaucccccuuu

SEQ ID NO: 699700 - RNA, 22 nt, Human
gggcucaagcgauucuccugcc

SEQ ID NO: 699701 - RNA, 22 nt, Human
gggcucaagcgauucuccugcc

SEQ ID NO: 699702 - RNA, 22 nt, Human
gggucucacuauguuguccagg

SEQ ID NO: 699703 - RNA, 24 nt, Human
ggucucacuauguuguccaggcug

SEQ ID NO: 699704 - RNA, 24 nt, Human
ggucucacuauguuguccaggcug

SEQ ID NO: 699705 - RNA, 24 nt, Human
uaauuuguguauuuuuugcauaga

SEQ ID NO: 699706 - RNA, 24 nt, Human
uaauuuguguauuuuuugcauaga

SEQ ID NO: 699707 - RNA, 19 nt, Human
uauguuguccaggcugguc

SEQ ID NO: 699708 - RNA, 21 nt, Human
uauguuguccaggcuggucuc

SEQ ID NO: 699709 - RNA, 24 nt, Human
uauguuguccaggcuggucucgaa

SEQ ID NO: 699710 - RNA, 24 nt, Human
uauguuguccaggcuggucucgaa

SEQ ID NO: 699711 - RNA, 23 nt, Human
uauuuuauuuuuggagacagggu

SEQ ID NO: 699712 - RNA, 23 nt, Human
uauuuuauuuuuggagacagggu

SEQ ID NO: 699713 - RNA, 23 nt, Human
uauuuuuauuuuauuuuuggaga

SEQ ID NO: 699714 - RNA, 23 nt, Human
ucacugcaaccucgacuuucagg

SEQ ID NO: 699715 - RNA, 23 nt, Human
ucacugcaaccucgacuuucagg

SEQ ID NO: 699716 - RNA, 23 nt, Human
ucacugcaaccucgacuuucagg

SEQ ID NO: 699717 - RNA, 23 nt, Human
ucacugcaaccucgacuuucagg

SEQ ID NO: 699718 - RNA, 24 nt, Human
ucacugcaaccucgacuuucaggg

SEQ ID NO: 699719 - RNA, 24 nt, Human
ucacugcaaccucgacuuucaggg

SEQ ID NO: 699720 - RNA, 21 nt, Human
ucagccaccauguauggccau

SEQ ID NO: 699721 - RNA, 24 nt, Human
ucagccaccauguauggccauuuc

SEQ ID NO: 699722 - RNA, 24 nt, Human
ucagccaccauguauggccauuuc

SEQ ID NO: 699723 - RNA, 23 nt, Human
ucagccucccggguagcugggac

SEQ ID NO: 699724 - RNA, 23 nt, Human
ucagccucccggguagcugggac

SEQ ID NO: 699725 - RNA, 24 nt, Human
ucccaaagugcugggauuacaggc

SEQ ID NO: 699726 - RNA, 24 nt, Human
ucccaaagugcugggauuacaggc

SEQ ID NO: 699727 - RNA, 24 nt, Human
ucccccaggcuggagugcaguggc

SEQ ID NO: 699728 - RNA, 24 nt, Human
ucccccaggcuggagugcaguggc

SEQ ID NO: 699729 - RNA, 18 nt, Human
ucccccuuuacgccuggg

SEQ ID NO: 699730 - RNA, 23 nt, Human
ucccggguagcugggaccacagg

SEQ ID NO: 699731 - RNA, 23 nt, Human
ucccggguagcugggaccacagg

SEQ ID NO: 699732 - RNA, 24 nt, Human
ucccggguagcugggaccacaggu

SEQ ID NO: 699733 - RNA, 24 nt, Human
ucccggguagcugggaccacaggu

SEQ ID NO: 699734 - RNA, 21 nt, Human
uccugggcucaagcgauucuc

SEQ ID NO: 699735 - RNA, 21 nt, Human
uccugggcucaagcgauucuc

SEQ ID NO: 699736 - RNA, 22 nt, Human
uccugggcucaagcgauucucc

SEQ ID NO: 699737 - RNA, 22 nt, Human
uccugggcucaagcgauucucc

SEQ ID NO: 699738 - RNA, 24 nt, Human
uccugggcucaagcgauucuccug

SEQ ID NO: 699739 - RNA, 24 nt, Human
uccugggcucaagcgauucuccug

SEQ ID NO: 699740 - RNA, 18 nt, Human
ucggccucccaaagugcu

SEQ ID NO: 699741 - RNA, 18 nt, Human
ucggccucccaaagugcu

SEQ ID NO: 699742 - RNA, 23 nt, Human
ucgugcucugucccccaggcugg

SEQ ID NO: 699743 - RNA, 23 nt, Human
ucgugcucugucccccaggcugg

SEQ ID NO: 699744 - RNA, 24 nt, Human
ucgugcucugucccccaggcugga

SEQ ID NO: 699745 - RNA, 24 nt, Human
ucgugcucugucccccaggcugga

SEQ ID NO: 699746 - RNA, 19 nt, Human
ucucacuauguuguccagg

SEQ ID NO: 699747 - RNA, 19 nt, Human
ucucacuauguuguccagg

SEQ ID NO: 699748 - RNA, 23 nt, Human
ucucacuauguuguccaggcugg

SEQ ID NO: 699749 - RNA, 23 nt, Human
ucucacuauguuguccaggcugg

SEQ ID NO: 699750 - RNA, 24 nt, Human
ucucacuauguuguccaggcuggu

SEQ ID NO: 699751 - RNA, 24 nt, Human
ucucacuauguuguccaggcuggu

SEQ ID NO: 699752 - RNA, 19 nt, Human
ucucgaacuccugggcuca

SEQ ID NO: 699753 - RNA, 22 nt, Human
ucucgaacuccugggcucaagc

SEQ ID NO: 699754 - RNA, 23 nt, Human
ucucgaacuccugggcucaagcg

SEQ ID NO: 699755 - RNA, 20 nt, Human
ucucggggucauaacucucu

SEQ ID NO: 699756 - RNA, 18 nt, Human
ucucucugcccccuuccc

SEQ ID NO: 699757 - RNA, 19 nt, Human
ucugucccccaggcuggag

SEQ ID NO: 699758 - RNA, 24 nt, Human
ucugucccccaggcuggagugcag

SEQ ID NO: 699759 - RNA, 24 nt, Human
ucugucccccaggcuggagugcag

SEQ ID NO: 699760 - RNA, 21 nt, Human
ugcccccuuccuccuaguccc

SEQ ID NO: 699761 - RNA, 22 nt, Human
ugcccccuuccuccuagucccc

SEQ ID NO: 699762 - RNA, 21 nt, Human
ugccucggccucccaaagugc

SEQ ID NO: 699763 - RNA, 21 nt, Human
ugccucggccucccaaagugc

SEQ ID NO: 699764 - RNA, 24 nt, Human
ugccucggccucccaaagugcugg

SEQ ID NO: 699765 - RNA, 24 nt, Human
ugccucggccucccaaagugcugg

SEQ ID NO: 699766 - RNA, 19 nt, Human
ugcucugucccccaggcug

SEQ ID NO: 699767 - RNA, 21 nt, Human
ugcucugucccccaggcugga

SEQ ID NO: 699768 - RNA, 21 nt, Human
ugcucugucccccaggcugga

SEQ ID NO: 699769 - RNA, 24 nt, Human
ugcucugucccccaggcuggagug

SEQ ID NO: 699770 - RNA, 24 nt, Human
ugcucugucccccaggcuggagug

SEQ ID NO: 699771 - RNA, 20 nt, Human
ugcugggauuacaggcguca

SEQ ID NO: 699772 - RNA, 20 nt, Human
ugcugggauuacaggcguca

SEQ ID NO: 699773 - RNA, 22 nt, Human
uggagacagggucgugcucugu

SEQ ID NO: 699774 - RNA, 21 nt, Human
uggagugcaguggcacgauca

SEQ ID NO: 699775 - RNA, 21 nt, Human
uggagugcaguggcacgauca

SEQ ID NO: 699776 - RNA, 24 nt, Human
uggagugcaguggcacgaucaagg

SEQ ID NO: 699777 - RNA, 24 nt, Human
uggagugcaguggcacgaucaagg

SEQ ID NO: 699778 - RNA, 21 nt, Human
ugggaccacaggugcgggcca

SEQ ID NO: 699779 - RNA, 21 nt, Human
ugggaccacaggugcgggcca

SEQ ID NO: 699780 - RNA, 24 nt, Human
ugggaccacaggugcgggccacca

SEQ ID NO: 699781 - RNA, 24 nt, Human
ugggaccacaggugcgggccacca

SEQ ID NO: 699782 - RNA, 18 nt, Human
ugggauuacaggcgucag

SEQ ID NO: 699783 - RNA, 18 nt, Human
ugggauuacaggcgucag

SEQ ID NO: 699784 - RNA, 22 nt, Human
ugggauuacaggcgucagccac

SEQ ID NO: 699785 - RNA, 22 nt, Human
ugggauuacaggcgucagccac

SEQ ID NO: 699786 - RNA, 24 nt, Human
ugggauuacaggcgucagccacca

SEQ ID NO: 699787 - RNA, 24 nt, Human
ugggauuacaggcgucagccacca

SEQ ID NO: 699788 - RNA, 25 nt, Human
ugggauuacaggcgucagccaccau

SEQ ID NO: 699789 - RNA, 25 nt, Human
ugggauuacaggcgucagccaccau

SEQ ID NO: 699790 - RNA, 24 nt, Human
ugggcucaagcgauucuccugccu

SEQ ID NO: 699791 - RNA, 24 nt, Human
ugggcucaagcgauucuccugccu

SEQ ID NO: 699792 - RNA, 24 nt, Human
uguccaggcuggucucgaacuccu

SEQ ID NO: 699793 - RNA, 24 nt, Human
uguccaggcuggucucgaacuccu

SEQ ID NO: 699794 - RNA, 24 nt, Human
ugucgacccgcguggagcucacgc

SEQ ID NO: 699795 - RNA, 19 nt, Human
uuggagacagggucgugcu

SEQ ID NO: 699796 - RNA, 19 nt, Human
uuggagacagggucgugcu

SEQ ID NO: 699797 - RNA, 25 nt, Human
uuucagggcucaaaggauccuccca

SEQ ID NO: 699798 - RNA, 25 nt, Human
aaagacaaaugaaguuuuuuagccc

SEQ ID NO: 699799 - RNA, 20 nt, Human
aacucacuguguaauaggac

SEQ ID NO: 699800 - RNA, 19 nt, Human
agaaaaucuagagcaaggg

SEQ ID NO: 699801 - RNA, 18 nt, Human
agagcaagggauaacuuc

SEQ ID NO: 699802 - RNA, 22 nt, Human
aggacacauuuuaauaaacaaa

SEQ ID NO: 699803 - RNA, 19 nt, Human
auaccaugacugggaagcc

SEQ ID NO: 699804 - RNA, 20 nt, Human
caaugucauuguuccagacc

SEQ ID NO: 699805 - RNA, 23 nt, Human
cagcugaacuuucagaugaaguu

SEQ ID NO: 699806 - RNA, 18 nt, Human
ccagacacuucugaaaau

SEQ ID NO: 699807 - RNA, 18 nt, Human
ccaguccacaccucugcc

SEQ ID NO: 699808 - RNA, 20 nt, Human
ccgcgugggagugccgcggc

SEQ ID NO: 699809 - RNA, 18 nt, Human
ccucugccggacagaggu

SEQ ID NO: 699810 - RNA, 19 nt, Human
cuuuuagcaugagcgguaa

SEQ ID NO: 699811 - RNA, 22 nt, Human
gaugaaguugacuucuacuuga

SEQ ID NO: 699812 - RNA, 19 nt, Human
gcgccggcuuuuccagccc

SEQ ID NO: 699813 - RNA, 19 nt, Human
gcgccggcuuuuccagccc

SEQ ID NO: 699814 - RNA, 21 nt, Human
gcuuuuccagcccuccugccc

SEQ ID NO: 699815 - RNA, 18 nt, Human
gggagugccgcggccuuu

SEQ ID NO: 699816 - RNA, 21 nt, Human
gugugucuuaaguuggcaaug

SEQ ID NO: 699817 - RNA, 21 nt, Human
uaaucuuuuaagguucucuua

SEQ ID NO: 699818 - RNA, 18 nt, Human
uaccaugacugggaagcc

SEQ ID NO: 699819 - RNA, 24 nt, Human
uacuguacaugggaucuuuacaua

SEQ ID NO: 699820 - RNA, 24 nt, Human
ucaguguguguuugucacugagug

SEQ ID NO: 699821 - RNA, 22 nt, Human
uccauuuucuucagaaaaucua

SEQ ID NO: 699822 - RNA, 18 nt, Human
ucccucaggccuucagug

SEQ ID NO: 699823 - RNA, 20 nt, Human
ugaaaaagacaaaugaaguu

SEQ ID NO: 699824 - RNA, 24 nt, Human
ugaaaacagcugaacuuucagaug

SEQ ID NO: 699825 - RNA, 22 nt, Human
ugaccagacacuucugaaaauc

SEQ ID NO: 699826 - RNA, 19 nt, Human
ugcggacuucgggguccgc

SEQ ID NO: 699827 - RNA, 20 nt, Human
uggucuccaguccacaccuc

SEQ ID NO: 699828 - RNA, 22 nt, Human
uguguaauaggacacauuuuaa

SEQ ID NO: 699829 - RNA, 20 nt, Human
uuaaaguuuuguauauugac

SEQ ID NO: 699830 - RNA, 18 nt, Human
uucagaaaaucuagagca

SEQ ID NO: 699831 - RNA, 21 nt, Human
uuuucaccaccauugcuugau

SEQ ID NO: 699832 - RNA, 21 nt, Human
uuuuccagcccuccugcccac

SEQ ID NO: 699833 - RNA, 24 nt, Human
uuuuuuauuuuuaauguuuuuaau

SEQ ID NO: 699834 - RNA, 18 nt, Human
aacaaaaucucccaugca

SEQ ID NO: 699835 - RNA, 23 nt, Human
aacugggcagucagaucugccaa

SEQ ID NO: 699836 - RNA, 23 nt, Human
aagggucuucuuaaauuggcucc

SEQ ID NO: 699837 - RNA, 18 nt, Human
acuggagccauccuugau

SEQ ID NO: 699838 - RNA, 21 nt, Human
aggaagacaguccaggccucc

SEQ ID NO: 699839 - RNA, 18 nt, Human
aggaaggagguucugagg

SEQ ID NO: 699840 - RNA, 19 nt, Human
aggaaggagguucugaggg

SEQ ID NO: 699841 - RNA, 18 nt, Human
aggcuguagcgccggcug

SEQ ID NO: 699842 - RNA, 21 nt, Human
agggggccugggugggggggc

SEQ ID NO: 699843 - RNA, 18 nt, Human
agggucauugggguggcu

SEQ ID NO: 699844 - RNA, 24 nt, Human
aguagcaagaaucuagaaccugaa

SEQ ID NO: 699845 - RNA, 21 nt, Human
caaagcacaucccagcucaga

SEQ ID NO: 699846 - RNA, 21 nt, Human
caccaccagcuuuuggggccc

SEQ ID NO: 699847 - RNA, 25 nt, Human
cacccugcccucugugacaauccug

SEQ ID NO: 699848 - RNA, 19 nt, Human
cacgacagucagguccagc

SEQ ID NO: 699849 - RNA, 23 nt, Human
cacugcgcugcugucaccaaggu

SEQ ID NO: 699850 - RNA, 19 nt, Human
cacuguggcuauggggaga

SEQ ID NO: 699851 - RNA, 22 nt, Human
cacuuagaugguuuucugaaau

SEQ ID NO: 699852 - RNA, 21 nt, Human
cagaguccaggcucaccacca

SEQ ID NO: 699853 - RNA, 25 nt, Human
cagcugggguugcaggauugagagg

SEQ ID NO: 699854 - RNA, 20 nt, Human
cagguccagccuccggggaa

SEQ ID NO: 699855 - RNA, 20 nt, Human
ccaaaccagcccgcccuaag

SEQ ID NO: 699856 - RNA, 21 nt, Human
ccagcugcucugcaucccaag

SEQ ID NO: 699857 - RNA, 23 nt, Human
cccgggggcuuagagcuuggggg

SEQ ID NO: 699858 - RNA, 19 nt, Human
cccugauuuuuagggggcc

SEQ ID NO: 699859 - RNA, 21 nt, Human
ccucugcauccaccgguggga

SEQ ID NO: 699860 - RNA, 22 nt, Human
ccucugugacaauccugugggu

SEQ ID NO: 699861 - RNA, 24 nt, Human
ccuuccugugggcaggaaucuugc

SEQ ID NO: 699862 - RNA, 19 nt, Human
cgccuuggguuugggcagc

SEQ ID NO: 699863 - RNA, 19 nt, Human
cuauggggagagaccccuc

SEQ ID NO: 699864 - RNA, 19 nt, Human
cucaccaccaagaauggcu

SEQ ID NO: 699865 - RNA, 18 nt, Human
cuccagccgcaggcccag

SEQ ID NO: 699866 - RNA, 19 nt, Human
cugagggucauuggggugg

SEQ ID NO: 699867 - RNA, 23 nt, Human
cugccaggcuguagcgccggcug

SEQ ID NO: 699868 - RNA, 24 nt, Human
cuugagaagacuugacgccucccu

SEQ ID NO: 699869 - RNA, 20 nt, Human
gaaccugaaggaagcuggug

SEQ ID NO: 699870 - RNA, 19 nt, Human
gagcuugggggugagagug

SEQ ID NO: 699871 - RNA, 22 nt, Human
gcccaggaaggagguucugagg

SEQ ID NO: 699872 - RNA, 21 nt, Human
gcgugguuccuccagcacuua

SEQ ID NO: 699873 - RNA, 21 nt, Human
gcucugugaucuucuccucca

SEQ ID NO: 699874 - RNA, 22 nt, Human
gcugugucuccucugcuugcug

SEQ ID NO: 699875 - RNA, 24 nt, Human
gcuuuuggggcccaagguccuaag

SEQ ID NO: 699876 - RNA, 18 nt, Human
ggaucucacaggcuggua

SEQ ID NO: 699877 - RNA, 20 nt, Human
ggcaaggucuucgccuuggg

SEQ ID NO: 699878 - RNA, 20 nt, Human
ggggagagaccccucuggca

SEQ ID NO: 699879 - RNA, 19 nt, Human
gggguggcugguguccuug

SEQ ID NO: 699880 - RNA, 23 nt, Human
gguucugagggucauuggggugg

SEQ ID NO: 699881 - RNA, 27 nt, Human
guacuggagccauccuugaugaacucu

SEQ ID NO: 699882 - RNA, 23 nt, Human
guuggcuggugucggauucccug

SEQ ID NO: 699883 - RNA, 19 nt, Human
uaacuuccgaagacaauaa

SEQ ID NO: 699884 - RNA, 20 nt, Human
uaacuuccgaagacaauaau

SEQ ID NO: 699885 - RNA, 21 nt, Human
uaaguagcaagaaucuagaac

SEQ ID NO: 699886 - RNA, 21 nt, Human
ucaaagcacaucccagcucag

SEQ ID NO: 699887 - RNA, 21 nt, Human
ucaaaucaguuuccacaaagc

SEQ ID NO: 699888 - RNA, 20 nt, Human
uccacaaagcuacuccccgu

SEQ ID NO: 699889 - RNA, 20 nt, Human
uccaggcucaccaccaagaa

SEQ ID NO: 699890 - RNA, 21 nt, Human
uccauguuaaccacauguggu

SEQ ID NO: 699891 - RNA, 23 nt, Human
uccucagucaccacccugcccuc

SEQ ID NO: 699892 - RNA, 20 nt, Human
uccuuggccaccaccuugac

SEQ ID NO: 699893 - RNA, 23 nt, Human
uccuuggccaccaccuugaccuc

SEQ ID NO: 699894 - RNA, 21 nt, Human
ucgccuuggguuugggcagcc

SEQ ID NO: 699895 - RNA, 22 nt, Human
ucuagaaccugaaggaagcugg

SEQ ID NO: 699896 - RNA, 21 nt, Human
ucucaaagcacaucccagcuc

SEQ ID NO: 699897 - RNA, 24 nt, Human
ucugcagcucaguuucugugagac

SEQ ID NO: 699898 - RNA, 19 nt, Human
ugaacucuggcaaggucuu

SEQ ID NO: 699899 - RNA, 24 nt, Human
ugaccucacaaggcauugaaaacu

SEQ ID NO: 699900 - RNA, 21 nt, Human
ugcaucccaaggcucugaggc

SEQ ID NO: 699901 - RNA, 19 nt, Human
ugccaggcuguagcgccgg

SEQ ID NO: 699902 - RNA, 21 nt, Human
ugcccgaggucuuuuagaggc

SEQ ID NO: 699903 - RNA, 24 nt, Human
ugcgcugcugucaccaagguugau

SEQ ID NO: 699904 - RNA, 25 nt, Human
uggcaaggucuucgccuuggguuug

SEQ ID NO: 699905 - RNA, 20 nt, Human
uggcugguguccuuggccac

SEQ ID NO: 699906 - RNA, 18 nt, Human
ugggcagccgaacguguu

SEQ ID NO: 699907 - RNA, 23 nt, Human
ugucggauucccugagaagcagc

SEQ ID NO: 699908 - RNA, 19 nt, Human
ugugggcaggaaucuugcu

SEQ ID NO: 699909 - RNA, 23 nt, Human
ugugguuuuaaaaugaaauaauc

SEQ ID NO: 699910 - RNA, 27 nt, Human
ugugguuuuaaaaugaaauaaucuugg

SEQ ID NO: 699911 - RNA, 19 nt, Human
uuccacaaagcuacucccc

SEQ ID NO: 699912 - RNA, 23 nt, Human
uuccuccagcacuuagaugguuu

SEQ ID NO: 699913 - RNA, 25 nt, Human
uugacgacuuuaaccaccugaugaa

SEQ ID NO: 699914 - RNA, 21 nt, Human
uugggcagccgaacguguugc

SEQ ID NO: 699915 - RNA, 22 nt, Human
uuuuagggggccuggguggggg

SEQ ID NO: 699916 - RNA, 23 nt, Human
aaaaugcuaaaacauaauccaua

SEQ ID NO: 699917 - RNA, 26 nt, Human
aaacagagagacaaaagaagggaccc

SEQ ID NO: 699918 - RNA, 20 nt, Human
aacaaacgaaagcauaaaag

SEQ ID NO: 699919 - RNA, 19 nt, Human
aacacagugaaaccccguc

SEQ ID NO: 699920 - RNA, 20 nt, Human
aacacagugaaaccccgucu

SEQ ID NO: 699921 - RNA, 21 nt, Human
aacacagugaaaccccgucuc

SEQ ID NO: 699922 - RNA, 21 nt, Human
aacaggaaaagaccaccuauc

SEQ ID NO: 699923 - RNA, 21 nt, Human
aaccaaugaccuacuaagaaa

SEQ ID NO: 699924 - RNA, 19 nt, Human
aacuugauuucaaaaaugg

SEQ ID NO: 699925 - RNA, 23 nt, Human
aagaucgcgccacugcacuccag

SEQ ID NO: 699926 - RNA, 23 nt, Human
aagguugacauguuuuaaacacc

SEQ ID NO: 699927 - RNA, 22 nt, Human
aauaucugcacacacugaguaa

SEQ ID NO: 699928 - RNA, 23 nt, Human
aaugaccuacuaagaaaagcaga

SEQ ID NO: 699929 - RNA, 18 nt, Human
aauggcuugaugguaggg

SEQ ID NO: 699930 - RNA, 21 nt, Human
acaaaauuccaucucaguuac

SEQ ID NO: 699931 - RNA, 24 nt, Human
acagagugagacucugucucaaaa

SEQ ID NO: 699932 - RNA, 24 nt, Human
accccgucucuacuaaaaauacaa

SEQ ID NO: 699933 - RNA, 23 nt, Human
acuaugguauuaaacaauccauu

SEQ ID NO: 699934 - RNA, 24 nt, Human
acuccagccugggugacagaguga

SEQ ID NO: 699935 - RNA, 24 nt, Human
acugcacuccagccugggugacag

SEQ ID NO: 699936 - RNA, 26 nt, Human
acugcacuccagccugggugacagag

SEQ ID NO: 699937 - RNA, 18 nt, Human
agaacagaaacagagaga

SEQ ID NO: 699938 - RNA, 19 nt, Human
agaacagaaacagagagac

SEQ ID NO: 699939 - RNA, 19 nt, Human
agaacagaaacagagagac

SEQ ID NO: 699940 - RNA, 18 nt, Human
agaaggggaggaagagua

SEQ ID NO: 699941 - RNA, 20 nt, Human
agagguugcagagagcuaag

SEQ ID NO: 699942 - RNA, 18 nt, Human
agaucagaagacuugaug

SEQ ID NO: 699943 - RNA, 22 nt, Human
agcagagugguauccaaaaauc

SEQ ID NO: 699944 - RNA, 24 nt, Human
agccugggugacagagugagacuc

SEQ ID NO: 699945 - RNA, 18 nt, Human
agcuccauauauuauguu

SEQ ID NO: 699946 - RNA, 20 nt, Human
agcugggccagguuucacau

SEQ ID NO: 699947 - RNA, 20 nt, Human
agcuuguuaacaggaaaaga

SEQ ID NO: 699948 - RNA, 21 nt, Human
aggaagaguaauucacagcau

SEQ ID NO: 699949 - RNA, 24 nt, Human
aggaggguggaucacgaggucagg

SEQ ID NO: 699950 - RNA, 29 nt, Human
aggcaagagauacauuuaaaagggacccc

SEQ ID NO: 699951 - RNA, 19 nt, Human
aggcagagguugcagagag

SEQ ID NO: 699952 - RNA, 24 nt, Human
aggcagagguugcagagagcuaag

SEQ ID NO: 699953 - RNA, 23 nt, Human
aguggcucaugccuguaauccca

SEQ ID NO: 699954 - RNA, 24 nt, Human
aguggcucaugccuguaaucccag

SEQ ID NO: 699955 - RNA, 24 nt, Human
agugguagcaguccuccccagagu

SEQ ID NO: 699956 - RNA, 24 nt, Human
agugguagcaguccuccccagagu

SEQ ID NO: 699957 - RNA, 28 nt, Human
auacagaaaaugaaaauaaagggacccc

SEQ ID NO: 699958 - RNA, 20 nt, Human
aucaauaccccuacaacgca

SEQ ID NO: 699959 - RNA, 18 nt, Human
aucaugucaagaguaguu

SEQ ID NO: 699960 - RNA, 20 nt, Human
aucccaguaagcuuucugac

SEQ ID NO: 699961 - RNA, 24 nt, Human
aucgcgccacugcacuccagccug

SEQ ID NO: 699962 - RNA, 24 nt, Human
augauauaaaauaauuaguauguc

SEQ ID NO: 699963 - RNA, 19 nt, Human
augccuguaaucccaguac

SEQ ID NO: 699964 - RNA, 18 nt, Human
auucuuguguugucuuga

SEQ ID NO: 699965 - RNA, 21 nt, Human
caaauucuccaaagcauaaau

SEQ ID NO: 699966 - RNA, 18 nt, Human
caacaguaccuguauuug

SEQ ID NO: 699967 - RNA, 23 nt, Human
caaccacauuaaagggugucaga

SEQ ID NO: 699968 - RNA, 23 nt, Human
caauaccccuacaacgcaccuuc

SEQ ID NO: 699969 - RNA, 22 nt, Human
cacuccagccugggugacagag

SEQ ID NO: 699970 - RNA, 22 nt, Human
cacuccagccugggugacagag

SEQ ID NO: 699971 - RNA, 24 nt, Human
cacuccagccugggugacagagug

SEQ ID NO: 699972 - RNA, 19 nt, Human
cacugcacuccagccuggg

SEQ ID NO: 699973 - RNA, 21 nt, Human
cacugcacuccagccugggug

SEQ ID NO: 699974 - RNA, 22 nt, Human
cacugcacuccagccuggguga

SEQ ID NO: 699975 - RNA, 23 nt, Human
cacugcacuccagccugggugac

SEQ ID NO: 699976 - RNA, 24 nt, Human
cacugcacuccagccugggugaca

SEQ ID NO: 699977 - RNA, 25 nt, Human
cacugcacuccagccugggugacag

SEQ ID NO: 699978 - RNA, 21 nt, Human
cacuuuucuaacaacagucca

SEQ ID NO: 699979 - RNA, 23 nt, Human
cagaaacagagagacaaaagaaa

SEQ ID NO: 699980 - RNA, 24 nt, Human
caguacuuugggagguggggcgga

SEQ ID NO: 699981 - RNA, 18 nt, Human
cagucagaacagaaacag

SEQ ID NO: 699982 - RNA, 22 nt, Human
cauaacucuuucugcuccccaa

SEQ ID NO: 699983 - RNA, 24 nt, Human
caugccuguaaucccaguacuuug

SEQ ID NO: 699984 - RNA, 22 nt, Human
cauuccucucaauggaacagcc

SEQ ID NO: 699985 - RNA, 21 nt, Human
ccaaggcaauaauuuaccaag

SEQ ID NO: 699986 - RNA, 20 nt, Human
ccacugcacuccagccuggg

SEQ ID NO: 699987 - RNA, 20 nt, Human
ccacugcacuccagccuggg

SEQ ID NO: 699988 - RNA, 20 nt, Human
ccacugcacuccagccuggg

SEQ ID NO: 699989 - RNA, 21 nt, Human
ccacugcacuccagccugggu

SEQ ID NO: 699990 - RNA, 21 nt, Human
ccacugcacuccagccugggu

SEQ ID NO: 699991 - RNA, 23 nt, Human
ccacugcacuccagccuggguga

SEQ ID NO: 699992 - RNA, 23 nt, Human
ccacugcacuccagccuggguga

SEQ ID NO: 699993 - RNA, 24 nt, Human
ccacugcacuccagccugggugac

SEQ ID NO: 699994 - RNA, 24 nt, Human
cccaaauacauauuuccaaaaauu

SEQ ID NO: 699995 - RNA, 24 nt, Human
cccaaauacauauuuccaaaaauu

SEQ ID NO: 699996 - RNA, 23 nt, Human
cccauuucagagaaggggaggaa

SEQ ID NO: 699997 - RNA, 19 nt, Human
ccgccccugaggugagcgc

SEQ ID NO: 699998 - RNA, 24 nt, Human
ccuacaacgcaccuucgucacuga

SEQ ID NO: 699999 - RNA, 23 nt, Human
ccuggcuaacacagugaaacccc

SEQ ID NO: 700000 - RNA, 24 nt, Human
ccuggcuaacacagugaaaccccg

SEQ ID NO: 700001 - RNA, 23 nt, Human
ccugggaggcagagguugcagag

SEQ ID NO: 700002 - RNA, 22 nt, Human
ccugggugacagagugagacuc

SEQ ID NO: 700003 - RNA, 22 nt, Human
ccuguaaucccaguacuuuggg

SEQ ID NO: 700004 - RNA, 21 nt, Human
ccuguagucccaguuacucag

SEQ ID NO: 700005 - RNA, 24 nt, Human
cgaggccguccuggcuaacacagu

SEQ ID NO: 700006 - RNA, 18 nt, Human
cgccccugaggugagcgc

SEQ ID NO: 700007 - RNA, 24 nt, Human
cgccuguagucccaguuacucagg

SEQ ID NO: 700008 - RNA, 21 nt, Human
cgcuccggagcuggaaauggg

SEQ ID NO: 700009 - RNA, 19 nt, Human
cgggggcccgccccugagg

SEQ ID NO: 700010 - RNA, 24 nt, Human
cucaugccuguaaucccaguacuu

SEQ ID NO: 700011 - RNA, 19 nt, Human
cucugucucaaaaaaaaaa

SEQ ID NO: 700012 - RNA, 22 nt, Human
cugaaguaccuagugagccaca

SEQ ID NO: 700013 - RNA, 21 nt, Human
cugaaguugggcccuauaaag

SEQ ID NO: 700014 - RNA, 19 nt, Human
cuuuuggucauacacugaa

SEQ ID NO: 700015 - RNA, 20 nt, Human
gaaaaucaaguuucuuccua

SEQ ID NO: 700016 - RNA, 24 nt, Human
gacagagugagacucugucucaaa

SEQ ID NO: 700017 - RNA, 22 nt, Human
gacuguguuaaccuucauguug

SEQ ID NO: 700018 - RNA, 18 nt, Human
gaggaagaguaauucaca

SEQ ID NO: 700019 - RNA, 23 nt, Human
gcacuccagccugggugacagag

SEQ ID NO: 700020 - RNA, 19 nt, Human
gccacugcacuccagccug

SEQ ID NO: 700021 - RNA, 24 nt, Human
gccacugcacuccagccuggguga

SEQ ID NO: 700022 - RNA, 19 nt, Human
gccgcgaacgcaggcgggg

SEQ ID NO: 700023 - RNA, 19 nt, Human
gcggggcgcagccgcccgc

SEQ ID NO: 700024 - RNA, 19 nt, Human
gcuaagaucgcgccacugc

SEQ ID NO: 700025 - RNA, 18 nt, Human
gcuacuucaugagaaagc

SEQ ID NO: 700026 - RNA, 18 nt, Human
ggagguggaggagggugg

SEQ ID NO: 700027 - RNA, 20 nt, Human
ggcgccgcgaacgcaggcgg

SEQ ID NO: 700028 - RNA, 18 nt, Human
ggcgugguggcgggcgcc

SEQ ID NO: 700029 - RNA, 22 nt, Human
ggcgugguggcgggcgccugua

SEQ ID NO: 700030 - RNA, 19 nt, Human
ggcugggugcaguggcuca

SEQ ID NO: 700031 - RNA, 18 nt, Human
gggagguggaggagggug

SEQ ID NO: 700032 - RNA, 18 nt, Human
gggcugggugagggcuug

SEQ ID NO: 700033 - RNA, 24 nt, Human
gggugcaguggcucaugccuguaa

SEQ ID NO: 700034 - RNA, 19 nt, Human
ggucaggagaucgaggccg

SEQ ID NO: 700035 - RNA, 21 nt, Human
gguggaucacgaggucaggag

SEQ ID NO: 700036 - RNA, 24 nt, Human
gguggcgggcgccuguagucccag

SEQ ID NO: 700037 - RNA, 18 nt, Human
guagaacaccagucagcu

SEQ ID NO: 700038 - RNA, 24 nt, Human
gugacagagugagacucugucuca

SEQ ID NO: 700039 - RNA, 25 nt, Human
guucacugauggugaccuucccucc

SEQ ID NO: 700040 - RNA, 21 nt, Human
guugcagagagcuaagaucgc

SEQ ID NO: 700041 - RNA, 23 nt, Human
uaaaacauaauccauauauacaa

SEQ ID NO: 700042 - RNA, 19 nt, Human
uaaauaacccucuaucaca

SEQ ID NO: 700043 - RNA, 25 nt, Human
uaaauaucugcacacacugaguaaa

SEQ ID NO: 700044 - RNA, 20 nt, Human
uaacaagaaauggcugcagg

SEQ ID NO: 700045 - RNA, 24 nt, Human
uaacacagugaaaccccgucucua

SEQ ID NO: 700046 - RNA, 22 nt, Human
uaacaguacaguacauuuguuu

SEQ ID NO: 700047 - RNA, 18 nt, Human
uaagaaaagcagaggauc

SEQ ID NO: 700048 - RNA, 21 nt, Human
uaaggcaaccauaagugaggc

SEQ ID NO: 700049 - RNA, 22 nt, Human
uaaugugauauuuaccucuagu

SEQ ID NO: 700050 - RNA, 24 nt, Human
uacaaaaaagccuacugcauucaa

SEQ ID NO: 700051 - RNA, 22 nt, Human
uacacaauuuguccuuuaccca

SEQ ID NO: 700052 - RNA, 22 nt, Human
uacagcauaaauuccuuuuuuu

SEQ ID NO: 700053 - RNA, 19 nt, Human
uaccauauagagauggaug

SEQ ID NO: 700054 - RNA, 22 nt, Human
uagaacaccagucagcugaggg

SEQ ID NO: 700055 - RNA, 18 nt, Human
uagaguucuuucaucugg

SEQ ID NO: 700056 - RNA, 22 nt, Human
uaggacaaacuauuuaaaaagc

SEQ ID NO: 700057 - RNA, 18 nt, Human
uagggcccuuuggaagcc

SEQ ID NO: 700058 - RNA, 27 nt, Human
uauaacaguacaguacauuuguuugga

SEQ ID NO: 700059 - RNA, 20 nt, Human
uauagagauggaugagacug

SEQ ID NO: 700060 - RNA, 18 nt, Human
uauuuggaccaggaaauu

SEQ ID NO: 700061 - RNA, 19 nt, Human
ucaauaccccuacaacgca

SEQ ID NO: 700062 - RNA, 23 nt, Human
ucaauaccccuacaacgcaccuu

SEQ ID NO: 700063 - RNA, 18 nt, Human
ucacgaggucaggagauc

SEQ ID NO: 700064 - RNA, 24 nt, Human
ucacgaggucaggagaucgaggcc

SEQ ID NO: 700065 - RNA, 22 nt, Human
ucacugauggugaccuucccuc

SEQ ID NO: 700066 - RNA, 22 nt, Human
ucagaacagaaacagagagaca

SEQ ID NO: 700067 - RNA, 23 nt, Human
ucaggccggacacucaucucacg

SEQ ID NO: 700068 - RNA, 23 nt, Human
ucaggccggacacucaucucacg

SEQ ID NO: 700069 - RNA, 18 nt, Human
ucagucuucugcuggcgc

SEQ ID NO: 700070 - RNA, 22 nt, Human
ucaugccuguaaucccaguacu

SEQ ID NO: 700071 - RNA, 23 nt, Human
uccagccugggugacagagugag

SEQ ID NO: 700072 - RNA, 24 nt, Human
uccagccugggugacagagugaga

SEQ ID NO: 700073 - RNA, 22 nt, Human
uccaucccgcuuguaaaauuca

SEQ ID NO: 700074 - RNA, 23 nt, Human
uccccaaauuguccugagaauuu

SEQ ID NO: 700075 - RNA, 18 nt, Human
ucccucuugccuuuaagg

SEQ ID NO: 700076 - RNA, 23 nt, Human
ucgcgccacugcacuccagccug

SEQ ID NO: 700077 - RNA, 18 nt, Human
ucuaacaacaguccaaga

SEQ ID NO: 700078 - RNA, 24 nt, Human
ucucuacuaaaaauacaaaaaauu

SEQ ID NO: 700079 - RNA, 21 nt, Human
ucugcagugguagcaguccuc

SEQ ID NO: 700080 - RNA, 21 nt, Human
ucugcagugguagcaguccuc

SEQ ID NO: 700081 - RNA, 23 nt, Human
ucuuacauuacauuucauaauug

SEQ ID NO: 700082 - RNA, 21 nt, Human
ucuuguguugucuugauugua

SEQ ID NO: 700083 - RNA, 22 nt, Human
ucuuuuucugucuccaaacuga

SEQ ID NO: 700084 - RNA, 25 nt, Human
ugaaagaaacuacaccaaccccggg

SEQ ID NO: 700085 - RNA, 22 nt, Human
ugaaauguacagcauaaauucc

SEQ ID NO: 700086 - RNA, 24 nt, Human
ugaaccugggaggcagagguugca

SEQ ID NO: 700087 - RNA, 20 nt, Human
ugaaguugggcccuauaaag

SEQ ID NO: 700088 - RNA, 19 nt, Human
ugagaaagcauggugccca

SEQ ID NO: 700089 - RNA, 21 nt, Human
ugagagccuuuugaagcagaa

SEQ ID NO: 700090 - RNA, 24 nt, Human
ugagcgcagcuccucgacgagcgg

SEQ ID NO: 700091 - RNA, 18 nt, Human
ugaguggaaccucugcca

SEQ ID NO: 700092 - RNA, 20 nt, Human
ugaguuaucugagaucagaa

SEQ ID NO: 700093 - RNA, 22 nt, Human
ugauaacuccagaagaugacac

SEQ ID NO: 700094 - RNA, 20 nt, Human
ugauggugaccuucccucuu

SEQ ID NO: 700095 - RNA, 22 nt, Human
ugauggugaccuucccucuugc

SEQ ID NO: 700096 - RNA, 20 nt, Human
ugauuugcuuuuaugcccuc

SEQ ID NO: 700097 - RNA, 23 nt, Human
ugccuguaaucccaguacuuugg

SEQ ID NO: 700098 - RNA, 23 nt, Human
ugccuguaaucccaguacuuugg

SEQ ID NO: 700099 - RNA, 20 nt, Human
uggaaccaauagagaguagu

SEQ ID NO: 700100 - RNA, 18 nt, Human
uggaaccccaaaggaaaa

SEQ ID NO: 700101 - RNA, 21 nt, Human
uggagaacugagcuaggcaca

SEQ ID NO: 700102 - RNA, 22 nt, Human
uggcucaugccuguaaucccag

SEQ ID NO: 700103 - RNA, 24 nt, Human
uggcucaugccuguaaucccagua

SEQ ID NO: 700104 - RNA, 21 nt, Human
uggcugcagguucucagucag

SEQ ID NO: 700105 - RNA, 22 nt, Human
uggcugggugcaguggcucaug

SEQ ID NO: 700106 - RNA, 24 nt, Human
uggcugggugcaguggcucaugcc

SEQ ID NO: 700107 - RNA, 22 nt, Human
ugggcccuauaaaguauuagaa

SEQ ID NO: 700108 - RNA, 18 nt, Human
ugggcugggugagggcuu

SEQ ID NO: 700109 - RNA, 21 nt, Human
ugggugacagagugagacucu

SEQ ID NO: 700110 - RNA, 24 nt, Human
ugguggcgggcgccuguaguccca

SEQ ID NO: 700111 - RNA, 22 nt, Human
uguaaaugagguauaguccuga

SEQ ID NO: 700112 - RNA, 28 nt, Human
uguaaccagauuuuucgauggcagcacc

SEQ ID NO: 700113 - RNA, 28 nt, Human
uguaaccagauuuuucgauggcagcacc

SEQ ID NO: 700114 - RNA, 23 nt, Human
uguccuuuacccauuucagagaa

SEQ ID NO: 700115 - RNA, 26 nt, Human
uguucagaaugcaacauauuauuaau

SEQ ID NO: 700116 - RNA, 20 nt, Human
uuaauacaccaaggcaauaa

SEQ ID NO: 700117 - RNA, 25 nt, Human
uuagaaaaacaauuuuauaaugugc

SEQ ID NO: 700118 - RNA, 18 nt, Human
uuagcugggcgugguggc

SEQ ID NO: 700119 - RNA, 24 nt, Human
uuagcugggcgugguggcgggcgc

SEQ ID NO: 700120 - RNA, 31 nt, Human
uucaguucugcagugguagcaguccuccccu

SEQ ID NO: 700121 - RNA, 31 nt, Human; identical to SEQ ID NO: 700120

SEQ ID NO: 700122 - RNA, 24 nt, Human
uugaaccugggaggcagagguugc

SEQ ID NO: 700123 - RNA, 22 nt, Human
uugcaccccuguugcaauacug

SEQ ID NO: 700124 - RNA, 23 nt, Human
uuggcugggugcaguggcucaug

SEQ ID NO: 700125 - RNA, 19 nt, Human
uugguuucaucugagaucu

SEQ ID NO: 700126 - RNA, 23 nt, Human
uuguagaugaguggaaccucugc

SEQ ID NO: 700127 - RNA, 24 nt, Human
uuuuccuaauggcuuccaugagaa

SEQ ID NO: 700128 - RNA, 24 nt, Human
uuuuuucaguccucuaguuuucuc

SEQ ID NO: 700129 - RNA, 18 nt, Human
aaaguaaggcaucccacc

SEQ ID NO: 700130 - RNA, 22 nt, Human
agacagagggauccacauucuu

SEQ ID NO: 700131 - RNA, 23 nt, Human
cagacgggguggggcgcccaagc

SEQ ID NO: 700132 - RNA, 18 nt, Human
cccagacagagggaucca

SEQ ID NO: 700133 - RNA, 19 nt, Human
cccagacagagggauccac

SEQ ID NO: 700134 - RNA, 22 nt, Human
ccgccguccugccgccgucucg

SEQ ID NO: 700135 - RNA, 21 nt, Human
ggagauggaugcaggacgcag

SEQ ID NO: 700136 - RNA, 20 nt, Human
uaaggcaucccaccccagac

SEQ ID NO: 700137 - RNA, 23 nt, Human
ucgccgcccgguucccccaucca

SEQ ID NO: 700138 - RNA, 24 nt, Human
ucuuuaaucaugaugcgggccacu

SEQ ID NO: 700139 - RNA, 25 nt, Human
uucuuuaaucaugaugcgggccacu

SEQ ID NO: 700140 - RNA, 22 nt, Human
uuuaaucaugaugcgggccacu

SEQ ID NO: 700141 - RNA, 25 nt, Human
aaaguccucucagcugcagcugccc

SEQ ID NO: 700142 - RNA, 21 nt, Human
aacagccaaaaagaaaaacag

SEQ ID NO: 700143 - RNA, 18 nt, Human
aagagcccucccagcugc

SEQ ID NO: 700144 - RNA, 26 nt, Human
acgcccagaagagcccucccagcugc

SEQ ID NO: 700145 - RNA, 21 nt, Human
agaagagcccucccagcugca

SEQ ID NO: 700146 - RNA, 21 nt, Human
cccggacgcccagaagagccc

SEQ ID NO: 700147 - RNA, 22 nt, Human
gccaaaaagaaaaacagaaauc

SEQ ID NO: 700148 - RNA, 20 nt, Human
uaagguuugacaacauggug

SEQ ID NO: 700149 - RNA, 21 nt, Human
uauggugugaaaguccucuca

SEQ ID NO: 700150 - RNA, 23 nt, Human
uauggugugaaaguccucucagc

SEQ ID NO: 700151 - RNA, 19 nt, Human
ucuccuuauggugugaaag

SEQ ID NO: 700152 - RNA, 23 nt, Human
ugaacauucuugugauggcucca

SEQ ID NO: 700153 - RNA, 19 nt, Human
ugcaaccagugccugcagc

SEQ ID NO: 700154 - RNA, 28 nt, Human
uuccaaaugaacauucuugugauggcuc

SEQ ID NO: 700155 - RNA, 22 nt, Human
uugacaacauggugacugccuu

SEQ ID NO: 700156 - RNA, 21 nt, Human
aaaugccuugaaaauaagaua

SEQ ID NO: 700157 - RNA, 25 nt, Human
cuuaaaacaagacauuaguuugccc

SEQ ID NO: 700158 - RNA, 23 nt, Human
guuucuuaaaacaagacauuagu

SEQ ID NO: 700159 - RNA, 23 nt, Human
uaguuugcccuucauuuccaaau

SEQ ID NO: 700160 - RNA, 21 nt, Human
ucagugguggacuaagcaguu

SEQ ID NO: 700161 - RNA, 21 nt, Human
ucccuauacauaaaaugaaaa

SEQ ID NO: 700162 - RNA, 26 nt, Human
uuaaaacaagacauuaguuugccuca

SEQ ID NO: 700163 - RNA, 19 nt, Human
uuuucuucagugguggacu

SEQ ID NO: 700164 - RNA, 19 nt, Human
aaaguacauugaucaaggu

SEQ ID NO: 700165 - RNA, 18 nt, Human
aacauguuuccagaauga

SEQ ID NO: 700166 - RNA, 18 nt, Human
aaccacacaaucaacuca

SEQ ID NO: 700167 - RNA, 24 nt, Human
aaccuaaucaauaucacuuaucaa

SEQ ID NO: 700168 - RNA, 25 nt, Human
aauaucacuuaucaaaagcaguggc

SEQ ID NO: 700169 - RNA, 20 nt, Human
acagcacagaccccaccaca

SEQ ID NO: 700170 - RNA, 21 nt, Human
acagcacagaccccaccacag

SEQ ID NO: 700171 - RNA, 24 nt, Human
acuggccccgcccccgggccgcgc

SEQ ID NO: 700172 - RNA, 23 nt, Human
aggggcaucuggcaacauccggc

SEQ ID NO: 700173 - RNA, 22 nt, Human
auaaagcaccuggcaaauagca

SEQ ID NO: 700174 - RNA, 21 nt, Human
caagaagauucaaccuaauca

SEQ ID NO: 700175 - RNA, 21 nt, Human
cacagcacagaccccaccaca

SEQ ID NO: 700176 - RNA, 19 nt, Human
cacagccuacuaaaaacag

SEQ ID NO: 700177 - RNA, 23 nt, Human
caccucugugcucacuguaauuc

SEQ ID NO: 700178 - RNA, 23 nt, Human
cagaacacauauccagggugugu

SEQ ID NO: 700179 - RNA, 19 nt, Human
ccacuggccccgcccccgg

SEQ ID NO: 700180 - RNA, 19 nt, Human
ccggaaauguuuaucacag

SEQ ID NO: 700181 - RNA, 26 nt, Human
cgcagccaaucgcucgcgccagcgcc

SEQ ID NO: 700182 - RNA, 25 nt, Human
cgccacaucgcccggccaauuggcg

SEQ ID NO: 700183 - RNA, 22 nt, Human
cuaguuuaaucugcuaauauga

SEQ ID NO: 700184 - RNA, 24 nt, Human
cuaguuuaaucugcuaauaugaaa

SEQ ID NO: 700185 - RNA, 19 nt, Human
cugguggugccaccucccu

SEQ ID NO: 700186 - RNA, 22 nt, Human
gaaugaauaaaccacacaauca

SEQ ID NO: 700187 - RNA, 19 nt, Human
gagcacagucugcggcgcg

SEQ ID NO: 700188 - RNA, 23 nt, Human
gcaaugcacagcacagaccccac

SEQ ID NO: 700189 - RNA, 20 nt, Human
gcacagcacagaccccacca

SEQ ID NO: 700190 - RNA, 20 nt, Human
gccugugacaacggcagacg

SEQ ID NO: 700191 - RNA, 24 nt, Human
gcgaagcaccgggaaccugagccg

SEQ ID NO: 700192 - RNA, 26 nt, Human
gcggcgcgcaccgcccacuggccccc

SEQ ID NO: 700193 - RNA, 22 nt, Human
ggcagacgcgcgaagcaccggg

SEQ ID NO: 700194 - RNA, 24 nt, Human
gggcaucuggcaacauccggcaua

SEQ ID NO: 700195 - RNA, 18 nt, Human
gggggucaacacgcccca

SEQ ID NO: 700196 - RNA, 23 nt, Human
gggguugacucuguccccuaggg

SEQ ID NO: 700197 - RNA, 19 nt, Human
uaaaaacagaguuucacuc

SEQ ID NO: 700198 - RNA, 20 nt, Human
uaaugauagaacuaaauuua

SEQ ID NO: 700199 - RNA, 23 nt, Human
uacuaaaaacagaguuucacuca

SEQ ID NO: 700200 - RNA, 19 nt, Human
uagaacacugaucagccuc

SEQ ID NO: 700201 - RNA, 21 nt, Human
uagcaaguccucugcaagugc

SEQ ID NO: 700202 - RNA, 22 nt, Human
uauaaaaaguacauugaucaag

SEQ ID NO: 700203 - RNA, 27 nt, Human
uauggcaaguuuauaaaaaguacauug

SEQ ID NO: 700204 - RNA, 18 nt, Human
ucaauaucacuuaucaaa

SEQ ID NO: 700205 - RNA, 19 nt, Human
uccacgccacaucgcccgg

SEQ ID NO: 700206 - RNA, 21 nt, Human
uccucugcaagugcuccggaa

SEQ ID NO: 700207 - RNA, 26 nt, Human
ugaauaaaccacacaaucaacucaga

SEQ ID NO: 700208 - RNA, 27 nt, Human
ugaauaaaccacacaaucaacucagaa

SEQ ID NO: 700209 - RNA, 22 nt, Human
ugacaacggcagacgcgcgaag

SEQ ID NO: 700210 - RNA, 21 nt, Human
ugacucuguccccuaggggcc

SEQ ID NO: 700211 - RNA, 22 nt, Human
ugauacauaaagcaccuggcaa

SEQ ID NO: 700212 - RNA, 21 nt, Human
ugcuaguuuaaucugcuaaua

SEQ ID NO: 700213 - RNA, 20 nt, Human
uggcaacauccggcauaacu

SEQ ID NO: 700214 - RNA, 19 nt, Human
uggccugugacaacggcag

SEQ ID NO: 700215 - RNA, 20 nt, Human
ugucgcuuagaaacagaaca

SEQ ID NO: 700216 - RNA, 19 nt, Human
ugugauacaaaauuauaag

SEQ ID NO: 700217 - RNA, 20 nt, Human
uguucaaauuucccauaagu

SEQ ID NO: 700218 - RNA, 19 nt, Human
uguuguuguuauuuuuuuc

SEQ ID NO: 700219 - RNA, 22 nt, Human
uucccuugaaccugcuccucac

SEQ ID NO: 700220 - RNA, 23 nt, Human
aaaaagaaaaacaugauacagag

SEQ ID NO: 700221 - RNA, 22 nt, Human
aaagaaaaacaugauacagaga

SEQ ID NO: 700222 - RNA, 23 nt, Human
aacaugauacagagaucccaucc

SEQ ID NO: 700223 - RNA, 19 nt, Human
acagccucaugguccagcc

SEQ ID NO: 700224 - RNA, 19 nt, Human
accuuggaggcuuggauaa

SEQ ID NO: 700225 - RNA, 28 nt, Human
acucugaaauaagugauuuaaaaagaaa

SEQ ID NO: 700226 - RNA, 21 nt, Human
agaugagaaauauggaaauaa

SEQ ID NO: 700227 - RNA, 19 nt, Human
agcuguggggagacagccu

SEQ ID NO: 700228 - RNA, 24 nt, Human
cagaaguggauaaacgucgaguca

SEQ ID NO: 700229 - RNA, 22 nt, Human
cauuacacauggcugacucgac

SEQ ID NO: 700230 - RNA, 22 nt, Human
cccuguuuuuuggagagggugu

SEQ ID NO: 700231 - RNA, 24 nt, Human
cccuuuugcccuguuuuuuggaga

SEQ ID NO: 700232 - RNA, 22 nt, Human
ccucaauggugcgucugccugc

SEQ ID NO: 700233 - RNA, 21 nt, Human
cucaagaucuccccaagacuu

SEQ ID NO: 700234 - RNA, 19 nt, Human
cucaugguccagccaggcu

SEQ ID NO: 700235 - RNA, 25 nt, Human
cucccugcaaccaggcagaugagaa

SEQ ID NO: 700236 - RNA, 23 nt, Human
cuggcugugacccgaccucucuu

SEQ ID NO: 700237 - RNA, 22 nt, Human
gcaaucaagugccccuuuugcc

SEQ ID NO: 700238 - RNA, 23 nt, Human
ggaaauaaggaaaagggaaaaug

SEQ ID NO: 700239 - RNA, 23 nt, Human
ggcaaucaagugccccuuuugcc

SEQ ID NO: 700240 - RNA, 19 nt, Human
ggcugugacccgaccucuc

SEQ ID NO: 700241 - RNA, 18 nt, Human
gggaaaaugaagauauga

SEQ ID NO: 700242 - RNA, 18 nt, Human
guuuuuuggagagggugu

SEQ ID NO: 700243 - RNA, 21 nt, Human
uaaagcaaguaugucuuuauu

SEQ ID NO: 700244 - RNA, 19 nt, Human
uauacaugaugggcaauca

SEQ ID NO: 700245 - RNA, 18 nt, Human
ucaaaugaacagaagugg

SEQ ID NO: 700246 - RNA, 18 nt, Human
ucaaaugaacagaagugg

SEQ ID NO: 700247 - RNA, 19 nt, Human
ucaaaugaacagaagugga

SEQ ID NO: 700248 - RNA, 21 nt, Human
ucaaaugaacagaaguggaua

SEQ ID NO: 700249 - RNA, 21 nt, Human
ucccauccugaccuuggaggc

SEQ ID NO: 700250 - RNA, 18 nt, Human
ucccugcaaccaggcaga

SEQ ID NO: 700251 - RNA, 23 nt, Human
uccuggguaucagauguggaacu

SEQ ID NO: 700252 - RNA, 19 nt, Human
ugaaauagugauuuauaca

SEQ ID NO: 700253 - RNA, 20 nt, Human
ugaacagaaguggauaaacg

SEQ ID NO: 700254 - RNA, 28 nt, Human
ugccccuuuugcccuguuuuuuggagaa

SEQ ID NO: 700255 - RNA, 24 nt, Human
ugccucaauggugcgucugccugc

SEQ ID NO: 700256 - RNA, 19 nt, Human
uggggagacagccucaugg

SEQ ID NO: 700257 - RNA, 23 nt, Human
uuggaagcuggagacuccugggu

SEQ ID NO: 700258 - RNA, 24 nt, Human
aaacagaaaguuuuuuuuccaaga

SEQ ID NO: 700259 - RNA, 23 nt, Human
aaacagacaaguaacaaagagaa

SEQ ID NO: 700260 - RNA, 21 nt, Human
aagaaagccauccgcugcuag

SEQ ID NO: 700261 - RNA, 23 nt, Human
aagaaauucaaauggaaacagac

SEQ ID NO: 700262 - RNA, 18 nt, Human
aagaaucuuguuuucuuu

SEQ ID NO: 700263 - RNA, 22 nt, Human
aagaaucuuguuuucuuuuuuu

SEQ ID NO: 700264 - RNA, 22 nt, Human
acuugguguacauuuaauagac

SEQ ID NO: 700265 - RNA, 20 nt, Human
aggaaugcuguuuguucuug

SEQ ID NO: 700266 - RNA, 24 nt, Human
augggaaugaaaauaauagauacc

SEQ ID NO: 700267 - RNA, 21 nt, Human
auguacucuugaaaauguguu

SEQ ID NO: 700268 - RNA, 26 nt, Human
auguuugcccaacauuuccuucuuuu

SEQ ID NO: 700269 - RNA, 23 nt, Human
caacagaauaaauuauauaucca

SEQ ID NO: 700270 - RNA, 21 nt, Human
cacccccagccuccugugggu

SEQ ID NO: 700271 - RNA, 24 nt, Human
cagaaaguuuuuuuuccaagauau

SEQ ID NO: 700272 - RNA, 24 nt, Human
caggauacaauaaaacccuggagu

SEQ ID NO: 700273 - RNA, 19 nt, Human
cagguuccacuuacucuuc

SEQ ID NO: 700274 - RNA, 18 nt, Human
ccaacauuuccuucuuuu

SEQ ID NO: 700275 - RNA, 22 nt, Human
ccaauuccacuucaucauauau

SEQ ID NO: 700276 - RNA, 22 nt, Human
cccaacauuuccuucuuuuguu

SEQ ID NO: 700277 - RNA, 18 nt, Human
ccuccuguggguaagaau

SEQ ID NO: 700278 - RNA, 18 nt, Human
ccuccuguggguaagaau

SEQ ID NO: 700279 - RNA, 23 nt, Human
ccuccuguggguaagaaucuugu

SEQ ID NO: 700280 - RNA, 20 nt, Human
ccucuuaugggaaugaaaau

SEQ ID NO: 700281 - RNA, 21 nt, Human
cuccuguggguaagaaucuug

SEQ ID NO: 700282 - RNA, 25 nt, Human
cugcuagguuaaacuccaagaacac

SEQ ID NO: 700283 - RNA, 23 nt, Human
gaacccgucuccugagaagcugg

SEQ ID NO: 700284 - RNA, 19 nt, Human
gacaaguaacaaagagaag

SEQ ID NO: 700285 - RNA, 24 nt, Human
gcacagugcuaaaucauauauagu

SEQ ID NO: 700286 - RNA, 20 nt, Human
gccuccuguggguaagaauu

SEQ ID NO: 700287 - RNA, 23 nt, Human
ggaaaaaacaaugcuucccugga

SEQ ID NO: 700288 - RNA, 23 nt, Human
ggggaucccuuuucuuguauugu

SEQ ID NO: 700289 - RNA, 20 nt, Human
guagagaaucucuaucuaca

SEQ ID NO: 700290 - RNA, 19 nt, Human
guauaaacggguaaguaga

SEQ ID NO: 700291 - RNA, 18 nt, Human
gucccuguugugauaucu

SEQ ID NO: 700292 - RNA, 22 nt, Human
uaagaaauucaaauggaaacag

SEQ ID NO: 700293 - RNA, 23 nt, Human
uacauuuacaaaaacuccuucug

SEQ ID NO: 700294 - RNA, 21 nt, Human
uaccuggggaucccuuuucuu

SEQ ID NO: 700295 - RNA, 25 nt, Human
uagauacugcaugcuuuuuuuuuuu

SEQ ID NO: 700296 - RNA, 23 nt, Human
uagcacccccagccuccuguggg

SEQ ID NO: 700297 - RNA, 25 nt, Human
uagcugauucucucucuauucgcuc

SEQ ID NO: 700298 - RNA, 22 nt, Human
uagguuaaacuccaagaacacu

SEQ ID NO: 700299 - RNA, 24 nt, Human
uaugggaaugaaaauaauagauac

SEQ ID NO: 700300 - RNA, 21 nt, Human
uauguuaaacuuucuacaaaa

SEQ ID NO: 700301 - RNA, 25 nt, Human
ucagaagucagccuauacaaacugu

SEQ ID NO: 700302 - RNA, 24 nt, Human
uccaagaacacuuuauuaagaaca

SEQ ID NO: 700303 - RNA, 19 nt, Human
ucccagguuccacuuacuc

SEQ ID NO: 700304 - RNA, 21 nt, Human
ucgcuccaccagauuaccugg

SEQ ID NO: 700305 - RNA, 19 nt, Human
ucuguuguugauucuguac

SEQ ID NO: 700306 - RNA, 19 nt, Human
ugagaaucuguuucugcug

SEQ ID NO: 700307 - RNA, 28 nt, Human
ugccagaauguugguauuucgggucccc

SEQ ID NO: 700308 - RNA, 28 nt, Human
uggaaacagacaaguaacaaagagaagu

SEQ ID NO: 700309 - RNA, 24 nt, Human
ugggaguaaaaaugaacugagaau

SEQ ID NO: 700310 - RNA, 24 nt, Human
uguaaaacaggcacuugauuugcu

SEQ ID NO: 700311 - RNA, 19 nt, Human
uuauaucaaaauguacucu

SEQ ID NO: 700312 - RNA, 18 nt, Human
uucaaguuuuucugccuu

SEQ ID NO: 700313 - RNA, 23 nt, Human
uucuuuugagaagcgcucccuuu

SEQ ID NO: 700314 - RNA, 24 nt, Human
aaguuucuugguuucucauggaaa

SEQ ID NO: 700315 - RNA, 22 nt, Human
acugaccacugucaaaccagug

SEQ ID NO: 700316 - RNA, 31 nt, Human
acuuuaaaacagcagccaaguagagaagggg

SEQ ID NO: 700317 - RNA, 19 nt, Human
agaaggguuggggaaggga

SEQ ID NO: 700318 - RNA, 21 nt, Human
aguagagaaggguuggggaag

SEQ ID NO: 700319 - RNA, 21 nt, Human
cauuuacuccaguuccugcuc

SEQ ID NO: 700320 - RNA, 23 nt, Human
ccaguuccugcuccaugugaaaa

SEQ ID NO: 700321 - RNA, 21 nt, Human
ccccagccccucuauucgguc

SEQ ID NO: 700322 - RNA, 21 nt, Human
ccccucgugcugccgccgcua

SEQ ID NO: 700323 - RNA, 20 nt, Human
ccgcucagcucuuuuccccu

SEQ ID NO: 700324 - RNA, 23 nt, Human
ccucgugcugccgccgcucgcac

SEQ ID NO: 700325 - RNA, 19 nt, Human
cgcucgcacccggcucucc

SEQ ID NO: 700326 - RNA, 25 nt, Human
cuauucggucucucacagacccacu

SEQ ID NO: 700327 - RNA, 19 nt, Human
cugccgccgcucgcacccg

SEQ ID NO: 700328 - RNA, 25 nt, Human
gacccacugucucccggcugacuuu

SEQ ID NO: 700329 - RNA, 20 nt, Human
gagaaggguuggggaaggga

SEQ ID NO: 700330 - RNA, 19 nt, Human
gcucgcacccggcucucca

SEQ ID NO: 700331 - RNA, 24 nt, Human
ggcaaacuuuaaaacagcagccaa

SEQ ID NO: 700332 - RNA, 20 nt, Human
ucacagacccacugucuccc

SEQ ID NO: 700333 - RNA, 27 nt, Human
ucgaaagagcuuuagacucuguaauaa

SEQ ID NO: 700334 - RNA, 19 nt, Human
ucgugcugccgccgcucgc

SEQ ID NO: 700335 - RNA, 18 nt, Human
ucucucacagacccacug

SEQ ID NO: 700336 - RNA, 25 nt, Human
ucuguaauaaaaauccaaauuuggg

SEQ ID NO: 700337 - RNA, 25 nt, Human
uggccccagccccucuauucggucu

SEQ ID NO: 700338 - RNA, 23 nt, Human
uguaacugaccacugucaaacca

SEQ ID NO: 700339 - RNA, 22 nt, Human
uuaaucaguauaaaaucgaaag

SEQ ID NO: 700340 - RNA, 26 nt, Human
uuauacaccuauuuuucuuccuucca

SEQ ID NO: 700341 - RNA, 21 nt, Human
uucucauggaaaacauuuuau

SEQ ID NO: 700342 - RNA, 21 nt, Human
uucuugguuucucauggaaaa

SEQ ID NO: 700343 - RNA, 30 nt, Human
aaacuaguuuuacuuuagcaccauucuuaa

SEQ ID NO: 700344 - RNA, 22 nt, Human
agcaggauucuugaucaugggg

SEQ ID NO: 700345 - RNA, 19 nt, Human
agcgccuuuaaccaggcgg

SEQ ID NO: 700346 - RNA, 26 nt, Human
caggugccgagggucuggaucagaaa

SEQ ID NO: 700347 - RNA, 24 nt, Human
ccuuccaugagcucuccgcagcuc

SEQ ID NO: 700348 - RNA, 18 nt, Human
gaucagaaaaaaaggcag

SEQ ID NO: 700349 - RNA, 19 nt, Human
guguaucugggcuucaugg

SEQ ID NO: 700350 - RNA, 24 nt, Human
uggaauuuuguguaucugggcuuc

SEQ ID NO: 700351 - RNA, 19 nt, Human
ugggaaauaagcgccuuua

SEQ ID NO: 700352 - RNA, 23 nt, Human
ccuuuggucuuagauacuucucu

SEQ ID NO: 700353 - RNA, 19 nt, Human
uaggcaggcacaaaaugcc

SEQ ID NO: 700354 - RNA, 18 nt, Human
uggauagcuaggcaggca

SEQ ID NO: 700355 - RNA, 19 nt, Human
uggucuguguuuucuccuu

SEQ ID NO: 700356 - RNA, 18 nt, Human
uuuuuuuuuuuuuuuccg

SEQ ID NO: 700357 - RNA, 21 nt, Human
uuuuuuuuuuuuuuuuuccga

SEQ ID NO: 700358 - RNA, 26 nt, Human
uuuuuuuuuuuuuuuuuccgaguuuu

SEQ ID NO: 700359 - RNA, 23 nt, Human
agaaaguggcaagccuauuuuca

SEQ ID NO: 700360 - RNA, 20 nt, Human
cucaaaaugaauuuucaguu

SEQ ID NO: 700361 - RNA, 19 nt, Human
ugagagaguagcuuucagg

SEQ ID NO: 700362 - RNA, 21 nt, Human
aaacgccgggagaggcaacaa

SEQ ID NO: 700363 - RNA, 20 nt, Human
aaagugccucuagcccgcgg

SEQ ID NO: 700364 - RNA, 23 nt, Human
aacaacggcccuccauguccccc

SEQ ID NO: 700365 - RNA, 24 nt, Human
aacagggcagccuguccaacagaa

SEQ ID NO: 700366 - RNA, 22 nt, Human
aacugagcuggcagccagcccc

SEQ ID NO: 700367 - RNA, 23 nt, Human
aaugcucauucaugcaugaaguu

SEQ ID NO: 700368 - RNA, 18 nt, Human
acagguaaagcuuccuuc

SEQ ID NO: 700369 - RNA, 21 nt, Human
acauauauacaccauuuuaca

SEQ ID NO: 700370 - RNA, 19 nt, Human
acccagggugugucugugg

SEQ ID NO: 700371 - RNA, 26 nt, Human
acccccagugccaggcagaagcccau

SEQ ID NO: 700372 - RNA, 21 nt, Human
acccuggacccagacuccuca

SEQ ID NO: 700373 - RNA, 20 nt, Human
agacuccucaauccacccag

SEQ ID NO: 700374 - RNA, 23 nt, Human
agagggggaagccgcugcccaga

SEQ ID NO: 700375 - RNA, 19 nt, Human
agccccagcaggccagaga

SEQ ID NO: 700376 - RNA, 22 nt, Human
aggaacccggggagggggaugg

SEQ ID NO: 700377 - RNA, 22 nt, Human
aggaggcuuucauauuccgugc

SEQ ID NO: 700378 - RNA, 24 nt, Human
aggcagagaggugagugucucagg

SEQ ID NO: 700379 - RNA, 22 nt, Human
aggcaggggaggggcuagaggg

SEQ ID NO: 700380 - RNA, 18 nt, Human
aggcaggggaggggcucg

SEQ ID NO: 700381 - RNA, 26 nt, Human
aggggccgaagagucaccaccgagcc

SEQ ID NO: 700382 - RNA, 23 nt, Human
aggggguucauuuccccaggaag

SEQ ID NO: 700383 - RNA, 26 nt, Human
caacaacggcccuccauguccccccu

SEQ ID NO: 700384 - RNA, 21 nt, Human
caacggcccuccauguccccc

SEQ ID NO: 700385 - RNA, 19 nt, Human
cacagccacgccgucccuc

SEQ ID NO: 700386 - RNA, 19 nt, Human
cacccuccacccccagugc

SEQ ID NO: 700387 - RNA, 22 nt, Human
cacccuccacccccagugccag

SEQ ID NO: 700388 - RNA, 19 nt, Human
cagacuccucaauccaccc

SEQ ID NO: 700389 - RNA, 21 nt, Human
cagcccccagccccagggcuc

SEQ ID NO: 700390 - RNA, 18 nt, Human
cagcccccugcccagccu

SEQ ID NO: 700391 - RNA, 21 nt, Human
cagcccccugcccagccugcc

SEQ ID NO: 700392 - RNA, 20 nt, Human
cagcucagcccccugcccag

SEQ ID NO: 700393 - RNA, 18 nt, Human
caggcacccugaggccug

SEQ ID NO: 700394 - RNA, 22 nt, Human
cagggcagccuguccaacagaa

SEQ ID NO: 700395 - RNA, 23 nt, Human
cauuuccccaggaagcacagcca

SEQ ID NO: 700396 - RNA, 22 nt, Human
ccaccgagccugugugggagga

SEQ ID NO: 700397 - RNA, 22 nt, Human
ccagcaggccagagagcccagu

SEQ ID NO: 700398 - RNA, 19 nt, Human
ccagccugccccacagccu

SEQ ID NO: 700399 - RNA, 19 nt, Human
ccagcucagcccccugccc

SEQ ID NO: 700400 - RNA, 24 nt, Human
ccagcucagcccccugcccagccu

SEQ ID NO: 700401 - RNA, 25 nt, Human
ccaguggcuuuugcuggggcccccu

SEQ ID NO: 700402 - RNA, 26 nt, Human
cccagccucagccccaacugcgaggc

SEQ ID NO: 700403 - RNA, 19 nt, Human
ccccaggaagcacagccac

SEQ ID NO: 700404 - RNA, 22 nt, Human
ccccaggggccgaagagucacc

SEQ ID NO: 700405 - RNA, 21 nt, Human
cccccagugccaggcagaagc

SEQ ID NO: 700406 - RNA, 24 nt, Human
cccccuugcugcucucccagccuc

SEQ ID NO: 700407 - RNA, 21 nt, Human
cccuaugccugcugaccacca

SEQ ID NO: 700408 - RNA, 22 nt, Human
cccugcccagccugccccacag

SEQ ID NO: 700409 - RNA, 19 nt, Human
cccuggacccagacuccuc

SEQ ID NO: 700410 - RNA, 23 nt, Human
ccuccugauggcgcaccuggucc

SEQ ID NO: 700411 - RNA, 20 nt, Human
ccuggcacagagaggcgccc

SEQ ID NO: 700412 - RNA, 18 nt, Human
ccuucccuccugccuccc

SEQ ID NO: 700413 - RNA, 24 nt, Human
cgcugccagcucagcccccugccc

SEQ ID NO: 700414 - RNA, 20 nt, Human
cggcccuccauguccccccu

SEQ ID NO: 700415 - RNA, 20 nt, Human
cgggagaggcaacaacggcc

SEQ ID NO: 700416 - RNA, 23 nt, Human
cucagccccaacugcgaggcaga

SEQ ID NO: 700417 - RNA, 19 nt, Human
cuccauguccccccuaggu

SEQ ID NO: 700418 - RNA, 25 nt, Human
cucccagaacugagcuggcagccag

SEQ ID NO: 700419 - RNA, 20 nt, Human
cuccugccucccuaugccug

SEQ ID NO: 700420 - RNA, 21 nt, Human
cugaccaccagcaagaaauug

SEQ ID NO: 700421 - RNA, 30 nt, Human
cugagcuggcagccagccccagccucagcc

SEQ ID NO: 700422 - RNA, 21 nt, Human
cugcccagccugccccacagc

SEQ ID NO: 700423 - RNA, 22 nt, Human
cugcucucccagccucccuggc

SEQ ID NO: 700424 - RNA, 23 nt, Human
cugugccuguggcccaggcgacc

SEQ ID NO: 700425 - RNA, 22 nt, Human
cuguggcccaggcgaccccagc

SEQ ID NO: 700426 - RNA, 23 nt, Human
cuuaucuccuuccaagguggggg

SEQ ID NO: 700427 - RNA, 20 nt, Human
cuucgaacugggaucucccc

SEQ ID NO: 700428 - RNA, 23 nt, Human
cuuuugcuggggcccccuccuua

SEQ ID NO: 700429 - RNA, 18 nt, Human
cuuuuuguuuuuccccag

SEQ ID NO: 700430 - RNA, 18 nt, Human
gacgcggaggagaggcgc

SEQ ID NO: 700431 - RNA, 20 nt, Human
gagaggcaacaacggcccuc

SEQ ID NO: 700432 - RNA, 19 nt, Human
gagcugcugugccuguggc

SEQ ID NO: 700433 - RNA, 19 nt, Human
gaggaggcuuucauauucc

SEQ ID NO: 700434 - RNA, 21 nt, Human
gccccagccucagccccaacu

SEQ ID NO: 700435 - RNA, 33 nt, Human
gcuggcagccagccccagccucagccccaaccg

SEQ ID NO: 700436 - RNA, 18 nt, Human
ggcucagagaggcuggcg

SEQ ID NO: 700437 - RNA, 19 nt, Human
gggcagggggcuggggcga

SEQ ID NO: 700438 - RNA, 21 nt, Human
gggcagggggcuggggcgagg

SEQ ID NO: 700439 - RNA, 19 nt, Human
ggggagggggaugggacag

SEQ ID NO: 700440 - RNA, 23 nt, Human
ggggcgggcagggggcuggggcg

SEQ ID NO: 700441 - RNA, 22 nt, Human
gggguguauggggaggggggcu

SEQ ID NO: 700442 - RNA, 18 nt, Human
guaaagugccucuagccc

SEQ ID NO: 700443 - RNA, 18 nt, Human
guguauggggaggggggc

SEQ ID NO: 700444 - RNA, 18 nt, Human
uaaagugccucuagcccg

SEQ ID NO: 700445 - RNA, 23 nt, Human
uauuuuauuuauacauauauaca

SEQ ID NO: 700446 - RNA, 19 nt, Human
ucacccaggaacagggcag

SEQ ID NO: 700447 - RNA, 24 nt, Human
ucaggccugggguguauggggagg

SEQ ID NO: 700448 - RNA, 24 nt, Human
ucccaaaguggggcgggcaggggg

SEQ ID NO: 700449 - RNA, 20 nt, Human
ucgugugcacccuccacccc

SEQ ID NO: 700450 - RNA, 22 nt, Human
ucgugugcacccuccaccccca

SEQ ID NO: 700451 - RNA, 19 nt, Human
ucuccuuccaagguggggg

SEQ ID NO: 700452 - RNA, 19 nt, Human
ucugcaagcagcuuuggcu

SEQ ID NO: 700453 - RNA, 18 nt, Human
ugaaggaacccggggagg

SEQ ID NO: 700454 - RNA, 19 nt, Human
ugaaguuuuucucuguugc

SEQ ID NO: 700455 - RNA, 18 nt, Human
ugacaaggugaccugaag

SEQ ID NO: 700456 - RNA, 21 nt, Human
ugagcugcugugccuguggcc

SEQ ID NO: 700457 - RNA, 19 nt, Human
ugcccagccugccccacag

SEQ ID NO: 700458 - RNA, 23 nt, Human
ugccccacagccugagccccagc

SEQ ID NO: 700459 - RNA, 20 nt, Human
ugcugcucucccagccuccc

SEQ ID NO: 700460 - RNA, 24 nt, Human
uggagggucccaaaguggggcggg

SEQ ID NO: 700461 - RNA, 22 nt, Human
uggcacagagaggcgcccuggg

SEQ ID NO: 700462 - RNA, 20 nt, Human
uggcagagagggccacaggc

SEQ ID NO: 700463 - RNA, 20 nt, Human
uggcagagagggccacaggc

SEQ ID NO: 700464 - RNA, 24 nt, Human
uggcgcaccuggucccccuugcug

SEQ ID NO: 700465 - RNA, 18 nt, Human
uggggaaagcggcuggag

SEQ ID NO: 700466 - RNA, 23 nt, Human
uggggccaaggcaguuucccugg

SEQ ID NO: 700467 - RNA, 23 nt, Human
ugucucaggcacccugaggccug

SEQ ID NO: 700468 - RNA, 26 nt, Human
uuccagcccccagccccagggcucug

SEQ ID NO: 700469 - RNA, 19 nt, Human
uuccgugccaugaccccuc

SEQ ID NO: 700470 - RNA, 21 nt, Human
uugcugcucucccagccuccc

SEQ ID NO: 700471 - RNA, 21 nt, Human
uuugcuggggcccccuccuua

SEQ ID NO: 700472 - RNA, 22 nt, Human
uuuuucucuguugcacccugga

SEQ ID NO: 700473 - RNA, 20 nt, Human
uuuuuguuuuuccccagggg

SEQ ID NO: 700474 - RNA, 24 nt, Human
aggccgcaggcaggcagcgaggga

SEQ ID NO: 700475 - RNA, 19 nt, Human
caagugcacugggcaggcc

SEQ ID NO: 700476 - RNA, 21 nt, Human
caggccgcaggcaggcagcga

SEQ ID NO: 700477 - RNA, 23 nt, Human
cagggcaggccgcaggcaggcag

SEQ ID NO: 700478 - RNA, 20 nt, Human
ccagcaagugcacugggcag

SEQ ID NO: 700479 - RNA, 18 nt, Human
ccugaggacacugaggac

SEQ ID NO: 700480 - RNA, 24 nt, Human
gggggccugaguccggggcuugag

SEQ ID NO: 700481 - RNA, 22 nt, Human
uccaccccaucaggcccuugcg

SEQ ID NO: 700482 - RNA, 20 nt, Human
ucuuccagcaagugcacugg

SEQ ID NO: 700483 - RNA, 20 nt, Human
ugaugacagcugggggggcc

SEQ ID NO: 700484 - RNA, 24 nt, Human
ugcacugggcaggccccugaggac

SEQ ID NO: 700485 - RNA, 20 nt, Human
ugggggggccgccaugccuu

SEQ ID NO: 700486 - RNA, 25 nt, Human
uuuuucgauugccuuugccuuuaau

SEQ ID NO: 700487 - RNA, 18 nt, Human
uuuuuuuuuuuuuuuucg

SEQ ID NO: 700488 - RNA, 22 nt, Human
uuuuuuuuuuuuuuuuucgauu

SEQ ID NO: 700489 - RNA, 21 nt, Human
agcuauagcucccccuggggu

SEQ ID NO: 700490 - RNA, 22 nt, Human
cacacaggucacauguuacggu

SEQ ID NO: 700491 - RNA, 18 nt, Human
caguggcgcagccgcagu

SEQ ID NO: 700492 - RNA, 19 nt, Human
cggggcuuuccuuccuggc

SEQ ID NO: 700493 - RNA, 23 nt, Human
cugguuccaggugacuaggucac

SEQ ID NO: 700494 - RNA, 23 nt, Human
gagcugguuccaggugacuaggu

SEQ ID NO: 700495 - RNA, 18 nt, Human
gcgcagccgcagugaguc

SEQ ID NO: 700496 - RNA, 20 nt, Human
gcugguuccaggugacuagg

SEQ ID NO: 700497 - RNA, 20 nt, Human
ggggaggggucccaguggcg

SEQ ID NO: 700498 - RNA, 20 nt, Human
ucaggagcugguuccaggug

SEQ ID NO: 700499 - RNA, 20 nt, Human
ugaagcuauagcucccccug

SEQ ID NO: 700500 - RNA, 21 nt, Human
ugacuaggucaccacauucca

SEQ ID NO: 700501 - RNA, 19 nt, Human
uggcugcaggugccucuug

SEQ ID NO: 700502 - RNA, 21 nt, Human
uggcugcaggugccucuuggg

SEQ ID NO: 700503 - RNA, 26 nt, Human
ugguaaugaggaaaguucacuugggg

SEQ ID NO: 700504 - RNA, 18 nt, Human
uucaggaugguaaugagg

SEQ ID NO: 700505 - RNA, 21 nt, Human
acccaaacccacuaucagggu

SEQ ID NO: 700506 - RNA, 18 nt, Human
agagagaggcagaccuaa

SEQ ID NO: 700507 - RNA, 19 nt, Human
agcacauacauuccauacc

SEQ ID NO: 700508 - RNA, 23 nt, Human
agcuggccugcucacccagcccc

SEQ ID NO: 700509 - RNA, 18 nt, Human
agggggucagcacauaca

SEQ ID NO: 700510 - RNA, 20 nt, Human
cacacacacacacacacaca

SEQ ID NO: 700511 - RNA, 22 nt, Human
cacacacacacacacacacaga

SEQ ID NO: 700512 - RNA, 23 nt, Human
ccacuaucagggucugugccugg

SEQ ID NO: 700513 - RNA, 22 nt, Human
ccuccuauccacaggagcccag

SEQ ID NO: 700514 - RNA, 23 nt, Human
cguuugaaacuaggucugucugg

SEQ ID NO: 700515 - RNA, 23 nt, Human
cuaagaucccuguuccaaucccc

SEQ ID NO: 700516 - RNA, 20 nt, Human
cuaucagggucugugccugg

SEQ ID NO: 700517 - RNA, 25 nt, Human
cuucacacacacacacacacacaga

SEQ ID NO: 700518 - RNA, 20 nt, Human
gagcccagauggaggggcca

SEQ ID NO: 700519 - RNA, 24 nt, Human
gccugggcaccaaaggggcaggca

SEQ ID NO: 700520 - RNA, 21 nt, Human
ggagcccagauggaggggcca

SEQ ID NO: 700521 - RNA, 18 nt, Human
ggcaccaaaggggcaggc

SEQ ID NO: 700522 - RNA, 19 nt, Human
uacagugagggcuuggcuc

SEQ ID NO: 700523 - RNA, 22 nt, Human
uaugccuuuucacagccucaca

SEQ ID NO: 700524 - RNA, 22 nt, Human
ucacacacacacacacacacag

SEQ ID NO: 700525 - RNA, 25 nt, Human
ucacccagccccuccuauccacagg

SEQ ID NO: 700526 - RNA, 24 nt, Human
uccgcaccgcucggcuccacccuc

SEQ ID NO: 700527 - RNA, 22 nt, Human
uccuucugaucagcucagggaa

SEQ ID NO: 700528 - RNA, 22 nt, Human
ucuccggagaaccaccagaucu

SEQ ID NO: 700529 - RNA, 18 nt, Human
ucuucuguacagugaggg

SEQ ID NO: 700530 - RNA, 22 nt, Human
ugaaacuaggucugucugguug

SEQ ID NO: 700531 - RNA, 20 nt, Human
ugccugggcaccaaaggggc

SEQ ID NO: 700532 - RNA, 22 nt, Human
ugccugggcaccaaaggggcag

SEQ ID NO: 700533 - RNA, 27 nt, Human
ugggggccuccuuugcagggggacacc

SEQ ID NO: 700534 - RNA, 18 nt, Human
uguaaaaaacuucacaca

SEQ ID NO: 700535 - RNA, 20 nt, Human
uucacacacacacacacaca

SEQ ID NO: 700536 - RNA, 21 nt, Human
uucacacacacacacacacac

SEQ ID NO: 700537 - RNA, 22 nt, Human
aaaccagagggagugggaaggc

SEQ ID NO: 700538 - RNA, 22 nt, Human
aacaugaaacgcuugaagagga

SEQ ID NO: 700539 - RNA, 18 nt, Human
aaccagagggagugggaa

SEQ ID NO: 700540 - RNA, 22 nt, Human
aaggugcaggccuuggacgugc

SEQ ID NO: 700541 - RNA, 25 nt, Human
accuacugcccuggggaaaccccag

SEQ ID NO: 700542 - RNA, 19 nt, Human
agaagauagaaaggucagc

SEQ ID NO: 700543 - RNA, 18 nt, Human
agacacuggcacuggccu

SEQ ID NO: 700544 - RNA, 18 nt, Human
agcaguguucuuagccuc

SEQ ID NO: 700545 - RNA, 19 nt, Human
agcaguguucuuagccucc

SEQ ID NO: 700546 - RNA, 23 nt, Human
aggagcaguaccugagccuagag

SEQ ID NO: 700547 - RNA, 18 nt, Human
agggagugggaaggcgua

SEQ ID NO: 700548 - RNA, 23 nt, Human
agggagugggaaggcguaugaga

SEQ ID NO: 700549 - RNA, 24 nt, Human
auggugcagaagagcaguguugga

SEQ ID NO: 700550 - RNA, 19 nt, Human
caagggccccuaggaccca

SEQ ID NO: 700551 - RNA, 24 nt, Human
cacauuuauuccacuucuugaagg

SEQ ID NO: 700552 - RNA, 21 nt, Human
caggaggccuccucuccuguu

SEQ ID NO: 700553 - RNA, 23 nt, Human
caguguuggaaucauucuaaugc

SEQ ID NO: 700554 - RNA, 25 nt, Human
caguugcaaugucugugccacccca

SEQ ID NO: 700555 - RNA, 22 nt, Human
cauccuggccagcagccaggag

SEQ ID NO: 700556 - RNA, 22 nt, Human
cccaggaccagcuggagccuca

SEQ ID NO: 700557 - RNA, 23 nt, Human
cccaggagcugggacuagugggu

SEQ ID NO: 700558 - RNA, 18 nt, Human
ccccacacucugagcugc

SEQ ID NO: 700559 - RNA, 23 nt, Human
ccccagagcuuucagggcucacu

SEQ ID NO: 700560 - RNA, 19 nt, Human
ccccaggaggccuccucuc

SEQ ID NO: 700561 - RNA, 21 nt, Human
ccccuaggacccacaggcagg

SEQ ID NO: 700562 - RNA, 24 nt, Human
ccccuaggacccacaggcagggcc

SEQ ID NO: 700563 - RNA, 21 nt, Human
cccugagucaggcaaaggcuc

SEQ ID NO: 700564 - RNA, 18 nt, Human
cccuggggaaaccccagg

SEQ ID NO: 700565 - RNA, 20 nt, Human
ccuaggacccacaggcaggg

SEQ ID NO: 700566 - RNA, 22 nt, Human
ccuauaaaccagagggaguggg

SEQ ID NO: 700567 - RNA, 21 nt, Human
ccuccugguagccaagggccc

SEQ ID NO: 700568 - RNA, 22 nt, Human
ccuggcugcaugucccaggacc

SEQ ID NO: 700569 - RNA, 20 nt, Human
cuggcacuggccuuggccac

SEQ ID NO: 700570 - RNA, 24 nt, Human
cuggcugcaugucccaggaccagc

SEQ ID NO: 700571 - RNA, 20 nt, Human
gaagcaaaggccacauuuau

SEQ ID NO: 700572 - RNA, 22 nt, Human
gagcugggacuaguggguuucu

SEQ ID NO: 700573 - RNA, 24 nt, Human
gagcugggacuaguggguuucuuc

SEQ ID NO: 700574 - RNA, 20 nt, Human
gaggaaggaagacugugaug

SEQ ID NO: 700575 - RNA, 19 nt, Human
gcugugcugcuucccaggg

SEQ ID NO: 700576 - RNA, 22 nt, Human
ggagagccaaaggggccccaag

SEQ ID NO: 700577 - RNA, 22 nt, Human
ggaggcucucuauguugccuga

SEQ ID NO: 700578 - RNA, 19 nt, Human
gggaguggagagagcugug

SEQ ID NO: 700579 - RNA, 21 nt, Human
gggaugggaucuugcccuggg

SEQ ID NO: 700580 - RNA, 22 nt, Human
ggggaugcaggcuugugggacu

SEQ ID NO: 700581 - RNA, 18 nt, Human
gucagaccaagcauagaa

SEQ ID NO: 700582 - RNA, 22 nt, Human
guggaagguaaugcuggcgaca

SEQ ID NO: 700583 - RNA, 22 nt, Human
uacugcccuggggaaaccccag

SEQ ID NO: 700584 - RNA, 18 nt, Human
uaguggguuucuucccug

SEQ ID NO: 700585 - RNA, 24 nt, Human
uaugagagcuucuucuccccacgg

SEQ ID NO: 700586 - RNA, 21 nt, Human
uauguugccugaggcuggcag

SEQ ID NO: 700587 - RNA, 23 nt, Human
ucagaccaagcauagaaagaaca

SEQ ID NO: 700588 - RNA, 21 nt, Human
ucaggcaaaggcucuuccugg

SEQ ID NO: 700589 - RNA, 22 nt, Human
ucauucaugagcaguguucuua

SEQ ID NO: 700590 - RNA, 20 nt, Human
ucccaacagagguggccugg

SEQ ID NO: 700591 - RNA, 18 nt, Human
ucccugccuccuuguggc

SEQ ID NO: 700592 - RNA, 19 nt, Human
uccugguagccaagggccc

SEQ ID NO: 700593 - RNA, 21 nt, Human
uccugugggucccaacagagg

SEQ ID NO: 700594 - RNA, 22 nt, Human
uccugugggucccaacagaggu

SEQ ID NO: 700595 - RNA, 20 nt, Human
ucuccuguuggcuagggagu

SEQ ID NO: 700596 - RNA, 20 nt, Human
ucugccccacacucugagcu

SEQ ID NO: 700597 - RNA, 25 nt, Human
ucugccccacacucugagcugcccu

SEQ ID NO: 700598 - RNA, 23 nt, Human
ucugucuguggcacguccaggag

SEQ ID NO: 700599 - RNA, 21 nt, Human
ugaaacgcuugaagaggaagg

SEQ ID NO: 700600 - RNA, 19 nt, Human
ugaaggugcaggccuugga

SEQ ID NO: 700601 - RNA, 23 nt, Human
ugagggagagccaaaggggcccc

SEQ ID NO: 700602 - RNA, 21 nt, Human
ugccaccccaggagcugggac

SEQ ID NO: 700603 - RNA, 18 nt, Human
uggaagguaaugcuggcg

SEQ ID NO: 700604 - RNA, 19 nt, Human
uggaagguaaugcuggcga

SEQ ID NO: 700605 - RNA, 23 nt, Human
uggcaguggugacccucagaaau

SEQ ID NO: 700606 - RNA, 19 nt, Human
uggccagcagccaggaggg

SEQ ID NO: 700607 - RNA, 23 nt, Human
uggccuggugcccagucucagcu

SEQ ID NO: 700608 - RNA, 21 nt, Human
ugggaugggaucuugcccugg

SEQ ID NO: 700609 - RNA, 21 nt, Human
ugggaugggaucuugcccugg

SEQ ID NO: 700610 - RNA, 23 nt, Human
ugggucccaacagagguggccug

SEQ ID NO: 700611 - RNA, 20 nt, Human
uggguuucuucccugccucc

SEQ ID NO: 700612 - RNA, 18 nt, Human
ugugaugggaugggaucu

SEQ ID NO: 700613 - RNA, 24 nt, Human
uguggcacguccaggagcugagcc

SEQ ID NO: 700614 - RNA, 19 nt, Human
uuggucucauggugcagaa

SEQ ID NO: 700615 - RNA, 19 nt, Human
aaaaacagcgucugccuuu

SEQ ID NO: 700616 - RNA, 18 nt, Human
aaccaagccacgggcccc

SEQ ID NO: 700617 - RNA, 22 nt, Human
agcgccaccgcaccgggagaga

SEQ ID NO: 700618 - RNA, 24 nt, Human
agggcgcccaccaggcgcucgaaa

SEQ ID NO: 700619 - RNA, 18 nt, Human
aucccucuucagccucca

SEQ ID NO: 700620 - RNA, 24 nt, Human
caaggggggcagacaccccaguca

SEQ ID NO: 700621 - RNA, 24 nt, Human
caccacgccgcccuccugcagggu

SEQ ID NO: 700622 - RNA, 23 nt, Human
cacccaggccugaggcccugugc

SEQ ID NO: 700623 - RNA, 24 nt, Human
cagacaccccagucagcccguguc

SEQ ID NO: 700624 - RNA, 22 nt, Human
cagccuccagagggggcggagg

SEQ ID NO: 700625 - RNA, 21 nt, Human
cagcggcagcuggcacagggc

SEQ ID NO: 700626 - RNA, 22 nt, Human
cagcuggcacagggccgacgcc

SEQ ID NO: 700627 - RNA, 21 nt, Human
cagggcccccaggaagucugg

SEQ ID NO: 700628 - RNA, 22 nt, Human
ccaccaggcgcucgaaacccga

SEQ ID NO: 700629 - RNA, 22 nt, Human
ccacgcgcagcggcagcuggca

SEQ ID NO: 700630 - RNA, 19 nt, Human
ccagagggggcggaggggg

SEQ ID NO: 700631 - RNA, 21 nt, Human
ccaggccugaggcccugugcu

SEQ ID NO: 700632 - RNA, 18 nt, Human
ccccaggaagucuggcag

SEQ ID NO: 700633 - RNA, 18 nt, Human
cccccccccaaggggggc

SEQ ID NO: 700634 - RNA, 18 nt, Human
ccccgggcccggacaccc

SEQ ID NO: 700635 - RNA, 20 nt, Human
cccgccccaggucccgcccc

SEQ ID NO: 700636 - RNA, 20 nt, Human
cccgggggauggaaguagcu

SEQ ID NO: 700637 - RNA, 23 nt, Human
ccugggaguccugacucuccucc

SEQ ID NO: 700638 - RNA, 23 nt, Human
ccugugcugcccccccccaaggg

SEQ ID NO: 700639 - RNA, 18 nt, Human
cgccccgggcccggacac

SEQ ID NO: 700640 - RNA, 26 nt, Human
cgcgcagcggcagcuggcacagggcc

SEQ ID NO: 700641 - RNA, 21 nt, Human
cggaaaagggcggguacggcg

SEQ ID NO: 700642 - RNA, 19 nt, Human
cggccacgcgcagcggcag

SEQ ID NO: 700643 - RNA, 21 nt, Human
cggcuccacaggucuacggcc

SEQ ID NO: 700644 - RNA, 22 nt, Human
cgggccgugcgccccgggcccg

SEQ ID NO: 700645 - RNA, 22 nt, Human
cggugcggaaaagggcggguac

SEQ ID NO: 700646 - RNA, 24 nt, Human
cguagcugccgggcgcccggcccu

SEQ ID NO: 700647 - RNA, 18 nt, Human
cgugcgccccgggcccgg

SEQ ID NO: 700648 - RNA, 23 nt, Human
cugugcuggguaguuugugcacu

SEQ ID NO: 700649 - RNA, 19 nt, Human
gaagggcccgggacacuug

SEQ ID NO: 700650 - RNA, 20 nt, Human
gaagggcccgggacacuugc

SEQ ID NO: 700651 - RNA, 23 nt, Human
gcccccaggaagucuggcaguug

SEQ ID NO: 700652 - RNA, 22 nt, Human
gcccggaacgcggggcgcgagg

SEQ ID NO: 700653 - RNA, 20 nt, Human
gcccugugcugccccccccc

SEQ ID NO: 700654 - RNA, 21 nt, Human
gccugaggcccugugcugccc

SEQ ID NO: 700655 - RNA, 18 nt, Human
gcgggccgugcgccccgg

SEQ ID NO: 700656 - RNA, 19 nt, Human
ggcaguugggagggcagug

SEQ ID NO: 700657 - RNA, 23 nt, Human
ggcgcgggaguccccgggggaug

SEQ ID NO: 700658 - RNA, 20 nt, Human
gggcagcacgcagcugagcg

SEQ ID NO: 700659 - RNA, 18 nt, Human
gggccccugcgcgcucag

SEQ ID NO: 700660 - RNA, 21 nt, Human
gggccccugcgcgcucaguuc

SEQ ID NO: 700661 - RNA, 20 nt, Human
gggcggagggggcugugcuu

SEQ ID NO: 700662 - RNA, 19 nt, Human
gggcggguacggcguccgg

SEQ ID NO: 700663 - RNA, 18 nt, Human
guccugacucuccuccua

SEQ ID NO: 700664 - RNA, 20 nt, Human
uaagucccgucccccgcccc

SEQ ID NO: 700665 - RNA, 20 nt, Human
ucagccuccagagggggcgg

SEQ ID NO: 700666 - RNA, 20 nt, Human
uccagagggggcggaggggg

SEQ ID NO: 700667 - RNA, 25 nt, Human
ucccccgccccaggucccgccccug

SEQ ID NO: 700668 - RNA, 21 nt, Human
ucccgccccuggucccacccc

SEQ ID NO: 700669 - RNA, 18 nt, Human
ucccggcgcgggaguccc

SEQ ID NO: 700670 - RNA, 21 nt, Human
ucgcugcacagcgccaccgca

SEQ ID NO: 700671 - RNA, 23 nt, Human
ucuaggugccagguggcacccag

SEQ ID NO: 700672 - RNA, 20 nt, Human
ugaaaccaagccacgggccc

SEQ ID NO: 700673 - RNA, 21 nt, Human
ugcuggguaguuugugcacuc

SEQ ID NO: 700674 - RNA, 21 nt, Human
uggaaucccucuucagccucc

SEQ ID NO: 700675 - RNA, 19 nt, Human
ugggagggcagugugaaga

SEQ ID NO: 700676 - RNA, 24 nt, Human
ugucuguggguggcaggggcuggg

SEQ ID NO: 700677 - RNA, 18 nt, Human
uucuaggugccagguggc

SEQ ID NO: 700678 - RNA, 21 nt, Human
uucuaggugccagguggcacc

SEQ ID NO: 700679 - RNA, 20 nt, Human
uuuuuuuuuuuuuugggcca

SEQ ID NO: 700680 - RNA, 24 nt, Human
uuuuuuuuuuuuuuuuuuuuuggg

SEQ ID NO: 700681 - RNA, 19 nt, Human
aagcacacugcucuuucug

SEQ ID NO: 700682 - RNA, 24 nt, Human
aagcacacugcucuuucuggaguu

SEQ ID NO: 700683 - RNA, 23 nt, Human
acagguccacgaucacgucgcgc

SEQ ID NO: 700684 - RNA, 21 nt, Human
accaccuggagccaaaagccu

SEQ ID NO: 700685 - RNA, 22 nt, Human
acccacccaccccacccccaac

SEQ ID NO: 700686 - RNA, 23 nt, Human
acccacccaccccacccccaacc

SEQ ID NO: 700687 - RNA, 22 nt, Human
acccaccccacccccaaccccc

SEQ ID NO: 700688 - RNA, 20 nt, Human
accccacccccaacccccac

SEQ ID NO: 700689 - RNA, 22 nt, Human
accccacccccaacccccacug

SEQ ID NO: 700690 - RNA, 19 nt, Human
acccccaacccccacuguc

SEQ ID NO: 700691 - RNA, 18 nt, Human
agacacccgggacugcgg

SEQ ID NO: 700692 - RNA, 21 nt, Human
agcagcagcgggcgcggggca

SEQ ID NO: 700693 - RNA, 19 nt, Human
agccaaaagccucuuuucc

SEQ ID NO: 700694 - RNA, 21 nt, Human
agccuggacugaagcauaagc

SEQ ID NO: 700695 - RNA, 18 nt, Human
agcucuaggcggcucugc

SEQ ID NO: 700696 - RNA, 23 nt, Human
cacagcucuaggcggcucugccu

SEQ ID NO: 700697 - RNA, 22 nt, Human
caccaggcgccgcugcgccucc

SEQ ID NO: 700698 - RNA, 31 nt, Human
cacccacccaccccacccccaacccccacuu

SEQ ID NO: 700699 - RNA, 22 nt, Human
cacccaccccacccccaacccc

SEQ ID NO: 700700 - RNA, 21 nt, Human
caccccacccccaacccccac

SEQ ID NO: 700701 - RNA, 20 nt, Human
cacccccaacccccacuguc

SEQ ID NO: 700702 - RNA, 24 nt, Human
cagaacaacacccaguagggugaa

SEQ ID NO: 700703 - RNA, 18 nt, Human
cagaguccucucucccuc

SEQ ID NO: 700704 - RNA, 21 nt, Human
cagagugggaaagggaauccc

SEQ ID NO: 700705 - RNA, 21 nt, Human
cagcacccacccaccccaccc

SEQ ID NO: 700706 - RNA, 23 nt, Human
cagcacccacccaccccaccccc

SEQ ID NO: 700707 - RNA, 19 nt, Human
cagcgggcgcggggcagcg

SEQ ID NO: 700708 - RNA, 25 nt, Human
cagcgggcgcggggcagcguggagc

SEQ ID NO: 700709 - RNA, 20 nt, Human
cagggucgaaggcucauucc

SEQ ID NO: 700710 - RNA, 22 nt, Human
caggugagggccagaacaacac

SEQ ID NO: 700711 - RNA, 20 nt, Human
caguguccguugcguugcgg

SEQ ID NO: 700712 - RNA, 20 nt, Human
ccaaaagccucuuuuccuaa

SEQ ID NO: 700713 - RNA, 20 nt, Human
ccaaccucuccagccuggac

SEQ ID NO: 700714 - RNA, 22 nt, Human
ccacccaccccacccccaaccc

SEQ ID NO: 700715 - RNA, 23 nt, Human
ccaccgccagcacccacccaccc

SEQ ID NO: 700716 - RNA, 20 nt, Human
ccacggcagcgggcccacgc

SEQ ID NO: 700717 - RNA, 21 nt, Human
ccagaguccucucucccucug

SEQ ID NO: 700718 - RNA, 18 nt, Human
ccagcacccacccacccc

SEQ ID NO: 700719 - RNA, 21 nt, Human
ccagcacccacccaccccacc

SEQ ID NO: 700720 - RNA, 28 nt, Human
ccagcacccacccaccccacccccaacc

SEQ ID NO: 700721 - RNA, 20 nt, Human
cccacccaccccacccccaa

SEQ ID NO: 700722 - RNA, 18 nt, Human
cccaccccacccccaacc

SEQ ID NO: 700723 - RNA, 22 nt, Human
cccaccccacccccaaccccca

SEQ ID NO: 700724 - RNA, 23 nt, Human
cccaccccacccccaacccccac

SEQ ID NO: 700725 - RNA, 18 nt, Human
cccacccccaacccccac

SEQ ID NO: 700726 - RNA, 27 nt, Human
cccacccccaacccccacuguccugac

SEQ ID NO: 700727 - RNA, 19 nt, Human
cccaccgccagcacccacc

SEQ ID NO: 700728 - RNA, 19 nt, Human
cccacgcgcgccacgugcc

SEQ ID NO: 700729 - RNA, 19 nt, Human
ccccaacccccacuguccu

SEQ ID NO: 700730 - RNA, 19 nt, Human
ccccaaggagguuuucucu

SEQ ID NO: 700731 - RNA, 18 nt, Human
ccccaaggcggccccagc

SEQ ID NO: 700732 - RNA, 20 nt, Human
ccccacccccaacccccacu

SEQ ID NO: 700733 - RNA, 24 nt, Human
ccccaccgccagcacccacccacc

SEQ ID NO: 700734 - RNA, 20 nt, Human
ccccaccgccucacccuccu

SEQ ID NO: 700735 - RNA, 21 nt, Human
ccccacuguccugaccaccug

SEQ ID NO: 700736 - RNA, 20 nt, Human
cccccaccgccucacccucc

SEQ ID NO: 700737 - RNA, 20 nt, Human
cccccugcaaucccccaccg

SEQ ID NO: 700738 - RNA, 22 nt, Human
ccccugcaaucccccaccgccu

SEQ ID NO: 700739 - RNA, 23 nt, Human
ccccugcaaucccccaccgccuc

SEQ ID NO: 700740 - RNA, 18 nt, Human
cccgccgcccagcgcugc

SEQ ID NO: 700741 - RNA, 18 nt, Human
cccgccgcccagcgcugc

SEQ ID NO: 700742 - RNA, 19 nt, Human
cccgcgcuacgcgcguccg

SEQ ID NO: 700743 - RNA, 27 nt, Human
cccuaccccggccccaaccucuccagc

SEQ ID NO: 700744 - RNA, 19 nt, Human
ccgcccagagccacggcag

SEQ ID NO: 700745 - RNA, 18 nt, Human
ccgccgcccagcgcugcc

SEQ ID NO: 700746 - RNA, 22 nt, Human
ccgcgccccaaggcggccccag

SEQ ID NO: 700747 - RNA, 22 nt, Human
ccgcgcuacgcgcguccgcgcc

SEQ ID NO: 700748 - RNA, 25 nt, Human
ccuccccucccacagguccacgauc

SEQ ID NO: 700749 - RNA, 19 nt, Human
ccugaccaccuggagccaa

SEQ ID NO: 700750 - RNA, 22 nt, Human
ccugcgcugccgcgccccaagg

SEQ ID NO: 700751 - RNA, 19 nt, Human
cgccccaaggcggccccag

SEQ ID NO: 700752 - RNA, 21 nt, Human
cgcccccugcaaucccccacc

SEQ ID NO: 700753 - RNA, 22 nt, Human
cgcccgccgcccagcgcugccc

SEQ ID NO: 700754 - RNA, 19 nt, Human
cgcgcccgccgcccagcgc

SEQ ID NO: 700755 - RNA, 25 nt, Human
cgcugaccgggcgaaggucggcgcc

SEQ ID NO: 700756 - RNA, 24 nt, Human
cguggagcagggcgagcaggggcg

SEQ ID NO: 700757 - RNA, 19 nt, Human
cucauuccgggguuccagc

SEQ ID NO: 700758 - RNA, 21 nt, Human
cucccaccaggcgccgcugcg

SEQ ID NO: 700759 - RNA, 19 nt, Human
cuccugccucccuaccccg

SEQ ID NO: 700760 - RNA, 20 nt, Human
cugaaguaagcgagcagcag

SEQ ID NO: 700761 - RNA, 21 nt, Human
cugaccaccuggagccaaaag

SEQ ID NO: 700762 - RNA, 24 nt, Human
cugaccaccuggagccaaaagccu

SEQ ID NO: 700763 - RNA, 22 nt, Human
cugcacagcucuaggcggcucu

SEQ ID NO: 700764 - RNA, 24 nt, Human
cuggccgcgcugggcccgggccug

SEQ ID NO: 700765 - RNA, 18 nt, Human
gagcagcagcagcgggcg

SEQ ID NO: 700766 - RNA, 21 nt, Human
gagcagcagcagcgggcgcgg

SEQ ID NO: 700767 - RNA, 26 nt, Human
gagcagcagcagcgggcgcggggcag

SEQ ID NO: 700768 - RNA, 20 nt, Human
gcagcagcagcgggcgcggg

SEQ ID NO: 700769 - RNA, 22 nt, Human
gcagcguggagcagggcgagca

SEQ ID NO: 700770 - RNA, 20 nt, Human
gccacgugccuccccuccca

SEQ ID NO: 700771 - RNA, 29 nt, Human
gccccaaccucuccagccuggacugaagg

SEQ ID NO: 700772 - RNA, 25 nt, Human
gcccccaaggagguuuucucucagc

SEQ ID NO: 700773 - RNA, 18 nt, Human
gccgcuccacagcagcag

SEQ ID NO: 700774 - RNA, 22 nt, Human
gccucccuaccccggccccaac

SEQ ID NO: 700775 - RNA, 18 nt, Human
gccugaagguggguggca

SEQ ID NO: 700776 - RNA, 19 nt, Human
gcgcggcgcgggggucggg

SEQ ID NO: 700777 - RNA, 18 nt, Human
gcgcugggcccgggccug

SEQ ID NO: 700778 - RNA, 22 nt, Human
gcgggcgcggggcagcguggag

SEQ ID NO: 700779 - RNA, 28 nt, Human
gcugggcccgggccugacugugggcggc

SEQ ID NO: 700780 - RNA, 22 nt, Human
ggaaagggaaucccuggccccc

SEQ ID NO: 700781 - RNA, 18 nt, Human
ggccgcagacacccggga

SEQ ID NO: 700782 - RNA, 22 nt, Human
ggcgcggcgcgggggucggggc

SEQ ID NO: 700783 - RNA, 20 nt, Human
ggcggcucugccugcgcugc

SEQ ID NO: 700784 - RNA, 26 nt, Human
gggcgagcaggggcgcggcgcggggg

SEQ ID NO: 700785 - RNA, 23 nt, Human
gggcgcggggcagcguggagcag

SEQ ID NO: 700786 - RNA, 21 nt, Human
gguggagcucugcucaaccua

SEQ ID NO: 700787 - RNA, 22 nt, Human
guccagaguccucucucccucu

SEQ ID NO: 700788 - RNA, 26 nt, Human
uaccccggccccaaccucuccagccu

SEQ ID NO: 700789 - RNA, 23 nt, Human
ucagccgcccccugcaauccccc

SEQ ID NO: 700790 - RNA, 29 nt, Human
ucagucaagggaaaguaugaggaggaaga

SEQ ID NO: 700791 - RNA, 30 nt, Human
ucagucaagggaaaguaugaggaggaagag

SEQ ID NO: 700792 - RNA, 23 nt, Human
uccacgaucacgucgcgcccgcc

SEQ ID NO: 700793 - RNA, 24 nt, Human
uccacgaucacgucgcgcccgccg

SEQ ID NO: 700794 - RNA, 21 nt, Human
ucccccaccgccucacccucc

SEQ ID NO: 700795 - RNA, 25 nt, Human
ucccccaccgccucacccuccuuca

SEQ ID NO: 700796 - RNA, 20 nt, Human
ucccccaucagaacaggggu

SEQ ID NO: 700797 - RNA, 18 nt, Human
ucccucuggccagagccu

SEQ ID NO: 700798 - RNA, 19 nt, Human
uccgcgccgcccagagcca

SEQ ID NO: 700799 - RNA, 21 nt, Human
uccgcgccgcccagagccacg

SEQ ID NO: 700800 - RNA, 23 nt, Human
uccgcgccgcccagagccacggu

SEQ ID NO: 700801 - RNA, 18 nt, Human
uccguugcguugcggccg

SEQ ID NO: 700802 - RNA, 19 nt, Human
uccguugcguugcggccgc

SEQ ID NO: 700803 - RNA, 19 nt, Human
uccuagguccagaguccuc

SEQ ID NO: 700804 - RNA, 21 nt, Human
ucgcgcagcaggcgguagcgc

SEQ ID NO: 700805 - RNA, 20 nt, Human
ucucucagccgcccccugcc

SEQ ID NO: 700806 - RNA, 19 nt, Human
ugacauggcuccugccucc

SEQ ID NO: 700807 - RNA, 22 nt, Human
ugaccgggcgaaggucggcgcc

SEQ ID NO: 700808 - RNA, 21 nt, Human
ugaggcagggaaugcggcuuc

SEQ ID NO: 700809 - RNA, 21 nt, Human
ugcaauuagggcucccggaac

SEQ ID NO: 700810 - RNA, 18 nt, Human
ugcccugcucccgcgcua

SEQ ID NO: 700811 - RNA, 23 nt, Human
ugccucccuaccccggccccaac

SEQ ID NO: 700812 - RNA, 23 nt, Human
ugcgaagggccgcgcguccagcg

SEQ ID NO: 700813 - RNA, 18 nt, Human
uggcagggccuugcugug

SEQ ID NO: 700814 - RNA, 21 nt, Human
uggcuccugccucccuacccc

SEQ ID NO: 700815 - RNA, 23 nt, Human
ugguggccucugcgaagggcccc

SEQ ID NO: 700816 - RNA, 22 nt, Human
uuccuagguccagaguccucuc

SEQ ID NO: 700817 - RNA, 21 nt, Human
uuucuuaguuugucauguuug

SEQ ID NO: 700818 - RNA, 21 nt, Human
uuuuucuuaguuugucauguu

SEQ ID NO: 700819 - RNA, 25 nt, Human
aaaaagaggcagaauucaauuucua

SEQ ID NO: 700820 - RNA, 18 nt, Human
aaagugcugggauuacaa

SEQ ID NO: 700821 - RNA, 24 nt, Human
aaagugcugggauuacaagcauga

SEQ ID NO: 700822 - RNA, 18 nt, Human
aagcaccugccaccaugg

SEQ ID NO: 700823 - RNA, 22 nt, Human
aaguagcugggauuacaagcac

SEQ ID NO: 700824 - RNA, 25 nt, Human
aaguagcugggauuacaagcaccug

SEQ ID NO: 700825 - RNA, 19 nt, Human
aagugcugggauuacaagc

SEQ ID NO: 700826 - RNA, 21 nt, Human
aagugcugggauuacaagcau

SEQ ID NO: 700827 - RNA, 26 nt, Human
aagugcugggauuacaagcaugagcc

SEQ ID NO: 700828 - RNA, 22 nt, Human
aaugagggaaaauaaagaggaa

SEQ ID NO: 700829 - RNA, 24 nt, Human
acaggguuucagcauauuggccag

SEQ ID NO: 700830 - RNA, 21 nt, Human
accucagccuaccaaagugcu

SEQ ID NO: 700831 - RNA, 25 nt, Human
agcaauccccuaccuagguauuuau

SEQ ID NO: 700832 - RNA, 24 nt, Human
agcugggauuacaagcaccugcca

SEQ ID NO: 700833 - RNA, 19 nt, Human
aggagcacagaaaugucac

SEQ ID NO: 700834 - RNA, 25 nt, Human
aggcuggagugcaguggcacaaucu

SEQ ID NO: 700835 - RNA, 19 nt, Human
agugcaaccucugccuucc

SEQ ID NO: 700836 - RNA, 21 nt, Human
agugcaguggcacaaucucag

SEQ ID NO: 700837 - RNA, 24 nt, Human
agugcaguggcacaaucucagcuc

SEQ ID NO: 700838 - RNA, 24 nt, Human
agugcugggauuacaagcaugagc

SEQ ID NO: 700839 - RNA, 20 nt, Human
augagccaccacgccuggcc

SEQ ID NO: 700840 - RNA, 23 nt, Human
augaggcagaagaauggcuaaaa

SEQ ID NO: 700841 - RNA, 24 nt, Human
augaggcagaagaauggcuaaaau

SEQ ID NO: 700842 - RNA, 25 nt, Human
auggcccagcaauccccuaccuagg

SEQ ID NO: 700843 - RNA, 18 nt, Human
auggugaugguaggagca

SEQ ID NO: 700844 - RNA, 21 nt, Human
auuacaagcaugagccaccac

SEQ ID NO: 700845 - RNA, 24 nt, Human
auuuuuguaauuuuaguagagaca

SEQ ID NO: 700846 - RNA, 24 nt, Human
caaagugcugggauuacaagcaug

SEQ ID NO: 700847 - RNA, 22 nt, Human
caagugauucuccugccucagc

SEQ ID NO: 700848 - RNA, 27 nt, Human
caagugauucuccugccucagccuccc

SEQ ID NO: 700849 - RNA, 24 nt, Human
caccauggccggcuaauuuuugua

SEQ ID NO: 700850 - RNA, 23 nt, Human
cacccaccucagccuaccaaagu

SEQ ID NO: 700851 - RNA, 24 nt, Human
caccucagccuaccaaagugcugg

SEQ ID NO: 700852 - RNA, 25 nt, Human
caccuucgggaccuuaauucucuaa

SEQ ID NO: 700853 - RNA, 20 nt, Human
cacuacucuggaaacaagau

SEQ ID NO: 700854 - RNA, 24 nt, Human
cagcauauuggccaggcuggacuc

SEQ ID NO: 700855 - RNA, 24 nt, Human
caggguuucagcauauuggccagg

SEQ ID NO: 700856 - RNA, 24 nt, Human
cauauuggccaggcuggacucgaa

SEQ ID NO: 700857 - RNA, 19 nt, Human
ccaaagugcugggauuaca

SEQ ID NO: 700858 - RNA, 22 nt, Human
ccaaagugcugggauuacaagc

SEQ ID NO: 700859 - RNA, 24 nt, Human
ccaaagugcugggauuacaagcau

SEQ ID NO: 700860 - RNA, 21 nt, Human
ccaccuucgggaccuuaauuc

SEQ ID NO: 700861 - RNA, 19 nt, Human
cccaaguagcugggauuac

SEQ ID NO: 700862 - RNA, 24 nt, Human
ccugaccucaggugauccacccac

SEQ ID NO: 700863 - RNA, 23 nt, Human
ccugccucagccucccaaguagc

SEQ ID NO: 700864 - RNA, 22 nt, Human
ccugguucaagugauucuccug

SEQ ID NO: 700865 - RNA, 24 nt, Human
ccuuccugguucaagugauucucc

SEQ ID NO: 700866 - RNA, 24 nt, Human
cucagccucccaaguagcugggau

SEQ ID NO: 700867 - RNA, 25 nt, Human
cuccugccucagccucccaaguagc

SEQ ID NO: 700868 - RNA, 20 nt, Human
cucuuguugcccaggcugga

SEQ ID NO: 700869 - RNA, 23 nt, Human
cugccucagccucccaaguagcu

SEQ ID NO: 700870 - RNA, 19 nt, Human
cuuccugguucaagugauu

SEQ ID NO: 700871 - RNA, 24 nt, Human
cuuguugcccaggcuggagugcag

SEQ ID NO: 700872 - RNA, 24 nt, Human
gaaaauaaagaggaaauaguugac

SEQ ID NO: 700873 - RNA, 21 nt, Human
gaaaugucacuacucuggaaa

SEQ ID NO: 700874 - RNA, 24 nt, Human
gaccucaggugauccacccaccuc

SEQ ID NO: 700875 - RNA, 18 nt, Human
gauuacaagcaugagcca

SEQ ID NO: 700876 - RNA, 21 nt, Human
gauucuccugccucagccucc

SEQ ID NO: 700877 - RNA, 19 nt, Human
gcccaggcuggagugcagu

SEQ ID NO: 700878 - RNA, 21 nt, Human
gcucuuguugcccaggcugga

SEQ ID NO: 700879 - RNA, 24 nt, Human
gcucuuguugcccaggcuggagug

SEQ ID NO: 700880 - RNA, 23 nt, Human
gcuggacucgaacuccugaccuc

SEQ ID NO: 700881 - RNA, 19 nt, Human
gcuggagugcaguggcaca

SEQ ID NO: 700882 - RNA, 19 nt, Human
ggauuacaagcaugagcca

SEQ ID NO: 700883 - RNA, 24 nt, Human
ggcuggacucgaacuccugaccuc

SEQ ID NO: 700884 - RNA, 21 nt, Human
gguucaagugauucuccugcc

SEQ ID NO: 700885 - RNA, 18 nt, Human
guagcugggauuacaagc

SEQ ID NO: 700886 - RNA, 21 nt, Human
gugauccacccaccucagccu

SEQ ID NO: 700887 - RNA, 24 nt, Human
gugauucuccugccucagccuccc

SEQ ID NO: 700888 - RNA, 24 nt, Human
gugcaaccucugccuuccugguuc

SEQ ID NO: 700889 - RNA, 24 nt, Human
uaauuuuuguaauuuuaguagaga

SEQ ID NO: 700890 - RNA, 22 nt, Human
uacaagcaugagccaccacgcc

SEQ ID NO: 700891 - RNA, 27 nt, Human
uaccagguauuuugcauuauuuacccu

SEQ ID NO: 700892 - RNA, 18 nt, Human
uaggagcacagaaauguc

SEQ ID NO: 700893 - RNA, 19 nt, Human
uaggagcacagaaauguca

SEQ ID NO: 700894 - RNA, 20 nt, Human
uaguagagacaggguuucag

SEQ ID NO: 700895 - RNA, 24 nt, Human
uaguagagacaggguuucagcaua

SEQ ID NO: 700896 - RNA, 20 nt, Human
uauggcccagcaauccccua

SEQ ID NO: 700897 - RNA, 19 nt, Human
ucaagugauucuccugccu

SEQ ID NO: 700898 - RNA, 18 nt, Human
ucagagccaggcugccac

SEQ ID NO: 700899 - RNA, 20 nt, Human
ucagccucccaaguagcugg

SEQ ID NO: 700900 - RNA, 20 nt, Human
ucaggugauccacccaccuc

SEQ ID NO: 700901 - RNA, 19 nt, Human
ucagugcaaccucugccuu

SEQ ID NO: 700902 - RNA, 24 nt, Human
ucagugcaaccucugccuuccugg

SEQ ID NO: 700903 - RNA, 21 nt, Human
uccacccaccucagccuacca

SEQ ID NO: 700904 - RNA, 20 nt, Human
uccugguucaagugauucuc

SEQ ID NO: 700905 - RNA, 23 nt, Human
uccugguucaagugauucuccuc

SEQ ID NO: 700906 - RNA, 23 nt, Human
uccugguucaagugauucuccug

SEQ ID NO: 700907 - RNA, 22 nt, Human
ucuuguugcccaggcuggagug

SEQ ID NO: 700908 - RNA, 19 nt, Human
ugaagauuuguaugugaau

SEQ ID NO: 700909 - RNA, 21 nt, Human
ugaccucaggugauccaccca

SEQ ID NO: 700910 - RNA, 24 nt, Human
ugaccucaggugauccacccaccu

SEQ ID NO: 700911 - RNA, 22 nt, Human
ugagggaaaauaaagaggaaau

SEQ ID NO: 700912 - RNA, 20 nt, Human
ugauucuccugccucagccu

SEQ ID NO: 700913 - RNA, 23 nt, Human
ugcaaccucugccuuccugguuc

SEQ ID NO: 700914 - RNA, 18 nt, Human
ugcccaggcuggagugca

SEQ ID NO: 700915 - RNA, 21 nt, Human
ugcccaggcuggagugcagug

SEQ ID NO: 700916 - RNA, 22 nt, Human
ugcccaggcuggagugcagugg

SEQ ID NO: 700917 - RNA, 24 nt, Human
ugcccaggcuggagugcaguggca

SEQ ID NO: 700918 - RNA, 24 nt, Human
ugccucagccucccaaguagcugg

SEQ ID NO: 700919 - RNA, 22 nt, Human
ugccuuccugguucaagugauu

SEQ ID NO: 700920 - RNA, 24 nt, Human
ugcucuuguugcccaggcuggagu

SEQ ID NO: 700921 - RNA, 25 nt, Human
ugcugggauuacaagcaugagccac

SEQ ID NO: 700922 - RNA, 18 nt, Human
uggagugcaguggcacaa

SEQ ID NO: 700923 - RNA, 23 nt, Human
uggagugcaguggcacaaucuca

SEQ ID NO: 700924 - RNA, 24 nt, Human
uggagugcaguggcacaaucucag

SEQ ID NO: 700925 - RNA, 18 nt, Human
uggcacaaucucagcuca

SEQ ID NO: 700926 - RNA, 24 nt, Human
uggccaggcuggacucgaacuccu

SEQ ID NO: 700927 - RNA, 22 nt, Human
ugggauuacaagcaccugccac

SEQ ID NO: 700928 - RNA, 24 nt, Human
ugggauuacaagcaccugccacca

SEQ ID NO: 700929 - RNA, 25 nt, Human
ugggauuacaagcaccugccaccau

SEQ ID NO: 700930 - RNA, 22 nt, Human
ugggauuacaagcaugagccac

SEQ ID NO: 700931 - RNA, 23 nt, Human
ugggauuacaagcaugagccacc

SEQ ID NO: 700932 - RNA, 24 nt, Human
ugggauuacaagcaugagccacca

SEQ ID NO: 700933 - RNA, 24 nt, Human
ugggauuacaagcaugagccacca

SEQ ID NO: 700934 - RNA, 20 nt, Human
uguuuugcaucuuucaauga

SEQ ID NO: 700935 - RNA, 24 nt, Human
uuaguagagacaggguuucagcau

SEQ ID NO: 700936 - RNA, 21 nt, Human
uucaagugauucuccugccuc

SEQ ID NO: 700937 - RNA, 23 nt, Human
uucaagugauucuccugccucag

SEQ ID NO: 700938 - RNA, 24 nt, Human
uucaagugauucuccugccucagc

SEQ ID NO: 700939 - RNA, 24 nt, Human
uugcccaggcuggagugcaguggc

SEQ ID NO: 700940 - RNA, 23 nt, Human
uugcucuuguugcccaggcugga

SEQ ID NO: 700941 - RNA, 22 nt, Human
uuuaagaaaugaggcagaagaa

SEQ ID NO: 700942 - RNA, 22 nt, Human
uuugcauuauuuacccuuucug

SEQ ID NO: 700943 - RNA, 24 nt, Human
uuugcucuuguugcccaggcugga

SEQ ID NO: 700944 - RNA, 24 nt, Human
uuuugcucuuguugcccaggcugg

SEQ ID NO: 700945 - RNA, 20 nt, Human
uuuuuguaauuuuaguagag

SEQ ID NO: 700946 - RNA, 19 nt, Human
aaccuccuccuccuccucc

SEQ ID NO: 700947 - RNA, 18 nt, Human
aaggcugaaaauuacacu

SEQ ID NO: 700948 - RNA, 24 nt, Human
aaggugcugguauuacaggcguga

SEQ ID NO: 700949 - RNA, 19 nt, Human
aaguccaggucuggaguuc

SEQ ID NO: 700950 - RNA, 24 nt, Human
accauauuggccaggcuggucuug

SEQ ID NO: 700951 - RNA, 19 nt, Human
acccaggcuggagugcagu

SEQ ID NO: 700952 - RNA, 19 nt, Human
accuccuccuccuccuccc

SEQ ID NO: 700953 - RNA, 20 nt, Human
accuccuccuccuccucccg

SEQ ID NO: 700954 - RNA, 24 nt, Human
acucgaguagcugggauuauaggc

SEQ ID NO: 700955 - RNA, 20 nt, Human
acuggguuucaccauauugg

SEQ ID NO: 700956 - RNA, 24 nt, Human
acuggguuucaccauauuggccag

SEQ ID NO: 700957 - RNA, 18 nt, Human
acuucugaaaacaucaug

SEQ ID NO: 700958 - RNA, 18 nt, Human
acuuugucacccaggcug

SEQ ID NO: 700959 - RNA, 25 nt, Human
acuuugucacccaggcuggagugca

SEQ ID NO: 700960 - RNA, 23 nt, Human
agccgaguguguuuccuucucag

SEQ ID NO: 700961 - RNA, 23 nt, Human
aggcagugaguucccaaauggag

SEQ ID NO: 700962 - RNA, 23 nt, Human
aggcgugagccacugugcucggc

SEQ ID NO: 700963 - RNA, 25 nt, Human
aggcuggagugcagugccgcuaucu

SEQ ID NO: 700964 - RNA, 19 nt, Human
aguagcugggauuauaggc

SEQ ID NO: 700965 - RNA, 21 nt, Human
aguagcugggauuauaggcau

SEQ ID NO: 700966 - RNA, 23 nt, Human
aguauuuuugccaagacagccuu

SEQ ID NO: 700967 - RNA, 20 nt, Human
agugaguucccaaauggagu

SEQ ID NO: 700968 - RNA, 24 nt, Human
agugcagugccgcuaucucggcuc

SEQ ID NO: 700969 - RNA, 23 nt, Human
auauuggccaggcuggucuugaa

SEQ ID NO: 700970 - RNA, 21 nt, Human
auggaguacgucacugugccc

SEQ ID NO: 700971 - RNA, 18 nt, Human
auuacaggcgugagccac

SEQ ID NO: 700972 - RNA, 20 nt, Human
auuacaggcgugagccacug

SEQ ID NO: 700973 - RNA, 21 nt, Human
auucuuauuccucauuuuaag

SEQ ID NO: 700974 - RNA, 21 nt, Human
caccauauuggccaggcuggu

SEQ ID NO: 700975 - RNA, 24 nt, Human
caccauauuggccaggcuggucuu

SEQ ID NO: 700976 - RNA, 27 nt, Human
caccauauuggccaggcuggucuugaa

SEQ ID NO: 700977 - RNA, 21 nt, Human
cacugugcucggcccuguuuc

SEQ ID NO: 700978 - RNA, 24 nt, Human
cacuuugucacccaggcuggagug

SEQ ID NO: 700979 - RNA, 24 nt, Human
cauauuggccaggcuggucuugaa

SEQ ID NO: 700980 - RNA, 21 nt, Human
caugccuagcuaauuuuugua

SEQ ID NO: 700981 - RNA, 23 nt, Human
cccggguucaugcaauucuccug

SEQ ID NO: 700982 - RNA, 24 nt, Human
ccucccggguucaugcaauucucc

SEQ ID NO: 700983 - RNA, 18 nt, Human
ccugaccucaagugaucc

SEQ ID NO: 700984 - RNA, 21 nt, Human
ccugaccucaagugauccgcc

SEQ ID NO: 700985 - RNA, 23 nt, Human
ccugaccucaagugauccgccug

SEQ ID NO: 700986 - RNA, 24 nt, Human
ccugccucaggcacucgaguagcu

SEQ ID NO: 700987 - RNA, 24 nt, Human
cuaaggugcugguauuacaggcgu

SEQ ID NO: 700988 - RNA, 19 nt, Human
cucacugcaaccuccuccu

SEQ ID NO: 700989 - RNA, 24 nt, Human
cucacuuugucacccaggcuggag

SEQ ID NO: 700990 - RNA, 22 nt, Human
cucauuuuaaguauuucuguuu

SEQ ID NO: 700991 - RNA, 21 nt, Human
cucccggguucaugcaauucu

SEQ ID NO: 700992 - RNA, 26 nt, Human
cuccugaccucaagugauccgccugc

SEQ ID NO: 700993 - RNA, 23 nt, Human
cucgaguagcugggauuauaggc

SEQ ID NO: 700994 - RNA, 24 nt, Human
cucgaguagcugggauuauaggca

SEQ ID NO: 700995 - RNA, 23 nt, Human
cuggcucagauggucuuggcccu

SEQ ID NO: 700996 - RNA, 23 nt, Human
cuggggguuccgcggcuuccucc

SEQ ID NO: 700997 - RNA, 24 nt, Human
cuggguuucaccauauuggccagg

SEQ ID NO: 700998 - RNA, 24 nt, Human
cugugcccagccgaguguguuucc

SEQ ID NO: 700999 - RNA, 24 nt, Human
gaccucaagugauccgccugccuc

SEQ ID NO: 701000 - RNA, 22 nt, Human
gaguagcugggauuauaggcau

SEQ ID NO: 701001 - RNA, 24 nt, Human
gaguagcugggauuauaggcaugc

SEQ ID NO: 701002 - RNA, 18 nt, Human
gauuauaggcaugcgcca

SEQ ID NO: 701003 - RNA, 29 nt, Human
gcaaccuccuccuccuccucccggguucc

SEQ ID NO: 701004 - RNA, 19 nt, Human
gccacugugcucggcccug

SEQ ID NO: 701005 - RNA, 22 nt, Human
gccuagcuaauuuuuguauuuu

SEQ ID NO: 701006 - RNA, 20 nt, Human
gcucacugcaaccuccuccu

SEQ ID NO: 701007 - RNA, 22 nt, Human
gcucacugcaaccuccuccucc

SEQ ID NO: 701008 - RNA, 23 nt, Human
gcuggucuugaacuccugaccuc

SEQ ID NO: 701009 - RNA, 24 nt, Human
ggauuauaggcaugcgccaucaug

SEQ ID NO: 701010 - RNA, 24 nt, Human
ggcuggucuugaacuccugaccuc

SEQ ID NO: 701011 - RNA, 21 nt, Human
ggguuucaccauauuggccag

SEQ ID NO: 701012 - RNA, 19 nt, Human
ggucuugaacuccugaccu

SEQ ID NO: 701013 - RNA, 18 nt, Human
guagcugggauuauaggc

SEQ ID NO: 701014 - RNA, 20 nt, Human
guagcugggauuauaggcau

SEQ ID NO: 701015 - RNA, 21 nt, Human
gugcugguauuacaggcguga

SEQ ID NO: 701016 - RNA, 21 nt, Human
uaaggugcugguauuacaggc

SEQ ID NO: 701017 - RNA, 24 nt, Human
uaauuuuuguauuuuuaguagaga

SEQ ID NO: 701018 - RNA, 22 nt, Human
uacaggcgugagccacugugcu

SEQ ID NO: 701019 - RNA, 19 nt, Human
uaguagagacuggguuuca

SEQ ID NO: 701020 - RNA, 24 nt, Human
uaguagagacuggguuucaccaua

SEQ ID NO: 701021 - RNA, 24 nt, Human
ucacaauuuuuuuuuuuuuuuuuu

SEQ ID NO: 701022 - RNA, 23 nt, Human
ucacccaggcuggagugcagugc

SEQ ID NO: 701023 - RNA, 18 nt, Human
ucacugcaaccuccuccc

SEQ ID NO: 701024 - RNA, 19 nt, Human
ucacugcaaccuccuccuc

SEQ ID NO: 701025 - RNA, 21 nt, Human
ucacugcaaccuccuccuccu

SEQ ID NO: 701026 - RNA, 21 nt, Human
ucacugcaaccuccuccuccu

SEQ ID NO: 701027 - RNA, 31 nt, Human
ucacugcaaccuccuccuccuccucccgggg

SEQ ID NO: 701028 - RNA, 24 nt, Human
ucacuuugucacccaggcuggagu

SEQ ID NO: 701029 - RNA, 21 nt, Human
ucccggguucaugcaauucuc

SEQ ID NO: 701030 - RNA, 24 nt, Human
ucccggguucaugcaauucuccug

SEQ ID NO: 701031 - RNA, 24 nt, Human
ucgaguagcugggauuauaggcau

SEQ ID NO: 701032 - RNA, 23 nt, Human
ucucacuuugucacccaggcugg

SEQ ID NO: 701033 - RNA, 24 nt, Human
ucucacuuugucacccaggcugga

SEQ ID NO: 701034 - RNA, 21 nt, Human
ucuugaacuccugaccucaag

SEQ ID NO: 701035 - RNA, 18 nt, Human
ugaccucaagugauccgc

SEQ ID NO: 701036 - RNA, 24 nt, Human
ugaccucaagugauccgccugccu

SEQ ID NO: 701037 - RNA, 23 nt, Human
ugagauggaguacgucacugugc

SEQ ID NO: 701038 - RNA, 21 nt, Human
ugccucaggcacucgaguagc

SEQ ID NO: 701039 - RNA, 23 nt, Human
uggagugcagugccgcuaucucg

SEQ ID NO: 701040 - RNA, 24 nt, Human
uggagugcagugccgcuaucucgg

SEQ ID NO: 701041 - RNA, 24 nt, Human
uggccaggcuggucuugaacuccu

SEQ ID NO: 701042 - RNA, 18 nt, Human
ugggauuauaggcaugcg

SEQ ID NO: 701043 - RNA, 19 nt, Human
ugggauuauaggcaugcgc

SEQ ID NO: 701044 - RNA, 21 nt, Human
ugggauuauaggcaugcgcca

SEQ ID NO: 701045 - RNA, 21 nt, Human
ugggauuauaggcaugcgcca

SEQ ID NO: 701046 - RNA, 22 nt, Human
ugggauuauaggcaugcgccau

SEQ ID NO: 701047 - RNA, 24 nt, Human
ugggauuauaggcaugcgccauca

SEQ ID NO: 701048 - RNA, 23 nt, Human
uggguuucaccauauuggccagg

SEQ ID NO: 701049 - RNA, 21 nt, Human
ugguauuacaggcgugagcca

SEQ ID NO: 701050 - RNA, 22 nt, Human
ugguauuacaggcgugagccac

SEQ ID NO: 701051 - RNA, 24 nt, Human
ugguauuacaggcgugagccacug

SEQ ID NO: 701052 - RNA, 25 nt, Human
ugguauuacaggcgugagccacugu

SEQ ID NO: 701053 - RNA, 24 nt, Human
uuaguagagacuggguuucaccau

SEQ ID NO: 701054 - RNA, 21 nt, Human
uucaaaguacugcaaagaauc

SEQ ID NO: 701055 - RNA, 24 nt, Human
uuucaccauauuggccaggcuggu

SEQ ID NO: 701056 - RNA, 24 nt, Human
uuugucacccaggcuggagugcag

SEQ ID NO: 701057 - RNA, 24 nt, Human
uuuuuaguagagacuggguuucac

SEQ ID NO: 701058 - RNA, 20 nt, Human
uuuuuguauuuuuaguagag

SEQ ID NO: 701059 - RNA, 26 nt, Human
uuuuuuuuuuuugagauggagucuca

SEQ ID NO: 701060 - RNA, 22 nt, Human
uuuuuuuuuuuuuugagaugga

SEQ ID NO: 701061 - RNA, 18 nt, Human
uuuuuuuuuuuuuuuuug

SEQ ID NO: 701062 - RNA, 25 nt, Human
aaaaggcucccaugcugagcagccc

SEQ ID NO: 701063 - RNA, 26 nt, Human
aaagcagagccagcuggugcaagaga

SEQ ID NO: 701064 - RNA, 19 nt, Human
aaaugauugacaagagauc

SEQ ID NO: 701065 - RNA, 19 nt, Human
aagcagagccagcuggugc

SEQ ID NO: 701066 - RNA, 19 nt, Human
aaggaagaaggugugcagc

SEQ ID NO: 701067 - RNA, 20 nt, Human
aaggaagaaggugugcagcg

SEQ ID NO: 701068 - RNA, 23 nt, Human
acagagcgcaaugaccugaacaa

SEQ ID NO: 701069 - RNA, 21 nt, Human
accgagcacagaagcaucagg

SEQ ID NO: 701070 - RNA, 24 nt, Human
accgagcacagaagcaucaggcca

SEQ ID NO: 701071 - RNA, 24 nt, Human
accgcucccucaaggaagaaggug

SEQ ID NO: 701072 - RNA, 23 nt, Human
agaaaaagcagagccagcuggug

SEQ ID NO: 701073 - RNA, 24 nt, Human
agacagagcgcaaugaccugaaca

SEQ ID NO: 701074 - RNA, 18 nt, Human
agaccccucccugcccuu

SEQ ID NO: 701075 - RNA, 23 nt, Human
agagaaggaccaccugcgcggug

SEQ ID NO: 701076 - RNA, 20 nt, Human
agaggggccuggggcucaag

SEQ ID NO: 701077 - RNA, 18 nt, Human
agccaggccuggcccaua

SEQ ID NO: 701078 - RNA, 19 nt, Human
aggagaaaacaguccggga

SEQ ID NO: 701079 - RNA, 24 nt, Human
aggagaaaacaguccgggauaaag

SEQ ID NO: 701080 - RNA, 23 nt, Human
aggagaagcgcaaggaggugacc

SEQ ID NO: 701081 - RNA, 22 nt, Human
aggcucccaugcugagcagccc

SEQ ID NO: 701082 - RNA, 18 nt, Human
agggcgcucagagcuggg

SEQ ID NO: 701083 - RNA, 18 nt, Human
agguaaaaauccaacggc

SEQ ID NO: 701084 - RNA, 23 nt, Human
caagacaaguaauacacccaggu

SEQ ID NO: 701085 - RNA, 24 nt, Human
caaguaauacacccaggucuugac

SEQ ID NO: 701086 - RNA, 25 nt, Human
cagaaaaagcagagccagcuggugc

SEQ ID NO: 701087 - RNA, 20 nt, Human
cagaccccucccugcccuuc

SEQ ID NO: 701088 - RNA, 20 nt, Human
cagagcccuggcagggcgcu

SEQ ID NO: 701089 - RNA, 20 nt, Human
caggaccaggccaaugaugc

SEQ ID NO: 701090 - RNA, 22 nt, Human
caggagcaccgagcacagaagc

SEQ ID NO: 701091 - RNA, 18 nt, Human
caggugccucucuagccu

SEQ ID NO: 701092 - RNA, 19 nt, Human
caggugccucucuagccug

SEQ ID NO: 701093 - RNA, 21 nt, Human
caucaggccagacugggccuc

SEQ ID NO: 701094 - RNA, 18 nt, Human
cccagggucacagaagcg

SEQ ID NO: 701095 - RNA, 24 nt, Human
cccgcagcaagcuugagagccuau

SEQ ID NO: 701096 - RNA, 22 nt, Human
cccugagaggaggccagagggg

SEQ ID NO: 701097 - RNA, 23 nt, Human
ccgcagcaagcuugagagccuau

SEQ ID NO: 701098 - RNA, 21 nt, Human
ccugaacaagaggguacagga

SEQ ID NO: 701099 - RNA, 22 nt, Human
ccugcagguaaaaauccaacgg

SEQ ID NO: 701100 - RNA, 24 nt, Human
ccugcgcggugagcacagcaaggc

SEQ ID NO: 701101 - RNA, 21 nt, Human
ccuguaaguguacagugggcu

SEQ ID NO: 701102 - RNA, 22 nt, Human
cgccuugcuacccaggagcacc

SEQ ID NO: 701103 - RNA, 18 nt, Human
cucaagagcccaccuccg

SEQ ID NO: 701104 - RNA, 23 nt, Human
cugcagacagagcgcaaugaccu

SEQ ID NO: 701105 - RNA, 24 nt, Human
cugcagcggcacaaccgcucccuc

SEQ ID NO: 701106 - RNA, 19 nt, Human
gacaagagaucacccaaag

SEQ ID NO: 701107 - RNA, 18 nt, Human
gacagagcgcaaugaccu

SEQ ID NO: 701108 - RNA, 18 nt, Human
gaccaggccaaugaugcu

SEQ ID NO: 701109 - RNA, 18 nt, Human
gagaagcgcaaggaggug

SEQ ID NO: 701110 - RNA, 22 nt, Human
gagaggggcugucaucuguagc

SEQ ID NO: 701111 - RNA, 23 nt, Human
gagcagcccauugcugaagccag

SEQ ID NO: 701112 - RNA, 23 nt, Human
gagcgcaaugaccugaacaagag

SEQ ID NO: 701113 - RNA, 18 nt, Human
gaggaggagaagcgcaag

SEQ ID NO: 701114 - RNA, 21 nt, Human
gaggaggccagaggggccugg

SEQ ID NO: 701115 - RNA, 21 nt, Human
gcagcaagcuugagagccuau

SEQ ID NO: 701116 - RNA, 24 nt, Human
gccagacugggccucaagagccca

SEQ ID NO: 701117 - RNA, 21 nt, Human
gcccugagaggaggccagagg

SEQ ID NO: 701118 - RNA, 18 nt, Human
gccuugcuacccaggagc

SEQ ID NO: 701119 - RNA, 19 nt, Human
gcugaagccaggauguucu

SEQ ID NO: 701120 - RNA, 18 nt, Human
ggagaaaacaguccggga

SEQ ID NO: 701121 - RNA, 19 nt, Human
ggagaagcugugccgggca

SEQ ID NO: 701122 - RNA, 26 nt, Human
ggauaaagaacuggagggccugcagg

SEQ ID NO: 701123 - RNA, 22 nt, Human
ggcccugcuugagauggcugag

SEQ ID NO: 701124 - RNA, 19 nt, Human
ggccuggggcucaagcacc

SEQ ID NO: 701125 - RNA, 22 nt, Human
ggcuggagaagcugugccgggc

SEQ ID NO: 701126 - RNA, 24 nt, Human
gggcccgggaggaggaggagaagc

SEQ ID NO: 701127 - RNA, 19 nt, Human
uaaaaggcucccaugcuga

SEQ ID NO: 701128 - RNA, 21 nt, Human
uaaaaggcucccaugcugagc

SEQ ID NO: 701129 - RNA, 27 nt, Human
uaaaaggcucccaugcugagcagccca

SEQ ID NO: 701130 - RNA, 19 nt, Human
uacagugggcuugcauugg

SEQ ID NO: 701131 - RNA, 27 nt, Human
ucaggagccccuugggcaucgcuuccc

SEQ ID NO: 701132 - RNA, 20 nt, Human
ucccaugcugagcagcccau

SEQ ID NO: 701133 - RNA, 21 nt, Human
ucccccagggucacagaagcu

SEQ ID NO: 701134 - RNA, 24 nt, Human
ucccuaggcagagcccuggcaggg

SEQ ID NO: 701135 - RNA, 19 nt, Human
ucccugcccuucagagcuc

SEQ ID NO: 701136 - RNA, 20 nt, Human
uccuacagaaaaagcagagc

SEQ ID NO: 701137 - RNA, 19 nt, Human
ucugugagcugaagagucu

SEQ ID NO: 701138 - RNA, 24 nt, Human
ugaagcuccuacagaaaaagcaga

SEQ ID NO: 701139 - RNA, 18 nt, Human
ugacaagagaucacccaa

SEQ ID NO: 701140 - RNA, 19 nt, Human
ugaccuggcuggcaucugg

SEQ ID NO: 701141 - RNA, 26 nt, Human
ugagaggaggccagaggggccugggg

SEQ ID NO: 701142 - RNA, 25 nt, Human
ugaggagaaaacaguccgggauaaa

SEQ ID NO: 701143 - RNA, 21 nt, Human
ugaugcuucucaguagccuua

SEQ ID NO: 701144 - RNA, 26 nt, Human
ugcaagagaaggaccaccugcgcggu

SEQ ID NO: 701145 - RNA, 21 nt, Human
ugcgugggaugaugugcuggu

SEQ ID NO: 701146 - RNA, 20 nt, Human
ugcugggaagggagcggcag

SEQ ID NO: 701147 - RNA, 21 nt, Human
ugcugguggccagggcucccu

SEQ ID NO: 701148 - RNA, 19 nt, Human
uguacagaugaagucagug

SEQ ID NO: 701149 - RNA, 21 nt, Human
ugucuugugagcagggcuugc

SEQ ID NO: 701150 - RNA, 24 nt, Human
ugugagcagggcuugcuuggucag

SEQ ID NO: 701151 - RNA, 20 nt, Human
uugacaagagaucacccaaa

SEQ ID NO: 701152 - RNA, 24 nt, Human
uugcauuggggaugggggugugua

SEQ ID NO: 701153 - RNA, 24 nt, Human
aaauaauuguguucagagacagac

SEQ ID NO: 701154 - RNA, 22 nt, Human
aacguggcccacuuuguccuca

SEQ ID NO: 701155 - RNA, 24 nt, Human
aaugcagaaacagaagccuccaga

SEQ ID NO: 701156 - RNA, 18 nt, Human
acgcugcuugcuuguagc

SEQ ID NO: 701157 - RNA, 20 nt, Human
agaagaaguaaaaaacgaug

SEQ ID NO: 701158 - RNA, 22 nt, Human
aggaagagugggucagaugaga

SEQ ID NO: 701159 - RNA, 19 nt, Human
aguuugagacuguuuaugu

SEQ ID NO: 701160 - RNA, 19 nt, Human
auaaaauagcucugccucu

SEQ ID NO: 701161 - RNA, 26 nt, Human
auccuaaagcccuuacaacuaagcca

SEQ ID NO: 701162 - RNA, 21 nt, Human
cagaagaaguaaaaaacgaug

SEQ ID NO: 701163 - RNA, 24 nt, Human
cagacccggggacucggaccgaga

SEQ ID NO: 701164 - RNA, 23 nt, Human
cagcaagccucuuuuaaugauuu

SEQ ID NO: 701165 - RNA, 21 nt, Human
cagcuuccagccacgcugcuu

SEQ ID NO: 701166 - RNA, 21 nt, Human
cauauucagccugauccuaaa

SEQ ID NO: 701167 - RNA, 24 nt, Human
ccaaacccuccaugcgggccgcac

SEQ ID NO: 701168 - RNA, 23 nt, Human
cccgugucagaugaagccggggc

SEQ ID NO: 701169 - RNA, 21 nt, Human
ccuccaggcggcuccagcuug

SEQ ID NO: 701170 - RNA, 20 nt, Human
ccucccggggcaggaccggc

SEQ ID NO: 701171 - RNA, 21 nt, Human
ccucccggggcaggaccggcc

SEQ ID NO: 701172 - RNA, 24 nt, Human
ccuucaguggaaggaagagugggu

SEQ ID NO: 701173 - RNA, 24 nt, Human
ccuuucgccuccaggagcugaaaa

SEQ ID NO: 701174 - RNA, 22 nt, Human
cgcccggccucacggacacaga

SEQ ID NO: 701175 - RNA, 22 nt, Human
cgccugugcaucccuuuggucc

SEQ ID NO: 701176 - RNA, 19 nt, Human
cggcuccagcuugggcgcc

SEQ ID NO: 701177 - RNA, 24 nt, Human
cucaccaccucuuaaccacaaauu

SEQ ID NO: 701178 - RNA, 30 nt, Human
cucucguggcagaaugcagaaacagaagcu

SEQ ID NO: 701179 - RNA, 19 nt, Human
cucuuuggcaagcacccag

SEQ ID NO: 701180 - RNA, 19 nt, Human
cucuuuggcaagcacccag

SEQ ID NO: 701181 - RNA, 27 nt, Human
cuucagaggucgccgaccgagcccucc

SEQ ID NO: 701182 - RNA, 21 nt, Human
gaacuuuuccaaacccuccau

SEQ ID NO: 701183 - RNA, 19 nt, Human
gagcccuccaggcggcucc

SEQ ID NO: 701184 - RNA, 19 nt, Human
gcccgugaagaccuucagu

SEQ ID NO: 701185 - RNA, 21 nt, Human
gcccuggggcaugcgagcccc

SEQ ID NO: 701186 - RNA, 21 nt, Human
gccuccgugaacuuuuccaaa

SEQ ID NO: 701187 - RNA, 18 nt, Human
gcuaacguggcccacuuu

SEQ ID NO: 701188 - RNA, 20 nt, Human
gcuacaaaauuuauccaagg

SEQ ID NO: 701189 - RNA, 22 nt, Human
uaaaaaagaacuacuaacuuuu

SEQ ID NO: 701190 - RNA, 23 nt, Human
uaccagaagaaguaaaaaacgau

SEQ ID NO: 701191 - RNA, 19 nt, Human
uauguuaagaaauguaaca

SEQ ID NO: 701192 - RNA, 24 nt, Human
ucaccaccucuuaaccacaaauug

SEQ ID NO: 701193 - RNA, 19 nt, Human
uccacuucuuaucucacca

SEQ ID NO: 701194 - RNA, 21 nt, Human
uccagcuugggcgccucggga

SEQ ID NO: 701195 - RNA, 21 nt, Human
uccagcuugggcgccucggga

SEQ ID NO: 701196 - RNA, 19 nt, Human
uccaugcgggccgcacaca

SEQ ID NO: 701197 - RNA, 18 nt, Human
ucgccgcccggccucacg

SEQ ID NO: 701198 - RNA, 21 nt, Human
ucuaaagaaaagaucaaggac

SEQ ID NO: 701199 - RNA, 22 nt, Human
ucucaccaccucuuaaccacaa

SEQ ID NO: 701200 - RNA, 21 nt, Human
ucucugcagaugcuaacgugg

SEQ ID NO: 701201 - RNA, 18 nt, Human
ucuuagcuggcccugggg

SEQ ID NO: 701202 - RNA, 18 nt, Human
ucuuaucucaccaccucu

SEQ ID NO: 701203 - RNA, 18 nt, Human
ugacaggcugaauucaga

SEQ ID NO: 701204 - RNA, 19 nt, Human
ugacuaaaaccaaaucuga

SEQ ID NO: 701205 - RNA, 19 nt, Human
ugcagaaacagaagccucc

SEQ ID NO: 701206 - RNA, 22 nt, Human
ugcagaaacagaagccuccaga

SEQ ID NO: 701207 - RNA, 19 nt, Human
ugcucggugcacucucuuc

SEQ ID NO: 701208 - RNA, 21 nt, Human
ugcucggugcacucucuucag

SEQ ID NO: 701209 - RNA, 24 nt, Human
uggccccaguggcuuucaaaaggg

SEQ ID NO: 701210 - RNA, 23 nt, Human
uuauccaaggauuccaauuaugc

SEQ ID NO: 701211 - RNA, 23 nt, Human
uucccaucagcuuccagccacgc

SEQ ID NO: 701212 - RNA, 18 nt, Human
uuuuuuuuccuucagcaa

SEQ ID NO: 701213 - RNA, 23 nt, Human
aaaaaaaacauacagcacgaaga

SEQ ID NO: 701214 - RNA, 18 nt, Human
aaagcacugccccgaccc

SEQ ID NO: 701215 - RNA, 18 nt, Human
aaagcacugccccgaccc

SEQ ID NO: 701216 - RNA, 26 nt, Human
aaagucaugugggaaaugcagguagg

SEQ ID NO: 701217 - RNA, 21 nt, Human
aaccuucagcuccugggacuc

SEQ ID NO: 701218 - RNA, 21 nt, Human
aagcacuaaagggccaguacc

SEQ ID NO: 701219 - RNA, 18 nt, Human
aagggggaaaaaaaaaaa

SEQ ID NO: 701220 - RNA, 22 nt, Human
aaugcagguagggcccuggagu

SEQ ID NO: 701221 - RNA, 21 nt, Human
acagcacgaagauaggaaguc

SEQ ID NO: 701222 - RNA, 21 nt, Human
accagauuugaggcugguuuu

SEQ ID NO: 701223 - RNA, 23 nt, Human
acccacucccccagccaccagcc

SEQ ID NO: 701224 - RNA, 24 nt, Human
acccacucccccagccaccagccc

SEQ ID NO: 701225 - RNA, 20 nt, Human
accccaaguuggaccacuuc

SEQ ID NO: 701226 - RNA, 23 nt, Human
accccagcucucaugaccacaaa

SEQ ID NO: 701227 - RNA, 20 nt, Human
acucccgcuuuuucucagua

SEQ ID NO: 701228 - RNA, 18 nt, Human
agaaacagagcugggggg

SEQ ID NO: 701229 - RNA, 23 nt, Human
agaaaccuucagcuccugggacu

SEQ ID NO: 701230 - RNA, 18 nt, Human
agagaaggagggggugug

SEQ ID NO: 701231 - RNA, 20 nt, Human
agagagaauggcaggaggag

SEQ ID NO: 701232 - RNA, 24 nt, Human
agagcacccagagcugcucaggca

SEQ ID NO: 701233 - RNA, 18 nt, Human
agagcugggggggucaag

SEQ ID NO: 701234 - RNA, 21 nt, Human
agcagcagcucacacccuacc

SEQ ID NO: 701235 - RNA, 23 nt, Human
agcagcucacacccuaccuuccc

SEQ ID NO: 701236 - RNA, 20 nt, Human
agcagcugugacaccucugc

SEQ ID NO: 701237 - RNA, 20 nt, Human
agcaggaagagaucuucccg

SEQ ID NO: 701238 - RNA, 19 nt, Human
agccaaaccccuagagaca

SEQ ID NO: 701239 - RNA, 19 nt, Human
agccagcaacugauaaccc

SEQ ID NO: 701240 - RNA, 18 nt, Human
agcuggcccagggggccu

SEQ ID NO: 701241 - RNA, 23 nt, Human
agcuggcccagggggccuggagc

SEQ ID NO: 701242 - RNA, 18 nt, Human
aggagugggguuggggga

SEQ ID NO: 701243 - RNA, 21 nt, Human
aggcaaaauugagacccaaag

SEQ ID NO: 701244 - RNA, 20 nt, Human
aggcaaaguuccugggagug

SEQ ID NO: 701245 - RNA, 24 nt, Human
agggacccaaagcagagaaggagg

SEQ ID NO: 701246 - RNA, 26 nt, Human
agggcagggcuucuuggguggggggc

SEQ ID NO: 701247 - RNA, 20 nt, Human
agguaggacccaagcucugg

SEQ ID NO: 701248 - RNA, 21 nt, Human
agguugugcugcugcuggccc

SEQ ID NO: 701249 - RNA, 21 nt, Human
agucccucucucccauacucc

SEQ ID NO: 701250 - RNA, 19 nt, Human
aguggaacugaagccuaaa

SEQ ID NO: 701251 - RNA, 19 nt, Human
aguggccagaaaccuucag

SEQ ID NO: 701252 - RNA, 20 nt, Human
auaccaguccguccacaucc

SEQ ID NO: 701253 - RNA, 20 nt, Human
auccagacaggggcguggga

SEQ ID NO: 701254 - RNA, 24 nt, Human
auccuuuaugaggacccauguggg

SEQ ID NO: 701255 - RNA, 19 nt, Human
aucucaucacuuugcccca

SEQ ID NO: 701256 - RNA, 18 nt, Human
auggaucuuuucuaaaug

SEQ ID NO: 701257 - RNA, 20 nt, Human
augggcccugugucucagga

SEQ ID NO: 701258 - RNA, 22 nt, Human
caaagagagaauauggacucac

SEQ ID NO: 701259 - RNA, 21 nt, Human
caaaguucaguggccagaaac

SEQ ID NO: 701260 - RNA, 24 nt, Human
caacaguagccaaaccccuagaga

SEQ ID NO: 701261 - RNA, 24 nt, Human
caagaauaguugggaggcuuccag

SEQ ID NO: 701262 - RNA, 18 nt, Human
caaggggacaacuuuccu

SEQ ID NO: 701263 - RNA, 22 nt, Human
cacaagggaggggauccagaca

SEQ ID NO: 701264 - RNA, 20 nt, Human
caccucugcuuuagccaaag

SEQ ID NO: 701265 - RNA, 23 nt, Human
caccucugcuuuagccaaaguuc

SEQ ID NO: 701266 - RNA, 24 nt, Human
cacucuccauuaguggccucugcu

SEQ ID NO: 701267 - RNA, 19 nt, Human
cacuggggaaccccaaguu

SEQ ID NO: 701268 - RNA, 18 nt, Human
cacuucuccaucacaacc

SEQ ID NO: 701269 - RNA, 23 nt, Human
cagacugggaucucuaaucuacc

SEQ ID NO: 701270 - RNA, 22 nt, Human
cagcacuuagaaacagagcugg

SEQ ID NO: 701271 - RNA, 22 nt, Human
cagccuucagcagcagcucaca

SEQ ID NO: 701272 - RNA, 23 nt, Human
cagcucacacccuaccuucccca

SEQ ID NO: 701273 - RNA, 21 nt, Human
cagcuucuguguggcaguccc

SEQ ID NO: 701274 - RNA, 19 nt, Human
caggacugggucugaccug

SEQ ID NO: 701275 - RNA, 20 nt, Human
caggcacagccagcaacuga

SEQ ID NO: 701276 - RNA, 19 nt, Human
caggcucuucccacucucc

SEQ ID NO: 701277 - RNA, 22 nt, Human
cagguguugucuucagcuucug

SEQ ID NO: 701278 - RNA, 20 nt, Human
caguagcuggcuucuccucc

SEQ ID NO: 701279 - RNA, 18 nt, Human
caucacaaccagauuuga

SEQ ID NO: 701280 - RNA, 25 nt, Human
caugaugcaugcgucaggagcuggu

SEQ ID NO: 701281 - RNA, 23 nt, Human
ccaaagagagaauauggacucac

SEQ ID NO: 701282 - RNA, 24 nt, Human
ccacauccuggccuuucccaggcu

SEQ ID NO: 701283 - RNA, 21 nt, Human
ccacaucuuuccaggcucuuc

SEQ ID NO: 701284 - RNA, 21 nt, Human
ccagaaaccuucagcuccugg

SEQ ID NO: 701285 - RNA, 23 nt, Human
ccagcacccaccaucacacccuc

SEQ ID NO: 701286 - RNA, 20 nt, Human
cccaaagagagaauauggac

SEQ ID NO: 701287 - RNA, 21 nt, Human
cccaccaucacacccucuguc

SEQ ID NO: 701288 - RNA, 26 nt, Human
cccacucccccagccaccagccccaa

SEQ ID NO: 701289 - RNA, 21 nt, Human
cccagcacccaccaucacacc

SEQ ID NO: 701290 - RNA, 23 nt, Human
cccagcacccaccaucacacccu

SEQ ID NO: 701291 - RNA, 22 nt, Human
cccagccaccagccccaagguc

SEQ ID NO: 701292 - RNA, 25 nt, Human
cccagccaccagccccaaggucggc

SEQ ID NO: 701293 - RNA, 18 nt, Human
ccccagggucaccuaggg

SEQ ID NO: 701294 - RNA, 20 nt, Human
cccguagcauagccuggagc

SEQ ID NO: 701295 - RNA, 22 nt, Human
cccugcugcuguggacugcugu

SEQ ID NO: 701296 - RNA, 21 nt, Human
cccugugcugagucuuaaccc

SEQ ID NO: 701297 - RNA, 21 nt, Human
ccgaagcagcugcugccccca

SEQ ID NO: 701298 - RNA, 19 nt, Human
ccuaaaugaacagauguca

SEQ ID NO: 701299 - RNA, 21 nt, Human
ccuagggaagugaaggcagac

SEQ ID NO: 701300 - RNA, 18 nt, Human
ccuccccucuucacagcc

SEQ ID NO: 701301 - RNA, 19 nt, Human
ccuccccucuucacagcca

SEQ ID NO: 701302 - RNA, 20 nt, Human
ccugcugagucuuccauacc

SEQ ID NO: 701303 - RNA, 21 nt, Human
ccugcugagucuuccauacca

SEQ ID NO: 701304 - RNA, 24 nt, Human
ccuguguuccccugaagcaggugu

SEQ ID NO: 701305 - RNA, 19 nt, Human
ccuuuuugucuggcugacc

SEQ ID NO: 701306 - RNA, 19 nt, Human
cgccuccccucuucacagc

SEQ ID NO: 701307 - RNA, 23 nt, Human
cuaaaugaacagaugucaggaug

SEQ ID NO: 701308 - RNA, 18 nt, Human
cuacccacucccccagcu

SEQ ID NO: 701309 - RNA, 19 nt, Human
cuacccccaugccaccccc

SEQ ID NO: 701310 - RNA, 25 nt, Human
cuacccccaugccacccccaggguc

SEQ ID NO: 701311 - RNA, 19 nt, Human
cucaaugccauaccagucc

SEQ ID NO: 701312 - RNA, 20 nt, Human
cucccagcacccaccaucac

SEQ ID NO: 701313 - RNA, 23 nt, Human
cucccagcacccaccaucacacc

SEQ ID NO: 701314 - RNA, 24 nt, Human
cucccagcacccaccaucacaccc

SEQ ID NO: 701315 - RNA, 19 nt, Human
cucccccagccaccagccc

SEQ ID NO: 701316 - RNA, 20 nt, Human
cucccccagccaccagcccc

SEQ ID NO: 701317 - RNA, 22 nt, Human
cucccccagccaccagccccaa

SEQ ID NO: 701318 - RNA, 21 nt, Human
cuccgccuacugucccucuca

SEQ ID NO: 701319 - RNA, 21 nt, Human
cuccugggacuccuacucucc

SEQ ID NO: 701320 - RNA, 22 nt, Human
cucucaugaccacaaaugguug

SEQ ID NO: 701321 - RNA, 20 nt, Human
cucucccuaccuugccuccu

SEQ ID NO: 701322 - RNA, 24 nt, Human
cugccagaggaugcucuuucccag

SEQ ID NO: 701323 - RNA, 21 nt, Human
cugcucaggcacagccagcaa

SEQ ID NO: 701324 - RNA, 23 nt, Human
cuggcgccuucucggagcuggcc

SEQ ID NO: 701325 - RNA, 18 nt, Human
cuggggaaccccaaguug

SEQ ID NO: 701326 - RNA, 20 nt, Human
cuggggcggugaggaagacg

SEQ ID NO: 701327 - RNA, 22 nt, Human
cuggggcggugaggaagacggg

SEQ ID NO: 701328 - RNA, 20 nt, Human
cuguggcuggagggcagggc

SEQ ID NO: 701329 - RNA, 23 nt, Human
cuucuccucccguagcauagccu

SEQ ID NO: 701330 - RNA, 22 nt, Human
cuuuuucaagcgccuguguucc

SEQ ID NO: 701331 - RNA, 26 nt, Human
gaaaaaaaaaacauacagcacgaaga

SEQ ID NO: 701332 - RNA, 19 nt, Human
gaacagaugucaggaugcc

SEQ ID NO: 701333 - RNA, 21 nt, Human
gaacagaugucaggaugccuc

SEQ ID NO: 701334 - RNA, 24 nt, Human
gaacagaugucaggaugccuccau

SEQ ID NO: 701335 - RNA, 20 nt, Human
gacccaaagcagagaaggag

SEQ ID NO: 701336 - RNA, 24 nt, Human
gacuaaaugagcagagacauggga

SEQ ID NO: 701337 - RNA, 19 nt, Human
gagaauggcaggaggagga

SEQ ID NO: 701338 - RNA, 22 nt, Human
gagagcacccagagcugcucag

SEQ ID NO: 701339 - RNA, 26 nt, Human
gagagcacccagagcugcucaggcac

SEQ ID NO: 701340 - RNA, 23 nt, Human
gagugggguugggggacagccuu

SEQ ID NO: 701341 - RNA, 27 nt, Human
gauuugaggcugguuuugaccuugugg

SEQ ID NO: 701342 - RNA, 25 nt, Human
gcaaagcacuaaagggccaguacca

SEQ ID NO: 701343 - RNA, 19 nt, Human
gcacuggggugggauuugg

SEQ ID NO: 701344 - RNA, 18 nt, Human
gcagcagcucacacccua

SEQ ID NO: 701345 - RNA, 20 nt, Human
gcagugcucucuucagcacc

SEQ ID NO: 701346 - RNA, 22 nt, Human
gcagugcucucuucagcaccag

SEQ ID NO: 701347 - RNA, 21 nt, Human
gcccagcaggggcccucacuc

SEQ ID NO: 701348 - RNA, 21 nt, Human
gcucacacccuaccuucccca

SEQ ID NO: 701349 - RNA, 22 nt, Human
ggaaagcacugccccgacccuc

SEQ ID NO: 701350 - RNA, 20 nt, Human
ggaaaggagggacaucucau

SEQ ID NO: 701351 - RNA, 18 nt, Human
ggagugaugggaagguuu

SEQ ID NO: 701352 - RNA, 18 nt, Human
ggccuggagcauggacag

SEQ ID NO: 701353 - RNA, 18 nt, Human
ggcuacaccuccucugcc

SEQ ID NO: 701354 - RNA, 18 nt, Human
ggcuggagggcagggcuu

SEQ ID NO: 701355 - RNA, 22 nt, Human
gggcagggcuucuugggugggg

SEQ ID NO: 701356 - RNA, 19 nt, Human
gggccggggauggaucuuu

SEQ ID NO: 701357 - RNA, 19 nt, Human
gggcggugaggaagacggg

SEQ ID NO: 701358 - RNA, 19 nt, Human
gggcucacaagggagggga

SEQ ID NO: 701359 - RNA, 20 nt, Human
gggcuguucucucuuuucuu

SEQ ID NO: 701360 - RNA, 20 nt, Human
ggucaagguugugcugcugc

SEQ ID NO: 701361 - RNA, 18 nt, Human
ggugugggaaaaagagga

SEQ ID NO: 701362 - RNA, 20 nt, Human
gucaagugacaauccuuccc

SEQ ID NO: 701363 - RNA, 22 nt, Human
guccacauccuggccuuuccca

SEQ ID NO: 701364 - RNA, 23 nt, Human
guccuugggccuggccagucuuc

SEQ ID NO: 701365 - RNA, 20 nt, Human
gugaagggggaaaaaaaaaa

SEQ ID NO: 701366 - RNA, 23 nt, Human
uaaagcaaagucacuucuccauc

SEQ ID NO: 701367 - RNA, 18 nt, Human
uaaagggccaguaccagu

SEQ ID NO: 701368 - RNA, 19 nt, Human
uaaaugaacagaugucagg

SEQ ID NO: 701369 - RNA, 20 nt, Human
uaaaugagcagagacauggg

SEQ ID NO: 701370 - RNA, 18 nt, Human
uacaccuccucugcccaa

SEQ ID NO: 701371 - RNA, 21 nt, Human
uacaucucccagcacccacca

SEQ ID NO: 701372 - RNA, 27 nt, Human
uacccacucccccagccaccagcccca

SEQ ID NO: 701373 - RNA, 21 nt, Human
uaccuuccccagacuugcacu

SEQ ID NO: 701374 - RNA, 20 nt, Human
uagccaaaguucaguggcca

SEQ ID NO: 701375 - RNA, 18 nt, Human
uagcuggcuucuccuccc

SEQ ID NO: 701376 - RNA, 21 nt, Human
uaugaacaggcaucugcuucc

SEQ ID NO: 701377 - RNA, 19 nt, Human
ucaagcgccuguguucccc

SEQ ID NO: 701378 - RNA, 18 nt, Human
ucacacccuaccuucccc

SEQ ID NO: 701379 - RNA, 22 nt, Human
ucacagaucaauucugucccgc

SEQ ID NO: 701380 - RNA, 24 nt, Human
ucacuuucacuuuuuaaccaggga

SEQ ID NO: 701381 - RNA, 20 nt, Human
ucagcacuuagaaacagagc

SEQ ID NO: 701382 - RNA, 19 nt, Human
ucaggccaaggaaaggagg

SEQ ID NO: 701383 - RNA, 24 nt, Human
ucaggcucaaugccauaccagucc

SEQ ID NO: 701384 - RNA, 23 nt, Human
ucaguagcuggcuucuccucccg

SEQ ID NO: 701385 - RNA, 22 nt, Human
ucaguagcuggcuuuuccucag

SEQ ID NO: 701386 - RNA, 22 nt, Human
ucagugccuucucucagcuccc

SEQ ID NO: 701387 - RNA, 19 nt, Human
uccaaggagagaagacaga

SEQ ID NO: 701388 - RNA, 19 nt, Human
ucccaggacggaugggccc

SEQ ID NO: 701389 - RNA, 26 nt, Human
ucccaggccaacaguagccaaacccc

SEQ ID NO: 701390 - RNA, 20 nt, Human
ucccaggcuacccacucccc

SEQ ID NO: 701391 - RNA, 18 nt, Human
ucccccagccaccagccc

SEQ ID NO: 701392 - RNA, 24 nt, Human
uccccugcuggggcggugaggaag

SEQ ID NO: 701393 - RNA, 24 nt, Human
ucccggggagcauuaugggcuguu

SEQ ID NO: 701394 - RNA, 21 nt, Human
uccuaggcacuggggaacccc

SEQ ID NO: 701395 - RNA, 20 nt, Human
uccucuucucuggugaaagg

SEQ ID NO: 701396 - RNA, 19 nt, Human
uccugggacuccuacucuc

SEQ ID NO: 701397 - RNA, 18 nt, Human
uccuugggccuggccagu

SEQ ID NO: 701398 - RNA, 19 nt, Human
uccuugggccuggccaguc

SEQ ID NO: 701399 - RNA, 24 nt, Human
uccuuucucucaucccuuuuccuu

SEQ ID NO: 701400 - RNA, 21 nt, Human
ucuacccccaugccaccccca

SEQ ID NO: 701401 - RNA, 19 nt, Human
ucuagguaggugggaaugg

SEQ ID NO: 701402 - RNA, 23 nt, Human
ucuccauuaguggccucugcucc

SEQ ID NO: 701403 - RNA, 18 nt, Human
ucucucagcucccaggcc

SEQ ID NO: 701404 - RNA, 20 nt, Human
ucucucaucccuuuuccuga

SEQ ID NO: 701405 - RNA, 18 nt, Human
ucucucauccuagccccu

SEQ ID NO: 701406 - RNA, 23 nt, Human
ucucuucagcaccagagcugcuu

SEQ ID NO: 701407 - RNA, 19 nt, Human
ucugcuuccuccuucaccu

SEQ ID NO: 701408 - RNA, 23 nt, Human
ucugucucucauccuagccccuc

SEQ ID NO: 701409 - RNA, 21 nt, Human
ucuuuguuuccauaugaacag

SEQ ID NO: 701410 - RNA, 19 nt, Human
ugaauaauccuuuaugagg

SEQ ID NO: 701411 - RNA, 24 nt, Human
ugaauaauccuuuaugaggaccca

SEQ ID NO: 701412 - RNA, 23 nt, Human
ugacaauccuuccccaccccagc

SEQ ID NO: 701413 - RNA, 19 nt, Human
ugacuucacugaagaggca

SEQ ID NO: 701414 - RNA, 19 nt, Human
ugaggcugguuuugauggc

SEQ ID NO: 701415 - RNA, 22 nt, Human
ugagucucucacagaucaauuc

SEQ ID NO: 701416 - RNA, 21 nt, Human
ugaucggugugggaaaaagag

SEQ ID NO: 701417 - RNA, 19 nt, Human
ugcaaggcuaaggcaucaa

SEQ ID NO: 701418 - RNA, 22 nt, Human
ugcagaaugcggccagagcuga

SEQ ID NO: 701419 - RNA, 22 nt, Human
ugcagguagggcccuggagugc

SEQ ID NO: 701420 - RNA, 25 nt, Human
ugccugcccgcacccuggccugguc

SEQ ID NO: 701421 - RNA, 23 nt, Human
ugcgucaggagcuggugagccug

SEQ ID NO: 701422 - RNA, 21 nt, Human
ugcucaggcacagccagcaac

SEQ ID NO: 701423 - RNA, 25 nt, Human
ugcucaggcacagccagcaacugau

SEQ ID NO: 701424 - RNA, 22 nt, Human
ugcugcugcuggcccugugcug

SEQ ID NO: 701425 - RNA, 18 nt, Human
ugcuguggcuggagggca

SEQ ID NO: 701426 - RNA, 19 nt, Human
ugcuguggcuggagggcag

SEQ ID NO: 701427 - RNA, 26 nt, Human
uggagggcagggcuucuugggucgaa

SEQ ID NO: 701428 - RNA, 24 nt, Human
uggauccgaagcagcugcugcccc

SEQ ID NO: 701429 - RNA, 18 nt, Human
uggcaggaggaggaggca

SEQ ID NO: 701430 - RNA, 21 nt, Human
uggcaggaggaggaggcauua

SEQ ID NO: 701431 - RNA, 27 nt, Human
uggccagaaaccuucagcuccugggac

SEQ ID NO: 701432 - RNA, 19 nt, Human
uggccuggucccugguccu

SEQ ID NO: 701433 - RNA, 19 nt, Human
uggcugaccuugaggaaug

SEQ ID NO: 701434 - RNA, 20 nt, Human
uggcuggagggcagggcuuc

SEQ ID NO: 701435 - RNA, 24 nt, Human
uggcuggagggcagggcuucuugg

SEQ ID NO: 701436 - RNA, 22 nt, Human
ugggaagggcaggaugccgagc

SEQ ID NO: 701437 - RNA, 18 nt, Human
ugggacaggcaaaguucc

SEQ ID NO: 701438 - RNA, 24 nt, Human
uggggcucacaagggaggggaucc

SEQ ID NO: 701439 - RNA, 19 nt, Human
ugggguugggggacagccu

SEQ ID NO: 701440 - RNA, 25 nt, Human
uggguccuugggccuggccagucuu

SEQ ID NO: 701441 - RNA, 25 nt, Human
uguaaauaaagucuauuuuucuccc

SEQ ID NO: 701442 - RNA, 19 nt, Human
ugugcugcugcuggcccug

SEQ ID NO: 701443 - RNA, 18 nt, Human
uuccaggcucuucccacu

SEQ ID NO: 701444 - RNA, 27 nt, Human
uuccccugcuggggcggugaggaagac

SEQ ID NO: 701445 - RNA, 21 nt, Human
uuccugaggccacaucuuucc

SEQ ID NO: 701446 - RNA, 21 nt, Human
uucuagguaggugggaaugga

SEQ ID NO: 701447 - RNA, 24 nt, Human
uugaauuuggugagagaagggacc

SEQ ID NO: 701448 - RNA, 18 nt, Human
uuggaccacuucaggcuc

SEQ ID NO: 701449 - RNA, 21 nt, Human
uugugcugcugcuggcccugu

SEQ ID NO: 701450 - RNA, 19 nt, Human
uuugaagccuaccuuguuc

SEQ ID NO: 701451 - RNA, 21 nt, Human
uuugccccaggcuacaccucc

SEQ ID NO: 701452 - RNA, 22 nt, Human
aaaaacacaagcauauguuggc

SEQ ID NO: 701453 - RNA, 18 nt, Human
acauuauucugccuacca

SEQ ID NO: 701454 - RNA, 22 nt, Human
accaggggugugagccugggau

SEQ ID NO: 701455 - RNA, 20 nt, Human
acgggcugcacggguucccc

SEQ ID NO: 701456 - RNA, 19 nt, Human
agaaacuggaaaacagauu

SEQ ID NO: 701457 - RNA, 22 nt, Human
agaggcagacgugcuggggcuu

SEQ ID NO: 701458 - RNA, 23 nt, Human
agauccuuaacauaaucacauuu

SEQ ID NO: 701459 - RNA, 21 nt, Human
agcaggaugagcuugguuugg

SEQ ID NO: 701460 - RNA, 19 nt, Human
agcaggcuccaggcagcuc

SEQ ID NO: 701461 - RNA, 22 nt, Human
agcaggcuccaggcagcucugc

SEQ ID NO: 701462 - RNA, 21 nt, Human
agcccagcaggcuccaggcag

SEQ ID NO: 701463 - RNA, 20 nt, Human
aggagagaagggcaguuaga

SEQ ID NO: 701464 - RNA, 19 nt, Human
aggcagcucugccucuccc

SEQ ID NO: 701465 - RNA, 20 nt, Human
aggcuccaggcagcucugcc

SEQ ID NO: 701466 - RNA, 25 nt, Human
aguccagccaccaggggugugagcc

SEQ ID NO: 701467 - RNA, 19 nt, Human
agucugaaaugggugucac

SEQ ID NO: 701468 - RNA, 21 nt, Human
caaaaccucuuuggacaugua

SEQ ID NO: 701469 - RNA, 20 nt, Human
caaggccccucacuccaucu

SEQ ID NO: 701470 - RNA, 24 nt, Human
caaguccagccaccagggguguga

SEQ ID NO: 701471 - RNA, 18 nt, Human
cacaaggauaacccagga

SEQ ID NO: 701472 - RNA, 24 nt, Human
cacaaggauaacccaggauugucu

SEQ ID NO: 701473 - RNA, 19 nt, Human
caccaaggcuuccaccagc

SEQ ID NO: 701474 - RNA, 26 nt, Human
caccaaggcuuccaccagcccagcag

SEQ ID NO: 701475 - RNA, 21 nt, Human
caccaggggugugagccuggg

SEQ ID NO: 701476 - RNA, 30 nt, Human
cacugagcugaaauccaugugucaagagcc

SEQ ID NO: 701477 - RNA, 20 nt, Human
cagaauccaccaaggcuucc

SEQ ID NO: 701478 - RNA, 22 nt, Human
cagaauccaccaaggcuuccac

SEQ ID NO: 701479 - RNA, 21 nt, Human
cagauucccccaaauagcuga

SEQ ID NO: 701480 - RNA, 24 nt, Human
cagauucccccaaauagcugagcc

SEQ ID NO: 701481 - RNA, 18 nt, Human
ccaaggcuuccaccagcc

SEQ ID NO: 701482 - RNA, 23 nt, Human
ccacaacaauucccagcccugag

SEQ ID NO: 701483 - RNA, 20 nt, Human
ccagaggcagacgugcuggg

SEQ ID NO: 701484 - RNA, 18 nt, Human
ccaggauugucuccucau

SEQ ID NO: 701485 - RNA, 20 nt, Human
ccaggggugugagccuggga

SEQ ID NO: 701486 - RNA, 21 nt, Human
cccagcucaaacccaguccca

SEQ ID NO: 701487 - RNA, 19 nt, Human
ccccaaauagcugagccac

SEQ ID NO: 701488 - RNA, 28 nt, Human
ccccucacuccaucuucaaaauuagaag

SEQ ID NO: 701489 - RNA, 24 nt, Human
cccugagcaggaugagcuugguuu

SEQ ID NO: 701490 - RNA, 21 nt, Human
ccuaccauagacccugagcag

SEQ ID NO: 701491 - RNA, 27 nt, Human
ccugccagaauccaccaaggcuuccaa

SEQ ID NO: 701492 - RNA, 23 nt, Human
cgugcuggggcuuagaaccacuc

SEQ ID NO: 701493 - RNA, 25 nt, Human
cucacuccaucuucaaaauuagaag

SEQ ID NO: 701494 - RNA, 19 nt, Human
cuccaggcagcucugccuc

SEQ ID NO: 701495 - RNA, 19 nt, Human
cugacucucccuuccugcc

SEQ ID NO: 701496 - RNA, 22 nt, Human
cugagcccacaaggauaaccca

SEQ ID NO: 701497 - RNA, 18 nt, Human
cugagcugaaauccaugu

SEQ ID NO: 701498 - RNA, 20 nt, Human
cugguccucacugaugggga

SEQ ID NO: 701499 - RNA, 18 nt, Human
gacgugcuggggcuuaga

SEQ ID NO: 701500 - RNA, 20 nt, Human
gagagaagggcaguuagaaa

SEQ ID NO: 701501 - RNA, 21 nt, Human
gaggcugggugaagccagagg

SEQ ID NO: 701502 - RNA, 20 nt, Human
gaugagcuugguuugggggc

SEQ ID NO: 701503 - RNA, 21 nt, Human
gccacaacaauucccagcccu

SEQ ID NO: 701504 - RNA, 19 nt, Human
gcccugagaguggggugga

SEQ ID NO: 701505 - RNA, 19 nt, Human
gccugccagaauccaccaa

SEQ ID NO: 701506 - RNA, 18 nt, Human
ggagugugcuguagccuc

SEQ ID NO: 701507 - RNA, 23 nt, Human
ggcaguuagaaaaggaggcuggg

SEQ ID NO: 701508 - RNA, 18 nt, Human
ggcugggugaagccagag

SEQ ID NO: 701509 - RNA, 19 nt, Human
gggugucacugagcugaaa

SEQ ID NO: 701510 - RNA, 18 nt, Human
guggagugugcuguagcc

SEQ ID NO: 701511 - RNA, 22 nt, Human
guggagugugcuguagccuccc

SEQ ID NO: 701512 - RNA, 22 nt, Human
gugugcuguagccucccucaca

SEQ ID NO: 701513 - RNA, 18 nt, Human
uaagcccagcucaaaccc

SEQ ID NO: 701514 - RNA, 20 nt, Human
ucaaacccagucccacugcc

SEQ ID NO: 701515 - RNA, 20 nt, Human
ucacugagcugaaauccaug

SEQ ID NO: 701516 - RNA, 19 nt, Human
ucccagcccugagaguggg

SEQ ID NO: 701517 - RNA, 21 nt, Human
ucucccuuccugccuccuucu

SEQ ID NO: 701518 - RNA, 22 nt, Human
ucugagaaacuggaaaacagau

SEQ ID NO: 701519 - RNA, 21 nt, Human
ugacucucccuuccugccucc

SEQ ID NO: 701520 - RNA, 20 nt, Human
ugagccugggauguguguga

SEQ ID NO: 701521 - RNA, 19 nt, Human
ugauggggaggagagaagg

SEQ ID NO: 701522 - RNA, 22 nt, Human
ugauggggaggagagaagggca

SEQ ID NO: 701523 - RNA, 23 nt, Human
uggaaaacagauucccccaaaua

SEQ ID NO: 701524 - RNA, 18 nt, Human
ugggauuaggauguggac

SEQ ID NO: 701525 - RNA, 18 nt, Human
uguaugguaacauaugca

SEQ ID NO: 701526 - RNA, 19 nt, Human
uguggaggucagaagucug

SEQ ID NO: 701527 - RNA, 22 nt, Human
uuccaccagcccagcaggcucc

SEQ ID NO: 701528 - RNA, 24 nt, Human
uucccccaaauagcugagccacaa

SEQ ID NO: 701529 - RNA, 23 nt, Human
uuccuccuucuaaaaacacaagc

SEQ ID NO: 701530 - RNA, 18 nt, Human
uuuuuuuuuuuuagaggu

SEQ ID NO: 701531 - RNA, 22 nt, Human
aaaaaaaaacagacuaggagaa

SEQ ID NO: 701532 - RNA, 24 nt, Human
aaaaaaaaacagacuaggagaaaa

SEQ ID NO: 701533 - RNA, 21 nt, Human
aaaaaacauauguacaagacc

SEQ ID NO: 701534 - RNA, 21 nt, Human
aaaaacccauucuaaaacuaa

SEQ ID NO: 701535 - RNA, 24 nt, Human
aaaaaggaaauaaaauaaaaaccc

SEQ ID NO: 701536 - RNA, 25 nt, Human
aaaaaggaaauaaaauaaaaaccca

SEQ ID NO: 701537 - RNA, 20 nt, Human
aaacauauguacaagacccu

SEQ ID NO: 701538 - RNA, 19 nt, Human
aaacuaaacuaaugaagca

SEQ ID NO: 701539 - RNA, 22 nt, Human
aaaggaaauaaaauaaaaaccc

SEQ ID NO: 701540 - RNA, 19 nt, Human
aaaggguuuucuaucuaca

SEQ ID NO: 701541 - RNA, 20 nt, Human
aaaugccaaguucaccauaa

SEQ ID NO: 701542 - RNA, 21 nt, Human
aagcaaaaaaaggguuuucua

SEQ ID NO: 701543 - RNA, 21 nt, Human
aagcaccccaaggaaauguua

SEQ ID NO: 701544 - RNA, 22 nt, Human
aaggaagagauucagggcucug

SEQ ID NO: 701545 - RNA, 18 nt, Human
aaugaagaggcagauaga

SEQ ID NO: 701546 - RNA, 24 nt, Human
aaugaagaggcagauagaaaagga

SEQ ID NO: 701547 - RNA, 25 nt, Human
acaacagucuuccaaauuauucucc

SEQ ID NO: 701548 - RNA, 23 nt, Human
acaaugcguauucagaaaaaucc

SEQ ID NO: 701549 - RNA, 26 nt, Human
accccaaggaaauguuaaaagcaaag

SEQ ID NO: 701550 - RNA, 19 nt, Human
agacaugguaaaacaggag

SEQ ID NO: 701551 - RNA, 23 nt, Human
agagaggagagagcagaaaaaga

SEQ ID NO: 701552 - RNA, 23 nt, Human
agaggagagagcagaaaaagaga

SEQ ID NO: 701553 - RNA, 21 nt, Human
agauagaaaaggagagacuga

SEQ ID NO: 701554 - RNA, 22 nt, Human
aggaagagauucagggcucuga

SEQ ID NO: 701555 - RNA, 18 nt, Human
aguggucacugugaagug

SEQ ID NO: 701556 - RNA, 20 nt, Human
aucuuuuuuuuuuuuuuuuu

SEQ ID NO: 701557 - RNA, 22 nt, Human
auuauucuccucuggauauuag

SEQ ID NO: 701558 - RNA, 24 nt, Human
caagauucccauucacaaaugcca

SEQ ID NO: 701559 - RNA, 22 nt, Human
caagcaccccaaggaaauguua

SEQ ID NO: 701560 - RNA, 23 nt, Human
caauccaggugcagagccgggaa

SEQ ID NO: 701561 - RNA, 21 nt, Human
caccauaaaagcagauaauuc

SEQ ID NO: 701562 - RNA, 23 nt, Human
caccuuugggucuagaguguauu

SEQ ID NO: 701563 - RNA, 21 nt, Human
caggaggacacugaugcuaca

SEQ ID NO: 701564 - RNA, 19 nt, Human
cauuuguugcacuguucuc

SEQ ID NO: 701565 - RNA, 22 nt, Human
ccaaaaaacauauguacaagac

SEQ ID NO: 701566 - RNA, 20 nt, Human
ccaagcaccccaaggaaaug

SEQ ID NO: 701567 - RNA, 23 nt, Human
ccacguuuuacuccuguguucuu

SEQ ID NO: 701568 - RNA, 23 nt, Human
ccacucaaccucccagggacggg

SEQ ID NO: 701569 - RNA, 24 nt, Human
ccauacagaucuucccuacaagac

SEQ ID NO: 701570 - RNA, 19 nt, Human
cccaauuucaugcccuuga

SEQ ID NO: 701571 - RNA, 18 nt, Human
ccccaccccugcacagag

SEQ ID NO: 701572 - RNA, 23 nt, Human
cccccgaauggcaaugcuggcau

SEQ ID NO: 701573 - RNA, 26 nt, Human
cccuccuaugaacaaguguucuucuc

SEQ ID NO: 701574 - RNA, 19 nt, Human
ccuccuaugaacaaguguu

SEQ ID NO: 701575 - RNA, 24 nt, Human
cgagaaagaauccggugcuccuug

SEQ ID NO: 701576 - RNA, 21 nt, Human
cugaaggccgacguggcccag

SEQ ID NO: 701577 - RNA, 22 nt, Human
gaaaaaaaaaacagacuaggag

SEQ ID NO: 701578 - RNA, 18 nt, Human
gaaauaaaauaaaaaccc

SEQ ID NO: 701579 - RNA, 22 nt, Human
gacccuguuuuuccucguguuc

SEQ ID NO: 701580 - RNA, 20 nt, Human
gagaaagaauccggugcucc

SEQ ID NO: 701581 - RNA, 23 nt, Human
gagcucuaugacaagaauuggag

SEQ ID NO: 701582 - RNA, 21 nt, Human
gcagaacccgagaaagaaucc

SEQ ID NO: 701583 - RNA, 18 nt, Human
ggaaauaaaauaaaaacc

SEQ ID NO: 701584 - RNA, 19 nt, Human
ggaaggaaaaaagccgaua

SEQ ID NO: 701585 - RNA, 19 nt, Human
ggcagauagaaaaggagag

SEQ ID NO: 701586 - RNA, 21 nt, Human
ggcauuuguugcacuguucuc

SEQ ID NO: 701587 - RNA, 22 nt, Human
uaaaaacccauucuaaaacuaa

SEQ ID NO: 701588 - RNA, 19 nt, Human
uagacccgcccccaccccu

SEQ ID NO: 701589 - RNA, 18 nt, Human
uauauauauauguauaua

SEQ ID NO: 701590 - RNA, 18 nt, Human
uauauauauguauauaua

SEQ ID NO: 701591 - RNA, 18 nt, Human
uauauauguauauauaua

SEQ ID NO: 701592 - RNA, 19 nt, Human
uauauauguauauauauau

SEQ ID NO: 701593 - RNA, 18 nt, Human
uauauguauauauauaua

SEQ ID NO: 701594 - RNA, 18 nt, Human
uauauguauauauauaua

SEQ ID NO: 701595 - RNA, 23 nt, Human
uauauguauauauauauaagggu

SEQ ID NO: 701596 - RNA, 22 nt, Human
uauguauauauauauaagggua

SEQ ID NO: 701597 - RNA, 24 nt, Human
uauguauauauauauaaggguaca

SEQ ID NO: 701598 - RNA, 21 nt, Human
uccauacagaucuucccuaca

SEQ ID NO: 701599 - RNA, 21 nt, Human
uccccacaacagucuuccaaa

SEQ ID NO: 701600 - RNA, 22 nt, Human
ucucugaaggccgacguggccc

SEQ ID NO: 701601 - RNA, 24 nt, Human
ucuucuuaguacucuguagugguc

SEQ ID NO: 701602 - RNA, 22 nt, Human
ugagagaggagagagcagaaaa

SEQ ID NO: 701603 - RNA, 23 nt, Human
ugaguacaugcagccuuucaacc

SEQ ID NO: 701604 - RNA, 22 nt, Human
ugcagagccgggaaaaaaaaaa

SEQ ID NO: 701605 - RNA, 23 nt, Human
ugcagagccgggaaaaaaaaaac

SEQ ID NO: 701606 - RNA, 25 nt, Human
ugugaacaagauucccauucacaaa

SEQ ID NO: 701607 - RNA, 24 nt, Human
uguuccccacaacagucuuccaaa

SEQ ID NO: 701608 - RNA, 23 nt, Human
uucacaaaugccaaguucaccau

SEQ ID NO: 701609 - RNA, 23 nt, Human
uucagggcucugacugguggggc

SEQ ID NO: 701610 - RNA, 21 nt, Human
uuggaguguugcuugcaaauc

SEQ ID NO: 701611 - RNA, 25 nt, Human
uuucuuguuuuugcuagcaauuaau

SEQ ID NO: 701612 - RNA, 18 nt, Human
aagccuuucccauucccc

SEQ ID NO: 701613 - RNA, 24 nt, Human
aagcugcuccccagagcucccccg

SEQ ID NO: 701614 - RNA, 19 nt, Human
acagccaaggaugugacac

SEQ ID NO: 701615 - RNA, 18 nt, Human
accaagccuuucccauuc

SEQ ID NO: 701616 - RNA, 22 nt, Human
accccucccuagaguccugccg

SEQ ID NO: 701617 - RNA, 19 nt, Human
agaggcaaauucccugagc

SEQ ID NO: 701618 - RNA, 23 nt, Human
agaggcaggggccucaugcucug

SEQ ID NO: 701619 - RNA, 22 nt, Human
aggcagagcuugcaaaguugug

SEQ ID NO: 701620 - RNA, 19 nt, Human
aggcuggaauuugagccca

SEQ ID NO: 701621 - RNA, 20 nt, Human
caacuccaugagguaggugu

SEQ ID NO: 701622 - RNA, 18 nt, Human
caaggagaggcaaauucc

SEQ ID NO: 701623 - RNA, 18 nt, Human
cacaacuccaugagguag

SEQ ID NO: 701624 - RNA, 22 nt, Human
caccaagccuuucccauucccc

SEQ ID NO: 701625 - RNA, 19 nt, Human
caccacaacuccaugaggu

SEQ ID NO: 701626 - RNA, 19 nt, Human
caccccucccuagaguccu

SEQ ID NO: 701627 - RNA, 20 nt, Human
cacuggguagggacagggag

SEQ ID NO: 701628 - RNA, 20 nt, Human
cagagcucccccgcugcagu

SEQ ID NO: 701629 - RNA, 20 nt, Human
caggcucucuucccaccuuu

SEQ ID NO: 701630 - RNA, 21 nt, Human
caggggcccugcaugccacuc

SEQ ID NO: 701631 - RNA, 20 nt, Human
cauggcaggggcccugcaug

SEQ ID NO: 701632 - RNA, 24 nt, Human
cauuucgcuuuguucuaucagagg

SEQ ID NO: 701633 - RNA, 21 nt, Human
cccacauuacagaugaggaaa

SEQ ID NO: 701634 - RNA, 25 nt, Human
cccauguaccaggcacuauuaagca

SEQ ID NO: 701635 - RNA, 19 nt, Human
cccgucugaggccagaucg

SEQ ID NO: 701636 - RNA, 20 nt, Human
ccguccugcuggcccuggcc

SEQ ID NO: 701637 - RNA, 21 nt, Human
ccuccuucugguucuuuucca

SEQ ID NO: 701638 - RNA, 23 nt, Human
ccuuggcagaagugcagguuguu

SEQ ID NO: 701639 - RNA, 26 nt, Human
cgcacccauggcaggggcccugcaug

SEQ ID NO: 701640 - RNA, 22 nt, Human
cugcauuuccuccuugcacugu

SEQ ID NO: 701641 - RNA, 20 nt, Human
cugccugcagaaaaggcuug

SEQ ID NO: 701642 - RNA, 22 nt, Human
gaacccaaggcagagcuugcaa

SEQ ID NO: 701643 - RNA, 20 nt, Human
gcaguugcccuggcugggaa

SEQ ID NO: 701644 - RNA, 20 nt, Human
gcaugggauugacagccaag

SEQ ID NO: 701645 - RNA, 19 nt, Human
gcaugggcaggcaugggag

SEQ ID NO: 701646 - RNA, 27 nt, Human
gccguccugcuggcccuggccuuggcc

SEQ ID NO: 701647 - RNA, 25 nt, Human
gcuggcccuggccuuggcagaagug

SEQ ID NO: 701648 - RNA, 18 nt, Human
ggagguggggcucuggac

SEQ ID NO: 701649 - RNA, 20 nt, Human
gucuacacaagcugcucccc

SEQ ID NO: 701650 - RNA, 20 nt, Human
uaccaggcacuauuaagcac

SEQ ID NO: 701651 - RNA, 20 nt, Human
ucaccacaacuccaugaggu

SEQ ID NO: 701652 - RNA, 22 nt, Human
uccccagagcucccccgcugca

SEQ ID NO: 701653 - RNA, 22 nt, Human
ucccugagcacuuugaauccau

SEQ ID NO: 701654 - RNA, 18 nt, Human
ucugaaacuccugccugc

SEQ ID NO: 701655 - RNA, 19 nt, Human
ugaagucacacagcuugug

SEQ ID NO: 701656 - RNA, 18 nt, Human
ugcccagccuccuucugg

SEQ ID NO: 701657 - RNA, 18 nt, Human
ugcccuggcugggaauga

SEQ ID NO: 701658 - RNA, 26 nt, Human
uggcagaagugcagguuguucugguu

SEQ ID NO: 701659 - RNA, 18 nt, Human
ugggauugacagccaagg

SEQ ID NO: 701660 - RNA, 21 nt, Human
ugguucuuuuccaggccuggu

SEQ ID NO: 701661 - RNA, 19 nt, Human
ugugaguggugaggcugga

SEQ ID NO: 701662 - RNA, 18 nt, Human
uuaaagacaugacuucau

SEQ ID NO: 701663 - RNA, 21 nt, Human
uucaucuucaccacaacucca

SEQ ID NO: 701664 - RNA, 23 nt, Human
uugcacugucauuucugccuugc

SEQ ID NO: 701665 - RNA, 20 nt, Human
aauuuucaacauaugcaggu

SEQ ID NO: 701666 - RNA, 19 nt, Human
caauaaauaauccuccccu

SEQ ID NO: 701667 - RNA, 19 nt, Human
caggugccuggggugguag

SEQ ID NO: 701668 - RNA, 22 nt, Human
ccccaaacuguccccaggagga

SEQ ID NO: 701669 - RNA, 20 nt, Human
ccugguggaaucucugccca

SEQ ID NO: 701670 - RNA, 20 nt, Human
cucaaaucuggcuggcucug

SEQ ID NO: 701671 - RNA, 20 nt, Human
cucaaccuuaucauagguca

SEQ ID NO: 701672 - RNA, 18 nt, Human
gucagucaguauugguaa

SEQ ID NO: 701673 - RNA, 24 nt, Human
uaaauacaauaaauaauccucccc

SEQ ID NO: 701674 - RNA, 20 nt, Human
uaauggacuaauuaaccugu

SEQ ID NO: 701675 - RNA, 21 nt, Human
uagccacaaaaauaagacuuu

SEQ ID NO: 701676 - RNA, 19 nt, Human
ucacaggugccuggggugg

SEQ ID NO: 701677 - RNA, 19 nt, Human
ucagcaucacaugucaguc

SEQ ID NO: 701678 - RNA, 22 nt, Human
uccccaaacuguccccaggagg

SEQ ID NO: 701679 - RNA, 18 nt, Human
uccugguggaaucucugc

SEQ ID NO: 701680 - RNA, 23 nt, Human
ucucucuguucagcgcgucucuu

SEQ ID NO: 701681 - RNA, 25 nt, Human
ucucugguuugguucccucaguugu

SEQ ID NO: 701682 - RNA, 24 nt, Human
ugaaaaaaguacauaauucaauau

SEQ ID NO: 701683 - RNA, 19 nt, Human
ugguagauuuaucuuggcc

SEQ ID NO: 701684 - RNA, 23 nt, Human
uguuggcucacaggugccugggg

SEQ ID NO: 701685 - RNA, 20 nt, Human
acaacauuucaacagcaaag

SEQ ID NO: 701686 - RNA, 19 nt, Human
accaaccgccccuuccucu

SEQ ID NO: 701687 - RNA, 19 nt, Human
aggaaaaggagugaaggga

SEQ ID NO: 701688 - RNA, 19 nt, Human
cacaaaugggagacuggca

SEQ ID NO: 701689 - RNA, 20 nt, Human
caccaaccgccccuuccucu

SEQ ID NO: 701690 - RNA, 22 nt, Human
ccacggaaaugucugucaccau

SEQ ID NO: 701691 - RNA, 25 nt, Human
ccaguagcaggcagcuuaggcuccu

SEQ ID NO: 701692 - RNA, 19 nt, Human
cugaguagcagacaacuga

SEQ ID NO: 701693 - RNA, 21 nt, Human
gcaccaaccgccccuuccucu

SEQ ID NO: 701694 - RNA, 21 nt, Human
gcccaguagcaggcagcuuag

SEQ ID NO: 701695 - RNA, 23 nt, Human
gcuccagucuucccccuugggua

SEQ ID NO: 701696 - RNA, 18 nt, Human
uagaauauuaggaagaaa

SEQ ID NO: 701697 - RNA, 18 nt, Human
uaggaagaaauguuggua

SEQ ID NO: 701698 - RNA, 22 nt, Human
uauagauggauggcauagguca

SEQ ID NO: 701699 - RNA, 25 nt, Human
ucuuagaaaaaaaaauuuccagacu

SEQ ID NO: 701700 - RNA, 20 nt, Human
uggaggccgcaccaaccgcc

SEQ ID NO: 701701 - RNA, 21 nt, Human
uggcauaggucacaaauggga

SEQ ID NO: 701702 - RNA, 21 nt, Human
aaaaacucuacccagacaaag

SEQ ID NO: 701703 - RNA, 18 nt, Human
aaaaagaaaccccccacu

SEQ ID NO: 701704 - RNA, 18 nt, Human
aaaaagaaaccccccacu

SEQ ID NO: 701705 - RNA, 23 nt, Human
aaacacggcuaaauaugggucac

SEQ ID NO: 701706 - RNA, 23 nt, Human
aaacacggcuaaauaugggucac

SEQ ID NO: 701707 - RNA, 19 nt, Human
aaacucuacccagacaaag

SEQ ID NO: 701708 - RNA, 21 nt, Human
aaccccccacucuuucccacu

SEQ ID NO: 701709 - RNA, 23 nt, Human
aagcauuaaaauacagaaaagcu

SEQ ID NO: 701710 - RNA, 22 nt, Human
aagcauuaaaauacagaaagcu

SEQ ID NO: 701711 - RNA, 20 nt, Human
accccccacucuuucccacu

SEQ ID NO: 701712 - RNA, 21 nt, Human
acgggaugggggcgggggccu

SEQ ID NO: 701713 - RNA, 21 nt, Human
acgggaugggggcgggggccu

SEQ ID NO: 701714 - RNA, 19 nt, Human
acucaaaaacucuacccag

SEQ ID NO: 701715 - RNA, 28 nt, Human
acugaacugcaaaaacucaaaaacucua

SEQ ID NO: 701716 - RNA, 28 nt, Human
acugaacugcaaaaacucaaaaacucua

SEQ ID NO: 701717 - RNA, 19 nt, Human
agacagagggauacugaac

SEQ ID NO: 701718 - RNA, 19 nt, Human
agacagagggauacugaac

SEQ ID NO: 701719 - RNA, 25 nt, Human
agcaacguggacgggaugggggcgg

SEQ ID NO: 701720 - RNA, 25 nt, Human
agcaacguggacgggaugggggcgg

SEQ ID NO: 701721 - RNA, 25 nt, Human
aggagccgcccccagaaccuccgcc

SEQ ID NO: 701722 - RNA, 19 nt, Human
aggaggaggaguccggacc

SEQ ID NO: 701723 - RNA, 22 nt, Human
aguagcugccuuguccaugguu

SEQ ID NO: 701724 - RNA, 18 nt, Human
auagccuuucugcuugcc

SEQ ID NO: 701725 - RNA, 23 nt, Human
caaaaacucuacccagacaaagu

SEQ ID NO: 701726 - RNA, 23 nt, Human
caaaaacucuacccagacaaagu

SEQ ID NO: 701727 - RNA, 20 nt, Human
caccgccacuggcauuccca

SEQ ID NO: 701728 - RNA, 18 nt, Human
caccgguggggcgggcug

SEQ ID NO: 701729 - RNA, 19 nt, Human
cacgacacagcaacgugga

SEQ ID NO: 701730 - RNA, 19 nt, Human
cacgacacagcaacgugga

SEQ ID NO: 701731 - RNA, 22 nt, Human
cagaaccuccgccguagccccc

SEQ ID NO: 701732 - RNA, 20 nt, Human
cauaaaaagaaaccccccac

SEQ ID NO: 701733 - RNA, 19 nt, Human
ccacagccgccggggucug

SEQ ID NO: 701734 - RNA, 21 nt, Human
ccaccaccgcccccgccgcca

SEQ ID NO: 701735 - RNA, 21 nt, Human
ccaccgcccccgccgccaccg

SEQ ID NO: 701736 - RNA, 20 nt, Human
ccagacauaaaaagaaaccc

SEQ ID NO: 701737 - RNA, 20 nt, Human
ccagacauaaaaagaaaccc

SEQ ID NO: 701738 - RNA, 19 nt, Human
ccauacccagcaccggcau

SEQ ID NO: 701739 - RNA, 20 nt, Human
ccaugguuauagccuuucug

SEQ ID NO: 701740 - RNA, 21 nt, Human
cccauagcuuccauacccagc

SEQ ID NO: 701741 - RNA, 22 nt, Human
ccccagaaccuccgccguagcc

SEQ ID NO: 701742 - RNA, 26 nt, Human
cccccaaaagccaccgguggggcggg

SEQ ID NO: 701743 - RNA, 20 nt, Human
cccccagaaccuccgccgua

SEQ ID NO: 701744 - RNA, 23 nt, Human
cccccagaaccuccgccguagcc

SEQ ID NO: 701745 - RNA, 25 nt, Human
cccccagaaccuccgccguagcccc

SEQ ID NO: 701746 - RNA, 21 nt, Human
ccccgggagcuguaguucgac

SEQ ID NO: 701747 - RNA, 20 nt, Human
ccccgugcggcugcuucuuc

SEQ ID NO: 701748 - RNA, 20 nt, Human
cccgugcggcugcuucuucc

SEQ ID NO: 701749 - RNA, 23 nt, Human
ccgcagccgccgccgccgcccuc

SEQ ID NO: 701750 - RNA, 21 nt, Human
ccgccacuggcauucccagaa

SEQ ID NO: 701751 - RNA, 19 nt, Human
ccgccgccaccgccacugg

SEQ ID NO: 701752 - RNA, 28 nt, Human
ccgccgccaccgccacuggcauucccag

SEQ ID NO: 701753 - RNA, 18 nt, Human
ccgccgcccuccugccac

SEQ ID NO: 701754 - RNA, 18 nt, Human
ccgccgccgcccuccugc

SEQ ID NO: 701755 - RNA, 25 nt, Human
ccgccuugugaggacugguaggagc

SEQ ID NO: 701756 - RNA, 24 nt, Human
cgaccgcagccgccgccgccgccc

SEQ ID NO: 701757 - RNA, 25 nt, Human
cgaccgcagccgccgccgccgcccu

SEQ ID NO: 701758 - RNA, 22 nt, Human
cgccgcccuccugccacagccg

SEQ ID NO: 701759 - RNA, 20 nt, Human
cgccugagccguagcuguuc

SEQ ID NO: 701760 - RNA, 21 nt, Human
cgggagcuguaguucgacugu

SEQ ID NO: 701761 - RNA, 22 nt, Human
cgggggcgagcgggcgggcggg

SEQ ID NO: 701762 - RNA, 18 nt, Human
cucaaaaacucuacccag

SEQ ID NO: 701763 - RNA, 24 nt, Human
cuccguacccauagcuuccauacc

SEQ ID NO: 701764 - RNA, 19 nt, Human
cugagccguagcuguuccc

SEQ ID NO: 701765 - RNA, 22 nt, Human
cugcaccucacgacacagcaac

SEQ ID NO: 701766 - RNA, 22 nt, Human
cugcaccucacgacacagcaac

SEQ ID NO: 701767 - RNA, 22 nt, Human
cugcuggguucaacugcaaugc

SEQ ID NO: 701768 - RNA, 22 nt, Human
cugguagcccgagccguaggag

SEQ ID NO: 701769 - RNA, 23 nt, Human
cugguagcccgagccguaggagg

SEQ ID NO: 701770 - RNA, 23 nt, Human
cuguucccgccgcuucggccucc

SEQ ID NO: 701771 - RNA, 23 nt, Human
gaagaggaggaggaggaguccgg

SEQ ID NO: 701772 - RNA, 19 nt, Human
gaaugacccagacauaaaa

SEQ ID NO: 701773 - RNA, 19 nt, Human
gaaugacccagacauaaaa

SEQ ID NO: 701774 - RNA, 24 nt, Human
gacgggaugggggcgggggccugg

SEQ ID NO: 701775 - RNA, 24 nt, Human
gacgggaugggggcgggggccugg

SEQ ID NO: 701776 - RNA, 22 nt, Human
gacugcugcuggcccugguggg

SEQ ID NO: 701777 - RNA, 18 nt, Human
gagaagaggaggaggagg

SEQ ID NO: 701778 - RNA, 23 nt, Human
gagccaccaccgcccccgccgcc

SEQ ID NO: 701779 - RNA, 20 nt, Human
gccacuguaguucuggccgg

SEQ ID NO: 701780 - RNA, 19 nt, Human
gcgagcgggcgggcgggca

SEQ ID NO: 701781 - RNA, 20 nt, Human
gcgagcgggcgggcgggcag

SEQ ID NO: 701782 - RNA, 22 nt, Human
ggaccgggggcgagcgggcggg

SEQ ID NO: 701783 - RNA, 21 nt, Human
ggacgggaugggggcgggggc

SEQ ID NO: 701784 - RNA, 21 nt, Human
ggacgggaugggggcgggggc

SEQ ID NO: 701785 - RNA, 21 nt, Human
ggacugguaggagcugggagg

SEQ ID NO: 701786 - RNA, 19 nt, Human
ggagcgcaggcagcugaca

SEQ ID NO: 701787 - RNA, 23 nt, Human
ggagcuguaguucgacugugagc

SEQ ID NO: 701788 - RNA, 21 nt, Human
ggcaccggugaguuguaguug

SEQ ID NO: 701789 - RNA, 22 nt, Human
ggcgggggccuggagggccagc

SEQ ID NO: 701790 - RNA, 24 nt, Human
gggagcuguaguucgacugugagc

SEQ ID NO: 701791 - RNA, 22 nt, Human
guaugaggagccgcccccagaa

SEQ ID NO: 701792 - RNA, 18 nt, Human
guggacgggaugggggcg

SEQ ID NO: 701793 - RNA, 18 nt, Human
guggacgggaugggggcg

SEQ ID NO: 701794 - RNA, 18 nt, Human
uaaaaagaaaccccccac

SEQ ID NO: 701795 - RNA, 20 nt, Human
uaaagcauuaaaauacagaa

SEQ ID NO: 701796 - RNA, 20 nt, Human
uaaagcauuaaaauacagaa

SEQ ID NO: 701797 - RNA, 27 nt, Human
uaacucacuucacaaaagcauuaacaa

SEQ ID NO: 701798 - RNA, 21 nt, Human
uaacugugaugcauaaaacuc

SEQ ID NO: 701799 - RNA, 21 nt, Human
uaacugugaugcauaaaacuc

SEQ ID NO: 701800 - RNA, 19 nt, Human
uaauggcaacuaacaaacc

SEQ ID NO: 701801 - RNA, 19 nt, Human
uaauggcaacuaacaaacc

SEQ ID NO: 701802 - RNA, 18 nt, Human
uacagaaagcucguuuaa

SEQ ID NO: 701803 - RNA, 23 nt, Human
uaccacuaacacgaagugugaau

SEQ ID NO: 701804 - RNA, 23 nt, Human
uaccacuaacacgaagugugaau

SEQ ID NO: 701805 - RNA, 18 nt, Human
uagcccccgugugacccu

SEQ ID NO: 701806 - RNA, 20 nt, Human
uagcuuccauacccagcacc

SEQ ID NO: 701807 - RNA, 22 nt, Human
uauaaaaacugaaacacuaaag

SEQ ID NO: 701808 - RNA, 21 nt, Human
uauuugucuacauucagcuua

SEQ ID NO: 701809 - RNA, 21 nt, Human
uauuugucuacauucagcuua

SEQ ID NO: 701810 - RNA, 21 nt, Human
uccccuucuucgaccgcagcc

SEQ ID NO: 701811 - RNA, 22 nt, Human
ucgaccgcagccgccgccgccg

SEQ ID NO: 701812 - RNA, 25 nt, Human
ucgaccgcagccgccgccgccgccc

SEQ ID NO: 701813 - RNA, 22 nt, Human
ucuacauucagcuuaauucaga

SEQ ID NO: 701814 - RNA, 22 nt, Human
ucuacauucagcuuaauucaga

SEQ ID NO: 701815 - RNA, 20 nt, Human
ugaacugcaaaaacucaaaa

SEQ ID NO: 701816 - RNA, 20 nt, Human
ugaacugcaaaaacucaaaa

SEQ ID NO: 701817 - RNA, 24 nt, Human
ugaacugcaaaaacucaaaaacuc

SEQ ID NO: 701818 - RNA, 24 nt, Human
ugaacugcaaaaacucaaaaacuc

SEQ ID NO: 701819 - RNA, 20 nt, Human
ugaguuaccacuaacacgaa

SEQ ID NO: 701820 - RNA, 20 nt, Human
ugaguuaccacuaacacgaa

SEQ ID NO: 701821 - RNA, 21 nt, Human
ugccacagccgccggggucug

SEQ ID NO: 701822 - RNA, 24 nt, Human
ugcccccaaaagccaccggugggg

SEQ ID NO: 701823 - RNA, 22 nt, Human
ugccccgccugagccguagcug

SEQ ID NO: 701824 - RNA, 25 nt, Human
ugccugaaugacccagacauaaaag

SEQ ID NO: 701825 - RNA, 25 nt, Human
ugccugaaugacccagacauaaaag

SEQ ID NO: 701826 - RNA, 21 nt, Human
ugcgagaagaggaggaggagg

SEQ ID NO: 701827 - RNA, 19 nt, Human
uggagggccagcugacaug

SEQ ID NO: 701828 - RNA, 25 nt, Human
ugggggcgggggccuggagggccag

SEQ ID NO: 701829 - RNA, 19 nt, Human
uggugggacugguagcccg

SEQ ID NO: 701830 - RNA, 22 nt, Human
ugucuggaaaucaaacuuuugc

SEQ ID NO: 701831 - RNA, 23 nt, Human
uuuaacucacuucaacaaaaagc

SEQ ID NO: 701832 - RNA, 25 nt, Human
uuuuuuuuuuuuaguuuuguuuuuu

SEQ ID NO: 701833 - RNA, 24 nt, Human
uuuuuuuuuuuuuuuuuuaguuuu

SEQ ID NO: 701834 - RNA, 22 nt, Human
caaugugcacacacacaaaaug

SEQ ID NO: 701835 - RNA, 22 nt, Human
cacaaaacacacaaugugcaca

SEQ ID NO: 701836 - RNA, 23 nt, Human
cggcagcagcgacagacacucag

SEQ ID NO: 701837 - RNA, 21 nt, Human
gagaaaccuuuauuuacaacc

SEQ ID NO: 701838 - RNA, 19 nt, Human
gaggcuggguggaggcggc

SEQ ID NO: 701839 - RNA, 19 nt, Human
gcacacacacaaaaugaac

SEQ ID NO: 701840 - RNA, 21 nt, Human
ggcggaggcuggguggaggcg

SEQ ID NO: 701841 - RNA, 24 nt, Human
uaccaugcgugcuccuggccgcgc

SEQ ID NO: 701842 - RNA, 25 nt, Human
uauuuacaaccaugggagucccaca

SEQ ID NO: 701843 - RNA, 18 nt, Human
ugugcacacacacaaaau

SEQ ID NO: 701844 - RNA, 20 nt, Human
ugugcacacacacaaaauga

SEQ ID NO: 701845 - RNA, 23 nt, Human
uuuuuuuuuuuuuuuuuuuuagg

SEQ ID NO: 701846 - RNA, 21 nt, Human
aagcaucuucuacagacaccc

SEQ ID NO: 701847 - RNA, 25 nt, Human
accacaguuuaauggaggaagcauc

SEQ ID NO: 701848 - RNA, 21 nt, Human
auggaggaagcaucuucuaca

SEQ ID NO: 701849 - RNA, 21 nt, Human
cagucuuccagaaccuccuca

SEQ ID NO: 701850 - RNA, 23 nt, Human
ccagucuuccagaaccuccucag

SEQ ID NO: 701851 - RNA, 25 nt, Human
cccaacugcugccccagucuuccaa

SEQ ID NO: 701852 - RNA, 19 nt, Human
uccccaacugcugccccag

SEQ ID NO: 701853 - RNA, 21 nt, Human
uccccaacugcugccccaguc

SEQ ID NO: 701854 - RNA, 22 nt, Human
uccccaacugcugccccagucu

SEQ ID NO: 701855 - RNA, 21 nt, Human
ucuacagacacccagacaucu

SEQ ID NO: 701856 - RNA, 19 nt, Human
ugacccaugcuucuucccc

SEQ ID NO: 701857 - RNA, 20 nt, Human
ugccccagucuuccagaacc

SEQ ID NO: 701858 - RNA, 24 nt, Human
ugccccagucuuccagaaccuccu

SEQ ID NO: 701859 - RNA, 24 nt, Human
ugcuucuuccccuugauauucuca

SEQ ID NO: 701860 - RNA, 23 nt, Human
agugacaggcaggggcuguccag

SEQ ID NO: 701861 - RNA, 22 nt, Human
cacagcccacccccauucccuc

SEQ ID NO: 701862 - RNA, 21 nt, Human
cagcagcccagcuccagagug

SEQ ID NO: 701863 - RNA, 22 nt, Human
cagcucuguccggggucggaga

SEQ ID NO: 701864 - RNA, 20 nt, Human
ccauucccucccucccgccc

SEQ ID NO: 701865 - RNA, 18 nt, Human
ccccauucccucccuccc

SEQ ID NO: 701866 - RNA, 19 nt, Human
cccgcccuccuggcccugg

SEQ ID NO: 701867 - RNA, 18 nt, Human
cccucccucccgcccucc

SEQ ID NO: 701868 - RNA, 21 nt, Human
ccgcccccacguugcccuggg

SEQ ID NO: 701869 - RNA, 24 nt, Human
ccgcccccacguugcccuggggcc

SEQ ID NO: 701870 - RNA, 21 nt, Human
ccgcccuccuggcccuggcca

SEQ ID NO: 701871 - RNA, 25 nt, Human
ccgccgccggccaaccaacgacgcu

SEQ ID NO: 701872 - RNA, 21 nt, Human
ccggggucggagagggggucc

SEQ ID NO: 701873 - RNA, 22 nt, Human
ccucccgcccuccuggcccugg

SEQ ID NO: 701874 - RNA, 25 nt, Human
ccucccgcccuccuggcccuggcca

SEQ ID NO: 701875 - RNA, 22 nt, Human
ccugaggcagcagcagcccagc

SEQ ID NO: 701876 - RNA, 18 nt, Human
gcucgcgccacacccuuc

SEQ ID NO: 701877 - RNA, 19 nt, Human
uccggggucggagaggggg

SEQ ID NO: 701878 - RNA, 22 nt, Human
uccuggcccuggccagcucagc

SEQ ID NO: 701879 - RNA, 21 nt, Human
ugaggcagcagcagcccagcu

SEQ ID NO: 701880 - RNA, 18 nt, Human
ugcgcacagcccaccccc

SEQ ID NO: 701881 - RNA, 21 nt, Human
uguccggggucggagaggggg

SEQ ID NO: 701882 - RNA, 24 nt, Human
aaagugcugggauuacaggcguga

SEQ ID NO: 701883 - RNA, 27 nt, Human
aaauagcugagauuacaggcacgagcc

SEQ ID NO: 701884 - RNA, 23 nt, Human
aacacaauucuacacaccugccu

SEQ ID NO: 701885 - RNA, 25 nt, Human
aagugauucuccugccucagccucc

SEQ ID NO: 701886 - RNA, 19 nt, Human
aagugcugggauuacaggc

SEQ ID NO: 701887 - RNA, 19 nt, Human
aagugcugggauuacaggc

SEQ ID NO: 701888 - RNA, 26 nt, Human
aagugcugggauuacaggcgugagcc

SEQ ID NO: 701889 - RNA, 22 nt, Human
aaucaaaucgaaacuucgggaa

SEQ ID NO: 701890 - RNA, 30 nt, Human
accagcuccgccagccgcuccgcgcgcgcc

SEQ ID NO: 701891 - RNA, 24 nt, Human
accauauuggccaggcuggucucg

SEQ ID NO: 701892 - RNA, 18 nt, Human
accuccucagccucccaa

SEQ ID NO: 701893 - RNA, 18 nt, Human
accucgcccggccccaca

SEQ ID NO: 701894 - RNA, 18 nt, Human
acgggguuucaccauauu

SEQ ID NO: 701895 - RNA, 20 nt, Human
acgggguuucaccauauugg

SEQ ID NO: 701896 - RNA, 24 nt, Human
acgggguuucaccauauuggccag

SEQ ID NO: 701897 - RNA, 21 nt, Human
acuccccggaacucccugcug

SEQ ID NO: 701898 - RNA, 19 nt, Human
agauuacaggcacgagcca

SEQ ID NO: 701899 - RNA, 20 nt, Human
aggaagcggacuacguuggc

SEQ ID NO: 701900 - RNA, 25 nt, Human
aggcuggagugcaguggcacgaucu

SEQ ID NO: 701901 - RNA, 21 nt, Human
agguucaagugauucuccugc

SEQ ID NO: 701902 - RNA, 22 nt, Human
agguucaagugauucuccugcc

SEQ ID NO: 701903 - RNA, 23 nt, Human
agguucaagugauucuccugccu

SEQ ID NO: 701904 - RNA, 24 nt, Human
agugauucuccugccucagccucc

SEQ ID NO: 701905 - RNA, 20 nt, Human
agugcaguggcacgaucucg

SEQ ID NO: 701906 - RNA, 23 nt, Human
agugcaguggcacgaucucggcu

SEQ ID NO: 701907 - RNA, 24 nt, Human
agugcaguggcacgaucucggcuc

SEQ ID NO: 701908 - RNA, 24 nt, Human
augauccgaccuccucagccuccc

SEQ ID NO: 701909 - RNA, 24 nt, Human
caaagugcugggauuacaggcgug

SEQ ID NO: 701910 - RNA, 23 nt, Human
caaauagcugagauuacaggcac

SEQ ID NO: 701911 - RNA, 22 nt, Human
caagugauucuccugccucagc

SEQ ID NO: 701912 - RNA, 26 nt, Human
caauagagacgggguuucaccauauu

SEQ ID NO: 701913 - RNA, 20 nt, Human
cacaggcuccccaacacugg

SEQ ID NO: 701914 - RNA, 21 nt, Human
caccauauuggccaggcuggu

SEQ ID NO: 701915 - RNA, 24 nt, Human
caccauauuggccaggcuggucuc

SEQ ID NO: 701916 - RNA, 27 nt, Human
caccauauuggccaggcuggucucgaa

SEQ ID NO: 701917 - RNA, 23 nt, Human
caccccccaccccagcugauuuc

SEQ ID NO: 701918 - RNA, 24 nt, Human
cacuauggccggcuaauuuuugua

SEQ ID NO: 701919 - RNA, 21 nt, Human
cacugcaaccuccgccuccca

SEQ ID NO: 701920 - RNA, 18 nt, Human
cagcauggacaugguugg

SEQ ID NO: 701921 - RNA, 21 nt, Human
cagcugggguucaggugcaca

SEQ ID NO: 701922 - RNA, 23 nt, Human
caggcuccccaacacuggccucc

SEQ ID NO: 701923 - RNA, 20 nt, Human
cagucgagcaagugcaggug

SEQ ID NO: 701924 - RNA, 24 nt, Human
cauauuggccaggcuggucucgaa

SEQ ID NO: 701925 - RNA, 24 nt, Human
caugauccgaccuccucagccucc

SEQ ID NO: 701926 - RNA, 22 nt, Human
ccaaagugcugggauuacaggc

SEQ ID NO: 701927 - RNA, 22 nt, Human
ccaaagugcugggauuacaggc

SEQ ID NO: 701928 - RNA, 24 nt, Human
ccaaagugcugggauuacaggcgu

SEQ ID NO: 701929 - RNA, 23 nt, Human
ccaaggcccacugagccugaggc

SEQ ID NO: 701930 - RNA, 24 nt, Human
ccaauagagacgggguuucaccau

SEQ ID NO: 701931 - RNA, 23 nt, Human
ccagcugauuucagugcgcagcu

SEQ ID NO: 701932 - RNA, 18 nt, Human
cccaaauagcugagauua

SEQ ID NO: 701933 - RNA, 23 nt, Human
cccacaaucuuaaccacugucca

SEQ ID NO: 701934 - RNA, 23 nt, Human
cccagguucaagugauucuccuc

SEQ ID NO: 701935 - RNA, 23 nt, Human
cccagguucaagugauucuccug

SEQ ID NO: 701936 - RNA, 19 nt, Human
cccgagugugggagcgagg

SEQ ID NO: 701937 - RNA, 18 nt, Human
ccgaccuccucagccucc

SEQ ID NO: 701938 - RNA, 20 nt, Human
ccgacuucaccgccaggagc

SEQ ID NO: 701939 - RNA, 24 nt, Human
ccgccucccagguucaagugauuc

SEQ ID NO: 701940 - RNA, 23 nt, Human
ccgggccucugguuuccacuuug

SEQ ID NO: 701941 - RNA, 23 nt, Human
ccguagcugcgcucuugccccca

SEQ ID NO: 701942 - RNA, 20 nt, Human
ccuccagcgccaccagcucc

SEQ ID NO: 701943 - RNA, 19 nt, Human
ccuccauguucccaccagc

SEQ ID NO: 701944 - RNA, 24 nt, Human
ccucccagguucaagugauucucc

SEQ ID NO: 701945 - RNA, 25 nt, Human
cgagugguccucaggccuagcugca

SEQ ID NO: 701946 - RNA, 22 nt, Human
cgccucccagguucaagugauu

SEQ ID NO: 701947 - RNA, 21 nt, Human
cgcucuugcccccacgugcgc

SEQ ID NO: 701948 - RNA, 19 nt, Human
cggcgcacuggccgcccgc

SEQ ID NO: 701949 - RNA, 24 nt, Human
cgggguuucaccauauuggccagg

SEQ ID NO: 701950 - RNA, 26 nt, Human
cuacacaccugccuccacaggcuccc

SEQ ID NO: 701951 - RNA, 24 nt, Human
cucacugcaaccuccgccucccag

SEQ ID NO: 701952 - RNA, 22 nt, Human
cucagaucccccaccucccgaa

SEQ ID NO: 701953 - RNA, 21 nt, Human
cuccacugcucaagaggaccc

SEQ ID NO: 701954 - RNA, 18 nt, Human
cuccauguucccaccagc

SEQ ID NO: 701955 - RNA, 21 nt, Human
cucccaaauagcugagauuac

SEQ ID NO: 701956 - RNA, 24 nt, Human
cucccaauagagacgggguuucac

SEQ ID NO: 701957 - RNA, 18 nt, Human
cucccagguucaagugau

SEQ ID NO: 701958 - RNA, 20 nt, Human
cuccgcgcgcgccucguccu

SEQ ID NO: 701959 - RNA, 24 nt, Human
cuccucagccucccaaagugcugg

SEQ ID NO: 701960 - RNA, 22 nt, Human
cucggccgccggcgcacuuggc

SEQ ID NO: 701961 - RNA, 23 nt, Human
cucguagugcucaggcgccgacu

SEQ ID NO: 701962 - RNA, 18 nt, Human
cucuugaccucaugaucc

SEQ ID NO: 701963 - RNA, 19 nt, Human
cugauccuggcucccacgc

SEQ ID NO: 701964 - RNA, 23 nt, Human
cugcaaccuccgccucccagguu

SEQ ID NO: 701965 - RNA, 24 nt, Human
cugcaaccuccgccucccagguuc

SEQ ID NO: 701966 - RNA, 23 nt, Human
cugccucagccucccaaauagcu

SEQ ID NO: 701967 - RNA, 21 nt, Human
cuugcccccacgugcgccgga

SEQ ID NO: 701968 - RNA, 21 nt, Human
cuuguaaacaguggaaaucac

SEQ ID NO: 701969 - RNA, 21 nt, Human
gaaaucacaacugacauuugu

SEQ ID NO: 701970 - RNA, 22 nt, Human
gaccucaugauccgaccuccuc

SEQ ID NO: 701971 - RNA, 24 nt, Human
gagacgggguuucaccauauuggc

SEQ ID NO: 701972 - RNA, 20 nt, Human
gaggggcccggaauucuugc

SEQ ID NO: 701973 - RNA, 18 nt, Human
gauuacaggcacgagcca

SEQ ID NO: 701974 - RNA, 22 nt, Human
gauuacaggcacgagccacuau

SEQ ID NO: 701975 - RNA, 18 nt, Human
gauuacaggcgugagcca

SEQ ID NO: 701976 - RNA, 20 nt, Human
gauuacaggcgugagccacc

SEQ ID NO: 701977 - RNA, 24 nt, Human
gauuacaggcgugagccaccucgc

SEQ ID NO: 701978 - RNA, 18 nt, Human
gcagccagccagucgagc

SEQ ID NO: 701979 - RNA, 22 nt, Human
gccagccgcuccgcgcgcgccu

SEQ ID NO: 701980 - RNA, 20 nt, Human
gccauuagcuuugguugggg

SEQ ID NO: 701981 - RNA, 19 nt, Human
gcccaggcuggagugcagu

SEQ ID NO: 701982 - RNA, 23 nt, Human
gcccaggcuggagugcaguggca

SEQ ID NO: 701983 - RNA, 25 nt, Human
gccugucucugacccguggggguga

SEQ ID NO: 701984 - RNA, 25 nt, Human
gcucugucgcccaggcuggagugca

SEQ ID NO: 701985 - RNA, 21 nt, Human
gcugucugggaaugccacggc

SEQ ID NO: 701986 - RNA, 20 nt, Human
ggaagcgggauccaccugau

SEQ ID NO: 701987 - RNA, 21 nt, Human
ggagauggagccaggauguag

SEQ ID NO: 701988 - RNA, 23 nt, Human
ggcauuuuccacaccccccaccc

SEQ ID NO: 701989 - RNA, 18 nt, Human
ggggcugaagccgcccaa

SEQ ID NO: 701990 - RNA, 23 nt, Human
gggguuucaccauauuggccagg

SEQ ID NO: 701991 - RNA, 19 nt, Human
ggucucgaacucuugaccu

SEQ ID NO: 701992 - RNA, 23 nt, Human
gucagcccagcuccagcuccacu

SEQ ID NO: 701993 - RNA, 24 nt, Human
gugauucuccugccucagccuccc

SEQ ID NO: 701994 - RNA, 19 nt, Human
gugggagcgaggggcccgg

SEQ ID NO: 701995 - RNA, 24 nt, Human
uaauuuuuguacucccaauagaga

SEQ ID NO: 701996 - RNA, 18 nt, Human
uacaggcgugagccaccu

SEQ ID NO: 701997 - RNA, 18 nt, Human
uagccgagugguccucag

SEQ ID NO: 701998 - RNA, 19 nt, Human
ucaagugauucuccugccu

SEQ ID NO: 701999 - RNA, 19 nt, Human
ucacugcaaccuccgccuc

SEQ ID NO: 702000 - RNA, 23 nt, Human
ucacugcaaccuccgccucccag

SEQ ID NO: 702001 - RNA, 24 nt, Human
ucacugcaaccuccgccucccagg

SEQ ID NO: 702002 - RNA, 27 nt, Human
ucacugcaaccuccgccucccagguuc

SEQ ID NO: 702003 - RNA, 21 nt, Human
ucacuuguaaacaguggaaau

SEQ ID NO: 702004 - RNA, 21 nt, Human
ucagccucccaaauagcugag

SEQ ID NO: 702005 - RNA, 22 nt, Human
uccacaggcuccccaacacugg

SEQ ID NO: 702006 - RNA, 24 nt, Human
ucccaaagugcugggauuacaggc

SEQ ID NO: 702007 - RNA, 24 nt, Human
ucccaaauagcugagauuacaggc

SEQ ID NO: 702008 - RNA, 21 nt, Human
ucccagguucaagugauucuc

SEQ ID NO: 702009 - RNA, 24 nt, Human
ucccagguucaagugauucuccug

SEQ ID NO: 702010 - RNA, 18 nt, Human
uccccaacacuggccucc

SEQ ID NO: 702011 - RNA, 19 nt, Human
ucccugcuggguuguccaa

SEQ ID NO: 702012 - RNA, 19 nt, Human
uccgaccuccucagccucc

SEQ ID NO: 702013 - RNA, 18 nt, Human
uccgcgcgcgccucgucc

SEQ ID NO: 702014 - RNA, 21 nt, Human
uccucagccucccaaagugcu

SEQ ID NO: 702015 - RNA, 20 nt, Human
uccucggggcccggggugcc

SEQ ID NO: 702016 - RNA, 24 nt, Human
ucgcccaggcuggagugcaguggc

SEQ ID NO: 702017 - RNA, 18 nt, Human
ucgcgcgccuccagcgcc

SEQ ID NO: 702018 - RNA, 22 nt, Human
ucucagaucccccaccucccga

SEQ ID NO: 702019 - RNA, 23 nt, Human
ucucagaucccccaccucccgaa

SEQ ID NO: 702020 - RNA, 26 nt, Human
ucuccugccucagccucccaaauagc

SEQ ID NO: 702021 - RNA, 21 nt, Human
ucucgaacucuugaccucaug

SEQ ID NO: 702022 - RNA, 24 nt, Human
ucugucgcccaggcuggagugcag

SEQ ID NO: 702023 - RNA, 22 nt, Human
ucuugcucugucgcccaggcug

SEQ ID NO: 702024 - RNA, 23 nt, Human
ucuugcucugucgcccaggcugg

SEQ ID NO: 702025 - RNA, 24 nt, Human
ucuugcucugucgcccaggcugga

SEQ ID NO: 702026 - RNA, 18 nt, Human
ugaagccgcccaacuggc

SEQ ID NO: 702027 - RNA, 21 nt, Human
ugagauuacaggcacgagcca

SEQ ID NO: 702028 - RNA, 22 nt, Human
ugagauuacaggcacgagccac

SEQ ID NO: 702029 - RNA, 22 nt, Human
ugagauuacaggcacgagccac

SEQ ID NO: 702030 - RNA, 23 nt, Human
ugagauuacaggcacgagccacu

SEQ ID NO: 702031 - RNA, 24 nt, Human
ugagauuacaggcacgagccacua

SEQ ID NO: 702032 - RNA, 26 nt, Human
ugagauuacaggcacgagccacuaug

SEQ ID NO: 702033 - RNA, 23 nt, Human
ugagccugaggcccagaccccgg

SEQ ID NO: 702034 - RNA, 26 nt, Human
ugauccgaccuccucagccucccaaa

SEQ ID NO: 702035 - RNA, 20 nt, Human
ugauucuccugccucagccu

SEQ ID NO: 702036 - RNA, 22 nt, Human
ugcaguggcacgaucucggcuc

SEQ ID NO: 702037 - RNA, 23 nt, Human
ugccacggcccuggauuagucac

SEQ ID NO: 702038 - RNA, 23 nt, Human
ugcccaauagaaagaggcggcgc

SEQ ID NO: 702039 - RNA, 27 nt, Human
ugccucagccucccaaauagcugagau

SEQ ID NO: 702040 - RNA, 24 nt, Human
ugcucugucgcccaggcuggagug

SEQ ID NO: 702041 - RNA, 24 nt, Human
ugcugggauuacaggcgugagcca

SEQ ID NO: 702042 - RNA, 21 nt, Human
uggaggcccggggcugaagcc

SEQ ID NO: 702043 - RNA, 23 nt, Human
uggagugcaguggcacgaucucg

SEQ ID NO: 702044 - RNA, 24 nt, Human
uggagugcaguggcacgaucucgg

SEQ ID NO: 702045 - RNA, 24 nt, Human
uggccaggcuggucucgaacucuu

SEQ ID NO: 702046 - RNA, 22 nt, Human
uggccggagaacagguggcggc

SEQ ID NO: 702047 - RNA, 24 nt, Human
uggccuccauguucccaccagccu

SEQ ID NO: 702048 - RNA, 25 nt, Human
uggcucccacgcucccaggucuccc

SEQ ID NO: 702049 - RNA, 18 nt, Human
ugggauuacaggcgugag

SEQ ID NO: 702050 - RNA, 19 nt, Human
ugggauuacaggcgugagc

SEQ ID NO: 702051 - RNA, 21 nt, Human
ugggauuacaggcgugagcca

SEQ ID NO: 702052 - RNA, 22 nt, Human
ugggauuacaggcgugagccac

SEQ ID NO: 702053 - RNA, 23 nt, Human
ugggauuacaggcgugagccacc

SEQ ID NO: 702054 - RNA, 23 nt, Human
ugggauuacaggcgugagccacc

SEQ ID NO: 702055 - RNA, 26 nt, Human
ugggauuacaggcgugagccaccucg

SEQ ID NO: 702056 - RNA, 27 nt, Human
ugggauuacaggcgugagccaccucgc

SEQ ID NO: 702057 - RNA, 20 nt, Human
ugggcaggacguaagguacc

SEQ ID NO: 702058 - RNA, 21 nt, Human
uguaaacaguggaaaucacaa

SEQ ID NO: 702059 - RNA, 21 nt, Human
uucaagugauucuccugccuc

SEQ ID NO: 702060 - RNA, 23 nt, Human
uucaagugauucuccugccucag

SEQ ID NO: 702061 - RNA, 24 nt, Human
uucaagugauucuccugccucagc

SEQ ID NO: 702062 - RNA, 24 nt, Human
uugcucugucgcccaggcuggagu

SEQ ID NO: 702063 - RNA, 20 nt, Human
uuggaggcccggggcugaag

SEQ ID NO: 702064 - RNA, 24 nt, Human
uuucaccauauuggccaggcuggu

SEQ ID NO: 702065 - RNA, 20 nt, Human
uuugguuggggugagugugg

SEQ ID NO: 702066 - RNA, 18 nt, Human
uuuuccacaccccccacc

SEQ ID NO: 702067 - RNA, 21 nt, Human
aaaaccagcagcuuacaaucc

SEQ ID NO: 702068 - RNA, 20 nt, Human
aaaagaguagagcuaacuca

SEQ ID NO: 702069 - RNA, 24 nt, Human
aaacaaaaagaagcauuuccccca

SEQ ID NO: 702070 - RNA, 19 nt, Human
aaggaaaugauaaaauagc

SEQ ID NO: 702071 - RNA, 21 nt, Human
auaaugaacagcucuacuaua

SEQ ID NO: 702072 - RNA, 22 nt, Human
auacauuuuuauaagagaaaaa

SEQ ID NO: 702073 - RNA, 18 nt, Human
aucuuaacaagugugaaa

SEQ ID NO: 702074 - RNA, 21 nt, Human
auggcauuugaaagcaaacac

SEQ ID NO: 702075 - RNA, 24 nt, Human
cacugugcauuguaacaauaaggc

SEQ ID NO: 702076 - RNA, 20 nt, Human
cagaacgcagagccccuccg

SEQ ID NO: 702077 - RNA, 22 nt, Human
cagagccccuccgggccuucuc

SEQ ID NO: 702078 - RNA, 24 nt, Human
cagcgccacuacagaacgcagagc

SEQ ID NO: 702079 - RNA, 25 nt, Human
cagcucuacuauaacaaagaauaau

SEQ ID NO: 702080 - RNA, 22 nt, Human
ccaagcagcgccacuacagaac

SEQ ID NO: 702081 - RNA, 22 nt, Human
ccagcagcuuacaauccgccac

SEQ ID NO: 702082 - RNA, 23 nt, Human
ccgcucuucccagccgcaaaacc

SEQ ID NO: 702083 - RNA, 23 nt, Human
cucgccgcucuucccagccgcaa

SEQ ID NO: 702084 - RNA, 24 nt, Human
cucuucccagccgcaaaaccagca

SEQ ID NO: 702085 - RNA, 23 nt, Human
gaaauauccauaaugaacagcuc

SEQ ID NO: 702086 - RNA, 23 nt, Human
gaacauaucacaguaucaaauac

SEQ ID NO: 702087 - RNA, 20 nt, Human
gaacccucucgccgcucuuc

SEQ ID NO: 702088 - RNA, 23 nt, Human
gcaaaaccagcagcuuacaaucc

SEQ ID NO: 702089 - RNA, 23 nt, Human
gcagcagaaauauccauaaugaa

SEQ ID NO: 702090 - RNA, 22 nt, Human
gcgccacuacagaacgcagagc

SEQ ID NO: 702091 - RNA, 18 nt, Human
uaaaaaaaaauccaguuu

SEQ ID NO: 702092 - RNA, 20 nt, Human
uaacaagugugaaaaguacu

SEQ ID NO: 702093 - RNA, 18 nt, Human
uaacucaguaacaggcaa

SEQ ID NO: 702094 - RNA, 22 nt, Human
uaagagaaaaauaugaaggaaa

SEQ ID NO: 702095 - RNA, 23 nt, Human
uacccaaucuuuugccaaaauua

SEQ ID NO: 702096 - RNA, 20 nt, Human
uagauagaacuaaaugauca

SEQ ID NO: 702097 - RNA, 21 nt, Human
uaucacaaacaaaaagaagca

SEQ ID NO: 702098 - RNA, 19 nt, Human
uaucacaguaucaaauaca

SEQ ID NO: 702099 - RNA, 18 nt, Human
ucacaaacaaaaagaagc

SEQ ID NO: 702100 - RNA, 27 nt, Human
ucauaauauuccaaauguaugacaguu

SEQ ID NO: 702101 - RNA, 18 nt, Human
uccacugugcauuguaac

SEQ ID NO: 702102 - RNA, 18 nt, Human
ugaaaaguacuugcucuc

SEQ ID NO: 702103 - RNA, 22 nt, Human
uggccaaauuuuaucaaaaauc

SEQ ID NO: 702104 - RNA, 23 nt, Human
ugggaaacugcucuuuauuuaga

SEQ ID NO: 702105 - RNA, 21 nt, Human
uuugccaaaauuaauuuagau

SEQ ID NO: 702106 - RNA, 19 nt, Human
uuugugggaaacugcucuu

SEQ ID NO: 702107 - RNA, 18 nt, Human
uuuuuuuuuuuuuuuuug

SEQ ID NO: 702108 - RNA, 19 nt, Human
uuuuuuuuuuuuuuuuugu

SEQ ID NO: 702109 - RNA, 25 nt, Human
uuuuuuuuuuuuuuuuuuuuguggg

SEQ ID NO: 702110 - RNA, 18 nt, Human
aaaccgagacgauaaaag

SEQ ID NO: 702111 - RNA, 19 nt, Human
aagugggaggcaggcaugg

SEQ ID NO: 702112 - RNA, 22 nt, Human
aagugggaggcaggcauggugc

SEQ ID NO: 702113 - RNA, 23 nt, Human
aaucaauauuuuuguuugaaaga

SEQ ID NO: 702114 - RNA, 22 nt, Human
acaggaaugcagggacguucug

SEQ ID NO: 702115 - RNA, 21 nt, Human
acaguagcagccccauccaga

SEQ ID NO: 702116 - RNA, 24 nt, Human
agaaggccagucuguccaugaaag

SEQ ID NO: 702117 - RNA, 20 nt, Human
agacaggaaugcagggacgu

SEQ ID NO: 702118 - RNA, 24 nt, Human
agcagcagggacagccaaguggga

SEQ ID NO: 702119 - RNA, 24 nt, Human
aggaagaccacuccggagggccac

SEQ ID NO: 702120 - RNA, 24 nt, Human
caaauuuauaguacagcuaagaag

SEQ ID NO: 702121 - RNA, 18 nt, Human
cacaccuggggaggcccc

SEQ ID NO: 702122 - RNA, 21 nt, Human
cacaguagcagccccauccag

SEQ ID NO: 702123 - RNA, 20 nt, Human
caccuggggaggccccuggu

SEQ ID NO: 702124 - RNA, 19 nt, Human
cagcagcagggacagccaa

SEQ ID NO: 702125 - RNA, 22 nt, Human
cagccccacaguagcagcccca

SEQ ID NO: 702126 - RNA, 19 nt, Human
cagccccauccagaggaag

SEQ ID NO: 702127 - RNA, 19 nt, Human
caggcccggagccccaggc

SEQ ID NO: 702128 - RNA, 24 nt, Human
caggcccggagccccaggcgcugg

SEQ ID NO: 702129 - RNA, 21 nt, Human
cauggugcacaccuggggagg

SEQ ID NO: 702130 - RNA, 18 nt, Human
ccacacuucugcagcauc

SEQ ID NO: 702131 - RNA, 20 nt, Human
cccugcgucuucugguuccg

SEQ ID NO: 702132 - RNA, 20 nt, Human
ccgagacgauaaaagaacaa

SEQ ID NO: 702133 - RNA, 21 nt, Human
ccgggccggguagccuucguc

SEQ ID NO: 702134 - RNA, 26 nt, Human
ccucugcagcccuggcacugccgccc

SEQ ID NO: 702135 - RNA, 22 nt, Human
ccugugccaaguguccuugggg

SEQ ID NO: 702136 - RNA, 21 nt, Human
ccuucgucucggagccgggcg

SEQ ID NO: 702137 - RNA, 23 nt, Human
cgcccagcccuccaucucagcgg

SEQ ID NO: 702138 - RNA, 18 nt, Human
cggggcagaaacgcggcg

SEQ ID NO: 702139 - RNA, 24 nt, Human
cggggcccuaaaagcagaaaucaa

SEQ ID NO: 702140 - RNA, 21 nt, Human
cucugcagcccuggcacugcc

SEQ ID NO: 702141 - RNA, 18 nt, Human
cugcagcccuggcacugc

SEQ ID NO: 702142 - RNA, 21 nt, Human
cuggcuaagugagcugggcuc

SEQ ID NO: 702143 - RNA, 23 nt, Human
gcagccccauccagaggaagacc

SEQ ID NO: 702144 - RNA, 21 nt, Human
gccccauccagaggaagacca

SEQ ID NO: 702145 - RNA, 22 nt, Human
gcggaagugaggaggagggucc

SEQ ID NO: 702146 - RNA, 18 nt, Human
gcuggcuaagugagcugg

SEQ ID NO: 702147 - RNA, 19 nt, Human
ggccacaggccucugcagc

SEQ ID NO: 702148 - RNA, 28 nt, Human
gggacagccaagugggaggcaggcaugg

SEQ ID NO: 702149 - RNA, 21 nt, Human
ggugcacaccuggggaggccc

SEQ ID NO: 702150 - RNA, 22 nt, Human
gugcaggcccggagccccaggc

SEQ ID NO: 702151 - RNA, 19 nt, Human
guguccuuggggucccgcc

SEQ ID NO: 702152 - RNA, 25 nt, Human
uaaaagcagaaaucaauauuuuugg

SEQ ID NO: 702153 - RNA, 20 nt, Human
uagcagccccauccagagga

SEQ ID NO: 702154 - RNA, 22 nt, Human
uauaguacagcuaagaaggcca

SEQ ID NO: 702155 - RNA, 22 nt, Human
uccagaggaagaccacuccgga

SEQ ID NO: 702156 - RNA, 20 nt, Human
uccaugaaagggagccgagg

SEQ ID NO: 702157 - RNA, 23 nt, Human
ucccuuuaugucuggauggaaac

SEQ ID NO: 702158 - RNA, 22 nt, Human
uccuuggggucccgccaugguc

SEQ ID NO: 702159 - RNA, 21 nt, Human
ugcaggcccggagccccaggc

SEQ ID NO: 702160 - RNA, 23 nt, Human
ugcaggcccggagccccaggcgc

SEQ ID NO: 702161 - RNA, 23 nt, Human
uggggaggccccuggugcagaag

SEQ ID NO: 702162 - RNA, 22 nt, Human
uggugcagaagcagccccacag

SEQ ID NO: 702163 - RNA, 18 nt, Human
uguggccggguccugccc

SEQ ID NO: 702164 - RNA, 18 nt, Human
uugaaagaugcagucaug

SEQ ID NO: 702165 - RNA, 22 nt, Human
uugaagccagcauuucccuuua

SEQ ID NO: 702166 - RNA, 23 nt, Human
uuggcuaaaaccgagacgauaaa

SEQ ID NO: 702167 - RNA, 20 nt, Human
uuuuuuuuuugaagccagca

SEQ ID NO: 702168 - RNA, 18 nt, Human
uuuuuuuuuuuuuuuuug

SEQ ID NO: 702169 - RNA, 21 nt, Human
aaagcaaagcagaugagguca

SEQ ID NO: 702170 - RNA, 19 nt, Human
aaagcagaugaggucagcc

SEQ ID NO: 702171 - RNA, 20 nt, Human
aaagcagaugaggucagccc

SEQ ID NO: 702172 - RNA, 20 nt, Human
acaugccaaagcaaagcaga

SEQ ID NO: 702173 - RNA, 22 nt, Human
aggaggaggggguaaucuagaa

SEQ ID NO: 702174 - RNA, 21 nt, Human
aggcaaggcucacaugccaaa

SEQ ID NO: 702175 - RNA, 19 nt, Human
augcccccuuaggcaaggc

SEQ ID NO: 702176 - RNA, 21 nt, Human
caaagcaaagcagaugagguc

SEQ ID NO: 702177 - RNA, 20 nt, Human
caaagcagaugaggucagcc

SEQ ID NO: 702178 - RNA, 22 nt, Human
cagauaugcccccuuaggcaag

SEQ ID NO: 702179 - RNA, 22 nt, Human
cagcccauggggacagagucag

SEQ ID NO: 702180 - RNA, 21 nt, Human
ccaaagcaaagcagaugaggu

SEQ ID NO: 702181 - RNA, 19 nt, Human
ccgcccgaggcgcccgcgg

SEQ ID NO: 702182 - RNA, 23 nt, Human
ccucccugggcaauggaaagagc

SEQ ID NO: 702183 - RNA, 24 nt, Human
cgaggcgcccgcggagaaaacccu

SEQ ID NO: 702184 - RNA, 18 nt, Human
cgcccgcggagaaaaccc

SEQ ID NO: 702185 - RNA, 23 nt, Human
cuagggacccagauaugcccccu

SEQ ID NO: 702186 - RNA, 21 nt, Human
cuagggccuucuagggaccca

SEQ ID NO: 702187 - RNA, 19 nt, Human
cucacaugccaaagcaaag

SEQ ID NO: 702188 - RNA, 20 nt, Human
cucacaugccaaagcaaagc

SEQ ID NO: 702189 - RNA, 18 nt, Human
gaggcgcccgcggagaaa

SEQ ID NO: 702190 - RNA, 20 nt, Human
gcaauggaaagagcuuugga

SEQ ID NO: 702191 - RNA, 23 nt, Human
ggcaauggaaagagcuuuggaga

SEQ ID NO: 702192 - RNA, 23 nt, Human
uaaaaaagagcgagcguguggca

SEQ ID NO: 702193 - RNA, 22 nt, Human
uaaucuagaagccccacaucua

SEQ ID NO: 702194 - RNA, 18 nt, Human
ucacaugccaaagcaaag

SEQ ID NO: 702195 - RNA, 19 nt, Human
ucuccagguuccgcccgag

SEQ ID NO: 702196 - RNA, 20 nt, Human
uggagaccagcccaugggga

SEQ ID NO: 702197 - RNA, 19 nt, Human
uggcaggaggaggggguaa

SEQ ID NO: 702198 - RNA, 27 nt, Human
uuuuuuuuuuuuuuuuuuuuuuugggg

SEQ ID NO: 702199 - RNA, 20 nt, Human
agggaguugcugguuuauuu

SEQ ID NO: 702200 - RNA, 21 nt, Human
cagcagcacaugggggccucg

SEQ ID NO: 702201 - RNA, 20 nt, Human
caucuuggccacucagcagc

SEQ ID NO: 702202 - RNA, 21 nt, Human
cccccaguguauagggcagcc

SEQ ID NO: 702203 - RNA, 20 nt, Human
ccucagacagagacggguca

SEQ ID NO: 702204 - RNA, 22 nt, Human
cuccagggguguggagcgugcc

SEQ ID NO: 702205 - RNA, 19 nt, Human
cuggcaucaucuuggccac

SEQ ID NO: 702206 - RNA, 18 nt, Human
guauagggcagccuggca

SEQ ID NO: 702207 - RNA, 18 nt, Human
guggagcgugccgaggcc

SEQ ID NO: 702208 - RNA, 22 nt, Human
uaggagccuggguccagccccc

SEQ ID NO: 702209 - RNA, 19 nt, Human
uggccacucagcagcacau

SEQ ID NO: 702210 - RNA, 22 nt, Human
aaccugcugcuuucccuucuuu

SEQ ID NO: 702211 - RNA, 25 nt, Human
aagaagccccaaccugcugcuuucc

SEQ ID NO: 702212 - RNA, 22 nt, Human
aagaauucagccucccuuaacc

SEQ ID NO: 702213 - RNA, 18 nt, Human
accugcugcuuucccuuc

SEQ ID NO: 702214 - RNA, 22 nt, Human
cccaaccugcugcuuucccuuc

SEQ ID NO: 702215 - RNA, 21 nt, Human
cuccaagaauucagccucccu

SEQ ID NO: 702216 - RNA, 22 nt, Human
cuggugacaggcucugaaguug

SEQ ID NO: 702217 - RNA, 24 nt, Human
gcaaaguuuucugugucauuaaaa

SEQ ID NO: 702218 - RNA, 24 nt, Human
uccaagaauucagccucccuuaac

SEQ ID NO: 702219 - RNA, 26 nt, Human
ucccuucagcuccaagaauucagccu

SEQ ID NO: 702220 - RNA, 22 nt, Human
ugaaacuacaggauuccuuccg

SEQ ID NO: 702221 - RNA, 18 nt, Human
ugcaaaggugaugcagca

SEQ ID NO: 702222 - RNA, 20 nt, Human
ugccuucaguuuuaggaccu

SEQ ID NO: 702223 - RNA, 22 nt, Human
uggaaugaaguuuucccuucag

SEQ ID NO: 702224 - RNA, 24 nt, Human
uggcaaaguugcaaaggugaugca

SEQ ID NO: 702225 - RNA, 18 nt, Human
uggccacaagaagcccca

SEQ ID NO: 702226 - RNA, 23 nt, Human
uggccacaagaagccccaaccug

SEQ ID NO: 702227 - RNA, 23 nt, Human
uuggaaugaaguuuucccuucag

SEQ ID NO: 702228 - RNA, 18 nt, Human
aagugccuugcgcuagaa

SEQ ID NO: 702229 - RNA, 20 nt, Human
aauuuuauuuuucuucccac

SEQ ID NO: 702230 - RNA, 19 nt, Human
acccucuugguggggccug

SEQ ID NO: 702231 - RNA, 22 nt, Human
accugaaggaaauuuuauuuuu

SEQ ID NO: 702232 - RNA, 18 nt, Human
agggacagggaggggcug

SEQ ID NO: 702233 - RNA, 21 nt, Human
caccccagaaguugucccgag

SEQ ID NO: 702234 - RNA, 21 nt, Human
caccccgaggggcagacagug

SEQ ID NO: 702235 - RNA, 20 nt, Human
caggagaagugcccgcggcg

SEQ ID NO: 702236 - RNA, 22 nt, Human
ccagaaguugucccgagcccag

SEQ ID NO: 702237 - RNA, 25 nt, Human
ccccaccccagaaguugucccgagc

SEQ ID NO: 702238 - RNA, 23 nt, Human
ccuaggccaagaggcggagaggc

SEQ ID NO: 702239 - RNA, 22 nt, Human
ccucacuggaacaucuuucuca

SEQ ID NO: 702240 - RNA, 23 nt, Human
cgaaaccccuccgagagggcugg

SEQ ID NO: 702241 - RNA, 23 nt, Human
cgagcgggcgcgggcggcgagcc

SEQ ID NO: 702242 - RNA, 22 nt, Human
cgcagcuucuucccuucggucc

SEQ ID NO: 702243 - RNA, 25 nt, Human
cggcggcaggagccgcaaacuuucu

SEQ ID NO: 702244 - RNA, 23 nt, Human
cggggagagcccaggagaagugc

SEQ ID NO: 702245 - RNA, 19 nt, Human
cuacagcccggcccaggug

SEQ ID NO: 702246 - RNA, 25 nt, Human
cuccuaggccaagaggcggagaggc

SEQ ID NO: 702247 - RNA, 20 nt, Human
cucgaagggacagggagggg

SEQ ID NO: 702248 - RNA, 20 nt, Human
cuugcgcuagaauuucugac

SEQ ID NO: 702249 - RNA, 22 nt, Human
cuuugcaccccaccccagaagu

SEQ ID NO: 702250 - RNA, 21 nt, Human
gaacgagcgggcgcgggcggc

SEQ ID NO: 702251 - RNA, 22 nt, Human
gaaguugucccgagcccagggc

SEQ ID NO: 702252 - RNA, 22 nt, Human
gagcccagggcggggaaggcgg

SEQ ID NO: 702253 - RNA, 22 nt, Human
gagccuccuaggccaagacccu

SEQ ID NO: 702254 - RNA, 24 nt, Human
gcgcagcuucuucccuucgguccg

SEQ ID NO: 702255 - RNA, 26 nt, Human
gcggcgcgcagggagacggacgacac

SEQ ID NO: 702256 - RNA, 18 nt, Human
gcgggcgcgggcggcgag

SEQ ID NO: 702257 - RNA, 20 nt, Human
ggcuggugugucacguuucu

SEQ ID NO: 702258 - RNA, 21 nt, Human
gggcggcgagccuccuaggcc

SEQ ID NO: 702259 - RNA, 18 nt, Human
ggugugauccacccucuu

SEQ ID NO: 702260 - RNA, 21 nt, Human
uacagcccggcccaggugucc

SEQ ID NO: 702261 - RNA, 22 nt, Human
ucaaucaagugggcaaaccuga

SEQ ID NO: 702262 - RNA, 20 nt, Human
ucucggggcaggacgcgguc

SEQ ID NO: 702263 - RNA, 20 nt, Human
ugaggugugauccacccucu

SEQ ID NO: 702264 - RNA, 19 nt, Human
ugcaccccaccccagaagu

SEQ ID NO: 702265 - RNA, 18 nt, Human
ugcccgcggcgcgcaggg

SEQ ID NO: 702266 - RNA, 22 nt, Human
ugcccguuguuguccuggacuc

SEQ ID NO: 702267 - RNA, 20 nt, Human
ugcgcuagaauuucugacac

SEQ ID NO: 702268 - RNA, 19 nt, Human
uggggccuggagagcuucu

SEQ ID NO: 702269 - RNA, 23 nt, Human
ugguggggccuggagagcuucuu

SEQ ID NO: 702270 - RNA, 20 nt, Human
ugucccgagcccagggcggg

SEQ ID NO: 702271 - RNA, 27 nt, Human
uguuugggggcugagagaucaggguuc

SEQ ID NO: 702272 - RNA, 19 nt, Human
uuggguagguguuuggggg

SEQ ID NO: 702273 - RNA, 22 nt, Human
uuuauuuuucuucccacugagg

SEQ ID NO: 702274 - RNA, 21 nt, Human
aaaacgcuaggacaaguacca

SEQ ID NO: 702275 - RNA, 20 nt, Human
aaaaucucuaagggaaacac

SEQ ID NO: 702276 - RNA, 21 nt, Human
aaaccuggcugaccuuccccg

SEQ ID NO: 702277 - RNA, 21 nt, Human
aaacugcaaacuauuuaaagu

SEQ ID NO: 702278 - RNA, 21 nt, Human
aaauucaaaagaauggagaug

SEQ ID NO: 702279 - RNA, 25 nt, Human
aagaaaggaaucauuuugcugaaua

SEQ ID NO: 702280 - RNA, 19 nt, Human
aagcaaagagaaaugggug

SEQ ID NO: 702281 - RNA, 24 nt, Human
aagggaaacacaagaucaaggugc

SEQ ID NO: 702282 - RNA, 23 nt, Human
aaggggaggggagggaggggaga

SEQ ID NO: 702283 - RNA, 18 nt, Human
accgugagaccucccaaa

SEQ ID NO: 702284 - RNA, 21 nt, Human
accgugagaccucccaaagac

SEQ ID NO: 702285 - RNA, 22 nt, Human
agagagacagagaauuauauag

SEQ ID NO: 702286 - RNA, 19 nt, Human
agcuucuucuguguguuuu

SEQ ID NO: 702287 - RNA, 18 nt, Human
aggaaucauuuugcugaa

SEQ ID NO: 702288 - RNA, 18 nt, Human
agggaaacacaagaucaa

SEQ ID NO: 702289 - RNA, 24 nt, Human
agggaaacacaagaucaaggugcu

SEQ ID NO: 702290 - RNA, 21 nt, Human
auagguucuuggcuagcggaa

SEQ ID NO: 702291 - RNA, 20 nt, Human
aucagcuuuacaaaaucucu

SEQ ID NO: 702292 - RNA, 24 nt, Human
auggagaagaaggggaggggaggg

SEQ ID NO: 702293 - RNA, 19 nt, Human
caaaacgcuaggacaagua

SEQ ID NO: 702294 - RNA, 21 nt, Human
caacuaucagcuuuacaaaau

SEQ ID NO: 702295 - RNA, 19 nt, Human
cacaugcauacauuuguau

SEQ ID NO: 702296 - RNA, 22 nt, Human
caccaaaaugcaaaaagacaaa

SEQ ID NO: 702297 - RNA, 19 nt, Human
cacccuguguaacccacag

SEQ ID NO: 702298 - RNA, 22 nt, Human
cacccuguguaacccacaggcc

SEQ ID NO: 702299 - RNA, 24 nt, Human
caggagagauccgaguggauggug

SEQ ID NO: 702300 - RNA, 18 nt, Human
cagggccucggcagaguc

SEQ ID NO: 702301 - RNA, 21 nt, Human
cauucugucagguguuggaag

SEQ ID NO: 702302 - RNA, 19 nt, Human
ccacagaaaaagggugugc

SEQ ID NO: 702303 - RNA, 22 nt, Human
ccacagaaaaagggugugcauu

SEQ ID NO: 702304 - RNA, 20 nt, Human
ccccugggguucucagggcc

SEQ ID NO: 702305 - RNA, 20 nt, Human
cccgguacccggcgcuccuc

SEQ ID NO: 702306 - RNA, 21 nt, Human
cccuggggggcgggaggcggg

SEQ ID NO: 702307 - RNA, 20 nt, Human
ccgaguggauggugaagugg

SEQ ID NO: 702308 - RNA, 23 nt, Human
ccuggggggcgggaggcggggcu

SEQ ID NO: 702309 - RNA, 19 nt, Human
ccugggguucucagggccu

SEQ ID NO: 702310 - RNA, 18 nt, Human
cgaguggauggugaagug

SEQ ID NO: 702311 - RNA, 24 nt, Human
cggccccugggguucucagggccu

SEQ ID NO: 702312 - RNA, 18 nt, Human
cggguggccucaaagcuc

SEQ ID NO: 702313 - RNA, 21 nt, Human
cguuguuuugcuggugccugu

SEQ ID NO: 702314 - RNA, 24 nt, Human
cuagaaaagccugcuuucucuuua

SEQ ID NO: 702315 - RNA, 18 nt, Human
cucccccggcccgguacc

SEQ ID NO: 702316 - RNA, 24 nt, Human
cucuacaccgugagaccucccaaa

SEQ ID NO: 702317 - RNA, 26 nt, Human
cucucuacaccgugagaccucccaaa

SEQ ID NO: 702318 - RNA, 22 nt, Human
cucuuguucuuuugaguaacca

SEQ ID NO: 702319 - RNA, 19 nt, Human
cugaagccugcagaagccc

SEQ ID NO: 702320 - RNA, 24 nt, Human
cugcuuugccuggggggggggggu

SEQ ID NO: 702321 - RNA, 20 nt, Human
cuuccccgagagcccgcggc

SEQ ID NO: 702322 - RNA, 22 nt, Human
cuuccccgccccuccucggccc

SEQ ID NO: 702323 - RNA, 18 nt, Human
gaccuuccccgccccucc

SEQ ID NO: 702324 - RNA, 19 nt, Human
gacgagauuucccucuggg

SEQ ID NO: 702325 - RNA, 20 nt, Human
gagaagaaggggaggggagg

SEQ ID NO: 702326 - RNA, 18 nt, Human
gaggagugacagaguuuc

SEQ ID NO: 702327 - RNA, 20 nt, Human
gaugaggaaauucaaaagaa

SEQ ID NO: 702328 - RNA, 24 nt, Human
gccauaagaaaucaagaaacaaag

SEQ ID NO: 702329 - RNA, 21 nt, Human
gcccuggggggcgggaggcgg

SEQ ID NO: 702330 - RNA, 24 nt, Human
gccgccuccgcagacuucucauuc

SEQ ID NO: 702331 - RNA, 20 nt, Human
gcggaagacaauucagaaca

SEQ ID NO: 702332 - RNA, 22 nt, Human
ggagaagaaggggaggggaggg

SEQ ID NO: 702333 - RNA, 19 nt, Human
ggagauggagaagaagggg

SEQ ID NO: 702334 - RNA, 18 nt, Human
gggagggaggggagagau

SEQ ID NO: 702335 - RNA, 23 nt, Human
ggggggggugcguagauacggga

SEQ ID NO: 702336 - RNA, 21 nt, Human
ggggugcguagauacgggauu

SEQ ID NO: 702337 - RNA, 23 nt, Human
ggugguucuggcaaaccuggcug

SEQ ID NO: 702338 - RNA, 22 nt, Human
uaaaaaaaucugugaauuuaac

SEQ ID NO: 702339 - RNA, 24 nt, Human
uaagaaaucaagaaacaaagaaaa

SEQ ID NO: 702340 - RNA, 24 nt, Human
uaagaacacaauaaacuucccucc

SEQ ID NO: 702341 - RNA, 18 nt, Human
uaagggaaacacaagauc

SEQ ID NO: 702342 - RNA, 22 nt, Human
uaauauguacacacauguacag

SEQ ID NO: 702343 - RNA, 22 nt, Human
uaccgcugcaggcacccugugu

SEQ ID NO: 702344 - RNA, 23 nt, Human
uagcaguaugcaaaaaaccaguu

SEQ ID NO: 702345 - RNA, 18 nt, Human
uaguucaacuaaaaggga

SEQ ID NO: 702346 - RNA, 20 nt, Human
uaucuuaacaucuucccuuu

SEQ ID NO: 702347 - RNA, 22 nt, Human
uaucuuaacaucuucccuuucu

SEQ ID NO: 702348 - RNA, 18 nt, Human
uaugaccuaaucuuuaau

SEQ ID NO: 702349 - RNA, 18 nt, Human
ucaagaaacaaagaaaag

SEQ ID NO: 702350 - RNA, 22 nt, Human
ucacaugcauacauuuguauac

SEQ ID NO: 702351 - RNA, 24 nt, Human
ucaggagagauccgaguggauggu

SEQ ID NO: 702352 - RNA, 21 nt, Human
ucagggccucggcagaguccc

SEQ ID NO: 702353 - RNA, 19 nt, Human
uccccgccccuccucggcc

SEQ ID NO: 702354 - RNA, 25 nt, Human
ucuacaccgugagaccucccaaaga

SEQ ID NO: 702355 - RNA, 28 nt, Human
ucuguauauuucacaugcauacagugug

SEQ ID NO: 702356 - RNA, 18 nt, Human
ucuuugguuugcucccga

SEQ ID NO: 702357 - RNA, 20 nt, Human
ucuuuguuugguugauuggu

SEQ ID NO: 702358 - RNA, 18 nt, Human
ugaaguggauggcugaag

SEQ ID NO: 702359 - RNA, 18 nt, Human
ugaccuaaucuuuaauga

SEQ ID NO: 702360 - RNA, 18 nt, Human
ugaccuuccccgccccuc

SEQ ID NO: 702361 - RNA, 21 nt, Human
ugaccuuccccgccccuccuc

SEQ ID NO: 702362 - RNA, 24 nt, Human
ugaguguccuuccgacgagauuuc

SEQ ID NO: 702363 - RNA, 21 nt, Human
ugcaggcacccuguguaaccc

SEQ ID NO: 702364 - RNA, 18 nt, Human
ugcauuuugcuuggcuuu

SEQ ID NO: 702365 - RNA, 22 nt, Human
ugcuccaacuaucagcuuuacu

SEQ ID NO: 702366 - RNA, 24 nt, Human
ugcuuggcuuugaacacguucacc

SEQ ID NO: 702367 - RNA, 22 nt, Human
uggagaagaaggggaggggagg

SEQ ID NO: 702368 - RNA, 23 nt, Human
uggagaagaaggggaggggaggg

SEQ ID NO: 702369 - RNA, 24 nt, Human
uggagaagaaggggaggggaggga

SEQ ID NO: 702370 - RNA, 21 nt, Human
uggcugaagccugcagaagcc

SEQ ID NO: 702371 - RNA, 21 nt, Human
uggggggcgggaggcggggcu

SEQ ID NO: 702372 - RNA, 23 nt, Human
uggggggcgggaggcggggcucg

SEQ ID NO: 702373 - RNA, 21 nt, Human
ugggugaauuuugugcgggug

SEQ ID NO: 702374 - RNA, 22 nt, Human
uguauacacaauaaaacugcaa

SEQ ID NO: 702375 - RNA, 18 nt, Human
uguauauuucacaugcau

SEQ ID NO: 702376 - RNA, 23 nt, Human
uguauauuucacaugcauacauu

SEQ ID NO: 702377 - RNA, 23 nt, Human
uguuuuccucuuccaaaacgcua

SEQ ID NO: 702378 - RNA, 23 nt, Human
uguuuuucucguuaaaaaaaucu

SEQ ID NO: 702379 - RNA, 18 nt, Human
uucaaaagaauggagaug

SEQ ID NO: 702380 - RNA, 22 nt, Human
uucaaaagaauggagauggaga

SEQ ID NO: 702381 - RNA, 24 nt, Human
uucaaauccaggcuagcuucgaaa

SEQ ID NO: 702382 - RNA, 19 nt, Human
uucaacuaaaagggauagc

SEQ ID NO: 702383 - RNA, 26 nt, Human
aaggaugaagagaagggguggauggg

SEQ ID NO: 702384 - RNA, 28 nt, Human
aaggaugaagagaagggguggauggggg

SEQ ID NO: 702385 - RNA, 18 nt, Human
aagggguggaugggaugg

SEQ ID NO: 702386 - RNA, 24 nt, Human
aaugaaggggacuccgaggaggga

SEQ ID NO: 702387 - RNA, 23 nt, Human
acaguaguaucucuuccaaccug

SEQ ID NO: 702388 - RNA, 23 nt, Human
agacagcagugaggguccagguu

SEQ ID NO: 702389 - RNA, 19 nt, Human
agcagaaaggaggcagaga

SEQ ID NO: 702390 - RNA, 22 nt, Human
agcagaaaggaggcagagacag

SEQ ID NO: 702391 - RNA, 26 nt, Human
agcauccucccauccuucccccaggc

SEQ ID NO: 702392 - RNA, 24 nt, Human
agccgucagugaggagcucucagg

SEQ ID NO: 702393 - RNA, 21 nt, Human
aggaggcagagacagcaguga

SEQ ID NO: 702394 - RNA, 24 nt, Human
agggaaggaugaagagaaggggug

SEQ ID NO: 702395 - RNA, 19 nt, Human
agggagugguggggugagg

SEQ ID NO: 702396 - RNA, 24 nt, Human
agggcgggcauggcugccgaggcc

SEQ ID NO: 702397 - RNA, 22 nt, Human
agggguggaugggaugggggca

SEQ ID NO: 702398 - RNA, 22 nt, Human
aggucauggggcuggaggguca

SEQ ID NO: 702399 - RNA, 19 nt, Human
auccucccauccuuccccc

SEQ ID NO: 702400 - RNA, 21 nt, Human
augaaggggacuccgaggagg

SEQ ID NO: 702401 - RNA, 18 nt, Human
augacacuacugcaacca

SEQ ID NO: 702402 - RNA, 20 nt, Human
caagacaagccaggccggcc

SEQ ID NO: 702403 - RNA, 18 nt, Human
caaggccuggguccaagc

SEQ ID NO: 702404 - RNA, 25 nt, Human
cacuacugcaaccaccccgccccaa

SEQ ID NO: 702405 - RNA, 19 nt, Human
cagaaaggaggcagagaca

SEQ ID NO: 702406 - RNA, 19 nt, Human
cagcagaaaggaggcagag

SEQ ID NO: 702407 - RNA, 21 nt, Human
cagcagaaaggaggcagagac

SEQ ID NO: 702408 - RNA, 21 nt, Human
cauucccucccaaggccuggg

SEQ ID NO: 702409 - RNA, 24 nt, Human
ccacaacacccccgccugggugag

SEQ ID NO: 702410 - RNA, 21 nt, Human
ccagagaccaaaauuggugcu

SEQ ID NO: 702411 - RNA, 20 nt, Human
cccacaacacccccgccugg

SEQ ID NO: 702412 - RNA, 18 nt, Human
cccaccauucccucccaa

SEQ ID NO: 702413 - RNA, 22 nt, Human
cccccaggccuucuggacccag

SEQ ID NO: 702414 - RNA, 21 nt, Human
cccggcuugggugcccaggga

SEQ ID NO: 702415 - RNA, 19 nt, Human
cccuucgugguuacggagg

SEQ ID NO: 702416 - RNA, 24 nt, Human
ccgccugggugagcucucggcugc

SEQ ID NO: 702417 - RNA, 20 nt, Human
ccucccauccuucccccagg

SEQ ID NO: 702418 - RNA, 21 nt, Human
ccuccccaccucguuuggggg

SEQ ID NO: 702419 - RNA, 19 nt, Human
ccuggcagggaggugggcc

SEQ ID NO: 702420 - RNA, 21 nt, Human
ccuuggcugcuggcccccugc

SEQ ID NO: 702421 - RNA, 22 nt, Human
cgauggccuguacccacaacac

SEQ ID NO: 702422 - RNA, 23 nt, Human
cgccccagugacugacaagacaa

SEQ ID NO: 702423 - RNA, 20 nt, Human
cuagaccccggcuugggugc

SEQ ID NO: 702424 - RNA, 18 nt, Human
cucaacgcccggcuacag

SEQ ID NO: 702425 - RNA, 22 nt, Human
cuccugccccagccccuuggcu

SEQ ID NO: 702426 - RNA, 21 nt, Human
cuucuggacccaggcuuucag

SEQ ID NO: 702427 - RNA, 19 nt, Human
gaaggaugaagagaagggg

SEQ ID NO: 702428 - RNA, 19 nt, Human
gaaggggacuccgaggagg

SEQ ID NO: 702429 - RNA, 22 nt, Human
gcaggucccuuccguucggccu

SEQ ID NO: 702430 - RNA, 22 nt, Human
gccccgcuacagccgcugccuc

SEQ ID NO: 702431 - RNA, 23 nt, Human
gcuggcccccugcuagaccccgg

SEQ ID NO: 702432 - RNA, 21 nt, Human
ggaggcagagacagcagugag

SEQ ID NO: 702433 - RNA, 22 nt, Human
ggagugguggggugaggggggg

SEQ ID NO: 702434 - RNA, 23 nt, Human
ggcgaagaguccguggaguugag

SEQ ID NO: 702435 - RNA, 21 nt, Human
ggcuacagccccgcuacagcc

SEQ ID NO: 702436 - RNA, 23 nt, Human
gggaauagggaaggaugaagaga

SEQ ID NO: 702437 - RNA, 18 nt, Human
ggggggcccagggcgggc

SEQ ID NO: 702438 - RNA, 18 nt, Human
guccaacgaagcgcggag

SEQ ID NO: 702439 - RNA, 24 nt, Human
gugacagcagaaaggaggcagaga

SEQ ID NO: 702440 - RNA, 19 nt, Human
uacagccccgcuacagccg

SEQ ID NO: 702441 - RNA, 21 nt, Human
uacugcaaccaccccgcccca

SEQ ID NO: 702442 - RNA, 23 nt, Human
uagaccccggcuugggugcccag

SEQ ID NO: 702443 - RNA, 20 nt, Human
ucacagggucgauggccugu

SEQ ID NO: 702444 - RNA, 22 nt, Human
ucacagggucgauggccuguac

SEQ ID NO: 702445 - RNA, 20 nt, Human
ucacgggagagagagagccc

SEQ ID NO: 702446 - RNA, 18 nt, Human
uccaagcauccucccauc

SEQ ID NO: 702447 - RNA, 18 nt, Human
uccagguuuacucuuugg

SEQ ID NO: 702448 - RNA, 19 nt, Human
ucccauccuucccccaggc

SEQ ID NO: 702449 - RNA, 19 nt, Human
ucccccaggccuucuggac

SEQ ID NO: 702450 - RNA, 20 nt, Human
ucccuuccguucggccuggc

SEQ ID NO: 702451 - RNA, 22 nt, Human
uccucccauccuucccccaggc

SEQ ID NO: 702452 - RNA, 22 nt, Human
ucuccugccccagccccuuggc

SEQ ID NO: 702453 - RNA, 24 nt, Human
ugaaggggacuccgaggagggagc

SEQ ID NO: 702454 - RNA, 22 nt, Human
ugacagcagaaaggaggcagag

SEQ ID NO: 702455 - RNA, 25 nt, Human
ugacaguauucugaagggcuccagc

SEQ ID NO: 702456 - RNA, 22 nt, Human
ugcccagggaguggugggguga

SEQ ID NO: 702457 - RNA, 19 nt, Human
ugccccagccccuuggcug

SEQ ID NO: 702458 - RNA, 23 nt, Human
ugccccagccccuuggcugcugg

SEQ ID NO: 702459 - RNA, 21 nt, Human
ugcuagaccccggcuugggug

SEQ ID NO: 702460 - RNA, 21 nt, Human
ugcuaugaacaggucaugggg

SEQ ID NO: 702461 - RNA, 21 nt, Human
uggagggagucacaggggagg

SEQ ID NO: 702462 - RNA, 19 nt, Human
uggcagggaggugggcccu

SEQ ID NO: 702463 - RNA, 21 nt, Human
uggggauggggggguugauga

SEQ ID NO: 702464 - RNA, 22 nt, Human
uggggugagggggggcccaggg

SEQ ID NO: 702465 - RNA, 18 nt, Human
ugguggggugaggggggg

SEQ ID NO: 702466 - RNA, 20 nt, Human
ugguggggugagggggggcc

SEQ ID NO: 702467 - RNA, 18 nt, Human
ugguggugacagcagaaa

SEQ ID NO: 702468 - RNA, 19 nt, Human
ugucuccugccccagcccc

SEQ ID NO: 702469 - RNA, 21 nt, Human
uguucccaccauucccuccca

SEQ ID NO: 702470 - RNA, 23 nt, Human
uuggcuacaguaguaucucuucc

SEQ ID NO: 702471 - RNA, 24 nt, Human
aaacaaaaaaagcagacuagaaaa

SEQ ID NO: 702472 - RNA, 24 nt, Human
aaagcauacuuuucauggaaccaa

SEQ ID NO: 702473 - RNA, 21 nt, Human
aaaucagguauuuauauuccu

SEQ ID NO: 702474 - RNA, 20 nt, Human
aacaguuaaaacacaaagca

SEQ ID NO: 702475 - RNA, 22 nt, Human
aacauacuccugcccuacacca

SEQ ID NO: 702476 - RNA, 18 nt, Human
aacuucuguucccucccu

SEQ ID NO: 702477 - RNA, 19 nt, Human
aagaagaaaagcuaauguu

SEQ ID NO: 702478 - RNA, 19 nt, Human
aagccauagaauauuuauu

SEQ ID NO: 702479 - RNA, 22 nt, Human
aagccugaaacacacaugaaua

SEQ ID NO: 702480 - RNA, 20 nt, Human
aaggucaaggcugcagugag

SEQ ID NO: 702481 - RNA, 18 nt, Human
aauucucuucagaaaggc

SEQ ID NO: 702482 - RNA, 25 nt, Human
aauuuugcaucucucccucuuacca

SEQ ID NO: 702483 - RNA, 19 nt, Human
acacaacauacuccugccc

SEQ ID NO: 702484 - RNA, 20 nt, Human
acaccuguaauuccaaaacc

SEQ ID NO: 702485 - RNA, 20 nt, Human
acagagcaagaacucaucuc

SEQ ID NO: 702486 - RNA, 22 nt, Human
acauguacugaaauggacaguu

SEQ ID NO: 702487 - RNA, 20 nt, Human
accuguaauuccaaaaccuu

SEQ ID NO: 702488 - RNA, 24 nt, Human
acugcacuccagccuaggugacag

SEQ ID NO: 702489 - RNA, 26 nt, Human
acugcacuccagccuaggugacagag

SEQ ID NO: 702490 - RNA, 23 nt, Human
agacaaaaauuuuaaauagagga

SEQ ID NO: 702491 - RNA, 22 nt, Human
agaguagagugugaaguagcuc

SEQ ID NO: 702492 - RNA, 23 nt, Human
agaucgauugaggccaggagcuc

SEQ ID NO: 702493 - RNA, 19 nt, Human
agcaaaaguaaguuucuca

SEQ ID NO: 702494 - RNA, 23 nt, Human
agcaaaauaugccacagcauaga

SEQ ID NO: 702495 - RNA, 24 nt, Human
agccugggcaacauagaaagaccc

SEQ ID NO: 702496 - RNA, 24 nt, Human
aggcacuugacauguacugaaaug

SEQ ID NO: 702497 - RNA, 25 nt, Human
aggcacuugacauguacugaaaugg

SEQ ID NO: 702498 - RNA, 24 nt, Human
aggcaugguggcucacaccuguaa

SEQ ID NO: 702499 - RNA, 23 nt, Human
aggcugcagugagccaugaucau

SEQ ID NO: 702500 - RNA, 19 nt, Human
auaaaggagcaaaaguaag

SEQ ID NO: 702501 - RNA, 23 nt, Human
auagaauauuuauugacauggaa

SEQ ID NO: 702502 - RNA, 20 nt, Human
auauaauucucuucagaaag

SEQ ID NO: 702503 - RNA, 23 nt, Human
aucaugccacugcacuccagccu

SEQ ID NO: 702504 - RNA, 19 nt, Human
augaauagaucauaaguuc

SEQ ID NO: 702505 - RNA, 19 nt, Human
augaauuaucaccucagca

SEQ ID NO: 702506 - RNA, 22 nt, Human
augccacugcacuccagccuag

SEQ ID NO: 702507 - RNA, 20 nt, Human
augccugucuguaaucccag

SEQ ID NO: 702508 - RNA, 19 nt, Human
auucugccaccucuauccc

SEQ ID NO: 702509 - RNA, 20 nt, Human
caaaaaaagcagacuagaaa

SEQ ID NO: 702510 - RNA, 24 nt, Human
caaaaaaagcagacuagaaaauca

SEQ ID NO: 702511 - RNA, 21 nt, Human
caacauacuccugcccuacac

SEQ ID NO: 702512 - RNA, 19 nt, Human
caacauagaaagacccuau

SEQ ID NO: 702513 - RNA, 22 nt, Human
caacauagaaagacccuaucuu

SEQ ID NO: 702514 - RNA, 27 nt, Human
cacaaagcauacuuuucauggaaccaa

SEQ ID NO: 702515 - RNA, 24 nt, Human
cacaccuguaauuccaaaaccuug

SEQ ID NO: 702516 - RNA, 24 nt, Human
cacagccuaacuucuaucauaguu

SEQ ID NO: 702517 - RNA, 18 nt, Human
caccaucccaaaguugcc

SEQ ID NO: 702518 - RNA, 19 nt, Human
caccuguaauuccaaaacc

SEQ ID NO: 702519 - RNA, 21 nt, Human
caccuguaauuccaaaaccuu

SEQ ID NO: 702520 - RNA, 20 nt, Human
cacuauauauaccucaaagc

SEQ ID NO: 702521 - RNA, 19 nt, Human
cacugcacuccagccuagg

SEQ ID NO: 702522 - RNA, 19 nt, Human
cacugcacuccagccuagg

SEQ ID NO: 702523 - RNA, 23 nt, Human
cacugcacuccagccuaggugac

SEQ ID NO: 702524 - RNA, 24 nt, Human
cacugcacuccagccuaggugaca

SEQ ID NO: 702525 - RNA, 25 nt, Human
cacugcacuccagccuaggugacag

SEQ ID NO: 702526 - RNA, 21 nt, Human
cagagaaaagagaaaaagacc

SEQ ID NO: 702527 - RNA, 19 nt, Human
cagaugauauaaccaagaa

SEQ ID NO: 702528 - RNA, 21 nt, Human
cagauggauacuccuggauuu

SEQ ID NO: 702529 - RNA, 21 nt, Human
cagcuucugcaauucccaucu

SEQ ID NO: 702530 - RNA, 23 nt, Human
caggccaggcaugguggcucaca

SEQ ID NO: 702531 - RNA, 23 nt, Human
cauucugccaccucuaucccacu

SEQ ID NO: 702532 - RNA, 23 nt, Human
ccaccucuaucccacucuacgaa

SEQ ID NO: 702533 - RNA, 19 nt, Human
ccacugcacuccagccuag

SEQ ID NO: 702534 - RNA, 20 nt, Human
ccacugcacuccagccuagg

SEQ ID NO: 702535 - RNA, 20 nt, Human
ccacugcacuccagccuagg

SEQ ID NO: 702536 - RNA, 21 nt, Human
ccacugcacuccagccuaggu

SEQ ID NO: 702537 - RNA, 24 nt, Human
ccacugcacuccagccuaggugac

SEQ ID NO: 702538 - RNA, 19 nt, Human
ccagccaauugacuuuagg

SEQ ID NO: 702539 - RNA, 22 nt, Human
ccauuugccacagccuaacuuc

SEQ ID NO: 702540 - RNA, 22 nt, Human
cccaaauaagccugaaacacac

SEQ ID NO: 702541 - RNA, 25 nt, Human
ccccuggaccugcccugcagccgcc

SEQ ID NO: 702542 - RNA, 22 nt, Human
ccugggcaacauagaaagaccc

SEQ ID NO: 702543 - RNA, 24 nt, Human
cucacaccuguaauuccaaaaccu

SEQ ID NO: 702544 - RNA, 19 nt, Human
cucccaaauaagccugaaa

SEQ ID NO: 702545 - RNA, 18 nt, Human
cuguaaucccagcuacuu

SEQ ID NO: 702546 - RNA, 20 nt, Human
cuguaaucccagcuacuugg

SEQ ID NO: 702547 - RNA, 21 nt, Human
gaucaugccacugcacuccag

SEQ ID NO: 702548 - RNA, 20 nt, Human
gaugaaguggugauuaaguu

SEQ ID NO: 702549 - RNA, 24 nt, Human
gcacuccagccuaggugacagagc

SEQ ID NO: 702550 - RNA, 19 nt, Human
gccaugaucaugccacugc

SEQ ID NO: 702551 - RNA, 21 nt, Human
gcuccuucucucugcaaaauc

SEQ ID NO: 702552 - RNA, 23 nt, Human
gcuggaaggucaaggcugcagug

SEQ ID NO: 702553 - RNA, 21 nt, Human
gggaaaaaaugggggggaggg

SEQ ID NO: 702554 - RNA, 23 nt, Human
gguggcucacaccuguaauucca

SEQ ID NO: 702555 - RNA, 23 nt, Human
guaaagcuauuuacuauaaccuu

SEQ ID NO: 702556 - RNA, 20 nt, Human
guagagugugaaguagcucc

SEQ ID NO: 702557 - RNA, 20 nt, Human
gugaagaucacaagaaaggu

SEQ ID NO: 702558 - RNA, 22 nt, Human
uaaaaaaaaaauaauauaagga

SEQ ID NO: 702559 - RNA, 20 nt, Human
uaaaaauaccaacgguaagg

SEQ ID NO: 702560 - RNA, 24 nt, Human
uaaagguaaaacaucagagaaaag

SEQ ID NO: 702561 - RNA, 18 nt, Human
uaacaaaggcacuugaca

SEQ ID NO: 702562 - RNA, 23 nt, Human
uaacacacuauaaaauaugucaa

SEQ ID NO: 702563 - RNA, 24 nt, Human
uaacaguuaaaacacaaagcauac

SEQ ID NO: 702564 - RNA, 20 nt, Human
uaaccaagaagaaaagcuaa

SEQ ID NO: 702565 - RNA, 23 nt, Human
uacacaacauacuccugcccuac

SEQ ID NO: 702566 - RNA, 23 nt, Human
uacacaacauacuccugcccuac

SEQ ID NO: 702567 - RNA, 18 nt, Human
uacuccuggauuuucacu

SEQ ID NO: 702568 - RNA, 22 nt, Human
uagagacauuucuucuccaccu

SEQ ID NO: 702569 - RNA, 21 nt, Human
uagaggggaaaaaaugggggg

SEQ ID NO: 702570 - RNA, 20 nt, Human
uaguucucccaaauaagccu

SEQ ID NO: 702571 - RNA, 20 nt, Human
uauauacaaaaucaugcaua

SEQ ID NO: 702572 - RNA, 24 nt, Human
ucaaagguaaauuucacuaucuaa

SEQ ID NO: 702573 - RNA, 22 nt, Human
ucagagaaaagagaaaaagacc

SEQ ID NO: 702574 - RNA, 21 nt, Human
uccaaaaccuuggcaggaaga

SEQ ID NO: 702575 - RNA, 20 nt, Human
uccaaacacaaaaaggucau

SEQ ID NO: 702576 - RNA, 21 nt, Human
uccaugcucuagcaccauccc

SEQ ID NO: 702577 - RNA, 21 nt, Human
uccaugcugaacuggcugacu

SEQ ID NO: 702578 - RNA, 20 nt, Human
ucccacucuacgaauguccc

SEQ ID NO: 702579 - RNA, 21 nt, Human
uccuggauuuucacuuaaucc

SEQ ID NO: 702580 - RNA, 20 nt, Human
ucucugcaaaaucuuggaac

SEQ ID NO: 702581 - RNA, 21 nt, Human
ucuggagugcagauggaaagc

SEQ ID NO: 702582 - RNA, 21 nt, Human
ucugggguggaaggagacuac

SEQ ID NO: 702583 - RNA, 24 nt, Human
ucuguaaucccagcuacuuggcag

SEQ ID NO: 702584 - RNA, 18 nt, Human
ugaaagauacauaaaggu

SEQ ID NO: 702585 - RNA, 23 nt, Human
ugaaauauguaggcuacaaaaca

SEQ ID NO: 702586 - RNA, 24 nt, Human
ugaaauggacaguuaauucaggua

SEQ ID NO: 702587 - RNA, 24 nt, Human
ugaauagaggggaaaaaauggggg

SEQ ID NO: 702588 - RNA, 30 nt, Human
ugaauagaggggaaaaaaugggggggaggg

SEQ ID NO: 702589 - RNA, 22 nt, Human
ugcagugagccaugaucaugcc

SEQ ID NO: 702590 - RNA, 19 nt, Human
uggaaagaaaaauaaccau

SEQ ID NO: 702591 - RNA, 20 nt, Human
uggaaggagacuacugacac

SEQ ID NO: 702592 - RNA, 20 nt, Human
uggaaggucaaggcugcagu

SEQ ID NO: 702593 - RNA, 19 nt, Human
uggcagaugauauaaccaa

SEQ ID NO: 702594 - RNA, 24 nt, Human
uggcaggaagaucgauugaggcca

SEQ ID NO: 702595 - RNA, 19 nt, Human
uggccccuggaccugcccu

SEQ ID NO: 702596 - RNA, 21 nt, Human
uggcucacaccuguaauucca

SEQ ID NO: 702597 - RNA, 23 nt, Human
uggcucacaccuguaauuccaaa

SEQ ID NO: 702598 - RNA, 23 nt, Human
uggcugacuuaagcagucaagga

SEQ ID NO: 702599 - RNA, 19 nt, Human
ugggcaacauagaaagacc

SEQ ID NO: 702600 - RNA, 21 nt, Human
ugggcaacauagaaagacccu

SEQ ID NO: 702601 - RNA, 24 nt, Human
ugguggcucacaccuguaauucca

SEQ ID NO: 702602 - RNA, 20 nt, Human
uguagaaaauuauuauaugg

SEQ ID NO: 702603 - RNA, 18 nt, Human
ugucaaagcaggccaggc

SEQ ID NO: 702604 - RNA, 23 nt, Human
ugucuguaaucccagcuacuugg

SEQ ID NO: 702605 - RNA, 23 nt, Human
uguuugccauuacaucugaaagu

SEQ ID NO: 702606 - RNA, 19 nt, Human
uuaaaagaaacgagaaugu

SEQ ID NO: 702607 - RNA, 23 nt, Human
uuaaacaaaaaaagcagacuaga

SEQ ID NO: 702608 - RNA, 21 nt, Human
uuaguucucccaaauaagccu

SEQ ID NO: 702609 - RNA, 23 nt, Human
uucagaaaggcucuguuucacua

SEQ ID NO: 702610 - RNA, 20 nt, Human
uucagagcuggagaauuuug

SEQ ID NO: 702611 - RNA, 18 nt, Human
uuccaaacacaaaaaggu

SEQ ID NO: 702612 - RNA, 18 nt, Human
uuccauuaagaguagagu

SEQ ID NO: 702613 - RNA, 18 nt, Human
uuggaacugagaaagccg

SEQ ID NO: 702614 - RNA, 20 nt, Human
uuuaacuucuuuaauuaugu

SEQ ID NO: 702615 - RNA, 22 nt, Human
uuuaacuucuuuaauuauguaa

SEQ ID NO: 702616 - RNA, 19 nt, Human
aagggcgccugggcccugc

SEQ ID NO: 702617 - RNA, 21 nt, Human
agaggagcggagcagggggag

SEQ ID NO: 702618 - RNA, 21 nt, Human
agggggaggagcgcugagacc

SEQ ID NO: 702619 - RNA, 21 nt, Human
cugggcccugcagaggagcgg

SEQ ID NO: 702620 - RNA, 19 nt, Human
gcggagcagggggaggagc

SEQ ID NO: 702621 - RNA, 18 nt, Human
guuuaaugagcccugucc

SEQ ID NO: 702622 - RNA, 22 nt, Human
uaaugagcccuguccagggccc

SEQ ID NO: 702623 - RNA, 22 nt, Human
ugcagaggagcggagcaggggg

SEQ ID NO: 702624 - RNA, 18 nt, Human
aaccuacagaauugaaag

SEQ ID NO: 702625 - RNA, 19 nt, Human
aaucuaaggggugguuuuc

SEQ ID NO: 702626 - RNA, 18 nt, Human
accugaaucaucgaucac

SEQ ID NO: 702627 - RNA, 19 nt, Human
acugacacauaaaugacac

SEQ ID NO: 702628 - RNA, 19 nt, Human
agaaaagagaaagaugucu

SEQ ID NO: 702629 - RNA, 22 nt, Human
agacggggcaacucuucagcuc

SEQ ID NO: 702630 - RNA, 18 nt, Human
aguugggcagaugaagag

SEQ ID NO: 702631 - RNA, 24 nt, Human
auaugagacugaagccuugaagac

SEQ ID NO: 702632 - RNA, 20 nt, Human
aucaucgaucacugugaagc

SEQ ID NO: 702633 - RNA, 20 nt, Human
caaucuaaggggugguuuuc

SEQ ID NO: 702634 - RNA, 18 nt, Human
cucuggucugagugucuc

SEQ ID NO: 702635 - RNA, 18 nt, Human
cugacacauaaaugacac

SEQ ID NO: 702636 - RNA, 20 nt, Human
cugacuguccagaaucuacu

SEQ ID NO: 702637 - RNA, 21 nt, Human
cuucucuggucugagugucuc

SEQ ID NO: 702638 - RNA, 21 nt, Human
gacaccuuggcuuuuuccacu

SEQ ID NO: 702639 - RNA, 22 nt, Human
gacgugcggcuucaacgcgagc

SEQ ID NO: 702640 - RNA, 19 nt, Human
guaggcgcaugcacacccc

SEQ ID NO: 702641 - RNA, 19 nt, Human
guccuuaucaccagagcuc

SEQ ID NO: 702642 - RNA, 23 nt, Human
uaaaaggcauaggagagugaaag

SEQ ID NO: 702643 - RNA, 23 nt, Human
uaaaggagacauggaacagagac

SEQ ID NO: 702644 - RNA, 23 nt, Human
uaaauagauuuguguaagcugaa

SEQ ID NO: 702645 - RNA, 23 nt, Human
uaaaugacaccuuggcuuuuucc

SEQ ID NO: 702646 - RNA, 23 nt, Human
uacauagaagaaaaggauauaug

SEQ ID NO: 702647 - RNA, 22 nt, Human
uagaaaagagaaagaugucuuu

SEQ ID NO: 702648 - RNA, 19 nt, Human
uagcuggguaauggcuggg

SEQ ID NO: 702649 - RNA, 19 nt, Human
uagcuuacacuacuaaauc

SEQ ID NO: 702650 - RNA, 19 nt, Human
uaggagagugaaagcaacg

SEQ ID NO: 702651 - RNA, 23 nt, Human
uaggauaagaaaguucaguaaaa

SEQ ID NO: 702652 - RNA, 21 nt, Human
uaucagaguggaauugggugu

SEQ ID NO: 702653 - RNA, 19 nt, Human
ucacugccauuuuuuuaac

SEQ ID NO: 702654 - RNA, 27 nt, Human
ucccucuuaagcauuaacuuuuucaaa

SEQ ID NO: 702655 - RNA, 20 nt, Human
ucuggccgaagugacugcug

SEQ ID NO: 702656 - RNA, 18 nt, Human
ucugugauugcuccagga

SEQ ID NO: 702657 - RNA, 19 nt, Human
ugaaaagcuacauccuuaa

SEQ ID NO: 702658 - RNA, 21 nt, Human
ugaaaagcuacauccuuaaua

SEQ ID NO: 702659 - RNA, 18 nt, Human
ugaaagccuaaagucuag

SEQ ID NO: 702660 - RNA, 21 nt, Human
ugaaaugggcagggauaagua

SEQ ID NO: 702661 - RNA, 22 nt, Human
ugaacugacacauaaaugacac

SEQ ID NO: 702662 - RNA, 23 nt, Human
ugaacugacacauaaaugacacc

SEQ ID NO: 702663 - RNA, 19 nt, Human
ugaccagaagugguuucuu

SEQ ID NO: 702664 - RNA, 22 nt, Human
ugagaagaaccaaaauguguuu

SEQ ID NO: 702665 - RNA, 18 nt, Human
ugcauuauuuuauauguu

SEQ ID NO: 702666 - RNA, 20 nt, Human
ugggaaggggaauacgugga

SEQ ID NO: 702667 - RNA, 21 nt, Human
ugguuucuuuuacuuuggggc

SEQ ID NO: 702668 - RNA, 19 nt, Human
ugugaagcgugagcugaag

SEQ ID NO: 702669 - RNA, 24 nt, Human
ugugcuaggauaagaaaguucagu

SEQ ID NO: 702670 - RNA, 23 nt, Human
uuacuuuggggcgguagcauugu

SEQ ID NO: 702671 - RNA, 19 nt, Human
uucacagcaaaugacgaug

SEQ ID NO: 702672 - RNA, 22 nt, Human
uucacagcaaaugacgaugauc

SEQ ID NO: 702673 - RNA, 19 nt, Human
uuggugagauucgugugac

SEQ ID NO: 702674 - RNA, 23 nt, Human
uuuuuuuuuuuuuuuuuggugag

SEQ ID NO: 702675 - RNA, 20 nt, Human
uuuuuuuuuuuuuuuuuugg

SEQ ID NO: 702676 - RNA, 22 nt, Human
agagauacauaucuuuaauggc

SEQ ID NO: 702677 - RNA, 22 nt, Human
caagaguccucaggguaaccca

SEQ ID NO: 702678 - RNA, 23 nt, Human
ucaguuaagcaagaguccucagg

SEQ ID NO: 702679 - RNA, 22 nt, Human
ucgaacucucaaaacuauagaa

SEQ ID NO: 702680 - RNA, 23 nt, Human
ucugaagguaucaugaaaaggaa

SEQ ID NO: 702681 - RNA, 22 nt, Human
gaggagcaggugggagcccggg

SEQ ID NO: 702682 - RNA, 21 nt, Human
gcccugccucaccugggcgga

SEQ ID NO: 702683 - RNA, 23 nt, Human
ggaggagcaggugggagcccggg

SEQ ID NO: 702684 - RNA, 25 nt, Human
uucaaucacucuuaaagacaccugg

SEQ ID NO: 702685 - RNA, 24 nt, Human
aaaacuucuaguauaauuacacau

SEQ ID NO: 702686 - RNA, 20 nt, Human
guaaugacaggaaugcauac

SEQ ID NO: 702687 - RNA, 19 nt, Human
uaaaacauugcauaguauu

SEQ ID NO: 702688 - RNA, 25 nt, Human
uaccuuuuguuguuuuccuacaaga

SEQ ID NO: 702689 - RNA, 24 nt, Human
uauaauuacacauaauuaccuuuu

SEQ ID NO: 702690 - RNA, 24 nt, Human
aaagagcugggauuacaggcguga

SEQ ID NO: 702691 - RNA, 21 nt, Human
aagagcugggauuacaggcgu

SEQ ID NO: 702692 - RNA, 23 nt, Human
aaugcaguggcaugaucacggcu

SEQ ID NO: 702693 - RNA, 20 nt, Human
aaugccacauggccaggaug

SEQ ID NO: 702694 - RNA, 22 nt, Human
acaaagagcugggauuacaggc

SEQ ID NO: 702695 - RNA, 24 nt, Human
acaaagagcugggauuacaggcgu

SEQ ID NO: 702696 - RNA, 20 nt, Human
acagacuggaaacaaugggc

SEQ ID NO: 702697 - RNA, 19 nt, Human
acaggguuuugucaugcug

SEQ ID NO: 702698 - RNA, 24 nt, Human
acaggguuuugucaugcugcccag

SEQ ID NO: 702699 - RNA, 21 nt, Human
accacaggugugugccaccau

SEQ ID NO: 702700 - RNA, 21 nt, Human
accccgacuucccuugucugg

SEQ ID NO: 702701 - RNA, 23 nt, Human
accucagccucccgaguagcugg

SEQ ID NO: 702702 - RNA, 21 nt, Human
acggucugugacaaugccaca

SEQ ID NO: 702703 - RNA, 18 nt, Human
agacaggguuuugucaug

SEQ ID NO: 702704 - RNA, 24 nt, Human
agagcugggauuacaggcgugagc

SEQ ID NO: 702705 - RNA, 25 nt, Human
agcauaaagggaagcuguggacagg

SEQ ID NO: 702706 - RNA, 19 nt, Human
agccaccgcaccuggccca

SEQ ID NO: 702707 - RNA, 21 nt, Human
agccucaacuucccaggcucc

SEQ ID NO: 702708 - RNA, 23 nt, Human
aguagcugggaccacaggugugu

SEQ ID NO: 702709 - RNA, 26 nt, Human
aucuguucuuucgucuaacaccugcu

SEQ ID NO: 702710 - RNA, 24 nt, Human
auuuuuguauuuuugguagagaca

SEQ ID NO: 702711 - RNA, 19 nt, Human
caaagagcugggauuacag

SEQ ID NO: 702712 - RNA, 21 nt, Human
caaagagcugggauuacaggc

SEQ ID NO: 702713 - RNA, 21 nt, Human
caaagagcugggauuacaggc

SEQ ID NO: 702714 - RNA, 24 nt, Human
caaagagcugggauuacaggcgug

SEQ ID NO: 702715 - RNA, 22 nt, Human
caacuucccaggcuccagcgau

SEQ ID NO: 702716 - RNA, 30 nt, Human
caacuucccaggcuccagcgauccucccuc

SEQ ID NO: 702717 - RNA, 23 nt, Human
cacaaagagcugggauuacaggc

SEQ ID NO: 702718 - RNA, 24 nt, Human
caccaugcguggcuaauuuuugua

SEQ ID NO: 702719 - RNA, 22 nt, Human
cacugcagccucaacuucccag

SEQ ID NO: 702720 - RNA, 21 nt, Human
cagacuggaaacaaugggcca

SEQ ID NO: 702721 - RNA, 22 nt, Human
cagcauaaagggaagcugugga

SEQ ID NO: 702722 - RNA, 20 nt, Human
cagccucaacuucccaggcu

SEQ ID NO: 702723 - RNA, 23 nt, Human
cagccucaacuucccaggcucca

SEQ ID NO: 702724 - RNA, 21 nt, Human
caggaacagacuggaaacaau

SEQ ID NO: 702725 - RNA, 24 nt, Human
caggguuuugucaugcugcccagg

SEQ ID NO: 702726 - RNA, 25 nt, Human
caggugugugccaccaugcguggcu

SEQ ID NO: 702727 - RNA, 18 nt, Human
caugcugcccaggcuggu

SEQ ID NO: 702728 - RNA, 24 nt, Human
caugcugcccaggcuggucuugaa

SEQ ID NO: 702729 - RNA, 19 nt, Human
ccaccgcaccuggcccaaa

SEQ ID NO: 702730 - RNA, 22 nt, Human
ccaccgcaccuggcccaaacac

SEQ ID NO: 702731 - RNA, 23 nt, Human
ccaccucagccucccgaguagcu

SEQ ID NO: 702732 - RNA, 27 nt, Human
ccagcgauccucccaccucagccuccc

SEQ ID NO: 702733 - RNA, 23 nt, Human
ccaggaugaugaugcauguggca

SEQ ID NO: 702734 - RNA, 23 nt, Human
cccaccucagccucccgaguagc

SEQ ID NO: 702735 - RNA, 18 nt, Human
cccucucccuccaagaau

SEQ ID NO: 702736 - RNA, 23 nt, Human
cccugacaccccgacuucccuug

SEQ ID NO: 702737 - RNA, 18 nt, Human
ccguuccccucucccucc

SEQ ID NO: 702738 - RNA, 21 nt, Human
ccucacgaucguauugugucu

SEQ ID NO: 702739 - RNA, 21 nt, Human
ccugagcucaaagaccucggc

SEQ ID NO: 702740 - RNA, 24 nt, Human
cucagccucccgaguagcugggac

SEQ ID NO: 702741 - RNA, 24 nt, Human
cuccagcgauccucccaccucagc

SEQ ID NO: 702742 - RNA, 24 nt, Human
cucccgaguagcugggaccacagg

SEQ ID NO: 702743 - RNA, 20 nt, Human
cuccugagcucaaagaccuc

SEQ ID NO: 702744 - RNA, 26 nt, Human
gaguagcugggaccacaggugugugc

SEQ ID NO: 702745 - RNA, 18 nt, Human
gaguuaggaggcuagcag

SEQ ID NO: 702746 - RNA, 18 nt, Human
gauuacaggcgugagcca

SEQ ID NO: 702747 - RNA, 22 nt, Human
gauuacaggcgugagccaccgc

SEQ ID NO: 702748 - RNA, 23 nt, Human
gauuacaggcgugagccaccgca

SEQ ID NO: 702749 - RNA, 19 nt, Human
gcuggaaugcaguggcaug

SEQ ID NO: 702750 - RNA, 24 nt, Human
ggcuggucuugaacuccugagcuc

SEQ ID NO: 702751 - RNA, 22 nt, Human
guagagacaggguuuugucaug

SEQ ID NO: 702752 - RNA, 24 nt, Human
gucaugcugcccaggcuggucuug

SEQ ID NO: 702753 - RNA, 22 nt, Human
uaaagggaagcuguggacagga

SEQ ID NO: 702754 - RNA, 24 nt, Human
uaauuuuuguauuuuugguagaga

SEQ ID NO: 702755 - RNA, 22 nt, Human
uacaggcgugagccaccgcacc

SEQ ID NO: 702756 - RNA, 23 nt, Human
uacaggcgugagccaccgcaccu

SEQ ID NO: 702757 - RNA, 21 nt, Human
uagcaggagagacggucugug

SEQ ID NO: 702758 - RNA, 23 nt, Human
uagcugggaccacaggugugugc

SEQ ID NO: 702759 - RNA, 19 nt, Human
ucacugcagccucaacuuc

SEQ ID NO: 702760 - RNA, 23 nt, Human
ucacugcagccucaacuucccag

SEQ ID NO: 702761 - RNA, 24 nt, Human
ucacugcagccucaacuucccagg

SEQ ID NO: 702762 - RNA, 23 nt, Human
ucagccucccgaguagcugggac

SEQ ID NO: 702763 - RNA, 21 nt, Human
ucccaggcuccagcgauccuc

SEQ ID NO: 702764 - RNA, 23 nt, Human
ucccgaguagcugggaccacagg

SEQ ID NO: 702765 - RNA, 24 nt, Human
ucccgaguagcugggaccacaggu

SEQ ID NO: 702766 - RNA, 26 nt, Human
uccucccaccucagccucccgaguag

SEQ ID NO: 702767 - RNA, 18 nt, Human
uccugagcucaaagaccu

SEQ ID NO: 702768 - RNA, 19 nt, Human
ucggccccacaaagagcug

SEQ ID NO: 702769 - RNA, 24 nt, Human
ucucucuccaucacacaggcugga

SEQ ID NO: 702770 - RNA, 24 nt, Human
ucuguucuuucgucuaacaccugc

SEQ ID NO: 702771 - RNA, 22 nt, Human
ucuugaacuccugagcucaaag

SEQ ID NO: 702772 - RNA, 23 nt, Human
ugaacuccugagcucaaagaccu

SEQ ID NO: 702773 - RNA, 22 nt, Human
ugagacagggucucucuccauc

SEQ ID NO: 702774 - RNA, 21 nt, Human
ugagacugauuuacuuaaugc

SEQ ID NO: 702775 - RNA, 18 nt, Human
ugcagccucaacuuccca

SEQ ID NO: 702776 - RNA, 24 nt, Human
ugcccaggcuggucuugaacuccu

SEQ ID NO: 702777 - RNA, 28 nt, Human
ugcccaggcuggucuugaacuccugagc

SEQ ID NO: 702778 - RNA, 22 nt, Human
ugcugcccaggcuggucuugaa

SEQ ID NO: 702779 - RNA, 25 nt, Human
ugcuggggaagacccaggcccugag

SEQ ID NO: 702780 - RNA, 26 nt, Human
ugcuggggaagacccaggcccugagu

SEQ ID NO: 702781 - RNA, 19 nt, Human
uggaaugcaguggcaugau

SEQ ID NO: 702782 - RNA, 24 nt, Human
uggaaugcaguggcaugaucacgg

SEQ ID NO: 702783 - RNA, 21 nt, Human
ugggaccacaggugugugcca

SEQ ID NO: 702784 - RNA, 24 nt, Human
ugggaccacaggugugugccacca

SEQ ID NO: 702785 - RNA, 18 nt, Human
ugggauuacaggcgugag

SEQ ID NO: 702786 - RNA, 19 nt, Human
ugggauuacaggcgugagc

SEQ ID NO: 702787 - RNA, 21 nt, Human
ugggauuacaggcgugagcca

SEQ ID NO: 702788 - RNA, 22 nt, Human
ugggauuacaggcgugagccac

SEQ ID NO: 702789 - RNA, 23 nt, Human
ugggauuacaggcgugagccacc

SEQ ID NO: 702790 - RNA, 24 nt, Human
ugggauuacaggcgugagccaccg

SEQ ID NO: 702791 - RNA, 24 nt, Human
ugguagagacaggguuuugucaug

SEQ ID NO: 702792 - RNA, 24 nt, Human
ugucaugcugcccaggcuggucuu

SEQ ID NO: 702793 - RNA, 27 nt, Human
ugucaugcugcccaggcuggucuugaa

SEQ ID NO: 702794 - RNA, 18 nt, Human
uguccguuccccucuccc

SEQ ID NO: 702795 - RNA, 23 nt, Human
ugucugguuuuaguuguuuccuu

SEQ ID NO: 702796 - RNA, 18 nt, Human
ugugugccaccaugcgug

SEQ ID NO: 702797 - RNA, 21 nt, Human
uguuugcuguccguuccccuc

SEQ ID NO: 702798 - RNA, 25 nt, Human
uucccaggcuccagcgauccuccca

SEQ ID NO: 702799 - RNA, 18 nt, Human
uugagacagggucucucu

SEQ ID NO: 702800 - RNA, 22 nt, Human
uugagacagggucucucuccau

SEQ ID NO: 702801 - RNA, 24 nt, Human
uugguagagacaggguuuugucau

SEQ ID NO: 702802 - RNA, 19 nt, Human
uugucaugcugcccaggcu

SEQ ID NO: 702803 - RNA, 21 nt, Human
uugucaugcugcccaggcugg

SEQ ID NO: 702804 - RNA, 23 nt, Human
uuuugucaugcugcccaggcugg

SEQ ID NO: 702805 - RNA, 21 nt, Human
uuuuugguagagacaggguuu

SEQ ID NO: 702806 - RNA, 21 nt, Human
uuuuugguagagacaggguuu

SEQ ID NO: 702807 - RNA, 20 nt, Human
uuuuuguauuuuugguagag

SEQ ID NO: 702808 - RNA, 23 nt, Human
uuuuuuuuuugagacagggucuc

SEQ ID NO: 702809 - RNA, 20 nt, Human
uuuuuuuuuuugagacaggg

SEQ ID NO: 702810 - RNA, 23 nt, Human
uuuuuuuuuuuugagacaggguc

SEQ ID NO: 702811 - RNA, 23 nt, Human
uuuuuuuuuuuuuugagacaggg

SEQ ID NO: 702812 - RNA, 18 nt, Human
cccaguaggagggcucgc

SEQ ID NO: 702813 - RNA, 21 nt, Human
ccuuggccauggagcccugcu

SEQ ID NO: 702814 - RNA, 20 nt, Human
gggcgugcccgaggugacgu

SEQ ID NO: 702815 - RNA, 19 nt, Human
ucccaguaggagggcucgc

SEQ ID NO: 702816 - RNA, 27 nt, Human
ucucacgguucuaguuguugcgcugcc

SEQ ID NO: 702817 - RNA, 18 nt, Human
ugggucgcgguugcugga

SEQ ID NO: 702818 - RNA, 21 nt, Human
uuagaggucugggcuuucuuc

SEQ ID NO: 702819 - RNA, 20 nt, Human
aaggggguccagggguuuau

SEQ ID NO: 702820 - RNA, 19 nt, Human
acaguacaugcagcagaau

SEQ ID NO: 702821 - RNA, 23 nt, Human
acuuugagaaaaugguugaggag

SEQ ID NO: 702822 - RNA, 18 nt, Human
agagcugagggaacaagg

SEQ ID NO: 702823 - RNA, 18 nt, Human
aggauugucuauguaaau

SEQ ID NO: 702824 - RNA, 19 nt, Human
agggaacaaggggguccag

SEQ ID NO: 702825 - RNA, 18 nt, Human
augcagcagaauauaccu

SEQ ID NO: 702826 - RNA, 19 nt, Human
caaaugucugcauauguug

SEQ ID NO: 702827 - RNA, 27 nt, Human
caaguucaagaucuuauaggauugucu

SEQ ID NO: 702828 - RNA, 19 nt, Human
ccggcaaaaaaaaaaaaaa

SEQ ID NO: 702829 - RNA, 22 nt, Human
cgacuccggcaaaaaaaaaaaa

SEQ ID NO: 702830 - RNA, 22 nt, Human
cgcucgacuccggcaaaaaaaa

SEQ ID NO: 702831 - RNA, 21 nt, Human
cuccggcaaaaaaaaaaaaaa

SEQ ID NO: 702832 - RNA, 25 nt, Human
cuuaaaaucuucaucauuggaauuc

SEQ ID NO: 702833 - RNA, 19 nt, Human
ggaacaaggggguccaggg

SEQ ID NO: 702834 - RNA, 24 nt, Human
ggaauaauauucauagcacaccag

SEQ ID NO: 702835 - RNA, 20 nt, Human
uacaacccauaaaauucaag

SEQ ID NO: 702836 - RNA, 18 nt, Human
uacaguacaugcagcaga

SEQ ID NO: 702837 - RNA, 23 nt, Human
uagaaugcccauuacuuugagaa

SEQ ID NO: 702838 - RNA, 24 nt, Human
uagcagcacccgcucgacuccggc

SEQ ID NO: 702839 - RNA, 22 nt, Human
uauauaaaaucuucagcugaag

SEQ ID NO: 702840 - RNA, 22 nt, Human
uccgcuagcagcacccgcucga

SEQ ID NO: 702841 - RNA, 18 nt, Human
ucuaaaucauagaaugcc

SEQ ID NO: 702842 - RNA, 21 nt, Human
ucuucuuucucuucucuucuu

SEQ ID NO: 702843 - RNA, 19 nt, Human
ucuuucucuucucuucuuu

SEQ ID NO: 702844 - RNA, 24 nt, Human
ugccuggaaaugcauuguuucuuc

SEQ ID NO: 702845 - RNA, 18 nt, Human
uggaauaauauucauagc

SEQ ID NO: 702846 - RNA, 18 nt, Human
uucuucuuucucuucucu

SEQ ID NO: 702847 - RNA, 24 nt, Human
uucuuucucuucucuucuuuuuaa

SEQ ID NO: 702848 - RNA, 22 nt, Human
uuucuucuuucucuucucuucu

SEQ ID NO: 702849 - RNA, 20 nt, Human
uuuguaaccauuuauauaca

SEQ ID NO: 702850 - RNA, 19 nt, Human
aacuguguuggaauccaag

SEQ ID NO: 702851 - RNA, 18 nt, Human
aagcaggaagggaaugga

SEQ ID NO: 702852 - RNA, 19 nt, Human
aagcaggaagggaauggag

SEQ ID NO: 702853 - RNA, 20 nt, Human
aaggacagugggcaagacca

SEQ ID NO: 702854 - RNA, 18 nt, Human
aagggagagggcugaagg

SEQ ID NO: 702855 - RNA, 20 nt, Human
acaaagcaaggagaaugaaa

SEQ ID NO: 702856 - RNA, 18 nt, Human
agcauggaggcaaaagga

SEQ ID NO: 702857 - RNA, 22 nt, Human
aggaagggaauggagaagaaaa

SEQ ID NO: 702858 - RNA, 26 nt, Human
aggagggggaaugaagaggucugggg

SEQ ID NO: 702859 - RNA, 25 nt, Human
agggggaaugaagaggucuggggga

SEQ ID NO: 702860 - RNA, 24 nt, Human
agucaggggauguggaagaaacug

SEQ ID NO: 702861 - RNA, 23 nt, Human
aguggggagaggggaggagaagg

SEQ ID NO: 702862 - RNA, 20 nt, Human
auacagcaccgaccucagca

SEQ ID NO: 702863 - RNA, 23 nt, Human
aucacaccuagcccucaccacag

SEQ ID NO: 702864 - RNA, 20 nt, Human
auccacuccucccugaaccc

SEQ ID NO: 702865 - RNA, 23 nt, Human
auuccaccuugcccccucuccca

SEQ ID NO: 702866 - RNA, 22 nt, Human
caccccucccuaccagggucug

SEQ ID NO: 702867 - RNA, 19 nt, Human
cacugugccauccacuccu

SEQ ID NO: 702868 - RNA, 20 nt, Human
cacugugccauccacuccuc

SEQ ID NO: 702869 - RNA, 21 nt, Human
cagcaccgaccucagcaugga

SEQ ID NO: 702870 - RNA, 26 nt, Human
cagcaccgaccucagcauggaggcaa

SEQ ID NO: 702871 - RNA, 19 nt, Human
cagcauggaggcaaaagga

SEQ ID NO: 702872 - RNA, 22 nt, Human
cagggucugaugcagccucagc

SEQ ID NO: 702873 - RNA, 19 nt, Human
ccaugcuaugccccagucc

SEQ ID NO: 702874 - RNA, 19 nt, Human
cccccaugcuaugccccag

SEQ ID NO: 702875 - RNA, 22 nt, Human
cccccucucccaggaugaaucc

SEQ ID NO: 702876 - RNA, 21 nt, Human
cccugaaccccuggccccagc

SEQ ID NO: 702877 - RNA, 26 nt, Human
ccguuaguggcugcggcaccccuccc

SEQ ID NO: 702878 - RNA, 19 nt, Human
ccucagcaccgggaguggg

SEQ ID NO: 702879 - RNA, 22 nt, Human
ccucagcauggaggcaaaagga

SEQ ID NO: 702880 - RNA, 19 nt, Human
cugcccccaugcuaugccc

SEQ ID NO: 702881 - RNA, 20 nt, Human
cugcccccaugcuaugcccc

SEQ ID NO: 702882 - RNA, 19 nt, Human
gaaaaaagcaggaagggaa

SEQ ID NO: 702883 - RNA, 21 nt, Human
gaaaaggacccucccucugaa

SEQ ID NO: 702884 - RNA, 18 nt, Human
gaauccucuuggcacaga

SEQ ID NO: 702885 - RNA, 21 nt, Human
gagaagaaaaguguugaucac

SEQ ID NO: 702886 - RNA, 18 nt, Human
gcaccccucccuaccagg

SEQ ID NO: 702887 - RNA, 21 nt, Human
gcagccucagcaccgggagug

SEQ ID NO: 702888 - RNA, 23 nt, Human
gcccccucucccaggaugaaucc

SEQ ID NO: 702889 - RNA, 20 nt, Human
ggggagaggggaggagaagg

SEQ ID NO: 702890 - RNA, 22 nt, Human
uacaaagcaaggagaaugaaaa

SEQ ID NO: 702891 - RNA, 24 nt, Human
uacaaagcaaggagaaugaaaagg

SEQ ID NO: 702892 - RNA, 30 nt, Human
uauuuaccuacccaaguuccuuuuacaugg

SEQ ID NO: 702893 - RNA, 20 nt, Human
ugaaaaaagcaggaagggaa

SEQ ID NO: 702894 - RNA, 21 nt, Human
ugaaaaggacccucccucuga

SEQ ID NO: 702895 - RNA, 19 nt, Human
ugaaauacagcaccgaccu

SEQ ID NO: 702896 - RNA, 23 nt, Human
ugaaauacagcaccgaccucagc

SEQ ID NO: 702897 - RNA, 22 nt, Human
ugaaccccuggccccagcacag

SEQ ID NO: 702898 - RNA, 22 nt, Human
ugaaggagagcacauaccguua

SEQ ID NO: 702899 - RNA, 19 nt, Human
uggagaagaaaaguguuga

SEQ ID NO: 702900 - RNA, 21 nt, Human
uggggagaggggaggagaagg

SEQ ID NO: 702901 - RNA, 18 nt, Human
uucaacuagggccagagc

SEQ ID NO: 702902 - RNA, 22 nt, Human
aacuugcuccucggauccgggc

SEQ ID NO: 702903 - RNA, 18 nt, Human
aggaagggaaauauugcg

SEQ ID NO: 702904 - RNA, 20 nt, Human
cccgagcucacgcgcgcccg

SEQ ID NO: 702905 - RNA, 23 nt, Human
cccgcacgcccggccgggcagcc

SEQ ID NO: 702906 - RNA, 25 nt, Human
cccggccgggcagcccgagcucacg

SEQ ID NO: 702907 - RNA, 20 nt, Human
cccugcaaggucgcccuucu

SEQ ID NO: 702908 - RNA, 23 nt, Human
cgccggggucccugcugaugcuc

SEQ ID NO: 702909 - RNA, 23 nt, Human
cuccucggauccgggcacacagc

SEQ ID NO: 702910 - RNA, 18 nt, Human
gcgacacgaaugaaggga

SEQ ID NO: 702911 - RNA, 22 nt, Human
ggaagggaaauauugcgacacg

SEQ ID NO: 702912 - RNA, 19 nt, Human
ggacagauuaacuugcucc

SEQ ID NO: 702913 - RNA, 19 nt, Human
ggccgggcagcccgagcuc

SEQ ID NO: 702914 - RNA, 20 nt, Human
uaccauguccccgcccgcac

SEQ ID NO: 702915 - RNA, 22 nt, Human
uacuaaguaucaaccgaacaag

SEQ ID NO: 702916 - RNA, 19 nt, Human
uaguuuuaaaaggaaggga

SEQ ID NO: 702917 - RNA, 19 nt, Human
ucccugcugaugcucgggg

SEQ ID NO: 702918 - RNA, 23 nt, Human
ucccugcugaugcucggggggag

SEQ ID NO: 702919 - RNA, 18 nt, Human
uccgccggggucccugcu

SEQ ID NO: 702920 - RNA, 21 nt, Human
uccguggaccagguuaccaug

SEQ ID NO: 702921 - RNA, 18 nt, Human
ucgcggcggcgagucccu

SEQ ID NO: 702922 - RNA, 22 nt, Human
uggccacggaguuacuaaguau

SEQ ID NO: 702923 - RNA, 24 nt, Human
cacuaaagaucugauaucccacuc

SEQ ID NO: 702924 - RNA, 19 nt, Human
ccuguuuauuaacauguug

SEQ ID NO: 702925 - RNA, 22 nt, Human
guagauguaucuucacacuaaa

SEQ ID NO: 702926 - RNA, 21 nt, Human
ucaaccuucacaguuuuaaaa

SEQ ID NO: 702927 - RNA, 19 nt, Human
uguagauguaucuucacac

SEQ ID NO: 702928 - RNA, 21 nt, Human
uguaucuucacacuaaagauc

SEQ ID NO: 702929 - RNA, 20 nt, Human
accuucuccugcuugucaga

SEQ ID NO: 702930 - RNA, 21 nt, Human
acgcugcacuccagcgcuggg

SEQ ID NO: 702931 - RNA, 22 nt, Human
acgcugcacuccagcgcugggc

SEQ ID NO: 702932 - RNA, 25 nt, Human
caaccagacagcuuuuuagacuaaa

SEQ ID NO: 702933 - RNA, 19 nt, Human
cagcucuuuauuaccaggg

SEQ ID NO: 702934 - RNA, 18 nt, Human
cagcugcagcucccuggg

SEQ ID NO: 702935 - RNA, 20 nt, Human
cccaugugcccacagcccga

SEQ ID NO: 702936 - RNA, 21 nt, Human
ccccaugugcccacagcccga

SEQ ID NO: 702937 - RNA, 23 nt, Human
ccuccaaggaaccugcggggccc

SEQ ID NO: 702938 - RNA, 20 nt, Human
ccucccagcucagggcuccu

SEQ ID NO: 702939 - RNA, 21 nt, Human
ccuuggagcugaccgggcccu

SEQ ID NO: 702940 - RNA, 22 nt, Human
cgaccgcccuccucguggcacg

SEQ ID NO: 702941 - RNA, 21 nt, Human
cuccugcuugucagaggugag

SEQ ID NO: 702942 - RNA, 22 nt, Human
cugaccgggcccuuaccuucuc

SEQ ID NO: 702943 - RNA, 18 nt, Human
cugcacuccagcgcuggg

SEQ ID NO: 702944 - RNA, 19 nt, Human
cugcacuccagcgcugggc

SEQ ID NO: 702945 - RNA, 20 nt, Human
cugcacuccagcgcugggca

SEQ ID NO: 702946 - RNA, 18 nt, Human
gagcgcgcuccuuggagc

SEQ ID NO: 702947 - RNA, 21 nt, Human
gagcgcgcuccuuggagcuga

SEQ ID NO: 702948 - RNA, 19 nt, Human
ggccuccgggaggcuuuga

SEQ ID NO: 702949 - RNA, 22 nt, Human
gggcuccagcugcagcucccug

SEQ ID NO: 702950 - RNA, 25 nt, Human
ugaccgggcccuuaccuucuccugc

SEQ ID NO: 702951 - RNA, 18 nt, Human
ugacuccacugaucggca

SEQ ID NO: 702952 - RNA, 26 nt, Human
ugauaggucagccuuugcugccuccc

SEQ ID NO: 702953 - RNA, 20 nt, Human
ugcacgcgcguggagcgcgc

SEQ ID NO: 702954 - RNA, 21 nt, Human
ugcgguggucaggcucgauac

SEQ ID NO: 702955 - RNA, 23 nt, Human
uggagcgcgcuccuuggagcuga

SEQ ID NO: 702956 - RNA, 23 nt, Human
ugugugcacgcgcguggagcgcg

SEQ ID NO: 702957 - RNA, 24 nt, Human
uuccuggcuugcgguggucaggcu

SEQ ID NO: 702958 - RNA, 20 nt, Human
aaaauagcugagggugagaa

SEQ ID NO: 702959 - RNA, 22 nt, Human
aaagaaagguuugaaguagcuc

SEQ ID NO: 702960 - RNA, 21 nt, Human
aaagccccacagaaauuccca

SEQ ID NO: 702961 - RNA, 19 nt, Human
aacuccaguaaaguagcau

SEQ ID NO: 702962 - RNA, 24 nt, Human
aagacaaaaaaaacauuggcuacc

SEQ ID NO: 702963 - RNA, 25 nt, Human
accaaucacauaacuuuuaauucac

SEQ ID NO: 702964 - RNA, 22 nt, Human
agaggaaagggggcgccacggg

SEQ ID NO: 702965 - RNA, 22 nt, Human
agcauccuccccaccuccaaac

SEQ ID NO: 702966 - RNA, 19 nt, Human
aguacacaauguacacuga

SEQ ID NO: 702967 - RNA, 23 nt, Human
agugcucagccaaugucccaaac

SEQ ID NO: 702968 - RNA, 19 nt, Human
augaacuagaagagcuucg

SEQ ID NO: 702969 - RNA, 25 nt, Human
caaaaaaaacauuggcuaccaaagg

SEQ ID NO: 702970 - RNA, 23 nt, Human
caaaaacaaguugccgcugaaaa

SEQ ID NO: 702971 - RNA, 23 nt, Human
cacaguaugacauuuacagcaga

SEQ ID NO: 702972 - RNA, 21 nt, Human
cagcagaagcauuaaacaauu

SEQ ID NO: 702973 - RNA, 19 nt, Human
caguaugacauuuacagca

SEQ ID NO: 702974 - RNA, 23 nt, Human
cauccuccccaccuccaaacacc

SEQ ID NO: 702975 - RNA, 22 nt, Human
caugcaccccaaaagcagcaaa

SEQ ID NO: 702976 - RNA, 19 nt, Human
ccaccuccaaacaccaacu

SEQ ID NO: 702977 - RNA, 20 nt, Human
ccaugaucuguuuccucuaa

SEQ ID NO: 702978 - RNA, 20 nt, Human
cccacaaaauagcugagggu

SEQ ID NO: 702979 - RNA, 24 nt, Human
cccaugaucuguuuccucuaaggc

SEQ ID NO: 702980 - RNA, 19 nt, Human
ccccaaaagcagcaaaaau

SEQ ID NO: 702981 - RNA, 24 nt, Human
ccccaugcaccccaaaagcagcaa

SEQ ID NO: 702982 - RNA, 19 nt, Human
cccgccgggccuccccggg

SEQ ID NO: 702983 - RNA, 21 nt, Human
ccgcugaaaagaaaauacuga

SEQ ID NO: 702984 - RNA, 26 nt, Human
ccuccaaacaccaacuuaagaaugga

SEQ ID NO: 702985 - RNA, 18 nt, Human
cgccugugaugacaagac

SEQ ID NO: 702986 - RNA, 22 nt, Human
cgggcgccgggggcggggcuuu

SEQ ID NO: 702987 - RNA, 19 nt, Human
cuccccaccuccaaacacc

SEQ ID NO: 702988 - RNA, 19 nt, Human
cuccccgggcuggcccggc

SEQ ID NO: 702989 - RNA, 18 nt, Human
gagggugagaauuuuagg

SEQ ID NO: 702990 - RNA, 20 nt, Human
gauucguuagggucuccaga

SEQ ID NO: 702991 - RNA, 24 nt, Human
gcaccccaaaagcagcaaaaaucc

SEQ ID NO: 702992 - RNA, 19 nt, Human
gcgccgggggcggggcuuu

SEQ ID NO: 702993 - RNA, 23 nt, Human
ggagcgggcgccgggggcggggc

SEQ ID NO: 702994 - RNA, 18 nt, Human
ggauuacagguguuaaca

SEQ ID NO: 702995 - RNA, 24 nt, Human
gggaaagugagaaggauuuaaagc

SEQ ID NO: 702996 - RNA, 21 nt, Human
gggaauuaguacacaauguac

SEQ ID NO: 702997 - RNA, 23 nt, Human
ggguagccagaauccuuugugga

SEQ ID NO: 702998 - RNA, 23 nt, Human
gguggagucgagagcgcucuggg

SEQ ID NO: 702999 - RNA, 21 nt, Human
gucccgccgggccuccccggg

SEQ ID NO: 703000 - RNA, 21 nt, Human
uaaaacagucaaacuugagga

SEQ ID NO: 703001 - RNA, 21 nt, Human
uaaaguagcauccuccccacc

SEQ ID NO: 703002 - RNA, 18 nt, Human
uacacaauguacacugaa

SEQ ID NO: 703003 - RNA, 20 nt, Human
uaccaaaggguagccagaau

SEQ ID NO: 703004 - RNA, 18 nt, Human
uaggaaggaaugaaagua

SEQ ID NO: 703005 - RNA, 21 nt, Human
ucaagguuuauaccauauaca

SEQ ID NO: 703006 - RNA, 20 nt, Human
uccccaccuccaaacaccaa

SEQ ID NO: 703007 - RNA, 21 nt, Human
uccuuaaguuugacaccaauc

SEQ ID NO: 703008 - RNA, 18 nt, Human
uccuuaguggauuacagg

SEQ ID NO: 703009 - RNA, 18 nt, Human
uccuuuguggacauugag

SEQ ID NO: 703010 - RNA, 19 nt, Human
uccuuuguggacauugaga

SEQ ID NO: 703011 - RNA, 19 nt, Human
ucugacccuauugagacag

SEQ ID NO: 703012 - RNA, 22 nt, Human
ucuguauuuccaaaaagccauu

SEQ ID NO: 703013 - RNA, 19 nt, Human
ugaaaagaaaauacugaau

SEQ ID NO: 703014 - RNA, 21 nt, Human
ugaaaagaaaauacugaauau

SEQ ID NO: 703015 - RNA, 19 nt, Human
ugacaagacaaaaaaaaca

SEQ ID NO: 703016 - RNA, 19 nt, Human
ugacaagacaaaaaaaaca

SEQ ID NO: 703017 - RNA, 23 nt, Human
ugacaagacaaaaaaaacauugg

SEQ ID NO: 703018 - RNA, 19 nt, Human
ugagcaaauugccauucag

SEQ ID NO: 703019 - RNA, 19 nt, Human
ugcaccccaaaagcagcaa

SEQ ID NO: 703020 - RNA, 20 nt, Human
uggauuacagguguuaacau

SEQ ID NO: 703021 - RNA, 19 nt, Human
uggcuaccaaaggguagcc

SEQ ID NO: 703022 - RNA, 26 nt, Human
ugggcaaaggaaaguuuucuugcggg

SEQ ID NO: 703023 - RNA, 18 nt, Human
uggggaaagugagaagga

SEQ ID NO: 703024 - RNA, 24 nt, Human
uggugguaagcaucuuacaaauac

SEQ ID NO: 703025 - RNA, 22 nt, Human
uguccgcuccucugguggaaca

SEQ ID NO: 703026 - RNA, 24 nt, Human
uguggacauugagacaugcacgca

SEQ ID NO: 703027 - RNA, 22 nt, Human
uuaaaacagucaaacuugagga

SEQ ID NO: 703028 - RNA, 21 nt, Human
uuggcuaccaaaggguagcca

SEQ ID NO: 703029 - RNA, 20 nt, Human
uuucacagucuauguacauu

SEQ ID NO: 703030 - RNA, 26 nt, Human
uuucacagucuauguacauuuauuug

SEQ ID NO: 703031 - RNA, 24 nt, Human
agacugaggugaaagcagacacuc

SEQ ID NO: 703032 - RNA, 22 nt, Human
agcagaaaaucugaacucugca

SEQ ID NO: 703033 - RNA, 27 nt, Human
agcagaaaaucugaacucugcacuagc

SEQ ID NO: 703034 - RNA, 21 nt, Human
agcagaaaggaaacauucuga

SEQ ID NO: 703035 - RNA, 23 nt, Human
cagaaaaucugaacucugcacua

SEQ ID NO: 703036 - RNA, 22 nt, Human
cagguccuuucagugcaggcug

SEQ ID NO: 703037 - RNA, 19 nt, Human
cccccgaacacagucuucc

SEQ ID NO: 703038 - RNA, 18 nt, Human
cgaacacagucuuccucc

SEQ ID NO: 703039 - RNA, 22 nt, Human
cuaugccagcucccccgaacac

SEQ ID NO: 703040 - RNA, 21 nt, Human
ggugaaucagccuucagguac

SEQ ID NO: 703041 - RNA, 19 nt, Human
guaagagcagaaaggaaac

SEQ ID NO: 703042 - RNA, 25 nt, Human
uagcuaugccagcucccccgaacaa

SEQ ID NO: 703043 - RNA, 23 nt, Human
uaugcagguccuuucagugcagg

SEQ ID NO: 703044 - RNA, 21 nt, Human
ucccccgaacacagucuuccu

SEQ ID NO: 703045 - RNA, 23 nt, Human
ugacaaaacaaugcuguguaaga

SEQ ID NO: 703046 - RNA, 21 nt, Human
ugcacagacauagucuaugca

SEQ ID NO: 703047 - RNA, 26 nt, Human
ugcacagacauagucuaugcaggucc

SEQ ID NO: 703048 - RNA, 23 nt, Human
ugccagcucccccgaacacaguc

SEQ ID NO: 703049 - RNA, 24 nt, Human
uguacagacugaggugaaagcaga

SEQ ID NO: 703050 - RNA, 22 nt, Human
uuaugaauucucauuuccaacu

SEQ ID NO: 703051 - RNA, 21 nt, Human
uucccaagguguaaaagauua

SEQ ID NO: 703052 - RNA, 18 nt, Human
aaacacuggcgcagcagc

SEQ ID NO: 703053 - RNA, 20 nt, Human
aauaagcuaguguuagaucu

SEQ ID NO: 703054 - RNA, 19 nt, Human
accgggaugcaggccgcag

SEQ ID NO: 703055 - RNA, 25 nt, Human
acguccacuccaaccggccugcauc

SEQ ID NO: 703056 - RNA, 19 nt, Human
agaccuucauuuaugagaa

SEQ ID NO: 703057 - RNA, 20 nt, Human
agagaaaauuccauuuuucu

SEQ ID NO: 703058 - RNA, 22 nt, Human
aucaaacaauauaacaccaaua

SEQ ID NO: 703059 - RNA, 22 nt, Human
caaaaauuaauuuuaaaaugac

SEQ ID NO: 703060 - RNA, 24 nt, Human
caccaauaucuacuaaaaucuacu

SEQ ID NO: 703061 - RNA, 19 nt, Human
caccuuuuuuaaccaaaca

SEQ ID NO: 703062 - RNA, 24 nt, Human
cagcuaggucgccacccacucagc

SEQ ID NO: 703063 - RNA, 24 nt, Human
cguccacuccaaccggccugcauc

SEQ ID NO: 703064 - RNA, 23 nt, Human
cuaaagcuuagcuaauuauuaac

SEQ ID NO: 703065 - RNA, 21 nt, Human
cuaggucgccacccacucagc

SEQ ID NO: 703066 - RNA, 19 nt, Human
gaaaugccauaauucaugg

SEQ ID NO: 703067 - RNA, 19 nt, Human
gacucgcucguucccggca

SEQ ID NO: 703068 - RNA, 20 nt, Human
gagcuuccaacacaaacacu

SEQ ID NO: 703069 - RNA, 19 nt, Human
gcaucagcugagcuuccaa

SEQ ID NO: 703070 - RNA, 24 nt, Human
ggauuggagaacauagcuagugag

SEQ ID NO: 703071 - RNA, 22 nt, Human
gguaauguaaauuuaagaagaa

SEQ ID NO: 703072 - RNA, 18 nt, Human
uaaaaauacacaguacaa

SEQ ID NO: 703073 - RNA, 22 nt, Human
uaacucaugucgaaccccacaa

SEQ ID NO: 703074 - RNA, 20 nt, Human
uaagaaaugccauaauucau

SEQ ID NO: 703075 - RNA, 22 nt, Human
uaagaagaaauuagcuuuucca

SEQ ID NO: 703076 - RNA, 19 nt, Human
uaucuugaaauuucagggg

SEQ ID NO: 703077 - RNA, 18 nt, Human
ucaaaggcuaaaggggag

SEQ ID NO: 703078 - RNA, 18 nt, Human
ucacuagggcugcagcgg

SEQ ID NO: 703079 - RNA, 20 nt, Human
ucaggauucuccagaauuca

SEQ ID NO: 703080 - RNA, 20 nt, Human
ucuacuaaaaucuacuagca

SEQ ID NO: 703081 - RNA, 22 nt, Human
ugagaacauaagcauauacuca

SEQ ID NO: 703082 - RNA, 19 nt, Human
ugagcuuccaacacaaaca

SEQ ID NO: 703083 - RNA, 19 nt, Human
uggaaaaguuaauauagca

SEQ ID NO: 703084 - RNA, 26 nt, Human
uucccggcaaugacguccacuccaag

SEQ ID NO: 703085 - RNA, 22 nt, Human
uuuuaaccaaacaauguuaaaa

SEQ ID NO: 703086 - RNA, 19 nt, Human
aaaccacaucaaaagaaaa

SEQ ID NO: 703087 - RNA, 19 nt, Human
acuccuuugcccagacugg

SEQ ID NO: 703088 - RNA, 25 nt, Human
acuccuuugcccagacugggagaca

SEQ ID NO: 703089 - RNA, 24 nt, Human
agacugggagacaaacauaccccu

SEQ ID NO: 703090 - RNA, 21 nt, Human
agcagugauaauaacucacac

SEQ ID NO: 703091 - RNA, 19 nt, Human
aucagccacacaaggagcu

SEQ ID NO: 703092 - RNA, 20 nt, Human
augucacagcuuccucaguu

SEQ ID NO: 703093 - RNA, 22 nt, Human
caaguccuaugucacagcuucc

SEQ ID NO: 703094 - RNA, 19 nt, Human
caauauguggcucacaaau

SEQ ID NO: 703095 - RNA, 22 nt, Human
cauaccccucccuccugaacug

SEQ ID NO: 703096 - RNA, 23 nt, Human
cccuccugaacuggauccccacc

SEQ ID NO: 703097 - RNA, 20 nt, Human
cccuuuccugccauucacuc

SEQ ID NO: 703098 - RNA, 20 nt, Human
ccuccugaacuggaucccca

SEQ ID NO: 703099 - RNA, 23 nt, Human
cucccuccugaacuggaucccca

SEQ ID NO: 703100 - RNA, 18 nt, Human
cugaacuacaucauuucc

SEQ ID NO: 703101 - RNA, 24 nt, Human
cugggagacaaacauaccccuccc

SEQ ID NO: 703102 - RNA, 20 nt, Human
cuuuaagguucaaagaaaaa

SEQ ID NO: 703103 - RNA, 20 nt, Human
gagauggcccuuuccugcca

SEQ ID NO: 703104 - RNA, 22 nt, Human
uaacucaauagaaagacagcag

SEQ ID NO: 703105 - RNA, 23 nt, Human
uagaacucccaauauguggcuca

SEQ ID NO: 703106 - RNA, 19 nt, Human
ucacucaaaucuagaacuc

SEQ ID NO: 703107 - RNA, 20 nt, Human
uccagacacaucagccacag

SEQ ID NO: 703108 - RNA, 21 nt, Human
uccccaccaccuuuccaaagg

SEQ ID NO: 703109 - RNA, 20 nt, Human
ugacaagaacuuuccagagc

SEQ ID NO: 703110 - RNA, 21 nt, Human
ugccauucacucaaaucuaga

SEQ ID NO: 703111 - RNA, 18 nt, Human
ugguauucaccacaaaga

SEQ ID NO: 703112 - RNA, 18 nt, Human
uggugggagcuuuucugc

SEQ ID NO: 703113 - RNA, 20 nt, Human
uucacucaaaucuagaacuc

SEQ ID NO: 703114 - RNA, 24 nt, Human
uuccaaaggccacuggacaugucu

SEQ ID NO: 703115 - RNA, 18 nt, Human
uucucuguagaauucuga

SEQ ID NO: 703116 - RNA, 21 nt, Human
uucucuguagaauucugagaa

SEQ ID NO: 703117 - RNA, 18 nt, Human
uugacaagaacuuuccag

SEQ ID NO: 703118 - RNA, 24 nt, Human
uuuuuuuuuuuuuuuuaaauuuuu

SEQ ID NO: 703119 - RNA, 24 nt, Human
aaauaaauaaauucacauuaggca

SEQ ID NO: 703120 - RNA, 26 nt, Human
acuucgaaggugcugaggccaaaaag

SEQ ID NO: 703121 - RNA, 23 nt, Human
agccucggugcucacagagacgg

SEQ ID NO: 703122 - RNA, 21 nt, Human
aggugcugaggccaaaaagcc

SEQ ID NO: 703123 - RNA, 18 nt, Human
cagcggcggcgcgucugg

SEQ ID NO: 703124 - RNA, 23 nt, Human
ccaggaaaggcagucugccaagg

SEQ ID NO: 703125 - RNA, 23 nt, Human
cccccgucgggaucgcccgugcc

SEQ ID NO: 703126 - RNA, 19 nt, Human
cccgugcccucuuccagga

SEQ ID NO: 703127 - RNA, 24 nt, Human
ccgaggugugaaguggccccuucc

SEQ ID NO: 703128 - RNA, 21 nt, Human
ccggcggccggcggccgcuuu

SEQ ID NO: 703129 - RNA, 19 nt, Human
cgaaggugcugaggccaaa

SEQ ID NO: 703130 - RNA, 18 nt, Human
cugccaaggaaccacuuc

SEQ ID NO: 703131 - RNA, 25 nt, Human
gcagagccuccugcuugccucaaag

SEQ ID NO: 703132 - RNA, 25 nt, Human
gccaaaaagccucggugcucacaga

SEQ ID NO: 703133 - RNA, 19 nt, Human
ggaggggcugagaagggcc

SEQ ID NO: 703134 - RNA, 25 nt, Human
ggcagcggcggcgcgucugggggcc

SEQ ID NO: 703135 - RNA, 20 nt, Human
ggcugagaagggccgccgcg

SEQ ID NO: 703136 - RNA, 23 nt, Human
uaaauaaauucacauuaggcaga

SEQ ID NO: 703137 - RNA, 18 nt, Human
ucccuccauggagggagg

SEQ ID NO: 703138 - RNA, 19 nt, Human
ucuagcccuaugggucccu

SEQ ID NO: 703139 - RNA, 20 nt, Human
ugagaagggccgccgcggug

SEQ ID NO: 703140 - RNA, 18 nt, Human
ugcccucuuccaggaaag

SEQ ID NO: 703141 - RNA, 18 nt, Human
uuuuuuuuuuuuuuuuug

SEQ ID NO: 703142 - RNA, 20 nt, Human
acgaggcggaguccaggucu

SEQ ID NO: 703143 - RNA, 19 nt, Human
cccaaggucauaccuaugc

SEQ ID NO: 703144 - RNA, 18 nt, Human
cccgagccccggggacga

SEQ ID NO: 703145 - RNA, 23 nt, Human
ccgugcaagcaagcuaaaccaaa

SEQ ID NO: 703146 - RNA, 23 nt, Human
ccuacaacccgugcaagcaagcu

SEQ ID NO: 703147 - RNA, 19 nt, Human
ccuaugcucaggugccuau

SEQ ID NO: 703148 - RNA, 20 nt, Human
ccugcacgccugcgacaggc

SEQ ID NO: 703149 - RNA, 21 nt, Human
cuuauggagccaaugucuucc

SEQ ID NO: 703150 - RNA, 22 nt, Human
gaauguucuuggcagauggagg

SEQ ID NO: 703151 - RNA, 21 nt, Human
gaguccaggucccugcacgcc

SEQ ID NO: 703152 - RNA, 20 nt, Human
gcccgagccccggggacgag

SEQ ID NO: 703153 - RNA, 19 nt, Human
ggaaaaaagaaauggaauu

SEQ ID NO: 703154 - RNA, 23 nt, Human
ggagccaaugucuucccaagguc

SEQ ID NO: 703155 - RNA, 20 nt, Human
gucccuuuuugguagguuuu

SEQ ID NO: 703156 - RNA, 20 nt, Human
uacuugcuuuuuucuuuauc

SEQ ID NO: 703157 - RNA, 21 nt, Human
ucccaaggucauaccuaugcu

SEQ ID NO: 703158 - RNA, 20 nt, Human
ucucuuggcauugcuuaugg

SEQ ID NO: 703159 - RNA, 23 nt, Human
ucucuuggcauugcuuauggagc

SEQ ID NO: 703160 - RNA, 19 nt, Human
ugcaagcaagcuaaaccaa

SEQ ID NO: 703161 - RNA, 22 nt, Human
ugcaucacccaaacucacuauu

SEQ ID NO: 703162 - RNA, 18 nt, Human
uugaucauucucuuggca

SEQ ID NO: 703163 - RNA, 21 nt, Human
aaauggggcaaucacaagagu

SEQ ID NO: 703164 - RNA, 21 nt, Human
aaauggggcaaucacaagagu

SEQ ID NO: 703165 - RNA, 18 nt, Human
aacacucuggcuuuuguu

SEQ ID NO: 703166 - RNA, 18 nt, Human
aacacucuggcuuuuguu

SEQ ID NO: 703167 - RNA, 20 nt, Human
aaccagggaaaucagggcca

SEQ ID NO: 703168 - RNA, 20 nt, Human
aaccagggaaaucagggcca

SEQ ID NO: 703169 - RNA, 20 nt, Human
aagugagucucaaaccaggg

SEQ ID NO: 703170 - RNA, 20 nt, Human
aagugagucucaaaccaggg

SEQ ID NO: 703171 - RNA, 26 nt, Human
acaauauaauaaauauauuaaauaua

SEQ ID NO: 703172 - RNA, 23 nt, Human
acagaugaagugagagcggguag

SEQ ID NO: 703173 - RNA, 21 nt, Human
acagcccaggagagaaaggcc

SEQ ID NO: 703174 - RNA, 22 nt, Human
agaaaaagguuuauuuggcuca

SEQ ID NO: 703175 - RNA, 24 nt, Human
agaacucacucacuguccccaccu

SEQ ID NO: 703176 - RNA, 19 nt, Human
agaccagagacagcccagg

SEQ ID NO: 703177 - RNA, 22 nt, Human
agaccagagacagcccaggaga

SEQ ID NO: 703178 - RNA, 18 nt, Human
agagacagcccaggagag

SEQ ID NO: 703179 - RNA, 22 nt, Human
aggaagugagucucaaaccagg

SEQ ID NO: 703180 - RNA, 22 nt, Human
aggaagugagucucaaaccagg

SEQ ID NO: 703181 - RNA, 18 nt, Human
aggcaggggcucgggccu

SEQ ID NO: 703182 - RNA, 19 nt, Human
agugagagcggguaggugc

SEQ ID NO: 703183 - RNA, 24 nt, Human
cacaucuccacaucaguccgcacc

SEQ ID NO: 703184 - RNA, 24 nt, Human
cacucuggcuuuuguugccagagg

SEQ ID NO: 703185 - RNA, 24 nt, Human
cacucuggcuuuuguugccagagg

SEQ ID NO: 703186 - RNA, 24 nt, Human
cagcuuccacucaauggcugaagg

SEQ ID NO: 703187 - RNA, 20 nt, Human
caucaguccgcaccgccacc

SEQ ID NO: 703188 - RNA, 19 nt, Human
ccagaccagagacagccca

SEQ ID NO: 703189 - RNA, 20 nt, Human
ccaggaaacccagagguagg

SEQ ID NO: 703190 - RNA, 20 nt, Human
ccagucaccgucugcagccu

SEQ ID NO: 703191 - RNA, 24 nt, Human
ccccaggguugggagaguucuuuc

SEQ ID NO: 703192 - RNA, 19 nt, Human
cccgggaaggcaggggcuc

SEQ ID NO: 703193 - RNA, 18 nt, Human
cccucuccuucuuggccc

SEQ ID NO: 703194 - RNA, 18 nt, Human
cccuguggggggacuugg

SEQ ID NO: 703195 - RNA, 18 nt, Human
cccuguggggggacuugg

SEQ ID NO: 703196 - RNA, 19 nt, Human
ccugcagaggcccuguggg

SEQ ID NO: 703197 - RNA, 19 nt, Human
ccugcagaggcccuguggg

SEQ ID NO: 703198 - RNA, 21 nt, Human
ccugcagaggcccuguggggg

SEQ ID NO: 703199 - RNA, 21 nt, Human
ccugcagaggcccuguggggg

SEQ ID NO: 703200 - RNA, 21 nt, Human
ccuguggggggacuuggccca

SEQ ID NO: 703201 - RNA, 21 nt, Human
ccuguggggggacuuggccca

SEQ ID NO: 703202 - RNA, 21 nt, Human
cuccacaucaguccgcaccgc

SEQ ID NO: 703203 - RNA, 21 nt, Human
cucuuuaacaaccagcucugg

SEQ ID NO: 703204 - RNA, 20 nt, Human
cuuggacucucaagaagggg

SEQ ID NO: 703205 - RNA, 20 nt, Human
cuuggacucucaagaagggg

SEQ ID NO: 703206 - RNA, 23 nt, Human
gaagccagggccagucaccgucu

SEQ ID NO: 703207 - RNA, 21 nt, Human
gcaccgccacccaggaagcca

SEQ ID NO: 703208 - RNA, 24 nt, Human
gccacccuuaggcaauuccuccua

SEQ ID NO: 703209 - RNA, 20 nt, Human
gcucacaguucugauggcuu

SEQ ID NO: 703210 - RNA, 21 nt, Human
gcugaauuucccgagagccag

SEQ ID NO: 703211 - RNA, 21 nt, Human
ggcagaaagugggcuggagug

SEQ ID NO: 703212 - RNA, 21 nt, Human
ggccuuucucccucuccuucu

SEQ ID NO: 703213 - RNA, 18 nt, Human
ggcucuuuaacaaccagc

SEQ ID NO: 703214 - RNA, 21 nt, Human
guccgcaccgccacccaggaa

SEQ ID NO: 703215 - RNA, 27 nt, Human
uaagagaacucacucacuguccccacc

SEQ ID NO: 703216 - RNA, 22 nt, Human
uacauaaaaauuauuucugcuc

SEQ ID NO: 703217 - RNA, 22 nt, Human
uacauaaaaauuauuucugcuc

SEQ ID NO: 703218 - RNA, 18 nt, Human
uaggccccaggguuggga

SEQ ID NO: 703219 - RNA, 18 nt, Human
ucacuguccccaccucgg

SEQ ID NO: 703220 - RNA, 27 nt, Human
ucccgagagccaggcugaccagaccag

SEQ ID NO: 703221 - RNA, 20 nt, Human
ucccucuccuucuuggccca

SEQ ID NO: 703222 - RNA, 22 nt, Human
ucccucuccuucuuggcccaaa

SEQ ID NO: 703223 - RNA, 19 nt, Human
uccgcaccgccacccagga

SEQ ID NO: 703224 - RNA, 24 nt, Human
uccgcaccgccacccaggaagcca

SEQ ID NO: 703225 - RNA, 24 nt, Human
uccuccuauacagcuaggccccag

SEQ ID NO: 703226 - RNA, 24 nt, Human
ucucaagaaggggguagcugccag

SEQ ID NO: 703227 - RNA, 24 nt, Human
ucucaagaaggggguagcugccag

SEQ ID NO: 703228 - RNA, 27 nt, Human
ucuccacaucaguccgcaccgccaccc

SEQ ID NO: 703229 - RNA, 24 nt, Human
ucuuggacucucaagaagggggua

SEQ ID NO: 703230 - RNA, 24 nt, Human
ucuuggacucucaagaagggggua

SEQ ID NO: 703231 - RNA, 22 nt, Human
ugaggaagugagucucaaacca

SEQ ID NO: 703232 - RNA, 22 nt, Human
ugaggaagugagucucaaacca

SEQ ID NO: 703233 - RNA, 19 nt, Human
uggcugaauuucccgagag

SEQ ID NO: 703234 - RNA, 20 nt, Human
ugggcaucaagauugggcau

SEQ ID NO: 703235 - RNA, 21 nt, Human
uggggcaaucacaagaguggg

SEQ ID NO: 703236 - RNA, 21 nt, Human
uggggcaaucacaagaguggg

SEQ ID NO: 703237 - RNA, 23 nt, Human
uuggcucacaguucugauggcug

SEQ ID NO: 703238 - RNA, 22 nt, Human
uuuuuuuuuuuucuguuuuuaa

SEQ ID NO: 703239 - RNA, 18 nt, Human
uuuuuuuuuuuuuuucug

SEQ ID NO: 703240 - RNA, 24 nt, Human
uuuuuuuuuuuuuuuucuguuuuu

SEQ ID NO: 703241 - RNA, 22 nt, Human
acccucacgcugcgugcccucu

SEQ ID NO: 703242 - RNA, 20 nt, Human
acucugaagucgaagauggg

SEQ ID NO: 703243 - RNA, 20 nt, Human
aggcaggcugggguggaggg

SEQ ID NO: 703244 - RNA, 23 nt, Human
aggcaggcugggguggaggggcu

SEQ ID NO: 703245 - RNA, 19 nt, Human
aggcugggguggaggggcu

SEQ ID NO: 703246 - RNA, 22 nt, Human
aggggcuggcggagccuggggg

SEQ ID NO: 703247 - RNA, 19 nt, Human
aggugggcugcuccagcuu

SEQ ID NO: 703248 - RNA, 19 nt, Human
aggugggcugcuccagcuu

SEQ ID NO: 703249 - RNA, 24 nt, Human
auagaggcuguuggcgcuggacag

SEQ ID NO: 703250 - RNA, 24 nt, Human
cacagccaggguuccagcuucacc

SEQ ID NO: 703251 - RNA, 21 nt, Human
cacagcuguggcccccgaagc

SEQ ID NO: 703252 - RNA, 20 nt, Human
cacagguguugaaccagugu

SEQ ID NO: 703253 - RNA, 20 nt, Human
cacagguguugaaccagugu

SEQ ID NO: 703254 - RNA, 20 nt, Human
cacagguguugaaccagugu

SEQ ID NO: 703255 - RNA, 19 nt, Human
caccaggaccaggcucuuc

SEQ ID NO: 703256 - RNA, 25 nt, Human
cacucggcacagccaggguuccagc

SEQ ID NO: 703257 - RNA, 24 nt, Human
cagcaggcaggcugggguggaggg

SEQ ID NO: 703258 - RNA, 24 nt, Human
cagcuccauaaggaagcacucgau

SEQ ID NO: 703259 - RNA, 23 nt, Human
caggcucuucuccuugggccucc

SEQ ID NO: 703260 - RNA, 19 nt, Human
caggucguguggccaggug

SEQ ID NO: 703261 - RNA, 19 nt, Human
caggucguguggccaggug

SEQ ID NO: 703262 - RNA, 19 nt, Human
caggucguguggccaggug

SEQ ID NO: 703263 - RNA, 27 nt, Human
caggugugacugcagguguggccggcg

SEQ ID NO: 703264 - RNA, 27 nt, Human
caggugugacugcagguguggccggcg

SEQ ID NO: 703265 - RNA, 22 nt, Human
ccacaggucguguggccaggug

SEQ ID NO: 703266 - RNA, 22 nt, Human
ccacaggucguguggccaggug

SEQ ID NO: 703267 - RNA, 22 nt, Human
ccacaggucguguggccaggug

SEQ ID NO: 703268 - RNA, 23 nt, Human
cccacagcuguggcccccgaagc

SEQ ID NO: 703269 - RNA, 21 nt, Human
cccccgaagcuccaggugcaa

SEQ ID NO: 703270 - RNA, 20 nt, Human
ccgcccaccucccaguacac

SEQ ID NO: 703271 - RNA, 19 nt, Human
ccucacgcugcgugcccuc

SEQ ID NO: 703272 - RNA, 20 nt, Human
ccucccagcugacagguccu

SEQ ID NO: 703273 - RNA, 24 nt, Human
ccucccagcugacagguccugccc

SEQ ID NO: 703274 - RNA, 23 nt, Human
ccuucugcaggggcaguuaggug

SEQ ID NO: 703275 - RNA, 23 nt, Human
ccuucugcaggggcaguuaggug

SEQ ID NO: 703276 - RNA, 23 nt, Human
ccuucugcaggggcaguuaggug

SEQ ID NO: 703277 - RNA, 23 nt, Human
cggcgcgcacacaugaagucaca

SEQ ID NO: 703278 - RNA, 23 nt, Human
cggcgcgcacacaugaagucaca

SEQ ID NO: 703279 - RNA, 23 nt, Human
cggcgcgcacacaugaagucaca

SEQ ID NO: 703280 - RNA, 20 nt, Human
cgggugucccaccaccuucu

SEQ ID NO: 703281 - RNA, 23 nt, Human
cuccuugggccucccagcugaca

SEQ ID NO: 703282 - RNA, 22 nt, Human
cucuaggugggcugcuccagcu

SEQ ID NO: 703283 - RNA, 22 nt, Human
cucuaggugggcugcuccagcu

SEQ ID NO: 703284 - RNA, 18 nt, Human
cugcagcaccgugcggcc

SEQ ID NO: 703285 - RNA, 18 nt, Human
cugggcggccgcggccag

SEQ ID NO: 703286 - RNA, 22 nt, Human
cuucugcagcaccgugcggccc

SEQ ID NO: 703287 - RNA, 19 nt, Human
gacaggcagaggcugaggc

SEQ ID NO: 703288 - RNA, 23 nt, Human
gagccuggggguccgcccaccuc

SEQ ID NO: 703289 - RNA, 19 nt, Human
gccgcgggcuggggcccgg

SEQ ID NO: 703290 - RNA, 20 nt, Human
gcggugcaggcgcuugggga

SEQ ID NO: 703291 - RNA, 22 nt, Human
ggaccaggcucuucuccuuggg

SEQ ID NO: 703292 - RNA, 19 nt, Human
ggagagggugggccgggcu

SEQ ID NO: 703293 - RNA, 19 nt, Human
ggagcucggcagggcuggg

SEQ ID NO: 703294 - RNA, 20 nt, Human
ggcccccgaagcuccaggug

SEQ ID NO: 703295 - RNA, 18 nt, Human
ggcccggggcuggggguc

SEQ ID NO: 703296 - RNA, 26 nt, Human
ggccgggcucuuaccucucaggagcc

SEQ ID NO: 703297 - RNA, 20 nt, Human
ggcugggguggaggggcugg

SEQ ID NO: 703298 - RNA, 19 nt, Human
ggggagccacggcgcugcc

SEQ ID NO: 703299 - RNA, 26 nt, Human
gggggucuguggcccggacagcuggg

SEQ ID NO: 703300 - RNA, 20 nt, Human
gucuggggggccguauagga

SEQ ID NO: 703301 - RNA, 21 nt, Human
gugcggcccuuguacaugaug

SEQ ID NO: 703302 - RNA, 18 nt, Human
guggaggggcuggcggag

SEQ ID NO: 703303 - RNA, 21 nt, Human
guggaggggcuggcggagccu

SEQ ID NO: 703304 - RNA, 19 nt, Human
gugggcugcuccagcuuuc

SEQ ID NO: 703305 - RNA, 19 nt, Human
gugggcugcuccagcuuuc

SEQ ID NO: 703306 - RNA, 20 nt, Human
uagccaccgacgcugccucg

SEQ ID NO: 703307 - RNA, 20 nt, Human
uagccaccgacgcugccucg

SEQ ID NO: 703308 - RNA, 20 nt, Human
uagccaccgacgcugccucg

SEQ ID NO: 703309 - RNA, 20 nt, Human
ucacagguguccacaggugu

SEQ ID NO: 703310 - RNA, 20 nt, Human
ucacagguguccacaggugu

SEQ ID NO: 703311 - RNA, 19 nt, Human
ucacaguuccgaggcagca

SEQ ID NO: 703312 - RNA, 21 nt, Human
uccaccagcucuuggaagaag

SEQ ID NO: 703313 - RNA, 21 nt, Human
ucccaguacaccuugcacuug

SEQ ID NO: 703314 - RNA, 23 nt, Human
uccuugggccucccagcugacag

SEQ ID NO: 703315 - RNA, 18 nt, Human
ucugaagucgaagauggg

SEQ ID NO: 703316 - RNA, 27 nt, Human
ucugcaggggcaguuagguggcugucc

SEQ ID NO: 703317 - RNA, 22 nt, Human
ugaagucacagguguugaacca

SEQ ID NO: 703318 - RNA, 22 nt, Human
ugaagucacagguguugaacca

SEQ ID NO: 703319 - RNA, 22 nt, Human
ugaagucacagguguugaacca

SEQ ID NO: 703320 - RNA, 22 nt, Human
ugacagguccugcccgaagccc

SEQ ID NO: 703321 - RNA, 21 nt, Human
ugcccgaagcccagguagaug

SEQ ID NO: 703322 - RNA, 24 nt, Human
ugccgugcccggaauuccaccagc

SEQ ID NO: 703323 - RNA, 20 nt, Human
uggcccccgaagcuccaggu

SEQ ID NO: 703324 - RNA, 18 nt, Human
uggcccggacagcugggu

SEQ ID NO: 703325 - RNA, 19 nt, Human
uggcgggaaggcgcaggcc

SEQ ID NO: 703326 - RNA, 19 nt, Human
uggcgggaaggcgcaggcc

SEQ ID NO: 703327 - RNA, 19 nt, Human
uggcgggaaggcgcaggcc

SEQ ID NO: 703328 - RNA, 19 nt, Human
ugggccucccagcugacag

SEQ ID NO: 703329 - RNA, 26 nt, Human
ugggggucuguggcccggacagcugg

SEQ ID NO: 703330 - RNA, 20 nt, Human
ugggguggaggggcuggcgg

SEQ ID NO: 703331 - RNA, 23 nt, Human
ugggguggaggggcuggcggagc

SEQ ID NO: 703332 - RNA, 18 nt, Human
uggugcggggacucuggg

SEQ ID NO: 703333 - RNA, 22 nt, Human
ugucacaguuccgaggcagcag

SEQ ID NO: 703334 - RNA, 20 nt, Human
ugucccaccaccuucugcag

SEQ ID NO: 703335 - RNA, 21 nt, Human
ugucccaccaccuucugcagc

SEQ ID NO: 703336 - RNA, 22 nt, Human
ugugacugcagguguggccggc

SEQ ID NO: 703337 - RNA, 22 nt, Human
ugugacugcagguguggccggc

SEQ ID NO: 703338 - RNA, 24 nt, Human
uguggccaggugucacaggugucc

SEQ ID NO: 703339 - RNA, 24 nt, Human
uguggccaggugucacaggugucc

SEQ ID NO: 703340 - RNA, 24 nt, Human
uguggccaggugucacaggugucc

SEQ ID NO: 703341 - RNA, 18 nt, Human
uuggcgcuggacaggcag

SEQ ID NO: 703342 - RNA, 23 nt, Human
aaagaaaugagaaacaaaguggc

SEQ ID NO: 703343 - RNA, 23 nt, Human
aaauauguauaauacaacuucau

SEQ ID NO: 703344 - RNA, 26 nt, Human
aaauuaaaaaaauaucaacuuacuau

SEQ ID NO: 703345 - RNA, 18 nt, Human
aagaagaagaaaaaagaa

SEQ ID NO: 703346 - RNA, 23 nt, Human
aagaagaagaaaaaagaaaugaa

SEQ ID NO: 703347 - RNA, 22 nt, Human
acaggggaguuaaagaagaaga

SEQ ID NO: 703348 - RNA, 19 nt, Human
accauuuacaaauuguauu

SEQ ID NO: 703349 - RNA, 28 nt, Human
agaagaaaaaagaaaugagaaacaaagg

SEQ ID NO: 703350 - RNA, 20 nt, Human
agaagaaaaaagaaaugagg

SEQ ID NO: 703351 - RNA, 25 nt, Human
agaagaagaaaaaagaaaugagaag

SEQ ID NO: 703352 - RNA, 21 nt, Human
agcagaugugucaagaccaga

SEQ ID NO: 703353 - RNA, 21 nt, Human
ccugcaguuuagauuugcuau

SEQ ID NO: 703354 - RNA, 18 nt, Human
cuguuuagauuccauuca

SEQ ID NO: 703355 - RNA, 21 nt, Human
gagaaacaaaguggcuuucuc

SEQ ID NO: 703356 - RNA, 18 nt, Human
gcuugcuuaaguuuaaau

SEQ ID NO: 703357 - RNA, 19 nt, Human
ugaacagagagagcagaug

SEQ ID NO: 703358 - RNA, 20 nt, Human
uggcuuucuccccacuuguc

SEQ ID NO: 703359 - RNA, 24 nt, Human
uguacuaauuacuucaaauagcag

SEQ ID NO: 703360 - RNA, 24 nt, Human
uuacaggggaguuaaagaagaaga

SEQ ID NO: 703361 - RNA, 21 nt, Human
uucauggucaaaacauuugaa

SEQ ID NO: 703362 - RNA, 20 nt, Human
uucgggugcaaaaauuuucc

SEQ ID NO: 703363 - RNA, 24 nt, Human
uuugaaccauuuacaaauuguauu

SEQ ID NO: 703364 - RNA, 23 nt, Human
aacaguagagccuaggaccuuca

SEQ ID NO: 703365 - RNA, 19 nt, Human
aagaccccgaccaucgggc

SEQ ID NO: 703366 - RNA, 27 nt, Human
aagcugcuuccguccuuacucuccggu

SEQ ID NO: 703367 - RNA, 25 nt, Human
acaauagguagcgugugcaugagcc

SEQ ID NO: 703368 - RNA, 21 nt, Human
acagaaaaagggccccucuga

SEQ ID NO: 703369 - RNA, 18 nt, Human
agaguauugggcaugcca

SEQ ID NO: 703370 - RNA, 24 nt, Human
agggcugugugacugaacguggcc

SEQ ID NO: 703371 - RNA, 18 nt, Human
aggggcaggccugauagc

SEQ ID NO: 703372 - RNA, 22 nt, Human
augagacaaaggaacaguagag

SEQ ID NO: 703373 - RNA, 22 nt, Human
caagggccugggcugccuuugu

SEQ ID NO: 703374 - RNA, 19 nt, Human
cacguccgugccuuccagg

SEQ ID NO: 703375 - RNA, 20 nt, Human
caggacaucccugggaguaa

SEQ ID NO: 703376 - RNA, 21 nt, Human
cagggccagcgggaucagcgc

SEQ ID NO: 703377 - RNA, 21 nt, Human
cauccaaacacuuccugaaac

SEQ ID NO: 703378 - RNA, 19 nt, Human
caugccagccaccaccagc

SEQ ID NO: 703379 - RNA, 23 nt, Human
ccaaagcugcuuccguccuuacu

SEQ ID NO: 703380 - RNA, 21 nt, Human
ccagccaaagcugcuuccguc

SEQ ID NO: 703381 - RNA, 19 nt, Human
ccccauucccagcugacua

SEQ ID NO: 703382 - RNA, 28 nt, Human
cccgaccaucgggcuccccagcccugac

SEQ ID NO: 703383 - RNA, 20 nt, Human
cccugugcagacccucugca

SEQ ID NO: 703384 - RNA, 23 nt, Human
ccucaccuuccucccucucccca

SEQ ID NO: 703385 - RNA, 24 nt, Human
ccucaccuuccucccucuccccag

SEQ ID NO: 703386 - RNA, 22 nt, Human
cucaccuuccucccucucccca

SEQ ID NO: 703387 - RNA, 24 nt, Human
cuccccagcccugaccgugccacc

SEQ ID NO: 703388 - RNA, 26 nt, Human
cugaaacaccuaauaagggcuggaca

SEQ ID NO: 703389 - RNA, 18 nt, Human
cugacucagaacagagga

SEQ ID NO: 703390 - RNA, 18 nt, Human
cugccuuugucugcccca

SEQ ID NO: 703391 - RNA, 22 nt, Human
gcaccaguguggaggggccaag

SEQ ID NO: 703392 - RNA, 18 nt, Human
gcgcccuuccagaugccc

SEQ ID NO: 703393 - RNA, 23 nt, Human
gcuuggcaagggccugggcugcc

SEQ ID NO: 703394 - RNA, 21 nt, Human
gggaguaagaccccgaccauc

SEQ ID NO: 703395 - RNA, 18 nt, Human
gggcagcaagcgaggaug

SEQ ID NO: 703396 - RNA, 23 nt, Human
gggguaaaugagacaaaggaaca

SEQ ID NO: 703397 - RNA, 21 nt, Human
gugcagacccucugcauccaa

SEQ ID NO: 703398 - RNA, 22 nt, Human
uacaguaguacagaaaaagggc

SEQ ID NO: 703399 - RNA, 21 nt, Human
ucaccuuccucccucucccca

SEQ ID NO: 703400 - RNA, 20 nt, Human
ucagcgccuguaggaacaag

SEQ ID NO: 703401 - RNA, 21 nt, Human
ucagcgggacgguguuccucu

SEQ ID NO: 703402 - RNA, 23 nt, Human
uccccagcccugaccgugccacc

SEQ ID NO: 703403 - RNA, 18 nt, Human
uccccaggcuugacuccc

SEQ ID NO: 703404 - RNA, 19 nt, Human
ucccugggaguaagacccc

SEQ ID NO: 703405 - RNA, 23 nt, Human
ugaccgugccacccucaccuucc

SEQ ID NO: 703406 - RNA, 18 nt, Human
ugagcaccagggccaugg

SEQ ID NO: 703407 - RNA, 23 nt, Human
ugagcuuggcaagggccugggcu

SEQ ID NO: 703408 - RNA, 21 nt, Human
ugagugaggcugcaggcagug

SEQ ID NO: 703409 - RNA, 26 nt, Human
ugcauccaaacacuuccugaaacacc

SEQ ID NO: 703410 - RNA, 19 nt, Human
ugcuuccguccuuacucuc

SEQ ID NO: 703411 - RNA, 22 nt, Human
ugggcugccuuugucugcccca

SEQ ID NO: 703412 - RNA, 21 nt, Human
ugugugcgcccuuccagauga

SEQ ID NO: 703413 - RNA, 19 nt, Human
uguugggaugcaccuuccc

SEQ ID NO: 703414 - RNA, 20 nt, Human
uuggaggugauggugagcuu

SEQ ID NO: 703415 - RNA, 20 nt, Human
uuuggaguucuacacacuuu

SEQ ID NO: 703416 - RNA, 18 nt, Human
uuuuuuuuuuuuuuuuug

SEQ ID NO: 703417 - RNA, 23 nt, Human
uuuuuuuuuuuuuuuuuggaguu

SEQ ID NO: 703418 - RNA, 20 nt, Human
accauucacuuuagggaaau

SEQ ID NO: 703419 - RNA, 20 nt, Human
cgaggacgagggggaauuca

SEQ ID NO: 703420 - RNA, 25 nt, Human
gacgagggggaauucacgaaaggga

SEQ ID NO: 703421 - RNA, 22 nt, Human
uaacacuguagacuguagcgca

SEQ ID NO: 703422 - RNA, 18 nt, Human
uuaaggugagcgaggacg

SEQ ID NO: 703423 - RNA, 19 nt, Human
aacuccuccccccuccccc

SEQ ID NO: 703424 - RNA, 22 nt, Human
aacuccuccccccucccccccg

SEQ ID NO: 703425 - RNA, 20 nt, Human
acacaagcacgugggggcau

SEQ ID NO: 703426 - RNA, 21 nt, Human
acuccuccccccucccccccg

SEQ ID NO: 703427 - RNA, 20 nt, Human
acucuauauacagaaaaggg

SEQ ID NO: 703428 - RNA, 24 nt, Human
acuggagccgccggcagaggccug

SEQ ID NO: 703429 - RNA, 22 nt, Human
caacuccuccccccuccccccc

SEQ ID NO: 703430 - RNA, 21 nt, Human
caccuggacgcgagcucggga

SEQ ID NO: 703431 - RNA, 22 nt, Human
caccuggacgcgagcucgggac

SEQ ID NO: 703432 - RNA, 23 nt, Human
cagccgcgccugccccgccgccc

SEQ ID NO: 703433 - RNA, 22 nt, Human
ccaacuccuccccccucccccc

SEQ ID NO: 703434 - RNA, 19 nt, Human
cccaacuccuccccccucc

SEQ ID NO: 703435 - RNA, 25 nt, Human
cccacauucccucccuccccaacuu

SEQ ID NO: 703436 - RNA, 18 nt, Human
ccccaacuccuccccccu

SEQ ID NO: 703437 - RNA, 20 nt, Human
ccccaacuccuccccccucc

SEQ ID NO: 703438 - RNA, 22 nt, Human
cccccgcaaaaguaaaagaaga

SEQ ID NO: 703439 - RNA, 21 nt, Human
ccccgccgcccagcuccgcgg

SEQ ID NO: 703440 - RNA, 24 nt, Human
cccggucggcccgacgaggcggcg

SEQ ID NO: 703441 - RNA, 18 nt, Human
ccgcgccugccccgccgc

SEQ ID NO: 703442 - RNA, 22 nt, Human
ccuccccccucccccccgcaaa

SEQ ID NO: 703443 - RNA, 23 nt, Human
ccucccuccccaacuccuccccc

SEQ ID NO: 703444 - RNA, 19 nt, Human
cggcccgacgaggcggcgg

SEQ ID NO: 703445 - RNA, 20 nt, Human
cugccccgccgcccagcucc

SEQ ID NO: 703446 - RNA, 19 nt, Human
cuggagccgccggcagagg

SEQ ID NO: 703447 - RNA, 20 nt, Human
gcagaggccuggccaccugg

SEQ ID NO: 703448 - RNA, 21 nt, Human
gccgcgccugccccgccgccc

SEQ ID NO: 703449 - RNA, 21 nt, Human
gggaaagagacacaagcacgu

SEQ ID NO: 703450 - RNA, 19 nt, Human
uaauuccucccacauuccc

SEQ ID NO: 703451 - RNA, 23 nt, Human
ucccccccgcaaaaguaaaagaa

SEQ ID NO: 703452 - RNA, 25 nt, Human
uccccccucccccccgcaaaaguca

SEQ ID NO: 703453 - RNA, 18 nt, Human
ugccccgccgcccagcuc

SEQ ID NO: 703454 - RNA, 19 nt, Human
uuauuagacaaaaauauau

SEQ ID NO: 703455 - RNA, 30 nt, Human
uuccucccacauucccucccuccccaacuu

SEQ ID NO: 703456 - RNA, 19 nt, Human
acacacaaaggcagacacg

SEQ ID NO: 703457 - RNA, 26 nt, Human
acuuucuuuguuuaguuuugcuuuua

SEQ ID NO: 703458 - RNA, 21 nt, Human
agaggggggccgacccccggg

SEQ ID NO: 703459 - RNA, 26 nt, Human
caaaaucaaccggacaaacaaaccuc

SEQ ID NO: 703460 - RNA, 20 nt, Human
cacguuuauucucacugaaa

SEQ ID NO: 703461 - RNA, 19 nt, Human
cacugaaacuccacccccc

SEQ ID NO: 703462 - RNA, 20 nt, Human
cagcucagcgccgcccgcgg

SEQ ID NO: 703463 - RNA, 19 nt, Human
cccccaaaaucaaccggac

SEQ ID NO: 703464 - RNA, 21 nt, Human
cccccaaaaucaaccggacaa

SEQ ID NO: 703465 - RNA, 24 nt, Human
cccccaaaaucaaccggacaaaca

SEQ ID NO: 703466 - RNA, 22 nt, Human
ccccccaaaaucaaccggacaa

SEQ ID NO: 703467 - RNA, 19 nt, Human
cccccgggccgcccagcuc

SEQ ID NO: 703468 - RNA, 18 nt, Human
ccccgggccgcccagcuc

SEQ ID NO: 703469 - RNA, 21 nt, Human
cgacccccgggccgcccagcu

SEQ ID NO: 703470 - RNA, 18 nt, Human
cggacaaacaaaccucac

SEQ ID NO: 703471 - RNA, 22 nt, Human
cggagaggggggccgacccccg

SEQ ID NO: 703472 - RNA, 28 nt, Human
cguacaauuugguucacacauauguaca

SEQ ID NO: 703473 - RNA, 22 nt, Human
cucacugaaacuccacccccca

SEQ ID NO: 703474 - RNA, 23 nt, Human
cucacugaaacuccaccccccaa

SEQ ID NO: 703475 - RNA, 24 nt, Human
cucacugaaacuccaccccccaaa

SEQ ID NO: 703476 - RNA, 18 nt, Human
gacccccgggccgcccag

SEQ ID NO: 703477 - RNA, 19 nt, Human
guuuuauuucuuuuucuua

SEQ ID NO: 703478 - RNA, 20 nt, Human
guuuuauuucuuuuucuuac

SEQ ID NO: 703479 - RNA, 19 nt, Human
uacacacacacaaaggcag

SEQ ID NO: 703480 - RNA, 24 nt, Human
uacauuucucuguauauauacaca

SEQ ID NO: 703481 - RNA, 20 nt, Human
uaguuuugcuuuuagguauc

SEQ ID NO: 703482 - RNA, 25 nt, Human
uauauacacacacacaaaggcagac

SEQ ID NO: 703483 - RNA, 18 nt, Human
ucaaccggacaaacaaac

SEQ ID NO: 703484 - RNA, 23 nt, Human
ucacugaaacuccaccccccaaa

SEQ ID NO: 703485 - RNA, 18 nt, Human
ugaaacuccaccccccaa

SEQ ID NO: 703486 - RNA, 23 nt, Human
uggcagcagcucauuuauuuagc

SEQ ID NO: 703487 - RNA, 20 nt, Human
uguuuaguuuugcuuuuagg

SEQ ID NO: 703488 - RNA, 22 nt, Human
acagcagaccacgcuucagaac

SEQ ID NO: 703489 - RNA, 18 nt, Human
agaagcccccucuccggu

SEQ ID NO: 703490 - RNA, 22 nt, Human
agcaucauauuauggagucgag

SEQ ID NO: 703491 - RNA, 27 nt, Human
agcugcaggcuucuaggcgcugggagg

SEQ ID NO: 703492 - RNA, 18 nt, Human
aggcccgacaggcccagg

SEQ ID NO: 703493 - RNA, 18 nt, Human
aggcgguggaggccccgg

SEQ ID NO: 703494 - RNA, 20 nt, Human
aucuggccucuucugcuccg

SEQ ID NO: 703495 - RNA, 24 nt, Human
cagaagcccccucuccgguggguu

SEQ ID NO: 703496 - RNA, 21 nt, Human
caggcuucuaggcgcugggag

SEQ ID NO: 703497 - RNA, 18 nt, Human
caggguaucuggccucuu

SEQ ID NO: 703498 - RNA, 20 nt, Human
ccccggcguggcagcgccgg

SEQ ID NO: 703499 - RNA, 23 nt, Human
cccggggcggacgggcggggccu

SEQ ID NO: 703500 - RNA, 27 nt, Human
cccuccugggcucgggacccgcccgcc

SEQ ID NO: 703501 - RNA, 22 nt, Human
ccugcaggguucugcgcgcugg

SEQ ID NO: 703502 - RNA, 24 nt, Human
ccugcaggguucugcgcgcugggg

SEQ ID NO: 703503 - RNA, 23 nt, Human
cgagugugcaagagucaacucag

SEQ ID NO: 703504 - RNA, 18 nt, Human
cgcggccacugcuccgga

SEQ ID NO: 703505 - RNA, 19 nt, Human
cgcggcccggggcggacgg

SEQ ID NO: 703506 - RNA, 21 nt, Human
cggcccggggcggacgggcgg

SEQ ID NO: 703507 - RNA, 24 nt, Human
cuccugggcucgggacccgcccgc

SEQ ID NO: 703508 - RNA, 24 nt, Human
gcccggggcggacgggcggggccu

SEQ ID NO: 703509 - RNA, 20 nt, Human
gcgcgcuggggccggcgugg

SEQ ID NO: 703510 - RNA, 18 nt, Human
ggcguggcagcgccgggc

SEQ ID NO: 703511 - RNA, 24 nt, Human
uacgucugaggaugaaaucggagg

SEQ ID NO: 703512 - RNA, 24 nt, Human
uaggcgcugggagggcgaagcagg

SEQ ID NO: 703513 - RNA, 18 nt, Human
uauuauggagucgagugu

SEQ ID NO: 703514 - RNA, 22 nt, Human
ucagaagcccccucuccggugg

SEQ ID NO: 703515 - RNA, 21 nt, Human
ucaggguaucuggccucuucu

SEQ ID NO: 703516 - RNA, 21 nt, Human
ucagugcaagugcuguuggug

SEQ ID NO: 703517 - RNA, 21 nt, Human
uccucuggaaacucagugaaa

SEQ ID NO: 703518 - RNA, 20 nt, Human
ucgcgguggccgcgcuaguc

SEQ ID NO: 703519 - RNA, 20 nt, Human
ugaaaagagucggcgccguc

SEQ ID NO: 703520 - RNA, 19 nt, Human
ugaagcaggcaauuauugg

SEQ ID NO: 703521 - RNA, 23 nt, Human
ugaagcaggcaauuauuggugug

SEQ ID NO: 703522 - RNA, 20 nt, Human
ugagcgcggguucccuccug

SEQ ID NO: 703523 - RNA, 24 nt, Human
ugugcaagagucaacucagugcaa

SEQ ID NO: 703524 - RNA, 27 nt, Human
uucgcgguggccgcgcuagucuuccuc

SEQ ID NO: 703525 - RNA, 19 nt, Human
cuccuguacuggcaaagau

SEQ ID NO: 703526 - RNA, 22 nt, Human
ggcugugggcugugggcugugg

SEQ ID NO: 703527 - RNA, 19 nt, Human
ugggcugugggcugugggc

SEQ ID NO: 703528 - RNA, 24 nt, Human
agagaggagaggagagggcagagc

SEQ ID NO: 703529 - RNA, 18 nt, Human
agcggcggccacguagag

SEQ ID NO: 703530 - RNA, 21 nt, Human
agugugcggccaggggcagaa

SEQ ID NO: 703531 - RNA, 21 nt, Human
augcagggagcaugcgagguc

SEQ ID NO: 703532 - RNA, 18 nt, Human
caaaggcucacauacucu

SEQ ID NO: 703533 - RNA, 20 nt, Human
caggggcagaaggacgaggg

SEQ ID NO: 703534 - RNA, 19 nt, Human
cagucuggugaaagcaggu

SEQ ID NO: 703535 - RNA, 23 nt, Human
cauccuggcgccuugggcugucc

SEQ ID NO: 703536 - RNA, 18 nt, Human
ccagaccgugucucucgg

SEQ ID NO: 703537 - RNA, 22 nt, Human
ccccuuccuuuuccccgcuagg

SEQ ID NO: 703538 - RNA, 21 nt, Human
ccuggcgccuugggcugucca

SEQ ID NO: 703539 - RNA, 22 nt, Human
cgccagggagcgcugagcuggg

SEQ ID NO: 703540 - RNA, 21 nt, Human
cuaacccugguaagucccaga

SEQ ID NO: 703541 - RNA, 19 nt, Human
cuccgggccggccgagaug

SEQ ID NO: 703542 - RNA, 24 nt, Human
cugaguuauccccuuccuuuuccc

SEQ ID NO: 703543 - RNA, 20 nt, Human
gacacagguggggcguggag

SEQ ID NO: 703544 - RNA, 21 nt, Human
gcaaagugugcggccaggggc

SEQ ID NO: 703545 - RNA, 20 nt, Human
gcgcaaagugugcggccagg

SEQ ID NO: 703546 - RNA, 25 nt, Human
gcgggcuggcagggagggguccccc

SEQ ID NO: 703547 - RNA, 23 nt, Human
ggccaggggcagaaggacgaggg

SEQ ID NO: 703548 - RNA, 21 nt, Human
gggagcaugcgagguccgcgg

SEQ ID NO: 703549 - RNA, 19 nt, Human
ggggcagaaggacgagggu

SEQ ID NO: 703550 - RNA, 24 nt, Human
gugugcggccaggggcagaaggac

SEQ ID NO: 703551 - RNA, 23 nt, Human
ucucucauaaauaacaauagaau

SEQ ID NO: 703552 - RNA, 21 nt, Human
ugcggccaggggcagaaggac

SEQ ID NO: 703553 - RNA, 18 nt, Human
uggagagacagagcggcg

SEQ ID NO: 703554 - RNA, 24 nt, Human
uggggcguggagagacagagcggc

SEQ ID NO: 703555 - RNA, 19 nt, Human
ugucuguuccucugaguua

SEQ ID NO: 703556 - RNA, 18 nt, Human
uugagugucuguuccucu

SEQ ID NO: 703557 - RNA, 20 nt, Human
agagucgacucaggcagcgg

SEQ ID NO: 703558 - RNA, 21 nt, Human
agggucguggggggcagcggg

SEQ ID NO: 703559 - RNA, 19 nt, Human
cagcggggaggaagagccg

SEQ ID NO: 703560 - RNA, 21 nt, Human
cgacucaggcagcggcggcgg

SEQ ID NO: 703561 - RNA, 22 nt, Human
gaggaagagccgagaaacugug

SEQ ID NO: 703562 - RNA, 21 nt, Human
gggucguggggggcagcgggg

SEQ ID NO: 703563 - RNA, 19 nt, Human
ggucguggggggcagcggg

SEQ ID NO: 703564 - RNA, 22 nt, Human
uagggucguggggggcagcggg

SEQ ID NO: 703565 - RNA, 20 nt, Human
uucaagguagggucgugggg

SEQ ID NO: 703566 - RNA, 18 nt, Human
uuugugggggccuucaag

SEQ ID NO: 703567 - RNA, 19 nt, Human
uuuuuuuuuugagggcuga

SEQ ID NO: 703568 - RNA, 19 nt, Human
uuuuuuuuuuuugagggcu

SEQ ID NO: 703569 - RNA, 19 nt, Human
uuuuuuuuuuuuugagggc

SEQ ID NO: 703570 - RNA, 22 nt, Human
uuuuuuuuuuuuuuuuugaggg

SEQ ID NO: 703571 - RNA, 22 nt, Human
aaagaaauauaaguuacccagu

SEQ ID NO: 703572 - RNA, 21 nt, Human
aacaggcaggaaagugagagg

SEQ ID NO: 703573 - RNA, 24 nt, Human
aacaggcaggaaagugagagggug

SEQ ID NO: 703574 - RNA, 20 nt, Human
aagcugguaaagugaaagca

SEQ ID NO: 703575 - RNA, 24 nt, Human
accccacugggaaacagagacaau

SEQ ID NO: 703576 - RNA, 20 nt, Human
agagacaaugcccaugaggg

SEQ ID NO: 703577 - RNA, 20 nt, Human
agccaccugagggcuccugg

SEQ ID NO: 703578 - RNA, 22 nt, Human
agcugcacucuggagaccaaua

SEQ ID NO: 703579 - RNA, 19 nt, Human
aggaaagugagagggugga

SEQ ID NO: 703580 - RNA, 23 nt, Human
aggaaugggaggagugauggugg

SEQ ID NO: 703581 - RNA, 18 nt, Human
aggaggagggaagcagag

SEQ ID NO: 703582 - RNA, 21 nt, Human
aggagggaagcagaggguggg

SEQ ID NO: 703583 - RNA, 20 nt, Human
augguggggaacugugggga

SEQ ID NO: 703584 - RNA, 23 nt, Human
augguggggaacuguggggagcc

SEQ ID NO: 703585 - RNA, 24 nt, Human
caaacaaaagccccaguguuggcu

SEQ ID NO: 703586 - RNA, 20 nt, Human
caacgucagcucccuccugu

SEQ ID NO: 703587 - RNA, 21 nt, Human
caagagugaguauaagacuug

SEQ ID NO: 703588 - RNA, 22 nt, Human
caagccaacgucagcucccucc

SEQ ID NO: 703589 - RNA, 26 nt, Human
caccagaguccacaggaaagcagcag

SEQ ID NO: 703590 - RNA, 22 nt, Human
caccaggcccuggcuuugcucc

SEQ ID NO: 703591 - RNA, 24 nt, Human
caccccacugggaaacagagacaa

SEQ ID NO: 703592 - RNA, 21 nt, Human
caccugagggcuccuggcuuc

SEQ ID NO: 703593 - RNA, 19 nt, Human
cacuuucccucccauccug

SEQ ID NO: 703594 - RNA, 19 nt, Human
cagaaaaggcuuggaauca

SEQ ID NO: 703595 - RNA, 22 nt, Human
cagcagcaucccuaggacucaa

SEQ ID NO: 703596 - RNA, 18 nt, Human
caggaucacgaggaggag

SEQ ID NO: 703597 - RNA, 24 nt, Human
caggccccaaggagggcucaagag

SEQ ID NO: 703598 - RNA, 18 nt, Human
caggguucuaggguugcc

SEQ ID NO: 703599 - RNA, 20 nt, Human
caggucucagguuucagggg

SEQ ID NO: 703600 - RNA, 25 nt, Human
ccaaaauaaauacuguggucaggcc

SEQ ID NO: 703601 - RNA, 20 nt, Human
cccagagccccaugccaccc

SEQ ID NO: 703602 - RNA, 28 nt, Human
cccaguugucuaugagaauccaacugcc

SEQ ID NO: 703603 - RNA, 20 nt, Human
cccaugagggugggccucug

SEQ ID NO: 703604 - RNA, 22 nt, Human
ccccaaaccucugcuuuuaugc

SEQ ID NO: 703605 - RNA, 23 nt, Human
cccccaaaccucugcuuuuaugc

SEQ ID NO: 703606 - RNA, 21 nt, Human
cccuccuuuuuuccuguugac

SEQ ID NO: 703607 - RNA, 19 nt, Human
ccucccauccugcccccuc

SEQ ID NO: 703608 - RNA, 20 nt, Human
ccuccucccuccuuuuuucc

SEQ ID NO: 703609 - RNA, 20 nt, Human
ccuccucccuccuuuuuucc

SEQ ID NO: 703610 - RNA, 24 nt, Human
ccugcccccucccaauggcagcua

SEQ ID NO: 703611 - RNA, 21 nt, Human
ccugucugcuuucuaagcagg

SEQ ID NO: 703612 - RNA, 22 nt, Human
cuaaaggcuucucuguuccuug

SEQ ID NO: 703613 - RNA, 23 nt, Human
cuaaaggcuucucuguuccuugg

SEQ ID NO: 703614 - RNA, 18 nt, Human
cucuccuuuucuguuuuc

SEQ ID NO: 703615 - RNA, 18 nt, Human
cucuggccucugucccuc

SEQ ID NO: 703616 - RNA, 21 nt, Human
cugagcccccaaaccucugcu

SEQ ID NO: 703617 - RNA, 23 nt, Human
cugucccucuccuuuucuguuuu

SEQ ID NO: 703618 - RNA, 18 nt, Human
cuuggaauuguacagaau

SEQ ID NO: 703619 - RNA, 19 nt, Human
gaaagcagcagauguugac

SEQ ID NO: 703620 - RNA, 21 nt, Human
gaaccaggaucacgaggagga

SEQ ID NO: 703621 - RNA, 19 nt, Human
gaagaagcugccagggagg

SEQ ID NO: 703622 - RNA, 20 nt, Human
gagggcggucgagugcacua

SEQ ID NO: 703623 - RNA, 22 nt, Human
gcagcaucccuaggacucaaaa

SEQ ID NO: 703624 - RNA, 19 nt, Human
gccccaugccacccaugua

SEQ ID NO: 703625 - RNA, 18 nt, Human
gcccuggcuuugcuccca

SEQ ID NO: 703626 - RNA, 21 nt, Human
gcuuuuccuccucccuccuuu

SEQ ID NO: 703627 - RNA, 21 nt, Human
ggaagauaaagagggaaucug

SEQ ID NO: 703628 - RNA, 19 nt, Human
ggaggacagguucugugac

SEQ ID NO: 703629 - RNA, 19 nt, Human
ggaggagggaagcagaggg

SEQ ID NO: 703630 - RNA, 24 nt, Human
ggcuauggaaccaggaucacgagg

SEQ ID NO: 703631 - RNA, 19 nt, Human
gggaaacagagacaaugcc

SEQ ID NO: 703632 - RNA, 18 nt, Human
gggaagcagaggguggga

SEQ ID NO: 703633 - RNA, 18 nt, Human
ggguuggggagggaucag

SEQ ID NO: 703634 - RNA, 19 nt, Human
uaaaaggaccccaaacaaa

SEQ ID NO: 703635 - RNA, 19 nt, Human
uaaaaggaccccaaacaaa

SEQ ID NO: 703636 - RNA, 18 nt, Human
uaaaggcuucucuguucc

SEQ ID NO: 703637 - RNA, 21 nt, Human
uaaccuggagauuuccaguaa

SEQ ID NO: 703638 - RNA, 19 nt, Human
uaaugcagacuccacacuu

SEQ ID NO: 703639 - RNA, 23 nt, Human
uacuguggucaggccucaggaac

SEQ ID NO: 703640 - RNA, 21 nt, Human
uaguuuuggugccagcucuuc

SEQ ID NO: 703641 - RNA, 18 nt, Human
uaugaaucaccagagucc

SEQ ID NO: 703642 - RNA, 19 nt, Human
uauggaaccaggaucacga

SEQ ID NO: 703643 - RNA, 22 nt, Human
uauuugugcuacauaaccagug

SEQ ID NO: 703644 - RNA, 24 nt, Human
ucagcucccuccuguggagugggg

SEQ ID NO: 703645 - RNA, 23 nt, Human
ucagguuucaggggggauggcag

SEQ ID NO: 703646 - RNA, 22 nt, Human
uccacaggaaagcagcagaugu

SEQ ID NO: 703647 - RNA, 22 nt, Human
ucccauccugcccccucccaau

SEQ ID NO: 703648 - RNA, 21 nt, Human
uccccagagccccaugccacc

SEQ ID NO: 703649 - RNA, 22 nt, Human
uccccagagccccaugccaccc

SEQ ID NO: 703650 - RNA, 18 nt, Human
ucccucuccuuuucuguu

SEQ ID NO: 703651 - RNA, 19 nt, Human
uccuaggagcuauuugugc

SEQ ID NO: 703652 - RNA, 23 nt, Human
uccucccuccuuuuuuccuguug

SEQ ID NO: 703653 - RNA, 24 nt, Human
uccucccugcuauuccagcuccag

SEQ ID NO: 703654 - RNA, 20 nt, Human
uccuggggauaaaaggaccc

SEQ ID NO: 703655 - RNA, 21 nt, Human
ucucucuucucagcucuuaau

SEQ ID NO: 703656 - RNA, 19 nt, Human
ucugucccucuccuuuucu

SEQ ID NO: 703657 - RNA, 20 nt, Human
ucuguuuucuucacuuuccc

SEQ ID NO: 703658 - RNA, 21 nt, Human
ucuucacuuucccucccaucc

SEQ ID NO: 703659 - RNA, 19 nt, Human
ugaagaagcugccagggag

SEQ ID NO: 703660 - RNA, 23 nt, Human
ugagagaaguagagaaaauacug

SEQ ID NO: 703661 - RNA, 21 nt, Human
ugagcccccaaaccucugcuu

SEQ ID NO: 703662 - RNA, 19 nt, Human
ugagggaagauaaagaggg

SEQ ID NO: 703663 - RNA, 27 nt, Human
ugauuacaaagaaauauaaguuacccu

SEQ ID NO: 703664 - RNA, 19 nt, Human
ugccaaaauaaauacugug

SEQ ID NO: 703665 - RNA, 19 nt, Human
ugcugcuucccaaagcugg

SEQ ID NO: 703666 - RNA, 19 nt, Human
uggaaggaaugggaggagu

SEQ ID NO: 703667 - RNA, 21 nt, Human
uggaaggaaugggaggaguga

SEQ ID NO: 703668 - RNA, 19 nt, Human
uggaaucaggaagccuaug

SEQ ID NO: 703669 - RNA, 20 nt, Human
ugggaggacagguucuguga

SEQ ID NO: 703670 - RNA, 18 nt, Human
uggggagauaguccagag

SEQ ID NO: 703671 - RNA, 25 nt, Human
ugguggggaacuguggggggagcac

SEQ ID NO: 703672 - RNA, 29 nt, Human
uguggcuuuuccuccucccuccuuuuuuc

SEQ ID NO: 703673 - RNA, 23 nt, Human
uguuuucuucacuuucccuccca

SEQ ID NO: 703674 - RNA, 22 nt, Human
uuccaccagagaaacccugcaa

SEQ ID NO: 703675 - RNA, 19 nt, Human
uuggaaggaaugggaggag

SEQ ID NO: 703676 - RNA, 20 nt, Human
uuuccuguugacucucccca

SEQ ID NO: 703677 - RNA, 21 nt, Human
aaaaauccagacuaaauccug

SEQ ID NO: 703678 - RNA, 18 nt, Human
aaacucccagguccuccc

SEQ ID NO: 703679 - RNA, 22 nt, Human
aaugauggaaacauauccaaaa

SEQ ID NO: 703680 - RNA, 24 nt, Human
aauuccagcaaccaauucuugcug

SEQ ID NO: 703681 - RNA, 22 nt, Human
acuggcagugaucacuuguccu

SEQ ID NO: 703682 - RNA, 18 nt, Human
auaaaggagcacaggcca

SEQ ID NO: 703683 - RNA, 26 nt, Human
auagcaggugccaacuggguccuuuu

SEQ ID NO: 703684 - RNA, 21 nt, Human
ccaccaagacacucgcugugc

SEQ ID NO: 703685 - RNA, 23 nt, Human
ccagcagcaacugaguauccaag

SEQ ID NO: 703686 - RNA, 21 nt, Human
ccaguuuccugaggauauccu

SEQ ID NO: 703687 - RNA, 21 nt, Human
ccugcacugcgcagaccccuc

SEQ ID NO: 703688 - RNA, 21 nt, Human
ccugcuuggcaguaacccugg

SEQ ID NO: 703689 - RNA, 21 nt, Human
cgaaguagcugcccuuggggc

SEQ ID NO: 703690 - RNA, 23 nt, Human
cgcuguacacugugagcuuuucc

SEQ ID NO: 703691 - RNA, 23 nt, Human
cugagaauccccaguaaacuccc

SEQ ID NO: 703692 - RNA, 21 nt, Human
cuuauaaaaauccagacuaaa

SEQ ID NO: 703693 - RNA, 22 nt, Human
cuuucuuuuucuuugaacagga

SEQ ID NO: 703694 - RNA, 22 nt, Human
gagaauccccaguaaacucccc

SEQ ID NO: 703695 - RNA, 22 nt, Human
gagcacaggccacaacuuuucc

SEQ ID NO: 703696 - RNA, 22 nt, Human
uagcugcccuuggggccgcugu

SEQ ID NO: 703697 - RNA, 22 nt, Human
uccagugauauaaaggagcaca

SEQ ID NO: 703698 - RNA, 21 nt, Human
uccggaucagcauugcuguuc

SEQ ID NO: 703699 - RNA, 19 nt, Human
ucggguauguggaagucca

SEQ ID NO: 703700 - RNA, 23 nt, Human
ucuccugccaguuuccugaggau

SEQ ID NO: 703701 - RNA, 21 nt, Human
ugaggauauccuugaaugagu

SEQ ID NO: 703702 - RNA, 22 nt, Human
ugcgcagaccccuccgcgggcc

SEQ ID NO: 703703 - RNA, 19 nt, Human
ugcuacauagcaggugcca

SEQ ID NO: 703704 - RNA, 21 nt, Human
uggaauuccagcaaccaauuc

SEQ ID NO: 703705 - RNA, 23 nt, Human
uguacacugugagcuuuuccacg

SEQ ID NO: 703706 - RNA, 20 nt, Human
uguugguggugucaaacggu

SEQ ID NO: 703707 - RNA, 20 nt, Human
uuccggcaaggagagaacuc

SEQ ID NO: 703708 - RNA, 21 nt, Human
uugaggucuuuggucuucuuu

SEQ ID NO: 703709 - RNA, 24 nt, Human
uugaggucuuuggucuucuuuuuu

SEQ ID NO: 703710 - RNA, 24 nt, Human
uuugcaaugauaucugcaacacug

SEQ ID NO: 703711 - RNA, 18 nt, Human
acacaugggccguggccc

SEQ ID NO: 703712 - RNA, 19 nt, Human
acuggcugauagccucucc

SEQ ID NO: 703713 - RNA, 21 nt, Human
aggaaaaaguaaugcaaagga

SEQ ID NO: 703714 - RNA, 20 nt, Human
aggaggccaggaggcggacg

SEQ ID NO: 703715 - RNA, 24 nt, Human
augcugcucuagaucauccugaag

SEQ ID NO: 703716 - RNA, 21 nt, Human
cauccugaaggaaaaaguaau

SEQ ID NO: 703717 - RNA, 24 nt, Human
ccaacagcuccaugcugcucuaga

SEQ ID NO: 703718 - RNA, 23 nt, Human
ccguggcccacucagcuuccccu

SEQ ID NO: 703719 - RNA, 19 nt, Human
cucagcuuccccucagccg

SEQ ID NO: 703720 - RNA, 22 nt, Human
gaggcggacgcccagacacggg

SEQ ID NO: 703721 - RNA, 26 nt, Human
ggaggcggacgcccagacacgggggc

SEQ ID NO: 703722 - RNA, 22 nt, Human
uugcacaaugcacagacacuuu

SEQ ID NO: 703723 - RNA, 23 nt, Human
uuuccuaaguuuacuuuuugcac

SEQ ID NO: 703724 - RNA, 18 nt, Human
uuuuuuuuuuuuuuuuug

SEQ ID NO: 703725 - RNA, 21 nt, Human
uuuuuuuuuuuuuuuuugcaa

SEQ ID NO: 703726 - RNA, 20 nt, Human
aaaaguacuaaacaaacacg

SEQ ID NO: 703727 - RNA, 22 nt, Human
aaacaaacacggacaggagagg

SEQ ID NO: 703728 - RNA, 23 nt, Human
aaacugacauuugcaaacgaugu

SEQ ID NO: 703729 - RNA, 22 nt, Human
aaaugaucaaugugaaaaaagc

SEQ ID NO: 703730 - RNA, 18 nt, Human
aacaaacacggacaggag

SEQ ID NO: 703731 - RNA, 18 nt, Human
aacagccccaucaccaac

SEQ ID NO: 703732 - RNA, 19 nt, Human
aacagccccaucaccaaca

SEQ ID NO: 703733 - RNA, 25 nt, Human
aaugaucaaugugaaaaaagccaaa

SEQ ID NO: 703734 - RNA, 19 nt, Human
aaugcaggaucuuuuuauu

SEQ ID NO: 703735 - RNA, 18 nt, Human
acaggagaggaaacugac

SEQ ID NO: 703736 - RNA, 21 nt, Human
agacaaacacaaauucuuuug

SEQ ID NO: 703737 - RNA, 18 nt, Human
agcagccaggugacaugg

SEQ ID NO: 703738 - RNA, 19 nt, Human
agcagccaggugacauggc

SEQ ID NO: 703739 - RNA, 20 nt, Human
agcugugaucaagccgagca

SEQ ID NO: 703740 - RNA, 19 nt, Human
agggagcugugaucaagcc

SEQ ID NO: 703741 - RNA, 24 nt, Human
auccccgcuccagccccucggaga

SEQ ID NO: 703742 - RNA, 26 nt, Human
caaacacggacaggagaggaaacuga

SEQ ID NO: 703743 - RNA, 19 nt, Human
caacaagcuggauguggca

SEQ ID NO: 703744 - RNA, 23 nt, Human
cacgcagaaaagucucaggacuc

SEQ ID NO: 703745 - RNA, 22 nt, Human
cagacuccgacccuuccugaca

SEQ ID NO: 703746 - RNA, 19 nt, Human
cagccccucggagaaggaa

SEQ ID NO: 703747 - RNA, 19 nt, Human
cagccccucggagaaggaa

SEQ ID NO: 703748 - RNA, 25 nt, Human
caggugacauggccaggcaccuucc

SEQ ID NO: 703749 - RNA, 23 nt, Human
cauggccaggcaccuuccuguac

SEQ ID NO: 703750 - RNA, 18 nt, Human
ccaaucccaaacaaucuu

SEQ ID NO: 703751 - RNA, 22 nt, Human
cccaucaccaacaccugugugc

SEQ ID NO: 703752 - RNA, 21 nt, Human
cgcagaaaagucucaggacuc

SEQ ID NO: 703753 - RNA, 24 nt, Human
cgccaagguccccuugcuuuaucc

SEQ ID NO: 703754 - RNA, 20 nt, Human
cuaccuagggagcugugauc

SEQ ID NO: 703755 - RNA, 24 nt, Human
cuagaaggucuucucuguggugcc

SEQ ID NO: 703756 - RNA, 20 nt, Human
cuggcccaggcucacuagaa

SEQ ID NO: 703757 - RNA, 24 nt, Human
cuucuugucuggccaggcuggggg

SEQ ID NO: 703758 - RNA, 18 nt, Human
cuugucuggccaggcugg

SEQ ID NO: 703759 - RNA, 23 nt, Human
gcagaaaagucucaggacucaga

SEQ ID NO: 703760 - RNA, 25 nt, Human
ggggcccagcauuccuggaagggag

SEQ ID NO: 703761 - RNA, 25 nt, Human
uaccuucaacaggcaucucaacagc

SEQ ID NO: 703762 - RNA, 22 nt, Human
uagaaggucuucucuguggugc

SEQ ID NO: 703763 - RNA, 19 nt, Human
uagcagccaggugacaugg

SEQ ID NO: 703764 - RNA, 23 nt, Human
uagccaucacgcagaaaagucuc

SEQ ID NO: 703765 - RNA, 21 nt, Human
uauaaaaguacuaaacaaaca

SEQ ID NO: 703766 - RNA, 22 nt, Human
uauaaaaguacuaaacaaacac

SEQ ID NO: 703767 - RNA, 23 nt, Human
ucaacagccccaucaccaacacc

SEQ ID NO: 703768 - RNA, 22 nt, Human
ucagaacuacaccauaaaugca

SEQ ID NO: 703769 - RNA, 23 nt, Human
ucagaacuacaccauaaaugcag

SEQ ID NO: 703770 - RNA, 23 nt, Human
ucuucuugucuggccaggcuggg

SEQ ID NO: 703771 - RNA, 18 nt, Human
ucuugucuggccaggcug

SEQ ID NO: 703772 - RNA, 18 nt, Human
ucuugucuggccaggcug

SEQ ID NO: 703773 - RNA, 19 nt, Human
ucuugucuggccaggcugg

SEQ ID NO: 703774 - RNA, 20 nt, Human
ucuugucuggccaggcuggg

SEQ ID NO: 703775 - RNA, 19 nt, Human
ugaaaaaagccaaacugua

SEQ ID NO: 703776 - RNA, 19 nt, Human
ugagagcgccaaggucccc

SEQ ID NO: 703777 - RNA, 22 nt, Human
ugaucaaugugaaaaaagccaa

SEQ ID NO: 703778 - RNA, 22 nt, Human
uggaagggagagacagcccagc

SEQ ID NO: 703779 - RNA, 19 nt, Human
ugugaaaaaagccaaacug

SEQ ID NO: 703780 - RNA, 22 nt, Human
uucuugucuggccaggcugggg

SEQ ID NO: 703781 - RNA, 30 nt, Human
aaaagaaaacaaaacauaaaggcaaagagg

SEQ ID NO: 703782 - RNA, 18 nt, Human
aaacaaaacauaaaggca

SEQ ID NO: 703783 - RNA, 22 nt, Human
aaacacgaaucauuuauucauc

SEQ ID NO: 703784 - RNA, 23 nt, Human
aaaccauaaacacacaugcauaa

SEQ ID NO: 703785 - RNA, 25 nt, Human
aaacccaaacaaagcccgaagcugg

SEQ ID NO: 703786 - RNA, 28 nt, Human
aaagaaaacaaaacauaaaggcaaagag

SEQ ID NO: 703787 - RNA, 23 nt, Human
aaaucagcuuagcgaagagccaa

SEQ ID NO: 703788 - RNA, 24 nt, Human
aacacaaucaaacccaaacaaagc

SEQ ID NO: 703789 - RNA, 23 nt, Human
aacauaaaggcaaagaggagaga

SEQ ID NO: 703790 - RNA, 20 nt, Human
aagcaaaccauaaacacaca

SEQ ID NO: 703791 - RNA, 19 nt, Human
aagcaccuccuucgacggc

SEQ ID NO: 703792 - RNA, 22 nt, Human
aagcucgggaugccagcaacag

SEQ ID NO: 703793 - RNA, 19 nt, Human
acaaaacauaaaggcaaag

SEQ ID NO: 703794 - RNA, 23 nt, Human
acacaaucaaacccaaacaaagc

SEQ ID NO: 703795 - RNA, 23 nt, Human
acacacaugcauaaaacuacaca

SEQ ID NO: 703796 - RNA, 18 nt, Human
accauaaacacacaugca

SEQ ID NO: 703797 - RNA, 21 nt, Human
accauaaacacacaugcauaa

SEQ ID NO: 703798 - RNA, 28 nt, Human
agaaaacaaaacauaaaggcaaagagga

SEQ ID NO: 703799 - RNA, 26 nt, Human
caaaccauaaacacacaugcauagug

SEQ ID NO: 703800 - RNA, 18 nt, Human
caaagcccgaagcugggg

SEQ ID NO: 703801 - RNA, 24 nt, Human
cacaaucaaacccaaacaaagccc

SEQ ID NO: 703802 - RNA, 23 nt, Human
cacacaugcauaaaacuacacac

SEQ ID NO: 703803 - RNA, 23 nt, Human
cacgaaucauuuauucaucuagc

SEQ ID NO: 703804 - RNA, 18 nt, Human
cacuuuaaaaagcaauaa

SEQ ID NO: 703805 - RNA, 23 nt, Human
cagcguccuggcuggcaagggag

SEQ ID NO: 703806 - RNA, 20 nt, Human
cagcuuugcagccccgucug

SEQ ID NO: 703807 - RNA, 27 nt, Human
cccgcggcucggagcaagccggggucc

SEQ ID NO: 703808 - RNA, 19 nt, Human
ccgccccgcgcccgccgcc

SEQ ID NO: 703809 - RNA, 20 nt, Human
ccgccccgcgcccgccgccu

SEQ ID NO: 703810 - RNA, 21 nt, Human
ccgcgcccgccgccuggcugc

SEQ ID NO: 703811 - RNA, 25 nt, Human
ccgcgcccgccgccuggcugccuuc

SEQ ID NO: 703812 - RNA, 25 nt, Human
ccucccggcucggcacggcgggucc

SEQ ID NO: 703813 - RNA, 21 nt, Human
cggcucggagcaagcggugca

SEQ ID NO: 703814 - RNA, 19 nt, Human
cggggcccgcgggcgagug

SEQ ID NO: 703815 - RNA, 19 nt, Human
cggugcagguaagcgggcc

SEQ ID NO: 703816 - RNA, 22 nt, Human
cuagucucaaacaguaguaaga

SEQ ID NO: 703817 - RNA, 20 nt, Human
gaagcaccuccuucgacggc

SEQ ID NO: 703818 - RNA, 24 nt, Human
gagccaaacacaaucaaacccaaa

SEQ ID NO: 703819 - RNA, 19 nt, Human
gagcuuuuguuucucucca

SEQ ID NO: 703820 - RNA, 18 nt, Human
gcaaagaggagagaaugc

SEQ ID NO: 703821 - RNA, 24 nt, Human
gcauuguucucucugggaagcgua

SEQ ID NO: 703822 - RNA, 23 nt, Human
gcccgaagcugggggggaaacca

SEQ ID NO: 703823 - RNA, 18 nt, Human
gcucggcaucucagggcc

SEQ ID NO: 703824 - RNA, 18 nt, Human
gcugccuuccggacgcgg

SEQ ID NO: 703825 - RNA, 20 nt, Human
ggggaaaaaagucuguggcg

SEQ ID NO: 703826 - RNA, 22 nt, Human
ggugaugcuggaucugugggag

SEQ ID NO: 703827 - RNA, 19 nt, Human
guuucucuccagccggugg

SEQ ID NO: 703828 - RNA, 27 nt, Human
uaaaaaagaaaacaaaacauaaaggca

SEQ ID NO: 703829 - RNA, 22 nt, Human
uaaaguguaaucagugcucuuc

SEQ ID NO: 703830 - RNA, 24 nt, Human
uaacuuagcacuuaauuaauccag

SEQ ID NO: 703831 - RNA, 21 nt, Human
uaagauuaagguuguaucugu

SEQ ID NO: 703832 - RNA, 23 nt, Human
uaauuaauccagucaucugugac

SEQ ID NO: 703833 - RNA, 22 nt, Human
uacaacgacacuagucucaaac

SEQ ID NO: 703834 - RNA, 21 nt, Human
uagcaggcggaccccgcggcu

SEQ ID NO: 703835 - RNA, 22 nt, Human
uauccaucuugcaaaaauaagc

SEQ ID NO: 703836 - RNA, 23 nt, Human
ucaaccaccaacuguugaagugu

SEQ ID NO: 703837 - RNA, 24 nt, Human
uccagccgguggggcuucugcugc

SEQ ID NO: 703838 - RNA, 21 nt, Human
ucccgggcgaccucggggccc

SEQ ID NO: 703839 - RNA, 23 nt, Human
uccgcaggccuagcaggcggacc

SEQ ID NO: 703840 - RNA, 22 nt, Human
ucucacagcauuguucucucug

SEQ ID NO: 703841 - RNA, 19 nt, Human
ucucagggccccuacggcc

SEQ ID NO: 703842 - RNA, 18 nt, Human
ucuccgcgagaagcaccu

SEQ ID NO: 703843 - RNA, 18 nt, Human
ucucucugggaagcguag

SEQ ID NO: 703844 - RNA, 22 nt, Human
ucucucugggaagcguagggau

SEQ ID NO: 703845 - RNA, 18 nt, Human
ucucugggaagcguaggg

SEQ ID NO: 703846 - RNA, 22 nt, Human
ugaaaaagucagcagcuaugug

SEQ ID NO: 703847 - RNA, 18 nt, Human
ugaaagagugaaacacga

SEQ ID NO: 703848 - RNA, 23 nt, Human
ugacacaaugcuaaacucucuca

SEQ ID NO: 703849 - RNA, 22 nt, Human
ugagcaauuugucuccuccugu

SEQ ID NO: 703850 - RNA, 21 nt, Human
ugcuaaacucucucacagcau

SEQ ID NO: 703851 - RNA, 19 nt, Human
uggcaagggaggaagcucg

SEQ ID NO: 703852 - RNA, 19 nt, Human
ugggcagggaggccaacac

SEQ ID NO: 703853 - RNA, 23 nt, Human
uguacaaccagcaacuggcauga

SEQ ID NO: 703854 - RNA, 26 nt, Human
uuaagauuaagguuguaucuguucac

SEQ ID NO: 703855 - RNA, 23 nt, Human
uuacaguaaagugcuacaacgac

SEQ ID NO: 703856 - RNA, 23 nt, Human
uuccggacgcgggcucggccucc

SEQ ID NO: 703857 - RNA, 18 nt, Human
uucgaguguacaaccagc

SEQ ID NO: 703858 - RNA, 22 nt, Human
uugcaaaaauaagcaaaccaua

SEQ ID NO: 703859 - RNA, 19 nt, Human
uugcagcuuugcagccccg

SEQ ID NO: 703860 - RNA, 24 nt, Human
uugcuuccacaggugggcagggag

SEQ ID NO: 703861 - RNA, 22 nt, Human
aaaaaggugcauuccccuaagc

SEQ ID NO: 703862 - RNA, 20 nt, Human
aaacuccaagcuccugcugg

SEQ ID NO: 703863 - RNA, 21 nt, Human
aaauauacaaagcauuuaaga

SEQ ID NO: 703864 - RNA, 20 nt, Human
aagaagaaaagaggaacacg

SEQ ID NO: 703865 - RNA, 27 nt, Human
aagaagaaaagaggaacacggcagggg

SEQ ID NO: 703866 - RNA, 21 nt, Human
aagcagggggaaggaggaggg

SEQ ID NO: 703867 - RNA, 19 nt, Human
aaugaucaguaaaaacaug

SEQ ID NO: 703868 - RNA, 24 nt, Human
acagcccuccucuccaaggcucag

SEQ ID NO: 703869 - RNA, 24 nt, Human
accuugccugccccguuccucagc

SEQ ID NO: 703870 - RNA, 18 nt, Human
agaaaguguacccuccaa

SEQ ID NO: 703871 - RNA, 22 nt, Human
agaagaaaagaggaacacggca

SEQ ID NO: 703872 - RNA, 27 nt, Human
agaagaaaagaggaacacggcaggggg

SEQ ID NO: 703873 - RNA, 22 nt, Human
agagaugggccccccaccgaga

SEQ ID NO: 703874 - RNA, 27 nt, Human
agagucccugggacacccccagguagc

SEQ ID NO: 703875 - RNA, 24 nt, Human
agccaccuucucuugugcucuggu

SEQ ID NO: 703876 - RNA, 27 nt, Human
agccccauccccuugcccagggccuca

SEQ ID NO: 703877 - RNA, 23 nt, Human
agcugugggcccaggcuuuggca

SEQ ID NO: 703878 - RNA, 22 nt, Human
aggaauggagagacaugucacc

SEQ ID NO: 703879 - RNA, 25 nt, Human
aggcaggguggacaaguaccaggug

SEQ ID NO: 703880 - RNA, 26 nt, Human
aggcaggguggacaaguaccaggugg

SEQ ID NO: 703881 - RNA, 20 nt, Human
aggcucagggcugagaacgg

SEQ ID NO: 703882 - RNA, 21 nt, Human
aggcuuuggcaggcccagcuu

SEQ ID NO: 703883 - RNA, 18 nt, Human
agggggaaggaggagggc

SEQ ID NO: 703884 - RNA, 28 nt, Human
agggggaaggaggagggccagagagcag

SEQ ID NO: 703885 - RNA, 21 nt, Human
agugagaaggaaagggaaaaa

SEQ ID NO: 703886 - RNA, 22 nt, Human
auccccacuccccaaacuccaa

SEQ ID NO: 703887 - RNA, 19 nt, Human
auccucagcucaagcccca

SEQ ID NO: 703888 - RNA, 21 nt, Human
caaaacaguuccaagcuugga

SEQ ID NO: 703889 - RNA, 21 nt, Human
caagccccaggucuaggaagg

SEQ ID NO: 703890 - RNA, 20 nt, Human
cacagccccauccccuugcc

SEQ ID NO: 703891 - RNA, 19 nt, Human
cagaaaacacuuugcagca

SEQ ID NO: 703892 - RNA, 22 nt, Human
cagaacccacggcucguccccc

SEQ ID NO: 703893 - RNA, 25 nt, Human
cagagagcagccggaaagaagaaaa

SEQ ID NO: 703894 - RNA, 20 nt, Human
cagcagagaugggcccccca

SEQ ID NO: 703895 - RNA, 21 nt, Human
cagcagagaugggccccccac

SEQ ID NO: 703896 - RNA, 21 nt, Human
cagggaggugggcaggguugg

SEQ ID NO: 703897 - RNA, 19 nt, Human
cagggccucacaugcccgg

SEQ ID NO: 703898 - RNA, 22 nt, Human
cauccucagcucaagccccagg

SEQ ID NO: 703899 - RNA, 20 nt, Human
cauuccccuaagcugagggg

SEQ ID NO: 703900 - RNA, 24 nt, Human
ccagguggcucucccuuucccucu

SEQ ID NO: 703901 - RNA, 20 nt, Human
cccaaacuccaagcuccugc

SEQ ID NO: 703902 - RNA, 23 nt, Human
cccacagccccauccccuugccc

SEQ ID NO: 703903 - RNA, 21 nt, Human
cccacuccccaaacuccaagc

SEQ ID NO: 703904 - RNA, 19 nt, Human
ccccacagccccauccccu

SEQ ID NO: 703905 - RNA, 26 nt, Human
ccccagagacugacugaaggcguuac

SEQ ID NO: 703906 - RNA, 21 nt, Human
ccccagguagccaccuucucu

SEQ ID NO: 703907 - RNA, 19 nt, Human
ccccauccccuugcccagg

SEQ ID NO: 703908 - RNA, 20 nt, Human
cccccacagccccauccccu

SEQ ID NO: 703909 - RNA, 18 nt, Human
cccccagguagccaccuu

SEQ ID NO: 703910 - RNA, 21 nt, Human
cccccagguagccaccuucuc

SEQ ID NO: 703911 - RNA, 22 nt, Human
cccccagguagccaccuucucu

SEQ ID NO: 703912 - RNA, 22 nt, Human
ccccuaagcugagggggaugga

SEQ ID NO: 703913 - RNA, 24 nt, Human
cccgcagccucugccggugcagcc

SEQ ID NO: 703914 - RNA, 21 nt, Human
cccuccaagaaaaagcuucug

SEQ ID NO: 703915 - RNA, 19 nt, Human
cccuccucuccaaggcuca

SEQ ID NO: 703916 - RNA, 19 nt, Human
ccgcagccucugccggugc

SEQ ID NO: 703917 - RNA, 19 nt, Human
ccgccccgcccccacagcc

SEQ ID NO: 703918 - RNA, 20 nt, Human
ccgccccgcccccacagccc

SEQ ID NO: 703919 - RNA, 22 nt, Human
ccgccccgcccccacagcccca

SEQ ID NO: 703920 - RNA, 20 nt, Human
ccggugcagccucggucucu

SEQ ID NO: 703921 - RNA, 24 nt, Human
ccuccgccgcuccgagcucugcag

SEQ ID NO: 703922 - RNA, 19 nt, Human
ccuggggggcaggacuggg

SEQ ID NO: 703923 - RNA, 24 nt, Human
cgccggcccgcgcguccgccccgc

SEQ ID NO: 703924 - RNA, 19 nt, Human
cggacucauccccacuccc

SEQ ID NO: 703925 - RNA, 25 nt, Human
cgucccauccucagcucaagcccca

SEQ ID NO: 703926 - RNA, 20 nt, Human
cguuacagcccuccucucca

SEQ ID NO: 703927 - RNA, 26 nt, Human
cguuacagcccuccucuccaaggcuc

SEQ ID NO: 703928 - RNA, 21 nt, Human
cucagcucaagccccaggucu

SEQ ID NO: 703929 - RNA, 19 nt, Human
cuccaagaaaaagcuucug

SEQ ID NO: 703930 - RNA, 22 nt, Human
cuccccaaacuccaagcuccug

SEQ ID NO: 703931 - RNA, 20 nt, Human
cuucugaagcccaugccgcc

SEQ ID NO: 703932 - RNA, 20 nt, Human
cuuugguuccacucagagaa

SEQ ID NO: 703933 - RNA, 23 nt, Human
gaaugaucaguaaaaacaugcaa

SEQ ID NO: 703934 - RNA, 18 nt, Human
gcagauacuucugaagcc

SEQ ID NO: 703935 - RNA, 20 nt, Human
gccccaggucuaggaauagg

SEQ ID NO: 703936 - RNA, 22 nt, Human
gccccgcagccucugccggugc

SEQ ID NO: 703937 - RNA, 20 nt, Human
gccucggucucugccuccgg

SEQ ID NO: 703938 - RNA, 23 nt, Human
gcuccuggggggcaggacugggg

SEQ ID NO: 703939 - RNA, 24 nt, Human
gcuucuuugguuccacucagagaa

SEQ ID NO: 703940 - RNA, 20 nt, Human
gcuugugcuccuggggggca

SEQ ID NO: 703941 - RNA, 22 nt, Human
ggaaggaggagggccagagagc

SEQ ID NO: 703942 - RNA, 20 nt, Human
ggaauagggacagugaagaa

SEQ ID NO: 703943 - RNA, 22 nt, Human
ggacaaguaccagguggcucuc

SEQ ID NO: 703944 - RNA, 19 nt, Human
ggacuggggguccuagcuc

SEQ ID NO: 703945 - RNA, 20 nt, Human
ggaggagggccagagagcag

SEQ ID NO: 703946 - RNA, 21 nt, Human
ggagggccagagagcagccgg

SEQ ID NO: 703947 - RNA, 23 nt, Human
ggccagagagcagccggaaagaa

SEQ ID NO: 703948 - RNA, 24 nt, Human
uacagcccuccucuccaaggcuca

SEQ ID NO: 703949 - RNA, 21 nt, Human
uagaaacgcguccaaaguaca

SEQ ID NO: 703950 - RNA, 22 nt, Human
uaucgaaugaucaguaaaaaca

SEQ ID NO: 703951 - RNA, 18 nt, Human
ucaagacagugggacaca

SEQ ID NO: 703952 - RNA, 22 nt, Human
uccaagaaaaagcuucugagga

SEQ ID NO: 703953 - RNA, 18 nt, Human
uccaagcuccugcuggug

SEQ ID NO: 703954 - RNA, 23 nt, Human
uccaccuacucagcagaacccac

SEQ ID NO: 703955 - RNA, 25 nt, Human
uccccacuccccaaacuccaagcuc

SEQ ID NO: 703956 - RNA, 19 nt, Human
uccccagagacugacugaa

SEQ ID NO: 703957 - RNA, 23 nt, Human
ucccccaaccgguccuuccccuu

SEQ ID NO: 703958 - RNA, 21 nt, Human
uccccuugcccagggccucac

SEQ ID NO: 703959 - RNA, 23 nt, Human
ucccucuguguuaucuuucaaaa

SEQ ID NO: 703960 - RNA, 20 nt, Human
ucccugggcacaucguccca

SEQ ID NO: 703961 - RNA, 22 nt, Human
ugagaaaauauacaaagcauuu

SEQ ID NO: 703962 - RNA, 21 nt, Human
ugagaaggaaagggaaaaagg

SEQ ID NO: 703963 - RNA, 25 nt, Human
ugccccguuccucagccgcccaucc

SEQ ID NO: 703964 - RNA, 21 nt, Human
ugggcaggguuggagaggaau

SEQ ID NO: 703965 - RNA, 19 nt, Human
ugggcugccggugcagcug

SEQ ID NO: 703966 - RNA, 26 nt, Human
ugguacagggaggugggcaggguugg

SEQ ID NO: 703967 - RNA, 24 nt, Human
uucaagacagugggacacagaaaa

SEQ ID NO: 703968 - RNA, 21 nt, Human
uuccccuugggcugccggugc

SEQ ID NO: 703969 - RNA, 19 nt, Human
uuccucagccgcccauccc

SEQ ID NO: 703970 - RNA, 24 nt, Human
uucugaggacuuuucuaauugugc

SEQ ID NO: 703971 - RNA, 24 nt, Human
uucuuugguuccacucagagaaca

SEQ ID NO: 703972 - RNA, 23 nt, Human
uugugcagauacuucugaagccc

SEQ ID NO: 703973 - RNA, 21 nt, Human
uuugcagcaucgccucucccu

SEQ ID NO: 703974 - RNA, 22 nt, Human
aaaaagccgggcaguucugaug

SEQ ID NO: 703975 - RNA, 19 nt, Human
aaacagaagaaucagauca

SEQ ID NO: 703976 - RNA, 21 nt, Human
aaagugggcauccugcagccc

SEQ ID NO: 703977 - RNA, 22 nt, Human
acagcacaaauccucagcacag

SEQ ID NO: 703978 - RNA, 23 nt, Human
acagcacaaauccucagcacagg

SEQ ID NO: 703979 - RNA, 18 nt, Human
acaguagagagcaggcgg

SEQ ID NO: 703980 - RNA, 23 nt, Human
acccagcaccccacaucuuccag

SEQ ID NO: 703981 - RNA, 20 nt, Human
accuccaugcacuggcucgg

SEQ ID NO: 703982 - RNA, 22 nt, Human
accugguacucucuuccauccc

SEQ ID NO: 703983 - RNA, 26 nt, Human
acucagcacuuucucuagcguccucc

SEQ ID NO: 703984 - RNA, 23 nt, Human
acugcuaucuuaagacacaaaaa

SEQ ID NO: 703985 - RNA, 21 nt, Human
acuuucucuagcguccuccau

SEQ ID NO: 703986 - RNA, 21 nt, Human
agacaccagcgcggaacuccc

SEQ ID NO: 703987 - RNA, 20 nt, Human
agacaccggcauggcagcca

SEQ ID NO: 703988 - RNA, 23 nt, Human
agagagcaggcggacggccccac

SEQ ID NO: 703989 - RNA, 22 nt, Human
agcugcuggcccagcgggugug

SEQ ID NO: 703990 - RNA, 22 nt, Human
aggaaaaacaaggaaggggccg

SEQ ID NO: 703991 - RNA, 21 nt, Human
aggacgcccagcuuccuuucc

SEQ ID NO: 703992 - RNA, 26 nt, Human
aggcagccuccuucccgggcuccagg

SEQ ID NO: 703993 - RNA, 21 nt, Human
aggcccaaagaccuggaauga

SEQ ID NO: 703994 - RNA, 23 nt, Human
agggagcagcagugcuggcuuag

SEQ ID NO: 703995 - RNA, 18 nt, Human
agggaguggggagucagg

SEQ ID NO: 703996 - RNA, 24 nt, Human
agggaguggggagucaggcagaag

SEQ ID NO: 703997 - RNA, 24 nt, Human
aggggucagacggcagagccagug

SEQ ID NO: 703998 - RNA, 22 nt, Human
aggggucuguggccuccucugg

SEQ ID NO: 703999 - RNA, 23 nt, Human
aggucagggaguggggagucagg

SEQ ID NO: 704000 - RNA, 22 nt, Human
caaauccucagcacaggcgcca

SEQ ID NO: 704001 - RNA, 22 nt, Human
caaugagagguggaccaggccu

SEQ ID NO: 704002 - RNA, 19 nt, Human
cacagcccgacaugggcag

SEQ ID NO: 704003 - RNA, 18 nt, Human
caccagcgcggaacuccc

SEQ ID NO: 704004 - RNA, 22 nt, Human
cacccagcaccccacaucuucc

SEQ ID NO: 704005 - RNA, 19 nt, Human
caccccucaccucccaucc

SEQ ID NO: 704006 - RNA, 22 nt, Human
cagaggacagcccggaagccuu

SEQ ID NO: 704007 - RNA, 22 nt, Human
cagccaggcagccuccuucccg

SEQ ID NO: 704008 - RNA, 24 nt, Human
cagcccagcugagccaggccgaag

SEQ ID NO: 704009 - RNA, 21 nt, Human
caggcggacggccccacuccc

SEQ ID NO: 704010 - RNA, 25 nt, Human
caucagagaaucagguuaaaaauua

SEQ ID NO: 704011 - RNA, 24 nt, Human
caugcaccgaucagccucccacag

SEQ ID NO: 704012 - RNA, 19 nt, Human
cauggcagccauacgcaca

SEQ ID NO: 704013 - RNA, 22 nt, Human
ccagcaccccacaucuuccagg

SEQ ID NO: 704014 - RNA, 18 nt, Human
ccagcccuguggugcucu

SEQ ID NO: 704015 - RNA, 24 nt, Human
ccauacgcacaccccucaccuccc

SEQ ID NO: 704016 - RNA, 24 nt, Human
cccaaaucacagcacaaauccuca

SEQ ID NO: 704017 - RNA, 25 nt, Human
cccaagcccugugccucccuccuca

SEQ ID NO: 704018 - RNA, 22 nt, Human
cccacugggaagagggccccga

SEQ ID NO: 704019 - RNA, 18 nt, Human
cccccaagggucccgguc

SEQ ID NO: 704020 - RNA, 19 nt, Human
ccccugaggggucuguggc

SEQ ID NO: 704021 - RNA, 19 nt, Human
cccucugggucccggcucc

SEQ ID NO: 704022 - RNA, 18 nt, Human
cccugugccucccuccuc

SEQ ID NO: 704023 - RNA, 18 nt, Human
ccgaucagccucccacag

SEQ ID NO: 704024 - RNA, 22 nt, Human
ccgccgccgccacuuccuccuc

SEQ ID NO: 704025 - RNA, 18 nt, Human
ccgccgccgccgccgcca

SEQ ID NO: 704026 - RNA, 19 nt, Human
ccgcgccuauccucaccua

SEQ ID NO: 704027 - RNA, 23 nt, Human
ccggaagccuuuuucacuuuuuc

SEQ ID NO: 704028 - RNA, 18 nt, Human
ccggcgcgcgccgcgagc

SEQ ID NO: 704029 - RNA, 20 nt, Human
ccgggcuccagggagcagca

SEQ ID NO: 704030 - RNA, 19 nt, Human
ccuccaugcacuggcucgg

SEQ ID NO: 704031 - RNA, 19 nt, Human
ccucccuccucaaaguggg

SEQ ID NO: 704032 - RNA, 18 nt, Human
ccuccucgggcggggagc

SEQ ID NO: 704033 - RNA, 21 nt, Human
ccuccucuggcuguggggagg

SEQ ID NO: 704034 - RNA, 19 nt, Human
ccuccuucccgggcuccag

SEQ ID NO: 704035 - RNA, 23 nt, Human
ccucgcccaagcccugugccucc

SEQ ID NO: 704036 - RNA, 21 nt, Human
ccugcagcccagcugagccag

SEQ ID NO: 704037 - RNA, 21 nt, Human
cgaggcucccgcgccuauccu

SEQ ID NO: 704038 - RNA, 20 nt, Human
cgcggaacuccccugagggg

SEQ ID NO: 704039 - RNA, 22 nt, Human
cgcugccccucugggucccggc

SEQ ID NO: 704040 - RNA, 18 nt, Human
cggaggaaaucgcccaca

SEQ ID NO: 704041 - RNA, 21 nt, Human
cgggacacucagcacuuucuc

SEQ ID NO: 704042 - RNA, 23 nt, Human
cucagggucagaacuaggaaagg

SEQ ID NO: 704043 - RNA, 18 nt, Human
cucccuggcaccugcugg

SEQ ID NO: 704044 - RNA, 22 nt, Human
cucugcagagggggcugccugg

SEQ ID NO: 704045 - RNA, 23 nt, Human
cucugcgcccugcgcugccccuc

SEQ ID NO: 704046 - RNA, 24 nt, Human
cugaugccucucacccagcacccc

SEQ ID NO: 704047 - RNA, 18 nt, Human
cugcacaguagagagcag

SEQ ID NO: 704048 - RNA, 24 nt, Human
cugcagaggcuucuccccaacccu

SEQ ID NO: 704049 - RNA, 23 nt, Human
cugcgcccugcgcugccccucug

SEQ ID NO: 704050 - RNA, 18 nt, Human
cuguggccuccucuggcu

SEQ ID NO: 704051 - RNA, 18 nt, Human
cuguggccuccucuggcu

SEQ ID NO: 704052 - RNA, 18 nt, Human
gaaaaacaaggaaggggc

SEQ ID NO: 704053 - RNA, 24 nt, Human
gaaggaccuccaugcacuggcucg

SEQ ID NO: 704054 - RNA, 19 nt, Human
gacaugggcaggcuucccc

SEQ ID NO: 704055 - RNA, 19 nt, Human
gagcaggcggacggcccca

SEQ ID NO: 704056 - RNA, 25 nt, Human
gagcaggcggacggccccacucccc

SEQ ID NO: 704057 - RNA, 20 nt, Human
gcacaccaggcagggugggg

SEQ ID NO: 704058 - RNA, 23 nt, Human
gcagugcaagaggccagccacgc

SEQ ID NO: 704059 - RNA, 20 nt, Human
gcccagacaccagcgcggaa

SEQ ID NO: 704060 - RNA, 21 nt, Human
gcccggaagccuuuuucacuu

SEQ ID NO: 704061 - RNA, 18 nt, Human
gccgcgagcgagugggca

SEQ ID NO: 704062 - RNA, 21 nt, Human
gccuccagccaggcagccucc

SEQ ID NO: 704063 - RNA, 21 nt, Human
gccuccucuggcuguggggag

SEQ ID NO: 704064 - RNA, 23 nt, Human
gcgccuauccucaccuaggugac

SEQ ID NO: 704065 - RNA, 25 nt, Human
gcgcgcagucccgccgccgccgccg

SEQ ID NO: 704066 - RNA, 21 nt, Human
gcgcggaacuccccugagggg

SEQ ID NO: 704067 - RNA, 19 nt, Human
gcuucccccaagggucccg

SEQ ID NO: 704068 - RNA, 20 nt, Human
ggaaaaacaaggaaggggca

SEQ ID NO: 704069 - RNA, 22 nt, Human
ggaaaaacaaggaaggggcagg

SEQ ID NO: 704070 - RNA, 24 nt, Human
ggaggaaaaacaaggaaggggcag

SEQ ID NO: 704071 - RNA, 19 nt, Human
ggagucaggcagaagggaa

SEQ ID NO: 704072 - RNA, 19 nt, Human
ggccugcugggugaggagg

SEQ ID NO: 704073 - RNA, 18 nt, Human
ggcuguggggagggaggg

SEQ ID NO: 704074 - RNA, 23 nt, Human
gggcaguucugauggccucugcc

SEQ ID NO: 704075 - RNA, 24 nt, Human
gggugggggcuaacaaagccuugg

SEQ ID NO: 704076 - RNA, 19 nt, Human
guccacuagagacaagggg

SEQ ID NO: 704077 - RNA, 22 nt, Human
uaaaaaacagaagaaucagauc

SEQ ID NO: 704078 - RNA, 25 nt, Human
uagcaucgccguugggaggaggagc

SEQ ID NO: 704079 - RNA, 18 nt, Human
uagcugcacaccaggcag

SEQ ID NO: 704080 - RNA, 20 nt, Human
uaggaaaggugacguacaga

SEQ ID NO: 704081 - RNA, 30 nt, Human
ucaaaguaaacugcuaucuuaagacacaag

SEQ ID NO: 704082 - RNA, 23 nt, Human
ucagccucccacagcccgacaug

SEQ ID NO: 704083 - RNA, 19 nt, Human
ucaggcagaagggaagcca

SEQ ID NO: 704084 - RNA, 23 nt, Human
ucagggaguggggagucaggcag

SEQ ID NO: 704085 - RNA, 18 nt, Human
uccacaguggccauggag

SEQ ID NO: 704086 - RNA, 21 nt, Human
uccaucccccacuaccccuca

SEQ ID NO: 704087 - RNA, 19 nt, Human
uccccaacccuuuucucug

SEQ ID NO: 704088 - RNA, 21 nt, Human
ucccgccgccgccgccgccac

SEQ ID NO: 704089 - RNA, 18 nt, Human
ucccgggcuccagggagc

SEQ ID NO: 704090 - RNA, 23 nt, Human
ucgggacacucagcacuuucucu

SEQ ID NO: 704091 - RNA, 22 nt, Human
ucucaaauguccacuagagaca

SEQ ID NO: 704092 - RNA, 24 nt, Human
ucucaaauguccacuagagacaag

SEQ ID NO: 704093 - RNA, 21 nt, Human
ucucugcagagggggcugccu

SEQ ID NO: 704094 - RNA, 18 nt, Human
ucugcagagggggcugcc

SEQ ID NO: 704095 - RNA, 23 nt, Human
ugaacccacugggaagagggccc

SEQ ID NO: 704096 - RNA, 20 nt, Human
ugagagguggaccaggccug

SEQ ID NO: 704097 - RNA, 20 nt, Human
ugagccaggccgaaggaccu

SEQ ID NO: 704098 - RNA, 19 nt, Human
ugaggagggacccagcagg

SEQ ID NO: 704099 - RNA, 24 nt, Human
ugaggggucuguggccuccucugg

SEQ ID NO: 704100 - RNA, 20 nt, Human
ugcaaacacaagcgugugua

SEQ ID NO: 704101 - RNA, 20 nt, Human
ugccuggaucaggggucaga

SEQ ID NO: 704102 - RNA, 22 nt, Human
ugcugggugaggagggacccag

SEQ ID NO: 704103 - RNA, 18 nt, Human
ugggagcugcuggcccag

SEQ ID NO: 704104 - RNA, 18 nt, Human
uggggagggagggguuag

SEQ ID NO: 704105 - RNA, 18 nt, Human
uggggagucaggcagaag

SEQ ID NO: 704106 - RNA, 20 nt, Human
ugucaugccgaggcucccgc

SEQ ID NO: 704107 - RNA, 20 nt, Human
ugugcacagacaccggcaug

SEQ ID NO: 704108 - RNA, 18 nt, Human
ugugcagaagcgaugggg

SEQ ID NO: 704109 - RNA, 19 nt, Human
ugugcagaagcgauggggg

SEQ ID NO: 704110 - RNA, 20 nt, Human
ugugcagaagcgaugggggg

SEQ ID NO: 704111 - RNA, 21 nt, Human
ugugcagaagcgauggggggc

SEQ ID NO: 704112 - RNA, 19 nt, Human
uuuccaaaaaagccgggca

SEQ ID NO: 704113 - RNA, 24 nt, Human
uuuccuguuccccagggcucaggg

SEQ ID NO: 704114 - RNA, 18 nt, Human
uuuuuuuuuuuuuugcgg

SEQ ID NO: 704115 - RNA, 18 nt, Human
uuuuuuuuuuuuuuuuug

SEQ ID NO: 704116 - RNA, 27 nt, Human
uuuuuuuuuuuuuuuuuugcgguuuga

SEQ ID NO: 704117 - RNA, 23 nt, Human
uuuuuuuuuuuuuuuuuuugcgg

SEQ ID NO: 704118 - RNA, 21 nt, Human
aaaacaaaacaaaacaaaaaa

SEQ ID NO: 704119 - RNA, 21 nt, Human
aaaacaaaacaaaacaaaaaa

SEQ ID NO: 704120 - RNA, 24 nt, Human
aaacaaaacaaaaaacaacaaacu

SEQ ID NO: 704121 - RNA, 24 nt, Human
aaacaaaacaaaaaacaacaaacu

SEQ ID NO: 704122 - RNA, 19 nt, Human
aaacaaaacaaaacaaaaa

SEQ ID NO: 704123 - RNA, 19 nt, Human
aaacaaaacaaaacaaaaa

SEQ ID NO: 704124 - RNA, 23 nt, Human
aaacaaaacaaaacaaaaaacaa

SEQ ID NO: 704125 - RNA, 23 nt, Human
aaacaaaacaaaacaaaaaacaa

SEQ ID NO: 704126 - RNA, 22 nt, Human
aaacaaaacaaaacaaaacaaa

SEQ ID NO: 704127 - RNA, 22 nt, Human
aaacaaaacaaaacaaaacaaa

SEQ ID NO: 704128 - RNA, 19 nt, Human
aaagaccuuuuccccuacu

SEQ ID NO: 704129 - RNA, 19 nt, Human
aaagaccuuuuccccuacu

SEQ ID NO: 704130 - RNA, 23 nt, Human
aacacacgcccaauuucagcaua

SEQ ID NO: 704131 - RNA, 23 nt, Human
aacacacgcccaauuucagcaua

SEQ ID NO: 704132 - RNA, 20 nt, Human
aacauggugaaacccugucu

SEQ ID NO: 704133 - RNA, 20 nt, Human
aacauggugaaacccugucu

SEQ ID NO: 704134 - RNA, 21 nt, Human
aacauggugaaacccugucuc

SEQ ID NO: 704135 - RNA, 21 nt, Human
aacauggugaaacccugucuc

SEQ ID NO: 704136 - RNA, 20 nt, Human
aaccaggaaggggcaggacc

SEQ ID NO: 704137 - RNA, 20 nt, Human
aaccaggaaggggcaggacc

SEQ ID NO: 704138 - RNA, 24 nt, Human
aaccauuucagccgcucuagccuc

SEQ ID NO: 704139 - RNA, 26 nt, Human
aagaaagaagcaaaaucaagccaaga

SEQ ID NO: 704140 - RNA, 26 nt, Human
aagaaagaagcaaaaucaagccaaga

SEQ ID NO: 704141 - RNA, 21 nt, Human
aaggacuccugggaacagaca

SEQ ID NO: 704142 - RNA, 21 nt, Human
aaggacuccugggaacagaca

SEQ ID NO: 704143 - RNA, 23 nt, Human
aaggcaggcggaucaagagguca

SEQ ID NO: 704144 - RNA, 23 nt, Human
aaggcaggcggaucaagagguca

SEQ ID NO: 704145 - RNA, 21 nt, Human
aaguaaauuccaaggcuggca

SEQ ID NO: 704146 - RNA, 21 nt, Human
aaguaaauuccaaggcuggca

SEQ ID NO: 704147 - RNA, 21 nt, Human
aaguaaauuccaaggcuggca

SEQ ID NO: 704148 - RNA, 23 nt, Human
aaguaccucuccagccauggugc

SEQ ID NO: 704149 - RNA, 21 nt, Human
aaguaccucugggaggaggag

SEQ ID NO: 704150 - RNA, 21 nt, Human
aaguagggggcccuguggggu

SEQ ID NO: 704151 - RNA, 21 nt, Human
aagucgcacuuaguauauccu

SEQ ID NO: 704152 - RNA, 21 nt, Human
aagucgcacuuaguauauccu

SEQ ID NO: 704153 - RNA, 24 nt, Human
aauggcuugaacccgggaggcgga

SEQ ID NO: 704154 - RNA, 24 nt, Human
aauggcuugaacccgggaggcgga

SEQ ID NO: 704155 - RNA, 18 nt, Human
aauuagccaggcauggug

SEQ ID NO: 704156 - RNA, 18 nt, Human
aauuagccaggcauggug

SEQ ID NO: 704157 - RNA, 22 nt, Human
aauucagaagcucugccuugag

SEQ ID NO: 704158 - RNA, 22 nt, Human
aauucagaagcucugccuugag

SEQ ID NO: 704159 - RNA, 20 nt, Human
aauuccaccccacuaaauac

SEQ ID NO: 704160 - RNA, 24 nt, Human
acaaaacaaaacaaaaaacaacaa

SEQ ID NO: 704161 - RNA, 24 nt, Human
acaaaacaaaacaaaaaacaacaa

SEQ ID NO: 704162 - RNA, 24 nt, Human
acaaaacaaaacaaaaaacaacaa

SEQ ID NO: 704163 - RNA, 24 nt, Human
acaaaacaaaacaaaaaacaacaa

SEQ ID NO: 704164 - RNA, 25 nt, Human
acaaaacaaaacaaaaaacaacaaa

SEQ ID NO: 704165 - RNA, 22 nt, Human
acaaaacaaaacaaaacaaaaa

SEQ ID NO: 704166 - RNA, 22 nt, Human
acaaaacaaaacaaaacaaaaa

SEQ ID NO: 704167 - RNA, 18 nt, Human
acaaggaaagagcccaga

SEQ ID NO: 704168 - RNA, 18 nt, Human
acacaucuccacagcacc

SEQ ID NO: 704169 - RNA, 18 nt, Human
acacaucuccacagcacc

SEQ ID NO: 704170 - RNA, 22 nt, Human
acagaacugaaacauacuuuaa

SEQ ID NO: 704171 - RNA, 22 nt, Human
acagaacugaaacauacuuuaa

SEQ ID NO: 704172 - RNA, 22 nt, Human
acagaagagagugggccccaga

SEQ ID NO: 704173 - RNA, 19 nt, Human
acagagcgagacuccgucu

SEQ ID NO: 704174 - RNA, 19 nt, Human
acagagcgagacuccgucu

SEQ ID NO: 704175 - RNA, 25 nt, Human
acagagcgagacuccgucuuuaaaa

SEQ ID NO: 704176 - RNA, 25 nt, Human
acagagcgagacuccgucuuuaaaa

SEQ ID NO: 704177 - RNA, 24 nt, Human
accaacauggugaaacccugucuc

SEQ ID NO: 704178 - RNA, 24 nt, Human
accaacauggugaaacccugucuc

SEQ ID NO: 704179 - RNA, 19 nt, Human
accacugcacuccagccug

SEQ ID NO: 704180 - RNA, 19 nt, Human
accacugcacuccagccug

SEQ ID NO: 704181 - RNA, 24 nt, Human
accacugcacuccagccuggguga

SEQ ID NO: 704182 - RNA, 24 nt, Human
accacugcacuccagccuggguga

SEQ ID NO: 704183 - RNA, 18 nt, Human
acccccgccauuuuugcu

SEQ ID NO: 704184 - RNA, 24 nt, Human
acccugucucuacuaaaaacacaa

SEQ ID NO: 704185 - RNA, 24 nt, Human
acccugucucuacuaaaaacacaa

SEQ ID NO: 704186 - RNA, 23 nt, Human
acccuguguaccuuccuccagca

SEQ ID NO: 704187 - RNA, 23 nt, Human
acccuguguaccuuccuccagca

SEQ ID NO: 704188 - RNA, 23 nt, Human
accucaaauucacagagccauga

SEQ ID NO: 704189 - RNA, 23 nt, Human
accucaaauucacagagccauga

SEQ ID NO: 704190 - RNA, 23 nt, Human
accucaaauucacagagccauga

SEQ ID NO: 704191 - RNA, 19 nt, Human
acgcccaauuucagcauac

SEQ ID NO: 704192 - RNA, 19 nt, Human
acgcccaauuucagcauac

SEQ ID NO: 704193 - RNA, 24 nt, Human
acugcacuccagccugggugacag

SEQ ID NO: 704194 - RNA, 24 nt, Human
acugcacuccagccugggugacag

SEQ ID NO: 704195 - RNA, 26 nt, Human
acugcacuccagccugggugacagag

SEQ ID NO: 704196 - RNA, 26 nt, Human
acugcacuccagccugggugacagag

SEQ ID NO: 704197 - RNA, 22 nt, Human
agaaagaaagaagcaaaaucaa

SEQ ID NO: 704198 - RNA, 22 nt, Human
agaaagaaagaagcaaaaucaa

SEQ ID NO: 704199 - RNA, 23 nt, Human
agaaagaagcaaaaucaagccaa

SEQ ID NO: 704200 - RNA, 23 nt, Human
agaaagaagcaaaaucaagccaa

SEQ ID NO: 704201 - RNA, 18 nt, Human
agaagcccuccaacacac

SEQ ID NO: 704202 - RNA, 18 nt, Human
agaagcccuccaacacac

SEQ ID NO: 704203 - RNA, 22 nt, Human
agaagcucugccuugagauaag

SEQ ID NO: 704204 - RNA, 22 nt, Human
agaagcucugccuugagauaag

SEQ ID NO: 704205 - RNA, 23 nt, Human
agacagaagagagugggccccag

SEQ ID NO: 704206 - RNA, 25 nt, Human
agacagaagagagugggccccagag

SEQ ID NO: 704207 - RNA, 18 nt, Human
agaccacccaugaucugg

SEQ ID NO: 704208 - RNA, 18 nt, Human
agaccacccaugaucugg

SEQ ID NO: 704209 - RNA, 24 nt, Human
agacugaggcaggagaauggcuug

SEQ ID NO: 704210 - RNA, 24 nt, Human
agacugaggcaggagaauggcuug

SEQ ID NO: 704211 - RNA, 23 nt, Human
agagcagcgguuuuaaauccuuu

SEQ ID NO: 704212 - RNA, 22 nt, Human
agcaccacaggcacaucucaaa

SEQ ID NO: 704213 - RNA, 21 nt, Human
agcagcugggauuacaggcau

SEQ ID NO: 704214 - RNA, 22 nt, Human
agccauggugcgcguagcaacc

SEQ ID NO: 704215 - RNA, 22 nt, Human
agccauggugcgcguagcaacc

SEQ ID NO: 704216 - RNA, 21 nt, Human
agcccagaaccaagcucaaga

SEQ ID NO: 704217 - RNA, 24 nt, Human
agcccgaccaacauggugaaaccc

SEQ ID NO: 704218 - RNA, 24 nt, Human
agcccgaccaacauggugaaaccc

SEQ ID NO: 704219 - RNA, 21 nt, Human
agccuaggaacccucaaagac

SEQ ID NO: 704220 - RNA, 21 nt, Human
agccuaggaacccucaaagac

SEQ ID NO: 704221 - RNA, 23 nt, Human
agccucugggauuauaggcguga

SEQ ID NO: 704222 - RNA, 24 nt, Human
agccugggugacagagcgagacuc

SEQ ID NO: 704223 - RNA, 24 nt, Human
agccugggugacagagcgagacuc

SEQ ID NO: 704224 - RNA, 21 nt, Human
agcuuucuuuuuucuuucuuu

SEQ ID NO: 704225 - RNA, 24 nt, Human
agcuuuuucuuuucuuucuuuuuu

SEQ ID NO: 704226 - RNA, 23 nt, Human
aggaaggccuggccacaagaggg

SEQ ID NO: 704227 - RNA, 23 nt, Human
aggaaggccuggccacaagaggg

SEQ ID NO: 704228 - RNA, 19 nt, Human
aggaggagguugcagugag

SEQ ID NO: 704229 - RNA, 20 nt, Human
aggaguuugagaccagcccg

SEQ ID NO: 704230 - RNA, 20 nt, Human
aggaguuugagaccagcccg

SEQ ID NO: 704231 - RNA, 24 nt, Human
aggcacgguggcucacaucuguaa

SEQ ID NO: 704232 - RNA, 24 nt, Human
aggcacgguggcucacaucuguaa

SEQ ID NO: 704233 - RNA, 24 nt, Human
aggcacgguggcucacaucuguaa

SEQ ID NO: 704234 - RNA, 18 nt, Human
aggcaggagaauggcuug

SEQ ID NO: 704235 - RNA, 18 nt, Human
aggcaggagaauggcuug

SEQ ID NO: 704236 - RNA, 24 nt, Human
aggcaggagaauggcuugaacccg

SEQ ID NO: 704237 - RNA, 24 nt, Human
aggcaggagaauggcuugaacccg

SEQ ID NO: 704238 - RNA, 24 nt, Human
aggcaggcggaucaagaggucagg

SEQ ID NO: 704239 - RNA, 24 nt, Human
aggcaggcggaucaagaggucagg

SEQ ID NO: 704240 - RNA, 23 nt, Human
aggcaggcgguuuuaaauccuuu

SEQ ID NO: 704241 - RNA, 24 nt, Human
aggcaugguggcacgcacccguaa

SEQ ID NO: 704242 - RNA, 24 nt, Human
aggcaugguggcacgcacccguaa

SEQ ID NO: 704243 - RNA, 24 nt, Human
aggccaaggagaucccccaaguac

SEQ ID NO: 704244 - RNA, 24 nt, Human
aggccaaggagaucccccaaguac

SEQ ID NO: 704245 - RNA, 23 nt, Human
aggccaaggcaggcggaucaaga

SEQ ID NO: 704246 - RNA, 23 nt, Human
aggccaaggcaggcggaucaaga

SEQ ID NO: 704247 - RNA, 23 nt, Human
aggccaaggcaggcgguuuuaaa

SEQ ID NO: 704248 - RNA, 19 nt, Human
aggcggagguuacagugag

SEQ ID NO: 704249 - RNA, 19 nt, Human
aggcggagguuacagugag

SEQ ID NO: 704250 - RNA, 24 nt, Human
aggcggagguuacagugagccaag

SEQ ID NO: 704251 - RNA, 24 nt, Human
aggcggagguuacagugagccaag

SEQ ID NO: 704252 - RNA, 24 nt, Human
aggcggaucaagaggucaggaguu

SEQ ID NO: 704253 - RNA, 24 nt, Human
aggcggaucaagaggucaggaguu

SEQ ID NO: 704254 - RNA, 21 nt, Human
aggcgugagccacugcgccca

SEQ ID NO: 704255 - RNA, 20 nt, Human
aggcucccgacacaacagcc

SEQ ID NO: 704256 - RNA, 20 nt, Human
aggcucccgacacaacagcc

SEQ ID NO: 704257 - RNA, 20 nt, Human
aggcucccgacacaacagcc

SEQ ID NO: 704258 - RNA, 22 nt, Human
agggucuguccaguaguuccag

SEQ ID NO: 704259 - RNA, 22 nt, Human
agggucuguccaguaguuccag

SEQ ID NO: 704260 - RNA, 24 nt, Human
aggugauccgccugccucagccuc

SEQ ID NO: 704261 - RNA, 19 nt, Human
agugguaggaaagggaggg

SEQ ID NO: 704262 - RNA, 18 nt, Human
auagaaauacaaucucac

SEQ ID NO: 704263 - RNA, 18 nt, Human
auagaaauacaaucucac

SEQ ID NO: 704264 - RNA, 18 nt, Human
aucaagaggucaggaguu

SEQ ID NO: 704265 - RNA, 21 nt, Human
aucaagaggucaggaguuuga

SEQ ID NO: 704266 - RNA, 24 nt, Human
aucauaccacugcacuccagccug

SEQ ID NO: 704267 - RNA, 24 nt, Human
aucauaccacugcacuccagccug

SEQ ID NO: 704268 - RNA, 22 nt, Human
aucccaucacuuugggaggcca

SEQ ID NO: 704269 - RNA, 22 nt, Human
aucccaucacuuugggaggcca

SEQ ID NO: 704270 - RNA, 22 nt, Human
augcagacaagguguuuuccag

SEQ ID NO: 704271 - RNA, 22 nt, Human
augcagacaagguguuuuccag

SEQ ID NO: 704272 - RNA, 22 nt, Human
augcagacaagguguuuuccag

SEQ ID NO: 704273 - RNA, 20 nt, Human
auuugucuaguuggauuuca

SEQ ID NO: 704274 - RNA, 20 nt, Human
auuugucuaguuggauuuca

SEQ ID NO: 704275 - RNA, 22 nt, Human
caaaacaaaacaaaacaaaaaa

SEQ ID NO: 704276 - RNA, 22 nt, Human
caaaacaaaacaaaacaaaaaa

SEQ ID NO: 704277 - RNA, 21 nt, Human
caacaaacucaucuuuacuga

SEQ ID NO: 704278 - RNA, 21 nt, Human
caacaaacucaucuuuacuga

SEQ ID NO: 704279 - RNA, 26 nt, Human
caacacacacacaagcucaacaaaga

SEQ ID NO: 704280 - RNA, 26 nt, Human
caacacacacacaagcucaacaaaga

SEQ ID NO: 704281 - RNA, 24 nt, Human
caacauggugaaacccugucucua

SEQ ID NO: 704282 - RNA, 24 nt, Human
caacauggugaaacccugucucua

SEQ ID NO: 704283 - RNA, 18 nt, Human
caaggaaagagcccagaa

SEQ ID NO: 704284 - RNA, 22 nt, Human
caaggcaggcggaucaagaggu

SEQ ID NO: 704285 - RNA, 22 nt, Human
caaggcaggcggaucaagaggu

SEQ ID NO: 704286 - RNA, 24 nt, Human
caaggcaggcggaucaagagguca

SEQ ID NO: 704287 - RNA, 24 nt, Human
caaggcaggcggaucaagagguca

SEQ ID NO: 704288 - RNA, 22 nt, Human
caaggcaggcgguuuuaaaucc

SEQ ID NO: 704289 - RNA, 25 nt, Human
caaguacagcaucagcuucacccug

SEQ ID NO: 704290 - RNA, 25 nt, Human
caaguacagcaucagcuucacccug

SEQ ID NO: 704291 - RNA, 19 nt, Human
cacaaaaaagagccuugac

SEQ ID NO: 704292 - RNA, 19 nt, Human
cacaaaaaagagccuugac

SEQ ID NO: 704293 - RNA, 26 nt, Human
cacacaagcucaacaaagagcuaaga

SEQ ID NO: 704294 - RNA, 26 nt, Human
cacacaagcucaacaaagagcuaaga

SEQ ID NO: 704295 - RNA, 18 nt, Human
cacacacacaagcucaac

SEQ ID NO: 704296 - RNA, 18 nt, Human
cacacacacaagcucaac

SEQ ID NO: 704297 - RNA, 24 nt, Human
cacagaaagaaagaagcaaaauca

SEQ ID NO: 704298 - RNA, 24 nt, Human
cacagaaagaaagaagcaaaauca

SEQ ID NO: 704299 - RNA, 23 nt, Human
cacagaacugaaacauacuuuaa

SEQ ID NO: 704300 - RNA, 23 nt, Human
cacagaacugaaacauacuuuaa

SEQ ID NO: 704301 - RNA, 25 nt, Human
cacagcaccacaggcacaucucaaa

SEQ ID NO: 704302 - RNA, 25 nt, Human
cacagcaccacaggcacaucucaaa

SEQ ID NO: 704303 - RNA, 18 nt, Human
cacaucuccacagcacca

SEQ ID NO: 704304 - RNA, 18 nt, Human
cacaucuccacagcacca

SEQ ID NO: 704305 - RNA, 24 nt, Human
cacaucuguaaucccaucacuuug

SEQ ID NO: 704306 - RNA, 24 nt, Human
cacaucuguaaucccaucacuuug

SEQ ID NO: 704307 - RNA, 24 nt, Human
cacaucuguaaucccaucacuuug

SEQ ID NO: 704308 - RNA, 21 nt, Human
cacccguaaucccagcuacuc

SEQ ID NO: 704309 - RNA, 24 nt, Human
cacccguaaucccagcuacucagg

SEQ ID NO: 704310 - RNA, 24 nt, Human
cacccguaaucccagcuacucagg

SEQ ID NO: 704311 - RNA, 22 nt, Human
caccucaaauucacagagccau

SEQ ID NO: 704312 - RNA, 22 nt, Human
caccucaaauucacagagccau

SEQ ID NO: 704313 - RNA, 22 nt, Human
caccucaaauucacagagccau

SEQ ID NO: 704314 - RNA, 19 nt, Human
caccucugcuuccccauga

SEQ ID NO: 704315 - RNA, 19 nt, Human
caccucugcuuccccauga

SEQ ID NO: 704316 - RNA, 19 nt, Human
caccucugcuuccccauga

SEQ ID NO: 704317 - RNA, 22 nt, Human
caccucugcuuccccaugaccu

SEQ ID NO: 704318 - RNA, 29 nt, Human
caccucugcuuccccaugaccuuuuccaa

SEQ ID NO: 704319 - RNA, 29 nt, Human
caccucugcuuccccaugaccuuuuccaa

SEQ ID NO: 704320 - RNA, 29 nt, Human
caccucugcuuccccaugaccuuuuccaa

SEQ ID NO: 704321 - RNA, 22 nt, Human
cacuccagccugggugacagag

SEQ ID NO: 704322 - RNA, 22 nt, Human
cacuccagccugggugacagag

SEQ ID NO: 704323 - RNA, 23 nt, Human
cacuccagccugggugacagagc

SEQ ID NO: 704324 - RNA, 24 nt, Human
cacuccagccugggugacagagcg

SEQ ID NO: 704325 - RNA, 24 nt, Human
cacuccagccugggugacagagcg

SEQ ID NO: 704326 - RNA, 19 nt, Human
cacugcacuccagccuggg

SEQ ID NO: 704327 - RNA, 19 nt, Human
cacugcacuccagccuggg

SEQ ID NO: 704328 - RNA, 19 nt, Human
cacugcacuccagccuggg

SEQ ID NO: 704329 - RNA, 21 nt, Human
cacugcacuccagccugggug

SEQ ID NO: 704330 - RNA, 21 nt, Human
cacugcacuccagccugggug

SEQ ID NO: 704331 - RNA, 22 nt, Human
cacugcacuccagccuggguga

SEQ ID NO: 704332 - RNA, 22 nt, Human
cacugcacuccagccuggguga

SEQ ID NO: 704333 - RNA, 23 nt, Human
cacugcacuccagccugggugac

SEQ ID NO: 704334 - RNA, 23 nt, Human
cacugcacuccagccugggugac

SEQ ID NO: 704335 - RNA, 24 nt, Human
cacugcacuccagccugggugaca

SEQ ID NO: 704336 - RNA, 24 nt, Human
cacugcacuccagccugggugaca

SEQ ID NO: 704337 - RNA, 24 nt, Human
cacugcacuccagccugggugaca

SEQ ID NO: 704338 - RNA, 25 nt, Human
cacugcacuccagccugggugacag

SEQ ID NO: 704339 - RNA, 25 nt, Human
cacugcacuccagccugggugacag

SEQ ID NO: 704340 - RNA, 18 nt, Human
cacuuugggaggccaagg

SEQ ID NO: 704341 - RNA, 18 nt, Human
cacuuugggaggccaagg

SEQ ID NO: 704342 - RNA, 21 nt, Human
cacuuugggaggccaaggcag

SEQ ID NO: 704343 - RNA, 21 nt, Human
cacuuugggaggccaaggcag

SEQ ID NO: 704344 - RNA, 21 nt, Human
cacuuugggaggccaaggcag

SEQ ID NO: 704345 - RNA, 24 nt, Human
cagaaccaagcucaagauaccuau

SEQ ID NO: 704346 - RNA, 22 nt, Human
cagaccacccaugaucuggucu

SEQ ID NO: 704347 - RNA, 22 nt, Human
cagaccacccaugaucuggucu

SEQ ID NO: 704348 - RNA, 18 nt, Human
cagagggaucccaguggc

SEQ ID NO: 704349 - RNA, 19 nt, Human
cagagggaucccaguggca

SEQ ID NO: 704350 - RNA, 23 nt, Human
cagcaccacaggcacaucucaaa

SEQ ID NO: 704351 - RNA, 19 nt, Human
cagccgccgaaggacuccu

SEQ ID NO: 704352 - RNA, 19 nt, Human
cagccgccgaaggacuccu

SEQ ID NO: 704353 - RNA, 19 nt, Human
cagccgccgaaggacuccu

SEQ ID NO: 704354 - RNA, 20 nt, Human
cagccucugggauuauaggc

SEQ ID NO: 704355 - RNA, 24 nt, Human
cagccucugggauuauaggcguga

SEQ ID NO: 704356 - RNA, 22 nt, Human
caggcggaucaagaggucagga

SEQ ID NO: 704357 - RNA, 22 nt, Human
caggcggaucaagaggucagga

SEQ ID NO: 704358 - RNA, 22 nt, Human
caggugauccgccugccucagc

SEQ ID NO: 704359 - RNA, 22 nt, Human
cagugucaucaccaaacaacca

SEQ ID NO: 704360 - RNA, 21 nt, Human
caucacuuugggaggccaagg

SEQ ID NO: 704361 - RNA, 21 nt, Human
caucacuuugggaggccaagg

SEQ ID NO: 704362 - RNA, 20 nt, Human
caucgcacucuagccugcug

SEQ ID NO: 704363 - RNA, 21 nt, Human
caucgcacucuagccugcugg

SEQ ID NO: 704364 - RNA, 24 nt, Human
caucgcacucuagccugcugggca

SEQ ID NO: 704365 - RNA, 23 nt, Human
caucuguaaucccaucacuuugg

SEQ ID NO: 704366 - RNA, 23 nt, Human
caucuguaaucccaucacuuugg

SEQ ID NO: 704367 - RNA, 23 nt, Human
caucuguaaucccaucacuuugg

SEQ ID NO: 704368 - RNA, 24 nt, Human
caucuguaaucccaucacuuuggg

SEQ ID NO: 704369 - RNA, 24 nt, Human
caucuguaaucccaucacuuuggg

SEQ ID NO: 704370 - RNA, 23 nt, Human
caugcaccaccaugccuggcuaa

SEQ ID NO: 704371 - RNA, 23 nt, Human
caugcaccacuaugccuggcuaa

SEQ ID NO: 704372 - RNA, 24 nt, Human
ccaaagagcuaagaagcccuccuu

SEQ ID NO: 704373 - RNA, 24 nt, Human
ccaaagagcuaagaagcccuccuu

SEQ ID NO: 704374 - RNA, 21 nt, Human
ccaacacacgcccaauuucag

SEQ ID NO: 704375 - RNA, 21 nt, Human
ccaacacacgcccaauuucag

SEQ ID NO: 704376 - RNA, 25 nt, Human
ccacaaaaaagagccuugacaaacc

SEQ ID NO: 704377 - RNA, 25 nt, Human
ccacaaaaaagagccuugacaaacc

SEQ ID NO: 704378 - RNA, 20 nt, Human
ccacagaaagaaagaagcaa

SEQ ID NO: 704379 - RNA, 20 nt, Human
ccacagaaagaaagaagcaa

SEQ ID NO: 704380 - RNA, 20 nt, Human
ccacugcacuccagccuggg

SEQ ID NO: 704381 - RNA, 20 nt, Human
ccacugcacuccagccuggg

SEQ ID NO: 704382 - RNA, 20 nt, Human
ccacugcacuccagccuggg

SEQ ID NO: 704383 - RNA, 20 nt, Human
ccacugcacuccagccuggg

SEQ ID NO: 704384 - RNA, 20 nt, Human
ccacugcacuccagccuggg

SEQ ID NO: 704385 - RNA, 21 nt, Human
ccacugcacuccagccugggu

SEQ ID NO: 704386 - RNA, 21 nt, Human
ccacugcacuccagccugggu

SEQ ID NO: 704387 - RNA, 21 nt, Human
ccacugcacuccagccugggu

SEQ ID NO: 704388 - RNA, 21 nt, Human
ccacugcacuccagccugggu

SEQ ID NO: 704389 - RNA, 23 nt, Human
ccacugcacuccagccuggguga

SEQ ID NO: 704390 - RNA, 23 nt, Human
ccacugcacuccagccuggguga

SEQ ID NO: 704391 - RNA, 24 nt, Human
ccacugcacuccagccugggugac

SEQ ID NO: 704392 - RNA, 24 nt, Human
ccacugcacuccagccugggugac

SEQ ID NO: 704393 - RNA, 20 nt, Human
ccacugcgcccagccuccag

SEQ ID NO: 704394 - RNA, 21 nt, Human
ccacugcgcccagccuccagu

SEQ ID NO: 704395 - RNA, 23 nt, Human
ccagugucaucaccaaacaacca

SEQ ID NO: 704396 - RNA, 23 nt, Human
ccaucgcacucuagccugcuggg

SEQ ID NO: 704397 - RNA, 21 nt, Human
ccauguuggucaggcugaucu

SEQ ID NO: 704398 - RNA, 21 nt, Human
ccauguuggucaggcugaucu

SEQ ID NO: 704399 - RNA, 21 nt, Human
cccacaaaaaagagccuugac

SEQ ID NO: 704400 - RNA, 18 nt, Human
cccagagauggaaggacc

SEQ ID NO: 704401 - RNA, 25 nt, Human
cccaugaccuuuuccauauccuucc

SEQ ID NO: 704402 - RNA, 25 nt, Human
cccaugaccuuuuccauauccuucc

SEQ ID NO: 704403 - RNA, 25 nt, Human
cccaugaccuuuuccauauccuucc

SEQ ID NO: 704404 - RNA, 19 nt, Human
ccccagagauggaaggacc

SEQ ID NO: 704405 - RNA, 20 nt, Human
ccccagagauggaaggaccc

SEQ ID NO: 704406 - RNA, 21 nt, Human
ccccagagauggaaggaccuc

SEQ ID NO: 704407 - RNA, 23 nt, Human
ccccagugucaucaccaaacaac

SEQ ID NO: 704408 - RNA, 24 nt, Human
ccccagugucaucaccaaacaacc

SEQ ID NO: 704409 - RNA, 22 nt, Human
cccccaaguacagcaucagcuu

SEQ ID NO: 704410 - RNA, 22 nt, Human
cccccaaguacagcaucagcuu

SEQ ID NO: 704411 - RNA, 21 nt, Human
ccccgccauuuuugcugucua

SEQ ID NO: 704412 - RNA, 22 nt, Human
cccgaccaacauggugaaaccc

SEQ ID NO: 704413 - RNA, 22 nt, Human
cccgaccaacauggugaaaccc

SEQ ID NO: 704414 - RNA, 19 nt, Human
cccucaaagaaauggggaa

SEQ ID NO: 704415 - RNA, 21 nt, Human
ccgccugccucagccucuggg

SEQ ID NO: 704416 - RNA, 23 nt, Human
ccucagccucugggauuauaggc

SEQ ID NO: 704417 - RNA, 21 nt, Human
ccuccaacacacgcccaauuu

SEQ ID NO: 704418 - RNA, 21 nt, Human
ccuccaacacacgcccaauuu

SEQ ID NO: 704419 - RNA, 24 nt, Human
ccuccaacacacgcccaauuucag

SEQ ID NO: 704420 - RNA, 24 nt, Human
ccuccaacacacgcccaauuucag

SEQ ID NO: 704421 - RNA, 18 nt, Human
ccugaccucaggugaucc

SEQ ID NO: 704422 - RNA, 21 nt, Human
ccugaccucaggugauccgcc

SEQ ID NO: 704423 - RNA, 23 nt, Human
ccugaccucaggugauccgccug

SEQ ID NO: 704424 - RNA, 19 nt, Human
ccugagcagcugggauuac

SEQ ID NO: 704425 - RNA, 23 nt, Human
ccugagcagcugggauuacaggc

SEQ ID NO: 704426 - RNA, 24 nt, Human
ccugagcagcugggauuacaggca

SEQ ID NO: 704427 - RNA, 19 nt, Human
ccuggccacaagagggcuc

SEQ ID NO: 704428 - RNA, 22 nt, Human
ccugggugacagagcgagacuc

SEQ ID NO: 704429 - RNA, 22 nt, Human
ccugggugacagagcgagacuc

SEQ ID NO: 704430 - RNA, 18 nt, Human
ccuucagcaggugacggc

SEQ ID NO: 704431 - RNA, 19 nt, Human
cgacacaacagccgccgaa

SEQ ID NO: 704432 - RNA, 19 nt, Human
cgacacaacagccgccgaa

SEQ ID NO: 704433 - RNA, 23 nt, Human
cgacacaacagccgccgaaggac

SEQ ID NO: 704434 - RNA, 23 nt, Human
cgacacaacagccgccgaaggac

SEQ ID NO: 704435 - RNA, 23 nt, Human
cgacacaacagccgccgaaggac

SEQ ID NO: 704436 - RNA, 19 nt, Human
cgcacccguaaucccagcu

SEQ ID NO: 704437 - RNA, 21 nt, Human
cggaucaagaggucaggaguu

SEQ ID NO: 704438 - RNA, 21 nt, Human
cggaucaagaggucaggaguu

SEQ ID NO: 704439 - RNA, 19 nt, Human
cguaaucccagcuacucag

SEQ ID NO: 704440 - RNA, 19 nt, Human
cguaaucccagcuacucag

SEQ ID NO: 704441 - RNA, 19 nt, Human
cgucaguacacaaggaaag

SEQ ID NO: 704442 - RNA, 24 nt, Human
cucacaucuguaaucccaucacuu

SEQ ID NO: 704443 - RNA, 24 nt, Human
cucacaucuguaaucccaucacuu

SEQ ID NO: 704444 - RNA, 24 nt, Human
cucacaucuguaaucccaucacuu

SEQ ID NO: 704445 - RNA, 24 nt, Human
cucagccucugggauuauaggcgu

SEQ ID NO: 704446 - RNA, 23 nt, Human
cucaggugauccgccugccucag

SEQ ID NO: 704447 - RNA, 23 nt, Human
cucauauucuucacaaguggccu

SEQ ID NO: 704448 - RNA, 18 nt, Human
cuccaaaugaccugagaa

SEQ ID NO: 704449 - RNA, 18 nt, Human
cuccaaaugaccugagaa

SEQ ID NO: 704450 - RNA, 24 nt, Human
cuccauguuggucaggcugaucuu

SEQ ID NO: 704451 - RNA, 26 nt, Human
cuccugaccucaggugauccgccugc

SEQ ID NO: 704452 - RNA, 22 nt, Human
cuccuucagcaggugacggccc

SEQ ID NO: 704453 - RNA, 23 nt, Human
cugagcagcugggauuacaggca

SEQ ID NO: 704454 - RNA, 24 nt, Human
cugagcagcugggauuacaggcau

SEQ ID NO: 704455 - RNA, 19 nt, Human
cuggccacaagagggcucu

SEQ ID NO: 704456 - RNA, 19 nt, Human
cuggccacaagagggcucu

SEQ ID NO: 704457 - RNA, 21 nt, Human
cuguaaucccaucacuuuggg

SEQ ID NO: 704458 - RNA, 19 nt, Human
gaaacccugucucuacuaa

SEQ ID NO: 704459 - RNA, 19 nt, Human
gaaacccugucucuacuaa

SEQ ID NO: 704460 - RNA, 19 nt, Human
gaagaaguagggggcccug

SEQ ID NO: 704461 - RNA, 21 nt, Human
gaagcccuccaacacacgccc

SEQ ID NO: 704462 - RNA, 24 nt, Human
gaagcccuccaacacacgcccuuc

SEQ ID NO: 704463 - RNA, 24 nt, Human
gaagcccuccaacacacgcccuuc

SEQ ID NO: 704464 - RNA, 21 nt, Human
gaaggccuggccacaagaggg

SEQ ID NO: 704465 - RNA, 21 nt, Human
gaaggccuggccacaagaggg

SEQ ID NO: 704466 - RNA, 18 nt, Human
gacacaacagccgccgaa

SEQ ID NO: 704467 - RNA, 21 nt, Human
gacacaacagccgccgaagga

SEQ ID NO: 704468 - RNA, 21 nt, Human
gacacaacagccgccgaagga

SEQ ID NO: 704469 - RNA, 21 nt, Human
gacacaacagccgccgaagga

SEQ ID NO: 704470 - RNA, 21 nt, Human
gacagagcgagacuccgucuu

SEQ ID NO: 704471 - RNA, 23 nt, Human
gaccaacauggugaaacccuguc

SEQ ID NO: 704472 - RNA, 23 nt, Human
gaccaacauggugaaacccuguc

SEQ ID NO: 704473 - RNA, 24 nt, Human
gaccucaggugauccgccugccuc

SEQ ID NO: 704474 - RNA, 23 nt, Human
gagaccagcccgaccaacauggu

SEQ ID NO: 704475 - RNA, 22 nt, Human
gagcagcugggauuacaggcau

SEQ ID NO: 704476 - RNA, 24 nt, Human
gagcagcugggauuacaggcaugc

SEQ ID NO: 704477 - RNA, 18 nt, Human
gagguuacagugagccaa

SEQ ID NO: 704478 - RNA, 18 nt, Human
gagguuacagugagccaa

SEQ ID NO: 704479 - RNA, 19 nt, Human
gagguuacagugagccaag

SEQ ID NO: 704480 - RNA, 19 nt, Human
gagguuacagugagccaag

SEQ ID NO: 704481 - RNA, 21 nt, Human
gaucaagaggucaggaguuug

SEQ ID NO: 704482 - RNA, 21 nt, Human
gaucaagaggucaggaguuug

SEQ ID NO: 704483 - RNA, 22 nt, Human
gaucaagaggucaggaguuuga

SEQ ID NO: 704484 - RNA, 22 nt, Human
gaucaagaggucaggaguuuga

SEQ ID NO: 704485 - RNA, 22 nt, Human
gaucccucaaagaaauggggaa

SEQ ID NO: 704486 - RNA, 24 nt, Human
gauuacaggcaugcaccaccaugc

SEQ ID NO: 704487 - RNA, 21 nt, Human
gauuacaggcaugcaccacua

SEQ ID NO: 704488 - RNA, 18 nt, Human
gauuauaggcgugagcca

SEQ ID NO: 704489 - RNA, 22 nt, Human
gauuauaggcgugagccacugc

SEQ ID NO: 704490 - RNA, 22 nt, Human
gauuauaggcgugagccacugc

SEQ ID NO: 704491 - RNA, 20 nt, Human
gcaccacuaugccuggcuaa

SEQ ID NO: 704492 - RNA, 24 nt, Human
gcacuccagccugggugacagagc

SEQ ID NO: 704493 - RNA, 24 nt, Human
gcacuccagccugggugacagagc

SEQ ID NO: 704494 - RNA, 18 nt, Human
gcagcugggauuacaggc

SEQ ID NO: 704495 - RNA, 20 nt, Human
gcagcugggauuacaggcau

SEQ ID NO: 704496 - RNA, 18 nt, Human
gcauacagcuaagacuac

SEQ ID NO: 704497 - RNA, 20 nt, Human
gccaagaucauaccacugca

SEQ ID NO: 704498 - RNA, 20 nt, Human
gccaagaucauaccacugca

SEQ ID NO: 704499 - RNA, 21 nt, Human
gccccagagauggaaggaccc

SEQ ID NO: 704500 - RNA, 18 nt, Human
gccucugggauuauaggc

SEQ ID NO: 704501 - RNA, 20 nt, Human
gccuggccacaagagggcuc

SEQ ID NO: 704502 - RNA, 20 nt, Human
gccuggccacaagagggcuc

SEQ ID NO: 704503 - RNA, 19 nt, Human
gcggaucaagaggucagga

SEQ ID NO: 704504 - RNA, 23 nt, Human
gcggaucaagaggucaggaguuu

SEQ ID NO: 704505 - RNA, 23 nt, Human
gcggaucaagaggucaggaguuu

SEQ ID NO: 704506 - RNA, 30 nt, Human
gcggaucaagaggucaggaguuugagaccc

SEQ ID NO: 704507 - RNA, 30 nt, Human; identical to SEQ ID NO: 704506

SEQ ID NO: 704508 - RNA, 27 nt, Human
gcuccagcuuuuucuuuucgggccgcc

SEQ ID NO: 704509 - RNA, 18 nt, Human
gcugaacaggagguacaa

SEQ ID NO: 704510 - RNA, 18 nt, Human
gcugaacaggagguacaa

SEQ ID NO: 704511 - RNA, 23 nt, Human
gcugaucuugaacuccugaccuc

SEQ ID NO: 704512 - RNA, 22 nt, Human
gcuugaacccgggaggcggagg

SEQ ID NO: 704513 - RNA, 22 nt, Human
gcuugaacccgggaggcggagg

SEQ ID NO: 704514 - RNA, 21 nt, Human
ggacaguaguuccuacagcug

SEQ ID NO: 704515 - RNA, 21 nt, Human
ggacaguaguuccuacagcug

SEQ ID NO: 704516 - RNA, 22 nt, Human
ggagaucccccaaguacagcau

SEQ ID NO: 704517 - RNA, 22 nt, Human
ggagaucccccaaguacagcau

SEQ ID NO: 704518 - RNA, 20 nt, Human
ggaggauggggcacauagcu

SEQ ID NO: 704519 - RNA, 21 nt, Human
ggaggcggagguuacagugag

SEQ ID NO: 704520 - RNA, 21 nt, Human
ggaggcggagguuacagugag

SEQ ID NO: 704521 - RNA, 20 nt, Human
ggagguuacagugagccaag

SEQ ID NO: 704522 - RNA, 20 nt, Human
ggagguuacagugagccaag

SEQ ID NO: 704523 - RNA, 24 nt, Human
ggagguuacagugagccaagauca

SEQ ID NO: 704524 - RNA, 24 nt, Human
ggagguuacagugagccaagauca

SEQ ID NO: 704525 - RNA, 24 nt, Human
ggagguugcagugagccgaaaucg

SEQ ID NO: 704526 - RNA, 20 nt, Human
ggaucaagaggucaggaguu

SEQ ID NO: 704527 - RNA, 20 nt, Human
ggaucaagaggucaggaguu

SEQ ID NO: 704528 - RNA, 25 nt, Human
ggaucaagaggucaggaguuugaga

SEQ ID NO: 704529 - RNA, 25 nt, Human
ggaucaagaggucaggaguuugaga

SEQ ID NO: 704530 - RNA, 24 nt, Human
ggauuacaggcaugcaccaccaug

SEQ ID NO: 704531 - RNA, 24 nt, Human
ggauuacaggcaugcaccacuaug

SEQ ID NO: 704532 - RNA, 23 nt, Human
ggccaaggagaucccccaaguac

SEQ ID NO: 704533 - RNA, 26 nt, Human
ggcggaucaagaggucaggaguuuga

SEQ ID NO: 704534 - RNA, 21 nt, Human
ggcuaggcacgguggcucaca

SEQ ID NO: 704535 - RNA, 21 nt, Human
ggcuaggcacgguggcucaca

SEQ ID NO: 704536 - RNA, 19 nt, Human
ggcugaacaggagguacaa

SEQ ID NO: 704537 - RNA, 24 nt, Human
ggcugagaaguaccucugggagga

SEQ ID NO: 704538 - RNA, 24 nt, Human
ggcugaucuugaacuccugaccuc

SEQ ID NO: 704539 - RNA, 18 nt, Human
gggaggaggagguugcag

SEQ ID NO: 704540 - RNA, 18 nt, Human
gggcaugaaggaggaugg

SEQ ID NO: 704541 - RNA, 23 nt, Human
ggggcaggaccaggcacugggaa

SEQ ID NO: 704542 - RNA, 23 nt, Human
ggggcaggaccaggcacugggaa

SEQ ID NO: 704543 - RNA, 22 nt, Human
gggguguagaagacaaauaagg

SEQ ID NO: 704544 - RNA, 18 nt, Human
ggguccaaauggggagga

SEQ ID NO: 704545 - RNA, 18 nt, Human
ggguccaaauggggagga

SEQ ID NO: 704546 - RNA, 21 nt, Human
ggguuucuccauguuggucag

SEQ ID NO: 704547 - RNA, 22 nt, Human
ggguuucuccauguuggucagg

SEQ ID NO: 704548 - RNA, 24 nt, Human
ggugauccgccugccucagccucu

SEQ ID NO: 704549 - RNA, 24 nt, Human
gguggcacgcacccguaaucccag

SEQ ID NO: 704550 - RNA, 23 nt, Human
gguggcucacaucuguaauccca

SEQ ID NO: 704551 - RNA, 23 nt, Human
gguggcucacaucuguaauccca

SEQ ID NO: 704552 - RNA, 23 nt, Human
gguggcucacaucuguaauccca

SEQ ID NO: 704553 - RNA, 18 nt, Human
guaaucccagcuacucag

SEQ ID NO: 704554 - RNA, 24 nt, Human
guaggguuucuccauguuggucag

SEQ ID NO: 704555 - RNA, 22 nt, Human
gucagcuuguauucaggaggac

SEQ ID NO: 704556 - RNA, 21 nt, Human
gugaaacccugucucuacuaa

SEQ ID NO: 704557 - RNA, 21 nt, Human
gugaaacccugucucuacuaa

SEQ ID NO: 704558 - RNA, 18 nt, Human
gugauccgccugccucag

SEQ ID NO: 704559 - RNA, 22 nt, Human
gugauccgccugccucagccuc

SEQ ID NO: 704560 - RNA, 21 nt, Human
guugcagugagccgaaaucgc

SEQ ID NO: 704561 - RNA, 22 nt, Human
uaaaaaaacaaaacaaaacaaa

SEQ ID NO: 704562 - RNA, 22 nt, Human
uaaaaaaacaaaacaaaacaaa

SEQ ID NO: 704563 - RNA, 27 nt, Human
uaaaaaaacaaaacaaaacaaaacaaa

SEQ ID NO: 704564 - RNA, 27 nt, Human
uaaaaaaacaaaacaaaacaaaacaaa

SEQ ID NO: 704565 - RNA, 21 nt, Human
uaaaaacacaaaaauuagcca

SEQ ID NO: 704566 - RNA, 21 nt, Human
uaaaaacacaaaaauuagcca

SEQ ID NO: 704567 - RNA, 19 nt, Human
uaaagcacuuguucuccaa

SEQ ID NO: 704568 - RNA, 19 nt, Human
uaaagcacuuguucuccaa

SEQ ID NO: 704569 - RNA, 18 nt, Human
uaagaagcccuccaacac

SEQ ID NO: 704570 - RNA, 18 nt, Human
uaagaagcccuccaacac

SEQ ID NO: 704571 - RNA, 25 nt, Human
uacacaacacacacacaagcucaac

SEQ ID NO: 704572 - RNA, 25 nt, Human
uacacaacacacacacaagcucaac

SEQ ID NO: 704573 - RNA, 19 nt, Human
uacacaaggaaagagccca

SEQ ID NO: 704574 - RNA, 23 nt, Human
uacacacaucuccacagcaccac

SEQ ID NO: 704575 - RNA, 23 nt, Human
uacacacaucuccacagcaccac

SEQ ID NO: 704576 - RNA, 20 nt, Human
uacagcuaagacuacacaac

SEQ ID NO: 704577 - RNA, 20 nt, Human
uacagcuaagacuacacaac

SEQ ID NO: 704578 - RNA, 24 nt, Human
uacagcuaagacuacacaacacac

SEQ ID NO: 704579 - RNA, 24 nt, Human
uacagcuaagacuacacaacacac

SEQ ID NO: 704580 - RNA, 22 nt, Human
uacaggcaugcaccaccaugcc

SEQ ID NO: 704581 - RNA, 22 nt, Human
uacaggcaugcaccacuaugcc

SEQ ID NO: 704582 - RNA, 22 nt, Human
uaccacugcacuccagccuggg

SEQ ID NO: 704583 - RNA, 22 nt, Human
uaccacugcacuccagccuggg

SEQ ID NO: 704584 - RNA, 18 nt, Human
uacccaggauuccuuccu

SEQ ID NO: 704585 - RNA, 21 nt, Human
uacccaggauuccuuccugau

SEQ ID NO: 704586 - RNA, 22 nt, Human
uacuaugcucuccacaacaaga

SEQ ID NO: 704587 - RNA, 19 nt, Human
uagaaauacaaucucacca

SEQ ID NO: 704588 - RNA, 19 nt, Human
uagaaauacaaucucacca

SEQ ID NO: 704589 - RNA, 19 nt, Human
uagaagggaagucaauggc

SEQ ID NO: 704590 - RNA, 20 nt, Human
uagaagggaagucaauggca

SEQ ID NO: 704591 - RNA, 18 nt, Human
uagccucuaauucccgcu

SEQ ID NO: 704592 - RNA, 22 nt, Human
uagcugacauuauuaaaaacac

SEQ ID NO: 704593 - RNA, 24 nt, Human
uaggguuucuccauguuggucagg

SEQ ID NO: 704594 - RNA, 19 nt, Human
uauaggcgugagccacugc

SEQ ID NO: 704595 - RNA, 24 nt, Human
ucaagaggucaggaguuugagacc

SEQ ID NO: 704596 - RNA, 24 nt, Human
ucaagaggucaggaguuugagacc

SEQ ID NO: 704597 - RNA, 25 nt, Human
ucaagaggucaggaguuugagaccc

SEQ ID NO: 704598 - RNA, 24 nt, Human
ucacaucuguaaucccaucacuuu

SEQ ID NO: 704599 - RNA, 24 nt, Human
ucacaucuguaaucccaucacuuu

SEQ ID NO: 704600 - RNA, 24 nt, Human
ucacaucuguaaucccaucacuuu

SEQ ID NO: 704601 - RNA, 22 nt, Human
ucaccaaacaaccauuucagcu

SEQ ID NO: 704602 - RNA, 20 nt, Human
ucagcaggugacggcccccu

SEQ ID NO: 704603 - RNA, 18 nt, Human
ucagcagugguaggaaag

SEQ ID NO: 704604 - RNA, 21 nt, Human
ucagcauacagcuaagacuac

SEQ ID NO: 704605 - RNA, 22 nt, Human
ucaggugauccgccugccucag

SEQ ID NO: 704606 - RNA, 23 nt, Human
ucauaccacugcacuccagccug

SEQ ID NO: 704607 - RNA, 23 nt, Human
ucauaccacugcacuccagccug

SEQ ID NO: 704608 - RNA, 18 nt, Human
uccaacacacgcccaauu

SEQ ID NO: 704609 - RNA, 18 nt, Human
uccaacacacgcccaauu

SEQ ID NO: 704610 - RNA, 20 nt, Human
uccaacacacgcccaauuuc

SEQ ID NO: 704611 - RNA, 20 nt, Human
uccaacacacgcccaauuuc

SEQ ID NO: 704612 - RNA, 24 nt, Human
uccacagaaagaaagaagcaaaau

SEQ ID NO: 704613 - RNA, 24 nt, Human
uccacagaaagaaagaagcaaaau

SEQ ID NO: 704614 - RNA, 23 nt, Human
uccagccugggugacagagcgag

SEQ ID NO: 704615 - RNA, 23 nt, Human
uccagccugggugacagagcgag

SEQ ID NO: 704616 - RNA, 24 nt, Human
uccagccugggugacagagcgaga

SEQ ID NO: 704617 - RNA, 24 nt, Human
uccagccugggugacagagcgaga

SEQ ID NO: 704618 - RNA, 24 nt, Human
uccauguuggucaggcugaucuug

SEQ ID NO: 704619 - RNA, 22 nt, Human
ucccacaaaaaagagccuugac

SEQ ID NO: 704620 - RNA, 22 nt, Human
ucccacaaaaaagagccuugac

SEQ ID NO: 704621 - RNA, 21 nt, Human
ucccaguggcacuucccaugg

SEQ ID NO: 704622 - RNA, 22 nt, Human
uccgccugccucagccucuggg

SEQ ID NO: 704623 - RNA, 20 nt, Human
uccgcgacuacagcgagggg

SEQ ID NO: 704624 - RNA, 23 nt, Human
uccuccagcaaaggaaggccugg

SEQ ID NO: 704625 - RNA, 23 nt, Human
uccuccagcaaaggaaggccugg

SEQ ID NO: 704626 - RNA, 24 nt, Human
uccugagcagcugggauuacaggc

SEQ ID NO: 704627 - RNA, 19 nt, Human
ucuagaacagcuggcccug

SEQ ID NO: 704628 - RNA, 22 nt, Human
ucuagaacagcuggcccugguc

SEQ ID NO: 704629 - RNA, 21 nt, Human
ucucaguuggagcuagagggc

SEQ ID NO: 704630 - RNA, 21 nt, Human
ucucaguuggagcuagagggc

SEQ ID NO: 704631 - RNA, 23 nt, Human
ucuccaaaugaccugagaaaucc

SEQ ID NO: 704632 - RNA, 23 nt, Human
ucuccaaaugaccugagaaaucc

SEQ ID NO: 704633 - RNA, 21 nt, Human
ucucuacuaaaaacacaaaaa

SEQ ID NO: 704634 - RNA, 21 nt, Human
ucucuacuaaaaacacaaaaa

SEQ ID NO: 704635 - RNA, 24 nt, Human
ucugcuuccccaugaccuuuucca

SEQ ID NO: 704636 - RNA, 24 nt, Human
ucugcuuccccaugaccuuuucca

SEQ ID NO: 704637 - RNA, 24 nt, Human
ucugcuuccccaugaccuuuucca

SEQ ID NO: 704638 - RNA, 23 nt, Human
ucuugaacuccugaccucaggug

SEQ ID NO: 704639 - RNA, 24 nt, Human
ugaaacuacagacaucaggggcca

SEQ ID NO: 704640 - RNA, 21 nt, Human
ugaacaggagguacaagagua

SEQ ID NO: 704641 - RNA, 21 nt, Human
ugaacaggagguacaagagua

SEQ ID NO: 704642 - RNA, 22 nt, Human
ugaauuccaccccacuaaauac

SEQ ID NO: 704643 - RNA, 22 nt, Human
ugaauuccaccccacuaaauac

SEQ ID NO: 704644 - RNA, 18 nt, Human
ugaccucaggugauccgc

SEQ ID NO: 704645 - RNA, 24 nt, Human
ugaccucaggugauccgccugccu

SEQ ID NO: 704646 - RNA, 23 nt, Human
ugacucauauucuucacaagugg

SEQ ID NO: 704647 - RNA, 23 nt, Human
ugacucauauucuucacaagugg

SEQ ID NO: 704648 - RNA, 23 nt, Human
ugacucauauucuucacaagugg

SEQ ID NO: 704649 - RNA, 24 nt, Human
ugagaccagcccgaccaacauggu

SEQ ID NO: 704650 - RNA, 24 nt, Human
ugagaccagcccgaccaacauggu

SEQ ID NO: 704651 - RNA, 23 nt, Human
ugagauaagaaccaggaaggggc

SEQ ID NO: 704652 - RNA, 23 nt, Human
ugagauaagaaccaggaaggggc

SEQ ID NO: 704653 - RNA, 26 nt, Human
ugagauaagaaccaggaaggggcagg

SEQ ID NO: 704654 - RNA, 26 nt, Human
ugagauaagaaccaggaaggggcagg

SEQ ID NO: 704655 - RNA, 22 nt, Human
ugagccgaaaucgcgccaucgc

SEQ ID NO: 704656 - RNA, 24 nt, Human
ugaggcaggagaauggcuugaacc

SEQ ID NO: 704657 - RNA, 24 nt, Human
ugaggcaggagaauggcuugaacc

SEQ ID NO: 704658 - RNA, 25 nt, Human
ugaggcaggagaauggcuugaaccc

SEQ ID NO: 704659 - RNA, 25 nt, Human
ugaggcaggagaauggcuugaaccc

SEQ ID NO: 704660 - RNA, 18 nt, Human
uggaaugaaggccugaaa

SEQ ID NO: 704661 - RNA, 18 nt, Human
uggaaugaaggccugaaa

SEQ ID NO: 704662 - RNA, 22 nt, Human
uggcacgcacccguaaucccag

SEQ ID NO: 704663 - RNA, 21 nt, Human
uggcucacaucuguaauccca

SEQ ID NO: 704664 - RNA, 21 nt, Human
uggcucacaucuguaauccca

SEQ ID NO: 704665 - RNA, 21 nt, Human
uggcucacaucuguaauccca

SEQ ID NO: 704666 - RNA, 20 nt, Human
uggcuugaacccgggaggcg

SEQ ID NO: 704667 - RNA, 20 nt, Human
uggcuugaacccgggaggcg

SEQ ID NO: 704668 - RNA, 24 nt, Human
uggcuugaacccgggaggcggagg

SEQ ID NO: 704669 - RNA, 24 nt, Human
uggcuugaacccgggaggcggagg

SEQ ID NO: 704670 - RNA, 24 nt, Human
ugggaggaggagguugcagugagc

SEQ ID NO: 704671 - RNA, 18 nt, Human
ugggaggccaaggcaggc

SEQ ID NO: 704672 - RNA, 24 nt, Human
ugggaggccaaggcaggcggauca

SEQ ID NO: 704673 - RNA, 24 nt, Human
ugggaggccaaggcaggcggauca

SEQ ID NO: 704674 - RNA, 21 nt, Human
ugggaggccaaggcaggcggu

SEQ ID NO: 704675 - RNA, 21 nt, Human
ugggauuacaggcaugcacca

SEQ ID NO: 704676 - RNA, 24 nt, Human
ugggauuacaggcaugcaccacca

SEQ ID NO: 704677 - RNA, 23 nt, Human
ugggauuacaggcaugcaccacu

SEQ ID NO: 704678 - RNA, 24 nt, Human
ugggauuacaggcaugcaccacua

SEQ ID NO: 704679 - RNA, 18 nt, Human
ugggauuauaggcgugag

SEQ ID NO: 704680 - RNA, 19 nt, Human
ugggauuauaggcgugagc

SEQ ID NO: 704681 - RNA, 21 nt, Human
ugggauuauaggcgugagcca

SEQ ID NO: 704682 - RNA, 22 nt, Human
ugggauuauaggcgugagccac

SEQ ID NO: 704683 - RNA, 22 nt, Human
ugggauuauaggcgugagccac

SEQ ID NO: 704684 - RNA, 24 nt, Human
ugggauuauaggcgugagccacug

SEQ ID NO: 704685 - RNA, 20 nt, Human
uggggaggaagaaagcaaug

SEQ ID NO: 704686 - RNA, 20 nt, Human
uggggaggaagaaagcaaug

SEQ ID NO: 704687 - RNA, 24 nt, Human
ugguaggaaagggagggagggcau

SEQ ID NO: 704688 - RNA, 24 nt, Human
uggucaggcugaucuugaacuccu

SEQ ID NO: 704689 - RNA, 18 nt, Human
ugguggaacaggccaagg

SEQ ID NO: 704690 - RNA, 18 nt, Human
ugguggaacaggccaagg

SEQ ID NO: 704691 - RNA, 18 nt, Human
ugguggauggugguagau

SEQ ID NO: 704692 - RNA, 18 nt, Human
ugguggauggugguagau

SEQ ID NO: 704693 - RNA, 22 nt, Human
ugguggauggugguagauggag

SEQ ID NO: 704694 - RNA, 22 nt, Human
ugguggauggugguagauggag

SEQ ID NO: 704695 - RNA, 20 nt, Human
uguagaagacaaauaaggca

SEQ ID NO: 704696 - RNA, 19 nt, Human
uuagggauuuccaaauagg

SEQ ID NO: 704697 - RNA, 19 nt, Human
uuagggauuuccaaauagg

SEQ ID NO: 704698 - RNA, 21 nt, Human
uuccccaugaccuuuuccaua

SEQ ID NO: 704699 - RNA, 19 nt, Human
uucucucacuugguggaac

SEQ ID NO: 704700 - RNA, 19 nt, Human
uucucucacuugguggaac

SEQ ID NO: 704701 - RNA, 22 nt, Human
uugcagugagccgaaaucgcgc

SEQ ID NO: 704702 - RNA, 23 nt, Human
uuggcuaggcacgguggcucaca

SEQ ID NO: 704703 - RNA, 23 nt, Human
uuggcuaggcacgguggcucaca

SEQ ID NO: 704704 - RNA, 28 nt, Human
uuggcuaggcacgguggcucacaucugu

SEQ ID NO: 704705 - RNA, 28 nt, Human
uuggcuaggcacgguggcucacaucugu

SEQ ID NO: 704706 - RNA, 28 nt, Human
uuggcuaggcacgguggcucacaucugu

SEQ ID NO: 704707 - RNA, 19 nt, Human
uuguuuuucuuuuuggauc

SEQ ID NO: 704708 - RNA, 19 nt, Human
uuguuuuucuuuuuggauc

SEQ ID NO: 704709 - RNA, 20 nt, Human
uuuaaacuacuacuaaagca

SEQ ID NO: 704710 - RNA, 20 nt, Human
uuuaaacuacuacuaaagca

SEQ ID NO: 704711 - RNA, 21 nt, Human
uuucuccauguuggucaggcu

SEQ ID NO: 704712 - RNA, 19 nt, Human
uuuugcucuuguugccagg

SEQ ID NO: 704713 - RNA, 19 nt, Human
uuuuuuuuuuuuuuuucaa

SEQ ID NO: 704714 - RNA, 28 nt, Human
uuccccgcaaacccucaccgguagagag

SEQ ID NO: 704715 - RNA, 24 nt, Human
aaacaaaugguaauuggaaucaga

SEQ ID NO: 704716 - RNA, 23 nt, Human
aaaguuaccguaauuuaugauua

SEQ ID NO: 704717 - RNA, 21 nt, Human
aacagcaaaaugacuuaaaac

SEQ ID NO: 704718 - RNA, 23 nt, Human
aagaggccaaagaagcagaaaug

SEQ ID NO: 704719 - RNA, 23 nt, Human
aagguccacaguaaaaucagaaa

SEQ ID NO: 704720 - RNA, 25 nt, Human
aagugauccucccaccuuggccucc

SEQ ID NO: 704721 - RNA, 25 nt, Human
aagugauccucccaccuuggccucc

SEQ ID NO: 704722 - RNA, 23 nt, Human
aauagaauuggguaaaaaacaaa

SEQ ID NO: 704723 - RNA, 20 nt, Human
aaucucguguuuccugcagc

SEQ ID NO: 704724 - RNA, 21 nt, Human
acaaacuugccuuuccaaugg

SEQ ID NO: 704725 - RNA, 22 nt, Human
acaaaguuuuacaauuauuaac

SEQ ID NO: 704726 - RNA, 26 nt, Human
acagagcagacaaaaggaucggcaaa

SEQ ID NO: 704727 - RNA, 25 nt, Human
acagcuuauugcagccugaacucuc

SEQ ID NO: 704728 - RNA, 24 nt, Human
acccaggcuggagugcagaggcau

SEQ ID NO: 704729 - RNA, 19 nt, Human
accggccccgucucgcccc

SEQ ID NO: 704730 - RNA, 18 nt, Human
acuauguuacccaggcag

SEQ ID NO: 704731 - RNA, 27 nt, Human
acucuuaucuaggaugugguucuguuc

SEQ ID NO: 704732 - RNA, 22 nt, Human
agaagcagaaaugagcagaaag

SEQ ID NO: 704733 - RNA, 21 nt, Human
agcaaaaugacuuaaaacuga

SEQ ID NO: 704734 - RNA, 25 nt, Human
agcagaaaggaguuggggcuugaug

SEQ ID NO: 704735 - RNA, 24 nt, Human
agcugggacuacaagcacaugcca

SEQ ID NO: 704736 - RNA, 25 nt, Human
aggaucggcaaaaggaaauggacaa

SEQ ID NO: 704737 - RNA, 19 nt, Human
aggcaaaagucaauucagc

SEQ ID NO: 704738 - RNA, 19 nt, Human
aggcacgccaggguggggg

SEQ ID NO: 704739 - RNA, 18 nt, Human
aggcaggucuugaacucc

SEQ ID NO: 704740 - RNA, 23 nt, Human
agugcagaggcaugaucacagcu

SEQ ID NO: 704741 - RNA, 19 nt, Human
aguucaagugauccuccca

SEQ ID NO: 704742 - RNA, 21 nt, Human
auaauggaauuuuucucuuca

SEQ ID NO: 704743 - RNA, 22 nt, Human
auagaaacaacacucaugucau

SEQ ID NO: 704744 - RNA, 21 nt, Human
aucuauuugaugaggucagau

SEQ ID NO: 704745 - RNA, 21 nt, Human
aucuccaucacccaggcugga

SEQ ID NO: 704746 - RNA, 23 nt, Human
aucuccaucacccaggcuggagu

SEQ ID NO: 704747 - RNA, 26 nt, Human
auuuuacucagccagguuucccaggg

SEQ ID NO: 704748 - RNA, 23 nt, Human
cacccaggcuggagugcagaggc

SEQ ID NO: 704749 - RNA, 21 nt, Human
caccccuuccauuuuaaucug

SEQ ID NO: 704750 - RNA, 24 nt, Human
caccucagccucccuaguagcugg

SEQ ID NO: 704751 - RNA, 24 nt, Human
cacuauguuacccaggcaggucuu

SEQ ID NO: 704752 - RNA, 31 nt, Human
cacuauguuacccaggcaggucuugaacucc

SEQ ID NO: 704753 - RNA, 21 nt, Human
cagcaaaaugacuuaaaacug

SEQ ID NO: 704754 - RNA, 21 nt, Human
cagccugaacucucagacuga

SEQ ID NO: 704755 - RNA, 23 nt, Human
cagccugaacucucagacugaag

SEQ ID NO: 704756 - RNA, 18 nt, Human
cagcuagaacaccuucca

SEQ ID NO: 704757 - RNA, 23 nt, Human
cagcuagaacaccuuccagacac

SEQ ID NO: 704758 - RNA, 19 nt, Human
cauuagaacaccuugguau

SEQ ID NO: 704759 - RNA, 18 nt, Human
cauuugggaggguggagg

SEQ ID NO: 704760 - RNA, 18 nt, Human
ccaaaaaaacuccauacc

SEQ ID NO: 704761 - RNA, 24 nt, Human
ccaaagaagcagaaaugagcagaa

SEQ ID NO: 704762 - RNA, 21 nt, Human
cccaggcuggagugcagaggc

SEQ ID NO: 704763 - RNA, 19 nt, Human
ccccucccgccaccuaccg

SEQ ID NO: 704764 - RNA, 20 nt, Human
ccccuggcaaccacuaggua

SEQ ID NO: 704765 - RNA, 23 nt, Human
ccgcggccggggcaggccggggc

SEQ ID NO: 704766 - RNA, 19 nt, Human
ccggccccgucucgccccg

SEQ ID NO: 704767 - RNA, 20 nt, Human
ccggcccggccccucccgcc

SEQ ID NO: 704768 - RNA, 24 nt, Human
ccuacugcuaauauuuucuuugga

SEQ ID NO: 704769 - RNA, 19 nt, Human
ccucccaccuuggccuccc

SEQ ID NO: 704770 - RNA, 18 nt, Human
ccuccuccucagccgcgg

SEQ ID NO: 704771 - RNA, 20 nt, Human
ccugaguucaagugauccuc

SEQ ID NO: 704772 - RNA, 23 nt, Human
ccugccacugauuacugaagucc

SEQ ID NO: 704773 - RNA, 21 nt, Human
ccuucuauuuguccuuuuaaa

SEQ ID NO: 704774 - RNA, 21 nt, Human
cgcggccggggcaggcacgcc

SEQ ID NO: 704775 - RNA, 24 nt, Human
cucagccucccuaguagcugggac

SEQ ID NO: 704776 - RNA, 18 nt, Human
cuccaucacccaggcugg

SEQ ID NO: 704777 - RNA, 19 nt, Human
cuccaucacccaggcugga

SEQ ID NO: 704778 - RNA, 20 nt, Human
cuccaucacccaggcuggag

SEQ ID NO: 704779 - RNA, 20 nt, Human
cuccuccuccuccuccuccu

SEQ ID NO: 704780 - RNA, 20 nt, Human
cuccuccuccuccuccuccu

SEQ ID NO: 704781 - RNA, 20 nt, Human
cuccuccuccuccuccuccu

SEQ ID NO: 704782 - RNA, 22 nt, Human
cuccuccuccuccuccuccuca

SEQ ID NO: 704783 - RNA, 24 nt, Human
cucucaaccugaucuuaguauuuc

SEQ ID NO: 704784 - RNA, 18 nt, Human
cucucuucauuuuacuca

SEQ ID NO: 704785 - RNA, 21 nt, Human
cuugugccaaaaucacucuuc

SEQ ID NO: 704786 - RNA, 21 nt, Human
cuuugagggaaaacacacagg

SEQ ID NO: 704787 - RNA, 23 nt, Human
gaacuugguggugacauuuggga

SEQ ID NO: 704788 - RNA, 19 nt, Human
gacauaguuauguaauucg

SEQ ID NO: 704789 - RNA, 21 nt, Human
gagccaccauacccggccuca

SEQ ID NO: 704790 - RNA, 18 nt, Human
gauuacaguugugagcca

SEQ ID NO: 704791 - RNA, 21 nt, Human
gauuacaguugugagccacca

SEQ ID NO: 704792 - RNA, 24 nt, Human
gauuacaguugugagccaccauac

SEQ ID NO: 704793 - RNA, 20 nt, Human
gcaugaucacagcuuauugc

SEQ ID NO: 704794 - RNA, 20 nt, Human
gccggcuccggcccggcccc

SEQ ID NO: 704795 - RNA, 21 nt, Human
gccggcuccggcccggccccu

SEQ ID NO: 704796 - RNA, 20 nt, Human
gcggccggggcaggcacgcc

SEQ ID NO: 704797 - RNA, 23 nt, Human
gcuggagugcagaggcaugauca

SEQ ID NO: 704798 - RNA, 24 nt, Human
ggcaucuccaucacccaggcugga

SEQ ID NO: 704799 - RNA, 23 nt, Human
gggauuacaguugugagccacca

SEQ ID NO: 704800 - RNA, 23 nt, Human
gggccuccgggccuggcccuccc

SEQ ID NO: 704801 - RNA, 22 nt, Human
ggggauuacaguugugagccac

SEQ ID NO: 704802 - RNA, 24 nt, Human
ggggauuacaguugugagccacca

SEQ ID NO: 704803 - RNA, 18 nt, Human
gggugggggccuccgggc

SEQ ID NO: 704804 - RNA, 18 nt, Human
guacaacucuccagaaau

SEQ ID NO: 704805 - RNA, 19 nt, Human
guggauagccugaaggcag

SEQ ID NO: 704806 - RNA, 19 nt, Human
gugggggccuccgggccug

SEQ ID NO: 704807 - RNA, 24 nt, Human
gugguucuguucaugcugcuuucu

SEQ ID NO: 704808 - RNA, 24 nt, Human
uaaaacugaguacaacucuccaga

SEQ ID NO: 704809 - RNA, 22 nt, Human
uaaaaucagaaagcugaaccuc

SEQ ID NO: 704810 - RNA, 19 nt, Human
uaacaugagcagugauuug

SEQ ID NO: 704811 - RNA, 19 nt, Human
uaagagauggcaucuccau

SEQ ID NO: 704812 - RNA, 23 nt, Human
uacaguugugagccaccauaccc

SEQ ID NO: 704813 - RNA, 21 nt, Human
uaccggccccgucucgccccg

SEQ ID NO: 704814 - RNA, 19 nt, Human
uagaaagcacuugacauug

SEQ ID NO: 704815 - RNA, 24 nt, Human
uaguagcugggacuacaagcacau

SEQ ID NO: 704816 - RNA, 24 nt, Human
uaguuaaaacuguugcugcauuca

SEQ ID NO: 704817 - RNA, 20 nt, Human
uauauucauaaaauugaaac

SEQ ID NO: 704818 - RNA, 18 nt, Human
uaugguguuuuguucuuc

SEQ ID NO: 704819 - RNA, 19 nt, Human
uaugguguuuuguucuucg

SEQ ID NO: 704820 - RNA, 23 nt, Human
uauguuacccaggcaggucuuga

SEQ ID NO: 704821 - RNA, 24 nt, Human
uauguuacccaggcaggucuugaa

SEQ ID NO: 704822 - RNA, 18 nt, Human
uauuuggaaaaaagauau

SEQ ID NO: 704823 - RNA, 25 nt, Human
ucaagugauccucccaccuuggccu

SEQ ID NO: 704824 - RNA, 18 nt, Human
ucacccaggcuggagugc

SEQ ID NO: 704825 - RNA, 18 nt, Human
ucacuugugccaaaauca

SEQ ID NO: 704826 - RNA, 22 nt, Human
ucagccagguuuuguacugaug

SEQ ID NO: 704827 - RNA, 18 nt, Human
uccacaguaaaaucagaa

SEQ ID NO: 704828 - RNA, 20 nt, Human
uccacaguaaaaucagaaag

SEQ ID NO: 704829 - RNA, 24 nt, Human
uccaucacccaggcuggagugcag

SEQ ID NO: 704830 - RNA, 21 nt, Human
ucccaccucagccucccuagu

SEQ ID NO: 704831 - RNA, 22 nt, Human
ucccaccucagccucccuagua

SEQ ID NO: 704832 - RNA, 18 nt, Human
ucccgccggcuccggccc

SEQ ID NO: 704833 - RNA, 22 nt, Human
ucccuaguagcugggacuacaa

SEQ ID NO: 704834 - RNA, 21 nt, Human
uccugaguucaagugauccuc

SEQ ID NO: 704835 - RNA, 19 nt, Human
ucggucacuugugccaaaa

SEQ ID NO: 704836 - RNA, 24 nt, Human
ucggucacuugugccaaaaucacu

SEQ ID NO: 704837 - RNA, 22 nt, Human
ucuacccagcuagaacaccuuc

SEQ ID NO: 704838 - RNA, 21 nt, Human
ucucaaacagagcagacaaaa

SEQ ID NO: 704839 - RNA, 19 nt, Human
ucucacuauguuacccagg

SEQ ID NO: 704840 - RNA, 26 nt, Human
ucucacuauguuacccaggcaggucu

SEQ ID NO: 704841 - RNA, 27 nt, Human
ucucacuauguuacccaggcaggucuu

SEQ ID NO: 704842 - RNA, 25 nt, Human
ucuccaucacccaggcuggagugca

SEQ ID NO: 704843 - RNA, 18 nt, Human
ucucgccccgucaccuag

SEQ ID NO: 704844 - RNA, 21 nt, Human
ucugaagccagugauauuguc

SEQ ID NO: 704845 - RNA, 23 nt, Human
ucuugaacuccugaguucaagug

SEQ ID NO: 704846 - RNA, 23 nt, Human
ugaaagagacaguaacuggagau

SEQ ID NO: 704847 - RNA, 24 nt, Human
ugaaagagacaguaacuggagaua

SEQ ID NO: 704848 - RNA, 25 nt, Human
ugaacuccugaguucaagugauccu

SEQ ID NO: 704849 - RNA, 26 nt, Human
ugacuagaccaagcagaaucucucaa

SEQ ID NO: 704850 - RNA, 20 nt, Human
ugacuucuuacaggccccuu

SEQ ID NO: 704851 - RNA, 18 nt, Human
ugagcagaaaggaguugg

SEQ ID NO: 704852 - RNA, 19 nt, Human
ugagcagaaaggaguuggg

SEQ ID NO: 704853 - RNA, 22 nt, Human
ugagcagaaaggaguuggggcu

SEQ ID NO: 704854 - RNA, 18 nt, Human
ugagggaaaacacacagg

SEQ ID NO: 704855 - RNA, 23 nt, Human
ugagggaaaacacacagggugag

SEQ ID NO: 704856 - RNA, 29 nt, Human
ugaggucucaccugaaggaacuugguggu

SEQ ID NO: 704857 - RNA, 24 nt, Human
ugaggucucacuauguuacccagg

SEQ ID NO: 704858 - RNA, 18 nt, Human
ugauuaaguucugggggc

SEQ ID NO: 704859 - RNA, 21 nt, Human
ugcaggagaauaucuggcaag

SEQ ID NO: 704860 - RNA, 18 nt, Human
ugccaccacaccaggcuc

SEQ ID NO: 704861 - RNA, 22 nt, Human
ugcgauauaauuuauuacagaa

SEQ ID NO: 704862 - RNA, 21 nt, Human
ugcugcauucaugaaugcccu

SEQ ID NO: 704863 - RNA, 22 nt, Human
ugcuugcugucagcauuguugc

SEQ ID NO: 704864 - RNA, 19 nt, Human
uggagugcagaggcaugau

SEQ ID NO: 704865 - RNA, 21 nt, Human
uggagugcagaggcaugauca

SEQ ID NO: 704866 - RNA, 18 nt, Human
uggcucagauggaagcaa

SEQ ID NO: 704867 - RNA, 21 nt, Human
ugggacuacaagcacaugcca

SEQ ID NO: 704868 - RNA, 24 nt, Human
ugggacuacaagcacaugccacca

SEQ ID NO: 704869 - RNA, 20 nt, Human
ugggaggguggagggaggca

SEQ ID NO: 704870 - RNA, 21 nt, Human
ugggaggguggagggaggcag

SEQ ID NO: 704871 - RNA, 20 nt, Human
ugggggccuccgggccuggc

SEQ ID NO: 704872 - RNA, 20 nt, Human
ugguaugagaauauauggaa

SEQ ID NO: 704873 - RNA, 18 nt, Human
uguauuuuaagcauuucc

SEQ ID NO: 704874 - RNA, 25 nt, Human
ugugagccaccauacccggccucau

SEQ ID NO: 704875 - RNA, 19 nt, Human
uguuauagugaacucaugg

SEQ ID NO: 704876 - RNA, 23 nt, Human
uguuuccugcagccugauagauu

SEQ ID NO: 704877 - RNA, 21 nt, Human
uguuuuguucuucggucacuu

SEQ ID NO: 704878 - RNA, 26 nt, Human
uuaaaauaaauguaagccauaguuaa

SEQ ID NO: 704879 - RNA, 26 nt, Human
uuacuacaucaaaacaaagagugaaa

SEQ ID NO: 704880 - RNA, 19 nt, Human
uuagaacaccuugguauaa

SEQ ID NO: 704881 - RNA, 22 nt, Human
uucaagcauuuuuguaagaggu

SEQ ID NO: 704882 - RNA, 23 nt, Human
uucaagugauccucccaccuugg

SEQ ID NO: 704883 - RNA, 24 nt, Human
uucaagugauccucccaccuuggc

SEQ ID NO: 704884 - RNA, 23 nt, Human
uuccaaaaaaacuccauacccau

SEQ ID NO: 704885 - RNA, 23 nt, Human
uuccagccugaauuuuucagauu

SEQ ID NO: 704886 - RNA, 26 nt, Human
uuccagccugaauuuuucagauugac

SEQ ID NO: 704887 - RNA, 23 nt, Human
uucccaccucagccucccuagua

SEQ ID NO: 704888 - RNA, 18 nt, Human
uuccugcagccugauaga

SEQ ID NO: 704889 - RNA, 25 nt, Human
uugacuagaccaagcagaaucucuc

SEQ ID NO: 704890 - RNA, 21 nt, Human
uugccauuuaaugaaugacau

SEQ ID NO: 704891 - RNA, 23 nt, Human
uugggaggguggagggaggcagu

SEQ ID NO: 704892 - RNA, 21 nt, Human
uuuaaaguguacaauuuggug

SEQ ID NO: 704893 - RNA, 26 nt, Human
uuuaacuucucaaacagagcagacaa

SEQ ID NO: 704894 - RNA, 19 nt, Human
uuuaagcauuuccuggugg

SEQ ID NO: 704895 - RNA, 23 nt, Human
aaaaaaaaaaaaaaaaaggaaag

SEQ ID NO: 704896 - RNA, 25 nt, Human
aaaaaaaaaaaaaaggaaaguauaa

SEQ ID NO: 704897 - RNA, 22 nt, Human
aaaaagcucggcugaugcuggc

SEQ ID NO: 704898 - RNA, 19 nt, Human
aaacuccagcagggcuggc

SEQ ID NO: 704899 - RNA, 21 nt, Human
agagaagagcccagggcugcc

SEQ ID NO: 704900 - RNA, 20 nt, Human
agggccccgcagcacgcccc

SEQ ID NO: 704901 - RNA, 19 nt, Human
agggcgaggggcagggcug

SEQ ID NO: 704902 - RNA, 23 nt, Human
agggcugggggcagguggguugc

SEQ ID NO: 704903 - RNA, 20 nt, Human
aggugggugggggcaucagg

SEQ ID NO: 704904 - RNA, 22 nt, Human
auauuaaaaaaaaaaaaaaaaa

SEQ ID NO: 704905 - RNA, 21 nt, Human
caacccuacccgagggucaac

SEQ ID NO: 704906 - RNA, 30 nt, Human
cacccccgacacccagagacuacaguacuu

SEQ ID NO: 704907 - RNA, 19 nt, Human
cagcagggcuggcgagggu

SEQ ID NO: 704908 - RNA, 18 nt, Human
caggacaacccuacccga

SEQ ID NO: 704909 - RNA, 21 nt, Human
caggacaacccuacccgaggg

SEQ ID NO: 704910 - RNA, 21 nt, Human
caguacuuaggaguuacacac

SEQ ID NO: 704911 - RNA, 22 nt, Human
caucagggcgaggggcagggcu

SEQ ID NO: 704912 - RNA, 20 nt, Human
ccacagcaaacuccagcagg

SEQ ID NO: 704913 - RNA, 24 nt, Human
ccagagaagagcccagggcugccu

SEQ ID NO: 704914 - RNA, 21 nt, Human
cccacagcaaacuccagcagg

SEQ ID NO: 704915 - RNA, 23 nt, Human
cccacagcaaacuccagcagggc

SEQ ID NO: 704916 - RNA, 26 nt, Human
cccacagcaaacuccagcagggcccc

SEQ ID NO: 704917 - RNA, 26 nt, Human
cccaggcaggacaacccuacccgagg

SEQ ID NO: 704918 - RNA, 18 nt, Human
cccagggcugccucguug

SEQ ID NO: 704919 - RNA, 27 nt, Human
cccagggcugccucguugggcgucucc

SEQ ID NO: 704920 - RNA, 18 nt, Human
ccccccuccuccucucuc

SEQ ID NO: 704921 - RNA, 23 nt, Human
cccccgacacccagagacuacag

SEQ ID NO: 704922 - RNA, 19 nt, Human
cccccgcccuggccacccc

SEQ ID NO: 704923 - RNA, 24 nt, Human
cccccuccuccucucucuucguca

SEQ ID NO: 704924 - RNA, 19 nt, Human
ccccgcccuggccaccccc

SEQ ID NO: 704925 - RNA, 21 nt, Human
ccccgcccuggccacccccga

SEQ ID NO: 704926 - RNA, 22 nt, Human
ccccgcccuggccacccccgac

SEQ ID NO: 704927 - RNA, 21 nt, Human
cccgcagcacgccccucucca

SEQ ID NO: 704928 - RNA, 24 nt, Human
cccgcagcacgccccucuccagcu

SEQ ID NO: 704929 - RNA, 24 nt, Human
cccuggccucggugccucuguccu

SEQ ID NO: 704930 - RNA, 21 nt, Human
ccgcucuuccuccuggguggc

SEQ ID NO: 704931 - RNA, 22 nt, Human
ccuccuccucucucuucgucac

SEQ ID NO: 704932 - RNA, 22 nt, Human
ccuggccacccccgacacccag

SEQ ID NO: 704933 - RNA, 21 nt, Human
cgagggugcgcccggcugccg

SEQ ID NO: 704934 - RNA, 18 nt, Human
cgcccuggccacccccga

SEQ ID NO: 704935 - RNA, 24 nt, Human
cgcuggaccgaggugggugggggc

SEQ ID NO: 704936 - RNA, 23 nt, Human
cgcuuggucccucuggguuuccu

SEQ ID NO: 704937 - RNA, 22 nt, Human
cucagcccgcucuuccuccugg

SEQ ID NO: 704938 - RNA, 18 nt, Human
cuccaccuccucccagcc

SEQ ID NO: 704939 - RNA, 20 nt, Human
cuccucuuccuccuccucca

SEQ ID NO: 704940 - RNA, 21 nt, Human
cugaguuucacaaaaaagcuc

SEQ ID NO: 704941 - RNA, 22 nt, Human
cuggaccgaggugggugggggc

SEQ ID NO: 704942 - RNA, 20 nt, Human
cuuccuccuccuccaccucc

SEQ ID NO: 704943 - RNA, 19 nt, Human
cuucuccucuuccuccucc

SEQ ID NO: 704944 - RNA, 21 nt, Human
gagguuccuuggaugggugcc

SEQ ID NO: 704945 - RNA, 24 nt, Human
gaguuucacaaaaaagcucggcug

SEQ ID NO: 704946 - RNA, 18 nt, Human
gcccacagcaaacuccag

SEQ ID NO: 704947 - RNA, 19 nt, Human
gcccugccaggacagccag

SEQ ID NO: 704948 - RNA, 22 nt, Human
ggagguuccuuggaugggugcc

SEQ ID NO: 704949 - RNA, 23 nt, Human
ggcugccgccuccugggcagggc

SEQ ID NO: 704950 - RNA, 20 nt, Human
gggcagggcugggggcaggu

SEQ ID NO: 704951 - RNA, 22 nt, Human
gggcagggcugggggcaggugg

SEQ ID NO: 704952 - RNA, 19 nt, Human
gggccccgcagcacgcccc

SEQ ID NO: 704953 - RNA, 23 nt, Human
gggcugggggcagguggguugca

SEQ ID NO: 704954 - RNA, 21 nt, Human
ggugggugggggcaucagggc

SEQ ID NO: 704955 - RNA, 21 nt, Human
gucccucuggguuuccucagc

SEQ ID NO: 704956 - RNA, 24 nt, Human
uaaaaaacaugugcaguugaaagc

SEQ ID NO: 704957 - RNA, 24 nt, Human
uaacugguggcuaucuguucauaa

SEQ ID NO: 704958 - RNA, 23 nt, Human
uccagcuucgcaucagggcgagg

SEQ ID NO: 704959 - RNA, 18 nt, Human
uccucagccgcguuuugg

SEQ ID NO: 704960 - RNA, 19 nt, Human
uccugccuccuucaaagug

SEQ ID NO: 704961 - RNA, 18 nt, Human
ucgcaucagggcgagggg

SEQ ID NO: 704962 - RNA, 21 nt, Human
ucuccagcuucgcaucagggc

SEQ ID NO: 704963 - RNA, 21 nt, Human
ucuccucuuccuccuccucca

SEQ ID NO: 704964 - RNA, 21 nt, Human
ucuggguuuccucagcccgcu

SEQ ID NO: 704965 - RNA, 21 nt, Human
ucuuccuccuccuccaccucc

SEQ ID NO: 704966 - RNA, 26 nt, Human
ucuuccuccuccuccaccuccucccc

SEQ ID NO: 704967 - RNA, 19 nt, Human
ugcaguugaaagcccugcc

SEQ ID NO: 704968 - RNA, 24 nt, Human
ugcaguugaaagcccugccaggac

SEQ ID NO: 704969 - RNA, 20 nt, Human
ugccaggacagccagucugu

SEQ ID NO: 704970 - RNA, 22 nt, Human
ugccucuguccugccuccuuca

SEQ ID NO: 704971 - RNA, 18 nt, Human
uggaugggugcccuggug

SEQ ID NO: 704972 - RNA, 25 nt, Human
uggccacccccgacacccagagacu

SEQ ID NO: 704973 - RNA, 21 nt, Human
ugggugggggcaucagggccc

SEQ ID NO: 704974 - RNA, 24 nt, Human
uggguuuccucagcccgcucuucc

SEQ ID NO: 704975 - RNA, 24 nt, Human
uguacaguuuuucaugcaccaaag

SEQ ID NO: 704976 - RNA, 24 nt, Human
uuaaaaaaaaaaaaaaaaaggaaa

SEQ ID NO: 704977 - RNA, 26 nt, Human
uuauagaaauccauauauauauugcu

SEQ ID NO: 704978 - RNA, 21 nt, Human
uucgcaucagggcgaggggca

SEQ ID NO: 704979 - RNA, 20 nt, Human
uuuccuucuccucuuccucc

SEQ ID NO: 704980 - RNA, 24 nt, Human
uuuccuucuccucuuccuccuccu

SEQ ID NO: 704981 - RNA, 18 nt, Human
uuugguugcaacucaugg

SEQ ID NO: 704982 - RNA, 19 nt, Human
uuuuuuuuuuuuuuuuuaa

SEQ ID NO: 704983 - RNA, 21 nt, Human
aagaaggcugacucaacaggc

SEQ ID NO: 704984 - RNA, 19 nt, Human
caagggcaggcccugagau

SEQ ID NO: 704985 - RNA, 19 nt, Human
cacggagcuuccuguaggg

SEQ ID NO: 704986 - RNA, 21 nt, Human
ccagcuccccuggcagccgag

SEQ ID NO: 704987 - RNA, 21 nt, Human
ccccagcugggcacacggagc

SEQ ID NO: 704988 - RNA, 22 nt, Human
gagauggggguccagagagaga

SEQ ID NO: 704989 - RNA, 20 nt, Human
gauggggguccagagagaga

SEQ ID NO: 704990 - RNA, 21 nt, Human
gggcaggcccugagauggggg

SEQ ID NO: 704991 - RNA, 18 nt, Human
ugagggaagaaggcugac

SEQ ID NO: 704992 - RNA, 20 nt, Human
uggcuccagcuccccuggca

SEQ ID NO: 704993 - RNA, 22 nt, Human
ugggaggacaccuucgcaggug

SEQ ID NO: 704994 - RNA, 21 nt, Human
aaaaaauuugauccgagaaac

SEQ ID NO: 704995 - RNA, 21 nt, Human
aacaggcacuaguccgacacg

SEQ ID NO: 704996 - RNA, 23 nt, Human
aacuucucuuuucucuuuuauaa

SEQ ID NO: 704997 - RNA, 24 nt, Human
aagaaaaagauccagaugaucuga

SEQ ID NO: 704998 - RNA, 19 nt, Human
aagggggccccugauggag

SEQ ID NO: 704999 - RNA, 18 nt, Human
aaguaauaccucuccuua

SEQ ID NO: 705000 - RNA, 18 nt, Human
aaguuaaaaaauuugauc

SEQ ID NO: 705001 - RNA, 24 nt, Human
aauauacauccacuuuuuuuguug

SEQ ID NO: 705002 - RNA, 23 nt, Human
aauuuuuuucuguuuucuuuuuu

SEQ ID NO: 705003 - RNA, 23 nt, Human
accccacccacccccguccccaa

SEQ ID NO: 705004 - RNA, 19 nt, Human
aggaaggagguggggaaga

SEQ ID NO: 705005 - RNA, 19 nt, Human
aggaagggggccccugaug

SEQ ID NO: 705006 - RNA, 22 nt, Human
auuugauccgagaaacaguuaa

SEQ ID NO: 705007 - RNA, 21 nt, Human
caaacuucucuuuucucuuuu

SEQ ID NO: 705008 - RNA, 19 nt, Human
caaagcccaauugugcuac

SEQ ID NO: 705009 - RNA, 19 nt, Human
caccacccccgggcccggc

SEQ ID NO: 705010 - RNA, 23 nt, Human
caccccacccacccccgucccca

SEQ ID NO: 705011 - RNA, 25 nt, Human
cacuuguuccugagucgcucuccug

SEQ ID NO: 705012 - RNA, 23 nt, Human
cagcagucuaaaaucacaagauc

SEQ ID NO: 705013 - RNA, 27 nt, Human
ccacccacccccguccccaaaaaagua

SEQ ID NO: 705014 - RNA, 24 nt, Human
ccccacccacccccguccccaaaa

SEQ ID NO: 705015 - RNA, 19 nt, Human
cccccgggcccggcgccgc

SEQ ID NO: 705016 - RNA, 21 nt, Human
ccccuaaguguaucccuccuc

SEQ ID NO: 705017 - RNA, 19 nt, Human
ccgccgccgccgcuuccuc

SEQ ID NO: 705018 - RNA, 20 nt, Human
ccggcgccgccgccgccgcu

SEQ ID NO: 705019 - RNA, 22 nt, Human
ccugcugucaccacccccgggc

SEQ ID NO: 705020 - RNA, 20 nt, Human
cgccgccgccgcuuccucuc

SEQ ID NO: 705021 - RNA, 20 nt, Human
cuuuuuuuuuuuuuuuuugu

SEQ ID NO: 705022 - RNA, 18 nt, Human
gaagaacacgaagaagaa

SEQ ID NO: 705023 - RNA, 19 nt, Human
gaccugcugucaccacccc

SEQ ID NO: 705024 - RNA, 19 nt, Human
gccaguagagcaggcucug

SEQ ID NO: 705025 - RNA, 19 nt, Human
gccccugauggaguaagaa

SEQ ID NO: 705026 - RNA, 22 nt, Human
gccgccgccgcuuccucuccca

SEQ ID NO: 705027 - RNA, 21 nt, Human
gccgccgcuuccucucccaca

SEQ ID NO: 705028 - RNA, 18 nt, Human
ggacuuaggaaggggaag

SEQ ID NO: 705029 - RNA, 18 nt, Human
gggaagaacacgaagaag

SEQ ID NO: 705030 - RNA, 23 nt, Human
ggggaagaacacgaagaagaagu

SEQ ID NO: 705031 - RNA, 22 nt, Human
guccuuuguauuuaugaugcaa

SEQ ID NO: 705032 - RNA, 23 nt, Human
guuaacucugcagcagucuaaaa

SEQ ID NO: 705033 - RNA, 23 nt, Human
guugacacggggggaggaagggg

SEQ ID NO: 705034 - RNA, 18 nt, Human
uaaaacugucuccaaagu

SEQ ID NO: 705035 - RNA, 18 nt, Human
uaaagaaaaagauccaga

SEQ ID NO: 705036 - RNA, 22 nt, Human
uaaagcaauauacauccacuuu

SEQ ID NO: 705037 - RNA, 24 nt, Human
uaccaaaaaaauaaaauaaaauaa

SEQ ID NO: 705038 - RNA, 19 nt, Human
uacccauuugccaaagccc

SEQ ID NO: 705039 - RNA, 24 nt, Human
uacccauuugccaaagcccaauug

SEQ ID NO: 705040 - RNA, 19 nt, Human
uaugaccaagaaaugggac

SEQ ID NO: 705041 - RNA, 28 nt, Human
uaugaccaagaaaugggacuuaggaagg

SEQ ID NO: 705042 - RNA, 24 nt, Human
ucaccccacccacccccgucccca

SEQ ID NO: 705043 - RNA, 26 nt, Human
ucaccccacccacccccguccccaaa

SEQ ID NO: 705044 - RNA, 20 nt, Human
ucucuucaccccacccaccc

SEQ ID NO: 705045 - RNA, 21 nt, Human
ucugcagcagucuaaaaucac

SEQ ID NO: 705046 - RNA, 18 nt, Human
ucuuuuuuuuuuuuuuuu

SEQ ID NO: 705047 - RNA, 18 nt, Human
ugaacuggaaaaggaagg

SEQ ID NO: 705048 - RNA, 22 nt, Human
ugacaguuaucaugcucuuccu

SEQ ID NO: 705049 - RNA, 24 nt, Human
ugagccccuaaguguaucccuccu

SEQ ID NO: 705050 - RNA, 20 nt, Human
ugauauguacaucacaauua

SEQ ID NO: 705051 - RNA, 23 nt, Human
ugggaucugugagccccuaagug

SEQ ID NO: 705052 - RNA, 21 nt, Human
uguaaauggcaaaaaauuuaa

SEQ ID NO: 705053 - RNA, 18 nt, Human
uguuuuguuuuguuuuua

SEQ ID NO: 705054 - RNA, 24 nt, Human
uuaaaaaauuugauccgagaaaca

SEQ ID NO: 705055 - RNA, 18 nt, Human
uuaacucugcagcagucu

SEQ ID NO: 705056 - RNA, 21 nt, Human
uuugccaaagcccaauugugc

SEQ ID NO: 705057 - RNA, 19 nt, Human
uuuuuuuuuuuuuuuguga

SEQ ID NO: 705058 - RNA, 18 nt, Human
uuuuuuuuuuuuuuuuug

SEQ ID NO: 705059 - RNA, 18 nt, Human
uuuuuuuuuuuuuuuuug

SEQ ID NO: 705060 - RNA, 19 nt, Human
uuuuuuuuuuuuuuuuugu

SEQ ID NO: 705061 - RNA, 18 nt, Human
aaggcccccaacccacag

SEQ ID NO: 705062 - RNA, 23 nt, Human
aaggccgcagcaggaggaacugg

SEQ ID NO: 705063 - RNA, 21 nt, Human
acccacaguaccguccccaau

SEQ ID NO: 705064 - RNA, 25 nt, Human
accccaaaucccugccugaggcugg

SEQ ID NO: 705065 - RNA, 18 nt, Human
agugggcaggggucuggg

SEQ ID NO: 705066 - RNA, 21 nt, Human
aucccugccugaggcugggga

SEQ ID NO: 705067 - RNA, 22 nt, Human
caacccacaguaccguccccaa

SEQ ID NO: 705068 - RNA, 23 nt, Human
caaggcccccaacccacaguacc

SEQ ID NO: 705069 - RNA, 18 nt, Human
cacugccuccagcacccc

SEQ ID NO: 705070 - RNA, 18 nt, Human
cagcaccccaaaucccug

SEQ ID NO: 705071 - RNA, 21 nt, Human
cagcaccccaaaucccugccu

SEQ ID NO: 705072 - RNA, 20 nt, Human
cagcaggaggaacuggacag

SEQ ID NO: 705073 - RNA, 19 nt, Human
caggaggaacuggacagcg

SEQ ID NO: 705074 - RNA, 22 nt, Human
ccacaugcuggacuaucacccc

SEQ ID NO: 705075 - RNA, 21 nt, Human
ccagcaccccaaaucccugcc

SEQ ID NO: 705076 - RNA, 18 nt, Human
cccacaguaccgucccca

SEQ ID NO: 705077 - RNA, 19 nt, Human
cccccaacccacaguaccg

SEQ ID NO: 705078 - RNA, 19 nt, Human
cccugccugaggcugggga

SEQ ID NO: 705079 - RNA, 18 nt, Human
ccugaggcuggggagaga

SEQ ID NO: 705080 - RNA, 18 nt, Human
cuccagcaccccaaaucc

SEQ ID NO: 705081 - RNA, 24 nt, Human
gagaaaguggggagcagccgguac

SEQ ID NO: 705082 - RNA, 18 nt, Human
ggaacuggacagcggagg

SEQ ID NO: 705083 - RNA, 21 nt, Human
ggagcagcuguagaaacccug

SEQ ID NO: 705084 - RNA, 21 nt, Human
ggcaugugcuuggccacugcc

SEQ ID NO: 705085 - RNA, 21 nt, Human
ggccacugccuccagcacccc

SEQ ID NO: 705086 - RNA, 20 nt, Human
gggagagaccucugccggcg

SEQ ID NO: 705087 - RNA, 23 nt, Human
gguccaggaccggguccgagaaa

SEQ ID NO: 705088 - RNA, 19 nt, Human
uccaaggccgcagcaggag

SEQ ID NO: 705089 - RNA, 19 nt, Human
uccaggaccggguccgaga

SEQ ID NO: 705090 - RNA, 24 nt, Human
uccccacaugcuggacuaucaccc

SEQ ID NO: 705091 - RNA, 22 nt, Human
ucccugccugaggccggggucc

SEQ ID NO: 705092 - RNA, 21 nt, Human
ucccugccugaggcuggggag

SEQ ID NO: 705093 - RNA, 22 nt, Human
ugccugaggcuggggagagacc

SEQ ID NO: 705094 - RNA, 19 nt, Human
ugcuuggccacugccucca

SEQ ID NO: 705095 - RNA, 24 nt, Human
ugggcaggggucuggguccaaggc

SEQ ID NO: 705096 - RNA, 19 nt, Human
aaauggcccugagacccga

SEQ ID NO: 705097 - RNA, 21 nt, Human
aaccacaccccagggcccagc

SEQ ID NO: 705098 - RNA, 20 nt, Human
aacccccagcuccgaaaauc

SEQ ID NO: 705099 - RNA, 25 nt, Human
aagaaaagacagacaagacacagaa

SEQ ID NO: 705100 - RNA, 21 nt, Human
aagaagaaaagacagacaaga

SEQ ID NO: 705101 - RNA, 19 nt, Human
aagaagaagaaaagacaga

SEQ ID NO: 705102 - RNA, 21 nt, Human
aagaagaagaaaagacagaca

SEQ ID NO: 705103 - RNA, 19 nt, Human
aaggggcaugagauguccc

SEQ ID NO: 705104 - RNA, 19 nt, Human
aaggggcuuggggucccca

SEQ ID NO: 705105 - RNA, 18 nt, Human
aagugguggauuggggcu

SEQ ID NO: 705106 - RNA, 18 nt, Human
acaccggagucuccuggc

SEQ ID NO: 705107 - RNA, 18 nt, Human
acaccuuccugggccuac

SEQ ID NO: 705108 - RNA, 20 nt, Human
acagagcaagacuccgucuc

SEQ ID NO: 705109 - RNA, 24 nt, Human
acagagcaagacuccgucucgaga

SEQ ID NO: 705110 - RNA, 22 nt, Human
acagugugagagaagaagcagg

SEQ ID NO: 705111 - RNA, 23 nt, Human
acagugugagagaagaagcaggg

SEQ ID NO: 705112 - RNA, 21 nt, Human
accacaccccagggcccagcg

SEQ ID NO: 705113 - RNA, 22 nt, Human
accccagggcccagcgagguca

SEQ ID NO: 705114 - RNA, 19 nt, Human
accucaccugaggauuuca

SEQ ID NO: 705115 - RNA, 24 nt, Human
accuugucucuacuaagaauacaa

SEQ ID NO: 705116 - RNA, 21 nt, Human
acgccaggaaaaggggguagg

SEQ ID NO: 705117 - RNA, 22 nt, Human
agaaaaaaaaaaggguggaagg

SEQ ID NO: 705118 - RNA, 27 nt, Human
agaaaaaaggaagaaaacagcaagggg

SEQ ID NO: 705119 - RNA, 19 nt, Human
agaaaaagaaaggaaaaga

SEQ ID NO: 705120 - RNA, 23 nt, Human
agaaaagacagacaagacacaga

SEQ ID NO: 705121 - RNA, 23 nt, Human
agaaaggaaaagaggcucguuaa

SEQ ID NO: 705122 - RNA, 21 nt, Human
agaagaagaaaagacagacaa

SEQ ID NO: 705123 - RNA, 20 nt, Human
agacaagaagaagaaaagac

SEQ ID NO: 705124 - RNA, 26 nt, Human
agacaagaagaagaaaagagggaccc

SEQ ID NO: 705125 - RNA, 27 nt, Human
agacaagacacagaaaaagagggaccc

SEQ ID NO: 705126 - RNA, 27 nt, Human
agacaagacacagaaaaagccuuucgg

SEQ ID NO: 705127 - RNA, 22 nt, Human
agagguugcagugagcugagau

SEQ ID NO: 705128 - RNA, 24 nt, Human
agagguugcagugagcugagauug

SEQ ID NO: 705129 - RNA, 23 nt, Human
agauuagguuggcgcacucugcu

SEQ ID NO: 705130 - RNA, 25 nt, Human
agcaaggggcaugagaugucccuuc

SEQ ID NO: 705131 - RNA, 23 nt, Human
agccgggcaugguggcgugugcc

SEQ ID NO: 705132 - RNA, 23 nt, Human
agccuggccaauauggugaaacc

SEQ ID NO: 705133 - RNA, 23 nt, Human
agccuggccaauauggugaaacc

SEQ ID NO: 705134 - RNA, 24 nt, Human
agccuggccaauauggugaaaccu

SEQ ID NO: 705135 - RNA, 21 nt, Human
agccuggugacagagcaagac

SEQ ID NO: 705136 - RNA, 23 nt, Human
agccuggugacagagcaagacuc

SEQ ID NO: 705137 - RNA, 19 nt, Human
agcgcucagcuccggggga

SEQ ID NO: 705138 - RNA, 20 nt, Human
agcuccgaaaaucacagaca

SEQ ID NO: 705139 - RNA, 18 nt, Human
aggaaggugugaguggug

SEQ ID NO: 705140 - RNA, 21 nt, Human
aggacagcacuuucaggcucu

SEQ ID NO: 705141 - RNA, 20 nt, Human
aggcagagguugcagugagc

SEQ ID NO: 705142 - RNA, 24 nt, Human
aggcagagguugcagugagcugag

SEQ ID NO: 705143 - RNA, 24 nt, Human
aggccaacaagggacauaucagaa

SEQ ID NO: 705144 - RNA, 23 nt, Human
aggccaaggcgggcagaucacga

SEQ ID NO: 705145 - RNA, 18 nt, Human
aggcgggcagaucacgag

SEQ ID NO: 705146 - RNA, 24 nt, Human
aggcgggcagaucacgaggucaag

SEQ ID NO: 705147 - RNA, 21 nt, Human
aggggguuccugaauggaacc

SEQ ID NO: 705148 - RNA, 20 nt, Human
agguaucauagaaaacacaa

SEQ ID NO: 705149 - RNA, 24 nt, Human
aguggcucacggcuguaaucccag

SEQ ID NO: 705150 - RNA, 19 nt, Human
auggagaaaaaaggaagaa

SEQ ID NO: 705151 - RNA, 24 nt, Human
auugcgccgcugcacuccagccug

SEQ ID NO: 705152 - RNA, 23 nt, Human
caagaagaagaaaagacagacaa

SEQ ID NO: 705153 - RNA, 24 nt, Human
caagaccagccuggccaauauggu

SEQ ID NO: 705154 - RNA, 24 nt, Human
caaggcgggcagaucacgagguca

SEQ ID NO: 705155 - RNA, 24 nt, Human
caauauggugaaaccuugucucua

SEQ ID NO: 705156 - RNA, 19 nt, Human
caccaggaccccauggacu

SEQ ID NO: 705157 - RNA, 18 nt, Human
cacccuggcuucaaggcu

SEQ ID NO: 705158 - RNA, 22 nt, Human
cacccuggcuucaaggcucauc

SEQ ID NO: 705159 - RNA, 24 nt, Human
cacggcuguaaucccagcacuuug

SEQ ID NO: 705160 - RNA, 22 nt, Human
cacuccagccuggugacagagc

SEQ ID NO: 705161 - RNA, 19 nt, Human
cacugccccaacugcccug

SEQ ID NO: 705162 - RNA, 27 nt, Human
cagacaagacacagaaaaagaaaggaa

SEQ ID NO: 705163 - RNA, 19 nt, Human
cagaucacgaggucaagag

SEQ ID NO: 705164 - RNA, 24 nt, Human
cagcacuuugggaggccaaggcgg

SEQ ID NO: 705165 - RNA, 20 nt, Human
cagcagcaguggcagaugcc

SEQ ID NO: 705166 - RNA, 21 nt, Human
cagcagcaguggcagaugccu

SEQ ID NO: 705167 - RNA, 23 nt, Human
cagcaguggcagaugccuuggcc

SEQ ID NO: 705168 - RNA, 21 nt, Human
caggagaacccaggaggcaga

SEQ ID NO: 705169 - RNA, 20 nt, Human
caggcagaccuccccugagg

SEQ ID NO: 705170 - RNA, 20 nt, Human
caucacagcagcuaguuucc

SEQ ID NO: 705171 - RNA, 19 nt, Human
caugacuagccacucccug

SEQ ID NO: 705172 - RNA, 21 nt, Human
ccacaccccagggcccagcga

SEQ ID NO: 705173 - RNA, 22 nt, Human
ccaggaggcagagguugcagug

SEQ ID NO: 705174 - RNA, 22 nt, Human
ccaguguccccggggucugggu

SEQ ID NO: 705175 - RNA, 22 nt, Human
cccaagauccccuccaccagga

SEQ ID NO: 705176 - RNA, 19 nt, Human
ccccaugacaucauccccc

SEQ ID NO: 705177 - RNA, 19 nt, Human
ccccauggacuaaugcagg

SEQ ID NO: 705178 - RNA, 20 nt, Human
cccccagcuccgaaaaucac

SEQ ID NO: 705179 - RNA, 20 nt, Human
cccggcacccuggcuucaag

SEQ ID NO: 705180 - RNA, 21 nt, Human
cccuaaauggcccugagaccc

SEQ ID NO: 705181 - RNA, 19 nt, Human
ccgcugcacuccagccugg

SEQ ID NO: 705182 - RNA, 20 nt, Human
ccgcugcacuccagccuggu

SEQ ID NO: 705183 - RNA, 23 nt, Human
ccgcugcacuccagccuggugac

SEQ ID NO: 705184 - RNA, 18 nt, Human
ccucccggcacccuggcu

SEQ ID NO: 705185 - RNA, 21 nt, Human
ccuggccaauauggugaaacc

SEQ ID NO: 705186 - RNA, 24 nt, Human
ccuggccaauauggugaaaccuug

SEQ ID NO: 705187 - RNA, 21 nt, Human
ccuggugacagagcaagacuc

SEQ ID NO: 705188 - RNA, 19 nt, Human
ccuguaaucccagcuacuc

SEQ ID NO: 705189 - RNA, 21 nt, Human
ccuguaaucccagcuacucgg

SEQ ID NO: 705190 - RNA, 19 nt, Human
ccuuccaagugugggcaga

SEQ ID NO: 705191 - RNA, 18 nt, Human
cgccgcugcacuccagcc

SEQ ID NO: 705192 - RNA, 20 nt, Human
cgcugcacuccagccuggug

SEQ ID NO: 705193 - RNA, 22 nt, Human
cgcugcacuccagccuggugac

SEQ ID NO: 705194 - RNA, 18 nt, Human
cggcugguaguggcaguc

SEQ ID NO: 705195 - RNA, 23 nt, Human
cggcuguaaucccagcacuuugg

SEQ ID NO: 705196 - RNA, 24 nt, Human
cggcuguaaucccagcacuuuggg

SEQ ID NO: 705197 - RNA, 22 nt, Human
cgggcagaucacgaggucaaga

SEQ ID NO: 705198 - RNA, 24 nt, Human
cgggugccccuccuguggggccuc

SEQ ID NO: 705199 - RNA, 24 nt, Human
cucacggcuguaaucccagcacuu

SEQ ID NO: 705200 - RNA, 24 nt, Human
cucagcuccgggggauacaggaag

SEQ ID NO: 705201 - RNA, 19 nt, Human
cucugcucaggacugagag

SEQ ID NO: 705202 - RNA, 21 nt, Human
cugcacuccagccuggugaca

SEQ ID NO: 705203 - RNA, 21 nt, Human
cugcacuccagccuggugaca

SEQ ID NO: 705204 - RNA, 22 nt, Human
cugcacuccagccuggugacag

SEQ ID NO: 705205 - RNA, 24 nt, Human
cugcacuccagccuggugacagag

SEQ ID NO: 705206 - RNA, 20 nt, Human
cugccuuacgagaccccuac

SEQ ID NO: 705207 - RNA, 20 nt, Human
cugcucaggacugagagcaa

SEQ ID NO: 705208 - RNA, 21 nt, Human
cuggcaucuaccgggugcccc

SEQ ID NO: 705209 - RNA, 21 nt, Human
cuggcaucuaccgggugcccc

SEQ ID NO: 705210 - RNA, 24 nt, Human
cuggccaauauggugaaaccuugu

SEQ ID NO: 705211 - RNA, 23 nt, Human
cuggcuucaaggcucaucuucag

SEQ ID NO: 705212 - RNA, 19 nt, Human
cugggccuacggggagcca

SEQ ID NO: 705213 - RNA, 18 nt, Human
cugguaguggcagucagc

SEQ ID NO: 705214 - RNA, 18 nt, Human
cuuacaacgccuccucag

SEQ ID NO: 705215 - RNA, 19 nt, Human
cuuacgagaccccuaccca

SEQ ID NO: 705216 - RNA, 19 nt, Human
gaaaccuugucucuacuaa

SEQ ID NO: 705217 - RNA, 23 nt, Human
gaacaggaaugaacccaaccaga

SEQ ID NO: 705218 - RNA, 22 nt, Human
gaacuggaggacugcucccccu

SEQ ID NO: 705219 - RNA, 24 nt, Human
gacagagcaagacuccgucucgag

SEQ ID NO: 705220 - RNA, 18 nt, Human
gacagcacuuucaggcuc

SEQ ID NO: 705221 - RNA, 23 nt, Human
gagauugcgccgcugcacuccag

SEQ ID NO: 705222 - RNA, 18 nt, Human
gagccaggggccuuggaa

SEQ ID NO: 705223 - RNA, 24 nt, Human
gaucacgaggucaagaguucaaga

SEQ ID NO: 705224 - RNA, 23 nt, Human
gcacuccagccuggugacagagc

SEQ ID NO: 705225 - RNA, 24 nt, Human
gccaauauggugaaaccuugucuc

SEQ ID NO: 705226 - RNA, 18 nt, Human
gcccacugccccaacugc

SEQ ID NO: 705227 - RNA, 22 nt, Human
gcgugugccuguaaucccagcu

SEQ ID NO: 705228 - RNA, 23 nt, Human
gcugcacuccagccuggugacag

SEQ ID NO: 705229 - RNA, 19 nt, Human
gcugggugcaguggcucac

SEQ ID NO: 705230 - RNA, 24 nt, Human
gcuugggguccccaugacaucauc

SEQ ID NO: 705231 - RNA, 21 nt, Human
ggacaaagucuugguucccuu

SEQ ID NO: 705232 - RNA, 22 nt, Human
ggaggcagagguugcagugagc

SEQ ID NO: 705233 - RNA, 24 nt, Human
ggauuggggcugggugcaguggcu

SEQ ID NO: 705234 - RNA, 19 nt, Human
ggcacccuggcuucaaggc

SEQ ID NO: 705235 - RNA, 18 nt, Human
ggcccccaguccccagca

SEQ ID NO: 705236 - RNA, 18 nt, Human
ggccguggcugauggcug

SEQ ID NO: 705237 - RNA, 24 nt, Human
gggcagaucacgaggucaagaguu

SEQ ID NO: 705238 - RNA, 18 nt, Human
gggcaugguggcgugugc

SEQ ID NO: 705239 - RNA, 24 nt, Human
gggcaugguggcgugugccuguaa

SEQ ID NO: 705240 - RNA, 23 nt, Human
gggcucuuucaggcaucccaccc

SEQ ID NO: 705241 - RNA, 21 nt, Human
ggggcugggugcaguggcuca

SEQ ID NO: 705242 - RNA, 18 nt, Human
ggggguggucagggcaga

SEQ ID NO: 705243 - RNA, 23 nt, Human
gggugccccuccuguggggccuc

SEQ ID NO: 705244 - RNA, 18 nt, Human
ggugcaguggcucacggc

SEQ ID NO: 705245 - RNA, 19 nt, Human
ggugcaguggcucacggcu

SEQ ID NO: 705246 - RNA, 23 nt, Human
ggugcaguggcucacggcuguaa

SEQ ID NO: 705247 - RNA, 24 nt, Human
gguggcgugugccuguaaucccag

SEQ ID NO: 705248 - RNA, 19 nt, Human
guccccaugacaucauccc

SEQ ID NO: 705249 - RNA, 21 nt, Human
gugagagcacagcaagugggg

SEQ ID NO: 705250 - RNA, 22 nt, Human
gugaggcaggagaacccaggag

SEQ ID NO: 705251 - RNA, 22 nt, Human
guggaaggaaagccaaggaagg

SEQ ID NO: 705252 - RNA, 23 nt, Human
guggcgugugccuguaaucccag

SEQ ID NO: 705253 - RNA, 19 nt, Human
guugcagugagcugagauu

SEQ ID NO: 705254 - RNA, 21 nt, Human
guugcagugagcugagauugc

SEQ ID NO: 705255 - RNA, 21 nt, Human
uaagcuagcugagggccccca

SEQ ID NO: 705256 - RNA, 22 nt, Human
uagccgggcaugguggcgugug

SEQ ID NO: 705257 - RNA, 23 nt, Human
uauaaaaagaaaagcuuaacgcc

SEQ ID NO: 705258 - RNA, 23 nt, Human
ucacaccggagucuccuggcugc

SEQ ID NO: 705259 - RNA, 22 nt, Human
ucaccugaggauuucacuggca

SEQ ID NO: 705260 - RNA, 24 nt, Human
ucacgaggucaagaguucaagacc

SEQ ID NO: 705261 - RNA, 21 nt, Human
ucaggcucuggggcauggaga

SEQ ID NO: 705262 - RNA, 18 nt, Human
ucaugugcaguagaguga

SEQ ID NO: 705263 - RNA, 19 nt, Human
uccccagauuggaaucgug

SEQ ID NO: 705264 - RNA, 20 nt, Human
uccccggggucuggguguca

SEQ ID NO: 705265 - RNA, 22 nt, Human
ucccuucgcauugagugagagc

SEQ ID NO: 705266 - RNA, 23 nt, Human
uccugggccuacggggagccagg

SEQ ID NO: 705267 - RNA, 21 nt, Human
ucucuacuaagaauacaaaaa

SEQ ID NO: 705268 - RNA, 25 nt, Human
ugaacccaaccagaugagaucacag

SEQ ID NO: 705269 - RNA, 19 nt, Human
ugacaucauccccccucuu

SEQ ID NO: 705270 - RNA, 18 nt, Human
ugagaugucccuuccucc

SEQ ID NO: 705271 - RNA, 19 nt, Human
ugaguggugaguggcccgu

SEQ ID NO: 705272 - RNA, 19 nt, Human
ugcccaagauccccuccac

SEQ ID NO: 705273 - RNA, 21 nt, Human
ugcccaggccaacaagggaca

SEQ ID NO: 705274 - RNA, 20 nt, Human
ugccccaacugcccuggcga

SEQ ID NO: 705275 - RNA, 23 nt, Human
ugccccaacugcccuggcgaugc

SEQ ID NO: 705276 - RNA, 24 nt, Human
ugccuguaaucccagcuacucggg

SEQ ID NO: 705277 - RNA, 24 nt, Human
uggccaauauggugaaaccuuguc

SEQ ID NO: 705278 - RNA, 21 nt, Human
uggcgugugccuguaauccca

SEQ ID NO: 705279 - RNA, 22 nt, Human
uggcgugugccuguaaucccag

SEQ ID NO: 705280 - RNA, 24 nt, Human
uggcgugugccuguaaucccagcu

SEQ ID NO: 705281 - RNA, 22 nt, Human
uggcucacggcuguaaucccag

SEQ ID NO: 705282 - RNA, 24 nt, Human
uggcucacggcuguaaucccagca

SEQ ID NO: 705283 - RNA, 24 nt, Human
ugggaggccaaggcgggcagauca

SEQ ID NO: 705284 - RNA, 19 nt, Human
ugggcacagaggggguugg

SEQ ID NO: 705285 - RNA, 19 nt, Human
ugggcacagaggggguugg

SEQ ID NO: 705286 - RNA, 19 nt, Human
uggggcugggugcaguggc

SEQ ID NO: 705287 - RNA, 24 nt, Human
ugguggcgugugccuguaauccca

SEQ ID NO: 705288 - RNA, 22 nt, Human
ugugagagaagaagcagggugu

SEQ ID NO: 705289 - RNA, 24 nt, Human
ugugggcagagagcccacugcccc

SEQ ID NO: 705290 - RNA, 24 nt, Human
uuagccgggcaugguggcgugugc

SEQ ID NO: 705291 - RNA, 22 nt, Human
uugcagugagcugagauugcgc

SEQ ID NO: 705292 - RNA, 23 nt, Human
uugcgccgcugcacuccagccug

SEQ ID NO: 705293 - RNA, 23 nt, Human
uuuuuuuuuuuuuuuuuuugggu

SEQ ID NO: 705294 - RNA, 24 nt, Human
uuuuuuuuuuuuuuuuuuuuuggg

SEQ ID NO: 705295 - RNA, 21 nt, Human
aaaaugccuaagcagagcugg

SEQ ID NO: 705296 - RNA, 23 nt, Human
aagcagagcuggagggaggcaaa

SEQ ID NO: 705297 - RNA, 18 nt, Human
aaugggacuggugagggu

SEQ ID NO: 705298 - RNA, 20 nt, Human
aaugggacuggugagggucg

SEQ ID NO: 705299 - RNA, 22 nt, Human
acacuuggguucugaguucaag

SEQ ID NO: 705300 - RNA, 22 nt, Human
agggaggcaaaugggacuggug

SEQ ID NO: 705301 - RNA, 19 nt, Human
aggggcaaaaugccuaagc

SEQ ID NO: 705302 - RNA, 18 nt, Human
agguucaaggcuggggaa

SEQ ID NO: 705303 - RNA, 26 nt, Human
aguuuuggggcuggauguagguggcu

SEQ ID NO: 705304 - RNA, 20 nt, Human
auccacacaggggcauggaa

SEQ ID NO: 705305 - RNA, 18 nt, Human
caccucaccccuugguug

SEQ ID NO: 705306 - RNA, 20 nt, Human
ccauucccugcugaggccug

SEQ ID NO: 705307 - RNA, 22 nt, Human
ccccauucccugcugaggccug

SEQ ID NO: 705308 - RNA, 18 nt, Human
cgggaucaccuggaccag

SEQ ID NO: 705309 - RNA, 20 nt, Human
cuaagcagagcuggagggag

SEQ ID NO: 705310 - RNA, 19 nt, Human
cugcugaggccugucccca

SEQ ID NO: 705311 - RNA, 18 nt, Human
cuggaccagggguccaac

SEQ ID NO: 705312 - RNA, 21 nt, Human
cuguccccaccucaccccuug

SEQ ID NO: 705313 - RNA, 19 nt, Human
cuugaccuggguuggaagg

SEQ ID NO: 705314 - RNA, 23 nt, Human
gaucaccuggaccagggguccaa

SEQ ID NO: 705315 - RNA, 24 nt, Human
gaugggagugucucuggguucaca

SEQ ID NO: 705316 - RNA, 20 nt, Human
gauuuggcaaugucuugacc

SEQ ID NO: 705317 - RNA, 21 nt, Human
gcaaaugggacuggugagggu

SEQ ID NO: 705318 - RNA, 19 nt, Human
gggcuggcguggggguagg

SEQ ID NO: 705319 - RNA, 22 nt, Human
gggguggggugguauucuccag

SEQ ID NO: 705320 - RNA, 24 nt, Human
gggucgggaucaccuggaccaggg

SEQ ID NO: 705321 - RNA, 25 nt, Human
gguaaugggggcugggugugaggga

SEQ ID NO: 705322 - RNA, 20 nt, Human
gugagggucgggaucaccug

SEQ ID NO: 705323 - RNA, 18 nt, Human
gugguauucuccaggucc

SEQ ID NO: 705324 - RNA, 22 nt, Human
uaacauauacgccccauucccu

SEQ ID NO: 705325 - RNA, 23 nt, Human
uaggcuccuguuuuaagugcugg

SEQ ID NO: 705326 - RNA, 20 nt, Human
uccacacaggggcauggaac

SEQ ID NO: 705327 - RNA, 23 nt, Human
uccccaccucaccccuugguugu

SEQ ID NO: 705328 - RNA, 20 nt, Human
ucccuagguaaugggggcug

SEQ ID NO: 705329 - RNA, 24 nt, Human
ucccugcugaggccuguccccacc

SEQ ID NO: 705330 - RNA, 23 nt, Human
uccuggguacagaucccaggggc

SEQ ID NO: 705331 - RNA, 23 nt, Human
ugaagccccaguuuuggggcugg

SEQ ID NO: 705332 - RNA, 24 nt, Human
ugaguucaagauuuggcaaugucu

SEQ ID NO: 705333 - RNA, 18 nt, Human
ugccuaagcagagcugga

SEQ ID NO: 705334 - RNA, 25 nt, Human
ugccuaagcagagcuggagggaggc

SEQ ID NO: 705335 - RNA, 20 nt, Human
ugccuugcuccaggccccag

SEQ ID NO: 705336 - RNA, 18 nt, Human
uggagggaggcaaauggg

SEQ ID NO: 705337 - RNA, 22 nt, Human
uggauguagguggcucuugguc

SEQ ID NO: 705338 - RNA, 22 nt, Human
ugggaaagggcucuggguccca

SEQ ID NO: 705339 - RNA, 23 nt, Human
ugggaaagggcucugggucccaa

SEQ ID NO: 705340 - RNA, 24 nt, Human
ugggcuggggguggggugguauuc

SEQ ID NO: 705341 - RNA, 20 nt, Human
uggggcuggauguagguggc

SEQ ID NO: 705342 - RNA, 22 nt, Human
uggggcuggcguggggguaggg

SEQ ID NO: 705343 - RNA, 18 nt, Human
uggguucacaauuugaaa

SEQ ID NO: 705344 - RNA, 26 nt, Human
uguagguggcucuuggucccgaccac

SEQ ID NO: 705345 - RNA, 23 nt, Human
uuaugggcugggggugggguggu

SEQ ID NO: 705346 - RNA, 21 nt, Human
uugguccuagguucaaggcug

SEQ ID NO: 705347 - RNA, 20 nt, Human
uuugguccaggguucaagau

SEQ ID NO: 705348 - RNA, 19 nt, Human
aagugcuggggggaaguga

SEQ ID NO: 705349 - RNA, 22 nt, Human
aagugcuggggggaagugagcu

SEQ ID NO: 705350 - RNA, 20 nt, Human
aggucccuagcacagccccc

SEQ ID NO: 705351 - RNA, 25 nt, Human
cagcuuccugccgccuucaccggaa

SEQ ID NO: 705352 - RNA, 22 nt, Human
caggauuguuccuccugggauc

SEQ ID NO: 705353 - RNA, 19 nt, Human
caggucccuagcacagccc

SEQ ID NO: 705354 - RNA, 18 nt, Human
caucaagaagugcugggg

SEQ ID NO: 705355 - RNA, 19 nt, Human
ccaaggcucagcucugcag

SEQ ID NO: 705356 - RNA, 22 nt, Human
ccaaggcucagcucugcaguuc

SEQ ID NO: 705357 - RNA, 21 nt, Human
ccacugcaggucccuagcaca

SEQ ID NO: 705358 - RNA, 18 nt, Human
ccacugccaaggcucagc

SEQ ID NO: 705359 - RNA, 18 nt, Human
cccgguuuucugaccucc

SEQ ID NO: 705360 - RNA, 21 nt, Human
ccgccuucaccggccugaccu

SEQ ID NO: 705361 - RNA, 20 nt, Human
ccuccgcgugucccugaccc

SEQ ID NO: 705362 - RNA, 20 nt, Human
ccuccugggaucgugcucca

SEQ ID NO: 705363 - RNA, 18 nt, Human
ccugacccgggccccagc

SEQ ID NO: 705364 - RNA, 23 nt, Human
ccugaccuccgcgugucccugac

SEQ ID NO: 705365 - RNA, 26 nt, Human
cuuccugccgccuucaccggccugac

SEQ ID NO: 705366 - RNA, 19 nt, Human
gaaagugggcaccagcccc

SEQ ID NO: 705367 - RNA, 21 nt, Human
gccccacugccaaggcucagc

SEQ ID NO: 705368 - RNA, 20 nt, Human
gcucugcaguucugccacug

SEQ ID NO: 705369 - RNA, 21 nt, Human
gucccuggcaauuuccuccag

SEQ ID NO: 705370 - RNA, 25 nt, Human
uauucaucacaucggagaucaucuc

SEQ ID NO: 705371 - RNA, 18 nt, Human
ucccaaggggucgcugcc

SEQ ID NO: 705372 - RNA, 22 nt, Human
ucccuagcacagcccccagggu

SEQ ID NO: 705373 - RNA, 18 nt, Human
uccugccgccuucaccgg

SEQ ID NO: 705374 - RNA, 21 nt, Human
ucugcaguucugccacugcag

SEQ ID NO: 705375 - RNA, 24 nt, Human
ucugggucccuggcaauuuccucc

SEQ ID NO: 705376 - RNA, 21 nt, Human
ugcugaguggaaagugggcac

SEQ ID NO: 705377 - RNA, 19 nt, Human
uggcuuccaagcacgcccc

SEQ ID NO: 705378 - RNA, 19 nt, Human
ugggucccuggcaauuucc

SEQ ID NO: 705379 - RNA, 22 nt, Human
uuaaaaaauccccagguuggau

SEQ ID NO: 705380 - RNA, 21 nt, Human
uuccugccgccuucaccggcc

SEQ ID NO: 705381 - RNA, 19 nt, Human
uuuauucguauucaucaca

SEQ ID NO: 705382 - RNA, 21 nt, Human
aaaaucagaagcagcacauca

SEQ ID NO: 705383 - RNA, 22 nt, Human
aaaaugcacauucauuuccuuc

SEQ ID NO: 705384 - RNA, 24 nt, Human
aaacacacgugaaacuucagacac

SEQ ID NO: 705385 - RNA, 25 nt, Human
aacacauuacuagcauuucaaaaau

SEQ ID NO: 705386 - RNA, 25 nt, Human
aaugauuuuuuuuuuuccuauaaga

SEQ ID NO: 705387 - RNA, 21 nt, Human
accaguuuccacugcacauca

SEQ ID NO: 705388 - RNA, 21 nt, Human
agaacauaggucuggacaagg

SEQ ID NO: 705389 - RNA, 22 nt, Human
agaacauaggucuggacaaggg

SEQ ID NO: 705390 - RNA, 24 nt, Human
agaaucuggcggcggcggcggcgg

SEQ ID NO: 705391 - RNA, 20 nt, Human
agaucauggcuguagguugg

SEQ ID NO: 705392 - RNA, 18 nt, Human
aucaaacagguggcaaag

SEQ ID NO: 705393 - RNA, 20 nt, Human
auuuuuuuuuuuccuauaag

SEQ ID NO: 705394 - RNA, 19 nt, Human
caaaaacgcaagcagaaca

SEQ ID NO: 705395 - RNA, 21 nt, Human
caaaaacgcaagcagaacaua

SEQ ID NO: 705396 - RNA, 23 nt, Human
caagaaaaaucagaagcagcaca

SEQ ID NO: 705397 - RNA, 18 nt, Human
caagggcaagcugcaacu

SEQ ID NO: 705398 - RNA, 24 nt, Human
caaguuuuguuuuauuuuuugucu

SEQ ID NO: 705399 - RNA, 21 nt, Human
cacaauuuaaugcuacagaaa

SEQ ID NO: 705400 - RNA, 21 nt, Human
cacacgugaaacuucagacac

SEQ ID NO: 705401 - RNA, 21 nt, Human
cagaacauaggucuggacaag

SEQ ID NO: 705402 - RNA, 20 nt, Human
caggcuaacacaugauguca

SEQ ID NO: 705403 - RNA, 23 nt, Human
caucuacuuuaacagccuuuuca

SEQ ID NO: 705404 - RNA, 19 nt, Human
caucuuugauuuuuaagag

SEQ ID NO: 705405 - RNA, 21 nt, Human
ccacugcacaucaaacaggug

SEQ ID NO: 705406 - RNA, 23 nt, Human
ccacugcacaucaaacagguggc

SEQ ID NO: 705407 - RNA, 27 nt, Human
ccaguuaaaaacgaaacaaugcaaaaa

SEQ ID NO: 705408 - RNA, 22 nt, Human
ccuauacaugcaugcugccaua

SEQ ID NO: 705409 - RNA, 25 nt, Human
ccuccagaaucuggcggcggcggcg

SEQ ID NO: 705410 - RNA, 27 nt, Human
ccuccuguuucaaaaacgcaagcagaa

SEQ ID NO: 705411 - RNA, 20 nt, Human
gcggcggcaaccgaucagcu

SEQ ID NO: 705412 - RNA, 21 nt, Human
ggacauacagagaguuucuuc

SEQ ID NO: 705413 - RNA, 21 nt, Human
ggaggguggugguuuucuuuc

SEQ ID NO: 705414 - RNA, 22 nt, Human
ggcggcggcggcggcggcaacc

SEQ ID NO: 705415 - RNA, 23 nt, Human
uaaaaugcacauucauuuccuuu

SEQ ID NO: 705416 - RNA, 18 nt, Human
uaaagaucauggcuguag

SEQ ID NO: 705417 - RNA, 21 nt, Human
uaaccaguuuccacugcacau

SEQ ID NO: 705418 - RNA, 23 nt, Human
uacaaaaauguaacaaaauaucc

SEQ ID NO: 705419 - RNA, 21 nt, Human
uaugaacaacuggcuuaacca

SEQ ID NO: 705420 - RNA, 18 nt, Human
ucauauguggguaagggu

SEQ ID NO: 705421 - RNA, 23 nt, Human
ucaucuaaagacguuuuucaaau

SEQ ID NO: 705422 - RNA, 23 nt, Human
ucugaggucuucucucugaaaca

SEQ ID NO: 705423 - RNA, 22 nt, Human
ugaggucuucucucugaaacau

SEQ ID NO: 705424 - RNA, 21 nt, Human
ugcaacaaauacuugcuggug

SEQ ID NO: 705425 - RNA, 24 nt, Human
ugcaacaaauacuugcuggugaaa

SEQ ID NO: 705426 - RNA, 18 nt, Human
ugcuaaagaucauggcug

SEQ ID NO: 705427 - RNA, 18 nt, Human
uggcggcggcggcggcgg

SEQ ID NO: 705428 - RNA, 20 nt, Human
uggcggcggcggcggcggca

SEQ ID NO: 705429 - RNA, 20 nt, Human
ugucugugaagucaugguga

SEQ ID NO: 705430 - RNA, 22 nt, Human
uguggguaaggguacagauucu

SEQ ID NO: 705431 - RNA, 24 nt, Human
uguuucaaaaacgcaagcagaaca

SEQ ID NO: 705432 - RNA, 23 nt, Human
uuaaaaugcaagaaaaaucagaa

SEQ ID NO: 705433 - RNA, 23 nt, Human
uucaauuggcaggcaaaacauuu

SEQ ID NO: 705434 - RNA, 19 nt, Human
uucacaauuuaaugcuaca

SEQ ID NO: 705435 - RNA, 21 nt, Human
uuuauuuuuuuuaauucccuu

SEQ ID NO: 705436 - RNA, 22 nt, Human
uuuuuauuagcugcaguagcug

SEQ ID NO: 705437 - RNA, 23 nt, Human
aaccaagaagcccugaagaccgg

SEQ ID NO: 705438 - RNA, 21 nt, Human
aagaagcccugaagaccggug

SEQ ID NO: 705439 - RNA, 23 nt, Human
aagcccugaagaccggugcacuu

SEQ ID NO: 705440 - RNA, 18 nt, Human
acccagaaccaguucccc

SEQ ID NO: 705441 - RNA, 22 nt, Human
acccagaaccaguucccccacc

SEQ ID NO: 705442 - RNA, 22 nt, Human
acuuugagauaugauggaaaaa

SEQ ID NO: 705443 - RNA, 21 nt, Human
agaaccaguucccccaccaaa

SEQ ID NO: 705444 - RNA, 24 nt, Human
augauggaaaaauauuacagguac

SEQ ID NO: 705445 - RNA, 21 nt, Human
caagugaaaacaaucuaacca

SEQ ID NO: 705446 - RNA, 21 nt, Human
caccaaagcuguggaaaacca

SEQ ID NO: 705447 - RNA, 18 nt, Human
cagaaccaguucccccac

SEQ ID NO: 705448 - RNA, 20 nt, Human
cagaaccaguucccccacca

SEQ ID NO: 705449 - RNA, 19 nt, Human
caucuccucccccaauggu

SEQ ID NO: 705450 - RNA, 23 nt, Human
ccaaagcuguggaaaaccaagaa

SEQ ID NO: 705451 - RNA, 19 nt, Human
ccaaugguguagugcccuc

SEQ ID NO: 705452 - RNA, 21 nt, Human
cccagaaccaguucccccacc

SEQ ID NO: 705453 - RNA, 23 nt, Human
ccccaccaaagcuguggaaaacc

SEQ ID NO: 705454 - RNA, 18 nt, Human
cuguggaaaaccaagaag

SEQ ID NO: 705455 - RNA, 19 nt, Human
gaagaagguguugaaggag

SEQ ID NO: 705456 - RNA, 21 nt, Human
gugaacccagaaccaguuccc

SEQ ID NO: 705457 - RNA, 23 nt, Human
guuccaggcaguagagcucccag

SEQ ID NO: 705458 - RNA, 21 nt, Human
uaaccagaaagcuuuaacguc

SEQ ID NO: 705459 - RNA, 19 nt, Human
uauuacagguacacaugga

SEQ ID NO: 705460 - RNA, 22 nt, Human
ucccccaauggucuugucacuu

SEQ ID NO: 705461 - RNA, 18 nt, Human
uccccgacaagcuaagag

SEQ ID NO: 705462 - RNA, 19 nt, Human
ucuuccuugccugugauga

SEQ ID NO: 705463 - RNA, 19 nt, Human
ugaacccagaaccaguucc

SEQ ID NO: 705464 - RNA, 19 nt, Human
ugaagaccggugcacuggu

SEQ ID NO: 705465 - RNA, 18 nt, Human
ugccugugaugagcugcu

SEQ ID NO: 705466 - RNA, 19 nt, Human
ugccugugaugagcugcuc

SEQ ID NO: 705467 - RNA, 21 nt, Human
uggaaaaauauuacagguaca

SEQ ID NO: 705468 - RNA, 24 nt, Human
uggaaaagacaugaucaccaagug

SEQ ID NO: 705469 - RNA, 21 nt, Human
uggagaugcaucaccauagug

SEQ ID NO: 705470 - RNA, 20 nt, Human
ugugaugagcugcucagggu

SEQ ID NO: 705471 - RNA, 22 nt, Human
uguggaaaaccaagaagcccug

SEQ ID NO: 705472 - RNA, 20 nt, Human
uugccugugaugagcugcuc

SEQ ID NO: 705473 - RNA, 21 nt, Human
aaggagagaggaaggaggagg

SEQ ID NO: 705474 - RNA, 19 nt, Human
accuuacaaggagagagga

SEQ ID NO: 705475 - RNA, 18 nt, Human
acuccccagccucugcau

SEQ ID NO: 705476 - RNA, 20 nt, Human
agacuccccagccucugcau

SEQ ID NO: 705477 - RNA, 18 nt, Human
agagaggaaggaggagga

SEQ ID NO: 705478 - RNA, 24 nt, Human
agagaggaaggaggaggacccugg

SEQ ID NO: 705479 - RNA, 23 nt, Human
agccuuaggagagagcaggcuuu

SEQ ID NO: 705480 - RNA, 20 nt, Human
aggcaggguagagggagcca

SEQ ID NO: 705481 - RNA, 22 nt, Human
aggcucccagcagcacaggugc

SEQ ID NO: 705482 - RNA, 22 nt, Human
aggcuggcuuaggccugggaau

SEQ ID NO: 705483 - RNA, 19 nt, Human
agggagggagguggagcug

SEQ ID NO: 705484 - RNA, 22 nt, Human
agggagguggagcuggaggagg

SEQ ID NO: 705485 - RNA, 22 nt, Human
caaggcaggguagagggagcca

SEQ ID NO: 705486 - RNA, 21 nt, Human
cagcaggccacuuauaaacac

SEQ ID NO: 705487 - RNA, 23 nt, Human
caggccucaaggcaggguagagg

SEQ ID NO: 705488 - RNA, 21 nt, Human
caggguagagggagccauggg

SEQ ID NO: 705489 - RNA, 23 nt, Human
caggugggugacaaccuggcauu

SEQ ID NO: 705490 - RNA, 19 nt, Human
caggugugacugcaaacag

SEQ ID NO: 705491 - RNA, 22 nt, Human
ccacuuauaaacacuaugagac

SEQ ID NO: 705492 - RNA, 18 nt, Human
ccagcugcccgggccucg

SEQ ID NO: 705493 - RNA, 18 nt, Human
ccagggagggaacagagg

SEQ ID NO: 705494 - RNA, 23 nt, Human
ccucgcaagauaggcugaaugag

SEQ ID NO: 705495 - RNA, 23 nt, Human
ccuuaggagagagcaggcuuugg

SEQ ID NO: 705496 - RNA, 22 nt, Human
cugcaaacaggccucaaggcag

SEQ ID NO: 705497 - RNA, 23 nt, Human
gagaggaaggaggaggacccugg

SEQ ID NO: 705498 - RNA, 19 nt, Human
gagggagguggagcuggag

SEQ ID NO: 705499 - RNA, 20 nt, Human
gcaggccacuuauaaacacu

SEQ ID NO: 705500 - RNA, 20 nt, Human
ggagagaggaaggaggagga

SEQ ID NO: 705501 - RNA, 20 nt, Human
ggagcacucacucccagcag

SEQ ID NO: 705502 - RNA, 23 nt, Human
ggagcuggaggaggacuuuccag

SEQ ID NO: 705503 - RNA, 23 nt, Human
ggagggagggagggagguggagc

SEQ ID NO: 705504 - RNA, 22 nt, Human
ggagggagguggagcuggagga

SEQ ID NO: 705505 - RNA, 20 nt, Human
gggagggagggagguggagc

SEQ ID NO: 705506 - RNA, 26 nt, Human
gugcugcuggcagucugggcacuguc

SEQ ID NO: 705507 - RNA, 24 nt, Human
guggagcuggaggaggacuuucca

SEQ ID NO: 705508 - RNA, 20 nt, Human
uacuccaggcucccagcagc

SEQ ID NO: 705509 - RNA, 22 nt, Human
uccagcugcccgggccucgcaa

SEQ ID NO: 705510 - RNA, 21 nt, Human
uccagggagggaacagaggga

SEQ ID NO: 705511 - RNA, 20 nt, Human
ucuggagggagggagggagg

SEQ ID NO: 705512 - RNA, 21 nt, Human
ugcaaacaggccucaaggcag

SEQ ID NO: 705513 - RNA, 23 nt, Human
ugcugcuggcagucugggcacug

SEQ ID NO: 705514 - RNA, 27 nt, Human
uggaggaggacuuuccagcugcccggg

SEQ ID NO: 705515 - RNA, 23 nt, Human
uggagggagggagggagguggag

SEQ ID NO: 705516 - RNA, 18 nt, Human
ugucaggagggagaggcu

SEQ ID NO: 705517 - RNA, 19 nt, Human
ugucaggagggagaggcug

SEQ ID NO: 705518 - RNA, 21 nt, Human
aaacuggauuucuuucugagu

SEQ ID NO: 705519 - RNA, 20 nt, Human
aaagagagagucaaugugcu

SEQ ID NO: 705520 - RNA, 24 nt, Human
aaaguacugggauuacagguguga

SEQ ID NO: 705521 - RNA, 20 nt, Human
aaccuccaccuccuggguuc

SEQ ID NO: 705522 - RNA, 18 nt, Human
aagaacaaaagugaggac

SEQ ID NO: 705523 - RNA, 23 nt, Human
aagcaggaaacugaaggagggac

SEQ ID NO: 705524 - RNA, 18 nt, Human
aaguacugggauuacagg

SEQ ID NO: 705525 - RNA, 26 nt, Human
aaguacugggauuacaggugugagcc

SEQ ID NO: 705526 - RNA, 19 nt, Human
aaguagcugggauuuuagg

SEQ ID NO: 705527 - RNA, 20 nt, Human
aaguugagcaucccaaaucc

SEQ ID NO: 705528 - RNA, 24 nt, Human
accaaguuggccaggcuggucuug

SEQ ID NO: 705529 - RNA, 18 nt, Human
acgggguuucaccaaguu

SEQ ID NO: 705530 - RNA, 20 nt, Human
acgggguuucaccaaguugg

SEQ ID NO: 705531 - RNA, 24 nt, Human
acgggguuucaccaaguuggccag

SEQ ID NO: 705532 - RNA, 18 nt, Human
acuaaggcuccaaaaggu

SEQ ID NO: 705533 - RNA, 26 nt, Human
acucugucacccagacuggaauacau

SEQ ID NO: 705534 - RNA, 24 nt, Human
agaggagcugaaagaagaucaggg

SEQ ID NO: 705535 - RNA, 25 nt, Human
agagguggugaugguuggauacagg

SEQ ID NO: 705536 - RNA, 19 nt, Human
agagucaaugugcuggugu

SEQ ID NO: 705537 - RNA, 19 nt, Human
agaugugucuaauaaacau

SEQ ID NO: 705538 - RNA, 22 nt, Human
agcaucccaaauccaaaaaucc

SEQ ID NO: 705539 - RNA, 24 nt, Human
agcgauucuccugccucagucucu

SEQ ID NO: 705540 - RNA, 19 nt, Human
aggaacaacaggaaccaag

SEQ ID NO: 705541 - RNA, 19 nt, Human
aggggugcaccaccacgcc

SEQ ID NO: 705542 - RNA, 18 nt, Human
agguggugaugguuggau

SEQ ID NO: 705543 - RNA, 22 nt, Human
aguuggccaggcuggucuugaa

SEQ ID NO: 705544 - RNA, 24 nt, Human
auagaggagcugaaagaagaucag

SEQ ID NO: 705545 - RNA, 19 nt, Human
caaaaauccaauauccaaa

SEQ ID NO: 705546 - RNA, 21 nt, Human
caaaaucugagauuuugagca

SEQ ID NO: 705547 - RNA, 28 nt, Human
caaaaugcuccaaaaucugagauuuuga

SEQ ID NO: 705548 - RNA, 24 nt, Human
caaaguacugggauuacaggugug

SEQ ID NO: 705549 - RNA, 19 nt, Human
caaauucuguugccaggaa

SEQ ID NO: 705550 - RNA, 20 nt, Human
caagcgauucuccugccuca

SEQ ID NO: 705551 - RNA, 21 nt, Human
caagcgauucuccugccucag

SEQ ID NO: 705552 - RNA, 26 nt, Human
caagugaucuccccccuuggccuccc

SEQ ID NO: 705553 - RNA, 24 nt, Human
caauggagcugauguaauaccauc

SEQ ID NO: 705554 - RNA, 18 nt, Human
cacauguaaccaacacac

SEQ ID NO: 705555 - RNA, 21 nt, Human
caccaaguuggccaggcuggu

SEQ ID NO: 705556 - RNA, 24 nt, Human
caccaaguuggccaggcuggucuu

SEQ ID NO: 705557 - RNA, 22 nt, Human
caccaccacgccuggcuaauuu

SEQ ID NO: 705558 - RNA, 23 nt, Human
cacucugucacccagacuggaau

SEQ ID NO: 705559 - RNA, 26 nt, Human
cacugcauuauuucucaauaagucaa

SEQ ID NO: 705560 - RNA, 22 nt, Human
cauccucuuccuuuuucagucu

SEQ ID NO: 705561 - RNA, 25 nt, Human
cauccucuuccuuuuucccucugaa

SEQ ID NO: 705562 - RNA, 23 nt, Human
cauuuuagaaagaguggucuggg

SEQ ID NO: 705563 - RNA, 20 nt, Human
ccaaaguacugggauuacag

SEQ ID NO: 705564 - RNA, 21 nt, Human
ccaaaguacugggauuacagg

SEQ ID NO: 705565 - RNA, 24 nt, Human
ccaaaguacugggauuacaggugu

SEQ ID NO: 705566 - RNA, 24 nt, Human
ccaccuccuggguucaagcgauuc

SEQ ID NO: 705567 - RNA, 20 nt, Human
ccauccucuuccuuuuucag

SEQ ID NO: 705568 - RNA, 20 nt, Human
ccuaaagaauaggaggaccc

SEQ ID NO: 705569 - RNA, 19 nt, Human
ccuccaccuccuggguuca

SEQ ID NO: 705570 - RNA, 24 nt, Human
ccuccuggguucaagcgauucucc

SEQ ID NO: 705571 - RNA, 18 nt, Human
ccucuuccuuuuucaguc

SEQ ID NO: 705572 - RNA, 23 nt, Human
ccuggguucaagcgauucuccug

SEQ ID NO: 705573 - RNA, 19 nt, Human
ccuuagguguuugacucag

SEQ ID NO: 705574 - RNA, 24 nt, Human
cgcuaaauauaaugcaaauauucc

SEQ ID NO: 705575 - RNA, 18 nt, Human
cuaaucccaagcauuuca

SEQ ID NO: 705576 - RNA, 18 nt, Human
cucaaguagcugggauuu

SEQ ID NO: 705577 - RNA, 23 nt, Human
cucaagugaucuccccccuuggc

SEQ ID NO: 705578 - RNA, 22 nt, Human
cucacuggaaccuccaccuccu

SEQ ID NO: 705579 - RNA, 24 nt, Human
cucacuggaaccuccaccuccugg

SEQ ID NO: 705580 - RNA, 24 nt, Human
cucagucucucaaguagcugggau

SEQ ID NO: 705581 - RNA, 24 nt, Human
cuccagagacuacacauguaaccu

SEQ ID NO: 705582 - RNA, 21 nt, Human
cuccuggguucaagcgauucu

SEQ ID NO: 705583 - RNA, 23 nt, Human
cugccucagucucucaaguagcu

SEQ ID NO: 705584 - RNA, 24 nt, Human
gaacaacaggaaccaagcuuccug

SEQ ID NO: 705585 - RNA, 26 nt, Human
gaagacgugucauucccgaauuccuc

SEQ ID NO: 705586 - RNA, 20 nt, Human
gagucaaugugcuggugugu

SEQ ID NO: 705587 - RNA, 22 nt, Human
gaguggucugggaagguuucuc

SEQ ID NO: 705588 - RNA, 18 nt, Human
gauuacaggugugagcca

SEQ ID NO: 705589 - RNA, 21 nt, Human
gauuacaggugugagccacca

SEQ ID NO: 705590 - RNA, 24 nt, Human
gauuacaggugugagccaccaugc

SEQ ID NO: 705591 - RNA, 21 nt, Human
gcagaggaagggccugcagga

SEQ ID NO: 705592 - RNA, 22 nt, Human
gccucagucucucaaguagcug

SEQ ID NO: 705593 - RNA, 24 nt, Human
gccucagucucucaaguagcuggg

SEQ ID NO: 705594 - RNA, 24 nt, Human
gccuggcuaauuuuuuuguauuuu

SEQ ID NO: 705595 - RNA, 23 nt, Human
gcuggucuugaacuccugaccuc

SEQ ID NO: 705596 - RNA, 18 nt, Human
ggaaacugaaggauccaa

SEQ ID NO: 705597 - RNA, 24 nt, Human
ggauuacaggugugagccaccaug

SEQ ID NO: 705598 - RNA, 18 nt, Human
ggccuggugacaaagaca

SEQ ID NO: 705599 - RNA, 24 nt, Human
ggcuggucuugaacuccugaccuc

SEQ ID NO: 705600 - RNA, 23 nt, Human
gggguuucaccaaguuggccagg

SEQ ID NO: 705601 - RNA, 22 nt, Human
ggguuucaccaaguuggccagg

SEQ ID NO: 705602 - RNA, 19 nt, Human
ggucuugaacuccugaccu

SEQ ID NO: 705603 - RNA, 19 nt, Human
gguggugaugguuggauac

SEQ ID NO: 705604 - RNA, 18 nt, Human
uaagguaggauucagguu

SEQ ID NO: 705605 - RNA, 24 nt, Human
uacaggugugagccaccaugccca

SEQ ID NO: 705606 - RNA, 24 nt, Human
uacugggauuacaggugugagcca

SEQ ID NO: 705607 - RNA, 20 nt, Human
uagcugaggcuggagguggg

SEQ ID NO: 705608 - RNA, 24 nt, Human
uaguaaagacgggguuucaccaag

SEQ ID NO: 705609 - RNA, 26 nt, Human
uaguaaagacgggguuucaccaaguu

SEQ ID NO: 705610 - RNA, 18 nt, Human
uaucaaagagagagucaa

SEQ ID NO: 705611 - RNA, 22 nt, Human
uaucaggaugggcccauccaac

SEQ ID NO: 705612 - RNA, 23 nt, Human
uaucaggaugggcccauccaacu

SEQ ID NO: 705613 - RNA, 25 nt, Human
uauccaaaaugcuccaaaaucugag

SEQ ID NO: 705614 - RNA, 24 nt, Human
uauuuauuuuuugagacagagucu

SEQ ID NO: 705615 - RNA, 20 nt, Human
uauuuuauuuauuuauuuuu

SEQ ID NO: 705616 - RNA, 21 nt, Human
ucaaauucuguugccaggaac

SEQ ID NO: 705617 - RNA, 19 nt, Human
ucaagcgauucuccugccu

SEQ ID NO: 705618 - RNA, 21 nt, Human
ucaauaagucaauccugcugc

SEQ ID NO: 705619 - RNA, 24 nt, Human
ucacuggaaccuccaccuccuggg

SEQ ID NO: 705620 - RNA, 25 nt, Human
ucacuggaaccuccaccuccugggu

SEQ ID NO: 705621 - RNA, 26 nt, Human
ucacuggaaccuccaccuccuggguu

SEQ ID NO: 705622 - RNA, 22 nt, Human
ucagguaggcagguuuaagucc

SEQ ID NO: 705623 - RNA, 27 nt, Human
uccaaaaucugaaaaaaaauugaaauc

SEQ ID NO: 705624 - RNA, 23 nt, Human
ucccaaaguacugggauuacagg

SEQ ID NO: 705625 - RNA, 24 nt, Human
uccuagauauucaaauucuguugc

SEQ ID NO: 705626 - RNA, 21 nt, Human
uccuggguucaagcgauucuc

SEQ ID NO: 705627 - RNA, 24 nt, Human
uccuggguucaagcgauucuccug

SEQ ID NO: 705628 - RNA, 18 nt, Human
ucucaaguagcugggauu

SEQ ID NO: 705629 - RNA, 24 nt, Human
ucucacucugucacccagacugga

SEQ ID NO: 705630 - RNA, 18 nt, Human
ucugggaagguuucucuu

SEQ ID NO: 705631 - RNA, 21 nt, Human
ucuugaacuccugaccucaag

SEQ ID NO: 705632 - RNA, 21 nt, Human
ugaaaaaaaauugaaaucuga

SEQ ID NO: 705633 - RNA, 22 nt, Human
ugaauuuuggauuuuuggauuu

SEQ ID NO: 705634 - RNA, 18 nt, Human
ugaccucaagugaucucc

SEQ ID NO: 705635 - RNA, 19 nt, Human
ugaccucaagugaucuccc

SEQ ID NO: 705636 - RNA, 19 nt, Human
ugacuuagauucuuggcuc

SEQ ID NO: 705637 - RNA, 18 nt, Human
ugagacagagucucacuc

SEQ ID NO: 705638 - RNA, 22 nt, Human
ugagacagagucucacucuguc

SEQ ID NO: 705639 - RNA, 18 nt, Human
ugaggcuggaggugggcc

SEQ ID NO: 705640 - RNA, 21 nt, Human
ugagguagaguccaaagggcc

SEQ ID NO: 705641 - RNA, 20 nt, Human
ugaucuccccccuuggccuc

SEQ ID NO: 705642 - RNA, 22 nt, Human
ugcuagcugaggcuggaggugg

SEQ ID NO: 705643 - RNA, 24 nt, Human
uggaauacauuggcaugauuuugg

SEQ ID NO: 705644 - RNA, 23 nt, Human
uggaggugggccagaccauccag

SEQ ID NO: 705645 - RNA, 21 nt, Human
uggcaugauuuuggcucacug

SEQ ID NO: 705646 - RNA, 22 nt, Human
uggcaugauuuuggcucacugg

SEQ ID NO: 705647 - RNA, 24 nt, Human
uggccaggcuggucuugaacuccu

SEQ ID NO: 705648 - RNA, 18 nt, Human
ugggauuacaggugugag

SEQ ID NO: 705649 - RNA, 22 nt, Human
ugggauuacaggugugagccac

SEQ ID NO: 705650 - RNA, 23 nt, Human
ugggauuacaggugugagccacc

SEQ ID NO: 705651 - RNA, 24 nt, Human
ugggauuacaggugugagccacca

SEQ ID NO: 705652 - RNA, 25 nt, Human
ugggauuacaggugugagccaccau

SEQ ID NO: 705653 - RNA, 21 nt, Human
ugggauuuuaggggugcacca

SEQ ID NO: 705654 - RNA, 23 nt, Human
uggguucaagcgauucuccugcc

SEQ ID NO: 705655 - RNA, 24 nt, Human
uggguucaagcgauucuccugccu

SEQ ID NO: 705656 - RNA, 23 nt, Human
uggguuggagagggacaagaaca

SEQ ID NO: 705657 - RNA, 24 nt, Human
uguggagaguggguuggagaggga

SEQ ID NO: 705658 - RNA, 21 nt, Human
uguugccaggaacaacaggag

SEQ ID NO: 705659 - RNA, 18 nt, Human
uuaguaaagacgggguuu

SEQ ID NO: 705660 - RNA, 23 nt, Human
uuaguaaagacgggguuucacca

SEQ ID NO: 705661 - RNA, 21 nt, Human
uucaagcgauucuccugccuc

SEQ ID NO: 705662 - RNA, 23 nt, Human
uucaagcgauucuccugccucag

SEQ ID NO: 705663 - RNA, 24 nt, Human
uucaagcgauucuccugccucagu

SEQ ID NO: 705664 - RNA, 25 nt, Human
uugcuuaguuaucaaagagagaguc

SEQ ID NO: 705665 - RNA, 20 nt, Human
uuggauuuuuggauuuggau

SEQ ID NO: 705666 - RNA, 24 nt, Human
uuggauuuuuggauuuggauacuc

SEQ ID NO: 705667 - RNA, 23 nt, Human
uuguauuuuuaguaaagacgggg

SEQ ID NO: 705668 - RNA, 21 nt, Human
uuuaaaauuaaaccuaaagaa

SEQ ID NO: 705669 - RNA, 21 nt, Human
uuucaccaaguuggccaggcu

SEQ ID NO: 705670 - RNA, 24 nt, Human
uuuuuaguaaagacgggguuucac

SEQ ID NO: 705671 - RNA, 24 nt, Human
uuuuuuguauuuuuaguaaagacg

SEQ ID NO: 705672 - RNA, 21 nt, Human
uuuuuuuuuuuuauaagaucu

SEQ ID NO: 705673 - RNA, 24 nt, Human
aaagugcugggauuauagguguga

SEQ ID NO: 705674 - RNA, 20 nt, Human
aaccaaagagccucgucaag

SEQ ID NO: 705675 - RNA, 21 nt, Human
aagcaucaagcuucuucuuca

SEQ ID NO: 705676 - RNA, 18 nt, Human
aagugauccucccuccuc

SEQ ID NO: 705677 - RNA, 18 nt, Human
aagugcugggauuauagg

SEQ ID NO: 705678 - RNA, 21 nt, Human
acaaagcaacuacaaaguucu

SEQ ID NO: 705679 - RNA, 23 nt, Human
acuuuaaaaggugucuaguugaa

SEQ ID NO: 705680 - RNA, 22 nt, Human
agagacagggucuuguucugcc

SEQ ID NO: 705681 - RNA, 20 nt, Human
aggacuagaaaaaccaaaga

SEQ ID NO: 705682 - RNA, 18 nt, Human
aggcacuuuaaaaggugu

SEQ ID NO: 705683 - RNA, 23 nt, Human
agugcaguggugugaucguagcu

SEQ ID NO: 705684 - RNA, 23 nt, Human
agugcaguggugugaucguagcu

SEQ ID NO: 705685 - RNA, 18 nt, Human
caaagcaacuacaaaguu

SEQ ID NO: 705686 - RNA, 24 nt, Human
caaagugcugggauuauaggugug

SEQ ID NO: 705687 - RNA, 23 nt, Human
caagaaauuuauuggaaaaaucc

SEQ ID NO: 705688 - RNA, 27 nt, Human
caagugauccucccuccucugccuccc

SEQ ID NO: 705689 - RNA, 19 nt, Human
caccgcgagaugugucccc

SEQ ID NO: 705690 - RNA, 19 nt, Human
cagccugaauuccuggguu

SEQ ID NO: 705691 - RNA, 20 nt, Human
caugcaggccagagugcagu

SEQ ID NO: 705692 - RNA, 21 nt, Human
ccaaagugcugggauuauagg

SEQ ID NO: 705693 - RNA, 24 nt, Human
ccaaagugcugggauuauaggugu

SEQ ID NO: 705694 - RNA, 23 nt, Human
ccaagauaaaaguaacuuuuuac

SEQ ID NO: 705695 - RNA, 23 nt, Human
ccaccgcgagauguguccccccg

SEQ ID NO: 705696 - RNA, 27 nt, Human
ccagagugcaugcaggccagagugcag

SEQ ID NO: 705697 - RNA, 23 nt, Human
ccccgcgccguggccuggaauuc

SEQ ID NO: 705698 - RNA, 25 nt, Human
ccccucccgccccgcgccguggccu

SEQ ID NO: 705699 - RNA, 24 nt, Human
cccgccccgcgccguggccuggaa

SEQ ID NO: 705700 - RNA, 23 nt, Human
cccgcgccguggccuggaauucc

SEQ ID NO: 705701 - RNA, 20 nt, Human
ccgcacgcgcuccugcggcc

SEQ ID NO: 705702 - RNA, 22 nt, Human
ccgcacgcgcuccugcggccgg

SEQ ID NO: 705703 - RNA, 21 nt, Human
ccgcgccguggccuggaauuc

SEQ ID NO: 705704 - RNA, 21 nt, Human
ccggcaaaguccacgccgcac

SEQ ID NO: 705705 - RNA, 19 nt, Human
ccucgccgcgcccccuccc

SEQ ID NO: 705706 - RNA, 20 nt, Human
ccucgucaaguccugccugc

SEQ ID NO: 705707 - RNA, 18 nt, Human
ccugccugcuaacuccuc

SEQ ID NO: 705708 - RNA, 18 nt, Human
ccuggaauucccaaguuu

SEQ ID NO: 705709 - RNA, 22 nt, Human
ccuggguucaagugauccuccc

SEQ ID NO: 705710 - RNA, 18 nt, Human
cgccagggcccaggccgg

SEQ ID NO: 705711 - RNA, 20 nt, Human
cgccgcgcccccucccgccc

SEQ ID NO: 705712 - RNA, 24 nt, Human
cuaauaccaguguucauuucuucc

SEQ ID NO: 705713 - RNA, 27 nt, Human
cugacagccaagcaucaagcuucuucu

SEQ ID NO: 705714 - RNA, 18 nt, Human
cugggauuauagguguga

SEQ ID NO: 705715 - RNA, 22 nt, Human
cuggguucaagugauccucccu

SEQ ID NO: 705716 - RNA, 20 nt, Human
cuuacugcagccugaauucc

SEQ ID NO: 705717 - RNA, 19 nt, Human
gaucguagcuuacugcagc

SEQ ID NO: 705718 - RNA, 19 nt, Human
gcgggccucgccgcgcccc

SEQ ID NO: 705719 - RNA, 22 nt, Human
ggccagagugcaguggugugau

SEQ ID NO: 705720 - RNA, 19 nt, Human
ggccagagugcaugcaggc

SEQ ID NO: 705721 - RNA, 20 nt, Human
ggcuguguggcgagcccggc

SEQ ID NO: 705722 - RNA, 19 nt, Human
guuuugccccgccggcggg

SEQ ID NO: 705723 - RNA, 20 nt, Human
uaaauccaagauaaaaguaa

SEQ ID NO: 705724 - RNA, 24 nt, Human
uagaggcacuuuaaaaggugucua

SEQ ID NO: 705725 - RNA, 18 nt, Human
uagcuuacugcagccuga

SEQ ID NO: 705726 - RNA, 23 nt, Human
uagcuuacugcagccugaauucc

SEQ ID NO: 705727 - RNA, 19 nt, Human
ucaaguccugccugcuaac

SEQ ID NO: 705728 - RNA, 21 nt, Human
ucagugguugaggacuagaaa

SEQ ID NO: 705729 - RNA, 23 nt, Human
ucagugguugaggacuagaaaaa

SEQ ID NO: 705730 - RNA, 21 nt, Human
uccacgccgcacgcgcuccug

SEQ ID NO: 705731 - RNA, 23 nt, Human
uccaugagcagcaugauuaguuu

SEQ ID NO: 705732 - RNA, 23 nt, Human
ucccaaagugcugggauuauagg

SEQ ID NO: 705733 - RNA, 24 nt, Human
ucccgccccgcgccguggccugga

SEQ ID NO: 705734 - RNA, 21 nt, Human
uccucugccucccaaagugcu

SEQ ID NO: 705735 - RNA, 20 nt, Human
uccugccugcuaacuccuca

SEQ ID NO: 705736 - RNA, 21 nt, Human
uccuggguucaagugauccuc

SEQ ID NO: 705737 - RNA, 21 nt, Human
ucgccgcgcccccucccgccc

SEQ ID NO: 705738 - RNA, 18 nt, Human
ucuucauaauaaauccaa

SEQ ID NO: 705739 - RNA, 18 nt, Human
ucuuuuuuuagagacagg

SEQ ID NO: 705740 - RNA, 23 nt, Human
ugacagccaagcaucaagcuucu

SEQ ID NO: 705741 - RNA, 22 nt, Human
ugauccucccuccucugccucc

SEQ ID NO: 705742 - RNA, 21 nt, Human
ugcaguggugugaucguagcu

SEQ ID NO: 705743 - RNA, 21 nt, Human
ugcaugcaggccagagugcag

SEQ ID NO: 705744 - RNA, 24 nt, Human
uggauuauaaauacaguuuggcca

SEQ ID NO: 705745 - RNA, 19 nt, Human
ugggauuauaggugugacg

SEQ ID NO: 705746 - RNA, 20 nt, Human
ugggauuauaggugugacgc

SEQ ID NO: 705747 - RNA, 24 nt, Human
ugggauuauaggugugacgcacca

SEQ ID NO: 705748 - RNA, 25 nt, Human
ugggauuauaggugugacgcaccau

SEQ ID NO: 705749 - RNA, 20 nt, Human
uggguucaagugauccuccc

SEQ ID NO: 705750 - RNA, 21 nt, Human
uggguucaagugauccucccu

SEQ ID NO: 705751 - RNA, 23 nt, Human
uuaaagugaucacuguucuuuuu

SEQ ID NO: 705752 - RNA, 23 nt, Human
uuacugcagccugaauuccuggg

SEQ ID NO: 705753 - RNA, 19 nt, Human
uuauaggugugacgcacca

SEQ ID NO: 705754 - RNA, 20 nt, Human
uuauuggaaaaauccaugag

SEQ ID NO: 705755 - RNA, 24 nt, Human
uucaagugauccucccuccucugc

SEQ ID NO: 705756 - RNA, 19 nt, Human
uucugccaugcaggccaga

SEQ ID NO: 705757 - RNA, 26 nt, Human
aagaguucagggcuguagagguggcc

SEQ ID NO: 705758 - RNA, 20 nt, Human
acagcagcaggggccaggca

SEQ ID NO: 705759 - RNA, 22 nt, Human
accuccuccaggacggccaguu

SEQ ID NO: 705760 - RNA, 26 nt, Human
agaggcucaugggccagugggugcac

SEQ ID NO: 705761 - RNA, 19 nt, Human
aggaacaggagugggggcu

SEQ ID NO: 705762 - RNA, 20 nt, Human
caagaguucagggcuguaga

SEQ ID NO: 705763 - RNA, 18 nt, Human
caccuccuccaggacggc

SEQ ID NO: 705764 - RNA, 19 nt, Human
cagcagcaggggccaggca

SEQ ID NO: 705765 - RNA, 20 nt, Human
cagcagcaggggccaggcag

SEQ ID NO: 705766 - RNA, 22 nt, Human
cagcagcaggggccaggcagag

SEQ ID NO: 705767 - RNA, 21 nt, Human
caggacagcagcaggggccag

SEQ ID NO: 705768 - RNA, 22 nt, Human
caggagugggggcugaggccag

SEQ ID NO: 705769 - RNA, 18 nt, Human
cagggcucaguucgcugc

SEQ ID NO: 705770 - RNA, 18 nt, Human
ccaagaagcaacaguugg

SEQ ID NO: 705771 - RNA, 22 nt, Human
ccccagggcucaguucgcugcc

SEQ ID NO: 705772 - RNA, 18 nt, Human
ccuccaggacggccacag

SEQ ID NO: 705773 - RNA, 25 nt, Human
ccuucagcuggguggcaccugaagc

SEQ ID NO: 705774 - RNA, 18 nt, Human
cugaagccccacccacaa

SEQ ID NO: 705775 - RNA, 20 nt, Human
gccccagggcucaguucgcu

SEQ ID NO: 705776 - RNA, 19 nt, Human
ggccacaggacagcagcag

SEQ ID NO: 705777 - RNA, 18 nt, Human
ggcuguagagguggccag

SEQ ID NO: 705778 - RNA, 18 nt, Human
uagagguggccagggacc

SEQ ID NO: 705779 - RNA, 25 nt, Human
ucaagaguucagggcuguagaggug

SEQ ID NO: 705780 - RNA, 23 nt, Human
ugcacaaggaacaggaguggggg

SEQ ID NO: 705781 - RNA, 24 nt, Human
ugcacaaggaacaggagugggggc

SEQ ID NO: 705782 - RNA, 18 nt, Human
ugccccaagaagcaacag

SEQ ID NO: 705783 - RNA, 25 nt, Human
ugccgagcgccccugcccacugcuu

SEQ ID NO: 705784 - RNA, 23 nt, Human
ugggcagcuauugcuggagagag

SEQ ID NO: 705785 - RNA, 23 nt, Human
uucgcugccccaagaagcaacag

SEQ ID NO: 705786 - RNA, 23 nt, Human
uuuuuuuuuuuuuuuuuuaauag

SEQ ID NO: 705787 - RNA, 24 nt, Human
aaacagaaaacuacacucccagga

SEQ ID NO: 705788 - RNA, 19 nt, Human
aaagugcugggauuacagg

SEQ ID NO: 705789 - RNA, 20 nt, Human
aaagugcugggauuacaggg

SEQ ID NO: 705790 - RNA, 24 nt, Human
aaagugcugggauuacagggguga

SEQ ID NO: 705791 - RNA, 24 nt, Human
aaguaaucgacccgccuuggccuc

SEQ ID NO: 705792 - RNA, 18 nt, Human
aagugcugggauuacagg

SEQ ID NO: 705793 - RNA, 21 nt, Human
aagugcugggauuacaggggu

SEQ ID NO: 705794 - RNA, 26 nt, Human
aagugcugggauuacaggggugagcc

SEQ ID NO: 705795 - RNA, 18 nt, Human
acacaauaccuggacacc

SEQ ID NO: 705796 - RNA, 22 nt, Human
acaguggagcagauccucuaaa

SEQ ID NO: 705797 - RNA, 25 nt, Human
acccgccuuggccucccaaagugcu

SEQ ID NO: 705798 - RNA, 20 nt, Human
acuacacucccaggaggcca

SEQ ID NO: 705799 - RNA, 23 nt, Human
agaagggacacugcugcguggug

SEQ ID NO: 705800 - RNA, 18 nt, Human
agccacugagcccagcca

SEQ ID NO: 705801 - RNA, 24 nt, Human
agccccagacacugaaauggggcu

SEQ ID NO: 705802 - RNA, 19 nt, Human
aggaacucagacccaagaa

SEQ ID NO: 705803 - RNA, 25 nt, Human
aggcuggagugcaguggcacgaucu

SEQ ID NO: 705804 - RNA, 18 nt, Human
agggacagugacccacaa

SEQ ID NO: 705805 - RNA, 18 nt, Human
agggugagggaugaggag

SEQ ID NO: 705806 - RNA, 20 nt, Human
agugcaguggcacgaucucg

SEQ ID NO: 705807 - RNA, 23 nt, Human
agugcaguggcacgaucucggcu

SEQ ID NO: 705808 - RNA, 24 nt, Human
agugcaguggcacgaucucggcuc

SEQ ID NO: 705809 - RNA, 24 nt, Human
auccucuaaaagcugggaugggga

SEQ ID NO: 705810 - RNA, 18 nt, Human
augggguuucacaauguu

SEQ ID NO: 705811 - RNA, 24 nt, Human
augggguuucacaauguuggccag

SEQ ID NO: 705812 - RNA, 19 nt, Human
auguuggccaggcuggucg

SEQ ID NO: 705813 - RNA, 24 nt, Human
caaagugcugggauuacaggggug

SEQ ID NO: 705814 - RNA, 21 nt, Human
caacacaucuaccagagcccc

SEQ ID NO: 705815 - RNA, 22 nt, Human
caagcaauucuccugccucagc

SEQ ID NO: 705816 - RNA, 21 nt, Human
cacaauguuggccaggcuggu

SEQ ID NO: 705817 - RNA, 22 nt, Human
cacaauguuggccaggcugguc

SEQ ID NO: 705818 - RNA, 19 nt, Human
cagccgggcccuccgagcu

SEQ ID NO: 705819 - RNA, 20 nt, Human
cagccgggcccuccgagcuc

SEQ ID NO: 705820 - RNA, 19 nt, Human
caggaggccaacuucuucc

SEQ ID NO: 705821 - RNA, 24 nt, Human
cauacacacaauaccuggacaccc

SEQ ID NO: 705822 - RNA, 19 nt, Human
ccaaagugcugggauuaca

SEQ ID NO: 705823 - RNA, 21 nt, Human
ccaaagugcugggauuacagg

SEQ ID NO: 705824 - RNA, 24 nt, Human
ccaaagugcugggauuacaggggu

SEQ ID NO: 705825 - RNA, 20 nt, Human
cccagacacugaaauggggc

SEQ ID NO: 705826 - RNA, 22 nt, Human
ccccagacacugaaauggggcu

SEQ ID NO: 705827 - RNA, 24 nt, Human
ccccggguagcugggauuacaggc

SEQ ID NO: 705828 - RNA, 23 nt, Human
ccccuaccuauaauaggaacuca

SEQ ID NO: 705829 - RNA, 24 nt, Human
cccggggcccccgcagcaccagcc

SEQ ID NO: 705830 - RNA, 23 nt, Human
cccggguagcugggauuacaggc

SEQ ID NO: 705831 - RNA, 24 nt, Human
cccggguagcugggauuacaggca

SEQ ID NO: 705832 - RNA, 24 nt, Human
cccuuuuucuggaguccaggcugg

SEQ ID NO: 705833 - RNA, 26 nt, Human
ccgccuucugaguucaagcaauucuu

SEQ ID NO: 705834 - RNA, 24 nt, Human
ccggguagcugggauuacaggcau

SEQ ID NO: 705835 - RNA, 19 nt, Human
ccuauaauaggaacucaga

SEQ ID NO: 705836 - RNA, 19 nt, Human
ccuccgagcucgcgccucg

SEQ ID NO: 705837 - RNA, 22 nt, Human
ccuccgagcucgcgccucgugc

SEQ ID NO: 705838 - RNA, 22 nt, Human
ccucuaaaagcugggaugggga

SEQ ID NO: 705839 - RNA, 20 nt, Human
ccugaccucaaguaaucgac

SEQ ID NO: 705840 - RNA, 21 nt, Human
ccuggacacccuuuuucugga

SEQ ID NO: 705841 - RNA, 24 nt, Human
ccuucugaguucaagcaauucucc

SEQ ID NO: 705842 - RNA, 22 nt, Human
cgagauggagucuugcucuguu

SEQ ID NO: 705843 - RNA, 18 nt, Human
cguggugacucugcuucc

SEQ ID NO: 705844 - RNA, 21 nt, Human
cucaacacaucuaccagagcc

SEQ ID NO: 705845 - RNA, 24 nt, Human
cucaacacaucuaccagagcccca

SEQ ID NO: 705846 - RNA, 23 nt, Human
cugcagccuccgccuucugaguu

SEQ ID NO: 705847 - RNA, 24 nt, Human
cugccucagccuccccggguagcu

SEQ ID NO: 705848 - RNA, 20 nt, Human
cugcuuccugucuggggcag

SEQ ID NO: 705849 - RNA, 22 nt, Human
cugcuuccugucuggggcagcu

SEQ ID NO: 705850 - RNA, 24 nt, Human
cugggagggcugaggaaggggaug

SEQ ID NO: 705851 - RNA, 18 nt, Human
cuguugaccaggcuggag

SEQ ID NO: 705852 - RNA, 20 nt, Human
cuuccagccaagaaaaggac

SEQ ID NO: 705853 - RNA, 24 nt, Human
cuuccugucuggggcagcuggaag

SEQ ID NO: 705854 - RNA, 23 nt, Human
gacagugacccacaacugccccc

SEQ ID NO: 705855 - RNA, 24 nt, Human
gaccucaaguaaucgacccgccuu

SEQ ID NO: 705856 - RNA, 23 nt, Human
gaggaaggggaugucaaccaaga

SEQ ID NO: 705857 - RNA, 18 nt, Human
gaggguggggccccuacc

SEQ ID NO: 705858 - RNA, 21 nt, Human
gaggugagagggagcaaagug

SEQ ID NO: 705859 - RNA, 20 nt, Human
gaguucaagcaauucuccug

SEQ ID NO: 705860 - RNA, 18 nt, Human
gauuacaggcaugugcca

SEQ ID NO: 705861 - RNA, 22 nt, Human
gauuacaggcaugugccacuac

SEQ ID NO: 705862 - RNA, 18 nt, Human
gauuacaggggugagcca

SEQ ID NO: 705863 - RNA, 23 nt, Human
gcacaacuaaaugcauacacaca

SEQ ID NO: 705864 - RNA, 18 nt, Human
gcagagaugggguuucac

SEQ ID NO: 705865 - RNA, 22 nt, Human
gcagagaugggguuucacaaug

SEQ ID NO: 705866 - RNA, 19 nt, Human
gccuaaugccaguauagga

SEQ ID NO: 705867 - RNA, 22 nt, Human
gccuuggccucccaaagugcug

SEQ ID NO: 705868 - RNA, 18 nt, Human
gcugaugggaagcccaga

SEQ ID NO: 705869 - RNA, 19 nt, Human
gcuggagugcaguggcacg

SEQ ID NO: 705870 - RNA, 23 nt, Human
gcuggucgugaacuccugaccuc

SEQ ID NO: 705871 - RNA, 26 nt, Human
ggacaggagaaaggucagggugaggg

SEQ ID NO: 705872 - RNA, 19 nt, Human
ggauuacaggcaugugcca

SEQ ID NO: 705873 - RNA, 19 nt, Human
ggccaggcuggucgugaac

SEQ ID NO: 705874 - RNA, 18 nt, Human
ggcuggggcguggccugg

SEQ ID NO: 705875 - RNA, 19 nt, Human
ggcuggggcguggccuggc

SEQ ID NO: 705876 - RNA, 24 nt, Human
ggcuggucgugaacuccugaccuc

SEQ ID NO: 705877 - RNA, 20 nt, Human
gggauggggaguaggcuggg

SEQ ID NO: 705878 - RNA, 20 nt, Human
gggcguggccuggcggggag

SEQ ID NO: 705879 - RNA, 21 nt, Human
ggggcguggccuggcggggag

SEQ ID NO: 705880 - RNA, 22 nt, Human
ggggcguggccuggcggggagc

SEQ ID NO: 705881 - RNA, 18 nt, Human
gggguuucacaauguugg

SEQ ID NO: 705882 - RNA, 22 nt, Human
gggguuucacaauguuggccag

SEQ ID NO: 705883 - RNA, 24 nt, Human
guaaucgacccgccuuggccuccc

SEQ ID NO: 705884 - RNA, 18 nt, Human
guagcugggauuacaggc

SEQ ID NO: 705885 - RNA, 19 nt, Human
guagcugggauuacaggca

SEQ ID NO: 705886 - RNA, 22 nt, Human
guagcugggauuacaggcaugu

SEQ ID NO: 705887 - RNA, 19 nt, Human
gugagccacugagcccagc

SEQ ID NO: 705888 - RNA, 19 nt, Human
guugaccaggcuggagugc

SEQ ID NO: 705889 - RNA, 24 nt, Human
uaacuuuuguauuuuuggcagaga

SEQ ID NO: 705890 - RNA, 19 nt, Human
uacacucccaggaggccaa

SEQ ID NO: 705891 - RNA, 23 nt, Human
uacaggcaugugccacuacgccc

SEQ ID NO: 705892 - RNA, 18 nt, Human
uacaggggugagccacug

SEQ ID NO: 705893 - RNA, 19 nt, Human
uacaggggugagccacuga

SEQ ID NO: 705894 - RNA, 24 nt, Human
uacaggggugagccacugagccca

SEQ ID NO: 705895 - RNA, 25 nt, Human
uaccuauaauaggaacucagaccca

SEQ ID NO: 705896 - RNA, 18 nt, Human
ucacugcagccuccgccu

SEQ ID NO: 705897 - RNA, 18 nt, Human
ucacugcagccuccgccu

SEQ ID NO: 705898 - RNA, 19 nt, Human
ucacugcagccuccgccuu

SEQ ID NO: 705899 - RNA, 22 nt, Human
ucacugcagccuccgccuucug

SEQ ID NO: 705900 - RNA, 24 nt, Human
ucacugcagccuccgccuucugag

SEQ ID NO: 705901 - RNA, 25 nt, Human
ucacugcagccuccgccuucugagu

SEQ ID NO: 705902 - RNA, 23 nt, Human
ucccaaagugcugggauuacagg

SEQ ID NO: 705903 - RNA, 20 nt, Human
ucccaggaggccaacuucuu

SEQ ID NO: 705904 - RNA, 22 nt, Human
uccgccuucugaguucaagccg

SEQ ID NO: 705905 - RNA, 26 nt, Human
ucuccugccucagccuccccggguag

SEQ ID NO: 705906 - RNA, 20 nt, Human
ucugaguucaagcaauucuc

SEQ ID NO: 705907 - RNA, 23 nt, Human
ucugaguucaagcaauucuccug

SEQ ID NO: 705908 - RNA, 21 nt, Human
ucugcuuccugucuggggcag

SEQ ID NO: 705909 - RNA, 24 nt, Human
ucuguugaccaggcuggagugcag

SEQ ID NO: 705910 - RNA, 23 nt, Human
ucuugcucuguugaccaggcugg

SEQ ID NO: 705911 - RNA, 24 nt, Human
ucuugcucuguugaccaggcugga

SEQ ID NO: 705912 - RNA, 19 nt, Human
ugaaauggggcugggaucg

SEQ ID NO: 705913 - RNA, 24 nt, Human
ugaccaggcuggagugcaguggca

SEQ ID NO: 705914 - RNA, 20 nt, Human
ugaccucaaguaaucgaccc

SEQ ID NO: 705915 - RNA, 21 nt, Human
ugaccucaaguaaucgacccg

SEQ ID NO: 705916 - RNA, 25 nt, Human
ugaccucaaguaaucgacccgccuu

SEQ ID NO: 705917 - RNA, 19 nt, Human
ugagagggagcaaaguggc

SEQ ID NO: 705918 - RNA, 20 nt, Human
ugaggaaggggaugucaacc

SEQ ID NO: 705919 - RNA, 21 nt, Human
ugaguucaagcaauucuccug

SEQ ID NO: 705920 - RNA, 24 nt, Human
ugaguucaagcaauucuccugccu

SEQ ID NO: 705921 - RNA, 23 nt, Human
ugcacuucccagaggugagaggg

SEQ ID NO: 705922 - RNA, 22 nt, Human
ugcaguggcacgaucucggcuc

SEQ ID NO: 705923 - RNA, 23 nt, Human
ugcauacacacaauaccuggaca

SEQ ID NO: 705924 - RNA, 25 nt, Human
ugccucagccuccccggguagcugg

SEQ ID NO: 705925 - RNA, 21 nt, Human
ugcguggugacucugcuuccu

SEQ ID NO: 705926 - RNA, 23 nt, Human
uggagugcaguggcacgaucucg

SEQ ID NO: 705927 - RNA, 24 nt, Human
uggagugcaguggcacgaucucgg

SEQ ID NO: 705928 - RNA, 24 nt, Human
uggcagagaugggguuucacaaug

SEQ ID NO: 705929 - RNA, 24 nt, Human
uggccaggcuggucgugaacuccu

SEQ ID NO: 705930 - RNA, 19 nt, Human
uggcuggggcguggccugg

SEQ ID NO: 705931 - RNA, 27 nt, Human
uggcuggggcguggccuggcggggaga

SEQ ID NO: 705932 - RNA, 20 nt, Human
ugggagggcugaggaagggg

SEQ ID NO: 705933 - RNA, 21 nt, Human
ugggagggcugaggaagggga

SEQ ID NO: 705934 - RNA, 18 nt, Human
ugggauggggaguaggcu

SEQ ID NO: 705935 - RNA, 18 nt, Human
ugggauuacaggcaugug

SEQ ID NO: 705936 - RNA, 21 nt, Human
ugggauuacaggcaugugcca

SEQ ID NO: 705937 - RNA, 22 nt, Human
ugggauuacaggcaugugccac

SEQ ID NO: 705938 - RNA, 22 nt, Human
ugggauuacaggcaugugccac

SEQ ID NO: 705939 - RNA, 24 nt, Human
ugggauuacaggcaugugccacua

SEQ ID NO: 705940 - RNA, 24 nt, Human
ugggauuacaggcaugugccacua

SEQ ID NO: 705941 - RNA, 19 nt, Human
ugggauuacaggggugagc

SEQ ID NO: 705942 - RNA, 22 nt, Human
ugggauuacaggggugagccac

SEQ ID NO: 705943 - RNA, 22 nt, Human
ugggauuacaggggugagccac

SEQ ID NO: 705944 - RNA, 24 nt, Human
ugggauuacaggggugagccacug

SEQ ID NO: 705945 - RNA, 18 nt, Human
uggggaguaggcugggag

SEQ ID NO: 705946 - RNA, 22 nt, Human
uggggcagcuggaagggacagu

SEQ ID NO: 705947 - RNA, 24 nt, Human
ugggguuucacaauguuggccagg

SEQ ID NO: 705948 - RNA, 21 nt, Human
uguauuuuuggcagagauggg

SEQ ID NO: 705949 - RNA, 31 nt, Human
ugugugcacaacuaaaugcauacacacagug

SEQ ID NO: 705950 - RNA, 21 nt, Human
uucaagcaauucuccugccuc

SEQ ID NO: 705951 - RNA, 24 nt, Human
uucaagcaauucuccugccucagc

SEQ ID NO: 705952 - RNA, 25 nt, Human
uucacaauguuggccaggcuggucg

SEQ ID NO: 705953 - RNA, 24 nt, Human
uuggcagagaugggguuucacaau

SEQ ID NO: 705954 - RNA, 18 nt, Human
uuggccucccaaagugcu

SEQ ID NO: 705955 - RNA, 21 nt, Human
uuucacaauguuggccaggcu

SEQ ID NO: 705956 - RNA, 22 nt, Human
uuucacaauguuggccaggcug

SEQ ID NO: 705957 - RNA, 24 nt, Human
uuuuuggcagagaugggguuucac

SEQ ID NO: 705958 - RNA, 24 nt, Human
uuuuuuuuuuucgagauggagucu

SEQ ID NO: 705959 - RNA, 18 nt, Human
uuuuuuuuuuuuuuuucg

SEQ ID NO: 705960 - RNA, 23 nt, Human
uuuuuuuuuuuuuuuuucgagau

SEQ ID NO: 705961 - RNA, 19 nt, Human
aagagagggcuggaacaga

SEQ ID NO: 705962 - RNA, 22 nt, Human
aaggagccagaaagcgagccgc

SEQ ID NO: 705963 - RNA, 19 nt, Human
acaaagcuagcucccacag

SEQ ID NO: 705964 - RNA, 24 nt, Human
acacgggguccccaucccccugcc

SEQ ID NO: 705965 - RNA, 23 nt, Human
agaaagcgagccgcgccagcccg

SEQ ID NO: 705966 - RNA, 24 nt, Human
agacaagagagggcuggaacagaa

SEQ ID NO: 705967 - RNA, 19 nt, Human
agaggaaaggcggcgggag

SEQ ID NO: 705968 - RNA, 18 nt, Human
aggaaaaaucgagcgggg

SEQ ID NO: 705969 - RNA, 18 nt, Human
aucccccuccccuccaca

SEQ ID NO: 705970 - RNA, 19 nt, Human
cacaaagggcugugggauu

SEQ ID NO: 705971 - RNA, 21 nt, Human
cacacgggguccccauccccc

SEQ ID NO: 705972 - RNA, 24 nt, Human
caucccccugccgccgccacagcc

SEQ ID NO: 705973 - RNA, 25 nt, Human
caucccugacucugguucacggucu

SEQ ID NO: 705974 - RNA, 24 nt, Human
cccacagaccccgcucagcaggcg

SEQ ID NO: 705975 - RNA, 21 nt, Human
cccccugccgccgccacagcc

SEQ ID NO: 705976 - RNA, 19 nt, Human
ccccgcucccuccggggag

SEQ ID NO: 705977 - RNA, 21 nt, Human
ccccugccgccgccacagcca

SEQ ID NO: 705978 - RNA, 18 nt, Human
ccgccacagccacccaga

SEQ ID NO: 705979 - RNA, 24 nt, Human
ccgcucgcuggggcugcccgaggc

SEQ ID NO: 705980 - RNA, 19 nt, Human
cggaaggagccagaaagcg

SEQ ID NO: 705981 - RNA, 22 nt, Human
cgggaggaagcuaaggcauccu

SEQ ID NO: 705982 - RNA, 19 nt, Human
cuccccuccacagagagga

SEQ ID NO: 705983 - RNA, 21 nt, Human
cugcccgaggcgcagcggcgg

SEQ ID NO: 705984 - RNA, 22 nt, Human
cugccgccgccacagccaccca

SEQ ID NO: 705985 - RNA, 18 nt, Human
cuggaaaucccccucccc

SEQ ID NO: 705986 - RNA, 23 nt, Human
cuggaaaucccccuccccuccac

SEQ ID NO: 705987 - RNA, 20 nt, Human
gagcucccggcgugcuuucc

SEQ ID NO: 705988 - RNA, 20 nt, Human
gaguugccgcucgcuggggc

SEQ ID NO: 705989 - RNA, 19 nt, Human
gaucuucaaccccuucccc

SEQ ID NO: 705990 - RNA, 18 nt, Human
gccacagccacccagaca

SEQ ID NO: 705991 - RNA, 21 nt, Human
gcuaaacuguucaugccaugc

SEQ ID NO: 705992 - RNA, 22 nt, Human
gcugugggauuccccgcucccu

SEQ ID NO: 705993 - RNA, 21 nt, Human
ggcucagaggaaaggcggcgg

SEQ ID NO: 705994 - RNA, 19 nt, Human
gggguccccaucccccugc

SEQ ID NO: 705995 - RNA, 27 nt, Human
gucgcuggaaaucccccuccccuccaa

SEQ ID NO: 705996 - RNA, 23 nt, Human
uaaggcauccuuuaaaagaacaa

SEQ ID NO: 705997 - RNA, 18 nt, Human
uccccacacggggucccc

SEQ ID NO: 705998 - RNA, 23 nt, Human
uccccggcuggcuggagcucccg

SEQ ID NO: 705999 - RNA, 23 nt, Human
ucgcuggaaaucccccuccccuc

SEQ ID NO: 706000 - RNA, 18 nt, Human
ucucuaguaggaaggcuc

SEQ ID NO: 706001 - RNA, 20 nt, Human
ucucuaguaggaaggcucag

SEQ ID NO: 706002 - RNA, 23 nt, Human
ucuucagucauuuuuguugguua

SEQ ID NO: 706003 - RNA, 26 nt, Human
ugaacuggacaaagccgcagagccag

SEQ ID NO: 706004 - RNA, 25 nt, Human
ugaccugucgcuggaaaucccccuc

SEQ ID NO: 706005 - RNA, 20 nt, Human
uggcuggagcucccggcgug

SEQ ID NO: 706006 - RNA, 18 nt, Human
uggggagggcuucccauu

SEQ ID NO: 706007 - RNA, 26 nt, Human
ugucgcuggaaaucccccuccccucc

SEQ ID NO: 706008 - RNA, 22 nt, Human
uguuuuguuuuguuucaauuua

SEQ ID NO: 706009 - RNA, 23 nt, Human
uuuaagaaacaaguuuuguuuug

SEQ ID NO: 706010 - RNA, 26 nt, Human
uuucccccugucuuuacaucccugac

SEQ ID NO: 706011 - RNA, 23 nt, Human
uuuuaguucacaggcauuauuaa

SEQ ID NO: 706012 - RNA, 20 nt, Human
aagaaggagcugagggaggg

SEQ ID NO: 706013 - RNA, 22 nt, Human
aagaggaaggggguuaacccca

SEQ ID NO: 706014 - RNA, 25 nt, Human
aagaggaaggggguuaaccccaaaa

SEQ ID NO: 706015 - RNA, 23 nt, Human
aagcccagggagacuuagugagg

SEQ ID NO: 706016 - RNA, 24 nt, Human
aagccugccccucucugccuccca

SEQ ID NO: 706017 - RNA, 18 nt, Human
aaggagcugagggagggu

SEQ ID NO: 706018 - RNA, 27 nt, Human
aaggagucagccugugccugagaggug

SEQ ID NO: 706019 - RNA, 19 nt, Human
aaggagucugggggacauu

SEQ ID NO: 706020 - RNA, 20 nt, Human
aaugaagaggacccucugaa

SEQ ID NO: 706021 - RNA, 20 nt, Human
aaugcugcagcaaacugguc

SEQ ID NO: 706022 - RNA, 22 nt, Human
acaccuugagccacccaaacaa

SEQ ID NO: 706023 - RNA, 25 nt, Human
agagcacccaggggaucuaugaaga

SEQ ID NO: 706024 - RNA, 19 nt, Human
agaggagacuggggcaucc

SEQ ID NO: 706025 - RNA, 24 nt, Human
agaggggcugagacaggugaggag

SEQ ID NO: 706026 - RNA, 18 nt, Human
agaggggggugggguguu

SEQ ID NO: 706027 - RNA, 18 nt, Human
agcagcggcagcaggagg

SEQ ID NO: 706028 - RNA, 19 nt, Human
agccuggaauuccuuugca

SEQ ID NO: 706029 - RNA, 20 nt, Human
agcuggugcaucuugagggg

SEQ ID NO: 706030 - RNA, 25 nt, Human
aggaaacugggggugucuagagagg

SEQ ID NO: 706031 - RNA, 19 nt, Human
aggaagaacuaaagagaug

SEQ ID NO: 706032 - RNA, 18 nt, Human
aggaaguugggcacaauc

SEQ ID NO: 706033 - RNA, 19 nt, Human
aggagacgccgggagaagg

SEQ ID NO: 706034 - RNA, 18 nt, Human
aggcaaggccuggggaug

SEQ ID NO: 706035 - RNA, 24 nt, Human
aggcagaagagccuggaauuccuu

SEQ ID NO: 706036 - RNA, 19 nt, Human
agggacugagaagggccuu

SEQ ID NO: 706037 - RNA, 18 nt, Human
agggcagauguaaaugcu

SEQ ID NO: 706038 - RNA, 24 nt, Human
agggcuggagaggggaagggguua

SEQ ID NO: 706039 - RNA, 21 nt, Human
aggggaagggguuaucuaaag

SEQ ID NO: 706040 - RNA, 22 nt, Human
aggggggugggguguugaaagg

SEQ ID NO: 706041 - RNA, 25 nt, Human
aggugucugggggcgucuagagggg

SEQ ID NO: 706042 - RNA, 22 nt, Human
agugguggagaggagacugggg

SEQ ID NO: 706043 - RNA, 23 nt, Human
agugguggagaggagacuggggc

SEQ ID NO: 706044 - RNA, 18 nt, Human
augcaggaguccagcugg

SEQ ID NO: 706045 - RNA, 19 nt, Human
auuuccagcagccagggga

SEQ ID NO: 706046 - RNA, 21 nt, Human
caacaaagccuggucgacacu

SEQ ID NO: 706047 - RNA, 19 nt, Human
caagaaggagcugagggag

SEQ ID NO: 706048 - RNA, 18 nt, Human
cagaaggggugcccaagc

SEQ ID NO: 706049 - RNA, 21 nt, Human
cagagcacccaggggaucuau

SEQ ID NO: 706050 - RNA, 22 nt, Human
cagagggaggaggaaaucucaa

SEQ ID NO: 706051 - RNA, 20 nt, Human
cagcagaggacaggguugcg

SEQ ID NO: 706052 - RNA, 18 nt, Human
cagcagcggcagcaggag

SEQ ID NO: 706053 - RNA, 19 nt, Human
cagcucccaccaggaaaaa

SEQ ID NO: 706054 - RNA, 23 nt, Human
cagcugcuauugcuagaguuugc

SEQ ID NO: 706055 - RNA, 20 nt, Human
caggaaaaaugucuggggug

SEQ ID NO: 706056 - RNA, 25 nt, Human
caggaggaagagaagcaaccacagc

SEQ ID NO: 706057 - RNA, 23 nt, Human
caggggccuguggaagcccagug

SEQ ID NO: 706058 - RNA, 21 nt, Human
cagugcuucagcucccaccag

SEQ ID NO: 706059 - RNA, 22 nt, Human
caugcaggaguccagcugggag

SEQ ID NO: 706060 - RNA, 18 nt, Human
ccaaagcuccauauccca

SEQ ID NO: 706061 - RNA, 20 nt, Human
ccaacaaagccuggucgaca

SEQ ID NO: 706062 - RNA, 23 nt, Human
ccagagccuccuaguagggcugg

SEQ ID NO: 706063 - RNA, 20 nt, Human
ccaggaggaagaacuaaaga

SEQ ID NO: 706064 - RNA, 21 nt, Human
ccucauggaucuggaaaggga

SEQ ID NO: 706065 - RNA, 18 nt, Human
ccugccccucucugccuc

SEQ ID NO: 706066 - RNA, 25 nt, Human
ccugccccucucugccucccaaaaa

SEQ ID NO: 706067 - RNA, 25 nt, Human
ccuugagccacccaaacaaggaaac

SEQ ID NO: 706068 - RNA, 18 nt, Human
cguugggggcaggucugg

SEQ ID NO: 706069 - RNA, 23 nt, Human
cucaguggggggggcagaagggg

SEQ ID NO: 706070 - RNA, 22 nt, Human
cuccaaagcuccauaucccagc

SEQ ID NO: 706071 - RNA, 19 nt, Human
cucguagaggccagaucag

SEQ ID NO: 706072 - RNA, 18 nt, Human
cucuacaggaguucuggg

SEQ ID NO: 706073 - RNA, 19 nt, Human
cucugcacucucaagaguc

SEQ ID NO: 706074 - RNA, 20 nt, Human
cucuucucugaaccuccaaa

SEQ ID NO: 706075 - RNA, 19 nt, Human
cugagaagggccuugggga

SEQ ID NO: 706076 - RNA, 26 nt, Human
gagaggggaagggguuaucuaaaggg

SEQ ID NO: 706077 - RNA, 21 nt, Human
gaguugggugugucuccaggg

SEQ ID NO: 706078 - RNA, 22 nt, Human
gauggugggggcuuggagacac

SEQ ID NO: 706079 - RNA, 18 nt, Human
gcaaggaggccaggggcc

SEQ ID NO: 706080 - RNA, 27 nt, Human
gccaagaaggagcugagggaggguuua

SEQ ID NO: 706081 - RNA, 18 nt, Human
gccacuccccaagcccag

SEQ ID NO: 706082 - RNA, 19 nt, Human
gccagucccagugugcuag

SEQ ID NO: 706083 - RNA, 23 nt, Human
gcggcagcaggaggaagagaagc

SEQ ID NO: 706084 - RNA, 20 nt, Human
gcgggguccauuuccagcag

SEQ ID NO: 706085 - RNA, 23 nt, Human
ggaaaggaguucccaaaaaugaa

SEQ ID NO: 706086 - RNA, 27 nt, Human
ggacaggguugcgggguccauuuccag

SEQ ID NO: 706087 - RNA, 21 nt, Human
ggagaagagcagaaaaggggu

SEQ ID NO: 706088 - RNA, 23 nt, Human
ggagacuggggcauccagagggu

SEQ ID NO: 706089 - RNA, 23 nt, Human
ggaguccagcugggagagugggg

SEQ ID NO: 706090 - RNA, 20 nt, Human
ggaguucuggggaagaaagg

SEQ ID NO: 706091 - RNA, 20 nt, Human
ggaguugggugugucuccag

SEQ ID NO: 706092 - RNA, 22 nt, Human
ggaucuggaaagggagcuggug

SEQ ID NO: 706093 - RNA, 23 nt, Human
ggauggggccaagaaggagcuga

SEQ ID NO: 706094 - RNA, 21 nt, Human
ggcgucuagaggggccaagaa

SEQ ID NO: 706095 - RNA, 23 nt, Human
ggcuuuggaaaggaguucccaaa

SEQ ID NO: 706096 - RNA, 18 nt, Human
gggcaaggaggccagggg

SEQ ID NO: 706097 - RNA, 22 nt, Human
gggcauccagaggguagaaaug

SEQ ID NO: 706098 - RNA, 24 nt, Human
gggccgggacucaaauguuaggaa

SEQ ID NO: 706099 - RNA, 23 nt, Human
ggggaagggguuaucuaaagggg

SEQ ID NO: 706100 - RNA, 18 nt, Human
ggggauggggccaagaag

SEQ ID NO: 706101 - RNA, 21 nt, Human
gggggcaggucuggggaaacc

SEQ ID NO: 706102 - RNA, 20 nt, Human
ggggggugggguguugaaag

SEQ ID NO: 706103 - RNA, 19 nt, Human
gggggugggguguugaaag

SEQ ID NO: 706104 - RNA, 22 nt, Human
ggggugggguguugaaagggag

SEQ ID NO: 706105 - RNA, 20 nt, Human
ggguggcuguggauccagga

SEQ ID NO: 706106 - RNA, 20 nt, Human
ggguguggggauggggccaa

SEQ ID NO: 706107 - RNA, 24 nt, Human
guagaauuugugcuaucugagugu

SEQ ID NO: 706108 - RNA, 20 nt, Human
gucucagggaaggcagaaga

SEQ ID NO: 706109 - RNA, 19 nt, Human
gugcccaagccugccccuc

SEQ ID NO: 706110 - RNA, 20 nt, Human
guggcuguggauccaggagg

SEQ ID NO: 706111 - RNA, 18 nt, Human
uaaagaggcugaaaggug

SEQ ID NO: 706112 - RNA, 22 nt, Human
uacaggaguucuggggaagaaa

SEQ ID NO: 706113 - RNA, 21 nt, Human
uagagaggccaagaggaacca

SEQ ID NO: 706114 - RNA, 25 nt, Human
uagaggccagaucagaggugagggu

SEQ ID NO: 706115 - RNA, 24 nt, Human
uagcagcagcggcagcaggaggaa

SEQ ID NO: 706116 - RNA, 18 nt, Human
uaggagaauguggcuguc

SEQ ID NO: 706117 - RNA, 19 nt, Human
uaggagaauguggcugucu

SEQ ID NO: 706118 - RNA, 20 nt, Human
uaggaggggccugggcaaug

SEQ ID NO: 706119 - RNA, 22 nt, Human
uagggcuggagaggggaagggg

SEQ ID NO: 706120 - RNA, 22 nt, Human
uauugcuagaguuugcuggggg

SEQ ID NO: 706121 - RNA, 21 nt, Human
ucagaggugaggguucucuuc

SEQ ID NO: 706122 - RNA, 22 nt, Human
ucagaugucggaucaaagcuuu

SEQ ID NO: 706123 - RNA, 21 nt, Human
ucaguggggggggcagaaggg

SEQ ID NO: 706124 - RNA, 19 nt, Human
uccaggagguuguaaagag

SEQ ID NO: 706125 - RNA, 20 nt, Human
ucccaaaaaugaagaggacc

SEQ ID NO: 706126 - RNA, 22 nt, Human
ucccaaaaaugaagaggaccuc

SEQ ID NO: 706127 - RNA, 19 nt, Human
uccccaagcccagggagac

SEQ ID NO: 706128 - RNA, 21 nt, Human
uccccaagcccagggagacuu

SEQ ID NO: 706129 - RNA, 18 nt, Human
ucuugggacugccuagag

SEQ ID NO: 706130 - RNA, 19 nt, Human
ugacacggcagcagcugcu

SEQ ID NO: 706131 - RNA, 20 nt, Human
ugaccccucaggcaaggccu

SEQ ID NO: 706132 - RNA, 18 nt, Human
ugagaggcugagaguuau

SEQ ID NO: 706133 - RNA, 19 nt, Human
ugagaggugucugggggcg

SEQ ID NO: 706134 - RNA, 21 nt, Human
ugagggguggcuguggaucca

SEQ ID NO: 706135 - RNA, 20 nt, Human
ugcagugguggagaggagac

SEQ ID NO: 706136 - RNA, 19 nt, Human
ugccaagaauagcccgggg

SEQ ID NO: 706137 - RNA, 19 nt, Human
ugccacuccccaagcccag

SEQ ID NO: 706138 - RNA, 25 nt, Human
ugccuggaaguggggguucuagagg

SEQ ID NO: 706139 - RNA, 25 nt, Human
uggaaaggaguucccaaaaaugaag

SEQ ID NO: 706140 - RNA, 24 nt, Human
uggaaagggagcuggugcaucuug

SEQ ID NO: 706141 - RNA, 26 nt, Human
ugggcuuugcaggaagcuggcaggag

SEQ ID NO: 706142 - RNA, 18 nt, Human
uggggauggggccaagaa

SEQ ID NO: 706143 - RNA, 23 nt, Human
ugggggacauuuacagaaccuag

SEQ ID NO: 706144 - RNA, 22 nt, Human
uggggugggaggaaguuucuca

SEQ ID NO: 706145 - RNA, 22 nt, Human
ugguggagaggagacuggggca

SEQ ID NO: 706146 - RNA, 22 nt, Human
ugucggaucaaagcuuugccuu

SEQ ID NO: 706147 - RNA, 22 nt, Human
ugucugggggcgucuagagggg

SEQ ID NO: 706148 - RNA, 23 nt, Human
ugugcuaucugaguguguguugg

SEQ ID NO: 706149 - RNA, 20 nt, Human
uguggggauggggccaagaa

SEQ ID NO: 706150 - RNA, 22 nt, Human
uguguguugggagaggcagccu

SEQ ID NO: 706151 - RNA, 24 nt, Human
uuaaccccaaaaugggauuaagag

SEQ ID NO: 706152 - RNA, 22 nt, Human
uucccaaaaaugaagaggaccc

SEQ ID NO: 706153 - RNA, 21 nt, Human
uugcauaguucucaguggggg

SEQ ID NO: 706154 - RNA, 20 nt, Human
uugggagaggcagccugacc

SEQ ID NO: 706155 - RNA, 24 nt, Human
uuuccuggcuacuuccccacuaug

SEQ ID NO: 706156 - RNA, 19 nt, Human
aaaccacaggcaccucccg

SEQ ID NO: 706157 - RNA, 19 nt, Human
aaaccacaggcaccucccg

SEQ ID NO: 706158 - RNA, 26 nt, Human
aaaucccccucuaauccaaaagaagc

SEQ ID NO: 706159 - RNA, 21 nt, Human
aacugucuuuccucucucuaa

SEQ ID NO: 706160 - RNA, 20 nt, Human
aagggucucuucaaaguggc

SEQ ID NO: 706161 - RNA, 19 nt, Human
acaggcaccucccggacuc

SEQ ID NO: 706162 - RNA, 19 nt, Human
accacaggcaccucccgga

SEQ ID NO: 706163 - RNA, 21 nt, Human
accccaacacccaggccccaa

SEQ ID NO: 706164 - RNA, 24 nt, Human
agaaggacaaagcucuaggcaaag

SEQ ID NO: 706165 - RNA, 22 nt, Human
agacccugcaggagcuacccag

SEQ ID NO: 706166 - RNA, 18 nt, Human
agucccccaccccacccc

SEQ ID NO: 706167 - RNA, 20 nt, Human
aguggugggugcaaaccaca

SEQ ID NO: 706168 - RNA, 24 nt, Human
auacuuacagccaaucagaucuag

SEQ ID NO: 706169 - RNA, 21 nt, Human
aucacaacuagucucucagcg

SEQ ID NO: 706170 - RNA, 21 nt, Human
caaaauagcaaaucacaacua

SEQ ID NO: 706171 - RNA, 21 nt, Human
cacaggcaccucccggacucc

SEQ ID NO: 706172 - RNA, 19 nt, Human
cacaguagagauacuuaca

SEQ ID NO: 706173 - RNA, 21 nt, Human
caccccaccccgaaucagggg

SEQ ID NO: 706174 - RNA, 18 nt, Human
cagccaaucagaucuaga

SEQ ID NO: 706175 - RNA, 24 nt, Human
caucaaaaaucccccucuaauccu

SEQ ID NO: 706176 - RNA, 20 nt, Human
ccaaucagaucuagaaggac

SEQ ID NO: 706177 - RNA, 19 nt, Human
cccaacacccaggccccaa

SEQ ID NO: 706178 - RNA, 20 nt, Human
cccaucaaaaaucccccucu

SEQ ID NO: 706179 - RNA, 22 nt, Human
ccccaaagucaguguacgcgcu

SEQ ID NO: 706180 - RNA, 18 nt, Human
ccccaacacccaggcccc

SEQ ID NO: 706181 - RNA, 19 nt, Human
cccccaccccaccccgaau

SEQ ID NO: 706182 - RNA, 23 nt, Human
ccccgaaucagggguuuaccaag

SEQ ID NO: 706183 - RNA, 18 nt, Human
cccgcaggggucccgggg

SEQ ID NO: 706184 - RNA, 20 nt, Human
ccgcacugugaaagugaaac

SEQ ID NO: 706185 - RNA, 21 nt, Human
ccucuaauccaaaagaagcuu

SEQ ID NO: 706186 - RNA, 19 nt, Human
cggacuccuuggaggugcu

SEQ ID NO: 706187 - RNA, 25 nt, Human
cuaauccaaaagaagcuuguaaccc

SEQ ID NO: 706188 - RNA, 18 nt, Human
cugacaguuugucccaag

SEQ ID NO: 706189 - RNA, 24 nt, Human
cugcaggagcuacccagggcaucc

SEQ ID NO: 706190 - RNA, 23 nt, Human
cuugaaaacugucuuuccucucu

SEQ ID NO: 706191 - RNA, 20 nt, Human
gccuagucccccaccccacc

SEQ ID NO: 706192 - RNA, 20 nt, Human
gcugacaguuugucccaagu

SEQ ID NO: 706193 - RNA, 21 nt, Human
ggagcuacccagggcauccag

SEQ ID NO: 706194 - RNA, 23 nt, Human
ggcaaaauagcaaaucacaacua

SEQ ID NO: 706195 - RNA, 26 nt, Human
uacacaguagagauacuuacagccaa

SEQ ID NO: 706196 - RNA, 22 nt, Human
uacuuacagccaaucagaucua

SEQ ID NO: 706197 - RNA, 19 nt, Human
uagcaaaucacaacuaguc

SEQ ID NO: 706198 - RNA, 21 nt, Human
ucaaaaaucccccucuaaucc

SEQ ID NO: 706199 - RNA, 20 nt, Human
uccaagaggguucuucugcu

SEQ ID NO: 706200 - RNA, 20 nt, Human
ucccaaaucguccaguccaa

SEQ ID NO: 706201 - RNA, 20 nt, Human
ucccaaguuuugaauuccca

SEQ ID NO: 706202 - RNA, 18 nt, Human
ucccaucaaaaauccccc

SEQ ID NO: 706203 - RNA, 21 nt, Human
ucccaucaaaaaucccccucu

SEQ ID NO: 706204 - RNA, 19 nt, Human
uccuaagcauucggcagcc

SEQ ID NO: 706205 - RNA, 21 nt, Human
ucuaagguugcuggcugaugg

SEQ ID NO: 706206 - RNA, 22 nt, Human
ucuagaaggacaaagcucuagg

SEQ ID NO: 706207 - RNA, 22 nt, Human
ugaaaacugucuuuccucucuc

SEQ ID NO: 706208 - RNA, 23 nt, Human
ugaauucccaaaucguccagucc

SEQ ID NO: 706209 - RNA, 20 nt, Human
uggcaagcauaucaucccgc

SEQ ID NO: 706210 - RNA, 21 nt, Human
uggugggugcaaaccacaggc

SEQ ID NO: 706211 - RNA, 22 nt, Human
ugugaaagugaaaccagacacu

SEQ ID NO: 706212 - RNA, 24 nt, Human
uugaaaacugucuuuccucucucu

SEQ ID NO: 706213 - RNA, 19 nt, Human
uuggaggugcugguuccgg

SEQ ID NO: 706214 - RNA, 23 nt, Human
aagccgcggggccgacccccuga

SEQ ID NO: 706215 - RNA, 21 nt, Human
accugcggguggccggggagu

SEQ ID NO: 706216 - RNA, 19 nt, Human
cagccccccaccccaagcc

SEQ ID NO: 706217 - RNA, 22 nt, Human
cagccccccaccccaagccgcc

SEQ ID NO: 706218 - RNA, 20 nt, Human
cccccugagggcugcgggcg

SEQ ID NO: 706219 - RNA, 21 nt, Human
ccccugagggcugcgggcgcc

SEQ ID NO: 706220 - RNA, 22 nt, Human
cccgccgcuguccagaggcgag

SEQ ID NO: 706221 - RNA, 18 nt, Human
cccgcugcagccccccac

SEQ ID NO: 706222 - RNA, 21 nt, Human
ccucggggcuccgcuccugcc

SEQ ID NO: 706223 - RNA, 22 nt, Human
ccugcggguggccggggagucc

SEQ ID NO: 706224 - RNA, 20 nt, Human
cgaauggagccgccggggcg

SEQ ID NO: 706225 - RNA, 22 nt, Human
cgccggcgccagcgcugagccc

SEQ ID NO: 706226 - RNA, 21 nt, Human
cgcgcgcgccgcucaccuccc

SEQ ID NO: 706227 - RNA, 22 nt, Human
cggcccgagggccccgcugcag

SEQ ID NO: 706228 - RNA, 23 nt, Human
cggcggccgccccgccgcugucc

SEQ ID NO: 706229 - RNA, 18 nt, Human
cggcggcgggggcggggc

SEQ ID NO: 706230 - RNA, 18 nt, Human
cucugugcaguccuccuc

SEQ ID NO: 706231 - RNA, 20 nt, Human
cugcagccccccaccccaag

SEQ ID NO: 706232 - RNA, 18 nt, Human
gccgccccgccgcugucc

SEQ ID NO: 706233 - RNA, 19 nt, Human
gcgccgcucaccucccucc

SEQ ID NO: 706234 - RNA, 20 nt, Human
gcgcgccgcucaccucccuc

SEQ ID NO: 706235 - RNA, 24 nt, Human
gcgcucccucggggcuccgcuccu

SEQ ID NO: 706236 - RNA, 20 nt, Human
gcggcgggggcggggccucu

SEQ ID NO: 706237 - RNA, 21 nt, Human
ggcccgggggucccugggcuc

SEQ ID NO: 706238 - RNA, 19 nt, Human
ggccucugugcaguccucc

SEQ ID NO: 706239 - RNA, 20 nt, Human
gggcccgcgcucccucgggg

SEQ ID NO: 706240 - RNA, 21 nt, Human
gggcggggccucugugcaguc

SEQ ID NO: 706241 - RNA, 18 nt, Human
gggggacuuucggcccga

SEQ ID NO: 706242 - RNA, 27 nt, Human
gguggccggggaguccucgccggcgcc

SEQ ID NO: 706243 - RNA, 26 nt, Human
guggccggggaguccucgccggcgcc

SEQ ID NO: 706244 - RNA, 23 nt, Human
uagcuccccgucuccggcgcucc

SEQ ID NO: 706245 - RNA, 22 nt, Human
ucccaagccgcggggccgaccc

SEQ ID NO: 706246 - RNA, 25 nt, Human
uccgcgcgcgccgcucaccucccuc

SEQ ID NO: 706247 - RNA, 30 nt, Human
uccgcgcgcgccgcucaccucccuccgcgg

SEQ ID NO: 706248 - RNA, 20 nt, Human
uccggcgcucccugcggccg

SEQ ID NO: 706249 - RNA, 22 nt, Human
uccggcgcucccugcggccgcg

SEQ ID NO: 706250 - RNA, 18 nt, Human
ucgcgccgccgacccucg

SEQ ID NO: 706251 - RNA, 22 nt, Human
ucgcgccgccgacccucgcgcc

SEQ ID NO: 706252 - RNA, 23 nt, Human
ugacgggggagcgcgccgucggg

SEQ ID NO: 706253 - RNA, 24 nt, Human
ugcagccccccaccccaagccgcc

SEQ ID NO: 706254 - RNA, 21 nt, Human
uguccagaggcgagaggcaaa

SEQ ID NO: 706255 - RNA, 23 nt, Human
aaguccagaaauccagagccaac

SEQ ID NO: 706256 - RNA, 18 nt, Human
agaaauccagagccaacc

SEQ ID NO: 706257 - RNA, 21 nt, Human
agacaggccugggcccugggc

SEQ ID NO: 706258 - RNA, 18 nt, Human
agaggagagcuggagacc

SEQ ID NO: 706259 - RNA, 21 nt, Human
agcugguggcugcugacccca

SEQ ID NO: 706260 - RNA, 19 nt, Human
aggaagccaaggggcccag

SEQ ID NO: 706261 - RNA, 22 nt, Human
agguggcuccccucacagaggg

SEQ ID NO: 706262 - RNA, 19 nt, Human
aucucaucugcccagccca

SEQ ID NO: 706263 - RNA, 23 nt, Human
caaggcaggaagccaaggggccc

SEQ ID NO: 706264 - RNA, 26 nt, Human
caccccagacaggccugggcccuggg

SEQ ID NO: 706265 - RNA, 18 nt, Human
cacgcuucauuaaaaagu

SEQ ID NO: 706266 - RNA, 25 nt, Human
cacgggccagguucuuccccucggg

SEQ ID NO: 706267 - RNA, 24 nt, Human
caucucaugccugcuggguuccac

SEQ ID NO: 706268 - RNA, 23 nt, Human
cauuaaaaaguccagaaauccag

SEQ ID NO: 706269 - RNA, 18 nt, Human
ccaaggcaggaagccaag

SEQ ID NO: 706270 - RNA, 22 nt, Human
ccaaggcaggaagccaaggggc

SEQ ID NO: 706271 - RNA, 22 nt, Human
ccagaaauccagagccaaccag

SEQ ID NO: 706272 - RNA, 20 nt, Human
cccagacaggccugggcccu

SEQ ID NO: 706273 - RNA, 23 nt, Human
cccagacaggccugggcccuggg

SEQ ID NO: 706274 - RNA, 20 nt, Human
ccccaccuccccacgggcca

SEQ ID NO: 706275 - RNA, 21 nt, Human
ccccagacaggccugggcccu

SEQ ID NO: 706276 - RNA, 21 nt, Human
cccccaccuccccacgggcca

SEQ ID NO: 706277 - RNA, 22 nt, Human
ccccccaccuccccacgggcca

SEQ ID NO: 706278 - RNA, 23 nt, Human
ccccccaccuccccacgggccag

SEQ ID NO: 706279 - RNA, 23 nt, Human
cccgcacccgccacguggcccca

SEQ ID NO: 706280 - RNA, 25 nt, Human
cccucugggcagcccuccucccaga

SEQ ID NO: 706281 - RNA, 21 nt, Human
cccucuuacugccgcugccgc

SEQ ID NO: 706282 - RNA, 21 nt, Human
ccgcaccccucugggcagccc

SEQ ID NO: 706283 - RNA, 21 nt, Human
ccgcugccgcugccgcugccu

SEQ ID NO: 706284 - RNA, 19 nt, Human
ccgcugccgcugccucugc

SEQ ID NO: 706285 - RNA, 21 nt, Human
ccucacagagggggagguugg

SEQ ID NO: 706286 - RNA, 18 nt, Human
ccuccugccuccuccccu

SEQ ID NO: 706287 - RNA, 21 nt, Human
ccucugggcagcccuccuccc

SEQ ID NO: 706288 - RNA, 20 nt, Human
ccugccuccuccccucccuc

SEQ ID NO: 706289 - RNA, 18 nt, Human
ccugggcccugggccagg

SEQ ID NO: 706290 - RNA, 23 nt, Human
cgcaccccucugggcagcccucc

SEQ ID NO: 706291 - RNA, 21 nt, Human
cggggcgccccaugcgcccuu

SEQ ID NO: 706292 - RNA, 21 nt, Human
cggucccccccaccuccccac

SEQ ID NO: 706293 - RNA, 22 nt, Human
cucccucuuacugccgcugcua

SEQ ID NO: 706294 - RNA, 23 nt, Human
cucugcuccgaaccccguagcuc

SEQ ID NO: 706295 - RNA, 22 nt, Human
cucuuacugccgcugccgcugc

SEQ ID NO: 706296 - RNA, 19 nt, Human
cugaccccaaggcaggaag

SEQ ID NO: 706297 - RNA, 26 nt, Human
cugaccccaaggcaggaagccaaggg

SEQ ID NO: 706298 - RNA, 21 nt, Human
gaaaguaggaucucaucugcc

SEQ ID NO: 706299 - RNA, 23 nt, Human
gaacaggcuuggcagcggucugg

SEQ ID NO: 706300 - RNA, 25 nt, Human
gaacaggcuuggcagcggucugggg

SEQ ID NO: 706301 - RNA, 23 nt, Human
gcagcagaaaagaccaccuugag

SEQ ID NO: 706302 - RNA, 24 nt, Human
gcagcagaaaagaccaccuugaga

SEQ ID NO: 706303 - RNA, 18 nt, Human
gcccucagguggcucccc

SEQ ID NO: 706304 - RNA, 20 nt, Human
gcccuccugccuccuccccu

SEQ ID NO: 706305 - RNA, 23 nt, Human
gccuccuccccucccucuuacug

SEQ ID NO: 706306 - RNA, 19 nt, Human
gccugcuggguuccacagc

SEQ ID NO: 706307 - RNA, 22 nt, Human
gcgcggccgggccggagggggc

SEQ ID NO: 706308 - RNA, 18 nt, Human
ggagagcuggagaccugg

SEQ ID NO: 706309 - RNA, 23 nt, Human
ggcccagguccucccugaguggu

SEQ ID NO: 706310 - RNA, 19 nt, Human
ggccggagggggcgcgcug

SEQ ID NO: 706311 - RNA, 19 nt, Human
gggaaggcuuggaaaaggg

SEQ ID NO: 706312 - RNA, 20 nt, Human
gggaggggccgcuagcgaca

SEQ ID NO: 706313 - RNA, 18 nt, Human
guccagaaauccagagcc

SEQ ID NO: 706314 - RNA, 22 nt, Human
uaaaaaguccagaaauccagag

SEQ ID NO: 706315 - RNA, 25 nt, Human
uagaggagagcuggagaccugggcg

SEQ ID NO: 706316 - RNA, 21 nt, Human
uagcagcagaaaagaccaccu

SEQ ID NO: 706317 - RNA, 21 nt, Human
uauccaaaagugagcccaggg

SEQ ID NO: 706318 - RNA, 23 nt, Human
ucaaggcgcggcgcuggggagcu

SEQ ID NO: 706319 - RNA, 23 nt, Human
ucagcgccguuucgguccccccc

SEQ ID NO: 706320 - RNA, 21 nt, Human
ucaucucaugccugcuggguu

SEQ ID NO: 706321 - RNA, 18 nt, Human
ucauuaaaaaguccagaa

SEQ ID NO: 706322 - RNA, 26 nt, Human
uccacagcccucagguggcuccccuc

SEQ ID NO: 706323 - RNA, 19 nt, Human
ucccccccaccuccccacg

SEQ ID NO: 706324 - RNA, 23 nt, Human
ucccccccaccuccccacgggcc

SEQ ID NO: 706325 - RNA, 20 nt, Human
ucucggcucggcucagcgcc

SEQ ID NO: 706326 - RNA, 22 nt, Human
ugaccccaaggcaggaagccaa

SEQ ID NO: 706327 - RNA, 20 nt, Human
ugagaccauguuguaauggg

SEQ ID NO: 706328 - RNA, 22 nt, Human
ugagcccaggguguuggggggu

SEQ ID NO: 706329 - RNA, 19 nt, Human
ugccgcugccucugcuccg

SEQ ID NO: 706330 - RNA, 26 nt, Human
ugccucugcuccgaaccccguagcuc

SEQ ID NO: 706331 - RNA, 20 nt, Human
uggcagcggucuggggucag

SEQ ID NO: 706332 - RNA, 23 nt, Human
uggggaaggcuuggaaaagggaa

SEQ ID NO: 706333 - RNA, 18 nt, Human
uggggucagggaaaggau

SEQ ID NO: 706334 - RNA, 20 nt, Human
uucggucccccccaccuccc

SEQ ID NO: 706335 - RNA, 19 nt, Human
uuggagcaguccaggcccu

SEQ ID NO: 706336 - RNA, 20 nt, Human
uuggcagcggucugggguca

SEQ ID NO: 706337 - RNA, 19 nt, Human
aaagugcugggauuacagg

SEQ ID NO: 706338 - RNA, 22 nt, Human
aaagugcugggauuacaggcga

SEQ ID NO: 706339 - RNA, 18 nt, Human
aagugcugggauuacagg

SEQ ID NO: 706340 - RNA, 19 nt, Human
aagugcugggauuacaggc

SEQ ID NO: 706341 - RNA, 24 nt, Human
aagugcugggauuacaggcgagcc

SEQ ID NO: 706342 - RNA, 19 nt, Human
acaggcgccugccaccacg

SEQ ID NO: 706343 - RNA, 19 nt, Human
acccaggcuggagugcagu

SEQ ID NO: 706344 - RNA, 23 nt, Human
acccaggcuggagugcaguggug

SEQ ID NO: 706345 - RNA, 25 nt, Human
accuugcccaccuucaguccccuca

SEQ ID NO: 706346 - RNA, 25 nt, Human
acucugucacccaggcuggagugca

SEQ ID NO: 706347 - RNA, 20 nt, Human
aguagaggugggguuucacc

SEQ ID NO: 706348 - RNA, 18 nt, Human
aguagcugggauuacagg

SEQ ID NO: 706349 - RNA, 20 nt, Human
agugcaguggugcggccucg

SEQ ID NO: 706350 - RNA, 23 nt, Human
agugcaguggugcggccucggcu

SEQ ID NO: 706351 - RNA, 24 nt, Human
agugcaguggugcggccucggcuc

SEQ ID NO: 706352 - RNA, 21 nt, Human
auucuccugccucagccuccc

SEQ ID NO: 706353 - RNA, 26 nt, Human
caaagugcugggauuacaggcgagcc

SEQ ID NO: 706354 - RNA, 18 nt, Human
caaccuccaccucccggg

SEQ ID NO: 706355 - RNA, 24 nt, Human
cacccaggcuggagugcaguggug

SEQ ID NO: 706356 - RNA, 18 nt, Human
caccguguuagccaggau

SEQ ID NO: 706357 - RNA, 22 nt, Human
caccguguuagccaggaugguc

SEQ ID NO: 706358 - RNA, 23 nt, Human
caccuucaguccccucauggugu

SEQ ID NO: 706359 - RNA, 21 nt, Human
caccuugcccaccuucagucc

SEQ ID NO: 706360 - RNA, 22 nt, Human
cacucugucacccaggcuggag

SEQ ID NO: 706361 - RNA, 23 nt, Human
cacucugucacccaggcuggagu

SEQ ID NO: 706362 - RNA, 21 nt, Human
caggcgccugccaccacgccc

SEQ ID NO: 706363 - RNA, 23 nt, Human
caggcgccugccaccacgcccgg

SEQ ID NO: 706364 - RNA, 26 nt, Human
caguagcugggauuacaggcgccugc

SEQ ID NO: 706365 - RNA, 28 nt, Human
caguccccucauggugucuuuaucuugg

SEQ ID NO: 706366 - RNA, 22 nt, Human
caugccauucuccugccucagc

SEQ ID NO: 706367 - RNA, 19 nt, Human
ccaaagugcugggauuaca

SEQ ID NO: 706368 - RNA, 22 nt, Human
ccaaagugcugggauuacaggc

SEQ ID NO: 706369 - RNA, 23 nt, Human
ccaaagugcugggauuacaggcg

SEQ ID NO: 706370 - RNA, 24 nt, Human
ccaagauccuuaacucucaccuuu

SEQ ID NO: 706371 - RNA, 24 nt, Human
ccaccuccccaagauccuuaacuc

SEQ ID NO: 706372 - RNA, 21 nt, Human
ccaguagcugggauuacaggc

SEQ ID NO: 706373 - RNA, 23 nt, Human
cccaguagcugggauuacaggcg

SEQ ID NO: 706374 - RNA, 23 nt, Human
ccccaguagcugggauuacaggc

SEQ ID NO: 706375 - RNA, 19 nt, Human
ccuccaccucccggguuca

SEQ ID NO: 706376 - RNA, 24 nt, Human
cucacucugucacccaggcuggag

SEQ ID NO: 706377 - RNA, 24 nt, Human
cucagccuccccaguagcugggau

SEQ ID NO: 706378 - RNA, 21 nt, Human
cucccggguucaugccauucu

SEQ ID NO: 706379 - RNA, 24 nt, Human
cucccugcaaccuccaccucccgg

SEQ ID NO: 706380 - RNA, 23 nt, Human
cuccugccucagccuccccagua

SEQ ID NO: 706381 - RNA, 18 nt, Human
cugcaaccuccaccuccc

SEQ ID NO: 706382 - RNA, 23 nt, Human
cugcaaccuccaccucccggguu

SEQ ID NO: 706383 - RNA, 24 nt, Human
cugcaaccuccaccucccggguuc

SEQ ID NO: 706384 - RNA, 22 nt, Human
cugccucagccuccccaguagc

SEQ ID NO: 706385 - RNA, 23 nt, Human
cugccucagccuccccaguagcu

SEQ ID NO: 706386 - RNA, 23 nt, Human
cugggauuacaggcgagccacug

SEQ ID NO: 706387 - RNA, 20 nt, Human
cuugcccaccuucagucccc

SEQ ID NO: 706388 - RNA, 18 nt, Human
gaggugggguuucaccgu

SEQ ID NO: 706389 - RNA, 24 nt, Human
gaggugggguuucaccguguuagc

SEQ ID NO: 706390 - RNA, 21 nt, Human
gauuacaggcgagccacugca

SEQ ID NO: 706391 - RNA, 18 nt, Human
gauuacaggcgccugcca

SEQ ID NO: 706392 - RNA, 23 nt, Human
gccucggccucccaaagugcugg

SEQ ID NO: 706393 - RNA, 18 nt, Human
gggguuucaccguguuag

SEQ ID NO: 706394 - RNA, 22 nt, Human
gggguuucaccguguuagccag

SEQ ID NO: 706395 - RNA, 22 nt, Human
ggguuucaccguguuagccagg

SEQ ID NO: 706396 - RNA, 18 nt, Human
guagcugggauuacaggc

SEQ ID NO: 706397 - RNA, 18 nt, Human
gugggguuucaccguguu

SEQ ID NO: 706398 - RNA, 19 nt, Human
gugggguuucaccguguua

SEQ ID NO: 706399 - RNA, 21 nt, Human
uacaggcgagccacugcaccc

SEQ ID NO: 706400 - RNA, 23 nt, Human
uacaggcgccugccaccacgccc

SEQ ID NO: 706401 - RNA, 21 nt, Human
uaguagaggugggguuucacc

SEQ ID NO: 706402 - RNA, 24 nt, Human
uaguagaggugggguuucaccgug

SEQ ID NO: 706403 - RNA, 26 nt, Human
uaguagaggugggguuucaccguguu

SEQ ID NO: 706404 - RNA, 24 nt, Human
ucacccaggcuggagugcaguggu

SEQ ID NO: 706405 - RNA, 24 nt, Human
ucaccguguuagccaggauggucu

SEQ ID NO: 706406 - RNA, 24 nt, Human
ucacucugucacccaggcuggagu

SEQ ID NO: 706407 - RNA, 18 nt, Human
ucagccuccccaguagcu

SEQ ID NO: 706408 - RNA, 20 nt, Human
ucagccuccccaguagcugg

SEQ ID NO: 706409 - RNA, 29 nt, Human
ucaguccccucauggugucuuuauccuac

SEQ ID NO: 706410 - RNA, 24 nt, Human
ucccaaagugcugggauuacaggc

SEQ ID NO: 706411 - RNA, 22 nt, Human
uccccaagauccuuaacucuca

SEQ ID NO: 706412 - RNA, 24 nt, Human
uccccaguagcugggauuacaggc

SEQ ID NO: 706413 - RNA, 21 nt, Human
ucccggguucaugccauucuc

SEQ ID NO: 706414 - RNA, 24 nt, Human
ucccggguucaugccauucuccug

SEQ ID NO: 706415 - RNA, 24 nt, Human
ucccugcaaccuccaccucccggg

SEQ ID NO: 706416 - RNA, 18 nt, Human
ucggccucccaaagugcu

SEQ ID NO: 706417 - RNA, 23 nt, Human
ucucacucugucacccaggcugg

SEQ ID NO: 706418 - RNA, 24 nt, Human
ucucacucugucacccaggcugga

SEQ ID NO: 706419 - RNA, 26 nt, Human
ucucacucugucacccaggcuggagu

SEQ ID NO: 706420 - RNA, 27 nt, Human
ucucacucugucacccaggcuggagug

SEQ ID NO: 706421 - RNA, 24 nt, Human
ucugucacccaggcuggagugcag

SEQ ID NO: 706422 - RNA, 20 nt, Human
ugaguuggagucucacucug

SEQ ID NO: 706423 - RNA, 23 nt, Human
ugauccgcccgccucggccuccc

SEQ ID NO: 706424 - RNA, 22 nt, Human
ugcaguggugcggccucggcuc

SEQ ID NO: 706425 - RNA, 19 nt, Human
ugccaccacgcccggcuau

SEQ ID NO: 706426 - RNA, 24 nt, Human
ugccucagccuccccaguagcugg

SEQ ID NO: 706427 - RNA, 22 nt, Human
ugcugggauuacaggcgagcca

SEQ ID NO: 706428 - RNA, 18 nt, Human
uggagugcaguggugcgg

SEQ ID NO: 706429 - RNA, 22 nt, Human
uggagugcaguggugcggccuc

SEQ ID NO: 706430 - RNA, 24 nt, Human
uggagugcaguggugcggccucgg

SEQ ID NO: 706431 - RNA, 20 nt, Human
ugggauuacaggcgagccac

SEQ ID NO: 706432 - RNA, 21 nt, Human
ugggauuacaggcgagccacu

SEQ ID NO: 706433 - RNA, 21 nt, Human
ugggauuacaggcgccugcca

SEQ ID NO: 706434 - RNA, 22 nt, Human
ugggauuacaggcgccugccac

SEQ ID NO: 706435 - RNA, 24 nt, Human
ugggauuacaggcgccugccacca

SEQ ID NO: 706436 - RNA, 24 nt, Human
ugggguuucaccguguuagccagg

SEQ ID NO: 706437 - RNA, 18 nt, Human
uuaguagaggugggguuu

SEQ ID NO: 706438 - RNA, 22 nt, Human
uuaguagaggugggguuucacc

SEQ ID NO: 706439 - RNA, 24 nt, Human
uuaguagaggugggguuucaccgu

SEQ ID NO: 706440 - RNA, 19 nt, Human
uucaugccauucuccugcc

SEQ ID NO: 706441 - RNA, 19 nt, Human
uuucaccguguuagccagg

SEQ ID NO: 706442 - RNA, 31 nt, Human
uuuuuaauuuuaguagaggugggguuucacc

SEQ ID NO: 706443 - RNA, 19 nt, Human
uuuuuuaauuuuaguagag

SEQ ID NO: 706444 - RNA, 26 nt, Human
uuuuuuuuuuuugaguuggagucuca

SEQ ID NO: 706445 - RNA, 22 nt, Human
uuuuuuuuuuuuuugaguugga

SEQ ID NO: 706446 - RNA, 23 nt, Human
uuuuuuuuuuuuuuuugaguugg

SEQ ID NO: 706447 - RNA, 18 nt, Human
uuuuuuuuuuuuuuuuug

SEQ ID NO: 706448 - RNA, 23 nt, Human
aaaaaggaaaacagccauuaaaa

SEQ ID NO: 706449 - RNA, 22 nt, Human
aauagaaaaaggaaaacagcca

SEQ ID NO: 706450 - RNA, 20 nt, Human
accuugugagccccugaguc

SEQ ID NO: 706451 - RNA, 20 nt, Human
agagaggauuuaaauagaaa

SEQ ID NO: 706452 - RNA, 18 nt, Human
agcaguaaauaggagucu

SEQ ID NO: 706453 - RNA, 19 nt, Human
aguaaauaguacaaaauga

SEQ ID NO: 706454 - RNA, 23 nt, Human
auccaugaacaguuuuaucccuu

SEQ ID NO: 706455 - RNA, 23 nt, Human
caguuuuaucccuugguuucuua

SEQ ID NO: 706456 - RNA, 21 nt, Human
caugugauuuaaaaaauaaaa

SEQ ID NO: 706457 - RNA, 23 nt, Human
cucgguuagagcccaggccagcg

SEQ ID NO: 706458 - RNA, 21 nt, Human
gaaaacagccauuaaaagcac

SEQ ID NO: 706459 - RNA, 22 nt, Human
uaaaagcaguaaauaggagucu

SEQ ID NO: 706460 - RNA, 23 nt, Human
uaaauagaaaaaggaaaacagcc

SEQ ID NO: 706461 - RNA, 24 nt, Human
uaaggugccgugagaugcuggcag

SEQ ID NO: 706462 - RNA, 18 nt, Human
uauguauauuuacauccu

SEQ ID NO: 706463 - RNA, 19 nt, Human
uccucgguuagagcccagg

SEQ ID NO: 706464 - RNA, 19 nt, Human
ucuggaguucucccgggau

SEQ ID NO: 706465 - RNA, 22 nt, Human
ugagccccugagucaagacccu

SEQ ID NO: 706466 - RNA, 18 nt, Human
ugccgugagaugcuggca

SEQ ID NO: 706467 - RNA, 24 nt, Human
ugccgugagaugcuggcaguuuua

SEQ ID NO: 706468 - RNA, 19 nt, Human
uuagagcccaggccagcgc

SEQ ID NO: 706469 - RNA, 18 nt, Human
aaaaagaaaaauacaucg

SEQ ID NO: 706470 - RNA, 23 nt, Human
aaaaccuuugccauacuucacaa

SEQ ID NO: 706471 - RNA, 22 nt, Human
aaagagaacuccagaaugugaa

SEQ ID NO: 706472 - RNA, 19 nt, Human
aaaguuuguccagaaggau

SEQ ID NO: 706473 - RNA, 18 nt, Human
aacugcaugcagaaaaaa

SEQ ID NO: 706474 - RNA, 28 nt, Human
aagcuuuuuuuuuaccaaaaugaaaaga

SEQ ID NO: 706475 - RNA, 18 nt, Human
aaggauggagggagaaag

SEQ ID NO: 706476 - RNA, 18 nt, Human
aauaaagagaacuccaga

SEQ ID NO: 706477 - RNA, 24 nt, Human
acaaaaagaaaaauacaucagcag

SEQ ID NO: 706478 - RNA, 22 nt, Human
acagcauggaggugguucugcc

SEQ ID NO: 706479 - RNA, 18 nt, Human
agaaaacauucauuucuu

SEQ ID NO: 706480 - RNA, 19 nt, Human
agcucagaagucuuggcuc

SEQ ID NO: 706481 - RNA, 23 nt, Human
agcuuugcucagucuucaugccc

SEQ ID NO: 706482 - RNA, 20 nt, Human
aggauggagggagaaaggga

SEQ ID NO: 706483 - RNA, 29 nt, Human
aggcaaaaaggcaaacuaaaagggacccc

SEQ ID NO: 706484 - RNA, 24 nt, Human
agggagaaagggagagaguuccag

SEQ ID NO: 706485 - RNA, 19 nt, Human
aggugguucugccuuuccc

SEQ ID NO: 706486 - RNA, 21 nt, Human
auaaagagaacuccagaaugu

SEQ ID NO: 706487 - RNA, 22 nt, Human
augcagaaaaaaugggggauuc

SEQ ID NO: 706488 - RNA, 20 nt, Human
auuacucccacaaguuauag

SEQ ID NO: 706489 - RNA, 22 nt, Human
cacaaaagccacaugggacaaa

SEQ ID NO: 706490 - RNA, 20 nt, Human
cacccagguuuucucccuca

SEQ ID NO: 706491 - RNA, 20 nt, Human
cacugggaaaggacacaccc

SEQ ID NO: 706492 - RNA, 22 nt, Human
cagaaugugaacccaauauauc

SEQ ID NO: 706493 - RNA, 20 nt, Human
cagcaggagcugugcacucc

SEQ ID NO: 706494 - RNA, 21 nt, Human
cagcaggagcugugcacuccu

SEQ ID NO: 706495 - RNA, 19 nt, Human
cagcaucugaauuugccug

SEQ ID NO: 706496 - RNA, 19 nt, Human
cagccgccccggcuguggc

SEQ ID NO: 706497 - RNA, 20 nt, Human
cauuuggggauuuccacuag

SEQ ID NO: 706498 - RNA, 23 nt, Human
ccaaaaugaaaagaaaacauuca

SEQ ID NO: 706499 - RNA, 21 nt, Human
cccaaaauguccaagacaauu

SEQ ID NO: 706500 - RNA, 23 nt, Human
cccauuuuggauucuugagcaac

SEQ ID NO: 706501 - RNA, 18 nt, Human
cccuauguccacagaccc

SEQ ID NO: 706502 - RNA, 18 nt, Human
cccuauguccacagaccc

SEQ ID NO: 706503 - RNA, 22 nt, Human
cgagcaggggaaguggaaggau

SEQ ID NO: 706504 - RNA, 19 nt, Human
cuagauggagccucucuau

SEQ ID NO: 706505 - RNA, 20 nt, Human
cuaggagaugacaugcagug

SEQ ID NO: 706506 - RNA, 21 nt, Human
gacggcggggccgagcagggg

SEQ ID NO: 706507 - RNA, 18 nt, Human
gagaaggggaaccugaug

SEQ ID NO: 706508 - RNA, 19 nt, Human
gagcaacaaaauacgauac

SEQ ID NO: 706509 - RNA, 23 nt, Human
gauggagggagaaagggagagag

SEQ ID NO: 706510 - RNA, 22 nt, Human
gcaacaaaauacgauaccuaga

SEQ ID NO: 706511 - RNA, 23 nt, Human
gcagaaaaaaugggggauuccuu

SEQ ID NO: 706512 - RNA, 20 nt, Human
gcaggauucccagcuuugcu

SEQ ID NO: 706513 - RNA, 24 nt, Human
gcaugcagaaaaaaugggggauuc

SEQ ID NO: 706514 - RNA, 19 nt, Human
gccaagaagggagaagggg

SEQ ID NO: 706515 - RNA, 25 nt, Human
gccaagaagggagaaggggaaccug

SEQ ID NO: 706516 - RNA, 23 nt, Human
gcuaaccacuggccaccagcucu

SEQ ID NO: 706517 - RNA, 22 nt, Human
ggagcugugcacuccugaggcc

SEQ ID NO: 706518 - RNA, 20 nt, Human
gggaaaggacacacccaggu

SEQ ID NO: 706519 - RNA, 24 nt, Human
gggacccggccugacggcggggcc

SEQ ID NO: 706520 - RNA, 26 nt, Human
gggggacccggccugacggcggggcc

SEQ ID NO: 706521 - RNA, 18 nt, Human
guccauguuuuuauuuca

SEQ ID NO: 706522 - RNA, 21 nt, Human
gugguucugccuuucccuggc

SEQ ID NO: 706523 - RNA, 21 nt, Human
uaacuguguaaucucugaggc

SEQ ID NO: 706524 - RNA, 20 nt, Human
uaaucucugaggcuuccccu

SEQ ID NO: 706525 - RNA, 20 nt, Human
uacauggcaaauaacgugcg

SEQ ID NO: 706526 - RNA, 19 nt, Human
uaccaaagucugucaaaca

SEQ ID NO: 706527 - RNA, 21 nt, Human
uagaaauuguuugcuacagca

SEQ ID NO: 706528 - RNA, 23 nt, Human
uauguccacagacccauuuugga

SEQ ID NO: 706529 - RNA, 19 nt, Human
ucccaaaauguccaagaca

SEQ ID NO: 706530 - RNA, 20 nt, Human
ucccuggcuccucacacucu

SEQ ID NO: 706531 - RNA, 23 nt, Human
ucccuggcuccucacacucuuuc

SEQ ID NO: 706532 - RNA, 19 nt, Human
ucuaaaacauaaaauaaga

SEQ ID NO: 706533 - RNA, 19 nt, Human
ucugccuuucccuggcucc

SEQ ID NO: 706534 - RNA, 18 nt, Human
ucugcuggcacaacggac

SEQ ID NO: 706535 - RNA, 18 nt, Human
ugaaaagaaaacauucau

SEQ ID NO: 706536 - RNA, 21 nt, Human
ugacggcagggaagggggacc

SEQ ID NO: 706537 - RNA, 19 nt, Human
ugagcaacaaaauacgaua

SEQ ID NO: 706538 - RNA, 21 nt, Human
ugaggcuuccccugagauuua

SEQ ID NO: 706539 - RNA, 21 nt, Human
ugcaggauucccagcuuugcu

SEQ ID NO: 706540 - RNA, 18 nt, Human
uggauuguuaccaaaguc

SEQ ID NO: 706541 - RNA, 20 nt, Human
uggcagagccuagauggagc

SEQ ID NO: 706542 - RNA, 20 nt, Human
ugguucugccuuucccuggc

SEQ ID NO: 706543 - RNA, 19 nt, Human
uguaaaagaaaagcacugg

SEQ ID NO: 706544 - RNA, 25 nt, Human
ugugaacccaauauaucuucccaaa

SEQ ID NO: 706545 - RNA, 18 nt, Human
uguuaaaacagcaagcuu

SEQ ID NO: 706546 - RNA, 21 nt, Human
uguuaaaacagcaagcuuuuu

SEQ ID NO: 706547 - RNA, 24 nt, Human
uucacaaaaagaaaaauacaucag

SEQ ID NO: 706548 - RNA, 21 nt, Human
uucaggaauaacaaucaggca

SEQ ID NO: 706549 - RNA, 18 nt, Human
uucauuaacaaaauauga

SEQ ID NO: 706550 - RNA, 23 nt, Human
uucucccucacuuugagccccaa

SEQ ID NO: 706551 - RNA, 18 nt, Human
uuuuuuuuuuuguguguu

SEQ ID NO: 706552 - RNA, 18 nt, Human
uuuuuuuuuuuuuuuuug

SEQ ID NO: 706553 - RNA, 24 nt, Human
uuuuuuuuuuuuuuuuuguguguu

SEQ ID NO: 706554 - RNA, 21 nt, Human
aaaucuguccuagacucaccg

SEQ ID NO: 706555 - RNA, 18 nt, Human
aacuggaaccagcaaaau

SEQ ID NO: 706556 - RNA, 25 nt, Human
aacuugcuuccccagaggcagucua

SEQ ID NO: 706557 - RNA, 22 nt, Human
aagcacugcuuauucucuuggc

SEQ ID NO: 706558 - RNA, 23 nt, Human
aaggguucucaggagggagcaca

SEQ ID NO: 706559 - RNA, 19 nt, Human
aaucuagaacugccagucu

SEQ ID NO: 706560 - RNA, 21 nt, Human
aauggacaacucuguaucccu

SEQ ID NO: 706561 - RNA, 21 nt, Human
acagaaucucaacuaaugagc

SEQ ID NO: 706562 - RNA, 18 nt, Human
acaggucuuuuuuuuuuu

SEQ ID NO: 706563 - RNA, 18 nt, Human
acccccuccacuuggccu

SEQ ID NO: 706564 - RNA, 23 nt, Human
acucugugaucagucuacagcca

SEQ ID NO: 706565 - RNA, 20 nt, Human
acuuuaaaaaaaaacaaccc

SEQ ID NO: 706566 - RNA, 22 nt, Human
agaaacauuacucuuuaguuuc

SEQ ID NO: 706567 - RNA, 22 nt, Human
agcacugccaagcaguccaccu

SEQ ID NO: 706568 - RNA, 21 nt, Human
auugccacugcuuccuugacu

SEQ ID NO: 706569 - RNA, 23 nt, Human
caaacuggaaccagcaaaaucuc

SEQ ID NO: 706570 - RNA, 24 nt, Human
caacuccauugggcaaacuggaac

SEQ ID NO: 706571 - RNA, 25 nt, Human
caccagugcuugccucuguggucaa

SEQ ID NO: 706572 - RNA, 23 nt, Human
caccccccuccccuagcaaaagc

SEQ ID NO: 706573 - RNA, 22 nt, Human
cacccccuuucacaguugggga

SEQ ID NO: 706574 - RNA, 21 nt, Human
caccucagccccgugaggcag

SEQ ID NO: 706575 - RNA, 19 nt, Human
cauuccauaaccuucccuc

SEQ ID NO: 706576 - RNA, 26 nt, Human
ccaaagccaacgggaaccuucacccc

SEQ ID NO: 706577 - RNA, 20 nt, Human
ccacaggucuuuuuuuuuuu

SEQ ID NO: 706578 - RNA, 20 nt, Human
ccaccuagucauuuacccag

SEQ ID NO: 706579 - RNA, 19 nt, Human
ccaggucaggccagaaaug

SEQ ID NO: 706580 - RNA, 19 nt, Human
ccaugagcuggccaggccc

SEQ ID NO: 706581 - RNA, 18 nt, Human
cccaggcuggcugcgacu

SEQ ID NO: 706582 - RNA, 20 nt, Human
ccccagaggcagucuauacc

SEQ ID NO: 706583 - RNA, 23 nt, Human
cccccaaccugcuuggccgcuca

SEQ ID NO: 706584 - RNA, 19 nt, Human
cccccuccccuagcaaaag

SEQ ID NO: 706585 - RNA, 19 nt, Human
cccugugcccuacaggguc

SEQ ID NO: 706586 - RNA, 23 nt, Human
cccugugcccuacagggucucac

SEQ ID NO: 706587 - RNA, 22 nt, Human
ccuccagucccaccucagcccc

SEQ ID NO: 706588 - RNA, 23 nt, Human
ccuccaucuugcuaccuugggga

SEQ ID NO: 706589 - RNA, 21 nt, Human
cuagaaacauuacucuuuagu

SEQ ID NO: 706590 - RNA, 22 nt, Human
cuccuagcacugccaagcaguc

SEQ ID NO: 706591 - RNA, 23 nt, Human
cucgaaauccuccagucccaccu

SEQ ID NO: 706592 - RNA, 24 nt, Human
cucgaaauccuccagucccaccuc

SEQ ID NO: 706593 - RNA, 23 nt, Human
cugaaguccugaguccaccuccu

SEQ ID NO: 706594 - RNA, 21 nt, Human
cugcggccaacauggcccagc

SEQ ID NO: 706595 - RNA, 19 nt, Human
cuggaaccagcaaaaucuc

SEQ ID NO: 706596 - RNA, 24 nt, Human
cuucaccagggggccaucugcggc

SEQ ID NO: 706597 - RNA, 22 nt, Human
gaguccaccuccuagcacugcc

SEQ ID NO: 706598 - RNA, 22 nt, Human
gcccucgaaauccuccaguccc

SEQ ID NO: 706599 - RNA, 21 nt, Human
ggcauuacagaaccacaagaa

SEQ ID NO: 706600 - RNA, 18 nt, Human
ggccagaaauguugcuuc

SEQ ID NO: 706601 - RNA, 21 nt, Human
ggcccagcucccaggcuggcu

SEQ ID NO: 706602 - RNA, 25 nt, Human
gggcaccccccuccccuagcaaaag

SEQ ID NO: 706603 - RNA, 18 nt, Human
gggcaggcgcccccaacc

SEQ ID NO: 706604 - RNA, 20 nt, Human
gucuuuuuuuuuuuuuugga

SEQ ID NO: 706605 - RNA, 22 nt, Human
gugcucuacagccagaaguugg

SEQ ID NO: 706606 - RNA, 19 nt, Human
guuggguccuaagccuuuc

SEQ ID NO: 706607 - RNA, 23 nt, Human
uaaaaaaaaacaacccacccagu

SEQ ID NO: 706608 - RNA, 25 nt, Human
uagaaucauugagauucucaacucc

SEQ ID NO: 706609 - RNA, 21 nt, Human
ucacagaaucucaacuaauga

SEQ ID NO: 706610 - RNA, 21 nt, Human
ucagggcaccccccuccccua

SEQ ID NO: 706611 - RNA, 25 nt, Human
ucccaccucagccccgugaggcaga

SEQ ID NO: 706612 - RNA, 19 nt, Human
uccccauauagaggaaucu

SEQ ID NO: 706613 - RNA, 21 nt, Human
uccccuagcaaaagcagggcg

SEQ ID NO: 706614 - RNA, 20 nt, Human
ucccuggagccuucauuccu

SEQ ID NO: 706615 - RNA, 21 nt, Human
ucuagaauugccacugcuucc

SEQ ID NO: 706616 - RNA, 22 nt, Human
ucuccacguaaaaucuguccua

SEQ ID NO: 706617 - RNA, 18 nt, Human
ucugcggccaacauggcc

SEQ ID NO: 706618 - RNA, 21 nt, Human
ucuuuccuucccagaguucug

SEQ ID NO: 706619 - RNA, 23 nt, Human
ucuuuuuuuuuuuuuuggucuuu

SEQ ID NO: 706620 - RNA, 25 nt, Human
ugccagggggaaugcugguuggguc

SEQ ID NO: 706621 - RNA, 27 nt, Human
ugcuuauucucuuggcugggugcucua

SEQ ID NO: 706622 - RNA, 18 nt, Human
uggacaacucuguauccc

SEQ ID NO: 706623 - RNA, 21 nt, Human
uggagccuucauuccuuuugg

SEQ ID NO: 706624 - RNA, 25 nt, Human
uggccaggcccccgcagugccaggg

SEQ ID NO: 706625 - RNA, 26 nt, Human
uggccaggcccccgcagugccagggg

SEQ ID NO: 706626 - RNA, 19 nt, Human
uggcccagcucccaggcug

SEQ ID NO: 706627 - RNA, 22 nt, Human
uggcugaguugagaagcaacac

SEQ ID NO: 706628 - RNA, 23 nt, Human
uggguccuaagccuuucuuuccu

SEQ ID NO: 706629 - RNA, 21 nt, Human
ugucuacuucccaaagccaac

SEQ ID NO: 706630 - RNA, 22 nt, Human
uuaccaccuagucauuuaccca

SEQ ID NO: 706631 - RNA, 21 nt, Human
uucaaagcacugcuuauucuc

SEQ ID NO: 706632 - RNA, 18 nt, Human
uucccuuguccacuaauu

SEQ ID NO: 706633 - RNA, 23 nt, Human
uuccuuuuggcauuacagaacca

SEQ ID NO: 706634 - RNA, 18 nt, Human
uugcuaccuuggggaagg

SEQ ID NO: 706635 - RNA, 21 nt, Human
uuggucuuuggucaaucaaga

SEQ ID NO: 706636 - RNA, 20 nt, Human
uuuccuucccagaguucugg

SEQ ID NO: 706637 - RNA, 21 nt, Human
uuucuuuccuucccagaguuc

SEQ ID NO: 706638 - RNA, 19 nt, Human
agacacacacaccaaaaaa

SEQ ID NO: 706639 - RNA, 19 nt, Human
agccaaagcaaaccagaau

SEQ ID NO: 706640 - RNA, 23 nt, Human
agccuugugguucuaccaagguc

SEQ ID NO: 706641 - RNA, 20 nt, Human
aggcauguaagauccagugg

SEQ ID NO: 706642 - RNA, 24 nt, Human
cggugaagacacacacaccaaaaa

SEQ ID NO: 706643 - RNA, 18 nt, Human
cuccagugcuucugcuuu

SEQ ID NO: 706644 - RNA, 18 nt, Human
cugucuacugacaugcag

SEQ ID NO: 706645 - RNA, 23 nt, Human
gagugagccaaagcaaaccagaa

SEQ ID NO: 706646 - RNA, 20 nt, Human
ggaagugggggguacagagg

SEQ ID NO: 706647 - RNA, 24 nt, Human
uaaaaagcgagugagccaaagcaa

SEQ ID NO: 706648 - RNA, 21 nt, Human
uaaaguaacuauuccagagaa

SEQ ID NO: 706649 - RNA, 21 nt, Human
ucucugggagccuugugguuc

SEQ ID NO: 706650 - RNA, 19 nt, Human
ugaggagagaugggugucu

SEQ ID NO: 706651 - RNA, 23 nt, Human
uggaguggaagugggggguacag

SEQ ID NO: 706652 - RNA, 21 nt, Human
ugggugucucugggagccuug

SEQ ID NO: 706653 - RNA, 25 nt, Human
uguaagauccagugguuuguaaaaa

SEQ ID NO: 706654 - RNA, 24 nt, Human
uguccuguugcuggcgcaggagca

SEQ ID NO: 706655 - RNA, 19 nt, Human
ugucuacugacaugcagag

SEQ ID NO: 706656 - RNA, 23 nt, Human
uguugcuggcgcaggagcauggg

SEQ ID NO: 706657 - RNA, 21 nt, Human
aaaucaggaccccucccuucc

SEQ ID NO: 706658 - RNA, 18 nt, Human
aacaaaugugaaggucaa

SEQ ID NO: 706659 - RNA, 26 nt, Human
aacccacuuucuagaucucucuccug

SEQ ID NO: 706660 - RNA, 18 nt, Human
aagaaaauagcuaucccu

SEQ ID NO: 706661 - RNA, 19 nt, Human
aagcccuccaggugauucc

SEQ ID NO: 706662 - RNA, 18 nt, Human
aauguccacuccacaugg

SEQ ID NO: 706663 - RNA, 20 nt, Human
acaccgccccccccacgggc

SEQ ID NO: 706664 - RNA, 25 nt, Human
acccggccccacccuccauuucccu

SEQ ID NO: 706665 - RNA, 22 nt, Human
acccugguuuggggcuguaucu

SEQ ID NO: 706666 - RNA, 23 nt, Human
acccugguuuggggcuguaucug

SEQ ID NO: 706667 - RNA, 19 nt, Human
accucucucucucucuucc

SEQ ID NO: 706668 - RNA, 18 nt, Human
acucugcuccccaagcca

SEQ ID NO: 706669 - RNA, 20 nt, Human
agcacauuuccaggggcuuu

SEQ ID NO: 706670 - RNA, 20 nt, Human
agccugggcuucgggucccg

SEQ ID NO: 706671 - RNA, 21 nt, Human
aggcggcgucggggguccugg

SEQ ID NO: 706672 - RNA, 18 nt, Human
agguuuuugaauguccac

SEQ ID NO: 706673 - RNA, 19 nt, Human
augugaaugacugugcccc

SEQ ID NO: 706674 - RNA, 21 nt, Human
auucacaccuugcugagcccc

SEQ ID NO: 706675 - RNA, 22 nt, Human
auucuguccauccauccacuca

SEQ ID NO: 706676 - RNA, 21 nt, Human
cacacauaaaaccccacccuu

SEQ ID NO: 706677 - RNA, 18 nt, Human
cacacuccccuacccucc

SEQ ID NO: 706678 - RNA, 20 nt, Human
cacagguucucaaagugugg

SEQ ID NO: 706679 - RNA, 20 nt, Human
cacauaaaaccccacccuuc

SEQ ID NO: 706680 - RNA, 18 nt, Human
caccacagguagauuccu

SEQ ID NO: 706681 - RNA, 20 nt, Human
caccaccuccgauaugcagu

SEQ ID NO: 706682 - RNA, 21 nt, Human
cacccacacuccccuacccuc

SEQ ID NO: 706683 - RNA, 22 nt, Human
cacccacacuccccuacccucc

SEQ ID NO: 706684 - RNA, 19 nt, Human
cacccccuccacuugucac

SEQ ID NO: 706685 - RNA, 21 nt, Human
caccgccccccccacgggccc

SEQ ID NO: 706686 - RNA, 24 nt, Human
caccgccccccccacgggcccccc

SEQ ID NO: 706687 - RNA, 18 nt, Human
cagcagagaccccugggg

SEQ ID NO: 706688 - RNA, 18 nt, Human
cagcuuccagacaccccc

SEQ ID NO: 706689 - RNA, 19 nt, Human
caugugcccaucuuggucc

SEQ ID NO: 706690 - RNA, 21 nt, Human
ccaaaguuaaacucuucagcu

SEQ ID NO: 706691 - RNA, 20 nt, Human
ccacacauaaaaccccaccc

SEQ ID NO: 706692 - RNA, 24 nt, Human
ccacucaugaacaaaugugaaggu

SEQ ID NO: 706693 - RNA, 23 nt, Human
ccacuuucuagaucucucuccug

SEQ ID NO: 706694 - RNA, 21 nt, Human
cccacacuccccuacccucca

SEQ ID NO: 706695 - RNA, 23 nt, Human
cccagaaccucucucucucucuu

SEQ ID NO: 706696 - RNA, 18 nt, Human
cccauccaacccccaaaa

SEQ ID NO: 706697 - RNA, 20 nt, Human
cccauccaacccccaaaagu

SEQ ID NO: 706698 - RNA, 24 nt, Human
cccauccaacccccaaaaguccau

SEQ ID NO: 706699 - RNA, 18 nt, Human
cccaucuugguccggcuc

SEQ ID NO: 706700 - RNA, 22 nt, Human
ccccaagccaugcacccugguu

SEQ ID NO: 706701 - RNA, 22 nt, Human
ccccaaggacacacugcuuucc

SEQ ID NO: 706702 - RNA, 18 nt, Human
ccccacccuccauuuccc

SEQ ID NO: 706703 - RNA, 22 nt, Human
ccccacccuccauuucccugaa

SEQ ID NO: 706704 - RNA, 18 nt, Human
ccccacgggccccccgaa

SEQ ID NO: 706705 - RNA, 31 nt, Human
ccccccacgggccccccgaagggugggagcu

SEQ ID NO: 706706 - RNA, 21 nt, Human
cccccccacgggccccccgaa

SEQ ID NO: 706707 - RNA, 24 nt, Human
ccccgcucugccugcuucccugaa

SEQ ID NO: 706708 - RNA, 23 nt, Human
ccccuacccuccaccacccgagg

SEQ ID NO: 706709 - RNA, 21 nt, Human
ccccugacaccgcccccccca

SEQ ID NO: 706710 - RNA, 21 nt, Human
ccccugggggguggcguccau

SEQ ID NO: 706711 - RNA, 25 nt, Human
ccccuuauuuugaggacaggaacug

SEQ ID NO: 706712 - RNA, 22 nt, Human
cccggccccacccuccauuucc

SEQ ID NO: 706713 - RNA, 20 nt, Human
cccugacaccgcccccccca

SEQ ID NO: 706714 - RNA, 25 nt, Human
cccuuucccacacauaaaaccccac

SEQ ID NO: 706715 - RNA, 22 nt, Human
ccgccccccccacgggcccccc

SEQ ID NO: 706716 - RNA, 24 nt, Human
ccuaugccuuacacuggccccagc

SEQ ID NO: 706717 - RNA, 18 nt, Human
ccuccauuucccugaaau

SEQ ID NO: 706718 - RNA, 22 nt, Human
ccuccuccuccuccaccaccuc

SEQ ID NO: 706719 - RNA, 23 nt, Human
ccugcucagcuuccagacacccc

SEQ ID NO: 706720 - RNA, 20 nt, Human
ccuggaggggagcacgugga

SEQ ID NO: 706721 - RNA, 19 nt, Human
ccuguaagaucucacucca

SEQ ID NO: 706722 - RNA, 22 nt, Human
ccuuacacuggccccagccuuc

SEQ ID NO: 706723 - RNA, 20 nt, Human
cgacuuccaaguauucacuu

SEQ ID NO: 706724 - RNA, 19 nt, Human
cggcagcagagaccccugg

SEQ ID NO: 706725 - RNA, 28 nt, Human
cuacagguuaguggcagcccugagugga

SEQ ID NO: 706726 - RNA, 24 nt, Human
cucacuccacuguaagaaaauagc

SEQ ID NO: 706727 - RNA, 18 nt, Human
cucagcuuccagacaccc

SEQ ID NO: 706728 - RNA, 20 nt, Human
cuccuccuccaccaccuccc

SEQ ID NO: 706729 - RNA, 21 nt, Human
cucucucuuccugccugugcc

SEQ ID NO: 706730 - RNA, 21 nt, Human
cugccaccugccgcgcgucgc

SEQ ID NO: 706731 - RNA, 21 nt, Human
cugcuaccaucuucccaucca

SEQ ID NO: 706732 - RNA, 22 nt, Human
cuggcccuuccuccccagaacc

SEQ ID NO: 706733 - RNA, 26 nt, Human
cugggcuucgggucccuuuccuccgg

SEQ ID NO: 706734 - RNA, 24 nt, Human
cuucccauccaacccccaaaaguc

SEQ ID NO: 706735 - RNA, 20 nt, Human
cuuucccaggccccucucca

SEQ ID NO: 706736 - RNA, 23 nt, Human
gacacccccuccacuugucacug

SEQ ID NO: 706737 - RNA, 21 nt, Human
gagugcggcgggggcccgagc

SEQ ID NO: 706738 - RNA, 18 nt, Human
gaguuucugggcccaaag

SEQ ID NO: 706739 - RNA, 20 nt, Human
gauccucagcuucuucucag

SEQ ID NO: 706740 - RNA, 23 nt, Human
gcccaaaguuaaacucuucagcc

SEQ ID NO: 706741 - RNA, 18 nt, Human
gccuggagugcggcgggg

SEQ ID NO: 706742 - RNA, 20 nt, Human
gccuggagugcggcgggggc

SEQ ID NO: 706743 - RNA, 21 nt, Human
gcuuccagacacccccuccac

SEQ ID NO: 706744 - RNA, 19 nt, Human
ggcccccggucugccacag

SEQ ID NO: 706745 - RNA, 21 nt, Human
ggcgucggggguccuggaggg

SEQ ID NO: 706746 - RNA, 19 nt, Human
gggaggcuggcagaagagg

SEQ ID NO: 706747 - RNA, 23 nt, Human
ggucagaaacccuuggaguggag

SEQ ID NO: 706748 - RNA, 19 nt, Human
gugcggcgggggcccgagc

SEQ ID NO: 706749 - RNA, 21 nt, Human
guugaguuucugggcccaaag

SEQ ID NO: 706750 - RNA, 23 nt, Human
guuucuagacuugagguucuggg

SEQ ID NO: 706751 - RNA, 23 nt, Human
uaacuccugacuuacauauuccc

SEQ ID NO: 706752 - RNA, 21 nt, Human
uaagaaaauagcuaucccugg

SEQ ID NO: 706753 - RNA, 23 nt, Human
uaccaagcccuccaggugauucc

SEQ ID NO: 706754 - RNA, 21 nt, Human
uagauuccucuguuuucccag

SEQ ID NO: 706755 - RNA, 21 nt, Human
uagugaacccacuuucuagau

SEQ ID NO: 706756 - RNA, 18 nt, Human
ucaugaacaaaugugaag

SEQ ID NO: 706757 - RNA, 23 nt, Human
ucauucuguccauccauccacuc

SEQ ID NO: 706758 - RNA, 24 nt, Human
uccaaguauucacuuagagcacag

SEQ ID NO: 706759 - RNA, 20 nt, Human
uccagcaacagcagcaugac

SEQ ID NO: 706760 - RNA, 24 nt, Human
uccaucauucuguccauccaucca

SEQ ID NO: 706761 - RNA, 27 nt, Human
ucccacacauaaaaccccacccuucac

SEQ ID NO: 706762 - RNA, 22 nt, Human
ucccaggccccucuccaggccc

SEQ ID NO: 706763 - RNA, 23 nt, Human
ucccaggccccucuccaggcccc

SEQ ID NO: 706764 - RNA, 21 nt, Human
uccccaagccaugcacccugg

SEQ ID NO: 706765 - RNA, 24 nt, Human
uccccaagccaugcacccugguuu

SEQ ID NO: 706766 - RNA, 23 nt, Human
uccccagaaccucucucucucuc

SEQ ID NO: 706767 - RNA, 21 nt, Human
ucccugaaaucaggaccccuc

SEQ ID NO: 706768 - RNA, 19 nt, Human
uccucagcuucuucucagc

SEQ ID NO: 706769 - RNA, 20 nt, Human
uccucaugugcccaucuugg

SEQ ID NO: 706770 - RNA, 18 nt, Human
uccuccuccaccaccucc

SEQ ID NO: 706771 - RNA, 25 nt, Human
uccuccuccuccuccuccuccacca

SEQ ID NO: 706772 - RNA, 21 nt, Human
uccuggaggggagcacgugga

SEQ ID NO: 706773 - RNA, 24 nt, Human
ucgcugggcgccuaggcggcgucg

SEQ ID NO: 706774 - RNA, 19 nt, Human
ucguucagucaccacaggu

SEQ ID NO: 706775 - RNA, 23 nt, Human
ucuacagguuaguggcagcccug

SEQ ID NO: 706776 - RNA, 21 nt, Human
ucuccuggcccuuccucccca

SEQ ID NO: 706777 - RNA, 24 nt, Human
ucuccuggcccuuccuccccaaca

SEQ ID NO: 706778 - RNA, 21 nt, Human
ucugggggacggggacuuucc

SEQ ID NO: 706779 - RNA, 20 nt, Human
ucugucuggaggaaaagggu

SEQ ID NO: 706780 - RNA, 24 nt, Human
ucuuccugccugugccugauaccu

SEQ ID NO: 706781 - RNA, 22 nt, Human
ugaaaucaggaccccucccuuc

SEQ ID NO: 706782 - RNA, 18 nt, Human
ugacaccgccccccccac

SEQ ID NO: 706783 - RNA, 24 nt, Human
ugagccccuugcaugccuucaucc

SEQ ID NO: 706784 - RNA, 20 nt, Human
ugaggacaggaaccagguuu

SEQ ID NO: 706785 - RNA, 22 nt, Human
ugauuccaacgcacacuggaga

SEQ ID NO: 706786 - RNA, 25 nt, Human
ugccuuccuccuccuccuccuccuc

SEQ ID NO: 706787 - RNA, 25 nt, Human
uggaguggagcccaaaaaucugugu

SEQ ID NO: 706788 - RNA, 18 nt, Human
uggcagaagaggugacug

SEQ ID NO: 706789 - RNA, 20 nt, Human
uggcagaagaggugacuggg

SEQ ID NO: 706790 - RNA, 21 nt, Human
uggcccuuccuccccagaacc

SEQ ID NO: 706791 - RNA, 22 nt, Human
uggggaggcuggcagaagaggu

SEQ ID NO: 706792 - RNA, 19 nt, Human
ugguccccaccucuugggu

SEQ ID NO: 706793 - RNA, 19 nt, Human
uggugaggguggagcuagg

SEQ ID NO: 706794 - RNA, 19 nt, Human
ugguuuggggcuguaucug

SEQ ID NO: 706795 - RNA, 22 nt, Human
ugugaaggucaaacacagacug

SEQ ID NO: 706796 - RNA, 19 nt, Human
ugugcccaucuugguccgg

SEQ ID NO: 706797 - RNA, 19 nt, Human
uguuuucccagguaccccu

SEQ ID NO: 706798 - RNA, 19 nt, Human
uucacccggccccacccuc

SEQ ID NO: 706799 - RNA, 18 nt, Human
uucaucuuccucucagcu

SEQ ID NO: 706800 - RNA, 18 nt, Human
uuccuaggggcucccugu

SEQ ID NO: 706801 - RNA, 20 nt, Human
uuccuccuccuccuccuccu

SEQ ID NO: 706802 - RNA, 25 nt, Human
uuccugccugugccugauaccugua

SEQ ID NO: 706803 - RNA, 20 nt, Human
uucucagcuucucuucaucu

SEQ ID NO: 706804 - RNA, 20 nt, Human
uuggaguggagcccaaaaau

SEQ ID NO: 706805 - RNA, 18 nt, Human
uuuaucugcuaccaucuu

SEQ ID NO: 706806 - RNA, 18 nt, Human
uuucccacacauaaaacc

SEQ ID NO: 706807 - RNA, 25 nt, Human
uuucugggcccaaaguuaaacucuu

SEQ ID NO: 706808 - RNA, 18 nt, Human
uuugaauguccacuccac

SEQ ID NO: 706809 - RNA, 21 nt, Human
uuuugguccccaccucuuggg

SEQ ID NO: 706810 - RNA, 21 nt, Human
agagaagcaaaccacgcccgg

SEQ ID NO: 706811 - RNA, 20 nt, Human
ccacgcccggcggccccgcg

SEQ ID NO: 706812 - RNA, 25 nt, Human
cgccagcagugacugagagaagcaa

SEQ ID NO: 706813 - RNA, 24 nt, Human
ggccuggagaggguccccggcgcg

SEQ ID NO: 706814 - RNA, 23 nt, Human
uaagaaagcgccagcagugacug

SEQ ID NO: 706815 - RNA, 25 nt, Human
ugagagaagcaaaccacgcccggcg

SEQ ID NO: 706816 - RNA, 21 nt, Human
uuggauaaagauuaagaaagc

SEQ ID NO: 706817 - RNA, 25 nt, Human
aaaaaacagaaacagguauaaagag

SEQ ID NO: 706818 - RNA, 30 nt, Human
aaaaauaaaaagaaagggacaacaaaaaag

SEQ ID NO: 706819 - RNA, 24 nt, Human
aaaagaaagcccagacacaucccc

SEQ ID NO: 706820 - RNA, 23 nt, Human
aaccuaucuccucaggcagcuag

SEQ ID NO: 706821 - RNA, 20 nt, Human
aagaaagggacaacaaaaaa

SEQ ID NO: 706822 - RNA, 20 nt, Human
aaggaacagagagagcuuca

SEQ ID NO: 706823 - RNA, 24 nt, Human
acaacaaaaaacagaaacagguau

SEQ ID NO: 706824 - RNA, 21 nt, Human
acacauccccaaacauucucc

SEQ ID NO: 706825 - RNA, 24 nt, Human
acagacauuuucccuaugcagaca

SEQ ID NO: 706826 - RNA, 21 nt, Human
acauucuccccacuuuuaaaa

SEQ ID NO: 706827 - RNA, 18 nt, Human
accauucaaagggaaaau

SEQ ID NO: 706828 - RNA, 18 nt, Human
accccggcucccuguccg

SEQ ID NO: 706829 - RNA, 20 nt, Human
accccggcucccuguccggc

SEQ ID NO: 706830 - RNA, 21 nt, Human
agaaagcccagacacaucccc

SEQ ID NO: 706831 - RNA, 19 nt, Human
agaaagggacaacaaaaaa

SEQ ID NO: 706832 - RNA, 24 nt, Human
agaaagggacaacaaaaaacagaa

SEQ ID NO: 706833 - RNA, 23 nt, Human
agacaagcaucgaggcuucaggc

SEQ ID NO: 706834 - RNA, 19 nt, Human
agaguucuagggaaagaug

SEQ ID NO: 706835 - RNA, 18 nt, Human
agaucagauuucuaaaga

SEQ ID NO: 706836 - RNA, 20 nt, Human
agcuccuguggcgccagcuc

SEQ ID NO: 706837 - RNA, 21 nt, Human
aggcagcuaaagcucugaaac

SEQ ID NO: 706838 - RNA, 22 nt, Human
aggcauuaaggccuuaaaaaua

SEQ ID NO: 706839 - RNA, 18 nt, Human
aggcucccgggaacagcu

SEQ ID NO: 706840 - RNA, 21 nt, Human
aggcucccgggaacagcuccc

SEQ ID NO: 706841 - RNA, 21 nt, Human
agguaugcuuugaaggaagcc

SEQ ID NO: 706842 - RNA, 19 nt, Human
auccccaaacauucucccc

SEQ ID NO: 706843 - RNA, 18 nt, Human
caaaaaacagaaacaggu

SEQ ID NO: 706844 - RNA, 22 nt, Human
caaaaagaaagcccagacacau

SEQ ID NO: 706845 - RNA, 23 nt, Human
caacaaaaaacagaaacagguau

SEQ ID NO: 706846 - RNA, 19 nt, Human
cacccccgggaaauaaggg

SEQ ID NO: 706847 - RNA, 23 nt, Human
caccccggcucccuguccggcuc

SEQ ID NO: 706848 - RNA, 22 nt, Human
cagaaggaacagagccaaggcg

SEQ ID NO: 706849 - RNA, 20 nt, Human
cagcucccgggcgccccacc

SEQ ID NO: 706850 - RNA, 20 nt, Human
caggaaaucaaggcuuaagg

SEQ ID NO: 706851 - RNA, 23 nt, Human
cauccccaaacauucuccccacu

SEQ ID NO: 706852 - RNA, 20 nt, Human
ccacagccaggcauuaaggc

SEQ ID NO: 706853 - RNA, 22 nt, Human
ccagacacauccccaaacauuc

SEQ ID NO: 706854 - RNA, 25 nt, Human
ccaugaccgccgggcucucccgcag

SEQ ID NO: 706855 - RNA, 20 nt, Human
cccacaccccuacaccacca

SEQ ID NO: 706856 - RNA, 22 nt, Human
cccaccgccggcucgcccauga

SEQ ID NO: 706857 - RNA, 20 nt, Human
cccccgggaaauaagggccc

SEQ ID NO: 706858 - RNA, 21 nt, Human
cccccgggaaauaagggcccc

SEQ ID NO: 706859 - RNA, 21 nt, Human
ccccggcgcucagccagcucc

SEQ ID NO: 706860 - RNA, 18 nt, Human
ccccuccacucccccugc

SEQ ID NO: 706861 - RNA, 23 nt, Human
ccccugggcggcaaucauccucc

SEQ ID NO: 706862 - RNA, 22 nt, Human
cccuccacucccccugcucucc

SEQ ID NO: 706863 - RNA, 23 nt, Human
cccuccacucccccugcucuccc

SEQ ID NO: 706864 - RNA, 25 nt, Human
cccuccacucccccugcucuccucg

SEQ ID NO: 706865 - RNA, 20 nt, Human
cccugguaaaaaugaaaugg

SEQ ID NO: 706866 - RNA, 27 nt, Human
ccgcuuugucgccgccguuccccucca

SEQ ID NO: 706867 - RNA, 23 nt, Human
ccuguccggcucagauaggggag

SEQ ID NO: 706868 - RNA, 22 nt, Human
cgggcccccgggggcagccccc

SEQ ID NO: 706869 - RNA, 19 nt, Human
cgguagcuccuguggcgcc

SEQ ID NO: 706870 - RNA, 26 nt, Human
cuaaagcucugaaacaagauuaauga

SEQ ID NO: 706871 - RNA, 20 nt, Human
cucacagacgccacagccag

SEQ ID NO: 706872 - RNA, 21 nt, Human
cucacagacgccacagccagg

SEQ ID NO: 706873 - RNA, 19 nt, Human
cucccgggaacagcuccca

SEQ ID NO: 706874 - RNA, 19 nt, Human
cucugcccagcauccauuc

SEQ ID NO: 706875 - RNA, 18 nt, Human
cugaaacaagauuaauga

SEQ ID NO: 706876 - RNA, 24 nt, Human
gagccgagaucagauuucuaaaga

SEQ ID NO: 706877 - RNA, 21 nt, Human
gcaggccgcgaggcucccccg

SEQ ID NO: 706878 - RNA, 19 nt, Human
gcauuggguccccaagccc

SEQ ID NO: 706879 - RNA, 19 nt, Human
gccagcuccccacguccuc

SEQ ID NO: 706880 - RNA, 20 nt, Human
gccuggcaaaaagaaagccc

SEQ ID NO: 706881 - RNA, 19 nt, Human
gcgccagcuccccacgucc

SEQ ID NO: 706882 - RNA, 20 nt, Human
gcgcucagccagcucccggg

SEQ ID NO: 706883 - RNA, 21 nt, Human
gcucccccggccgccgccucg

SEQ ID NO: 706884 - RNA, 22 nt, Human
gcugggaugcgggcgcaguuuc

SEQ ID NO: 706885 - RNA, 25 nt, Human
gcuuugucgccgccguuccccucca

SEQ ID NO: 706886 - RNA, 21 nt, Human
ggcgcucagccagcucccggg

SEQ ID NO: 706887 - RNA, 22 nt, Human
ggcgcucagccagcucccgggc

SEQ ID NO: 706888 - RNA, 21 nt, Human
gggacaacaaaaaacagaaac

SEQ ID NO: 706889 - RNA, 21 nt, Human
gggcgcaguuuccaccccggc

SEQ ID NO: 706890 - RNA, 21 nt, Human
ggggaacgggcgcagaguuca

SEQ ID NO: 706891 - RNA, 23 nt, Human
uaaugaaacaaggcaaugucuaa

SEQ ID NO: 706892 - RNA, 23 nt, Human
uagcuccuguggcgccagcuccc

SEQ ID NO: 706893 - RNA, 19 nt, Human
ucaggaaaucaaggcuuaa

SEQ ID NO: 706894 - RNA, 19 nt, Human
uccccaaacauucucccca

SEQ ID NO: 706895 - RNA, 21 nt, Human
uccccaaacauucuccccacu

SEQ ID NO: 706896 - RNA, 21 nt, Human
ucccugucccacaccccuaca

SEQ ID NO: 706897 - RNA, 19 nt, Human
ucucccgcaggccgcgagg

SEQ ID NO: 706898 - RNA, 19 nt, Human
ucugaaacaagauuaauga

SEQ ID NO: 706899 - RNA, 19 nt, Human
ucuugcugcaguuuaaagg

SEQ ID NO: 706900 - RNA, 26 nt, Human
ugaaacaagauuaaugaaacaaggca

SEQ ID NO: 706901 - RNA, 20 nt, Human
ugacuccuaguuucaaaucc

SEQ ID NO: 706902 - RNA, 20 nt, Human
ugcagacaccauuggcaggu

SEQ ID NO: 706903 - RNA, 18 nt, Human
ugcauuggguccccaagc

SEQ ID NO: 706904 - RNA, 21 nt, Human
uggaagguggcuguugguugg

SEQ ID NO: 706905 - RNA, 23 nt, Human
uggcaaaaagaaagcccagacac

SEQ ID NO: 706906 - RNA, 20 nt, Human
uggccucugcccagcaucca

SEQ ID NO: 706907 - RNA, 23 nt, Human
uggcgcugggaugcgggcgcagu

SEQ ID NO: 706908 - RNA, 21 nt, Human
ugucgccgccguuccccucca

SEQ ID NO: 706909 - RNA, 18 nt, Human
uucacgucugcuuggcgc

SEQ ID NO: 706910 - RNA, 22 nt, Human
uucagaguucuagggaaagaug

SEQ ID NO: 706911 - RNA, 20 nt, Human
uugacuccuaguuucaaauc

SEQ ID NO: 706912 - RNA, 24 nt, Human
uugcugcaguuuaaaggccugaag

SEQ ID NO: 706913 - RNA, 27 nt, Human
uuuaaaaauucauccauucagaguucu

SEQ ID NO: 706914 - RNA, 19 nt, Human
aucccuggggagggugccc

SEQ ID NO: 706915 - RNA, 19 nt, Human
cagaagaccgccuagaggc

SEQ ID NO: 706916 - RNA, 20 nt, Human
ccgccgcggucccaaccugc

SEQ ID NO: 706917 - RNA, 22 nt, Human
ccgccgcggucccaaccugcuc

SEQ ID NO: 706918 - RNA, 18 nt, Human
cgccuagaggcccgucau

SEQ ID NO: 706919 - RNA, 18 nt, Human
cugaagccagacccuccc

SEQ ID NO: 706920 - RNA, 21 nt, Human
gaaaggagggaggggacuuag

SEQ ID NO: 706921 - RNA, 22 nt, Human
gaaaggagggaggggacuuagc

SEQ ID NO: 706922 - RNA, 20 nt, Human
gacuuagccacagacaguaa

SEQ ID NO: 706923 - RNA, 25 nt, Human
uauauuuuuggaaaggagggagggg

SEQ ID NO: 706924 - RNA, 23 nt, Human
uccagauucgacccuggccuggg

SEQ ID NO: 706925 - RNA, 18 nt, Human
ucgacccuggccugggug

SEQ ID NO: 706926 - RNA, 21 nt, Human
ugagaaacugcucguggcaga

SEQ ID NO: 706927 - RNA, 23 nt, Human
uuuuuuuuuuuuuuuuuuuaugg

SEQ ID NO: 706928 - RNA, 20 nt, Human
aaagagggaccccagcugau

SEQ ID NO: 706929 - RNA, 23 nt, Human
aggcccccgaaaucccucuaccu

SEQ ID NO: 706930 - RNA, 18 nt, Human
caaaagagggaccccagc

SEQ ID NO: 706931 - RNA, 18 nt, Human
cccacaccucuguccuuu

SEQ ID NO: 706932 - RNA, 23 nt, Human
cccccgaaaucccucuaccugga

SEQ ID NO: 706933 - RNA, 29 nt, Human
cccccgaaaucccucuaccuggaguggag

SEQ ID NO: 706934 - RNA, 18 nt, Human
ccuggaguggaggaagcg

SEQ ID NO: 706935 - RNA, 18 nt, Human
ccuugggucucccacacc

SEQ ID NO: 706936 - RNA, 22 nt, Human
cucccacaccucuguccuuucc

SEQ ID NO: 706937 - RNA, 21 nt, Human
gggaccccagcugauugccac

SEQ ID NO: 706938 - RNA, 23 nt, Human
uaaguucuuggacucgggggcua

SEQ ID NO: 706939 - RNA, 18 nt, Human
uccaugagcuugggaggu

SEQ ID NO: 706940 - RNA, 21 nt, Human
ucccucuaccuggaguggagg

SEQ ID NO: 706941 - RNA, 21 nt, Human
uccuugcuucugagaaggccc

SEQ ID NO: 706942 - RNA, 19 nt, Human
ugccuaaguucuuggacuc

SEQ ID NO: 706943 - RNA, 21 nt, Human
ugccuaaguucuuggacucga

SEQ ID NO: 706944 - RNA, 22 nt, Human
uuauugucuuggggccccugcc

SEQ ID NO: 706945 - RNA, 20 nt, Human
uucuuggacucgggggcuau

SEQ ID NO: 706946 - RNA, 18 nt, Human
aggaagugggggagaagg

SEQ ID NO: 706947 - RNA, 21 nt, Human
cacccagccucuaggguggau

SEQ ID NO: 706948 - RNA, 18 nt, Human
cacccgaaagucacaucc

SEQ ID NO: 706949 - RNA, 20 nt, Human
cacccgaaagucacauccca

SEQ ID NO: 706950 - RNA, 21 nt, Human
cagccucuaggguggauggaa

SEQ ID NO: 706951 - RNA, 21 nt, Human
caugcugccccgacacccgaa

SEQ ID NO: 706952 - RNA, 24 nt, Human
cccgacacccgaaagucacauccc

SEQ ID NO: 706953 - RNA, 23 nt, Human
ccgaaagucacaucccaugucac

SEQ ID NO: 706954 - RNA, 21 nt, Human
ccgcuaaaguaaggaaguggg

SEQ ID NO: 706955 - RNA, 19 nt, Human
cgccgggagcgguggacua

SEQ ID NO: 706956 - RNA, 21 nt, Human
cgccgggagcgguggacuagg

SEQ ID NO: 706957 - RNA, 26 nt, Human
cucucacauaaaggagggucggugau

SEQ ID NO: 706958 - RNA, 20 nt, Human
cucucucacauaaaggaggg

SEQ ID NO: 706959 - RNA, 19 nt, Human
cugcacccagccucuaggg

SEQ ID NO: 706960 - RNA, 19 nt, Human
cugcacccagccucuaggg

SEQ ID NO: 706961 - RNA, 23 nt, Human
cuucauggugccguauggcugcc

SEQ ID NO: 706962 - RNA, 19 nt, Human
gcugccccgacacccgaaa

SEQ ID NO: 706963 - RNA, 21 nt, Human
gggagaggcggggagccggcg

SEQ ID NO: 706964 - RNA, 23 nt, Human
gggccaggcguccagcucguauc

SEQ ID NO: 706965 - RNA, 18 nt, Human
ggggagccggcgccggga

SEQ ID NO: 706966 - RNA, 23 nt, Human
ggggagccggcgccgggagcggu

SEQ ID NO: 706967 - RNA, 19 nt, Human
gugccguauggcugccaga

SEQ ID NO: 706968 - RNA, 18 nt, Human
uaggguggauggaaaaug

SEQ ID NO: 706969 - RNA, 20 nt, Human
ugccccgacacccgaaaguc

SEQ ID NO: 706970 - RNA, 20 nt, Human
uggguggacaugugcaaagc

SEQ ID NO: 706971 - RNA, 18 nt, Human
aaaaauauuuuuggcugu

SEQ ID NO: 706972 - RNA, 21 nt, Human
aaacagcaaccagccuagugc

SEQ ID NO: 706973 - RNA, 25 nt, Human
aacacaaaaguaaauagcaauguga

SEQ ID NO: 706974 - RNA, 22 nt, Human
aacacauuaauuugccacaaca

SEQ ID NO: 706975 - RNA, 19 nt, Human
aaccaacacaaaacaguua

SEQ ID NO: 706976 - RNA, 21 nt, Human
aaccaugcaagguaaacagca

SEQ ID NO: 706977 - RNA, 22 nt, Human
aagaaaacagaacggugcccag

SEQ ID NO: 706978 - RNA, 24 nt, Human
aagaaaacagaacggugcccagca

SEQ ID NO: 706979 - RNA, 21 nt, Human
aagaaaagaaagaaaacagaa

SEQ ID NO: 706980 - RNA, 23 nt, Human
aagcacaaauucacaaagagcaa

SEQ ID NO: 706981 - RNA, 18 nt, Human
aagguaaacagcaaccag

SEQ ID NO: 706982 - RNA, 19 nt, Human
aagguagugaaaagcccac

SEQ ID NO: 706983 - RNA, 28 nt, Human
aauaagugaugaaaaauauugucuucaa

SEQ ID NO: 706984 - RNA, 24 nt, Human
acaaaaguaaauagcaaugugaac

SEQ ID NO: 706985 - RNA, 20 nt, Human
agaaaagaaagaaaacagaa

SEQ ID NO: 706986 - RNA, 25 nt, Human
agaaauaagauuaugaaaaccacca

SEQ ID NO: 706987 - RNA, 20 nt, Human
agcagcauuuauaccaaggu

SEQ ID NO: 706988 - RNA, 18 nt, Human
agccuagugcaacuaacu

SEQ ID NO: 706989 - RNA, 24 nt, Human
aggaauggcaaaaagacccacagc

SEQ ID NO: 706990 - RNA, 21 nt, Human
auaaaacauguagaagagacu

SEQ ID NO: 706991 - RNA, 19 nt, Human
auauagaacagcuuuugca

SEQ ID NO: 706992 - RNA, 18 nt, Human
aucccaauagggaaugcu

SEQ ID NO: 706993 - RNA, 22 nt, Human
aucugacaacucagaacacaga

SEQ ID NO: 706994 - RNA, 26 nt, Human
auuuauaccaaggugcagugcccuuc

SEQ ID NO: 706995 - RNA, 27 nt, Human
caacacaaaacaguuauuuauucuccu

SEQ ID NO: 706996 - RNA, 20 nt, Human
cacagcgcgugcugcccucu

SEQ ID NO: 706997 - RNA, 21 nt, Human
cacagcgcgugcugcccucuc

SEQ ID NO: 706998 - RNA, 22 nt, Human
cacuccuuguaaguaucaucuc

SEQ ID NO: 706999 - RNA, 24 nt, Human
cagaaggagauacuacacauucau

SEQ ID NO: 707000 - RNA, 20 nt, Human
cauuugaaguccugauuaca

SEQ ID NO: 707001 - RNA, 21 nt, Human
ccacacaaauaucaguaacac

SEQ ID NO: 707002 - RNA, 19 nt, Human
cccaaacacaaaaguaaau

SEQ ID NO: 707003 - RNA, 18 nt, Human
cccagcagcauuuauacc

SEQ ID NO: 707004 - RNA, 22 nt, Human
ccucucacaccacucgccgcuu

SEQ ID NO: 707005 - RNA, 23 nt, Human
cuacacauucauugacuuaagca

SEQ ID NO: 707006 - RNA, 24 nt, Human
cuacacauucauugacuuaagcac

SEQ ID NO: 707007 - RNA, 22 nt, Human
cucagaacacagacuuuaucac

SEQ ID NO: 707008 - RNA, 24 nt, Human
cuccugaauaauaaagacaucaug

SEQ ID NO: 707009 - RNA, 19 nt, Human
cucucaguucuuuccaaca

SEQ ID NO: 707010 - RNA, 24 nt, Human
cuggcacacaaugugagaagagag

SEQ ID NO: 707011 - RNA, 24 nt, Human
cugugcacauagcuuuaaaauccc

SEQ ID NO: 707012 - RNA, 20 nt, Human
cuuaagcacaaauucacaaa

SEQ ID NO: 707013 - RNA, 26 nt, Human
cuuggcaaaugaauaacugagcccug

SEQ ID NO: 707014 - RNA, 19 nt, Human
cuuuccaacaugccccugg

SEQ ID NO: 707015 - RNA, 23 nt, Human
gaaaaccaccaaccaacacaaaa

SEQ ID NO: 707016 - RNA, 19 nt, Human
gaacaaaggcuuucuuuaa

SEQ ID NO: 707017 - RNA, 23 nt, Human
gacgacccaagagcguacugcau

SEQ ID NO: 707018 - RNA, 25 nt, Human
gcggaaugagagaagaaaguacuag

SEQ ID NO: 707019 - RNA, 21 nt, Human
gcuggguuuccccucuucuuu

SEQ ID NO: 707020 - RNA, 19 nt, Human
gcuuauauuuuggaaauua

SEQ ID NO: 707021 - RNA, 21 nt, Human
ggagcaccuaccaacauucag

SEQ ID NO: 707022 - RNA, 20 nt, Human
ggaggaauggcaaaaagacc

SEQ ID NO: 707023 - RNA, 19 nt, Human
ggugcagugcccuuccugg

SEQ ID NO: 707024 - RNA, 18 nt, Human
uaaaaagugaugaaaaaa

SEQ ID NO: 707025 - RNA, 26 nt, Human
uaagauuaugaaaaccaccaaccaac

SEQ ID NO: 707026 - RNA, 19 nt, Human
uacaagaaaaguaccuaac

SEQ ID NO: 707027 - RNA, 18 nt, Human
uaccaacaaguagcaucu

SEQ ID NO: 707028 - RNA, 18 nt, Human
uacugcauacuuggauag

SEQ ID NO: 707029 - RNA, 23 nt, Human
uagaagagacuaauauucugugg

SEQ ID NO: 707030 - RNA, 22 nt, Human
uagcaaugugaacaaaggcuuu

SEQ ID NO: 707031 - RNA, 24 nt, Human
uagcaaugugaacaaaggcuuucu

SEQ ID NO: 707032 - RNA, 24 nt, Human
uagcuuuaguaaacaauaagugau

SEQ ID NO: 707033 - RNA, 23 nt, Human
uagggaacucauaacagacugca

SEQ ID NO: 707034 - RNA, 21 nt, Human
uauaaaauauaacaacaaaaa

SEQ ID NO: 707035 - RNA, 20 nt, Human
uaugaaaaccaccaaccaac

SEQ ID NO: 707036 - RNA, 22 nt, Human
uaugaaaaccaccaaccaacac

SEQ ID NO: 707037 - RNA, 22 nt, Human
ucaagagaucugacaacucaga

SEQ ID NO: 707038 - RNA, 18 nt, Human
ucacaccacucgccgcuu

SEQ ID NO: 707039 - RNA, 18 nt, Human
ucacagguaaugacacuc

SEQ ID NO: 707040 - RNA, 21 nt, Human
ucagaacacagacuuuaucac

SEQ ID NO: 707041 - RNA, 23 nt, Human
ucagucagcucacagguaaugac

SEQ ID NO: 707042 - RNA, 22 nt, Human
ucaguucaaauauguguuagaa

SEQ ID NO: 707043 - RNA, 20 nt, Human
uccaacacauuaauuugcca

SEQ ID NO: 707044 - RNA, 22 nt, Human
uccaacacauuaauuugccaca

SEQ ID NO: 707045 - RNA, 22 nt, Human
uccacacaaauaucaguaacac

SEQ ID NO: 707046 - RNA, 19 nt, Human
uccaguacagaaauaagau

SEQ ID NO: 707047 - RNA, 21 nt, Human
ucccucguauuuucccccaaa

SEQ ID NO: 707048 - RNA, 18 nt, Human
ucgccgcuuuguugcucu

SEQ ID NO: 707049 - RNA, 22 nt, Human
ugaaaaaaaguagcuggcuggu

SEQ ID NO: 707050 - RNA, 19 nt, Human
ugaaaaauauugucuucaa

SEQ ID NO: 707051 - RNA, 21 nt, Human
ugaaaaauauugucuucaaga

SEQ ID NO: 707052 - RNA, 19 nt, Human
ugcagugcccuuccuggca

SEQ ID NO: 707053 - RNA, 26 nt, Human
ugccccugggucucaugagacgaccc

SEQ ID NO: 707054 - RNA, 20 nt, Human
ugcucuuucucucaguucuu

SEQ ID NO: 707055 - RNA, 24 nt, Human
uggcaaaugaauaacugagcccug

SEQ ID NO: 707056 - RNA, 18 nt, Human
uggcggaaugagagaaga

SEQ ID NO: 707057 - RNA, 24 nt, Human
uguaauggagcaccuaccaacauu

SEQ ID NO: 707058 - RNA, 25 nt, Human
uguaauggagcaccuaccaacauuc

SEQ ID NO: 707059 - RNA, 26 nt, Human
ugucuucuucuuuugauauugauauu

SEQ ID NO: 707060 - RNA, 22 nt, Human
uuagaaaaaagaucuauucugu

SEQ ID NO: 707061 - RNA, 20 nt, Human
uucaagagaucugacaacuc

SEQ ID NO: 707062 - RNA, 28 nt, Human
uucaagagaucugacaacucagaacaca

SEQ ID NO: 707063 - RNA, 19 nt, Human
uuccaacaugccccugggu

SEQ ID NO: 707064 - RNA, 24 nt, Human
uuccaacaugccccugggucucau

SEQ ID NO: 707065 - RNA, 18 nt, Human
uuccuggauuguaaugga

SEQ ID NO: 707066 - RNA, 19 nt, Human
uugaaaccaguccaccaau

SEQ ID NO: 707067 - RNA, 20 nt, Human
uugaaaccaguccaccaauu

SEQ ID NO: 707068 - RNA, 19 nt, Human
uugcauuauugcucuacau

SEQ ID NO: 707069 - RNA, 19 nt, Human
uuugccacaacacauuuac

SEQ ID NO: 707070 - RNA, 24 nt, Human
uuuuuuuuuuuuuuuuagauuuuu

SEQ ID NO: 707071 - RNA, 19 nt, Human
aaagagcccaguccuaaag

SEQ ID NO: 707072 - RNA, 23 nt, Human
aaagagcccaguccuaaagccac

SEQ ID NO: 707073 - RNA, 26 nt, Human
agaggagaggccaccguggggcacgc

SEQ ID NO: 707074 - RNA, 21 nt, Human
agcccaguccuaaagccaccc

SEQ ID NO: 707075 - RNA, 23 nt, Human
cacuguggguccaaggaugagcu

SEQ ID NO: 707076 - RNA, 19 nt, Human
cagagaugcucuagaaaca

SEQ ID NO: 707077 - RNA, 18 nt, Human
cagcagcuggggcacucc

SEQ ID NO: 707078 - RNA, 22 nt, Human
ccacuguggguccaaggaugag

SEQ ID NO: 707079 - RNA, 21 nt, Human
cuccaaagagcccaguccuaa

SEQ ID NO: 707080 - RNA, 22 nt, Human
cuggggcacuccugacaccgau

SEQ ID NO: 707081 - RNA, 18 nt, Human
uaucugaagacaucagca

SEQ ID NO: 707082 - RNA, 19 nt, Human
ucaguggaagcaaggagcc

SEQ ID NO: 707083 - RNA, 24 nt, Human
uccaaagagcccaguccuaaagcc

SEQ ID NO: 707084 - RNA, 23 nt, Human
ucuagaaacagcagcuggggcac

SEQ ID NO: 707085 - RNA, 20 nt, Human
ugaaaguacucaagagguca

SEQ ID NO: 707086 - RNA, 19 nt, Human
uggaagcaaggagccaaau

SEQ ID NO: 707087 - RNA, 18 nt, Human
uggguugcagagaugcuc

SEQ ID NO: 707088 - RNA, 21 nt, Human
uuguucccuucuuggcaaucc

SEQ ID NO: 707089 - RNA, 21 nt, Human
aacagaaagcguggcuccagc

SEQ ID NO: 707090 - RNA, 19 nt, Human
aaccagcacggaccccucc

SEQ ID NO: 707091 - RNA, 23 nt, Human
aagaggcgccacuguacaaggcu

SEQ ID NO: 707092 - RNA, 18 nt, Human
aaggcuucccggaggugg

SEQ ID NO: 707093 - RNA, 26 nt, Human
acuccaagaggcgccacuguacaagg

SEQ ID NO: 707094 - RNA, 18 nt, Human
acugagcuccagccagag

SEQ ID NO: 707095 - RNA, 21 nt, Human
acugagcuccagccagagggg

SEQ ID NO: 707096 - RNA, 21 nt, Human
agaaagcguggcuccagcuca

SEQ ID NO: 707097 - RNA, 22 nt, Human
agaggguggcugcugcugccuu

SEQ ID NO: 707098 - RNA, 21 nt, Human
agcgaugcuucuggccagggc

SEQ ID NO: 707099 - RNA, 18 nt, Human
aggccucaguccacucag

SEQ ID NO: 707100 - RNA, 23 nt, Human
agguggggcugguacaggugucc

SEQ ID NO: 707101 - RNA, 20 nt, Human
cacuguacaaggcuucccgg

SEQ ID NO: 707102 - RNA, 18 nt, Human
cagccagagggagagagg

SEQ ID NO: 707103 - RNA, 18 nt, Human
cagcggcugggcuccugc

SEQ ID NO: 707104 - RNA, 19 nt, Human
cagcucagaccaccccgga

SEQ ID NO: 707105 - RNA, 22 nt, Human
cagggcugggccaugcugucug

SEQ ID NO: 707106 - RNA, 23 nt, Human
ccagccaugcacacaggcagcca

SEQ ID NO: 707107 - RNA, 19 nt, Human
ccaugcacacaggcagcca

SEQ ID NO: 707108 - RNA, 18 nt, Human
ccuacugagcuccagcca

SEQ ID NO: 707109 - RNA, 25 nt, Human
ccucugccugggcagucugggcggg

SEQ ID NO: 707110 - RNA, 21 nt, Human
ccugcuggugaccacuugacu

SEQ ID NO: 707111 - RNA, 20 nt, Human
ccugggcagucugggcgggg

SEQ ID NO: 707112 - RNA, 22 nt, Human
ccuuugagaucuccgggguccc

SEQ ID NO: 707113 - RNA, 23 nt, Human
gaaccagcacggaccccuccccg

SEQ ID NO: 707114 - RNA, 22 nt, Human
gaagcuccgggcuccccugccc

SEQ ID NO: 707115 - RNA, 19 nt, Human
gcugcuccaugcccaccgg

SEQ ID NO: 707116 - RNA, 21 nt, Human
gcugcuccaugcccaccgggg

SEQ ID NO: 707117 - RNA, 21 nt, Human
gggcuggaggucuaccuccug

SEQ ID NO: 707118 - RNA, 27 nt, Human
ggggcugguacaggugucccuagagag

SEQ ID NO: 707119 - RNA, 20 nt, Human
uacccagggcuggaggucua

SEQ ID NO: 707120 - RNA, 23 nt, Human
ucaccagugccuuccagccaugc

SEQ ID NO: 707121 - RNA, 24 nt, Human
ucagaaccagcacggaccccuccc

SEQ ID NO: 707122 - RNA, 20 nt, Human
ucccuagagaguugucccua

SEQ ID NO: 707123 - RNA, 22 nt, Human
ucccuccagcucuccgaguccc

SEQ ID NO: 707124 - RNA, 19 nt, Human
uccggggucccuccagcuc

SEQ ID NO: 707125 - RNA, 19 nt, Human
ucuccgaguccguagggcc

SEQ ID NO: 707126 - RNA, 20 nt, Human
ugaccagaggaagcuccggg

SEQ ID NO: 707127 - RNA, 21 nt, Human
ugcccucugccugggcagucu

SEQ ID NO: 707128 - RNA, 18 nt, Human
ugccugggcagucugggc

SEQ ID NO: 707129 - RNA, 20 nt, Human
ugcuguucuccuucagcugc

SEQ ID NO: 707130 - RNA, 20 nt, Human
uggccagggcugggccaugc

SEQ ID NO: 707131 - RNA, 21 nt, Human
ugggacaucaccagugccuuc

SEQ ID NO: 707132 - RNA, 18 nt, Human
ugggagagaggguggcug

SEQ ID NO: 707133 - RNA, 18 nt, Human
ugguggcgggcagggccg

SEQ ID NO: 707134 - RNA, 20 nt, Human
ugucuugcuguucuccuuca

SEQ ID NO: 707135 - RNA, 24 nt, Human
uucccggagguggcggccacacga

SEQ ID NO: 707136 - RNA, 21 nt, Human
uuucugauucccacauucauc

SEQ ID NO: 707137 - RNA, 21 nt, Human
cacaaagcagaaaugccugaa

SEQ ID NO: 707138 - RNA, 22 nt, Human
cacaaagcagaaaugccugaaa

SEQ ID NO: 707139 - RNA, 21 nt, Human
cauacaccccauagcauuagc

SEQ ID NO: 707140 - RNA, 18 nt, Human
ucuaaaugaccuaaacuu

SEQ ID NO: 707141 - RNA, 19 nt, Human
ugacauauucauacacccc

SEQ ID NO: 707142 - RNA, 24 nt, Human
ugccugaaauuugaagguguuuac

SEQ ID NO: 707143 - RNA, 20 nt, Human
ugccuggaaagaaaaugaag

SEQ ID NO: 707144 - RNA, 18 nt, Human
uggcuaaagaacugcuau

SEQ ID NO: 707145 - RNA, 23 nt, Human
uuaaaagguaacgggcuuauaaa

SEQ ID NO: 707146 - RNA, 21 nt, Human
uuagcagcuguugauagccau

SEQ ID NO: 707147 - RNA, 23 nt, Human
uucauacaccccauagcauuagc

SEQ ID NO: 707148 - RNA, 21 nt, Human
uugaagguguuuacucccaua

SEQ ID NO: 707149 - RNA, 19 nt, Human
aaacaugaccugguucaug

SEQ ID NO: 707150 - RNA, 21 nt, Human
aaacaugaccugguucaugua

SEQ ID NO: 707151 - RNA, 24 nt, Human
aaacuucaagaaccaagcagggac

SEQ ID NO: 707152 - RNA, 23 nt, Human
aaagccaccgaggcugggagccg

SEQ ID NO: 707153 - RNA, 24 nt, Human
aacacaaggccaaacaugaccugg

SEQ ID NO: 707154 - RNA, 18 nt, Human
aagaaccaagcagggaca

SEQ ID NO: 707155 - RNA, 19 nt, Human
aagcagacaaugucuucca

SEQ ID NO: 707156 - RNA, 22 nt, Human
aagcagcccauaagucagaagc

SEQ ID NO: 707157 - RNA, 19 nt, Human
aagcagggacagggcaggc

SEQ ID NO: 707158 - RNA, 19 nt, Human
aagcccagaguucaagcag

SEQ ID NO: 707159 - RNA, 24 nt, Human
aaucaccaaaaaacacacgcaaac

SEQ ID NO: 707160 - RNA, 20 nt, Human
aaugguuuucacugauacau

SEQ ID NO: 707161 - RNA, 21 nt, Human
acaaacagccucaugguaggc

SEQ ID NO: 707162 - RNA, 19 nt, Human
acacaccuucacacaugcc

SEQ ID NO: 707163 - RNA, 22 nt, Human
acagauucugaccauuugacag

SEQ ID NO: 707164 - RNA, 19 nt, Human
acagggcaggcggagcuga

SEQ ID NO: 707165 - RNA, 19 nt, Human
acaugccauucucucugcu

SEQ ID NO: 707166 - RNA, 21 nt, Human
accacuuuacacagcaggucu

SEQ ID NO: 707167 - RNA, 21 nt, Human
acucauccuccuucccuccag

SEQ ID NO: 707168 - RNA, 24 nt, Human
acucauccuccuucccuccaggac

SEQ ID NO: 707169 - RNA, 21 nt, Human
agaaaggaaccacagcugaga

SEQ ID NO: 707170 - RNA, 20 nt, Human
agaaccaagcagggacaggg

SEQ ID NO: 707171 - RNA, 19 nt, Human
agacacuauggggaaccug

SEQ ID NO: 707172 - RNA, 20 nt, Human
agcaggggaggaaucucuac

SEQ ID NO: 707173 - RNA, 23 nt, Human
agcugagauccagagcuccuaua

SEQ ID NO: 707174 - RNA, 19 nt, Human
aggagcaaagugugcagaa

SEQ ID NO: 707175 - RNA, 20 nt, Human
aggcauucagauucuuaaaa

SEQ ID NO: 707176 - RNA, 21 nt, Human
aggccacacaugaagccccag

SEQ ID NO: 707177 - RNA, 23 nt, Human
auccuuucaacuuccuccccucu

SEQ ID NO: 707178 - RNA, 19 nt, Human
aucuaggguagcacugucc

SEQ ID NO: 707179 - RNA, 19 nt, Human
auggucccugauacauuau

SEQ ID NO: 707180 - RNA, 20 nt, Human
auuugcauaaugguuuucac

SEQ ID NO: 707181 - RNA, 18 nt, Human
caaaaaacacacgcaaac

SEQ ID NO: 707182 - RNA, 24 nt, Human
caaauaccuacucugcaccaagcc

SEQ ID NO: 707183 - RNA, 26 nt, Human
caaggccaaacaugaccugguucaug

SEQ ID NO: 707184 - RNA, 21 nt, Human
caccacuguaucucuugagac

SEQ ID NO: 707185 - RNA, 18 nt, Human
cacccagugggcuguagg

SEQ ID NO: 707186 - RNA, 20 nt, Human
caccuccacuuggaucucca

SEQ ID NO: 707187 - RNA, 24 nt, Human
cacgcaaaggcauucagauucuua

SEQ ID NO: 707188 - RNA, 23 nt, Human
cagaagaaagauggaguugaugg

SEQ ID NO: 707189 - RNA, 20 nt, Human
cagaagccaguauaucagag

SEQ ID NO: 707190 - RNA, 20 nt, Human
cagaagggcugguaugugug

SEQ ID NO: 707191 - RNA, 23 nt, Human
cagcaagugaagagaagauucag

SEQ ID NO: 707192 - RNA, 18 nt, Human
cagcaugagugauccugg

SEQ ID NO: 707193 - RNA, 26 nt, Human
cagcauggucccuggcacauaaucaa

SEQ ID NO: 707194 - RNA, 20 nt, Human
cagcccauaagucagaagcc

SEQ ID NO: 707195 - RNA, 21 nt, Human
cagcccauaagucagaagcca

SEQ ID NO: 707196 - RNA, 20 nt, Human
cagcugagauccagagcucc

SEQ ID NO: 707197 - RNA, 20 nt, Human
ccaaauaccuacucugcacc

SEQ ID NO: 707198 - RNA, 23 nt, Human
ccaacaagcccagauuccaaacc

SEQ ID NO: 707199 - RNA, 21 nt, Human
ccaacacaaggccaaacauga

SEQ ID NO: 707200 - RNA, 20 nt, Human
ccacagcugagauccagagc

SEQ ID NO: 707201 - RNA, 23 nt, Human
ccagaagggagaggacucucaca

SEQ ID NO: 707202 - RNA, 23 nt, Human
ccaggacucauccuccuucccuc

SEQ ID NO: 707203 - RNA, 22 nt, Human
ccaggggcccuucagauuuucu

SEQ ID NO: 707204 - RNA, 26 nt, Human
cccaggacucauccuccuucccucca

SEQ ID NO: 707205 - RNA, 25 nt, Human
ccccccuggaaccucauuugcuuaa

SEQ ID NO: 707206 - RNA, 20 nt, Human
ccccgcugcccucuccuucc

SEQ ID NO: 707207 - RNA, 20 nt, Human
ccccuccucugacuuucuca

SEQ ID NO: 707208 - RNA, 21 nt, Human
cccgccgagccuccugcugca

SEQ ID NO: 707209 - RNA, 20 nt, Human
cccgcugcccucuccuuccu

SEQ ID NO: 707210 - RNA, 19 nt, Human
cccucuccuuccuucuucc

SEQ ID NO: 707211 - RNA, 19 nt, Human
cccucuccuuccuucuucc

SEQ ID NO: 707212 - RNA, 18 nt, Human
cccucugagcuuggcacc

SEQ ID NO: 707213 - RNA, 18 nt, Human
cccuggcucugaaaggga

SEQ ID NO: 707214 - RNA, 20 nt, Human
ccgaaacaugacugcaggcc

SEQ ID NO: 707215 - RNA, 19 nt, Human
ccgcuggcuauacucgguc

SEQ ID NO: 707216 - RNA, 19 nt, Human
ccggccccgccgagccucc

SEQ ID NO: 707217 - RNA, 22 nt, Human
ccggccccgccgagccuccugc

SEQ ID NO: 707218 - RNA, 24 nt, Human
ccggccccgccgagccuccugcug

SEQ ID NO: 707219 - RNA, 18 nt, Human
ccucugccccgccggccc

SEQ ID NO: 707220 - RNA, 18 nt, Human
ccucuguuccaaucugga

SEQ ID NO: 707221 - RNA, 25 nt, Human
ccugcugcaggcggccccgcugccc

SEQ ID NO: 707222 - RNA, 22 nt, Human
ccugggaggcucacuaccauga

SEQ ID NO: 707223 - RNA, 21 nt, Human
ccuguccugggccuuuggagg

SEQ ID NO: 707224 - RNA, 25 nt, Human
ccuuccuucuuccuugccuaguccc

SEQ ID NO: 707225 - RNA, 24 nt, Human
ccuugagugcauucgucgcccucu

SEQ ID NO: 707226 - RNA, 21 nt, Human
ccuuggcuuucauugccuucu

SEQ ID NO: 707227 - RNA, 24 nt, Human
cgaucgcugcccacgcguccgugc

SEQ ID NO: 707228 - RNA, 19 nt, Human
cgccucugccccgccggcc

SEQ ID NO: 707229 - RNA, 20 nt, Human
cgggauuacaggcgcgguca

SEQ ID NO: 707230 - RNA, 21 nt, Human
cgggauuacaggcgcggucac

SEQ ID NO: 707231 - RNA, 19 nt, Human
cugagcuuggcacccagug

SEQ ID NO: 707232 - RNA, 21 nt, Human
cuggauggguacucuagguag

SEQ ID NO: 707233 - RNA, 18 nt, Human
cuucuaauugugacaucu

SEQ ID NO: 707234 - RNA, 19 nt, Human
cuuguggaucaacucuggg

SEQ ID NO: 707235 - RNA, 20 nt, Human
gaaccacagcugagauccag

SEQ ID NO: 707236 - RNA, 21 nt, Human
gaaccacagcugagauccaga

SEQ ID NO: 707237 - RNA, 20 nt, Human
gaacugccaaggucagacug

SEQ ID NO: 707238 - RNA, 25 nt, Human
gaccauaagggugcuacacgcagcc

SEQ ID NO: 707239 - RNA, 19 nt, Human
gaggcugggagccgcuggc

SEQ ID NO: 707240 - RNA, 23 nt, Human
gagguccaggucucucucuggcu

SEQ ID NO: 707241 - RNA, 21 nt, Human
gaguucaagcagacaaugucu

SEQ ID NO: 707242 - RNA, 21 nt, Human
gauuacaggcgcggucacacc

SEQ ID NO: 707243 - RNA, 20 nt, Human
gcaggcggccccgcugcccu

SEQ ID NO: 707244 - RNA, 21 nt, Human
gcccuucagauuuucuuucuc

SEQ ID NO: 707245 - RNA, 23 nt, Human
gccuuuggaggaaggaaugcagc

SEQ ID NO: 707246 - RNA, 26 nt, Human
gcucccaccuccacuuggaucuccac

SEQ ID NO: 707247 - RNA, 21 nt, Human
gcugcaggcggccccgcugcc

SEQ ID NO: 707248 - RNA, 23 nt, Human
gcugcccucuccuuccuucuucc

SEQ ID NO: 707249 - RNA, 21 nt, Human
ggaguugauggagcauugcuc

SEQ ID NO: 707250 - RNA, 19 nt, Human
ggcacaccaacaagcccag

SEQ ID NO: 707251 - RNA, 25 nt, Human
ggccuuuggaggaaggaaugcagcu

SEQ ID NO: 707252 - RNA, 20 nt, Human
ggcugggagccgcuggcuau

SEQ ID NO: 707253 - RNA, 22 nt, Human
gggcagggauuggaccacuuua

SEQ ID NO: 707254 - RNA, 21 nt, Human
gggcuggaaucuggacuuggg

SEQ ID NO: 707255 - RNA, 26 nt, Human
gggcuggagcuggccagaagggagag

SEQ ID NO: 707256 - RNA, 23 nt, Human
ggggagcgaguuguugcuuuucu

SEQ ID NO: 707257 - RNA, 20 nt, Human
gugugucuguuugugggugg

SEQ ID NO: 707258 - RNA, 19 nt, Human
guguguucugcaagaccau

SEQ ID NO: 707259 - RNA, 20 nt, Human
guuagauugucacuugcuca

SEQ ID NO: 707260 - RNA, 22 nt, Human
guuucuugguguguucugcaag

SEQ ID NO: 707261 - RNA, 21 nt, Human
uaacacaacggcauguguguc

SEQ ID NO: 707262 - RNA, 21 nt, Human
uaagcagcccauaagucagaa

SEQ ID NO: 707263 - RNA, 22 nt, Human
uaagucagaagccaguauauca

SEQ ID NO: 707264 - RNA, 23 nt, Human
uaauuagcaauuuaucauuugga

SEQ ID NO: 707265 - RNA, 19 nt, Human
uacacaccuguacuuagua

SEQ ID NO: 707266 - RNA, 23 nt, Human
uacacaccuguacuuaguagagc

SEQ ID NO: 707267 - RNA, 18 nt, Human
uacacagcaggucuuggc

SEQ ID NO: 707268 - RNA, 18 nt, Human
uacucggucucgccucug

SEQ ID NO: 707269 - RNA, 20 nt, Human
uagagaccccucugcucucc

SEQ ID NO: 707270 - RNA, 21 nt, Human
uagcaaaucuugcauaccagc

SEQ ID NO: 707271 - RNA, 21 nt, Human
uaugacacacaccuucacaca

SEQ ID NO: 707272 - RNA, 19 nt, Human
uauguacuaggcccugugu

SEQ ID NO: 707273 - RNA, 18 nt, Human
ucaccaaaaaacacacgc

SEQ ID NO: 707274 - RNA, 22 nt, Human
uccaaaucuccugucuggaccc

SEQ ID NO: 707275 - RNA, 19 nt, Human
uccaugaaucaccaaaaaa

SEQ ID NO: 707276 - RNA, 19 nt, Human
ucccaggacucauccuccu

SEQ ID NO: 707277 - RNA, 21 nt, Human
uccucuguuccaaucuggaga

SEQ ID NO: 707278 - RNA, 23 nt, Human
uccuuggcuuucauugccuucug

SEQ ID NO: 707279 - RNA, 21 nt, Human
ucuagaucucaggccaggggc

SEQ ID NO: 707280 - RNA, 22 nt, Human
ucucacagaaucuaggguagca

SEQ ID NO: 707281 - RNA, 21 nt, Human
ucuccuuggcuuucauugccu

SEQ ID NO: 707282 - RNA, 19 nt, Human
ucuuguggaucaacucugg

SEQ ID NO: 707283 - RNA, 19 nt, Human
ugagcuggcuuuaaguuag

SEQ ID NO: 707284 - RNA, 18 nt, Human
ugagggggcuggagcugg

SEQ ID NO: 707285 - RNA, 21 nt, Human
ugaugggcagaaaggaacugc

SEQ ID NO: 707286 - RNA, 20 nt, Human
ugccaaggucagacuguugg

SEQ ID NO: 707287 - RNA, 22 nt, Human
ugccaaggucagacuguugggg

SEQ ID NO: 707288 - RNA, 18 nt, Human
ugccaggaaccacaaaca

SEQ ID NO: 707289 - RNA, 18 nt, Human
ugccgggauuacaggcgc

SEQ ID NO: 707290 - RNA, 24 nt, Human
ugccgggauuacaggcgcggucac

SEQ ID NO: 707291 - RNA, 23 nt, Human
ugcuaugguacuuccucccagga

SEQ ID NO: 707292 - RNA, 22 nt, Human
ugcugcaggcggccccgcugcc

SEQ ID NO: 707293 - RNA, 20 nt, Human
uggacccuuccccuggcucu

SEQ ID NO: 707294 - RNA, 18 nt, Human
uggcuuggaggcagguuu

SEQ ID NO: 707295 - RNA, 22 nt, Human
ugggggcagggauuggaccacu

SEQ ID NO: 707296 - RNA, 18 nt, Human
uguacaggaggugcucag

SEQ ID NO: 707297 - RNA, 27 nt, Human
uguaugacacacaccuucacacauggu

SEQ ID NO: 707298 - RNA, 19 nt, Human
ugugguggcaccucccggg

SEQ ID NO: 707299 - RNA, 21 nt, Human
ugugguggcaccucccgggcg

SEQ ID NO: 707300 - RNA, 21 nt, Human
uuagagaccccucugcucucc

SEQ ID NO: 707301 - RNA, 23 nt, Human
uuaguauccuuucaacuuccucc

SEQ ID NO: 707302 - RNA, 21 nt, Human
uucaacauuuaccaaauaccu

SEQ ID NO: 707303 - RNA, 22 nt, Human
uucaacuuccuccccucuggcu

SEQ ID NO: 707304 - RNA, 20 nt, Human
uucaugaauggcuuggaggc

SEQ ID NO: 707305 - RNA, 23 nt, Human
uucauguacaggaggugcucagg

SEQ ID NO: 707306 - RNA, 21 nt, Human
uuccccuggcucugaaaggga

SEQ ID NO: 707307 - RNA, 23 nt, Human
uucccucuugagcuuucuccaca

SEQ ID NO: 707308 - RNA, 24 nt, Human
uugcugacuccuguuggaugcucc

SEQ ID NO: 707309 - RNA, 25 nt, Human
uugcuugcagaaucucacagaaucu

SEQ ID NO: 707310 - RNA, 25 nt, Human
uuuaagacucuuccaacggguauuu

SEQ ID NO: 707311 - RNA, 20 nt, Human
uuuaucggcagcaugguccc

SEQ ID NO: 707312 - RNA, 22 nt, Human
uuucgggggccagcucuuuauu

SEQ ID NO: 707313 - RNA, 22 nt, Human
uuugauugcugacuccuguugg

SEQ ID NO: 707314 - RNA, 20 nt, Human
uuuuuuuuuuuuuucggggg

SEQ ID NO: 707315 - RNA, 19 nt, Human
aacaugcugaugcugaaga

SEQ ID NO: 707316 - RNA, 19 nt, Human
aagcagcagauggcuucca

SEQ ID NO: 707317 - RNA, 22 nt, Human
aagcagcagauggcuuccagga

SEQ ID NO: 707318 - RNA, 18 nt, Human
aaggcccucuucuuccgc

SEQ ID NO: 707319 - RNA, 22 nt, Human
acacgccauacuucuugugggc

SEQ ID NO: 707320 - RNA, 23 nt, Human
acguagagggggcaguugggggc

SEQ ID NO: 707321 - RNA, 21 nt, Human
agaaagacggggaugaacagg

SEQ ID NO: 707322 - RNA, 21 nt, Human
agagggaucugcaggacucug

SEQ ID NO: 707323 - RNA, 20 nt, Human
agcagggugaugagggugga

SEQ ID NO: 707324 - RNA, 24 nt, Human
aggaagcuuauuauggccacgaug

SEQ ID NO: 707325 - RNA, 19 nt, Human
aggcaggagguggcacagg

SEQ ID NO: 707326 - RNA, 20 nt, Human
aggcaggagguggcacaggg

SEQ ID NO: 707327 - RNA, 24 nt, Human
aggcaggagguggcacaggguugg

SEQ ID NO: 707328 - RNA, 25 nt, Human
aggcaggagguggcacaggguuggg

SEQ ID NO: 707329 - RNA, 21 nt, Human
aggcucuugcgccguagcagu

SEQ ID NO: 707330 - RNA, 19 nt, Human
agggaucugcaggacucug

SEQ ID NO: 707331 - RNA, 22 nt, Human
aggugcuggaugccgcaggucc

SEQ ID NO: 707332 - RNA, 19 nt, Human
augaugcugugcacgggca

SEQ ID NO: 707333 - RNA, 21 nt, Human
augcgcugccacugcuccgga

SEQ ID NO: 707334 - RNA, 22 nt, Human
cacacaccacguggucagcaaa

SEQ ID NO: 707335 - RNA, 22 nt, Human
cacagaauaggagcccaguuga

SEQ ID NO: 707336 - RNA, 20 nt, Human
cacaggcaggagguggcaca

SEQ ID NO: 707337 - RNA, 22 nt, Human
caccacguggucagcaaacuug

SEQ ID NO: 707338 - RNA, 19 nt, Human
caccagcagcugcgauggc

SEQ ID NO: 707339 - RNA, 22 nt, Human
caccucauccuccgacuggucg

SEQ ID NO: 707340 - RNA, 23 nt, Human
cagaaguagaaggaggucaggag

SEQ ID NO: 707341 - RNA, 22 nt, Human
cagaauaggagcccaguugauc

SEQ ID NO: 707342 - RNA, 20 nt, Human
cagcagcagcacgauggggu

SEQ ID NO: 707343 - RNA, 19 nt, Human
cagcaggaugcucuuguug

SEQ ID NO: 707344 - RNA, 24 nt, Human
cagcaggcuguccagguuguccac

SEQ ID NO: 707345 - RNA, 22 nt, Human
cagccuccgggcccacugcagg

SEQ ID NO: 707346 - RNA, 18 nt, Human
cagggugcagaagaggau

SEQ ID NO: 707347 - RNA, 20 nt, Human
caguucagaaagacggggau

SEQ ID NO: 707348 - RNA, 23 nt, Human
caugcggccuggcagcucggacc

SEQ ID NO: 707349 - RNA, 20 nt, Human
ccagcagcugcgauggccag

SEQ ID NO: 707350 - RNA, 21 nt, Human
ccagcagcugcgauggccaga

SEQ ID NO: 707351 - RNA, 20 nt, Human
ccagcaguucagaaagacgg

SEQ ID NO: 707352 - RNA, 19 nt, Human
ccaggacgggcgcgaugcu

SEQ ID NO: 707353 - RNA, 18 nt, Human
ccaggaugugccggggcc

SEQ ID NO: 707354 - RNA, 21 nt, Human
ccaggcccagcagcagccggg

SEQ ID NO: 707355 - RNA, 25 nt, Human
ccagguuguccacagagcccuccau

SEQ ID NO: 707356 - RNA, 26 nt, Human
cccagcagcagccgggugauggugau

SEQ ID NO: 707357 - RNA, 22 nt, Human
cccagggccccuucacuucccg

SEQ ID NO: 707358 - RNA, 19 nt, Human
ccccgagaaggcccucuuc

SEQ ID NO: 707359 - RNA, 22 nt, Human
cccgagaaggcccucuucuucc

SEQ ID NO: 707360 - RNA, 19 nt, Human
cccgaugaggcacacgcca

SEQ ID NO: 707361 - RNA, 24 nt, Human
cccguguguccucacaguccucca

SEQ ID NO: 707362 - RNA, 20 nt, Human
cccugggagcugccuccggu

SEQ ID NO: 707363 - RNA, 20 nt, Human
ccgacccgagggagaagcga

SEQ ID NO: 707364 - RNA, 19 nt, Human
ccgccauguaguccuccuc

SEQ ID NO: 707365 - RNA, 22 nt, Human
ccgcccggccugccugcuuggg

SEQ ID NO: 707366 - RNA, 24 nt, Human
ccgccgcccggccugccugcuugg

SEQ ID NO: 707367 - RNA, 24 nt, Human
ccgccgcccguguggcggcccugg

SEQ ID NO: 707368 - RNA, 19 nt, Human
ccgccgcgcgccucccggc

SEQ ID NO: 707369 - RNA, 18 nt, Human
ccggacccucgugcagcc

SEQ ID NO: 707370 - RNA, 19 nt, Human
ccucacacaccacgugguc

SEQ ID NO: 707371 - RNA, 18 nt, Human
ccucccgcuucagcccga

SEQ ID NO: 707372 - RNA, 24 nt, Human
ccucccgcuucagcccgaugaggc

SEQ ID NO: 707373 - RNA, 22 nt, Human
ccucccggcagacgccccccgg

SEQ ID NO: 707374 - RNA, 19 nt, Human
ccuccgggcccacugcagg

SEQ ID NO: 707375 - RNA, 22 nt, Human
ccuccgggcccacugcaggcuc

SEQ ID NO: 707376 - RNA, 18 nt, Human
ccugguugaacauggcug

SEQ ID NO: 707377 - RNA, 21 nt, Human
cgcagcggcggccagaagauc

SEQ ID NO: 707378 - RNA, 18 nt, Human
cgcaugagguccuggucu

SEQ ID NO: 707379 - RNA, 26 nt, Human
cgccuugcggcucagccuccgggccc

SEQ ID NO: 707380 - RNA, 19 nt, Human
cgcucugcguaggccggug

SEQ ID NO: 707381 - RNA, 25 nt, Human
cggcaggcggaacaugaaggccagg

SEQ ID NO: 707382 - RNA, 21 nt, Human
cggccaggaugugccggggcc

SEQ ID NO: 707383 - RNA, 20 nt, Human
cggccggcggcgaacggcag

SEQ ID NO: 707384 - RNA, 22 nt, Human
cggcggcgaacggcaggcggaa

SEQ ID NO: 707385 - RNA, 26 nt, Human
cgggccggacccucgugcagccccug

SEQ ID NO: 707386 - RNA, 22 nt, Human
cggguucagcaggaugcucuug

SEQ ID NO: 707387 - RNA, 18 nt, Human
cgugaugaugaagggcag

SEQ ID NO: 707388 - RNA, 22 nt, Human
cucggcgcucauggugcucucc

SEQ ID NO: 707389 - RNA, 18 nt, Human
cugaagacgcggccggcg

SEQ ID NO: 707390 - RNA, 19 nt, Human
cugcagugggagcaccacg

SEQ ID NO: 707391 - RNA, 22 nt, Human
cugggaccacagagggaucugc

SEQ ID NO: 707392 - RNA, 21 nt, Human
cuugaacccguaggccuuggc

SEQ ID NO: 707393 - RNA, 19 nt, Human
gaaguagaaggaggucagg

SEQ ID NO: 707394 - RNA, 20 nt, Human
gaagugguggucgggcuugu

SEQ ID NO: 707395 - RNA, 20 nt, Human
gaccugguugaacauggcug

SEQ ID NO: 707396 - RNA, 19 nt, Human
gacugguagagcagugugu

SEQ ID NO: 707397 - RNA, 20 nt, Human
gagaagcaucgucuccagga

SEQ ID NO: 707398 - RNA, 24 nt, Human
gcagcagaagggggcuuucacagg

SEQ ID NO: 707399 - RNA, 24 nt, Human
gcagccccagcauccgaugcccag

SEQ ID NO: 707400 - RNA, 24 nt, Human
gcagccccugccccgagaaggccc

SEQ ID NO: 707401 - RNA, 22 nt, Human
gcaggcuguccagguuguccac

SEQ ID NO: 707402 - RNA, 18 nt, Human
gcagggugcagaagagga

SEQ ID NO: 707403 - RNA, 18 nt, Human
gccacuguccccauggag

SEQ ID NO: 707404 - RNA, 23 nt, Human
gccccagggccccuucacuuccc

SEQ ID NO: 707405 - RNA, 24 nt, Human
gcccccgccgcgcgccucccggca

SEQ ID NO: 707406 - RNA, 20 nt, Human
gccccgagaaggcccucuuc

SEQ ID NO: 707407 - RNA, 21 nt, Human
gccccugccccgagaaggccc

SEQ ID NO: 707408 - RNA, 18 nt, Human
gccuccgggcccacugca

SEQ ID NO: 707409 - RNA, 23 nt, Human
gcgcauguuggaaggguggguga

SEQ ID NO: 707410 - RNA, 22 nt, Human
gcucgcaugagguccuggucuu

SEQ ID NO: 707411 - RNA, 22 nt, Human
gcugcccccgcccccaccgccg

SEQ ID NO: 707412 - RNA, 22 nt, Human
gcuguaguugcccccugacuuc

SEQ ID NO: 707413 - RNA, 19 nt, Human
ggacgagucauugaaggag

SEQ ID NO: 707414 - RNA, 22 nt, Human
ggcacgaugaaguuguacagcc

SEQ ID NO: 707415 - RNA, 18 nt, Human
ggcucagccuccgggccc

SEQ ID NO: 707416 - RNA, 20 nt, Human
gggcaggcgggccggacccu

SEQ ID NO: 707417 - RNA, 21 nt, Human
gggcgugacgucaccguagcc

SEQ ID NO: 707418 - RNA, 18 nt, Human
ggguggaggucgccgggc

SEQ ID NO: 707419 - RNA, 22 nt, Human
guagcccacgguggagaaggug

SEQ ID NO: 707420 - RNA, 23 nt, Human
guccgcauagaugaugccacacu

SEQ ID NO: 707421 - RNA, 18 nt, Human
gugaagcucuugcccucg

SEQ ID NO: 707422 - RNA, 22 nt, Human
gugaugaugaagggcagagugu

SEQ ID NO: 707423 - RNA, 23 nt, Human
gugauggugaucauguaguccuu

SEQ ID NO: 707424 - RNA, 18 nt, Human
uacgugcggauccacagg

SEQ ID NO: 707425 - RNA, 18 nt, Human
uagaugccaauggggauc

SEQ ID NO: 707426 - RNA, 22 nt, Human
uagcagugggugcucugcgggg

SEQ ID NO: 707427 - RNA, 20 nt, Human
ucacaggcaggagguggcac

SEQ ID NO: 707428 - RNA, 21 nt, Human
ucaccgagaucugggacuggg

SEQ ID NO: 707429 - RNA, 18 nt, Human
ucagaggcggccaggaug

SEQ ID NO: 707430 - RNA, 22 nt, Human
ucagcccgaugaggcacacgcc

SEQ ID NO: 707431 - RNA, 20 nt, Human
ucagcuuguucuugaacccg

SEQ ID NO: 707432 - RNA, 19 nt, Human
ucaggagggacagguucuc

SEQ ID NO: 707433 - RNA, 21 nt, Human
uccagagguagacgagcuccu

SEQ ID NO: 707434 - RNA, 18 nt, Human
uccccgugaaaacgaggc

SEQ ID NO: 707435 - RNA, 20 nt, Human
uccccgugaaaacgaggcac

SEQ ID NO: 707436 - RNA, 18 nt, Human
ucccuccuggccgcggga

SEQ ID NO: 707437 - RNA, 24 nt, Human
uccggagacuccugucccuccugg

SEQ ID NO: 707438 - RNA, 18 nt, Human
uccguggugaugcugagg

SEQ ID NO: 707439 - RNA, 21 nt, Human
uccucacacaccacgugguca

SEQ ID NO: 707440 - RNA, 18 nt, Human
uccucacaguccuccacg

SEQ ID NO: 707441 - RNA, 21 nt, Human
uccucacaguccuccacguuc

SEQ ID NO: 707442 - RNA, 28 nt, Human
uccuccucacacaccacguggucaggau

SEQ ID NO: 707443 - RNA, 18 nt, Human
uccuggccgcgggacgug

SEQ ID NO: 707444 - RNA, 18 nt, Human
ucgaucuugagggagcug

SEQ ID NO: 707445 - RNA, 21 nt, Human
ucgcaugagguccuggucuuu

SEQ ID NO: 707446 - RNA, 18 nt, Human
ucggcgcuggaggagcag

SEQ ID NO: 707447 - RNA, 22 nt, Human
ucucgcccgcccgcuccaggug

SEQ ID NO: 707448 - RNA, 19 nt, Human
ucugcagccgugcgguccc

SEQ ID NO: 707449 - RNA, 19 nt, Human
ucugccgcuccauccagag

SEQ ID NO: 707450 - RNA, 18 nt, Human
ucuugaacccguaggccu

SEQ ID NO: 707451 - RNA, 21 nt, Human
ugaggguggaggucgccgggc

SEQ ID NO: 707452 - RNA, 18 nt, Human
ugagguccuggucuuuga

SEQ ID NO: 707453 - RNA, 23 nt, Human
ugaugaugaagggcagaguguug

SEQ ID NO: 707454 - RNA, 24 nt, Human
ugaugaugaagggcagaguguuga

SEQ ID NO: 707455 - RNA, 18 nt, Human
ugccacugcuccggagac

SEQ ID NO: 707456 - RNA, 19 nt, Human
ugccgcagguccccgugaa

SEQ ID NO: 707457 - RNA, 19 nt, Human
uggaggagcagagcuucug

SEQ ID NO: 707458 - RNA, 24 nt, Human
uggaucgcccacagugucaucuuu

SEQ ID NO: 707459 - RNA, 18 nt, Human
uggcacaggguuggggag

SEQ ID NO: 707460 - RNA, 19 nt, Human
ugggacugggcucugaggu

SEQ ID NO: 707461 - RNA, 20 nt, Human
uggggcacaggaugaccacc

SEQ ID NO: 707462 - RNA, 21 nt, Human
uggugaugcugaggcugggga

SEQ ID NO: 707463 - RNA, 20 nt, Human
uguccagccgcaggcagcag

SEQ ID NO: 707464 - RNA, 22 nt, Human
uguccagguuguccacagagcc

SEQ ID NO: 707465 - RNA, 18 nt, Human
ugugggcguggaaggccg

SEQ ID NO: 707466 - RNA, 20 nt, Human
uguugugcuugcagcccuug

SEQ ID NO: 707467 - RNA, 23 nt, Human
uucacaggcaggagguggcacag

SEQ ID NO: 707468 - RNA, 22 nt, Human
uucacggcccaggcgcgcagga

SEQ ID NO: 707469 - RNA, 20 nt, Human
uugaacccguaggccuuggc

SEQ ID NO: 707470 - RNA, 24 nt, Human
uugcccccugacuucugccgcucc

SEQ ID NO: 707471 - RNA, 19 nt, Human
uuggaaagagccagagagu

SEQ ID NO: 707472 - RNA, 22 nt, Human
uuggaagggugggugagcuccg

SEQ ID NO: 707473 - RNA, 25 nt, Human
uuguccagcagcagcacgauggggu

SEQ ID NO: 707474 - RNA, 21 nt, Human
uuguuuucagguuugaggauc

SEQ ID NO: 707475 - RNA, 26 nt, Human
uuugggcagccccagcauccugacag

SEQ ID NO: 707476 - RNA, 23 nt, Human
aaucagaaagcuguccauaguau

SEQ ID NO: 707477 - RNA, 20 nt, Human
acccgcugugcgccuuccuc

SEQ ID NO: 707478 - RNA, 19 nt, Human
acgccggaagcuuuggucc

SEQ ID NO: 707479 - RNA, 19 nt, Human
caaguggcagaaagaggag

SEQ ID NO: 707480 - RNA, 19 nt, Human
cagaaagcuguccauagua

SEQ ID NO: 707481 - RNA, 19 nt, Human
cagaauacagaaauccaca

SEQ ID NO: 707482 - RNA, 24 nt, Human
cagcgcacaaguggcagaaagagg

SEQ ID NO: 707483 - RNA, 21 nt, Human
cauccagugaugucauuuaac

SEQ ID NO: 707484 - RNA, 21 nt, Human
ccaagcccgacacagucccug

SEQ ID NO: 707485 - RNA, 19 nt, Human
ccuccugccgcuagggagc

SEQ ID NO: 707486 - RNA, 21 nt, Human
ccugcaaaguuugaacauuug

SEQ ID NO: 707487 - RNA, 20 nt, Human
ccugugcacacugccggucg

SEQ ID NO: 707488 - RNA, 19 nt, Human
cgccuuccuccuccugccg

SEQ ID NO: 707489 - RNA, 19 nt, Human
cuaguagaugaagcaauau

SEQ ID NO: 707490 - RNA, 24 nt, Human
cuccugccgcuagggagccgggag

SEQ ID NO: 707491 - RNA, 22 nt, Human
cugguggcggccgggauucccc

SEQ ID NO: 707492 - RNA, 20 nt, Human
ggagacagggagcagaggaa

SEQ ID NO: 707493 - RNA, 19 nt, Human
gggagccgggagugcgcgg

SEQ ID NO: 707494 - RNA, 23 nt, Human
gggcgccacaaaguuggggacac

SEQ ID NO: 707495 - RNA, 24 nt, Human
uacugcaaucuaagcaguuuuggg

SEQ ID NO: 707496 - RNA, 19 nt, Human
uaugcuguuuuaugcucca

SEQ ID NO: 707497 - RNA, 24 nt, Human
ucagcaaaaauuaauuaagaugag

SEQ ID NO: 707498 - RNA, 20 nt, Human
ucaguugggagaaugaagau

SEQ ID NO: 707499 - RNA, 19 nt, Human
uccacauacuacacucagu

SEQ ID NO: 707500 - RNA, 22 nt, Human
ucuccuuggcgcacccucucca

SEQ ID NO: 707501 - RNA, 19 nt, Human
ugaaaaagaagauagggau

SEQ ID NO: 707502 - RNA, 22 nt, Human
ugaaaaagaagauagggauaua

SEQ ID NO: 707503 - RNA, 21 nt, Human
ugaaauacuaagaauaugcug

SEQ ID NO: 707504 - RNA, 25 nt, Human
ugaacauuugcuauuuaccccaaca

SEQ ID NO: 707505 - RNA, 21 nt, Human
ugaagcaauauaucagcaaaa

SEQ ID NO: 707506 - RNA, 22 nt, Human
ugaugaaugucaaaaugccugc

SEQ ID NO: 707507 - RNA, 19 nt, Human
ugcuuuaucauuuuaguua

SEQ ID NO: 707508 - RNA, 18 nt, Human
uggcacggccccuggugg

SEQ ID NO: 707509 - RNA, 27 nt, Human
uggcagaaagaggagacagggagcaga

SEQ ID NO: 707510 - RNA, 18 nt, Human
uguaaacucauguacugc

SEQ ID NO: 707511 - RNA, 24 nt, Human
uguucacuaccucacuuuuacaua

SEQ ID NO: 707512 - RNA, 26 nt, Human
uuauuuaguaauuccaguguagaaau

SEQ ID NO: 707513 - RNA, 23 nt, Human
uucaugaaauacuaagaauaugc

SEQ ID NO: 707514 - RNA, 24 nt, Human
uucauuauuuuaaagccauaaugu

SEQ ID NO: 707515 - RNA, 24 nt, Human
uuccccgggcucccgaagggguua

SEQ ID NO: 707516 - RNA, 22 nt, Human
uuuaacauauauuucccauuuu

SEQ ID NO: 707517 - RNA, 22 nt, Human
uuuuuagcuuuagagguuuugg

SEQ ID NO: 707518 - RNA, 22 nt, Human
uuuuuuuuuuuuuuagcuuuag

SEQ ID NO: 707519 - RNA, 23 nt, Human
uuuuuuuuuuuuuuuuuagcuuu

SEQ ID NO: 707520 - RNA, 20 nt, Human
aaauuuggggccacagagua

SEQ ID NO: 707521 - RNA, 22 nt, Human
aagaaaaaacgagucaucagaa

SEQ ID NO: 707522 - RNA, 21 nt, Human
aggcaaaaaacuacaaacagc

SEQ ID NO: 707523 - RNA, 20 nt, Human
agggaggcaggcuggcgggg

SEQ ID NO: 707524 - RNA, 27 nt, Human
aguagaagaaaaaacgagucaucagaa

SEQ ID NO: 707525 - RNA, 22 nt, Human
agucaucagaaucaaaaacuaa

SEQ ID NO: 707526 - RNA, 24 nt, Human
caaguccugagcuccccaagaccu

SEQ ID NO: 707527 - RNA, 20 nt, Human
cagaaucaaaaacuaaagag

SEQ ID NO: 707528 - RNA, 19 nt, Human
ccacagaguagaagaaaaa

SEQ ID NO: 707529 - RNA, 18 nt, Human
ccccugaaacccggcagg

SEQ ID NO: 707530 - RNA, 25 nt, Human
ccccugaaacccggcaggaggcggg

SEQ ID NO: 707531 - RNA, 22 nt, Human
cccgcugcugccgaggagagag

SEQ ID NO: 707532 - RNA, 23 nt, Human
ccuccacugucccccugaaaccc

SEQ ID NO: 707533 - RNA, 22 nt, Human
ccuggauccuccacuguccccc

SEQ ID NO: 707534 - RNA, 20 nt, Human
ccuuccucugccucccgcug

SEQ ID NO: 707535 - RNA, 28 nt, Human
cggcaggaggcgggaugggaggucgacc

SEQ ID NO: 707536 - RNA, 23 nt, Human
cuccccaagaccuggauccucca

SEQ ID NO: 707537 - RNA, 20 nt, Human
cugaacggguagcugggcug

SEQ ID NO: 707538 - RNA, 21 nt, Human
cugaacggguagcugggcugg

SEQ ID NO: 707539 - RNA, 18 nt, Human
cuggaugggaaagcucuu

SEQ ID NO: 707540 - RNA, 18 nt, Human
gaacggguagcugggcug

SEQ ID NO: 707541 - RNA, 19 nt, Human
gaggcaggcuggcgggggg

SEQ ID NO: 707542 - RNA, 20 nt, Human
ggacccuaggugcgcuccgc

SEQ ID NO: 707543 - RNA, 23 nt, Human
ggauggggagcacaagagguggg

SEQ ID NO: 707544 - RNA, 22 nt, Human
gggagggaggcaggcuggcggg

SEQ ID NO: 707545 - RNA, 19 nt, Human
gggcuggggggacggaaga

SEQ ID NO: 707546 - RNA, 20 nt, Human
guccugagcuccccaagacc

SEQ ID NO: 707547 - RNA, 21 nt, Human
guggaaagauuuuuuuuucuu

SEQ ID NO: 707548 - RNA, 19 nt, Human
uaaaaggcaaaaaacuaca

SEQ ID NO: 707549 - RNA, 24 nt, Human
uaaaaggcaaaaaacuacaaacag

SEQ ID NO: 707550 - RNA, 20 nt, Human
uagaagaaaaaacgagucau

SEQ ID NO: 707551 - RNA, 24 nt, Human
uaggugcgcuccgcuccggggagg

SEQ ID NO: 707552 - RNA, 24 nt, Human
uauaaaauuuggggccacagagua

SEQ ID NO: 707553 - RNA, 20 nt, Human
ucagaaucaaaaacuaaaga

SEQ ID NO: 707554 - RNA, 22 nt, Human
ucccgcugcugccgaggagaga

SEQ ID NO: 707555 - RNA, 24 nt, Human
uccuccacugucccccugaaaccc

SEQ ID NO: 707556 - RNA, 21 nt, Human
uccucugccucccgcugcugc

SEQ ID NO: 707557 - RNA, 19 nt, Human
ucugccgccuuccucugcc

SEQ ID NO: 707558 - RNA, 20 nt, Human
uggaaagauuuuuuuuucuu

SEQ ID NO: 707559 - RNA, 28 nt, Human
aagauaaggcaagaugcauuaaacagaa

SEQ ID NO: 707560 - RNA, 23 nt, Human
acaguaauaaaaaaagauaaggc

SEQ ID NO: 707561 - RNA, 23 nt, Human
acugaauuuauuaauacagcauu

SEQ ID NO: 707562 - RNA, 22 nt, Human
agauuucaaacaaauacagcuc

SEQ ID NO: 707563 - RNA, 26 nt, Human
aggacagaugcuggugauggucuuug

SEQ ID NO: 707564 - RNA, 26 nt, Human
caaaaaauaaauauaguggaaugcaa

SEQ ID NO: 707565 - RNA, 19 nt, Human
cguaucaagcaucuuaugc

SEQ ID NO: 707566 - RNA, 20 nt, Human
cuggugauggucuuuggcac

SEQ ID NO: 707567 - RNA, 18 nt, Human
uaaaaaaagauaaggcaa

SEQ ID NO: 707568 - RNA, 19 nt, Human
uaaggcaagaugcauuaaa

SEQ ID NO: 707569 - RNA, 26 nt, Human
uaaggcaagaugcauuaaacagaaac

SEQ ID NO: 707570 - RNA, 20 nt, Human
uacaauuucauugcagacac

SEQ ID NO: 707571 - RNA, 23 nt, Human
ucacaaaaucuucacuuuuggaa

SEQ ID NO: 707572 - RNA, 18 nt, Human
uggaaugcaaguuugagg

SEQ ID NO: 707573 - RNA, 18 nt, Human
uuucaaacaaauacagcu

SEQ ID NO: 707574 - RNA, 22 nt, Human
uuuuccucugcguuuuuacaga

SEQ ID NO: 707575 - RNA, 26 nt, Human
uuuugccaaaaaauaaauauagugga

SEQ ID NO: 707576 - RNA, 22 nt, Human
aagaggagggacauuguuccag

SEQ ID NO: 707577 - RNA, 26 nt, Human
aaguacaaggcagguaucagccacug

SEQ ID NO: 707578 - RNA, 24 nt, Human
aauauuugucuucuugcauuagaa

SEQ ID NO: 707579 - RNA, 19 nt, Human
aaugggucuuuaagggcga

SEQ ID NO: 707580 - RNA, 21 nt, Human
agcugacaccuuuauaucuug

SEQ ID NO: 707581 - RNA, 20 nt, Human
aggcagguaucagccacugg

SEQ ID NO: 707582 - RNA, 22 nt, Human
agucuugcccucaggccuugga

SEQ ID NO: 707583 - RNA, 19 nt, Human
auauaucuguaucugcuca

SEQ ID NO: 707584 - RNA, 22 nt, Human
auuguuccagauugggguugac

SEQ ID NO: 707585 - RNA, 22 nt, Human
cacacuuaaaacuagcugacac

SEQ ID NO: 707586 - RNA, 21 nt, Human
caccuaaaacugaaaggaaaa

SEQ ID NO: 707587 - RNA, 19 nt, Human
cagagcccugccugcgccu

SEQ ID NO: 707588 - RNA, 23 nt, Human
caguuuuuguuucaagacaaaga

SEQ ID NO: 707589 - RNA, 22 nt, Human
cauucaaaauaguuuccuucau

SEQ ID NO: 707590 - RNA, 18 nt, Human
ccccagagcccugccugc

SEQ ID NO: 707591 - RNA, 21 nt, Human
ccccagagcccugccugcgcc

SEQ ID NO: 707592 - RNA, 21 nt, Human
ccggccccggucucuaggugc

SEQ ID NO: 707593 - RNA, 22 nt, Human
ccggccccggucucuaggugcc

SEQ ID NO: 707594 - RNA, 21 nt, Human
ccucacagcuccgcgaucgca

SEQ ID NO: 707595 - RNA, 19 nt, Human
ccugcgccucacagcuccg

SEQ ID NO: 707596 - RNA, 24 nt, Human
cggcugccacgucuccggccccgg

SEQ ID NO: 707597 - RNA, 22 nt, Human
cucauaaguaaaacagugauug

SEQ ID NO: 707598 - RNA, 26 nt, Human
cuccgcgaucgcacccgcgcgccgcc

SEQ ID NO: 707599 - RNA, 22 nt, Human
cugguaaauuugguuugcuucu

SEQ ID NO: 707600 - RNA, 19 nt, Human
cuugaccaccuaaauuugg

SEQ ID NO: 707601 - RNA, 24 nt, Human
gccccagagcccugccugcgccuc

SEQ ID NO: 707602 - RNA, 19 nt, Human
gccccggucucuaggugcc

SEQ ID NO: 707603 - RNA, 19 nt, Human
gccugaaggcagugugaaa

SEQ ID NO: 707604 - RNA, 19 nt, Human
gcgcccgcgcccagcaaac

SEQ ID NO: 707605 - RNA, 21 nt, Human
ggagaacaaucauuuauguuu

SEQ ID NO: 707606 - RNA, 18 nt, Human
ggagggacauuguuccag

SEQ ID NO: 707607 - RNA, 25 nt, Human
ggcauuuguuucuuuauugaaaaua

SEQ ID NO: 707608 - RNA, 24 nt, Human
uaaaacaguuuuuguuucaagaca

SEQ ID NO: 707609 - RNA, 24 nt, Human
uaaguaaaacagugauugugcaaa

SEQ ID NO: 707610 - RNA, 19 nt, Human
uaccuggaaaguggaaauu

SEQ ID NO: 707611 - RNA, 24 nt, Human
uacuuucgcaccuaaaacugaaag

SEQ ID NO: 707612 - RNA, 18 nt, Human
uagcugacaccuuuauau

SEQ ID NO: 707613 - RNA, 19 nt, Human
uagcugacaccuuuauauc

SEQ ID NO: 707614 - RNA, 29 nt, Human
ucuaagaggagggacauuguuccguccgg

SEQ ID NO: 707615 - RNA, 19 nt, Human
ucuaccuggaaaguggaaa

SEQ ID NO: 707616 - RNA, 21 nt, Human
ucucuaggugccccagagccc

SEQ ID NO: 707617 - RNA, 19 nt, Human
ucuggcgggcagggcggcu

SEQ ID NO: 707618 - RNA, 21 nt, Human
ugaaaaaauucaaaccaguaa

SEQ ID NO: 707619 - RNA, 23 nt, Human
ugaaaaaauucaaaccaguaaaa

SEQ ID NO: 707620 - RNA, 22 nt, Human
ugacugauuacuuucgcaccua

SEQ ID NO: 707621 - RNA, 18 nt, Human
ugacuugcucaucaugag

SEQ ID NO: 707622 - RNA, 19 nt, Human
ugagaaggucuucugggug

SEQ ID NO: 707623 - RNA, 19 nt, Human
ugccccagagcccugccug

SEQ ID NO: 707624 - RNA, 20 nt, Human
ugccccagagcccugccugc

SEQ ID NO: 707625 - RNA, 29 nt, Human
ugcccucaggccuuggagaacaaucauuu

SEQ ID NO: 707626 - RNA, 21 nt, Human
ugcugaaauccacacuaaaca

SEQ ID NO: 707627 - RNA, 23 nt, Human
uggaaaguggaaauucacaagaa

SEQ ID NO: 707628 - RNA, 24 nt, Human
uggaaaguggaaauucacaagaac

SEQ ID NO: 707629 - RNA, 19 nt, Human
uggcgggcagggcggcugc

SEQ ID NO: 707630 - RNA, 18 nt, Human
uguaucugcucauaaguc

SEQ ID NO: 707631 - RNA, 18 nt, Human
ugugaaagugaaauaagu

SEQ ID NO: 707632 - RNA, 23 nt, Human
uguucacaucuguaucugcugga

SEQ ID NO: 707633 - RNA, 18 nt, Human
uguugcagugaggcacca

SEQ ID NO: 707634 - RNA, 24 nt, Human
uuagaacacaagcauuguggaugg

SEQ ID NO: 707635 - RNA, 20 nt, Human
uucugggugggaugaucagg

SEQ ID NO: 707636 - RNA, 20 nt, Human
aacaaaauaacuguccaucc

SEQ ID NO: 707637 - RNA, 27 nt, Human
aagcaacaccaccaccucuggcacuca

SEQ ID NO: 707638 - RNA, 19 nt, Human
acccaggccuauuacccgg

SEQ ID NO: 707639 - RNA, 19 nt, Human
cacccccuuucccagccag

SEQ ID NO: 707640 - RNA, 20 nt, Human
cacccccuuucccagccagg

SEQ ID NO: 707641 - RNA, 22 nt, Human
caccucuggcacucagggaccc

SEQ ID NO: 707642 - RNA, 25 nt, Human
cagagggggccucccccugaggccc

SEQ ID NO: 707643 - RNA, 18 nt, Human
caggcccaucccugggaa

SEQ ID NO: 707644 - RNA, 19 nt, Human
ccacacccccuuucccagc

SEQ ID NO: 707645 - RNA, 21 nt, Human
ccacacccccuuucccagcca

SEQ ID NO: 707646 - RNA, 23 nt, Human
ccacacccccuuucccagccagg

SEQ ID NO: 707647 - RNA, 22 nt, Human
ccccugaggcccccauuggccc

SEQ ID NO: 707648 - RNA, 24 nt, Human
ccgccuccaccgcccgagccccgg

SEQ ID NO: 707649 - RNA, 21 nt, Human
cggccagaggguuugggggcc

SEQ ID NO: 707650 - RNA, 22 nt, Human
cucccagguauccaagaauaaa

SEQ ID NO: 707651 - RNA, 22 nt, Human
cugaggcauccuggccucccuu

SEQ ID NO: 707652 - RNA, 20 nt, Human
gaagauaagcaacaccacca

SEQ ID NO: 707653 - RNA, 19 nt, Human
gccgcgcuccggcuccgcc

SEQ ID NO: 707654 - RNA, 19 nt, Human
gcuccggcuccgccuccac

SEQ ID NO: 707655 - RNA, 22 nt, Human
gcuuuggacuucuuuugagaug

SEQ ID NO: 707656 - RNA, 18 nt, Human
ggcacaugauucccgcuu

SEQ ID NO: 707657 - RNA, 25 nt, Human
uaagcaacaccaccaccucuggcac

SEQ ID NO: 707658 - RNA, 18 nt, Human
ucaacaaaauaacugucc

SEQ ID NO: 707659 - RNA, 18 nt, Human
uccacacccccuuuccca

SEQ ID NO: 707660 - RNA, 23 nt, Human
uccaccgcccgagccccggcgcc

SEQ ID NO: 707661 - RNA, 22 nt, Human
ucccggaagauggguuauuugc

SEQ ID NO: 707662 - RNA, 19 nt, Human
ucccggggcuccgcugagg

SEQ ID NO: 707663 - RNA, 21 nt, Human
ucccugggaaccacauuucca

SEQ ID NO: 707664 - RNA, 23 nt, Human
ucccugggaaccacauuuccaga

SEQ ID NO: 707665 - RNA, 21 nt, Human
uccuggaagccugcucuuucc

SEQ ID NO: 707666 - RNA, 19 nt, Human
ugaggcauccuggccuccc

SEQ ID NO: 707667 - RNA, 21 nt, Human
ugagugggacccaggccuauu

SEQ ID NO: 707668 - RNA, 22 nt, Human
uggccgcgcuccggcuccgccu

SEQ ID NO: 707669 - RNA, 21 nt, Human
uguacaaaaacaaugauacuc

SEQ ID NO: 707670 - RNA, 22 nt, Human
uuuuaacacugaggcauccugg

SEQ ID NO: 707671 - RNA, 21 nt, Human
aauacauauaggauacuugau

SEQ ID NO: 707672 - RNA, 19 nt, Human
acagcuggcucuauccucc

SEQ ID NO: 707673 - RNA, 19 nt, Human
agaaaggaauacauauagg

SEQ ID NO: 707674 - RNA, 18 nt, Human
caucgcccccgcccgcac

SEQ ID NO: 707675 - RNA, 20 nt, Human
cauucucguuccuccgauca

SEQ ID NO: 707676 - RNA, 20 nt, Human
cccgcccgcacgugcagccg

SEQ ID NO: 707677 - RNA, 19 nt, Human
cccgcgccgagccaaccgc

SEQ ID NO: 707678 - RNA, 19 nt, Human
cgcaucgcccccgcccgca

SEQ ID NO: 707679 - RNA, 21 nt, Human
cgccgagccaaccgccgccaa

SEQ ID NO: 707680 - RNA, 23 nt, Human
cgccgagccaaccgccgccaaca

SEQ ID NO: 707681 - RNA, 21 nt, Human
cucccgcgccgagccaaccgc

SEQ ID NO: 707682 - RNA, 19 nt, Human
gacuaucgcaggagaggug

SEQ ID NO: 707683 - RNA, 18 nt, Human
gagcacccaggacuaucg

SEQ ID NO: 707684 - RNA, 20 nt, Human
gagguggaacagaugaagug

SEQ ID NO: 707685 - RNA, 20 nt, Human
uaaccccuugggccacaucu

SEQ ID NO: 707686 - RNA, 19 nt, Human
ucaguggagcacccaggac

SEQ ID NO: 707687 - RNA, 18 nt, Human
ucccgcgccgagccaacc

SEQ ID NO: 707688 - RNA, 24 nt, Human
uccuccgaucagugacgcaucgcc

SEQ ID NO: 707689 - RNA, 26 nt, Human
ucuauccuccaaucaguggagcacca

SEQ ID NO: 707690 - RNA, 20 nt, Human
ucucuguaaaucugaagagu

SEQ ID NO: 707691 - RNA, 19 nt, Human
ugauaagacuguggcugaa

SEQ ID NO: 707692 - RNA, 19 nt, Human
uucucuguaaaucugaaga

SEQ ID NO: 707693 - RNA, 18 nt, Human
aaaaaagcaucuacacac

SEQ ID NO: 707694 - RNA, 22 nt, Human
aaaacccacguaaugaaaaagu

SEQ ID NO: 707695 - RNA, 18 nt, Human
aaacaacaaagaaaaaag

SEQ ID NO: 707696 - RNA, 19 nt, Human
aaacaacaaagaaaaaagc

SEQ ID NO: 707697 - RNA, 21 nt, Human
aaacaacaaagaaaaaagcau

SEQ ID NO: 707698 - RNA, 22 nt, Human
aaacagcccugaauuuugaaau

SEQ ID NO: 707699 - RNA, 24 nt, Human
aaacagcccugaauuuugaaaugu

SEQ ID NO: 707700 - RNA, 20 nt, Human
aaaccuacucccucccucua

SEQ ID NO: 707701 - RNA, 22 nt, Human
aagaaggggaccacgaagaaaa

SEQ ID NO: 707702 - RNA, 18 nt, Human
aagucaguuuuacaagcc

SEQ ID NO: 707703 - RNA, 19 nt, Human
aauucaggaggccuucccu

SEQ ID NO: 707704 - RNA, 18 nt, Human
acagaagccagaaugcag

SEQ ID NO: 707705 - RNA, 25 nt, Human
agaaaucaguaacaacuuugcucau

SEQ ID NO: 707706 - RNA, 21 nt, Human
agaagaaggggaccacgaaga

SEQ ID NO: 707707 - RNA, 22 nt, Human
agaagaaggggaccacgaagaa

SEQ ID NO: 707708 - RNA, 21 nt, Human
auggaauaagguggggagaag

SEQ ID NO: 707709 - RNA, 24 nt, Human
caaaaccuacucccucccucuaag

SEQ ID NO: 707710 - RNA, 22 nt, Human
caaagaaaaaagcaucuacaca

SEQ ID NO: 707711 - RNA, 22 nt, Human
caagcaaugucauuuuugaaac

SEQ ID NO: 707712 - RNA, 24 nt, Human
caccaucaaccucuucaaaaccua

SEQ ID NO: 707713 - RNA, 18 nt, Human
cagaagccagaaugcaga

SEQ ID NO: 707714 - RNA, 19 nt, Human
cagaagccagaaugcagag

SEQ ID NO: 707715 - RNA, 19 nt, Human
cagacauuuugacauaagu

SEQ ID NO: 707716 - RNA, 22 nt, Human
caucaaacucaauucaggaggc

SEQ ID NO: 707717 - RNA, 22 nt, Human
ccacgaagaaaaacacuuagac

SEQ ID NO: 707718 - RNA, 18 nt, Human
cccaccaccaucaaccuc

SEQ ID NO: 707719 - RNA, 23 nt, Human
ccccaccaccaucaaccucuuca

SEQ ID NO: 707720 - RNA, 21 nt, Human
cccuccccaccaccaucaacc

SEQ ID NO: 707721 - RNA, 31 nt, Human
cccuccccaccaccaucaaccucuucaaaaa

SEQ ID NO: 707722 - RNA, 21 nt, Human
ccuccccaccaccaucaaccu

SEQ ID NO: 707723 - RNA, 21 nt, Human
cggcagcgacggaggcccgag

SEQ ID NO: 707724 - RNA, 27 nt, Human
cuccccaccaccaucaaccucuucaaa

SEQ ID NO: 707725 - RNA, 25 nt, Human
cugcagugucccuuuuuauaucaug

SEQ ID NO: 707726 - RNA, 22 nt, Human
cuucaaaaccuacucccucccu

SEQ ID NO: 707727 - RNA, 19 nt, Human
cuuccgagaacaaaauggg

SEQ ID NO: 707728 - RNA, 21 nt, Human
gaagaaaaacacuuagacaau

SEQ ID NO: 707729 - RNA, 20 nt, Human
gagaacaaaaugggaggacg

SEQ ID NO: 707730 - RNA, 25 nt, Human
gagaagaaggggaccacgaagaaaa

SEQ ID NO: 707731 - RNA, 20 nt, Human
gcagacauuuugacauaagu

SEQ ID NO: 707732 - RNA, 18 nt, Human
gccucaaaucaaaacuaa

SEQ ID NO: 707733 - RNA, 18 nt, Human
gcggcagcgacggaggcc

SEQ ID NO: 707734 - RNA, 25 nt, Human
gcugcagacauuuugacauaaguuu

SEQ ID NO: 707735 - RNA, 18 nt, Human
ggaauaagguggggagaa

SEQ ID NO: 707736 - RNA, 20 nt, Human
ggacuaaacuuuauugacaa

SEQ ID NO: 707737 - RNA, 20 nt, Human
ggagauacaagaaaucagua

SEQ ID NO: 707738 - RNA, 20 nt, Human
ggcccgagcggcgguuggcg

SEQ ID NO: 707739 - RNA, 23 nt, Human
gggaugccucaaaucaaaacuaa

SEQ ID NO: 707740 - RNA, 18 nt, Human
ggggagaagaaggggacc

SEQ ID NO: 707741 - RNA, 24 nt, Human
guaaagcaacaggaauccugggag

SEQ ID NO: 707742 - RNA, 18 nt, Human
guacaaauccaauuagga

SEQ ID NO: 707743 - RNA, 25 nt, Human
uaaaaaaggacuaaacuuuauugac

SEQ ID NO: 707744 - RNA, 21 nt, Human
uaaacaacaaagaaaaaagca

SEQ ID NO: 707745 - RNA, 21 nt, Human
uaaaucuuaaacagcccugaa

SEQ ID NO: 707746 - RNA, 23 nt, Human
uaacguuaaaaauugcaucaacu

SEQ ID NO: 707747 - RNA, 24 nt, Human
uaccuauuuaggcagacuuacaca

SEQ ID NO: 707748 - RNA, 20 nt, Human
uacuaugacugaaagauucu

SEQ ID NO: 707749 - RNA, 22 nt, Human
uacuuugucuuuuuaaauacug

SEQ ID NO: 707750 - RNA, 18 nt, Human
uaggcagacuuacacaug

SEQ ID NO: 707751 - RNA, 21 nt, Human
ucaaaaccuacucccucccuc

SEQ ID NO: 707752 - RNA, 23 nt, Human
ucaaaacuaagagaaacuuaaca

SEQ ID NO: 707753 - RNA, 18 nt, Human
ucaaccucuucaaaaccu

SEQ ID NO: 707754 - RNA, 25 nt, Human
uccaagugaacuuuucauggagugc

SEQ ID NO: 707755 - RNA, 18 nt, Human
ugaaauguagccuaguuu

SEQ ID NO: 707756 - RNA, 22 nt, Human
ugcagaguuaagaauggaauaa

SEQ ID NO: 707757 - RNA, 20 nt, Human
uggcagagcgggagcgguag

SEQ ID NO: 707758 - RNA, 23 nt, Human
uggcuaaaaagcucugcaucaaa

SEQ ID NO: 707759 - RNA, 21 nt, Human
ugggauucugcaacuacaacu

SEQ ID NO: 707760 - RNA, 23 nt, Human
ugggauucugcaacuacaacuuu

SEQ ID NO: 707761 - RNA, 18 nt, Human
ugucccuuuuuauaucau

SEQ ID NO: 707762 - RNA, 19 nt, Human
uuaaaaauugcaucaacua

SEQ ID NO: 707763 - RNA, 23 nt, Human
uuuuaaaauacuacauacagaag

SEQ ID NO: 707764 - RNA, 19 nt, Human
uuuuccccucauguuuguu

SEQ ID NO: 707765 - RNA, 23 nt, Human
aacccccgaccccgcccgcgccc

SEQ ID NO: 707766 - RNA, 22 nt, Human
acacuacagaacauuucaagac

SEQ ID NO: 707767 - RNA, 20 nt, Human
accccgcccgcgcccccagc

SEQ ID NO: 707768 - RNA, 20 nt, Human
acuuguaauuggcuucccuu

SEQ ID NO: 707769 - RNA, 19 nt, Human
acuuugaacaguauacagg

SEQ ID NO: 707770 - RNA, 18 nt, Human
agcaagaggagacuuugc

SEQ ID NO: 707771 - RNA, 22 nt, Human
aggcaguccacggcgauccccg

SEQ ID NO: 707772 - RNA, 18 nt, Human
aggcgcacggggggcggc

SEQ ID NO: 707773 - RNA, 20 nt, Human
aguaguuuuaaguuccaucc

SEQ ID NO: 707774 - RNA, 23 nt, Human
auguuggcaagagaaaaaaaaac

SEQ ID NO: 707775 - RNA, 21 nt, Human
cacccgagccacagcugcgac

SEQ ID NO: 707776 - RNA, 18 nt, Human
caccugccagcacccgag

SEQ ID NO: 707777 - RNA, 19 nt, Human
cagcacccgagccacagcu

SEQ ID NO: 707778 - RNA, 20 nt, Human
cagcacccgagccacagcug

SEQ ID NO: 707779 - RNA, 18 nt, Human
cagcaccugccagcaccc

SEQ ID NO: 707780 - RNA, 20 nt, Human
cagcggcggggacccggggg

SEQ ID NO: 707781 - RNA, 23 nt, Human
cagcggcggggacccgggggccg

SEQ ID NO: 707782 - RNA, 22 nt, Human
ccagcaccugccagcacccgag

SEQ ID NO: 707783 - RNA, 21 nt, Human
ccagcgccggcggcccccgcg

SEQ ID NO: 707784 - RNA, 18 nt, Human
cccagcgccggcggcccc

SEQ ID NO: 707785 - RNA, 20 nt, Human
cccccgaccccgcccgcgcc

SEQ ID NO: 707786 - RNA, 18 nt, Human
ccccgauccccgguggcc

SEQ ID NO: 707787 - RNA, 22 nt, Human
ccccgccagucccgccagcacc

SEQ ID NO: 707788 - RNA, 24 nt, Human
ccccgccagucccgccagcaccug

SEQ ID NO: 707789 - RNA, 24 nt, Human
cccgaccccgcccgcgcccccagc

SEQ ID NO: 707790 - RNA, 20 nt, Human
cccgagccacagcugcgacc

SEQ ID NO: 707791 - RNA, 19 nt, Human
cccgccagcaccugccagc

SEQ ID NO: 707792 - RNA, 23 nt, Human
cccggcaacccccgaccccgccc

SEQ ID NO: 707793 - RNA, 21 nt, Human
ccgaccgcucagccccgaucc

SEQ ID NO: 707794 - RNA, 21 nt, Human
ccgagccacagcugcgaccug

SEQ ID NO: 707795 - RNA, 22 nt, Human
ccugccagcacccgagccacag

SEQ ID NO: 707796 - RNA, 20 nt, Human
ccuuuaaaaugaaaggugag

SEQ ID NO: 707797 - RNA, 25 nt, Human
cggccggaaggcggcggcggcggca

SEQ ID NO: 707798 - RNA, 24 nt, Human
cggcgccccugaggcaguccacgg

SEQ ID NO: 707799 - RNA, 18 nt, Human
cggcggcccccgcgcucc

SEQ ID NO: 707800 - RNA, 23 nt, Human
cgggccgagcgggcugcggcgcc

SEQ ID NO: 707801 - RNA, 26 nt, Human
cuuaacacuacagaacauuucaagac

SEQ ID NO: 707802 - RNA, 24 nt, Human
gaccccgcccgcgcccccagcggg

SEQ ID NO: 707803 - RNA, 20 nt, Human
gaggagcgggcgcgggcggc

SEQ ID NO: 707804 - RNA, 23 nt, Human
gaggagcgggcgcgggcggcgcg

SEQ ID NO: 707805 - RNA, 18 nt, Human
gauguggacuccaggcgc

SEQ ID NO: 707806 - RNA, 22 nt, Human
gcaguccacggcgauccccgcc

SEQ ID NO: 707807 - RNA, 20 nt, Human
gcccucgggccgagcgggcu

SEQ ID NO: 707808 - RNA, 24 nt, Human
gcggcagcagcggccaagccgggc

SEQ ID NO: 707809 - RNA, 20 nt, Human
gcggcgcgguuaggcgggcc

SEQ ID NO: 707810 - RNA, 22 nt, Human
gcggcggcggcggcacgggggc

SEQ ID NO: 707811 - RNA, 18 nt, Human
gcgggccgaggaggagcg

SEQ ID NO: 707812 - RNA, 19 nt, Human
gggcggcgcccggcaaccc

SEQ ID NO: 707813 - RNA, 21 nt, Human
gggcggcgcccggcaaccccc

SEQ ID NO: 707814 - RNA, 22 nt, Human
gggcggcgcgguuaggcgggcc

SEQ ID NO: 707815 - RNA, 21 nt, Human
guccacggcgauccccgccag

SEQ ID NO: 707816 - RNA, 23 nt, Human
uauacagacuggaaauaacaaaa

SEQ ID NO: 707817 - RNA, 22 nt, Human
uccacggcgauccccgccaguc

SEQ ID NO: 707818 - RNA, 23 nt, Human
ucccgccagcaccugccagcacc

SEQ ID NO: 707819 - RNA, 24 nt, Human
ucccgccagcaccugccagcaccc

SEQ ID NO: 707820 - RNA, 18 nt, Human
ucuauggaaaccuuuaaa

SEQ ID NO: 707821 - RNA, 22 nt, Human
uuaaaaagggauuguucauaga

SEQ ID NO: 707822 - RNA, 19 nt, Human
uucaagacuugaguuacaa

SEQ ID NO: 707823 - RNA, 20 nt, Human
uuuaaguuccauccauucag

SEQ ID NO: 707824 - RNA, 21 nt, Human
uuugauuuauuuaaaaaggga

SEQ ID NO: 707825 - RNA, 19 nt, Human
uuuuaaguuccauccauuc

SEQ ID NO: 707826 - RNA, 20 nt, Human
aaaaaaaagaaauagcaaga

SEQ ID NO: 707827 - RNA, 25 nt, Human
aaaaaaaagauuuuucacagaugaa

SEQ ID NO: 707828 - RNA, 21 nt, Human
aaaaaguaaaaacugccauac

SEQ ID NO: 707829 - RNA, 23 nt, Human
aaaacagaagcccccaaacagaa

SEQ ID NO: 707830 - RNA, 21 nt, Human
aaacaaaacagaagcccccaa

SEQ ID NO: 707831 - RNA, 18 nt, Human
aaacagaagcccccaaac

SEQ ID NO: 707832 - RNA, 25 nt, Human
aagaaaaagcaugugagacacagaa

SEQ ID NO: 707833 - RNA, 21 nt, Human
aagaaauagcaagagugaccg

SEQ ID NO: 707834 - RNA, 20 nt, Human
aagucccccccacccugcuu

SEQ ID NO: 707835 - RNA, 21 nt, Human
acaaaacagaagcccccaaac

SEQ ID NO: 707836 - RNA, 21 nt, Human
agacacagaacaggcgagaga

SEQ ID NO: 707837 - RNA, 19 nt, Human
agagagugagggcccggca

SEQ ID NO: 707838 - RNA, 27 nt, Human
agcaagagugacuuuuuuuuuuccuuu

SEQ ID NO: 707839 - RNA, 24 nt, Human
aggaggcggcggcggcggcggcgg

SEQ ID NO: 707840 - RNA, 19 nt, Human
aggcgagagagugagggcc

SEQ ID NO: 707841 - RNA, 18 nt, Human
auaaguucugcuuugcuc

SEQ ID NO: 707842 - RNA, 21 nt, Human
aucucgcuaucuucucuggcu

SEQ ID NO: 707843 - RNA, 22 nt, Human
augcccccaagucccccccacc

SEQ ID NO: 707844 - RNA, 19 nt, Human
caaaacagaagcccccaaa

SEQ ID NO: 707845 - RNA, 20 nt, Human
caaaacagaagcccccaaac

SEQ ID NO: 707846 - RNA, 21 nt, Human
caaaacagaagcccccaaacc

SEQ ID NO: 707847 - RNA, 21 nt, Human
caaacaaaacagaagccccca

SEQ ID NO: 707848 - RNA, 23 nt, Human
caaacaaaacagaagcccccaaa

SEQ ID NO: 707849 - RNA, 23 nt, Human
caaacagaacaaaauggaaaaaa

SEQ ID NO: 707850 - RNA, 30 nt, Human
caaacagaacaaaauggaaaaaaaaaagaa

SEQ ID NO: 707851 - RNA, 21 nt, Human
caaggaauguuccaccucuaa

SEQ ID NO: 707852 - RNA, 21 nt, Human
cagaagcccccaaacagaaca

SEQ ID NO: 707853 - RNA, 24 nt, Human
cagggcgggagggagagaagaggg

SEQ ID NO: 707854 - RNA, 26 nt, Human
cagggcgggagggagagaagaggggg

SEQ ID NO: 707855 - RNA, 23 nt, Human
cagguucaggaaggcuggggggu

SEQ ID NO: 707856 - RNA, 23 nt, Human
ccaauuuugaaagaaaaagcaug

SEQ ID NO: 707857 - RNA, 20 nt, Human
ccagggcgggagggagagaa

SEQ ID NO: 707858 - RNA, 20 nt, Human
cccaagucccccccacccug

SEQ ID NO: 707859 - RNA, 21 nt, Human
cccaagucccccccacccugc

SEQ ID NO: 707860 - RNA, 20 nt, Human
ccccaagucccccccacccu

SEQ ID NO: 707861 - RNA, 22 nt, Human
ccccaguacuccccacggcacc

SEQ ID NO: 707862 - RNA, 18 nt, Human
cccccccacccugcuugc

SEQ ID NO: 707863 - RNA, 27 nt, Human
ccugcaauacaacaccugguccaagga

SEQ ID NO: 707864 - RNA, 22 nt, Human
ccuggcgcggaggcugaagcug

SEQ ID NO: 707865 - RNA, 24 nt, Human
cgccaaacaaaacagaagccccca

SEQ ID NO: 707866 - RNA, 25 nt, Human
cgccaaacaaaacagaagcccccaa

SEQ ID NO: 707867 - RNA, 19 nt, Human
cggcucaacgcgggaacaa

SEQ ID NO: 707868 - RNA, 20 nt, Human
cgggccuggcgcggaggcug

SEQ ID NO: 707869 - RNA, 18 nt, Human
cucgcuaucuucucuggc

SEQ ID NO: 707870 - RNA, 21 nt, Human
cugcaauacaacaccuggucc

SEQ ID NO: 707871 - RNA, 22 nt, Human
cugcuuugcucuuuguguuuuu

SEQ ID NO: 707872 - RNA, 22 nt, Human
cuggcucaacauggaaggaucc

SEQ ID NO: 707873 - RNA, 18 nt, Human
gaagaauagagacuuuuu

SEQ ID NO: 707874 - RNA, 18 nt, Human
gacacagaacaggcgaga

SEQ ID NO: 707875 - RNA, 19 nt, Human
gagccagggcgggagggag

SEQ ID NO: 707876 - RNA, 19 nt, Human
gagggagagaagagggggc

SEQ ID NO: 707877 - RNA, 19 nt, Human
gagugacuuuuuuuuuucc

SEQ ID NO: 707878 - RNA, 18 nt, Human
gccaaacaaaacagaagc

SEQ ID NO: 707879 - RNA, 21 nt, Human
gccaaacaaaacagaagcccc

SEQ ID NO: 707880 - RNA, 18 nt, Human
gccgggccuggcgcggag

SEQ ID NO: 707881 - RNA, 19 nt, Human
gcggcggcggcggcggcgg

SEQ ID NO: 707882 - RNA, 19 nt, Human
gcggcggcggcggcggcuc

SEQ ID NO: 707883 - RNA, 29 nt, Human
gcugaggaggcggcggcggcggcggcgac

SEQ ID NO: 707884 - RNA, 19 nt, Human
ggaagggguccugcaauac

SEQ ID NO: 707885 - RNA, 19 nt, Human
ggaggggggacgggcgggg

SEQ ID NO: 707886 - RNA, 21 nt, Human
ggcggcggcucaacgcgggaa

SEQ ID NO: 707887 - RNA, 24 nt, Human
ggcgggagggagagaagagggggc

SEQ ID NO: 707888 - RNA, 20 nt, Human
guccugggaggggggacggg

SEQ ID NO: 707889 - RNA, 23 nt, Human
gugagacacagaacaggcgagag

SEQ ID NO: 707890 - RNA, 19 nt, Human
uaaaaacaagagggccgag

SEQ ID NO: 707891 - RNA, 24 nt, Human
uaaaaaguaaaaacugccauacaa

SEQ ID NO: 707892 - RNA, 18 nt, Human
uccaaggaauguuccacc

SEQ ID NO: 707893 - RNA, 20 nt, Human
uccccacggcaccaucgcuc

SEQ ID NO: 707894 - RNA, 19 nt, Human
uccccaguacuccccacgg

SEQ ID NO: 707895 - RNA, 24 nt, Human
ucccccccacccugcuugccgcga

SEQ ID NO: 707896 - RNA, 21 nt, Human
uccucagagaggcagguucag

SEQ ID NO: 707897 - RNA, 25 nt, Human
ucgccaaacaaaacagaagccccca

SEQ ID NO: 707898 - RNA, 26 nt, Human
ucgccaaacaaaacagaagcccccaa

SEQ ID NO: 707899 - RNA, 24 nt, Human
ucucucgccaaacaaaacagaagc

SEQ ID NO: 707900 - RNA, 22 nt, Human
ugaaaagacaacagaccagucc

SEQ ID NO: 707901 - RNA, 18 nt, Human
ugaaagaaaaagcaugug

SEQ ID NO: 707902 - RNA, 19 nt, Human
ugaagaauagagacuuuuu

SEQ ID NO: 707903 - RNA, 20 nt, Human
ugcaauacaacaccuggucc

SEQ ID NO: 707904 - RNA, 20 nt, Human
ugcccccaagucccccccac

SEQ ID NO: 707905 - RNA, 20 nt, Human
ugcccccaagucccccccac

SEQ ID NO: 707906 - RNA, 23 nt, Human
uggcgcggaggcugaagcugagg

SEQ ID NO: 707907 - RNA, 19 nt, Human
ugggggaagggguccugca

SEQ ID NO: 707908 - RNA, 19 nt, Human
uuuauaaguucugcuuugc

SEQ ID NO: 707909 - RNA, 18 nt, Human
uuuucaguuucaaucucc

SEQ ID NO: 707910 - RNA, 22 nt, Human
uuuucaguuucaaucuccucuu

SEQ ID NO: 707911 - RNA, 25 nt, Human
uuuuguuaucauuuauuugugaagu

SEQ ID NO: 707912 - RNA, 22 nt, Human
uuuuuaaaaguuuauuuuaaaa

SEQ ID NO: 707913 - RNA, 22 nt, Human
uuuuuuguuguucucauuuugu

SEQ ID NO: 707914 - RNA, 20 nt, Human
uuuuuuuuuuuuuuugaggu

SEQ ID NO: 707915 - RNA, 22 nt, Human
uuuuuuuuuuuuuuuuuugagg

SEQ ID NO: 707916 - RNA, 22 nt, Human
aaagauaccaaccugagauaag

SEQ ID NO: 707917 - RNA, 19 nt, Human
aaaugugucuauauacugu

SEQ ID NO: 707918 - RNA, 19 nt, Human
aagauaccaaccugagaua

SEQ ID NO: 707919 - RNA, 19 nt, Human
aauguaccaaauuaaaugu

SEQ ID NO: 707920 - RNA, 21 nt, Human
acacagucaagucuggggugc

SEQ ID NO: 707921 - RNA, 24 nt, Human
agaggugagcuuccaugugcauga

SEQ ID NO: 707922 - RNA, 22 nt, Human
aguggcaugggauccacugcug

SEQ ID NO: 707923 - RNA, 18 nt, Human
aucauuuuuacuccaguu

SEQ ID NO: 707924 - RNA, 21 nt, Human
caaagagaaaaaauaaacaau

SEQ ID NO: 707925 - RNA, 20 nt, Human
cagauacccuaacacugcca

SEQ ID NO: 707926 - RNA, 21 nt, Human
ccaaccugagauaagagcuga

SEQ ID NO: 707927 - RNA, 28 nt, Human
cucauucuuuaaaaaaaaaaaaaaaaaa

SEQ ID NO: 707928 - RNA, 22 nt, Human
cuggauuugaugaaagauacca

SEQ ID NO: 707929 - RNA, 19 nt, Human
cugggcaaggugagccaga

SEQ ID NO: 707930 - RNA, 21 nt, Human
gcuuauauggcucuggcucuu

SEQ ID NO: 707931 - RNA, 20 nt, Human
ggaaaaaaaauuccaacaag

SEQ ID NO: 707932 - RNA, 21 nt, Human
ggaaaugugcagcgguccuug

SEQ ID NO: 707933 - RNA, 18 nt, Human
ggcauccuggcacagagg

SEQ ID NO: 707934 - RNA, 19 nt, Human
uaaacagauacccuaacac

SEQ ID NO: 707935 - RNA, 24 nt, Human
uaaacagauacccuaacacugcca

SEQ ID NO: 707936 - RNA, 28 nt, Human
uaaacagauacccuaacacuguaaugac

SEQ ID NO: 707937 - RNA, 23 nt, Human
uaagaugagcacacaaaucucug

SEQ ID NO: 707938 - RNA, 24 nt, Human
uacauacauaaaaaaucuugagug

SEQ ID NO: 707939 - RNA, 18 nt, Human
uacuccaguuuguaguua

SEQ ID NO: 707940 - RNA, 19 nt, Human
uacugauaauuugcaaagg

SEQ ID NO: 707941 - RNA, 23 nt, Human
ucauugguauuaaaaacucccuc

SEQ ID NO: 707942 - RNA, 19 nt, Human
ucuaaaaccaaagagaaaa

SEQ ID NO: 707943 - RNA, 21 nt, Human
ucuggccccgcugcagccacg

SEQ ID NO: 707944 - RNA, 20 nt, Human
ucuuuaaaaaaaaaaaaaaa

SEQ ID NO: 707945 - RNA, 26 nt, Human
ugaaagauaccaaccugagauaagag

SEQ ID NO: 707946 - RNA, 20 nt, Human
ugacuucuucacaacagucc

SEQ ID NO: 707947 - RNA, 19 nt, Human
ugcucuggccccgcugcag

SEQ ID NO: 707948 - RNA, 19 nt, Human
uggccccgcugcagccacg

SEQ ID NO: 707949 - RNA, 19 nt, Human
ugggaaaaaauaaauccau

SEQ ID NO: 707950 - RNA, 23 nt, Human
ugggaaaggucuuuaucugcacu

SEQ ID NO: 707951 - RNA, 20 nt, Human
uguacauuacaccagcagcu

SEQ ID NO: 707952 - RNA, 20 nt, Human
uuaaaaaaaaaaaaaaaaaa

SEQ ID NO: 707953 - RNA, 22 nt, Human
uucuuuggaaaaaaaauuccaa

SEQ ID NO: 707954 - RNA, 23 nt, Human
uuggaaaugugcagcgguccuug

SEQ ID NO: 707955 - RNA, 21 nt, Human
uuguuuuguuuuaaaaaaaua

SEQ ID NO: 707956 - RNA, 24 nt, Human
uuuauacauacauaaaaaaucuug

SEQ ID NO: 707957 - RNA, 24 nt, Human
aaacaaaaaguaaagaacacucgg

SEQ ID NO: 707958 - RNA, 22 nt, Human
aaacuuccggggaagaucccac

SEQ ID NO: 707959 - RNA, 27 nt, Human
aaacuuccggggaagaucccaccccuu

SEQ ID NO: 707960 - RNA, 23 nt, Human
aaccaaacaaaaaguaaagaaca

SEQ ID NO: 707961 - RNA, 23 nt, Human
aagcaggaacccucacaacccga

SEQ ID NO: 707962 - RNA, 20 nt, Human
aucccaccccuuccacucaa

SEQ ID NO: 707963 - RNA, 24 nt, Human
caaaacuuccggggaagaucccac

SEQ ID NO: 707964 - RNA, 19 nt, Human
caaaauauccccacuuccc

SEQ ID NO: 707965 - RNA, 22 nt, Human
cacaaauacauuuucuccaaaa

SEQ ID NO: 707966 - RNA, 24 nt, Human
cacaacccgagccuccacgaaauu

SEQ ID NO: 707967 - RNA, 20 nt, Human
caccccuuccacucaacgag

SEQ ID NO: 707968 - RNA, 25 nt, Human
caccccuuccacucaacgaggcuug

SEQ ID NO: 707969 - RNA, 25 nt, Human
caccgccgacuccgaagcaggaacc

SEQ ID NO: 707970 - RNA, 21 nt, Human
ccaccuucuagcgugaaaccu

SEQ ID NO: 707971 - RNA, 23 nt, Human
cgagccgcugauuggaggggcuu

SEQ ID NO: 707972 - RNA, 22 nt, Human
cgccgacuccgaagcaggaacc

SEQ ID NO: 707973 - RNA, 19 nt, Human
cgugaaaccucaaccaaac

SEQ ID NO: 707974 - RNA, 21 nt, Human
gaaaauguacaaaauaucccc

SEQ ID NO: 707975 - RNA, 25 nt, Human
gagaaagaguauaucuaaaauacac

SEQ ID NO: 707976 - RNA, 20 nt, Human
gaucccaccccuuccacuca

SEQ ID NO: 707977 - RNA, 19 nt, Human
ggaagaucccaccccuucc

SEQ ID NO: 707978 - RNA, 22 nt, Human
gugaaaccucaaccaaacaaaa

SEQ ID NO: 707979 - RNA, 24 nt, Human
uccacgaaauucaaacuugccgca

SEQ ID NO: 707980 - RNA, 23 nt, Human
ucuaaaauacacuuugaugaaca

SEQ ID NO: 707981 - RNA, 19 nt, Human
ugaaggaaaauguuuggau

SEQ ID NO: 707982 - RNA, 21 nt, Human
uucaaacuugccgcaccgagc

SEQ ID NO: 707983 - RNA, 20 nt, Human
aaacugaaaggaaacaagau

SEQ ID NO: 707984 - RNA, 21 nt, Human
aaauagaaaaaccaugaagau

SEQ ID NO: 707985 - RNA, 20 nt, Human
aacagcauucugaccaauga

SEQ ID NO: 707986 - RNA, 23 nt, Human
aacuucccuucaaugggaagcau

SEQ ID NO: 707987 - RNA, 25 nt, Human
aacuuggcccucacaaaucaacagg

SEQ ID NO: 707988 - RNA, 24 nt, Human
aagaagaccacugaauacuaaaga

SEQ ID NO: 707989 - RNA, 22 nt, Human
aagcugaccaucucacaaaagc

SEQ ID NO: 707990 - RNA, 20 nt, Human
aagucaucuuuaugaugcca

SEQ ID NO: 707991 - RNA, 18 nt, Human
aaucucuacucccaucuc

SEQ ID NO: 707992 - RNA, 21 nt, Human
acaguacaaauuuaaacagaa

SEQ ID NO: 707993 - RNA, 23 nt, Human
acauauuagaaacaugucagaac

SEQ ID NO: 707994 - RNA, 23 nt, Human
accaaagcugaccaucucacaaa

SEQ ID NO: 707995 - RNA, 23 nt, Human
accaucucacaaaagcaaaacca

SEQ ID NO: 707996 - RNA, 20 nt, Human
acgaagauaacagugcccuc

SEQ ID NO: 707997 - RNA, 22 nt, Human
auauuagaaacaugucagaaca

SEQ ID NO: 707998 - RNA, 23 nt, Human
caaaccccagcuccaagaaaaug

SEQ ID NO: 707999 - RNA, 21 nt, Human
caagaaguuuccaaucucaaa

SEQ ID NO: 708000 - RNA, 22 nt, Human
caaucaagccaugucauuuccc

SEQ ID NO: 708001 - RNA, 18 nt, Human
cagaacaaucaagccaug

SEQ ID NO: 708002 - RNA, 20 nt, Human
caguaacauccacaaauguc

SEQ ID NO: 708003 - RNA, 18 nt, Human
cagugaacaucaucuggu

SEQ ID NO: 708004 - RNA, 24 nt, Human
caucucacaaaagcaaaaccaaac

SEQ ID NO: 708005 - RNA, 23 nt, Human
cauuauggaauuucagcagugaa

SEQ ID NO: 708006 - RNA, 22 nt, Human
ccaucucacaaaagcaaaacca

SEQ ID NO: 708007 - RNA, 21 nt, Human
cccucguugccaucauucauu

SEQ ID NO: 708008 - RNA, 18 nt, Human
ccugaaaagaagaccacu

SEQ ID NO: 708009 - RNA, 22 nt, Human
ccuuaaaagccccagaugaaaa

SEQ ID NO: 708010 - RNA, 23 nt, Human
cgcccuggccacauauuagaaac

SEQ ID NO: 708011 - RNA, 23 nt, Human
cuccaagaaaaugugagagagaa

SEQ ID NO: 708012 - RNA, 20 nt, Human
gaaaacuacaucuuucuucc

SEQ ID NO: 708013 - RNA, 24 nt, Human
gaacacacauguuguggagagcac

SEQ ID NO: 708014 - RNA, 20 nt, Human
gccaugucauuuccccaaau

SEQ ID NO: 708015 - RNA, 19 nt, Human
ggggcacuguccaaaauuc

SEQ ID NO: 708016 - RNA, 24 nt, Human
uaaguucuguucaaggcaagaagu

SEQ ID NO: 708017 - RNA, 21 nt, Human
uagcaaguccuuaaaagcccc

SEQ ID NO: 708018 - RNA, 21 nt, Human
uaguuugcuuuauuuuaaaac

SEQ ID NO: 708019 - RNA, 22 nt, Human
uauaaaacacuuauacagauaa

SEQ ID NO: 708020 - RNA, 24 nt, Human
uauaaaacacuuauacagauaaau

SEQ ID NO: 708021 - RNA, 18 nt, Human
uauaaagcauuuaaaaaa

SEQ ID NO: 708022 - RNA, 24 nt, Human
uauacaauuguuuucaaaacugga

SEQ ID NO: 708023 - RNA, 20 nt, Human
uauagcaaguccuuaaaagc

SEQ ID NO: 708024 - RNA, 18 nt, Human
uaucagaaauagaaaaac

SEQ ID NO: 708025 - RNA, 22 nt, Human
uaucagaaauagaaaaaccaug

SEQ ID NO: 708026 - RNA, 19 nt, Human
uauuccaaauauuacuccu

SEQ ID NO: 708027 - RNA, 20 nt, Human
ucagaacacacauguugugg

SEQ ID NO: 708028 - RNA, 23 nt, Human
ucccaucuccuaauacucccagc

SEQ ID NO: 708029 - RNA, 19 nt, Human
uccugguaggauacucugg

SEQ ID NO: 708030 - RNA, 18 nt, Human
ucuccuaauacucccagc

SEQ ID NO: 708031 - RNA, 20 nt, Human
ugaaaggaaacaagauggua

SEQ ID NO: 708032 - RNA, 20 nt, Human
ugaacaugaacauguguaac

SEQ ID NO: 708033 - RNA, 25 nt, Human
ugaucauugaaaacaaacgaagaua

SEQ ID NO: 708034 - RNA, 24 nt, Human
ugcaguaacauccacaaauguccu

SEQ ID NO: 708035 - RNA, 18 nt, Human
uggagagcaccaaagcug

SEQ ID NO: 708036 - RNA, 24 nt, Human
uggagagcaccaaagcugaccagu

SEQ ID NO: 708037 - RNA, 23 nt, Human
ugggaagcauuauggaauuucag

SEQ ID NO: 708038 - RNA, 20 nt, Human
uguccaaaaauaugcauaua

SEQ ID NO: 708039 - RNA, 21 nt, Human
uguccaaaauucaauacugau

SEQ ID NO: 708040 - RNA, 20 nt, Human
uguggagagcaccaaagcug

SEQ ID NO: 708041 - RNA, 22 nt, Human
uuaaaacaguaacuuccuuaua

SEQ ID NO: 708042 - RNA, 23 nt, Human
uucaaaccccagcuccaagaaaa

SEQ ID NO: 708043 - RNA, 21 nt, Human
uuccuauucaaaccccagcuc

SEQ ID NO: 708044 - RNA, 19 nt, Human
uuuccaaucucaaauauuu

SEQ ID NO: 708045 - RNA, 22 nt, Human
aaaaaaaccacaaauaagugaa

SEQ ID NO: 708046 - RNA, 23 nt, Human
aaaaagcacaaauaaaauauuac

SEQ ID NO: 708047 - RNA, 22 nt, Human
aaacaauccaaccacauaagca

SEQ ID NO: 708048 - RNA, 25 nt, Human
aaccuaaccacuuugggaaaggcag

SEQ ID NO: 708049 - RNA, 24 nt, Human
aagaaggagcuuaggagagccuca

SEQ ID NO: 708050 - RNA, 20 nt, Human
aagggagggaggaauggcag

SEQ ID NO: 708051 - RNA, 24 nt, Human
aagugaccacaccguaauaaaaau

SEQ ID NO: 708052 - RNA, 22 nt, Human
aauguccaucuaaauaagugac

SEQ ID NO: 708053 - RNA, 21 nt, Human
acagacaguaucuccaaaccg

SEQ ID NO: 708054 - RNA, 19 nt, Human
accuaaaauaaaaaagacc

SEQ ID NO: 708055 - RNA, 21 nt, Human
agacuaaaaucacccagcaac

SEQ ID NO: 708056 - RNA, 23 nt, Human
agagauaaaugaggauuuagauc

SEQ ID NO: 708057 - RNA, 23 nt, Human
agcaaagggucacucugcuccca

SEQ ID NO: 708058 - RNA, 19 nt, Human
agcugagaaaaaaaccaca

SEQ ID NO: 708059 - RNA, 25 nt, Human
aggaagcacugguucucuguagggg

SEQ ID NO: 708060 - RNA, 29 nt, Human
aggcacaaaguggagauagaagggacccc

SEQ ID NO: 708061 - RNA, 18 nt, Human
agggagggaggaauggca

SEQ ID NO: 708062 - RNA, 23 nt, Human
aguccccaccucacauccacaga

SEQ ID NO: 708063 - RNA, 24 nt, Human
agugucuguccucccccaaguaac

SEQ ID NO: 708064 - RNA, 27 nt, Human
auagaacauucaacauaaaaccuaaaa

SEQ ID NO: 708065 - RNA, 24 nt, Human
caaauuaagaaauuauacauuuug

SEQ ID NO: 708066 - RNA, 18 nt, Human
caagcauggcgagucacc

SEQ ID NO: 708067 - RNA, 23 nt, Human
caauccaaccacauaagcagcag

SEQ ID NO: 708068 - RNA, 20 nt, Human
caccacagugucuguccucc

SEQ ID NO: 708069 - RNA, 23 nt, Human
caccaggaagcagagggugccaa

SEQ ID NO: 708070 - RNA, 21 nt, Human
cacuuugggaaaggcagcaga

SEQ ID NO: 708071 - RNA, 21 nt, Human
cagaaaaaaaaaaugccuuca

SEQ ID NO: 708072 - RNA, 23 nt, Human
cagaauagcugagaaaaaaacca

SEQ ID NO: 708073 - RNA, 24 nt, Human
cagagcagcaccaggaagcagagg

SEQ ID NO: 708074 - RNA, 21 nt, Human
cagagccuccagugacaguaa

SEQ ID NO: 708075 - RNA, 25 nt, Human
cagcaaagccaaagcuucaucuuug

SEQ ID NO: 708076 - RNA, 20 nt, Human
cagcagaaaaaaaaaaugcc

SEQ ID NO: 708077 - RNA, 24 nt, Human
cagcagaaaaaaaaaaugccuuca

SEQ ID NO: 708078 - RNA, 23 nt, Human
cagcccaggggaaaggagggcga

SEQ ID NO: 708079 - RNA, 20 nt, Human
cagcucgggccgcugcaggg

SEQ ID NO: 708080 - RNA, 20 nt, Human
caggagggcucugaucucac

SEQ ID NO: 708081 - RNA, 18 nt, Human
cauggcgagucaccccca

SEQ ID NO: 708082 - RNA, 23 nt, Human
ccagcccugcccuggggcgggag

SEQ ID NO: 708083 - RNA, 22 nt, Human
cccacagcugacgcuuugaaac

SEQ ID NO: 708084 - RNA, 23 nt, Human
cccagcaucagcaaagggucacu

SEQ ID NO: 708085 - RNA, 21 nt, Human
ccccagcaucagcaaaggguc

SEQ ID NO: 708086 - RNA, 19 nt, Human
cccccaaauauccaggaag

SEQ ID NO: 708087 - RNA, 23 nt, Human
cccccaaauauccaggaagacaa

SEQ ID NO: 708088 - RNA, 23 nt, Human
cccccgggcuguacccucccagc

SEQ ID NO: 708089 - RNA, 24 nt, Human
cccccgggcuguacccucccagcc

SEQ ID NO: 708090 - RNA, 20 nt, Human
cccugccucgccugccccuc

SEQ ID NO: 708091 - RNA, 23 nt, Human
ccgcccccgggcuguacccuccc

SEQ ID NO: 708092 - RNA, 23 nt, Human
ccucccagcccugcccuggggcg

SEQ ID NO: 708093 - RNA, 21 nt, Human
ccuccccugaaagcucuccag

SEQ ID NO: 708094 - RNA, 20 nt, Human
ccuggcagccuagcccaugu

SEQ ID NO: 708095 - RNA, 19 nt, Human
cgagucagagcagcaccag

SEQ ID NO: 708096 - RNA, 21 nt, Human
cgcagcccaggggaaaggagg

SEQ ID NO: 708097 - RNA, 20 nt, Human
cgcccggcccggggcagcga

SEQ ID NO: 708098 - RNA, 24 nt, Human
cggcccggggcagcgaggacgcgg

SEQ ID NO: 708099 - RNA, 24 nt, Human
cgggaggggcggcaauacuggagg

SEQ ID NO: 708100 - RNA, 22 nt, Human
cgggcagcgccgccgcggaagc

SEQ ID NO: 708101 - RNA, 22 nt, Human
cggggcacggggcgggcuggga

SEQ ID NO: 708102 - RNA, 23 nt, Human
cuaaaaucacccagcaacagguc

SEQ ID NO: 708103 - RNA, 18 nt, Human
cuaaaguagccacauggc

SEQ ID NO: 708104 - RNA, 24 nt, Human
cucagaauagcugagaaaaaaacc

SEQ ID NO: 708105 - RNA, 19 nt, Human
cucugcucccacagcugac

SEQ ID NO: 708106 - RNA, 25 nt, Human
cugcaagaacuaccgacacuccucu

SEQ ID NO: 708107 - RNA, 20 nt, Human
cuucuuggcaauauuacuaa

SEQ ID NO: 708108 - RNA, 26 nt, Human
gaacauucaacauaaaaccuaaaaua

SEQ ID NO: 708109 - RNA, 20 nt, Human
gagaaaaaaaccacaaauaa

SEQ ID NO: 708110 - RNA, 20 nt, Human
gagucacccccaaauauccg

SEQ ID NO: 708111 - RNA, 24 nt, Human
gcagcaccaggaagcagagggugc

SEQ ID NO: 708112 - RNA, 18 nt, Human
gcccuggggcgggagggg

SEQ ID NO: 708113 - RNA, 18 nt, Human
gcccugucugaacccugg

SEQ ID NO: 708114 - RNA, 21 nt, Human
gcggccccauggcgucucagc

SEQ ID NO: 708115 - RNA, 18 nt, Human
gcggcggccgggaggcga

SEQ ID NO: 708116 - RNA, 19 nt, Human
gcuuauuauucaaauuaag

SEQ ID NO: 708117 - RNA, 23 nt, Human
gcuuggcagacccuccuccucca

SEQ ID NO: 708118 - RNA, 23 nt, Human
ggaggggcggcaauacuggaggg

SEQ ID NO: 708119 - RNA, 18 nt, Human
ggaggggcggcccugccu

SEQ ID NO: 708120 - RNA, 19 nt, Human
ggcgggcggggcacggggc

SEQ ID NO: 708121 - RNA, 27 nt, Human
gggaaaaaaaauauuuaauguaaaugu

SEQ ID NO: 708122 - RNA, 20 nt, Human
gggagggaggaauggcagaa

SEQ ID NO: 708123 - RNA, 22 nt, Human
gggcggcccugccucgccugcc

SEQ ID NO: 708124 - RNA, 24 nt, Human
guaaacaauccaaccacauaagca

SEQ ID NO: 708125 - RNA, 24 nt, Human
uaaacgcuuauuauucaaauuaag

SEQ ID NO: 708126 - RNA, 20 nt, Human
uaaauaagugaccacaccgu

SEQ ID NO: 708127 - RNA, 27 nt, Human
uacaaauaaauaaauaagcucagaaua

SEQ ID NO: 708128 - RNA, 23 nt, Human
uaccaucaucaucucuuuuccaa

SEQ ID NO: 708129 - RNA, 22 nt, Human
uacugcaagaacuaccgacacu

SEQ ID NO: 708130 - RNA, 21 nt, Human
uagaagagauaaaugaggauu

SEQ ID NO: 708131 - RNA, 22 nt, Human
uagauccccuccccccagcauc

SEQ ID NO: 708132 - RNA, 19 nt, Human
uagcugagaaaaaaaccac

SEQ ID NO: 708133 - RNA, 24 nt, Human
uagcugagaaaaaaaccacaaaua

SEQ ID NO: 708134 - RNA, 24 nt, Human
uaggagagccucaggcgugcagug

SEQ ID NO: 708135 - RNA, 19 nt, Human
uauccaggaagacaagugg

SEQ ID NO: 708136 - RNA, 19 nt, Human
ucaccagcaaagccaaagc

SEQ ID NO: 708137 - RNA, 20 nt, Human
ucacugagaugccacuagug

SEQ ID NO: 708138 - RNA, 22 nt, Human
ucauuuaaaaaaggaagggagg

SEQ ID NO: 708139 - RNA, 27 nt, Human
uccaaaccuaaccacuuugggaaaggc

SEQ ID NO: 708140 - RNA, 19 nt, Human
uccaaccacauaagcagca

SEQ ID NO: 708141 - RNA, 20 nt, Human
uccacagacaguaucuccaa

SEQ ID NO: 708142 - RNA, 19 nt, Human
uccccaccucacauccaca

SEQ ID NO: 708143 - RNA, 24 nt, Human
uccccuccccccagcaucagcaaa

SEQ ID NO: 708144 - RNA, 22 nt, Human
ucuccaggcacaaaguggagau

SEQ ID NO: 708145 - RNA, 19 nt, Human
ugaaagaaggagcuuagga

SEQ ID NO: 708146 - RNA, 20 nt, Human
ugaauugucaauuucuccuc

SEQ ID NO: 708147 - RNA, 26 nt, Human
ugagaaaaaaaccacaaauaagugaa

SEQ ID NO: 708148 - RNA, 19 nt, Human
ugagaugccacuaguguaa

SEQ ID NO: 708149 - RNA, 21 nt, Human
ugagaugccacuaguguaaaa

SEQ ID NO: 708150 - RNA, 22 nt, Human
ugaggcaggccacgguauacug

SEQ ID NO: 708151 - RNA, 21 nt, Human
ugccucgccugccccucaucc

SEQ ID NO: 708152 - RNA, 19 nt, Human
ugccugcucaggagggcuc

SEQ ID NO: 708153 - RNA, 25 nt, Human
ugccuucaguuuuaauaaugaggcu

SEQ ID NO: 708154 - RNA, 18 nt, Human
ugcucccacagcugacgc

SEQ ID NO: 708155 - RNA, 23 nt, Human
uggcaauauuacuaaaguagcca

SEQ ID NO: 708156 - RNA, 25 nt, Human
uggcagccuagcccaugugcgggca

SEQ ID NO: 708157 - RNA, 21 nt, Human
uggcgagucacccccaaauau

SEQ ID NO: 708158 - RNA, 23 nt, Human
uggcgucucagcccucagacccu

SEQ ID NO: 708159 - RNA, 21 nt, Human
ugggaaaggcagcagaaaaaa

SEQ ID NO: 708160 - RNA, 18 nt, Human
uggggaaauggcuuaaaa

SEQ ID NO: 708161 - RNA, 23 nt, Human
ugggucuggggaggcgcugcuga

SEQ ID NO: 708162 - RNA, 22 nt, Human
ugguucaaacaacuuuaaugac

SEQ ID NO: 708163 - RNA, 23 nt, Human
uuaaaaagcacaaauaaaauauu

SEQ ID NO: 708164 - RNA, 23 nt, Human
uucgagucagagcagcaccagga

SEQ ID NO: 708165 - RNA, 18 nt, Human
uuggcaauauuacuaaag

SEQ ID NO: 708166 - RNA, 18 nt, Human
uuggcagacccuccuccu

SEQ ID NO: 708167 - RNA, 22 nt, Human
uuucuguauaucaagacuacaa

SEQ ID NO: 708168 - RNA, 22 nt, Human
aaaaaaacagccacaaauucaa

SEQ ID NO: 708169 - RNA, 26 nt, Human
aaacagaagacaggaacuccacaggg

SEQ ID NO: 708170 - RNA, 22 nt, Human
aaacagccacaaauucaacuuc

SEQ ID NO: 708171 - RNA, 21 nt, Human
aaagacaucaccccaaccucc

SEQ ID NO: 708172 - RNA, 20 nt, Human
aaaggaccaggaccccagag

SEQ ID NO: 708173 - RNA, 22 nt, Human
aagaggccucuguccuggccug

SEQ ID NO: 708174 - RNA, 20 nt, Human
aagcaggggaggcuugaggu

SEQ ID NO: 708175 - RNA, 23 nt, Human
aaggagcaggugcuuucucagag

SEQ ID NO: 708176 - RNA, 18 nt, Human
acaaaggaccaggacccc

SEQ ID NO: 708177 - RNA, 24 nt, Human
acaacaacaucgcccgccuagagc

SEQ ID NO: 708178 - RNA, 21 nt, Human
acagaagacaggaacuccaca

SEQ ID NO: 708179 - RNA, 19 nt, Human
acagcgccacgguggagug

SEQ ID NO: 708180 - RNA, 19 nt, Human
acaggcaggcaucacagag

SEQ ID NO: 708181 - RNA, 19 nt, Human
accaggaccccagacggcg

SEQ ID NO: 708182 - RNA, 20 nt, Human
accaggacuggggacauucc

SEQ ID NO: 708183 - RNA, 22 nt, Human
accccaaccuccagcucugcau

SEQ ID NO: 708184 - RNA, 25 nt, Human
accccaaccuccagcucugcauggg

SEQ ID NO: 708185 - RNA, 22 nt, Human
accuggcgggcaaccagcuggc

SEQ ID NO: 708186 - RNA, 19 nt, Human
acgugcagccgcuggagcu

SEQ ID NO: 708187 - RNA, 22 nt, Human
acuccgcgugcccccgccgguc

SEQ ID NO: 708188 - RNA, 18 nt, Human
acugccgcuccgcgccgc

SEQ ID NO: 708189 - RNA, 18 nt, Human
agaaaaaaaaacagccac

SEQ ID NO: 708190 - RNA, 25 nt, Human
agaaaaggcaacccagucuaggggu

SEQ ID NO: 708191 - RNA, 21 nt, Human
agaaagcaggggaggcuugag

SEQ ID NO: 708192 - RNA, 21 nt, Human
agaagacaggaacuccacagg

SEQ ID NO: 708193 - RNA, 18 nt, Human
agaagagagacaugcccc

SEQ ID NO: 708194 - RNA, 20 nt, Human
agagacaugcccccaaccuc

SEQ ID NO: 708195 - RNA, 24 nt, Human
agagacaugcccccaaccucggcg

SEQ ID NO: 708196 - RNA, 22 nt, Human
agaggaaaggcccagagaggcc

SEQ ID NO: 708197 - RNA, 20 nt, Human
agccccuggccagucugcaa

SEQ ID NO: 708198 - RNA, 19 nt, Human
agcgcggccacgagauguu

SEQ ID NO: 708199 - RNA, 19 nt, Human
agcugcuggaggaccaggc

SEQ ID NO: 708200 - RNA, 22 nt, Human
aggaagacuuaaggagcaggug

SEQ ID NO: 708201 - RNA, 22 nt, Human
aggaagggguggcagggccuug

SEQ ID NO: 708202 - RNA, 20 nt, Human
aggcccagcuagaaggcggg

SEQ ID NO: 708203 - RNA, 21 nt, Human
aggcugcaccaccgccugcag

SEQ ID NO: 708204 - RNA, 22 nt, Human
aggcuugaggugugcccagaag

SEQ ID NO: 708205 - RNA, 18 nt, Human
aggggaggggggcgaggg

SEQ ID NO: 708206 - RNA, 18 nt, Human
agggguggcagggccuug

SEQ ID NO: 708207 - RNA, 19 nt, Human
auaagggugaccaacgugg

SEQ ID NO: 708208 - RNA, 19 nt, Human
cacaacaacagccugcgcg

SEQ ID NO: 708209 - RNA, 18 nt, Human
cacagagcuaaaggggag

SEQ ID NO: 708210 - RNA, 24 nt, Human
caccaccgccugcagccacacugg

SEQ ID NO: 708211 - RNA, 25 nt, Human
caccugcaggagagggacuucagca

SEQ ID NO: 708212 - RNA, 20 nt, Human
cacgcgucugcggcugaacc

SEQ ID NO: 708213 - RNA, 22 nt, Human
cacuagcaaccggcugcgcggc

SEQ ID NO: 708214 - RNA, 19 nt, Human
cagaaaaaaaaacagccac

SEQ ID NO: 708215 - RNA, 20 nt, Human
cagagcuaaaggggaggggg

SEQ ID NO: 708216 - RNA, 18 nt, Human
cagcagccucaucugcau

SEQ ID NO: 708217 - RNA, 21 nt, Human
cagccaccgccuccagccccg

SEQ ID NO: 708218 - RNA, 22 nt, Human
cagccccuggccagucugcaag

SEQ ID NO: 708219 - RNA, 23 nt, Human
cagccgcagcagcccgcgcaacc

SEQ ID NO: 708220 - RNA, 20 nt, Human
cagcgggguaagcgccuccu

SEQ ID NO: 708221 - RNA, 18 nt, Human
caggcacauguguaccuu

SEQ ID NO: 708222 - RNA, 18 nt, Human
caucaaccgcuccaagcc

SEQ ID NO: 708223 - RNA, 20 nt, Human
caucaccccaaccuccagcu

SEQ ID NO: 708224 - RNA, 19 nt, Human
ccaccgccuccagccccgg

SEQ ID NO: 708225 - RNA, 24 nt, Human
ccagagucuccuggacguauccca

SEQ ID NO: 708226 - RNA, 21 nt, Human
ccagcagccugccgcugcuac

SEQ ID NO: 708227 - RNA, 21 nt, Human
ccagcuggcgcggcugcugga

SEQ ID NO: 708228 - RNA, 19 nt, Human
cccaaccucggcgcccuuu

SEQ ID NO: 708229 - RNA, 20 nt, Human
cccagcuagaaggcggguug

SEQ ID NO: 708230 - RNA, 21 nt, Human
ccccaacaccucccuugaagc

SEQ ID NO: 708231 - RNA, 20 nt, Human
ccccagaagcacugagcucu

SEQ ID NO: 708232 - RNA, 26 nt, Human
ccccagacggcagccaaaugcagcca

SEQ ID NO: 708233 - RNA, 18 nt, Human
ccccagccucgcgagggc

SEQ ID NO: 708234 - RNA, 19 nt, Human
ccccagggagaggaagacc

SEQ ID NO: 708235 - RNA, 20 nt, Human
cccccaaccucggcgcccuu

SEQ ID NO: 708236 - RNA, 21 nt, Human
cccccagggagaggaagaccc

SEQ ID NO: 708237 - RNA, 18 nt, Human
ccccgcgccuggcgcucc

SEQ ID NO: 708238 - RNA, 25 nt, Human
ccccuggccagucugcaaguccugc

SEQ ID NO: 708239 - RNA, 22 nt, Human
cccgcaaccgcagccaccgccu

SEQ ID NO: 708240 - RNA, 21 nt, Human
cccgcgcaaccgccgccuccg

SEQ ID NO: 708241 - RNA, 25 nt, Human
cccgcgcaaccgccgccuccggccg

SEQ ID NO: 708242 - RNA, 19 nt, Human
cccgcugggaaucccgcca

SEQ ID NO: 708243 - RNA, 19 nt, Human
cccucaagccaccugccua

SEQ ID NO: 708244 - RNA, 21 nt, Human
cccucgcccuguagggcugga

SEQ ID NO: 708245 - RNA, 23 nt, Human
cccucuguccacgugcagccgcu

SEQ ID NO: 708246 - RNA, 24 nt, Human
ccgaacugcugccgcugcugcugc

SEQ ID NO: 708247 - RNA, 19 nt, Human
ccgcagccaccgccuccag

SEQ ID NO: 708248 - RNA, 20 nt, Human
ccgcagccaccgccuccagc

SEQ ID NO: 708249 - RNA, 18 nt, Human
ccgccgccuccggccgcc

SEQ ID NO: 708250 - RNA, 18 nt, Human
ccgccgccuccggccgcc

SEQ ID NO: 708251 - RNA, 19 nt, Human
ccgcgagcccaggcccagc

SEQ ID NO: 708252 - RNA, 19 nt, Human
ccgcgccgccggcugccca

SEQ ID NO: 708253 - RNA, 23 nt, Human
ccgcgugcccccgccggucgccu

SEQ ID NO: 708254 - RNA, 22 nt, Human
ccgcugcugcugcuacuacugc

SEQ ID NO: 708255 - RNA, 20 nt, Human
ccguguggagcugcgggagg

SEQ ID NO: 708256 - RNA, 22 nt, Human
ccuagcacugcuggaccucagc

SEQ ID NO: 708257 - RNA, 21 nt, Human
ccuccagcccgagcccagccc

SEQ ID NO: 708258 - RNA, 19 nt, Human
ccucgcccuguagggcugg

SEQ ID NO: 708259 - RNA, 20 nt, Human
ccucgcccuguagggcugga

SEQ ID NO: 708260 - RNA, 27 nt, Human
ccugcacaacaacagccugcgcgcccu

SEQ ID NO: 708261 - RNA, 21 nt, Human
ccugcagacacuguuccugca

SEQ ID NO: 708262 - RNA, 23 nt, Human
ccugcagccccuggccagucugc

SEQ ID NO: 708263 - RNA, 21 nt, Human
ccugccaagccuccggcuacc

SEQ ID NO: 708264 - RNA, 20 nt, Human
ccuggaucaaggagggcggc

SEQ ID NO: 708265 - RNA, 25 nt, Human
ccuggaucaaggagggcggccagcc

SEQ ID NO: 708266 - RNA, 18 nt, Human
ccuggcccagcugcgcgu

SEQ ID NO: 708267 - RNA, 19 nt, Human
ccuggcccagcugcgcgug

SEQ ID NO: 708268 - RNA, 18 nt, Human
ccuggccugcaaaacccc

SEQ ID NO: 708269 - RNA, 21 nt, Human
ccuggccugcaaaaccccaac

SEQ ID NO: 708270 - RNA, 20 nt, Human
cgagaggcccugcagccccu

SEQ ID NO: 708271 - RNA, 30 nt, Human
cgaggcgggcagcauggccuuccgcgcccc

SEQ ID NO: 708272 - RNA, 18 nt, Human
cgcaaccgcagccaccgc

SEQ ID NO: 708273 - RNA, 18 nt, Human
cgcaugcuccgucaguaa

SEQ ID NO: 708274 - RNA, 21 nt, Human
cgcccagguuccuaaaaacag

SEQ ID NO: 708275 - RNA, 19 nt, Human
cgccccaaggagcuugggg

SEQ ID NO: 708276 - RNA, 21 nt, Human
cgccgccggcugcccagcagc

SEQ ID NO: 708277 - RNA, 23 nt, Human
cgcggaugacgugggcgccggag

SEQ ID NO: 708278 - RNA, 19 nt, Human
cggcagcgagccccggccc

SEQ ID NO: 708279 - RNA, 23 nt, Human
cggcagugccgacggggcugccc

SEQ ID NO: 708280 - RNA, 22 nt, Human
cggcauccgacacgggcagcgg

SEQ ID NO: 708281 - RNA, 21 nt, Human
cggcccgaggcgggcagcaug

SEQ ID NO: 708282 - RNA, 20 nt, Human
cggcccggaacagggggcgg

SEQ ID NO: 708283 - RNA, 21 nt, Human
cggccugcagacacuguuccu

SEQ ID NO: 708284 - RNA, 19 nt, Human
cguaagaggcgugagugcc

SEQ ID NO: 708285 - RNA, 20 nt, Human
cgucaacgacuacuuggacg

SEQ ID NO: 708286 - RNA, 20 nt, Human
cuccagcccgagcccagccu

SEQ ID NO: 708287 - RNA, 23 nt, Human
cuccgcgacgagcgcggccacga

SEQ ID NO: 708288 - RNA, 18 nt, Human
cuccgcgugcccccgccg

SEQ ID NO: 708289 - RNA, 22 nt, Human
cucggcgcccuuuuuccucacg

SEQ ID NO: 708290 - RNA, 22 nt, Human
cucuguccaacuucaaccccag

SEQ ID NO: 708291 - RNA, 21 nt, Human
cugcauggggggggucccucg

SEQ ID NO: 708292 - RNA, 21 nt, Human
cugccgagacuggccugccaa

SEQ ID NO: 708293 - RNA, 19 nt, Human
cugcgccggcucuaccugc

SEQ ID NO: 708294 - RNA, 20 nt, Human
cuggaggaccaggcucuagc

SEQ ID NO: 708295 - RNA, 24 nt, Human
cuggaucaaggagggcggccagcg

SEQ ID NO: 708296 - RNA, 21 nt, Human
cuggcucucgacugccgagac

SEQ ID NO: 708297 - RNA, 24 nt, Human
cuucaaccccagaagcacugagcu

SEQ ID NO: 708298 - RNA, 21 nt, Human
cuuccgaaaagacaucacccc

SEQ ID NO: 708299 - RNA, 18 nt, Human
cuugaggugugcccagaa

SEQ ID NO: 708300 - RNA, 20 nt, Human
gaccugcggguugccugccc

SEQ ID NO: 708301 - RNA, 20 nt, Human
gagcaaggacuggccggcag

SEQ ID NO: 708302 - RNA, 22 nt, Human
gagcaggugcuuucucagagac

SEQ ID NO: 708303 - RNA, 18 nt, Human
gagcccccgcgccuggcg

SEQ ID NO: 708304 - RNA, 22 nt, Human
gaggaccugcggguugccugcc

SEQ ID NO: 708305 - RNA, 18 nt, Human
gaggagagacccuaggcc

SEQ ID NO: 708306 - RNA, 23 nt, Human
gaggguccggcggaggcgcccgc

SEQ ID NO: 708307 - RNA, 21 nt, Human
gcagcagccgcagcagcccgc

SEQ ID NO: 708308 - RNA, 23 nt, Human
gcaggugcaggccuccauuccau

SEQ ID NO: 708309 - RNA, 20 nt, Human
gcaguagggagcaggcucau

SEQ ID NO: 708310 - RNA, 24 nt, Human
gcccccaaccucggcgcccuuuuu

SEQ ID NO: 708311 - RNA, 23 nt, Human
gccccgcgaagggcggggcgaca

SEQ ID NO: 708312 - RNA, 22 nt, Human
gccccucgcccuguagggcugg

SEQ ID NO: 708313 - RNA, 20 nt, Human
gcccugagggcccccgaacu

SEQ ID NO: 708314 - RNA, 20 nt, Human
gcccugcgguugcgcgucgu

SEQ ID NO: 708315 - RNA, 19 nt, Human
gcccugggcguggccacac

SEQ ID NO: 708316 - RNA, 19 nt, Human
gcccuguagggcuggaaua

SEQ ID NO: 708317 - RNA, 19 nt, Human
gccgagacuggccugccaa

SEQ ID NO: 708318 - RNA, 19 nt, Human
gccggcugcccagcagccu

SEQ ID NO: 708319 - RNA, 22 nt, Human
gcgcagccgcgccugcuggagc

SEQ ID NO: 708320 - RNA, 20 nt, Human
gcgcccgcugacugcggccc

SEQ ID NO: 708321 - RNA, 23 nt, Human
gcugaaccgcggaagggccggug

SEQ ID NO: 708322 - RNA, 19 nt, Human
gcugacugcggcccggaac

SEQ ID NO: 708323 - RNA, 20 nt, Human
gcugcugcuacuacugccgc

SEQ ID NO: 708324 - RNA, 22 nt, Human
gcuggagcucacagccaaccug

SEQ ID NO: 708325 - RNA, 18 nt, Human
ggagcugcgggaggacgg

SEQ ID NO: 708326 - RNA, 19 nt, Human
ggaguguggcgcccugcgg

SEQ ID NO: 708327 - RNA, 19 nt, Human
ggcccgaggcgggcagcau

SEQ ID NO: 708328 - RNA, 21 nt, Human
ggcccggaacagggggcgggg

SEQ ID NO: 708329 - RNA, 19 nt, Human
ggccggcagugccgacggg

SEQ ID NO: 708330 - RNA, 20 nt, Human
ggccggugaggaaccgggcc

SEQ ID NO: 708331 - RNA, 23 nt, Human
ggccugugucucacccagagcua

SEQ ID NO: 708332 - RNA, 18 nt, Human
gggaggccccaacaccuc

SEQ ID NO: 708333 - RNA, 21 nt, Human
gggggccuccgggggagggag

SEQ ID NO: 708334 - RNA, 22 nt, Human
gggggccuccgggggagggagc

SEQ ID NO: 708335 - RNA, 22 nt, Human
ggggggcgagggugaagggccu

SEQ ID NO: 708336 - RNA, 20 nt, Human
ggggugcccccagggagagg

SEQ ID NO: 708337 - RNA, 20 nt, Human
ggugaggaaccgggccucgg

SEQ ID NO: 708338 - RNA, 19 nt, Human
gugaagggccugccgcccc

SEQ ID NO: 708339 - RNA, 23 nt, Human
guggacagaaaaaaaaacagcca

SEQ ID NO: 708340 - RNA, 19 nt, Human
uaaggagcaggugcuuucu

SEQ ID NO: 708341 - RNA, 19 nt, Human
uacagcucaggcacccuuu

SEQ ID NO: 708342 - RNA, 21 nt, Human
uaccuugaugacccccuccag

SEQ ID NO: 708343 - RNA, 24 nt, Human
uaccuugaugacccccuccagccc

SEQ ID NO: 708344 - RNA, 19 nt, Human
uacuacugccgcuccgcgc

SEQ ID NO: 708345 - RNA, 20 nt, Human
uaggaaggcccagcauagug

SEQ ID NO: 708346 - RNA, 20 nt, Human
ucaaggagggcggccagcgg

SEQ ID NO: 708347 - RNA, 23 nt, Human
uccaacuucaaccccagaagcac

SEQ ID NO: 708348 - RNA, 21 nt, Human
uccacugcuagggccgcgggc

SEQ ID NO: 708349 - RNA, 19 nt, Human
uccgacacgggcagcggca

SEQ ID NO: 708350 - RNA, 19 nt, Human
uccgcgacgagcgcggcca

SEQ ID NO: 708351 - RNA, 21 nt, Human
uccgcgacgagcgcggccacg

SEQ ID NO: 708352 - RNA, 24 nt, Human
uccgcgcgcagccgcgccugcugg

SEQ ID NO: 708353 - RNA, 27 nt, Human
ucgcgcugcuggcgcucacggcgcugc

SEQ ID NO: 708354 - RNA, 23 nt, Human
ucguaggccuggcccagcugcgc

SEQ ID NO: 708355 - RNA, 21 nt, Human
ucugcaaguccugcgccucac

SEQ ID NO: 708356 - RNA, 24 nt, Human
ucugcggcugaaccgcggaagggc

SEQ ID NO: 708357 - RNA, 25 nt, Human
ucuguaacaggcaggcaucacagag

SEQ ID NO: 708358 - RNA, 18 nt, Human
ugaccaggacuggggaca

SEQ ID NO: 708359 - RNA, 22 nt, Human
ugaggggaggcagacaaaauug

SEQ ID NO: 708360 - RNA, 18 nt, Human
ugcaaaaccccaacugca

SEQ ID NO: 708361 - RNA, 21 nt, Human
ugcacaacaacagccugcgcg

SEQ ID NO: 708362 - RNA, 18 nt, Human
ugcccagaagcaagguag

SEQ ID NO: 708363 - RNA, 23 nt, Human
ugccccagccucgcgagggccgg

SEQ ID NO: 708364 - RNA, 18 nt, Human
ugccccgcgaagggcggg

SEQ ID NO: 708365 - RNA, 20 nt, Human
ugcccgguggccauguuggg

SEQ ID NO: 708366 - RNA, 21 nt, Human
ugcgcccugcacuggcugggg

SEQ ID NO: 708367 - RNA, 20 nt, Human
ugcgggagugggugugcugg

SEQ ID NO: 708368 - RNA, 18 nt, Human
ugcugccgcugcugcugc

SEQ ID NO: 708369 - RNA, 19 nt, Human
uggaauaguuagaaaaggc

SEQ ID NO: 708370 - RNA, 22 nt, Human
uggaaucccaaagcauuugcac

SEQ ID NO: 708371 - RNA, 20 nt, Human
uggaccucagcaggaaccag

SEQ ID NO: 708372 - RNA, 21 nt, Human
uggccggccacaguaggaucu

SEQ ID NO: 708373 - RNA, 24 nt, Human
uggccugcaaaaccccaacugcac

SEQ ID NO: 708374 - RNA, 19 nt, Human
uggcgcucacggcgcugcu

SEQ ID NO: 708375 - RNA, 19 nt, Human
uggcgcuccagagucuccu

SEQ ID NO: 708376 - RNA, 24 nt, Human
uggcuggguggcaggguaggggga

SEQ ID NO: 708377 - RNA, 19 nt, Human
uggggucaaggaaggggug

SEQ ID NO: 708378 - RNA, 20 nt, Human
uggggucaaggaaggggugg

SEQ ID NO: 708379 - RNA, 21 nt, Human
ugugggaggugggaaagaggc

SEQ ID NO: 708380 - RNA, 21 nt, Human
uuagaaaaggcaacccagucu

SEQ ID NO: 708381 - RNA, 23 nt, Human
uuagcagcacccucaagccaccu

SEQ ID NO: 708382 - RNA, 26 nt, Human
aaaaguguacauucuucaguuucucc

SEQ ID NO: 708383 - RNA, 24 nt, Human
aaacuagaccuauuucuccuucca

SEQ ID NO: 708384 - RNA, 18 nt, Human
aaacugcugauuuuuucu

SEQ ID NO: 708385 - RNA, 19 nt, Human
aaagaagcacaucaacugu

SEQ ID NO: 708386 - RNA, 20 nt, Human
aaagaugcccaacagaaccc

SEQ ID NO: 708387 - RNA, 22 nt, Human
aaaguguacauucuucaguuuc

SEQ ID NO: 708388 - RNA, 18 nt, Human
aacaagcauauuugcccu

SEQ ID NO: 708389 - RNA, 27 nt, Human
aaccauauaauuucagugaaaaucaag

SEQ ID NO: 708390 - RNA, 21 nt, Human
aacuagcgaagcucacaaggc

SEQ ID NO: 708391 - RNA, 20 nt, Human
aagcaaaaggcaacaagcau

SEQ ID NO: 708392 - RNA, 18 nt, Human
aagcaggauuaaggaggu

SEQ ID NO: 708393 - RNA, 20 nt, Human
aagcugccccucacuccucc

SEQ ID NO: 708394 - RNA, 21 nt, Human
aagcugccccucacuccucca

SEQ ID NO: 708395 - RNA, 18 nt, Human
acaaauggaucuacacaa

SEQ ID NO: 708396 - RNA, 19 nt, Human
acaugucugggcugcugcc

SEQ ID NO: 708397 - RNA, 23 nt, Human
accaaaguugucauuuaaauaag

SEQ ID NO: 708398 - RNA, 19 nt, Human
accaacgccuuuucaagca

SEQ ID NO: 708399 - RNA, 21 nt, Human
accaaucaccacuacacugcu

SEQ ID NO: 708400 - RNA, 18 nt, Human
accacaaaaaaaccgaga

SEQ ID NO: 708401 - RNA, 22 nt, Human
acgaacccucagagcggucggc

SEQ ID NO: 708402 - RNA, 19 nt, Human
acugagugccgacuaugca

SEQ ID NO: 708403 - RNA, 26 nt, Human
acugcaccacaaaaaaaccgagauug

SEQ ID NO: 708404 - RNA, 20 nt, Human
acugcacuccaguucccaag

SEQ ID NO: 708405 - RNA, 23 nt, Human
acugcacuccaguucccaaggaa

SEQ ID NO: 708406 - RNA, 18 nt, Human
agaauaagaggucccacc

SEQ ID NO: 708407 - RNA, 24 nt, Human
aggcaacaagcauuuuuacaagca

SEQ ID NO: 708408 - RNA, 21 nt, Human
auaaagcaaaaggcaacaagc

SEQ ID NO: 708409 - RNA, 21 nt, Human
aucaaaaccuuuaaugcucag

SEQ ID NO: 708410 - RNA, 22 nt, Human
augcagggccugguugcccaca

SEQ ID NO: 708411 - RNA, 28 nt, Human
augcccaacagaacccaaugaaucagaa

SEQ ID NO: 708412 - RNA, 21 nt, Human
caaaaaaaccgagauugauaa

SEQ ID NO: 708413 - RNA, 22 nt, Human
caaaaaagcccuccuguguaac

SEQ ID NO: 708414 - RNA, 19 nt, Human
caaacuuaagcugccccuc

SEQ ID NO: 708415 - RNA, 22 nt, Human
caagauacccgagaaaaguccu

SEQ ID NO: 708416 - RNA, 22 nt, Human
caaggagauaaauacccagaac

SEQ ID NO: 708417 - RNA, 24 nt, Human
caaggagauaaauacccagaacac

SEQ ID NO: 708418 - RNA, 26 nt, Human
caauaacaucucauuaacacucuggu

SEQ ID NO: 708419 - RNA, 25 nt, Human
cacaagcaauaauaaaacugcauuu

SEQ ID NO: 708420 - RNA, 22 nt, Human
cacccagcucauacugcacucc

SEQ ID NO: 708421 - RNA, 18 nt, Human
caccccuguucucccucu

SEQ ID NO: 708422 - RNA, 22 nt, Human
caccugcugagcaccauuuggc

SEQ ID NO: 708423 - RNA, 24 nt, Human
cacuauuugagaauaagagguccc

SEQ ID NO: 708424 - RNA, 19 nt, Human
cacugcaccacaaaaaaac

SEQ ID NO: 708425 - RNA, 19 nt, Human
cacugcaccacaaaaaaac

SEQ ID NO: 708426 - RNA, 20 nt, Human
cacugcaccacaaaaaaacc

SEQ ID NO: 708427 - RNA, 18 nt, Human
cagaacaaaggcaaucuu

SEQ ID NO: 708428 - RNA, 21 nt, Human
cagaacccaaugaaucagaag

SEQ ID NO: 708429 - RNA, 22 nt, Human
cagaauggcaggugggaggaug

SEQ ID NO: 708430 - RNA, 18 nt, Human
cagccaguaagucuaugu

SEQ ID NO: 708431 - RNA, 24 nt, Human
cauaggaaaagucuuugggauuuc

SEQ ID NO: 708432 - RNA, 22 nt, Human
caucucauuaacacucuggucc

SEQ ID NO: 708433 - RNA, 22 nt, Human
ccaaguaccaaggauccuuacu

SEQ ID NO: 708434 - RNA, 27 nt, Human
ccaagugacacccagcucauacugcac

SEQ ID NO: 708435 - RNA, 22 nt, Human
ccacugcaccacaaaaaaaccg

SEQ ID NO: 708436 - RNA, 23 nt, Human
ccagaacacauuaagccuacuga

SEQ ID NO: 708437 - RNA, 18 nt, Human
ccagcauugcuacagcca

SEQ ID NO: 708438 - RNA, 18 nt, Human
ccccaaaaaagcccuccu

SEQ ID NO: 708439 - RNA, 22 nt, Human
ccccaaacuuaagcugccccuc

SEQ ID NO: 708440 - RNA, 22 nt, Human
cccccaaaaaagcccuccugug

SEQ ID NO: 708441 - RNA, 25 nt, Human
ccccccaaaaaagcccuccugugua

SEQ ID NO: 708442 - RNA, 19 nt, Human
ccccuugcucccuuuccca

SEQ ID NO: 708443 - RNA, 24 nt, Human
ccucaaaugugagucgccuagucu

SEQ ID NO: 708444 - RNA, 21 nt, Human
ccucaguucaacagaugccac

SEQ ID NO: 708445 - RNA, 18 nt, Human
ccuguguaacaaaaaagc

SEQ ID NO: 708446 - RNA, 24 nt, Human
ccuuccacugcaccacaaaaaaac

SEQ ID NO: 708447 - RNA, 18 nt, Human
cggcguuucuacccuccc

SEQ ID NO: 708448 - RNA, 24 nt, Human
cucccuuucccaccccuguucucc

SEQ ID NO: 708449 - RNA, 23 nt, Human
cugcacuccaguucccaaggaaa

SEQ ID NO: 708450 - RNA, 20 nt, Human
cuguacuggucaucccccca

SEQ ID NO: 708451 - RNA, 21 nt, Human
cuguguaacaaaaaagcacug

SEQ ID NO: 708452 - RNA, 22 nt, Human
gaaaaauaaauaaaauagacaa

SEQ ID NO: 708453 - RNA, 23 nt, Human
gaaaagucuuugggauuucucca

SEQ ID NO: 708454 - RNA, 24 nt, Human
gaagcuaaaagggacacuucagug

SEQ ID NO: 708455 - RNA, 18 nt, Human
gaaggaagcuguuaaccc

SEQ ID NO: 708456 - RNA, 24 nt, Human
gaauaaacaaaauccaugauauuu

SEQ ID NO: 708457 - RNA, 18 nt, Human
gaccuauuucuccuuccu

SEQ ID NO: 708458 - RNA, 18 nt, Human
gagcccauucuuuccuug

SEQ ID NO: 708459 - RNA, 21 nt, Human
gcccaacagaacccaaugaau

SEQ ID NO: 708460 - RNA, 18 nt, Human
gcucccuuucccaccccu

SEQ ID NO: 708461 - RNA, 22 nt, Human
gcucccuuucccaccccuguuc

SEQ ID NO: 708462 - RNA, 21 nt, Human
gucuauguuuucaauguucuu

SEQ ID NO: 708463 - RNA, 23 nt, Human
uaaaaaaaacaucaauucagaaa

SEQ ID NO: 708464 - RNA, 22 nt, Human
uaaaauaaacuuaccaaggggc

SEQ ID NO: 708465 - RNA, 19 nt, Human
uaaaaugccuaguacauag

SEQ ID NO: 708466 - RNA, 19 nt, Human
uaacaagcauauuugcccu

SEQ ID NO: 708467 - RNA, 23 nt, Human
uaacaggccagcauugcuacagc

SEQ ID NO: 708468 - RNA, 18 nt, Human
uaacccagcacagcagca

SEQ ID NO: 708469 - RNA, 24 nt, Human
uaacccagcacagcagcacaccuc

SEQ ID NO: 708470 - RNA, 20 nt, Human
uaagaggucccaccugcucc

SEQ ID NO: 708471 - RNA, 24 nt, Human
uacacugaagauaaagcaaaaggc

SEQ ID NO: 708472 - RNA, 23 nt, Human
uacagccaguaagucuauguuuu

SEQ ID NO: 708473 - RNA, 25 nt, Human
uaucaaaauacacuuuucacuggga

SEQ ID NO: 708474 - RNA, 18 nt, Human
uauuugcaacuacauaua

SEQ ID NO: 708475 - RNA, 22 nt, Human
uauuuuaguaacucauagugua

SEQ ID NO: 708476 - RNA, 21 nt, Human
ucaagcauuacagcaaagcca

SEQ ID NO: 708477 - RNA, 23 nt, Human
ucaaguugaagcaggauuaagga

SEQ ID NO: 708478 - RNA, 22 nt, Human
ucacuccuccagccagcccucc

SEQ ID NO: 708479 - RNA, 24 nt, Human
ucagagcggucggcgcagcucaca

SEQ ID NO: 708480 - RNA, 23 nt, Human
uccacauguugauuuaauaaagu

SEQ ID NO: 708481 - RNA, 21 nt, Human
uccacugcaccacaaaaaaac

SEQ ID NO: 708482 - RNA, 21 nt, Human
uccaugauauuuuaguaacuc

SEQ ID NO: 708483 - RNA, 19 nt, Human
ucccccagagcugcucaac

SEQ ID NO: 708484 - RNA, 21 nt, Human
uccccccaaaaaagcccuccu

SEQ ID NO: 708485 - RNA, 22 nt, Human
uccccccaaaaaagcccuccug

SEQ ID NO: 708486 - RNA, 25 nt, Human
uccccccaaaaaagcccuccugugu

SEQ ID NO: 708487 - RNA, 24 nt, Human
ucucaaucucuucugcaauaacau

SEQ ID NO: 708488 - RNA, 24 nt, Human
ucuccagacuuuuagacagaacaa

SEQ ID NO: 708489 - RNA, 19 nt, Human
ucugggcugcugccuaaga

SEQ ID NO: 708490 - RNA, 20 nt, Human
ucuguacuggucaucccccc

SEQ ID NO: 708491 - RNA, 23 nt, Human
ugaaaugugauuuguucaaggcu

SEQ ID NO: 708492 - RNA, 21 nt, Human
ugaagauaaagcaaaaggcaa

SEQ ID NO: 708493 - RNA, 19 nt, Human
ugcuacagccaguaagucu

SEQ ID NO: 708494 - RNA, 19 nt, Human
ugcucccuuucccaccccu

SEQ ID NO: 708495 - RNA, 21 nt, Human
ugcucccuuucccaccccugu

SEQ ID NO: 708496 - RNA, 22 nt, Human
uggaacaaaacuauaucuuugc

SEQ ID NO: 708497 - RNA, 19 nt, Human
uggcggcagggaccgcgaa

SEQ ID NO: 708498 - RNA, 19 nt, Human
ugggagaaaaaacugcuga

SEQ ID NO: 708499 - RNA, 24 nt, Human
uggucauccccccaaaaaagcccu

SEQ ID NO: 708500 - RNA, 26 nt, Human
uguggaacaaaacuauaucuuugccc

SEQ ID NO: 708501 - RNA, 22 nt, Human
uuaaagaugcccaacagaaccc

SEQ ID NO: 708502 - RNA, 19 nt, Human
uuaacccagcacagcagca

SEQ ID NO: 708503 - RNA, 25 nt, Human
uuaacccagcacagcagcacaccuc

SEQ ID NO: 708504 - RNA, 20 nt, Human
uuaaugcucaguuuucacaa

SEQ ID NO: 708505 - RNA, 21 nt, Human
uucacaaacacagucaagucu

SEQ ID NO: 708506 - RNA, 24 nt, Human
uucacaagauaaucaaguugaagc

SEQ ID NO: 708507 - RNA, 20 nt, Human
uucagaauauaaaaaaaugc

SEQ ID NO: 708508 - RNA, 22 nt, Human
aaacacauauacagaguacccc

SEQ ID NO: 708509 - RNA, 23 nt, Human
aaagaagaaacacauauacagag

SEQ ID NO: 708510 - RNA, 26 nt, Human
aauugcuuuuucccuuuaacuuccau

SEQ ID NO: 708511 - RNA, 26 nt, Human
accuucuuuagcaacuuuccuuguug

SEQ ID NO: 708512 - RNA, 18 nt, Human
auuuauuugccggcugga

SEQ ID NO: 708513 - RNA, 22 nt, Human
caacaaugucauaguugguuuu

SEQ ID NO: 708514 - RNA, 21 nt, Human
cacccuuuuucccaaguuuug

SEQ ID NO: 708515 - RNA, 18 nt, Human
cacugaguugucugcuuu

SEQ ID NO: 708516 - RNA, 24 nt, Human
cagaguaccccaauuaccaguaug

SEQ ID NO: 708517 - RNA, 22 nt, Human
caguaugguggacccuaccccu

SEQ ID NO: 708518 - RNA, 21 nt, Human
ccauuugggcuucuuggcugc

SEQ ID NO: 708519 - RNA, 22 nt, Human
gcuucaguucuuucuucuucuu

SEQ ID NO: 708520 - RNA, 22 nt, Human
uauacagaguaccccaauuacc

SEQ ID NO: 708521 - RNA, 24 nt, Human
uauuuuuaugaaaucuguuuuuuu

SEQ ID NO: 708522 - RNA, 20 nt, Human
ucauaguugguuuuaucacu

SEQ ID NO: 708523 - RNA, 24 nt, Human
ucuuucuucuucuuuuugaagucc

SEQ ID NO: 708524 - RNA, 24 nt, Human
ucuuuggugauuuguccccuugcu

SEQ ID NO: 708525 - RNA, 27 nt, Human
ucuuuggugauuuguccccuugcugcu

SEQ ID NO: 708526 - RNA, 19 nt, Human
ugaaaucuguuuuuuucuu

SEQ ID NO: 708527 - RNA, 22 nt, Human
ugauuuguccccuugcugcuua

SEQ ID NO: 708528 - RNA, 18 nt, Human
uggcuggaauuuucucuu

SEQ ID NO: 708529 - RNA, 19 nt, Human
uggcuggaauuuucucuuc

SEQ ID NO: 708530 - RNA, 27 nt, Human
uuaaaaaagaccauuuaaaaaaacaau

SEQ ID NO: 708531 - RNA, 22 nt, Human
uucuuggcugcugauucaucuu

SEQ ID NO: 708532 - RNA, 21 nt, Human
uuggaaaugucuuugaagaac

SEQ ID NO: 708533 - RNA, 24 nt, Human
uuucugcauugggaaacagaacag

SEQ ID NO: 708534 - RNA, 20 nt, Human
uuuuucccuuuaacuuccau

SEQ ID NO: 708535 - RNA, 24 nt, Human
uuuuucuugugcugucuuuguauu

SEQ ID NO: 708536 - RNA, 22 nt, Human
uuuuuuuuuuuuaaaaaagacc

SEQ ID NO: 708537 - RNA, 19 nt, Human
aaaagaaaguuguauggga

SEQ ID NO: 708538 - RNA, 28 nt, Human
aaauguaggccaagugugguggcucacg

SEQ ID NO: 708539 - RNA, 25 nt, Human
aaccaccugugauuugaacacuuga

SEQ ID NO: 708540 - RNA, 21 nt, Human
aaccccgucucuaccaaaaau

SEQ ID NO: 708541 - RNA, 23 nt, Human
aagguggguggaucacuugaggu

SEQ ID NO: 708542 - RNA, 25 nt, Human
aagguggguggaucacuugagguca

SEQ ID NO: 708543 - RNA, 24 nt, Human
aagugugguggcucacgcauguaa

SEQ ID NO: 708544 - RNA, 22 nt, Human
aauaaacauauaaacuaaagug

SEQ ID NO: 708545 - RNA, 21 nt, Human
aauauggcgaaaccccgucuc

SEQ ID NO: 708546 - RNA, 22 nt, Human
aauguacaauaaaugcacugaa

SEQ ID NO: 708547 - RNA, 19 nt, Human
acaagccugccuguguaau

SEQ ID NO: 708548 - RNA, 20 nt, Human
acagagcaugcuugugcuug

SEQ ID NO: 708549 - RNA, 18 nt, Human
acccaaauucuaccacuc

SEQ ID NO: 708550 - RNA, 24 nt, Human
accccgucucuaccaaaaauacaa

SEQ ID NO: 708551 - RNA, 18 nt, Human
acugcacuguagccuggg

SEQ ID NO: 708552 - RNA, 21 nt, Human
acugcacuguagccugggcag

SEQ ID NO: 708553 - RNA, 20 nt, Human
acuggaauaaggaauaccag

SEQ ID NO: 708554 - RNA, 24 nt, Human
acuguagccugggcagcacaguga

SEQ ID NO: 708555 - RNA, 24 nt, Human
acuugaggucaggaguuugagacc

SEQ ID NO: 708556 - RNA, 21 nt, Human
agaaagcaguuucuacauucu

SEQ ID NO: 708557 - RNA, 19 nt, Human
agcacagugagacuccguc

SEQ ID NO: 708558 - RNA, 24 nt, Human
agcacuuugggagaccaagguggg

SEQ ID NO: 708559 - RNA, 22 nt, Human
agccugggcagcacagugagac

SEQ ID NO: 708560 - RNA, 24 nt, Human
agccugggcagcacagugagacuc

SEQ ID NO: 708561 - RNA, 21 nt, Human
agcuggguguggugacagaug

SEQ ID NO: 708562 - RNA, 18 nt, Human
aggagaauugcuugaaaa

SEQ ID NO: 708563 - RNA, 24 nt, Human
aggcaggagaauugcuugaaaacc

SEQ ID NO: 708564 - RNA, 26 nt, Human
aggcaggagaauugcuugaaaaccug

SEQ ID NO: 708565 - RNA, 24 nt, Human
aggcggagauuggagagagccaag

SEQ ID NO: 708566 - RNA, 21 nt, Human
aggcugaggcaggagaauugc

SEQ ID NO: 708567 - RNA, 24 nt, Human
aggcugaggcaggagaauugcuug

SEQ ID NO: 708568 - RNA, 23 nt, Human
agguggguggaucacuugagguc

SEQ ID NO: 708569 - RNA, 21 nt, Human
aguuguaugggaguugagugg

SEQ ID NO: 708570 - RNA, 20 nt, Human
aucacuugaggucaggaguu

SEQ ID NO: 708571 - RNA, 26 nt, Human
aucacuuuccuacccaaauucuacca

SEQ ID NO: 708572 - RNA, 24 nt, Human
aucgagccacugcacuguagccug

SEQ ID NO: 708573 - RNA, 22 nt, Human
augcauuucuuagaacguaucc

SEQ ID NO: 708574 - RNA, 25 nt, Human
auguagccgcacuguaauaguuuuc

SEQ ID NO: 708575 - RNA, 22 nt, Human
caacggcagcaggagcgcgggc

SEQ ID NO: 708576 - RNA, 24 nt, Human
caagguggguggaucacuugaggu

SEQ ID NO: 708577 - RNA, 22 nt, Human
caauauggcgaaaccccgucuc

SEQ ID NO: 708578 - RNA, 24 nt, Human
caauauggcgaaaccccgucucua

SEQ ID NO: 708579 - RNA, 25 nt, Human
cacaagauucccuaacuaugcauuu

SEQ ID NO: 708580 - RNA, 24 nt, Human
cacgcauguaaucccagcacuuug

SEQ ID NO: 708581 - RNA, 20 nt, Human
cacuauacaaaaucucagaa

SEQ ID NO: 708582 - RNA, 20 nt, Human
cacugauuucugacauccuc

SEQ ID NO: 708583 - RNA, 23 nt, Human
cacugcacuguagccugggcagc

SEQ ID NO: 708584 - RNA, 24 nt, Human
cacugcacuguagccugggcagca

SEQ ID NO: 708585 - RNA, 23 nt, Human
cacuugaggucaggaguuugaga

SEQ ID NO: 708586 - RNA, 24 nt, Human
cagcacuuugggagaccaaggugg

SEQ ID NO: 708587 - RNA, 21 nt, Human
cagcaggcaagacaaauaggc

SEQ ID NO: 708588 - RNA, 21 nt, Human
caggcaggaauuccaggguag

SEQ ID NO: 708589 - RNA, 19 nt, Human
caucucaaucacuauacaa

SEQ ID NO: 708590 - RNA, 20 nt, Human
cauguggcuaguggcucauu

SEQ ID NO: 708591 - RNA, 22 nt, Human
cauguggcuaguggcucauugg

SEQ ID NO: 708592 - RNA, 20 nt, Human
ccacugcacuguagccuggg

SEQ ID NO: 708593 - RNA, 21 nt, Human
ccacugcacuguagccugggc

SEQ ID NO: 708594 - RNA, 24 nt, Human
ccacugcacuguagccugggcagc

SEQ ID NO: 708595 - RNA, 22 nt, Human
ccaguacaguagccacuaacca

SEQ ID NO: 708596 - RNA, 23 nt, Human
ccugggcagcacagugagacucc

SEQ ID NO: 708597 - RNA, 25 nt, Human
cgacggcagcagcggcgaggcccag

SEQ ID NO: 708598 - RNA, 24 nt, Human
cgcauguaaucccagcacuuuggg

SEQ ID NO: 708599 - RNA, 21 nt, Human
cgcgggcagcgcggcccggag

SEQ ID NO: 708600 - RNA, 19 nt, Human
cggcgaggcccagcaacgg

SEQ ID NO: 708601 - RNA, 24 nt, Human
cucacgcauguaaucccagcacuu

SEQ ID NO: 708602 - RNA, 24 nt, Human
cuccauggucaguacacugauuuc

SEQ ID NO: 708603 - RNA, 23 nt, Human
cuccgucauauauauauauauau

SEQ ID NO: 708604 - RNA, 25 nt, Human
cuuaaaaucacuuauuccccauuuc

SEQ ID NO: 708605 - RNA, 22 nt, Human
cuuuaucuuuccuguuuuuggu

SEQ ID NO: 708606 - RNA, 22 nt, Human
gacaguccgcgacggcagcagc

SEQ ID NO: 708607 - RNA, 23 nt, Human
gacuuaaucacuuuccuacccaa

SEQ ID NO: 708608 - RNA, 24 nt, Human
gaucacuugaggucaggaguuuga

SEQ ID NO: 708609 - RNA, 24 nt, Human
gccacugcacuguagccugggcag

SEQ ID NO: 708610 - RNA, 20 nt, Human
ggaaaauuacucguuucagc

SEQ ID NO: 708611 - RNA, 22 nt, Human
ggaucacuugaggucaggaguu

SEQ ID NO: 708612 - RNA, 19 nt, Human
gggaaaguacaaaagguau

SEQ ID NO: 708613 - RNA, 19 nt, Human
ggucaggaguuugagacca

SEQ ID NO: 708614 - RNA, 21 nt, Human
gguggaucacuugaggucagg

SEQ ID NO: 708615 - RNA, 24 nt, Human
gguggcucacgcauguaaucccag

SEQ ID NO: 708616 - RNA, 29 nt, Human
gguguuaaaaguuguaaaauuuucuucaa

SEQ ID NO: 708617 - RNA, 18 nt, Human
guaaaauuuucuucaucu

SEQ ID NO: 708618 - RNA, 21 nt, Human
guaaaauuuucuucaucuaaa

SEQ ID NO: 708619 - RNA, 22 nt, Human
guaggccaagugugguggcuca

SEQ ID NO: 708620 - RNA, 24 nt, Human
guggcucacgcauguaaucccagc

SEQ ID NO: 708621 - RNA, 24 nt, Human
guguggugacagaugucugugguc

SEQ ID NO: 708622 - RNA, 22 nt, Human
guuucagcuuuuucauuuuuuu

SEQ ID NO: 708623 - RNA, 23 nt, Human
uaaaaagauacacauucuagagg

SEQ ID NO: 708624 - RNA, 21 nt, Human
uaaaaauguuacuggaauaag

SEQ ID NO: 708625 - RNA, 22 nt, Human
uaaacauauaaacuaaaguggg

SEQ ID NO: 708626 - RNA, 23 nt, Human
uaaagcagcuauuuuggaagagc

SEQ ID NO: 708627 - RNA, 23 nt, Human
uaaagcucuaauauccaauguca

SEQ ID NO: 708628 - RNA, 21 nt, Human
uaacaacugucuuggaacuga

SEQ ID NO: 708629 - RNA, 24 nt, Human
uaaggugccuguuauagauguucu

SEQ ID NO: 708630 - RNA, 22 nt, Human
uaauauguaaguguuaaccuaa

SEQ ID NO: 708631 - RNA, 18 nt, Human
uacaaaaaguuagcuggg

SEQ ID NO: 708632 - RNA, 19 nt, Human
uacacaagcuggaacuuug

SEQ ID NO: 708633 - RNA, 22 nt, Human
uaccaaaaauacaaaaaguuag

SEQ ID NO: 708634 - RNA, 22 nt, Human
uagaaaguaucaaaauguacaa

SEQ ID NO: 708635 - RNA, 20 nt, Human
uagaacguauccccauugau

SEQ ID NO: 708636 - RNA, 18 nt, Human
uagaggaauaagagaaaa

SEQ ID NO: 708637 - RNA, 21 nt, Human
uagguagaaaguaucaaaaug

SEQ ID NO: 708638 - RNA, 21 nt, Human
uaguauaucuaucuaucuccc

SEQ ID NO: 708639 - RNA, 20 nt, Human
uauagaacaguguuuccuua

SEQ ID NO: 708640 - RNA, 20 nt, Human
uaugcacauaauucuguaua

SEQ ID NO: 708641 - RNA, 19 nt, Human
ucacuugaggucaggaguu

SEQ ID NO: 708642 - RNA, 22 nt, Human
ucauuaaugauagugccauuaa

SEQ ID NO: 708643 - RNA, 20 nt, Human
uccccagaagaaaguaagau

SEQ ID NO: 708644 - RNA, 18 nt, Human
ucuaccacuccuuuaaga

SEQ ID NO: 708645 - RNA, 21 nt, Human
ucucuaccaaaaauacaaaaa

SEQ ID NO: 708646 - RNA, 19 nt, Human
ucugaacaaaagagaccau

SEQ ID NO: 708647 - RNA, 21 nt, Human
ucugacauccucuaugcuuuc

SEQ ID NO: 708648 - RNA, 21 nt, Human
ucugcaguauucagcacagua

SEQ ID NO: 708649 - RNA, 21 nt, Human
ucuguggucccagcuacuaag

SEQ ID NO: 708650 - RNA, 23 nt, Human
ugaaaaaugaaaccaaauauuga

SEQ ID NO: 708651 - RNA, 22 nt, Human
ugaaaaccugcaaggcggagau

SEQ ID NO: 708652 - RNA, 24 nt, Human
ugacagaugucuguggucccagcu

SEQ ID NO: 708653 - RNA, 25 nt, Human
ugacagugauaacaauggcuuaagc

SEQ ID NO: 708654 - RNA, 26 nt, Human
ugaggcaggagaauugcuugaaaacc

SEQ ID NO: 708655 - RNA, 27 nt, Human
ugaggcaggagaauugcuugaaaaccu

SEQ ID NO: 708656 - RNA, 18 nt, Human
ugaggucaggaguuugag

SEQ ID NO: 708657 - RNA, 24 nt, Human
ugcacugaaaacuuugaucacugu

SEQ ID NO: 708658 - RNA, 18 nt, Human
ugccuguuauagauguuc

SEQ ID NO: 708659 - RNA, 20 nt, Human
ugcuuucuacuuugauggcu

SEQ ID NO: 708660 - RNA, 21 nt, Human
uggaacuuuguugccauuagu

SEQ ID NO: 708661 - RNA, 19 nt, Human
uggaagguaggauuuaaga

SEQ ID NO: 708662 - RNA, 23 nt, Human
uggaccacauauagaacaguguu

SEQ ID NO: 708663 - RNA, 23 nt, Human
uggaucacuugaggucaggaguu

SEQ ID NO: 708664 - RNA, 24 nt, Human
uggaucacuugaggucaggaguuu

SEQ ID NO: 708665 - RNA, 27 nt, Human
uggaucacuugaggucaggaguuugag

SEQ ID NO: 708666 - RNA, 19 nt, Human
uggcuaguggcucauugga

SEQ ID NO: 708667 - RNA, 21 nt, Human
uggcucacgcauguaauccca

SEQ ID NO: 708668 - RNA, 24 nt, Human
uggcucacgcauguaaucccagca

SEQ ID NO: 708669 - RNA, 24 nt, Human
ugggagaccaagguggguggauca

SEQ ID NO: 708670 - RNA, 24 nt, Human
uggguggaucacuugaggucagga

SEQ ID NO: 708671 - RNA, 24 nt, Human
uggugacagaugucugugguccca

SEQ ID NO: 708672 - RNA, 24 nt, Human
ugguggcucacgcauguaauccca

SEQ ID NO: 708673 - RNA, 19 nt, Human
uguagguuugggacaaaau

SEQ ID NO: 708674 - RNA, 24 nt, Human
ugucuguggucccagcuacuaagg

SEQ ID NO: 708675 - RNA, 22 nt, Human
ugugaugaguguuuucgauuca

SEQ ID NO: 708676 - RNA, 26 nt, Human
uguuacuggaauaaggaauaccauua

SEQ ID NO: 708677 - RNA, 21 nt, Human
uguuuuucuucgguuuuugcu

SEQ ID NO: 708678 - RNA, 19 nt, Human
uuagcuggguguggugaca

SEQ ID NO: 708679 - RNA, 24 nt, Human
uuagcuggguguggugacagaugu

SEQ ID NO: 708680 - RNA, 23 nt, Human
uuagcuggguguggugaccacgg

SEQ ID NO: 708681 - RNA, 21 nt, Human
uucaagugacagauucugccu

SEQ ID NO: 708682 - RNA, 23 nt, Human
uucaagugacagauucugccuuu

SEQ ID NO: 708683 - RNA, 21 nt, Human
uucuuuaucuuuccuguuuuu

SEQ ID NO: 708684 - RNA, 22 nt, Human
uucuuugagccucagacuucua

SEQ ID NO: 708685 - RNA, 20 nt, Human
uuuaaaauguuauucugaau

SEQ ID NO: 708686 - RNA, 22 nt, Human
uuuaaacuaaauuuacuuaaau

SEQ ID NO: 708687 - RNA, 23 nt, Human
uuuucauuuuuuuacuccccaaa

SEQ ID NO: 708688 - RNA, 24 nt, Human
aaaaaaaagagcacaaaugcaugg

SEQ ID NO: 708689 - RNA, 20 nt, Human
aaaaaagagcacaaaugcau

SEQ ID NO: 708690 - RNA, 23 nt, Human
aaaacaaacugaaacauaagccc

SEQ ID NO: 708691 - RNA, 28 nt, Human
aaacaaacugaaacauaagccggacccc

SEQ ID NO: 708692 - RNA, 19 nt, Human
aaacaaaucaccauccuuc

SEQ ID NO: 708693 - RNA, 21 nt, Human
aaacagaacggaaaacaaacu

SEQ ID NO: 708694 - RNA, 21 nt, Human
aaauacaaaaaccaugaaaca

SEQ ID NO: 708695 - RNA, 20 nt, Human
aacaaaucaccauccuucaa

SEQ ID NO: 708696 - RNA, 22 nt, Human
aagaaaaagacuaagaacaaaa

SEQ ID NO: 708697 - RNA, 25 nt, Human
aagaaaaagacuaagaacaaaaagu

SEQ ID NO: 708698 - RNA, 19 nt, Human
aagaacaucaauuuuacaa

SEQ ID NO: 708699 - RNA, 26 nt, Human
aauuuagaaacaaauuuuauuuaaga

SEQ ID NO: 708700 - RNA, 26 nt, Human
acaagaaaaagacuaagaacaaaaag

SEQ ID NO: 708701 - RNA, 20 nt, Human
acucaaauacaaaaaccaug

SEQ ID NO: 708702 - RNA, 20 nt, Human
acuuugaaaugagaaaagga

SEQ ID NO: 708703 - RNA, 21 nt, Human
acuuugaaaugagaaaaggag

SEQ ID NO: 708704 - RNA, 25 nt, Human
agaacaaaaaguguuuacagauaca

SEQ ID NO: 708705 - RNA, 21 nt, Human
agaacggaaaacaaacugaaa

SEQ ID NO: 708706 - RNA, 18 nt, Human
auccagaucuucccagca

SEQ ID NO: 708707 - RNA, 21 nt, Human
aucuuccuucuuucccuucca

SEQ ID NO: 708708 - RNA, 18 nt, Human
augaagaugaacuuuugu

SEQ ID NO: 708709 - RNA, 24 nt, Human
caaaaaccaugaaacaaaucacca

SEQ ID NO: 708710 - RNA, 19 nt, Human
caacaauuugagcaaagau

SEQ ID NO: 708711 - RNA, 22 nt, Human
caacuuugaaaugagaaaagga

SEQ ID NO: 708712 - RNA, 26 nt, Human
caaucuuccuucuuucccuuccaaga

SEQ ID NO: 708713 - RNA, 22 nt, Human
cacauagcauuaacacauauua

SEQ ID NO: 708714 - RNA, 21 nt, Human
cacugguagcaacuuugaaau

SEQ ID NO: 708715 - RNA, 23 nt, Human
cagaacggaaaacaaacugaaac

SEQ ID NO: 708716 - RNA, 18 nt, Human
cauccuucaacaauuugg

SEQ ID NO: 708717 - RNA, 18 nt, Human
caugaaacaaaucaccau

SEQ ID NO: 708718 - RNA, 25 nt, Human
caugaaacaaaucaccauccuucaa

SEQ ID NO: 708719 - RNA, 24 nt, Human
ccaaccaacaaucuuccuucuuuc

SEQ ID NO: 708720 - RNA, 19 nt, Human
ccagaaaaccguggcuaca

SEQ ID NO: 708721 - RNA, 23 nt, Human
cugcaaugaagaugaacuuuugu

SEQ ID NO: 708722 - RNA, 18 nt, Human
cuuauagaucuucuggga

SEQ ID NO: 708723 - RNA, 21 nt, Human
gaagugggagauacaaccuag

SEQ ID NO: 708724 - RNA, 21 nt, Human
ggagauacaaccuagaaagaa

SEQ ID NO: 708725 - RNA, 24 nt, Human
uaaaauaucaacuuuuccagaaaa

SEQ ID NO: 708726 - RNA, 23 nt, Human
uacaaccuagaaagaaaggcagg

SEQ ID NO: 708727 - RNA, 23 nt, Human
uacaagaaaaagacuaagaacaa

SEQ ID NO: 708728 - RNA, 25 nt, Human
uacaagaaaaagacuaagaacaaaa

SEQ ID NO: 708729 - RNA, 21 nt, Human
uacaauuccuaaaauaucaac

SEQ ID NO: 708730 - RNA, 21 nt, Human
uagaaagaaaggcagguaucu

SEQ ID NO: 708731 - RNA, 22 nt, Human
uagaacgugcauuagacucaaa

SEQ ID NO: 708732 - RNA, 23 nt, Human
uagacucaaauacaaaaaccaug

SEQ ID NO: 708733 - RNA, 22 nt, Human
uaggaaccaccagcauucaagc

SEQ ID NO: 708734 - RNA, 27 nt, Human
ucaaauacaaaaaccaugaaacaaauc

SEQ ID NO: 708735 - RNA, 20 nt, Human
ucaacuaggcaauaaaaugu

SEQ ID NO: 708736 - RNA, 21 nt, Human
ucaagcaccauaaaaaaaaaa

SEQ ID NO: 708737 - RNA, 18 nt, Human
ucugaaauacaauuccua

SEQ ID NO: 708738 - RNA, 19 nt, Human
ucugcaaugaagaugaacu

SEQ ID NO: 708739 - RNA, 23 nt, Human
ucuguaaucagggaagguucugc

SEQ ID NO: 708740 - RNA, 18 nt, Human
ucuuccuucuuucccuuc

SEQ ID NO: 708741 - RNA, 22 nt, Human
ugaaaucauccaagauucugua

SEQ ID NO: 708742 - RNA, 22 nt, Human
ugaaccuuuggcacuaggaauc

SEQ ID NO: 708743 - RNA, 18 nt, Human
ugagcaaagauagaaugc

SEQ ID NO: 708744 - RNA, 21 nt, Human
uggguuuucagguauauacau

SEQ ID NO: 708745 - RNA, 23 nt, Human
uugaaaugagaaaaggagcuuac

SEQ ID NO: 708746 - RNA, 26 nt, Human
uuugagcaaagauagaaugccuaaga

SEQ ID NO: 708747 - RNA, 24 nt, Human
aaauaacagagcuccagagaaaga

SEQ ID NO: 708748 - RNA, 21 nt, Human
aaccuccugcaaacacccgca

SEQ ID NO: 708749 - RNA, 23 nt, Human
aacugcauugaggguacagccuu

SEQ ID NO: 708750 - RNA, 21 nt, Human
aagucgcagcuguuaauccug

SEQ ID NO: 708751 - RNA, 22 nt, Human
aagucgcagcuguuaauccuga

SEQ ID NO: 708752 - RNA, 24 nt, Human
aauacaauuuauuauuauuacauu

SEQ ID NO: 708753 - RNA, 18 nt, Human
aauccgugaagacaggcc

SEQ ID NO: 708754 - RNA, 28 nt, Human
acagagcuccagagaaagagggaacgcc

SEQ ID NO: 708755 - RNA, 21 nt, Human
accgcccccuucagugccccg

SEQ ID NO: 708756 - RNA, 18 nt, Human
acgccgaagcgccacggc

SEQ ID NO: 708757 - RNA, 22 nt, Human
acucuguugcaggcuccuuacu

SEQ ID NO: 708758 - RNA, 21 nt, Human
agcccagcgaguacugcaacc

SEQ ID NO: 708759 - RNA, 22 nt, Human
caagucaggguccuggaccgcc

SEQ ID NO: 708760 - RNA, 18 nt, Human
cacccgagacgaccucag

SEQ ID NO: 708761 - RNA, 18 nt, Human
cagagcuccagagaaaga

SEQ ID NO: 708762 - RNA, 19 nt, Human
cagcgcccaccacaggcua

SEQ ID NO: 708763 - RNA, 21 nt, Human
ccaaagcuugaauuuacaugg

SEQ ID NO: 708764 - RNA, 18 nt, Human
ccaccacaggcuaaaccc

SEQ ID NO: 708765 - RNA, 20 nt, Human
cccccgagccucgcgugcuc

SEQ ID NO: 708766 - RNA, 19 nt, Human
ccccgagccucgcgugcuc

SEQ ID NO: 708767 - RNA, 18 nt, Human
ccccgugccgcccccgag

SEQ ID NO: 708768 - RNA, 22 nt, Human
ccccgugccgcccccgagccuc

SEQ ID NO: 708769 - RNA, 18 nt, Human
ccccuaaacaacaaaacu

SEQ ID NO: 708770 - RNA, 21 nt, Human
ccccuaaacaacaaaacucug

SEQ ID NO: 708771 - RNA, 22 nt, Human
cccgcagcgcccaccacaggcu

SEQ ID NO: 708772 - RNA, 18 nt, Human
cccggcccgcccgcggga

SEQ ID NO: 708773 - RNA, 18 nt, Human
ccgcccccuucagugccc

SEQ ID NO: 708774 - RNA, 19 nt, Human
ccgcccccuucagugcccc

SEQ ID NO: 708775 - RNA, 18 nt, Human
ccgccccgugccgccccc

SEQ ID NO: 708776 - RNA, 22 nt, Human
ccucacccgagacgaccucagc

SEQ ID NO: 708777 - RNA, 18 nt, Human
ccucgcgugcucgcgccg

SEQ ID NO: 708778 - RNA, 23 nt, Human
ccugcaaacacccgcagcgccca

SEQ ID NO: 708779 - RNA, 23 nt, Human
ccuugcugaaggguccuuucuug

SEQ ID NO: 708780 - RNA, 22 nt, Human
cgcccccgagccucgcgugcuc

SEQ ID NO: 708781 - RNA, 22 nt, Human
cgcccccuaaacaacaaaacuc

SEQ ID NO: 708782 - RNA, 22 nt, Human
cgugccgcccccgagccucgcg

SEQ ID NO: 708783 - RNA, 24 nt, Human
cuaaagucgcagcuguuaauccug

SEQ ID NO: 708784 - RNA, 25 nt, Human
cucaaaauaacagagcuccagagaa

SEQ ID NO: 708785 - RNA, 18 nt, Human
cuccaauacaauuuauua

SEQ ID NO: 708786 - RNA, 23 nt, Human
cuuccggcgcgaccuccucaccc

SEQ ID NO: 708787 - RNA, 22 nt, Human
cuugcugaaggguccuuucuug

SEQ ID NO: 708788 - RNA, 24 nt, Human
cuugucaacuccuaguuagccugc

SEQ ID NO: 708789 - RNA, 20 nt, Human
gagaagaaaauauaccccac

SEQ ID NO: 708790 - RNA, 21 nt, Human
gagacaagucaggguccugga

SEQ ID NO: 708791 - RNA, 19 nt, Human
gaugaugaaucuggaaaaa

SEQ ID NO: 708792 - RNA, 22 nt, Human
gccgcgcccccuaaacaacaaa

SEQ ID NO: 708793 - RNA, 24 nt, Human
gcugcaaggugaagggagcggugc

SEQ ID NO: 708794 - RNA, 18 nt, Human
ggugcggugccgcgcccc

SEQ ID NO: 708795 - RNA, 21 nt, Human
gucuucuugugguuguuacca

SEQ ID NO: 708796 - RNA, 19 nt, Human
gugaagggagcggugcggu

SEQ ID NO: 708797 - RNA, 21 nt, Human
gugaugacagcaaaacuaaaa

SEQ ID NO: 708798 - RNA, 21 nt, Human
gugccgcgcccccuaaacaac

SEQ ID NO: 708799 - RNA, 23 nt, Human
uaaaccccgccccgugccgcccc

SEQ ID NO: 708800 - RNA, 19 nt, Human
uaaccgcgagacaagucag

SEQ ID NO: 708801 - RNA, 24 nt, Human
uaacuaagaaagaacaguuucacu

SEQ ID NO: 708802 - RNA, 24 nt, Human
uacagccuugcugaaggguccuuu

SEQ ID NO: 708803 - RNA, 22 nt, Human
uaccacaagccaaagcuugaau

SEQ ID NO: 708804 - RNA, 26 nt, Human
uacugcaaccuccugcaaagggcccu

SEQ ID NO: 708805 - RNA, 26 nt, Human
uauuauacucaaaauaacagagcucc

SEQ ID NO: 708806 - RNA, 21 nt, Human
ucaaugaugaugaaucuggaa

SEQ ID NO: 708807 - RNA, 25 nt, Human
ucagcccagcgaguacugcaaccuc

SEQ ID NO: 708808 - RNA, 22 nt, Human
ucaggguccuggaccgcccccu

SEQ ID NO: 708809 - RNA, 19 nt, Human
uccagagaaagacaguuaa

SEQ ID NO: 708810 - RNA, 26 nt, Human
uccagagaaagacaguuaacuaagaa

SEQ ID NO: 708811 - RNA, 18 nt, Human
uccuggaccgcccccuuc

SEQ ID NO: 708812 - RNA, 19 nt, Human
uggaccgcccccuucagug

SEQ ID NO: 708813 - RNA, 24 nt, Human
uuacaugggcaucaggccaagucu

SEQ ID NO: 708814 - RNA, 19 nt, Human
uucuugacagucaaugaug

SEQ ID NO: 708815 - RNA, 24 nt, Human
uugacagucaaugaugaugaaucu

SEQ ID NO: 708816 - RNA, 22 nt, Human
aaaagaaaaagaaaauugagag

SEQ ID NO: 708817 - RNA, 24 nt, Human
aaaagaaaaagaaaauugagagag

SEQ ID NO: 708818 - RNA, 18 nt, Human
aaacagaagaaaccaaag

SEQ ID NO: 708819 - RNA, 19 nt, Human
aaaccaaagaaaaacacac

SEQ ID NO: 708820 - RNA, 28 nt, Human
aaagaaaaacacacuucauguaaacaaa

SEQ ID NO: 708821 - RNA, 20 nt, Human
aaagaaaauugagagagagg

SEQ ID NO: 708822 - RNA, 25 nt, Human
aacacacuucauguaaacaacagaa

SEQ ID NO: 708823 - RNA, 18 nt, Human
aaccuggggcgccgcacu

SEQ ID NO: 708824 - RNA, 23 nt, Human
aagaaaccaaagaaaaacacacu

SEQ ID NO: 708825 - RNA, 19 nt, Human
aaggaugaggauacagaga

SEQ ID NO: 708826 - RNA, 21 nt, Human
acccuguugccaggccaccgg

SEQ ID NO: 708827 - RNA, 19 nt, Human
acucuuugcuuacugcagg

SEQ ID NO: 708828 - RNA, 25 nt, Human
agaaaagaaaaagaaaauugagaga

SEQ ID NO: 708829 - RNA, 22 nt, Human
aggaauuucagauaacaaaugu

SEQ ID NO: 708830 - RNA, 18 nt, Human
aggcagaaccaauauaau

SEQ ID NO: 708831 - RNA, 19 nt, Human
augccagaggcagaaccaa

SEQ ID NO: 708832 - RNA, 18 nt, Human
caaagaaaaacacacuuc

SEQ ID NO: 708833 - RNA, 20 nt, Human
caaaugugaaaaguugaaau

SEQ ID NO: 708834 - RNA, 19 nt, Human
cacacaaaucugugugugg

SEQ ID NO: 708835 - RNA, 23 nt, Human
cacacaaaucuguguguggcuaa

SEQ ID NO: 708836 - RNA, 18 nt, Human
cagcaugccagaggcaga

SEQ ID NO: 708837 - RNA, 20 nt, Human
cagcaugccagaggcagaac

SEQ ID NO: 708838 - RNA, 23 nt, Human
cagcaugccagaggcagaaccaa

SEQ ID NO: 708839 - RNA, 23 nt, Human
cauguaaacaacagaacacuaug

SEQ ID NO: 708840 - RNA, 22 nt, Human
ccaccggguccggcccagccuu

SEQ ID NO: 708841 - RNA, 23 nt, Human
ccggguccggcccagccuugauu

SEQ ID NO: 708842 - RNA, 20 nt, Human
cuacaauaaaagccacacaa

SEQ ID NO: 708843 - RNA, 19 nt, Human
cuaccagcaugccagaggc

SEQ ID NO: 708844 - RNA, 24 nt, Human
cucgccgcgccuguuacugccucc

SEQ ID NO: 708845 - RNA, 24 nt, Human
gaaaaacacacuucauguaaacaa

SEQ ID NO: 708846 - RNA, 22 nt, Human
gaaaauaauaaguuaggauggc

SEQ ID NO: 708847 - RNA, 22 nt, Human
uaacaaaugugaaaaguugaaa

SEQ ID NO: 708848 - RNA, 23 nt, Human
uaacaggaaauaggaauuucaga

SEQ ID NO: 708849 - RNA, 18 nt, Human
uagaaaacagggaaaugu

SEQ ID NO: 708850 - RNA, 25 nt, Human
uagaaaacagggaaauguccuucaa

SEQ ID NO: 708851 - RNA, 20 nt, Human
uagaaaaugaguucaaccau

SEQ ID NO: 708852 - RNA, 19 nt, Human
ucacucauccucgcuucgc

SEQ ID NO: 708853 - RNA, 27 nt, Human
ucauguaaacaacagaacacuaugcua

SEQ ID NO: 708854 - RNA, 18 nt, Human
uggaaaacagaagaaacc

SEQ ID NO: 708855 - RNA, 24 nt, Human
uggaaaacagaagaaaccaaagaa

SEQ ID NO: 708856 - RNA, 23 nt, Human
ugucuggaggagaaccucuggaa

SEQ ID NO: 708857 - RNA, 25 nt, Human
uguuaacaggaaauaggaauuucag

SEQ ID NO: 708858 - RNA, 20 nt, Human
uuacugcaggucuugucugg

SEQ ID NO: 708859 - RNA, 24 nt, Human
uuacugccuccacggaucacucag

SEQ ID NO: 708860 - RNA, 23 nt, Human
uuaguuggaaaacagaagaaacc

SEQ ID NO: 708861 - RNA, 21 nt, Human
aaaaagaaacauggaauccau

SEQ ID NO: 708862 - RNA, 24 nt, Human
aaauggccagccagcuuggggagc

SEQ ID NO: 708863 - RNA, 18 nt, Human
aacaacaucacauaucca

SEQ ID NO: 708864 - RNA, 19 nt, Human
aacauggagaaaaagauga

SEQ ID NO: 708865 - RNA, 22 nt, Human
aacucuguuaccucugcauccc

SEQ ID NO: 708866 - RNA, 21 nt, Human
aagcaagggugagacagccac

SEQ ID NO: 708867 - RNA, 19 nt, Human
aagccucuucuuuaggaau

SEQ ID NO: 708868 - RNA, 20 nt, Human
aagguccauucuuccuuagg

SEQ ID NO: 708869 - RNA, 21 nt, Human
aagguugucaggggagucugu

SEQ ID NO: 708870 - RNA, 20 nt, Human
aaugcccacccuccacaggc

SEQ ID NO: 708871 - RNA, 21 nt, Human
aauuuuauuucauugcaauga

SEQ ID NO: 708872 - RNA, 18 nt, Human
acacacacacauacacac

SEQ ID NO: 708873 - RNA, 22 nt, Human
accucugcaucccaccugugcc

SEQ ID NO: 708874 - RNA, 18 nt, Human
accuggagggcaggugag

SEQ ID NO: 708875 - RNA, 22 nt, Human
agaaggaggcuuagccccagaa

SEQ ID NO: 708876 - RNA, 23 nt, Human
agacagccacauuccucauccuc

SEQ ID NO: 708877 - RNA, 20 nt, Human
agauccugaucaccgcccag

SEQ ID NO: 708878 - RNA, 21 nt, Human
agaugguguuguagaugccuu

SEQ ID NO: 708879 - RNA, 21 nt, Human
agcaauggcaacagaugaaga

SEQ ID NO: 708880 - RNA, 25 nt, Human
aggcacaugugucaccuacaugugg

SEQ ID NO: 708881 - RNA, 19 nt, Human
aggcagaagagggaaucag

SEQ ID NO: 708882 - RNA, 21 nt, Human
aggcagaagagggaaucagag

SEQ ID NO: 708883 - RNA, 22 nt, Human
aggcaguuuauggccauauagg

SEQ ID NO: 708884 - RNA, 20 nt, Human
agggcuggggcuggucuggu

SEQ ID NO: 708885 - RNA, 20 nt, Human
agggguuccugaaaugucug

SEQ ID NO: 708886 - RNA, 20 nt, Human
agguguagcaucuccucacc

SEQ ID NO: 708887 - RNA, 20 nt, Human
agguugucaggggagucugu

SEQ ID NO: 708888 - RNA, 23 nt, Human
aguuucuucaucuccaaaauggg

SEQ ID NO: 708889 - RNA, 26 nt, Human
auaaauaaaccucuuuauagcuucau

SEQ ID NO: 708890 - RNA, 20 nt, Human
auaaauauaaauaaaccucc

SEQ ID NO: 708891 - RNA, 23 nt, Human
auccauugagcaauggggaaagg

SEQ ID NO: 708892 - RNA, 22 nt, Human
auggagaggaauaaagggcugg

SEQ ID NO: 708893 - RNA, 21 nt, Human
auuuuucuaccuuucucccuc

SEQ ID NO: 708894 - RNA, 21 nt, Human
caagagcucuuuguucuugcu

SEQ ID NO: 708895 - RNA, 28 nt, Human
caagauggugucccagauagagcugaag

SEQ ID NO: 708896 - RNA, 20 nt, Human
caagggucaccacuaaaugc

SEQ ID NO: 708897 - RNA, 18 nt, Human
cacacacagcagcaaaau

SEQ ID NO: 708898 - RNA, 22 nt, Human
cacacacagcagcaaaauggcc

SEQ ID NO: 708899 - RNA, 23 nt, Human
cacacacuuacacacacacauac

SEQ ID NO: 708900 - RNA, 22 nt, Human
cacacagcagcaaaauggccag

SEQ ID NO: 708901 - RNA, 20 nt, Human
caccuccacacacagcagca

SEQ ID NO: 708902 - RNA, 24 nt, Human
caccucugcuuccugccuaacuaa

SEQ ID NO: 708903 - RNA, 23 nt, Human
cacuaaaugcccacccuccacag

SEQ ID NO: 708904 - RNA, 20 nt, Human
cacucccaccccgagccagg

SEQ ID NO: 708905 - RNA, 21 nt, Human
cagaaaaaaauacugacaaau

SEQ ID NO: 708906 - RNA, 21 nt, Human
cagauagagcugaagaaggca

SEQ ID NO: 708907 - RNA, 25 nt, Human
cagcaauggcaacagaugaagagga

SEQ ID NO: 708908 - RNA, 24 nt, Human
cagcagcaauggcaacagaugaag

SEQ ID NO: 708909 - RNA, 25 nt, Human
cagcgccccgggcccuggagggagg

SEQ ID NO: 708910 - RNA, 18 nt, Human
cagucaccaccaagagcu

SEQ ID NO: 708911 - RNA, 18 nt, Human
caguguguguccuuggga

SEQ ID NO: 708912 - RNA, 20 nt, Human
cauacacacaguuuuugccc

SEQ ID NO: 708913 - RNA, 22 nt, Human
caucccaccugugccauaccgu

SEQ ID NO: 708914 - RNA, 21 nt, Human
caucuguaaacauugcacagg

SEQ ID NO: 708915 - RNA, 18 nt, Human
cauuaaacacccaauuuc

SEQ ID NO: 708916 - RNA, 23 nt, Human
ccacaucccuggguuuggugcag

SEQ ID NO: 708917 - RNA, 18 nt, Human
ccacccuccacaggccua

SEQ ID NO: 708918 - RNA, 23 nt, Human
ccagaggucuucuucauccuucu

SEQ ID NO: 708919 - RNA, 22 nt, Human
ccagggaaucuccugguugcug

SEQ ID NO: 708920 - RNA, 21 nt, Human
ccaucuguuuugcaagcaagg

SEQ ID NO: 708921 - RNA, 26 nt, Human
ccccaagaaaaagaaacauggaaucc

SEQ ID NO: 708922 - RNA, 18 nt, Human
ccccccaagaaaaagaaa

SEQ ID NO: 708923 - RNA, 23 nt, Human
ccccccuuuuccuuuaagaagcc

SEQ ID NO: 708924 - RNA, 21 nt, Human
ccccgugaacuuacccucccc

SEQ ID NO: 708925 - RNA, 18 nt, Human
cccggugauccgcccucc

SEQ ID NO: 708926 - RNA, 22 nt, Human
cccucccugcuccccccaagaa

SEQ ID NO: 708927 - RNA, 21 nt, Human
ccggagccuggcuaaagcugc

SEQ ID NO: 708928 - RNA, 20 nt, Human
ccuccacacacagcagcaaa

SEQ ID NO: 708929 - RNA, 18 nt, Human
ccuccuuccacguuacuu

SEQ ID NO: 708930 - RNA, 22 nt, Human
ccucuggcugccguccggagcc

SEQ ID NO: 708931 - RNA, 19 nt, Human
cuaaacaggcagugauggu

SEQ ID NO: 708932 - RNA, 18 nt, Human
cucccucccugcuccccc

SEQ ID NO: 708933 - RNA, 22 nt, Human
cucuccagcauuaaacacccaa

SEQ ID NO: 708934 - RNA, 18 nt, Human
cugacagcgccccgggcc

SEQ ID NO: 708935 - RNA, 23 nt, Human
cugagugaugucugagugggggu

SEQ ID NO: 708936 - RNA, 23 nt, Human
cuguuaugugaagggcacagcca

SEQ ID NO: 708937 - RNA, 20 nt, Human
cuucucuggcugcuggcccc

SEQ ID NO: 708938 - RNA, 25 nt, Human
cuucuucuucuucuuguucuucucu

SEQ ID NO: 708939 - RNA, 20 nt, Human
cuucuugguguuuggucaag

SEQ ID NO: 708940 - RNA, 21 nt, Human
gaaaggagcaauggggaaagg

SEQ ID NO: 708941 - RNA, 20 nt, Human
gaaguggaaagaagagagug

SEQ ID NO: 708942 - RNA, 21 nt, Human
gagcaagcaguugccauggaa

SEQ ID NO: 708943 - RNA, 19 nt, Human
gagcaauggggaaaggccu

SEQ ID NO: 708944 - RNA, 18 nt, Human
gaggaauaaagggcuggg

SEQ ID NO: 708945 - RNA, 21 nt, Human
gaggacucccaggcagauggu

SEQ ID NO: 708946 - RNA, 19 nt, Human
gagggcugggacauuugug

SEQ ID NO: 708947 - RNA, 24 nt, Human
gaucccuccuuucccaacaaacac

SEQ ID NO: 708948 - RNA, 20 nt, Human
gcaccuuugagggagucugg

SEQ ID NO: 708949 - RNA, 24 nt, Human
gcacugggacuccucuaguuacgc

SEQ ID NO: 708950 - RNA, 18 nt, Human
gcaggcccaggaggacuc

SEQ ID NO: 708951 - RNA, 18 nt, Human
gcagguccugggcucaaa

SEQ ID NO: 708952 - RNA, 19 nt, Human
gccacuggcagcaccucca

SEQ ID NO: 708953 - RNA, 28 nt, Human
gccaggaaagguugucaggggagucuga

SEQ ID NO: 708954 - RNA, 23 nt, Human
gccauaccgugcacacaucacaa

SEQ ID NO: 708955 - RNA, 20 nt, Human
gcccaagugagcaaauagaa

SEQ ID NO: 708956 - RNA, 18 nt, Human
gcccuggagggaggugug

SEQ ID NO: 708957 - RNA, 18 nt, Human
ggaaaagagaggccccau

SEQ ID NO: 708958 - RNA, 18 nt, Human
ggagaaaggcacuuugcu

SEQ ID NO: 708959 - RNA, 21 nt, Human
gggcuggggcuggucuggugc

SEQ ID NO: 708960 - RNA, 20 nt, Human
ggggaaaggagcaaugggga

SEQ ID NO: 708961 - RNA, 22 nt, Human
gggguuccugaaaugucugugu

SEQ ID NO: 708962 - RNA, 18 nt, Human
gggugagagcaaguccau

SEQ ID NO: 708963 - RNA, 21 nt, Human
ggugcaggcagauggcaaguc

SEQ ID NO: 708964 - RNA, 19 nt, Human
gguugccucugcacuccca

SEQ ID NO: 708965 - RNA, 21 nt, Human
gguuuuugcuauuuccccccu

SEQ ID NO: 708966 - RNA, 22 nt, Human
guaguaaacaaucgcugaacac

SEQ ID NO: 708967 - RNA, 23 nt, Human
guggcaguucagggacagaggcu

SEQ ID NO: 708968 - RNA, 23 nt, Human
gugugucuguaucaagacacaca

SEQ ID NO: 708969 - RNA, 21 nt, Human
guguugccuucugugagacug

SEQ ID NO: 708970 - RNA, 23 nt, Human
guuucaucccuggggugagagca

SEQ ID NO: 708971 - RNA, 22 nt, Human
uaaacaaucgcugaacacccgc

SEQ ID NO: 708972 - RNA, 20 nt, Human
uaaacuucuagagcauaacu

SEQ ID NO: 708973 - RNA, 18 nt, Human
uaaauuaugauucacagg

SEQ ID NO: 708974 - RNA, 19 nt, Human
uaacuaaacaggcagugau

SEQ ID NO: 708975 - RNA, 22 nt, Human
uacacacacuuacacacacaca

SEQ ID NO: 708976 - RNA, 18 nt, Human
uacauguccucacauacc

SEQ ID NO: 708977 - RNA, 21 nt, Human
uaccauggcgaaggcggugac

SEQ ID NO: 708978 - RNA, 22 nt, Human
uaccucaaggcacaugugucac

SEQ ID NO: 708979 - RNA, 18 nt, Human
uagaaaacccuggugcaa

SEQ ID NO: 708980 - RNA, 22 nt, Human
uagaauauaucuuuccuuuaau

SEQ ID NO: 708981 - RNA, 25 nt, Human
uagaguuagaaauaggaaagcaugc

SEQ ID NO: 708982 - RNA, 21 nt, Human
uaggaagccucuucuuuagga

SEQ ID NO: 708983 - RNA, 23 nt, Human
uauuccucuuccagcuuuggguu

SEQ ID NO: 708984 - RNA, 22 nt, Human
uauuucagggguuccugaaaug

SEQ ID NO: 708985 - RNA, 24 nt, Human
uauuuccccccuuuuccuuuaaga

SEQ ID NO: 708986 - RNA, 25 nt, Human
uauuuuucuuggaaagguggcugcc

SEQ ID NO: 708987 - RNA, 19 nt, Human
uccaaaauggggaacaauc

SEQ ID NO: 708988 - RNA, 20 nt, Human
uccacacacagcagcaaaau

SEQ ID NO: 708989 - RNA, 19 nt, Human
uccaguguugccuucugug

SEQ ID NO: 708990 - RNA, 23 nt, Human
uccauucuagggggacugagagg

SEQ ID NO: 708991 - RNA, 23 nt, Human
ucccggaucccggugauccgccc

SEQ ID NO: 708992 - RNA, 21 nt, Human
ucccugcuccccccaagaaaa

SEQ ID NO: 708993 - RNA, 23 nt, Human
uccuagaucauaucugacacuac

SEQ ID NO: 708994 - RNA, 18 nt, Human
ucgcugaacacccgcccu

SEQ ID NO: 708995 - RNA, 19 nt, Human
ucuccccagccauccauuc

SEQ ID NO: 708996 - RNA, 21 nt, Human
ucuccugguugcugccccguc

SEQ ID NO: 708997 - RNA, 25 nt, Human
ucuccugguugcugccccgucugac

SEQ ID NO: 708998 - RNA, 26 nt, Human
ucucggccagaacugcuuuccuggag

SEQ ID NO: 708999 - RNA, 25 nt, Human
ucuucuucuucuucuucuucuuguu

SEQ ID NO: 709000 - RNA, 25 nt, Human
ucuucuucuucuuguucuucucugg

SEQ ID NO: 709001 - RNA, 21 nt, Human
ucuucuuguucuucucuggcu

SEQ ID NO: 709002 - RNA, 23 nt, Human
ucuuguucuucucuggcugcugg

SEQ ID NO: 709003 - RNA, 18 nt, Human
ugaacuuacccuccccag

SEQ ID NO: 709004 - RNA, 20 nt, Human
ugacacuacgucucagcugu

SEQ ID NO: 709005 - RNA, 23 nt, Human
ugagaagugaguuucuggguguu

SEQ ID NO: 709006 - RNA, 19 nt, Human
ugagagggcaaaugugacu

SEQ ID NO: 709007 - RNA, 21 nt, Human
ugagagguggagacaggaagg

SEQ ID NO: 709008 - RNA, 21 nt, Human
ugagggagucuggucuccaag

SEQ ID NO: 709009 - RNA, 21 nt, Human
ugaguaccaagcagcccaagu

SEQ ID NO: 709010 - RNA, 22 nt, Human
ugaugagugggaggccugagug

SEQ ID NO: 709011 - RNA, 19 nt, Human
ugcaagcaagggugagaca

SEQ ID NO: 709012 - RNA, 21 nt, Human
ugcacacaucacaaccuuaug

SEQ ID NO: 709013 - RNA, 19 nt, Human
ugccccgucugacagcgcc

SEQ ID NO: 709014 - RNA, 19 nt, Human
ugcguugucaggggaucuc

SEQ ID NO: 709015 - RNA, 21 nt, Human
ugcugagugguuugcgggggu

SEQ ID NO: 709016 - RNA, 20 nt, Human
uggaaaguucuguaaguguu

SEQ ID NO: 709017 - RNA, 23 nt, Human
uggaaggagugaaaauggagagg

SEQ ID NO: 709018 - RNA, 24 nt, Human
uggaaggagugaaaauggagagga

SEQ ID NO: 709019 - RNA, 18 nt, Human
uggagacaggaagggcag

SEQ ID NO: 709020 - RNA, 20 nt, Human
uggagaggaauaaagggcug

SEQ ID NO: 709021 - RNA, 21 nt, Human
uggagaggaauaaagggcugg

SEQ ID NO: 709022 - RNA, 20 nt, Human
uggagggagguguggguucc

SEQ ID NO: 709023 - RNA, 18 nt, Human
uggaucacauuaaacacc

SEQ ID NO: 709024 - RNA, 22 nt, Human
uggcaacagaugaagaggagug

SEQ ID NO: 709025 - RNA, 22 nt, Human
uggcagcaccuccacacacagc

SEQ ID NO: 709026 - RNA, 19 nt, Human
uggggaaaagagaggcccc

SEQ ID NO: 709027 - RNA, 22 nt, Human
uggggaaaagagaggccccauu

SEQ ID NO: 709028 - RNA, 22 nt, Human
uggucccggaucccggugaucc

SEQ ID NO: 709029 - RNA, 24 nt, Human
uggugucccagauagagcugaaga

SEQ ID NO: 709030 - RNA, 21 nt, Human
uggugugucuguaucaagaca

SEQ ID NO: 709031 - RNA, 23 nt, Human
ugguguuguagaugccuucuugg

SEQ ID NO: 709032 - RNA, 23 nt, Human
ugguguuuggucaagaugguguc

SEQ ID NO: 709033 - RNA, 18 nt, Human
ugguugccucugcacucc

SEQ ID NO: 709034 - RNA, 20 nt, Human
uguccuggugagcaguggca

SEQ ID NO: 709035 - RNA, 19 nt, Human
ugugaugaucaccaagagu

SEQ ID NO: 709036 - RNA, 20 nt, Human
uguggguuccuuuuugguug

SEQ ID NO: 709037 - RNA, 21 nt, Human
uguguguuugaauuuuacaga

SEQ ID NO: 709038 - RNA, 23 nt, Human
uuaacucugcuucccaaccucac

SEQ ID NO: 709039 - RNA, 22 nt, Human
uucaaaggagcaagcaguugcc

SEQ ID NO: 709040 - RNA, 25 nt, Human
uucaaaggagcaagcaguugccaug

SEQ ID NO: 709041 - RNA, 21 nt, Human
uucagauccugaucaccgccc

SEQ ID NO: 709042 - RNA, 19 nt, Human
uucauccuucuucuucuuc

SEQ ID NO: 709043 - RNA, 23 nt, Human
uucuugcuuugcguugucagggg

SEQ ID NO: 709044 - RNA, 18 nt, Human
uugagucucaguuucuuc

SEQ ID NO: 709045 - RNA, 21 nt, Human
uugcaagcaagggugagacag

SEQ ID NO: 709046 - RNA, 24 nt, Human
uuggacccuuuauauuuuucuugg

SEQ ID NO: 709047 - RNA, 20 nt, Human
uuggguuugggcaugccacu

SEQ ID NO: 709048 - RNA, 18 nt, Human
uugucaggggagucugug

SEQ ID NO: 709049 - RNA, 24 nt, Human
uuucuggguguuucaucccugggg

SEQ ID NO: 709050 - RNA, 18 nt, Human
uuucuucaucuccaaaau

SEQ ID NO: 709051 - RNA, 19 nt, Human
uuuuucuuuuguguguguu

SEQ ID NO: 709052 - RNA, 21 nt, Human
aaacuacugugccagcaagcc

SEQ ID NO: 709053 - RNA, 24 nt, Human
aaagugcugggauuacaggcguga

SEQ ID NO: 709054 - RNA, 23 nt, Human
aaauaacccuuuauaaacgacua

SEQ ID NO: 709055 - RNA, 24 nt, Human
aaauuuuuguauuuuuaguagaga

SEQ ID NO: 709056 - RNA, 21 nt, Human
aacaggaagcuacacccuuga

SEQ ID NO: 709057 - RNA, 22 nt, Human
aacgacuaaugaaccaacuaca

SEQ ID NO: 709058 - RNA, 25 nt, Human
aagcccacgggccgagaggcccuga

SEQ ID NO: 709059 - RNA, 21 nt, Human
aaguaucucuucaaauuauac

SEQ ID NO: 709060 - RNA, 19 nt, Human
aagugcugggauuacaggc

SEQ ID NO: 709061 - RNA, 19 nt, Human
aagugcugggauuacaggc

SEQ ID NO: 709062 - RNA, 26 nt, Human
aagugcugggauuacaggcgugagcc

SEQ ID NO: 709063 - RNA, 23 nt, Human
aauuuuuguauuuuuaguagaga

SEQ ID NO: 709064 - RNA, 25 nt, Human
accaacuacagacaguauaccaaug

SEQ ID NO: 709065 - RNA, 18 nt, Human
accauguuggccaggccg

SEQ ID NO: 709066 - RNA, 18 nt, Human
acgggguuucaccauguu

SEQ ID NO: 709067 - RNA, 23 nt, Human
acgggguuucaccauguuggcca

SEQ ID NO: 709068 - RNA, 24 nt, Human
acgggguuucaccauguuggccag

SEQ ID NO: 709069 - RNA, 19 nt, Human
acuacagacaguauaccaa

SEQ ID NO: 709070 - RNA, 23 nt, Human
aggcgugagccacugugucuggc

SEQ ID NO: 709071 - RNA, 18 nt, Human
aguagcugggauuacagg

SEQ ID NO: 709072 - RNA, 18 nt, Human
aguggcaugaucuuggcu

SEQ ID NO: 709073 - RNA, 24 nt, Human
aguggcaugaucuuggcucacugc

SEQ ID NO: 709074 - RNA, 26 nt, Human
auuauaccuuuaacaaaacaagcauu

SEQ ID NO: 709075 - RNA, 24 nt, Human
auuuuuguauuuuuaguagagacg

SEQ ID NO: 709076 - RNA, 22 nt, Human
caaaacaagcauuaucaagaga

SEQ ID NO: 709077 - RNA, 24 nt, Human
caaagugcugggauuacaggcgug

SEQ ID NO: 709078 - RNA, 24 nt, Human
caaauuuuuguauuuuuaguagag

SEQ ID NO: 709079 - RNA, 21 nt, Human
caaccaguuaacccuuugaga

SEQ ID NO: 709080 - RNA, 20 nt, Human
caagcgauccuccugccuca

SEQ ID NO: 709081 - RNA, 22 nt, Human
caagcgauccuccugccucagc

SEQ ID NO: 709082 - RNA, 27 nt, Human
caagcgauccuccugccucagcccccc

SEQ ID NO: 709083 - RNA, 18 nt, Human
caccauguuggccaggcc

SEQ ID NO: 709084 - RNA, 21 nt, Human
caccauguuggccaggccggu

SEQ ID NO: 709085 - RNA, 24 nt, Human
caccauguuggccaggccggucuc

SEQ ID NO: 709086 - RNA, 27 nt, Human
caccauguuggccaggccggucucaaa

SEQ ID NO: 709087 - RNA, 18 nt, Human
cacugcaaccucugccuc

SEQ ID NO: 709088 - RNA, 19 nt, Human
cagccccccuaguagcugg

SEQ ID NO: 709089 - RNA, 21 nt, Human
cagguucaagcgauccuccug

SEQ ID NO: 709090 - RNA, 24 nt, Human
cauacagcccccauuaugaaacac

SEQ ID NO: 709091 - RNA, 24 nt, Human
cauguuggccaggccggucucaaa

SEQ ID NO: 709092 - RNA, 22 nt, Human
ccaaagugcugggauuacaggc

SEQ ID NO: 709093 - RNA, 22 nt, Human
ccaaagugcugggauuacaggc

SEQ ID NO: 709094 - RNA, 24 nt, Human
ccaaagugcugggauuacaggcgu

SEQ ID NO: 709095 - RNA, 20 nt, Human
ccaccaugcccagcaaauuu

SEQ ID NO: 709096 - RNA, 22 nt, Human
ccagccucugaucuccuaaucu

SEQ ID NO: 709097 - RNA, 19 nt, Human
cccacgggccgagaggccc

SEQ ID NO: 709098 - RNA, 23 nt, Human
cccacgggccgagaggcccugaa

SEQ ID NO: 709099 - RNA, 24 nt, Human
cccagugccgaaacuucgccccuc

SEQ ID NO: 709100 - RNA, 23 nt, Human
ccccagugccgaaacuucgcccc

SEQ ID NO: 709101 - RNA, 24 nt, Human
ccccuaguagcugggauuacaggc

SEQ ID NO: 709102 - RNA, 23 nt, Human
cccuaguagcugggauuacaggc

SEQ ID NO: 709103 - RNA, 22 nt, Human
cccuccgcaggguccggcaccu

SEQ ID NO: 709104 - RNA, 23 nt, Human
ccgccgaccuggaaugcugagga

SEQ ID NO: 709105 - RNA, 19 nt, Human
ccggucccagcagagacgc

SEQ ID NO: 709106 - RNA, 22 nt, Human
ccggucucaaacuccugaccuu

SEQ ID NO: 709107 - RNA, 23 nt, Human
ccuaguagcugggauuacaggca

SEQ ID NO: 709108 - RNA, 25 nt, Human
ccuccugccucagccccccuaguag

SEQ ID NO: 709109 - RNA, 24 nt, Human
ccucucagguucaagcgauccucc

SEQ ID NO: 709110 - RNA, 24 nt, Human
cgaccuggaaugcugaggaacuga

SEQ ID NO: 709111 - RNA, 18 nt, Human
cuacagacaguauaccaa

SEQ ID NO: 709112 - RNA, 22 nt, Human
cuaguagcugggauuacaggca

SEQ ID NO: 709113 - RNA, 24 nt, Human
cucacugcaaccucugccucucag

SEQ ID NO: 709114 - RNA, 24 nt, Human
cucagccccccuaguagcugggau

SEQ ID NO: 709115 - RNA, 20 nt, Human
cucagguucaagcgauccuc

SEQ ID NO: 709116 - RNA, 24 nt, Human
cuccugaccuugugaucugcccgc

SEQ ID NO: 709117 - RNA, 25 nt, Human
cuccugccucagccccccuaguagc

SEQ ID NO: 709118 - RNA, 21 nt, Human
cucguucuguugcucagacug

SEQ ID NO: 709119 - RNA, 24 nt, Human
cugcaaccucugccucucagguuc

SEQ ID NO: 709120 - RNA, 24 nt, Human
cuggaguaaaguggcaugaucuug

SEQ ID NO: 709121 - RNA, 21 nt, Human
gaaugcugaggaacugaaugg

SEQ ID NO: 709122 - RNA, 22 nt, Human
gaccuugugaucugcccgccuc

SEQ ID NO: 709123 - RNA, 23 nt, Human
gaccuugugaucugcccgccucc

SEQ ID NO: 709124 - RNA, 24 nt, Human
gagacgggguuucaccauguuggc

SEQ ID NO: 709125 - RNA, 18 nt, Human
gauuacaggcacgcgcca

SEQ ID NO: 709126 - RNA, 18 nt, Human
gauuacaggcgugagcca

SEQ ID NO: 709127 - RNA, 21 nt, Human
gauuacaggcgugagccacug

SEQ ID NO: 709128 - RNA, 24 nt, Human
gauuacaggcgugagccacugugu

SEQ ID NO: 709129 - RNA, 25 nt, Human
gcaagccauauuauuaauauauaau

SEQ ID NO: 709130 - RNA, 19 nt, Human
gccacucaccaccuccagc

SEQ ID NO: 709131 - RNA, 21 nt, Human
gccacugugucuggccuuuga

SEQ ID NO: 709132 - RNA, 21 nt, Human
gcucacugcaaccucugccuc

SEQ ID NO: 709133 - RNA, 21 nt, Human
ggaaagcguccgcacgcccuc

SEQ ID NO: 709134 - RNA, 21 nt, Human
ggacauucauuugauuuccag

SEQ ID NO: 709135 - RNA, 20 nt, Human
ggacuuuuuugaaauaucug

SEQ ID NO: 709136 - RNA, 24 nt, Human
ggccggucucaaacuccugaccuu

SEQ ID NO: 709137 - RNA, 22 nt, Human
ggggacccccucgacacagucc

SEQ ID NO: 709138 - RNA, 23 nt, Human
gggguuucaccauguuggccagg

SEQ ID NO: 709139 - RNA, 22 nt, Human
ggguuucaccauguuggccagg

SEQ ID NO: 709140 - RNA, 23 nt, Human
guagagacgggguuucaccaugu

SEQ ID NO: 709141 - RNA, 18 nt, Human
gugaucugcccgccuccc

SEQ ID NO: 709142 - RNA, 21 nt, Human
guucuuuuucuuucaugggug

SEQ ID NO: 709143 - RNA, 26 nt, Human
uaacaaaacaagcauuaucaagagaa

SEQ ID NO: 709144 - RNA, 25 nt, Human
uaacccuuugagaaaagaauuuuug

SEQ ID NO: 709145 - RNA, 18 nt, Human
uaagacccuaagcucuuc

SEQ ID NO: 709146 - RNA, 24 nt, Human
uaagaucccacaaguagaauauua

SEQ ID NO: 709147 - RNA, 24 nt, Human
uacaggcacgcgccaccaugccca

SEQ ID NO: 709148 - RNA, 23 nt, Human
uacaggcgugagccacugugucu

SEQ ID NO: 709149 - RNA, 22 nt, Human
uacugugccagcaagccauauu

SEQ ID NO: 709150 - RNA, 22 nt, Human
uagagacgggguuucaccaugu

SEQ ID NO: 709151 - RNA, 24 nt, Human
uaguagagacgggguuucaccaug

SEQ ID NO: 709152 - RNA, 26 nt, Human
uaguagagacgggguuucaccauguu

SEQ ID NO: 709153 - RNA, 27 nt, Human
uaguagcugggauuacaggcacgcgcc

SEQ ID NO: 709154 - RNA, 21 nt, Human
uaucaagagaagguccagccu

SEQ ID NO: 709155 - RNA, 22 nt, Human
uaucaagagaagguccagccuc

SEQ ID NO: 709156 - RNA, 27 nt, Human
uaugaaacacagauaacaggguaaacc

SEQ ID NO: 709157 - RNA, 22 nt, Human
ucaccauaaacaucccagcugu

SEQ ID NO: 709158 - RNA, 19 nt, Human
ucacugcaaccucugccuc

SEQ ID NO: 709159 - RNA, 24 nt, Human
ucacugcaaccucugccucucagg

SEQ ID NO: 709160 - RNA, 21 nt, Human
ucauacagcccccauuaugaa

SEQ ID NO: 709161 - RNA, 24 nt, Human
ucccaaagugcugggauuacaggc

SEQ ID NO: 709162 - RNA, 21 nt, Human
ucccagcugucugaggagaga

SEQ ID NO: 709163 - RNA, 21 nt, Human
ucucagguucaagcgauccuc

SEQ ID NO: 709164 - RNA, 24 nt, Human
ucucagguucaagcgauccuccug

SEQ ID NO: 709165 - RNA, 23 nt, Human
ucucguucuguugcucagacugg

SEQ ID NO: 709166 - RNA, 24 nt, Human
ucucguucuguugcucagacugga

SEQ ID NO: 709167 - RNA, 23 nt, Human
ucugcccgccucccaaagugcug

SEQ ID NO: 709168 - RNA, 21 nt, Human
ucugcuaaacucuuaaugcca

SEQ ID NO: 709169 - RNA, 18 nt, Human
ucugugcugauuucucuu

SEQ ID NO: 709170 - RNA, 24 nt, Human
ucuuucauggguggucauaaaagu

SEQ ID NO: 709171 - RNA, 18 nt, Human
ugaacauacuauucaaaa

SEQ ID NO: 709172 - RNA, 24 nt, Human
ugcccagcaaauuuuuguauuuuu

SEQ ID NO: 709173 - RNA, 21 nt, Human
ugccucagccccccuaguagc

SEQ ID NO: 709174 - RNA, 24 nt, Human
ugccucagccccccuaguagcugg

SEQ ID NO: 709175 - RNA, 26 nt, Human
ugccucagccccccuaguagcuggga

SEQ ID NO: 709176 - RNA, 24 nt, Human
ugcucagacuggaguaaaguggca

SEQ ID NO: 709177 - RNA, 24 nt, Human
ugcugggauuacaggcgugagcca

SEQ ID NO: 709178 - RNA, 20 nt, Human
uggaaaauaagggucuuuaa

SEQ ID NO: 709179 - RNA, 19 nt, Human
uggagcuaagaccacccgc

SEQ ID NO: 709180 - RNA, 24 nt, Human
uggaguaaaguggcaugaucuugg

SEQ ID NO: 709181 - RNA, 18 nt, Human
uggcaaccaguuaacccu

SEQ ID NO: 709182 - RNA, 19 nt, Human
uggcaugaucuuggcucac

SEQ ID NO: 709183 - RNA, 21 nt, Human
uggcaugaucuuggcucacug

SEQ ID NO: 709184 - RNA, 24 nt, Human
uggccaggccggucucaaacuccu

SEQ ID NO: 709185 - RNA, 21 nt, Human
ugggauuacaggcacgcgcca

SEQ ID NO: 709186 - RNA, 22 nt, Human
ugggauuacaggcacgcgccac

SEQ ID NO: 709187 - RNA, 24 nt, Human
ugggauuacaggcacgcgccacca

SEQ ID NO: 709188 - RNA, 18 nt, Human
ugggauuacaggcgugag

SEQ ID NO: 709189 - RNA, 21 nt, Human
ugggauuacaggcgugagcca

SEQ ID NO: 709190 - RNA, 22 nt, Human
ugggauuacaggcgugagccac

SEQ ID NO: 709191 - RNA, 22 nt, Human
ugggauuacaggcgugagccac

SEQ ID NO: 709192 - RNA, 22 nt, Human
ugggauuacaggcgugagccac

SEQ ID NO: 709193 - RNA, 23 nt, Human
ugggauuacaggcgugagccacu

SEQ ID NO: 709194 - RNA, 24 nt, Human
ugggauuacaggcgugagccacug

SEQ ID NO: 709195 - RNA, 21 nt, Human
ugggggacuggagcuaagacc

SEQ ID NO: 709196 - RNA, 18 nt, Human
uguacaggccauuucacc

SEQ ID NO: 709197 - RNA, 21 nt, Human
uguauuuuuaguagagacggg

SEQ ID NO: 709198 - RNA, 20 nt, Human
ugucugaggagagagaaggc

SEQ ID NO: 709199 - RNA, 20 nt, Human
uuaaacacuuuaaagauaaa

SEQ ID NO: 709200 - RNA, 22 nt, Human
uuaaugccaaccgacucgggga

SEQ ID NO: 709201 - RNA, 24 nt, Human
uuacuuauuuauuuauuuauuuug

SEQ ID NO: 709202 - RNA, 18 nt, Human
uuaguagagacgggguuu

SEQ ID NO: 709203 - RNA, 22 nt, Human
uuaguagagacgggguuucacc

SEQ ID NO: 709204 - RNA, 24 nt, Human
uuaguagagacgggguuucaccau

SEQ ID NO: 709205 - RNA, 25 nt, Human
uuauuuauuuauuuacuuauuuauu

SEQ ID NO: 709206 - RNA, 19 nt, Human
uuauuuauuuauuuauuua

SEQ ID NO: 709207 - RNA, 20 nt, Human
uucaaaauggcaaccaguua

SEQ ID NO: 709208 - RNA, 21 nt, Human
uucaagcgauccuccugccuc

SEQ ID NO: 709209 - RNA, 24 nt, Human
uucaagcgauccuccugccucagc

SEQ ID NO: 709210 - RNA, 21 nt, Human
uucauuugauuuccagccauu

SEQ ID NO: 709211 - RNA, 23 nt, Human
uuguauuuuuaguagagacgggg

SEQ ID NO: 709212 - RNA, 22 nt, Human
uuuacuuauuuauuuauuuauu

SEQ ID NO: 709213 - RNA, 20 nt, Human
uuuaguagagacgggguuuu

SEQ ID NO: 709214 - RNA, 22 nt, Human
uuuauuuacuuauuuauuuauu

SEQ ID NO: 709215 - RNA, 22 nt, Human
uuuauuuauuuauuuacuuauu

SEQ ID NO: 709216 - RNA, 24 nt, Human
uuucaccauguuggccaggccggu

SEQ ID NO: 709217 - RNA, 24 nt, Human
uuuuuaguagagacgggguuucac

SEQ ID NO: 709218 - RNA, 23 nt, Human
acauaguuaccuuuaacucagug

SEQ ID NO: 709219 - RNA, 19 nt, Human
acuucugcugcugcuaugc

SEQ ID NO: 709220 - RNA, 21 nt, Human
agaaagaacuucuuuuaaaga

SEQ ID NO: 709221 - RNA, 23 nt, Human
aggcaagaggaugcaucuuucuu

SEQ ID NO: 709222 - RNA, 18 nt, Human
aggcagcagggugcccag

SEQ ID NO: 709223 - RNA, 21 nt, Human
augcuuucuaugaaugauguu

SEQ ID NO: 709224 - RNA, 19 nt, Human
caaaacagugccccaccug

SEQ ID NO: 709225 - RNA, 22 nt, Human
caacucugcaugaaacaccaac

SEQ ID NO: 709226 - RNA, 24 nt, Human
caaucaccagccuugaaaggcagc

SEQ ID NO: 709227 - RNA, 21 nt, Human
caccaaaacagugccccaccu

SEQ ID NO: 709228 - RNA, 23 nt, Human
cauacaacucugcaugaaacacc

SEQ ID NO: 709229 - RNA, 22 nt, Human
cucagugguuaucuaauagcuc

SEQ ID NO: 709230 - RNA, 18 nt, Human
cuucugcugcugcuaugc

SEQ ID NO: 709231 - RNA, 20 nt, Human
gcagggugcccaggugaagc

SEQ ID NO: 709232 - RNA, 23 nt, Human
ggcaaaaugaagcuauuugcuga

SEQ ID NO: 709233 - RNA, 19 nt, Human
guggucaauaauuuaaaau

SEQ ID NO: 709234 - RNA, 22 nt, Human
uacaccucaaaguauauccuuu

SEQ ID NO: 709235 - RNA, 20 nt, Human
uaccuuuaacucagugguua

SEQ ID NO: 709236 - RNA, 24 nt, Human
uaguuuuuaacuugaucuaaauua

SEQ ID NO: 709237 - RNA, 20 nt, Human
uauccgagcaaucaccagcc

SEQ ID NO: 709238 - RNA, 19 nt, Human
uauguauaaacauguaugu

SEQ ID NO: 709239 - RNA, 21 nt, Human
uauguauaaacauguauguaa

SEQ ID NO: 709240 - RNA, 19 nt, Human
uccgagcaaucaccagccu

SEQ ID NO: 709241 - RNA, 24 nt, Human
uccgagcaaucaccagccuugaaa

SEQ ID NO: 709242 - RNA, 22 nt, Human
ucuuucuuccugguguacaagc

SEQ ID NO: 709243 - RNA, 22 nt, Human
ugaaacaccaacaacugggaau

SEQ ID NO: 709244 - RNA, 22 nt, Human
ugaagcuggccuguuuucuaaa

SEQ ID NO: 709245 - RNA, 18 nt, Human
ugcccaggugaagcuggc

SEQ ID NO: 709246 - RNA, 21 nt, Human
uggaugcacacuuugugugua

SEQ ID NO: 709247 - RNA, 22 nt, Human
uguaggcuguauauguaucgga

SEQ ID NO: 709248 - RNA, 20 nt, Human
uguaucggauuucuucaaag

SEQ ID NO: 709249 - RNA, 22 nt, Human
uuaaaaaaacuccaagccuucc

SEQ ID NO: 709250 - RNA, 22 nt, Human
uuauaugcuuaaucuguacacc

SEQ ID NO: 709251 - RNA, 19 nt, Human
aagcagccgaggggccagc

SEQ ID NO: 709252 - RNA, 19 nt, Human
aagcagccgaggggccagg

SEQ ID NO: 709253 - RNA, 21 nt, Human
aagucccccccgagccagaga

SEQ ID NO: 709254 - RNA, 23 nt, Human
aagucccccccgagccagagaag

SEQ ID NO: 709255 - RNA, 18 nt, Human
aauuuuguuuccccguca

SEQ ID NO: 709256 - RNA, 22 nt, Human
accccagagggggcugagaagc

SEQ ID NO: 709257 - RNA, 24 nt, Human
agaaguccuggagaaugggcaucc

SEQ ID NO: 709258 - RNA, 22 nt, Human
agagaauaauuuuguuuccccg

SEQ ID NO: 709259 - RNA, 22 nt, Human
agaugcagccccccaaacacag

SEQ ID NO: 709260 - RNA, 23 nt, Human
agccagagaagcagccgaggggc

SEQ ID NO: 709261 - RNA, 20 nt, Human
agcggggggacgacaaccag

SEQ ID NO: 709262 - RNA, 21 nt, Human
agggggcugagaagcgggggg

SEQ ID NO: 709263 - RNA, 22 nt, Human
aguugggccucucuggggcugu

SEQ ID NO: 709264 - RNA, 18 nt, Human
auacaguuuguugcuugu

SEQ ID NO: 709265 - RNA, 27 nt, Human
augaaugucauuuucugccccugucgg

SEQ ID NO: 709266 - RNA, 23 nt, Human
caagaauaaaacccaggcugcag

SEQ ID NO: 709267 - RNA, 24 nt, Human
cacagcacuccauggaugaggacu

SEQ ID NO: 709268 - RNA, 19 nt, Human
cagcagaugcagcccccca

SEQ ID NO: 709269 - RNA, 22 nt, Human
cagcagaugcagccccccaaac

SEQ ID NO: 709270 - RNA, 25 nt, Human
ccaaacacagcacuccauggaugag

SEQ ID NO: 709271 - RNA, 21 nt, Human
ccagguccaguucaggggucc

SEQ ID NO: 709272 - RNA, 23 nt, Human
ccaguucagggguccggaucuga

SEQ ID NO: 709273 - RNA, 20 nt, Human
cccccaaacacagcacucca

SEQ ID NO: 709274 - RNA, 22 nt, Human
ccccccgagccagagaagcagc

SEQ ID NO: 709275 - RNA, 22 nt, Human
cggagaggagagaggaacccca

SEQ ID NO: 709276 - RNA, 26 nt, Human
cucaaauguccuuucccucucagaga

SEQ ID NO: 709277 - RNA, 27 nt, Human
cucaaauguccuuucccucucagagaa

SEQ ID NO: 709278 - RNA, 24 nt, Human
cucacccucaccuuccugcaaacu

SEQ ID NO: 709279 - RNA, 19 nt, Human
cugcaguacuccugggacc

SEQ ID NO: 709280 - RNA, 22 nt, Human
cuguuccacacaaaaaacaaag

SEQ ID NO: 709281 - RNA, 19 nt, Human
gagaaguccuggagaaugg

SEQ ID NO: 709282 - RNA, 22 nt, Human
gcaaagagugggcggagaggag

SEQ ID NO: 709283 - RNA, 22 nt, Human
gccuggguccugagaugugcug

SEQ ID NO: 709284 - RNA, 24 nt, Human
gggcagugagcaaagagugggcga

SEQ ID NO: 709285 - RNA, 22 nt, Human
uagcacugagaaaggggccaga

SEQ ID NO: 709286 - RNA, 18 nt, Human
ucaaaagaugaaugucau

SEQ ID NO: 709287 - RNA, 20 nt, Human
uccacacaaaaaacaaagaa

SEQ ID NO: 709288 - RNA, 21 nt, Human
ucccggucagggccaggccaa

SEQ ID NO: 709289 - RNA, 18 nt, Human
ucccugcaguacuccugg

SEQ ID NO: 709290 - RNA, 19 nt, Human
ucccugcaguacuccuggg

SEQ ID NO: 709291 - RNA, 18 nt, Human
ucucaucaauuuugcuug

SEQ ID NO: 709292 - RNA, 25 nt, Human
uggaauagaacaauccauuugaaua

SEQ ID NO: 709293 - RNA, 18 nt, Human
uggagaaguccuggagaa

SEQ ID NO: 709294 - RNA, 21 nt, Human
uggaugaggacucaaaagaug

SEQ ID NO: 709295 - RNA, 19 nt, Human
ugggcggagaggagagagg

SEQ ID NO: 709296 - RNA, 21 nt, Human
uggggccagucuauugccugg

SEQ ID NO: 709297 - RNA, 21 nt, Human
uggucaugccugagaccagaa

SEQ ID NO: 709298 - RNA, 30 nt, Human
uguuucccucaaauguccuuucccucucaa

SEQ ID NO: 709299 - RNA, 18 nt, Human
uuucugccccugugucuc

SEQ ID NO: 709300 - RNA, 22 nt, Human
aaugggcuugacacuuucaaau

SEQ ID NO: 709301 - RNA, 21 nt, Human
acagaauagaaggugagugcc

SEQ ID NO: 709302 - RNA, 24 nt, Human
caagggcuccugccugccuggaca

SEQ ID NO: 709303 - RNA, 20 nt, Human
cacggaggacacgagacugc

SEQ ID NO: 709304 - RNA, 22 nt, Human
ccucaagggcuccugccugccu

SEQ ID NO: 709305 - RNA, 21 nt, Human
uaagaaaaucuaaaucuggca

SEQ ID NO: 709306 - RNA, 23 nt, Human
uagaaaaaauauuagaaucaaaa

SEQ ID NO: 709307 - RNA, 25 nt, Human
uauaaaagaaagcugcaguuuuaaa

SEQ ID NO: 709308 - RNA, 18 nt, Human
uauaaauaauagaaaaaa

SEQ ID NO: 709309 - RNA, 23 nt, Human
uaucugaaugggcuugacacuuu

SEQ ID NO: 709310 - RNA, 20 nt, Human
uccacagcaaagcgcugccc

SEQ ID NO: 709311 - RNA, 19 nt, Human
ucccagggcaccggcucgc

SEQ ID NO: 709312 - RNA, 19 nt, Human
ugagugccaggccccugag

SEQ ID NO: 709313 - RNA, 20 nt, Human
uucaaguuaacagaggcuug

SEQ ID NO: 709314 - RNA, 19 nt, Human
uuccacagcaaagcgcugc

SEQ ID NO: 709315 - RNA, 22 nt, Human
uuccucaagggcuccugccugc

SEQ ID NO: 709316 - RNA, 24 nt, Human
aaaaaagaagggguacugacaaag

SEQ ID NO: 709317 - RNA, 19 nt, Human
aaaaagacaccccuccccc

SEQ ID NO: 709318 - RNA, 20 nt, Human
aaaacaaaacagaacacacc

SEQ ID NO: 709319 - RNA, 20 nt, Human
aaaacagaacacaccacaga

SEQ ID NO: 709320 - RNA, 19 nt, Human
aaaagagaccccagaagca

SEQ ID NO: 709321 - RNA, 19 nt, Human
aaaagcaaccacggguagc

SEQ ID NO: 709322 - RNA, 18 nt, Human
aaacaaauggggugaaac

SEQ ID NO: 709323 - RNA, 22 nt, Human
aaacacugucucacuuccuaag

SEQ ID NO: 709324 - RNA, 21 nt, Human
aaacgacaauuccaaagaaca

SEQ ID NO: 709325 - RNA, 24 nt, Human
aaacgcccccuccccccauugcaa

SEQ ID NO: 709326 - RNA, 24 nt, Human
aaagacaccccuccccccaacccu

SEQ ID NO: 709327 - RNA, 24 nt, Human
aaagcaaaaagacaccccuccccc

SEQ ID NO: 709328 - RNA, 20 nt, Human
aaagccagcacaggacagga

SEQ ID NO: 709329 - RNA, 19 nt, Human
aaaggaaccauaagcucgg

SEQ ID NO: 709330 - RNA, 22 nt, Human
aaaggccuuuucuaggcacaag

SEQ ID NO: 709331 - RNA, 19 nt, Human
aaagugcugggauaacagg

SEQ ID NO: 709332 - RNA, 23 nt, Human
aaagugcugggauaacaggcgua

SEQ ID NO: 709333 - RNA, 19 nt, Human
aaauguugggaaguuaugc

SEQ ID NO: 709334 - RNA, 20 nt, Human
aacaaguagcucuagagugc

SEQ ID NO: 709335 - RNA, 22 nt, Human
aaccaaaaacaaaacagaacac

SEQ ID NO: 709336 - RNA, 19 nt, Human
aaccaccccccccaaacau

SEQ ID NO: 709337 - RNA, 20 nt, Human
aaccaccccccccaaacauc

SEQ ID NO: 709338 - RNA, 24 nt, Human
aaccucaggugaucugcccaccuc

SEQ ID NO: 709339 - RNA, 23 nt, Human
aacgcaggcaccuggcacauccc

SEQ ID NO: 709340 - RNA, 18 nt, Human
aacuacccucuaaccacc

SEQ ID NO: 709341 - RNA, 25 nt, Human
aagaaacagagcaagcagaaaggug

SEQ ID NO: 709342 - RNA, 21 nt, Human
aagaacacucaacaagggcgg

SEQ ID NO: 709343 - RNA, 21 nt, Human
aagaauaagaggaagccaaga

SEQ ID NO: 709344 - RNA, 18 nt, Human
aagacaccccucccccca

SEQ ID NO: 709345 - RNA, 24 nt, Human
aagagcacuccauugucuugacuc

SEQ ID NO: 709346 - RNA, 22 nt, Human
aagagugccacagaaacccacc

SEQ ID NO: 709347 - RNA, 22 nt, Human
aagaugccagccccacucaugg

SEQ ID NO: 709348 - RNA, 25 nt, Human
aagcaaccacggguagcucuuccca

SEQ ID NO: 709349 - RNA, 20 nt, Human
aagcacacacccaccccaag

SEQ ID NO: 709350 - RNA, 21 nt, Human
aagcacacacccaccccaagc

SEQ ID NO: 709351 - RNA, 22 nt, Human
aagcagaaaggugccagccaug

SEQ ID NO: 709352 - RNA, 23 nt, Human
aagcagaaaggugccagccaugg

SEQ ID NO: 709353 - RNA, 20 nt, Human
aagcagagccuaagcugacc

SEQ ID NO: 709354 - RNA, 21 nt, Human
aagcauaaauacggcagguac

SEQ ID NO: 709355 - RNA, 19 nt, Human
aagcauacaaaggaaaccc

SEQ ID NO: 709356 - RNA, 24 nt, Human
aagcauacaaaggaaacccaagca

SEQ ID NO: 709357 - RNA, 24 nt, Human
aaggacuuggaggccuucucuuca

SEQ ID NO: 709358 - RNA, 21 nt, Human
aaggcaccaaaaggacuugga

SEQ ID NO: 709359 - RNA, 23 nt, Human
aaguacuggcagcacggggagcu

SEQ ID NO: 709360 - RNA, 22 nt, Human
aaucuccgcucacugcaaccuc

SEQ ID NO: 709361 - RNA, 19 nt, Human
aauguugggaaguuaugcc

SEQ ID NO: 709362 - RNA, 24 nt, Human
aauuuguuuuaaaaccagacagaa

SEQ ID NO: 709363 - RNA, 19 nt, Human
acaaaacagaacacaccac

SEQ ID NO: 709364 - RNA, 26 nt, Human
acaaaacagaacacaccacagacccu

SEQ ID NO: 709365 - RNA, 26 nt, Human
acaaaguacccuacaacuacccuucc

SEQ ID NO: 709366 - RNA, 24 nt, Human
acaaggcaccaaaaggacuuggag

SEQ ID NO: 709367 - RNA, 23 nt, Human
acaaguugaaaaccacacagcaa

SEQ ID NO: 709368 - RNA, 21 nt, Human
acaccaggccuagaaaaacca

SEQ ID NO: 709369 - RNA, 21 nt, Human
acaggacugcaaucuuagcuc

SEQ ID NO: 709370 - RNA, 24 nt, Human
acagggcucuccaccugcggcugu

SEQ ID NO: 709371 - RNA, 20 nt, Human
accacacagcaaaguaaggc

SEQ ID NO: 709372 - RNA, 23 nt, Human
accaccccccccaaacaucccug

SEQ ID NO: 709373 - RNA, 22 nt, Human
accauguuggccaggcuggucu

SEQ ID NO: 709374 - RNA, 18 nt, Human
acccagaaccauccccua

SEQ ID NO: 709375 - RNA, 21 nt, Human
acccaggaucacaagaaugac

SEQ ID NO: 709376 - RNA, 23 nt, Human
acggagaaggaguuugcuaugug

SEQ ID NO: 709377 - RNA, 24 nt, Human
acuacccucuaaccacccccccca

SEQ ID NO: 709378 - RNA, 18 nt, Human
acugggacugcuggagaa

SEQ ID NO: 709379 - RNA, 21 nt, Human
agaaaaaccaacuaggaaggc

SEQ ID NO: 709380 - RNA, 21 nt, Human
agaaaacagacacuuugucca

SEQ ID NO: 709381 - RNA, 26 nt, Human
agaaaagccagcacaggacaggagug

SEQ ID NO: 709382 - RNA, 27 nt, Human
agaaaagccagcacaggaccggacccc

SEQ ID NO: 709383 - RNA, 24 nt, Human
agaacacaccacagacccuaaucc

SEQ ID NO: 709384 - RNA, 19 nt, Human
agaaccauccccuaccuuc

SEQ ID NO: 709385 - RNA, 19 nt, Human
agaaggaucugugaacgug

SEQ ID NO: 709386 - RNA, 23 nt, Human
agacaccccuccccccaacccuu

SEQ ID NO: 709387 - RNA, 21 nt, Human
agacagaauuucgcucuuguu

SEQ ID NO: 709388 - RNA, 19 nt, Human
agacccuaauccugggcag

SEQ ID NO: 709389 - RNA, 20 nt, Human
agacuuccacagccacccag

SEQ ID NO: 709390 - RNA, 20 nt, Human
agagcaauggaaaccuacag

SEQ ID NO: 709391 - RNA, 20 nt, Human
agaguuuucgaagugggggc

SEQ ID NO: 709392 - RNA, 21 nt, Human
agaugaacagcgguccaagug

SEQ ID NO: 709393 - RNA, 22 nt, Human
agauguuuuuuuaaacagaggg

SEQ ID NO: 709394 - RNA, 20 nt, Human
agcacacacccaccccaagc

SEQ ID NO: 709395 - RNA, 22 nt, Human
agcacagauccuugguccacca

SEQ ID NO: 709396 - RNA, 19 nt, Human
agcaugccauacauaucug

SEQ ID NO: 709397 - RNA, 22 nt, Human
agccaugggcgccuggcguucc

SEQ ID NO: 709398 - RNA, 21 nt, Human
agccccaggcuucugaccggc

SEQ ID NO: 709399 - RNA, 24 nt, Human
agcgauucuccugccucagccucc

SEQ ID NO: 709400 - RNA, 18 nt, Human
agcucggaaggcagagug

SEQ ID NO: 709401 - RNA, 20 nt, Human
aggaaggaggaggcagggag

SEQ ID NO: 709402 - RNA, 21 nt, Human
aggaaggaggaggcagggagg

SEQ ID NO: 709403 - RNA, 22 nt, Human
aggaaggaggaggcagggaggg

SEQ ID NO: 709404 - RNA, 24 nt, Human
aggaaggaggaggcagggaggggg

SEQ ID NO: 709405 - RNA, 21 nt, Human
aggaggaggcagggagggggc

SEQ ID NO: 709406 - RNA, 22 nt, Human
aggcaagaaacagagcaagcag

SEQ ID NO: 709407 - RNA, 24 nt, Human
aggcaagaaacagagcaagcagaa

SEQ ID NO: 709408 - RNA, 22 nt, Human
aggcaggaaggaggaggcaggg

SEQ ID NO: 709409 - RNA, 19 nt, Human
aggcagggagggggccugg

SEQ ID NO: 709410 - RNA, 20 nt, Human
aggcagggagggggccuggg

SEQ ID NO: 709411 - RNA, 21 nt, Human
aggcagggagggggccugggc

SEQ ID NO: 709412 - RNA, 19 nt, Human
agggaucccauaucagguc

SEQ ID NO: 709413 - RNA, 21 nt, Human
agggguucuuagggucccagg

SEQ ID NO: 709414 - RNA, 21 nt, Human
aggucccaaaagagaccccag

SEQ ID NO: 709415 - RNA, 22 nt, Human
aggugccugcugcgcaguuugc

SEQ ID NO: 709416 - RNA, 20 nt, Human
agguucaagcgauucuccug

SEQ ID NO: 709417 - RNA, 21 nt, Human
aguagcugggauuacaggugc

SEQ ID NO: 709418 - RNA, 19 nt, Human
agucaugguuucaugcagu

SEQ ID NO: 709419 - RNA, 19 nt, Human
agugggaagacauguccuc

SEQ ID NO: 709420 - RNA, 21 nt, Human
aucaggugaacagggcucucc

SEQ ID NO: 709421 - RNA, 21 nt, Human
aucaucuacccagagagugac

SEQ ID NO: 709422 - RNA, 25 nt, Human
augacaacaaaaggaaaguggcuau

SEQ ID NO: 709423 - RNA, 21 nt, Human
augcagaacuggaaucauaua

SEQ ID NO: 709424 - RNA, 18 nt, Human
augggguuucaccauguu

SEQ ID NO: 709425 - RNA, 22 nt, Human
augggguuucaccauguuggcc

SEQ ID NO: 709426 - RNA, 23 nt, Human
augggguuucaccauguuggcca

SEQ ID NO: 709427 - RNA, 24 nt, Human
augggguuucaccauguuggccag

SEQ ID NO: 709428 - RNA, 24 nt, Human
auguacauuuaaaaaauccauaca

SEQ ID NO: 709429 - RNA, 19 nt, Human
auuacaggugccugccacu

SEQ ID NO: 709430 - RNA, 20 nt, Human
caaaaagacaccccuccccc

SEQ ID NO: 709431 - RNA, 19 nt, Human
caaaagcaaaaagacaccc

SEQ ID NO: 709432 - RNA, 25 nt, Human
caaaauuagaacaagcuagcccaac

SEQ ID NO: 709433 - RNA, 24 nt, Human
caaagugcugggauaacaggcgua

SEQ ID NO: 709434 - RNA, 23 nt, Human
caaaucccucaguuacugggaag

SEQ ID NO: 709435 - RNA, 24 nt, Human
caaaugacacuacuauuccugcac

SEQ ID NO: 709436 - RNA, 20 nt, Human
caacuacccucuaaccaccc

SEQ ID NO: 709437 - RNA, 22 nt, Human
caagaaugacaacaaaaggaaa

SEQ ID NO: 709438 - RNA, 20 nt, Human
caagagaaggaucugugaac

SEQ ID NO: 709439 - RNA, 22 nt, Human
caagcacgaaaggcuacaugga

SEQ ID NO: 709440 - RNA, 21 nt, Human
caagcagaaaggugccagcca

SEQ ID NO: 709441 - RNA, 22 nt, Human
caagcgauucuccugccucagc

SEQ ID NO: 709442 - RNA, 22 nt, Human
caagugacccucccugaacacc

SEQ ID NO: 709443 - RNA, 26 nt, Human
cacaacgcaggcaccuggcacauccc

SEQ ID NO: 709444 - RNA, 23 nt, Human
cacaagggagaaaccaaaaacaa

SEQ ID NO: 709445 - RNA, 22 nt, Human
cacacaggcgcacgcacgcaau

SEQ ID NO: 709446 - RNA, 20 nt, Human
cacacccaccccaagcuuca

SEQ ID NO: 709447 - RNA, 20 nt, Human
cacagacuuggcucugcugu

SEQ ID NO: 709448 - RNA, 20 nt, Human
cacagauccuugguccacca

SEQ ID NO: 709449 - RNA, 19 nt, Human
caccaaaagcaaaaagaca

SEQ ID NO: 709450 - RNA, 21 nt, Human
caccaaaagcaaaaagacacc

SEQ ID NO: 709451 - RNA, 23 nt, Human
caccaaaagcaaaaagacacccc

SEQ ID NO: 709452 - RNA, 18 nt, Human
caccaggccuagaaaaac

SEQ ID NO: 709453 - RNA, 21 nt, Human
caccauguuggccaggcuggu

SEQ ID NO: 709454 - RNA, 23 nt, Human
caccauguuggccaggcuggucu

SEQ ID NO: 709455 - RNA, 24 nt, Human
caccauguuggccaggcuggucuu

SEQ ID NO: 709456 - RNA, 27 nt, Human
caccauguuggccaggcuggucuugaa

SEQ ID NO: 709457 - RNA, 18 nt, Human
cacccagaaccauccccu

SEQ ID NO: 709458 - RNA, 20 nt, Human
cacccagaaccauccccuac

SEQ ID NO: 709459 - RNA, 26 nt, Human
cacccagaaccauccccuaccuucaa

SEQ ID NO: 709460 - RNA, 19 nt, Human
cacccaggaucacaagaau

SEQ ID NO: 709461 - RNA, 19 nt, Human
caccccccccaaacauccc

SEQ ID NO: 709462 - RNA, 21 nt, Human
caccccuccccccaacccuuu

SEQ ID NO: 709463 - RNA, 23 nt, Human
caccccuccccccaacccuuuuu

SEQ ID NO: 709464 - RNA, 22 nt, Human
caccucacagacuuccacagcc

SEQ ID NO: 709465 - RNA, 24 nt, Human
caccucgaccucccaaagugcugg

SEQ ID NO: 709466 - RNA, 19 nt, Human
cacucuuucacccaaccuc

SEQ ID NO: 709467 - RNA, 25 nt, Human
cagcagccauaaggcaagaaacaga

SEQ ID NO: 709468 - RNA, 23 nt, Human
cagccaaaguggccaaaauuaga

SEQ ID NO: 709469 - RNA, 19 nt, Human
cagcccagagaagugucag

SEQ ID NO: 709470 - RNA, 23 nt, Human
cagcgccaccucccucuccuccu

SEQ ID NO: 709471 - RNA, 21 nt, Human
caggcgcacgcacgcaaucug

SEQ ID NO: 709472 - RNA, 21 nt, Human
caguugcucagggcaccagca

SEQ ID NO: 709473 - RNA, 18 nt, Human
caucccugaagcccaggc

SEQ ID NO: 709474 - RNA, 23 nt, Human
cauggagacugcaaaucccaaug

SEQ ID NO: 709475 - RNA, 24 nt, Human
cauguuggccaggcuggucuugaa

SEQ ID NO: 709476 - RNA, 22 nt, Human
ccaaagugcugggauaacaggc

SEQ ID NO: 709477 - RNA, 24 nt, Human
ccaaagugcugggauaacaggcgu

SEQ ID NO: 709478 - RNA, 19 nt, Human
ccacagaaacccacccagg

SEQ ID NO: 709479 - RNA, 21 nt, Human
ccacagacuuggcucugcugu

SEQ ID NO: 709480 - RNA, 23 nt, Human
ccaccucacagacuuccacagcc

SEQ ID NO: 709481 - RNA, 18 nt, Human
ccaccucccucuccuccu

SEQ ID NO: 709482 - RNA, 24 nt, Human
ccaccuucuagguucaagcgauuc

SEQ ID NO: 709483 - RNA, 23 nt, Human
ccacgugaacaaguagcucuaga

SEQ ID NO: 709484 - RNA, 22 nt, Human
ccagaagcacacacccacccca

SEQ ID NO: 709485 - RNA, 23 nt, Human
ccagaagcacacacccaccccaa

SEQ ID NO: 709486 - RNA, 20 nt, Human
ccagccaugggcgccuggcg

SEQ ID NO: 709487 - RNA, 18 nt, Human
ccaggcuggagugccaug

SEQ ID NO: 709488 - RNA, 21 nt, Human
cccaaaagagaccccagaagc

SEQ ID NO: 709489 - RNA, 18 nt, Human
cccaaccgaguucacacc

SEQ ID NO: 709490 - RNA, 19 nt, Human
cccaccucgaccucccaaa

SEQ ID NO: 709491 - RNA, 21 nt, Human
cccaggaucacaagaaugaca

SEQ ID NO: 709492 - RNA, 19 nt, Human
cccauuuccccccuuuuga

SEQ ID NO: 709493 - RNA, 20 nt, Human
ccccaaacaucccugaagcc

SEQ ID NO: 709494 - RNA, 23 nt, Human
ccccaagcuucagggguucuuag

SEQ ID NO: 709495 - RNA, 20 nt, Human
ccccacagagcgacagcagg

SEQ ID NO: 709496 - RNA, 22 nt, Human
ccccacagagcgacagcaggcu

SEQ ID NO: 709497 - RNA, 26 nt, Human
ccccaggcuucugaccggcaggcccu

SEQ ID NO: 709498 - RNA, 24 nt, Human
ccccaguugcagguguuuuaaggg

SEQ ID NO: 709499 - RNA, 22 nt, Human
cccccaaacaucccugaagccc

SEQ ID NO: 709500 - RNA, 24 nt, Human
cccccaaacaucccugaagcccag

SEQ ID NO: 709501 - RNA, 24 nt, Human
ccccccuuuugaaucuaaauccaa

SEQ ID NO: 709502 - RNA, 23 nt, Human
cccgaguagcugggauuacaggu

SEQ ID NO: 709503 - RNA, 24 nt, Human
cccgaguagcugggauuacaggug

SEQ ID NO: 709504 - RNA, 20 nt, Human
cccucuaaccacccccccca

SEQ ID NO: 709505 - RNA, 19 nt, Human
cccugaacaccaagggacc

SEQ ID NO: 709506 - RNA, 21 nt, Human
ccgaguagcugggauuacagg

SEQ ID NO: 709507 - RNA, 22 nt, Human
ccgccggcucagccugcucccc

SEQ ID NO: 709508 - RNA, 24 nt, Human
ccgucgagcccuggcaacuggggg

SEQ ID NO: 709509 - RNA, 24 nt, Human
ccuaaccucaggugaucugcccac

SEQ ID NO: 709510 - RNA, 19 nt, Human
ccuaccagccccaggcuuc

SEQ ID NO: 709511 - RNA, 21 nt, Human
ccuccaauaauccugaaaauc

SEQ ID NO: 709512 - RNA, 22 nt, Human
ccucuaaccaccccccccaaac

SEQ ID NO: 709513 - RNA, 24 nt, Human
ccugccucagccucccgaguagcu

SEQ ID NO: 709514 - RNA, 21 nt, Human
ccuucuaaaaguccucacaag

SEQ ID NO: 709515 - RNA, 24 nt, Human
ccuucuagguucaagcgauucucc

SEQ ID NO: 709516 - RNA, 18 nt, Human
ccuugguccaccagcgcc

SEQ ID NO: 709517 - RNA, 24 nt, Human
cgacuaaaacaagguaacacugaa

SEQ ID NO: 709518 - RNA, 20 nt, Human
cgagaggccacaguugcugg

SEQ ID NO: 709519 - RNA, 21 nt, Human
cgagaggccacaguugcuggg

SEQ ID NO: 709520 - RNA, 21 nt, Human
cgcaggcaccuggcacauccc

SEQ ID NO: 709521 - RNA, 18 nt, Human
cgcccccuccccccauug

SEQ ID NO: 709522 - RNA, 18 nt, Human
cggccagaugaacagcgg

SEQ ID NO: 709523 - RNA, 19 nt, Human
cggcuguugcuucgcaaaa

SEQ ID NO: 709524 - RNA, 24 nt, Human
cucacacuaccucuccagcaacug

SEQ ID NO: 709525 - RNA, 23 nt, Human
cucacugcaaccuccaccuucua

SEQ ID NO: 709526 - RNA, 24 nt, Human
cucagccucccgaguagcugggau

SEQ ID NO: 709527 - RNA, 21 nt, Human
cuccaauaauccugaaaaucc

SEQ ID NO: 709528 - RNA, 19 nt, Human
cuccaccugcggcuguugc

SEQ ID NO: 709529 - RNA, 18 nt, Human
cucccccucccauggguc

SEQ ID NO: 709530 - RNA, 25 nt, Human
cuccccucucacccagaaccauccc

SEQ ID NO: 709531 - RNA, 20 nt, Human
cucgucuuuauagcucugcc

SEQ ID NO: 709532 - RNA, 23 nt, Human
cucucacccagaaccauccccua

SEQ ID NO: 709533 - RNA, 21 nt, Human
cucuuguuguccaggcuggag

SEQ ID NO: 709534 - RNA, 22 nt, Human
cucuuguuguccaggcuggagu

SEQ ID NO: 709535 - RNA, 24 nt, Human
cugcaaccuccaccuucuagguuc

SEQ ID NO: 709536 - RNA, 18 nt, Human
cuggaggugaggaccagc

SEQ ID NO: 709537 - RNA, 19 nt, Human
gaagacauguccuccccac

SEQ ID NO: 709538 - RNA, 19 nt, Human
gaagcacacacccacccca

SEQ ID NO: 709539 - RNA, 18 nt, Human
gacaaugacuuaagcccc

SEQ ID NO: 709540 - RNA, 18 nt, Human
gacagcaggcuggcuucc

SEQ ID NO: 709541 - RNA, 20 nt, Human
gacaggagugaggacaggag

SEQ ID NO: 709542 - RNA, 19 nt, Human
gacaugaaguuguggcguc

SEQ ID NO: 709543 - RNA, 20 nt, Human
gacccucccugaacaccaag

SEQ ID NO: 709544 - RNA, 19 nt, Human
gacuaaaacaagguaacac

SEQ ID NO: 709545 - RNA, 18 nt, Human
gacuuggcucugcuguga

SEQ ID NO: 709546 - RNA, 22 nt, Human
gagaaaccaaaaacaaaacaga

SEQ ID NO: 709547 - RNA, 22 nt, Human
gagaaggggaguugccuugaug

SEQ ID NO: 709548 - RNA, 20 nt, Human
gagaaugguuuuuuccucuu

SEQ ID NO: 709549 - RNA, 18 nt, Human
gagaugggguuucaccau

SEQ ID NO: 709550 - RNA, 24 nt, Human
gagaugggguuucaccauguuggc

SEQ ID NO: 709551 - RNA, 18 nt, Human
gagcuugcaagagacagg

SEQ ID NO: 709552 - RNA, 19 nt, Human
gaggcagggagggggccug

SEQ ID NO: 709553 - RNA, 22 nt, Human
gaggucccaaaagagaccccag

SEQ ID NO: 709554 - RNA, 24 nt, Human
gaguacaaguugaaaaccacacag

SEQ ID NO: 709555 - RNA, 18 nt, Human
gauuacaggugccugcca

SEQ ID NO: 709556 - RNA, 22 nt, Human
gcaagaaacagagcaagcagaa

SEQ ID NO: 709557 - RNA, 24 nt, Human
gcauaaaacugaagaaaacagcca

SEQ ID NO: 709558 - RNA, 19 nt, Human
gccaccucccucuccuccu

SEQ ID NO: 709559 - RNA, 18 nt, Human
gccagcacaggacaggag

SEQ ID NO: 709560 - RNA, 19 nt, Human
gccagggaggguggcaggg

SEQ ID NO: 709561 - RNA, 23 nt, Human
gcccccuccccccauugcaagac

SEQ ID NO: 709562 - RNA, 23 nt, Human
gccuagaaaaaccaacuaggaag

SEQ ID NO: 709563 - RNA, 20 nt, Human
gccucagccucccgaguagc

SEQ ID NO: 709564 - RNA, 21 nt, Human
gccugaacucaauuauagacu

SEQ ID NO: 709565 - RNA, 18 nt, Human
gcgaaacgcccccucccc

SEQ ID NO: 709566 - RNA, 21 nt, Human
gcgaaacgcccccucccccca

SEQ ID NO: 709567 - RNA, 24 nt, Human
gcgauucuccugccucagccuccc

SEQ ID NO: 709568 - RNA, 18 nt, Human
gcggggcccgcacccugc

SEQ ID NO: 709569 - RNA, 23 nt, Human
gcugaacaugcgauuugcaguua

SEQ ID NO: 709570 - RNA, 23 nt, Human
gcuggucuugaacuccuaaccuc

SEQ ID NO: 709571 - RNA, 20 nt, Human
ggacaggagugaggacagga

SEQ ID NO: 709572 - RNA, 19 nt, Human
ggagcaucacaggcaggaa

SEQ ID NO: 709573 - RNA, 19 nt, Human
ggagcuugcaagagacagg

SEQ ID NO: 709574 - RNA, 18 nt, Human
ggaggaaggugggcuuag

SEQ ID NO: 709575 - RNA, 21 nt, Human
ggagggggccugggcuccuug

SEQ ID NO: 709576 - RNA, 18 nt, Human
ggaugaugacucccccuc

SEQ ID NO: 709577 - RNA, 19 nt, Human
ggcaagguggggggccuga

SEQ ID NO: 709578 - RNA, 21 nt, Human
ggccaccucacagacuuccac

SEQ ID NO: 709579 - RNA, 24 nt, Human
ggcuggucuugaacuccuaaccuc

SEQ ID NO: 709580 - RNA, 19 nt, Human
ggcuuaggaggcugcuggc

SEQ ID NO: 709581 - RNA, 21 nt, Human
ggcuuccccacaaauguaagg

SEQ ID NO: 709582 - RNA, 20 nt, Human
gggaagcaaaauagaccaaa

SEQ ID NO: 709583 - RNA, 21 nt, Human
gggaagcaaaauagaccaaaa

SEQ ID NO: 709584 - RNA, 24 nt, Human
gggaaggagagggagaaaugggag

SEQ ID NO: 709585 - RNA, 19 nt, Human
gggaggaaggugggcuuag

SEQ ID NO: 709586 - RNA, 22 nt, Human
gggagggggccugggcuccuug

SEQ ID NO: 709587 - RNA, 21 nt, Human
gggauuagaacugacucaaaa

SEQ ID NO: 709588 - RNA, 27 nt, Human
ggggagcggguagcacagauccuuggu

SEQ ID NO: 709589 - RNA, 21 nt, Human
ggggagcuugcaagagacagg

SEQ ID NO: 709590 - RNA, 21 nt, Human
ggggcuggaagcucugggcuu

SEQ ID NO: 709591 - RNA, 22 nt, Human
gggguuucaccauguuggccag

SEQ ID NO: 709592 - RNA, 23 nt, Human
gggguuucuuaaauguugggaag

SEQ ID NO: 709593 - RNA, 20 nt, Human
ggguggcagggggagggggg

SEQ ID NO: 709594 - RNA, 22 nt, Human
gguguccuuggcugccgucgag

SEQ ID NO: 709595 - RNA, 19 nt, Human
gguucugccaccauuaccu

SEQ ID NO: 709596 - RNA, 25 nt, Human
guagaaaacagacacuuuguccaca

SEQ ID NO: 709597 - RNA, 23 nt, Human
guagagaugggguuucaccaugu

SEQ ID NO: 709598 - RNA, 18 nt, Human
guagcugggauuacaggu

SEQ ID NO: 709599 - RNA, 24 nt, Human
gucagggaaggagagggagaaaug

SEQ ID NO: 709600 - RNA, 20 nt, Human
gugaacagggcucuccaccu

SEQ ID NO: 709601 - RNA, 24 nt, Human
gugaucugcccaccucgaccuccc

SEQ ID NO: 709602 - RNA, 20 nt, Human
gugcagcuaucagcgcccgg

SEQ ID NO: 709603 - RNA, 24 nt, Human
gugggcuuaggaggcugcuggcug

SEQ ID NO: 709604 - RNA, 22 nt, Human
guggggccagaggagaguuuuc

SEQ ID NO: 709605 - RNA, 20 nt, Human
guguuuuaagggacagaaag

SEQ ID NO: 709606 - RNA, 22 nt, Human
guuccagaaaagccagcacagg

SEQ ID NO: 709607 - RNA, 21 nt, Human
guugcugggguagguuuacgu

SEQ ID NO: 709608 - RNA, 18 nt, Human
guuguccaggcuggagug

SEQ ID NO: 709609 - RNA, 22 nt, Human
guuuguggaagaauaagaggaa

SEQ ID NO: 709610 - RNA, 19 nt, Human
uaaaacugaagaaaacagc

SEQ ID NO: 709611 - RNA, 23 nt, Human
uaaaagagugccacagaaaccca

SEQ ID NO: 709612 - RNA, 22 nt, Human
uaaaaguccucacaaggcacca

SEQ ID NO: 709613 - RNA, 18 nt, Human
uaaccucaggugaucugc

SEQ ID NO: 709614 - RNA, 22 nt, Human
uaacucccaucaucacugcacc

SEQ ID NO: 709615 - RNA, 24 nt, Human
uaacucccaucaucacugcaccuc

SEQ ID NO: 709616 - RNA, 19 nt, Human
uaagcugaccccagccacu

SEQ ID NO: 709617 - RNA, 19 nt, Human
uaagugacuuggagaaggg

SEQ ID NO: 709618 - RNA, 25 nt, Human
uaauuuuuuguauuuuuaguagagg

SEQ ID NO: 709619 - RNA, 33 nt, Human
uacaccuaauuuuuuguauuuuuaguagagaag

SEQ ID NO: 709620 - RNA, 23 nt, Human
uaccucuccagcaacuggcacaa

SEQ ID NO: 709621 - RNA, 24 nt, Human
uagaccucuaagaugaugcuacau

SEQ ID NO: 709622 - RNA, 22 nt, Human
uagagagggaugaaggccucca

SEQ ID NO: 709623 - RNA, 22 nt, Human
uagagaugggguuucaccaugu

SEQ ID NO: 709624 - RNA, 25 nt, Human
uagcacacccguccacugggaagca

SEQ ID NO: 709625 - RNA, 23 nt, Human
uagcucuucccauuucugcaacc

SEQ ID NO: 709626 - RNA, 27 nt, Human
uaggauggguguucucuaaugggggag

SEQ ID NO: 709627 - RNA, 21 nt, Human
uagggucccaggguuuccggu

SEQ ID NO: 709628 - RNA, 24 nt, Human
uaguagagaugggguuucaccaug

SEQ ID NO: 709629 - RNA, 26 nt, Human
uaguagagaugggguuucaccauguu

SEQ ID NO: 709630 - RNA, 22 nt, Human
uauagcucugccacuccaggga

SEQ ID NO: 709631 - RNA, 22 nt, Human
uaucaggugaacagggcucucc

SEQ ID NO: 709632 - RNA, 24 nt, Human
uaucaucuacccagagagugacuc

SEQ ID NO: 709633 - RNA, 24 nt, Human
uauuaggcaagguggggggccuga

SEQ ID NO: 709634 - RNA, 18 nt, Human
uauugcacaacccggaag

SEQ ID NO: 709635 - RNA, 19 nt, Human
uauuugaucauuuguucca

SEQ ID NO: 709636 - RNA, 23 nt, Human
ucacugcaaccuccaccuucuag

SEQ ID NO: 709637 - RNA, 24 nt, Human
ucacugcaaccuccaccuucuagg

SEQ ID NO: 709638 - RNA, 27 nt, Human
ucacugcaaccuccaccuucuagguuc

SEQ ID NO: 709639 - RNA, 21 nt, Human
ucacugcaccuccaaggaggg

SEQ ID NO: 709640 - RNA, 23 nt, Human
ucacugcaccuccaagggggccc

SEQ ID NO: 709641 - RNA, 20 nt, Human
ucacugggacaaccuugagc

SEQ ID NO: 709642 - RNA, 20 nt, Human
ucagccucccgaguagcugg

SEQ ID NO: 709643 - RNA, 22 nt, Human
ucagggcaccagcagccuuagu

SEQ ID NO: 709644 - RNA, 24 nt, Human
uccacagccacccagcugggccag

SEQ ID NO: 709645 - RNA, 23 nt, Human
uccacaugaggaccaccaagggc

SEQ ID NO: 709646 - RNA, 19 nt, Human
uccaccagcgccaccuccc

SEQ ID NO: 709647 - RNA, 18 nt, Human
uccacugggaagcagagc

SEQ ID NO: 709648 - RNA, 19 nt, Human
uccauggaagauaagaauu

SEQ ID NO: 709649 - RNA, 20 nt, Human
uccauuuuauauauaacuau

SEQ ID NO: 709650 - RNA, 23 nt, Human
ucccaaagccaaaugccuuggca

SEQ ID NO: 709651 - RNA, 24 nt, Human
ucccaaagugcugggauaacaggc

SEQ ID NO: 709652 - RNA, 25 nt, Human
ucccaugggucccauuucucccccc

SEQ ID NO: 709653 - RNA, 23 nt, Human
ucccauuucucccccaguugcag

SEQ ID NO: 709654 - RNA, 23 nt, Human
ucccgaguagcugggauuacagg

SEQ ID NO: 709655 - RNA, 24 nt, Human
ucccgaguagcugggauuacaggu

SEQ ID NO: 709656 - RNA, 20 nt, Human
ucccucuguuagaggagaga

SEQ ID NO: 709657 - RNA, 22 nt, Human
uccuuggcugccgucgagcccu

SEQ ID NO: 709658 - RNA, 22 nt, Human
ucgcucuuguuguccaggcugg

SEQ ID NO: 709659 - RNA, 23 nt, Human
ucgcucuuguuguccaggcugga

SEQ ID NO: 709660 - RNA, 19 nt, Human
ucggcccccaccaagagga

SEQ ID NO: 709661 - RNA, 22 nt, Human
ucuaaaaguccucacaaggcac

SEQ ID NO: 709662 - RNA, 22 nt, Human
ucuaagcagugggaagacaugu

SEQ ID NO: 709663 - RNA, 23 nt, Human
ucuagagugcuuuuaggcagagu

SEQ ID NO: 709664 - RNA, 24 nt, Human
ucuccugccucagccucccgagua

SEQ ID NO: 709665 - RNA, 20 nt, Human
ucugaccggcaggcccuggg

SEQ ID NO: 709666 - RNA, 21 nt, Human
ucugcucacacuaccucucca

SEQ ID NO: 709667 - RNA, 27 nt, Human
ucugcugugaaauaaacgugccaggga

SEQ ID NO: 709668 - RNA, 18 nt, Human
ucugcuguguugaaacca

SEQ ID NO: 709669 - RNA, 23 nt, Human
ucuggauugaguugucacguccc

SEQ ID NO: 709670 - RNA, 18 nt, Human
ucugucagggcuguuuga

SEQ ID NO: 709671 - RNA, 21 nt, Human
ucuuagggucccaggguuucc

SEQ ID NO: 709672 - RNA, 25 nt, Human
ucuuccucacugggacaaccuugag

SEQ ID NO: 709673 - RNA, 20 nt, Human
ugaacaaguagcucuagagu

SEQ ID NO: 709674 - RNA, 19 nt, Human
ugaacagcgguccaaguga

SEQ ID NO: 709675 - RNA, 23 nt, Human
ugaacgccccuucuaaaaguccu

SEQ ID NO: 709676 - RNA, 20 nt, Human
ugaaugcuugugaauggcug

SEQ ID NO: 709677 - RNA, 18 nt, Human
ugacaaaguacccuacaa

SEQ ID NO: 709678 - RNA, 19 nt, Human
ugacaaaguacccuacaac

SEQ ID NO: 709679 - RNA, 23 nt, Human
ugacaaaguacccuacaacuacc

SEQ ID NO: 709680 - RNA, 19 nt, Human
ugacacagccuggagagca

SEQ ID NO: 709681 - RNA, 19 nt, Human
ugaccuaauccuccaauaa

SEQ ID NO: 709682 - RNA, 21 nt, Human
ugacucaaaagcuuucagcac

SEQ ID NO: 709683 - RNA, 22 nt, Human
ugacucccccucccaugggucc

SEQ ID NO: 709684 - RNA, 20 nt, Human
ugacuuaagccccaucguga

SEQ ID NO: 709685 - RNA, 18 nt, Human
ugaggacaggagguggcc

SEQ ID NO: 709686 - RNA, 20 nt, Human
ugaggacaggagguggccug

SEQ ID NO: 709687 - RNA, 24 nt, Human
ugaggacaggagguggccugaggg

SEQ ID NO: 709688 - RNA, 24 nt, Human
ugaggaccaccaagggccuaccag

SEQ ID NO: 709689 - RNA, 21 nt, Human
ugagggaggaagagcacucca

SEQ ID NO: 709690 - RNA, 24 nt, Human
ugaucugcccaccucgaccuccca

SEQ ID NO: 709691 - RNA, 23 nt, Human
ugcaacagucagacauguaugug

SEQ ID NO: 709692 - RNA, 20 nt, Human
ugcaagguggagcuaacacu

SEQ ID NO: 709693 - RNA, 22 nt, Human
ugccacagaaacccacccagga

SEQ ID NO: 709694 - RNA, 20 nt, Human
ugccauaggcccuuaagcaa

SEQ ID NO: 709695 - RNA, 21 nt, Human
ugcccaccucgaccucccaaa

SEQ ID NO: 709696 - RNA, 18 nt, Human
ugcccccugcucggcccc

SEQ ID NO: 709697 - RNA, 20 nt, Human
ugccucaaaacagaguucgg

SEQ ID NO: 709698 - RNA, 24 nt, Human
ugccucagccucccgaguagcugg

SEQ ID NO: 709699 - RNA, 23 nt, Human
ugccuugggacaugaacagacaa

SEQ ID NO: 709700 - RNA, 24 nt, Human
ugcucugcucacacuaccucucca

SEQ ID NO: 709701 - RNA, 20 nt, Human
ugcuguuugguuugguuuug

SEQ ID NO: 709702 - RNA, 23 nt, Human
ugcuucgcaaaauauccuuccuc

SEQ ID NO: 709703 - RNA, 23 nt, Human
uggaaaccuacaggcaugagaau

SEQ ID NO: 709704 - RNA, 19 nt, Human
uggaaaggaccacuggcug

SEQ ID NO: 709705 - RNA, 19 nt, Human
uggaagaauaagaggaagc

SEQ ID NO: 709706 - RNA, 18 nt, Human
uggcaacacagucugugu

SEQ ID NO: 709707 - RNA, 19 nt, Human
uggcaagauuucagcugcu

SEQ ID NO: 709708 - RNA, 24 nt, Human
uggccaggcuggucuugaacuccu

SEQ ID NO: 709709 - RNA, 18 nt, Human
uggcccagacacacaugg

SEQ ID NO: 709710 - RNA, 18 nt, Human
uggccgcucucuucuugc

SEQ ID NO: 709711 - RNA, 21 nt, Human
ugggaagacauguccucccca

SEQ ID NO: 709712 - RNA, 24 nt, Human
ugggaagcaaaauagaccaaaagg

SEQ ID NO: 709713 - RNA, 19 nt, Human
ugggacaaccuugagcugg

SEQ ID NO: 709714 - RNA, 22 nt, Human
ugggaccacauccaaggcauga

SEQ ID NO: 709715 - RNA, 22 nt, Human
ugggauaacaggcguaagcuac

SEQ ID NO: 709716 - RNA, 24 nt, Human
ugggauaacaggcguaagcuacug

SEQ ID NO: 709717 - RNA, 21 nt, Human
ugggauuacaggugccugcca

SEQ ID NO: 709718 - RNA, 22 nt, Human
ugggauuacaggugccugccac

SEQ ID NO: 709719 - RNA, 22 nt, Human
ugggauuacaggugccugccac

SEQ ID NO: 709720 - RNA, 24 nt, Human
ugggauuacaggugccugccacua

SEQ ID NO: 709721 - RNA, 27 nt, Human
ugggccuuuuaaaaaaaaucugggggu

SEQ ID NO: 709722 - RNA, 23 nt, Human
ugggcuuaggaggcugcuggcug

SEQ ID NO: 709723 - RNA, 18 nt, Human
uggggccagaggagaguu

SEQ ID NO: 709724 - RNA, 26 nt, Human
uggggcugaagcccuugagacuuagu

SEQ ID NO: 709725 - RNA, 20 nt, Human
ugggggcuggaagcucuggg

SEQ ID NO: 709726 - RNA, 21 nt, Human
ugggggcuggaagcucugggc

SEQ ID NO: 709727 - RNA, 23 nt, Human
uggggguggggaaaauaacggag

SEQ ID NO: 709728 - RNA, 24 nt, Human
ugggguuucaccauguuggccagg

SEQ ID NO: 709729 - RNA, 24 nt, Human
ugguacaaucuccgcucacugcaa

SEQ ID NO: 709730 - RNA, 20 nt, Human
ugguaggagcucgagucacg

SEQ ID NO: 709731 - RNA, 20 nt, Human
ugguugggccaccucacaga

SEQ ID NO: 709732 - RNA, 24 nt, Human
ugucagaaagaugaccaguauucc

SEQ ID NO: 709733 - RNA, 18 nt, Human
uguccaggcuggagugcc

SEQ ID NO: 709734 - RNA, 21 nt, Human
uguccaggcuggagugccaug

SEQ ID NO: 709735 - RNA, 24 nt, Human
uguccaggcuggagugccauggua

SEQ ID NO: 709736 - RNA, 20 nt, Human
ugucuguuggcuuccccaca

SEQ ID NO: 709737 - RNA, 24 nt, Human
ugugagggaaggggccagaaaggc

SEQ ID NO: 709738 - RNA, 23 nt, Human
ugugucuguuggcuuccccacaa

SEQ ID NO: 709739 - RNA, 20 nt, Human
uguguugaaaccaaacugcc

SEQ ID NO: 709740 - RNA, 19 nt, Human
uguuuuaaaaccagacaga

SEQ ID NO: 709741 - RNA, 19 nt, Human
uguuuuaagggacagaaag

SEQ ID NO: 709742 - RNA, 21 nt, Human
uuacaggugccugccacuaca

SEQ ID NO: 709743 - RNA, 22 nt, Human
uuagaacaucaagaauugaagu

SEQ ID NO: 709744 - RNA, 18 nt, Human
uuaguagagaugggguuu

SEQ ID NO: 709745 - RNA, 22 nt, Human
uuaguagagaugggguuucacc

SEQ ID NO: 709746 - RNA, 24 nt, Human
uuaguagagaugggguuucaccau

SEQ ID NO: 709747 - RNA, 19 nt, Human
uuaucuaugauguaaguga

SEQ ID NO: 709748 - RNA, 21 nt, Human
uucaagcgauucuccugccuc

SEQ ID NO: 709749 - RNA, 23 nt, Human
uucaagcgauucuccugccucag

SEQ ID NO: 709750 - RNA, 24 nt, Human
uucaagcgauucuccugccucagc

SEQ ID NO: 709751 - RNA, 18 nt, Human
uucacaccauccuucugg

SEQ ID NO: 709752 - RNA, 23 nt, Human
uuccaaaugacacuacuauuccu

SEQ ID NO: 709753 - RNA, 23 nt, Human
uucgcaaaauauccuuccucucc

SEQ ID NO: 709754 - RNA, 24 nt, Human
uucgcucuuguuguccaggcugga

SEQ ID NO: 709755 - RNA, 20 nt, Human
uucggagguucuuaauuggg

SEQ ID NO: 709756 - RNA, 24 nt, Human
uucuagguucaagcgauucuccug

SEQ ID NO: 709757 - RNA, 23 nt, Human
uugccaagcacgaaaggcuacau

SEQ ID NO: 709758 - RNA, 18 nt, Human
uugcccccugcucggccc

SEQ ID NO: 709759 - RNA, 19 nt, Human
uugcucagggcaccagcag

SEQ ID NO: 709760 - RNA, 22 nt, Human
uugcucagggcaccagcagccu

SEQ ID NO: 709761 - RNA, 21 nt, Human
uuggaggugucuggcagagcc

SEQ ID NO: 709762 - RNA, 23 nt, Human
uuguauuuuuaguagagaugggg

SEQ ID NO: 709763 - RNA, 26 nt, Human
uuuaaacagaggaaccgaaaaaugag

SEQ ID NO: 709764 - RNA, 24 nt, Human
uuucaccauguuggccaggcuggu

SEQ ID NO: 709765 - RNA, 22 nt, Human
uuucgcucuuguuguccaggcu

SEQ ID NO: 709766 - RNA, 24 nt, Human
uuucgcucuuguuguccaggcugg

SEQ ID NO: 709767 - RNA, 25 nt, Human
uuucucagcaaccauuucggucugg

SEQ ID NO: 709768 - RNA, 23 nt, Human
uuucuggaggugccugcugcgca

SEQ ID NO: 709769 - RNA, 19 nt, Human
uuuuacauaaaauaaaccc

SEQ ID NO: 709770 - RNA, 20 nt, Human
uuuuguauuuuuaguagaga

SEQ ID NO: 709771 - RNA, 24 nt, Human
uuuuuaguagagaugggguuucac

SEQ ID NO: 709772 - RNA, 23 nt, Human
uuuuuguauuuuuaguagagaag

SEQ ID NO: 709773 - RNA, 20 nt, Human
aaaaagccacacugagccca

SEQ ID NO: 709774 - RNA, 21 nt, Human
aaaaguauuacagcaaggaca

SEQ ID NO: 709775 - RNA, 18 nt, Human
aaagggcuccuuguaaga

SEQ ID NO: 709776 - RNA, 24 nt, Human
aagcagaagcagauucuccacaug

SEQ ID NO: 709777 - RNA, 22 nt, Human
aagcagauucuccacauguaga

SEQ ID NO: 709778 - RNA, 19 nt, Human
aagcgcgcuacuaagaaca

SEQ ID NO: 709779 - RNA, 19 nt, Human
aaggaccaaggcuaugagc

SEQ ID NO: 709780 - RNA, 21 nt, Human
acaaagcuuuuggccaaauaa

SEQ ID NO: 709781 - RNA, 20 nt, Human
acacagccacacugcccaaa

SEQ ID NO: 709782 - RNA, 22 nt, Human
acacugagcccacucuuccugu

SEQ ID NO: 709783 - RNA, 21 nt, Human
accaagagaucauaauacaaa

SEQ ID NO: 709784 - RNA, 19 nt, Human
accaccugcuguauccuuc

SEQ ID NO: 709785 - RNA, 21 nt, Human
accucaucacccccaaagcca

SEQ ID NO: 709786 - RNA, 20 nt, Human
accugacaagcccuuuguuu

SEQ ID NO: 709787 - RNA, 21 nt, Human
agaaguucuuucauaaagaaa

SEQ ID NO: 709788 - RNA, 22 nt, Human
agccacacugagcccacucuuc

SEQ ID NO: 709789 - RNA, 27 nt, Human
auaguuggaaaaaagccacacugagcc

SEQ ID NO: 709790 - RNA, 22 nt, Human
caaagagaucaaagagucagga

SEQ ID NO: 709791 - RNA, 18 nt, Human
caagaugagaccuuccuu

SEQ ID NO: 709792 - RNA, 28 nt, Human
cacagaccaagagaucauaauacaaagc

SEQ ID NO: 709793 - RNA, 18 nt, Human
caccucaucacccccaaa

SEQ ID NO: 709794 - RNA, 20 nt, Human
caccucaucacccccaaagc

SEQ ID NO: 709795 - RNA, 20 nt, Human
cacuacacagccacacugcc

SEQ ID NO: 709796 - RNA, 22 nt, Human
cacuacacagccacacugccca

SEQ ID NO: 709797 - RNA, 25 nt, Human
cacuacacagccacacugcccuuug

SEQ ID NO: 709798 - RNA, 20 nt, Human
cacugcccaaagcgcgcuac

SEQ ID NO: 709799 - RNA, 23 nt, Human
cagaccaagagaucauaauacaa

SEQ ID NO: 709800 - RNA, 24 nt, Human
cagaccaagagaucauaauacaaa

SEQ ID NO: 709801 - RNA, 21 nt, Human
cagccacacugcccaaagcgc

SEQ ID NO: 709802 - RNA, 21 nt, Human
ccaaagcgcgcuacuaagaac

SEQ ID NO: 709803 - RNA, 23 nt, Human
ccacacugagcccacucuuccug

SEQ ID NO: 709804 - RNA, 19 nt, Human
cccaaugcauuuacauaaa

SEQ ID NO: 709805 - RNA, 21 nt, Human
ccccaccucaucacccccaaa

SEQ ID NO: 709806 - RNA, 22 nt, Human
cccccacuuucuaauuccagcc

SEQ ID NO: 709807 - RNA, 21 nt, Human
cuaacaaaaaaaggggaugau

SEQ ID NO: 709808 - RNA, 20 nt, Human
cugcuguauccuuccccacc

SEQ ID NO: 709809 - RNA, 23 nt, Human
cuuuguuucuaacaaaaaaaggg

SEQ ID NO: 709810 - RNA, 21 nt, Human
gaaaggcagcuugccggcuua

SEQ ID NO: 709811 - RNA, 21 nt, Human
gaagcagauucuccacaugua

SEQ ID NO: 709812 - RNA, 25 nt, Human
gaaguucuuucauaaagaaaugcuu

SEQ ID NO: 709813 - RNA, 19 nt, Human
gacugcaugaguguugaaa

SEQ ID NO: 709814 - RNA, 22 nt, Human
gagcccacucuuccugugaggc

SEQ ID NO: 709815 - RNA, 22 nt, Human
gaggcaagaugagaccuuccuu

SEQ ID NO: 709816 - RNA, 25 nt, Human
ggcauggaaaucacaguacagaauu

SEQ ID NO: 709817 - RNA, 19 nt, Human
gugacugcaugaguguuga

SEQ ID NO: 709818 - RNA, 19 nt, Human
gugaggcaagaugagaccu

SEQ ID NO: 709819 - RNA, 20 nt, Human
uaaagaaaugcuuaacuuua

SEQ ID NO: 709820 - RNA, 18 nt, Human
uaaagcagaagcagauuc

SEQ ID NO: 709821 - RNA, 19 nt, Human
uaaagcagaagcagauucu

SEQ ID NO: 709822 - RNA, 22 nt, Human
uaaagcagaagcagauucucca

SEQ ID NO: 709823 - RNA, 21 nt, Human
uaacagugaaaucauuaaaca

SEQ ID NO: 709824 - RNA, 19 nt, Human
uaacucguagagcuucuca

SEQ ID NO: 709825 - RNA, 21 nt, Human
uaacuuuauuuaaccuagagu

SEQ ID NO: 709826 - RNA, 22 nt, Human
uaagaacacugguccuacaaag

SEQ ID NO: 709827 - RNA, 18 nt, Human
uaagaggcaaagcaucaa

SEQ ID NO: 709828 - RNA, 19 nt, Human
uacagcaaggacagggaaa

SEQ ID NO: 709829 - RNA, 26 nt, Human
uacagcaaggacagggaaagaugaaa

SEQ ID NO: 709830 - RNA, 18 nt, Human
uacaguaaaaacccaaug

SEQ ID NO: 709831 - RNA, 18 nt, Human
uauuucauguacagaggc

SEQ ID NO: 709832 - RNA, 22 nt, Human
uccacauguagaacuuggcaga

SEQ ID NO: 709833 - RNA, 18 nt, Human
uccacgucauagaccccc

SEQ ID NO: 709834 - RNA, 19 nt, Human
uccauaguuggaaaaaagc

SEQ ID NO: 709835 - RNA, 18 nt, Human
uccaugauuucucucuuu

SEQ ID NO: 709836 - RNA, 24 nt, Human
uccccaccucaucacccccaaagc

SEQ ID NO: 709837 - RNA, 24 nt, Human
ugacgccauaaacugugccugccu

SEQ ID NO: 709838 - RNA, 20 nt, Human
ugacugcaugaguguugaaa

SEQ ID NO: 709839 - RNA, 18 nt, Human
ugagcaagccauaugugg

SEQ ID NO: 709840 - RNA, 24 nt, Human
ugauauuuuaaagcagaagcagau

SEQ ID NO: 709841 - RNA, 24 nt, Human
ugcccaaagcgcgcuacuaagaac

SEQ ID NO: 709842 - RNA, 20 nt, Human
ugcugggauacaagcacgca

SEQ ID NO: 709843 - RNA, 24 nt, Human
uggaaaaaagccacacugagccca

SEQ ID NO: 709844 - RNA, 24 nt, Human
uucuccacauguagaacuuggcag

SEQ ID NO: 709845 - RNA, 19 nt, Human
uuuucagucucaucugggu

SEQ ID NO: 709846 - RNA, 18 nt, Human
aaaaucacagccaaacca

SEQ ID NO: 709847 - RNA, 20 nt, Human
aaacagacuuugaaaaaaug

SEQ ID NO: 709848 - RNA, 24 nt, Human
aaacccaagguuaaggaccagugg

SEQ ID NO: 709849 - RNA, 26 nt, Human
aaaguccucccacugacuugcuacuc

SEQ ID NO: 709850 - RNA, 24 nt, Human
aacaaaacuuaaaaaaaguaucac

SEQ ID NO: 709851 - RNA, 18 nt, Human
aaccccugucccugccuc

SEQ ID NO: 709852 - RNA, 19 nt, Human
aaccuugccucaccucuca

SEQ ID NO: 709853 - RNA, 19 nt, Human
aagccagagcucggaggca

SEQ ID NO: 709854 - RNA, 19 nt, Human
aaggaccagugaagaauag

SEQ ID NO: 709855 - RNA, 21 nt, Human
aaggcuucuggagagacaggc

SEQ ID NO: 709856 - RNA, 19 nt, Human
acagccugagccuccauuc

SEQ ID NO: 709857 - RNA, 18 nt, Human
accaggugcuguuacaaa

SEQ ID NO: 709858 - RNA, 19 nt, Human
acccaaacagagaagccuu

SEQ ID NO: 709859 - RNA, 22 nt, Human
acgcuacccaaacagagaagcc

SEQ ID NO: 709860 - RNA, 26 nt, Human
agaaaaaagucaggcuugucuuguaa

SEQ ID NO: 709861 - RNA, 23 nt, Human
agagaagccuucuuuuuaaaacc

SEQ ID NO: 709862 - RNA, 18 nt, Human
aggaacaagugagcaucc

SEQ ID NO: 709863 - RNA, 22 nt, Human
aggcaaagcuguugccacaauc

SEQ ID NO: 709864 - RNA, 19 nt, Human
aggcaagggcuccacagug

SEQ ID NO: 709865 - RNA, 23 nt, Human
aggcuuccugucuccugucucuu

SEQ ID NO: 709866 - RNA, 21 nt, Human
aggugaggagagggcaagagg

SEQ ID NO: 709867 - RNA, 22 nt, Human
aguuagagaaauucauauucaa

SEQ ID NO: 709868 - RNA, 23 nt, Human
augcuugaaacagcaaauucaac

SEQ ID NO: 709869 - RNA, 19 nt, Human
caaaaucacagccaaacca

SEQ ID NO: 709870 - RNA, 20 nt, Human
caagauaaaaacaaaacuua

SEQ ID NO: 709871 - RNA, 24 nt, Human
caagguaaucagagaaaaaaguca

SEQ ID NO: 709872 - RNA, 21 nt, Human
cacucugcagacgucucaacc

SEQ ID NO: 709873 - RNA, 23 nt, Human
cagagcucggaggcaagggcucc

SEQ ID NO: 709874 - RNA, 19 nt, Human
cagccaugcacaugaauca

SEQ ID NO: 709875 - RNA, 18 nt, Human
cagcguauucucaaaugu

SEQ ID NO: 709876 - RNA, 18 nt, Human
cauucugcaaacaucugc

SEQ ID NO: 709877 - RNA, 19 nt, Human
cauucugucagcguuaacc

SEQ ID NO: 709878 - RNA, 23 nt, Human
ccaacaggcaagauaaaaacaaa

SEQ ID NO: 709879 - RNA, 23 nt, Human
ccaagaagagaaaacaaaacgga

SEQ ID NO: 709880 - RNA, 21 nt, Human
ccaggggugaaaaaguccucc

SEQ ID NO: 709881 - RNA, 22 nt, Human
cccagcuagagucaugggcccc

SEQ ID NO: 709882 - RNA, 22 nt, Human
cccuuacauuucagagaccccc

SEQ ID NO: 709883 - RNA, 20 nt, Human
cggcaaauccuaaauuuugc

SEQ ID NO: 709884 - RNA, 21 nt, Human
cuaaagaaucucacauuauca

SEQ ID NO: 709885 - RNA, 20 nt, Human
cuagaaucuccaucacugaa

SEQ ID NO: 709886 - RNA, 20 nt, Human
cuaggacugaccucugcgcc

SEQ ID NO: 709887 - RNA, 22 nt, Human
cucauguguucugacuucaggu

SEQ ID NO: 709888 - RNA, 23 nt, Human
cuccugaaagcagcuugagaaaa

SEQ ID NO: 709889 - RNA, 24 nt, Human
cucgggcuggcgaucgggcagccc

SEQ ID NO: 709890 - RNA, 23 nt, Human
cuggugcaucuggaaaaugaggu

SEQ ID NO: 709891 - RNA, 24 nt, Human
cugugucaguuuuucauagaacgg

SEQ ID NO: 709892 - RNA, 21 nt, Human
cuuccugucuccugucucuuc

SEQ ID NO: 709893 - RNA, 22 nt, Human
cuugaaacagcaaauucaacaa

SEQ ID NO: 709894 - RNA, 19 nt, Human
gaaaggcuucuggagagac

SEQ ID NO: 709895 - RNA, 20 nt, Human
gacaaguuaucuccauccau

SEQ ID NO: 709896 - RNA, 21 nt, Human
gacuuccagucccacaggcuc

SEQ ID NO: 709897 - RNA, 22 nt, Human
gacuugcuacuccuuagacuuc

SEQ ID NO: 709898 - RNA, 20 nt, Human
gagaaaaauaaaacagaaaa

SEQ ID NO: 709899 - RNA, 19 nt, Human
gcaaacauggccccugggc

SEQ ID NO: 709900 - RNA, 22 nt, Human
gcaaagacaggggcaagcugug

SEQ ID NO: 709901 - RNA, 19 nt, Human
ggaaugcuaaaauuauaaa

SEQ ID NO: 709902 - RNA, 22 nt, Human
ggaucuauugggaaugcuaaaa

SEQ ID NO: 709903 - RNA, 24 nt, Human
ggaugcugcuugugauuacugaga

SEQ ID NO: 709904 - RNA, 19 nt, Human
gggcagcccagggcccgac

SEQ ID NO: 709905 - RNA, 20 nt, Human
ggugaggagagggcaagagg

SEQ ID NO: 709906 - RNA, 21 nt, Human
guagagcauaaauggcacccc

SEQ ID NO: 709907 - RNA, 20 nt, Human
gugcauuguggaugguaagu

SEQ ID NO: 709908 - RNA, 21 nt, Human
uaaaacagaaaagacaaagaa

SEQ ID NO: 709909 - RNA, 23 nt, Human
uaaaacagaaaagacaaagaacc

SEQ ID NO: 709910 - RNA, 19 nt, Human
uaaaacccaagguuaagga

SEQ ID NO: 709911 - RNA, 21 nt, Human
uaaaacccaagguuaaggacc

SEQ ID NO: 709912 - RNA, 23 nt, Human
uaaaacccaagguuaaggaccag

SEQ ID NO: 709913 - RNA, 18 nt, Human
uaaagcaaaaucuuccag

SEQ ID NO: 709914 - RNA, 22 nt, Human
uaaagcaaaaucuuccagaguc

SEQ ID NO: 709915 - RNA, 24 nt, Human
uaaagcaaaaucuuccagagucuu

SEQ ID NO: 709916 - RNA, 22 nt, Human
uaaaguagaugcccagcauauu

SEQ ID NO: 709917 - RNA, 23 nt, Human
uaacacagaggucucaaaugugc

SEQ ID NO: 709918 - RNA, 20 nt, Human
uaagaacaauaaaauccuaa

SEQ ID NO: 709919 - RNA, 23 nt, Human
uaagaacaauaaaauccuaaccu

SEQ ID NO: 709920 - RNA, 20 nt, Human
uacucagcucuuacgcuacc

SEQ ID NO: 709921 - RNA, 18 nt, Human
uacuccugucagccaugc

SEQ ID NO: 709922 - RNA, 23 nt, Human
uacugugauggaacugcagaacu

SEQ ID NO: 709923 - RNA, 20 nt, Human
uagcuccaauuugacacuag

SEQ ID NO: 709924 - RNA, 21 nt, Human
uagugaaccuggagaagagcu

SEQ ID NO: 709925 - RNA, 24 nt, Human
ucaaaaccuuucagcacugguucc

SEQ ID NO: 709926 - RNA, 23 nt, Human
ucacccugcucauguguucugac

SEQ ID NO: 709927 - RNA, 20 nt, Human
uccaauuugacacuagacac

SEQ ID NO: 709928 - RNA, 24 nt, Human
uccagcaucucaguaggaacaagu

SEQ ID NO: 709929 - RNA, 22 nt, Human
ucccaagaagagaaaacaaaac

SEQ ID NO: 709930 - RNA, 20 nt, Human
ucccauucaggaugaaccuu

SEQ ID NO: 709931 - RNA, 21 nt, Human
uccccaaaguggcuaaagaau

SEQ ID NO: 709932 - RNA, 23 nt, Human
uccugcucacguucuuuucaaga

SEQ ID NO: 709933 - RNA, 24 nt, Human
uccuugcuaacuuauuaauaggag

SEQ ID NO: 709934 - RNA, 23 nt, Human
ucucaaauguauugaagccaaca

SEQ ID NO: 709935 - RNA, 20 nt, Human
ucugcaaacaucugcgaugc

SEQ ID NO: 709936 - RNA, 23 nt, Human
ucugcaaacaucugcgaugcccu

SEQ ID NO: 709937 - RNA, 24 nt, Human
ucugcaaacaucugcgaugcccuu

SEQ ID NO: 709938 - RNA, 19 nt, Human
ucugcagacgucucaaccu

SEQ ID NO: 709939 - RNA, 21 nt, Human
ucugcagacgucucaaccugg

SEQ ID NO: 709940 - RNA, 22 nt, Human
ucugcuagcuccugaaagcagc

SEQ ID NO: 709941 - RNA, 19 nt, Human
ucugucagcguuaaccuga

SEQ ID NO: 709942 - RNA, 21 nt, Human
ugaaaaaguccucccacugac

SEQ ID NO: 709943 - RNA, 23 nt, Human
ugacagaugucucccaagaagag

SEQ ID NO: 709944 - RNA, 23 nt, Human
ugagagaaaaggaggugaggaga

SEQ ID NO: 709945 - RNA, 26 nt, Human
ugagagaaaaggaggugaggagaggg

SEQ ID NO: 709946 - RNA, 19 nt, Human
ugagccuccauucugucag

SEQ ID NO: 709947 - RNA, 25 nt, Human
ugauaauaauaaaucaauucaccua

SEQ ID NO: 709948 - RNA, 19 nt, Human
ugauauuuaaucuagaauc

SEQ ID NO: 709949 - RNA, 19 nt, Human
ugcaaggaagcaguaaccu

SEQ ID NO: 709950 - RNA, 22 nt, Human
ugcacaaaaagggaaaacaccc

SEQ ID NO: 709951 - RNA, 28 nt, Human
ugcacaaaaagggaaaacacccuauuuc

SEQ ID NO: 709952 - RNA, 24 nt, Human
ugccucaccucucacccugcucau

SEQ ID NO: 709953 - RNA, 19 nt, Human
uggagagacaggcucccca

SEQ ID NO: 709954 - RNA, 18 nt, Human
uggagguccaaggugccc

SEQ ID NO: 709955 - RNA, 19 nt, Human
uggcaguggggaagaggag

SEQ ID NO: 709956 - RNA, 21 nt, Human
uggccccugggcuccaacugu

SEQ ID NO: 709957 - RNA, 23 nt, Human
uggcgacucaagucagacgaugu

SEQ ID NO: 709958 - RNA, 19 nt, Human
uggcuaaggcuggccuaca

SEQ ID NO: 709959 - RNA, 21 nt, Human
ugguagugaaccaguacuccu

SEQ ID NO: 709960 - RNA, 24 nt, Human
ugugcacaaaaagggaaaacaccc

SEQ ID NO: 709961 - RNA, 24 nt, Human
uguggaugguaaguccucgggcug

SEQ ID NO: 709962 - RNA, 19 nt, Human
uuaauacaucaaugcgagu

SEQ ID NO: 709963 - RNA, 22 nt, Human
uucagguuccagagucacugag

SEQ ID NO: 709964 - RNA, 22 nt, Human
uucauagaacggccucuuccgu

SEQ ID NO: 709965 - RNA, 20 nt, Human
uuccugguuugacagauguc

SEQ ID NO: 709966 - RNA, 21 nt, Human
uucgacuuuuuuugcaaggaa

SEQ ID NO: 709967 - RNA, 26 nt, Human
aaaaaauaaaacccaccucuucucuc

SEQ ID NO: 709968 - RNA, 21 nt, Human
aaaagugcuggugucaacaug

SEQ ID NO: 709969 - RNA, 21 nt, Human
aacagagaaaccagcccugaa

SEQ ID NO: 709970 - RNA, 20 nt, Human
aacaugcacuccagucacag

SEQ ID NO: 709971 - RNA, 19 nt, Human
aacauggagaaaccccauc

SEQ ID NO: 709972 - RNA, 20 nt, Human
aacauggagaaaccccaucu

SEQ ID NO: 709973 - RNA, 21 nt, Human
aacauggagaaaccccaucuc

SEQ ID NO: 709974 - RNA, 19 nt, Human
aaccaagccaccccauggc

SEQ ID NO: 709975 - RNA, 24 nt, Human
aaccaggagguggagguugcagug

SEQ ID NO: 709976 - RNA, 18 nt, Human
aagaaaaacaaaaagccu

SEQ ID NO: 709977 - RNA, 23 nt, Human
aagcaagaaaaacaaaaagccua

SEQ ID NO: 709978 - RNA, 24 nt, Human
aagcaagaaaaacaaaaagccuag

SEQ ID NO: 709979 - RNA, 22 nt, Human
aaguccucauagaaaagggaaa

SEQ ID NO: 709980 - RNA, 24 nt, Human
aaguggggcuuuuugcccuugggc

SEQ ID NO: 709981 - RNA, 23 nt, Human
aaucgcuugaaccaggaggugga

SEQ ID NO: 709982 - RNA, 21 nt, Human
aaugguagggacaacacugga

SEQ ID NO: 709983 - RNA, 24 nt, Human
acaaaaaaccuccacguauggcca

SEQ ID NO: 709984 - RNA, 21 nt, Human
acaaaaagccuaggguugccc

SEQ ID NO: 709985 - RNA, 24 nt, Human
acaaaauacaucuuuuguaaacaa

SEQ ID NO: 709986 - RNA, 27 nt, Human
acaaacgcagcacaaggccaacaacaa

SEQ ID NO: 709987 - RNA, 21 nt, Human
acagagaggaaacgacaugaa

SEQ ID NO: 709988 - RNA, 20 nt, Human
acaugcacuccagucacagg

SEQ ID NO: 709989 - RNA, 24 nt, Human
accagucacaugggguuugugggc

SEQ ID NO: 709990 - RNA, 20 nt, Human
acccacuguuuucagaccca

SEQ ID NO: 709991 - RNA, 24 nt, Human
accccaucucuacuaaaaauacaa

SEQ ID NO: 709992 - RNA, 24 nt, Human
acgcaguagccgcuugguggccug

SEQ ID NO: 709993 - RNA, 25 nt, Human
acuccagccugggcaacaagaguga

SEQ ID NO: 709994 - RNA, 23 nt, Human
acuggagugaagaaaccaagcca

SEQ ID NO: 709995 - RNA, 20 nt, Human
agaaaaacaaaaagccuagg

SEQ ID NO: 709996 - RNA, 21 nt, Human
agaaccacccaaccugagcuu

SEQ ID NO: 709997 - RNA, 18 nt, Human
agacaggauggaaagugg

SEQ ID NO: 709998 - RNA, 25 nt, Human
agagaaaccagcccugaaauguuua

SEQ ID NO: 709999 - RNA, 22 nt, Human
agaucacuugaggucgggaguu

SEQ ID NO: 710000 - RNA, 21 nt, Human
agcaagaaaaacaaaaagccu

SEQ ID NO: 710001 - RNA, 23 nt, Human
agccaggugugguggcaggcgcc

SEQ ID NO: 710002 - RNA, 26 nt, Human
aggccugagaaucgcuugaaccagga

SEQ ID NO: 710003 - RNA, 21 nt, Human
aggcgccuguaaucccaacua

SEQ ID NO: 710004 - RNA, 21 nt, Human
aggcgggcagaucacuugagg

SEQ ID NO: 710005 - RNA, 22 nt, Human
aggcgggcagaucacuugaggg

SEQ ID NO: 710006 - RNA, 23 nt, Human
aggcgggcagaucacuugagguc

SEQ ID NO: 710007 - RNA, 26 nt, Human
aggcgggcagaucacuugaggucggg

SEQ ID NO: 710008 - RNA, 23 nt, Human
aggcuggcuuugcugcuggagag

SEQ ID NO: 710009 - RNA, 22 nt, Human
agguccaccuuauucucuggug

SEQ ID NO: 710010 - RNA, 21 nt, Human
agguggagguugcagugagcc

SEQ ID NO: 710011 - RNA, 24 nt, Human
agguggagguugcagugagccgag

SEQ ID NO: 710012 - RNA, 24 nt, Human
aggugugguggcaggcgccuguaa

SEQ ID NO: 710013 - RNA, 21 nt, Human
agugaagaaaccaagccaccc

SEQ ID NO: 710014 - RNA, 24 nt, Human
auggugccauugcacuccagccug

SEQ ID NO: 710015 - RNA, 24 nt, Human
auugcacuccagccugggcaacaa

SEQ ID NO: 710016 - RNA, 20 nt, Human
auugcacugucagaucugaa

SEQ ID NO: 710017 - RNA, 24 nt, Human
caaaaacaacaacaaaaaaccucc

SEQ ID NO: 710018 - RNA, 25 nt, Human
caaaaacaacaacaaaaaaccucca

SEQ ID NO: 710019 - RNA, 18 nt, Human
caacaacaaaaaaccucc

SEQ ID NO: 710020 - RNA, 22 nt, Human
caacaacaaaaaaccuccacgu

SEQ ID NO: 710021 - RNA, 24 nt, Human
caacaacaaaaaggaauaaaagca

SEQ ID NO: 710022 - RNA, 21 nt, Human
caagccccaggcuggcuuugc

SEQ ID NO: 710023 - RNA, 24 nt, Human
caaggcgggcagaucacuugaggu

SEQ ID NO: 710024 - RNA, 21 nt, Human
caccuuauucucuggugucca

SEQ ID NO: 710025 - RNA, 24 nt, Human
cacgccuguaaucccagcacuuug

SEQ ID NO: 710026 - RNA, 23 nt, Human
cacuccagccugggcaacaagag

SEQ ID NO: 710027 - RNA, 23 nt, Human
cacuccagccugggcaacaagag

SEQ ID NO: 710028 - RNA, 25 nt, Human
cacuccagccugggcaacaagagug

SEQ ID NO: 710029 - RNA, 19 nt, Human
cacuggagugaagaaacca

SEQ ID NO: 710030 - RNA, 22 nt, Human
cagacccacuguagaggccaca

SEQ ID NO: 710031 - RNA, 20 nt, Human
cagagauggcuauaaacacc

SEQ ID NO: 710032 - RNA, 24 nt, Human
cagaucacuugaggucgggaguuu

SEQ ID NO: 710033 - RNA, 20 nt, Human
cagcacaaggccaacaacaa

SEQ ID NO: 710034 - RNA, 22 nt, Human
cagcacaaggccaacaacaaaa

SEQ ID NO: 710035 - RNA, 24 nt, Human
cagcacuuugggaggccaaggcgg

SEQ ID NO: 710036 - RNA, 20 nt, Human
cagcagaaccugugucaagu

SEQ ID NO: 710037 - RNA, 25 nt, Human
cagcagugacaacucagcagaaccu

SEQ ID NO: 710038 - RNA, 22 nt, Human
cagcccagguccuauuccaucc

SEQ ID NO: 710039 - RNA, 24 nt, Human
cagccugaccaacauggagaaacc

SEQ ID NO: 710040 - RNA, 29 nt, Human
caggagguggagguugcagugacaacggu

SEQ ID NO: 710041 - RNA, 24 nt, Human
caggagguggagguugcagugagc

SEQ ID NO: 710042 - RNA, 20 nt, Human
caggauggaaaguggaggca

SEQ ID NO: 710043 - RNA, 23 nt, Human
cagucacaggggggagaaagccc

SEQ ID NO: 710044 - RNA, 25 nt, Human
cauccuguucaguauccuccucacu

SEQ ID NO: 710045 - RNA, 19 nt, Human
caugcaagccccaggcugg

SEQ ID NO: 710046 - RNA, 19 nt, Human
cauugcacuccagccuggg

SEQ ID NO: 710047 - RNA, 21 nt, Human
cauugcacuccagccugggca

SEQ ID NO: 710048 - RNA, 22 nt, Human
cauugcacuccagccugggcaa

SEQ ID NO: 710049 - RNA, 24 nt, Human
cauugcacuccagccugggcaaca

SEQ ID NO: 710050 - RNA, 21 nt, Human
ccacccaaccugagcuuggca

SEQ ID NO: 710051 - RNA, 27 nt, Human
ccaccucuucucucuucucaauagaaa

SEQ ID NO: 710052 - RNA, 20 nt, Human
ccaggagguggagguugcag

SEQ ID NO: 710053 - RNA, 20 nt, Human
ccauugcacuccagccuggg

SEQ ID NO: 710054 - RNA, 21 nt, Human
ccauugcacuccagccugggc

SEQ ID NO: 710055 - RNA, 23 nt, Human
ccauugcacuccagccugggcaa

SEQ ID NO: 710056 - RNA, 24 nt, Human
ccauugcacuccagccugggcaac

SEQ ID NO: 710057 - RNA, 18 nt, Human
ccccauggcugucccagg

SEQ ID NO: 710058 - RNA, 21 nt, Human
cccuccccgcuccacuuucuc

SEQ ID NO: 710059 - RNA, 20 nt, Human
cccuugggcaucagcauggg

SEQ ID NO: 710060 - RNA, 19 nt, Human
ccuacaacuaucugaagag

SEQ ID NO: 710061 - RNA, 24 nt, Human
ccugaccaacauggagaaacccca

SEQ ID NO: 710062 - RNA, 22 nt, Human
ccuuuaugcucuggguccuuca

SEQ ID NO: 710063 - RNA, 24 nt, Human
cgagauggugccauugcacuccag

SEQ ID NO: 710064 - RNA, 22 nt, Human
cgcaguagccgcuugguggccu

SEQ ID NO: 710065 - RNA, 23 nt, Human
cgccuguaaucccaacuacuugg

SEQ ID NO: 710066 - RNA, 24 nt, Human
cgccuguaaucccaacuacuuggg

SEQ ID NO: 710067 - RNA, 24 nt, Human
cgccuguaaucccagcacuuuggg

SEQ ID NO: 710068 - RNA, 18 nt, Human
cggauuccugagguccac

SEQ ID NO: 710069 - RNA, 21 nt, Human
cggccuuguuggauugaagau

SEQ ID NO: 710070 - RNA, 18 nt, Human
cgggcagaucacuugagg

SEQ ID NO: 710071 - RNA, 22 nt, Human
cuaagcaccagaauuggauaug

SEQ ID NO: 710072 - RNA, 19 nt, Human
cucaaaaacaacaacaaaa

SEQ ID NO: 710073 - RNA, 22 nt, Human
cucacgccuguaaucccagcac

SEQ ID NO: 710074 - RNA, 24 nt, Human
cucacgccuguaaucccagcacuu

SEQ ID NO: 710075 - RNA, 24 nt, Human
cucugccgggugcgguggcucacg

SEQ ID NO: 710076 - RNA, 20 nt, Human
cuggccuuaagugcacagaa

SEQ ID NO: 710077 - RNA, 21 nt, Human
gaagaugaccagcccaggucc

SEQ ID NO: 710078 - RNA, 22 nt, Human
gagcagcagugacaacucagca

SEQ ID NO: 710079 - RNA, 25 nt, Human
gagcagcagugacaacucagcagaa

SEQ ID NO: 710080 - RNA, 21 nt, Human
gagguugcagugagccgagau

SEQ ID NO: 710081 - RNA, 24 nt, Human
gaucacuugaggucgggaguuuga

SEQ ID NO: 710082 - RNA, 19 nt, Human
gcacagaaccacccaaccu

SEQ ID NO: 710083 - RNA, 19 nt, Human
gcagcacaaggccaacaac

SEQ ID NO: 710084 - RNA, 22 nt, Human
gccauugcacuccagccugggc

SEQ ID NO: 710085 - RNA, 24 nt, Human
gccauugcacuccagccugggcaa

SEQ ID NO: 710086 - RNA, 21 nt, Human
gcucuggguccuucaaaccag

SEQ ID NO: 710087 - RNA, 18 nt, Human
ggagguugcagugagccg

SEQ ID NO: 710088 - RNA, 20 nt, Human
ggagguugcagugagccgag

SEQ ID NO: 710089 - RNA, 22 nt, Human
ggagguugcagugagccgagau

SEQ ID NO: 710090 - RNA, 24 nt, Human
ggagguugcagugagccgagaugg

SEQ ID NO: 710091 - RNA, 19 nt, Human
ggaguuugagaccagccug

SEQ ID NO: 710092 - RNA, 22 nt, Human
ggauucccuccccgcuccacuu

SEQ ID NO: 710093 - RNA, 25 nt, Human
ggcagaucacuugaggucgggaguu

SEQ ID NO: 710094 - RNA, 24 nt, Human
ggcgccuguaaucccaacuacuug

SEQ ID NO: 710095 - RNA, 21 nt, Human
ggcucacgccuguaaucccag

SEQ ID NO: 710096 - RNA, 21 nt, Human
ggggcuuuuugcccuugggca

SEQ ID NO: 710097 - RNA, 24 nt, Human
gggugcgguggcucacgccuguaa

SEQ ID NO: 710098 - RNA, 20 nt, Human
ggucaccccugccugccacc

SEQ ID NO: 710099 - RNA, 19 nt, Human
ggucgggaguuugagacca

SEQ ID NO: 710100 - RNA, 23 nt, Human
gguggcucacgccuguaauccca

SEQ ID NO: 710101 - RNA, 24 nt, Human
gguggcucacgccuguaaucccag

SEQ ID NO: 710102 - RNA, 22 nt, Human
gucacaggggggagaaagccca

SEQ ID NO: 710103 - RNA, 23 nt, Human
gucauugugcagggcaggaaaag

SEQ ID NO: 710104 - RNA, 21 nt, Human
gucccuguuccuaagcaccag

SEQ ID NO: 710105 - RNA, 23 nt, Human
gugaccacuggccuuaagugcac

SEQ ID NO: 710106 - RNA, 21 nt, Human
guggccuguuacucagggcgc

SEQ ID NO: 710107 - RNA, 18 nt, Human
guggugguuggaauguca

SEQ ID NO: 710108 - RNA, 23 nt, Human
guucacuuccuuaaaggaagugg

SEQ ID NO: 710109 - RNA, 24 nt, Human
guugcagugagccgagauggugcc

SEQ ID NO: 710110 - RNA, 20 nt, Human
uaaaaauacaaaauuagcca

SEQ ID NO: 710111 - RNA, 22 nt, Human
uaaaaauacaaaauuagccagg

SEQ ID NO: 710112 - RNA, 23 nt, Human
uaaaaauacaaaauuagccaggu

SEQ ID NO: 710113 - RNA, 19 nt, Human
uaaaacaaggguuugugac

SEQ ID NO: 710114 - RNA, 23 nt, Human
uaaaagcaagaaaaacaaaaagc

SEQ ID NO: 710115 - RNA, 21 nt, Human
uaaacaaacgcagcacaaggc

SEQ ID NO: 710116 - RNA, 20 nt, Human
uaagcuaggauucccucccc

SEQ ID NO: 710117 - RNA, 25 nt, Human
uacagcacagaaccacccaaccuga

SEQ ID NO: 710118 - RNA, 19 nt, Human
uacaguggcagccuccgag

SEQ ID NO: 710119 - RNA, 20 nt, Human
uaccuuccuugcccaggaac

SEQ ID NO: 710120 - RNA, 22 nt, Human
uagaaaauggugcagaagagac

SEQ ID NO: 710121 - RNA, 21 nt, Human
uauaaacaccccacucuuccu

SEQ ID NO: 710122 - RNA, 20 nt, Human
ucaaaaggaaaaaaauaaaa

SEQ ID NO: 710123 - RNA, 25 nt, Human
ucaacaugcaagccccaggcuggcu

SEQ ID NO: 710124 - RNA, 21 nt, Human
ucacccaacgcugccccaaau

SEQ ID NO: 710125 - RNA, 18 nt, Human
ucagucucaaaaacaaca

SEQ ID NO: 710126 - RNA, 23 nt, Human
ucagucucaaaaacaacaacaaa

SEQ ID NO: 710127 - RNA, 21 nt, Human
ucauuauaaaacucugccggg

SEQ ID NO: 710128 - RNA, 22 nt, Human
uccacacgucuguccuauugca

SEQ ID NO: 710129 - RNA, 24 nt, Human
uccagagauggcuauaaacacccc

SEQ ID NO: 710130 - RNA, 19 nt, Human
uccauacagcacagaacca

SEQ ID NO: 710131 - RNA, 22 nt, Human
uccauccauacagcacagaacc

SEQ ID NO: 710132 - RNA, 22 nt, Human
uccuaccuuccuugcccaggaa

SEQ ID NO: 710133 - RNA, 19 nt, Human
uccucauagaaaagggaaa

SEQ ID NO: 710134 - RNA, 23 nt, Human
ucgcuugaaccaggagguggagg

SEQ ID NO: 710135 - RNA, 22 nt, Human
ucuacccaagaaauggcuuacu

SEQ ID NO: 710136 - RNA, 20 nt, Human
ucucuacuaaaaauacaaaa

SEQ ID NO: 710137 - RNA, 18 nt, Human
ucugguguagaaaauggu

SEQ ID NO: 710138 - RNA, 22 nt, Human
ucugguguagaaaauggugcag

SEQ ID NO: 710139 - RNA, 19 nt, Human
ucuuuggcuucucuuuugu

SEQ ID NO: 710140 - RNA, 22 nt, Human
ucuuuuccggauuccugagguc

SEQ ID NO: 710141 - RNA, 24 nt, Human
ugagaccagccugaccaacaugga

SEQ ID NO: 710142 - RNA, 23 nt, Human
ugagagaccuuuaugcucugggu

SEQ ID NO: 710143 - RNA, 22 nt, Human
ugagccgagauggugccauugc

SEQ ID NO: 710144 - RNA, 21 nt, Human
ugagcuuggcaacuacagugg

SEQ ID NO: 710145 - RNA, 18 nt, Human
ugagggccagcaggucac

SEQ ID NO: 710146 - RNA, 18 nt, Human
ugaggucgggaguuugag

SEQ ID NO: 710147 - RNA, 23 nt, Human
ugaguaguucuuauaacagucca

SEQ ID NO: 710148 - RNA, 20 nt, Human
ugagucuggagcagcaguga

SEQ ID NO: 710149 - RNA, 19 nt, Human
ugagugaacugggaaaacu

SEQ ID NO: 710150 - RNA, 19 nt, Human
ugcacuccagccugggcaa

SEQ ID NO: 710151 - RNA, 22 nt, Human
ugcacuccagccugggcaacaa

SEQ ID NO: 710152 - RNA, 20 nt, Human
ugcagaaaaagugcuggugu

SEQ ID NO: 710153 - RNA, 24 nt, Human
ugccauugcacuccagccugggca

SEQ ID NO: 710154 - RNA, 18 nt, Human
uggaaaguggaggcagca

SEQ ID NO: 710155 - RNA, 25 nt, Human
uggaaucaaaaggaaaaaaauaaaa

SEQ ID NO: 710156 - RNA, 18 nt, Human
uggagagaagucuggcca

SEQ ID NO: 710157 - RNA, 23 nt, Human
uggagaggaguuuccuccucuac

SEQ ID NO: 710158 - RNA, 20 nt, Human
uggauaugaacagagaaacc

SEQ ID NO: 710159 - RNA, 21 nt, Human
uggcaagggcagacccacugu

SEQ ID NO: 710160 - RNA, 23 nt, Human
uggcagccuccgagccuagagug

SEQ ID NO: 710161 - RNA, 21 nt, Human
uggccccaagguccugcuugu

SEQ ID NO: 710162 - RNA, 22 nt, Human
uggcucacgccuguaaucccag

SEQ ID NO: 710163 - RNA, 24 nt, Human
uggcucacgccuguaaucccagca

SEQ ID NO: 710164 - RNA, 21 nt, Human
uggcugguggugguuggaaug

SEQ ID NO: 710165 - RNA, 18 nt, Human
uggcuguaaugucuggcu

SEQ ID NO: 710166 - RNA, 20 nt, Human
ugggaaaacugcucuuuggc

SEQ ID NO: 710167 - RNA, 20 nt, Human
ugggaagcugaggccugagg

SEQ ID NO: 710168 - RNA, 18 nt, Human
ugggagaaaagauuggaa

SEQ ID NO: 710169 - RNA, 24 nt, Human
ugggaggccaaggcgggcagauca

SEQ ID NO: 710170 - RNA, 22 nt, Human
ugguagggacaacacuggagug

SEQ ID NO: 710171 - RNA, 25 nt, Human
uggugcagaagagacugcggccggu

SEQ ID NO: 710172 - RNA, 24 nt, Human
ugguggcaggcgccuguaauccca

SEQ ID NO: 710173 - RNA, 25 nt, Human
uguaaacaaacgcagcacaaggcca

SEQ ID NO: 710174 - RNA, 19 nt, Human
uguaagcuucucagucuuu

SEQ ID NO: 710175 - RNA, 19 nt, Human
ugugcagaaaaagugcugg

SEQ ID NO: 710176 - RNA, 20 nt, Human
ugugcagaaaaagugcuggu

SEQ ID NO: 710177 - RNA, 22 nt, Human
ugugggcacuaucugcagaccc

SEQ ID NO: 710178 - RNA, 19 nt, Human
uuaaaggaaguggggcuuu

SEQ ID NO: 710179 - RNA, 25 nt, Human
uucagacccagacaggauggaaagu

SEQ ID NO: 710180 - RNA, 23 nt, Human
uugaaccaggagguggagguugc

SEQ ID NO: 710181 - RNA, 18 nt, Human
uugcagugagccgagaug

SEQ ID NO: 710182 - RNA, 22 nt, Human
uugcagugagccgagauggugc

SEQ ID NO: 710183 - RNA, 24 nt, Human
uugggaagcugaggccugagaauc

SEQ ID NO: 710184 - RNA, 21 nt, Human
uugggcaucagcauggguccc

SEQ ID NO: 710185 - RNA, 18 nt, Human
uuugcuaccacugucaaa

SEQ ID NO: 710186 - RNA, 19 nt, Human
uuuuccggauuccugaggu

SEQ ID NO: 710187 - RNA, 18 nt, Human
uuuuuuguuuuagguucc

SEQ ID NO: 710188 - RNA, 19 nt, Human
aaaagaccccuccgccccu

SEQ ID NO: 710189 - RNA, 20 nt, Human
aagagaaaagggguagguag

SEQ ID NO: 710190 - RNA, 20 nt, Human
aagaggccagaagcggccca

SEQ ID NO: 710191 - RNA, 22 nt, Human
acuguagucuaaagggcaagag

SEQ ID NO: 710192 - RNA, 20 nt, Human
agagaaaagggguagguagg

SEQ ID NO: 710193 - RNA, 19 nt, Human
agagggcagacauccaagc

SEQ ID NO: 710194 - RNA, 19 nt, Human
aggaaagaagaaggaaaag

SEQ ID NO: 710195 - RNA, 23 nt, Human
aggcacagggcaaguuucuguaa

SEQ ID NO: 710196 - RNA, 23 nt, Human
aggccagaagcggcccagaggga

SEQ ID NO: 710197 - RNA, 19 nt, Human
aggggacaaggaaagguag

SEQ ID NO: 710198 - RNA, 21 nt, Human
aggggacaaggaaagguagga

SEQ ID NO: 710199 - RNA, 21 nt, Human
caaggcaggcagccauggucc

SEQ ID NO: 710200 - RNA, 18 nt, Human
cacagaccucugcccauc

SEQ ID NO: 710201 - RNA, 22 nt, Human
cacagaccucugcccauccccu

SEQ ID NO: 710202 - RNA, 18 nt, Human
cagcgaguccccgcagcc

SEQ ID NO: 710203 - RNA, 25 nt, Human
cagcucugaaaagagaaggggcaau

SEQ ID NO: 710204 - RNA, 20 nt, Human
ccagaccaaacacagaccuc

SEQ ID NO: 710205 - RNA, 22 nt, Human
ccagcccaggggacaaggaaag

SEQ ID NO: 710206 - RNA, 23 nt, Human
ccccuuggccuuuggcccauggc

SEQ ID NO: 710207 - RNA, 19 nt, Human
cccgcagccucacucgcca

SEQ ID NO: 710208 - RNA, 21 nt, Human
cccuccgcugcucagcgaguc

SEQ ID NO: 710209 - RNA, 19 nt, Human
cccuuggccuuuggcccau

SEQ ID NO: 710210 - RNA, 22 nt, Human
ccuacggcacggcacggccggg

SEQ ID NO: 710211 - RNA, 20 nt, Human
ccuuuggcccauggcuccaa

SEQ ID NO: 710212 - RNA, 19 nt, Human
cgccugggcaugcugggaa

SEQ ID NO: 710213 - RNA, 20 nt, Human
cggcccagagggagcuaugg

SEQ ID NO: 710214 - RNA, 21 nt, Human
cugugcagccagcccagggga

SEQ ID NO: 710215 - RNA, 21 nt, Human
cuuggccuuuggcccauggcc

SEQ ID NO: 710216 - RNA, 19 nt, Human
gagcuaugguuccucccca

SEQ ID NO: 710217 - RNA, 20 nt, Human
gcagccagcccaggggacaa

SEQ ID NO: 710218 - RNA, 20 nt, Human
gcccauggcuccaagaggcc

SEQ ID NO: 710219 - RNA, 21 nt, Human
gggccagcucugaaaagagaa

SEQ ID NO: 710220 - RNA, 21 nt, Human
ggggaacugggccagaccaaa

SEQ ID NO: 710221 - RNA, 19 nt, Human
uaugguuccuccccaaggc

SEQ ID NO: 710222 - RNA, 22 nt, Human
uccaagaggccagaagcggccc

SEQ ID NO: 710223 - RNA, 26 nt, Human
uccccuuggccuuuggcccauggcuc

SEQ ID NO: 710224 - RNA, 22 nt, Human
uccgcugcucagcgaguccccg

SEQ ID NO: 710225 - RNA, 23 nt, Human
uccucugugcagccagcccaggg

SEQ ID NO: 710226 - RNA, 21 nt, Human
ucugugcagccagcccagggg

SEQ ID NO: 710227 - RNA, 26 nt, Human
ugggagcccugcgauccgauguggcg

SEQ ID NO: 710228 - RNA, 19 nt, Human
ugggggacacaggcacagg

SEQ ID NO: 710229 - RNA, 25 nt, Human
ugggggacacaggcacagggcaagg

SEQ ID NO: 710230 - RNA, 19 nt, Human
ugggguagagggcagacau

SEQ ID NO: 710231 - RNA, 18 nt, Human
aaauacuguaucuuugaa

SEQ ID NO: 710232 - RNA, 22 nt, Human
caaguacauuaaaacaaaucuu

SEQ ID NO: 710233 - RNA, 18 nt, Human
ccacagguaaagguccaa

SEQ ID NO: 710234 - RNA, 23 nt, Human
cuccugggacaccgccacugcuu

SEQ ID NO: 710235 - RNA, 21 nt, Human
cuuuaauaaaaaauacaaaaa

SEQ ID NO: 710236 - RNA, 24 nt, Human
gaguucuguuuuuuccgguuccuc

SEQ ID NO: 710237 - RNA, 20 nt, Human
ggccaguguugccuccacag

SEQ ID NO: 710238 - RNA, 21 nt, Human
ucaagauagacucuuucaaac

SEQ ID NO: 710239 - RNA, 22 nt, Human
ucuaagacuuuccucuucuugg

SEQ ID NO: 710240 - RNA, 23 nt, Human
ugccuccacagguaaagggggaa

SEQ ID NO: 710241 - RNA, 22 nt, Human
uuggccaguguugccuccacag

SEQ ID NO: 710242 - RNA, 19 nt, Human
aaacaaacaggcacguugg

SEQ ID NO: 710243 - RNA, 24 nt, Human
acccccucugcccuccccucuccu

SEQ ID NO: 710244 - RNA, 19 nt, Human
aggcacguugguaguuggc

SEQ ID NO: 710245 - RNA, 22 nt, Human
aguacccucacccccucugccc

SEQ ID NO: 710246 - RNA, 19 nt, Human
cagaauaguacccucaccc

SEQ ID NO: 710247 - RNA, 21 nt, Human
cccucacccccucugcccucc

SEQ ID NO: 710248 - RNA, 18 nt, Human
ccuccugcugcugacuuc

SEQ ID NO: 710249 - RNA, 20 nt, Human
ccuccugcugcugacuucuc

SEQ ID NO: 710250 - RNA, 19 nt, Human
cucacccccucugcccucc

SEQ ID NO: 710251 - RNA, 19 nt, Human
cuccuagauggucaccaua

SEQ ID NO: 710252 - RNA, 18 nt, Human
gaaguucuucaagggcac

SEQ ID NO: 710253 - RNA, 20 nt, Human
gagacgccugagcgccguaa

SEQ ID NO: 710254 - RNA, 18 nt, Human
gauuaggaaguucuucaa

SEQ ID NO: 710255 - RNA, 22 nt, Human
uauaaagaauggauauagguuu

SEQ ID NO: 710256 - RNA, 19 nt, Human
uauagguuuucucaauccu

SEQ ID NO: 710257 - RNA, 24 nt, Human
uauauacauuuauaaguguacaua

SEQ ID NO: 710258 - RNA, 21 nt, Human
uaugauggagagaaggaaaga

SEQ ID NO: 710259 - RNA, 24 nt, Human
uaugauguauuuuauguacaugga

SEQ ID NO: 710260 - RNA, 18 nt, Human
ucaauccagaauaguacc

SEQ ID NO: 710261 - RNA, 22 nt, Human
ugagcacggagcuucagggcgc

SEQ ID NO: 710262 - RNA, 23 nt, Human
ugcugcugacuucuccauaguga

SEQ ID NO: 710263 - RNA, 20 nt, Human
uggaaaauuuucuacaagag

SEQ ID NO: 710264 - RNA, 24 nt, Human
uguacauaugauguauuuuaugua

SEQ ID NO: 710265 - RNA, 18 nt, Human
uuccuuggcgucuccuga

SEQ ID NO: 710266 - RNA, 21 nt, Human
aaagcuccagcucuaccuucc

SEQ ID NO: 710267 - RNA, 21 nt, Human
accuuccccugaccccaaguc

SEQ ID NO: 710268 - RNA, 20 nt, Human
agcaagggacgcggcacaga

SEQ ID NO: 710269 - RNA, 21 nt, Human
caagggacgcggcacagacgc

SEQ ID NO: 710270 - RNA, 22 nt, Human
ccucagaaguccaccggggucc

SEQ ID NO: 710271 - RNA, 22 nt, Human
uaaaagcuccagcucuaccuuc

SEQ ID NO: 710272 - RNA, 22 nt, Human
uccccugaccccaagucuaggg

SEQ ID NO: 710273 - RNA, 23 nt, Human
ucuguaaaagcuccagcucuacc

SEQ ID NO: 710274 - RNA, 22 nt, Human
aaaaaaaaaccccacaucucag

SEQ ID NO: 710275 - RNA, 18 nt, Human
aaaaacacaaaaaauggc

SEQ ID NO: 710276 - RNA, 22 nt, Human
aaagaaaauaauuuaaaaacac

SEQ ID NO: 710277 - RNA, 19 nt, Human
aacuuaauaaaaagaacau

SEQ ID NO: 710278 - RNA, 22 nt, Human
aagaauacagggaaaaaacagc

SEQ ID NO: 710279 - RNA, 24 nt, Human
aagccuuauuagucucucaacgau

SEQ ID NO: 710280 - RNA, 20 nt, Human
aagugaucaguauucuggaa

SEQ ID NO: 710281 - RNA, 23 nt, Human
aaugauaagugaacugaaaaaaa

SEQ ID NO: 710282 - RNA, 20 nt, Human
aauuacaaaauuuccacaaa

SEQ ID NO: 710283 - RNA, 26 nt, Human
acacaaugauguuguguaaaagguua

SEQ ID NO: 710284 - RNA, 18 nt, Human
acagauggguauucucca

SEQ ID NO: 710285 - RNA, 21 nt, Human
accaaaaacuccagucugugg

SEQ ID NO: 710286 - RNA, 18 nt, Human
agaaaccaccaaaaugau

SEQ ID NO: 710287 - RNA, 21 nt, Human
agagccugaagugaggacuag

SEQ ID NO: 710288 - RNA, 20 nt, Human
agauuuauggcccacagccc

SEQ ID NO: 710289 - RNA, 18 nt, Human
agcagcuuguuguagacg

SEQ ID NO: 710290 - RNA, 24 nt, Human
aggaagacuguacaggguguguug

SEQ ID NO: 710291 - RNA, 19 nt, Human
aggcccccgggccacagcu

SEQ ID NO: 710292 - RNA, 20 nt, Human
aggcccccgggccacagcuc

SEQ ID NO: 710293 - RNA, 23 nt, Human
agggaaaaaacagccagucaggg

SEQ ID NO: 710294 - RNA, 25 nt, Human
agucauucagcauguagauacuaaa

SEQ ID NO: 710295 - RNA, 21 nt, Human
agucugugggaagugcacaga

SEQ ID NO: 710296 - RNA, 29 nt, Human
caaaauuuccacaaacacagcagucuucc

SEQ ID NO: 710297 - RNA, 18 nt, Human
cacagacuucacuucugu

SEQ ID NO: 710298 - RNA, 22 nt, Human
caccaaaaacuccagucugugg

SEQ ID NO: 710299 - RNA, 25 nt, Human
caccaaaaacuccagucugugggaa

SEQ ID NO: 710300 - RNA, 25 nt, Human
caccaaacccccaauuuuuuagcaa

SEQ ID NO: 710301 - RNA, 21 nt, Human
cacuuccggacaaguugggaa

SEQ ID NO: 710302 - RNA, 21 nt, Human
cauaggcaaacaugugguguu

SEQ ID NO: 710303 - RNA, 21 nt, Human
ccacaaacacagcagucuucc

SEQ ID NO: 710304 - RNA, 22 nt, Human
ccacagccccuauuaccaccua

SEQ ID NO: 710305 - RNA, 23 nt, Human
ccagaagaggcccccgggccaca

SEQ ID NO: 710306 - RNA, 24 nt, Human
ccaugaucauacuggguaauuauu

SEQ ID NO: 710307 - RNA, 20 nt, Human
cccacagccccuauuaccac

SEQ ID NO: 710308 - RNA, 21 nt, Human
cccucuuuuccuucccucuuc

SEQ ID NO: 710309 - RNA, 21 nt, Human
ccucaaaaaaaaaaagugauc

SEQ ID NO: 710310 - RNA, 21 nt, Human
ccugguccagaagaggccccc

SEQ ID NO: 710311 - RNA, 21 nt, Human
cugaaaaaaaaaaaaccccac

SEQ ID NO: 710312 - RNA, 22 nt, Human
cuggcucuauucagcaccaaaa

SEQ ID NO: 710313 - RNA, 25 nt, Human
cuuaauaaaaagaacaugaucuucu

SEQ ID NO: 710314 - RNA, 21 nt, Human
gaaaaaacagccagucagggg

SEQ ID NO: 710315 - RNA, 19 nt, Human
gacuugcccucuuuuccuu

SEQ ID NO: 710316 - RNA, 23 nt, Human
gaggcccccgggccacagcucuu

SEQ ID NO: 710317 - RNA, 18 nt, Human
gaggguguggaauuuuug

SEQ ID NO: 710318 - RNA, 20 nt, Human
gcccucuuuuccuucccucu

SEQ ID NO: 710319 - RNA, 21 nt, Human
gugaacugaaaaaaaaaaaac

SEQ ID NO: 710320 - RNA, 19 nt, Human
guuguagacgaucuccuuc

SEQ ID NO: 710321 - RNA, 22 nt, Human
uaaaaagaacaugaucuucuuu

SEQ ID NO: 710322 - RNA, 19 nt, Human
uaaaaauauacuguagugu

SEQ ID NO: 710323 - RNA, 20 nt, Human
uaacaagauaaagaaaauaa

SEQ ID NO: 710324 - RNA, 22 nt, Human
uaacacagaaaccaccaaaaug

SEQ ID NO: 710325 - RNA, 30 nt, Human
uacaaagcccaaaaucacuauaauaaagag

SEQ ID NO: 710326 - RNA, 26 nt, Human
uacacacaacaaucagauuucuucac

SEQ ID NO: 710327 - RNA, 21 nt, Human
uaccuuucacucuauaaacuu

SEQ ID NO: 710328 - RNA, 21 nt, Human
uagguucaggacuugcccucu

SEQ ID NO: 710329 - RNA, 20 nt, Human
uauuaccaccuaaauccagc

SEQ ID NO: 710330 - RNA, 18 nt, Human
ucaacccagaagauaccu

SEQ ID NO: 710331 - RNA, 24 nt, Human
ucagcaccaaaaacuccagucugu

SEQ ID NO: 710332 - RNA, 22 nt, Human
ucauaggcaaacaugugguguu

SEQ ID NO: 710333 - RNA, 22 nt, Human
uccacaaacacagcagucuucc

SEQ ID NO: 710334 - RNA, 24 nt, Human
uccacaaacacagcagucuuccau

SEQ ID NO: 710335 - RNA, 19 nt, Human
ucuacaguuuauacacucu

SEQ ID NO: 710336 - RNA, 20 nt, Human
ucuccagacccaagguucuc

SEQ ID NO: 710337 - RNA, 23 nt, Human
ugaaaaaaaaaaaaccccacauc

SEQ ID NO: 710338 - RNA, 26 nt, Human
ugaaaaaaaaaaaaccccacaucuca

SEQ ID NO: 710339 - RNA, 18 nt, Human
ugaaaagagccugaagug

SEQ ID NO: 710340 - RNA, 22 nt, Human
ugaacugaaaaaaaaaaaaccc

SEQ ID NO: 710341 - RNA, 24 nt, Human
ugaacugaaaaaaaaaaaacccca

SEQ ID NO: 710342 - RNA, 19 nt, Human
ugagagcucagcagaggca

SEQ ID NO: 710343 - RNA, 21 nt, Human
ugcauuugaucugggccagcu

SEQ ID NO: 710344 - RNA, 22 nt, Human
ugccucaaaaaaaaaaagugau

SEQ ID NO: 710345 - RNA, 23 nt, Human
uggaauuuuugaugaaaagagcc

SEQ ID NO: 710346 - RNA, 22 nt, Human
uguagauacuaaaaauauacug

SEQ ID NO: 710347 - RNA, 21 nt, Human
ugugcuuaggucuguauucag

SEQ ID NO: 710348 - RNA, 27 nt, Human
uguggaaugcagacuaacgagaucuaa

SEQ ID NO: 710349 - RNA, 23 nt, Human
uguuguagacgaucuccuucugc

SEQ ID NO: 710350 - RNA, 20 nt, Human
uguuguugcuguuuauuuuu

SEQ ID NO: 710351 - RNA, 21 nt, Human
uuaaacuaguuacacaacuga

SEQ ID NO: 710352 - RNA, 21 nt, Human
uuuccacaaacacagcagucu

SEQ ID NO: 710353 - RNA, 21 nt, Human
aacucccuccuucccacccug

SEQ ID NO: 710354 - RNA, 18 nt, Human
aagagggcucccaggauc

SEQ ID NO: 710355 - RNA, 23 nt, Human
aagcuacugcccagcucccccuc

SEQ ID NO: 710356 - RNA, 20 nt, Human
aaggaaaugggagugaccac

SEQ ID NO: 710357 - RNA, 24 nt, Human
aaggagacaagaaaauggucucca

SEQ ID NO: 710358 - RNA, 24 nt, Human
acaaccacaggugcccacccccac

SEQ ID NO: 710359 - RNA, 27 nt, Human
acaaccacaggugcccacccccacccc

SEQ ID NO: 710360 - RNA, 19 nt, Human
accacuuaacgacaaacaa

SEQ ID NO: 710361 - RNA, 20 nt, Human
agacaagaaaauggucucca

SEQ ID NO: 710362 - RNA, 20 nt, Human
agagaacagcagagcccaca

SEQ ID NO: 710363 - RNA, 18 nt, Human
agaguuugcccaaacucc

SEQ ID NO: 710364 - RNA, 26 nt, Human
agccagcacugugggccccaggugga

SEQ ID NO: 710365 - RNA, 19 nt, Human
aggaagggaaaggguagua

SEQ ID NO: 710366 - RNA, 23 nt, Human
agggggaagaagccagcacugug

SEQ ID NO: 710367 - RNA, 21 nt, Human
agucccacgugcccuaggcac

SEQ ID NO: 710368 - RNA, 20 nt, Human
caaaccccuggagguacccu

SEQ ID NO: 710369 - RNA, 21 nt, Human
caaacucccuccuucccaccc

SEQ ID NO: 710370 - RNA, 25 nt, Human
caacuccauacucaguacgaaaaga

SEQ ID NO: 710371 - RNA, 19 nt, Human
caagccagcccggguccgc

SEQ ID NO: 710372 - RNA, 22 nt, Human
caagccagcccggguccgccag

SEQ ID NO: 710373 - RNA, 20 nt, Human
cacccacucagggauggcca

SEQ ID NO: 710374 - RNA, 19 nt, Human
cacccccaccccaagcuac

SEQ ID NO: 710375 - RNA, 24 nt, Human
cacccccaccccaagcuacugccc

SEQ ID NO: 710376 - RNA, 19 nt, Human
cagaauucugccaagaccc

SEQ ID NO: 710377 - RNA, 23 nt, Human
cagagcccacagcucugccacuc

SEQ ID NO: 710378 - RNA, 21 nt, Human
cagcacugugggccccaggug

SEQ ID NO: 710379 - RNA, 22 nt, Human
cagcacugugggccccaggugg

SEQ ID NO: 710380 - RNA, 24 nt, Human
cagcagagcccacagcucugccac

SEQ ID NO: 710381 - RNA, 26 nt, Human
cagggcccugccugagcucuucaggg

SEQ ID NO: 710382 - RNA, 19 nt, Human
caggugcaaugcuccccag

SEQ ID NO: 710383 - RNA, 18 nt, Human
caggugcccacccccacc

SEQ ID NO: 710384 - RNA, 21 nt, Human
ccacccacuccucaugccagg

SEQ ID NO: 710385 - RNA, 26 nt, Human
ccacccacuccucaugccaggugcaa

SEQ ID NO: 710386 - RNA, 18 nt, Human
ccacgugcccuaggcacu

SEQ ID NO: 710387 - RNA, 27 nt, Human
cccacccccaccccaagcuacugccca

SEQ ID NO: 710388 - RNA, 18 nt, Human
cccacgugcccuaggcac

SEQ ID NO: 710389 - RNA, 22 nt, Human
cccacuccucaugccaggugca

SEQ ID NO: 710390 - RNA, 22 nt, Human
cccagaaggaacaugaguguuc

SEQ ID NO: 710391 - RNA, 21 nt, Human
ccccaagcuacugcccagcuc

SEQ ID NO: 710392 - RNA, 19 nt, Human
ccccacaagccagcccggg

SEQ ID NO: 710393 - RNA, 22 nt, Human
ccccacaagccagcccgggucu

SEQ ID NO: 710394 - RNA, 24 nt, Human
cccccaccccaagcuacugcccag

SEQ ID NO: 710395 - RNA, 23 nt, Human
ccgccgcugccagagccgccgcc

SEQ ID NO: 710396 - RNA, 18 nt, Human
ccucagggcagugcaugg

SEQ ID NO: 710397 - RNA, 25 nt, Human
ccucaugccaggugcaaugcucccc

SEQ ID NO: 710398 - RNA, 19 nt, Human
ccuucaggcugaguccugg

SEQ ID NO: 710399 - RNA, 23 nt, Human
cgaaaagagggcucccaggaucu

SEQ ID NO: 710400 - RNA, 25 nt, Human
cgacaaacaaaagcagauuguaccu

SEQ ID NO: 710401 - RNA, 20 nt, Human
cuaggcacugaccucauacc

SEQ ID NO: 710402 - RNA, 24 nt, Human
cucccuccuucccacccugcugga

SEQ ID NO: 710403 - RNA, 20 nt, Human
cucugggcuaggaagaacuc

SEQ ID NO: 710404 - RNA, 19 nt, Human
cugaaggacccccauggug

SEQ ID NO: 710405 - RNA, 28 nt, Human
cugcaagacacacugauauacccaauuu

SEQ ID NO: 710406 - RNA, 19 nt, Human
cugccacucugauaugucc

SEQ ID NO: 710407 - RNA, 19 nt, Human
cugccacucugauaugucc

SEQ ID NO: 710408 - RNA, 20 nt, Human
gaagaaaaaggaagggaaag

SEQ ID NO: 710409 - RNA, 27 nt, Human
gaagaagccagcacugugggccccagg

SEQ ID NO: 710410 - RNA, 18 nt, Human
gaccucauaccugccuca

SEQ ID NO: 710411 - RNA, 18 nt, Human
gagcagcuuccuucaggc

SEQ ID NO: 710412 - RNA, 20 nt, Human
gagccgccgccuccucccuc

SEQ ID NO: 710413 - RNA, 20 nt, Human
gccagcacugugggccccag

SEQ ID NO: 710414 - RNA, 23 nt, Human
gcccaaacucccuccuucccacc

SEQ ID NO: 710415 - RNA, 24 nt, Human
gcccaaacucccuccuucccaccc

SEQ ID NO: 710416 - RNA, 20 nt, Human
gccgacacugucgccgccgc

SEQ ID NO: 710417 - RNA, 18 nt, Human
gccucaggagcagcuucc

SEQ ID NO: 710418 - RNA, 20 nt, Human
gcucugggcuaggaagaacu

SEQ ID NO: 710419 - RNA, 23 nt, Human
ggaagaaaaaggaagggaaaggg

SEQ ID NO: 710420 - RNA, 19 nt, Human
ggaagaagccagcacugug

SEQ ID NO: 710421 - RNA, 21 nt, Human
ggagcggagggggggucaggc

SEQ ID NO: 710422 - RNA, 21 nt, Human
ggccccagguggccccaucuc

SEQ ID NO: 710423 - RNA, 18 nt, Human
gggaaggagacaagaaaa

SEQ ID NO: 710424 - RNA, 21 nt, Human
gggagcugcacuucaagcuca

SEQ ID NO: 710425 - RNA, 18 nt, Human
gggauggggcccuaggga

SEQ ID NO: 710426 - RNA, 23 nt, Human
gggcauggcuacccucagggcag

SEQ ID NO: 710427 - RNA, 19 nt, Human
ggggggucaggccgacacu

SEQ ID NO: 710428 - RNA, 18 nt, Human
uaaaaaguugggcaaagc

SEQ ID NO: 710429 - RNA, 18 nt, Human
uaaaggaaaugggaguga

SEQ ID NO: 710430 - RNA, 20 nt, Human
uacaggaugcaggagagaac

SEQ ID NO: 710431 - RNA, 19 nt, Human
uaggaagaacuccagggaa

SEQ ID NO: 710432 - RNA, 19 nt, Human
uaggauggcucuacaacuc

SEQ ID NO: 710433 - RNA, 21 nt, Human
uagggaagaaaaaggaaggga

SEQ ID NO: 710434 - RNA, 18 nt, Human
uauggcagacagcggugc

SEQ ID NO: 710435 - RNA, 20 nt, Human
ucaagagggggaagaagcca

SEQ ID NO: 710436 - RNA, 21 nt, Human
ucaggagcagcuuccuucagg

SEQ ID NO: 710437 - RNA, 20 nt, Human
uccauacucaguacgaaaag

SEQ ID NO: 710438 - RNA, 22 nt, Human
ucccacgugcccuaggcacuga

SEQ ID NO: 710439 - RNA, 24 nt, Human
ucgccgccgcugccagagccgccg

SEQ ID NO: 710440 - RNA, 27 nt, Human
ucgccgccgcugccagagccgccgccu

SEQ ID NO: 710441 - RNA, 24 nt, Human
ucuccacccacucagggauggccc

SEQ ID NO: 710442 - RNA, 25 nt, Human
ucugcaagacacacugaggucguaa

SEQ ID NO: 710443 - RNA, 28 nt, Human
ucugcaagacacacugauauacccagaa

SEQ ID NO: 710444 - RNA, 24 nt, Human
ucugggcuaggaagaaccgggguc

SEQ ID NO: 710445 - RNA, 19 nt, Human
ucuguguugucggccaaga

SEQ ID NO: 710446 - RNA, 20 nt, Human
ugagcucuucaggggaugga

SEQ ID NO: 710447 - RNA, 19 nt, Human
ugaggggagagagcgagcu

SEQ ID NO: 710448 - RNA, 24 nt, Human
ugagucuacaggaugcaggagaga

SEQ ID NO: 710449 - RNA, 24 nt, Human
ugcccacccccaccccaagcuacu

SEQ ID NO: 710450 - RNA, 18 nt, Human
ugcuggggccccugcugc

SEQ ID NO: 710451 - RNA, 24 nt, Human
ugcuggggccccugcugcuguggg

SEQ ID NO: 710452 - RNA, 19 nt, Human
uggcacugggauggggccc

SEQ ID NO: 710453 - RNA, 20 nt, Human
uggcacugggauggggcccu

SEQ ID NO: 710454 - RNA, 19 nt, Human
uggcaggggaaaguuccca

SEQ ID NO: 710455 - RNA, 21 nt, Human
uggccccaucucaggaaugac

SEQ ID NO: 710456 - RNA, 18 nt, Human
uggcuacccucagggcag

SEQ ID NO: 710457 - RNA, 19 nt, Human
uggcugaaggacccccaug

SEQ ID NO: 710458 - RNA, 22 nt, Human
ugggauggggcccuagggagcc

SEQ ID NO: 710459 - RNA, 18 nt, Human
ugggcaaagcaagggcau

SEQ ID NO: 710460 - RNA, 23 nt, Human
uggggguggggagcuggaugcug

SEQ ID NO: 710461 - RNA, 20 nt, Human
ugguaucagggaugagaguu

SEQ ID NO: 710462 - RNA, 25 nt, Human
uuacugcuggggccccugcugcugu

SEQ ID NO: 710463 - RNA, 24 nt, Human
uuauagcagguucuccuggccagc

SEQ ID NO: 710464 - RNA, 22 nt, Human
uucaggggauggagaggaggcc

SEQ ID NO: 710465 - RNA, 25 nt, Human
uucaggggauggagaggaggccacc

SEQ ID NO: 710466 - RNA, 22 nt, Human
uuccugccaucuagcgcugccc

SEQ ID NO: 710467 - RNA, 30 nt, Human
uugcccaaacucccuccuucccacccugcc

SEQ ID NO: 710468 - RNA, 24 nt, Human
uuuguuacugcuggggccccugcu

SEQ ID NO: 710469 - RNA, 23 nt, Human
aaaaccaacacugucaggaaccu

SEQ ID NO: 710470 - RNA, 23 nt, Human
aaacaagagaagagacaggcugu

SEQ ID NO: 710471 - RNA, 24 nt, Human
aaaccagcccccaaaccagcuguu

SEQ ID NO: 710472 - RNA, 22 nt, Human
aaccaacacugucaggaaccug

SEQ ID NO: 710473 - RNA, 18 nt, Human
aaguagcugcaggggaug

SEQ ID NO: 710474 - RNA, 20 nt, Human
acaaggagaggucaagccaa

SEQ ID NO: 710475 - RNA, 21 nt, Human
acacacaacaccagggaaacc

SEQ ID NO: 710476 - RNA, 24 nt, Human
acacacaacaccagggaaaccagc

SEQ ID NO: 710477 - RNA, 18 nt, Human
acccucuggcuggaggag

SEQ ID NO: 710478 - RNA, 19 nt, Human
acccuggcagccucagaac

SEQ ID NO: 710479 - RNA, 23 nt, Human
acgcugcaucuucagggaaagcc

SEQ ID NO: 710480 - RNA, 18 nt, Human
acuaaacaagagaagaga

SEQ ID NO: 710481 - RNA, 18 nt, Human
agcucuccccgcgccccc

SEQ ID NO: 710482 - RNA, 22 nt, Human
aguaacuaaacaagagaagaga

SEQ ID NO: 710483 - RNA, 23 nt, Human
caacaccagggaaaccagccccc

SEQ ID NO: 710484 - RNA, 21 nt, Human
caacacugucaggaaccuggc

SEQ ID NO: 710485 - RNA, 23 nt, Human
cacaacaccagggaaaccagccc

SEQ ID NO: 710486 - RNA, 21 nt, Human
caccuccccuccccaauguca

SEQ ID NO: 710487 - RNA, 22 nt, Human
cagaacccaggggucaggggcu

SEQ ID NO: 710488 - RNA, 25 nt, Human
cagaauuacuucuucauuuccagau

SEQ ID NO: 710489 - RNA, 22 nt, Human
cagcauucccucuccaagguuc

SEQ ID NO: 710490 - RNA, 18 nt, Human
cagccgcuggagcggugg

SEQ ID NO: 710491 - RNA, 18 nt, Human
cagcguaugggaccggcg

SEQ ID NO: 710492 - RNA, 25 nt, Human
cagcuguugguaagaugccuugggu

SEQ ID NO: 710493 - RNA, 19 nt, Human
ccaaguagcugcaggggau

SEQ ID NO: 710494 - RNA, 20 nt, Human
ccagcucuccccgcgccccc

SEQ ID NO: 710495 - RNA, 24 nt, Human
ccccaaaccagcuguugguaagau

SEQ ID NO: 710496 - RNA, 19 nt, Human
ccccaaugucauuuucuuu

SEQ ID NO: 710497 - RNA, 19 nt, Human
cccccaaaccagcuguugg

SEQ ID NO: 710498 - RNA, 20 nt, Human
ccccgccgccgccgccgcgc

SEQ ID NO: 710499 - RNA, 25 nt, Human
ccccgccgccgccgccgcgcguccg

SEQ ID NO: 710500 - RNA, 19 nt, Human
cccgcccagcucuccccgc

SEQ ID NO: 710501 - RNA, 22 nt, Human
cccggucaccuccacgcggccg

SEQ ID NO: 710502 - RNA, 19 nt, Human
ccgacgcgcccccgccgcc

SEQ ID NO: 710503 - RNA, 22 nt, Human
ccgacgcgcccccgccgccgcc

SEQ ID NO: 710504 - RNA, 23 nt, Human
ccgcccagcucuccccgcgcccc

SEQ ID NO: 710505 - RNA, 18 nt, Human
ccgccgccgccgccgcgc

SEQ ID NO: 710506 - RNA, 26 nt, Human
ccgccgccgccgccgcgcguccgccg

SEQ ID NO: 710507 - RNA, 26 nt, Human
ccgccgccgccgccgcgcguccgccg

SEQ ID NO: 710508 - RNA, 19 nt, Human
ccgccgcgcguccgccggc

SEQ ID NO: 710509 - RNA, 20 nt, Human
ccgccgcgcguccgccggcu

SEQ ID NO: 710510 - RNA, 19 nt, Human
ccgccgcgcucucgcucgc

SEQ ID NO: 710511 - RNA, 22 nt, Human
ccggagcccgcggccgccgcgc

SEQ ID NO: 710512 - RNA, 18 nt, Human
ccucccucccagccccuc

SEQ ID NO: 710513 - RNA, 19 nt, Human
ccucccucccagccccucc

SEQ ID NO: 710514 - RNA, 25 nt, Human
ccucuggcuggaggagugguggagc

SEQ ID NO: 710515 - RNA, 19 nt, Human
ccuggcccugggagggcuc

SEQ ID NO: 710516 - RNA, 24 nt, Human
ccuguggcgaggacaggccggggc

SEQ ID NO: 710517 - RNA, 20 nt, Human
ccuugguuuguagcccaggg

SEQ ID NO: 710518 - RNA, 22 nt, Human
cgagcugcaagcgacccuggca

SEQ ID NO: 710519 - RNA, 23 nt, Human
cgauccucccucccagccccucc

SEQ ID NO: 710520 - RNA, 21 nt, Human
cgccgccgccgccgcgcgucc

SEQ ID NO: 710521 - RNA, 18 nt, Human
cgccggagcccgcggccg

SEQ ID NO: 710522 - RNA, 22 nt, Human
cgcgcccccgccgccgccgccg

SEQ ID NO: 710523 - RNA, 22 nt, Human
cggagcaccuccccuccccaau

SEQ ID NO: 710524 - RNA, 21 nt, Human
cggcgcggggaggacuugggc

SEQ ID NO: 710525 - RNA, 20 nt, Human
cguggucgugugucuguccc

SEQ ID NO: 710526 - RNA, 22 nt, Human
cguggucgugugucugucccuc

SEQ ID NO: 710527 - RNA, 22 nt, Human
cuauuuugagaaaagcugggag

SEQ ID NO: 710528 - RNA, 19 nt, Human
cucagaacccaggggucag

SEQ ID NO: 710529 - RNA, 18 nt, Human
cuccccgcgcccccucgg

SEQ ID NO: 710530 - RNA, 26 nt, Human
cucuugcauucuaacacugggucauu

SEQ ID NO: 710531 - RNA, 25 nt, Human
cugggaggcggagcaccuccccucc

SEQ ID NO: 710532 - RNA, 19 nt, Human
gaacagcagccuugguuug

SEQ ID NO: 710533 - RNA, 18 nt, Human
gaacauucugcaaaagua

SEQ ID NO: 710534 - RNA, 23 nt, Human
gaacccaggggucaggggcucau

SEQ ID NO: 710535 - RNA, 21 nt, Human
gaaguaaugugguuuguauga

SEQ ID NO: 710536 - RNA, 20 nt, Human
gagucgaagggguuuaggug

SEQ ID NO: 710537 - RNA, 20 nt, Human
gcagcugacagggcuccugg

SEQ ID NO: 710538 - RNA, 23 nt, Human
gccgagcugcaagcgacccuggc

SEQ ID NO: 710539 - RNA, 19 nt, Human
gcgcccggcgcgcuccggc

SEQ ID NO: 710540 - RNA, 22 nt, Human
gcucucgcucgcugcgcccagc

SEQ ID NO: 710541 - RNA, 18 nt, Human
ggaaaccagcccccaaac

SEQ ID NO: 710542 - RNA, 18 nt, Human
ggaccggcggaggagaag

SEQ ID NO: 710543 - RNA, 18 nt, Human
ggaggagaaggcgcgguc

SEQ ID NO: 710544 - RNA, 19 nt, Human
ggaggagugguggagccag

SEQ ID NO: 710545 - RNA, 19 nt, Human
ggcagccucagaacccagg

SEQ ID NO: 710546 - RNA, 21 nt, Human
ggcggaggagaaggcgcgguc

SEQ ID NO: 710547 - RNA, 20 nt, Human
ggggcucaucgauccucccu

SEQ ID NO: 710548 - RNA, 23 nt, Human
guggagccaggacugggccuuca

SEQ ID NO: 710549 - RNA, 18 nt, Human
guggucgugugucugucc

SEQ ID NO: 710550 - RNA, 22 nt, Human
uaaaauagcacauaacaagggc

SEQ ID NO: 710551 - RNA, 20 nt, Human
uaacacacaacaccagggaa

SEQ ID NO: 710552 - RNA, 23 nt, Human
uaacuaaacaagagaagagacag

SEQ ID NO: 710553 - RNA, 28 nt, Human
uagguaacacacaacaccagggaaacca

SEQ ID NO: 710554 - RNA, 29 nt, Human
uauacacaugauaaacacagcauacaugg

SEQ ID NO: 710555 - RNA, 23 nt, Human
uauugccguaaguaacuaaacaa

SEQ ID NO: 710556 - RNA, 19 nt, Human
ucaaagcagaagagucgaa

SEQ ID NO: 710557 - RNA, 20 nt, Human
ucccagccccuccuaaucaa

SEQ ID NO: 710558 - RNA, 21 nt, Human
ucgcggccccugacagcagcc

SEQ ID NO: 710559 - RNA, 21 nt, Human
ucgugugucugucccuccggc

SEQ ID NO: 710560 - RNA, 19 nt, Human
ugacagggcuccuggaguu

SEQ ID NO: 710561 - RNA, 31 nt, Human
ugaccaauguuacacugauuaaaauagcacc

SEQ ID NO: 710562 - RNA, 23 nt, Human
ugacccgaaugcucccuggaggc

SEQ ID NO: 710563 - RNA, 19 nt, Human
ugagaaaagcugggaggcg

SEQ ID NO: 710564 - RNA, 21 nt, Human
ugagaaaagcugggaggcgga

SEQ ID NO: 710565 - RNA, 19 nt, Human
ugcauucuaacacuggguc

SEQ ID NO: 710566 - RNA, 19 nt, Human
ugccccacacgauguggga

SEQ ID NO: 710567 - RNA, 21 nt, Human
uggaggagugguggagccagg

SEQ ID NO: 710568 - RNA, 18 nt, Human
uggcauuaauacuaacac

SEQ ID NO: 710569 - RNA, 23 nt, Human
ugggaccggcggaggagaaggcg

SEQ ID NO: 710570 - RNA, 20 nt, Human
ugggaggcggagcaccuccc

SEQ ID NO: 710571 - RNA, 23 nt, Human
ugggaugaacagcagccuugguu

SEQ ID NO: 710572 - RNA, 24 nt, Human
ugggcgguggcgccgcguggucgu

SEQ ID NO: 710573 - RNA, 19 nt, Human
uggguggaggcgugggcgg

SEQ ID NO: 710574 - RNA, 18 nt, Human
ugucugucccuccggcga

SEQ ID NO: 710575 - RNA, 23 nt, Human
ugugcaaaaaccaacacugucag

SEQ ID NO: 710576 - RNA, 21 nt, Human
uuaauacuaacacagaauacu

SEQ ID NO: 710577 - RNA, 19 nt, Human
uuccucugaacucaugugc

SEQ ID NO: 710578 - RNA, 21 nt, Human
uuccucugaacucaugugcaa

SEQ ID NO: 710579 - RNA, 25 nt, Human
aaaaaacuagucuaccugcucccac

SEQ ID NO: 710580 - RNA, 21 nt, Human
aaaaacacucgacuacaaagc

SEQ ID NO: 710581 - RNA, 24 nt, Human
aaaacaaaacaaagcaaaaaaaac

SEQ ID NO: 710582 - RNA, 22 nt, Human
aaaacaccagaaugauagagua

SEQ ID NO: 710583 - RNA, 21 nt, Human
aaaacacucgacuacaaagca

SEQ ID NO: 710584 - RNA, 18 nt, Human
aaacaaaacaaagcaaaa

SEQ ID NO: 710585 - RNA, 19 nt, Human
aaacaaaacaaagcaaaaa

SEQ ID NO: 710586 - RNA, 25 nt, Human
aaacagcugggaaacucucuacuuu

SEQ ID NO: 710587 - RNA, 18 nt, Human
aaaccaaacaaaacaaaa

SEQ ID NO: 710588 - RNA, 22 nt, Human
aaaccaaacaaaacaaaacaaa

SEQ ID NO: 710589 - RNA, 25 nt, Human
aaaccaaacaaaacaaaacaaagca

SEQ ID NO: 710590 - RNA, 19 nt, Human
aacaaaguccucaacacaa

SEQ ID NO: 710591 - RNA, 19 nt, Human
aagaagaaugccacuuggu

SEQ ID NO: 710592 - RNA, 20 nt, Human
aagauggugaaaccccaucu

SEQ ID NO: 710593 - RNA, 19 nt, Human
aagcaaaaucugcaaggcg

SEQ ID NO: 710594 - RNA, 19 nt, Human
aagcaaaccaaacucugua

SEQ ID NO: 710595 - RNA, 26 nt, Human
aagcaaaccaaacucuguaaagaaca

SEQ ID NO: 710596 - RNA, 22 nt, Human
aagcaaaugaauauacuuaaau

SEQ ID NO: 710597 - RNA, 19 nt, Human
aauaaaaccgagggcuuaa

SEQ ID NO: 710598 - RNA, 19 nt, Human
aaucauggucaaauauuua

SEQ ID NO: 710599 - RNA, 24 nt, Human
aaugucugcuaguguuuggauaac

SEQ ID NO: 710600 - RNA, 21 nt, Human
acaaaacaaucccagaccucg

SEQ ID NO: 710601 - RNA, 20 nt, Human
acaaagcaaaaaaaacuuuc

SEQ ID NO: 710602 - RNA, 22 nt, Human
acagaaugagacuccauuaaaa

SEQ ID NO: 710603 - RNA, 24 nt, Human
accccaucucuacuaaaaauacaa

SEQ ID NO: 710604 - RNA, 20 nt, Human
accgagaucacgccacugca

SEQ ID NO: 710605 - RNA, 18 nt, Human
acgccacugcacuccagc

SEQ ID NO: 710606 - RNA, 22 nt, Human
acgccacugcacuccagccugg

SEQ ID NO: 710607 - RNA, 18 nt, Human
acugcacuccagccuggg

SEQ ID NO: 710608 - RNA, 24 nt, Human
acugcacuccagccugggugacag

SEQ ID NO: 710609 - RNA, 22 nt, Human
agaauauccaaagaaugucccc

SEQ ID NO: 710610 - RNA, 18 nt, Human
agacaaaauccacgugug

SEQ ID NO: 710611 - RNA, 19 nt, Human
agacaaauaugggcuaaaa

SEQ ID NO: 710612 - RNA, 24 nt, Human
agacgcaguggcaggcaccuguaa

SEQ ID NO: 710613 - RNA, 23 nt, Human
agagguugcagugaaccgagauc

SEQ ID NO: 710614 - RNA, 24 nt, Human
agagguugcagugaaccgagauca

SEQ ID NO: 710615 - RNA, 21 nt, Human
agcauuuugggaggccgaggc

SEQ ID NO: 710616 - RNA, 24 nt, Human
agcauuuugggaggccgaggcggg

SEQ ID NO: 710617 - RNA, 24 nt, Human
agccuggccaagauggugaaaccc

SEQ ID NO: 710618 - RNA, 24 nt, Human
agccugggugacagaaugagacuc

SEQ ID NO: 710619 - RNA, 21 nt, Human
aggaagaaacggagaaagcaa

SEQ ID NO: 710620 - RNA, 23 nt, Human
aggacaggcuugguuuuuuugaa

SEQ ID NO: 710621 - RNA, 21 nt, Human
aggcaggagaaucgcuugaac

SEQ ID NO: 710622 - RNA, 24 nt, Human
aggcaggagaaucgcuugaacaug

SEQ ID NO: 710623 - RNA, 19 nt, Human
aggcaggugacuucugggg

SEQ ID NO: 710624 - RNA, 21 nt, Human
aggccgaggcggguggaccac

SEQ ID NO: 710625 - RNA, 24 nt, Human
aggcggguggaccacaaggucagg

SEQ ID NO: 710626 - RNA, 22 nt, Human
agucuaggcugggcgcguggcu

SEQ ID NO: 710627 - RNA, 20 nt, Human
agugcugcaaauucacauca

SEQ ID NO: 710628 - RNA, 24 nt, Human
aguggcaggcaccuguaaucccag

SEQ ID NO: 710629 - RNA, 21 nt, Human
auagaguaagaaaauagaacu

SEQ ID NO: 710630 - RNA, 24 nt, Human
aucacgccacugcacuccagccug

SEQ ID NO: 710631 - RNA, 20 nt, Human
auccacgugugaaauggagc

SEQ ID NO: 710632 - RNA, 24 nt, Human
auuuuauucacucuaguugagaaa

SEQ ID NO: 710633 - RNA, 23 nt, Human
caauaaaaccgagggcuuaaaaa

SEQ ID NO: 710634 - RNA, 24 nt, Human
caccuguaaucccagcuacucagg

SEQ ID NO: 710635 - RNA, 24 nt, Human
caccuguaaucccagcuacucagg

SEQ ID NO: 710636 - RNA, 18 nt, Human
cacggcaugugaggccug

SEQ ID NO: 710637 - RNA, 18 nt, Human
cacuccagccugggugac

SEQ ID NO: 710638 - RNA, 22 nt, Human
cacuccagccugggugacagaa

SEQ ID NO: 710639 - RNA, 24 nt, Human
cacuccagccugggugacagaaug

SEQ ID NO: 710640 - RNA, 19 nt, Human
cacugcacuccagccuggg

SEQ ID NO: 710641 - RNA, 19 nt, Human
cacugcacuccagccuggg

SEQ ID NO: 710642 - RNA, 22 nt, Human
cacugcacuccagccuggguga

SEQ ID NO: 710643 - RNA, 23 nt, Human
cacugcacuccagccugggugac

SEQ ID NO: 710644 - RNA, 24 nt, Human
cacugcacuccagccugggugaca

SEQ ID NO: 710645 - RNA, 24 nt, Human
cacugcacuccagccugggugaca

SEQ ID NO: 710646 - RNA, 24 nt, Human
cagacacauuuaaaacaaaacaaa

SEQ ID NO: 710647 - RNA, 24 nt, Human
cagacucuuaggcuuugcagugaa

SEQ ID NO: 710648 - RNA, 24 nt, Human
cagauucucaaguucauacucuuc

SEQ ID NO: 710649 - RNA, 24 nt, Human
cagcauuuugggaggccgaggcgg

SEQ ID NO: 710650 - RNA, 24 nt, Human
caugcauguaaucccagcauuuug

SEQ ID NO: 710651 - RNA, 20 nt, Human
cauggaacuugcagaucacc

SEQ ID NO: 710652 - RNA, 25 nt, Human
cauggaacuugcagaucaccuaaua

SEQ ID NO: 710653 - RNA, 19 nt, Human
cauggucaaauauuuauau

SEQ ID NO: 710654 - RNA, 21 nt, Human
cauucaaaucuauuuccaaaa

SEQ ID NO: 710655 - RNA, 21 nt, Human
ccacaaggucaggaguucaag

SEQ ID NO: 710656 - RNA, 24 nt, Human
ccacaaggucaggaguucaagacc

SEQ ID NO: 710657 - RNA, 22 nt, Human
ccacucugcuccagcuguuggu

SEQ ID NO: 710658 - RNA, 20 nt, Human
ccacugcacuccagccuggg

SEQ ID NO: 710659 - RNA, 20 nt, Human
ccacugcacuccagccuggg

SEQ ID NO: 710660 - RNA, 20 nt, Human
ccacugcacuccagccuggg

SEQ ID NO: 710661 - RNA, 21 nt, Human
ccacugcacuccagccugggu

SEQ ID NO: 710662 - RNA, 21 nt, Human
ccacugcacuccagccugggu

SEQ ID NO: 710663 - RNA, 23 nt, Human
ccacugcacuccagccuggguga

SEQ ID NO: 710664 - RNA, 24 nt, Human
ccacugcacuccagccugggugac

SEQ ID NO: 710665 - RNA, 19 nt, Human
ccauuucaaguuuauucuc

SEQ ID NO: 710666 - RNA, 20 nt, Human
cccagaccucggauauaauu

SEQ ID NO: 710667 - RNA, 23 nt, Human
cccagccucacacguuccccggc

SEQ ID NO: 710668 - RNA, 23 nt, Human
ccccggcggaagucuaagcugcu

SEQ ID NO: 710669 - RNA, 19 nt, Human
cccugggcucccagggcuc

SEQ ID NO: 710670 - RNA, 22 nt, Human
ccuaaaucugcuccaauucauu

SEQ ID NO: 710671 - RNA, 21 nt, Human
ccuaaccccugggcucccagg

SEQ ID NO: 710672 - RNA, 24 nt, Human
ccuggccaagauggugaaacccca

SEQ ID NO: 710673 - RNA, 22 nt, Human
ccugggugacagaaugagacuc

SEQ ID NO: 710674 - RNA, 21 nt, Human
ccuguaaucccagcuacucag

SEQ ID NO: 710675 - RNA, 19 nt, Human
ccuuccagcugucguagcc

SEQ ID NO: 710676 - RNA, 26 nt, Human
cgccacugcacuccagccugggugac

SEQ ID NO: 710677 - RNA, 22 nt, Human
cguggcaguggcugucagagcu

SEQ ID NO: 710678 - RNA, 24 nt, Human
cguggcucaugcauguaaucccag

SEQ ID NO: 710679 - RNA, 23 nt, Human
cuagucuaggcugggcgcguggc

SEQ ID NO: 710680 - RNA, 24 nt, Human
cucaugcauguaaucccagcauuu

SEQ ID NO: 710681 - RNA, 21 nt, Human
cuguaaucccagcuacucagg

SEQ ID NO: 710682 - RNA, 24 nt, Human
cugugggcuggagauaaaccaugc

SEQ ID NO: 710683 - RNA, 19 nt, Human
cuuagcagcaggcagucug

SEQ ID NO: 710684 - RNA, 21 nt, Human
cuugcuguuguggagagucca

SEQ ID NO: 710685 - RNA, 23 nt, Human
gaaaaacacucgacuacaaagca

SEQ ID NO: 710686 - RNA, 26 nt, Human
gaaagcaaaugaauauacuuaaauca

SEQ ID NO: 710687 - RNA, 18 nt, Human
gaagaaacggagaaagca

SEQ ID NO: 710688 - RNA, 18 nt, Human
gaaugccacuuggugugu

SEQ ID NO: 710689 - RNA, 21 nt, Human
gacacagaggaggaggcagga

SEQ ID NO: 710690 - RNA, 24 nt, Human
gaccacaaggucaggaguucaaga

SEQ ID NO: 710691 - RNA, 23 nt, Human
gagaucacgccacugcacuccag

SEQ ID NO: 710692 - RNA, 23 nt, Human
gagcuuucuuugcauaaucaugg

SEQ ID NO: 710693 - RNA, 24 nt, Human
gaggcggguggaccacaaggucag

SEQ ID NO: 710694 - RNA, 18 nt, Human
gauagagcuggcuccuag

SEQ ID NO: 710695 - RNA, 22 nt, Human
gcaaggcgucccagccucacac

SEQ ID NO: 710696 - RNA, 22 nt, Human
gcagcaggcagucuguuuaagc

SEQ ID NO: 710697 - RNA, 19 nt, Human
gcagugaaaugucuagacc

SEQ ID NO: 710698 - RNA, 24 nt, Human
gccaagauggugaaaccccaucuc

SEQ ID NO: 710699 - RNA, 19 nt, Human
gccacugcacuccagccug

SEQ ID NO: 710700 - RNA, 24 nt, Human
gccacugcacuccagccuggguga

SEQ ID NO: 710701 - RNA, 20 nt, Human
gcugcaaauucacaucaguc

SEQ ID NO: 710702 - RNA, 21 nt, Human
gcugugggcuggagauaaacc

SEQ ID NO: 710703 - RNA, 25 nt, Human
ggcaauuuuucuaccauguuauuua

SEQ ID NO: 710704 - RNA, 19 nt, Human
ggcaccuguaaucccagcu

SEQ ID NO: 710705 - RNA, 20 nt, Human
ggcagagguugcagugaacc

SEQ ID NO: 710706 - RNA, 20 nt, Human
ggccaagauggugaaacccc

SEQ ID NO: 710707 - RNA, 20 nt, Human
gggaaacucucuacuuuucu

SEQ ID NO: 710708 - RNA, 23 nt, Human
gggcgcguggcucaugcauguaa

SEQ ID NO: 710709 - RNA, 20 nt, Human
gggcugaggcaggagaaucg

SEQ ID NO: 710710 - RNA, 24 nt, Human
gggcugaggcaggagaaucgcuug

SEQ ID NO: 710711 - RNA, 19 nt, Human
ggugacuucuggggccugg

SEQ ID NO: 710712 - RNA, 23 nt, Human
gguggaccacaaggucaggaguu

SEQ ID NO: 710713 - RNA, 19 nt, Human
gguguguguuugugugugu

SEQ ID NO: 710714 - RNA, 26 nt, Human
gguuguuguuuuuaauaugucuaaug

SEQ ID NO: 710715 - RNA, 24 nt, Human
guaaaugcagacaaaauccacgug

SEQ ID NO: 710716 - RNA, 26 nt, Human
gucguagccuccaggugacagguuuc

SEQ ID NO: 710717 - RNA, 24 nt, Human
guggcucaugcauguaaucccagc

SEQ ID NO: 710718 - RNA, 23 nt, Human
guggguguguguuugugugugug

SEQ ID NO: 710719 - RNA, 22 nt, Human
gugucacggcaugugaggccug

SEQ ID NO: 710720 - RNA, 19 nt, Human
guguguguuugugugugug

SEQ ID NO: 710721 - RNA, 21 nt, Human
uaaaaauacaaaaauuagcca

SEQ ID NO: 710722 - RNA, 20 nt, Human
uaaaaugggcaauaaaaccc

SEQ ID NO: 710723 - RNA, 20 nt, Human
uaaacaaagucaaaagcaau

SEQ ID NO: 710724 - RNA, 19 nt, Human
uaacacuguaaauaaugaa

SEQ ID NO: 710725 - RNA, 18 nt, Human
uaaccccugggcucccag

SEQ ID NO: 710726 - RNA, 25 nt, Human
uaagaaaaugcaaugaaaacaccag

SEQ ID NO: 710727 - RNA, 22 nt, Human
uaagccaacaacccaaauaauu

SEQ ID NO: 710728 - RNA, 18 nt, Human
uacauuacuuaaaagccu

SEQ ID NO: 710729 - RNA, 23 nt, Human
uacauuacuuaaaagccugugua

SEQ ID NO: 710730 - RNA, 24 nt, Human
uacucuuccuaucacccuguguac

SEQ ID NO: 710731 - RNA, 23 nt, Human
uagaaagcaaaugaauauacuua

SEQ ID NO: 710732 - RNA, 19 nt, Human
uagagcuggcuccuaggaa

SEQ ID NO: 710733 - RNA, 22 nt, Human
uagaguaagaaaauagaacuga

SEQ ID NO: 710734 - RNA, 24 nt, Human
uaggauuagaaaagaauaauguaa

SEQ ID NO: 710735 - RNA, 24 nt, Human
uagggaggaaacuuagacucguug

SEQ ID NO: 710736 - RNA, 20 nt, Human
uaguggguacucaaaaaugc

SEQ ID NO: 710737 - RNA, 23 nt, Human
ucacgccacugcacuccagccug

SEQ ID NO: 710738 - RNA, 20 nt, Human
ucaugcauguaaucccagca

SEQ ID NO: 710739 - RNA, 18 nt, Human
uccacaaaaaaaaaauga

SEQ ID NO: 710740 - RNA, 24 nt, Human
uccagccugggugacagaaugaga

SEQ ID NO: 710741 - RNA, 23 nt, Human
uccauuaaaaaaaaaaaaaaaaa

SEQ ID NO: 710742 - RNA, 19 nt, Human
ucccagggcucucccuccc

SEQ ID NO: 710743 - RNA, 25 nt, Human
ucccuggaguuccucccgagggucu

SEQ ID NO: 710744 - RNA, 21 nt, Human
ucucuacuaaaaauacaaaaa

SEQ ID NO: 710745 - RNA, 19 nt, Human
ucucuacuuuucuuuuucu

SEQ ID NO: 710746 - RNA, 19 nt, Human
ucugccauucucaggcugg

SEQ ID NO: 710747 - RNA, 26 nt, Human
ugaaaacaccagaaugauuggagacc

SEQ ID NO: 710748 - RNA, 19 nt, Human
ugaaaccccaucucuacua

SEQ ID NO: 710749 - RNA, 19 nt, Human
ugaaagcaaaaucugcaag

SEQ ID NO: 710750 - RNA, 22 nt, Human
ugaaauuacugaaaaggagcug

SEQ ID NO: 710751 - RNA, 23 nt, Human
ugaggcaggagaaucgcuugaac

SEQ ID NO: 710752 - RNA, 20 nt, Human
ugaguacaggucaugaaagc

SEQ ID NO: 710753 - RNA, 22 nt, Human
ugaugcaggcuuugaaaaacac

SEQ ID NO: 710754 - RNA, 22 nt, Human
ugaugcuaagaagaaugccacu

SEQ ID NO: 710755 - RNA, 21 nt, Human
ugaugugguaaaacagcuggg

SEQ ID NO: 710756 - RNA, 23 nt, Human
ugaugugguaaaacagcugggaa

SEQ ID NO: 710757 - RNA, 24 nt, Human
ugcagacaaaauccacgugugaaa

SEQ ID NO: 710758 - RNA, 24 nt, Human
ugcauguaaucccagcauuuuggg

SEQ ID NO: 710759 - RNA, 18 nt, Human
ugccaaggagauaguggg

SEQ ID NO: 710760 - RNA, 21 nt, Human
ugcuccagcuguugguccuug

SEQ ID NO: 710761 - RNA, 22 nt, Human
uggaccacaaggucaggaguuc

SEQ ID NO: 710762 - RNA, 21 nt, Human
uggcucaugcauguaauccca

SEQ ID NO: 710763 - RNA, 22 nt, Human
uggcucaugcauguaaucccag

SEQ ID NO: 710764 - RNA, 24 nt, Human
uggcucaugcauguaaucccagca

SEQ ID NO: 710765 - RNA, 19 nt, Human
ugggaggccgaggcgggug

SEQ ID NO: 710766 - RNA, 24 nt, Human
ugggaggccgaggcggguggacca

SEQ ID NO: 710767 - RNA, 20 nt, Human
uggguuugcauuaaauugug

SEQ ID NO: 710768 - RNA, 24 nt, Human
ugguuugguuuuuauuccuguuug

SEQ ID NO: 710769 - RNA, 19 nt, Human
uguaagcuaaucugcccaa

SEQ ID NO: 710770 - RNA, 23 nt, Human
ugugacacagaggaggaggcagg

SEQ ID NO: 710771 - RNA, 20 nt, Human
ugugaggccugcagagaugu

SEQ ID NO: 710772 - RNA, 22 nt, Human
ugugaguucugugggugugugu

SEQ ID NO: 710773 - RNA, 20 nt, Human
uguggguguguguuugugug

SEQ ID NO: 710774 - RNA, 20 nt, Human
uguguaaacaaagaagauaa

SEQ ID NO: 710775 - RNA, 21 nt, Human
ugugugcauugugcauuuccu

SEQ ID NO: 710776 - RNA, 22 nt, Human
uguuguggagaguccaggccuc

SEQ ID NO: 710777 - RNA, 19 nt, Human
uguuuguguguguguucau

SEQ ID NO: 710778 - RNA, 26 nt, Human
uuaaaaaccaaacaaaacaaaacaaa

SEQ ID NO: 710779 - RNA, 22 nt, Human
uuaaaacaaaacaaaguccuca

SEQ ID NO: 710780 - RNA, 18 nt, Human
uuaguucuuuuccuucuu

SEQ ID NO: 710781 - RNA, 19 nt, Human
uuauuugccccccuaucuu

SEQ ID NO: 710782 - RNA, 18 nt, Human
uucacucuaguugagaaa

SEQ ID NO: 710783 - RNA, 19 nt, Human
uucccuguggcugggagca

SEQ ID NO: 710784 - RNA, 23 nt, Human
uuccuaaccccugggcucccagg

SEQ ID NO: 710785 - RNA, 18 nt, Human
uuccuacuuguugucucu

SEQ ID NO: 710786 - RNA, 20 nt, Human
uucuggggccugggcgccuc

SEQ ID NO: 710787 - RNA, 20 nt, Human
uugcagugaaccgagaucac

SEQ ID NO: 710788 - RNA, 24 nt, Human
uugguguguguguaaacaaagaag

SEQ ID NO: 710789 - RNA, 24 nt, Human
uuguuucuuuaaggccauuuucag

SEQ ID NO: 710790 - RNA, 24 nt, Human
uuucuuugcauaaucauggucaaa

SEQ ID NO: 710791 - RNA, 21 nt, Human
uuuguuagaauacagcaguuc

SEQ ID NO: 710792 - RNA, 20 nt, Human
uuuuguggaugagaagcuga

SEQ ID NO: 710793 - RNA, 20 nt, Human
aaaaaacaaaggucagccca

SEQ ID NO: 710794 - RNA, 21 nt, Human
aaaaauccuccacucaaauac

SEQ ID NO: 710795 - RNA, 20 nt, Human
aaaacaguacaguaaauccc

SEQ ID NO: 710796 - RNA, 19 nt, Human
aaacaaauauaguacacau

SEQ ID NO: 710797 - RNA, 21 nt, Human
aaacauacauucgacaccuuc

SEQ ID NO: 710798 - RNA, 21 nt, Human
aaacccagaguaagaagcuga

SEQ ID NO: 710799 - RNA, 19 nt, Human
aaauauuuggcugagaucg

SEQ ID NO: 710800 - RNA, 22 nt, Human
aacaguacaguaaaucccauuc

SEQ ID NO: 710801 - RNA, 22 nt, Human
aacaguagccccuugcaccccc

SEQ ID NO: 710802 - RNA, 19 nt, Human
aagaaaugugaauuaaaau

SEQ ID NO: 710803 - RNA, 22 nt, Human
aagcaucagaaacacagaugcc

SEQ ID NO: 710804 - RNA, 19 nt, Human
aauguguuugggacuugcu

SEQ ID NO: 710805 - RNA, 21 nt, Human
acaacagugucaccuuaaagc

SEQ ID NO: 710806 - RNA, 21 nt, Human
acaacugcagugagggggaaa

SEQ ID NO: 710807 - RNA, 20 nt, Human
acacucacuccuccacucua

SEQ ID NO: 710808 - RNA, 23 nt, Human
acagaugccacaccccuucagaa

SEQ ID NO: 710809 - RNA, 18 nt, Human
acagcaggaaaaucccag

SEQ ID NO: 710810 - RNA, 20 nt, Human
accaguggaaaaacuaaagu

SEQ ID NO: 710811 - RNA, 21 nt, Human
acccucuugguguggaugcca

SEQ ID NO: 710812 - RNA, 26 nt, Human
agaaccaacaaugccacagguaguua

SEQ ID NO: 710813 - RNA, 21 nt, Human
agaaugaggaauaaaccacca

SEQ ID NO: 710814 - RNA, 24 nt, Human
agcaggaaaaucccagaugaauuu

SEQ ID NO: 710815 - RNA, 22 nt, Human
agcugcaggaagcccuccuaug

SEQ ID NO: 710816 - RNA, 22 nt, Human
aggagugacugcaucuaacaag

SEQ ID NO: 710817 - RNA, 22 nt, Human
agggacaggcccaaaucucaca

SEQ ID NO: 710818 - RNA, 22 nt, Human
aggucagcccacaaucaaagua

SEQ ID NO: 710819 - RNA, 20 nt, Human
aucuaacaagaggacuaaca

SEQ ID NO: 710820 - RNA, 18 nt, Human
augaauuuucugucuugu

SEQ ID NO: 710821 - RNA, 23 nt, Human
caacagugucaccuuaaagcuuc

SEQ ID NO: 710822 - RNA, 24 nt, Human
cacauggcauuugcacaaccaaug

SEQ ID NO: 710823 - RNA, 20 nt, Human
cacccccccacaagugaagc

SEQ ID NO: 710824 - RNA, 22 nt, Human
cacccccccacaagugaagcug

SEQ ID NO: 710825 - RNA, 22 nt, Human
cacccccgcccggcgccggggg

SEQ ID NO: 710826 - RNA, 25 nt, Human
caccggcaccucaucacaacacccu

SEQ ID NO: 710827 - RNA, 22 nt, Human
cacgcaaaguuccaacuccuca

SEQ ID NO: 710828 - RNA, 27 nt, Human
cagaaccaacaaugccacagguaguua

SEQ ID NO: 710829 - RNA, 24 nt, Human
cagaagaaugugccagccacagca

SEQ ID NO: 710830 - RNA, 18 nt, Human
cagaugaauuuucugucu

SEQ ID NO: 710831 - RNA, 27 nt, Human
cagauuuucuaaaguagugguucacau

SEQ ID NO: 710832 - RNA, 20 nt, Human
cagcggcuggcggcggcccc

SEQ ID NO: 710833 - RNA, 21 nt, Human
caguagccccuugcacccccc

SEQ ID NO: 710834 - RNA, 20 nt, Human
caguguaauguguuugggac

SEQ ID NO: 710835 - RNA, 20 nt, Human
caguguaauguguuugggac

SEQ ID NO: 710836 - RNA, 19 nt, Human
cagugucaccuuaaagcuu

SEQ ID NO: 710837 - RNA, 21 nt, Human
caucucauuaugcuacuuacu

SEQ ID NO: 710838 - RNA, 21 nt, Human
ccaauggucgcggccaccccc

SEQ ID NO: 710839 - RNA, 21 nt, Human
ccacugauguauaaacauaca

SEQ ID NO: 710840 - RNA, 23 nt, Human
ccacugauguauaaacauacauu

SEQ ID NO: 710841 - RNA, 24 nt, Human
cccaaaagauugaucagaaaggca

SEQ ID NO: 710842 - RNA, 19 nt, Human
ccccacccccccacaagug

SEQ ID NO: 710843 - RNA, 20 nt, Human
ccccuucccccaccccccca

SEQ ID NO: 710844 - RNA, 20 nt, Human
ccgccccuucccccaccccc

SEQ ID NO: 710845 - RNA, 22 nt, Human
ccgccccuucccccaccccccc

SEQ ID NO: 710846 - RNA, 27 nt, Human
ccgccccuucccccacccccccacaag

SEQ ID NO: 710847 - RNA, 18 nt, Human
ccgggccgaauguagccg

SEQ ID NO: 710848 - RNA, 24 nt, Human
ccuaaggucaccuaagccuagaac

SEQ ID NO: 710849 - RNA, 19 nt, Human
ccugcauuucugagaccgc

SEQ ID NO: 710850 - RNA, 23 nt, Human
cgaaggcauauucugacaacuaa

SEQ ID NO: 710851 - RNA, 18 nt, Human
cgccccuucccccacccc

SEQ ID NO: 710852 - RNA, 21 nt, Human
cggccacccccgcccggcgcc

SEQ ID NO: 710853 - RNA, 21 nt, Human
cuaaacuggcauugagggaca

SEQ ID NO: 710854 - RNA, 18 nt, Human
cuagaaaaaugagaaaaa

SEQ ID NO: 710855 - RNA, 18 nt, Human
cucacaaaguaacuuaaa

SEQ ID NO: 710856 - RNA, 26 nt, Human
cucccuguuaccauacuucauaagaa

SEQ ID NO: 710857 - RNA, 21 nt, Human
cugagaccgccccuuccccca

SEQ ID NO: 710858 - RNA, 25 nt, Human
cugauuguuaaaaaaacaaagguca

SEQ ID NO: 710859 - RNA, 19 nt, Human
cugcacauggcauuugcac

SEQ ID NO: 710860 - RNA, 19 nt, Human
cugcauagaucucagcugc

SEQ ID NO: 710861 - RNA, 23 nt, Human
cugcccaccuccgccuguucagc

SEQ ID NO: 710862 - RNA, 19 nt, Human
cuggcauugagggacaggc

SEQ ID NO: 710863 - RNA, 23 nt, Human
cuggcggcggccccgccccuuuc

SEQ ID NO: 710864 - RNA, 22 nt, Human
cuguguacaaacuuuaacaaag

SEQ ID NO: 710865 - RNA, 28 nt, Human
cuucccccacccccccacaagugaagcu

SEQ ID NO: 710866 - RNA, 23 nt, Human
cuucucagagggucaugcaccuu

SEQ ID NO: 710867 - RNA, 18 nt, Human
gaagcccuccuauggccu

SEQ ID NO: 710868 - RNA, 18 nt, Human
gaauaaucacuggcucuu

SEQ ID NO: 710869 - RNA, 19 nt, Human
gaauguagccgccuggacc

SEQ ID NO: 710870 - RNA, 20 nt, Human
gaccgccccuucccccaccc

SEQ ID NO: 710871 - RNA, 21 nt, Human
gagaaaagaggcuaaaaaugc

SEQ ID NO: 710872 - RNA, 32 nt, Human
gagaccgccccuucccccacccccccacaagg

SEQ ID NO: 710873 - RNA, 20 nt, Human
gaugccauggggccaugcug

SEQ ID NO: 710874 - RNA, 24 nt, Human
gauuguguggaaauuucauaagca

SEQ ID NO: 710875 - RNA, 20 nt, Human
gcaaaguuccaacuccucac

SEQ ID NO: 710876 - RNA, 19 nt, Human
gccccuucccccacccccc

SEQ ID NO: 710877 - RNA, 18 nt, Human
ggccgggccgaauguagc

SEQ ID NO: 710878 - RNA, 22 nt, Human
gggugggaccugggaaccugca

SEQ ID NO: 710879 - RNA, 21 nt, Human
guccugguuuccacgugaacc

SEQ ID NO: 710880 - RNA, 18 nt, Human
gugccagccacagcagga

SEQ ID NO: 710881 - RNA, 25 nt, Human
uaaaaaaacaaaggucagcccacaa

SEQ ID NO: 710882 - RNA, 26 nt, Human
uaaaaaaugcacuaacuagccuaaag

SEQ ID NO: 710883 - RNA, 24 nt, Human
uaaaaggcuagcagauaagaacca

SEQ ID NO: 710884 - RNA, 27 nt, Human
uaaaaggcuagcagauaagaaccagug

SEQ ID NO: 710885 - RNA, 22 nt, Human
uaaaaugaacaauggaccaacu

SEQ ID NO: 710886 - RNA, 20 nt, Human
uaaaaugaacaauggaccac

SEQ ID NO: 710887 - RNA, 25 nt, Human
uaaaaugaacaauggaccacaggug

SEQ ID NO: 710888 - RNA, 25 nt, Human
uaaaaugcuccaaaaauguuuugga

SEQ ID NO: 710889 - RNA, 21 nt, Human
uaaagcacuuauuccagguaa

SEQ ID NO: 710890 - RNA, 18 nt, Human
uaacacguaucaagugcu

SEQ ID NO: 710891 - RNA, 21 nt, Human
uaagcaauuuugaaaaaaaga

SEQ ID NO: 710892 - RNA, 19 nt, Human
uaaucuaggugucucccuc

SEQ ID NO: 710893 - RNA, 22 nt, Human
uacagucaaacaucauguugcc

SEQ ID NO: 710894 - RNA, 25 nt, Human
uacaguuaguagagcagaaacuucu

SEQ ID NO: 710895 - RNA, 19 nt, Human
uaccauacuucauaagaaa

SEQ ID NO: 710896 - RNA, 18 nt, Human
uaccauguuaaugcuggu

SEQ ID NO: 710897 - RNA, 22 nt, Human
uagccccuugcaccccccagug

SEQ ID NO: 710898 - RNA, 19 nt, Human
uaggaggguggauccuagc

SEQ ID NO: 710899 - RNA, 18 nt, Human
uaggguggauuucauuca

SEQ ID NO: 710900 - RNA, 19 nt, Human
ucacagcaggccugaacug

SEQ ID NO: 710901 - RNA, 21 nt, Human
ucacuaggugaccaggaggag

SEQ ID NO: 710902 - RNA, 19 nt, Human
ucagcccagugacuucuca

SEQ ID NO: 710903 - RNA, 22 nt, Human
uccacagaaugaggaauaaacc

SEQ ID NO: 710904 - RNA, 28 nt, Human
uccacagaaugaggaauaaaccaccauu

SEQ ID NO: 710905 - RNA, 19 nt, Human
uccacgugaacccaaaaga

SEQ ID NO: 710906 - RNA, 18 nt, Human
uccagcaaguuuccucac

SEQ ID NO: 710907 - RNA, 25 nt, Human
uccagggaacaccuggaauaaucac

SEQ ID NO: 710908 - RNA, 19 nt, Human
ucccagacucacuugaccu

SEQ ID NO: 710909 - RNA, 19 nt, Human
ucccccacccccccacaag

SEQ ID NO: 710910 - RNA, 20 nt, Human
uccgccaauggucgcggcca

SEQ ID NO: 710911 - RNA, 22 nt, Human
uccgccaauggucgcggccacc

SEQ ID NO: 710912 - RNA, 19 nt, Human
uccuggcucugucccugcu

SEQ ID NO: 710913 - RNA, 23 nt, Human
ucuacaguuaguagagcagaaac

SEQ ID NO: 710914 - RNA, 18 nt, Human
ucugucccugcucacuag

SEQ ID NO: 710915 - RNA, 19 nt, Human
ugaaaaaccacaaguuuag

SEQ ID NO: 710916 - RNA, 22 nt, Human
ugaaaauacgcaaaacacgcaa

SEQ ID NO: 710917 - RNA, 19 nt, Human
ugacuccuggcucuguccc

SEQ ID NO: 710918 - RNA, 23 nt, Human
ugacuucucagagggucaugcac

SEQ ID NO: 710919 - RNA, 22 nt, Human
ugaguggauuaucuaauuaaaa

SEQ ID NO: 710920 - RNA, 21 nt, Human
ugaugagauuacagucaaaca

SEQ ID NO: 710921 - RNA, 20 nt, Human
ugcugcugcaccgaggaccg

SEQ ID NO: 710922 - RNA, 23 nt, Human
uggaauaaucacuggcucuuggg

SEQ ID NO: 710923 - RNA, 21 nt, Human
uggaguggcacuuguugagag

SEQ ID NO: 710924 - RNA, 24 nt, Human
uggaguggcacuuguugagaggau

SEQ ID NO: 710925 - RNA, 18 nt, Human
uggaguguuuugugugcu

SEQ ID NO: 710926 - RNA, 26 nt, Human
uggcacugcacuugacuccuggcucu

SEQ ID NO: 710927 - RNA, 21 nt, Human
ugguguggaugccauggggcc

SEQ ID NO: 710928 - RNA, 21 nt, Human
uguaauguguuugggacuugc

SEQ ID NO: 710929 - RNA, 19 nt, Human
ugucuuguuaccucugagc

SEQ ID NO: 710930 - RNA, 18 nt, Human
uguugagaggauggccug

SEQ ID NO: 710931 - RNA, 24 nt, Human
uuaaagcagauuuucuaaaguagu

SEQ ID NO: 710932 - RNA, 22 nt, Human
uuaaagcuucaucaaagauuca

SEQ ID NO: 710933 - RNA, 24 nt, Human
uuacagcccuuuauauaucuuuua

SEQ ID NO: 710934 - RNA, 19 nt, Human
uucagauauuuguuccaua

SEQ ID NO: 710935 - RNA, 20 nt, Human
uuccacugauguauaaacau

SEQ ID NO: 710936 - RNA, 23 nt, Human
uuccauaaugugcagaauauccu

SEQ ID NO: 710937 - RNA, 22 nt, Human
uucccaugaaaaucuauuuuau

SEQ ID NO: 710938 - RNA, 23 nt, Human
uucccaugaaaaucuauuuuaua

SEQ ID NO: 710939 - RNA, 24 nt, Human
uuugcacaaccaaugagucggagg

SEQ ID NO: 710940 - RNA, 20 nt, Human
uuuuacauucacagauuggc

SEQ ID NO: 710941 - RNA, 23 nt, Human
uuuuuacauucacagauuggcug

SEQ ID NO: 710942 - RNA, 22 nt, Human
aaaaaagcaauuuauaaaggca

SEQ ID NO: 710943 - RNA, 22 nt, Human
aaaacaaacuaguuuuuguuuu

SEQ ID NO: 710944 - RNA, 23 nt, Human
aaagaugacaaauuuuuagauaa

SEQ ID NO: 710945 - RNA, 24 nt, Human
aaagugcugggauuauaggcuuga

SEQ ID NO: 710946 - RNA, 18 nt, Human
aaauagccucaaaaugau

SEQ ID NO: 710947 - RNA, 24 nt, Human
aagacacaaaagaggacuuaaaca

SEQ ID NO: 710948 - RNA, 24 nt, Human
aagcaagagauggaaaaagucaga

SEQ ID NO: 710949 - RNA, 25 nt, Human
aagcaagagauggaaaaagucagaa

SEQ ID NO: 710950 - RNA, 19 nt, Human
aagugcugggauuauaggc

SEQ ID NO: 710951 - RNA, 19 nt, Human
aagugcugggauuauaggc

SEQ ID NO: 710952 - RNA, 21 nt, Human
aauuaugguaccaugcagcuu

SEQ ID NO: 710953 - RNA, 22 nt, Human
acaaaacagaacauucauggau

SEQ ID NO: 710954 - RNA, 22 nt, Human
acaaacaagacgcuaguaugca

SEQ ID NO: 710955 - RNA, 26 nt, Human
acaaagaaaaauucugucauucccca

SEQ ID NO: 710956 - RNA, 23 nt, Human
acacauacuccaccaauccacca

SEQ ID NO: 710957 - RNA, 18 nt, Human
acaguaugccaguuuccc

SEQ ID NO: 710958 - RNA, 18 nt, Human
accauguuggccaggcug

SEQ ID NO: 710959 - RNA, 23 nt, Human
acccugccuccaaaaaaaaagca

SEQ ID NO: 710960 - RNA, 24 nt, Human
acucuguacauacauuucacaaca

SEQ ID NO: 710961 - RNA, 18 nt, Human
acugcucuccagccuggg

SEQ ID NO: 710962 - RNA, 24 nt, Human
acugcucuccagccugggugacag

SEQ ID NO: 710963 - RNA, 24 nt, Human
acugugccacugcucuccagccug

SEQ ID NO: 710964 - RNA, 23 nt, Human
agccgggcaugguggcgcacgcc

SEQ ID NO: 710965 - RNA, 19 nt, Human
aggacaaauaccuucccuc

SEQ ID NO: 710966 - RNA, 21 nt, Human
aggcagugaaauuacaauuau

SEQ ID NO: 710967 - RNA, 24 nt, Human
aggugcaguagcucaugccuguaa

SEQ ID NO: 710968 - RNA, 22 nt, Human
agguuucaccauguuggccagg

SEQ ID NO: 710969 - RNA, 24 nt, Human
agguuucaccauguuggccagggg

SEQ ID NO: 710970 - RNA, 22 nt, Human
aguagcucaugccuguaauccc

SEQ ID NO: 710971 - RNA, 22 nt, Human
aguagcucaugccuguaauccc

SEQ ID NO: 710972 - RNA, 24 nt, Human
aguagcucaugccuguaaucccgg

SEQ ID NO: 710973 - RNA, 19 nt, Human
agucaauuuaaacaggccu

SEQ ID NO: 710974 - RNA, 24 nt, Human
agugcugggauuauaggcuugagc

SEQ ID NO: 710975 - RNA, 18 nt, Human
aguugaaaaaacaaguaa

SEQ ID NO: 710976 - RNA, 22 nt, Human
auaaaauuuaaaauuuccucau

SEQ ID NO: 710977 - RNA, 19 nt, Human
aucugccugccuuggccuc

SEQ ID NO: 710978 - RNA, 19 nt, Human
augccuguaaucccggcac

SEQ ID NO: 710979 - RNA, 33 nt, Human
augggguuucagguuucaccauguuggccagga

SEQ ID NO: 710980 - RNA, 24 nt, Human
caaaacaccaaauguaccuauaag

SEQ ID NO: 710981 - RNA, 18 nt, Human
caaagugcugggauuaua

SEQ ID NO: 710982 - RNA, 22 nt, Human
caagagauggaaaaagucagaa

SEQ ID NO: 710983 - RNA, 18 nt, Human
caaggagaguuccccucu

SEQ ID NO: 710984 - RNA, 23 nt, Human
cacaaaaggcaaaguaaagucaa

SEQ ID NO: 710985 - RNA, 21 nt, Human
caccauguuggccaggcuggu

SEQ ID NO: 710986 - RNA, 23 nt, Human
caccauguuggccaggcuggucu

SEQ ID NO: 710987 - RNA, 24 nt, Human
caccauguuggccaggcuggucuu

SEQ ID NO: 710988 - RNA, 27 nt, Human
caccauguuggccaggcuggucuuaaa

SEQ ID NO: 710989 - RNA, 20 nt, Human
caccccuacccucuuucucc

SEQ ID NO: 710990 - RNA, 24 nt, Human
cacugcucuccagccugggugaca

SEQ ID NO: 710991 - RNA, 20 nt, Human
cacuguauacaagaacaaac

SEQ ID NO: 710992 - RNA, 24 nt, Human
cagccuaauaaaugacagcacgaa

SEQ ID NO: 710993 - RNA, 18 nt, Human
cagcugagagaguucugc

SEQ ID NO: 710994 - RNA, 23 nt, Human
cagcugagagaguucugucucuc

SEQ ID NO: 710995 - RNA, 22 nt, Human
cagguuucaccauguuggccag

SEQ ID NO: 710996 - RNA, 23 nt, Human
caguaguuuuuaaaaggccccaa

SEQ ID NO: 710997 - RNA, 19 nt, Human
cauccaucuucccuacagu

SEQ ID NO: 710998 - RNA, 23 nt, Human
caugcaccaccacaccuggcuaa

SEQ ID NO: 710999 - RNA, 24 nt, Human
caugccuguaaucccggcacuuug

SEQ ID NO: 711000 - RNA, 24 nt, Human
cauguuggccaggcuggucuuaaa

SEQ ID NO: 711001 - RNA, 22 nt, Human
ccaaagugcugggauuauaggc

SEQ ID NO: 711002 - RNA, 23 nt, Human
ccaaagugcugggauuauaggcu

SEQ ID NO: 711003 - RNA, 22 nt, Human
ccaccaugccucgccuaaaagc

SEQ ID NO: 711004 - RNA, 18 nt, Human
ccacugcucuccagccug

SEQ ID NO: 711005 - RNA, 20 nt, Human
ccacugcucuccagccuggg

SEQ ID NO: 711006 - RNA, 21 nt, Human
ccacugcucuccagccugggu

SEQ ID NO: 711007 - RNA, 21 nt, Human
ccacugcucuccagccugggu

SEQ ID NO: 711008 - RNA, 24 nt, Human
ccacugcucuccagccugggugac

SEQ ID NO: 711009 - RNA, 23 nt, Human
ccagccaggcuuucucaaaacua

SEQ ID NO: 711010 - RNA, 24 nt, Human
cccaaagugcugggauuauaggcu

SEQ ID NO: 711011 - RNA, 21 nt, Human
cccacacacaaauaaugaaac

SEQ ID NO: 711012 - RNA, 24 nt, Human
ccuccaaaaaaaaagcaauuuaua

SEQ ID NO: 711013 - RNA, 19 nt, Human
ccucgccuaaaagcaaaau

SEQ ID NO: 711014 - RNA, 21 nt, Human
ccugaccucaaaugaucugcc

SEQ ID NO: 711015 - RNA, 23 nt, Human
ccugaccucaaaugaucugccug

SEQ ID NO: 711016 - RNA, 21 nt, Human
ccugagccccagcuacucggg

SEQ ID NO: 711017 - RNA, 24 nt, Human
ccugccuccaaaaaaaaagcaauu

SEQ ID NO: 711018 - RNA, 22 nt, Human
ccugccuuggccucccaaagug

SEQ ID NO: 711019 - RNA, 24 nt, Human
ccugccuuggccucccaaagugcu

SEQ ID NO: 711020 - RNA, 22 nt, Human
ccuguaaucccggcacuuuggg

SEQ ID NO: 711021 - RNA, 23 nt, Human
cgccugagccccagcuacucggg

SEQ ID NO: 711022 - RNA, 20 nt, Human
cggcacuuugggaggcuaag

SEQ ID NO: 711023 - RNA, 19 nt, Human
cucaaaaaaaaaaaaagca

SEQ ID NO: 711024 - RNA, 21 nt, Human
cucaaaaaaaaaaaaagcacc

SEQ ID NO: 711025 - RNA, 25 nt, Human
cucaagccucagcuaaggauggauc

SEQ ID NO: 711026 - RNA, 23 nt, Human
cucaugccuguaaucccggcacu

SEQ ID NO: 711027 - RNA, 24 nt, Human
cucaugccuguaaucccggcacuu

SEQ ID NO: 711028 - RNA, 18 nt, Human
cuccaccaauccaccaaa

SEQ ID NO: 711029 - RNA, 18 nt, Human
cuccagccugggugacag

SEQ ID NO: 711030 - RNA, 26 nt, Human
cuccugaccucaaaugaucugccugc

SEQ ID NO: 711031 - RNA, 23 nt, Human
cucgggaggcugggauuacaggc

SEQ ID NO: 711032 - RNA, 24 nt, Human
cucgggaggcugggauuacaggca

SEQ ID NO: 711033 - RNA, 18 nt, Human
cugacccacacuccccug

SEQ ID NO: 711034 - RNA, 22 nt, Human
cugcagugagcuaugacugugc

SEQ ID NO: 711035 - RNA, 21 nt, Human
cugucucucuccauguaggau

SEQ ID NO: 711036 - RNA, 26 nt, Human
gaauucuuauuaaaaaaaacaaaaca

SEQ ID NO: 711037 - RNA, 25 nt, Human
gacccacacuccccuggcucuccac

SEQ ID NO: 711038 - RNA, 23 nt, Human
gaccucaaaugaucugccugccu

SEQ ID NO: 711039 - RNA, 19 nt, Human
gagaaacacaaaaggcaaa

SEQ ID NO: 711040 - RNA, 18 nt, Human
gagcuaugacugugccac

SEQ ID NO: 711041 - RNA, 18 nt, Human
gaggcugggauuacaggc

SEQ ID NO: 711042 - RNA, 20 nt, Human
gaggcugggauuacaggcau

SEQ ID NO: 711043 - RNA, 21 nt, Human
gauuauaggcuugagccacca

SEQ ID NO: 711044 - RNA, 24 nt, Human
gauuauaggcuugagccaccaugc

SEQ ID NO: 711045 - RNA, 18 nt, Human
gcacgccugagccccagc

SEQ ID NO: 711046 - RNA, 19 nt, Human
gcacuuugggaggcuaagg

SEQ ID NO: 711047 - RNA, 22 nt, Human
gcacuuugggaggcuaaggagg

SEQ ID NO: 711048 - RNA, 19 nt, Human
gccacugcucuccagccug

SEQ ID NO: 711049 - RNA, 24 nt, Human
gccacugcucuccagccuggguga

SEQ ID NO: 711050 - RNA, 18 nt, Human
gccaguuucccaccccua

SEQ ID NO: 711051 - RNA, 24 nt, Human
gcccagguguucgaggcugcagug

SEQ ID NO: 711052 - RNA, 19 nt, Human
gccugagccccagcuacuc

SEQ ID NO: 711053 - RNA, 22 nt, Human
gccuuggccucccaaagugcug

SEQ ID NO: 711054 - RNA, 24 nt, Human
gcugaaauacagggaauuuuacua

SEQ ID NO: 711055 - RNA, 19 nt, Human
gcugcagugagcuaugacu

SEQ ID NO: 711056 - RNA, 23 nt, Human
gcuggucuuaaacuccugaccuc

SEQ ID NO: 711057 - RNA, 22 nt, Human
ggaaaugucuucaaggcucaga

SEQ ID NO: 711058 - RNA, 18 nt, Human
ggagaaauauaaugaccc

SEQ ID NO: 711059 - RNA, 18 nt, Human
ggaggcugggauuacagg

SEQ ID NO: 711060 - RNA, 24 nt, Human
ggauuauaggcuugagccaccaug

SEQ ID NO: 711061 - RNA, 23 nt, Human
ggcaugguggcgcacgccugagc

SEQ ID NO: 711062 - RNA, 21 nt, Human
ggccaggugcaguagcucaug

SEQ ID NO: 711063 - RNA, 24 nt, Human
ggcuggucuuaaacuccugaccuc

SEQ ID NO: 711064 - RNA, 24 nt, Human
gggaggcugggauuacaggcaugc

SEQ ID NO: 711065 - RNA, 22 nt, Human
gggcaugguggcgcacgccuga

SEQ ID NO: 711066 - RNA, 20 nt, Human
gggucucaaaaaaaaaaaaa

SEQ ID NO: 711067 - RNA, 19 nt, Human
guaaagucaauuuaaacag

SEQ ID NO: 711068 - RNA, 19 nt, Human
gucucaaaaaaaaaaaaag

SEQ ID NO: 711069 - RNA, 21 nt, Human
gucucucuccauguaggaucc

SEQ ID NO: 711070 - RNA, 20 nt, Human
guucuuaaacaaggacaucu

SEQ ID NO: 711071 - RNA, 22 nt, Human
uaaaaaaaacaaaacagaacau

SEQ ID NO: 711072 - RNA, 22 nt, Human
uaaacaggccucacaaaaauca

SEQ ID NO: 711073 - RNA, 24 nt, Human
uaagaaaacacuguauacaagaac

SEQ ID NO: 711074 - RNA, 24 nt, Human
uaagacacaaaagaggacuuaaac

SEQ ID NO: 711075 - RNA, 24 nt, Human
uaagagaguuugucagaccuggug

SEQ ID NO: 711076 - RNA, 21 nt, Human
uaaggagaaauauaaugaccc

SEQ ID NO: 711077 - RNA, 24 nt, Human
uaaggagaaauauaaugacccaca

SEQ ID NO: 711078 - RNA, 19 nt, Human
uacaagaacaaacacuaga

SEQ ID NO: 711079 - RNA, 22 nt, Human
uacaggcaugcaccaccacacc

SEQ ID NO: 711080 - RNA, 23 nt, Human
uaccaugcagcuuauuuccccau

SEQ ID NO: 711081 - RNA, 19 nt, Human
uaccuaauauguacccaca

SEQ ID NO: 711082 - RNA, 21 nt, Human
uacuccaccaauccaccaaac

SEQ ID NO: 711083 - RNA, 22 nt, Human
uagauaaaauugagaaacacaa

SEQ ID NO: 711084 - RNA, 23 nt, Human
uagauagcuuacauuaaagucuc

SEQ ID NO: 711085 - RNA, 24 nt, Human
uagcucaugccuguaaucccggca

SEQ ID NO: 711086 - RNA, 18 nt, Human
uagcuuguuucagauucg

SEQ ID NO: 711087 - RNA, 19 nt, Human
uaguuuuuaaaaggcccca

SEQ ID NO: 711088 - RNA, 19 nt, Human
uauaaugacccacauguua

SEQ ID NO: 711089 - RNA, 26 nt, Human
uauacaagaacaaacacuagacuacc

SEQ ID NO: 711090 - RNA, 21 nt, Human
ucaagagaaagcccaucagga

SEQ ID NO: 711091 - RNA, 18 nt, Human
ucacuucagcccaggugu

SEQ ID NO: 711092 - RNA, 19 nt, Human
uccagccugggugacagag

SEQ ID NO: 711093 - RNA, 20 nt, Human
uccagccugggugacagaga

SEQ ID NO: 711094 - RNA, 24 nt, Human
ucccaaagugcugggauuauaggc

SEQ ID NO: 711095 - RNA, 21 nt, Human
uccccuggcucuccacuuuua

SEQ ID NO: 711096 - RNA, 27 nt, Human
uccccuggcucuccacuuuuaggcaca

SEQ ID NO: 711097 - RNA, 18 nt, Human
uccugaccucaaaugauc

SEQ ID NO: 711098 - RNA, 23 nt, Human
ucgggaggcugggauuacaggca

SEQ ID NO: 711099 - RNA, 24 nt, Human
ucgggaggcugggauuacaggcau

SEQ ID NO: 711100 - RNA, 28 nt, Human
ucuaucagacuuuguuccagaaacuauu

SEQ ID NO: 711101 - RNA, 24 nt, Human
ucuaugaccaaggaaaaccggggc

SEQ ID NO: 711102 - RNA, 19 nt, Human
ucuccagccugggugacag

SEQ ID NO: 711103 - RNA, 23 nt, Human
ucucugccauaaucuaccaucag

SEQ ID NO: 711104 - RNA, 20 nt, Human
ucugagagugucagcugaga

SEQ ID NO: 711105 - RNA, 21 nt, Human
ugaaaaaacaaguaacagaau

SEQ ID NO: 711106 - RNA, 24 nt, Human
ugaaaaaacaaguaacagaauuaa

SEQ ID NO: 711107 - RNA, 24 nt, Human
ugaaauuacaauuaugaaauuuuc

SEQ ID NO: 711108 - RNA, 24 nt, Human
ugaagcaagagauggaaaaaguca

SEQ ID NO: 711109 - RNA, 23 nt, Human
ugacacacacacauacuccacca

SEQ ID NO: 711110 - RNA, 23 nt, Human
ugaccaaggaaaacuuuuaggau

SEQ ID NO: 711111 - RNA, 23 nt, Human
ugacccacauguuaauuuauauu

SEQ ID NO: 711112 - RNA, 18 nt, Human
ugaccucaaaugaucugc

SEQ ID NO: 711113 - RNA, 21 nt, Human
ugauuaaacugaccuuuccuu

SEQ ID NO: 711114 - RNA, 18 nt, Human
ugccugccuuggccuccc

SEQ ID NO: 711115 - RNA, 23 nt, Human
ugccuguaaucccggcacuuugg

SEQ ID NO: 711116 - RNA, 18 nt, Human
uggaugggcaaagaaagg

SEQ ID NO: 711117 - RNA, 24 nt, Human
uggccaggcuggucuuaaacuccu

SEQ ID NO: 711118 - RNA, 19 nt, Human
uggcuugccagagaggcag

SEQ ID NO: 711119 - RNA, 24 nt, Human
ugggaggcuaaggagggaggauca

SEQ ID NO: 711120 - RNA, 21 nt, Human
ugggauuacaggcaugcacca

SEQ ID NO: 711121 - RNA, 24 nt, Human
ugggauuacaggcaugcaccacca

SEQ ID NO: 711122 - RNA, 18 nt, Human
ugggauuauaggcuugag

SEQ ID NO: 711123 - RNA, 21 nt, Human
ugggauuauaggcuugagcca

SEQ ID NO: 711124 - RNA, 22 nt, Human
ugggauuauaggcuugagccac

SEQ ID NO: 711125 - RNA, 24 nt, Human
ugggauuauaggcuugagccacca

SEQ ID NO: 711126 - RNA, 25 nt, Human
ugggauuauaggcuugagccaccau

SEQ ID NO: 711127 - RNA, 22 nt, Human
ugggguuucagguuucaccaug

SEQ ID NO: 711128 - RNA, 20 nt, Human
ugguagagaugggguuucag

SEQ ID NO: 711129 - RNA, 24 nt, Human
uguaccucuuucaccacagggcua

SEQ ID NO: 711130 - RNA, 19 nt, Human
ugucuuaaggaguaagaga

SEQ ID NO: 711131 - RNA, 22 nt, Human
ugugaaaauagccucaaaauga

SEQ ID NO: 711132 - RNA, 24 nt, Human
uuagauagcuuacauuaaagucuc

SEQ ID NO: 711133 - RNA, 18 nt, Human
uuagccgggcaugguggc

SEQ ID NO: 711134 - RNA, 21 nt, Human
uuccagccaggcuuucucaaa

SEQ ID NO: 711135 - RNA, 20 nt, Human
uucccagugcaaaacaccaa

SEQ ID NO: 711136 - RNA, 24 nt, Human
uucugcaucauguauaucccaaaa

SEQ ID NO: 711137 - RNA, 18 nt, Human
uuggccucccaaagugcu

SEQ ID NO: 711138 - RNA, 25 nt, Human
uugggaggcuaaggagggaggauca

SEQ ID NO: 711139 - RNA, 23 nt, Human
uugguagagaugggguuucaggu

SEQ ID NO: 711140 - RNA, 24 nt, Human
uuucaccauguuggccaggcuggu

SEQ ID NO: 711141 - RNA, 25 nt, Human
uuucucaaaacuagggcagaauuuu

SEQ ID NO: 711142 - RNA, 22 nt, Human
uuugucuuaaggaguaagagag

SEQ ID NO: 711143 - RNA, 20 nt, Human
uuuucuaucagacuuuguuc

SEQ ID NO: 711144 - RNA, 22 nt, Human
uuuuugguagagaugggguuuc

SEQ ID NO: 711145 - RNA, 23 nt, Human
uuuuuguuuuugagccagggucu

SEQ ID NO: 711146 - RNA, 21 nt, Human
uuuuuuauuuuuuugguagag

SEQ ID NO: 711147 - RNA, 23 nt, Human
uuuuuugguagagaugggguuuc

SEQ ID NO: 711148 - RNA, 18 nt, Human
aaaaagcaaaauaaaaau

SEQ ID NO: 711149 - RNA, 19 nt, Human
aaaauuucugaccugguua

SEQ ID NO: 711150 - RNA, 21 nt, Human
aaagcaaauauucaaaggguu

SEQ ID NO: 711151 - RNA, 19 nt, Human
aaaguauguuuaaugguug

SEQ ID NO: 711152 - RNA, 21 nt, Human
aagcaaaauaaaaauccucug

SEQ ID NO: 711153 - RNA, 22 nt, Human
aagcaaaauaaaaauccucuga

SEQ ID NO: 711154 - RNA, 18 nt, Human
aaguauguuuaaugguug

SEQ ID NO: 711155 - RNA, 18 nt, Human
accugggaaguaaauugu

SEQ ID NO: 711156 - RNA, 18 nt, Human
acuggacacagaagcaca

SEQ ID NO: 711157 - RNA, 18 nt, Human
acuuuauuccaaaaucuc

SEQ ID NO: 711158 - RNA, 21 nt, Human
agaaaaacuccaccaauagua

SEQ ID NO: 711159 - RNA, 21 nt, Human
agaaaacuggacacagaagca

SEQ ID NO: 711160 - RNA, 26 nt, Human
aggagauaacaggaguuuuuaauagc

SEQ ID NO: 711161 - RNA, 23 nt, Human
agggggucuccgcacuucggggg

SEQ ID NO: 711162 - RNA, 20 nt, Human
agguauaugcucacaacaua

SEQ ID NO: 711163 - RNA, 23 nt, Human
aucugauugaugagguacagauu

SEQ ID NO: 711164 - RNA, 22 nt, Human
caaagucugaaaugccaaaaag

SEQ ID NO: 711165 - RNA, 21 nt, Human
caacauaagugaguaugagac

SEQ ID NO: 711166 - RNA, 19 nt, Human
caauacauugauguccucc

SEQ ID NO: 711167 - RNA, 20 nt, Human
cacugaucaaagucugaaau

SEQ ID NO: 711168 - RNA, 23 nt, Human
cagauuaaaaagcaauacaagug

SEQ ID NO: 711169 - RNA, 20 nt, Human
caguacagcaaacucaucuc

SEQ ID NO: 711170 - RNA, 22 nt, Human
cauaucccuucucccauucuca

SEQ ID NO: 711171 - RNA, 20 nt, Human
caugaaaagccuguguaaug

SEQ ID NO: 711172 - RNA, 19 nt, Human
caugucaccagagcacugu

SEQ ID NO: 711173 - RNA, 20 nt, Human
ccaauaguagaaacaaagua

SEQ ID NO: 711174 - RNA, 18 nt, Human
ccacaaguaaaaaacugg

SEQ ID NO: 711175 - RNA, 20 nt, Human
cccacaaguaaaaaacuggu

SEQ ID NO: 711176 - RNA, 19 nt, Human
cucacuuuauuccaaaauc

SEQ ID NO: 711177 - RNA, 26 nt, Human
cuuuaaaacuccccugguuuccauuu

SEQ ID NO: 711178 - RNA, 23 nt, Human
cuuuggaaaggggaagugggcac

SEQ ID NO: 711179 - RNA, 21 nt, Human
gagacuuuucaagcaagcacu

SEQ ID NO: 711180 - RNA, 20 nt, Human
gcaguguuuccuuuaaaaag

SEQ ID NO: 711181 - RNA, 24 nt, Human
uaaaaaccauaaugccuugacuga

SEQ ID NO: 711182 - RNA, 24 nt, Human
uaaaaagcaauacaagugcacuua

SEQ ID NO: 711183 - RNA, 19 nt, Human
uaaaagcaaauauucaaag

SEQ ID NO: 711184 - RNA, 19 nt, Human
uaagugaguaugagaccug

SEQ ID NO: 711185 - RNA, 18 nt, Human
uaauaccccaaaaucuua

SEQ ID NO: 711186 - RNA, 18 nt, Human
uauagaaaaacuccacca

SEQ ID NO: 711187 - RNA, 23 nt, Human
uauagcauagucucauauuuuga

SEQ ID NO: 711188 - RNA, 22 nt, Human
uauguguacaguuuauauucca

SEQ ID NO: 711189 - RNA, 23 nt, Human
uauuucacugacaauuuguuuau

SEQ ID NO: 711190 - RNA, 25 nt, Human
ucacaacauaucccuucucccauuc

SEQ ID NO: 711191 - RNA, 23 nt, Human
ucacacccacaaguaaaaaacug

SEQ ID NO: 711192 - RNA, 21 nt, Human
ucaguacagcaaacucaucuc

SEQ ID NO: 711193 - RNA, 25 nt, Human
uccaaaaucucauuuauuucacuga

SEQ ID NO: 711194 - RNA, 22 nt, Human
uccccugguuuccauuuaaaug

SEQ ID NO: 711195 - RNA, 21 nt, Human
ugaauaaaauuucugaccugg

SEQ ID NO: 711196 - RNA, 26 nt, Human
ugaauaucaugauuacaaaacaggua

SEQ ID NO: 711197 - RNA, 23 nt, Human
ugacacauauauuuaucauguca

SEQ ID NO: 711198 - RNA, 27 nt, Human
ugauuacaaaacagguauuaagaacug

SEQ ID NO: 711199 - RNA, 20 nt, Human
ugcagcgucaguacagcaaa

SEQ ID NO: 711200 - RNA, 21 nt, Human
ugccaaaaagcaaaauaaaaa

SEQ ID NO: 711201 - RNA, 22 nt, Human
ugcuuuggaaaggggaaguggg

SEQ ID NO: 711202 - RNA, 25 nt, Human
ugcuuuggaaaggggaagugggcac

SEQ ID NO: 711203 - RNA, 24 nt, Human
ugucacaaagccuuuauuaacagg

SEQ ID NO: 711204 - RNA, 19 nt, Human
ugucuugaucuaguugaaa

SEQ ID NO: 711205 - RNA, 26 nt, Human
uguguaaugaagccuggguccuuuaa

SEQ ID NO: 711206 - RNA, 25 nt, Human
uuaaaugcuuuaacauugagucauc

SEQ ID NO: 711207 - RNA, 22 nt, Human
uuuaaugaccugaaauucaaac

SEQ ID NO: 711208 - RNA, 26 nt, Human
aaaaauacauaauacagaaaccaaaa

SEQ ID NO: 711209 - RNA, 18 nt, Human
aaaacacaacagaaacaa

SEQ ID NO: 711210 - RNA, 24 nt, Human
aaaacacaacagaaacaaaaccag

SEQ ID NO: 711211 - RNA, 24 nt, Human
aaacacaacagaaacaaaaccaga

SEQ ID NO: 711212 - RNA, 25 nt, Human
aaaccaaaacaaaacacaacagaaa

SEQ ID NO: 711213 - RNA, 28 nt, Human
aaaccaaaacaaaacacaacagaaacaa

SEQ ID NO: 711214 - RNA, 22 nt, Human
aaaccccagccuagugggccca

SEQ ID NO: 711215 - RNA, 20 nt, Human
aaaucaaagaaauuuauugg

SEQ ID NO: 711216 - RNA, 26 nt, Human
aacaaaacacaacagaaacaaaacca

SEQ ID NO: 711217 - RNA, 25 nt, Human
aacagaaacaaaaccagaaacccca

SEQ ID NO: 711218 - RNA, 25 nt, Human
aaccagaaaccccagccuagugggc

SEQ ID NO: 711219 - RNA, 19 nt, Human
acaaaaauacauaauacag

SEQ ID NO: 711220 - RNA, 22 nt, Human
acaaaacacaacagaaacaaaa

SEQ ID NO: 711221 - RNA, 25 nt, Human
acaaaacacaacagaaacaaaacca

SEQ ID NO: 711222 - RNA, 28 nt, Human
acaaaacacaacagaaacaaaaccagaa

SEQ ID NO: 711223 - RNA, 19 nt, Human
acaacagaaacaaaaccag

SEQ ID NO: 711224 - RNA, 22 nt, Human
acaacagaaacaaaaccagaaa

SEQ ID NO: 711225 - RNA, 22 nt, Human
acagaaacaaaaccagaaaccc

SEQ ID NO: 711226 - RNA, 21 nt, Human
caaaacaaaacacaacagaaa

SEQ ID NO: 711227 - RNA, 21 nt, Human
caaaacacaacagaaacaaaa

SEQ ID NO: 711228 - RNA, 27 nt, Human
caaaacacaacagaaacaaaaccagaa

SEQ ID NO: 711229 - RNA, 19 nt, Human
caaaaccagaaaccccagc

SEQ ID NO: 711230 - RNA, 21 nt, Human
caaaaccagaaaccccagccu

SEQ ID NO: 711231 - RNA, 23 nt, Human
caacagaaacaaaaccagaaacc

SEQ ID NO: 711232 - RNA, 23 nt, Human
ccaaaacaaaacacaacagaaac

SEQ ID NO: 711233 - RNA, 22 nt, Human
ccagacucccacaaagcauggc

SEQ ID NO: 711234 - RNA, 19 nt, Human
gaaacaaaaccagaaaccc

SEQ ID NO: 711235 - RNA, 20 nt, Human
gaaacaaaaccagaaacccc

SEQ ID NO: 711236 - RNA, 20 nt, Human
uacauaauacagaaaccaaa

SEQ ID NO: 711237 - RNA, 19 nt, Human
uccgggacucuucgauggc

SEQ ID NO: 711238 - RNA, 23 nt, Human
ucuuccgggacucuucgaugggg

SEQ ID NO: 711239 - RNA, 23 nt, Human
ugugccgacccagacucccacaa

SEQ ID NO: 711240 - RNA, 23 nt, Human
aaaaagaaaagaaaaggaucugg

SEQ ID NO: 711241 - RNA, 20 nt, Human
aacuauuaaagaguuucuaa

SEQ ID NO: 711242 - RNA, 19 nt, Human
acagagaagagcucacaaa

SEQ ID NO: 711243 - RNA, 23 nt, Human
acggacagucuucuagagcagca

SEQ ID NO: 711244 - RNA, 22 nt, Human
acuauuaaaaagcuaggaaaga

SEQ ID NO: 711245 - RNA, 22 nt, Human
acuugugccacaaugacuccuc

SEQ ID NO: 711246 - RNA, 19 nt, Human
agaaaagaaaaggaucugg

SEQ ID NO: 711247 - RNA, 23 nt, Human
aucuucuaggcaggaguagagau

SEQ ID NO: 711248 - RNA, 22 nt, Human
caaugacuccucccccuagcuc

SEQ ID NO: 711249 - RNA, 19 nt, Human
cacaaugacuccucccccu

SEQ ID NO: 711250 - RNA, 20 nt, Human
cauuucgaucuucuaggcaa

SEQ ID NO: 711251 - RNA, 25 nt, Human
cuagagcagcaggacgcugacagag

SEQ ID NO: 711252 - RNA, 23 nt, Human
cuugugccacaaugacuccuccc

SEQ ID NO: 711253 - RNA, 21 nt, Human
gagcaauuaaaaagaaaagaa

SEQ ID NO: 711254 - RNA, 20 nt, Human
gaguagagaugaggaacaca

SEQ ID NO: 711255 - RNA, 20 nt, Human
ggcagcuguuuacaagucug

SEQ ID NO: 711256 - RNA, 18 nt, Human
uaaaaagaaaagaaaagg

SEQ ID NO: 711257 - RNA, 21 nt, Human
uacauacaaccaguuuguaua

SEQ ID NO: 711258 - RNA, 24 nt, Human
uagagcagcaggacgcugacagag

SEQ ID NO: 711259 - RNA, 22 nt, Human
uaguuucucagccagccagccc

SEQ ID NO: 711260 - RNA, 20 nt, Human
uauguacaaauacuugugcc

SEQ ID NO: 711261 - RNA, 24 nt, Human
uauuaaaaagcuaggaaagauuag

SEQ ID NO: 711262 - RNA, 19 nt, Human
ucuaggcaggaguagagau

SEQ ID NO: 711263 - RNA, 22 nt, Human
ucuaggcaggaguagagaugag

SEQ ID NO: 711264 - RNA, 19 nt, Human
ugacuccucccccuagcuc

SEQ ID NO: 711265 - RNA, 20 nt, Human
ugacuccucccccuagcucc

SEQ ID NO: 711266 - RNA, 24 nt, Human
ugauacauacaaccaguuuguaua

SEQ ID NO: 711267 - RNA, 19 nt, Human
ugccgggggaguggggcag

SEQ ID NO: 711268 - RNA, 21 nt, Human
uggaacgaagaguagguagug

SEQ ID NO: 711269 - RNA, 19 nt, Human
uuaaaaagaaaagaaaagg

SEQ ID NO: 711270 - RNA, 22 nt, Human
uugggccuucuuucgcacaucu

SEQ ID NO: 711271 - RNA, 21 nt, Human
aaaaaaagcggaaggagccaa

SEQ ID NO: 711272 - RNA, 25 nt, Human
aaaaaaagcggaaggagccgguacc

SEQ ID NO: 711273 - RNA, 22 nt, Human
aaacuuaagacugacauucugg

SEQ ID NO: 711274 - RNA, 20 nt, Human
accccacaagucccuggagc

SEQ ID NO: 711275 - RNA, 20 nt, Human
acccuuucacuugaccccaa

SEQ ID NO: 711276 - RNA, 22 nt, Human
accggaccacaagccacccggc

SEQ ID NO: 711277 - RNA, 21 nt, Human
acgggaagccccucccacccc

SEQ ID NO: 711278 - RNA, 24 nt, Human
agaacucagcauuacuguccacca

SEQ ID NO: 711279 - RNA, 19 nt, Human
agccugaucagugugagac

SEQ ID NO: 711280 - RNA, 18 nt, Human
aggacuaucccccuaccc

SEQ ID NO: 711281 - RNA, 22 nt, Human
aggugcugaagagugaugccuc

SEQ ID NO: 711282 - RNA, 21 nt, Human
cacacuugaucaggacuaucc

SEQ ID NO: 711283 - RNA, 18 nt, Human
caccccacaagucccugg

SEQ ID NO: 711284 - RNA, 19 nt, Human
cagaccgaugcugcaggug

SEQ ID NO: 711285 - RNA, 23 nt, Human
caugcccugcagcgaacagacca

SEQ ID NO: 711286 - RNA, 21 nt, Human
ccaccccacaagucccuggag

SEQ ID NO: 711287 - RNA, 20 nt, Human
ccagaccgaugcugcaggug

SEQ ID NO: 711288 - RNA, 19 nt, Human
cccacaagucccuggagcc

SEQ ID NO: 711289 - RNA, 25 nt, Human
cccccuacccuuucacuugacccca

SEQ ID NO: 711290 - RNA, 19 nt, Human
ccucucuggcccugagccu

SEQ ID NO: 711291 - RNA, 23 nt, Human
ccugcagcuuccgcugacaccac

SEQ ID NO: 711292 - RNA, 24 nt, Human
cuaaggaguuugcuggaaauccac

SEQ ID NO: 711293 - RNA, 22 nt, Human
gaagccccucccaccccacaag

SEQ ID NO: 711294 - RNA, 20 nt, Human
gaucauggcuaaggaguuug

SEQ ID NO: 711295 - RNA, 20 nt, Human
gcagaagaucuucaauaagg

SEQ ID NO: 711296 - RNA, 20 nt, Human
gcagcgaacagaccaggugc

SEQ ID NO: 711297 - RNA, 24 nt, Human
gcagcgaacagaccaggugcugaa

SEQ ID NO: 711298 - RNA, 23 nt, Human
gccccucccaccccacaaguccc

SEQ ID NO: 711299 - RNA, 20 nt, Human
ggcucugacacccacaaauc

SEQ ID NO: 711300 - RNA, 20 nt, Human
ucaauaaggaugggcugaag

SEQ ID NO: 711301 - RNA, 18 nt, Human
uccaaaaaaagcggaagg

SEQ ID NO: 711302 - RNA, 21 nt, Human
ucccccuacccuuucacuuga

SEQ ID NO: 711303 - RNA, 20 nt, Human
uccuuuugauccaccccagc

SEQ ID NO: 711304 - RNA, 23 nt, Human
ucgaaugcuguucuccccagacc

SEQ ID NO: 711305 - RNA, 26 nt, Human
ucugacacccacaaauccucguggau

SEQ ID NO: 711306 - RNA, 25 nt, Human
ucuugcucucuuguugccucucugg

SEQ ID NO: 711307 - RNA, 19 nt, Human
ugaauggagaauaguuggc

SEQ ID NO: 711308 - RNA, 20 nt, Human
ugaauggagaauaguuggca

SEQ ID NO: 711309 - RNA, 23 nt, Human
ugaauggagaauaguuggcagaa

SEQ ID NO: 711310 - RNA, 25 nt, Human
ugagacagaacucagcauuacuguc

SEQ ID NO: 711311 - RNA, 18 nt, Human
uggaaauccacagguuau

SEQ ID NO: 711312 - RNA, 21 nt, Human
ugggcucugacacccacaaau

SEQ ID NO: 711313 - RNA, 21 nt, Human
ugugagacagaacucagcauu

SEQ ID NO: 711314 - RNA, 23 nt, Human
uguugcugaaacuuaagacugac

SEQ ID NO: 711315 - RNA, 23 nt, Human
uuccacuguuugcugguguugcu

SEQ ID NO: 711316 - RNA, 20 nt, Human
uugcugguguugcugaaacu

SEQ ID NO: 711317 - RNA, 26 nt, Human
aaacaagaagagaggagaggggaccc

SEQ ID NO: 711318 - RNA, 18 nt, Human
aacaucuaaauuuaaacc

SEQ ID NO: 711319 - RNA, 27 nt, Human
aagaaaccaaacaaugcagugggcacc

SEQ ID NO: 711320 - RNA, 20 nt, Human
aaguagaaggagugacaaua

SEQ ID NO: 711321 - RNA, 23 nt, Human
aucaaacaccaauaaaaauggca

SEQ ID NO: 711322 - RNA, 22 nt, Human
caacaaucuaagcaaaucucaa

SEQ ID NO: 711323 - RNA, 24 nt, Human
cauuccaauaaucaaacaccaaua

SEQ ID NO: 711324 - RNA, 20 nt, Human
cauucuagaauaccagggua

SEQ ID NO: 711325 - RNA, 22 nt, Human
cuaauuggaacaaacacauuua

SEQ ID NO: 711326 - RNA, 21 nt, Human
gaacaaacacauuuauguaaa

SEQ ID NO: 711327 - RNA, 19 nt, Human
gaagagaggagaggagaga

SEQ ID NO: 711328 - RNA, 24 nt, Human
ggcagcaguacaacaaucuaagca

SEQ ID NO: 711329 - RNA, 21 nt, Human
uaaaagaaaccaaacaaugca

SEQ ID NO: 711330 - RNA, 21 nt, Human
uaacucugcuuuuuaaagcaa

SEQ ID NO: 711331 - RNA, 25 nt, Human
uacaacaaucuaagcaaaucucaaa

SEQ ID NO: 711332 - RNA, 24 nt, Human
uacaacauacuuguaauuagaacu

SEQ ID NO: 711333 - RNA, 18 nt, Human
uacauucuagaauaccag

SEQ ID NO: 711334 - RNA, 21 nt, Human
uagaaggagugacaauauggc

SEQ ID NO: 711335 - RNA, 22 nt, Human
uagaaggagugacaauauggca

SEQ ID NO: 711336 - RNA, 23 nt, Human
uggaacaaacacauuuauguaaa

SEQ ID NO: 711337 - RNA, 25 nt, Human
ugguaaaagaaaccaaacaaugcau

SEQ ID NO: 711338 - RNA, 20 nt, Human
ugugcaaaaaucuaacucug

SEQ ID NO: 711339 - RNA, 20 nt, Human
uucacaacuacuuuugaaca

SEQ ID NO: 711340 - RNA, 27 nt, Human
uuccaauaaucaaacaccaagguaccc

SEQ ID NO: 711341 - RNA, 22 nt, Human
aaaaugcuacauggcccaaagc

SEQ ID NO: 711342 - RNA, 22 nt, Human
aaacaaauuaaaaagcuaugug

SEQ ID NO: 711343 - RNA, 24 nt, Human
aaaggcacaaacaaaucaacaggg

SEQ ID NO: 711344 - RNA, 25 nt, Human
aaaucaaagccacuauggcaaagaa

SEQ ID NO: 711345 - RNA, 20 nt, Human
aagaaaaagucuguacagcc

SEQ ID NO: 711346 - RNA, 19 nt, Human
aagcaaaaauguaacaggc

SEQ ID NO: 711347 - RNA, 19 nt, Human
aagcaccaccagccccacu

SEQ ID NO: 711348 - RNA, 24 nt, Human
aagccacuaauucagcaagaucca

SEQ ID NO: 711349 - RNA, 25 nt, Human
aaguaccuuuuuggcagaaucaucc

SEQ ID NO: 711350 - RNA, 23 nt, Human
aaguucuuuuuaucucccccacc

SEQ ID NO: 711351 - RNA, 24 nt, Human
aauucuccacauauuuguauuuuu

SEQ ID NO: 711352 - RNA, 21 nt, Human
accaccgcuucucccgcccug

SEQ ID NO: 711353 - RNA, 18 nt, Human
accgcuucucccgcccug

SEQ ID NO: 711354 - RNA, 20 nt, Human
acuacagccuccgcuaccac

SEQ ID NO: 711355 - RNA, 21 nt, Human
agcaagauccaggagaaagag

SEQ ID NO: 711356 - RNA, 25 nt, Human
aggagaaagagggcuacuuuuagaa

SEQ ID NO: 711357 - RNA, 19 nt, Human
aggcacaaacaaaucaaca

SEQ ID NO: 711358 - RNA, 19 nt, Human
auaaaguacugcuagguac

SEQ ID NO: 711359 - RNA, 24 nt, Human
caaagaaacaggagauuguacaga

SEQ ID NO: 711360 - RNA, 25 nt, Human
caaagaaacaggagauuguacagau

SEQ ID NO: 711361 - RNA, 21 nt, Human
caaaucagauauauacacacc

SEQ ID NO: 711362 - RNA, 22 nt, Human
caccaccagccccacuacagcc

SEQ ID NO: 711363 - RNA, 23 nt, Human
caccaccagccccacuacagccu

SEQ ID NO: 711364 - RNA, 19 nt, Human
cacuauggcaaagaaacag

SEQ ID NO: 711365 - RNA, 24 nt, Human
cacuuccugucccgcaguuggaag

SEQ ID NO: 711366 - RNA, 22 nt, Human
cagaaaauccuauuuacccaga

SEQ ID NO: 711367 - RNA, 20 nt, Human
cagcaacagauuaauaauuu

SEQ ID NO: 711368 - RNA, 18 nt, Human
cagcugauccaucccacu

SEQ ID NO: 711369 - RNA, 23 nt, Human
cauccaaagaguuuuucacagcu

SEQ ID NO: 711370 - RNA, 26 nt, Human
ccaaaucagauauauacacacccaca

SEQ ID NO: 711371 - RNA, 22 nt, Human
ccaccccccaagccacuaauuc

SEQ ID NO: 711372 - RNA, 19 nt, Human
ccacuacagccuccgcuac

SEQ ID NO: 711373 - RNA, 22 nt, Human
cccagaaaagcaaauuaaaaua

SEQ ID NO: 711374 - RNA, 20 nt, Human
cccgcaguuggaagcaccac

SEQ ID NO: 711375 - RNA, 24 nt, Human
ccuccgcuaccaccgcuucucccg

SEQ ID NO: 711376 - RNA, 18 nt, Human
ccugucccgcaguuggaa

SEQ ID NO: 711377 - RNA, 22 nt, Human
cgcuacggccacuuccuguccc

SEQ ID NO: 711378 - RNA, 20 nt, Human
cuacagcuagacaucagagc

SEQ ID NO: 711379 - RNA, 21 nt, Human
cucccgcccuguacagcugcc

SEQ ID NO: 711380 - RNA, 23 nt, Human
cuuucccagaaaagcaaauuaaa

SEQ ID NO: 711381 - RNA, 21 nt, Human
cuuuuuggcagaaucauccaa

SEQ ID NO: 711382 - RNA, 19 nt, Human
gacaaaacagggacuuuuu

SEQ ID NO: 711383 - RNA, 20 nt, Human
gagacuacagcuagacauca

SEQ ID NO: 711384 - RNA, 18 nt, Human
gcccaaagcuauacuaua

SEQ ID NO: 711385 - RNA, 23 nt, Human
gccuccgcuaccaccgcuucucc

SEQ ID NO: 711386 - RNA, 20 nt, Human
ggaagcaccaccagccccac

SEQ ID NO: 711387 - RNA, 18 nt, Human
ggcaguuaauaaaaggca

SEQ ID NO: 711388 - RNA, 26 nt, Human
guauuuuuccagaaguaccuuuuugg

SEQ ID NO: 711389 - RNA, 21 nt, Human
gugaaggaaagcugucauaca

SEQ ID NO: 711390 - RNA, 24 nt, Human
uaaaagcaaaaauguaacaggcag

SEQ ID NO: 711391 - RNA, 30 nt, Human
uaaaaggcacaaacaaaucaacagggauaa

SEQ ID NO: 711392 - RNA, 23 nt, Human
uaaaaugcuacauggcccaaagc

SEQ ID NO: 711393 - RNA, 19 nt, Human
uaaaauuucaggacaaaac

SEQ ID NO: 711394 - RNA, 25 nt, Human
uaaguucuuuuuaucucccccaccc

SEQ ID NO: 711395 - RNA, 20 nt, Human
uacccagaauagacuaaaau

SEQ ID NO: 711396 - RNA, 19 nt, Human
uagcaaaacugcuuuccca

SEQ ID NO: 711397 - RNA, 24 nt, Human
uagcaaaacugcuuucccagaaaa

SEQ ID NO: 711398 - RNA, 30 nt, Human
uauauacacacccacaaaaauagugugugg

SEQ ID NO: 711399 - RNA, 23 nt, Human
uccaaagaguuuuucacagcuga

SEQ ID NO: 711400 - RNA, 21 nt, Human
uccaacaagccgcuacggcca

SEQ ID NO: 711401 - RNA, 23 nt, Human
uccaacaagccgcuacggccacu

SEQ ID NO: 711402 - RNA, 23 nt, Human
uggaagcaccaccagccccacua

SEQ ID NO: 711403 - RNA, 24 nt, Human
uggcaaagaaacaggagauuguac

SEQ ID NO: 711404 - RNA, 21 nt, Human
ugguuaaaagcaaaaauguaa

SEQ ID NO: 711405 - RNA, 24 nt, Human
uguacagauggugaggcgaccauc

SEQ ID NO: 711406 - RNA, 20 nt, Human
ugucagaaaauccuauuuac

SEQ ID NO: 711407 - RNA, 24 nt, Human
ugucagaaaauccuauuuacccag

SEQ ID NO: 711408 - RNA, 24 nt, Human
uuaaaauaaugcaaucagcagauc

SEQ ID NO: 711409 - RNA, 23 nt, Human
uuaacauuucuuacuuuacccau

SEQ ID NO: 711410 - RNA, 25 nt, Human
uuacccagaauagacuaaaauuuca

SEQ ID NO: 711411 - RNA, 21 nt, Human
uuaucucccccaccccccaag

SEQ ID NO: 711412 - RNA, 21 nt, Human
uucuuuuuaucucccccaccc

SEQ ID NO: 711413 - RNA, 25 nt, Human
uugaaauaggaauuaagagucagca

SEQ ID NO: 711414 - RNA, 23 nt, Human
uuuagcaaaacugcuuucccaga

SEQ ID NO: 711415 - RNA, 19 nt, Human
uuuaucucccccacccccc

SEQ ID NO: 711416 - RNA, 23 nt, Human
uuucacagcugauccaucccacu

SEQ ID NO: 711417 - RNA, 22 nt, Human
aacacauucuuuacaacugccu

SEQ ID NO: 711418 - RNA, 25 nt, Human
aacugccuucuuaacagaaaauuac

SEQ ID NO: 711419 - RNA, 22 nt, Human
acauguauaugugauaugaaga

SEQ ID NO: 711420 - RNA, 24 nt, Human
auacauguauaugugauaugaaga

SEQ ID NO: 711421 - RNA, 18 nt, Human
cagaaaauuacuguagua

SEQ ID NO: 711422 - RNA, 21 nt, Human
cagaaaauuacuguaguauau

SEQ ID NO: 711423 - RNA, 23 nt, Human
ggauuucccccaucuccccacuu

SEQ ID NO: 711424 - RNA, 18 nt, Human
gucuuaaaucucucuucc

SEQ ID NO: 711425 - RNA, 20 nt, Human
uagaguuuuauauauauaca

SEQ ID NO: 711426 - RNA, 18 nt, Human
uauauauauacauguaua

SEQ ID NO: 711427 - RNA, 20 nt, Human
uauauauauacauguauaug

SEQ ID NO: 711428 - RNA, 22 nt, Human
uauauauauacauguauaugug

SEQ ID NO: 711429 - RNA, 26 nt, Human
ucccccaucuccccacuuagcaguaa

SEQ ID NO: 711430 - RNA, 23 nt, Human
ugaaaucuaaugucaaagaguuu

SEQ ID NO: 711431 - RNA, 22 nt, Human
uguacaaucaauaagucuuaaa

SEQ ID NO: 711432 - RNA, 24 nt, Human
ugugauaugaagagacugauguac

SEQ ID NO: 711433 - RNA, 20 nt, Human
ugugcaguugugaaaucuaa

SEQ ID NO: 711434 - RNA, 26 nt, Human
uuacaggccaauaaguucaauugugc

SEQ ID NO: 711435 - RNA, 20 nt, Human
uuuuuagguuuauauaaaca

SEQ ID NO: 711436 - RNA, 22 nt, Human
uccaaauaauuaucucuaaagc

SEQ ID NO: 711437 - RNA, 24 nt, Human
ucuaaagcaaauccuuuguuaguu

SEQ ID NO: 711438 - RNA, 21 nt, Human
ugugaaguaagcuauaaaaau

SEQ ID NO: 711439 - RNA, 23 nt, Human
aagcaacucuagcuccaaaccag

SEQ ID NO: 711440 - RNA, 25 nt, Human
acaccuccauagagugucuauggac

SEQ ID NO: 711441 - RNA, 21 nt, Human
aggggaggcagacaaccagaa

SEQ ID NO: 711442 - RNA, 24 nt, Human
aguugcuuccucucucaccaggaa

SEQ ID NO: 711443 - RNA, 19 nt, Human
auagagugucuauggaccc

SEQ ID NO: 711444 - RNA, 23 nt, Human
caccaggaagcaacucuagcucc

SEQ ID NO: 711445 - RNA, 21 nt, Human
cagcaaagagcagaaagggac

SEQ ID NO: 711446 - RNA, 20 nt, Human
cagcgccacauggagaaaga

SEQ ID NO: 711447 - RNA, 19 nt, Human
caggaagcaacucuagcuc

SEQ ID NO: 711448 - RNA, 19 nt, Human
cauggagaaagauaauuca

SEQ ID NO: 711449 - RNA, 21 nt, Human
ccaaaccagaugggugauuca

SEQ ID NO: 711450 - RNA, 23 nt, Human
gaaaggacacagcaaagagcaga

SEQ ID NO: 711451 - RNA, 23 nt, Human
gaaaugccugacccagcacccuc

SEQ ID NO: 711452 - RNA, 22 nt, Human
gggaggcagacaaccagaagga

SEQ ID NO: 711453 - RNA, 20 nt, Human
uaaaaauucugaaaggacac

SEQ ID NO: 711454 - RNA, 21 nt, Human
ucacauccacauuauguuccu

SEQ ID NO: 711455 - RNA, 22 nt, Human
ugaaaggacacagcaaagagca

SEQ ID NO: 711456 - RNA, 21 nt, Human
ugaggggaggcagacaaccag

SEQ ID NO: 711457 - RNA, 22 nt, Human
ugccaucagccuaucaggaaau

SEQ ID NO: 711458 - RNA, 21 nt, Human
uguuccugguaaaaauucuga

SEQ ID NO: 711459 - RNA, 19 nt, Human
uuguguuuuuaggauuaag

SEQ ID NO: 711460 - RNA, 20 nt, Human
uuguucagcaaugauuacag

SEQ ID NO: 711461 - RNA, 22 nt, Human
acagcaggugaacagucucccu

SEQ ID NO: 711462 - RNA, 23 nt, Human
agaaaagagagcagaauccccau

SEQ ID NO: 711463 - RNA, 24 nt, Human
agcagaauccccauauccucuuca

SEQ ID NO: 711464 - RNA, 24 nt, Human
auacuuccaaacaggaguacacag

SEQ ID NO: 711465 - RNA, 24 nt, Human
cacagcaggugaacagucucccuc

SEQ ID NO: 711466 - RNA, 18 nt, Human
cagaauccccauauccuc

SEQ ID NO: 711467 - RNA, 21 nt, Human
cagaauccccauauccucuuc

SEQ ID NO: 711468 - RNA, 23 nt, Human
caggccauuuaugagaagaaagu

SEQ ID NO: 711469 - RNA, 21 nt, Human
ccgcugccgaccucgcugugc

SEQ ID NO: 711470 - RNA, 21 nt, Human
ccgcugccgaccucgcugugc

SEQ ID NO: 711471 - RNA, 21 nt, Human
ccgcugccgaccucgcugugc

SEQ ID NO: 711472 - RNA, 21 nt, Human
ccgcugccgaccucgcugugc

SEQ ID NO: 711473 - RNA, 21 nt, Human
ccgcugccgaccucgcugugc

SEQ ID NO: 711474 - RNA, 21 nt, Human
ccgcugccgaccucgcugugc

SEQ ID NO: 711475 - RNA, 21 nt, Human
ccgcugccgaccucgcugugc

SEQ ID NO: 711476 - RNA, 19 nt, Human
ccucgcugccgcugccgac

SEQ ID NO: 711477 - RNA, 19 nt, Human
ccucgcugccgcugccgac

SEQ ID NO: 711478 - RNA, 18 nt, Human
gaaaaagacuuagaacaa

SEQ ID NO: 711479 - RNA, 18 nt, Human
gagcacagcgcgcgccgc

SEQ ID NO: 711480 - RNA, 22 nt, Human
ucgcugccgcugccgaccucgc

SEQ ID NO: 711481 - RNA, 22 nt, Human
ucgcugccgcugccgaccucgc

SEQ ID NO: 711482 - RNA, 26 nt, Human
ugagaagaaaguccauauaaacccca

SEQ ID NO: 711483 - RNA, 20 nt, Human
ugccgcugccgaccucgcug

SEQ ID NO: 711484 - RNA, 20 nt, Human
ugccgcugccgaccucgcug

SEQ ID NO: 711485 - RNA, 23 nt, Human
uuuacauguaaauaagaaaagag

SEQ ID NO: 711486 - RNA, 26 nt, Human
aaaaacaauccacaguugagcaguug

SEQ ID NO: 711487 - RNA, 20 nt, Human
aaggaaaaguaaaaaacaau

SEQ ID NO: 711488 - RNA, 22 nt, Human
aggaaaaguaaaaaacaaucca

SEQ ID NO: 711489 - RNA, 25 nt, Human
cagcgaagaaaaauauauacgaacc

SEQ ID NO: 711490 - RNA, 26 nt, Human
cugccgagcugccccacgagccgcac

SEQ ID NO: 711491 - RNA, 23 nt, Human
gcgaagaaaaauauauacgaacc

SEQ ID NO: 711492 - RNA, 24 nt, Human
guaacagcgaagaaaaauauauac

SEQ ID NO: 711493 - RNA, 23 nt, Human
uaaaaaacaauccacaguugagc

SEQ ID NO: 711494 - RNA, 24 nt, Human
uaaaaaacaauccacaguugagca

SEQ ID NO: 711495 - RNA, 19 nt, Human
uuacauguacaaaugcugc

SEQ ID NO: 711496 - RNA, 26 nt, Human
aaaaaaaaaaaaaucaggcacaaaaa

SEQ ID NO: 711497 - RNA, 23 nt, Human
aaaaaaaaaaaucaggcacaaaa

SEQ ID NO: 711498 - RNA, 24 nt, Human
aaaaaaaacaaaaacaguaacaac

SEQ ID NO: 711499 - RNA, 19 nt, Human
aaaaaaacaaaaacaguaa

SEQ ID NO: 711500 - RNA, 22 nt, Human
aaaaaacaaaaacaguaacaac

SEQ ID NO: 711501 - RNA, 22 nt, Human
aaacaaaaacaguaacaacaac

SEQ ID NO: 711502 - RNA, 24 nt, Human
aaacaaaaacaguaacaacaacaa

SEQ ID NO: 711503 - RNA, 18 nt, Human
aaacacacaaauggucag

SEQ ID NO: 711504 - RNA, 23 nt, Human
aaacacacaaauggucagaaaug

SEQ ID NO: 711505 - RNA, 19 nt, Human
aaacagaacacaaauccca

SEQ ID NO: 711506 - RNA, 23 nt, Human
aaacagaacacaaaucccaacaa

SEQ ID NO: 711507 - RNA, 29 nt, Human
aaagggaaaaauuaaauagcuucagaggg

SEQ ID NO: 711508 - RNA, 30 nt, Human
aaauaaaccaucccuucccuuccccccacc

SEQ ID NO: 711509 - RNA, 22 nt, Human
aacagaacacaaaucccaacaa

SEQ ID NO: 711510 - RNA, 22 nt, Human
aacugaggcaggaaguaaggau

SEQ ID NO: 711511 - RNA, 26 nt, Human
aacuucacaaaggcagaggcccagcc

SEQ ID NO: 711512 - RNA, 19 nt, Human
aagaagcaaaggaaaaagc

SEQ ID NO: 711513 - RNA, 21 nt, Human
aagaagcaaaggaaaaagcac

SEQ ID NO: 711514 - RNA, 20 nt, Human
aagagaaaggggagggggag

SEQ ID NO: 711515 - RNA, 25 nt, Human
aagcaaguacaaaaacagaacacaa

SEQ ID NO: 711516 - RNA, 21 nt, Human
aagcacaaagcgucugaguca

SEQ ID NO: 711517 - RNA, 25 nt, Human
aaggggagggggagagacucuagag

SEQ ID NO: 711518 - RNA, 24 nt, Human
aauaccaaucuuagaguacaacug

SEQ ID NO: 711519 - RNA, 18 nt, Human
acaaacucguggcuauga

SEQ ID NO: 711520 - RNA, 19 nt, Human
acaaagcggcgccggcccc

SEQ ID NO: 711521 - RNA, 18 nt, Human
acaauaggaaagggaaaa

SEQ ID NO: 711522 - RNA, 22 nt, Human
acaccccggucucaagaagcaa

SEQ ID NO: 711523 - RNA, 24 nt, Human
acaccccggucucaagaagcaaag

SEQ ID NO: 711524 - RNA, 21 nt, Human
acagaacacaaaucccaacaa

SEQ ID NO: 711525 - RNA, 24 nt, Human
acaguaacaacaacaaacacacaa

SEQ ID NO: 711526 - RNA, 20 nt, Human
accaucccuucccuuccccc

SEQ ID NO: 711527 - RNA, 19 nt, Human
acccggccgccagcaccgc

SEQ ID NO: 711528 - RNA, 19 nt, Human
acguguuguuggaggaggc

SEQ ID NO: 711529 - RNA, 21 nt, Human
acucugugacuacaagagcca

SEQ ID NO: 711530 - RNA, 18 nt, Human
acuguuccugcacuuuua

SEQ ID NO: 711531 - RNA, 21 nt, Human
agaaaugucauccuuaaaccc

SEQ ID NO: 711532 - RNA, 26 nt, Human
agccaguccuccgaccuuuucaccca

SEQ ID NO: 711533 - RNA, 19 nt, Human
aggaaaaacaggccacaga

SEQ ID NO: 711534 - RNA, 20 nt, Human
aggaaaaagcacaaagcguc

SEQ ID NO: 711535 - RNA, 20 nt, Human
aggcaggaaguaaggaugcu

SEQ ID NO: 711536 - RNA, 19 nt, Human
aggggagggggagagacuc

SEQ ID NO: 711537 - RNA, 18 nt, Human
aguauaaagucagaggaa

SEQ ID NO: 711538 - RNA, 24 nt, Human
aguaugaaaacagcguuucagaaa

SEQ ID NO: 711539 - RNA, 23 nt, Human
aguccuccgaccuuuucacccag

SEQ ID NO: 711540 - RNA, 19 nt, Human
auaggaaagggaaaaauua

SEQ ID NO: 711541 - RNA, 19 nt, Human
auggaaaagagugaaaaag

SEQ ID NO: 711542 - RNA, 23 nt, Human
caaagccuugcaggugaggugac

SEQ ID NO: 711543 - RNA, 23 nt, Human
caaaucccaacaacaugguuuuu

SEQ ID NO: 711544 - RNA, 24 nt, Human
caagaagcaaaggaaaaagcacaa

SEQ ID NO: 711545 - RNA, 20 nt, Human
caaguacaaaaacagaacac

SEQ ID NO: 711546 - RNA, 24 nt, Human
caaguccuuccuggaaauggaaaa

SEQ ID NO: 711547 - RNA, 20 nt, Human
caaguguuggaaagaaagag

SEQ ID NO: 711548 - RNA, 23 nt, Human
cacaaaccccaccuccccuggga

SEQ ID NO: 711549 - RNA, 24 nt, Human
cacaccccggucucaagaagcaaa

SEQ ID NO: 711550 - RNA, 21 nt, Human
cacacgcacacacauggaccg

SEQ ID NO: 711551 - RNA, 20 nt, Human
cacgaaacccuucaagggcu

SEQ ID NO: 711552 - RNA, 19 nt, Human
cacucugugacuacaagag

SEQ ID NO: 711553 - RNA, 23 nt, Human
cagacaaaucuacgacaaaaaaa

SEQ ID NO: 711554 - RNA, 21 nt, Human
cagaguucuggcauaacacau

SEQ ID NO: 711555 - RNA, 21 nt, Human
cagccugcagccaaacuccag

SEQ ID NO: 711556 - RNA, 19 nt, Human
cagcuaaaaacuguaaaac

SEQ ID NO: 711557 - RNA, 24 nt, Human
caguaacaacaacaaacacacaaa

SEQ ID NO: 711558 - RNA, 22 nt, Human
caucccuucccuuccccccacc

SEQ ID NO: 711559 - RNA, 23 nt, Human
ccaaaagaguuaaguuucaaaaa

SEQ ID NO: 711560 - RNA, 22 nt, Human
ccaaacuccagcaucccacacc

SEQ ID NO: 711561 - RNA, 19 nt, Human
ccaagcaaguacaaaaaca

SEQ ID NO: 711562 - RNA, 22 nt, Human
ccacaaagccuugcaggugagg

SEQ ID NO: 711563 - RNA, 20 nt, Human
ccagccucagacuaucaaaa

SEQ ID NO: 711564 - RNA, 19 nt, Human
ccaucccuucccuuccccc

SEQ ID NO: 711565 - RNA, 18 nt, Human
ccccccaccccaccccca

SEQ ID NO: 711566 - RNA, 21 nt, Human
cccucucacagcccgcugcaa

SEQ ID NO: 711567 - RNA, 18 nt, Human
ccgaaccaaacacgccgu

SEQ ID NO: 711568 - RNA, 26 nt, Human
ccgccagcaccgccgaccccucccag

SEQ ID NO: 711569 - RNA, 25 nt, Human
ccgccgaccccucccagagugacgc

SEQ ID NO: 711570 - RNA, 19 nt, Human
ccggccccucucacagccc

SEQ ID NO: 711571 - RNA, 23 nt, Human
ccggucucaagaagcaaaggaaa

SEQ ID NO: 711572 - RNA, 22 nt, Human
ccucagacuaucaaaacaaagu

SEQ ID NO: 711573 - RNA, 23 nt, Human
ccuccacagcugugucugucaug

SEQ ID NO: 711574 - RNA, 24 nt, Human
ccuccccugggagcuuguaacaaa

SEQ ID NO: 711575 - RNA, 25 nt, Human
ccuccgaccuuuucacccagugcca

SEQ ID NO: 711576 - RNA, 20 nt, Human
cgcugcaagccggcagcgcu

SEQ ID NO: 711577 - RNA, 23 nt, Human
cggucucaagaagcaaaggaaaa

SEQ ID NO: 711578 - RNA, 21 nt, Human
cgguguauguacuguaucccu

SEQ ID NO: 711579 - RNA, 21 nt, Human
cguauaaaacaccauaucaca

SEQ ID NO: 711580 - RNA, 19 nt, Human
cgucggggcagcagaccug

SEQ ID NO: 711581 - RNA, 20 nt, Human
cuagucuaacaaacugcagu

SEQ ID NO: 711582 - RNA, 22 nt, Human
cuauggaauccuccaaccucag

SEQ ID NO: 711583 - RNA, 18 nt, Human
cucaacgauuuuuccuac

SEQ ID NO: 711584 - RNA, 19 nt, Human
cuccaaccucagcucuagu

SEQ ID NO: 711585 - RNA, 23 nt, Human
cuccagcaucccacaccgcagcu

SEQ ID NO: 711586 - RNA, 21 nt, Human
cucugccccaggccccccucc

SEQ ID NO: 711587 - RNA, 22 nt, Human
cucugccccaggccccccucca

SEQ ID NO: 711588 - RNA, 23 nt, Human
cugaaugccaaagcuuggaagcc

SEQ ID NO: 711589 - RNA, 22 nt, Human
cugcagccaaacuccagcaucc

SEQ ID NO: 711590 - RNA, 18 nt, Human
cugcagccacucugugac

SEQ ID NO: 711591 - RNA, 22 nt, Human
cugcauguagggaaguuggaag

SEQ ID NO: 711592 - RNA, 23 nt, Human
cuucacggagccccuucuuagag

SEQ ID NO: 711593 - RNA, 23 nt, Human
cuuccaaagcuguauugucuaca

SEQ ID NO: 711594 - RNA, 20 nt, Human
cuucccuuccccccaccccc

SEQ ID NO: 711595 - RNA, 20 nt, Human
cuuggcaugacuccuaugcc

SEQ ID NO: 711596 - RNA, 21 nt, Human
cuuugcuuuugccccaaaaga

SEQ ID NO: 711597 - RNA, 18 nt, Human
cuuuucuuuccuccacuu

SEQ ID NO: 711598 - RNA, 21 nt, Human
gaagacacaaaccccaccucc

SEQ ID NO: 711599 - RNA, 24 nt, Human
gaccgaaccaaacacgccguggaa

SEQ ID NO: 711600 - RNA, 25 nt, Human
gagcagggagggggcuuucucagug

SEQ ID NO: 711601 - RNA, 18 nt, Human
gagccccuucuuagagca

SEQ ID NO: 711602 - RNA, 23 nt, Human
gagcgcacugcaggcagcgcggc

SEQ ID NO: 711603 - RNA, 22 nt, Human
gagcucacacgaaacccuucaa

SEQ ID NO: 711604 - RNA, 20 nt, Human
gcaaauaaaccaucccuucc

SEQ ID NO: 711605 - RNA, 23 nt, Human
gcacuauggaauccuccaaccuc

SEQ ID NO: 711606 - RNA, 22 nt, Human
gccaaaccuuuuuuuuucuucu

SEQ ID NO: 711607 - RNA, 24 nt, Human
gccccaggccccccuccaggguac

SEQ ID NO: 711608 - RNA, 20 nt, Human
gccugcagccaaacuccagc

SEQ ID NO: 711609 - RNA, 25 nt, Human
gcgcggcucugggaagaaccgccuc

SEQ ID NO: 711610 - RNA, 21 nt, Human
gcugacaugagggcuaugcuu

SEQ ID NO: 711611 - RNA, 25 nt, Human
gcuuuucuuuccuccacuuuucaaa

SEQ ID NO: 711612 - RNA, 24 nt, Human
ggaaauggaaaagagugaaaaaga

SEQ ID NO: 711613 - RNA, 25 nt, Human
ggaccgaaccaaacacgccguggaa

SEQ ID NO: 711614 - RNA, 22 nt, Human
ggacuguaacugacaaaaauaa

SEQ ID NO: 711615 - RNA, 21 nt, Human
ggagggggagagacucuagag

SEQ ID NO: 711616 - RNA, 20 nt, Human
ggcacaaaaaaaucgagcuc

SEQ ID NO: 711617 - RNA, 24 nt, Human
gggcagcagaccugcaucagaggg

SEQ ID NO: 711618 - RNA, 20 nt, Human
ggggaggggauagaaacgcu

SEQ ID NO: 711619 - RNA, 22 nt, Human
gguuuuccuguuacgacgcuca

SEQ ID NO: 711620 - RNA, 24 nt, Human
gucaggcaacuuuaguccuccucc

SEQ ID NO: 711621 - RNA, 19 nt, Human
gugcaaaucagacacgaca

SEQ ID NO: 711622 - RNA, 21 nt, Human
gugucugucaugcuugcuuca

SEQ ID NO: 711623 - RNA, 21 nt, Human
guuucuuugguaacugaggca

SEQ ID NO: 711624 - RNA, 22 nt, Human
uaaccuguaugagacuuccccu

SEQ ID NO: 711625 - RNA, 22 nt, Human
uaagagcacuuuauuauuguuc

SEQ ID NO: 711626 - RNA, 19 nt, Human
uaaggaugcuacauuagac

SEQ ID NO: 711627 - RNA, 21 nt, Human
uacaaaaacagaacacaaauc

SEQ ID NO: 711628 - RNA, 23 nt, Human
uacaaaaacagaacacaaauccc

SEQ ID NO: 711629 - RNA, 22 nt, Human
uacacacaugaagagaagguca

SEQ ID NO: 711630 - RNA, 21 nt, Human
uacauuagacagauguuccac

SEQ ID NO: 711631 - RNA, 21 nt, Human
uacgaggaagcguauaaaaca

SEQ ID NO: 711632 - RNA, 25 nt, Human
uagaaaccagcuauuuuuucuccau

SEQ ID NO: 711633 - RNA, 24 nt, Human
uagcaaguguuggaaagaaagaga

SEQ ID NO: 711634 - RNA, 19 nt, Human
uagcaauaacaaacucgug

SEQ ID NO: 711635 - RNA, 20 nt, Human
uauacacacgcacacacaug

SEQ ID NO: 711636 - RNA, 24 nt, Human
uauacacacgcacacacauggacc

SEQ ID NO: 711637 - RNA, 24 nt, Human
uaugcaaaaguuaaaaaaaaaaaa

SEQ ID NO: 711638 - RNA, 26 nt, Human
uauguacuguauccccgaucgaguau

SEQ ID NO: 711639 - RNA, 24 nt, Human
uauuacagauuuacacacaugaag

SEQ ID NO: 711640 - RNA, 26 nt, Human
ucaaaaaauaccuacaaauuucucug

SEQ ID NO: 711641 - RNA, 25 nt, Human
ucaaaaucacccauauagaaaagug

SEQ ID NO: 711642 - RNA, 24 nt, Human
ucagaaaugucauccuuaaacccu

SEQ ID NO: 711643 - RNA, 25 nt, Human
ucagcucuagucuaacaaacugcca

SEQ ID NO: 711644 - RNA, 18 nt, Human
ucagugcaccagggaccc

SEQ ID NO: 711645 - RNA, 19 nt, Human
ucagugcaccagggacccg

SEQ ID NO: 711646 - RNA, 20 nt, Human
ucaucauggcuugugacuga

SEQ ID NO: 711647 - RNA, 24 nt, Human
ucauugaccaaaaaggagcagcug

SEQ ID NO: 711648 - RNA, 19 nt, Human
ucccacaccgcagcugacc

SEQ ID NO: 711649 - RNA, 18 nt, Human
ucccaggaguguccuccc

SEQ ID NO: 711650 - RNA, 18 nt, Human
uccccccaccccaccccc

SEQ ID NO: 711651 - RNA, 23 nt, Human
uccccugggagcuuguaacaaag

SEQ ID NO: 711652 - RNA, 22 nt, Human
ucccuuccccccaccccacccc

SEQ ID NO: 711653 - RNA, 18 nt, Human
ucccuucccuucccccca

SEQ ID NO: 711654 - RNA, 19 nt, Human
uccuacagaaaauauaggg

SEQ ID NO: 711655 - RNA, 20 nt, Human
uccuccaaccucagcucuag

SEQ ID NO: 711656 - RNA, 21 nt, Human
uccuuacaaguccuuccugga

SEQ ID NO: 711657 - RNA, 22 nt, Human
uccuuacaaguccuuccuggaa

SEQ ID NO: 711658 - RNA, 24 nt, Human
ucgugagccucuggugggccaggu

SEQ ID NO: 711659 - RNA, 21 nt, Human
ugaaaacagcguuucagaagu

SEQ ID NO: 711660 - RNA, 22 nt, Human
ugaaugauuacaauaggaaagg

SEQ ID NO: 711661 - RNA, 19 nt, Human
ugacaaaaauaaacuaauu

SEQ ID NO: 711662 - RNA, 23 nt, Human
ugacuccuaugccgccgcuuccu

SEQ ID NO: 711663 - RNA, 18 nt, Human
ugaguagcuccuggcucu

SEQ ID NO: 711664 - RNA, 25 nt, Human
ugcaaaaguuaaaaaaaaaaaaauc

SEQ ID NO: 711665 - RNA, 18 nt, Human
ugcacaggaucagccucu

SEQ ID NO: 711666 - RNA, 21 nt, Human
ugcaccagggacccggccgcc

SEQ ID NO: 711667 - RNA, 19 nt, Human
ugcaggugaggugaccacg

SEQ ID NO: 711668 - RNA, 21 nt, Human
ugccaaagcuuggaagcccag

SEQ ID NO: 711669 - RNA, 20 nt, Human
ugccccaggccccccuccag

SEQ ID NO: 711670 - RNA, 19 nt, Human
uggaagacacaaaccccac

SEQ ID NO: 711671 - RNA, 24 nt, Human
ugggccaggugggacacagcacac

SEQ ID NO: 711672 - RNA, 22 nt, Human
ugguagagucugcaguccaguu

SEQ ID NO: 711673 - RNA, 22 nt, Human
uguagcaaguguuggaaagaaa

SEQ ID NO: 711674 - RNA, 21 nt, Human
ugucagccugcagccaaacuc

SEQ ID NO: 711675 - RNA, 18 nt, Human
uguggaguccuggccccg

SEQ ID NO: 711676 - RNA, 26 nt, Human
uuaaaaaaaaaaaaaucaggcacaaa

SEQ ID NO: 711677 - RNA, 19 nt, Human
uuccccccaccccaccccc

SEQ ID NO: 711678 - RNA, 20 nt, Human
uuccccccaccccacccccu

SEQ ID NO: 711679 - RNA, 23 nt, Human
uuccuccacuuuucaaaggccug

SEQ ID NO: 711680 - RNA, 23 nt, Human
uugcaaauaaaccaucccuuccc

SEQ ID NO: 711681 - RNA, 22 nt, Human
uugcaagcaccugaaaucuaga

SEQ ID NO: 711682 - RNA, 18 nt, Human
uugcaggugaggugacca

SEQ ID NO: 711683 - RNA, 24 nt, Human
uugucuacauuaaaaaaaacaaaa

SEQ ID NO: 711684 - RNA, 21 nt, Human
uuucacccagugccaauuucc

SEQ ID NO: 711685 - RNA, 18 nt, Human
aaacaucugacuccgccg

SEQ ID NO: 711686 - RNA, 18 nt, Human
aaacaucugacucugcug

SEQ ID NO: 711687 - RNA, 24 nt, Human
aaacccacucuuugaauaugggag

SEQ ID NO: 711688 - RNA, 20 nt, Human
aaaguacccagaaacaucug

SEQ ID NO: 711689 - RNA, 23 nt, Human
aacaagguaaguggcauauccau

SEQ ID NO: 711690 - RNA, 24 nt, Human
aacagaaaggaggaauccacccag

SEQ ID NO: 711691 - RNA, 24 nt, Human
aacauccauaugguccuaaguagc

SEQ ID NO: 711692 - RNA, 20 nt, Human
aacaugcuuuaaggcacaaa

SEQ ID NO: 711693 - RNA, 23 nt, Human
aacccaaacccgcucuuugaaua

SEQ ID NO: 711694 - RNA, 25 nt, Human
aacccaggccaccauuaacacccaa

SEQ ID NO: 711695 - RNA, 20 nt, Human
aaccuggcucugccaccagc

SEQ ID NO: 711696 - RNA, 20 nt, Human
aacuaaaccuccccugcucu

SEQ ID NO: 711697 - RNA, 21 nt, Human
aagaaacugaggaugcgauca

SEQ ID NO: 711698 - RNA, 24 nt, Human
aagacaagcauggagcccacuaga

SEQ ID NO: 711699 - RNA, 22 nt, Human
aagaggcaacccagggaagcca

SEQ ID NO: 711700 - RNA, 19 nt, Human
aagaggccccagccacagc

SEQ ID NO: 711701 - RNA, 18 nt, Human
aagcaaguuacagaugcc

SEQ ID NO: 711702 - RNA, 26 nt, Human
aagccagggccaggugggcaauggga

SEQ ID NO: 711703 - RNA, 26 nt, Human
aagccagggccaggugggcaauggga

SEQ ID NO: 711704 - RNA, 19 nt, Human
aagcccaggaggcccggaa

SEQ ID NO: 711705 - RNA, 19 nt, Human
aagcccaucugccucagag

SEQ ID NO: 711706 - RNA, 19 nt, Human
aaggaaacagggaauucca

SEQ ID NO: 711707 - RNA, 22 nt, Human
aaggaggaaggugcccccaggg

SEQ ID NO: 711708 - RNA, 23 nt, Human
aagggguugcaggaagcaagagg

SEQ ID NO: 711709 - RNA, 20 nt, Human
aaucuaugugagcuguccuu

SEQ ID NO: 711710 - RNA, 21 nt, Human
acacagccacugacacacgcc

SEQ ID NO: 711711 - RNA, 20 nt, Human
acagacacaugcauugaaca

SEQ ID NO: 711712 - RNA, 25 nt, Human
acagagucugccccucccaccaaag

SEQ ID NO: 711713 - RNA, 25 nt, Human
acagagucugccccucucaccaaag

SEQ ID NO: 711714 - RNA, 18 nt, Human
acagaugcaugggcauga

SEQ ID NO: 711715 - RNA, 18 nt, Human
acagcccaggagaggccc

SEQ ID NO: 711716 - RNA, 18 nt, Human
acauggcagaaaagaggc

SEQ ID NO: 711717 - RNA, 22 nt, Human
accacugggaagggagucgguc

SEQ ID NO: 711718 - RNA, 19 nt, Human
acccccagcccaagagaac

SEQ ID NO: 711719 - RNA, 21 nt, Human
acccucauccccaaggaaaca

SEQ ID NO: 711720 - RNA, 18 nt, Human
accgagcugcagaggaca

SEQ ID NO: 711721 - RNA, 20 nt, Human
acgcagcuucaccccagaaa

SEQ ID NO: 711722 - RNA, 19 nt, Human
acgcagggucugcagaugc

SEQ ID NO: 711723 - RNA, 21 nt, Human
acgcuacgcccuggcccugaa

SEQ ID NO: 711724 - RNA, 24 nt, Human
acuccgucaccucucuaugcccca

SEQ ID NO: 711725 - RNA, 23 nt, Human
acugacagaaacccaacaaccaa

SEQ ID NO: 711726 - RNA, 21 nt, Human
acugccugaggggugacuccg

SEQ ID NO: 711727 - RNA, 22 nt, Human
acuggccuugcacuugcaacgc

SEQ ID NO: 711728 - RNA, 23 nt, Human
acuuugcuggccccggcccugac

SEQ ID NO: 711729 - RNA, 24 nt, Human
acuuugcuggcccuggcccugacc

SEQ ID NO: 711730 - RNA, 19 nt, Human
agaaaagaggcaacccagg

SEQ ID NO: 711731 - RNA, 23 nt, Human
agaaaggaagcaccugcccagga

SEQ ID NO: 711732 - RNA, 22 nt, Human
agaaggaugaacccacgccccu

SEQ ID NO: 711733 - RNA, 22 nt, Human
agaaggaugaacucacgccccu

SEQ ID NO: 711734 - RNA, 23 nt, Human
agacaagacaagcauggagccca

SEQ ID NO: 711735 - RNA, 22 nt, Human
agacaauuccaaagcuggagca

SEQ ID NO: 711736 - RNA, 19 nt, Human
agacacaacccaggccacc

SEQ ID NO: 711737 - RNA, 22 nt, Human
agaccaacuaaaccuccccugc

SEQ ID NO: 711738 - RNA, 21 nt, Human
agaccacagagucugccccuc

SEQ ID NO: 711739 - RNA, 19 nt, Human
agagacagaccuggggagc

SEQ ID NO: 711740 - RNA, 21 nt, Human
agagacagaccuggggaggca

SEQ ID NO: 711741 - RNA, 21 nt, Human
agagacagaccuggggaggca

SEQ ID NO: 711742 - RNA, 21 nt, Human
agcagcgccagcaccagcaca

SEQ ID NO: 711743 - RNA, 25 nt, Human
agccaaagucaguguccuuuccccu

SEQ ID NO: 711744 - RNA, 19 nt, Human
agccaagagcuacguucuc

SEQ ID NO: 711745 - RNA, 21 nt, Human
agccacagcaugagaugagcc

SEQ ID NO: 711746 - RNA, 25 nt, Human
agcccaucucccucagagccuccag

SEQ ID NO: 711747 - RNA, 19 nt, Human
agccugugcuggcucagau

SEQ ID NO: 711748 - RNA, 20 nt, Human
agcggccccgugugcaggau

SEQ ID NO: 711749 - RNA, 22 nt, Human
agcugccaucggcucgagaggc

SEQ ID NO: 711750 - RNA, 23 nt, Human
aggacaucauggucacccaaccc

SEQ ID NO: 711751 - RNA, 25 nt, Human
aggagaggaucccaggacugccuga

SEQ ID NO: 711752 - RNA, 19 nt, Human
aggaggagcgagggaagaa

SEQ ID NO: 711753 - RNA, 18 nt, Human
aggaugccuguguggagg

SEQ ID NO: 711754 - RNA, 18 nt, Human
aggcagaaggaugaaccc

SEQ ID NO: 711755 - RNA, 22 nt, Human
aggcagcccugagccucccagg

SEQ ID NO: 711756 - RNA, 21 nt, Human
aggcagccuaggauacaugag

SEQ ID NO: 711757 - RNA, 20 nt, Human
aggcaggcagggcuuggggg

SEQ ID NO: 711758 - RNA, 20 nt, Human
aggcaggcagggcuuggggg

SEQ ID NO: 711759 - RNA, 22 nt, Human
aggcaggcagggcuugggggug

SEQ ID NO: 711760 - RNA, 21 nt, Human
aggcagggcugggcagcgagg

SEQ ID NO: 711761 - RNA, 23 nt, Human
aggcagggcugggcagcgagggc

SEQ ID NO: 711762 - RNA, 21 nt, Human
aggccccaugguggcaggggu

SEQ ID NO: 711763 - RNA, 21 nt, Human
aggccccgugguggcaggggu

SEQ ID NO: 711764 - RNA, 19 nt, Human
aggccucagcagccucugc

SEQ ID NO: 711765 - RNA, 21 nt, Human
aggcggggcugggcagugagg

SEQ ID NO: 711766 - RNA, 19 nt, Human
aggcugcagaggugcuggc

SEQ ID NO: 711767 - RNA, 26 nt, Human
aggcugcagcuuuucugggguggcug

SEQ ID NO: 711768 - RNA, 20 nt, Human
agggaagaagucgcauggug

SEQ ID NO: 711769 - RNA, 22 nt, Human
agggaaggacacagcccagggc

SEQ ID NO: 711770 - RNA, 18 nt, Human
agggagcccuggugggga

SEQ ID NO: 711771 - RNA, 22 nt, Human
agggaggagggcauccaccagg

SEQ ID NO: 711772 - RNA, 22 nt, Human
aggggaggacacagcccagggc

SEQ ID NO: 711773 - RNA, 22 nt, Human
aggggaggacacagcccagggc

SEQ ID NO: 711774 - RNA, 22 nt, Human
aggggaguacacagcccagggc

SEQ ID NO: 711775 - RNA, 19 nt, Human
aggugaggguggggaagac

SEQ ID NO: 711776 - RNA, 23 nt, Human
aggugaggugggaagcggaggca

SEQ ID NO: 711777 - RNA, 21 nt, Human
aguagaaggauacagccuaaa

SEQ ID NO: 711778 - RNA, 20 nt, Human
aguggagaggcuccccugga

SEQ ID NO: 711779 - RNA, 22 nt, Human
aguggugucuggggucacgggc

SEQ ID NO: 711780 - RNA, 18 nt, Human
aguucuccccgcaagccu

SEQ ID NO: 711781 - RNA, 20 nt, Human
auagaagcaacucugucacc

SEQ ID NO: 711782 - RNA, 24 nt, Human
auagaagcaacucugucaccucca

SEQ ID NO: 711783 - RNA, 19 nt, Human
aucauggucacccaacccu

SEQ ID NO: 711784 - RNA, 25 nt, Human
aucucccucagagccuccagagaca

SEQ ID NO: 711785 - RNA, 18 nt, Human
aucucucucccucccucc

SEQ ID NO: 711786 - RNA, 18 nt, Human
aucucucucccucccucc

SEQ ID NO: 711787 - RNA, 23 nt, Human
augaugaugguggugaugaagau

SEQ ID NO: 711788 - RNA, 21 nt, Human
augcccagacgggagccucac

SEQ ID NO: 711789 - RNA, 20 nt, Human
augggccccucuguggcugc

SEQ ID NO: 711790 - RNA, 18 nt, Human
auguagauguguguaugu

SEQ ID NO: 711791 - RNA, 24 nt, Human
augucacaguguuacauggaaagu

SEQ ID NO: 711792 - RNA, 19 nt, Human
caacaaccaaaaggugucc

SEQ ID NO: 711793 - RNA, 24 nt, Human
caacccaggccaccauuaacaccc

SEQ ID NO: 711794 - RNA, 21 nt, Human
caagacaagcauggagcccac

SEQ ID NO: 711795 - RNA, 19 nt, Human
caagaccggggucccggac

SEQ ID NO: 711796 - RNA, 23 nt, Human
caagaccggggucccggacacgg

SEQ ID NO: 711797 - RNA, 19 nt, Human
caagagaacagccaacacc

SEQ ID NO: 711798 - RNA, 23 nt, Human
caagguaaguggcauauccauca

SEQ ID NO: 711799 - RNA, 24 nt, Human
caaguuacagaugcaugggcauga

SEQ ID NO: 711800 - RNA, 19 nt, Human
caaucuaugugagcugucc

SEQ ID NO: 711801 - RNA, 21 nt, Human
cacaagaccggggucccggac

SEQ ID NO: 711802 - RNA, 23 nt, Human
cacacagccacugacacacgccc

SEQ ID NO: 711803 - RNA, 19 nt, Human
cacacuccugcacacagcc

SEQ ID NO: 711804 - RNA, 19 nt, Human
cacagcaucauggguggag

SEQ ID NO: 711805 - RNA, 19 nt, Human
cacagcucagacacucuuu

SEQ ID NO: 711806 - RNA, 27 nt, Human
cacaguccacgaagccucgcauccccc

SEQ ID NO: 711807 - RNA, 24 nt, Human
caccacauggaccaggacacaguc

SEQ ID NO: 711808 - RNA, 19 nt, Human
caccacauuuccccacgca

SEQ ID NO: 711809 - RNA, 19 nt, Human
caccacauuuccccaugca

SEQ ID NO: 711810 - RNA, 18 nt, Human
caccagcaggcuugcagu

SEQ ID NO: 711811 - RNA, 21 nt, Human
caccaggcccuccaucuccug

SEQ ID NO: 711812 - RNA, 18 nt, Human
cacccaacccucaucccc

SEQ ID NO: 711813 - RNA, 18 nt, Human
cacccaacccucaucccc

SEQ ID NO: 711814 - RNA, 20 nt, Human
cacccaacccucauccccaa

SEQ ID NO: 711815 - RNA, 19 nt, Human
cacccaaccgucaucccca

SEQ ID NO: 711816 - RNA, 19 nt, Human
cacccccagugaccucugc

SEQ ID NO: 711817 - RNA, 20 nt, Human
caccugggcaaagccugagc

SEQ ID NO: 711818 - RNA, 19 nt, Human
caccugggcagagcuggag

SEQ ID NO: 711819 - RNA, 20 nt, Human
caccuugagguacagcagga

SEQ ID NO: 711820 - RNA, 19 nt, Human
cacgcccucagccccaccc

SEQ ID NO: 711821 - RNA, 20 nt, Human
cacgcccucagccccacccc

SEQ ID NO: 711822 - RNA, 20 nt, Human
cacugaagugagggcaaggu

SEQ ID NO: 711823 - RNA, 23 nt, Human
cacugacacacgcccucgugcac

SEQ ID NO: 711824 - RNA, 21 nt, Human
cacugggugggaccuugcacc

SEQ ID NO: 711825 - RNA, 19 nt, Human
cacuuccucucucucucuc

SEQ ID NO: 711826 - RNA, 21 nt, Human
cagaaacccaacaaccaaaag

SEQ ID NO: 711827 - RNA, 23 nt, Human
cagaacucgaggaggcagcccug

SEQ ID NO: 711828 - RNA, 18 nt, Human
cagaagccaggugaggug

SEQ ID NO: 711829 - RNA, 24 nt, Human
cagagucugccccucccaccaaag

SEQ ID NO: 711830 - RNA, 24 nt, Human
cagagucugccccucucaccaaag

SEQ ID NO: 711831 - RNA, 19 nt, Human
cagaucaaaagaacugacu

SEQ ID NO: 711832 - RNA, 22 nt, Human
cagcagcgccagcaccagcaca

SEQ ID NO: 711833 - RNA, 20 nt, Human
cagcaggcuugcaguccugg

SEQ ID NO: 711834 - RNA, 20 nt, Human
cagcaggcuugcagucuugg

SEQ ID NO: 711835 - RNA, 18 nt, Human
cagccaacacccaccucg

SEQ ID NO: 711836 - RNA, 20 nt, Human
cagccaauauugcccaggag

SEQ ID NO: 711837 - RNA, 19 nt, Human
cagcccaagagaacagcca

SEQ ID NO: 711838 - RNA, 19 nt, Human
cagcccccaagcccaucuc

SEQ ID NO: 711839 - RNA, 21 nt, Human
cagcccccaagcccaucuccc

SEQ ID NO: 711840 - RNA, 23 nt, Human
cagcccccaagcccaucucccuc

SEQ ID NO: 711841 - RNA, 19 nt, Human
cagcccucauuccuagggg

SEQ ID NO: 711842 - RNA, 21 nt, Human
cagcugcaggguaccugggac

SEQ ID NO: 711843 - RNA, 24 nt, Human
cagcugcccaggcccagaaggaaa

SEQ ID NO: 711844 - RNA, 19 nt, Human
cagcugccccagcucugag

SEQ ID NO: 711845 - RNA, 24 nt, Human
cagcugccccagcucugagggagg

SEQ ID NO: 711846 - RNA, 19 nt, Human
cagcuggccacccguccca

SEQ ID NO: 711847 - RNA, 21 nt, Human
caggccccaggccagcaaggg

SEQ ID NO: 711848 - RNA, 22 nt, Human
caggcccuggguuacaaacccu

SEQ ID NO: 711849 - RNA, 22 nt, Human
caggccuggcaccagcacuuug

SEQ ID NO: 711850 - RNA, 19 nt, Human
cagggccaggugggcaaug

SEQ ID NO: 711851 - RNA, 19 nt, Human
cagggccaggugggcaaug

SEQ ID NO: 711852 - RNA, 26 nt, Human
cagggcccaggaaggacaagggggcc

SEQ ID NO: 711853 - RNA, 18 nt, Human
cagugaccucugcccuuu

SEQ ID NO: 711854 - RNA, 21 nt, Human
cagugaccucugcccuuuccc

SEQ ID NO: 711855 - RNA, 18 nt, Human
cagugggucuaaaggaga

SEQ ID NO: 711856 - RNA, 18 nt, Human
cagugggucuaaaggaga

SEQ ID NO: 711857 - RNA, 23 nt, Human
caucacagugcuguccagacccc

SEQ ID NO: 711858 - RNA, 18 nt, Human
cauccaacccucaucccc

SEQ ID NO: 711859 - RNA, 20 nt, Human
caucgcccacaugccugcug

SEQ ID NO: 711860 - RNA, 21 nt, Human
caucugaggcaaggacuaauu

SEQ ID NO: 711861 - RNA, 19 nt, Human
caugcgcucuugcucuugc

SEQ ID NO: 711862 - RNA, 25 nt, Human
cauuuacuucucaaucaccuacaua

SEQ ID NO: 711863 - RNA, 20 nt, Human
ccaagagaacagccaacacc

SEQ ID NO: 711864 - RNA, 23 nt, Human
ccaagugagcucuagccaccugc

SEQ ID NO: 711865 - RNA, 19 nt, Human
ccacacccggggcuggagc

SEQ ID NO: 711866 - RNA, 23 nt, Human
ccacagagucugccccucccacc

SEQ ID NO: 711867 - RNA, 23 nt, Human
ccacagagucugccccucucacc

SEQ ID NO: 711868 - RNA, 24 nt, Human
ccaccaggcccuccaucuccuggg

SEQ ID NO: 711869 - RNA, 21 nt, Human
ccacccaggacaugcccagac

SEQ ID NO: 711870 - RNA, 23 nt, Human
ccacccaggacaugcccagacgg

SEQ ID NO: 711871 - RNA, 25 nt, Human
ccaccccugccucacauggcaacgc

SEQ ID NO: 711872 - RNA, 23 nt, Human
ccaccugccuacccugccaucug

SEQ ID NO: 711873 - RNA, 23 nt, Human
ccacgcccccugcccgugcaugg

SEQ ID NO: 711874 - RNA, 19 nt, Human
ccacuggccuugcacuugc

SEQ ID NO: 711875 - RNA, 21 nt, Human
ccacuggccuugcacuugcaa

SEQ ID NO: 711876 - RNA, 26 nt, Human
ccacugggaagggagucggucacaga

SEQ ID NO: 711877 - RNA, 22 nt, Human
ccagagacagaccuggggaggc

SEQ ID NO: 711878 - RNA, 22 nt, Human
ccagagacagaccuggggaggc

SEQ ID NO: 711879 - RNA, 19 nt, Human
ccagcacuuugagccucag

SEQ ID NO: 711880 - RNA, 22 nt, Human
ccagcagaagcccaggaggccc

SEQ ID NO: 711881 - RNA, 19 nt, Human
ccagcccaagagaacagcc

SEQ ID NO: 711882 - RNA, 22 nt, Human
ccagcccaagcucugcuccauc

SEQ ID NO: 711883 - RNA, 21 nt, Human
ccagcccagcccagaggcucu

SEQ ID NO: 711884 - RNA, 23 nt, Human
ccaggacacaguccacgaagccu

SEQ ID NO: 711885 - RNA, 21 nt, Human
ccaggacaucauggucaccca

SEQ ID NO: 711886 - RNA, 24 nt, Human
ccaggagcccacaccuugagguac

SEQ ID NO: 711887 - RNA, 20 nt, Human
ccaggaggagcgagggaaga

SEQ ID NO: 711888 - RNA, 22 nt, Human
ccaggcagacuagaggacccga

SEQ ID NO: 711889 - RNA, 26 nt, Human
ccagggccaggugggcaaugggaggc

SEQ ID NO: 711890 - RNA, 26 nt, Human
ccagggccaggugggcaaugggaggc

SEQ ID NO: 711891 - RNA, 23 nt, Human
ccauagccuaggguagaccugga

SEQ ID NO: 711892 - RNA, 22 nt, Human
ccaugggccccucuguggcuga

SEQ ID NO: 711893 - RNA, 20 nt, Human
ccaugguggcaggggugggg

SEQ ID NO: 711894 - RNA, 21 nt, Human
ccaugugcuagaggcagcucc

SEQ ID NO: 711895 - RNA, 19 nt, Human
cccaagagaacagccaaca

SEQ ID NO: 711896 - RNA, 21 nt, Human
cccaagagaacagccaacacc

SEQ ID NO: 711897 - RNA, 23 nt, Human
cccaaggaaacacagcccagggc

SEQ ID NO: 711898 - RNA, 21 nt, Human
cccacagaacucgaggaggca

SEQ ID NO: 711899 - RNA, 24 nt, Human
cccacagaacucgaggaggcagcc

SEQ ID NO: 711900 - RNA, 21 nt, Human
cccacauggcagaaaagaggc

SEQ ID NO: 711901 - RNA, 18 nt, Human
cccaccaaagcccaggca

SEQ ID NO: 711902 - RNA, 24 nt, Human
cccagaaacaucugacucugcugu

SEQ ID NO: 711903 - RNA, 19 nt, Human
cccagcacagaggcaguca

SEQ ID NO: 711904 - RNA, 21 nt, Human
cccagcccagaggcucugcag

SEQ ID NO: 711905 - RNA, 22 nt, Human
cccagcugcccaggcccagaag

SEQ ID NO: 711906 - RNA, 21 nt, Human
cccaggaggcccggaaggcac

SEQ ID NO: 711907 - RNA, 23 nt, Human
cccaggcagaaggaugaacccac

SEQ ID NO: 711908 - RNA, 21 nt, Human
cccaggccccaggccagcaag

SEQ ID NO: 711909 - RNA, 22 nt, Human
cccagugaccucugcccuuucc

SEQ ID NO: 711910 - RNA, 19 nt, Human
cccaguugucacuugccuu

SEQ ID NO: 711911 - RNA, 23 nt, Human
cccaucucccucagagccuccag

SEQ ID NO: 711912 - RNA, 22 nt, Human
ccccagaaacugacagaaaccc

SEQ ID NO: 711913 - RNA, 24 nt, Human
ccccagaaacugacagaaacccaa

SEQ ID NO: 711914 - RNA, 24 nt, Human
ccccagaaacugacagaaaccucg

SEQ ID NO: 711915 - RNA, 25 nt, Human
ccccagccacagcaugagaugagcc

SEQ ID NO: 711916 - RNA, 23 nt, Human
ccccagugaccucugcccuuucc

SEQ ID NO: 711917 - RNA, 18 nt, Human
cccccagaccuuggcccu

SEQ ID NO: 711918 - RNA, 24 nt, Human
cccccagcccaagagaacagccaa

SEQ ID NO: 711919 - RNA, 26 nt, Human
cccccagcccaagagaacagccaaca

SEQ ID NO: 711920 - RNA, 20 nt, Human
cccccugagcugcagcucaa

SEQ ID NO: 711921 - RNA, 23 nt, Human
cccccuggacaugaccaccuccc

SEQ ID NO: 711922 - RNA, 20 nt, Human
ccccucucuccuuuuguguc

SEQ ID NO: 711923 - RNA, 21 nt, Human
ccccucuguggcugcugccug

SEQ ID NO: 711924 - RNA, 23 nt, Human
ccccugagcugcagcucaagggc

SEQ ID NO: 711925 - RNA, 26 nt, Human
ccccugggaggcagcugccccagcuc

SEQ ID NO: 711926 - RNA, 20 nt, Human
cccgagcaugucagcucugc

SEQ ID NO: 711927 - RNA, 21 nt, Human
cccgcaagccuggagggagca

SEQ ID NO: 711928 - RNA, 20 nt, Human
cccggcccugaccgcagcac

SEQ ID NO: 711929 - RNA, 18 nt, Human
cccucagccccaccccac

SEQ ID NO: 711930 - RNA, 25 nt, Human
cccugagcugcagcucaagggccuc

SEQ ID NO: 711931 - RNA, 20 nt, Human
cccugaguggaugcaccugg

SEQ ID NO: 711932 - RNA, 23 nt, Human
cccugaguggaugcaccuggcuc

SEQ ID NO: 711933 - RNA, 21 nt, Human
ccggugcaggcccacagaacu

SEQ ID NO: 711934 - RNA, 23 nt, Human
ccuaacacccuggaaucccugcc

SEQ ID NO: 711935 - RNA, 18 nt, Human
ccuagagcccccaagccc

SEQ ID NO: 711936 - RNA, 18 nt, Human
ccuagagcccccaagccc

SEQ ID NO: 711937 - RNA, 23 nt, Human
ccuagagcccccaagcccaucuc

SEQ ID NO: 711938 - RNA, 18 nt, Human
ccuaggcacagcccagga

SEQ ID NO: 711939 - RNA, 23 nt, Human
ccucacaggauggacaguggugu

SEQ ID NO: 711940 - RNA, 19 nt, Human
ccucagagccuccagagac

SEQ ID NO: 711941 - RNA, 21 nt, Human
ccucagagccuccagagacag

SEQ ID NO: 711942 - RNA, 23 nt, Human
ccucagagccuccagagacagaa

SEQ ID NO: 711943 - RNA, 23 nt, Human
ccucagagccuccagagacagaa

SEQ ID NO: 711944 - RNA, 19 nt, Human
ccucagccccaccccaccc

SEQ ID NO: 711945 - RNA, 21 nt, Human
ccucagccccaccccaccccu

SEQ ID NO: 711946 - RNA, 22 nt, Human
ccucccuccuucccucccuccc

SEQ ID NO: 711947 - RNA, 20 nt, Human
ccuccgugucacagcugccc

SEQ ID NO: 711948 - RNA, 23 nt, Human
ccuccuacagcccccaagcccau

SEQ ID NO: 711949 - RNA, 23 nt, Human
ccuccuagagcccccaagcccau

SEQ ID NO: 711950 - RNA, 23 nt, Human
ccuccuagagcccccaagcccau

SEQ ID NO: 711951 - RNA, 22 nt, Human
ccuccuccuacagcccccaagc

SEQ ID NO: 711952 - RNA, 22 nt, Human
ccuccuccuagagcccccaagc

SEQ ID NO: 711953 - RNA, 22 nt, Human
ccuccuccuagagcccccaagc

SEQ ID NO: 711954 - RNA, 20 nt, Human
ccuccugggacaaacccaaa

SEQ ID NO: 711955 - RNA, 21 nt, Human
ccuccugggacaaacccaaac

SEQ ID NO: 711956 - RNA, 24 nt, Human
ccucgcaucccccugagcugcagc

SEQ ID NO: 711957 - RNA, 21 nt, Human
ccucucuccuuuugugucucu

SEQ ID NO: 711958 - RNA, 19 nt, Human
ccugaccgcagcacuugga

SEQ ID NO: 711959 - RNA, 19 nt, Human
ccugaccgcagcacuugga

SEQ ID NO: 711960 - RNA, 20 nt, Human
ccugagcugcagcucaaggg

SEQ ID NO: 711961 - RNA, 24 nt, Human
ccugccucacauggcaacgcaggg

SEQ ID NO: 711962 - RNA, 23 nt, Human
ccugcuggggcagggucugcuau

SEQ ID NO: 711963 - RNA, 23 nt, Human
ccugcuggggcagggucugcuau

SEQ ID NO: 711964 - RNA, 22 nt, Human
ccuggagggagcauggccucca

SEQ ID NO: 711965 - RNA, 21 nt, Human
ccuggcccagaccugccucuc

SEQ ID NO: 711966 - RNA, 20 nt, Human
ccuggcccugaccgcagcac

SEQ ID NO: 711967 - RNA, 23 nt, Human
ccuuuucacauccugugcuguuu

SEQ ID NO: 711968 - RNA, 23 nt, Human
ccuuuugcaucugaggcaaggac

SEQ ID NO: 711969 - RNA, 23 nt, Human
ccuuuugcauuugaggcaaggac

SEQ ID NO: 711970 - RNA, 22 nt, Human
cgagggaagaagucgcauggug

SEQ ID NO: 711971 - RNA, 20 nt, Human
cgcccucagccccaccccac

SEQ ID NO: 711972 - RNA, 21 nt, Human
cgcccucagccccaccccacc

SEQ ID NO: 711973 - RNA, 19 nt, Human
cgcccuggcccugaagacg

SEQ ID NO: 711974 - RNA, 22 nt, Human
cggcagagaggacggauguggg

SEQ ID NO: 711975 - RNA, 21 nt, Human
cggucacagagggaaagagaa

SEQ ID NO: 711976 - RNA, 22 nt, Human
cgugcugcacacaguccaaggg

SEQ ID NO: 711977 - RNA, 22 nt, Human
cuacagcccccaagcccaucuc

SEQ ID NO: 711978 - RNA, 23 nt, Human
cuagagcccccaagcccaucugc

SEQ ID NO: 711979 - RNA, 21 nt, Human
cucaaucuaugugagcugucc

SEQ ID NO: 711980 - RNA, 20 nt, Human
cucacaagccugugagccac

SEQ ID NO: 711981 - RNA, 23 nt, Human
cucacagagaaccugaggcccag

SEQ ID NO: 711982 - RNA, 21 nt, Human
cucacagcucagacacucuuc

SEQ ID NO: 711983 - RNA, 24 nt, Human
cucagaccacagagucugccccuc

SEQ ID NO: 711984 - RNA, 22 nt, Human
cucagccccaccccaccccugc

SEQ ID NO: 711985 - RNA, 22 nt, Human
cucaggccuggcaccagcacuu

SEQ ID NO: 711986 - RNA, 24 nt, Human
cucauccccaaggaaacacagccc

SEQ ID NO: 711987 - RNA, 18 nt, Human
cuccagagucugggccug

SEQ ID NO: 711988 - RNA, 18 nt, Human
cuccccgcaagccuggag

SEQ ID NO: 711989 - RNA, 22 nt, Human
cucggggccccacaggauggcc

SEQ ID NO: 711990 - RNA, 19 nt, Human
cucucucuaucucucuccc

SEQ ID NO: 711991 - RNA, 20 nt, Human
cucucucucucuaucucucu

SEQ ID NO: 711992 - RNA, 22 nt, Human
cugacacccuggaaucccugcc

SEQ ID NO: 711993 - RNA, 20 nt, Human
cugacacccuggagucccug

SEQ ID NO: 711994 - RNA, 21 nt, Human
cugacagccucagccugugcu

SEQ ID NO: 711995 - RNA, 19 nt, Human
cugacuauucuaauuacgu

SEQ ID NO: 711996 - RNA, 18 nt, Human
cugacuauucuaauuacu

SEQ ID NO: 711997 - RNA, 19 nt, Human
cugagcccagagucccacc

SEQ ID NO: 711998 - RNA, 24 nt, Human
cugaggcaaggacuaauugagauu

SEQ ID NO: 711999 - RNA, 18 nt, Human
cugcagaggacagguuuc

SEQ ID NO: 712000 - RNA, 18 nt, Human
cugcagcaccuuccacug

SEQ ID NO: 712001 - RNA, 27 nt, Human
cugcccagaaacaucugacuccgccgu

SEQ ID NO: 712002 - RNA, 19 nt, Human
cugcccagcggccccgugu

SEQ ID NO: 712003 - RNA, 22 nt, Human
cugcugccuggguccaagcuga

SEQ ID NO: 712004 - RNA, 23 nt, Human
cuggcccuggcccugaccgcagc

SEQ ID NO: 712005 - RNA, 22 nt, Human
cugggacaaacccaaacccacu

SEQ ID NO: 712006 - RNA, 22 nt, Human
cugggacaaacccaaacccgcu

SEQ ID NO: 712007 - RNA, 20 nt, Human
cugggccugggaucccugca

SEQ ID NO: 712008 - RNA, 21 nt, Human
cugggguacaaugcaaaguga

SEQ ID NO: 712009 - RNA, 20 nt, Human
cugugcuguuuucagcauca

SEQ ID NO: 712010 - RNA, 20 nt, Human
cuguuccugccuuuucacau

SEQ ID NO: 712011 - RNA, 24 nt, Human
cuuccuguaaccaagggcugaaag

SEQ ID NO: 712012 - RNA, 19 nt, Human
cuuugaccagcaucucucc

SEQ ID NO: 712013 - RNA, 22 nt, Human
cuuugcuggcccuggcccugac

SEQ ID NO: 712014 - RNA, 21 nt, Human
gaaacugacagaaacccaaca

SEQ ID NO: 712015 - RNA, 20 nt, Human
gaagacggaggaggagccga

SEQ ID NO: 712016 - RNA, 23 nt, Human
gaaggacaagggggccugcuggg

SEQ ID NO: 712017 - RNA, 23 nt, Human
gaaggacaagggggccugcuggg

SEQ ID NO: 712018 - RNA, 19 nt, Human
gaaguucuccccgcaagcc

SEQ ID NO: 712019 - RNA, 18 nt, Human
gacacacgcccucgugca

SEQ ID NO: 712020 - RNA, 21 nt, Human
gacauccugggggugugaggg

SEQ ID NO: 712021 - RNA, 20 nt, Human
gaccaggacccaggaaggac

SEQ ID NO: 712022 - RNA, 20 nt, Human
gacccagcaggcagcgacgg

SEQ ID NO: 712023 - RNA, 21 nt, Human
gaccugccucucucuuuccuc

SEQ ID NO: 712024 - RNA, 21 nt, Human
gaccugcgucucucuuuccuc

SEQ ID NO: 712025 - RNA, 18 nt, Human
gacgggagccucacagga

SEQ ID NO: 712026 - RNA, 26 nt, Human
gagaaugaugugcugagaccaacuaa

SEQ ID NO: 712027 - RNA, 20 nt, Human
gagaggcccaggccccaggc

SEQ ID NO: 712028 - RNA, 19 nt, Human
gagccacucagagccgcga

SEQ ID NO: 712029 - RNA, 21 nt, Human
gagcccccaagcccaucuccc

SEQ ID NO: 712030 - RNA, 22 nt, Human
gagcccccaagcccaucugccu

SEQ ID NO: 712031 - RNA, 21 nt, Human
gagcguagccaugagccacgc

SEQ ID NO: 712032 - RNA, 21 nt, Human
gagcugggguugagcaccucc

SEQ ID NO: 712033 - RNA, 20 nt, Human
gagcuuacuccaccuccgcc

SEQ ID NO: 712034 - RNA, 22 nt, Human
gaggaaggugcccccagggccc

SEQ ID NO: 712035 - RNA, 18 nt, Human
gaggaggagccgagagcu

SEQ ID NO: 712036 - RNA, 22 nt, Human
gaggaggcaugucccagcaugg

SEQ ID NO: 712037 - RNA, 22 nt, Human
gaggaggcaugucccagcaugg

SEQ ID NO: 712038 - RNA, 20 nt, Human
gaggaguagcugacaaggca

SEQ ID NO: 712039 - RNA, 23 nt, Human
gaggaucccaggacugccugagg

SEQ ID NO: 712040 - RNA, 18 nt, Human
gaggaugccuguguggag

SEQ ID NO: 712041 - RNA, 23 nt, Human
gaggcaggcagggcuugggggug

SEQ ID NO: 712042 - RNA, 23 nt, Human
gaggguggggaagacaauuccaa

SEQ ID NO: 712043 - RNA, 21 nt, Human
gagucccugccuccuccuaga

SEQ ID NO: 712044 - RNA, 18 nt, Human
gagugcacagacaacagc

SEQ ID NO: 712045 - RNA, 21 nt, Human
gaucccaggacugccugaggg

SEQ ID NO: 712046 - RNA, 19 nt, Human
gauucaauguccacacccg

SEQ ID NO: 712047 - RNA, 25 nt, Human
gcacagcccaggagagggggaacgc

SEQ ID NO: 712048 - RNA, 22 nt, Human
gcagaagcccaggaggcccgga

SEQ ID NO: 712049 - RNA, 20 nt, Human
gcagaggacagguuucugga

SEQ ID NO: 712050 - RNA, 18 nt, Human
gcagccuaggauacauga

SEQ ID NO: 712051 - RNA, 21 nt, Human
gcaggcccacagaacucgagg

SEQ ID NO: 712052 - RNA, 22 nt, Human
gcaggcugcagaggugcuggca

SEQ ID NO: 712053 - RNA, 26 nt, Human
gcagugcuggcugaggacaggcgggg

SEQ ID NO: 712054 - RNA, 26 nt, Human
gcagugcuggcuggggacaggcaggg

SEQ ID NO: 712055 - RNA, 21 nt, Human
gcauauccaucaccucacaca

SEQ ID NO: 712056 - RNA, 18 nt, Human
gcccacaugccugcugug

SEQ ID NO: 712057 - RNA, 24 nt, Human
gcccacaugccugcugugugcgua

SEQ ID NO: 712058 - RNA, 21 nt, Human
gcccagaaauugcaucgugcu

SEQ ID NO: 712059 - RNA, 18 nt, Human
gcccaggagaggaguagc

SEQ ID NO: 712060 - RNA, 24 nt, Human
gcccaggagaggcccaggccccag

SEQ ID NO: 712061 - RNA, 26 nt, Human
gcccaggguaucuuggacacccagcc

SEQ ID NO: 712062 - RNA, 19 nt, Human
gccccagccacagcaugag

SEQ ID NO: 712063 - RNA, 23 nt, Human
gccccggcccugaccgcagcacu

SEQ ID NO: 712064 - RNA, 18 nt, Human
gccccucccaccaaagcc

SEQ ID NO: 712065 - RNA, 22 nt, Human
gccccuggggcccaggccucag

SEQ ID NO: 712066 - RNA, 22 nt, Human
gccccuggggcccaggccucag

SEQ ID NO: 712067 - RNA, 19 nt, Human
gcccguucaccaucauaga

SEQ ID NO: 712068 - RNA, 23 nt, Human
gcccuggcccugaccgcagcacu

SEQ ID NO: 712069 - RNA, 22 nt, Human
gcgacggggcccucacaagccu

SEQ ID NO: 712070 - RNA, 22 nt, Human
gcgccagcaccagcacacccag

SEQ ID NO: 712071 - RNA, 21 nt, Human
gcucuugcucuugcucacuca

SEQ ID NO: 712072 - RNA, 24 nt, Human
gcuggccccggcccugaccgcagc

SEQ ID NO: 712073 - RNA, 19 nt, Human
ggaaagccagcccaagcuc

SEQ ID NO: 712074 - RNA, 23 nt, Human
ggaaggacaagggggccugcugg

SEQ ID NO: 712075 - RNA, 23 nt, Human
ggaaggacaagggggccugcugg

SEQ ID NO: 712076 - RNA, 19 nt, Human
ggaauuccugucauuugcu

SEQ ID NO: 712077 - RNA, 22 nt, Human
ggacacaguccacgaagccucg

SEQ ID NO: 712078 - RNA, 20 nt, Human
ggacacggggguugggggug

SEQ ID NO: 712079 - RNA, 21 nt, Human
ggacuuugcuggccccggccc

SEQ ID NO: 712080 - RNA, 21 nt, Human
ggacuuugcuggcccuggccc

SEQ ID NO: 712081 - RNA, 21 nt, Human
ggagaggcccaggccccaggc

SEQ ID NO: 712082 - RNA, 20 nt, Human
ggagcacccgggcacugaag

SEQ ID NO: 712083 - RNA, 18 nt, Human
ggaggagccgagagcucg

SEQ ID NO: 712084 - RNA, 21 nt, Human
ggagggagcauggccuccagc

SEQ ID NO: 712085 - RNA, 22 nt, Human
ggaggucccucacagagaaccu

SEQ ID NO: 712086 - RNA, 18 nt, Human
ggaggugaggguggggaa

SEQ ID NO: 712087 - RNA, 19 nt, Human
ggaguuucuucacugugcg

SEQ ID NO: 712088 - RNA, 19 nt, Human
ggaucccaggacugccuga

SEQ ID NO: 712089 - RNA, 21 nt, Human
ggcagaaaagaggcaacccag

SEQ ID NO: 712090 - RNA, 25 nt, Human
ggcccagcaggcugcagaggugcug

SEQ ID NO: 712091 - RNA, 18 nt, Human
ggcccggaaggcacagug

SEQ ID NO: 712092 - RNA, 19 nt, Human
ggccucucucugagcccag

SEQ ID NO: 712093 - RNA, 20 nt, Human
ggccugauggcagcuggcca

SEQ ID NO: 712094 - RNA, 23 nt, Human
ggcggagucccugugagccuggc

SEQ ID NO: 712095 - RNA, 21 nt, Human
ggcugggguccaggcugaacu

SEQ ID NO: 712096 - RNA, 20 nt, Human
gggaaggacacagcccaggg

SEQ ID NO: 712097 - RNA, 21 nt, Human
gggaggcagcugccccagcuc

SEQ ID NO: 712098 - RNA, 20 nt, Human
gggaggccccaugguggcag

SEQ ID NO: 712099 - RNA, 18 nt, Human
gggcaaagccugagcacc

SEQ ID NO: 712100 - RNA, 19 nt, Human
gggcaccauggacacccaa

SEQ ID NO: 712101 - RNA, 19 nt, Human
gggcaccauggacacccaa

SEQ ID NO: 712102 - RNA, 22 nt, Human
gggcagagcuggagcacccggg

SEQ ID NO: 712103 - RNA, 20 nt, Human
gggcauggccugugagacug

SEQ ID NO: 712104 - RNA, 23 nt, Human
gggcuggagcguagccaugagcc

SEQ ID NO: 712105 - RNA, 20 nt, Human
gggucacugucaccacccac

SEQ ID NO: 712106 - RNA, 24 nt, Human
ggucacagaaugcaggacauagag

SEQ ID NO: 712107 - RNA, 20 nt, Human
ggugggucccugcugcagca

SEQ ID NO: 712108 - RNA, 26 nt, Human
guaaaauacacaagaacagcccaaaa

SEQ ID NO: 712109 - RNA, 20 nt, Human
guagccaugagccacgcccc

SEQ ID NO: 712110 - RNA, 24 nt, Human
guccacgacuaacccccagcccaa

SEQ ID NO: 712111 - RNA, 18 nt, Human
guccccacagguccgugg

SEQ ID NO: 712112 - RNA, 19 nt, Human
guccccacagguccguggc

SEQ ID NO: 712113 - RNA, 24 nt, Human
guccguggcgguugccguauuggg

SEQ ID NO: 712114 - RNA, 31 nt, Human
guggugaugaagauggcaauggcuuccuuuu

SEQ ID NO: 712115 - RNA, 19 nt, Human
gugugugugugccucugcu

SEQ ID NO: 712116 - RNA, 23 nt, Human
guucaugugaaugucauccaggc

SEQ ID NO: 712117 - RNA, 19 nt, Human
guuccugccuuuucacauc

SEQ ID NO: 712118 - RNA, 22 nt, Human
uaaaaaugcacaccacaggcuc

SEQ ID NO: 712119 - RNA, 23 nt, Human
uaaaccuccccugcucuucccac

SEQ ID NO: 712120 - RNA, 19 nt, Human
uaacccugugaaguucagg

SEQ ID NO: 712121 - RNA, 22 nt, Human
uaagcuggguuagcuaaggagc

SEQ ID NO: 712122 - RNA, 26 nt, Human
uacacaaaauacccagcaucgcccac

SEQ ID NO: 712123 - RNA, 18 nt, Human
uacccagaaacaucugac

SEQ ID NO: 712124 - RNA, 22 nt, Human
uaccccggggagagccacagca

SEQ ID NO: 712125 - RNA, 21 nt, Human
uacuucacugggugggaccuu

SEQ ID NO: 712126 - RNA, 20 nt, Human
uagacagaagccaggugagg

SEQ ID NO: 712127 - RNA, 21 nt, Human
uagagcccccaagcccaucuc

SEQ ID NO: 712128 - RNA, 24 nt, Human
uaugggugccuggggcaggucuca

SEQ ID NO: 712129 - RNA, 23 nt, Human
uaugugcaucccacucauacaca

SEQ ID NO: 712130 - RNA, 22 nt, Human
ucaacaugcauuuaaggcacaa

SEQ ID NO: 712131 - RNA, 21 nt, Human
ucaacaugcuuuaaggcacaa

SEQ ID NO: 712132 - RNA, 21 nt, Human
ucaaucauucacacagacaca

SEQ ID NO: 712133 - RNA, 23 nt, Human
ucacacagacacaugcauugaac

SEQ ID NO: 712134 - RNA, 21 nt, Human
ucacauggcaacgcagggucu

SEQ ID NO: 712135 - RNA, 23 nt, Human
ucacuggugucacucacaggaag

SEQ ID NO: 712136 - RNA, 19 nt, Human
ucagaccacagagucugcc

SEQ ID NO: 712137 - RNA, 19 nt, Human
ucagaccacagagucugcc

SEQ ID NO: 712138 - RNA, 19 nt, Human
ucaggccuggcaccagcac

SEQ ID NO: 712139 - RNA, 21 nt, Human
ucagugaaggccuccagaguc

SEQ ID NO: 712140 - RNA, 25 nt, Human
ucaucccccuggacaugaccaccuc

SEQ ID NO: 712141 - RNA, 21 nt, Human
ucauuccuaggggaguacaca

SEQ ID NO: 712142 - RNA, 20 nt, Human
uccaaagcuggagcacuggc

SEQ ID NO: 712143 - RNA, 24 nt, Human
uccacaucagggaccacacaagac

SEQ ID NO: 712144 - RNA, 18 nt, Human
uccacgggccuccuguga

SEQ ID NO: 712145 - RNA, 18 nt, Human
uccacgggccuccuguga

SEQ ID NO: 712146 - RNA, 19 nt, Human
uccacugggugggacccgg

SEQ ID NO: 712147 - RNA, 21 nt, Human
uccagguuaugggugccuggg

SEQ ID NO: 712148 - RNA, 18 nt, Human
uccaucaucccccuggac

SEQ ID NO: 712149 - RNA, 22 nt, Human
uccauuggaaccuggcucugcc

SEQ ID NO: 712150 - RNA, 23 nt, Human
ucccaaggccgagcuggggcgcu

SEQ ID NO: 712151 - RNA, 18 nt, Human
ucccgcucucuugguugg

SEQ ID NO: 712152 - RNA, 20 nt, Human
ucccgguugucacuugccuu

SEQ ID NO: 712153 - RNA, 20 nt, Human
ucccuaggggaggacacagc

SEQ ID NO: 712154 - RNA, 23 nt, Human
ucccucagagccuccagagacag

SEQ ID NO: 712155 - RNA, 23 nt, Human
ucccucagagccuccagagacag

SEQ ID NO: 712156 - RNA, 23 nt, Human
ucccugccuccuccuacagcccc

SEQ ID NO: 712157 - RNA, 24 nt, Human
ucccugccuccuccuagagccccc

SEQ ID NO: 712158 - RNA, 24 nt, Human
ucccugccuccuccuagagccccc

SEQ ID NO: 712159 - RNA, 22 nt, Human
ucccugcugcagcaccuuccac

SEQ ID NO: 712160 - RNA, 23 nt, Human
ucccugugcggaguccacgggcc

SEQ ID NO: 712161 - RNA, 22 nt, Human
uccggacagccagggaccaaag

SEQ ID NO: 712162 - RNA, 18 nt, Human
uccuacagcccccaagcc

SEQ ID NO: 712163 - RNA, 21 nt, Human
uccuggguggggccugauggc

SEQ ID NO: 712164 - RNA, 19 nt, Human
ucgcccacaugccugcugu

SEQ ID NO: 712165 - RNA, 21 nt, Human
ucuaaaggagaggaucccagg

SEQ ID NO: 712166 - RNA, 19 nt, Human
ucuaaaggagaggauccug

SEQ ID NO: 712167 - RNA, 24 nt, Human
ucuaggagguuggcagagggagac

SEQ ID NO: 712168 - RNA, 19 nt, Human
ucucggggccccacagggu

SEQ ID NO: 712169 - RNA, 26 nt, Human
ucucggggccccacaggguggcucca

SEQ ID NO: 712170 - RNA, 22 nt, Human
ucucugacuauucuaauuacau

SEQ ID NO: 712171 - RNA, 22 nt, Human
ucucugacuauucuaauuacgu

SEQ ID NO: 712172 - RNA, 22 nt, Human
ucucugacuauucuaauuacgu

SEQ ID NO: 712173 - RNA, 22 nt, Human
ucucugacuauucuaauuacgu

SEQ ID NO: 712174 - RNA, 22 nt, Human
ucugccucagagcauccagaga

SEQ ID NO: 712175 - RNA, 21 nt, Human
ucugcuccaucccuagccaaa

SEQ ID NO: 712176 - RNA, 21 nt, Human
ucugggguggcugggaucagu

SEQ ID NO: 712177 - RNA, 20 nt, Human
ucuguccccagcagaagccc

SEQ ID NO: 712178 - RNA, 22 nt, Human
ucuucuggcuacuuuucucuga

SEQ ID NO: 712179 - RNA, 23 nt, Human
ucuugguuggacagcucuccauc

SEQ ID NO: 712180 - RNA, 20 nt, Human
ugaaagagggaacgguuucc

SEQ ID NO: 712181 - RNA, 23 nt, Human
ugaaagagggaacgguuuccugg

SEQ ID NO: 712182 - RNA, 21 nt, Human
ugaagagcacagaggggggua

SEQ ID NO: 712183 - RNA, 19 nt, Human
ugaaggaccaggacccagg

SEQ ID NO: 712184 - RNA, 19 nt, Human
ugaaggaccagggcccagg

SEQ ID NO: 712185 - RNA, 22 nt, Human
ugaaggccuccagagucugggc

SEQ ID NO: 712186 - RNA, 18 nt, Human
ugaaugucauuucuggcu

SEQ ID NO: 712187 - RNA, 18 nt, Human
ugaaugucauuucuggcu

SEQ ID NO: 712188 - RNA, 18 nt, Human
ugaaugucauuucuggcu

SEQ ID NO: 712189 - RNA, 22 nt, Human
ugacauagacagaagccaggug

SEQ ID NO: 712190 - RNA, 22 nt, Human
ugacaucaguacaacauccaua

SEQ ID NO: 712191 - RNA, 18 nt, Human
ugaccucugcccuuuccc

SEQ ID NO: 712192 - RNA, 19 nt, Human
ugacuccucccaucagcag

SEQ ID NO: 712193 - RNA, 20 nt, Human
ugagaugagcccaucaagcc

SEQ ID NO: 712194 - RNA, 19 nt, Human
ugagaugauacacaucagg

SEQ ID NO: 712195 - RNA, 20 nt, Human
ugagcagccaccaggagccc

SEQ ID NO: 712196 - RNA, 21 nt, Human
ugagcagccaccaggagccca

SEQ ID NO: 712197 - RNA, 22 nt, Human
ugagcaugucaccgggaugggc

SEQ ID NO: 712198 - RNA, 20 nt, Human
ugagcccagagucccacccc

SEQ ID NO: 712199 - RNA, 21 nt, Human
ugagcccagagucccaccccu

SEQ ID NO: 712200 - RNA, 22 nt, Human
ugagcccagagucccaccccug

SEQ ID NO: 712201 - RNA, 18 nt, Human
ugagcgagugcacagaca

SEQ ID NO: 712202 - RNA, 21 nt, Human
ugagcugccaucggcucgaga

SEQ ID NO: 712203 - RNA, 23 nt, Human
ugagcuguccuugugaaaugggu

SEQ ID NO: 712204 - RNA, 19 nt, Human
ugaggacaggcggggcugg

SEQ ID NO: 712205 - RNA, 19 nt, Human
ugagggaggagggcaucca

SEQ ID NO: 712206 - RNA, 23 nt, Human
ugagggcaaggccucggggcccc

SEQ ID NO: 712207 - RNA, 23 nt, Human
ugagggcaaggucucggggcccc

SEQ ID NO: 712208 - RNA, 21 nt, Human
ugaggugggaagcggaggcag

SEQ ID NO: 712209 - RNA, 20 nt, Human
ugaguggaugcaccuggcuc

SEQ ID NO: 712210 - RNA, 21 nt, Human
ugcaacagaucaaaagaacug

SEQ ID NO: 712211 - RNA, 23 nt, Human
ugcacaggaggaagaugaugaug

SEQ ID NO: 712212 - RNA, 21 nt, Human
ugcacaggaggaugaugauga

SEQ ID NO: 712213 - RNA, 20 nt, Human
ugcaggaagcaagaggcccc

SEQ ID NO: 712214 - RNA, 20 nt, Human
ugcaggauucaucuggaccu

SEQ ID NO: 712215 - RNA, 25 nt, Human
ugcaugggcacaagugugugugugg

SEQ ID NO: 712216 - RNA, 20 nt, Human
ugccagcgccauucccacag

SEQ ID NO: 712217 - RNA, 18 nt, Human
ugccauagcacccaaccc

SEQ ID NO: 712218 - RNA, 18 nt, Human
ugcccagaaacaucugac

SEQ ID NO: 712219 - RNA, 20 nt, Human
ugcccaggagaggaguagcu

SEQ ID NO: 712220 - RNA, 18 nt, Human
ugcccaggaugccauagc

SEQ ID NO: 712221 - RNA, 25 nt, Human
ugcccaggaugccauagcacccaac

SEQ ID NO: 712222 - RNA, 22 nt, Human
ugcccaggcccagaaggaaagc

SEQ ID NO: 712223 - RNA, 23 nt, Human
ugcccaggcccagaaggaaagcc

SEQ ID NO: 712224 - RNA, 24 nt, Human
ugcccaggcccagaaggaaagccc

SEQ ID NO: 712225 - RNA, 20 nt, Human
ugccccagcucugagggagg

SEQ ID NO: 712226 - RNA, 20 nt, Human
ugccccagggagcaugacau

SEQ ID NO: 712227 - RNA, 21 nt, Human
ugccccagggagcaugacauu

SEQ ID NO: 712228 - RNA, 19 nt, Human
ugccggagucccugugagc

SEQ ID NO: 712229 - RNA, 23 nt, Human
ugccucagagcauccagagacag

SEQ ID NO: 712230 - RNA, 21 nt, Human
ugccucagccuuuccaucugc

SEQ ID NO: 712231 - RNA, 21 nt, Human
ugccucagcuuuuccaucugc

SEQ ID NO: 712232 - RNA, 18 nt, Human
ugccuguguggagggguc

SEQ ID NO: 712233 - RNA, 23 nt, Human
ugcuccaucccuagccaaaguca

SEQ ID NO: 712234 - RNA, 23 nt, Human
ugcugugugucuguacacacaua

SEQ ID NO: 712235 - RNA, 20 nt, Human
uggaagauucaauguccaca

SEQ ID NO: 712236 - RNA, 18 nt, Human
uggaaucccugccuccuc

SEQ ID NO: 712237 - RNA, 24 nt, Human
uggacacccaacccucauccccag

SEQ ID NO: 712238 - RNA, 24 nt, Human
uggacacccaacccucauccccag

SEQ ID NO: 712239 - RNA, 24 nt, Human
uggacauccaacccucauccccag

SEQ ID NO: 712240 - RNA, 20 nt, Human
uggaggaggcagggaaguuc

SEQ ID NO: 712241 - RNA, 22 nt, Human
uggaggaggcagggaaguucuc

SEQ ID NO: 712242 - RNA, 22 nt, Human
uggaggcccgacccucaucccu

SEQ ID NO: 712243 - RNA, 25 nt, Human
uggagggacuuggagcaagguccuu

SEQ ID NO: 712244 - RNA, 18 nt, Human
uggagggagcauggccuc

SEQ ID NO: 712245 - RNA, 24 nt, Human
uggcaccugggcagagcuggagca

SEQ ID NO: 712246 - RNA, 22 nt, Human
uggcagaaaagaggcaacccag

SEQ ID NO: 712247 - RNA, 22 nt, Human
uggcagaggcuggggauccagg

SEQ ID NO: 712248 - RNA, 23 nt, Human
uggcagaggcuggggauccaggc

SEQ ID NO: 712249 - RNA, 22 nt, Human
uggcagaggcugggguccaggc

SEQ ID NO: 712250 - RNA, 21 nt, Human
uggcagccagaugccagcgcc

SEQ ID NO: 712251 - RNA, 22 nt, Human
uggcaggggugggacaccuggu

SEQ ID NO: 712252 - RNA, 18 nt, Human
uggcauauccaucaccuc

SEQ ID NO: 712253 - RNA, 18 nt, Human
uggcccagaccugccucu

SEQ ID NO: 712254 - RNA, 20 nt, Human
uggccuagugugugcugcag

SEQ ID NO: 712255 - RNA, 18 nt, Human
uggccuccagcaccccca

SEQ ID NO: 712256 - RNA, 19 nt, Human
uggcggagucccugugagc

SEQ ID NO: 712257 - RNA, 23 nt, Human
uggcugaggacaggcggggcugg

SEQ ID NO: 712258 - RNA, 25 nt, Human
uggcugaggacaggcggggcugggc

SEQ ID NO: 712259 - RNA, 26 nt, Human
uggcugaggagacagcugcaggguac

SEQ ID NO: 712260 - RNA, 25 nt, Human
uggcuggggacaggcagggcugggc

SEQ ID NO: 712261 - RNA, 22 nt, Human
ugggaacacugagcagccacca

SEQ ID NO: 712262 - RNA, 21 nt, Human
ugggaggccccgugguggcag

SEQ ID NO: 712263 - RNA, 19 nt, Human
ugggaucccugcagugcug

SEQ ID NO: 712264 - RNA, 20 nt, Human
ugggauggaggugagggugg

SEQ ID NO: 712265 - RNA, 20 nt, Human
uggggagccauuuccucagg

SEQ ID NO: 712266 - RNA, 19 nt, Human
uggggcccaggccucagca

SEQ ID NO: 712267 - RNA, 19 nt, Human
uggggcccaggccucagca

SEQ ID NO: 712268 - RNA, 24 nt, Human
ugggggcaccagcccagcccagag

SEQ ID NO: 712269 - RNA, 26 nt, Human
ugggggcaccagcccagcccagaggc

SEQ ID NO: 712270 - RNA, 19 nt, Human
uggggucacgggcagcccu

SEQ ID NO: 712271 - RNA, 21 nt, Human
ugguuucuccuauaugugccc

SEQ ID NO: 712272 - RNA, 26 nt, Human
uguaaucacaaguguccuucuaggag

SEQ ID NO: 712273 - RNA, 23 nt, Human
uguacagauauuaauaaugaugu

SEQ ID NO: 712274 - RNA, 19 nt, Human
ugucacaguguuacaugga

SEQ ID NO: 712275 - RNA, 25 nt, Human
ugucauuugcuuuggauccaggagc

SEQ ID NO: 712276 - RNA, 18 nt, Human
uguccuugugaaaugggu

SEQ ID NO: 712277 - RNA, 21 nt, Human
ugucucagaccacagagucug

SEQ ID NO: 712278 - RNA, 18 nt, Human
ugucuggggucacgggca

SEQ ID NO: 712279 - RNA, 23 nt, Human
ugugaaguucaggucaccagcag

SEQ ID NO: 712280 - RNA, 23 nt, Human
ugugcaugggcacaagugugugu

SEQ ID NO: 712281 - RNA, 26 nt, Human
ugugcaugggcacaagugugugugug

SEQ ID NO: 712282 - RNA, 23 nt, Human
ugugcaugggcccaagugugugu

SEQ ID NO: 712283 - RNA, 24 nt, Human
uguggugagaacauuuaaaaucuc

SEQ ID NO: 712284 - RNA, 20 nt, Human
ugugucucuauuuuuaauug

SEQ ID NO: 712285 - RNA, 26 nt, Human
ugugugcaugggcacaagugugugug

SEQ ID NO: 712286 - RNA, 18 nt, Human
ugugugucuguacacaca

SEQ ID NO: 712287 - RNA, 22 nt, Human
ugugugucuguacacacauaug

SEQ ID NO: 712288 - RNA, 26 nt, Human
ugugugucuguacacacauauguuuu

SEQ ID NO: 712289 - RNA, 22 nt, Human
uguguguguggcucugcugugu

SEQ ID NO: 712290 - RNA, 21 nt, Human
uguguuagagggagcauucgg

SEQ ID NO: 712291 - RNA, 20 nt, Human
uguuuuggguuuuuuugugu

SEQ ID NO: 712292 - RNA, 19 nt, Human
uuaaaacaagguaaguggc

SEQ ID NO: 712293 - RNA, 18 nt, Human
uuccagguuaugggugcc

SEQ ID NO: 712294 - RNA, 24 nt, Human
uuccagguuaugggugccuggggc

SEQ ID NO: 712295 - RNA, 21 nt, Human
uuccgugaagagucuauugcu

SEQ ID NO: 712296 - RNA, 19 nt, Human
uucucccaagugagcucua

SEQ ID NO: 712297 - RNA, 22 nt, Human
uugaauaugggagggacuuugc

SEQ ID NO: 712298 - RNA, 22 nt, Human
uugaauaugggagggacuuugc

SEQ ID NO: 712299 - RNA, 24 nt, Human
uugaggcaaggacuaauugagauu

SEQ ID NO: 712300 - RNA, 21 nt, Human
uugcaccccugccuuccuaac

SEQ ID NO: 712301 - RNA, 28 nt, Human
uugcagauuaacuccacuggccuugcac

SEQ ID NO: 712302 - RNA, 27 nt, Human
uuuaaaauggguuagaaaugccuucaa

SEQ ID NO: 712303 - RNA, 20 nt, Human
uuuagcaauuuugaaauagu

SEQ ID NO: 712304 - RNA, 22 nt, Human
uuugaugggauggaggugaggg

SEQ ID NO: 712305 - RNA, 24 nt, Human
uuugcaucugaggcaaggacuaau

SEQ ID NO: 712306 - RNA, 24 nt, Human
uuugcugguccuccuggggcucug

SEQ ID NO: 712307 - RNA, 18 nt, Human
uuugggguuuuuuugugu

SEQ ID NO: 712308 - RNA, 28 nt, Human
aaaaauaguaagaaaaacaccgguaccc

SEQ ID NO: 712309 - RNA, 20 nt, Human
aacacaggaggagcaggcag

SEQ ID NO: 712310 - RNA, 20 nt, Human
aaccaaacacagaaaggucc

SEQ ID NO: 712311 - RNA, 18 nt, Human
aaggucccaagagucagc

SEQ ID NO: 712312 - RNA, 19 nt, Human
acaccucaggccacagacu

SEQ ID NO: 712313 - RNA, 22 nt, Human
accaaacacagaaaggucccag

SEQ ID NO: 712314 - RNA, 22 nt, Human
agacgagaaccaaacacagaaa

SEQ ID NO: 712315 - RNA, 21 nt, Human
agcaauuuuucuauugaauua

SEQ ID NO: 712316 - RNA, 22 nt, Human
aggagcaggcaggagcccuggc

SEQ ID NO: 712317 - RNA, 25 nt, Human
aggcagaaaaugugacauuucaaga

SEQ ID NO: 712318 - RNA, 24 nt, Human
aggcaggagcccuggcaccugugc

SEQ ID NO: 712319 - RNA, 23 nt, Human
agggaacaccaaaccacugagcc

SEQ ID NO: 712320 - RNA, 21 nt, Human
aggugcccacuaucgccaccc

SEQ ID NO: 712321 - RNA, 19 nt, Human
agguugcuauaauaaaaau

SEQ ID NO: 712322 - RNA, 23 nt, Human
aguaaagggacuacaacaagaua

SEQ ID NO: 712323 - RNA, 20 nt, Human
augcagccaaagccucugga

SEQ ID NO: 712324 - RNA, 19 nt, Human
auuauccuuuuauuuuucu

SEQ ID NO: 712325 - RNA, 21 nt, Human
auuuaugauccaauuuagcua

SEQ ID NO: 712326 - RNA, 22 nt, Human
caaacacagaaaggucccaaga

SEQ ID NO: 712327 - RNA, 22 nt, Human
caaaccacugagccaagacgag

SEQ ID NO: 712328 - RNA, 22 nt, Human
caccucaggccacagacucuaa

SEQ ID NO: 712329 - RNA, 19 nt, Human
cacugagccaagacgagaa

SEQ ID NO: 712330 - RNA, 23 nt, Human
cagaccaugcagccaaagccucu

SEQ ID NO: 712331 - RNA, 20 nt, Human
caggagcccuggcaccugug

SEQ ID NO: 712332 - RNA, 24 nt, Human
ccaaaguaaaaagccaaguuuuau

SEQ ID NO: 712333 - RNA, 21 nt, Human
ccaagacgagaaccaaacaca

SEQ ID NO: 712334 - RNA, 25 nt, Human
ccacugagccaagacgagaaccaaa

SEQ ID NO: 712335 - RNA, 18 nt, Human
ccagagcagacaccucag

SEQ ID NO: 712336 - RNA, 21 nt, Human
cccacuaucgccacccagagc

SEQ ID NO: 712337 - RNA, 24 nt, Human
cccagagcagacaccucaggccac

SEQ ID NO: 712338 - RNA, 24 nt, Human
ccuggcaccugugcuaaacgucac

SEQ ID NO: 712339 - RNA, 21 nt, Human
cggcggcagcggcggcggcug

SEQ ID NO: 712340 - RNA, 21 nt, Human
cugagccaagacgagaaccaa

SEQ ID NO: 712341 - RNA, 21 nt, Human
cugaggugcccacuaucgcca

SEQ ID NO: 712342 - RNA, 20 nt, Human
cuuagagggaaggcagaaaa

SEQ ID NO: 712343 - RNA, 18 nt, Human
cuugaagaauuugaaagg

SEQ ID NO: 712344 - RNA, 20 nt, Human
gaacaccaaaccacugagcc

SEQ ID NO: 712345 - RNA, 21 nt, Human
gaaccaaacacagaaaggucc

SEQ ID NO: 712346 - RNA, 18 nt, Human
gaauuugaaaggcaagua

SEQ ID NO: 712347 - RNA, 22 nt, Human
gagcaggcaggagcccuggcac

SEQ ID NO: 712348 - RNA, 24 nt, Human
gagcccuggcaccugugcuaaacg

SEQ ID NO: 712349 - RNA, 21 nt, Human
gcacaucuauauacauacaca

SEQ ID NO: 712350 - RNA, 19 nt, Human
gcccauguacccaaaguaa

SEQ ID NO: 712351 - RNA, 23 nt, Human
gcggcggcggcugcugucccggu

SEQ ID NO: 712352 - RNA, 18 nt, Human
gcuaaacgucaccgaccu

SEQ ID NO: 712353 - RNA, 21 nt, Human
ggaggacggcggcagcggcgg

SEQ ID NO: 712354 - RNA, 18 nt, Human
ggcggcagcggcggcggc

SEQ ID NO: 712355 - RNA, 20 nt, Human
ggcggcggcugcugucccgg

SEQ ID NO: 712356 - RNA, 21 nt, Human
gggaaggcagaaaaugugaca

SEQ ID NO: 712357 - RNA, 21 nt, Human
guacccaaaguaaaaagccaa

SEQ ID NO: 712358 - RNA, 22 nt, Human
uaagaaaaacacgauguaaaau

SEQ ID NO: 712359 - RNA, 30 nt, Human
uaagaaaaacacgauguaaaauacaucaag

SEQ ID NO: 712360 - RNA, 18 nt, Human
uagacaggggaggacggc

SEQ ID NO: 712361 - RNA, 23 nt, Human
uauauauauuuauaugcacaucu

SEQ ID NO: 712362 - RNA, 23 nt, Human
ucaaaauauacuacauaaacccc

SEQ ID NO: 712363 - RNA, 20 nt, Human
ucaagaauacuucccauguu

SEQ ID NO: 712364 - RNA, 20 nt, Human
ucagcucgagacagcuccgg

SEQ ID NO: 712365 - RNA, 20 nt, Human
ugaaaggcaaguauauuuaa

SEQ ID NO: 712366 - RNA, 20 nt, Human
ugcacaucuauauacauaca

SEQ ID NO: 712367 - RNA, 23 nt, Human
ugcagacgagggaacaccaaacc

SEQ ID NO: 712368 - RNA, 24 nt, Human
uugcuauaauaaaaauauauugcu

SEQ ID NO: 712369 - RNA, 20 nt, Human
uuuuauuuuucuuuucugag

SEQ ID NO: 712370 - RNA, 20 nt, Human
aacccuggcuaccagauuca

SEQ ID NO: 712371 - RNA, 18 nt, Human
auuuaaaaauggcagaac

SEQ ID NO: 712372 - RNA, 24 nt, Human
ccccaaguucgagggaacccuggc

SEQ ID NO: 712373 - RNA, 22 nt, Human
uaaaaauggcagaacaagaaca

SEQ ID NO: 712374 - RNA, 22 nt, Human
uaaaaauggcagaacaagaaca

SEQ ID NO: 712375 - RNA, 24 nt, Human
uaaaaauggcagaacaagaacaca

SEQ ID NO: 712376 - RNA, 24 nt, Human
uaaaaauggcagaacaagaacaca

SEQ ID NO: 712377 - RNA, 23 nt, Human
uaacagaaaccuugauuuaaaaa

SEQ ID NO: 712378 - RNA, 20 nt, Human
uacuuugcuuuuaaaaagau

SEQ ID NO: 712379 - RNA, 22 nt, Human
ugagcuacaacaugguggcagg

SEQ ID NO: 712380 - RNA, 20 nt, Human
ugauuuaaaaauggcagaac

SEQ ID NO: 712381 - RNA, 23 nt, Human
ugcccacccgaaaacucacagcg

SEQ ID NO: 712382 - RNA, 21 nt, Human
ugcgucugcccacccgaaaac

SEQ ID NO: 712383 - RNA, 22 nt, Human
uggaaugccucguuaacagaaa

SEQ ID NO: 712384 - RNA, 22 nt, Human
uggaaugccucguuaacagaaa

SEQ ID NO: 712385 - RNA, 21 nt, Human
uuauuaaaaaaaaaaaaaaaa

SEQ ID NO: 712386 - RNA, 24 nt, Human
uuuacuuugcuuuuaaaaagaucc

SEQ ID NO: 712387 - RNA, 20 nt, Human
aaaacacaaacaugaaacca

SEQ ID NO: 712388 - RNA, 23 nt, Human
aaacccucagggggcuaggcucc

SEQ ID NO: 712389 - RNA, 19 nt, Human
aaagguagcugggggcugc

SEQ ID NO: 712390 - RNA, 19 nt, Human
aaauggcaaggcuguggcc

SEQ ID NO: 712391 - RNA, 25 nt, Human
aacaacugcccuggccgccuccaca

SEQ ID NO: 712392 - RNA, 19 nt, Human
aagacgccacauucgcuaa

SEQ ID NO: 712393 - RNA, 23 nt, Human
aagaggcaugacagagggguuug

SEQ ID NO: 712394 - RNA, 20 nt, Human
aagaggcugcccugguaucg

SEQ ID NO: 712395 - RNA, 22 nt, Human
aagcaucucccgaaccuuccca

SEQ ID NO: 712396 - RNA, 20 nt, Human
aaggaagcaucucccgaacc

SEQ ID NO: 712397 - RNA, 24 nt, Human
aagugaaccugagugaggccaaga

SEQ ID NO: 712398 - RNA, 26 nt, Human
acaaauucacaaaacuggcuacaaaa

SEQ ID NO: 712399 - RNA, 18 nt, Human
acacaagggagcgcaccg

SEQ ID NO: 712400 - RNA, 22 nt, Human
acaugaaaccagcuaaaggcca

SEQ ID NO: 712401 - RNA, 18 nt, Human
acauggcaagguguggca

SEQ ID NO: 712402 - RNA, 20 nt, Human
acccagggcacggccacuca

SEQ ID NO: 712403 - RNA, 22 nt, Human
accccaggcccucccugacagc

SEQ ID NO: 712404 - RNA, 23 nt, Human
accccagggauucugucucucac

SEQ ID NO: 712405 - RNA, 20 nt, Human
accugagugaggccaagaag

SEQ ID NO: 712406 - RNA, 18 nt, Human
acugcccaacaucccaca

SEQ ID NO: 712407 - RNA, 19 nt, Human
agacauggucuccaugacc

SEQ ID NO: 712408 - RNA, 18 nt, Human
agaccugggagagaaggc

SEQ ID NO: 712409 - RNA, 22 nt, Human
agagcggcuggagugcaagcca

SEQ ID NO: 712410 - RNA, 18 nt, Human
agcacggcaacacccaca

SEQ ID NO: 712411 - RNA, 19 nt, Human
agcagauggccccuggccc

SEQ ID NO: 712412 - RNA, 20 nt, Human
agcaggugggcucccucucu

SEQ ID NO: 712413 - RNA, 19 nt, Human
agccaacacaagggagcgc

SEQ ID NO: 712414 - RNA, 23 nt, Human
agccccugcagccccagaaacag

SEQ ID NO: 712415 - RNA, 21 nt, Human
aggaagcaucucccgaaccuu

SEQ ID NO: 712416 - RNA, 20 nt, Human
aggcagcacacccagggcaa

SEQ ID NO: 712417 - RNA, 18 nt, Human
aggcagccggagaggagc

SEQ ID NO: 712418 - RNA, 19 nt, Human
aggcaggguuugugggcaa

SEQ ID NO: 712419 - RNA, 18 nt, Human
aggcugacacacccgcug

SEQ ID NO: 712420 - RNA, 19 nt, Human
aggcugcaggggcgggcag

SEQ ID NO: 712421 - RNA, 18 nt, Human
agggagcaugaauccagc

SEQ ID NO: 712422 - RNA, 21 nt, Human
agguggcugugacucagccag

SEQ ID NO: 712423 - RNA, 21 nt, Human
aucugucgccccagcccccag

SEQ ID NO: 712424 - RNA, 22 nt, Human
augccuccggcaggagcuacag

SEQ ID NO: 712425 - RNA, 25 nt, Human
caaaaagacuaugcuagaaggucag

SEQ ID NO: 712426 - RNA, 20 nt, Human
caaaacacaaacaugaaacc

SEQ ID NO: 712427 - RNA, 22 nt, Human
caaaacacaaacaugaaaccag

SEQ ID NO: 712428 - RNA, 24 nt, Human
caaaacacaaacaugaaaccagcc

SEQ ID NO: 712429 - RNA, 21 nt, Human
caaacuucaaagcuguccucu

SEQ ID NO: 712430 - RNA, 22 nt, Human
caacagauccaccaaauuucua

SEQ ID NO: 712431 - RNA, 30 nt, Human
caacagauccaccaaauuucuacccaacaa

SEQ ID NO: 712432 - RNA, 19 nt, Human
cacacccagggcacggcca

SEQ ID NO: 712433 - RNA, 18 nt, Human
cacaccccagcccugccu

SEQ ID NO: 712434 - RNA, 21 nt, Human
cacacugaaaacacaaaucau

SEQ ID NO: 712435 - RNA, 20 nt, Human
cacagcuugucccuuccugc

SEQ ID NO: 712436 - RNA, 22 nt, Human
cacaguacaaguaacaagcaaa

SEQ ID NO: 712437 - RNA, 23 nt, Human
caccagggggauacagagcggug

SEQ ID NO: 712438 - RNA, 18 nt, Human
cacccaacaacugcccug

SEQ ID NO: 712439 - RNA, 20 nt, Human
cacccaacaacugcccuggc

SEQ ID NO: 712440 - RNA, 19 nt, Human
cacccacauauugggaacu

SEQ ID NO: 712441 - RNA, 23 nt, Human
cacgcccccgcaccaggagaccc

SEQ ID NO: 712442 - RNA, 21 nt, Human
cagcacaccccagcccugccu

SEQ ID NO: 712443 - RNA, 18 nt, Human
cagccaacagauccacca

SEQ ID NO: 712444 - RNA, 21 nt, Human
cagccccugggccccacgggu

SEQ ID NO: 712445 - RNA, 18 nt, Human
cagccugugcggggaggc

SEQ ID NO: 712446 - RNA, 22 nt, Human
cagcucagggaagccccugcag

SEQ ID NO: 712447 - RNA, 22 nt, Human
cagcuggcaccguccaccuccc

SEQ ID NO: 712448 - RNA, 20 nt, Human
caggagcuacagcaaccaga

SEQ ID NO: 712449 - RNA, 22 nt, Human
caguacaaguaacaagcaaauu

SEQ ID NO: 712450 - RNA, 19 nt, Human
caguguggggccagagggu

SEQ ID NO: 712451 - RNA, 20 nt, Human
cauagagcagagcccaugug

SEQ ID NO: 712452 - RNA, 21 nt, Human
ccacaccccagucccacgaca

SEQ ID NO: 712453 - RNA, 19 nt, Human
ccacagagaagggcugcca

SEQ ID NO: 712454 - RNA, 24 nt, Human
ccacaggaaggccugcuauagagg

SEQ ID NO: 712455 - RNA, 25 nt, Human
ccaccccaggcccucccugacagcc

SEQ ID NO: 712456 - RNA, 19 nt, Human
ccaccucccucacugccuc

SEQ ID NO: 712457 - RNA, 23 nt, Human
ccaccugagcuagcaacaccauc

SEQ ID NO: 712458 - RNA, 25 nt, Human
ccagucaaaacacaaacaugaaacc

SEQ ID NO: 712459 - RNA, 23 nt, Human
ccaucuuuucagccaacagaucc

SEQ ID NO: 712460 - RNA, 19 nt, Human
ccauuuggaaguuaguuag

SEQ ID NO: 712461 - RNA, 22 nt, Human
cccaacgguggcagagccaugg

SEQ ID NO: 712462 - RNA, 22 nt, Human
cccacacacugaaaacacaaau

SEQ ID NO: 712463 - RNA, 21 nt, Human
cccacaccccagucccacgac

SEQ ID NO: 712464 - RNA, 20 nt, Human
cccacauauugggaacuuga

SEQ ID NO: 712465 - RNA, 22 nt, Human
cccaccgccccggcuuuccugc

SEQ ID NO: 712466 - RNA, 21 nt, Human
cccagccccugggccccacgg

SEQ ID NO: 712467 - RNA, 22 nt, Human
ccccaccgccccggcuuuccug

SEQ ID NO: 712468 - RNA, 21 nt, Human
ccccacgcccagugguacucc

SEQ ID NO: 712469 - RNA, 22 nt, Human
ccccagaaacagccuaugugcu

SEQ ID NO: 712470 - RNA, 23 nt, Human
ccccagcccccaggacagcuucc

SEQ ID NO: 712471 - RNA, 18 nt, Human
ccccagcccugccugggc

SEQ ID NO: 712472 - RNA, 21 nt, Human
ccccagcccugccugggccca

SEQ ID NO: 712473 - RNA, 22 nt, Human
ccccagcccugccugggcccac

SEQ ID NO: 712474 - RNA, 22 nt, Human
ccccaggacagcuuccccacac

SEQ ID NO: 712475 - RNA, 23 nt, Human
ccccaggcccucccugacagccc

SEQ ID NO: 712476 - RNA, 21 nt, Human
ccccagggugaggagccaggg

SEQ ID NO: 712477 - RNA, 21 nt, Human
cccccaccccaggcccucccu

SEQ ID NO: 712478 - RNA, 20 nt, Human
cccccaggacagcuucccca

SEQ ID NO: 712479 - RNA, 23 nt, Human
cccccccaccgccccggcuuucc

SEQ ID NO: 712480 - RNA, 18 nt, Human
ccccgcaccaggagaccc

SEQ ID NO: 712481 - RNA, 18 nt, Human
ccccgggucuacgcuuuc

SEQ ID NO: 712482 - RNA, 18 nt, Human
ccccugacugcugcgugg

SEQ ID NO: 712483 - RNA, 19 nt, Human
ccccugcagccccagaaac

SEQ ID NO: 712484 - RNA, 18 nt, Human
cccuaacaagcacccucc

SEQ ID NO: 712485 - RNA, 24 nt, Human
cccucaggacugggcucccccuaa

SEQ ID NO: 712486 - RNA, 23 nt, Human
cccucuggagggccaguccagca

SEQ ID NO: 712487 - RNA, 21 nt, Human
cccugagugcgcauagggccc

SEQ ID NO: 712488 - RNA, 21 nt, Human
cccugccugggcccacacccc

SEQ ID NO: 712489 - RNA, 22 nt, Human
cccuugggguggggcccuucug

SEQ ID NO: 712490 - RNA, 20 nt, Human
ccggggacaacagagacugc

SEQ ID NO: 712491 - RNA, 23 nt, Human
ccuaggcgaaccucccucccaga

SEQ ID NO: 712492 - RNA, 22 nt, Human
ccucagaggcaggguuuguggg

SEQ ID NO: 712493 - RNA, 19 nt, Human
ccucaggacugggcucccc

SEQ ID NO: 712494 - RNA, 27 nt, Human
ccuccagucaaaacacaaacaugaaac

SEQ ID NO: 712495 - RNA, 19 nt, Human
ccucccaccccagcccuaa

SEQ ID NO: 712496 - RNA, 18 nt, Human
ccucccugacagccccca

SEQ ID NO: 712497 - RNA, 19 nt, Human
ccucugggcugcaguaguu

SEQ ID NO: 712498 - RNA, 21 nt, Human
ccugcugcccauggggacacc

SEQ ID NO: 712499 - RNA, 28 nt, Human
ccuggcccccaccccaggcccucccuga

SEQ ID NO: 712500 - RNA, 21 nt, Human
cgccacauucgcuaaaagcca

SEQ ID NO: 712501 - RNA, 24 nt, Human
cggccaggccaggcucucccccag

SEQ ID NO: 712502 - RNA, 22 nt, Human
cggugcccagcucugccgggga

SEQ ID NO: 712503 - RNA, 19 nt, Human
cgguggcugggccuacaac

SEQ ID NO: 712504 - RNA, 22 nt, Human
cuacaaaagugcuuugaacgcg

SEQ ID NO: 712505 - RNA, 21 nt, Human
cuacagcaaccagaggugagc

SEQ ID NO: 712506 - RNA, 19 nt, Human
cuauccuaucuaggcuaca

SEQ ID NO: 712507 - RNA, 20 nt, Human
cucagugaccugucagccac

SEQ ID NO: 712508 - RNA, 21 nt, Human
cuccccagaagugaaccugag

SEQ ID NO: 712509 - RNA, 22 nt, Human
cuccccauuggccacucacccu

SEQ ID NO: 712510 - RNA, 21 nt, Human
cuccuaagccagcccaauugc

SEQ ID NO: 712511 - RNA, 22 nt, Human
cucucugggacccgacaccacu

SEQ ID NO: 712512 - RNA, 18 nt, Human
cugaaaacacaaaucauu

SEQ ID NO: 712513 - RNA, 24 nt, Human
cugccaucugcuaacccugcccca

SEQ ID NO: 712514 - RNA, 18 nt, Human
cugcccaacaucccacag

SEQ ID NO: 712515 - RNA, 22 nt, Human
cugcccaacaucccacagggaa

SEQ ID NO: 712516 - RNA, 19 nt, Human
cugcugcaugccucagccu

SEQ ID NO: 712517 - RNA, 21 nt, Human
cuggaauccugcaggggcccc

SEQ ID NO: 712518 - RNA, 24 nt, Human
cuggagggccaguccagcacccca

SEQ ID NO: 712519 - RNA, 25 nt, Human
cugggccccgggucuacgcuuucug

SEQ ID NO: 712520 - RNA, 26 nt, Human
cuggggccaucaugcuggugggggug

SEQ ID NO: 712521 - RNA, 21 nt, Human
cuguggccccagccccugggc

SEQ ID NO: 712522 - RNA, 20 nt, Human
cuugaggagaaagaagguga

SEQ ID NO: 712523 - RNA, 20 nt, Human
cuugcuggucgaugggacca

SEQ ID NO: 712524 - RNA, 25 nt, Human
gacccgacaccacucaggaagcuuu

SEQ ID NO: 712525 - RNA, 23 nt, Human
gagcaaacccucagggggcuagg

SEQ ID NO: 712526 - RNA, 20 nt, Human
gagccacuugcuccuaagcc

SEQ ID NO: 712527 - RNA, 18 nt, Human
gagcugucugccugcugc

SEQ ID NO: 712528 - RNA, 22 nt, Human
gauagccaccauuuucuccccu

SEQ ID NO: 712529 - RNA, 22 nt, Human
gcaaauuccugagagacuagag

SEQ ID NO: 712530 - RNA, 19 nt, Human
gcaagacauggccaugugc

SEQ ID NO: 712531 - RNA, 19 nt, Human
gcaaggcagccggagagga

SEQ ID NO: 712532 - RNA, 25 nt, Human
gcaccaguuauuuuuagccuuauga

SEQ ID NO: 712533 - RNA, 19 nt, Human
gcacggccacucacgcccc

SEQ ID NO: 712534 - RNA, 25 nt, Human
gcacuaagccccccccaaccggagg

SEQ ID NO: 712535 - RNA, 24 nt, Human
gcagccccagaaacagccuaugug

SEQ ID NO: 712536 - RNA, 22 nt, Human
gcaucucccgaaccuucccaag

SEQ ID NO: 712537 - RNA, 19 nt, Human
gccagcacaccccagcccu

SEQ ID NO: 712538 - RNA, 22 nt, Human
gcccagugguacuccgggggca

SEQ ID NO: 712539 - RNA, 19 nt, Human
gccccagcccccaggacag

SEQ ID NO: 712540 - RNA, 22 nt, Human
gccugugcggggaggccaggcu

SEQ ID NO: 712541 - RNA, 24 nt, Human
gcgcuccgggcgcggaccccgcgc

SEQ ID NO: 712542 - RNA, 23 nt, Human
gcucagacaggcagcacacccag

SEQ ID NO: 712543 - RNA, 22 nt, Human
gcucugggaccugcccagugcc

SEQ ID NO: 712544 - RNA, 19 nt, Human
gcugcaggggcgggcagac

SEQ ID NO: 712545 - RNA, 19 nt, Human
gcugcaguaguucugugga

SEQ ID NO: 712546 - RNA, 20 nt, Human
gcugccaucugcuaacccug

SEQ ID NO: 712547 - RNA, 19 nt, Human
gcuguggggcugggggcuu

SEQ ID NO: 712548 - RNA, 21 nt, Human
gcuuuccugcaggcuuagccc

SEQ ID NO: 712549 - RNA, 18 nt, Human
ggaagccccugcagcccc

SEQ ID NO: 712550 - RNA, 22 nt, Human
ggacauggcuuacccucuggag

SEQ ID NO: 712551 - RNA, 20 nt, Human
ggacgcccuucaccccugag

SEQ ID NO: 712552 - RNA, 21 nt, Human
ggacugggcucccccuaagcu

SEQ ID NO: 712553 - RNA, 22 nt, Human
ggcaacacccacaacauccagc

SEQ ID NO: 712554 - RNA, 18 nt, Human
ggcaagguuugagggcag

SEQ ID NO: 712555 - RNA, 22 nt, Human
ggcacaggacaggcaggcgggg

SEQ ID NO: 712556 - RNA, 21 nt, Human
ggccaggcucucccccaggca

SEQ ID NO: 712557 - RNA, 21 nt, Human
ggccccgggucuacgcuuucu

SEQ ID NO: 712558 - RNA, 21 nt, Human
ggccccuggcccccaccccag

SEQ ID NO: 712559 - RNA, 23 nt, Human
ggcccuaacaagcacccuccaaa

SEQ ID NO: 712560 - RNA, 21 nt, Human
ggcugggucauuucucccuaa

SEQ ID NO: 712561 - RNA, 23 nt, Human
ggcuguggccccagccccugggc

SEQ ID NO: 712562 - RNA, 21 nt, Human
gggagaccugggagagaaggc

SEQ ID NO: 712563 - RNA, 24 nt, Human
gggaggcccuaacaagcacccucc

SEQ ID NO: 712564 - RNA, 22 nt, Human
gggcacaggacaggcaggcggg

SEQ ID NO: 712565 - RNA, 20 nt, Human
gggcaggucacccacacccc

SEQ ID NO: 712566 - RNA, 24 nt, Human
gggcaguguggcagcuucgggccc

SEQ ID NO: 712567 - RNA, 18 nt, Human
gggcgcggaccccgcgcc

SEQ ID NO: 712568 - RNA, 24 nt, Human
gggcucccccuaagcugacaaggg

SEQ ID NO: 712569 - RNA, 25 nt, Human
gggcugccaucugcuaacccugccg

SEQ ID NO: 712570 - RNA, 21 nt, Human
ggggccagcaggguggagugc

SEQ ID NO: 712571 - RNA, 24 nt, Human
ggucugccauuaaaaaaaaaaaaa

SEQ ID NO: 712572 - RNA, 22 nt, Human
gguggagugcaggaacaggcug

SEQ ID NO: 712573 - RNA, 22 nt, Human
gguggcuuuggaaugagugggg

SEQ ID NO: 712574 - RNA, 27 nt, Human
guaaggcaagaggguauggcaacgaaa

SEQ ID NO: 712575 - RNA, 24 nt, Human
guggccccagccccugggccccac

SEQ ID NO: 712576 - RNA, 21 nt, Human
guggcuuuggaaugagugggg

SEQ ID NO: 712577 - RNA, 21 nt, Human
guuuucuuuuuaauguggacu

SEQ ID NO: 712578 - RNA, 23 nt, Human
uaaacaacguuucccaaaaagca

SEQ ID NO: 712579 - RNA, 23 nt, Human
uaagauuuaaacaacguuuccca

SEQ ID NO: 712580 - RNA, 19 nt, Human
uaagccccccccaccgccc

SEQ ID NO: 712581 - RNA, 19 nt, Human
uaagccccccccaccgccc

SEQ ID NO: 712582 - RNA, 20 nt, Human
uaaggccaaaugguucuggu

SEQ ID NO: 712583 - RNA, 18 nt, Human
uacagcaaccagagguga

SEQ ID NO: 712584 - RNA, 19 nt, Human
uaccugucaccaugugccu

SEQ ID NO: 712585 - RNA, 22 nt, Human
uagcagauggccccuggccccc

SEQ ID NO: 712586 - RNA, 21 nt, Human
uagcugggggcugcugcaugc

SEQ ID NO: 712587 - RNA, 20 nt, Human
uaggggcagggagcaugaau

SEQ ID NO: 712588 - RNA, 18 nt, Human
uauccuaucuaggcuaca

SEQ ID NO: 712589 - RNA, 20 nt, Human
ucaaccugcagaagcgaggc

SEQ ID NO: 712590 - RNA, 21 nt, Human
ucaccaugugccucccacccc

SEQ ID NO: 712591 - RNA, 19 nt, Human
ucaccggaaccaaccaugc

SEQ ID NO: 712592 - RNA, 18 nt, Human
ucacugccucugccuucc

SEQ ID NO: 712593 - RNA, 27 nt, Human
uccacagcuagggaagcuugcucagac

SEQ ID NO: 712594 - RNA, 18 nt, Human
uccaucccagggugggua

SEQ ID NO: 712595 - RNA, 23 nt, Human
uccaucuuuucagccaacagauc

SEQ ID NO: 712596 - RNA, 26 nt, Human
ucccaggguggguaucagccaucuuc

SEQ ID NO: 712597 - RNA, 21 nt, Human
uccccacacacugaaaacaca

SEQ ID NO: 712598 - RNA, 18 nt, Human
ucccgaaccuucccaagc

SEQ ID NO: 712599 - RNA, 24 nt, Human
uccggcaggagcuacagcaaccag

SEQ ID NO: 712600 - RNA, 22 nt, Human
uccugccaccaggccugaaugg

SEQ ID NO: 712601 - RNA, 18 nt, Human
ucgcuaaaagccagauuc

SEQ ID NO: 712602 - RNA, 23 nt, Human
ucuaagcagaagggauagccacc

SEQ ID NO: 712603 - RNA, 23 nt, Human
ucuccacauucacccaacaacug

SEQ ID NO: 712604 - RNA, 19 nt, Human
ucucccgaaccuucccaag

SEQ ID NO: 712605 - RNA, 26 nt, Human
ucucucagggcuguggggcugggggc

SEQ ID NO: 712606 - RNA, 23 nt, Human
ucugccauuaaaaaaaaaaaaaa

SEQ ID NO: 712607 - RNA, 21 nt, Human
ucugcccuuccucagucuccc

SEQ ID NO: 712608 - RNA, 24 nt, Human
ucugggaaauggccaaaugugguc

SEQ ID NO: 712609 - RNA, 24 nt, Human
ucuuggguucggcuguccgggauc

SEQ ID NO: 712610 - RNA, 20 nt, Human
ucuuucucuucuuuucucuu

SEQ ID NO: 712611 - RNA, 21 nt, Human
ugaaaacacaaaucauuugcc

SEQ ID NO: 712612 - RNA, 22 nt, Human
ugaaaacacaaaucauuugcca

SEQ ID NO: 712613 - RNA, 24 nt, Human
ugaaaacacaaaucauuugccagc

SEQ ID NO: 712614 - RNA, 22 nt, Human
ugaagcacggcaacacccacaa

SEQ ID NO: 712615 - RNA, 19 nt, Human
ugacaccaaggcagagccc

SEQ ID NO: 712616 - RNA, 23 nt, Human
ugagaaugaaaaucuguacgucu

SEQ ID NO: 712617 - RNA, 18 nt, Human
ugagcaggcagauggccu

SEQ ID NO: 712618 - RNA, 25 nt, Human
ugaggugggugaugugcccugguua

SEQ ID NO: 712619 - RNA, 25 nt, Human
ugaggugggugaugugcccugguug

SEQ ID NO: 712620 - RNA, 19 nt, Human
ugagugaaagaagcugcgg

SEQ ID NO: 712621 - RNA, 21 nt, Human
ugcaggggcgggcagacccug

SEQ ID NO: 712622 - RNA, 21 nt, Human
ugccacugcccccagcugggg

SEQ ID NO: 712623 - RNA, 18 nt, Human
ugcccaccugcucgcagc

SEQ ID NO: 712624 - RNA, 25 nt, Human
ugcccagugcccggcauaccccaug

SEQ ID NO: 712625 - RNA, 24 nt, Human
ugcccgagccccggugcgcggcca

SEQ ID NO: 712626 - RNA, 20 nt, Human
ugcccugguuacagccagca

SEQ ID NO: 712627 - RNA, 25 nt, Human
ugccgguggcugggccuacaacaga

SEQ ID NO: 712628 - RNA, 21 nt, Human
ugcuagaaggucagacuaucc

SEQ ID NO: 712629 - RNA, 23 nt, Human
uggagggccaguccagcacccca

SEQ ID NO: 712630 - RNA, 19 nt, Human
uggagugaccgucauucca

SEQ ID NO: 712631 - RNA, 19 nt, Human
uggcacggcuugcuucugg

SEQ ID NO: 712632 - RNA, 23 nt, Human
uggcaggcaagguuugagggcag

SEQ ID NO: 712633 - RNA, 22 nt, Human
uggcccccaccccaggcccucc

SEQ ID NO: 712634 - RNA, 24 nt, Human
uggccccuggcccccaccccaggc

SEQ ID NO: 712635 - RNA, 18 nt, Human
uggcuuuggaaugagugg

SEQ ID NO: 712636 - RNA, 20 nt, Human
ugggaaauggccaaaugugg

SEQ ID NO: 712637 - RNA, 20 nt, Human
ugggcagacuuggggugaag

SEQ ID NO: 712638 - RNA, 22 nt, Human
ugggcagacuuggggugaguac

SEQ ID NO: 712639 - RNA, 23 nt, Human
uggggagguggcaggcaagguuu

SEQ ID NO: 712640 - RNA, 19 nt, Human
uggggccaucaugcuggug

SEQ ID NO: 712641 - RNA, 21 nt, Human
uggggccaucaugcugguggg

SEQ ID NO: 712642 - RNA, 18 nt, Human
uggggcccuucugggaaa

SEQ ID NO: 712643 - RNA, 22 nt, Human
ugggggcugcugcaugccucag

SEQ ID NO: 712644 - RNA, 21 nt, Human
uggugggcacaggacaggcag

SEQ ID NO: 712645 - RNA, 21 nt, Human
uggugggcacaggacaggcag

SEQ ID NO: 712646 - RNA, 21 nt, Human
ugucugcucagagccaccagc

SEQ ID NO: 712647 - RNA, 24 nt, Human
ugucugcucagagccaccagcucu

SEQ ID NO: 712648 - RNA, 22 nt, Human
uguuuuguuuucuuuuuaaugu

SEQ ID NO: 712649 - RNA, 20 nt, Human
uucacaaaacuggcuacaaa

SEQ ID NO: 712650 - RNA, 22 nt, Human
uuccuugggcccgagacuccgg

SEQ ID NO: 712651 - RNA, 22 nt, Human
uucgcuaaaagccagauuccca

SEQ ID NO: 712652 - RNA, 23 nt, Human
uucuugaggagaaagaaggugag

SEQ ID NO: 712653 - RNA, 23 nt, Human
uugcuccuaagccagcccaauug

SEQ ID NO: 712654 - RNA, 20 nt, Human
aaaauugcaguaugaacuga

SEQ ID NO: 712655 - RNA, 18 nt, Human
aaacaccuagacauuucu

SEQ ID NO: 712656 - RNA, 21 nt, Human
aacucccgcuggaauuucuac

SEQ ID NO: 712657 - RNA, 18 nt, Human
aagaaggaagaagguaag

SEQ ID NO: 712658 - RNA, 21 nt, Human
aagacaaaggcuaaggugagc

SEQ ID NO: 712659 - RNA, 24 nt, Human
acacacuuuccucuucuugacugu

SEQ ID NO: 712660 - RNA, 20 nt, Human
agacuccuagcauucaaucu

SEQ ID NO: 712661 - RNA, 19 nt, Human
aggcaaguggcagagccag

SEQ ID NO: 712662 - RNA, 23 nt, Human
aggcccagguccucacccuggcc

SEQ ID NO: 712663 - RNA, 21 nt, Human
agugagcacaaagguccucuc

SEQ ID NO: 712664 - RNA, 23 nt, Human
aucacugccuccugggccaaagu

SEQ ID NO: 712665 - RNA, 23 nt, Human
aucuaaaaucuucuugugaacca

SEQ ID NO: 712666 - RNA, 18 nt, Human
aucuggccucuucuuugg

SEQ ID NO: 712667 - RNA, 20 nt, Human
aucuguuuuauuaaacaccu

SEQ ID NO: 712668 - RNA, 19 nt, Human
augcauccaagacucaucu

SEQ ID NO: 712669 - RNA, 20 nt, Human
auuaaacaccuagacauuuc

SEQ ID NO: 712670 - RNA, 22 nt, Human
auuucuggcacauguuucccaa

SEQ ID NO: 712671 - RNA, 22 nt, Human
auuugcucaaagacaaaggcua

SEQ ID NO: 712672 - RNA, 22 nt, Human
caaagacaaaggcuaaggugag

SEQ ID NO: 712673 - RNA, 18 nt, Human
caaaggcuaaggugagca

SEQ ID NO: 712674 - RNA, 19 nt, Human
caaagugagcacaaagguc

SEQ ID NO: 712675 - RNA, 24 nt, Human
cacugccuccugggccaaagugag

SEQ ID NO: 712676 - RNA, 20 nt, Human
caugagcaucacugccuccu

SEQ ID NO: 712677 - RNA, 20 nt, Human
ccaagcggggggaaagauca

SEQ ID NO: 712678 - RNA, 21 nt, Human
ccagaccugggucuucacacc

SEQ ID NO: 712679 - RNA, 18 nt, Human
cccacaggcucccucuuu

SEQ ID NO: 712680 - RNA, 21 nt, Human
ccccugugauuuuugcuaccu

SEQ ID NO: 712681 - RNA, 20 nt, Human
ccucaaaaucuauacucucc

SEQ ID NO: 712682 - RNA, 20 nt, Human
ccucacccuggcccagcgac

SEQ ID NO: 712683 - RNA, 24 nt, Human
ccugcccgcucuggccccuaagag

SEQ ID NO: 712684 - RNA, 18 nt, Human
ccuggcccagcgacucau

SEQ ID NO: 712685 - RNA, 24 nt, Human
cgagaccaacccuugggacagcgg

SEQ ID NO: 712686 - RNA, 20 nt, Human
cgcagccgaaagcgcgagac

SEQ ID NO: 712687 - RNA, 23 nt, Human
cuaaggugagcaccagggucucu

SEQ ID NO: 712688 - RNA, 25 nt, Human
cuacaggucaauaugcuaaucauau

SEQ ID NO: 712689 - RNA, 19 nt, Human
cuagacauuucuggcacau

SEQ ID NO: 712690 - RNA, 24 nt, Human
cucaaagacaaaggcuaaggugag

SEQ ID NO: 712691 - RNA, 18 nt, Human
cucugggccaggagucag

SEQ ID NO: 712692 - RNA, 20 nt, Human
cuggcacauguuucccaaau

SEQ ID NO: 712693 - RNA, 27 nt, Human
cuggccucuucuuugggaaggacggcc

SEQ ID NO: 712694 - RNA, 20 nt, Human
cuucuugugaaccagggauu

SEQ ID NO: 712695 - RNA, 24 nt, Human
cuugcauuugucuucuaagguagg

SEQ ID NO: 712696 - RNA, 19 nt, Human
cuuuccucuucuugacugu

SEQ ID NO: 712697 - RNA, 23 nt, Human
gaaacuucuuccuuccaaaucaa

SEQ ID NO: 712698 - RNA, 20 nt, Human
gaacccacaggcucccucuu

SEQ ID NO: 712699 - RNA, 19 nt, Human
gagggcagacaccauugcc

SEQ ID NO: 712700 - RNA, 18 nt, Human
gcaagaaacuucuuccuu

SEQ ID NO: 712701 - RNA, 18 nt, Human
gcacagaccagaaaugac

SEQ ID NO: 712702 - RNA, 18 nt, Human
gcucuauuuuuguuaucc

SEQ ID NO: 712703 - RNA, 30 nt, Human
ggaaacaauauagggagucaggucacagcc

SEQ ID NO: 712704 - RNA, 19 nt, Human
ggccccuaagaggcaccag

SEQ ID NO: 712705 - RNA, 21 nt, Human
guugcugaugcucuauuuuug

SEQ ID NO: 712706 - RNA, 18 nt, Human
uaaagucaugcaaccaug

SEQ ID NO: 712707 - RNA, 23 nt, Human
uaaggugagcaccagggucucug

SEQ ID NO: 712708 - RNA, 21 nt, Human
uaagugugagaaaacccaggc

SEQ ID NO: 712709 - RNA, 20 nt, Human
uagcauucaaucuacauuua

SEQ ID NO: 712710 - RNA, 21 nt, Human
ucaaucuacauuuacucuccc

SEQ ID NO: 712711 - RNA, 24 nt, Human
ucacugccuccugggccaaaguga

SEQ ID NO: 712712 - RNA, 24 nt, Human
ucuacaacugaggaaacaauauag

SEQ ID NO: 712713 - RNA, 21 nt, Human
ucucugagaacccacaggcuc

SEQ ID NO: 712714 - RNA, 28 nt, Human
ucuggccucuucuuugggaaggacggcc

SEQ ID NO: 712715 - RNA, 21 nt, Human
ucugggccaggagucaggagg

SEQ ID NO: 712716 - RNA, 23 nt, Human
ucugugaggcuaccaagcggggg

SEQ ID NO: 712717 - RNA, 25 nt, Human
ugaaaugaaaacgauuaugagccca

SEQ ID NO: 712718 - RNA, 19 nt, Human
ugagcacaaagguccucuc

SEQ ID NO: 712719 - RNA, 19 nt, Human
ugagcaccagggucucugg

SEQ ID NO: 712720 - RNA, 24 nt, Human
ugaggugagaaguucugaaaguca

SEQ ID NO: 712721 - RNA, 24 nt, Human
uggaauuucuaccuggaaaggguu

SEQ ID NO: 712722 - RNA, 23 nt, Human
uggcgcaggugcuuaagauuugg

SEQ ID NO: 712723 - RNA, 23 nt, Human
uucaguaggguuuuucauagguc

SEQ ID NO: 712724 - RNA, 25 nt, Human
uuucauaggucacugaaugcauccu

SEQ ID NO: 712725 - RNA, 20 nt, Human
aaaacaguaacaaaaacccc

SEQ ID NO: 712726 - RNA, 24 nt, Human
aaaacccaaaucaacaaagaccaa

SEQ ID NO: 712727 - RNA, 20 nt, Human
aaaagcacacaguguuaauc

SEQ ID NO: 712728 - RNA, 25 nt, Human
aaaauacuacuauaauuucaaagca

SEQ ID NO: 712729 - RNA, 26 nt, Human
aaacaaaagccaaaaauuaaacugua

SEQ ID NO: 712730 - RNA, 21 nt, Human
aaacaacaacaaaaauucuac

SEQ ID NO: 712731 - RNA, 26 nt, Human
aaacaacaacaaaaauucuacaucua

SEQ ID NO: 712732 - RNA, 21 nt, Human
aaacaccaauaacaauaaaac

SEQ ID NO: 712733 - RNA, 20 nt, Human
aaacaguaacaaaaacccca

SEQ ID NO: 712734 - RNA, 24 nt, Human
aaacaguaacaaaaaccccaacaa

SEQ ID NO: 712735 - RNA, 24 nt, Human
aaauagccauaaacacaaacaucc

SEQ ID NO: 712736 - RNA, 25 nt, Human
aaaucaacaaagaccaagauaaagg

SEQ ID NO: 712737 - RNA, 19 nt, Human
aacaauaaaacucuauaag

SEQ ID NO: 712738 - RNA, 20 nt, Human
aacauggcauaaaucuaucu

SEQ ID NO: 712739 - RNA, 27 nt, Human
aaccccaacaaaacccaaaucaacaaa

SEQ ID NO: 712740 - RNA, 20 nt, Human
aacuuuagcacacuugacug

SEQ ID NO: 712741 - RNA, 23 nt, Human
aaggaaaaaagggcaauuaaaaa

SEQ ID NO: 712742 - RNA, 21 nt, Human
aaggcaacaggaaccucaaag

SEQ ID NO: 712743 - RNA, 24 nt, Human
aaguacucgaaauuauauauagcu

SEQ ID NO: 712744 - RNA, 18 nt, Human
aauuaaaaaaauacaacu

SEQ ID NO: 712745 - RNA, 24 nt, Human
acaaaaaccccaacaaaacccaaa

SEQ ID NO: 712746 - RNA, 24 nt, Human
acaaacuuuagcacacuugacugu

SEQ ID NO: 712747 - RNA, 18 nt, Human
acaguaacaaaaacccca

SEQ ID NO: 712748 - RNA, 20 nt, Human
accaguucagaaauccagga

SEQ ID NO: 712749 - RNA, 20 nt, Human
acccugaaagcucagcuugg

SEQ ID NO: 712750 - RNA, 23 nt, Human
acuccacugucacucugaaacaa

SEQ ID NO: 712751 - RNA, 23 nt, Human
acugcaauuuuuuaaacaaaaac

SEQ ID NO: 712752 - RNA, 23 nt, Human
acuggcuacaacaccgugugcac

SEQ ID NO: 712753 - RNA, 25 nt, Human
agaaaacaacaacaaaaauucuaca

SEQ ID NO: 712754 - RNA, 18 nt, Human
agaaaucaaaauguacag

SEQ ID NO: 712755 - RNA, 22 nt, Human
agaagaugaggaaugccuauca

SEQ ID NO: 712756 - RNA, 23 nt, Human
agacaggaagaaaaacauuuugg

SEQ ID NO: 712757 - RNA, 24 nt, Human
agacaggaagaaaaacauuuuggg

SEQ ID NO: 712758 - RNA, 19 nt, Human
agcgggcgacagcuaccgc

SEQ ID NO: 712759 - RNA, 20 nt, Human
aggaaaaaagggcaauuaaa

SEQ ID NO: 712760 - RNA, 19 nt, Human
aggaagaaaaacauuuugg

SEQ ID NO: 712761 - RNA, 18 nt, Human
aggccggaacgaggcgaa

SEQ ID NO: 712762 - RNA, 19 nt, Human
agggagcgccgacggcacc

SEQ ID NO: 712763 - RNA, 25 nt, Human
aguaacaaaaaccccaacaaaaccc

SEQ ID NO: 712764 - RNA, 19 nt, Human
aguuccauuuucagacagg

SEQ ID NO: 712765 - RNA, 23 nt, Human
auuuucagacaggaagaaaaaca

SEQ ID NO: 712766 - RNA, 27 nt, Human
auuuuuuccauacaaaagcacacagug

SEQ ID NO: 712767 - RNA, 24 nt, Human
caaaaaccccaacaaaacccaaau

SEQ ID NO: 712768 - RNA, 27 nt, Human
caaaaaccccaacaaaacccaaaucaa

SEQ ID NO: 712769 - RNA, 22 nt, Human
caaagaccaagauaaaggugug

SEQ ID NO: 712770 - RNA, 20 nt, Human
caaagcaaauuaacauggca

SEQ ID NO: 712771 - RNA, 24 nt, Human
caaaucaacaaagaccaagauaaa

SEQ ID NO: 712772 - RNA, 20 nt, Human
caacuuaaaaaggcaacagg

SEQ ID NO: 712773 - RNA, 21 nt, Human
caauucuauacagcaaaaaga

SEQ ID NO: 712774 - RNA, 27 nt, Human
caauuuuuuaaacaaaaacaaaagcca

SEQ ID NO: 712775 - RNA, 24 nt, Human
caccaugacggccguugcugggcc

SEQ ID NO: 712776 - RNA, 19 nt, Human
caccgugugcacacccagu

SEQ ID NO: 712777 - RNA, 22 nt, Human
cagaauggucaaacucuuggca

SEQ ID NO: 712778 - RNA, 19 nt, Human
cagcugccacagggcccuu

SEQ ID NO: 712779 - RNA, 22 nt, Human
cagcugccacagggcccuuuag

SEQ ID NO: 712780 - RNA, 18 nt, Human
caggaaacacaauauuac

SEQ ID NO: 712781 - RNA, 26 nt, Human
caggaaacacaauauuacaagaacca

SEQ ID NO: 712782 - RNA, 21 nt, Human
caggaagaaaaacauuuuggg

SEQ ID NO: 712783 - RNA, 19 nt, Human
cagguaaacaccaauaaca

SEQ ID NO: 712784 - RNA, 19 nt, Human
caguuucaauccucugaag

SEQ ID NO: 712785 - RNA, 24 nt, Human
ccaauaacaauaaaacucuauaag

SEQ ID NO: 712786 - RNA, 20 nt, Human
ccacugucacucugaaacaa

SEQ ID NO: 712787 - RNA, 26 nt, Human
cccaaauagccauaaacacaaacauc

SEQ ID NO: 712788 - RNA, 19 nt, Human
ccccgcggucacgcaacca

SEQ ID NO: 712789 - RNA, 25 nt, Human
ccuacuguaauuuaaaaacaguaac

SEQ ID NO: 712790 - RNA, 20 nt, Human
ccuucuuuaaaaauacagaa

SEQ ID NO: 712791 - RNA, 20 nt, Human
cgacagcuaccgccgccagc

SEQ ID NO: 712792 - RNA, 23 nt, Human
cggcaccaugacggccguugcug

SEQ ID NO: 712793 - RNA, 20 nt, Human
cgugugcacacccaguuccu

SEQ ID NO: 712794 - RNA, 24 nt, Human
cuacaacaccgugugcacacccag

SEQ ID NO: 712795 - RNA, 18 nt, Human
gaacaguuuugcaguccc

SEQ ID NO: 712796 - RNA, 23 nt, Human
gaacuggcuacaacaccgugugc

SEQ ID NO: 712797 - RNA, 22 nt, Human
gacaacacaaguacaggaggaa

SEQ ID NO: 712798 - RNA, 23 nt, Human
gacaacacaaguacaggaggaac

SEQ ID NO: 712799 - RNA, 21 nt, Human
gacagcugccacagggcccuu

SEQ ID NO: 712800 - RNA, 19 nt, Human
gcaaaugaauauauauuuu

SEQ ID NO: 712801 - RNA, 21 nt, Human
gcugaaaucaaaagcagcuua

SEQ ID NO: 712802 - RNA, 25 nt, Human
ggaaaaaagggcaauuaaaaaaaua

SEQ ID NO: 712803 - RNA, 23 nt, Human
ggaccccgcggucacgcaaccaa

SEQ ID NO: 712804 - RNA, 30 nt, Human
uaaaaacaguaacaaaaaccccaacaaaag

SEQ ID NO: 712805 - RNA, 19 nt, Human
uaaaaucacuaagaaacac

SEQ ID NO: 712806 - RNA, 24 nt, Human
uaaacaccaauaacaauaaaacuc

SEQ ID NO: 712807 - RNA, 22 nt, Human
uaaagugaaaccaaaacauguu

SEQ ID NO: 712808 - RNA, 22 nt, Human
uaacaaaaaccccaacaaaacc

SEQ ID NO: 712809 - RNA, 23 nt, Human
uaacauggcauaaaucuaucuuu

SEQ ID NO: 712810 - RNA, 24 nt, Human
uaagagauaaacaauuuauacagu

SEQ ID NO: 712811 - RNA, 19 nt, Human
uaagcaauucuauacagca

SEQ ID NO: 712812 - RNA, 19 nt, Human
uacaaagaaagcuguucau

SEQ ID NO: 712813 - RNA, 24 nt, Human
uacaacaccgugugcacacccagu

SEQ ID NO: 712814 - RNA, 22 nt, Human
uacagugaacuucaccaaaucc

SEQ ID NO: 712815 - RNA, 20 nt, Human
uacaugcaauacaugcauuu

SEQ ID NO: 712816 - RNA, 21 nt, Human
uacuuuuuaaaaaacauuaca

SEQ ID NO: 712817 - RNA, 20 nt, Human
uagaacuauaaacaggugac

SEQ ID NO: 712818 - RNA, 20 nt, Human
uagagugcaccugugaucuu

SEQ ID NO: 712819 - RNA, 22 nt, Human
uagagugcaccugugaucuugg

SEQ ID NO: 712820 - RNA, 19 nt, Human
uagcaaggugccuauccca

SEQ ID NO: 712821 - RNA, 25 nt, Human
uagcacacuugacuguuaaaacaac

SEQ ID NO: 712822 - RNA, 22 nt, Human
uagccauaaacacaaacauccc

SEQ ID NO: 712823 - RNA, 20 nt, Human
uagguauucagguaaacacc

SEQ ID NO: 712824 - RNA, 23 nt, Human
uauacagcaaaaagagaaugauu

SEQ ID NO: 712825 - RNA, 19 nt, Human
uauuauugugaagaagaug

SEQ ID NO: 712826 - RNA, 25 nt, Human
ucaaaagcagcuuaaauugacaaac

SEQ ID NO: 712827 - RNA, 22 nt, Human
ucaguguuauguguagagugca

SEQ ID NO: 712828 - RNA, 18 nt, Human
ucccauucuucacugcaa

SEQ ID NO: 712829 - RNA, 18 nt, Human
ucgccgccgcaccgaggc

SEQ ID NO: 712830 - RNA, 21 nt, Human
ugaaaccaaaacauguucaac

SEQ ID NO: 712831 - RNA, 21 nt, Human
ugaaaccaaaacauguucaac

SEQ ID NO: 712832 - RNA, 18 nt, Human
ugaaagaaagagugauau

SEQ ID NO: 712833 - RNA, 22 nt, Human
ugaaaucaaaagcagcuuaaau

SEQ ID NO: 712834 - RNA, 27 nt, Human
ugaaaucaaaagcagcuuaaauugaca

SEQ ID NO: 712835 - RNA, 18 nt, Human
ugaagaagaugaggaaug

SEQ ID NO: 712836 - RNA, 24 nt, Human
ugauuguuuuugcaugucccccug

SEQ ID NO: 712837 - RNA, 23 nt, Human
ugcacacccaguuccugcagaau

SEQ ID NO: 712838 - RNA, 23 nt, Human
ugccacagggcccuuuaguccuc

SEQ ID NO: 712839 - RNA, 20 nt, Human
ugcuauucaacagauguccu

SEQ ID NO: 712840 - RNA, 20 nt, Human
uggcuacaacaccgugugca

SEQ ID NO: 712841 - RNA, 19 nt, Human
uguaaaaagaaauggaauc

SEQ ID NO: 712842 - RNA, 23 nt, Human
uuaaaaacaguaacaaaaacccc

SEQ ID NO: 712843 - RNA, 21 nt, Human
uuaaacaaaaacaaaagccaa

SEQ ID NO: 712844 - RNA, 22 nt, Human
uuaaacaaaaacaaaagccaaa

SEQ ID NO: 712845 - RNA, 21 nt, Human
uuccagugacagcugccacag

SEQ ID NO: 712846 - RNA, 19 nt, Human
uuccaucauuauuuucaag

SEQ ID NO: 712847 - RNA, 18 nt, Human
uucuacaucuaagcggcu

SEQ ID NO: 712848 - RNA, 20 nt, Human
uugcagucccaggacuagga

SEQ ID NO: 712849 - RNA, 19 nt, Human
uugcaugucccccugcuua

SEQ ID NO: 712850 - RNA, 20 nt, Human
uugcugggccgcggaggccg

SEQ ID NO: 712851 - RNA, 23 nt, Human
uuuaaaaacaguaacaaaaaccc

SEQ ID NO: 712852 - RNA, 26 nt, Human
uuuaaaaacaguaacaaaaaccccaa

SEQ ID NO: 712853 - RNA, 25 nt, Human
aaaagcccagaagguauccaccaag

SEQ ID NO: 712854 - RNA, 18 nt, Human
aaagcccagaagguaucc

SEQ ID NO: 712855 - RNA, 26 nt, Human
aacucauuuccccaagccacgcaggc

SEQ ID NO: 712856 - RNA, 18 nt, Human
acacacacacaaaacaca

SEQ ID NO: 712857 - RNA, 20 nt, Human
acacacacacaaaacacagc

SEQ ID NO: 712858 - RNA, 21 nt, Human
agccacgcaggccauggccuc

SEQ ID NO: 712859 - RNA, 22 nt, Human
aggaguaggugggaguuuaagg

SEQ ID NO: 712860 - RNA, 22 nt, Human
cacacacaaaacacagccccca

SEQ ID NO: 712861 - RNA, 23 nt, Human
cagcaggcucuccucaguggucu

SEQ ID NO: 712862 - RNA, 23 nt, Human
cagcaggugugugcauugaugcu

SEQ ID NO: 712863 - RNA, 22 nt, Human
ccaccaacucauuuccccaagc

SEQ ID NO: 712864 - RNA, 18 nt, Human
ccccaagccacgcaggcc

SEQ ID NO: 712865 - RNA, 26 nt, Human
ccccaagccacgcaggccauggccuc

SEQ ID NO: 712866 - RNA, 20 nt, Human
cuccuuauuccaggaguagg

SEQ ID NO: 712867 - RNA, 19 nt, Human
gagagggaaaugggggagg

SEQ ID NO: 712868 - RNA, 21 nt, Human
ggagagggaaaugggggaggg

SEQ ID NO: 712869 - RNA, 19 nt, Human
gggcaaguucaaaagccca

SEQ ID NO: 712870 - RNA, 26 nt, Human
gggggagagggaaaugggggaggggg

SEQ ID NO: 712871 - RNA, 22 nt, Human
uauacacacacacaaaacacag

SEQ ID NO: 712872 - RNA, 22 nt, Human
ucagcucagcaggcucuccuca

SEQ ID NO: 712873 - RNA, 24 nt, Human
uccaccaacucauuuccccaagcc

SEQ ID NO: 712874 - RNA, 23 nt, Human
uccuuauuccaggaguagguggg

SEQ ID NO: 712875 - RNA, 21 nt, Human
ucugguuucugaaacaagacu

SEQ ID NO: 712876 - RNA, 18 nt, Human
ugaaacuacaugccuucc

SEQ ID NO: 712877 - RNA, 21 nt, Human
ugaaacuacaugccuuccaga

SEQ ID NO: 712878 - RNA, 22 nt, Human
ugaaauggguaagacaggguca

SEQ ID NO: 712879 - RNA, 22 nt, Human
ugaaauggguaagacaggguca

SEQ ID NO: 712880 - RNA, 22 nt, Human
uuccagaaaucaaaagcaacag

SEQ ID NO: 712881 - RNA, 19 nt, Human
uugaaacuacaugccuucc

SEQ ID NO: 712882 - RNA, 25 nt, Human
aaaucaccaccaccaccaccacccu

SEQ ID NO: 712883 - RNA, 23 nt, Human
aaucaccaccaccaccaccaccc

SEQ ID NO: 712884 - RNA, 25 nt, Human
acaaauaacuaccccaaaucaccac

SEQ ID NO: 712885 - RNA, 23 nt, Human
acuuugcaggguauucuuugggg

SEQ ID NO: 712886 - RNA, 22 nt, Human
aggcaucuuguaccagaaggca

SEQ ID NO: 712887 - RNA, 25 nt, Human
caaaucaccaccaccaccaccaccc

SEQ ID NO: 712888 - RNA, 19 nt, Human
cacaguaugggacaaaggu

SEQ ID NO: 712889 - RNA, 20 nt, Human
caccaccaccaccaccaccc

SEQ ID NO: 712890 - RNA, 21 nt, Human
caccaccaccaccaccacccu

SEQ ID NO: 712891 - RNA, 19 nt, Human
ccuucaccuguuucagcca

SEQ ID NO: 712892 - RNA, 21 nt, Human
cgcaggacuuugauucugugc

SEQ ID NO: 712893 - RNA, 20 nt, Human
cuaccccaaaucaccaccac

SEQ ID NO: 712894 - RNA, 21 nt, Human
gccugagcgcaagggagccgg

SEQ ID NO: 712895 - RNA, 24 nt, Human
uaccaaaugaagagcuuaaacuua

SEQ ID NO: 712896 - RNA, 19 nt, Human
uaccagaaggcaggcucug

SEQ ID NO: 712897 - RNA, 20 nt, Human
uaccagaaggcaggcucugc

SEQ ID NO: 712898 - RNA, 22 nt, Human
uaccccaaaucaccaccaccac

SEQ ID NO: 712899 - RNA, 21 nt, Human
ucaccaccaccaccaccaccc

SEQ ID NO: 712900 - RNA, 25 nt, Human
ucaccaccaccaccaccacccuugc

SEQ ID NO: 712901 - RNA, 22 nt, Human
uccacaggcaucuuguaccaga

SEQ ID NO: 712902 - RNA, 23 nt, Human
uccgcaggacuuugauucugugc

SEQ ID NO: 712903 - RNA, 23 nt, Human
ucucauauauugccuaaauacca

SEQ ID NO: 712904 - RNA, 21 nt, Human
ugggacaaagguuuacacuuu

SEQ ID NO: 712905 - RNA, 24 nt, Human
uuacaaaugaacaaaaaaaauuuu

SEQ ID NO: 712906 - RNA, 26 nt, Human
uuacaguucacaaaacuguaucugaa

SEQ ID NO: 712907 - RNA, 22 nt, Human
uugggggaauguuaaauacugu

SEQ ID NO: 712908 - RNA, 19 nt, Human
uuugcagaaaauaaaagau

SEQ ID NO: 712909 - RNA, 20 nt, Human
cagcugccugcaggauccag

SEQ ID NO: 712910 - RNA, 18 nt, Human
ccccggacaaaccuggug

SEQ ID NO: 712911 - RNA, 23 nt, Human
ccugcgcugccgcgccugccgga

SEQ ID NO: 712912 - RNA, 18 nt, Human
gccggaugauggccaggc

SEQ ID NO: 712913 - RNA, 19 nt, Human
guacuccuuccucuucucc

SEQ ID NO: 712914 - RNA, 19 nt, Human
guagccuuugaggaagucg

SEQ ID NO: 712915 - RNA, 19 nt, Human
uacuccuuccucuucuccc

SEQ ID NO: 712916 - RNA, 19 nt, Human
ugcagaugcccuucaggaa

SEQ ID NO: 712917 - RNA, 19 nt, Human
ugcgggacacguacacgug

SEQ ID NO: 712918 - RNA, 22 nt, Human
ugcugcagaugcccuucaggaa

SEQ ID NO: 712919 - RNA, 18 nt, Human
aaaaaaaaaaagaaagaa

SEQ ID NO: 712920 - RNA, 29 nt, Human
aaaacaaaaacaaaaacaaaaaaacuuuc

SEQ ID NO: 712921 - RNA, 30 nt, Human
aaacaaacaaaaccugagaagaaaucaagg

SEQ ID NO: 712922 - RNA, 20 nt, Human
aaacccaggacaugagccca

SEQ ID NO: 712923 - RNA, 19 nt, Human
aaagcaucccugcccccug

SEQ ID NO: 712924 - RNA, 21 nt, Human
aaagcgcccaucccuaacccu

SEQ ID NO: 712925 - RNA, 18 nt, Human
aaagcucaccuacucucc

SEQ ID NO: 712926 - RNA, 20 nt, Human
aacaguuccuggguguuucc

SEQ ID NO: 712927 - RNA, 23 nt, Human
aacauccugauuuuguacuuuuu

SEQ ID NO: 712928 - RNA, 21 nt, Human
aaccugacugcuacuuggaua

SEQ ID NO: 712929 - RNA, 22 nt, Human
aaccugagaagaaaucaagucc

SEQ ID NO: 712930 - RNA, 20 nt, Human
aaccugcugauucuuucccu

SEQ ID NO: 712931 - RNA, 21 nt, Human
aacucggcucucccuucccga

SEQ ID NO: 712932 - RNA, 22 nt, Human
aagaaaccugcccucgcuaggc

SEQ ID NO: 712933 - RNA, 22 nt, Human
aagcaaaaggugaacaacagag

SEQ ID NO: 712934 - RNA, 21 nt, Human
aagcaaacucaaaauuaaaca

SEQ ID NO: 712935 - RNA, 20 nt, Human
aagcaggggagcugugugaa

SEQ ID NO: 712936 - RNA, 24 nt, Human
aagccagcucuauccaccccuaca

SEQ ID NO: 712937 - RNA, 23 nt, Human
acaaaaacaaaaaaacuuucaag

SEQ ID NO: 712938 - RNA, 19 nt, Human
acaaacaaacaaacaaaac

SEQ ID NO: 712939 - RNA, 24 nt, Human
acaaagcaauggacagugaaaaac

SEQ ID NO: 712940 - RNA, 23 nt, Human
acaaaucccacagaguuucuugg

SEQ ID NO: 712941 - RNA, 21 nt, Human
acagacccaggcaaacuaaca

SEQ ID NO: 712942 - RNA, 21 nt, Human
acagagagucuuaguuuggac

SEQ ID NO: 712943 - RNA, 21 nt, Human
acagaguuucuuggcacaaug

SEQ ID NO: 712944 - RNA, 19 nt, Human
acagcccagaaggaaagcc

SEQ ID NO: 712945 - RNA, 21 nt, Human
accccggacucagaaaaacag

SEQ ID NO: 712946 - RNA, 20 nt, Human
acccuggcucagagcaggag

SEQ ID NO: 712947 - RNA, 18 nt, Human
acguccaaugagagacca

SEQ ID NO: 712948 - RNA, 19 nt, Human
acuugaugcuuuuucucca

SEQ ID NO: 712949 - RNA, 19 nt, Human
agaaaggaggggaccaggg

SEQ ID NO: 712950 - RNA, 23 nt, Human
agacagacccaggcaaacuaaca

SEQ ID NO: 712951 - RNA, 18 nt, Human
agacccaagucacagcga

SEQ ID NO: 712952 - RNA, 20 nt, Human
agagaagcagauuucuucug

SEQ ID NO: 712953 - RNA, 23 nt, Human
agagaccaacaggccccugaccu

SEQ ID NO: 712954 - RNA, 20 nt, Human
agagaggaugggaaacuagg

SEQ ID NO: 712955 - RNA, 22 nt, Human
agaggaaagagaaggcugggag

SEQ ID NO: 712956 - RNA, 21 nt, Human
agaggagcccaggccucuccu

SEQ ID NO: 712957 - RNA, 22 nt, Human
agauaagagaacaaacagugca

SEQ ID NO: 712958 - RNA, 25 nt, Human
agauuaaggaaacaaacaaacaaac

SEQ ID NO: 712959 - RNA, 21 nt, Human
agcacgucugggaccaggugg

SEQ ID NO: 712960 - RNA, 22 nt, Human
agcagccaggcccaauguggaa

SEQ ID NO: 712961 - RNA, 18 nt, Human
agccacaaaacaaaaaca

SEQ ID NO: 712962 - RNA, 18 nt, Human
agccacaaaacaaaaaca

SEQ ID NO: 712963 - RNA, 20 nt, Human
aggaaccaaagcuacugcca

SEQ ID NO: 712964 - RNA, 28 nt, Human
aggagccacaaaacaaaaacaaaaacaa

SEQ ID NO: 712965 - RNA, 27 nt, Human
aggcaggagaagaaggaagagggaccc

SEQ ID NO: 712966 - RNA, 18 nt, Human
aggcaggugguccccagg

SEQ ID NO: 712967 - RNA, 19 nt, Human
aggcaggugguccccagga

SEQ ID NO: 712968 - RNA, 24 nt, Human
aggcaggugguccccaggaccaag

SEQ ID NO: 712969 - RNA, 20 nt, Human
aggccccugaccuaagucag

SEQ ID NO: 712970 - RNA, 21 nt, Human
agggagggagguaccaacaag

SEQ ID NO: 712971 - RNA, 20 nt, Human
aggguagaagcuacaagggc

SEQ ID NO: 712972 - RNA, 21 nt, Human
agguaccaacaaggugaggug

SEQ ID NO: 712973 - RNA, 20 nt, Human
aggugguaaaggagaagaca

SEQ ID NO: 712974 - RNA, 21 nt, Human
aguagaggagcccaggccucu

SEQ ID NO: 712975 - RNA, 19 nt, Human
agucacagcgaaaacaaca

SEQ ID NO: 712976 - RNA, 21 nt, Human
aguugguuuggccuccacaga

SEQ ID NO: 712977 - RNA, 21 nt, Human
auaaagcacugaagcucaaaa

SEQ ID NO: 712978 - RNA, 18 nt, Human
aucauugugaaaaauaca

SEQ ID NO: 712979 - RNA, 19 nt, Human
auggaggacaauauuccau

SEQ ID NO: 712980 - RNA, 22 nt, Human
auggaguucugcuuuccccagu

SEQ ID NO: 712981 - RNA, 25 nt, Human
auguggaagggugggcuugguuucc

SEQ ID NO: 712982 - RNA, 20 nt, Human
auuaaagagccaaaacccag

SEQ ID NO: 712983 - RNA, 22 nt, Human
caaaauacagauaagagaacaa

SEQ ID NO: 712984 - RNA, 21 nt, Human
caaagcuacugccagaagccu

SEQ ID NO: 712985 - RNA, 24 nt, Human
caaauucuaccccuucacacacau

SEQ ID NO: 712986 - RNA, 19 nt, Human
caacaggcacugaaaucaa

SEQ ID NO: 712987 - RNA, 21 nt, Human
caacucaggccacacuucugg

SEQ ID NO: 712988 - RNA, 23 nt, Human
caagaucgacacuuagaugcuaa

SEQ ID NO: 712989 - RNA, 22 nt, Human
caagccacacagaugcaaagaa

SEQ ID NO: 712990 - RNA, 19 nt, Human
caaggcccucucugccaac

SEQ ID NO: 712991 - RNA, 26 nt, Human
cacaaagcaauggacagugaaaaaca

SEQ ID NO: 712992 - RNA, 19 nt, Human
cacaccaagaaccugacug

SEQ ID NO: 712993 - RNA, 24 nt, Human
caccccucacuggcaccccucacc

SEQ ID NO: 712994 - RNA, 23 nt, Human
cacgcaccccucacuggcacccc

SEQ ID NO: 712995 - RNA, 20 nt, Human
cacuggauuaauccagaaag

SEQ ID NO: 712996 - RNA, 24 nt, Human
cagaaaaacagcgccacgggccgc

SEQ ID NO: 712997 - RNA, 22 nt, Human
cagaaggaaagccagcucuauc

SEQ ID NO: 712998 - RNA, 23 nt, Human
cagaaggaaagccagcucuaucc

SEQ ID NO: 712999 - RNA, 18 nt, Human
cagaaugggcagcugguc

SEQ ID NO: 713000 - RNA, 25 nt, Human
cagacccaggcaaacuaacaaacaa

SEQ ID NO: 713001 - RNA, 19 nt, Human
cagcccagcucugcagcag

SEQ ID NO: 713002 - RNA, 28 nt, Human
cagcugggcucagugggaucuaaaaacc

SEQ ID NO: 713003 - RNA, 20 nt, Human
caggugguccccaggaccaa

SEQ ID NO: 713004 - RNA, 25 nt, Human
caguuccuggguguuuccgguucug

SEQ ID NO: 713005 - RNA, 19 nt, Human
caucacaccaagaaccuga

SEQ ID NO: 713006 - RNA, 24 nt, Human
cauucaagcagagaaccccaaauc

SEQ ID NO: 713007 - RNA, 20 nt, Human
ccaaagcuacugccagaagc

SEQ ID NO: 713008 - RNA, 21 nt, Human
ccacaaagagaggacgaggac

SEQ ID NO: 713009 - RNA, 21 nt, Human
ccacaccccuccacccuguuc

SEQ ID NO: 713010 - RNA, 19 nt, Human
ccacagaaggagaaagccc

SEQ ID NO: 713011 - RNA, 22 nt, Human
ccacagaaggagaaagcccaaa

SEQ ID NO: 713012 - RNA, 24 nt, Human
ccacccuguucaggauagucauuu

SEQ ID NO: 713013 - RNA, 22 nt, Human
ccagcuaguccccaaaucaccu

SEQ ID NO: 713014 - RNA, 18 nt, Human
ccaggcaaacuaacaaac

SEQ ID NO: 713015 - RNA, 18 nt, Human
ccaggcacagaaaggggg

SEQ ID NO: 713016 - RNA, 19 nt, Human
ccaguuuacccuaaguauc

SEQ ID NO: 713017 - RNA, 21 nt, Human
cccaaggugagccaauuucua

SEQ ID NO: 713018 - RNA, 22 nt, Human
cccacaccccuccacccuguuc

SEQ ID NO: 713019 - RNA, 21 nt, Human
cccaggcaaacuaacaaacaa

SEQ ID NO: 713020 - RNA, 23 nt, Human
cccaggcaaacuaacaaacaagg

SEQ ID NO: 713021 - RNA, 23 nt, Human
ccccaggagucaggguuuccuuc

SEQ ID NO: 713022 - RNA, 22 nt, Human
ccccccauagcaggcuagacaa

SEQ ID NO: 713023 - RNA, 18 nt, Human
cccccuccuuccucagac

SEQ ID NO: 713024 - RNA, 19 nt, Human
ccccucacuggcaccccuc

SEQ ID NO: 713025 - RNA, 24 nt, Human
cccucaccaucucccauacauucc

SEQ ID NO: 713026 - RNA, 19 nt, Human
cccugcccaaaccugaauc

SEQ ID NO: 713027 - RNA, 21 nt, Human
ccuaacccugagcucagggga

SEQ ID NO: 713028 - RNA, 21 nt, Human
ccugcugauucuuucccuggg

SEQ ID NO: 713029 - RNA, 19 nt, Human
ccugugggcagggcuaguc

SEQ ID NO: 713030 - RNA, 20 nt, Human
ccuucuggaggggcauggaa

SEQ ID NO: 713031 - RNA, 20 nt, Human
ccuugaaguagcucuaggca

SEQ ID NO: 713032 - RNA, 20 nt, Human
cgccgacccucguccucggc

SEQ ID NO: 713033 - RNA, 18 nt, Human
cgggggcagcccccgccg

SEQ ID NO: 713034 - RNA, 21 nt, Human
cuaacccaauggcaguggccc

SEQ ID NO: 713035 - RNA, 24 nt, Human
cuagacauaacuucagaccguacc

SEQ ID NO: 713036 - RNA, 25 nt, Human
cuagcacugagacccaagucacagc

SEQ ID NO: 713037 - RNA, 23 nt, Human
cuagucucauaacaaaaugagga

SEQ ID NO: 713038 - RNA, 24 nt, Human
cuagucucauaacaaaaugaggaa

SEQ ID NO: 713039 - RNA, 23 nt, Human
cucaaacaggcacuacuguuucc

SEQ ID NO: 713040 - RNA, 20 nt, Human
cucacuggcaccccucacca

SEQ ID NO: 713041 - RNA, 19 nt, Human
cucccugccagugcucccc

SEQ ID NO: 713042 - RNA, 24 nt, Human
cucucaaaccaacagguggcccug

SEQ ID NO: 713043 - RNA, 22 nt, Human
cugaagcucaaaauagagguga

SEQ ID NO: 713044 - RNA, 24 nt, Human
cugcugggucagguccuccuggcu

SEQ ID NO: 713045 - RNA, 21 nt, Human
cuggaccaaacaguucccagg

SEQ ID NO: 713046 - RNA, 18 nt, Human
cugggcucagugggaucu

SEQ ID NO: 713047 - RNA, 26 nt, Human
cuuucagucccaucacaccaagaacc

SEQ ID NO: 713048 - RNA, 23 nt, Human
gaaagcucaccuacucuccuagg

SEQ ID NO: 713049 - RNA, 20 nt, Human
gacccaagucacagcgaaaa

SEQ ID NO: 713050 - RNA, 23 nt, Human
gacugcagccucgggccacaacc

SEQ ID NO: 713051 - RNA, 19 nt, Human
gagcugccaaggcucuggc

SEQ ID NO: 713052 - RNA, 18 nt, Human
gaggaugggaaacuaggg

SEQ ID NO: 713053 - RNA, 26 nt, Human
gauccccaaggcaagaagacacuuga

SEQ ID NO: 713054 - RNA, 20 nt, Human
gaucugaggacccgacauaa

SEQ ID NO: 713055 - RNA, 27 nt, Human
gcaaaaagcaaaaggugaacaacagag

SEQ ID NO: 713056 - RNA, 22 nt, Human
gcaaaauggaggcagccagucc

SEQ ID NO: 713057 - RNA, 18 nt, Human
gcaccccucaccaucucc

SEQ ID NO: 713058 - RNA, 18 nt, Human
gcaggugguccccaggac

SEQ ID NO: 713059 - RNA, 24 nt, Human
gccacgggccgcuccgccugagcc

SEQ ID NO: 713060 - RNA, 24 nt, Human
gccaggccaccccggacucagaaa

SEQ ID NO: 713061 - RNA, 21 nt, Human
gccucagucucuccuuccucc

SEQ ID NO: 713062 - RNA, 21 nt, Human
gccuggaguaaucauuaaaga

SEQ ID NO: 713063 - RNA, 19 nt, Human
gcuccagcccaagcugaag

SEQ ID NO: 713064 - RNA, 24 nt, Human
gcugcucucuacucgcucugccuc

SEQ ID NO: 713065 - RNA, 23 nt, Human
ggaaaauacugcugcuguuuucu

SEQ ID NO: 713066 - RNA, 21 nt, Human
ggaaacuaggguagaagcuac

SEQ ID NO: 713067 - RNA, 19 nt, Human
ggaaccaaagcuacugccg

SEQ ID NO: 713068 - RNA, 22 nt, Human
ggagguaccaacaaggugaggu

SEQ ID NO: 713069 - RNA, 26 nt, Human
ggaguggggugggacauggaaggggu

SEQ ID NO: 713070 - RNA, 24 nt, Human
ggcaaagaguugguuuggccucca

SEQ ID NO: 713071 - RNA, 23 nt, Human
ggcaggugguccccaggaccaag

SEQ ID NO: 713072 - RNA, 22 nt, Human
gggaaaagggugggcuuggaaa

SEQ ID NO: 713073 - RNA, 22 nt, Human
gggcagagaaccugcugauucu

SEQ ID NO: 713074 - RNA, 18 nt, Human
ggggagggaagggacagg

SEQ ID NO: 713075 - RNA, 18 nt, Human
ggguccuuccccaacccc

SEQ ID NO: 713076 - RNA, 22 nt, Human
gguagaagcuacaagggcuaag

SEQ ID NO: 713077 - RNA, 19 nt, Human
guuguccuuugaaaggacg

SEQ ID NO: 713078 - RNA, 23 nt, Human
uaaaaaacauaucuaauaaagca

SEQ ID NO: 713079 - RNA, 20 nt, Human
uaaaacacaaagcaauggac

SEQ ID NO: 713080 - RNA, 21 nt, Human
uaacaaaaugaggaaaucuag

SEQ ID NO: 713081 - RNA, 21 nt, Human
uaacccaauggcaguggccca

SEQ ID NO: 713082 - RNA, 19 nt, Human
uaagagaacaaacagugca

SEQ ID NO: 713083 - RNA, 20 nt, Human
uaagaucaauaagaagcauc

SEQ ID NO: 713084 - RNA, 20 nt, Human
uaagaucaauaagaagcauc

SEQ ID NO: 713085 - RNA, 19 nt, Human
uaagcucaaaauacagaua

SEQ ID NO: 713086 - RNA, 21 nt, Human
uacccauccugcccuuuaaaa

SEQ ID NO: 713087 - RNA, 23 nt, Human
uaccccagcccccaccauacuuc

SEQ ID NO: 713088 - RNA, 23 nt, Human
uacuguuuccuuggcugccagga

SEQ ID NO: 713089 - RNA, 23 nt, Human
uagagaaaugaaaggacagggga

SEQ ID NO: 713090 - RNA, 19 nt, Human
uagaggcaggagaagaagg

SEQ ID NO: 713091 - RNA, 24 nt, Human
uaggcagggagggcaagagaacac

SEQ ID NO: 713092 - RNA, 19 nt, Human
uaguuaggauguccacugc

SEQ ID NO: 713093 - RNA, 23 nt, Human
uauaacuuagugggaugguugag

SEQ ID NO: 713094 - RNA, 21 nt, Human
uauccaggccuuuccaggaga

SEQ ID NO: 713095 - RNA, 19 nt, Human
uaugggaaguauaccucug

SEQ ID NO: 713096 - RNA, 21 nt, Human
ucacagcgaaaacaacaggcu

SEQ ID NO: 713097 - RNA, 19 nt, Human
ucagaaaaacagcgccacg

SEQ ID NO: 713098 - RNA, 24 nt, Human
ucagauggagacagcccagaagga

SEQ ID NO: 713099 - RNA, 24 nt, Human
ucaguccuagcacuaagcucaaaa

SEQ ID NO: 713100 - RNA, 23 nt, Human
ucauucccuggaucacaacacac

SEQ ID NO: 713101 - RNA, 22 nt, Human
uccaaugagagaccaacaggcc

SEQ ID NO: 713102 - RNA, 25 nt, Human
uccacgcaccccucacuggcacccc

SEQ ID NO: 713103 - RNA, 24 nt, Human
ucccacaccccuccacccuguuca

SEQ ID NO: 713104 - RNA, 24 nt, Human
ucccaguagcucuuaggcagggag

SEQ ID NO: 713105 - RNA, 22 nt, Human
ucccgacaguuguccuuugaaa

SEQ ID NO: 713106 - RNA, 20 nt, Human
uccuggguguuuccgguucu

SEQ ID NO: 713107 - RNA, 18 nt, Human
uccuucaucuugacuaac

SEQ ID NO: 713108 - RNA, 19 nt, Human
ucguccucggccggcugcc

SEQ ID NO: 713109 - RNA, 21 nt, Human
ucucaaacgacuaaaugcugg

SEQ ID NO: 713110 - RNA, 18 nt, Human
ucuccuagguccuucugg

SEQ ID NO: 713111 - RNA, 18 nt, Human
ucucucacuuuggaaaga

SEQ ID NO: 713112 - RNA, 19 nt, Human
ucucucccugccagugcuc

SEQ ID NO: 713113 - RNA, 19 nt, Human
ucugaagucuuaucuagac

SEQ ID NO: 713114 - RNA, 19 nt, Human
ucugccucuuuuugucucc

SEQ ID NO: 713115 - RNA, 18 nt, Human
ucuuggaugcuggacagu

SEQ ID NO: 713116 - RNA, 20 nt, Human
ugaaaggacaggggaaggaa

SEQ ID NO: 713117 - RNA, 24 nt, Human
ugaccgggguggguccuuccccaa

SEQ ID NO: 713118 - RNA, 21 nt, Human
ugagcaggaaggauccaguuu

SEQ ID NO: 713119 - RNA, 20 nt, Human
ugagcucaggggaaaagggu

SEQ ID NO: 713120 - RNA, 22 nt, Human
ugaggugguaaaggagaagaca

SEQ ID NO: 713121 - RNA, 21 nt, Human
ugauuuuguacuuuuuggugg

SEQ ID NO: 713122 - RNA, 20 nt, Human
ugccaaggcccucucugcca

SEQ ID NO: 713123 - RNA, 19 nt, Human
ugccaggccaccccggacu

SEQ ID NO: 713124 - RNA, 21 nt, Human
ugcccccaucucacaagacug

SEQ ID NO: 713125 - RNA, 24 nt, Human
ugcccucucaucaaagccuaaaug

SEQ ID NO: 713126 - RNA, 26 nt, Human
ugcucucuacucgcucugccucuuuu

SEQ ID NO: 713127 - RNA, 20 nt, Human
uggaaagcaucccugccccc

SEQ ID NO: 713128 - RNA, 19 nt, Human
uggaaggcgggacccccuc

SEQ ID NO: 713129 - RNA, 21 nt, Human
uggaaggcgggacccccuccu

SEQ ID NO: 713130 - RNA, 20 nt, Human
uggaagggguagggucagau

SEQ ID NO: 713131 - RNA, 19 nt, Human
uggaauucuuucaguccca

SEQ ID NO: 713132 - RNA, 18 nt, Human
uggacagucuauaacugg

SEQ ID NO: 713133 - RNA, 21 nt, Human
uggcacaugccagggagacaa

SEQ ID NO: 713134 - RNA, 20 nt, Human
uggcaccccucaccaucucc

SEQ ID NO: 713135 - RNA, 21 nt, Human
uggcagcaaggcccuacaaag

SEQ ID NO: 713136 - RNA, 18 nt, Human
ugggagccagccacaaag

SEQ ID NO: 713137 - RNA, 26 nt, Human
ugggagccagccacaaagagaggacg

SEQ ID NO: 713138 - RNA, 21 nt, Human
ugggaguggggugggacaugg

SEQ ID NO: 713139 - RNA, 22 nt, Human
uggggugggacauggaaggggu

SEQ ID NO: 713140 - RNA, 20 nt, Human
ugguuucuuucccacacccc

SEQ ID NO: 713141 - RNA, 19 nt, Human
uguguugagguggaaggcc

SEQ ID NO: 713142 - RNA, 18 nt, Human
uguuuccuuggcugccag

SEQ ID NO: 713143 - RNA, 23 nt, Human
uuaaaaaaaaaaagaaagaaaga

SEQ ID NO: 713144 - RNA, 25 nt, Human
uuaaaaaacauaucuaauaaagcaa

SEQ ID NO: 713145 - RNA, 19 nt, Human
uucagucagcugggcucag

SEQ ID NO: 713146 - RNA, 22 nt, Human
uucaguguacuaucacuuugcc

SEQ ID NO: 713147 - RNA, 18 nt, Human
uuccuggguguuuccggu

SEQ ID NO: 713148 - RNA, 24 nt, Human
uucuaaagcuggaccaaacaguuc

SEQ ID NO: 713149 - RNA, 21 nt, Human
uuggcuccaggggagucuacc

SEQ ID NO: 713150 - RNA, 24 nt, Human
uuucugaaguucucagcugagauu

SEQ ID NO: 713151 - RNA, 20 nt, Human
aaaaauaagaaaaagccaac

SEQ ID NO: 713152 - RNA, 24 nt, Human
aaacacaauuagaaaagaacugga

SEQ ID NO: 713153 - RNA, 18 nt, Human
aaacgcuggcagcugacu

SEQ ID NO: 713154 - RNA, 18 nt, Human
aacacagcagccaggaac

SEQ ID NO: 713155 - RNA, 23 nt, Human
aacccuucccccagcacccccug

SEQ ID NO: 713156 - RNA, 21 nt, Human
aagagcagagaccccggaaga

SEQ ID NO: 713157 - RNA, 18 nt, Human
aagguucugggugagcug

SEQ ID NO: 713158 - RNA, 22 nt, Human
acaaauucuccaugccaggaac

SEQ ID NO: 713159 - RNA, 18 nt, Human
accccggaagagaaaccc

SEQ ID NO: 713160 - RNA, 19 nt, Human
acgguggccuccugccagg

SEQ ID NO: 713161 - RNA, 21 nt, Human
agaugguggugaggggugagg

SEQ ID NO: 713162 - RNA, 23 nt, Human
agcugacuccuaauuucagaaac

SEQ ID NO: 713163 - RNA, 18 nt, Human
aggagguuugcuggugaa

SEQ ID NO: 713164 - RNA, 18 nt, Human
aggccuggggcugaggcu

SEQ ID NO: 713165 - RNA, 23 nt, Human
aggugcagcuuugcuacaagaaa

SEQ ID NO: 713166 - RNA, 18 nt, Human
auaagaaaaagccaacau

SEQ ID NO: 713167 - RNA, 26 nt, Human
aucagccccagccccaggcgccccuu

SEQ ID NO: 713168 - RNA, 23 nt, Human
augcugugcucccggaguguggc

SEQ ID NO: 713169 - RNA, 18 nt, Human
caaaggcgacgggcccgc

SEQ ID NO: 713170 - RNA, 19 nt, Human
caagacgguggccuccugc

SEQ ID NO: 713171 - RNA, 19 nt, Human
cacaaucagccccagcccc

SEQ ID NO: 713172 - RNA, 23 nt, Human
cacacugcagccacacaaaaacg

SEQ ID NO: 713173 - RNA, 21 nt, Human
caccgcccacaaucagcccca

SEQ ID NO: 713174 - RNA, 22 nt, Human
caggaacaaagcccuuggcuaa

SEQ ID NO: 713175 - RNA, 21 nt, Human
caggaacaaauucuccaugcc

SEQ ID NO: 713176 - RNA, 24 nt, Human
caggaacaaauucuccaugccagg

SEQ ID NO: 713177 - RNA, 18 nt, Human
caggaccucagcaggagg

SEQ ID NO: 713178 - RNA, 20 nt, Human
caggagguuugcuggugaag

SEQ ID NO: 713179 - RNA, 20 nt, Human
cagggcucccaaacgcuucc

SEQ ID NO: 713180 - RNA, 21 nt, Human
cauagagcccugugggugcag

SEQ ID NO: 713181 - RNA, 18 nt, Human
ccacacaaaaacgcuggc

SEQ ID NO: 713182 - RNA, 19 nt, Human
ccaccgcccacaaucagcc

SEQ ID NO: 713183 - RNA, 23 nt, Human
ccaccgcccacaaucagccccag

SEQ ID NO: 713184 - RNA, 20 nt, Human
ccaggcacacugcagccacc

SEQ ID NO: 713185 - RNA, 20 nt, Human
ccagggccgguguggggagg

SEQ ID NO: 713186 - RNA, 21 nt, Human
ccaugccaggaacaaagcccu

SEQ ID NO: 713187 - RNA, 20 nt, Human
cccacagccgucccgggguc

SEQ ID NO: 713188 - RNA, 20 nt, Human
cccagccccaggcgccccuu

SEQ ID NO: 713189 - RNA, 19 nt, Human
cccaggcacacugcagcca

SEQ ID NO: 713190 - RNA, 19 nt, Human
cccaggcacacugcagcca

SEQ ID NO: 713191 - RNA, 20 nt, Human
cccaggcacacugcagccac

SEQ ID NO: 713192 - RNA, 18 nt, Human
ccccacagccgucccggg

SEQ ID NO: 713193 - RNA, 18 nt, Human
ccccagccccaggcgccc

SEQ ID NO: 713194 - RNA, 19 nt, Human
ccccaggcgccccuugccg

SEQ ID NO: 713195 - RNA, 23 nt, Human
cccccagcacccccuggaaacac

SEQ ID NO: 713196 - RNA, 18 nt, Human
cccugcaacaggcccucc

SEQ ID NO: 713197 - RNA, 22 nt, Human
cccugugggugcaguguggggc

SEQ ID NO: 713198 - RNA, 23 nt, Human
ccucaggaaggguaacgcgugcu

SEQ ID NO: 713199 - RNA, 19 nt, Human
ccucccaugcacuggaagg

SEQ ID NO: 713200 - RNA, 23 nt, Human
ccugcccucccaugcacuggaag

SEQ ID NO: 713201 - RNA, 23 nt, Human
ccugggcaguuagguccacccac

SEQ ID NO: 713202 - RNA, 26 nt, Human
ccuggggcugaggcuaugcccagggc

SEQ ID NO: 713203 - RNA, 27 nt, Human
cgcccugccccugcaacaggcccucca

SEQ ID NO: 713204 - RNA, 20 nt, Human
cuccaggagcugccaaaggc

SEQ ID NO: 713205 - RNA, 20 nt, Human
cuccaugccaggaacaaagc

SEQ ID NO: 713206 - RNA, 22 nt, Human
cucggcaggacagaggccuggg

SEQ ID NO: 713207 - RNA, 24 nt, Human
cuggaaacacagcagccaggaaca

SEQ ID NO: 713208 - RNA, 22 nt, Human
cuggaaggcucuggaaguagcu

SEQ ID NO: 713209 - RNA, 21 nt, Human
cugggugagcuggaaugggug

SEQ ID NO: 713210 - RNA, 24 nt, Human
cugucgcauagagcccugugggug

SEQ ID NO: 713211 - RNA, 25 nt, Human
cuugcugggugguggccucaggcug

SEQ ID NO: 713212 - RNA, 24 nt, Human
gaaacacaauuagaaaagaacugg

SEQ ID NO: 713213 - RNA, 22 nt, Human
gaacccuucccccagcaccccc

SEQ ID NO: 713214 - RNA, 24 nt, Human
gaagguucugggugagcuggaaug

SEQ ID NO: 713215 - RNA, 18 nt, Human
gagcagagaccccggaag

SEQ ID NO: 713216 - RNA, 25 nt, Human
gagcugccaaaggcgacgggcccgc

SEQ ID NO: 713217 - RNA, 18 nt, Human
gaggggugagggcagggc

SEQ ID NO: 713218 - RNA, 21 nt, Human
gcauguccacagcucuccagg

SEQ ID NO: 713219 - RNA, 23 nt, Human
gccucaggcuguuccugggcccc

SEQ ID NO: 713220 - RNA, 18 nt, Human
ggcagggcgugggguggu

SEQ ID NO: 713221 - RNA, 21 nt, Human
ggccucaggcuguuccugggc

SEQ ID NO: 713222 - RNA, 20 nt, Human
ggcuguuccugggccccugu

SEQ ID NO: 713223 - RNA, 18 nt, Human
ggcuugcugggugguggc

SEQ ID NO: 713224 - RNA, 21 nt, Human
gggccuuugcagaagcagcuc

SEQ ID NO: 713225 - RNA, 21 nt, Human
ggugaggggugagggcagggc

SEQ ID NO: 713226 - RNA, 19 nt, Human
gguguggggagggacaugg

SEQ ID NO: 713227 - RNA, 20 nt, Human
guggugaggggugagggcag

SEQ ID NO: 713228 - RNA, 22 nt, Human
guguggggagggacaugggggc

SEQ ID NO: 713229 - RNA, 21 nt, Human
uaaaaaauaagaaaaagccaa

SEQ ID NO: 713230 - RNA, 26 nt, Human
uagagcccugugggugcaguguggcg

SEQ ID NO: 713231 - RNA, 20 nt, Human
uccaccgcccacaaucagcc

SEQ ID NO: 713232 - RNA, 19 nt, Human
uccacggaacccuuccccc

SEQ ID NO: 713233 - RNA, 20 nt, Human
uccacggaacccuuccccca

SEQ ID NO: 713234 - RNA, 27 nt, Human
uccaugccaggaacaaagccggggucc

SEQ ID NO: 713235 - RNA, 20 nt, Human
ucccaugcacuggaaggcuc

SEQ ID NO: 713236 - RNA, 27 nt, Human
uccugggccccugucgcauagagcccc

SEQ ID NO: 713237 - RNA, 22 nt, Human
ucuccaggagcugccaaaggcg

SEQ ID NO: 713238 - RNA, 25 nt, Human
ucucgcuccacggaacccuuccccc

SEQ ID NO: 713239 - RNA, 23 nt, Human
ugacccucagcaaacgaaaagga

SEQ ID NO: 713240 - RNA, 19 nt, Human
ugcagcacgaacugagggg

SEQ ID NO: 713241 - RNA, 18 nt, Human
ugccccgugugauacagg

SEQ ID NO: 713242 - RNA, 24 nt, Human
ugcccgugagcugggcccaggcac

SEQ ID NO: 713243 - RNA, 21 nt, Human
ugcugggugguggccucaggc

SEQ ID NO: 713244 - RNA, 23 nt, Human
uggaaacacagcagccaggaaca

SEQ ID NO: 713245 - RNA, 18 nt, Human
uggaaugggugauaaggc

SEQ ID NO: 713246 - RNA, 18 nt, Human
uggggagggacauggggg

SEQ ID NO: 713247 - RNA, 19 nt, Human
uggggccccacagccgucc

SEQ ID NO: 713248 - RNA, 23 nt, Human
ugggguggugcucagcccugggg

SEQ ID NO: 713249 - RNA, 24 nt, Human
ugggguggugcucagcccugggga

SEQ ID NO: 713250 - RNA, 19 nt, Human
uggugaggggugagggcag

SEQ ID NO: 713251 - RNA, 22 nt, Human
ugguggugaggggugagggcag

SEQ ID NO: 713252 - RNA, 19 nt, Human
uguuggggucugugacccu

SEQ ID NO: 713253 - RNA, 21 nt, Human
uuugcuggugaagguucuggg

SEQ ID NO: 713254 - RNA, 24 nt, Human
aaaaaguuuccuccagagaugaag

SEQ ID NO: 713255 - RNA, 26 nt, Human
aaaauauucucaaucuaaacucaaaa

SEQ ID NO: 713256 - RNA, 18 nt, Human
aaacauuuuuaucacagc

SEQ ID NO: 713257 - RNA, 19 nt, Human
aacauuuuuaucacagcuc

SEQ ID NO: 713258 - RNA, 18 nt, Human
aauugccuuaagaaaaau

SEQ ID NO: 713259 - RNA, 21 nt, Human
acaauugacuaaacaucugaa

SEQ ID NO: 713260 - RNA, 20 nt, Human
agguggaauuguaccacaaa

SEQ ID NO: 713261 - RNA, 19 nt, Human
auaaagaagaugagacauc

SEQ ID NO: 713262 - RNA, 18 nt, Human
caaacugauagaaaagaa

SEQ ID NO: 713263 - RNA, 21 nt, Human
ccacaccuuauucaaccuaac

SEQ ID NO: 713264 - RNA, 18 nt, Human
ccccgccgcuccgcagcc

SEQ ID NO: 713265 - RNA, 18 nt, Human
cucaaaauggaauaaaga

SEQ ID NO: 713266 - RNA, 22 nt, Human
cuccgcuucaggcuaauccaga

SEQ ID NO: 713267 - RNA, 21 nt, Human
gccccgccgcuccgcagccgg

SEQ ID NO: 713268 - RNA, 19 nt, Human
ggacucuagcacaggaaau

SEQ ID NO: 713269 - RNA, 23 nt, Human
gugcaauuauacaguagauaucu

SEQ ID NO: 713270 - RNA, 25 nt, Human
uaacagaaaagcauuuuccacaccu

SEQ ID NO: 713271 - RNA, 24 nt, Human
uaauauacaaacugauagaaaaga

SEQ ID NO: 713272 - RNA, 23 nt, Human
uacacuauugaaaaccuuccuuu

SEQ ID NO: 713273 - RNA, 20 nt, Human
uaccacaaagaauagucuca

SEQ ID NO: 713274 - RNA, 23 nt, Human
uacuaacagaaaagcauuuucca

SEQ ID NO: 713275 - RNA, 20 nt, Human
uagcacaggaaaugucucuu

SEQ ID NO: 713276 - RNA, 18 nt, Human
uaugauagguggaauugu

SEQ ID NO: 713277 - RNA, 23 nt, Human
uauugaaaaccuuccuuucaaau

SEQ ID NO: 713278 - RNA, 20 nt, Human
ucuagcacaggaaaugucuc

SEQ ID NO: 713279 - RNA, 23 nt, Human
ucuagcacaggaaaugucucuug

SEQ ID NO: 713280 - RNA, 21 nt, Human
ucuccgcuucaggcuaaucca

SEQ ID NO: 713281 - RNA, 21 nt, Human
ucucgccccgccgcuccgcag

SEQ ID NO: 713282 - RNA, 24 nt, Human
ucucugccuucagaaaauaaaaau

SEQ ID NO: 713283 - RNA, 19 nt, Human
uggaauuguaccacaaaga

SEQ ID NO: 713284 - RNA, 24 nt, Human
uggguuuauuuuuacugcaguuuu

SEQ ID NO: 713285 - RNA, 20 nt, Human
uguaggaaugauuuagcauc

SEQ ID NO: 713286 - RNA, 21 nt, Human
uucacauaugauagguggaau

SEQ ID NO: 713287 - RNA, 24 nt, Human
uugcaauaaaaaucagaagaguau

SEQ ID NO: 713288 - RNA, 25 nt, Human
uuguaggaaugauuuagcaucuggg

SEQ ID NO: 713289 - RNA, 19 nt, Human
aaaaaaguuggaagcccuc

SEQ ID NO: 713290 - RNA, 23 nt, Human
aaaaacuaaaaaguuuugaacaa

SEQ ID NO: 713291 - RNA, 21 nt, Human
aaaaaguuuugaacaaggcug

SEQ ID NO: 713292 - RNA, 24 nt, Human
aaaccagaagcucaacaugcuccu

SEQ ID NO: 713293 - RNA, 21 nt, Human
aaacuccaaguauuaaccuca

SEQ ID NO: 713294 - RNA, 19 nt, Human
aaacuugcacacuguaucc

SEQ ID NO: 713295 - RNA, 22 nt, Human
aaccagaagcucaacaugcucc

SEQ ID NO: 713296 - RNA, 22 nt, Human
aacucacuccuucuguucucca

SEQ ID NO: 713297 - RNA, 22 nt, Human
acacaguagucacuguaaucca

SEQ ID NO: 713298 - RNA, 20 nt, Human
agaacagagaccauaaaugu

SEQ ID NO: 713299 - RNA, 23 nt, Human
agaauccuguccaaacucuccuc

SEQ ID NO: 713300 - RNA, 25 nt, Human
agaauccuguccaaacucuccucau

SEQ ID NO: 713301 - RNA, 19 nt, Human
agacccccauagaguggcg

SEQ ID NO: 713302 - RNA, 18 nt, Human
agagaagguauaucugau

SEQ ID NO: 713303 - RNA, 18 nt, Human
agaggagacgguaauggc

SEQ ID NO: 713304 - RNA, 23 nt, Human
agauuuuaagccuucaacaacuu

SEQ ID NO: 713305 - RNA, 23 nt, Human
agcuaaaccuaccgugucuggaa

SEQ ID NO: 713306 - RNA, 20 nt, Human
agcucagugaguaaaugugu

SEQ ID NO: 713307 - RNA, 22 nt, Human
aggagacgguaauggcacuuaa

SEQ ID NO: 713308 - RNA, 18 nt, Human
auaaaaauauaagugcau

SEQ ID NO: 713309 - RNA, 19 nt, Human
aucuccucuguaugaacuc

SEQ ID NO: 713310 - RNA, 25 nt, Human
auuuggaugauuacuuacugguaau

SEQ ID NO: 713311 - RNA, 23 nt, Human
caagauucccaaacaguuuauua

SEQ ID NO: 713312 - RNA, 18 nt, Human
caagcuaguagaaaaaaa

SEQ ID NO: 713313 - RNA, 23 nt, Human
caaugacuuucuuucuccgaucu

SEQ ID NO: 713314 - RNA, 21 nt, Human
cacaaagucaugcagacaaga

SEQ ID NO: 713315 - RNA, 18 nt, Human
caccaagauucccaaaca

SEQ ID NO: 713316 - RNA, 20 nt, Human
cagaagcucaacaugcuccu

SEQ ID NO: 713317 - RNA, 20 nt, Human
ccacccaaugacuuucuuuc

SEQ ID NO: 713318 - RNA, 19 nt, Human
ccccaaauggcaacuuaaa

SEQ ID NO: 713319 - RNA, 22 nt, Human
ccccauagaguggcgauccaaa

SEQ ID NO: 713320 - RNA, 23 nt, Human
ccggaaucuguaccacccaauga

SEQ ID NO: 713321 - RNA, 20 nt, Human
ccuauaaacugaaacuacuu

SEQ ID NO: 713322 - RNA, 18 nt, Human
cgauccaaagaacggcag

SEQ ID NO: 713323 - RNA, 23 nt, Human
cucaguaagcaaugaagaaaaac

SEQ ID NO: 713324 - RNA, 24 nt, Human
cuccccccagauuaaguucucaaa

SEQ ID NO: 713325 - RNA, 19 nt, Human
cugaaugucaaaaucugaa

SEQ ID NO: 713326 - RNA, 20 nt, Human
cuggcgcugaagcugcguag

SEQ ID NO: 713327 - RNA, 21 nt, Human
cuugcacacuguauccaaagg

SEQ ID NO: 713328 - RNA, 22 nt, Human
cuuuuuuuuuuuaaaggcaacc

SEQ ID NO: 713329 - RNA, 18 nt, Human
gaacacauuugcagauaa

SEQ ID NO: 713330 - RNA, 20 nt, Human
gccggaaucuguaccaccca

SEQ ID NO: 713331 - RNA, 24 nt, Human
gcgccggaaucuguaccacccaau

SEQ ID NO: 713332 - RNA, 20 nt, Human
gucacauuuaacugcuuugu

SEQ ID NO: 713333 - RNA, 24 nt, Human
guggaaacacacagcacugaaggu

SEQ ID NO: 713334 - RNA, 23 nt, Human
guguugcugauuugugagucacu

SEQ ID NO: 713335 - RNA, 18 nt, Human
uaaaacucacuccuucug

SEQ ID NO: 713336 - RNA, 21 nt, Human
uaaauggugggucuugcuguu

SEQ ID NO: 713337 - RNA, 18 nt, Human
uaaaugucuuuccuccac

SEQ ID NO: 713338 - RNA, 20 nt, Human
uaaauuuaccaguauaucca

SEQ ID NO: 713339 - RNA, 24 nt, Human
uaccaguauauccaugaaucgcac

SEQ ID NO: 713340 - RNA, 18 nt, Human
uagcugauaacaacugga

SEQ ID NO: 713341 - RNA, 18 nt, Human
uagugcaagagguaaguu

SEQ ID NO: 713342 - RNA, 18 nt, Human
ucacugaugcuaaacguu

SEQ ID NO: 713343 - RNA, 20 nt, Human
uccaucaaagaaaaaauaau

SEQ ID NO: 713344 - RNA, 19 nt, Human
uccuccacagauaaaacua

SEQ ID NO: 713345 - RNA, 20 nt, Human
ucuguucuccacugcugugu

SEQ ID NO: 713346 - RNA, 23 nt, Human
ucuuaccucucccaguaaaaauc

SEQ ID NO: 713347 - RNA, 18 nt, Human
ucuugucuuaccucuccc

SEQ ID NO: 713348 - RNA, 25 nt, Human
ucuuuauucaccaagauucccaaac

SEQ ID NO: 713349 - RNA, 19 nt, Human
ugaaaaugaaucuuuauuc

SEQ ID NO: 713350 - RNA, 24 nt, Human
ugaaacuugcacacuguauccaaa

SEQ ID NO: 713351 - RNA, 18 nt, Human
ugaacaaggcugaugguu

SEQ ID NO: 713352 - RNA, 19 nt, Human
ugaacaaggcugaugguua

SEQ ID NO: 713353 - RNA, 21 nt, Human
ugagaaagcaguucucccccc

SEQ ID NO: 713354 - RNA, 22 nt, Human
ugagaaagcaguucucccccca

SEQ ID NO: 713355 - RNA, 19 nt, Human
ugcgccggaaucuguacca

SEQ ID NO: 713356 - RNA, 22 nt, Human
ugcuguguguccuccaagauuc

SEQ ID NO: 713357 - RNA, 20 nt, Human
uggagaguuucuuuuguuua

SEQ ID NO: 713358 - RNA, 23 nt, Human
uggagcucagugaguaaaugugu

SEQ ID NO: 713359 - RNA, 19 nt, Human
ugggcaaaacuagaaaaca

SEQ ID NO: 713360 - RNA, 22 nt, Human
ugggcaaaacuagaaaacaagu

SEQ ID NO: 713361 - RNA, 21 nt, Human
ugucaugaaacuugcacacug

SEQ ID NO: 713362 - RNA, 21 nt, Human
ugucuuaccucucccaguaaa

SEQ ID NO: 713363 - RNA, 18 nt, Human
uuaaaagacagaccccca

SEQ ID NO: 713364 - RNA, 23 nt, Human
uuaaauaaaaauauaagugcauc

SEQ ID NO: 713365 - RNA, 24 nt, Human
uuacagauuuuaacuaguucaaag

SEQ ID NO: 713366 - RNA, 23 nt, Human
uucagcuugaaaaugaaucuuua

SEQ ID NO: 713367 - RNA, 23 nt, Human
uugaaggcugcugcuaaacuugu

SEQ ID NO: 713368 - RNA, 25 nt, Human
uugugggcaaaacuagaaaacaagu

SEQ ID NO: 713369 - RNA, 19 nt, Human
uuguuucccuuugaaaaag

SEQ ID NO: 713370 - RNA, 22 nt, Human
uuuaagaauccuguccaaacuc

SEQ ID NO: 713371 - RNA, 22 nt, Human
uuuaagccuucaacaacuuccu

SEQ ID NO: 713372 - RNA, 20 nt, Human
uuuuuuuuuuaaaggcaacc

SEQ ID NO: 713373 - RNA, 24 nt, Human
aaagugcugggauuacaggcguga

SEQ ID NO: 713374 - RNA, 23 nt, Human
aagccacaaauaccgaguucaaa

SEQ ID NO: 713375 - RNA, 19 nt, Human
aagugcugggauuacaggc

SEQ ID NO: 713376 - RNA, 19 nt, Human
aagugcugggauuacaggc

SEQ ID NO: 713377 - RNA, 26 nt, Human
aagugcugggauuacaggcgugagcc

SEQ ID NO: 713378 - RNA, 21 nt, Human
aauccggccaauccccggcag

SEQ ID NO: 713379 - RNA, 24 nt, Human
aauuuuuuauuuuuaguagagaug

SEQ ID NO: 713380 - RNA, 21 nt, Human
acaaccuccgccucuggguuc

SEQ ID NO: 713381 - RNA, 26 nt, Human
acccuacaggauacccugcacaggga

SEQ ID NO: 713382 - RNA, 22 nt, Human
accucagguuauccacccgccu

SEQ ID NO: 713383 - RNA, 24 nt, Human
agacagacaaauauuuuacaaggg

SEQ ID NO: 713384 - RNA, 25 nt, Human
agccacaaauaccgaguucaaaucu

SEQ ID NO: 713385 - RNA, 23 nt, Human
aggcgugagccacagugcccggc

SEQ ID NO: 713386 - RNA, 18 nt, Human
agguuauccacccgccuu

SEQ ID NO: 713387 - RNA, 18 nt, Human
aguagcugggauuacagg

SEQ ID NO: 713388 - RNA, 19 nt, Human
aguagcugggauuacaggc

SEQ ID NO: 713389 - RNA, 19 nt, Human
aguagcugggauuacaggc

SEQ ID NO: 713390 - RNA, 25 nt, Human
aguagcugggauuacaggcgcacgc

SEQ ID NO: 713391 - RNA, 24 nt, Human
agugcaauggugugauuucggcuc

SEQ ID NO: 713392 - RNA, 19 nt, Human
aucucaguuuuggggaauc

SEQ ID NO: 713393 - RNA, 21 nt, Human
augggguuucuccauguuggu

SEQ ID NO: 713394 - RNA, 24 nt, Human
auuccggcagucaggcugaaauga

SEQ ID NO: 713395 - RNA, 22 nt, Human
caaagaaagcggaaagggugaa

SEQ ID NO: 713396 - RNA, 20 nt, Human
caaagggccgccucugaguc

SEQ ID NO: 713397 - RNA, 19 nt, Human
caaagugcugggauuacag

SEQ ID NO: 713398 - RNA, 21 nt, Human
caaagugcugggauuacaggc

SEQ ID NO: 713399 - RNA, 21 nt, Human
caaagugcugggauuacaggc

SEQ ID NO: 713400 - RNA, 24 nt, Human
caaagugcugggauuacaggcgug

SEQ ID NO: 713401 - RNA, 25 nt, Human
cacagugcccggccuuuuuuuuuuu

SEQ ID NO: 713402 - RNA, 25 nt, Human
cacccccggcccgccugcgaauccu

SEQ ID NO: 713403 - RNA, 24 nt, Human
cacccgccuugguaucgcaaagug

SEQ ID NO: 713404 - RNA, 22 nt, Human
caggcgauucuccugccucagc

SEQ ID NO: 713405 - RNA, 18 nt, Human
cagucaggcugaaaugaa

SEQ ID NO: 713406 - RNA, 19 nt, Human
cauuagaaaacaaggagau

SEQ ID NO: 713407 - RNA, 21 nt, Human
ccacagugcccggccuuuuuu

SEQ ID NO: 713408 - RNA, 19 nt, Human
ccauguuggucaggcuggu

SEQ ID NO: 713409 - RNA, 22 nt, Human
ccauguuggucaggcuggucuc

SEQ ID NO: 713410 - RNA, 23 nt, Human
ccauguuggucaggcuggucucg

SEQ ID NO: 713411 - RNA, 22 nt, Human
cccccgcucccacccccggccc

SEQ ID NO: 713412 - RNA, 24 nt, Human
ccccggcccgccugcgaaucccuc

SEQ ID NO: 713413 - RNA, 21 nt, Human
ccggcccccgcucccaccccc

SEQ ID NO: 713414 - RNA, 22 nt, Human
ccggcccccgcucccacccccg

SEQ ID NO: 713415 - RNA, 21 nt, Human
ccuacaggcucacagggcugg

SEQ ID NO: 713416 - RNA, 23 nt, Human
ccucuggguucaggcgauucucc

SEQ ID NO: 713417 - RNA, 20 nt, Human
cggcccccgcucccaccccc

SEQ ID NO: 713418 - RNA, 21 nt, Human
cggguuccagguucucaaccu

SEQ ID NO: 713419 - RNA, 24 nt, Human
cuaauuuuuuauuuuuaguagaga

SEQ ID NO: 713420 - RNA, 23 nt, Human
cuacaaccuccgccucuggguuc

SEQ ID NO: 713421 - RNA, 24 nt, Human
cucagccucuugaguagcugggau

SEQ ID NO: 713422 - RNA, 24 nt, Human
cucagguuauccacccgccuuggu

SEQ ID NO: 713423 - RNA, 24 nt, Human
cuccauguuggucaggcuggucuc

SEQ ID NO: 713424 - RNA, 22 nt, Human
cuccugccucagccucuugagu

SEQ ID NO: 713425 - RNA, 22 nt, Human
cucugauuccggcagucaggcu

SEQ ID NO: 713426 - RNA, 24 nt, Human
cucuggguucaggcgauucuccug

SEQ ID NO: 713427 - RNA, 23 nt, Human
cugccucagccucuugaguagcu

SEQ ID NO: 713428 - RNA, 30 nt, Human
cugcgaaucccuccuuggccgcaagguccu

SEQ ID NO: 713429 - RNA, 23 nt, Human
cuugaguagcugggauuacaggc

SEQ ID NO: 713430 - RNA, 21 nt, Human
gaaaaggaaaaaacacgcgug

SEQ ID NO: 713431 - RNA, 24 nt, Human
gagaugggguuucuccauguuggu

SEQ ID NO: 713432 - RNA, 18 nt, Human
gauuacaggcgcacgcca

SEQ ID NO: 713433 - RNA, 18 nt, Human
gauuacaggcgugagcca

SEQ ID NO: 713434 - RNA, 19 nt, Human
gauuacaggcgugagccac

SEQ ID NO: 713435 - RNA, 24 nt, Human
gauuacaggcgugagccacagugc

SEQ ID NO: 713436 - RNA, 24 nt, Human
gcaaagugcugggauuacaggcgu

SEQ ID NO: 713437 - RNA, 23 nt, Human
gcacaacacgcaccaauuagcaa

SEQ ID NO: 713438 - RNA, 24 nt, Human
gcccaagcuggagugcaauggugu

SEQ ID NO: 713439 - RNA, 23 nt, Human
gccguauuucugcuggccagaga

SEQ ID NO: 713440 - RNA, 22 nt, Human
gcgauucuccugccucagccuc

SEQ ID NO: 713441 - RNA, 18 nt, Human
gcggccggccaaucacag

SEQ ID NO: 713442 - RNA, 23 nt, Human
gcucccacccccggcccgccugc

SEQ ID NO: 713443 - RNA, 19 nt, Human
ggaggacaggaacagacuu

SEQ ID NO: 713444 - RNA, 24 nt, Human
ggcgauucuccugccucagccucu

SEQ ID NO: 713445 - RNA, 19 nt, Human
gggaggacaggaacagacu

SEQ ID NO: 713446 - RNA, 18 nt, Human
gggguuucuccauguugg

SEQ ID NO: 713447 - RNA, 22 nt, Human
gggguuucuccauguuggucag

SEQ ID NO: 713448 - RNA, 19 nt, Human
ggguaauaaaaacagcuac

SEQ ID NO: 713449 - RNA, 20 nt, Human
ggguucaggcgauucuccug

SEQ ID NO: 713450 - RNA, 22 nt, Human
ggguuucuccauguuggucagg

SEQ ID NO: 713451 - RNA, 27 nt, Human
gguaauaaaaacagcuacagcgcaaga

SEQ ID NO: 713452 - RNA, 18 nt, Human
guagcugggauuacaggc

SEQ ID NO: 713453 - RNA, 18 nt, Human
gugaauuuucuugaaauc

SEQ ID NO: 713454 - RNA, 22 nt, Human
guugugaggcacagagaaaggg

SEQ ID NO: 713455 - RNA, 20 nt, Human
uaaaaaaaagagacagacaa

SEQ ID NO: 713456 - RNA, 25 nt, Human
uaaaaaaaagagacagacaaauauu

SEQ ID NO: 713457 - RNA, 22 nt, Human
uaauuuuuuauuuuuaguagag

SEQ ID NO: 713458 - RNA, 23 nt, Human
uaauuuuuuauuuuuaguagaga

SEQ ID NO: 713459 - RNA, 23 nt, Human
uacaggcgugagccacagugccc

SEQ ID NO: 713460 - RNA, 18 nt, Human
uagaaaacaaggagauug

SEQ ID NO: 713461 - RNA, 24 nt, Human
uaguagagaugggguuucuccaug

SEQ ID NO: 713462 - RNA, 24 nt, Human
uauucauuagaaaacaaggagauu

SEQ ID NO: 713463 - RNA, 19 nt, Human
ucacuacaaccuccgccuc

SEQ ID NO: 713464 - RNA, 23 nt, Human
ucacuacaaccuccgccucuggg

SEQ ID NO: 713465 - RNA, 23 nt, Human
ucacuacaaccuccgccucuggg

SEQ ID NO: 713466 - RNA, 26 nt, Human
ucacuacaaccuccgccucuggguuc

SEQ ID NO: 713467 - RNA, 20 nt, Human
ucagccucuugaguagcugg

SEQ ID NO: 713468 - RNA, 19 nt, Human
ucaggcgauucuccugccu

SEQ ID NO: 713469 - RNA, 19 nt, Human
ucaguuuuggggaaucuua

SEQ ID NO: 713470 - RNA, 22 nt, Human
uccaaaguugaagcagcucaac

SEQ ID NO: 713471 - RNA, 23 nt, Human
uccagcaagucacuucacuuuca

SEQ ID NO: 713472 - RNA, 23 nt, Human
ucccacccccggcccgccugcga

SEQ ID NO: 713473 - RNA, 22 nt, Human
uccccaguaguaaaauaggggu

SEQ ID NO: 713474 - RNA, 19 nt, Human
ucccccuuugcccagucgg

SEQ ID NO: 713475 - RNA, 25 nt, Human
uccccggcaggcagaggcaaagggc

SEQ ID NO: 713476 - RNA, 22 nt, Human
uccuacaggcucacagggcugg

SEQ ID NO: 713477 - RNA, 24 nt, Human
ucgcaaagugcugggauuacaggc

SEQ ID NO: 713478 - RNA, 23 nt, Human
ucgcuauuguugcccaagcugga

SEQ ID NO: 713479 - RNA, 25 nt, Human
ucucacccgcggcucugauuccggc

SEQ ID NO: 713480 - RNA, 24 nt, Human
ucuugaguagcugggauuacaggc

SEQ ID NO: 713481 - RNA, 23 nt, Human
ugcaauggugugauuucggcucc

SEQ ID NO: 713482 - RNA, 21 nt, Human
ugcccaagcuggagugcaaug

SEQ ID NO: 713483 - RNA, 24 nt, Human
ugccucagccucuugaguagcugg

SEQ ID NO: 713484 - RNA, 25 nt, Human
ugcugggauuacaggcgugagccac

SEQ ID NO: 713485 - RNA, 23 nt, Human
uggagugcaauggugugauuucg

SEQ ID NO: 713486 - RNA, 24 nt, Human
uggagugcaauggugugauuucgg

SEQ ID NO: 713487 - RNA, 19 nt, Human
ugggauuacaggcgcacca

SEQ ID NO: 713488 - RNA, 21 nt, Human
ugggauuacaggcgcacgcca

SEQ ID NO: 713489 - RNA, 18 nt, Human
ugggauuacaggcgugag

SEQ ID NO: 713490 - RNA, 19 nt, Human
ugggauuacaggcgugagc

SEQ ID NO: 713491 - RNA, 21 nt, Human
ugggauuacaggcgugagcca

SEQ ID NO: 713492 - RNA, 22 nt, Human
ugggauuacaggcgugagccac

SEQ ID NO: 713493 - RNA, 22 nt, Human
ugggauuacaggcgugagccac

SEQ ID NO: 713494 - RNA, 24 nt, Human
ugggauuacaggcgugagccacag

SEQ ID NO: 713495 - RNA, 26 nt, Human
ugggauuacaggcgugagccacagug

SEQ ID NO: 713496 - RNA, 27 nt, Human
ugggauuacaggcgugagccacagugc

SEQ ID NO: 713497 - RNA, 24 nt, Human
ugggguuucuccauguuggucagg

SEQ ID NO: 713498 - RNA, 24 nt, Human
uggguucaggcgauucuccugccu

SEQ ID NO: 713499 - RNA, 25 nt, Human
uggucaggcuggucucgaacucccu

SEQ ID NO: 713500 - RNA, 24 nt, Human
uggugugauuucggcucacuacaa

SEQ ID NO: 713501 - RNA, 20 nt, Human
uguugcccaagcuggagugc

SEQ ID NO: 713502 - RNA, 18 nt, Human
uuaguagagaugggguuu

SEQ ID NO: 713503 - RNA, 22 nt, Human
uuaguagagaugggguuucucc

SEQ ID NO: 713504 - RNA, 24 nt, Human
uuaguagagaugggguuucuccau

SEQ ID NO: 713505 - RNA, 18 nt, Human
uucaggcgauucuccugc

SEQ ID NO: 713506 - RNA, 21 nt, Human
uucaggcgauucuccugccuc

SEQ ID NO: 713507 - RNA, 23 nt, Human
uucaggcgauucuccugccucag

SEQ ID NO: 713508 - RNA, 23 nt, Human
uuccaggucacccuacaggauac

SEQ ID NO: 713509 - RNA, 24 nt, Human
uucgcuauuguugcccaagcugga

SEQ ID NO: 713510 - RNA, 18 nt, Human
uugcccaagcuggagugc

SEQ ID NO: 713511 - RNA, 23 nt, Human
uuguugcccaagcuggagugcaa

SEQ ID NO: 713512 - RNA, 24 nt, Human
uuuaaaaaaaagagacagacaaau

SEQ ID NO: 713513 - RNA, 21 nt, Human
uuucuccauguuggucaggcu

SEQ ID NO: 713514 - RNA, 19 nt, Human
uuuggaagcggguuccagg

SEQ ID NO: 713515 - RNA, 22 nt, Human
uuuuauuuuuaguagagauggg

SEQ ID NO: 713516 - RNA, 22 nt, Human
uuuuuaguagagaugggguuuc

SEQ ID NO: 713517 - RNA, 28 nt, Human
uuuuuuauuuuuaguagagaugggguuu

SEQ ID NO: 713518 - RNA, 21 nt, Human
aaaaagaaaaaaaagaaagaa

SEQ ID NO: 713519 - RNA, 19 nt, Human
aaacacacacaaagcaaca

SEQ ID NO: 713520 - RNA, 24 nt, Human
aaacgacagagagccacagcccag

SEQ ID NO: 713521 - RNA, 21 nt, Human
aaagugagcaaagaaggaaag

SEQ ID NO: 713522 - RNA, 20 nt, Human
aaaugccauuaguaauaaaa

SEQ ID NO: 713523 - RNA, 23 nt, Human
aacaagagcaaaacgguuagcaa

SEQ ID NO: 713524 - RNA, 23 nt, Human
aacaagauuuuuaaaaucccacu

SEQ ID NO: 713525 - RNA, 20 nt, Human
aacagcucuuuuauacauca

SEQ ID NO: 713526 - RNA, 19 nt, Human
aacauggugaaaccccguc

SEQ ID NO: 713527 - RNA, 20 nt, Human
aacauggugaaaccccgucu

SEQ ID NO: 713528 - RNA, 21 nt, Human
aacauggugaaaccccgucuc

SEQ ID NO: 713529 - RNA, 23 nt, Human
aacauuaaaaggcauucaaacag

SEQ ID NO: 713530 - RNA, 19 nt, Human
aagaggccccuacaucugc

SEQ ID NO: 713531 - RNA, 19 nt, Human
aagcaggguucauacugua

SEQ ID NO: 713532 - RNA, 21 nt, Human
aagccgaggugggcagaucac

SEQ ID NO: 713533 - RNA, 19 nt, Human
aaggaugagcauauggugg

SEQ ID NO: 713534 - RNA, 27 nt, Human
aaggauuuuguuuuacuucuuuauaga

SEQ ID NO: 713535 - RNA, 25 nt, Human
aagggccuucgccccuuacucccca

SEQ ID NO: 713536 - RNA, 24 nt, Human
aaucgcuugaacccgggaggcaga

SEQ ID NO: 713537 - RNA, 20 nt, Human
acaaaaauuagcugggugag

SEQ ID NO: 713538 - RNA, 20 nt, Human
acaaaagcgaaacuccgucu

SEQ ID NO: 713539 - RNA, 21 nt, Human
acaaaagcgaaacuccgucuc

SEQ ID NO: 713540 - RNA, 24 nt, Human
accacaaacgacagagagccacag

SEQ ID NO: 713541 - RNA, 20 nt, Human
accacaccuggggccucagc

SEQ ID NO: 713542 - RNA, 25 nt, Human
acccacaccugccuccccuccccac

SEQ ID NO: 713543 - RNA, 24 nt, Human
accccgucucuacugaaaauacaa

SEQ ID NO: 713544 - RNA, 20 nt, Human
accugccuccccuccccacc

SEQ ID NO: 713545 - RNA, 23 nt, Human
acuucucugacaacauggugcca

SEQ ID NO: 713546 - RNA, 27 nt, Human
agaaaaaaaagaaagaaaaugccagag

SEQ ID NO: 713547 - RNA, 21 nt, Human
agaagccaaggagcagaaagu

SEQ ID NO: 713548 - RNA, 23 nt, Human
agaagucaaacacacacaaagca

SEQ ID NO: 713549 - RNA, 19 nt, Human
agacacacacacaaagccc

SEQ ID NO: 713550 - RNA, 19 nt, Human
agacacacacacaaagccc

SEQ ID NO: 713551 - RNA, 24 nt, Human
agacacacacacaaagcccauccu

SEQ ID NO: 713552 - RNA, 18 nt, Human
agacagaauugcacaaau

SEQ ID NO: 713553 - RNA, 22 nt, Human
agagcugggggaggcugggggc

SEQ ID NO: 713554 - RNA, 23 nt, Human
agagcuugcagugagccgagauc

SEQ ID NO: 713555 - RNA, 22 nt, Human
agaucaccugaggucaggaguu

SEQ ID NO: 713556 - RNA, 18 nt, Human
agcaaaaccuccaaaugu

SEQ ID NO: 713557 - RNA, 24 nt, Human
agcacuuugggaagccgagguggg

SEQ ID NO: 713558 - RNA, 22 nt, Human
agccuggccaacauggugaaac

SEQ ID NO: 713559 - RNA, 24 nt, Human
agccuggccaacauggugaaaccc

SEQ ID NO: 713560 - RNA, 22 nt, Human
agcgaacauugugacauagguc

SEQ ID NO: 713561 - RNA, 23 nt, Human
agcugggugagguggugggugcc

SEQ ID NO: 713562 - RNA, 22 nt, Human
aggaaggguggagacccugggu

SEQ ID NO: 713563 - RNA, 24 nt, Human
aggaaggguggagacccuggguuu

SEQ ID NO: 713564 - RNA, 20 nt, Human
aggcaagaaagauguuuagu

SEQ ID NO: 713565 - RNA, 21 nt, Human
aggcagagcuugcagugagcc

SEQ ID NO: 713566 - RNA, 24 nt, Human
aggcagagcuugcagugagccgag

SEQ ID NO: 713567 - RNA, 22 nt, Human
aggcaggaaggaugagcauaug

SEQ ID NO: 713568 - RNA, 24 nt, Human
aggcaggagaaucgcuugaacccg

SEQ ID NO: 713569 - RNA, 20 nt, Human
aggcugaggcaggagaaucg

SEQ ID NO: 713570 - RNA, 24 nt, Human
aggcugaggcaggagaaucgcuug

SEQ ID NO: 713571 - RNA, 22 nt, Human
aggguacuggaugccugggccu

SEQ ID NO: 713572 - RNA, 21 nt, Human
aggucucuggcaccagggcuc

SEQ ID NO: 713573 - RNA, 22 nt, Human
aggugggcagaucaccugaggu

SEQ ID NO: 713574 - RNA, 26 nt, Human
aggugggcagaucaccugaggucagg

SEQ ID NO: 713575 - RNA, 21 nt, Human
agugaaggggggacggugggg

SEQ ID NO: 713576 - RNA, 23 nt, Human
agugaaggggggacgguggggag

SEQ ID NO: 713577 - RNA, 25 nt, Human
agugaaggggggacgguggggaggg

SEQ ID NO: 713578 - RNA, 19 nt, Human
aucccugcauccugcugcc

SEQ ID NO: 713579 - RNA, 21 nt, Human
auccugcugccauggaaaugg

SEQ ID NO: 713580 - RNA, 24 nt, Human
auccugucauuguacuccagcuug

SEQ ID NO: 713581 - RNA, 21 nt, Human
augcaaaauguuuucccuuga

SEQ ID NO: 713582 - RNA, 19 nt, Human
caaaaacacaaaucaaauc

SEQ ID NO: 713583 - RNA, 27 nt, Human
caaaaagaaaaaaaagaaagaaaaugc

SEQ ID NO: 713584 - RNA, 21 nt, Human
caaacacacacaaagcaacau

SEQ ID NO: 713585 - RNA, 24 nt, Human
caaagaaggaaagaaagggcaggc

SEQ ID NO: 713586 - RNA, 23 nt, Human
caaagcccauccuggauccuuuc

SEQ ID NO: 713587 - RNA, 22 nt, Human
caacagaacagccugucccucu

SEQ ID NO: 713588 - RNA, 24 nt, Human
caacauggugaaaccccgucucua

SEQ ID NO: 713589 - RNA, 23 nt, Human
caacauggugccaucuagaagcc

SEQ ID NO: 713590 - RNA, 18 nt, Human
caacgcagaacuccccag

SEQ ID NO: 713591 - RNA, 20 nt, Human
caagaucaaaguccaaaccc

SEQ ID NO: 713592 - RNA, 20 nt, Human
caagcccagccaaugacucc

SEQ ID NO: 713593 - RNA, 18 nt, Human
caauacaaaugaaaacaa

SEQ ID NO: 713594 - RNA, 21 nt, Human
cacacacaaagcaacauuuua

SEQ ID NO: 713595 - RNA, 19 nt, Human
cacacacacaaagcccauc

SEQ ID NO: 713596 - RNA, 26 nt, Human
cacaggaauaaguccguccacucaac

SEQ ID NO: 713597 - RNA, 18 nt, Human
caccaaagagagaaaaca

SEQ ID NO: 713598 - RNA, 22 nt, Human
caccaaagagagaaaacaacaa

SEQ ID NO: 713599 - RNA, 23 nt, Human
caccugaggucaggaguuugaga

SEQ ID NO: 713600 - RNA, 20 nt, Human
caccuguggcuuuuagaagu

SEQ ID NO: 713601 - RNA, 18 nt, Human
cacuggccacccacccug

SEQ ID NO: 713602 - RNA, 24 nt, Human
cacuggccacccacccugggcggc

SEQ ID NO: 713603 - RNA, 19 nt, Human
cagagauugaucugugggg

SEQ ID NO: 713604 - RNA, 24 nt, Human
cagaucaccugaggucaggaguuu

SEQ ID NO: 713605 - RNA, 18 nt, Human
cagauguugguuccucug

SEQ ID NO: 713606 - RNA, 25 nt, Human
cagcaccacaaacgacagagagcca

SEQ ID NO: 713607 - RNA, 21 nt, Human
cagcacuuugggaagccgagg

SEQ ID NO: 713608 - RNA, 24 nt, Human
cagcacuuugggaagccgaggugg

SEQ ID NO: 713609 - RNA, 19 nt, Human
cagcagcaauuucaggcag

SEQ ID NO: 713610 - RNA, 20 nt, Human
cagcagccaugguugucuaa

SEQ ID NO: 713611 - RNA, 24 nt, Human
cagcuacuugggaggcugaggcag

SEQ ID NO: 713612 - RNA, 24 nt, Human
caggaauaaguccguccacucaac

SEQ ID NO: 713613 - RNA, 22 nt, Human
caggccccuuuguuccuuuugg

SEQ ID NO: 713614 - RNA, 24 nt, Human
caggccuguaauuccagcacuuug

SEQ ID NO: 713615 - RNA, 19 nt, Human
caggcucuucccuagcccc

SEQ ID NO: 713616 - RNA, 18 nt, Human
caggugaagagugaggug

SEQ ID NO: 713617 - RNA, 24 nt, Human
cagguuccauccagaaagggaguc

SEQ ID NO: 713618 - RNA, 24 nt, Human
cagguuuuacuggggaaugauggc

SEQ ID NO: 713619 - RNA, 19 nt, Human
caguagacaccaucacagc

SEQ ID NO: 713620 - RNA, 24 nt, Human
caguagacaccaucacagcaccac

SEQ ID NO: 713621 - RNA, 20 nt, Human
cauaaacagagugcuucucu

SEQ ID NO: 713622 - RNA, 21 nt, Human
cauaaggaaaaucaacaugac

SEQ ID NO: 713623 - RNA, 19 nt, Human
cauaaucccuucauuuugu

SEQ ID NO: 713624 - RNA, 22 nt, Human
caucacagcaccacaaacgaca

SEQ ID NO: 713625 - RNA, 23 nt, Human
caugcaaaauguuuucccuugau

SEQ ID NO: 713626 - RNA, 18 nt, Human
cauuguacuccagcuugg

SEQ ID NO: 713627 - RNA, 19 nt, Human
cauuguacuccagcuuggg

SEQ ID NO: 713628 - RNA, 19 nt, Human
cauuguacuccagcuuggg

SEQ ID NO: 713629 - RNA, 19 nt, Human
cauuguacuccagcuuggg

SEQ ID NO: 713630 - RNA, 22 nt, Human
cauuguacuccagcuuggggga

SEQ ID NO: 713631 - RNA, 23 nt, Human
cauuguacuccagcuugggggac

SEQ ID NO: 713632 - RNA, 25 nt, Human
cauuguacuccagcuugggggacaa

SEQ ID NO: 713633 - RNA, 21 nt, Human
ccacaaacgacagagagccac

SEQ ID NO: 713634 - RNA, 19 nt, Human
ccacaccuggggccucagc

SEQ ID NO: 713635 - RNA, 23 nt, Human
ccagggcucccugcagagcuggg

SEQ ID NO: 713636 - RNA, 22 nt, Human
ccaucugccugugugcuauuuc

SEQ ID NO: 713637 - RNA, 18 nt, Human
ccccaggauuaaaggccu

SEQ ID NO: 713638 - RNA, 24 nt, Human
ccccuccccaccacaccuggggcc

SEQ ID NO: 713639 - RNA, 21 nt, Human
ccccuuuguuccuuuuggugu

SEQ ID NO: 713640 - RNA, 22 nt, Human
cccgcaguuugccgcccgcgcc

SEQ ID NO: 713641 - RNA, 18 nt, Human
cccucaggucaggcaccc

SEQ ID NO: 713642 - RNA, 20 nt, Human
cccucccacagguccugugu

SEQ ID NO: 713643 - RNA, 24 nt, Human
cccuccccaccacaccuggggccu

SEQ ID NO: 713644 - RNA, 18 nt, Human
ccgcccgcgccuccccgc

SEQ ID NO: 713645 - RNA, 23 nt, Human
ccuggccaacauggugaaacccc

SEQ ID NO: 713646 - RNA, 24 nt, Human
ccuggccaacauggugaaaccccg

SEQ ID NO: 713647 - RNA, 18 nt, Human
ccuguaaucccagcuacu

SEQ ID NO: 713648 - RNA, 19 nt, Human
ccuguaaucccagcuacuu

SEQ ID NO: 713649 - RNA, 21 nt, Human
ccuguaaucccagcuacuugg

SEQ ID NO: 713650 - RNA, 22 nt, Human
ccuguaauuccagcacuuuggg

SEQ ID NO: 713651 - RNA, 20 nt, Human
cgaggugggcagaucaccug

SEQ ID NO: 713652 - RNA, 24 nt, Human
cgaggugggcagaucaccugaggu

SEQ ID NO: 713653 - RNA, 26 nt, Human
cgaggugggcagaucaccugagguca

SEQ ID NO: 713654 - RNA, 23 nt, Human
cgcgcagcccgcacggcccgcac

SEQ ID NO: 713655 - RNA, 18 nt, Human
cgggugggguggcucagg

SEQ ID NO: 713656 - RNA, 19 nt, Human
cuagcccccagaguccucc

SEQ ID NO: 713657 - RNA, 24 nt, Human
cucaggccuguaauuccagcacuu

SEQ ID NO: 713658 - RNA, 22 nt, Human
cuccgcccgguacuggcugcgg

SEQ ID NO: 713659 - RNA, 20 nt, Human
cucugagaaauccagagggg

SEQ ID NO: 713660 - RNA, 26 nt, Human
cugagcucuagcccuggggaugcagc

SEQ ID NO: 713661 - RNA, 19 nt, Human
cugagggcucaagcccagc

SEQ ID NO: 713662 - RNA, 18 nt, Human
cugccccuggcuggcccc

SEQ ID NO: 713663 - RNA, 18 nt, Human
cuucgccccuuacucccc

SEQ ID NO: 713664 - RNA, 24 nt, Human
cuugcagugagccgagauccuguc

SEQ ID NO: 713665 - RNA, 20 nt, Human
cuuugcaaggugcugaccuc

SEQ ID NO: 713666 - RNA, 23 nt, Human
cuuugggaagccgaggugggcag

SEQ ID NO: 713667 - RNA, 18 nt, Human
gaaaaacacaaagagugc

SEQ ID NO: 713668 - RNA, 19 nt, Human
gaaaccccgucucuacuga

SEQ ID NO: 713669 - RNA, 18 nt, Human
gaaagggcaggcaugggg

SEQ ID NO: 713670 - RNA, 18 nt, Human
gaaauaaacaagcuuugg

SEQ ID NO: 713671 - RNA, 20 nt, Human
gaaaugcgaguuuauguauc

SEQ ID NO: 713672 - RNA, 23 nt, Human
gaacacaugccauaugcuucugg

SEQ ID NO: 713673 - RNA, 21 nt, Human
gaacagccugucccucuagaa

SEQ ID NO: 713674 - RNA, 20 nt, Human
gaacccgggaggcagagcuu

SEQ ID NO: 713675 - RNA, 21 nt, Human
gaaggggggacgguggggagg

SEQ ID NO: 713676 - RNA, 22 nt, Human
gaagucaaacacacacaaagca

SEQ ID NO: 713677 - RNA, 18 nt, Human
gaauaaucagauucuguc

SEQ ID NO: 713678 - RNA, 18 nt, Human
gacacacacacaaagccc

SEQ ID NO: 713679 - RNA, 21 nt, Human
gacuacacagcagagccagac

SEQ ID NO: 713680 - RNA, 19 nt, Human
gagaaaacaacaaaaggca

SEQ ID NO: 713681 - RNA, 23 nt, Human
gagaaucgcuugaacccgggagg

SEQ ID NO: 713682 - RNA, 21 nt, Human
gagacucuuccaacagaacag

SEQ ID NO: 713683 - RNA, 23 nt, Human
gagaguagccuggccaacauggu

SEQ ID NO: 713684 - RNA, 18 nt, Human
gagcuugcagugagccga

SEQ ID NO: 713685 - RNA, 24 nt, Human
gaucaccugaggucaggaguuuga

SEQ ID NO: 713686 - RNA, 18 nt, Human
gauuuauauauauacaca

SEQ ID NO: 713687 - RNA, 19 nt, Human
gcaaaaccuccaaaugugg

SEQ ID NO: 713688 - RNA, 21 nt, Human
gcaacaggacuuggaacugug

SEQ ID NO: 713689 - RNA, 20 nt, Human
gcagcagcaauuucaggcag

SEQ ID NO: 713690 - RNA, 21 nt, Human
gcaucuuugcaaggugcugac

SEQ ID NO: 713691 - RNA, 24 nt, Human
gccaacauggugaaaccccgucuc

SEQ ID NO: 713692 - RNA, 19 nt, Human
gccacacuucccggaggca

SEQ ID NO: 713693 - RNA, 19 nt, Human
gccacagguccacugggcu

SEQ ID NO: 713694 - RNA, 21 nt, Human
gcgcggcucugacgccuccgc

SEQ ID NO: 713695 - RNA, 21 nt, Human
gcggcucugacgccuccgccc

SEQ ID NO: 713696 - RNA, 24 nt, Human
gcucugacgccuccgcccgguacu

SEQ ID NO: 713697 - RNA, 20 nt, Human
ggacgguggggaggguuggg

SEQ ID NO: 713698 - RNA, 22 nt, Human
ggagaggaaaugucuucaggcc

SEQ ID NO: 713699 - RNA, 19 nt, Human
ggagucgcaggcauguucu

SEQ ID NO: 713700 - RNA, 25 nt, Human
ggcagaucaccugaggucaggaguu

SEQ ID NO: 713701 - RNA, 18 nt, Human
ggccagaggccagacggc

SEQ ID NO: 713702 - RNA, 23 nt, Human
ggccuguaauuccagcacuuugg

SEQ ID NO: 713703 - RNA, 21 nt, Human
ggcugggggcaugucagaguc

SEQ ID NO: 713704 - RNA, 22 nt, Human
gggagaaggucucuggcaccag

SEQ ID NO: 713705 - RNA, 20 nt, Human
gggaugcagccuuuccaaag

SEQ ID NO: 713706 - RNA, 18 nt, Human
gggcacagggccacaggc

SEQ ID NO: 713707 - RNA, 22 nt, Human
gggcagcagcaauuucaggcag

SEQ ID NO: 713708 - RNA, 20 nt, Human
gggcggcgguacagcagcca

SEQ ID NO: 713709 - RNA, 24 nt, Human
gggugggguggcucaggccuguaa

SEQ ID NO: 713710 - RNA, 23 nt, Human
gguggcucaggccuguaauucca

SEQ ID NO: 713711 - RNA, 24 nt, Human
gguggcucaggccuguaauuccag

SEQ ID NO: 713712 - RNA, 23 nt, Human
gguggugggugccuguaauccca

SEQ ID NO: 713713 - RNA, 24 nt, Human
gguggugggugccuguaaucccag

SEQ ID NO: 713714 - RNA, 22 nt, Human
gucauuguacuccagcuugggg

SEQ ID NO: 713715 - RNA, 18 nt, Human
guccucacuggccaccca

SEQ ID NO: 713716 - RNA, 22 nt, Human
guggggaugugcgcuacccaca

SEQ ID NO: 713717 - RNA, 18 nt, Human
uaaacagagugcuucucu

SEQ ID NO: 713718 - RNA, 23 nt, Human
uaagaaaauaggccggguggggu

SEQ ID NO: 713719 - RNA, 18 nt, Human
uaaggcaagaaagauguu

SEQ ID NO: 713720 - RNA, 21 nt, Human
uaaggccaguccucacuggcc

SEQ ID NO: 713721 - RNA, 18 nt, Human
uaauuuguaaaaugacuu

SEQ ID NO: 713722 - RNA, 27 nt, Human
uacagcagccaugguugucuaagggcc

SEQ ID NO: 713723 - RNA, 18 nt, Human
uacagcguucaaaaaguu

SEQ ID NO: 713724 - RNA, 19 nt, Human
uaccugggagagaagggau

SEQ ID NO: 713725 - RNA, 19 nt, Human
uacguggacaucuauggug

SEQ ID NO: 713726 - RNA, 23 nt, Human
uacguggacaucuauggugacug

SEQ ID NO: 713727 - RNA, 19 nt, Human
uacuccagcuugggggaca

SEQ ID NO: 713728 - RNA, 25 nt, Human
uacuccagcuugggggacaaaagcg

SEQ ID NO: 713729 - RNA, 23 nt, Human
uacugaaaauacaaaaauuagcu

SEQ ID NO: 713730 - RNA, 23 nt, Human
uagcccccagaguccuccagccu

SEQ ID NO: 713731 - RNA, 24 nt, Human
uagccuggccaacauggugaaacc

SEQ ID NO: 713732 - RNA, 19 nt, Human
uagcugggugagguggugg

SEQ ID NO: 713733 - RNA, 22 nt, Human
uagggagaaaugggagaagguc

SEQ ID NO: 713734 - RNA, 20 nt, Human
uaguaauaaaaacaguuguc

SEQ ID NO: 713735 - RNA, 20 nt, Human
uaucaaggaaaugcaacaau

SEQ ID NO: 713736 - RNA, 25 nt, Human
ucaaaaagaaaaaaaagaaagaaaa

SEQ ID NO: 713737 - RNA, 22 nt, Human
ucaaacacacacaaagcaacau

SEQ ID NO: 713738 - RNA, 23 nt, Human
ucacagcaccacaaacgacagag

SEQ ID NO: 713739 - RNA, 18 nt, Human
ucaccaccacuugucaaa

SEQ ID NO: 713740 - RNA, 19 nt, Human
ucaccugaggucaggaguu

SEQ ID NO: 713741 - RNA, 19 nt, Human
ucacggcguccagccugac

SEQ ID NO: 713742 - RNA, 21 nt, Human
ucacuggccacccacccuggg

SEQ ID NO: 713743 - RNA, 19 nt, Human
ucaggaacuggccugugcc

SEQ ID NO: 713744 - RNA, 19 nt, Human
ucaggcaggaaggaugagc

SEQ ID NO: 713745 - RNA, 22 nt, Human
ucaggccuguaauuccagcacu

SEQ ID NO: 713746 - RNA, 19 nt, Human
ucauaagggcuuagguuaa

SEQ ID NO: 713747 - RNA, 22 nt, Human
ucauuguacuccagcuuggggg

SEQ ID NO: 713748 - RNA, 24 nt, Human
ucauuguacuccagcuugggggac

SEQ ID NO: 713749 - RNA, 21 nt, Human
uccagaggggaggagaggaaa

SEQ ID NO: 713750 - RNA, 21 nt, Human
uccagccucugccaagaggcc

SEQ ID NO: 713751 - RNA, 21 nt, Human
uccagccugacacugugaagc

SEQ ID NO: 713752 - RNA, 22 nt, Human
uccauaugauuccagaguacaa

SEQ ID NO: 713753 - RNA, 20 nt, Human
uccccagacaugccuagucu

SEQ ID NO: 713754 - RNA, 22 nt, Human
uccccagacaugccuagucuac

SEQ ID NO: 713755 - RNA, 20 nt, Human
uccccaggauuaaaggccuc

SEQ ID NO: 713756 - RNA, 22 nt, Human
uccccgcgcccgcgcagcccgc

SEQ ID NO: 713757 - RNA, 22 nt, Human
uccgucucaaaaagaaaaaaaa

SEQ ID NO: 713758 - RNA, 24 nt, Human
uccuaaggacgggggugcuacugu

SEQ ID NO: 713759 - RNA, 20 nt, Human
uccucacuggccacccaccc

SEQ ID NO: 713760 - RNA, 18 nt, Human
uccugguguccugcugug

SEQ ID NO: 713761 - RNA, 18 nt, Human
ucgcuugaacccgggagg

SEQ ID NO: 713762 - RNA, 23 nt, Human
ucucuacugaaaauacaaaaauu

SEQ ID NO: 713763 - RNA, 20 nt, Human
ucucugagaaauccagaggg

SEQ ID NO: 713764 - RNA, 18 nt, Human
ucucuguggucccuaucu

SEQ ID NO: 713765 - RNA, 21 nt, Human
ucugagaaauccagaggggag

SEQ ID NO: 713766 - RNA, 19 nt, Human
ucuguuuugauuuuguuuc

SEQ ID NO: 713767 - RNA, 23 nt, Human
ugaaauuacaaaucaaacuuuuu

SEQ ID NO: 713768 - RNA, 19 nt, Human
ugaaggcacaaggauggcu

SEQ ID NO: 713769 - RNA, 20 nt, Human
ugagcaaagaaggaaagaaa

SEQ ID NO: 713770 - RNA, 24 nt, Human
ugaggcaggagaaucgcuugaacc

SEQ ID NO: 713771 - RNA, 25 nt, Human
ugaggcaggagaaucgcuugaaccc

SEQ ID NO: 713772 - RNA, 18 nt, Human
ugaggucaggaguuugag

SEQ ID NO: 713773 - RNA, 20 nt, Human
ugauuuucacuacucaguug

SEQ ID NO: 713774 - RNA, 19 nt, Human
ugcagccuuuccaaaggcu

SEQ ID NO: 713775 - RNA, 19 nt, Human
ugccauuaguaauaaaaac

SEQ ID NO: 713776 - RNA, 21 nt, Human
ugccauuaguaauaaaaacag

SEQ ID NO: 713777 - RNA, 22 nt, Human
ugccgcccgcgccuccccgcgc

SEQ ID NO: 713778 - RNA, 21 nt, Human
ugccuggugcacuucucacag

SEQ ID NO: 713779 - RNA, 24 nt, Human
ugccuguaaucccagcuacuuggg

SEQ ID NO: 713780 - RNA, 21 nt, Human
ugcgaugggcagcagcaauuu

SEQ ID NO: 713781 - RNA, 21 nt, Human
ugcuuuguaaaagcaccugug

SEQ ID NO: 713782 - RNA, 19 nt, Human
uggcaagaucaaaguccaa

SEQ ID NO: 713783 - RNA, 24 nt, Human
uggccaacauggugaaaccccguc

SEQ ID NO: 713784 - RNA, 24 nt, Human
uggcucaggccuguaauuccagca

SEQ ID NO: 713785 - RNA, 23 nt, Human
uggcuggggcuacagaugugcca

SEQ ID NO: 713786 - RNA, 20 nt, Human
ugggaagccgaggugggcag

SEQ ID NO: 713787 - RNA, 24 nt, Human
ugggaagccgaggugggcagauca

SEQ ID NO: 713788 - RNA, 20 nt, Human
ugggagagaagggaugaggc

SEQ ID NO: 713789 - RNA, 19 nt, Human
ugggaggcugaggcaggag

SEQ ID NO: 713790 - RNA, 23 nt, Human
ugggaggcugaggcaggagaauc

SEQ ID NO: 713791 - RNA, 24 nt, Human
ugggcagaucaccugaggucagga

SEQ ID NO: 713792 - RNA, 21 nt, Human
uggggaaugauggcaagauca

SEQ ID NO: 713793 - RNA, 24 nt, Human
ugggugagguggugggugccugua

SEQ ID NO: 713794 - RNA, 21 nt, Human
ugguggaauaauguguaugug

SEQ ID NO: 713795 - RNA, 22 nt, Human
uggugggugccuguaaucccag

SEQ ID NO: 713796 - RNA, 24 nt, Human
uggugggugccuguaaucccagcu

SEQ ID NO: 713797 - RNA, 19 nt, Human
uguaauauagcuacaauau

SEQ ID NO: 713798 - RNA, 21 nt, Human
uguacugacauuucaaaaaca

SEQ ID NO: 713799 - RNA, 18 nt, Human
uguagcuaccccucacug

SEQ ID NO: 713800 - RNA, 23 nt, Human
ugucauuguacuccagcuugggg

SEQ ID NO: 713801 - RNA, 21 nt, Human
uguccugugggccacugggca

SEQ ID NO: 713802 - RNA, 18 nt, Human
ugugaugggcaaauaacu

SEQ ID NO: 713803 - RNA, 23 nt, Human
ugugggccacugggcacagggcc

SEQ ID NO: 713804 - RNA, 25 nt, Human
ugugggcucaugcgaugggcagcag

SEQ ID NO: 713805 - RNA, 22 nt, Human
ugugugggcucaugcgaugggc

SEQ ID NO: 713806 - RNA, 19 nt, Human
uuaaacaucaagacggcau

SEQ ID NO: 713807 - RNA, 24 nt, Human
uuagcugggugagguggugggugc

SEQ ID NO: 713808 - RNA, 18 nt, Human
uucaagaaaggcauagga

SEQ ID NO: 713809 - RNA, 19 nt, Human
uugcagugagccgagaucc

SEQ ID NO: 713810 - RNA, 21 nt, Human
uugcagugagccgagaucccc

SEQ ID NO: 713811 - RNA, 21 nt, Human
uugcagugagccgagauccug

SEQ ID NO: 713812 - RNA, 22 nt, Human
uugcagugagccgagauccugu

SEQ ID NO: 713813 - RNA, 24 nt, Human
uugggaggcugaggcaggagaauc

SEQ ID NO: 713814 - RNA, 19 nt, Human
uuucaagaaaggcauagga

SEQ ID NO: 713815 - RNA, 22 nt, Human
uuucaggcaggaaggaugagca

SEQ ID NO: 713816 - RNA, 24 nt, Human
uuuccagcaaaaccuccaaaugug

SEQ ID NO: 713817 - RNA, 24 nt, Human
aaaaagaaaaagccauucuacaaa

SEQ ID NO: 713818 - RNA, 22 nt, Human
aaaauaacauuuucucaaaacu

SEQ ID NO: 713819 - RNA, 23 nt, Human
aaacagauguauacaguuaaaau

SEQ ID NO: 713820 - RNA, 20 nt, Human
aaacaucacauauguugagu

SEQ ID NO: 713821 - RNA, 22 nt, Human
aagaaaaagccauucuacaaaa

SEQ ID NO: 713822 - RNA, 22 nt, Human
aagcagaauuacaaugcaugua

SEQ ID NO: 713823 - RNA, 24 nt, Human
aaugccgcaacaagcuuccugcca

SEQ ID NO: 713824 - RNA, 18 nt, Human
accuauugucuuaagugg

SEQ ID NO: 713825 - RNA, 21 nt, Human
acuguaaaaauucuuccugga

SEQ ID NO: 713826 - RNA, 20 nt, Human
acuucaaaaaucagucaccc

SEQ ID NO: 713827 - RNA, 20 nt, Human
agaauuacaaugcauguaac

SEQ ID NO: 713828 - RNA, 19 nt, Human
agggaaggaagagaaucag

SEQ ID NO: 713829 - RNA, 20 nt, Human
aguauuguuacaaaccaguu

SEQ ID NO: 713830 - RNA, 18 nt, Human
aguuuuauucccacuccc

SEQ ID NO: 713831 - RNA, 22 nt, Human
aucugagggccauaaacaucac

SEQ ID NO: 713832 - RNA, 18 nt, Human
augggguuucuauuugca

SEQ ID NO: 713833 - RNA, 22 nt, Human
caaaagauaauucacauuugaa

SEQ ID NO: 713834 - RNA, 20 nt, Human
caacuaaauuaacaaaugaa

SEQ ID NO: 713835 - RNA, 19 nt, Human
caagauauuugaagacuua

SEQ ID NO: 713836 - RNA, 22 nt, Human
cagggaaggaagagaaucagaa

SEQ ID NO: 713837 - RNA, 22 nt, Human
caguaaaaauaacauuuucuca

SEQ ID NO: 713838 - RNA, 24 nt, Human
caguagaaaugggguuucuauuug

SEQ ID NO: 713839 - RNA, 24 nt, Human
cauuugaaaaauuaucuaccugaa

SEQ ID NO: 713840 - RNA, 19 nt, Human
ccauucuacaaaaacugca

SEQ ID NO: 713841 - RNA, 23 nt, Human
ccugugacaaaaggaaccggggc

SEQ ID NO: 713842 - RNA, 20 nt, Human
cgaggaaaaccauagagcua

SEQ ID NO: 713843 - RNA, 24 nt, Human
cuaacuggaaaaaacauuuugcuu

SEQ ID NO: 713844 - RNA, 21 nt, Human
cucccuauuacauaauuucuc

SEQ ID NO: 713845 - RNA, 24 nt, Human
cugaaagguacacauacacaccua

SEQ ID NO: 713846 - RNA, 18 nt, Human
cuuacaaucacccuagcc

SEQ ID NO: 713847 - RNA, 18 nt, Human
cuucaaaaaucagucacc

SEQ ID NO: 713848 - RNA, 19 nt, Human
cuugcaaacaguaaaauuu

SEQ ID NO: 713849 - RNA, 18 nt, Human
gaaaaagccauucuacaa

SEQ ID NO: 713850 - RNA, 19 nt, Human
gaaaaagguaacauccaca

SEQ ID NO: 713851 - RNA, 24 nt, Human
gaaaaagguaacauccacaaugac

SEQ ID NO: 713852 - RNA, 21 nt, Human
gaauagaacucuuaagaggaa

SEQ ID NO: 713853 - RNA, 23 nt, Human
gcuguguuucucuauuuuuacua

SEQ ID NO: 713854 - RNA, 24 nt, Human
ggaaucacauccauguugcuuuca

SEQ ID NO: 713855 - RNA, 22 nt, Human
gggaaaaagguuagaucaaugc

SEQ ID NO: 713856 - RNA, 18 nt, Human
guaagcaaauauccuuac

SEQ ID NO: 713857 - RNA, 22 nt, Human
gugggugcaaguucugcucugu

SEQ ID NO: 713858 - RNA, 24 nt, Human
uaaaauauaaccugcccacaggaa

SEQ ID NO: 713859 - RNA, 18 nt, Human
uaaacaucacauauguug

SEQ ID NO: 713860 - RNA, 24 nt, Human
uaacacacacacacaacuaaauua

SEQ ID NO: 713861 - RNA, 22 nt, Human
uaacagaauaaaaguaaccaaa

SEQ ID NO: 713862 - RNA, 20 nt, Human
uaaccaaagguuaaagcaau

SEQ ID NO: 713863 - RNA, 24 nt, Human
uaagaugaaagagcaauacacuua

SEQ ID NO: 713864 - RNA, 18 nt, Human
uaagcaaauauccuuacc

SEQ ID NO: 713865 - RNA, 22 nt, Human
uaagcaaauauccuuaccaaga

SEQ ID NO: 713866 - RNA, 18 nt, Human
uaaguaguuuuauuccca

SEQ ID NO: 713867 - RNA, 24 nt, Human
uacaaaaacugcaacugaaauggg

SEQ ID NO: 713868 - RNA, 18 nt, Human
uacaauaaaagggucaug

SEQ ID NO: 713869 - RNA, 23 nt, Human
uacaguuuuucuucuguuuaaaa

SEQ ID NO: 713870 - RNA, 20 nt, Human
uaccugugacaaaaggaaca

SEQ ID NO: 713871 - RNA, 20 nt, Human
uacucuuucuucaauucugu

SEQ ID NO: 713872 - RNA, 24 nt, Human
uauacaucacacugaguaagaauc

SEQ ID NO: 713873 - RNA, 23 nt, Human
uauacuucaaaaaucagucaccc

SEQ ID NO: 713874 - RNA, 19 nt, Human
uauuacagaguucuuacaa

SEQ ID NO: 713875 - RNA, 24 nt, Human
uauuacagaguucuuacaaucacc

SEQ ID NO: 713876 - RNA, 20 nt, Human
ucaaaaaucagucacccuac

SEQ ID NO: 713877 - RNA, 24 nt, Human
ucaaauuaaacagauguauacagu

SEQ ID NO: 713878 - RNA, 18 nt, Human
ucacuuccgaucuggggc

SEQ ID NO: 713879 - RNA, 19 nt, Human
ucaguagaaaugggguuuc

SEQ ID NO: 713880 - RNA, 25 nt, Human
ucauggccuucuuaaacagcuuucu

SEQ ID NO: 713881 - RNA, 20 nt, Human
ucauuuuuauugccccucuc

SEQ ID NO: 713882 - RNA, 23 nt, Human
ucgaauuccugacacgccgaauc

SEQ ID NO: 713883 - RNA, 21 nt, Human
ucuccgucacuuccgaucugg

SEQ ID NO: 713884 - RNA, 18 nt, Human
ucuucuguuuaaaacuag

SEQ ID NO: 713885 - RNA, 21 nt, Human
ucuuuauaggccacugcuuuu

SEQ ID NO: 713886 - RNA, 20 nt, Human
ucuuugagauacuguaaaaa

SEQ ID NO: 713887 - RNA, 22 nt, Human
ucuuugagauacuguaaaaauu

SEQ ID NO: 713888 - RNA, 23 nt, Human
ugaaagguacacauacacaccua

SEQ ID NO: 713889 - RNA, 19 nt, Human
ugaccauaucuuauagacu

SEQ ID NO: 713890 - RNA, 23 nt, Human
ugagaaauuaaacucuaaauucg

SEQ ID NO: 713891 - RNA, 19 nt, Human
uggcagguauuuccucugc

SEQ ID NO: 713892 - RNA, 21 nt, Human
uggugggugcaaguucugcuc

SEQ ID NO: 713893 - RNA, 25 nt, Human
uggugggugcaaguucugcucuguu

SEQ ID NO: 713894 - RNA, 23 nt, Human
uguaagcaaauauccuuaccaag

SEQ ID NO: 713895 - RNA, 19 nt, Human
uguuucucuauuuuuacua

SEQ ID NO: 713896 - RNA, 21 nt, Human
uuaacacacacacacaacuaa

SEQ ID NO: 713897 - RNA, 22 nt, Human
uucacacguaaauaaguauuau

SEQ ID NO: 713898 - RNA, 22 nt, Human
uugcaaccacacagcggccauu

SEQ ID NO: 713899 - RNA, 20 nt, Human
uuggcaaagcuuuuuuuuuu

SEQ ID NO: 713900 - RNA, 19 nt, Human
uuguuuccaacaguucuua

SEQ ID NO: 713901 - RNA, 24 nt, Human
uuuaacagaauaaaaguaaccaaa

SEQ ID NO: 713902 - RNA, 24 nt, Human
uuucuucuguuuaaaacuaggaug

SEQ ID NO: 713903 - RNA, 18 nt, Human
aaugcuggaaaggaagga

SEQ ID NO: 713904 - RNA, 21 nt, Human
accacagaauuaccaaaacug

SEQ ID NO: 713905 - RNA, 24 nt, Human
accacagaauuaccaaaacugcaa

SEQ ID NO: 713906 - RNA, 19 nt, Human
accugagcacagaagacuc

SEQ ID NO: 713907 - RNA, 23 nt, Human
agcagggaagcgccgucuuccag

SEQ ID NO: 713908 - RNA, 19 nt, Human
agccggcagcgggggcggc

SEQ ID NO: 713909 - RNA, 22 nt, Human
aggcugcagaguggcgacgucu

SEQ ID NO: 713910 - RNA, 18 nt, Human
aggggggugacaggaggu

SEQ ID NO: 713911 - RNA, 24 nt, Human
aguggccuauugcccgccuccaug

SEQ ID NO: 713912 - RNA, 23 nt, Human
aguggugcugagcauccacgcaa

SEQ ID NO: 713913 - RNA, 18 nt, Human
auaaaaauaacgucagug

SEQ ID NO: 713914 - RNA, 23 nt, Human
auaaauagaccacagaauuacca

SEQ ID NO: 713915 - RNA, 21 nt, Human
cacagaagacucggcucccca

SEQ ID NO: 713916 - RNA, 20 nt, Human
cacagaauuaccaaaacugc

SEQ ID NO: 713917 - RNA, 20 nt, Human
cagcaccccugccagccagg

SEQ ID NO: 713918 - RNA, 22 nt, Human
cagccagcagcaccccugccag

SEQ ID NO: 713919 - RNA, 21 nt, Human
caggucuagagauaugacccg

SEQ ID NO: 713920 - RNA, 22 nt, Human
caggucuagagauaugacccga

SEQ ID NO: 713921 - RNA, 21 nt, Human
cagugcuguggggaaugcugg

SEQ ID NO: 713922 - RNA, 19 nt, Human
caguggcccucuucucauc

SEQ ID NO: 713923 - RNA, 23 nt, Human
ccaugccugcuguugaccucuuc

SEQ ID NO: 713924 - RNA, 18 nt, Human
ccccggggccuggggcuc

SEQ ID NO: 713925 - RNA, 25 nt, Human
cccucugcugggcugccgccucucc

SEQ ID NO: 713926 - RNA, 18 nt, Human
ccgcugaguggaucggug

SEQ ID NO: 713927 - RNA, 18 nt, Human
cgcccccggacccggagc

SEQ ID NO: 713928 - RNA, 22 nt, Human
cgccccggccuccgugaagccc

SEQ ID NO: 713929 - RNA, 23 nt, Human
cgggggcggcuguaacugugagg

SEQ ID NO: 713930 - RNA, 18 nt, Human
cgugaccgcucgcccccg

SEQ ID NO: 713931 - RNA, 23 nt, Human
cgugcauagagcccucugcuggg

SEQ ID NO: 713932 - RNA, 21 nt, Human
cuccauggucaugccuuugcu

SEQ ID NO: 713933 - RNA, 28 nt, Human
cuccccaugccugcuguugaccucuuca

SEQ ID NO: 713934 - RNA, 21 nt, Human
cucguggugcgccguggcccu

SEQ ID NO: 713935 - RNA, 23 nt, Human
cugcugggaacccguucuuugag

SEQ ID NO: 713936 - RNA, 23 nt, Human
cugggcugccgccucuccccugg

SEQ ID NO: 713937 - RNA, 23 nt, Human
cuguggggaaugcuggaaaggaa

SEQ ID NO: 713938 - RNA, 18 nt, Human
gaauuaccaaaacugcaa

SEQ ID NO: 713939 - RNA, 22 nt, Human
gacccggagcgugggcggggau

SEQ ID NO: 713940 - RNA, 22 nt, Human
gagcgugggcggggauuucguc

SEQ ID NO: 713941 - RNA, 19 nt, Human
gcagugcuguggggaaugc

SEQ ID NO: 713942 - RNA, 18 nt, Human
gcccuagcagccagcagc

SEQ ID NO: 713943 - RNA, 22 nt, Human
gcuggagucguggcuacuccgg

SEQ ID NO: 713944 - RNA, 19 nt, Human
ggacccggagcgugggcgg

SEQ ID NO: 713945 - RNA, 18 nt, Human
ggagaagguugcuggccg

SEQ ID NO: 713946 - RNA, 24 nt, Human
gggaccggcugcuacagcagggaa

SEQ ID NO: 713947 - RNA, 18 nt, Human
gggcggggauuucgucac

SEQ ID NO: 713948 - RNA, 18 nt, Human
gggugguggcuggagucg

SEQ ID NO: 713949 - RNA, 20 nt, Human
gguaggugggcagaacagca

SEQ ID NO: 713950 - RNA, 18 nt, Human
ggucaugccuuugcuugg

SEQ ID NO: 713951 - RNA, 19 nt, Human
gguuggaggcugugggggg

SEQ ID NO: 713952 - RNA, 24 nt, Human
gguuggaggcugugggggguggcc

SEQ ID NO: 713953 - RNA, 19 nt, Human
gucaugaaggagcggugcc

SEQ ID NO: 713954 - RNA, 18 nt, Human
guggcagccacuggcaug

SEQ ID NO: 713955 - RNA, 22 nt, Human
uaaauagaccacagaauuacca

SEQ ID NO: 713956 - RNA, 21 nt, Human
uaaauagaccacagaauuacu

SEQ ID NO: 713957 - RNA, 21 nt, Human
uaacgucagugggugguggcu

SEQ ID NO: 713958 - RNA, 18 nt, Human
uacuccgggaggggggug

SEQ ID NO: 713959 - RNA, 18 nt, Human
ucaguguuggcgcucggc

SEQ ID NO: 713960 - RNA, 22 nt, Human
uccacgcaaccguaugggaccg

SEQ ID NO: 713961 - RNA, 21 nt, Human
ucccaggccgcagaagugacc

SEQ ID NO: 713962 - RNA, 22 nt, Human
ucccuccucgcugcuggagaac

SEQ ID NO: 713963 - RNA, 23 nt, Human
ucccucugcuugacggggcugag

SEQ ID NO: 713964 - RNA, 26 nt, Human
ucccucugcuugacggggcugagggg

SEQ ID NO: 713965 - RNA, 23 nt, Human
ucuuugagcguuuuggcauugug

SEQ ID NO: 713966 - RNA, 22 nt, Human
ugaccugcgguggaguucccuc

SEQ ID NO: 713967 - RNA, 21 nt, Human
ugccagacugcugggaacccg

SEQ ID NO: 713968 - RNA, 23 nt, Human
ugccugcuguugaccucuucauc

SEQ ID NO: 713969 - RNA, 21 nt, Human
ugcuggccgggugaaagugcc

SEQ ID NO: 713970 - RNA, 23 nt, Human
ugcugggaacccguucuuugagc

SEQ ID NO: 713971 - RNA, 22 nt, Human
uggaaaacagguuugaaacccg

SEQ ID NO: 713972 - RNA, 19 nt, Human
uggcaguggcccucuucuc

SEQ ID NO: 713973 - RNA, 23 nt, Human
uggcauugugguggcagccacug

SEQ ID NO: 713974 - RNA, 18 nt, Human
uggccgggugaaagugcc

SEQ ID NO: 713975 - RNA, 21 nt, Human
ugggugguggcuggagucgug

SEQ ID NO: 713976 - RNA, 19 nt, Human
uggugcgccguggcccucg

SEQ ID NO: 713977 - RNA, 21 nt, Human
uguaacugugaggaaggcugc

SEQ ID NO: 713978 - RNA, 18 nt, Human
ugugaggaaggcugcaga

SEQ ID NO: 713979 - RNA, 19 nt, Human
uguggaaaacagguuugaa

SEQ ID NO: 713980 - RNA, 22 nt, Human
uugacggggcugaggggcccga

SEQ ID NO: 713981 - RNA, 25 nt, Human
uuucgucacgugacguugccgcggg

SEQ ID NO: 713982 - RNA, 20 nt, Human
uuugcaguggugcugagcau

SEQ ID NO: 713983 - RNA, 25 nt, Human
aaaacaaacaaacaaacaaaaaaca

SEQ ID NO: 713984 - RNA, 22 nt, Human
aaacaaacaaaaaacaaccugu

SEQ ID NO: 713985 - RNA, 25 nt, Human
aaacaaccuguggcuuccaaauccc

SEQ ID NO: 713986 - RNA, 24 nt, Human
aaauaggagguaggacaccaugag

SEQ ID NO: 713987 - RNA, 24 nt, Human
aaauggccauuaaaaaaacaaaca

SEQ ID NO: 713988 - RNA, 23 nt, Human
aacaaacaaacaaacaaaaaaca

SEQ ID NO: 713989 - RNA, 24 nt, Human
acaaaaaacaaccuguggcuucca

SEQ ID NO: 713990 - RNA, 19 nt, Human
acaaacaaaaaacaaccug

SEQ ID NO: 713991 - RNA, 22 nt, Human
acaaacaaacaaacaaaaaacc

SEQ ID NO: 713992 - RNA, 20 nt, Human
acccucaaaucuacucacuc

SEQ ID NO: 713993 - RNA, 18 nt, Human
agaaaucuuguauccccu

SEQ ID NO: 713994 - RNA, 18 nt, Human
aggacaccaugaguggca

SEQ ID NO: 713995 - RNA, 21 nt, Human
auuaaaaaaacaaacaaacaa

SEQ ID NO: 713996 - RNA, 18 nt, Human
auuuauucauaaagauuu

SEQ ID NO: 713997 - RNA, 30 nt, Human
caaaaaacaaccuguggcuuccaaaucccu

SEQ ID NO: 713998 - RNA, 26 nt, Human
caagcaucccuucaaguuccugaccc

SEQ ID NO: 713999 - RNA, 21 nt, Human
caucugagcaugaaacuagcu

SEQ ID NO: 714000 - RNA, 21 nt, Human
caugaaacuagcuaauuuuaa

SEQ ID NO: 714001 - RNA, 24 nt, Human
ccaaaguaagaaucucaguaagaa

SEQ ID NO: 714002 - RNA, 22 nt, Human
ccaaagucaaagcuaaagaugc

SEQ ID NO: 714003 - RNA, 23 nt, Human
ccaggagagaagaaaauguuuua

SEQ ID NO: 714004 - RNA, 24 nt, Human
cccucaaaucuacucacuccaagc

SEQ ID NO: 714005 - RNA, 25 nt, Human
ccugaccccaaaguaagaaucucag

SEQ ID NO: 714006 - RNA, 18 nt, Human
cuggucccacccauguuc

SEQ ID NO: 714007 - RNA, 21 nt, Human
cuucuaauucguggucuggga

SEQ ID NO: 714008 - RNA, 23 nt, Human
gacaucugagcaugaaacuagcu

SEQ ID NO: 714009 - RNA, 24 nt, Human
gagcaauaacugcaacaaccccgg

SEQ ID NO: 714010 - RNA, 24 nt, Human
gccauuaaaaaaacaaacaaacaa

SEQ ID NO: 714011 - RNA, 19 nt, Human
gggagggaaaaggguagug

SEQ ID NO: 714012 - RNA, 19 nt, Human
guacagagacuugcccaaa

SEQ ID NO: 714013 - RNA, 26 nt, Human
uaaaauggccauuaaaaaaacaaaca

SEQ ID NO: 714014 - RNA, 18 nt, Human
uaacugcaacagucuggc

SEQ ID NO: 714015 - RNA, 22 nt, Human
uaucacagaggucaagccgaag

SEQ ID NO: 714016 - RNA, 23 nt, Human
uauuuauuuaucacagaggucag

SEQ ID NO: 714017 - RNA, 24 nt, Human
ucauaaagauuucuggucccaccc

SEQ ID NO: 714018 - RNA, 19 nt, Human
uccaaauaggagguaggac

SEQ ID NO: 714019 - RNA, 26 nt, Human
uccaaaucccuuaucuuuucauuuau

SEQ ID NO: 714020 - RNA, 27 nt, Human
uccaaaucccuuaucuuuucauuuauu

SEQ ID NO: 714021 - RNA, 26 nt, Human
ucccuuaucuuuucauuuauucauaa

SEQ ID NO: 714022 - RNA, 21 nt, Human
uccugaccccaaaguaagaau

SEQ ID NO: 714023 - RNA, 21 nt, Human
ucuacucacuccaagcauccc

SEQ ID NO: 714024 - RNA, 18 nt, Human
ucuuccacauaucuucua

SEQ ID NO: 714025 - RNA, 20 nt, Human
ugcauguaagaaaucuugua

SEQ ID NO: 714026 - RNA, 22 nt, Human
uggccauuaaaaaaacaaacaa

SEQ ID NO: 714027 - RNA, 20 nt, Human
ugggagggaaaaggguagug

SEQ ID NO: 714028 - RNA, 22 nt, Human
uuaaaaaaacaaacaaacaaac

SEQ ID NO: 714029 - RNA, 23 nt, Human
uuguaucaauauaccccaauccu

SEQ ID NO: 714030 - RNA, 21 nt, Human
uuuaaaauggccauuuaauac

SEQ ID NO: 714031 - RNA, 23 nt, Human
aaaaauucuucauucaaucugcu

SEQ ID NO: 714032 - RNA, 21 nt, Human
aaaacagccuuuuugguucuu

SEQ ID NO: 714033 - RNA, 23 nt, Human
aaaauucuucauucaaucugcuu

SEQ ID NO: 714034 - RNA, 22 nt, Human
aaacagccuuuuugguucuuua

SEQ ID NO: 714035 - RNA, 18 nt, Human
aaaccaaaacaaaacaaa

SEQ ID NO: 714036 - RNA, 22 nt, Human
aaagucccauggcaaucaccaa

SEQ ID NO: 714037 - RNA, 24 nt, Human
aauuacagcagaaaaacaaaaaca

SEQ ID NO: 714038 - RNA, 22 nt, Human
acaaaacaaauacuguauaaaa

SEQ ID NO: 714039 - RNA, 21 nt, Human
accccggaacacuuccguacc

SEQ ID NO: 714040 - RNA, 21 nt, Human
accggggcaguuccaggccgg

SEQ ID NO: 714041 - RNA, 23 nt, Human
agcagaaaaacaaaaacauuuuc

SEQ ID NO: 714042 - RNA, 19 nt, Human
aggaaaagaaaguauaaaa

SEQ ID NO: 714043 - RNA, 19 nt, Human
aggaaaccauagagcaguc

SEQ ID NO: 714044 - RNA, 19 nt, Human
agggauaaacacggaagga

SEQ ID NO: 714045 - RNA, 23 nt, Human
auacauuccaguuaccuuugauu

SEQ ID NO: 714046 - RNA, 19 nt, Human
auaguauaauagcaguguu

SEQ ID NO: 714047 - RNA, 24 nt, Human
auauaauggaaauaaaguuuuauc

SEQ ID NO: 714048 - RNA, 21 nt, Human
aucccaacaucaccuaucugc

SEQ ID NO: 714049 - RNA, 23 nt, Human
auguaugcuuuuuuuuuucuugg

SEQ ID NO: 714050 - RNA, 19 nt, Human
auucagcccuauuccaguc

SEQ ID NO: 714051 - RNA, 21 nt, Human
caaaaccaaaacaaaacaaau

SEQ ID NO: 714052 - RNA, 22 nt, Human
caacaucaccuaucugcacagc

SEQ ID NO: 714053 - RNA, 20 nt, Human
cacccaaaaaaaaaauaaaa

SEQ ID NO: 714054 - RNA, 23 nt, Human
caccuaucugcacagcuaaaaau

SEQ ID NO: 714055 - RNA, 19 nt, Human
cagcagaaaaacaaaaaca

SEQ ID NO: 714056 - RNA, 19 nt, Human
cauuauauacacucaaaac

SEQ ID NO: 714057 - RNA, 21 nt, Human
ccaaaacaaaacaaauacugu

SEQ ID NO: 714058 - RNA, 20 nt, Human
ccacggaccccggaacacuu

SEQ ID NO: 714059 - RNA, 18 nt, Human
ccauaaucacauauguau

SEQ ID NO: 714060 - RNA, 23 nt, Human
cccauggcaaucaccaauugcuu

SEQ ID NO: 714061 - RNA, 22 nt, Human
ccccggaacacuuccguaccgg

SEQ ID NO: 714062 - RNA, 26 nt, Human
ccgcgcgggacgguccgccgccuccc

SEQ ID NO: 714063 - RNA, 18 nt, Human
ccggggcaguuccaggcc

SEQ ID NO: 714064 - RNA, 20 nt, Human
ccucccucuccugcucccca

SEQ ID NO: 714065 - RNA, 25 nt, Human
cuaucugcacagcuaaaaauucuuc

SEQ ID NO: 714066 - RNA, 18 nt, Human
cucuugccuggcccucug

SEQ ID NO: 714067 - RNA, 18 nt, Human
gauucaaacacauuuauu

SEQ ID NO: 714068 - RNA, 22 nt, Human
gccucccucuccugcuccccac

SEQ ID NO: 714069 - RNA, 21 nt, Human
gcgggacgguccgccgccucc

SEQ ID NO: 714070 - RNA, 22 nt, Human
ggaacagacccaauuaugacag

SEQ ID NO: 714071 - RNA, 22 nt, Human
uacacucaaaaccaaaacaaaa

SEQ ID NO: 714072 - RNA, 19 nt, Human
uacagcagaaaaacaaaaa

SEQ ID NO: 714073 - RNA, 22 nt, Human
uaccggggcaguuccaggccgg

SEQ ID NO: 714074 - RNA, 19 nt, Human
uauaaaauuagagauucaa

SEQ ID NO: 714075 - RNA, 22 nt, Human
uauaauagcaguguugcuggaa

SEQ ID NO: 714076 - RNA, 23 nt, Human
uauccucacuggaaaaaaaugau

SEQ ID NO: 714077 - RNA, 21 nt, Human
ucaaaaccaaaacaaaacaaa

SEQ ID NO: 714078 - RNA, 23 nt, Human
ucagcccuauuccagucuuccca

SEQ ID NO: 714079 - RNA, 24 nt, Human
ucagcccuauuccagucuucccac

SEQ ID NO: 714080 - RNA, 18 nt, Human
uccagggacagaaaaauc

SEQ ID NO: 714081 - RNA, 23 nt, Human
ucccauggcaaucaccaauugcu

SEQ ID NO: 714082 - RNA, 23 nt, Human
uccguaccggggcaguuccaggc

SEQ ID NO: 714083 - RNA, 20 nt, Human
ugauuucauauauggacucc

SEQ ID NO: 714084 - RNA, 23 nt, Human
ugcagaauuacagcagaaaaaca

SEQ ID NO: 714085 - RNA, 29 nt, Human
ugcagacacccaaaaaaaaaagggagucc

SEQ ID NO: 714086 - RNA, 22 nt, Human
ugccuggcccucugaaauacug

SEQ ID NO: 714087 - RNA, 19 nt, Human
ugcuuuuuuuuuucuugga

SEQ ID NO: 714088 - RNA, 19 nt, Human
ugggaaaagucccauggca

SEQ ID NO: 714089 - RNA, 21 nt, Human
ugguaguaaaaggaacagacc

SEQ ID NO: 714090 - RNA, 21 nt, Human
uuaaauggacucuucaguuga

SEQ ID NO: 714091 - RNA, 24 nt, Human
uuccuaguucugcacaggauaauu

SEQ ID NO: 714092 - RNA, 26 nt, Human
uugccaaguuaaucacugcaaauugu

SEQ ID NO: 714093 - RNA, 23 nt, Human
uuggaaccauauugcuaaugcug

SEQ ID NO: 714094 - RNA, 19 nt, Human
uuuaacuccucuauuggaa

SEQ ID NO: 714095 - RNA, 18 nt, Human
uuugucauuaaaucaaua

SEQ ID NO: 714096 - RNA, 24 nt, Human
uuuuccaucccaacaucaccuauc

SEQ ID NO: 714097 - RNA, 21 nt, Human
uuuugaaaaauauucccagcu

SEQ ID NO: 714098 - RNA, 22 nt, Human
uuuuuuucuuuuaaaggaaacc

SEQ ID NO: 714099 - RNA, 24 nt, Human
uuuuuuuuucuuggacaaaaauau

SEQ ID NO: 714100 - RNA, 23 nt, Human
aaagggagugaggucuccagagg

SEQ ID NO: 714101 - RNA, 19 nt, Human
aacuaugcuggaaugagau

SEQ ID NO: 714102 - RNA, 19 nt, Human
aagacaaaagaaaaaucca

SEQ ID NO: 714103 - RNA, 22 nt, Human
aagacaaaagaaaaauccaaaa

SEQ ID NO: 714104 - RNA, 19 nt, Human
aauacaaaagcugaaaaua

SEQ ID NO: 714105 - RNA, 22 nt, Human
acagcaacagagacuggguuaa

SEQ ID NO: 714106 - RNA, 31 nt, Human
acagcaacagagacuggguuaaagugugccc

SEQ ID NO: 714107 - RNA, 21 nt, Human
accccaacaggaacaauuagc

SEQ ID NO: 714108 - RNA, 22 nt, Human
accugcuuuuccacguggcgcc

SEQ ID NO: 714109 - RNA, 22 nt, Human
agaaaaauccaaaacuaugcug

SEQ ID NO: 714110 - RNA, 21 nt, Human
agacaaaagaaaaauccaaaa

SEQ ID NO: 714111 - RNA, 18 nt, Human
agcccgcgcugccccgcc

SEQ ID NO: 714112 - RNA, 25 nt, Human
aggugccccuucagaucagaauucc

SEQ ID NO: 714113 - RNA, 20 nt, Human
auaagacaaaagaaaaaucc

SEQ ID NO: 714114 - RNA, 24 nt, Human
auaagacaaaagaaaaauccaaaa

SEQ ID NO: 714115 - RNA, 22 nt, Human
aucacuguuggaggaugagagg

SEQ ID NO: 714116 - RNA, 21 nt, Human
augaugauguuacguguaguu

SEQ ID NO: 714117 - RNA, 20 nt, Human
auggcaagagucuaaggcac

SEQ ID NO: 714118 - RNA, 20 nt, Human
caaaacggagcagagacuca

SEQ ID NO: 714119 - RNA, 21 nt, Human
caaaguaagggucuuucuguu

SEQ ID NO: 714120 - RNA, 21 nt, Human
cacggacggcuuccgccucuu

SEQ ID NO: 714121 - RNA, 19 nt, Human
cacugugaaagcuucagcc

SEQ ID NO: 714122 - RNA, 20 nt, Human
cacugugaaagcuucagccu

SEQ ID NO: 714123 - RNA, 22 nt, Human
cacuguuggaggaugagaggga

SEQ ID NO: 714124 - RNA, 18 nt, Human
cacuuugugggagugaac

SEQ ID NO: 714125 - RNA, 22 nt, Human
cagcaacagagacuggguuaaa

SEQ ID NO: 714126 - RNA, 18 nt, Human
cagccuuuaccccugggc

SEQ ID NO: 714127 - RNA, 19 nt, Human
cagucucugcacugugaaa

SEQ ID NO: 714128 - RNA, 27 nt, Human
cauagaggaccaaaguaaaugugacag

SEQ ID NO: 714129 - RNA, 19 nt, Human
cauauauuacaucuaccuu

SEQ ID NO: 714130 - RNA, 23 nt, Human
cauucaguaucugucaccccaac

SEQ ID NO: 714131 - RNA, 19 nt, Human
ccaaaacuaugcuggaaug

SEQ ID NO: 714132 - RNA, 24 nt, Human
ccagcugauuuuuaaauaaagcua

SEQ ID NO: 714133 - RNA, 19 nt, Human
ccccgccgcacucagcugu

SEQ ID NO: 714134 - RNA, 23 nt, Human
ccccgccgcacucagcuguuccg

SEQ ID NO: 714135 - RNA, 24 nt, Human
cccuacacagaagacggccagaaa

SEQ ID NO: 714136 - RNA, 19 nt, Human
ccgcacucagcuguuccgc

SEQ ID NO: 714137 - RNA, 20 nt, Human
ccgccgcacucagcuguucc

SEQ ID NO: 714138 - RNA, 22 nt, Human
ccgccgcgcuccccgccagccc

SEQ ID NO: 714139 - RNA, 23 nt, Human
cgccagcccgcgcugccccgcac

SEQ ID NO: 714140 - RNA, 24 nt, Human
cgguaaaaaggaauccauaaauac

SEQ ID NO: 714141 - RNA, 22 nt, Human
cgucucagugagaaccagacac

SEQ ID NO: 714142 - RNA, 21 nt, Human
cuaacacaauccaaccuuuag

SEQ ID NO: 714143 - RNA, 23 nt, Human
cuaacacaauccaaccuuuagca

SEQ ID NO: 714144 - RNA, 20 nt, Human
cuaaugguuccacauuuagu

SEQ ID NO: 714145 - RNA, 21 nt, Human
cugcuuguugucaucacuguu

SEQ ID NO: 714146 - RNA, 23 nt, Human
cuguuggaggaugagagggauuc

SEQ ID NO: 714147 - RNA, 22 nt, Human
cuucagccuuuaccccugggcu

SEQ ID NO: 714148 - RNA, 24 nt, Human
cuuucuaaugguuccacauuuagu

SEQ ID NO: 714149 - RNA, 22 nt, Human
gaaaaauccaaaacuaugcugg

SEQ ID NO: 714150 - RNA, 22 nt, Human
gaaaauguguguucuucacucc

SEQ ID NO: 714151 - RNA, 22 nt, Human
gaccagaugugguccuggguuc

SEQ ID NO: 714152 - RNA, 25 nt, Human
gagugaggucuccagagggggaggu

SEQ ID NO: 714153 - RNA, 19 nt, Human
gaugcuucuguuugcuggu

SEQ ID NO: 714154 - RNA, 23 nt, Human
gcgcuccccgccagcccgcgcug

SEQ ID NO: 714155 - RNA, 23 nt, Human
gggaguuguggugagggaggugg

SEQ ID NO: 714156 - RNA, 21 nt, Human
guccuggguucugggcauggc

SEQ ID NO: 714157 - RNA, 23 nt, Human
guggcgcccgccgcgcuccccgc

SEQ ID NO: 714158 - RNA, 25 nt, Human
uaacacaauccaaccuuuagcauug

SEQ ID NO: 714159 - RNA, 22 nt, Human
uaaccauagggggucuccacaa

SEQ ID NO: 714160 - RNA, 21 nt, Human
uaagaccaaaugagaauauuc

SEQ ID NO: 714161 - RNA, 23 nt, Human
uacaaaacggagcagagacucaa

SEQ ID NO: 714162 - RNA, 25 nt, Human
uacaaaagcugaaaauacuguguca

SEQ ID NO: 714163 - RNA, 20 nt, Human
uacaaagagaacacuguguu

SEQ ID NO: 714164 - RNA, 21 nt, Human
uacauagaggaccaaaguaaa

SEQ ID NO: 714165 - RNA, 20 nt, Human
uaccccugggcuugaugcuu

SEQ ID NO: 714166 - RNA, 23 nt, Human
uaccuugcugaccagaugugguc

SEQ ID NO: 714167 - RNA, 23 nt, Human
ucaaagucaucucgacuuccuua

SEQ ID NO: 714168 - RNA, 20 nt, Human
ucacuguuggaggaugagag

SEQ ID NO: 714169 - RNA, 22 nt, Human
uccccgccagcccgcgcugccc

SEQ ID NO: 714170 - RNA, 20 nt, Human
ucuguuccuuguccuggucu

SEQ ID NO: 714171 - RNA, 22 nt, Human
ucuguuugcuggugagcucagg

SEQ ID NO: 714172 - RNA, 24 nt, Human
ugacacgguaaaaaggaauccaua

SEQ ID NO: 714173 - RNA, 18 nt, Human
ugacaugaagguuaugcu

SEQ ID NO: 714174 - RNA, 20 nt, Human
ugacuguacaaaacggagca

SEQ ID NO: 714175 - RNA, 23 nt, Human
ugagaaccagacaccacuuugug

SEQ ID NO: 714176 - RNA, 22 nt, Human
ugcccaggcuagcagucucugc

SEQ ID NO: 714177 - RNA, 23 nt, Human
ugccccgcacagcucgcuccagc

SEQ ID NO: 714178 - RNA, 19 nt, Human
uggaauacaaaagcugaaa

SEQ ID NO: 714179 - RNA, 23 nt, Human
uggaauacaaaagcugaaaauac

SEQ ID NO: 714180 - RNA, 19 nt, Human
uggaggaugagagggauuc

SEQ ID NO: 714181 - RNA, 24 nt, Human
uggcacggacggcuuccgccucuu

SEQ ID NO: 714182 - RNA, 20 nt, Human
uggcgcccgccgcgcucccc

SEQ ID NO: 714183 - RNA, 23 nt, Human
ugucaaguucauauagauacccu

SEQ ID NO: 714184 - RNA, 19 nt, Human
ugugguccuggguucuggg

SEQ ID NO: 714185 - RNA, 24 nt, Human
uuaaaauaagacaaaagaaaaauc

SEQ ID NO: 714186 - RNA, 20 nt, Human
uugaugcuucuguuugcugg

SEQ ID NO: 714187 - RNA, 22 nt, Human
uuuccacguggcgcccgccgcg

SEQ ID NO: 714188 - RNA, 19 nt, Human
aaaccacaucuccuuccac

SEQ ID NO: 714189 - RNA, 22 nt, Human
aaccacacauggcucacuuaag

SEQ ID NO: 714190 - RNA, 22 nt, Human
acaaaguucauagacccucuca

SEQ ID NO: 714191 - RNA, 18 nt, Human
acaacucagcaaccacac

SEQ ID NO: 714192 - RNA, 22 nt, Human
acaccagggcccccagacaaac

SEQ ID NO: 714193 - RNA, 24 nt, Human
acaccagggcccccagacaaacca

SEQ ID NO: 714194 - RNA, 28 nt, Human
acaccagggcccccagacaaaccacacc

SEQ ID NO: 714195 - RNA, 20 nt, Human
acaucuccuuccacccuccc

SEQ ID NO: 714196 - RNA, 23 nt, Human
accacacauggcucacuuaaggu

SEQ ID NO: 714197 - RNA, 19 nt, Human
accucagagaaagccaaca

SEQ ID NO: 714198 - RNA, 24 nt, Human
acggucucauggccuugcugaggu

SEQ ID NO: 714199 - RNA, 25 nt, Human
acuauagagaaaccacaucuccuuc

SEQ ID NO: 714200 - RNA, 18 nt, Human
acuguguccuuugauaca

SEQ ID NO: 714201 - RNA, 24 nt, Human
agaaaccacaucuccuuccacccu

SEQ ID NO: 714202 - RNA, 25 nt, Human
agacaaaccacacauggccggaccc

SEQ ID NO: 714203 - RNA, 19 nt, Human
agcggugggagagggguga

SEQ ID NO: 714204 - RNA, 21 nt, Human
agcugaugcccaugcuccugg

SEQ ID NO: 714205 - RNA, 24 nt, Human
aggaccucagaagacccccucaaa

SEQ ID NO: 714206 - RNA, 19 nt, Human
agucacuguuuacugaguc

SEQ ID NO: 714207 - RNA, 23 nt, Human
agucacuguuuacugagucuaga

SEQ ID NO: 714208 - RNA, 23 nt, Human
auagagaaaccacaucuccuucc

SEQ ID NO: 714209 - RNA, 19 nt, Human
caaaggauuuccgguccaa

SEQ ID NO: 714210 - RNA, 25 nt, Human
caacagcuaaagaacagauguccac

SEQ ID NO: 714211 - RNA, 21 nt, Human
caagaguuuagucugagguuu

SEQ ID NO: 714212 - RNA, 21 nt, Human
cacacauggcucacuuaaggu

SEQ ID NO: 714213 - RNA, 20 nt, Human
caccucagagaaagccaaca

SEQ ID NO: 714214 - RNA, 21 nt, Human
cacuucaaaaaauacucugag

SEQ ID NO: 714215 - RNA, 23 nt, Human
cagagaaagccaacagcuaaaga

SEQ ID NO: 714216 - RNA, 23 nt, Human
cagcaaccacaccagggccccca

SEQ ID NO: 714217 - RNA, 24 nt, Human
cagcaaccacaccagggcccccag

SEQ ID NO: 714218 - RNA, 22 nt, Human
cagcacaauggaucaagcagag

SEQ ID NO: 714219 - RNA, 22 nt, Human
cagcggugggagaggggugagg

SEQ ID NO: 714220 - RNA, 21 nt, Human
ccacaccagggcccccagaca

SEQ ID NO: 714221 - RNA, 25 nt, Human
cccccagacaaaccacacauggcuc

SEQ ID NO: 714222 - RNA, 20 nt, Human
ccccucaaauucagaacaaa

SEQ ID NO: 714223 - RNA, 23 nt, Human
ccgguaguagcagcugcauccuu

SEQ ID NO: 714224 - RNA, 21 nt, Human
ccucagagaaagccaacagcu

SEQ ID NO: 714225 - RNA, 21 nt, Human
ccuuccacccucccccuggac

SEQ ID NO: 714226 - RNA, 20 nt, Human
ccuuccucaccuucucccca

SEQ ID NO: 714227 - RNA, 20 nt, Human
ccuuccucaccuucucccca

SEQ ID NO: 714228 - RNA, 18 nt, Human
cucagaagacccccucaa

SEQ ID NO: 714229 - RNA, 23 nt, Human
cuccggcccuacaaauacccauc

SEQ ID NO: 714230 - RNA, 27 nt, Human
cuccugaaacccaccuaccaagccgcc

SEQ ID NO: 714231 - RNA, 21 nt, Human
cugaaaaauuuacuagaggcu

SEQ ID NO: 714232 - RNA, 22 nt, Human
cugaggagggacagggugaaag

SEQ ID NO: 714233 - RNA, 23 nt, Human
cugagguuugauuggaagcccau

SEQ ID NO: 714234 - RNA, 23 nt, Human
cuugagcuacaacucagcaacca

SEQ ID NO: 714235 - RNA, 22 nt, Human
gaaagaccuaaggaaauaagga

SEQ ID NO: 714236 - RNA, 18 nt, Human
gacagcggugggagaggg

SEQ ID NO: 714237 - RNA, 18 nt, Human
gacugcuccugaaaccca

SEQ ID NO: 714238 - RNA, 22 nt, Human
gacuguguccuuugauacaugg

SEQ ID NO: 714239 - RNA, 21 nt, Human
gagaaaccacaucuccuucca

SEQ ID NO: 714240 - RNA, 21 nt, Human
gaggagggacagggugaaagg

SEQ ID NO: 714241 - RNA, 21 nt, Human
gcagaggaaaauaucagugag

SEQ ID NO: 714242 - RNA, 19 nt, Human
gcccccagacaaaccacac

SEQ ID NO: 714243 - RNA, 20 nt, Human
gcuaaagaacagauguccac

SEQ ID NO: 714244 - RNA, 19 nt, Human
gcugaugcccaugcuccug

SEQ ID NO: 714245 - RNA, 18 nt, Human
ggacagcggugggagagg

SEQ ID NO: 714246 - RNA, 24 nt, Human
ggaggcggugaagacccaagacua

SEQ ID NO: 714247 - RNA, 19 nt, Human
ggcccccagacaaaccaca

SEQ ID NO: 714248 - RNA, 24 nt, Human
ggcccuacaaauacccaucucuau

SEQ ID NO: 714249 - RNA, 22 nt, Human
ggcugaacgagcagugaugggg

SEQ ID NO: 714250 - RNA, 18 nt, Human
ggcuuuuggagagaggcc

SEQ ID NO: 714251 - RNA, 18 nt, Human
ggugaagacccaagacua

SEQ ID NO: 714252 - RNA, 22 nt, Human
ggugacccuuccucaccuucuc

SEQ ID NO: 714253 - RNA, 19 nt, Human
uaaggugccacacaccucc

SEQ ID NO: 714254 - RNA, 23 nt, Human
uacaauagugacugcuccugaaa

SEQ ID NO: 714255 - RNA, 21 nt, Human
uagaggagggagguagaauca

SEQ ID NO: 714256 - RNA, 18 nt, Human
uagggggucagacugguc

SEQ ID NO: 714257 - RNA, 18 nt, Human
uaguagcagcugcauccu

SEQ ID NO: 714258 - RNA, 25 nt, Human
ucaaaaaauacucugaggagggaca

SEQ ID NO: 714259 - RNA, 21 nt, Human
ucaagcagaggaaaauaucag

SEQ ID NO: 714260 - RNA, 18 nt, Human
ucagaacaaaggauuucc

SEQ ID NO: 714261 - RNA, 18 nt, Human
ucaggacagcggugggag

SEQ ID NO: 714262 - RNA, 18 nt, Human
uccuuccacccucccccu

SEQ ID NO: 714263 - RNA, 22 nt, Human
ucugaaaaauuuacuagaggcu

SEQ ID NO: 714264 - RNA, 18 nt, Human
ugaacgagcagugauggg

SEQ ID NO: 714265 - RNA, 18 nt, Human
ugaagacccaagacuagg

SEQ ID NO: 714266 - RNA, 20 nt, Human
ugacagagggugacccuucc

SEQ ID NO: 714267 - RNA, 19 nt, Human
ugacugcuccugaaaccca

SEQ ID NO: 714268 - RNA, 19 nt, Human
ugagguaaggugccacaca

SEQ ID NO: 714269 - RNA, 21 nt, Human
ugagguaaggugccacacacc

SEQ ID NO: 714270 - RNA, 20 nt, Human
ugcuccugaaacccaccuac

SEQ ID NO: 714271 - RNA, 18 nt, Human
ugcugagguaaggugcca

SEQ ID NO: 714272 - RNA, 20 nt, Human
uggacuguguccuuugauac

SEQ ID NO: 714273 - RNA, 19 nt, Human
uggcaggguggguauuugg

SEQ ID NO: 714274 - RNA, 18 nt, Human
uggguucggcauguugug

SEQ ID NO: 714275 - RNA, 21 nt, Human
uguucuguauguuuucuccuc

SEQ ID NO: 714276 - RNA, 18 nt, Human
uguuuucuccucuugagc

SEQ ID NO: 714277 - RNA, 24 nt, Human
uuaagguagaaaccaaaaccugcu

SEQ ID NO: 714278 - RNA, 26 nt, Human
uuaagguagaaaccaaaaccugcuuu

SEQ ID NO: 714279 - RNA, 18 nt, Human
uuccacccucccccugga

SEQ ID NO: 714280 - RNA, 19 nt, Human
uuucuccucuugagcuaca

SEQ ID NO: 714281 - RNA, 22 nt, Human
aaagcaaaaggccacagagggc

SEQ ID NO: 714282 - RNA, 24 nt, Human
aaagcaaaaggccacagagggcuc

SEQ ID NO: 714283 - RNA, 23 nt, Human
aagcagcagaaucuggaggagca

SEQ ID NO: 714284 - RNA, 21 nt, Human
acagggaaaacagaauuucca

SEQ ID NO: 714285 - RNA, 23 nt, Human
acauuaaagaaaggcugccugaa

SEQ ID NO: 714286 - RNA, 21 nt, Human
accugggaucacucugacagg

SEQ ID NO: 714287 - RNA, 23 nt, Human
acuucuauuaaggcagcuggaag

SEQ ID NO: 714288 - RNA, 24 nt, Human
agaugaaacagaauuucauggaga

SEQ ID NO: 714289 - RNA, 18 nt, Human
agccaguugcucuggccu

SEQ ID NO: 714290 - RNA, 23 nt, Human
aggagcaggaagagagcccagag

SEQ ID NO: 714291 - RNA, 21 nt, Human
aggaguaacagaaguuaugac

SEQ ID NO: 714292 - RNA, 19 nt, Human
agggaguguugugcugagu

SEQ ID NO: 714293 - RNA, 26 nt, Human
aguacaacuaagcgaggccuucaacu

SEQ ID NO: 714294 - RNA, 20 nt, Human
caaagcaaaaggccacagag

SEQ ID NO: 714295 - RNA, 24 nt, Human
caaaugaaaacagguaccccucuu

SEQ ID NO: 714296 - RNA, 21 nt, Human
caacucccaaaacgugaaagg

SEQ ID NO: 714297 - RNA, 23 nt, Human
caagcacagcugccaggagccag

SEQ ID NO: 714298 - RNA, 22 nt, Human
cacagugcuucccccauccucu

SEQ ID NO: 714299 - RNA, 22 nt, Human
caccacaaucccccuguacaga

SEQ ID NO: 714300 - RNA, 23 nt, Human
caccacaaucccccuguacagag

SEQ ID NO: 714301 - RNA, 20 nt, Human
cacgcaaagcaaaaggccac

SEQ ID NO: 714302 - RNA, 20 nt, Human
cacuacccaaaagacuugag

SEQ ID NO: 714303 - RNA, 25 nt, Human
cagaagcaaaagcuguaucauccaa

SEQ ID NO: 714304 - RNA, 20 nt, Human
cagcuuccaggaaccguuac

SEQ ID NO: 714305 - RNA, 18 nt, Human
caggguucaccauccaaa

SEQ ID NO: 714306 - RNA, 18 nt, Human
cauccaaucccaaagcca

SEQ ID NO: 714307 - RNA, 22 nt, Human
ccaaagccaccccuguggggaa

SEQ ID NO: 714308 - RNA, 24 nt, Human
ccaaaggaguaacagaaguuauga

SEQ ID NO: 714309 - RNA, 22 nt, Human
cccaaaagacuugaguacuucu

SEQ ID NO: 714310 - RNA, 19 nt, Human
cccacagugcuucccccau

SEQ ID NO: 714311 - RNA, 22 nt, Human
cccccuguacagaggggucugu

SEQ ID NO: 714312 - RNA, 25 nt, Human
ccgagucauuuucccucucccacuu

SEQ ID NO: 714313 - RNA, 23 nt, Human
ccucucccacuugcauucgagag

SEQ ID NO: 714314 - RNA, 20 nt, Human
ccugcagcgaggaguacugu

SEQ ID NO: 714315 - RNA, 27 nt, Human
cuacacagaagcaaaagcuguaucauc

SEQ ID NO: 714316 - RNA, 24 nt, Human
cuacagcugcaugggcaccaaaaa

SEQ ID NO: 714317 - RNA, 25 nt, Human
cugccaggagccaguugcucuggcc

SEQ ID NO: 714318 - RNA, 25 nt, Human
gaaacggacaagcacagcugccagg

SEQ ID NO: 714319 - RNA, 19 nt, Human
gcaaagcaaaaggccacag

SEQ ID NO: 714320 - RNA, 21 nt, Human
gcaaagcaaaaggccacagag

SEQ ID NO: 714321 - RNA, 21 nt, Human
gcaaagcaaaaggccacagag

SEQ ID NO: 714322 - RNA, 20 nt, Human
gcacagcugccaggagccag

SEQ ID NO: 714323 - RNA, 18 nt, Human
gcaggaagagagcccaga

SEQ ID NO: 714324 - RNA, 23 nt, Human
gcccacccuaggacuugaauggc

SEQ ID NO: 714325 - RNA, 18 nt, Human
gccuugauucucacucac

SEQ ID NO: 714326 - RNA, 21 nt, Human
ggaaagcagcagaaucuggag

SEQ ID NO: 714327 - RNA, 18 nt, Human
gggacgggccaggaggaa

SEQ ID NO: 714328 - RNA, 28 nt, Human
guaaugcaauccaacacaauaugcuaca

SEQ ID NO: 714329 - RNA, 23 nt, Human
guggucuucccacagugcuuccc

SEQ ID NO: 714330 - RNA, 23 nt, Human
uagcuaugggccaaaggaguaac

SEQ ID NO: 714331 - RNA, 18 nt, Human
uauguacagguauacuac

SEQ ID NO: 714332 - RNA, 19 nt, Human
ucaagacaaacuuugcaac

SEQ ID NO: 714333 - RNA, 23 nt, Human
ucaccacaaucccccuguacaga

SEQ ID NO: 714334 - RNA, 22 nt, Human
ucauccaaucccaaagccaccc

SEQ ID NO: 714335 - RNA, 19 nt, Human
uccagcucacuacccaaaa

SEQ ID NO: 714336 - RNA, 21 nt, Human
ucccacuguccagccaucuuu

SEQ ID NO: 714337 - RNA, 19 nt, Human
ucugacaggaaacggacaa

SEQ ID NO: 714338 - RNA, 21 nt, Human
ucugacaggaaacggacaagc

SEQ ID NO: 714339 - RNA, 18 nt, Human
ugaaaacagguaccccuc

SEQ ID NO: 714340 - RNA, 22 nt, Human
ugaaaacauuaaagaaaggcug

SEQ ID NO: 714341 - RNA, 22 nt, Human
ugagcuacagaauacaaaccaa

SEQ ID NO: 714342 - RNA, 23 nt, Human
ugccaaugagagggcccagcuuc

SEQ ID NO: 714343 - RNA, 22 nt, Human
ugccaggagccaguugcucugg

SEQ ID NO: 714344 - RNA, 21 nt, Human
ugccaguaaugcaauccaaca

SEQ ID NO: 714345 - RNA, 18 nt, Human
ugcuucccccauccucuc

SEQ ID NO: 714346 - RNA, 19 nt, Human
uggccucagucuccaauug

SEQ ID NO: 714347 - RNA, 20 nt, Human
ugggaugcuucacaacgugc

SEQ ID NO: 714348 - RNA, 24 nt, Human
ugucaagacaaacuuugcaacugg

SEQ ID NO: 714349 - RNA, 18 nt, Human
uguuacaaggagaaauug

SEQ ID NO: 714350 - RNA, 22 nt, Human
uucaccauccaaaauggcgacu

SEQ ID NO: 714351 - RNA, 20 nt, Human
uuccacggugccgcccucug

SEQ ID NO: 714352 - RNA, 19 nt, Human
uuguccuuucucugccagu

SEQ ID NO: 714353 - RNA, 23 nt, Human
uuuccuguaggcuuuccagcuca

SEQ ID NO: 714354 - RNA, 21 nt, Human
aaaaacauuccugcaauaguc

SEQ ID NO: 714355 - RNA, 22 nt, Human
aaacacccacagaacauggcaa

SEQ ID NO: 714356 - RNA, 18 nt, Human
aaacagacuguuaagacu

SEQ ID NO: 714357 - RNA, 22 nt, Human
aaacagaucaaugauccagcaa

SEQ ID NO: 714358 - RNA, 20 nt, Human
aaacaugguuuguagcaaaa

SEQ ID NO: 714359 - RNA, 19 nt, Human
aaaccccacccuuggcucc

SEQ ID NO: 714360 - RNA, 18 nt, Human
aaagcccccagaacgcag

SEQ ID NO: 714361 - RNA, 18 nt, Human
aaccgugugcccgugccc

SEQ ID NO: 714362 - RNA, 19 nt, Human
aaccugccaaacacccaca

SEQ ID NO: 714363 - RNA, 20 nt, Human
aagcagucuuuuacaaggga

SEQ ID NO: 714364 - RNA, 19 nt, Human
acauggcaaugaagcccua

SEQ ID NO: 714365 - RNA, 20 nt, Human
accagggccuucaucaguga

SEQ ID NO: 714366 - RNA, 25 nt, Human
acccaaugcaagcucugcaacccuu

SEQ ID NO: 714367 - RNA, 19 nt, Human
accugcaacuguuuccaga

SEQ ID NO: 714368 - RNA, 19 nt, Human
acgggagcgcaagggcuug

SEQ ID NO: 714369 - RNA, 18 nt, Human
acuacagaggggccagga

SEQ ID NO: 714370 - RNA, 19 nt, Human
agaagaaaaagcccccaga

SEQ ID NO: 714371 - RNA, 23 nt, Human
agaauggacagauaauauagaaa

SEQ ID NO: 714372 - RNA, 22 nt, Human
agagccucuucuuuccccaccc

SEQ ID NO: 714373 - RNA, 27 nt, Human
agcagcacugauugauuucccaguagg

SEQ ID NO: 714374 - RNA, 24 nt, Human
aggaagaaugaaacuuaaaaaaaa

SEQ ID NO: 714375 - RNA, 24 nt, Human
agugcuuucuccucaccagggccu

SEQ ID NO: 714376 - RNA, 21 nt, Human
caaaaucauaaaaaaggcccc

SEQ ID NO: 714377 - RNA, 18 nt, Human
caaaguccuugccagcau

SEQ ID NO: 714378 - RNA, 18 nt, Human
caaccaagacgcccgcag

SEQ ID NO: 714379 - RNA, 20 nt, Human
caaggaccucagcagaaggc

SEQ ID NO: 714380 - RNA, 19 nt, Human
caaugcaagcucugcaacc

SEQ ID NO: 714381 - RNA, 19 nt, Human
caccacagcuauguuguac

SEQ ID NO: 714382 - RNA, 20 nt, Human
caccacagcuauguuguacg

SEQ ID NO: 714383 - RNA, 18 nt, Human
caccagggccuucaucag

SEQ ID NO: 714384 - RNA, 21 nt, Human
caccagggccuucaucaguga

SEQ ID NO: 714385 - RNA, 20 nt, Human
caccccuaccuguccacacc

SEQ ID NO: 714386 - RNA, 19 nt, Human
cacccugucacucccagcc

SEQ ID NO: 714387 - RNA, 22 nt, Human
cacgcaaggaccucagcagaag

SEQ ID NO: 714388 - RNA, 24 nt, Human
cacuuugaaucugcaccuucucca

SEQ ID NO: 714389 - RNA, 24 nt, Human
cagagccucuucuuuccccacccc

SEQ ID NO: 714390 - RNA, 19 nt, Human
cagauaauauagaaaugcu

SEQ ID NO: 714391 - RNA, 24 nt, Human
cagcaaucgcugcucaaaagaagg

SEQ ID NO: 714392 - RNA, 28 nt, Human
cagcagcacugauugauuucccaguagg

SEQ ID NO: 714393 - RNA, 22 nt, Human
cagcaguggagaaggggacugg

SEQ ID NO: 714394 - RNA, 20 nt, Human
cagccagccaccguccgccu

SEQ ID NO: 714395 - RNA, 19 nt, Human
cagccgggaccucucaggc

SEQ ID NO: 714396 - RNA, 21 nt, Human
cagccgggaccucucaggcau

SEQ ID NO: 714397 - RNA, 30 nt, Human
cauggcaaugaagcccuacaugcuuuuaaa

SEQ ID NO: 714398 - RNA, 22 nt, Human
ccaaacacccacagaacauggc

SEQ ID NO: 714399 - RNA, 22 nt, Human
ccaaagccauagcugggaccuu

SEQ ID NO: 714400 - RNA, 24 nt, Human
ccaacaccugcaacuguuuccaga

SEQ ID NO: 714401 - RNA, 22 nt, Human
ccagaacgcagagccucuucuu

SEQ ID NO: 714402 - RNA, 23 nt, Human
ccauuaagccaccacagcuaugu

SEQ ID NO: 714403 - RNA, 23 nt, Human
cccaaaaauguaaaauccuggag

SEQ ID NO: 714404 - RNA, 26 nt, Human
cccaaaaauguaaaauccuggagagc

SEQ ID NO: 714405 - RNA, 26 nt, Human
cccaccccuaccuguccacaccccca

SEQ ID NO: 714406 - RNA, 19 nt, Human
ccccaccccuaccugucca

SEQ ID NO: 714407 - RNA, 23 nt, Human
ccccaccccuaccuguccacacc

SEQ ID NO: 714408 - RNA, 25 nt, Human
ccccaggggccgaagccacguuguc

SEQ ID NO: 714409 - RNA, 23 nt, Human
ccccggccgcgcaacccgcggug

SEQ ID NO: 714410 - RNA, 24 nt, Human
ccccuaccuguccacacccccagc

SEQ ID NO: 714411 - RNA, 21 nt, Human
cccgaaccgugugcccgugcc

SEQ ID NO: 714412 - RNA, 21 nt, Human
cccgcggugccgcugcagcca

SEQ ID NO: 714413 - RNA, 23 nt, Human
cccgggccgcgacugcacagaag

SEQ ID NO: 714414 - RNA, 18 nt, Human
ccgcagccacuacagagg

SEQ ID NO: 714415 - RNA, 19 nt, Human
ccgcggugccgcugcagcc

SEQ ID NO: 714416 - RNA, 24 nt, Human
ccgcuggagcauccccggccgcgc

SEQ ID NO: 714417 - RNA, 22 nt, Human
ccguguuuguaaugaacuuaac

SEQ ID NO: 714418 - RNA, 23 nt, Human
ccucaggagccgcucacuuugaa

SEQ ID NO: 714419 - RNA, 19 nt, Human
ccuggggcccucugcuggg

SEQ ID NO: 714420 - RNA, 20 nt, Human
ccuuggcggcucuccucagg

SEQ ID NO: 714421 - RNA, 27 nt, Human
cgcccgggccgcgacugcacagaaggc

SEQ ID NO: 714422 - RNA, 19 nt, Human
cgcugagccggagcgcagg

SEQ ID NO: 714423 - RNA, 18 nt, Human
cggcuggaacguggacgg

SEQ ID NO: 714424 - RNA, 19 nt, Human
cggcuuucacuuccaggcc

SEQ ID NO: 714425 - RNA, 20 nt, Human
cggugccgcugcagccagcc

SEQ ID NO: 714426 - RNA, 22 nt, Human
cguguuuguaaugaacuuacca

SEQ ID NO: 714427 - RNA, 19 nt, Human
cuccaacgaaagccugagg

SEQ ID NO: 714428 - RNA, 22 nt, Human
cuccagcucucaggcccagguc

SEQ ID NO: 714429 - RNA, 19 nt, Human
cucccagccgggaccucuc

SEQ ID NO: 714430 - RNA, 20 nt, Human
cugggaccuuggagauccug

SEQ ID NO: 714431 - RNA, 18 nt, Human
cuuuccccaccccuaccu

SEQ ID NO: 714432 - RNA, 21 nt, Human
gaaaaacuaugguauugcuga

SEQ ID NO: 714433 - RNA, 19 nt, Human
gaaagccugagugccuucc

SEQ ID NO: 714434 - RNA, 22 nt, Human
gaagaaaaagcccccagaacgc

SEQ ID NO: 714435 - RNA, 24 nt, Human
gaagacacuuugggcuugccguag

SEQ ID NO: 714436 - RNA, 18 nt, Human
gacacuuugggcuugccg

SEQ ID NO: 714437 - RNA, 23 nt, Human
gaccucagcagaaggcucagcac

SEQ ID NO: 714438 - RNA, 22 nt, Human
gagccggagcgcaggcuccaga

SEQ ID NO: 714439 - RNA, 19 nt, Human
gagcguggcuggcugggag

SEQ ID NO: 714440 - RNA, 23 nt, Human
gaggagaagaaaaagcccccaga

SEQ ID NO: 714441 - RNA, 18 nt, Human
gaggcagcaguggagaag

SEQ ID NO: 714442 - RNA, 22 nt, Human
gauuucaucuuccucccaacac

SEQ ID NO: 714443 - RNA, 22 nt, Human
gcaaccccaggggccgaagcca

SEQ ID NO: 714444 - RNA, 24 nt, Human
gcacacaacuuaugggaacuuaca

SEQ ID NO: 714445 - RNA, 20 nt, Human
gcaguggagaaggggacugg

SEQ ID NO: 714446 - RNA, 18 nt, Human
gccacguuguccaaagcc

SEQ ID NO: 714447 - RNA, 19 nt, Human
gcccguuuggcuauaugac

SEQ ID NO: 714448 - RNA, 18 nt, Human
gccggagcgcaggcucca

SEQ ID NO: 714449 - RNA, 24 nt, Human
gcucaacagaagugcaguuccacc

SEQ ID NO: 714450 - RNA, 19 nt, Human
ggacauucacugguuccuc

SEQ ID NO: 714451 - RNA, 22 nt, Human
ggagagagagagaaacgggagc

SEQ ID NO: 714452 - RNA, 20 nt, Human
ggccccacauucuuaaaggu

SEQ ID NO: 714453 - RNA, 20 nt, Human
ggcugcgcugggcucccggg

SEQ ID NO: 714454 - RNA, 22 nt, Human
ggcugggagagcugcacgccag

SEQ ID NO: 714455 - RNA, 23 nt, Human
ggcuuggaggaaugagugugcuc

SEQ ID NO: 714456 - RNA, 24 nt, Human
gggaaucacugagguuacccaaaa

SEQ ID NO: 714457 - RNA, 20 nt, Human
gggaggcagcaguggagaag

SEQ ID NO: 714458 - RNA, 18 nt, Human
gggcauaacgggaaggag

SEQ ID NO: 714459 - RNA, 20 nt, Human
gggggaggagaagaaaaagc

SEQ ID NO: 714460 - RNA, 24 nt, Human
ggggggcauaacgggaaggaggcg

SEQ ID NO: 714461 - RNA, 20 nt, Human
gguaagagccgggggcugcg

SEQ ID NO: 714462 - RNA, 20 nt, Human
guagucuucuuugugcuuuc

SEQ ID NO: 714463 - RNA, 21 nt, Human
gucgcugagccggagcgcagg

SEQ ID NO: 714464 - RNA, 23 nt, Human
guggagaaggggacuggccgcgu

SEQ ID NO: 714465 - RNA, 18 nt, Human
guguuuguaaugaacuua

SEQ ID NO: 714466 - RNA, 23 nt, Human
uaagacaucucaacaauguugga

SEQ ID NO: 714467 - RNA, 19 nt, Human
uaagacuaacagaaaccaa

SEQ ID NO: 714468 - RNA, 19 nt, Human
uaagagccgggggcugcgc

SEQ ID NO: 714469 - RNA, 20 nt, Human
uaccuguccacacccccagc

SEQ ID NO: 714470 - RNA, 22 nt, Human
uacugacaaacccugcagacac

SEQ ID NO: 714471 - RNA, 21 nt, Human
uaugugacauauucuugugcg

SEQ ID NO: 714472 - RNA, 23 nt, Human
ucaaccaagacgcccgcagccac

SEQ ID NO: 714473 - RNA, 22 nt, Human
ucaccagggccuucaucaguga

SEQ ID NO: 714474 - RNA, 19 nt, Human
ucacuuccaggccugagca

SEQ ID NO: 714475 - RNA, 21 nt, Human
ucagaaccucgugcacacaac

SEQ ID NO: 714476 - RNA, 18 nt, Human
ucagauaccuaauuguac

SEQ ID NO: 714477 - RNA, 27 nt, Human
ucagauaccuaauuguacaaaauugac

SEQ ID NO: 714478 - RNA, 23 nt, Human
uccgcagaacugagagcucaaca

SEQ ID NO: 714479 - RNA, 20 nt, Human
ucgcaggugaaaccccaccc

SEQ ID NO: 714480 - RNA, 23 nt, Human
ucucaggcccaggucagacacuu

SEQ ID NO: 714481 - RNA, 19 nt, Human
ucugcaccuucuccagcuc

SEQ ID NO: 714482 - RNA, 21 nt, Human
ucugcaccuucuccagcucuc

SEQ ID NO: 714483 - RNA, 19 nt, Human
ugaaaaaccgaggcuccug

SEQ ID NO: 714484 - RNA, 23 nt, Human
ugaaacuuaaaaaaaaaaaagaa

SEQ ID NO: 714485 - RNA, 18 nt, Human
ugacaaaacgauuacaga

SEQ ID NO: 714486 - RNA, 23 nt, Human
ugacaaacccugcagacacuagu

SEQ ID NO: 714487 - RNA, 19 nt, Human
ugacuuacccauaaaaagg

SEQ ID NO: 714488 - RNA, 19 nt, Human
ugauccagcaaucgcugcu

SEQ ID NO: 714489 - RNA, 20 nt, Human
ugaucguaaacaaaguccuu

SEQ ID NO: 714490 - RNA, 18 nt, Human
ugcagacgguagcugcgg

SEQ ID NO: 714491 - RNA, 18 nt, Human
ugccaaacacccacagaa

SEQ ID NO: 714492 - RNA, 22 nt, Human
ugccauggagccggucaggcag

SEQ ID NO: 714493 - RNA, 18 nt, Human
uggacuuccaaguccacu

SEQ ID NO: 714494 - RNA, 20 nt, Human
uggcaauuuuacuuaggaaa

SEQ ID NO: 714495 - RNA, 24 nt, Human
uggccgcguuuugcugaaaaaccg

SEQ ID NO: 714496 - RNA, 19 nt, Human
uggcuccaugaaugaauga

SEQ ID NO: 714497 - RNA, 23 nt, Human
uggcugggagagcugcacgccag

SEQ ID NO: 714498 - RNA, 19 nt, Human
ugggaccuuggagauccug

SEQ ID NO: 714499 - RNA, 18 nt, Human
ugguuuugacaggaggug

SEQ ID NO: 714500 - RNA, 24 nt, Human
uguaaugagaauuuuuaaaaaauu

SEQ ID NO: 714501 - RNA, 22 nt, Human
uguagcaaaagauucaaccaag

SEQ ID NO: 714502 - RNA, 21 nt, Human
uuaaaagacagcucgauuuca

SEQ ID NO: 714503 - RNA, 19 nt, Human
uuacaaaauauuguuaaga

SEQ ID NO: 714504 - RNA, 23 nt, Human
uuacagaguaggcgaagaacaga

SEQ ID NO: 714505 - RNA, 25 nt, Human
uucaaccaagacgcccgcagccacu

SEQ ID NO: 714506 - RNA, 20 nt, Human
uuggcuccaugaaugaauga

SEQ ID NO: 714507 - RNA, 21 nt, Human
uuggcuccaugaaugaaugag

SEQ ID NO: 714508 - RNA, 19 nt, Human
uuuccagauuuucugugua

SEQ ID NO: 714509 - RNA, 21 nt, Human
uuuccagauuuucuguguagu

SEQ ID NO: 714510 - RNA, 22 nt, Human
uuugcucaccuuaauuguuuca

SEQ ID NO: 714511 - RNA, 18 nt, Human
aaaaaaccaaaacaacaa

SEQ ID NO: 714512 - RNA, 25 nt, Human
aaaaaaccaaaacaacaaacaaaac

SEQ ID NO: 714513 - RNA, 29 nt, Human
aaaaaaccaaaacaacaaacagugggcac

SEQ ID NO: 714514 - RNA, 21 nt, Human
aaaaaggagggguucagcuca

SEQ ID NO: 714515 - RNA, 23 nt, Human
aaaacaacaaacaaaacccccaa

SEQ ID NO: 714516 - RNA, 18 nt, Human
aaaagccuuuggguugcu

SEQ ID NO: 714517 - RNA, 20 nt, Human
aaaauaccauucugcuacaa

SEQ ID NO: 714518 - RNA, 23 nt, Human
aaacaaacaaaaaucccccaaac

SEQ ID NO: 714519 - RNA, 26 nt, Human
aaacaaguacacuuagaaaggguuuc

SEQ ID NO: 714520 - RNA, 19 nt, Human
aaacaggaaaaacaaacaa

SEQ ID NO: 714521 - RNA, 23 nt, Human
aaacccccaaacaggaaaaacaa

SEQ ID NO: 714522 - RNA, 22 nt, Human
aaacugcccccagagugaccga

SEQ ID NO: 714523 - RNA, 18 nt, Human
aaaggagggguucagcuc

SEQ ID NO: 714524 - RNA, 21 nt, Human
aaccaaaacaacaaacaaaac

SEQ ID NO: 714525 - RNA, 25 nt, Human
aaccaaaacaacaaacaaaaccccc

SEQ ID NO: 714526 - RNA, 23 nt, Human
aacccccaaacaggaaaaacaaa

SEQ ID NO: 714527 - RNA, 20 nt, Human
aagcauccagacaucuguga

SEQ ID NO: 714528 - RNA, 19 nt, Human
aagcucaagggccgggcag

SEQ ID NO: 714529 - RNA, 19 nt, Human
aaggauggggagacagugg

SEQ ID NO: 714530 - RNA, 19 nt, Human
acaaaacccccaaacagga

SEQ ID NO: 714531 - RNA, 22 nt, Human
acaaaacccccaaacaggaaaa

SEQ ID NO: 714532 - RNA, 25 nt, Human
acaacaaacaaaacccccaaacagg

SEQ ID NO: 714533 - RNA, 21 nt, Human
acagauggcagcucccuucca

SEQ ID NO: 714534 - RNA, 24 nt, Human
accaaaacaacaaacaaaaccccc

SEQ ID NO: 714535 - RNA, 18 nt, Human
acccaaccuuuucagcug

SEQ ID NO: 714536 - RNA, 21 nt, Human
accuuguggcuuuuacaaagc

SEQ ID NO: 714537 - RNA, 21 nt, Human
acuugaggaaaauaccauucu

SEQ ID NO: 714538 - RNA, 21 nt, Human
agaaaccucaaguagguuuuc

SEQ ID NO: 714539 - RNA, 21 nt, Human
agaccagugacuggcagcccu

SEQ ID NO: 714540 - RNA, 19 nt, Human
agagggacagauggcagcu

SEQ ID NO: 714541 - RNA, 20 nt, Human
agaugcugggggcaggcagg

SEQ ID NO: 714542 - RNA, 18 nt, Human
agcaccuuugacuuuucu

SEQ ID NO: 714543 - RNA, 19 nt, Human
agcccuggccucuggugag

SEQ ID NO: 714544 - RNA, 25 nt, Human
agcugcuucuguggagaggaaggug

SEQ ID NO: 714545 - RNA, 22 nt, Human
aggcagggggaguggaggaggu

SEQ ID NO: 714546 - RNA, 22 nt, Human
aggccuccaccccccagaccag

SEQ ID NO: 714547 - RNA, 18 nt, Human
agguaagaaagagcuuuu

SEQ ID NO: 714548 - RNA, 19 nt, Human
agugugaaguagcugaaca

SEQ ID NO: 714549 - RNA, 24 nt, Human
aguuucacuccuggggaggaauga

SEQ ID NO: 714550 - RNA, 18 nt, Human
auaacaccaguuagcaug

SEQ ID NO: 714551 - RNA, 20 nt, Human
auguggcucagggaaagggg

SEQ ID NO: 714552 - RNA, 24 nt, Human
caaaaaucccccaaaccacauauu

SEQ ID NO: 714553 - RNA, 21 nt, Human
caaaacaacaaacaaaacccc

SEQ ID NO: 714554 - RNA, 24 nt, Human
caaaacccccaaacaggaaaaaca

SEQ ID NO: 714555 - RNA, 25 nt, Human
caaaacccccaaacaggaaaaacaa

SEQ ID NO: 714556 - RNA, 21 nt, Human
caaacaaaaaucccccaaacc

SEQ ID NO: 714557 - RNA, 22 nt, Human
caaacaaaaaucccccaaacca

SEQ ID NO: 714558 - RNA, 27 nt, Human
caaacaaaaaucccccaaaccacauau

SEQ ID NO: 714559 - RNA, 22 nt, Human
caaacaaaacccccaaacagga

SEQ ID NO: 714560 - RNA, 20 nt, Human
caaaccacauauuaaaaaug

SEQ ID NO: 714561 - RNA, 21 nt, Human
caaagcaaacugugcgggggc

SEQ ID NO: 714562 - RNA, 23 nt, Human
caacaaacaaaacccccaaacag

SEQ ID NO: 714563 - RNA, 26 nt, Human
caauaguuaaaguaauaaaaacauac

SEQ ID NO: 714564 - RNA, 19 nt, Human
cacagcaucuaaacugccc

SEQ ID NO: 714565 - RNA, 27 nt, Human
cacaguacaaggcugaagcaccuuuga

SEQ ID NO: 714566 - RNA, 24 nt, Human
cacccugcccucagcucaggccuc

SEQ ID NO: 714567 - RNA, 22 nt, Human
cagagcucuguacaugcucccc

SEQ ID NO: 714568 - RNA, 19 nt, Human
cagauggcagcucccuucc

SEQ ID NO: 714569 - RNA, 19 nt, Human
cagauggcagcucccuucc

SEQ ID NO: 714570 - RNA, 22 nt, Human
cagcagcaguacaaacacuaaa

SEQ ID NO: 714571 - RNA, 23 nt, Human
cagcagcaguacaaacacuaaaa

SEQ ID NO: 714572 - RNA, 21 nt, Human
cagcucaggccuccacccccc

SEQ ID NO: 714573 - RNA, 22 nt, Human
caguacaaggcugaagcaccuu

SEQ ID NO: 714574 - RNA, 20 nt, Human
cauuuuguaagcuucaaacc

SEQ ID NO: 714575 - RNA, 19 nt, Human
ccaaaaaaaaccaaaacaa

SEQ ID NO: 714576 - RNA, 22 nt, Human
ccaaaaaaaaccaaaacaacaa

SEQ ID NO: 714577 - RNA, 31 nt, Human
ccaaaaaaaaccaaaacaacaaacaaaaccu

SEQ ID NO: 714578 - RNA, 23 nt, Human
ccaaaacaacaaacaaaaccccc

SEQ ID NO: 714579 - RNA, 20 nt, Human
ccaaggccauuuccaaaagc

SEQ ID NO: 714580 - RNA, 20 nt, Human
ccaccuuuaaaaagaaaaac

SEQ ID NO: 714581 - RNA, 24 nt, Human
ccaucuccaucuugugguggaucc

SEQ ID NO: 714582 - RNA, 22 nt, Human
cccagagugaccgaggcaccgg

SEQ ID NO: 714583 - RNA, 21 nt, Human
cccaguguuugucuaaacugc

SEQ ID NO: 714584 - RNA, 20 nt, Human
cccccaaacaggaaaaacaa

SEQ ID NO: 714585 - RNA, 23 nt, Human
ccuccaccccccagaccagugac

SEQ ID NO: 714586 - RNA, 21 nt, Human
ccugcagcacagccccucgag

SEQ ID NO: 714587 - RNA, 23 nt, Human
cucagcucaggccuccacccccc

SEQ ID NO: 714588 - RNA, 21 nt, Human
cucaggccuccaccccccaga

SEQ ID NO: 714589 - RNA, 23 nt, Human
cugcuucuguggagaggaaggug

SEQ ID NO: 714590 - RNA, 23 nt, Human
cuggagccuggaauccuuugcuu

SEQ ID NO: 714591 - RNA, 21 nt, Human
cuguggaacaugcugaccucc

SEQ ID NO: 714592 - RNA, 18 nt, Human
gaaaaacugugggcaauc

SEQ ID NO: 714593 - RNA, 18 nt, Human
gaaaaguuggggacaggc

SEQ ID NO: 714594 - RNA, 21 nt, Human
gaacaaaaaacuuaagagauu

SEQ ID NO: 714595 - RNA, 24 nt, Human
gacacgaugccagcugccagcaag

SEQ ID NO: 714596 - RNA, 18 nt, Human
gacgucaaggugaguuca

SEQ ID NO: 714597 - RNA, 18 nt, Human
gacuauaugaagcaaaaa

SEQ ID NO: 714598 - RNA, 24 nt, Human
gcaagggcuagggccaagggcucg

SEQ ID NO: 714599 - RNA, 22 nt, Human
gcacacaggucaggcacccugc

SEQ ID NO: 714600 - RNA, 18 nt, Human
gcagacguacaaagcaaa

SEQ ID NO: 714601 - RNA, 21 nt, Human
gcccaguguuugucuaaacug

SEQ ID NO: 714602 - RNA, 21 nt, Human
gcccaugugugcacaugacug

SEQ ID NO: 714603 - RNA, 19 nt, Human
gccccucgaguucucuucc

SEQ ID NO: 714604 - RNA, 21 nt, Human
gccugcagcacagccccucga

SEQ ID NO: 714605 - RNA, 21 nt, Human
gcucaggccuccaccccccag

SEQ ID NO: 714606 - RNA, 18 nt, Human
ggaaaauaccauucugcu

SEQ ID NO: 714607 - RNA, 23 nt, Human
ggaacaugcugaccucccagugu

SEQ ID NO: 714608 - RNA, 18 nt, Human
ggcaagaagcucaagggc

SEQ ID NO: 714609 - RNA, 21 nt, Human
ggccaagggcucggcugcugg

SEQ ID NO: 714610 - RNA, 22 nt, Human
ggcuugaggcauaguaacaugg

SEQ ID NO: 714611 - RNA, 21 nt, Human
gggagacagugggcaagaagc

SEQ ID NO: 714612 - RNA, 23 nt, Human
ggguacauacaaaauaacaccag

SEQ ID NO: 714613 - RNA, 19 nt, Human
ggucaggcacccugcccuc

SEQ ID NO: 714614 - RNA, 20 nt, Human
gguguuccucccucccaccu

SEQ ID NO: 714615 - RNA, 18 nt, Human
guacugugucuugggugg

SEQ ID NO: 714616 - RNA, 18 nt, Human
gugcugaccaucuccauc

SEQ ID NO: 714617 - RNA, 20 nt, Human
guggaacaugcugaccuccc

SEQ ID NO: 714618 - RNA, 21 nt, Human
guguauacacagagcucugua

SEQ ID NO: 714619 - RNA, 19 nt, Human
guuugugcugaccaucucc

SEQ ID NO: 714620 - RNA, 22 nt, Human
guuugugcugaccaucuccauc

SEQ ID NO: 714621 - RNA, 23 nt, Human
uaaaaugaaacaaauaagcccuu

SEQ ID NO: 714622 - RNA, 21 nt, Human
uaauauacacuuuaaagagga

SEQ ID NO: 714623 - RNA, 18 nt, Human
uacaaacacuaaaagcaa

SEQ ID NO: 714624 - RNA, 23 nt, Human
uacagcaauauauucauaaauac

SEQ ID NO: 714625 - RNA, 22 nt, Human
uaucggaucuacuuuucccuuu

SEQ ID NO: 714626 - RNA, 24 nt, Human
ucaaggcagaguuaaggaguuuuu

SEQ ID NO: 714627 - RNA, 22 nt, Human
ucacagcaucuaaacugccccc

SEQ ID NO: 714628 - RNA, 19 nt, Human
ucagaccagaaaccucaag

SEQ ID NO: 714629 - RNA, 21 nt, Human
ucagcucaggccuccaccccc

SEQ ID NO: 714630 - RNA, 21 nt, Human
uccagugagauuuugcccuga

SEQ ID NO: 714631 - RNA, 20 nt, Human
ucccuggcauuuucuacacu

SEQ ID NO: 714632 - RNA, 19 nt, Human
uccuggggaggaaugagac

SEQ ID NO: 714633 - RNA, 21 nt, Human
ucgcccaguguuugucuaaac

SEQ ID NO: 714634 - RNA, 23 nt, Human
ucgcugaaugacaacggugauuc

SEQ ID NO: 714635 - RNA, 23 nt, Human
ugaacaaaaaacuuaagagauug

SEQ ID NO: 714636 - RNA, 21 nt, Human
ugaaguagcugaacaaaaaac

SEQ ID NO: 714637 - RNA, 20 nt, Human
ugacugucacacauggguuc

SEQ ID NO: 714638 - RNA, 18 nt, Human
ugagacaguucuuaccuu

SEQ ID NO: 714639 - RNA, 22 nt, Human
ugagagcggaagugcuaagaug

SEQ ID NO: 714640 - RNA, 18 nt, Human
ugagcccaguuucugacc

SEQ ID NO: 714641 - RNA, 30 nt, Human
ugcccaaaaaaaaccaaaacaacaaacaag

SEQ ID NO: 714642 - RNA, 23 nt, Human
ugcuuugugugcuccuaggacuu

SEQ ID NO: 714643 - RNA, 21 nt, Human
uggaggaggaggccugagagc

SEQ ID NO: 714644 - RNA, 21 nt, Human
uggaggaggaggccugagagc

SEQ ID NO: 714645 - RNA, 19 nt, Human
uggaggaggaggccugagg

SEQ ID NO: 714646 - RNA, 19 nt, Human
uggcaacacaagaaagaac

SEQ ID NO: 714647 - RNA, 18 nt, Human
uggcagcccuggccucug

SEQ ID NO: 714648 - RNA, 18 nt, Human
uggcagcccuggccucug

SEQ ID NO: 714649 - RNA, 20 nt, Human
uggcagcccuggccucuggu

SEQ ID NO: 714650 - RNA, 21 nt, Human
uggcagcccuggccucuggug

SEQ ID NO: 714651 - RNA, 19 nt, Human
uggccucuggugagggccc

SEQ ID NO: 714652 - RNA, 22 nt, Human
uggcuaauauacacuuuaaaga

SEQ ID NO: 714653 - RNA, 24 nt, Human
ugguaagggaugagcuacguuuuu

SEQ ID NO: 714654 - RNA, 24 nt, Human
ugucauagaaaauccaaccaaggg

SEQ ID NO: 714655 - RNA, 24 nt, Human
uguggagaggaaggugcuuguuga

SEQ ID NO: 714656 - RNA, 20 nt, Human
uucaauauuuuaauguccug

SEQ ID NO: 714657 - RNA, 20 nt, Human
uuccagggaaaagccuuugg

SEQ ID NO: 714658 - RNA, 21 nt, Human
uuccagggaaaagccuuuggg

SEQ ID NO: 714659 - RNA, 21 nt, Human
uugugguggaucccuggcauu

SEQ ID NO: 714660 - RNA, 25 nt, Human
uuuaaagaggaacagaaucgguuug

SEQ ID NO: 714661 - RNA, 19 nt, Human
uuucacuccuggggaggaa

SEQ ID NO: 714662 - RNA, 19 nt, Human
uuucagcugaagcaaguuu

SEQ ID NO: 714663 - RNA, 22 nt, Human
uuuuucuuaguuuauucguguu

SEQ ID NO: 714664 - RNA, 21 nt, Human
aaaggaacuggcagaggaggc

SEQ ID NO: 714665 - RNA, 19 nt, Human
aaagugcugggauuacagg

SEQ ID NO: 714666 - RNA, 19 nt, Human
aaagugcugggauuacagg

SEQ ID NO: 714667 - RNA, 23 nt, Human
aaagugcugggauuacaggugua

SEQ ID NO: 714668 - RNA, 23 nt, Human
aacugaauuuuaaaaaucaggaa

SEQ ID NO: 714669 - RNA, 19 nt, Human
aaguagcugggacuacagg

SEQ ID NO: 714670 - RNA, 20 nt, Human
aaguagcugggacuacaggc

SEQ ID NO: 714671 - RNA, 25 nt, Human
aaguagcugggacuacaggcgccca

SEQ ID NO: 714672 - RNA, 18 nt, Human
aagugcugggauuacagg

SEQ ID NO: 714673 - RNA, 19 nt, Human
aagugcugggauuacaggu

SEQ ID NO: 714674 - RNA, 26 nt, Human
aagugcugggauuacagguguaagcc

SEQ ID NO: 714675 - RNA, 23 nt, Human
acaggcgcccaccaccacacccg

SEQ ID NO: 714676 - RNA, 18 nt, Human
acaggguuucaccauguu

SEQ ID NO: 714677 - RNA, 19 nt, Human
acaggguuucaccauguua

SEQ ID NO: 714678 - RNA, 20 nt, Human
acaggguuucaccauguuag

SEQ ID NO: 714679 - RNA, 24 nt, Human
acaggguuucaccauguuagccag

SEQ ID NO: 714680 - RNA, 18 nt, Human
acagguguaagccaccgu

SEQ ID NO: 714681 - RNA, 19 nt, Human
acccaggcuggagugcagu

SEQ ID NO: 714682 - RNA, 24 nt, Human
accucggugccugugauuccucaa

SEQ ID NO: 714683 - RNA, 20 nt, Human
aggaagggcgagucccggug

SEQ ID NO: 714684 - RNA, 23 nt, Human
aggcuggaaccggaccgggccug

SEQ ID NO: 714685 - RNA, 25 nt, Human
aggcuggagugcaguagcgugaucu

SEQ ID NO: 714686 - RNA, 21 nt, Human
agggaggauggguccagcuug

SEQ ID NO: 714687 - RNA, 22 nt, Human
aguagagacaggguuucaccau

SEQ ID NO: 714688 - RNA, 20 nt, Human
agugcaguagcgugaucucg

SEQ ID NO: 714689 - RNA, 24 nt, Human
agugcaguagcgugaucucggcuc

SEQ ID NO: 714690 - RNA, 21 nt, Human
aucaaguuucuccccguaaau

SEQ ID NO: 714691 - RNA, 24 nt, Human
caaagugcugggauuacaggugua

SEQ ID NO: 714692 - RNA, 19 nt, Human
cacaccucuuucaauaaag

SEQ ID NO: 714693 - RNA, 18 nt, Human
caccauguuagccaggau

SEQ ID NO: 714694 - RNA, 22 nt, Human
caccauguuagccaggaugguc

SEQ ID NO: 714695 - RNA, 24 nt, Human
caccauguuagccaggauggucuc

SEQ ID NO: 714696 - RNA, 20 nt, Human
caccugggccggugugcugc

SEQ ID NO: 714697 - RNA, 22 nt, Human
cagagaacaaccucggugccuu

SEQ ID NO: 714698 - RNA, 23 nt, Human
cagcgcaaaccucggcuacguag

SEQ ID NO: 714699 - RNA, 19 nt, Human
cagcugguuuguacucugc

SEQ ID NO: 714700 - RNA, 21 nt, Human
caggcgcccaccaccacaccc

SEQ ID NO: 714701 - RNA, 24 nt, Human
caggguuucaccauguuagccagg

SEQ ID NO: 714702 - RNA, 22 nt, Human
cauaccauucuccugccucagc

SEQ ID NO: 714703 - RNA, 21 nt, Human
ccaaagugcugggauuacagg

SEQ ID NO: 714704 - RNA, 21 nt, Human
ccaaagugcugggauuacagg

SEQ ID NO: 714705 - RNA, 24 nt, Human
ccaaagugcugggauuacaggugu

SEQ ID NO: 714706 - RNA, 23 nt, Human
cccaaguagcugggacuacaggc

SEQ ID NO: 714707 - RNA, 23 nt, Human
cccaaguagcugggacuacaggc

SEQ ID NO: 714708 - RNA, 21 nt, Human
cccucugugagcagggaggau

SEQ ID NO: 714709 - RNA, 24 nt, Human
ccucccugguucauaccauucucc

SEQ ID NO: 714710 - RNA, 23 nt, Human
ccucggcuacguagcuccccuca

SEQ ID NO: 714711 - RNA, 23 nt, Human
ccugccucagccucccaaguagc

SEQ ID NO: 714712 - RNA, 24 nt, Human
ccugccucagccucccaaguagcu

SEQ ID NO: 714713 - RNA, 22 nt, Human
ccuuuccuuuccuuuccuuguc

SEQ ID NO: 714714 - RNA, 24 nt, Human
ccuuuccuuuccuuuccuugucuc

SEQ ID NO: 714715 - RNA, 21 nt, Human
cgcccaccaccacacccggcu

SEQ ID NO: 714716 - RNA, 24 nt, Human
cgccucggccucccaaagugcugg

SEQ ID NO: 714717 - RNA, 19 nt, Human
cggcagcgcaaaccucggc

SEQ ID NO: 714718 - RNA, 20 nt, Human
cggcggcagcgcaaaccucg

SEQ ID NO: 714719 - RNA, 24 nt, Human
cgugcugucacccaggcuggagug

SEQ ID NO: 714720 - RNA, 23 nt, Human
cuaauuuuuuguauuuuuaguag

SEQ ID NO: 714721 - RNA, 24 nt, Human
cucagccucccaaguagcugggac

SEQ ID NO: 714722 - RNA, 24 nt, Human
cuccugaccucgugaucugcucgc

SEQ ID NO: 714723 - RNA, 22 nt, Human
cucugcuaucuucccagaauca

SEQ ID NO: 714724 - RNA, 24 nt, Human
cugcaagcuccgccucccugguuc

SEQ ID NO: 714725 - RNA, 22 nt, Human
cugcggugucuucccacaucac

SEQ ID NO: 714726 - RNA, 21 nt, Human
cuucccagaaucaaguuucuc

SEQ ID NO: 714727 - RNA, 19 nt, Human
cuuuccuuuccuugucucu

SEQ ID NO: 714728 - RNA, 19 nt, Human
cuuuccuuuccuuuccuuu

SEQ ID NO: 714729 - RNA, 22 nt, Human
gaccucgugaucugcucgccuc

SEQ ID NO: 714730 - RNA, 24 nt, Human
gaccucgugaucugcucgccucgg

SEQ ID NO: 714731 - RNA, 23 nt, Human
gaugcggggauuguugagaggga

SEQ ID NO: 714732 - RNA, 18 nt, Human
gauuacagguguaagcca

SEQ ID NO: 714733 - RNA, 21 nt, Human
gauuacagguguaagccaccg

SEQ ID NO: 714734 - RNA, 22 nt, Human
gcaccugggccggugugcugcg

SEQ ID NO: 714735 - RNA, 20 nt, Human
gcagggaggauggguccagc

SEQ ID NO: 714736 - RNA, 24 nt, Human
gcugucacccaggcuggagugcag

SEQ ID NO: 714737 - RNA, 24 nt, Human
ggauggucucggucuccugaccuc

SEQ ID NO: 714738 - RNA, 24 nt, Human
ggauuacagguguaagccaccgug

SEQ ID NO: 714739 - RNA, 22 nt, Human
ggcagauucaaaauauuucuuu

SEQ ID NO: 714740 - RNA, 20 nt, Human
gggccuggcggcggcagcga

SEQ ID NO: 714741 - RNA, 24 nt, Human
gguuucaccauguuagccaggaug

SEQ ID NO: 714742 - RNA, 19 nt, Human
guacagcagagaacaaccu

SEQ ID NO: 714743 - RNA, 21 nt, Human
gucccggugagugagcucugc

SEQ ID NO: 714744 - RNA, 21 nt, Human
gugaucucggcucacugcaag

SEQ ID NO: 714745 - RNA, 26 nt, Human
uaaagaaagugcaaacuugcaguaca

SEQ ID NO: 714746 - RNA, 26 nt, Human
uaaagaaagugcaaacuugcaguaca

SEQ ID NO: 714747 - RNA, 24 nt, Human
uaaauaacugaauuuuaaaaauca

SEQ ID NO: 714748 - RNA, 23 nt, Human
uaacugaauuuuaaaaaucagga

SEQ ID NO: 714749 - RNA, 24 nt, Human
uaauuuuuuguauuuuuaguagag

SEQ ID NO: 714750 - RNA, 25 nt, Human
uaauuuuuuguauuuuuaguagaga

SEQ ID NO: 714751 - RNA, 22 nt, Human
uacagcagagaacaaccucggu

SEQ ID NO: 714752 - RNA, 22 nt, Human
uagagacaggguuucaccaugu

SEQ ID NO: 714753 - RNA, 24 nt, Human
uaguagagacaggguuucaccaug

SEQ ID NO: 714754 - RNA, 25 nt, Human
uaguagagacaggguuucaccaugu

SEQ ID NO: 714755 - RNA, 24 nt, Human
ucaccauguuagccaggauggucu

SEQ ID NO: 714756 - RNA, 22 nt, Human
ucacccaggcuggagugcagua

SEQ ID NO: 714757 - RNA, 19 nt, Human
ucacugcaagcuccgccuc

SEQ ID NO: 714758 - RNA, 19 nt, Human
ucacugcaagcuccgccuc

SEQ ID NO: 714759 - RNA, 24 nt, Human
ucacugcaagcuccgccucccugg

SEQ ID NO: 714760 - RNA, 24 nt, Human
ucacugcaagcuccgccucccugg

SEQ ID NO: 714761 - RNA, 25 nt, Human
ucacugcaagcuccgccucccuggu

SEQ ID NO: 714762 - RNA, 18 nt, Human
ucagccucccaaguagcu

SEQ ID NO: 714763 - RNA, 20 nt, Human
ucagccucccaaguagcugg

SEQ ID NO: 714764 - RNA, 21 nt, Human
ucauaccauucuccugccuca

SEQ ID NO: 714765 - RNA, 23 nt, Human
ucccaaagugcugggauuacagg

SEQ ID NO: 714766 - RNA, 24 nt, Human
ucccaaguagcugggacuacaggc

SEQ ID NO: 714767 - RNA, 24 nt, Human
ucccugguucauaccauucuccug

SEQ ID NO: 714768 - RNA, 18 nt, Human
ucccugugaaacagaagu

SEQ ID NO: 714769 - RNA, 21 nt, Human
uccguguuuuuguaaauguac

SEQ ID NO: 714770 - RNA, 19 nt, Human
uccuuuccuugucucucca

SEQ ID NO: 714771 - RNA, 22 nt, Human
uccuuuuuccaucagccucccu

SEQ ID NO: 714772 - RNA, 24 nt, Human
ucgccucggccucccaaagugcug

SEQ ID NO: 714773 - RNA, 19 nt, Human
ucggcuacguagcuccccu

SEQ ID NO: 714774 - RNA, 21 nt, Human
ucgugcugucacccaggcugg

SEQ ID NO: 714775 - RNA, 22 nt, Human
ucgugcugucacccaggcugga

SEQ ID NO: 714776 - RNA, 24 nt, Human
ucgugcugucacccaggcuggagu

SEQ ID NO: 714777 - RNA, 26 nt, Human
ucuccugccucagccucccaaguagc

SEQ ID NO: 714778 - RNA, 23 nt, Human
ucucgugcugucacccaggcugg

SEQ ID NO: 714779 - RNA, 24 nt, Human
ucucgugcugucacccaggcugga

SEQ ID NO: 714780 - RNA, 23 nt, Human
ucugcggugucuucccacaucac

SEQ ID NO: 714781 - RNA, 18 nt, Human
ugagagggaucuguaaga

SEQ ID NO: 714782 - RNA, 22 nt, Human
ugagcagggaggauggguccag

SEQ ID NO: 714783 - RNA, 18 nt, Human
ugagugagcucugcggug

SEQ ID NO: 714784 - RNA, 22 nt, Human
ugcaguagcgugaucucggcuc

SEQ ID NO: 714785 - RNA, 24 nt, Human
ugccucagccucccaaguagcugg

SEQ ID NO: 714786 - RNA, 26 nt, Human
ugcuaucuucccagaaucaaguuucu

SEQ ID NO: 714787 - RNA, 24 nt, Human
ugcugggauuacagguguaagcca

SEQ ID NO: 714788 - RNA, 19 nt, Human
uggagugcaguagcgugau

SEQ ID NO: 714789 - RNA, 23 nt, Human
uggagugcaguagcgugaucucg

SEQ ID NO: 714790 - RNA, 24 nt, Human
uggagugcaguagcgugaucucgg

SEQ ID NO: 714791 - RNA, 21 nt, Human
ugggacuacaggcgcccacca

SEQ ID NO: 714792 - RNA, 24 nt, Human
ugggacuacaggcgcccaccacca

SEQ ID NO: 714793 - RNA, 18 nt, Human
ugggauuacagguguaag

SEQ ID NO: 714794 - RNA, 21 nt, Human
ugggauuacagguguaagcca

SEQ ID NO: 714795 - RNA, 22 nt, Human
ugggauuacagguguaagccac

SEQ ID NO: 714796 - RNA, 23 nt, Human
ugggauuacagguguaagccacc

SEQ ID NO: 714797 - RNA, 23 nt, Human
ugggauuacagguguaagccacc

SEQ ID NO: 714798 - RNA, 24 nt, Human
ugggauuacagguguaagccaccg

SEQ ID NO: 714799 - RNA, 20 nt, Human
ugugugaccacagugcccuc

SEQ ID NO: 714800 - RNA, 23 nt, Human
uguugagagggaucuguaagagc

SEQ ID NO: 714801 - RNA, 24 nt, Human
uuaguagagacaggguuucaccau

SEQ ID NO: 714802 - RNA, 19 nt, Human
uucccacaucacaccuugg

SEQ ID NO: 714803 - RNA, 23 nt, Human
uucccacaucacaccuuggacug

SEQ ID NO: 714804 - RNA, 20 nt, Human
uuccucacaaugcccaugcc

SEQ ID NO: 714805 - RNA, 19 nt, Human
uuucaccauguuagccagg

SEQ ID NO: 714806 - RNA, 20 nt, Human
uuucaccauguuagccagga

SEQ ID NO: 714807 - RNA, 22 nt, Human
uuuuguauuuuuaguagagaca

SEQ ID NO: 714808 - RNA, 24 nt, Human
uuuuuaguagagacaggguuucac

SEQ ID NO: 714809 - RNA, 21 nt, Human
uuuuuguauuuuuaguagaga

SEQ ID NO: 714810 - RNA, 20 nt, Human
aaaaagaacuggcuucaaca

SEQ ID NO: 714811 - RNA, 24 nt, Human
aaaaagaacuggcuucaacaacua

SEQ ID NO: 714812 - RNA, 24 nt, Human
aaaaagauaacaaguugguacuga

SEQ ID NO: 714813 - RNA, 27 nt, Human
agagacuccaagaucggaggggagggc

SEQ ID NO: 714814 - RNA, 24 nt, Human
agcgaagagggauuuaaaaaaucu

SEQ ID NO: 714815 - RNA, 18 nt, Human
agcugggucugugcuggc

SEQ ID NO: 714816 - RNA, 19 nt, Human
agggcccacucccuggagc

SEQ ID NO: 714817 - RNA, 20 nt, Human
agguaccagugaggcugagg

SEQ ID NO: 714818 - RNA, 21 nt, Human
augaccaagacaaaaaagaac

SEQ ID NO: 714819 - RNA, 22 nt, Human
cacaggacccucgggaauagcc

SEQ ID NO: 714820 - RNA, 21 nt, Human
cacucgaggcggggccgggcu

SEQ ID NO: 714821 - RNA, 20 nt, Human
cagacucauagccuccccua

SEQ ID NO: 714822 - RNA, 19 nt, Human
cagcagcccagguuucucc

SEQ ID NO: 714823 - RNA, 21 nt, Human
cagccugccagggacaaagca

SEQ ID NO: 714824 - RNA, 22 nt, Human
cagcuggacugacagccugcca

SEQ ID NO: 714825 - RNA, 21 nt, Human
caguuuuccgagugcccaggc

SEQ ID NO: 714826 - RNA, 23 nt, Human
cauagccuccccuaaagggcaga

SEQ ID NO: 714827 - RNA, 24 nt, Human
ccaagacaaaaaagaacuggcuuc

SEQ ID NO: 714828 - RNA, 25 nt, Human
ccaagacaaaaaagaacuggcuuca

SEQ ID NO: 714829 - RNA, 20 nt, Human
ccagcuggacugacagccug

SEQ ID NO: 714830 - RNA, 19 nt, Human
cccacagagccagccugcc

SEQ ID NO: 714831 - RNA, 22 nt, Human
ccccaagcgugcugcagaaaaa

SEQ ID NO: 714832 - RNA, 24 nt, Human
ccccuccagcuggacugacagccu

SEQ ID NO: 714833 - RNA, 19 nt, Human
cccucuacucuugcucccc

SEQ ID NO: 714834 - RNA, 22 nt, Human
ccuccaagaccuugaauagccc

SEQ ID NO: 714835 - RNA, 22 nt, Human
ccuccugucccagacucauagc

SEQ ID NO: 714836 - RNA, 19 nt, Human
cuaaagggcagaagguacc

SEQ ID NO: 714837 - RNA, 21 nt, Human
cucagcagcccagguuucucc

SEQ ID NO: 714838 - RNA, 19 nt, Human
cuccaagaucggaggggag

SEQ ID NO: 714839 - RNA, 19 nt, Human
cugcugcccacaaucccca

SEQ ID NO: 714840 - RNA, 24 nt, Human
cugggucugugcuggccuccaaga

SEQ ID NO: 714841 - RNA, 21 nt, Human
gagccuacugacccccuccag

SEQ ID NO: 714842 - RNA, 20 nt, Human
gaguccugagguaacaguuu

SEQ ID NO: 714843 - RNA, 23 nt, Human
gccaacacccguggcuuuccuca

SEQ ID NO: 714844 - RNA, 24 nt, Human
ggaggggagggcccacucccugga

SEQ ID NO: 714845 - RNA, 24 nt, Human
gguuucuccauuucccccucuggg

SEQ ID NO: 714846 - RNA, 18 nt, Human
gugaggcugaggcugaag

SEQ ID NO: 714847 - RNA, 18 nt, Human
uaaaaaaucucaacuucc

SEQ ID NO: 714848 - RNA, 22 nt, Human
uaaagcaagcgaagagggauuu

SEQ ID NO: 714849 - RNA, 20 nt, Human
uaacaaguugguacugaaaa

SEQ ID NO: 714850 - RNA, 26 nt, Human
uagccucagauaaggaaaaagauaac

SEQ ID NO: 714851 - RNA, 25 nt, Human
uagugggcgugggaugagacaucau

SEQ ID NO: 714852 - RNA, 21 nt, Human
uccaagaucggaggggagggc

SEQ ID NO: 714853 - RNA, 18 nt, Human
uccagcgccacggcgucu

SEQ ID NO: 714854 - RNA, 20 nt, Human
ucccacagagccagccugcc

SEQ ID NO: 714855 - RNA, 21 nt, Human
uccccaagcgugcugcagaaa

SEQ ID NO: 714856 - RNA, 18 nt, Human
uccccagguagccucaga

SEQ ID NO: 714857 - RNA, 25 nt, Human
uccccuggaagagggacccucagca

SEQ ID NO: 714858 - RNA, 22 nt, Human
ucccucaugaccaagacaaaaa

SEQ ID NO: 714859 - RNA, 27 nt, Human
ucccucaugaccaagacaaaaaagaac

SEQ ID NO: 714860 - RNA, 23 nt, Human
ugacagugucccacagagccagc

SEQ ID NO: 714861 - RNA, 19 nt, Human
ugaccaagacaaaaaagaa

SEQ ID NO: 714862 - RNA, 23 nt, Human
ugaccaagacaaaaaagaacugg

SEQ ID NO: 714863 - RNA, 21 nt, Human
ugacccccuccagcuggacug

SEQ ID NO: 714864 - RNA, 23 nt, Human
ugccagagaaaacguuuaauucc

SEQ ID NO: 714865 - RNA, 21 nt, Human
ugccagggacaaagcaggacc

SEQ ID NO: 714866 - RNA, 21 nt, Human
ugcccacaauccccagguagc

SEQ ID NO: 714867 - RNA, 21 nt, Human
uggaagagggacccucagcau

SEQ ID NO: 714868 - RNA, 22 nt, Human
ugggcucugaauuuguccuccu

SEQ ID NO: 714869 - RNA, 20 nt, Human
uuagguaauguggccauagu

SEQ ID NO: 714870 - RNA, 19 nt, Human
uucccucaugaccaagaca

SEQ ID NO: 714871 - RNA, 25 nt, Human
uuuaaaaaaucucaacuuccuuuuc

SEQ ID NO: 714872 - RNA, 25 nt, Human
aaaaaaaaacgggucauagaccaaa

SEQ ID NO: 714873 - RNA, 25 nt, Human
aaaaaaaacgggucauagaccaaag

SEQ ID NO: 714874 - RNA, 21 nt, Human
aaaaaaacgggucauagacca

SEQ ID NO: 714875 - RNA, 23 nt, Human
aaaaaaacgggucauagaccaaa

SEQ ID NO: 714876 - RNA, 25 nt, Human
aaaaaacaaaacaaaacaaaaaaaa

SEQ ID NO: 714877 - RNA, 22 nt, Human
aaaaagaaaugugguacacugg

SEQ ID NO: 714878 - RNA, 26 nt, Human
aaaacaaaacaaaacaaaaaaaaaaa

SEQ ID NO: 714879 - RNA, 23 nt, Human
aaaacaaagaaacaaacgaaaaa

SEQ ID NO: 714880 - RNA, 26 nt, Human
aaaacaagacacacaggaucuaccuu

SEQ ID NO: 714881 - RNA, 25 nt, Human
aaacaaaaaaaaaaacgggucauag

SEQ ID NO: 714882 - RNA, 19 nt, Human
aaacaaaacaaaacaaaaa

SEQ ID NO: 714883 - RNA, 20 nt, Human
aaacaaaaccaaaaccaaaa

SEQ ID NO: 714884 - RNA, 27 nt, Human
aaacaagacacacaggaagccuuucgg

SEQ ID NO: 714885 - RNA, 21 nt, Human
aaacaagacacacaggaucua

SEQ ID NO: 714886 - RNA, 28 nt, Human
aaaccaaaaccaaaaaagaguaggaaga

SEQ ID NO: 714887 - RNA, 21 nt, Human
aaaccccaucuccacaaaaaa

SEQ ID NO: 714888 - RNA, 22 nt, Human
aaagaaacaaacgaaaaaacaa

SEQ ID NO: 714889 - RNA, 26 nt, Human
aacaaaacaaaaaaaaaaacggguca

SEQ ID NO: 714890 - RNA, 23 nt, Human
aacaaaaccaaaaccaaaaaaga

SEQ ID NO: 714891 - RNA, 24 nt, Human
aacauaccauuaaaagacaaucaa

SEQ ID NO: 714892 - RNA, 23 nt, Human
aacauagccaaaacaaaucucaa

SEQ ID NO: 714893 - RNA, 20 nt, Human
aacaugguaaaacucugucu

SEQ ID NO: 714894 - RNA, 21 nt, Human
aacaugguaaaacucugucuc

SEQ ID NO: 714895 - RNA, 20 nt, Human
aacauggugaaaccccaucc

SEQ ID NO: 714896 - RNA, 20 nt, Human
aacauggugaaaccccaucu

SEQ ID NO: 714897 - RNA, 20 nt, Human
aacauggugaaaccccaucu

SEQ ID NO: 714898 - RNA, 21 nt, Human
aacauggugaaaccccaucuc

SEQ ID NO: 714899 - RNA, 22 nt, Human
aacauggugaaaccccaucucc

SEQ ID NO: 714900 - RNA, 20 nt, Human
aacuacuuuuuaacaaaaau

SEQ ID NO: 714901 - RNA, 19 nt, Human
aagagggaggugaagggag

SEQ ID NO: 714902 - RNA, 19 nt, Human
aauacaaacaacagcaaaa

SEQ ID NO: 714903 - RNA, 24 nt, Human
aaucacuugaacccaggggauaga

SEQ ID NO: 714904 - RNA, 19 nt, Human
aauggaucauaggcuggcc

SEQ ID NO: 714905 - RNA, 23 nt, Human
aaugguaucugggcucucggcgc

SEQ ID NO: 714906 - RNA, 26 nt, Human
acaaaacaaaaaaaaaaacgggucau

SEQ ID NO: 714907 - RNA, 23 nt, Human
acaaaacaaaacaaaaaaaaaaa

SEQ ID NO: 714908 - RNA, 19 nt, Human
acaaaacaaaaccaaaacc

SEQ ID NO: 714909 - RNA, 21 nt, Human
acaaacaacagcaaaaauaug

SEQ ID NO: 714910 - RNA, 22 nt, Human
acaagagaaucacuugaaccca

SEQ ID NO: 714911 - RNA, 22 nt, Human
acacuuguaaucccaaaacuuu

SEQ ID NO: 714912 - RNA, 24 nt, Human
acagaacaagacuccaucucaaaa

SEQ ID NO: 714913 - RNA, 21 nt, Human
accaaaguauaaagcuuaaaa

SEQ ID NO: 714914 - RNA, 30 nt, Human
accagaaaacaagacacacaggaucuaccu

SEQ ID NO: 714915 - RNA, 24 nt, Human
acccaggcuggaguacaguggugu

SEQ ID NO: 714916 - RNA, 23 nt, Human
accccaucuccacaaaaaauaca

SEQ ID NO: 714917 - RNA, 26 nt, Human
acgccacugcaccccagccggguguc

SEQ ID NO: 714918 - RNA, 22 nt, Human
acgccacugcaccccagccugg

SEQ ID NO: 714919 - RNA, 20 nt, Human
acggaguuucgccauaggcc

SEQ ID NO: 714920 - RNA, 22 nt, Human
acggaguuucgccauaggcccg

SEQ ID NO: 714921 - RNA, 18 nt, Human
acuacauacaaauauggu

SEQ ID NO: 714922 - RNA, 18 nt, Human
acugcaccccagccuggg

SEQ ID NO: 714923 - RNA, 24 nt, Human
acugcaccccagccugggugacag

SEQ ID NO: 714924 - RNA, 18 nt, Human
acuuugucacccaggcug

SEQ ID NO: 714925 - RNA, 25 nt, Human
acuuugucacccaggcuggaguaca

SEQ ID NO: 714926 - RNA, 24 nt, Human
agaaaaacaggucaauggaacaaa

SEQ ID NO: 714927 - RNA, 22 nt, Human
agaaacaaacgaaaaaacaaaa

SEQ ID NO: 714928 - RNA, 22 nt, Human
agaaucacuugaacccagggga

SEQ ID NO: 714929 - RNA, 24 nt, Human
agacaagagaaucacuugaaccca

SEQ ID NO: 714930 - RNA, 19 nt, Human
agaccuguacacugaaaac

SEQ ID NO: 714931 - RNA, 27 nt, Human
agagaaaaacaggucaauggaacaaaa

SEQ ID NO: 714932 - RNA, 19 nt, Human
agagauugcagugagccaa

SEQ ID NO: 714933 - RNA, 23 nt, Human
agagauugcagugagccaagauc

SEQ ID NO: 714934 - RNA, 23 nt, Human
agcaccaaggcucacgccuguaa

SEQ ID NO: 714935 - RNA, 18 nt, Human
agccaccacacccugccu

SEQ ID NO: 714936 - RNA, 19 nt, Human
agccaccacacccugccug

SEQ ID NO: 714937 - RNA, 20 nt, Human
agccuggaagugccucggcg

SEQ ID NO: 714938 - RNA, 22 nt, Human
agccuggccaacaugguaaaac

SEQ ID NO: 714939 - RNA, 24 nt, Human
agccuggccaacaugguaaaacuc

SEQ ID NO: 714940 - RNA, 22 nt, Human
agccuggccaacauggugaaac

SEQ ID NO: 714941 - RNA, 24 nt, Human
agccugggugacagaacaagacuc

SEQ ID NO: 714942 - RNA, 22 nt, Human
agcuuauuagaaaaaggaguag

SEQ ID NO: 714943 - RNA, 22 nt, Human
agcuugggcaacauagugagac

SEQ ID NO: 714944 - RNA, 26 nt, Human
agcuugggcaacauagugagacaguc

SEQ ID NO: 714945 - RNA, 24 nt, Human
aggacugcuugaggccaggaguuu

SEQ ID NO: 714946 - RNA, 22 nt, Human
aggacuuaacauagccaaaaca

SEQ ID NO: 714947 - RNA, 24 nt, Human
aggcucacgccuguaaucccagca

SEQ ID NO: 714948 - RNA, 21 nt, Human
agggaggugaagggagggugg

SEQ ID NO: 714949 - RNA, 23 nt, Human
aggugggaggacugcuugaggcc

SEQ ID NO: 714950 - RNA, 22 nt, Human
aggugggucacuugaggucagg

SEQ ID NO: 714951 - RNA, 19 nt, Human
aguacaguggugugaucuc

SEQ ID NO: 714952 - RNA, 21 nt, Human
aguacaguggugugaucucag

SEQ ID NO: 714953 - RNA, 23 nt, Human
aguggcucacgccugugaucuca

SEQ ID NO: 714954 - RNA, 24 nt, Human
aguggugugaucucagcucacugc

SEQ ID NO: 714955 - RNA, 22 nt, Human
aguucaacaucaauuguauuuc

SEQ ID NO: 714956 - RNA, 26 nt, Human
auagaagacaaaacauuaauaccuag

SEQ ID NO: 714957 - RNA, 22 nt, Human
auagagcaaagggcaguccuuu

SEQ ID NO: 714958 - RNA, 24 nt, Human
aucacgccacugcaccccagccug

SEQ ID NO: 714959 - RNA, 21 nt, Human
aucuaccuucuuccuguccag

SEQ ID NO: 714960 - RNA, 22 nt, Human
auggaacaaaacagaguccuga

SEQ ID NO: 714961 - RNA, 20 nt, Human
auguaauuuacaaaaacacc

SEQ ID NO: 714962 - RNA, 19 nt, Human
auguguguccuuccuuccc

SEQ ID NO: 714963 - RNA, 21 nt, Human
auugugaucuugggaugggaa

SEQ ID NO: 714964 - RNA, 23 nt, Human
auuucacuguccccuuccaaagu

SEQ ID NO: 714965 - RNA, 18 nt, Human
caaaacaaaaccaaaacc

SEQ ID NO: 714966 - RNA, 25 nt, Human
caaaacaaagaaacaaacgaaaaaa

SEQ ID NO: 714967 - RNA, 19 nt, Human
caaaacagaguccugaaau

SEQ ID NO: 714968 - RNA, 24 nt, Human
caaaacuuugggaggccaaggugg

SEQ ID NO: 714969 - RNA, 26 nt, Human
caaacgaaaaaacaaaacaaaacaaa

SEQ ID NO: 714970 - RNA, 19 nt, Human
caaaguauaaagcuuaaaa

SEQ ID NO: 714971 - RNA, 24 nt, Human
caaaguucuaggauuacaggcaua

SEQ ID NO: 714972 - RNA, 21 nt, Human
caacacccaaagcauaaaaga

SEQ ID NO: 714973 - RNA, 24 nt, Human
caacacuuugagaagcuaaggugg

SEQ ID NO: 714974 - RNA, 21 nt, Human
caacagcaaaaauaugacgca

SEQ ID NO: 714975 - RNA, 24 nt, Human
caacaugguaaaacucugucucua

SEQ ID NO: 714976 - RNA, 18 nt, Human
caacauggugaaacccca

SEQ ID NO: 714977 - RNA, 20 nt, Human
caagaaaaagugaaggugga

SEQ ID NO: 714978 - RNA, 24 nt, Human
caaggcucacgccuguaaucccag

SEQ ID NO: 714979 - RNA, 20 nt, Human
caaggugggucacuugaggu

SEQ ID NO: 714980 - RNA, 22 nt, Human
caaggugggucacuugagguca

SEQ ID NO: 714981 - RNA, 20 nt, Human
caagugauccucccaccuca

SEQ ID NO: 714982 - RNA, 18 nt, Human
cacacuuguaaucccaaa

SEQ ID NO: 714983 - RNA, 24 nt, Human
cacacuuguaaucccaaaacuuug

SEQ ID NO: 714984 - RNA, 22 nt, Human
caccacacccugccuguuccca

SEQ ID NO: 714985 - RNA, 18 nt, Human
caccaugagaacucacag

SEQ ID NO: 714986 - RNA, 22 nt, Human
cacccaucuaggccucccaaag

SEQ ID NO: 714987 - RNA, 23 nt, Human
cacccaucuaggccucccaaagu

SEQ ID NO: 714988 - RNA, 18 nt, Human
caccccauagccacaagc

SEQ ID NO: 714989 - RNA, 20 nt, Human
caccccauagccacaagcca

SEQ ID NO: 714990 - RNA, 21 nt, Human
caccccauagccacaagccac

SEQ ID NO: 714991 - RNA, 23 nt, Human
cacgccuguaaucccagcacaug

SEQ ID NO: 714992 - RNA, 24 nt, Human
cacgccugugaucucaacacuuug

SEQ ID NO: 714993 - RNA, 23 nt, Human
cacugcaccccagccugggugac

SEQ ID NO: 714994 - RNA, 27 nt, Human
cacugcaccccagccugggugacagaa

SEQ ID NO: 714995 - RNA, 19 nt, Human
cacugcagucuugaccucu

SEQ ID NO: 714996 - RNA, 22 nt, Human
cacuugaggucaggaguuugaa

SEQ ID NO: 714997 - RNA, 23 nt, Human
cacuuguaaucccaaaacuuugg

SEQ ID NO: 714998 - RNA, 24 nt, Human
cacuuguaaucccaaaacuuuggg

SEQ ID NO: 714999 - RNA, 22 nt, Human
cacuuugucacccaggcuggag

SEQ ID NO: 715000 - RNA, 18 nt, Human
cagaaaacaagacacaca

SEQ ID NO: 715001 - RNA, 23 nt, Human
cagaacaagacuccaucucaaaa

SEQ ID NO: 715002 - RNA, 25 nt, Human
cagccuggccaacauggugaaaccc

SEQ ID NO: 715003 - RNA, 24 nt, Human
cagcucacugcagucuugaccucu

SEQ ID NO: 715004 - RNA, 23 nt, Human
caugcaccaccacaccuggcuaa

SEQ ID NO: 715005 - RNA, 24 nt, Human
cauuuaaaaaacacacuguaacaa

SEQ ID NO: 715006 - RNA, 19 nt, Human
ccaaaaccaaaaaagagua

SEQ ID NO: 715007 - RNA, 18 nt, Human
ccaaagcauaaaagaaca

SEQ ID NO: 715008 - RNA, 24 nt, Human
ccaaaguucuaggauuacaggcau

SEQ ID NO: 715009 - RNA, 19 nt, Human
ccacaaaaaauacaaacaa

SEQ ID NO: 715010 - RNA, 20 nt, Human
ccacaaaaaauacaaacaac

SEQ ID NO: 715011 - RNA, 22 nt, Human
ccacaagccacaccagccacca

SEQ ID NO: 715012 - RNA, 20 nt, Human
ccacugcaccccagccuggg

SEQ ID NO: 715013 - RNA, 21 nt, Human
ccacugcaccccagccugggu

SEQ ID NO: 715014 - RNA, 23 nt, Human
ccacugcaccccagccuggguga

SEQ ID NO: 715015 - RNA, 24 nt, Human
ccacugcaccccagccugggugac

SEQ ID NO: 715016 - RNA, 23 nt, Human
ccagcuugggcaacauagugaga

SEQ ID NO: 715017 - RNA, 18 nt, Human
ccaucuccacaaaaaaua

SEQ ID NO: 715018 - RNA, 22 nt, Human
cccacacuuguaaucccaaaac

SEQ ID NO: 715019 - RNA, 26 nt, Human
ccucccaccucagccugccguguaac

SEQ ID NO: 715020 - RNA, 22 nt, Human
ccugagcucaagugauccaccc

SEQ ID NO: 715021 - RNA, 23 nt, Human
ccugagcucaagugauccaccca

SEQ ID NO: 715022 - RNA, 20 nt, Human
ccuggccaacaugguaaaac

SEQ ID NO: 715023 - RNA, 24 nt, Human
ccuggccaacaugguaaaacucug

SEQ ID NO: 715024 - RNA, 23 nt, Human
ccuggccaacauggugaaacccc

SEQ ID NO: 715025 - RNA, 25 nt, Human
ccuggccaacauggugaaaccccaa

SEQ ID NO: 715026 - RNA, 22 nt, Human
ccugggugacagaacaagacuc

SEQ ID NO: 715027 - RNA, 18 nt, Human
ccuguaaucccagcuacu

SEQ ID NO: 715028 - RNA, 21 nt, Human
ccuguaaucccagcuacuugg

SEQ ID NO: 715029 - RNA, 22 nt, Human
ccuguaaucccagcuacuuggg

SEQ ID NO: 715030 - RNA, 19 nt, Human
ccuguucccaaauuucaca

SEQ ID NO: 715031 - RNA, 26 nt, Human
cgccacugcaccccagccugggugac

SEQ ID NO: 715032 - RNA, 23 nt, Human
cgccuguaaucccagcacauggg

SEQ ID NO: 715033 - RNA, 22 nt, Human
cggccugugccuguaaucccag

SEQ ID NO: 715034 - RNA, 27 nt, Human
cucaaaacaaagaaacaaacgaaaaaa

SEQ ID NO: 715035 - RNA, 21 nt, Human
cucaagugauccacccaucua

SEQ ID NO: 715036 - RNA, 22 nt, Human
cucacgccuguaaucccagcac

SEQ ID NO: 715037 - RNA, 24 nt, Human
cucacgccuguaaucccagcacau

SEQ ID NO: 715038 - RNA, 22 nt, Human
cucacgccugugaucucaacac

SEQ ID NO: 715039 - RNA, 24 nt, Human
cucacgccugugaucucaacacuu

SEQ ID NO: 715040 - RNA, 23 nt, Human
cucacugcagucuugaccucugg

SEQ ID NO: 715041 - RNA, 24 nt, Human
cucacuuugucacccaggcuggag

SEQ ID NO: 715042 - RNA, 21 nt, Human
cucccaccucagccugccgug

SEQ ID NO: 715043 - RNA, 24 nt, Human
cuggaguacaguggugugaucuca

SEQ ID NO: 715044 - RNA, 23 nt, Human
cuggccaacauggugaaacccca

SEQ ID NO: 715045 - RNA, 27 nt, Human
cuggccaacauggugaaaccccaucuu

SEQ ID NO: 715046 - RNA, 18 nt, Human
cugugccuguaaucccag

SEQ ID NO: 715047 - RNA, 23 nt, Human
cuguucccaaauuucacaucaaa

SEQ ID NO: 715048 - RNA, 25 nt, Human
cuugccaaccaccagcucucacgcc

SEQ ID NO: 715049 - RNA, 19 nt, Human
cuuuagcucaggaguucaa

SEQ ID NO: 715050 - RNA, 22 nt, Human
gaaaaaacaaaacaaaacaaaa

SEQ ID NO: 715051 - RNA, 21 nt, Human
gaaaccccaucuccacaaaaa

SEQ ID NO: 715052 - RNA, 21 nt, Human
gacaacuacuuuuuaacaaaa

SEQ ID NO: 715053 - RNA, 21 nt, Human
gacuacaggcaugcaccacca

SEQ ID NO: 715054 - RNA, 24 nt, Human
gacugcuugaggccaggaguuuga

SEQ ID NO: 715055 - RNA, 23 nt, Human
gagaccagcuugggcaacauagu

SEQ ID NO: 715056 - RNA, 18 nt, Human
gagauugcagugagccaa

SEQ ID NO: 715057 - RNA, 23 nt, Human
gauagagauugcagugagccaag

SEQ ID NO: 715058 - RNA, 18 nt, Human
gauuacaggcauaagcca

SEQ ID NO: 715059 - RNA, 21 nt, Human
gauuacaggcauaagccacca

SEQ ID NO: 715060 - RNA, 21 nt, Human
gcacauggggaggacgaggca

SEQ ID NO: 715061 - RNA, 24 nt, Human
gccaacaugguaaaacucugucuc

SEQ ID NO: 715062 - RNA, 19 nt, Human
gccaaccaccagcucucac

SEQ ID NO: 715063 - RNA, 20 nt, Human
gccaagaucacgccacugca

SEQ ID NO: 715064 - RNA, 24 nt, Human
gccacugcaccccagccuggguga

SEQ ID NO: 715065 - RNA, 18 nt, Human
gcccgggcuggucuggaa

SEQ ID NO: 715066 - RNA, 25 nt, Human
gccuggccaacauggugaaacccca

SEQ ID NO: 715067 - RNA, 20 nt, Human
gccuguaaucccagcuacuu

SEQ ID NO: 715068 - RNA, 23 nt, Human
gcggccugugccuguaaucccag

SEQ ID NO: 715069 - RNA, 20 nt, Human
gcucucggcgccucacuccu

SEQ ID NO: 715070 - RNA, 23 nt, Human
gcuggucuggaacuccugagcuc

SEQ ID NO: 715071 - RNA, 18 nt, Human
ggaaaaaaaauugugauc

SEQ ID NO: 715072 - RNA, 22 nt, Human
ggaguaggggucgggugcagug

SEQ ID NO: 715073 - RNA, 24 nt, Human
ggauagagauugcagugagccaag

SEQ ID NO: 715074 - RNA, 19 nt, Human
ggauuacaggcauaagcca

SEQ ID NO: 715075 - RNA, 22 nt, Human
ggauuacaggcauaagccacca

SEQ ID NO: 715076 - RNA, 25 nt, Human
ggccaacauggugaaaccccaucuc

SEQ ID NO: 715077 - RNA, 19 nt, Human
ggccaggaguuugagacca

SEQ ID NO: 715078 - RNA, 22 nt, Human
ggccaggaguuugagaccagcu

SEQ ID NO: 715079 - RNA, 24 nt, Human
ggccgcgguggcccacacuuguaa

SEQ ID NO: 715080 - RNA, 24 nt, Human
ggcggccugugccuguaaucccag

SEQ ID NO: 715081 - RNA, 20 nt, Human
ggcucacgccuguaauccca

SEQ ID NO: 715082 - RNA, 22 nt, Human
ggcuggaguacaguggugugau

SEQ ID NO: 715083 - RNA, 18 nt, Human
gggaaaagauuucucgga

SEQ ID NO: 715084 - RNA, 24 nt, Human
gggcguggcggccugugccuguaa

SEQ ID NO: 715085 - RNA, 21 nt, Human
ggggucgggugcaguggcuca

SEQ ID NO: 715086 - RNA, 20 nt, Human
gggucacuugaggucaggaa

SEQ ID NO: 715087 - RNA, 22 nt, Human
gggucacuugaggucaggaguu

SEQ ID NO: 715088 - RNA, 22 nt, Human
gggucgggugcaguggcucacg

SEQ ID NO: 715089 - RNA, 24 nt, Human
gggugcaguggcucacgccuguga

SEQ ID NO: 715090 - RNA, 24 nt, Human
ggucacuugaggucaggaguuuga

SEQ ID NO: 715091 - RNA, 20 nt, Human
ggucuggaacuccugagcuc

SEQ ID NO: 715092 - RNA, 23 nt, Human
gguggcccacacuuguaauccca

SEQ ID NO: 715093 - RNA, 21 nt, Human
guccuuccuucccaaauagcc

SEQ ID NO: 715094 - RNA, 19 nt, Human
gucucuacuaaaaauacaa

SEQ ID NO: 715095 - RNA, 24 nt, Human
gugauccacccaucuaggccuccc

SEQ ID NO: 715096 - RNA, 20 nt, Human
gugggucacuugaggucagg

SEQ ID NO: 715097 - RNA, 22 nt, Human
guucaagugauccucccaccuc

SEQ ID NO: 715098 - RNA, 18 nt, Human
uaaaagaacaaacgaaua

SEQ ID NO: 715099 - RNA, 24 nt, Human
uaaaagaacaaacgaauaaacugg

SEQ ID NO: 715100 - RNA, 19 nt, Human
uaaacccacauauacauuu

SEQ ID NO: 715101 - RNA, 24 nt, Human
uaacaaaaaugcaaaggugauaga

SEQ ID NO: 715102 - RNA, 24 nt, Human
uaacacuucuagaaguaaaaagga

SEQ ID NO: 715103 - RNA, 24 nt, Human
uaacauagccaaaacaaaucucaa

SEQ ID NO: 715104 - RNA, 22 nt, Human
uaagagauucaaauguaaccau

SEQ ID NO: 715105 - RNA, 18 nt, Human
uaagccaccacacccugc

SEQ ID NO: 715106 - RNA, 24 nt, Human
uaaggugggaggacugcuugaggc

SEQ ID NO: 715107 - RNA, 26 nt, Human
uaaggugggaggacugcuugaggcca

SEQ ID NO: 715108 - RNA, 21 nt, Human
uaauuuacaaaaacaccauga

SEQ ID NO: 715109 - RNA, 24 nt, Human
uaauuuuuucuauuuuuuguagag

SEQ ID NO: 715110 - RNA, 21 nt, Human
uacaauacacaugaccagaaa

SEQ ID NO: 715111 - RNA, 26 nt, Human
uacaauacacaugaccagaaaacaag

SEQ ID NO: 715112 - RNA, 22 nt, Human
uacaggcaugcaccaccacacc

SEQ ID NO: 715113 - RNA, 22 nt, Human
uacaguggugugaucucagcuc

SEQ ID NO: 715114 - RNA, 23 nt, Human
uacauacacuacauacaaauaug

SEQ ID NO: 715115 - RNA, 24 nt, Human
uagccgggcguggcggccugugcc

SEQ ID NO: 715116 - RNA, 20 nt, Human
uagcucaggaguucaacaca

SEQ ID NO: 715117 - RNA, 22 nt, Human
uaggauuacaggcauaagccac

SEQ ID NO: 715118 - RNA, 24 nt, Human
uaggauuacaggcauaagccacca

SEQ ID NO: 715119 - RNA, 24 nt, Human
uaggauuacaggcauaagccacca

SEQ ID NO: 715120 - RNA, 23 nt, Human
uaggcuggccgcgguggcccaca

SEQ ID NO: 715121 - RNA, 23 nt, Human
uaugguauuggcauucaggagag

SEQ ID NO: 715122 - RNA, 27 nt, Human
ucaaaacaaagaaacaaacgaaaaaac

SEQ ID NO: 715123 - RNA, 21 nt, Human
ucaaaacuaugaaaugcugac

SEQ ID NO: 715124 - RNA, 18 nt, Human
ucaauggaacaaaacaga

SEQ ID NO: 715125 - RNA, 20 nt, Human
ucacgccaaaaugguaucug

SEQ ID NO: 715126 - RNA, 23 nt, Human
ucacgccacugcaccccagccug

SEQ ID NO: 715127 - RNA, 19 nt, Human
ucacugcagucuugaccuc

SEQ ID NO: 715128 - RNA, 23 nt, Human
ucacugcagucuugaccucuggg

SEQ ID NO: 715129 - RNA, 21 nt, Human
ucacuguccccuuccaaagug

SEQ ID NO: 715130 - RNA, 24 nt, Human
ucacuuugucacccaggcuggagu

SEQ ID NO: 715131 - RNA, 23 nt, Human
ucagccugccguguaacugugac

SEQ ID NO: 715132 - RNA, 22 nt, Human
uccaucucaaaacaaagaaaca

SEQ ID NO: 715133 - RNA, 24 nt, Human
ucccaaaguucuaggauuacaggc

SEQ ID NO: 715134 - RNA, 25 nt, Human
uccuucccaaauagccagaugauaa

SEQ ID NO: 715135 - RNA, 20 nt, Human
ucuaaaaucaaagagggagg

SEQ ID NO: 715136 - RNA, 26 nt, Human
ucuacagaccaucaucuucacuugca

SEQ ID NO: 715137 - RNA, 20 nt, Human
ucuauagcuucuaaaaucaa

SEQ ID NO: 715138 - RNA, 23 nt, Human
ucucacuuugucacccaggcugg

SEQ ID NO: 715139 - RNA, 24 nt, Human
ucucacuuugucacccaggcugga

SEQ ID NO: 715140 - RNA, 21 nt, Human
ucucuacuaaaaauacaaaaa

SEQ ID NO: 715141 - RNA, 21 nt, Human
ucuggaacuccugagcucaag

SEQ ID NO: 715142 - RNA, 24 nt, Human
ugaaaccagccuggccaacauggu

SEQ ID NO: 715143 - RNA, 19 nt, Human
ugaaauaaacccacauaua

SEQ ID NO: 715144 - RNA, 18 nt, Human
ugaccagaaaacaagaca

SEQ ID NO: 715145 - RNA, 19 nt, Human
ugaccagaaaacaagacac

SEQ ID NO: 715146 - RNA, 21 nt, Human
ugaccagaaaacaagacacac

SEQ ID NO: 715147 - RNA, 25 nt, Human
ugaccucugggguucaagugauccu

SEQ ID NO: 715148 - RNA, 24 nt, Human
ugagacaagagaaucacuugaacc

SEQ ID NO: 715149 - RNA, 21 nt, Human
ugagacagucucuacaaaaca

SEQ ID NO: 715150 - RNA, 22 nt, Human
ugagcucaagugauccacccau

SEQ ID NO: 715151 - RNA, 18 nt, Human
ugaggucaggaguuugaa

SEQ ID NO: 715152 - RNA, 23 nt, Human
ugaggucaggaguuugaaaccag

SEQ ID NO: 715153 - RNA, 24 nt, Human
ugauccacccaucuaggccuccca

SEQ ID NO: 715154 - RNA, 22 nt, Human
ugcaacacccaaagcauaaaag

SEQ ID NO: 715155 - RNA, 24 nt, Human
ugccuguaaucccagcuacuuggg

SEQ ID NO: 715156 - RNA, 18 nt, Human
ugcuugaggccaggaguu

SEQ ID NO: 715157 - RNA, 23 nt, Human
uggaaaugugcaaaauccaugug

SEQ ID NO: 715158 - RNA, 19 nt, Human
uggaguacaguggugugau

SEQ ID NO: 715159 - RNA, 19 nt, Human
uggaguacaguggugugau

SEQ ID NO: 715160 - RNA, 28 nt, Human
uggaguacaguggugugauggcucuagc

SEQ ID NO: 715161 - RNA, 24 nt, Human
uggccaacaugguaaaacucuguc

SEQ ID NO: 715162 - RNA, 24 nt, Human
uggccaacauggugaaaccccauc

SEQ ID NO: 715163 - RNA, 24 nt, Human
uggcggccugugccuguaauccca

SEQ ID NO: 715164 - RNA, 21 nt, Human
uggcucacgccugugaucuca

SEQ ID NO: 715165 - RNA, 24 nt, Human
uggcucacgccugugaucucaaca

SEQ ID NO: 715166 - RNA, 20 nt, Human
ugggaggacugcuugaggcc

SEQ ID NO: 715167 - RNA, 18 nt, Human
ugggaggccaaggugggu

SEQ ID NO: 715168 - RNA, 19 nt, Human
ugggaggccaagguggguc

SEQ ID NO: 715169 - RNA, 19 nt, Human
ugggaggccaagguggguc

SEQ ID NO: 715170 - RNA, 24 nt, Human
ugggaggcugagacaagagaauca

SEQ ID NO: 715171 - RNA, 24 nt, Human
ugggaugggaaaagauuucucgga

SEQ ID NO: 715172 - RNA, 18 nt, Human
ugggcucucggcgccuca

SEQ ID NO: 715173 - RNA, 21 nt, Human
ugggcucucggcgccucacuc

SEQ ID NO: 715174 - RNA, 24 nt, Human
ugggguucaagugauccucccacc

SEQ ID NO: 715175 - RNA, 19 nt, Human
ugggucacuugaggucagg

SEQ ID NO: 715176 - RNA, 24 nt, Human
ugggucacuugaggucaggaguuu

SEQ ID NO: 715177 - RNA, 24 nt, Human
ugguagaccuguacacugaaaacu

SEQ ID NO: 715178 - RNA, 19 nt, Human
ugguauuggcauucaggag

SEQ ID NO: 715179 - RNA, 24 nt, Human
uggugugaucucagcucacugcag

SEQ ID NO: 715180 - RNA, 21 nt, Human
uguaaccauguuuacuuucau

SEQ ID NO: 715181 - RNA, 25 nt, Human
uguaaccauguuuacuuucauuuuu

SEQ ID NO: 715182 - RNA, 23 nt, Human
uguaacugugacuacaggcaugc

SEQ ID NO: 715183 - RNA, 22 nt, Human
uguaggaaugcugugauuacag

SEQ ID NO: 715184 - RNA, 24 nt, Human
uguauugcuuuagcucaggaguuc

SEQ ID NO: 715185 - RNA, 24 nt, Human
uguccuuccuucccaaauagccag

SEQ ID NO: 715186 - RNA, 24 nt, Human
ugugccuguaaucccagcuacuug

SEQ ID NO: 715187 - RNA, 19 nt, Human
uuaaaaaacacacuguaac

SEQ ID NO: 715188 - RNA, 22 nt, Human
uuauauauacugaaaauuucua

SEQ ID NO: 715189 - RNA, 19 nt, Human
uuaucuuaaacaaugucua

SEQ ID NO: 715190 - RNA, 23 nt, Human
uucaagugauccucccaccucag

SEQ ID NO: 715191 - RNA, 26 nt, Human
uucaagugauccucccaccucagccu

SEQ ID NO: 715192 - RNA, 21 nt, Human
uugacaaguugauccuaauuu

SEQ ID NO: 715193 - RNA, 22 nt, Human
uugaggccaggaguuugagacc

SEQ ID NO: 715194 - RNA, 20 nt, Human
uugcagugagccaagaucac

SEQ ID NO: 715195 - RNA, 25 nt, Human
uugggaggcugagacaagagaauca

SEQ ID NO: 715196 - RNA, 21 nt, Human
uugggcaacauagugagacag

SEQ ID NO: 715197 - RNA, 24 nt, Human
uuguagagacggaguuucgccaua

SEQ ID NO: 715198 - RNA, 26 nt, Human
uuuaacaaaaaugcaaaggugauaga

SEQ ID NO: 715199 - RNA, 19 nt, Human
uuuauaggccagaagacuc

SEQ ID NO: 715200 - RNA, 24 nt, Human
uuuguagagacggaguuucgccau

SEQ ID NO: 715201 - RNA, 18 nt, Human
uuugucacccaggcugga

SEQ ID NO: 715202 - RNA, 23 nt, Human
uuuuuuguagagacggaguuucg

SEQ ID NO: 715203 - RNA, 24 nt, Human
uuuuuuguagagacggaguuucgc

SEQ ID NO: 715204 - RNA, 19 nt, Human
acgugucauucacaggcau

SEQ ID NO: 715205 - RNA, 19 nt, Human
agaauccacauaaccacag

SEQ ID NO: 715206 - RNA, 18 nt, Human
agaaugaacccaguccca

SEQ ID NO: 715207 - RNA, 25 nt, Human
aggaaaguaagagaauccacauaac

SEQ ID NO: 715208 - RNA, 21 nt, Human
agucaugagaaugaacccagu

SEQ ID NO: 715209 - RNA, 27 nt, Human
aguggcuauuuaccaauaacaaguaac

SEQ ID NO: 715210 - RNA, 26 nt, Human
auccacauaaccacagcuuacaucac

SEQ ID NO: 715211 - RNA, 20 nt, Human
caaaauaauuaaacugaggc

SEQ ID NO: 715212 - RNA, 22 nt, Human
caggcuucucuguuccuccucc

SEQ ID NO: 715213 - RNA, 24 nt, Human
ccaaaauaauuaaacugaggcagg

SEQ ID NO: 715214 - RNA, 29 nt, Human
ccuccugcaggcacaguuugaguagagac

SEQ ID NO: 715215 - RNA, 23 nt, Human
cgcagauccagggacagucccuc

SEQ ID NO: 715216 - RNA, 19 nt, Human
cuguuccuccuccugcagg

SEQ ID NO: 715217 - RNA, 21 nt, Human
gccccaagucaugagaaugaa

SEQ ID NO: 715218 - RNA, 21 nt, Human
uaagagaauccacauaaccac

SEQ ID NO: 715219 - RNA, 22 nt, Human
uccacauaaccacagcuuacau

SEQ ID NO: 715220 - RNA, 18 nt, Human
ugaacccagucccagcag

SEQ ID NO: 715221 - RNA, 22 nt, Human
uucucuguuccuccuccugcag

SEQ ID NO: 715222 - RNA, 19 nt, Human
uugaaacugucuaccuccg

SEQ ID NO: 715223 - RNA, 22 nt, Human
uuugaaacugucuaccuccgca

SEQ ID NO: 715224 - RNA, 18 nt, Human
aaaaagacacuucagagc

SEQ ID NO: 715225 - RNA, 19 nt, Human
aaacaagacggcuugcccu

SEQ ID NO: 715226 - RNA, 19 nt, Human
aaauaaaauaggcuugaaa

SEQ ID NO: 715227 - RNA, 18 nt, Human
aagggggaguggaguugc

SEQ ID NO: 715228 - RNA, 19 nt, Human
aagugccccucaggccuuc

SEQ ID NO: 715229 - RNA, 21 nt, Human
acacacacacacauauauaua

SEQ ID NO: 715230 - RNA, 23 nt, Human
acacacauacacacacacacaca

SEQ ID NO: 715231 - RNA, 20 nt, Human
acaggguugggggugaaggg

SEQ ID NO: 715232 - RNA, 24 nt, Human
acauacacacacacacacacacag

SEQ ID NO: 715233 - RNA, 18 nt, Human
accacacucugcuuuugc

SEQ ID NO: 715234 - RNA, 23 nt, Human
accugggccuggcucugcuccug

SEQ ID NO: 715235 - RNA, 23 nt, Human
acucugcuuuugcuuggccuggg

SEQ ID NO: 715236 - RNA, 18 nt, Human
acugagggaauccuguug

SEQ ID NO: 715237 - RNA, 25 nt, Human
acugguuucacuggcaucucgagac

SEQ ID NO: 715238 - RNA, 18 nt, Human
agcagguggcugguggca

SEQ ID NO: 715239 - RNA, 22 nt, Human
agccagaagagcagcugccgcg

SEQ ID NO: 715240 - RNA, 23 nt, Human
agccagcguuggccccaaaggca

SEQ ID NO: 715241 - RNA, 25 nt, Human
agcuguggaggcuucaugccaagug

SEQ ID NO: 715242 - RNA, 24 nt, Human
aggagcuuuaggaaaggggacagg

SEQ ID NO: 715243 - RNA, 18 nt, Human
aggcuugaaaauuacagu

SEQ ID NO: 715244 - RNA, 19 nt, Human
agggaugaugacauagacc

SEQ ID NO: 715245 - RNA, 24 nt, Human
aggggaaacgaaccuucuucaaaa

SEQ ID NO: 715246 - RNA, 18 nt, Human
agggggccuggguggugc

SEQ ID NO: 715247 - RNA, 21 nt, Human
aggggugacggugccagccag

SEQ ID NO: 715248 - RNA, 25 nt, Human
auauauacacacauauauaugugug

SEQ ID NO: 715249 - RNA, 19 nt, Human
auauauauauauauauaua

SEQ ID NO: 715250 - RNA, 19 nt, Human
auauauauauauauauaua

SEQ ID NO: 715251 - RNA, 19 nt, Human
auauauauauauauauaua

SEQ ID NO: 715252 - RNA, 19 nt, Human
auauauauauauauauaua

SEQ ID NO: 715253 - RNA, 19 nt, Human
auauauauauauauauaua

SEQ ID NO: 715254 - RNA, 19 nt, Human
auauauauauauauauaua

SEQ ID NO: 715255 - RNA, 19 nt, Human
auauauauauauauauaua

SEQ ID NO: 715256 - RNA, 19 nt, Human
auauauauauauauauaua

SEQ ID NO: 715257 - RNA, 29 nt, Human
auguguauauauauacacacauauauaug

SEQ ID NO: 715258 - RNA, 20 nt, Human
cacacacacacacacacaca

SEQ ID NO: 715259 - RNA, 22 nt, Human
cacacacacacacacacacaua

SEQ ID NO: 715260 - RNA, 26 nt, Human
cacacacacacacacacacauauaua

SEQ ID NO: 715261 - RNA, 20 nt, Human
cacacacacacacacacaua

SEQ ID NO: 715262 - RNA, 22 nt, Human
cacacacacacacacacauaua

SEQ ID NO: 715263 - RNA, 26 nt, Human
cacacacacacacacacauauauaua

SEQ ID NO: 715264 - RNA, 19 nt, Human
cacacacacacacacauau

SEQ ID NO: 715265 - RNA, 25 nt, Human
cacacacacacacacauauauauau

SEQ ID NO: 715266 - RNA, 18 nt, Human
cacacacacauauauaua

SEQ ID NO: 715267 - RNA, 20 nt, Human
cacacacauauauauauaua

SEQ ID NO: 715268 - RNA, 24 nt, Human
cacacacauauauauauauauaua

SEQ ID NO: 715269 - RNA, 20 nt, Human
cacacauacacacacacaca

SEQ ID NO: 715270 - RNA, 26 nt, Human
cacauacacacacacacacacacaca

SEQ ID NO: 715271 - RNA, 22 nt, Human
cacauauauauauauauauaua

SEQ ID NO: 715272 - RNA, 19 nt, Human
cacccugggaccagcccaa

SEQ ID NO: 715273 - RNA, 21 nt, Human
cacuaccauaagcaaaaggga

SEQ ID NO: 715274 - RNA, 25 nt, Human
cagcaaacaagacggcuugcccucu

SEQ ID NO: 715275 - RNA, 22 nt, Human
cagcggcacccagggggcugcc

SEQ ID NO: 715276 - RNA, 23 nt, Human
caggaccagaaccuccuguccaa

SEQ ID NO: 715277 - RNA, 19 nt, Human
cagggggcugcccugcucu

SEQ ID NO: 715278 - RNA, 19 nt, Human
cagguggcugguggcagca

SEQ ID NO: 715279 - RNA, 18 nt, Human
cagugcguggccaaaggc

SEQ ID NO: 715280 - RNA, 26 nt, Human
cagugucagugcguggccaaaggcua

SEQ ID NO: 715281 - RNA, 22 nt, Human
caugcgauucucuucucuuuuc

SEQ ID NO: 715282 - RNA, 19 nt, Human
caugcucuuuuggccucgg

SEQ ID NO: 715283 - RNA, 25 nt, Human
cauucacuccaguccaaaacagugg

SEQ ID NO: 715284 - RNA, 21 nt, Human
cauuucaguuuacucagcaga

SEQ ID NO: 715285 - RNA, 22 nt, Human
ccagaaaaccgugguuuuucuu

SEQ ID NO: 715286 - RNA, 22 nt, Human
ccagaaccuccuguccaaccuc

SEQ ID NO: 715287 - RNA, 20 nt, Human
ccagaagagcagcugccgcg

SEQ ID NO: 715288 - RNA, 18 nt, Human
ccagugggacagaacagg

SEQ ID NO: 715289 - RNA, 21 nt, Human
cccaaaggcaggaccagaacc

SEQ ID NO: 715290 - RNA, 22 nt, Human
cccacuaccauaagcaaaaggg

SEQ ID NO: 715291 - RNA, 23 nt, Human
cccacucuuaacucagccucaua

SEQ ID NO: 715292 - RNA, 22 nt, Human
ccccucgcucccuuggugccca

SEQ ID NO: 715293 - RNA, 25 nt, Human
cccucuaugugcagaggagcuuuag

SEQ ID NO: 715294 - RNA, 19 nt, Human
cccugcgcuccaccccugu

SEQ ID NO: 715295 - RNA, 22 nt, Human
ccuccuguccaaccucaaaagc

SEQ ID NO: 715296 - RNA, 21 nt, Human
ccugacagcggcacccagggg

SEQ ID NO: 715297 - RNA, 19 nt, Human
ccugcaggcggggagcugu

SEQ ID NO: 715298 - RNA, 23 nt, Human
ccugcugcaccuggcucccuacc

SEQ ID NO: 715299 - RNA, 19 nt, Human
ccuuggugcccagggggcc

SEQ ID NO: 715300 - RNA, 20 nt, Human
cgagcgggcaggaggcgagc

SEQ ID NO: 715301 - RNA, 24 nt, Human
cgcuccaccccugugcccauucac

SEQ ID NO: 715302 - RNA, 28 nt, Human
cggcuucuggaggccgcguccaccccuu

SEQ ID NO: 715303 - RNA, 20 nt, Human
cucagcagauagaaaaauaa

SEQ ID NO: 715304 - RNA, 20 nt, Human
cucauuucaguuuacucagc

SEQ ID NO: 715305 - RNA, 24 nt, Human
cuccagcuggcuaagauaggcccu

SEQ ID NO: 715306 - RNA, 20 nt, Human
cucgcucccuuggugcccag

SEQ ID NO: 715307 - RNA, 22 nt, Human
cucucacaucccuaucuaugcc

SEQ ID NO: 715308 - RNA, 20 nt, Human
cucuuaaccacacucugcuu

SEQ ID NO: 715309 - RNA, 20 nt, Human
cugcccugcgcuccaccccu

SEQ ID NO: 715310 - RNA, 22 nt, Human
cuggagccaccugggccuggcc

SEQ ID NO: 715311 - RNA, 21 nt, Human
cugggccuggcucugcuccug

SEQ ID NO: 715312 - RNA, 19 nt, Human
cuggggcugcccugcgcuc

SEQ ID NO: 715313 - RNA, 23 nt, Human
cuuaaccacacucugcuuuugcu

SEQ ID NO: 715314 - RNA, 19 nt, Human
cuugcccucucagucuggc

SEQ ID NO: 715315 - RNA, 21 nt, Human
cuuggccugggcagugucagu

SEQ ID NO: 715316 - RNA, 25 nt, Human
gacccuugucucuuaaccacacucu

SEQ ID NO: 715317 - RNA, 24 nt, Human
gagccagcguuggccccaaaggca

SEQ ID NO: 715318 - RNA, 25 nt, Human
gaggagcuuuaggaaaggggacagg

SEQ ID NO: 715319 - RNA, 23 nt, Human
gaggccgcguccaccccuuuggg

SEQ ID NO: 715320 - RNA, 19 nt, Human
gcccauucacuccagucca

SEQ ID NO: 715321 - RNA, 21 nt, Human
gcggcacccagggggcugccc

SEQ ID NO: 715322 - RNA, 19 nt, Human
gcugcccugcgcuccaccc

SEQ ID NO: 715323 - RNA, 21 nt, Human
ggccuggggucgggcaggggu

SEQ ID NO: 715324 - RNA, 22 nt, Human
ggccuggggucgggcaggggug

SEQ ID NO: 715325 - RNA, 20 nt, Human
ggcuggcccaggggccaggu

SEQ ID NO: 715326 - RNA, 21 nt, Human
gggcaggaggcgagcccagga

SEQ ID NO: 715327 - RNA, 22 nt, Human
ggggccuggggucgggcagggg

SEQ ID NO: 715328 - RNA, 22 nt, Human
gguggucgauaaagugugaaac

SEQ ID NO: 715329 - RNA, 19 nt, Human
guauguguauauauauaca

SEQ ID NO: 715330 - RNA, 19 nt, Human
guccgggacacacgcgggg

SEQ ID NO: 715331 - RNA, 22 nt, Human
guggccaaaggcuacacaggac

SEQ ID NO: 715332 - RNA, 21 nt, Human
guggugguugggacccaucuc

SEQ ID NO: 715333 - RNA, 21 nt, Human
guguaucucuauaaacacaca

SEQ ID NO: 715334 - RNA, 24 nt, Human
guguguguauauauauguaugugu

SEQ ID NO: 715335 - RNA, 18 nt, Human
guugggacccaucucauu

SEQ ID NO: 715336 - RNA, 22 nt, Human
uaaaauaggcuugaaaauuaca

SEQ ID NO: 715337 - RNA, 22 nt, Human
uaaagcaccaguggccuuugaa

SEQ ID NO: 715338 - RNA, 19 nt, Human
uaagauaggcccuuccauc

SEQ ID NO: 715339 - RNA, 20 nt, Human
uacacacacacacacacaca

SEQ ID NO: 715340 - RNA, 24 nt, Human
uacacacacacacacacacacaua

SEQ ID NO: 715341 - RNA, 26 nt, Human
uacacacacacacacacacacauaua

SEQ ID NO: 715342 - RNA, 20 nt, Human
uacacacauauauaugugug

SEQ ID NO: 715343 - RNA, 20 nt, Human
uacacacauauauaugugug

SEQ ID NO: 715344 - RNA, 18 nt, Human
uacacaggaccccauggg

SEQ ID NO: 715345 - RNA, 23 nt, Human
uacaggguugggggugaaggggg

SEQ ID NO: 715346 - RNA, 19 nt, Human
uacaguggugguugggacc

SEQ ID NO: 715347 - RNA, 18 nt, Human
uagaaaaauaaagcacca

SEQ ID NO: 715348 - RNA, 26 nt, Human
uauaaacacacauacacacacacaca

SEQ ID NO: 715349 - RNA, 21 nt, Human
uauacacacauauauaugugu

SEQ ID NO: 715350 - RNA, 22 nt, Human
uauacacacauauauaugugug

SEQ ID NO: 715351 - RNA, 18 nt, Human
uauauacacacauauaua

SEQ ID NO: 715352 - RNA, 18 nt, Human
uauauacacacauauaua

SEQ ID NO: 715353 - RNA, 21 nt, Human
uauauacacacauauauaugu

SEQ ID NO: 715354 - RNA, 21 nt, Human
uauauauacacacauauauau

SEQ ID NO: 715355 - RNA, 21 nt, Human
uauauauacacacauauauau

SEQ ID NO: 715356 - RNA, 22 nt, Human
uauauauauacacacauauaua

SEQ ID NO: 715357 - RNA, 19 nt, Human
uauauauauauauauauau

SEQ ID NO: 715358 - RNA, 19 nt, Human
uauauauauauauauauau

SEQ ID NO: 715359 - RNA, 19 nt, Human
uauauauauauauauauau

SEQ ID NO: 715360 - RNA, 19 nt, Human
uauauauauauauauauau

SEQ ID NO: 715361 - RNA, 22 nt, Human
uauauauauguauguguauaua

SEQ ID NO: 715362 - RNA, 24 nt, Human
uaucuaugccaaaucgucauguca

SEQ ID NO: 715363 - RNA, 31 nt, Human
uaucucuauaaacacacauacacacacacag

SEQ ID NO: 715364 - RNA, 22 nt, Human
uauguauguguauauauauaca

SEQ ID NO: 715365 - RNA, 18 nt, Human
uauguguauauauauaca

SEQ ID NO: 715366 - RNA, 20 nt, Human
uauguguauauauauacaca

SEQ ID NO: 715367 - RNA, 18 nt, Human
uaugugugugucugugca

SEQ ID NO: 715368 - RNA, 22 nt, Human
uaugugugugucugugcaaaug

SEQ ID NO: 715369 - RNA, 23 nt, Human
ucacagagccaauauccagggga

SEQ ID NO: 715370 - RNA, 23 nt, Human
ucaugcgauucucuucucuuuuc

SEQ ID NO: 715371 - RNA, 18 nt, Human
uccagcuggcuaagauag

SEQ ID NO: 715372 - RNA, 18 nt, Human
uccaggggaaacgaaccu

SEQ ID NO: 715373 - RNA, 22 nt, Human
uccaggggaaacgaaccuucuu

SEQ ID NO: 715374 - RNA, 20 nt, Human
uccaucuggcuggcccaggg

SEQ ID NO: 715375 - RNA, 22 nt, Human
uccuguugcuugaagccacuca

SEQ ID NO: 715376 - RNA, 25 nt, Human
ucucacaucccuaucuaugccaaau

SEQ ID NO: 715377 - RNA, 19 nt, Human
ucucaucugaagugccccu

SEQ ID NO: 715378 - RNA, 18 nt, Human
ucucuuuucgggagagua

SEQ ID NO: 715379 - RNA, 21 nt, Human
ucucuuuuucuccccucuaug

SEQ ID NO: 715380 - RNA, 26 nt, Human
ucugaagugccccucaggccuuccag

SEQ ID NO: 715381 - RNA, 19 nt, Human
ucugcuccugacagcggca

SEQ ID NO: 715382 - RNA, 24 nt, Human
ucugcuuuugcuuggccugggcag

SEQ ID NO: 715383 - RNA, 21 nt, Human
ucuuuuggccucggcuucugg

SEQ ID NO: 715384 - RNA, 18 nt, Human
ugaaacccaagucaggga

SEQ ID NO: 715385 - RNA, 21 nt, Human
ugacacagagcgagcgggcag

SEQ ID NO: 715386 - RNA, 21 nt, Human
ugacauagacccuugucucuu

SEQ ID NO: 715387 - RNA, 21 nt, Human
ugacauagacccuugucucuu

SEQ ID NO: 715388 - RNA, 19 nt, Human
ugagaaaggaagguacucc

SEQ ID NO: 715389 - RNA, 27 nt, Human
ugagcaaagauggcuggccagugggac

SEQ ID NO: 715390 - RNA, 24 nt, Human
ugcagaggagcuuuaggaaagggg

SEQ ID NO: 715391 - RNA, 19 nt, Human
ugcccagggggccugggug

SEQ ID NO: 715392 - RNA, 21 nt, Human
ugcccugcgcuccaccccugu

SEQ ID NO: 715393 - RNA, 19 nt, Human
ugcuccugacagcggcacu

SEQ ID NO: 715394 - RNA, 21 nt, Human
ugcuuggccugggcaguguca

SEQ ID NO: 715395 - RNA, 19 nt, Human
uggagccaccugggccugg

SEQ ID NO: 715396 - RNA, 20 nt, Human
uggaggcuucaugccaagug

SEQ ID NO: 715397 - RNA, 20 nt, Human
uggaguugccuaaauucucu

SEQ ID NO: 715398 - RNA, 27 nt, Human
uggccugggcagugucagugcguggcc

SEQ ID NO: 715399 - RNA, 26 nt, Human
ugggacagaacagguuuggcuuaagc

SEQ ID NO: 715400 - RNA, 20 nt, Human
ugggaucacacauugcuguc

SEQ ID NO: 715401 - RNA, 19 nt, Human
uggggucgggcagggguga

SEQ ID NO: 715402 - RNA, 21 nt, Human
uggguggugccacccugggac

SEQ ID NO: 715403 - RNA, 27 nt, Human
uguauauauauacacacauauauaugu

SEQ ID NO: 715404 - RNA, 20 nt, Human
ugugcaaaugcgugugugua

SEQ ID NO: 715405 - RNA, 24 nt, Human
ugugcaaaugcguguguguauaua

SEQ ID NO: 715406 - RNA, 22 nt, Human
uguguauauauauacacacaua

SEQ ID NO: 715407 - RNA, 24 nt, Human
uguguauauauauacacacauaua

SEQ ID NO: 715408 - RNA, 29 nt, Human
uguguauauauauacacacauauauaugg

SEQ ID NO: 715409 - RNA, 19 nt, Human
uguguauauauauguaugu

SEQ ID NO: 715410 - RNA, 26 nt, Human
uguguauauauauguauguguauaua

SEQ ID NO: 715411 - RNA, 19 nt, Human
uguguguauauauauguau

SEQ ID NO: 715412 - RNA, 21 nt, Human
uguguguauauauauguaugu

SEQ ID NO: 715413 - RNA, 24 nt, Human
uguguguauauauauguaugugua

SEQ ID NO: 715414 - RNA, 23 nt, Human
uguguguaucucuauaaacacac

SEQ ID NO: 715415 - RNA, 28 nt, Human
uguguguguaucucuauaaacacacaua

SEQ ID NO: 715416 - RNA, 24 nt, Human
uugccuaaauucucuuuuucuccc

SEQ ID NO: 715417 - RNA, 21 nt, Human
uugcuugaagccacucacaug

SEQ ID NO: 715418 - RNA, 21 nt, Human
uugcuuggccugggcaguguc

SEQ ID NO: 715419 - RNA, 24 nt, Human
uuggccccaaaggcaggaccagaa

SEQ ID NO: 715420 - RNA, 20 nt, Human
uugggggugaagggggagug

SEQ ID NO: 715421 - RNA, 25 nt, Human
uuggugcccagggggccuggguggu

SEQ ID NO: 715422 - RNA, 20 nt, Human
uuuacagguacaaauaaaau

SEQ ID NO: 715423 - RNA, 23 nt, Human
uuucuccccucuaugugcagagg

SEQ ID NO: 715424 - RNA, 18 nt, Human
aaaaucuguuucuuucca

SEQ ID NO: 715425 - RNA, 19 nt, Human
aaacaaaacauaaaauucc

SEQ ID NO: 715426 - RNA, 21 nt, Human
aaacaaaacauaaaauucccu

SEQ ID NO: 715427 - RNA, 22 nt, Human
aacaaaacauaaaauucccuua

SEQ ID NO: 715428 - RNA, 23 nt, Human
aagcaaccaaaguaugaauacag

SEQ ID NO: 715429 - RNA, 25 nt, Human
agaaaaaaaaucugaaucuucaugu

SEQ ID NO: 715430 - RNA, 19 nt, Human
agaucuccaguaguuuaaa

SEQ ID NO: 715431 - RNA, 22 nt, Human
auggaaaagaaaaaaaaucuga

SEQ ID NO: 715432 - RNA, 22 nt, Human
caaguccaguuuaggcaagcaa

SEQ ID NO: 715433 - RNA, 22 nt, Human
caauauacaaguauggaaaaga

SEQ ID NO: 715434 - RNA, 24 nt, Human
ccgccgccgucgccgcugccgccg

SEQ ID NO: 715435 - RNA, 21 nt, Human
ccgccgucgccgcugccgccg

SEQ ID NO: 715436 - RNA, 21 nt, Human
ccgccgucgccgcugccgccg

SEQ ID NO: 715437 - RNA, 18 nt, Human
ccgccuccugcugccgcc

SEQ ID NO: 715438 - RNA, 22 nt, Human
ccgccuccugcugccgccgccg

SEQ ID NO: 715439 - RNA, 22 nt, Human
ccgcugccgccgcuggaggccg

SEQ ID NO: 715440 - RNA, 23 nt, Human
ccuccugcugccgccgccgucgc

SEQ ID NO: 715441 - RNA, 21 nt, Human
cgggacacgacuagcucagga

SEQ ID NO: 715442 - RNA, 21 nt, Human
cucucccuccgccuccugcug

SEQ ID NO: 715443 - RNA, 23 nt, Human
gaacaauauauaaagucugaagc

SEQ ID NO: 715444 - RNA, 22 nt, Human
gccgccgccgucgccgcugccg

SEQ ID NO: 715445 - RNA, 21 nt, Human
gccuccugcugccgccgccgu

SEQ ID NO: 715446 - RNA, 20 nt, Human
gcucaggacuccaccgccau

SEQ ID NO: 715447 - RNA, 20 nt, Human
gcugccgccgccgucgccgc

SEQ ID NO: 715448 - RNA, 23 nt, Human
gucaaaaagauuuauuaacuuaa

SEQ ID NO: 715449 - RNA, 23 nt, Human
uaaaauagaugaaauuuguauca

SEQ ID NO: 715450 - RNA, 19 nt, Human
uaaaauggcagaucuccag

SEQ ID NO: 715451 - RNA, 19 nt, Human
uaaagucugaagcaaccaa

SEQ ID NO: 715452 - RNA, 25 nt, Human
uauacaaguauggaaaagaaaaaaa

SEQ ID NO: 715453 - RNA, 24 nt, Human
uauauaaagucugaagcaaccaaa

SEQ ID NO: 715454 - RNA, 23 nt, Human
ucgccgcugccgccgcuggaggc

SEQ ID NO: 715455 - RNA, 23 nt, Human
ugcgaggcccgcgagcuacaggc

SEQ ID NO: 715456 - RNA, 25 nt, Human
uggcuccugcucucccuccgccucc

SEQ ID NO: 715457 - RNA, 21 nt, Human
uuggugauacuaguaaaaacu

SEQ ID NO: 715458 - RNA, 21 nt, Human
uuugaaaaucuguuucuuucc

SEQ ID NO: 715459 - RNA, 22 nt, Human
uuuuauuuuuuuaccuuuuaaa

SEQ ID NO: 715460 - RNA, 20 nt, Human
aacaaauuaucagcucuccu

SEQ ID NO: 715461 - RNA, 20 nt, Human
aacccaacaaccuauuucca

SEQ ID NO: 715462 - RNA, 21 nt, Human
aacccaacaaccuauuuccag

SEQ ID NO: 715463 - RNA, 21 nt, Human
aaccgaacaacaggcaacggg

SEQ ID NO: 715464 - RNA, 23 nt, Human
aaccucacuuucccccccccuua

SEQ ID NO: 715465 - RNA, 20 nt, Human
aaccucuugcacuucaucuc

SEQ ID NO: 715466 - RNA, 19 nt, Human
aacggcaugugcacaugac

SEQ ID NO: 715467 - RNA, 24 nt, Human
aagaccuuccccaauaaaugacag

SEQ ID NO: 715468 - RNA, 18 nt, Human
aaggagccaggacuggag

SEQ ID NO: 715469 - RNA, 18 nt, Human
aauggccuuggcaggaau

SEQ ID NO: 715470 - RNA, 18 nt, Human
aauguagugacugcuagg

SEQ ID NO: 715471 - RNA, 25 nt, Human
aauuugcuuuucccgccaacucggc

SEQ ID NO: 715472 - RNA, 22 nt, Human
acacacacaagagcccugugug

SEQ ID NO: 715473 - RNA, 23 nt, Human
acagaguuuacaaaacugcugac

SEQ ID NO: 715474 - RNA, 20 nt, Human
accauaagaggggagcuggg

SEQ ID NO: 715475 - RNA, 21 nt, Human
acccaacaaccuauuuccagc

SEQ ID NO: 715476 - RNA, 24 nt, Human
acccaauaguaaaggaaccccaca

SEQ ID NO: 715477 - RNA, 26 nt, Human
acccaguacugaauaacaccuguacc

SEQ ID NO: 715478 - RNA, 21 nt, Human
accccaugcccagugcagcua

SEQ ID NO: 715479 - RNA, 22 nt, Human
accuccuccgucccuccuccac

SEQ ID NO: 715480 - RNA, 24 nt, Human
acuagcugcuguauuuacauacac

SEQ ID NO: 715481 - RNA, 25 nt, Human
agaaauacacaaccucuugcacuuc

SEQ ID NO: 715482 - RNA, 19 nt, Human
agcacguggagggaaggca

SEQ ID NO: 715483 - RNA, 23 nt, Human
agccugcucaaaacccaacaacc

SEQ ID NO: 715484 - RNA, 21 nt, Human
aggacacucuaaauucaccaa

SEQ ID NO: 715485 - RNA, 19 nt, Human
aggagcccaggauguagga

SEQ ID NO: 715486 - RNA, 23 nt, Human
agguggaacacaagguaacaguu

SEQ ID NO: 715487 - RNA, 20 nt, Human
aguaggcgaaggugaaauca

SEQ ID NO: 715488 - RNA, 22 nt, Human
augcuucuauauccaucuauca

SEQ ID NO: 715489 - RNA, 24 nt, Human
auguaacagggcucgguccccuca

SEQ ID NO: 715490 - RNA, 22 nt, Human
caaaacccaacaaccuauuucc

SEQ ID NO: 715491 - RNA, 21 nt, Human
caaaacugcugacuaaaaagc

SEQ ID NO: 715492 - RNA, 24 nt, Human
caacagugaaagcccaggccaaac

SEQ ID NO: 715493 - RNA, 21 nt, Human
caaccgaacaacaggcaacgg

SEQ ID NO: 715494 - RNA, 23 nt, Human
caagcaugcucagcccccacccc

SEQ ID NO: 715495 - RNA, 23 nt, Human
caauaauagcagcuuaaaaucca

SEQ ID NO: 715496 - RNA, 20 nt, Human
caauaguaaaggaaccccac

SEQ ID NO: 715497 - RNA, 21 nt, Human
cacaaccgaacaacaggcaac

SEQ ID NO: 715498 - RNA, 18 nt, Human
cacacaaccgaacaacag

SEQ ID NO: 715499 - RNA, 18 nt, Human
caccaccaccccaugccc

SEQ ID NO: 715500 - RNA, 18 nt, Human
caccuauaguaaauccca

SEQ ID NO: 715501 - RNA, 19 nt, Human
cacugcacaggaaggagac

SEQ ID NO: 715502 - RNA, 22 nt, Human
cagaagacaccuguagagacac

SEQ ID NO: 715503 - RNA, 18 nt, Human
cagcaagggaaccuccuc

SEQ ID NO: 715504 - RNA, 20 nt, Human
cagcaagggaaccuccuccg

SEQ ID NO: 715505 - RNA, 19 nt, Human
caggagcccaggauguagg

SEQ ID NO: 715506 - RNA, 22 nt, Human
cauucaauuacuccuagacuag

SEQ ID NO: 715507 - RNA, 18 nt, Human
cauuuuucaaaagcaaaa

SEQ ID NO: 715508 - RNA, 24 nt, Human
ccaacagugaaagcccaggccaaa

SEQ ID NO: 715509 - RNA, 24 nt, Human
ccaacuggugcucucccacuagcu

SEQ ID NO: 715510 - RNA, 27 nt, Human
ccacauauuaacuuucucauuuuacuc

SEQ ID NO: 715511 - RNA, 26 nt, Human
cccaaugcuaagcccaucuggucuuc

SEQ ID NO: 715512 - RNA, 23 nt, Human
cccacagcuaaggucuaacaggc

SEQ ID NO: 715513 - RNA, 24 nt, Human
cccagaagacaccuguagagacac

SEQ ID NO: 715514 - RNA, 21 nt, Human
cccaggauguaggaaggagcc

SEQ ID NO: 715515 - RNA, 20 nt, Human
cccaugcccagugcagcuac

SEQ ID NO: 715516 - RNA, 18 nt, Human
ccuaaaauuucaaagcac

SEQ ID NO: 715517 - RNA, 23 nt, Human
ccugaugggagcugccacacccc

SEQ ID NO: 715518 - RNA, 21 nt, Human
ccugcagagaaaugcuucuau

SEQ ID NO: 715519 - RNA, 22 nt, Human
ccuggggcggcgggcuccgggc

SEQ ID NO: 715520 - RNA, 27 nt, Human
ccuucagaaaagcaaucccugguccac

SEQ ID NO: 715521 - RNA, 18 nt, Human
ccuuuguuuggcccauag

SEQ ID NO: 715522 - RNA, 19 nt, Human
cggcgggcuccgggcuccg

SEQ ID NO: 715523 - RNA, 18 nt, Human
cgggcuccgggcuccgcu

SEQ ID NO: 715524 - RNA, 22 nt, Human
cuaaaaggacacucuaaauuca

SEQ ID NO: 715525 - RNA, 22 nt, Human
cuaacacauuuaaauucucaca

SEQ ID NO: 715526 - RNA, 24 nt, Human
cuacaggccaccauuauugguugc

SEQ ID NO: 715527 - RNA, 21 nt, Human
cucaugauacagcuucuggga

SEQ ID NO: 715528 - RNA, 23 nt, Human
cucaugauacagcuucugggaag

SEQ ID NO: 715529 - RNA, 23 nt, Human
cucucuugucgucuuucuccacc

SEQ ID NO: 715530 - RNA, 18 nt, Human
cugaaccacccaguacug

SEQ ID NO: 715531 - RNA, 18 nt, Human
cugcucaaaacccaacaa

SEQ ID NO: 715532 - RNA, 19 nt, Human
cugcugaaccacccaguac

SEQ ID NO: 715533 - RNA, 18 nt, Human
cuggcuucagaaaaggag

SEQ ID NO: 715534 - RNA, 22 nt, Human
cugugagauucaagguggaaca

SEQ ID NO: 715535 - RNA, 20 nt, Human
cuuauagaccaccuccagac

SEQ ID NO: 715536 - RNA, 24 nt, Human
cuucaaaagaauuugcuuuucccg

SEQ ID NO: 715537 - RNA, 22 nt, Human
cuuuugccaggcuguaccaugc

SEQ ID NO: 715538 - RNA, 24 nt, Human
gaaaagcaaucccugguccacaaa

SEQ ID NO: 715539 - RNA, 18 nt, Human
gaagcaaaguaauuugcc

SEQ ID NO: 715540 - RNA, 19 nt, Human
gaaggcagcuccugggaca

SEQ ID NO: 715541 - RNA, 22 nt, Human
gaaucuaaauagucaagaguuc

SEQ ID NO: 715542 - RNA, 24 nt, Human
gacuaggacaucacaauuguggug

SEQ ID NO: 715543 - RNA, 26 nt, Human
gagcagcuuucuguaucaucuugcuu

SEQ ID NO: 715544 - RNA, 23 nt, Human
gaggccacggaggguccccuuga

SEQ ID NO: 715545 - RNA, 24 nt, Human
gcaacaaaacaguaacuuggagga

SEQ ID NO: 715546 - RNA, 24 nt, Human
gccccaccuaaaaggacacucuaa

SEQ ID NO: 715547 - RNA, 23 nt, Human
gcgaaggugaaaucacucaguga

SEQ ID NO: 715548 - RNA, 19 nt, Human
gcgcagccacaucagcaga

SEQ ID NO: 715549 - RNA, 20 nt, Human
gcggcgggcuccgggcuccg

SEQ ID NO: 715550 - RNA, 25 nt, Human
gcucaaaacccaacaaccuauuucc

SEQ ID NO: 715551 - RNA, 24 nt, Human
ggaagaagggcacuugggaugggg

SEQ ID NO: 715552 - RNA, 23 nt, Human
ggaagcaaaguaauuugccuggu

SEQ ID NO: 715553 - RNA, 19 nt, Human
ggaguagcugagagcuuga

SEQ ID NO: 715554 - RNA, 19 nt, Human
ggauacauguuacacugca

SEQ ID NO: 715555 - RNA, 22 nt, Human
gggaaagacuaagacuucaaaa

SEQ ID NO: 715556 - RNA, 22 nt, Human
gggaagacagcuucuucaggaa

SEQ ID NO: 715557 - RNA, 19 nt, Human
ggugugaggagugggggga

SEQ ID NO: 715558 - RNA, 19 nt, Human
gucccuuucuuccuuccaa

SEQ ID NO: 715559 - RNA, 19 nt, Human
gugaaagcccaggccaaac

SEQ ID NO: 715560 - RNA, 19 nt, Human
gugaagcucuuagcagcua

SEQ ID NO: 715561 - RNA, 21 nt, Human
guggaacugugccauagggcc

SEQ ID NO: 715562 - RNA, 26 nt, Human
guggaagcagcucugcaguccaccac

SEQ ID NO: 715563 - RNA, 24 nt, Human
uaacagccugcucaaaacccaaca

SEQ ID NO: 715564 - RNA, 24 nt, Human
uaacagggcucgguccccucaaaa

SEQ ID NO: 715565 - RNA, 18 nt, Human
uaagcucccaccaccacc

SEQ ID NO: 715566 - RNA, 25 nt, Human
uaaguggaagcagcucugcagucca

SEQ ID NO: 715567 - RNA, 20 nt, Human
uacaggccaccauuauuggu

SEQ ID NO: 715568 - RNA, 21 nt, Human
uaccaccagaccauccuuagc

SEQ ID NO: 715569 - RNA, 20 nt, Human
uaccuaaaauuucaaagcac

SEQ ID NO: 715570 - RNA, 24 nt, Human
uacgggaagcauaagcuugugcug

SEQ ID NO: 715571 - RNA, 22 nt, Human
uacugccuucagaaaagcaauc

SEQ ID NO: 715572 - RNA, 19 nt, Human
uagccaagacagcucucaa

SEQ ID NO: 715573 - RNA, 21 nt, Human
uaggcccaacuggugcucucc

SEQ ID NO: 715574 - RNA, 18 nt, Human
uaguaaaggaaccccaca

SEQ ID NO: 715575 - RNA, 23 nt, Human
ucaaaagaauuugcuuuucccgc

SEQ ID NO: 715576 - RNA, 26 nt, Human
ucaaacaggagagugguuuguuuugc

SEQ ID NO: 715577 - RNA, 23 nt, Human
ucaaagcaccuccaagaaugaaa

SEQ ID NO: 715578 - RNA, 18 nt, Human
ucacacuggaagaagggc

SEQ ID NO: 715579 - RNA, 22 nt, Human
ucacuucccagauugcugauac

SEQ ID NO: 715580 - RNA, 18 nt, Human
ucagaaaaggaggccaca

SEQ ID NO: 715581 - RNA, 19 nt, Human
ucagaaaaggaggccacau

SEQ ID NO: 715582 - RNA, 25 nt, Human
uccacgugcuuccuuccuaaggccg

SEQ ID NO: 715583 - RNA, 18 nt, Human
uccauggccuuuguuugg

SEQ ID NO: 715584 - RNA, 22 nt, Human
uccauggccuuuguuuggccca

SEQ ID NO: 715585 - RNA, 22 nt, Human
ucccaaugcuaagcccaucugg

SEQ ID NO: 715586 - RNA, 23 nt, Human
ucccaccaccaccccaugcccag

SEQ ID NO: 715587 - RNA, 18 nt, Human
uccgcucugcggugcuga

SEQ ID NO: 715588 - RNA, 20 nt, Human
uccgcucugcggugcugagg

SEQ ID NO: 715589 - RNA, 19 nt, Human
uccuuuucuuucccuccuu

SEQ ID NO: 715590 - RNA, 18 nt, Human
ucugaaaagauacacaaa

SEQ ID NO: 715591 - RNA, 18 nt, Human
ucugcacaagcaugcuca

SEQ ID NO: 715592 - RNA, 23 nt, Human
ucugcacaagcaugcucagcccc

SEQ ID NO: 715593 - RNA, 19 nt, Human
ucugccccccagaagacac

SEQ ID NO: 715594 - RNA, 18 nt, Human
ucuguccuugaauaugag

SEQ ID NO: 715595 - RNA, 19 nt, Human
ucuuccuuuucuuucccuc

SEQ ID NO: 715596 - RNA, 19 nt, Human
ugaaaagccacggcuacgg

SEQ ID NO: 715597 - RNA, 25 nt, Human
ugaaaagccacggcuacgggaagca

SEQ ID NO: 715598 - RNA, 19 nt, Human
ugaaaggaggcuucugugu

SEQ ID NO: 715599 - RNA, 21 nt, Human
ugacaacacacacaagagccc

SEQ ID NO: 715600 - RNA, 20 nt, Human
ugagggaaagacuaagacuu

SEQ ID NO: 715601 - RNA, 26 nt, Human
ugauucacccaauaguaaaggaaccc

SEQ ID NO: 715602 - RNA, 19 nt, Human
ugcggugcugaggcugcgg

SEQ ID NO: 715603 - RNA, 20 nt, Human
ugcggugcugaggcugcggc

SEQ ID NO: 715604 - RNA, 22 nt, Human
ugcugguaauuuaguaaggugg

SEQ ID NO: 715605 - RNA, 18 nt, Human
uggaagaagggcacuugg

SEQ ID NO: 715606 - RNA, 18 nt, Human
uggcaggaaugguggggc

SEQ ID NO: 715607 - RNA, 22 nt, Human
uggcaggaaugguggggccuga

SEQ ID NO: 715608 - RNA, 18 nt, Human
ugggagcugccacacccc

SEQ ID NO: 715609 - RNA, 21 nt, Human
ugggaugacaucagcuaggaa

SEQ ID NO: 715610 - RNA, 19 nt, Human
ugguggggccugaacuggu

SEQ ID NO: 715611 - RNA, 20 nt, Human
ugguggggccugaacuggua

SEQ ID NO: 715612 - RNA, 25 nt, Human
ugugcugcuguguggggagagcugc

SEQ ID NO: 715613 - RNA, 19 nt, Human
uguguccauugccacugaa

SEQ ID NO: 715614 - RNA, 18 nt, Human
uguguggggagagcugcc

SEQ ID NO: 715615 - RNA, 26 nt, Human
uuaacccugucacuucccagauugcu

SEQ ID NO: 715616 - RNA, 18 nt, Human
uuaaccugaaagaaaccg

SEQ ID NO: 715617 - RNA, 21 nt, Human
uuaaccugaaagaaaccgcua

SEQ ID NO: 715618 - RNA, 22 nt, Human
uuaacuuucucauuuuacucaa

SEQ ID NO: 715619 - RNA, 19 nt, Human
uucauguaacaagcauuuu

SEQ ID NO: 715620 - RNA, 21 nt, Human
uucccaaauaccaccagacca

SEQ ID NO: 715621 - RNA, 19 nt, Human
uuccuaaggcugagagcuc

SEQ ID NO: 715622 - RNA, 22 nt, Human
uucuaccuaaaauuucaaagca

SEQ ID NO: 715623 - RNA, 18 nt, Human
uucuuccuuuucuuuccc

SEQ ID NO: 715624 - RNA, 19 nt, Human
uugccaggcuguaccaugc

SEQ ID NO: 715625 - RNA, 21 nt, Human
uugccauuaacucugucagcu

SEQ ID NO: 715626 - RNA, 23 nt, Human
uugcugguaauuuaguaaggugg

SEQ ID NO: 715627 - RNA, 23 nt, Human
uugguaacuagacugggaaucau

SEQ ID NO: 715628 - RNA, 24 nt, Human
uugguagaaaaaaagaauguguuc

SEQ ID NO: 715629 - RNA, 20 nt, Human
uugguucccacgagaaaucu

SEQ ID NO: 715630 - RNA, 19 nt, Human
uuuacauagccacuuggaa

SEQ ID NO: 715631 - RNA, 20 nt, Human
uuuucccaaauaccaccaga

SEQ ID NO: 715632 - RNA, 19 nt, Human
aagccaccuacuccacuca

SEQ ID NO: 715633 - RNA, 18 nt, Human
aaggaaguggaggcgagg

SEQ ID NO: 715634 - RNA, 22 nt, Human
aauguggguacaggaagagcaa

SEQ ID NO: 715635 - RNA, 21 nt, Human
acaccgcaggccccacggaac

SEQ ID NO: 715636 - RNA, 28 nt, Human
acccaggaccuccacccugacccacacc

SEQ ID NO: 715637 - RNA, 21 nt, Human
aggaagagcaagagagaaaug

SEQ ID NO: 715638 - RNA, 22 nt, Human
aggagccccggccccgcggccc

SEQ ID NO: 715639 - RNA, 20 nt, Human
aggccccuagucaagacccu

SEQ ID NO: 715640 - RNA, 19 nt, Human
agggaaaggaggaagggga

SEQ ID NO: 715641 - RNA, 20 nt, Human
agggaaaggaggaaggggau

SEQ ID NO: 715642 - RNA, 23 nt, Human
agguccccuggauagcucugccu

SEQ ID NO: 715643 - RNA, 19 nt, Human
agucccuguacaacagccu

SEQ ID NO: 715644 - RNA, 21 nt, Human
caagccccggggagcucgagg

SEQ ID NO: 715645 - RNA, 22 nt, Human
caagccccggggagcucgagga

SEQ ID NO: 715646 - RNA, 19 nt, Human
cacauggccaauucccagg

SEQ ID NO: 715647 - RNA, 18 nt, Human
cacccaggaccuccaccc

SEQ ID NO: 715648 - RNA, 25 nt, Human
cacccaggaccuccacccugacccc

SEQ ID NO: 715649 - RNA, 27 nt, Human
cacccugacccacaccgcaggccccag

SEQ ID NO: 715650 - RNA, 19 nt, Human
caccgguuuggcggcugca

SEQ ID NO: 715651 - RNA, 22 nt, Human
cacuccugaccccuggaggguu

SEQ ID NO: 715652 - RNA, 20 nt, Human
cagcagcaguggccagggaa

SEQ ID NO: 715653 - RNA, 18 nt, Human
cagcaguggccagggaaa

SEQ ID NO: 715654 - RNA, 22 nt, Human
cagccccucucgcuuccccucc

SEQ ID NO: 715655 - RNA, 18 nt, Human
cagucgugacagcagcaa

SEQ ID NO: 715656 - RNA, 20 nt, Human
cauggccaauucccaggccc

SEQ ID NO: 715657 - RNA, 25 nt, Human
cauuaaacauaccgugucccccaag

SEQ ID NO: 715658 - RNA, 23 nt, Human
ccacaccgcaggccccacggaac

SEQ ID NO: 715659 - RNA, 24 nt, Human
ccacaccgcaggccccacggaacc

SEQ ID NO: 715660 - RNA, 24 nt, Human
ccacccaggccccuagucaaaggc

SEQ ID NO: 715661 - RNA, 18 nt, Human
ccaggccccuagucaaag

SEQ ID NO: 715662 - RNA, 23 nt, Human
ccagucgugacagcagcaacaag

SEQ ID NO: 715663 - RNA, 24 nt, Human
cccaccaugcucagggaauggaag

SEQ ID NO: 715664 - RNA, 23 nt, Human
cccacggaacccaccagcuacga

SEQ ID NO: 715665 - RNA, 25 nt, Human
cccacggaacccaccagcuacgagc

SEQ ID NO: 715666 - RNA, 22 nt, Human
ccccgcccggcgacacacggcg

SEQ ID NO: 715667 - RNA, 23 nt, Human
ccccgcggccccgccccucgggg

SEQ ID NO: 715668 - RNA, 23 nt, Human
cccugacccacaccgcaggcccc

SEQ ID NO: 715669 - RNA, 27 nt, Human
cccugacccacaccgcaggccccacgg

SEQ ID NO: 715670 - RNA, 20 nt, Human
cccugggucccaccaugcuc

SEQ ID NO: 715671 - RNA, 20 nt, Human
ccgcaggccccacggaaccc

SEQ ID NO: 715672 - RNA, 21 nt, Human
ccgcaggccccacggaaccca

SEQ ID NO: 715673 - RNA, 22 nt, Human
ccgcugucggcgagaggcggcu

SEQ ID NO: 715674 - RNA, 21 nt, Human
ccggccccgcggccccgcccg

SEQ ID NO: 715675 - RNA, 19 nt, Human
ccucaaagcuuggggugga

SEQ ID NO: 715676 - RNA, 22 nt, Human
ccuccacccugacccacaccgc

SEQ ID NO: 715677 - RNA, 18 nt, Human
ccuccauuaaacauaccg

SEQ ID NO: 715678 - RNA, 22 nt, Human
ccugacccacaccgcaggcccc

SEQ ID NO: 715679 - RNA, 22 nt, Human
ccugaccccuggaggguugaga

SEQ ID NO: 715680 - RNA, 18 nt, Human
ccugggucccaccaugcu

SEQ ID NO: 715681 - RNA, 21 nt, Human
cgacagccccucucgcuuccc

SEQ ID NO: 715682 - RNA, 21 nt, Human
cgcaggcuccucaccgaugcc

SEQ ID NO: 715683 - RNA, 24 nt, Human
cgcggagucgcgacagccccucuc

SEQ ID NO: 715684 - RNA, 18 nt, Human
cggcugcaccggcaguag

SEQ ID NO: 715685 - RNA, 19 nt, Human
cuccacccugacccacacc

SEQ ID NO: 715686 - RNA, 22 nt, Human
cuuauggcccagucugcuuccc

SEQ ID NO: 715687 - RNA, 20 nt, Human
gagcucgaggaagacggcag

SEQ ID NO: 715688 - RNA, 18 nt, Human
gaggacccugggucccac

SEQ ID NO: 715689 - RNA, 18 nt, Human
gcagcaguggccagggaa

SEQ ID NO: 715690 - RNA, 23 nt, Human
gccuccccuccauuaaacauacc

SEQ ID NO: 715691 - RNA, 23 nt, Human
gcuggcgcacucgcgcuccccgc

SEQ ID NO: 715692 - RNA, 23 nt, Human
ggaaaaaaagccaccuacuccac

SEQ ID NO: 715693 - RNA, 22 nt, Human
ggaagagggagggaaaaaaagc

SEQ ID NO: 715694 - RNA, 23 nt, Human
ggaccuccacccugacccacacc

SEQ ID NO: 715695 - RNA, 18 nt, Human
ggagaaucaagagcccaa

SEQ ID NO: 715696 - RNA, 21 nt, Human
ggccccacggaacccaccagc

SEQ ID NO: 715697 - RNA, 20 nt, Human
ggccggaggagcgugcaagc

SEQ ID NO: 715698 - RNA, 21 nt, Human
ggcugaaaccagggcuccuca

SEQ ID NO: 715699 - RNA, 19 nt, Human
ggucccaggcccagagagg

SEQ ID NO: 715700 - RNA, 24 nt, Human
guccugaagggcaagaauaggagc

SEQ ID NO: 715701 - RNA, 21 nt, Human
gugacagcagcaacaaggaag

SEQ ID NO: 715702 - RNA, 18 nt, Human
guggccagggaaaggagg

SEQ ID NO: 715703 - RNA, 18 nt, Human
uaaacaaaccuugggcac

SEQ ID NO: 715704 - RNA, 19 nt, Human
ucagaggcccuccccacag

SEQ ID NO: 715705 - RNA, 19 nt, Human
ucagggagaaucaagagcc

SEQ ID NO: 715706 - RNA, 23 nt, Human
ucccaggcccagagaggauauug

SEQ ID NO: 715707 - RNA, 20 nt, Human
ucccaggcccuaaacaaacc

SEQ ID NO: 715708 - RNA, 18 nt, Human
ucccggaggcgcuuggcc

SEQ ID NO: 715709 - RNA, 24 nt, Human
ucccuccucagcuucccccaaaug

SEQ ID NO: 715710 - RNA, 18 nt, Human
ucccuguacaacagccug

SEQ ID NO: 715711 - RNA, 24 nt, Human
uccuacugcugcuaggucgucguc

SEQ ID NO: 715712 - RNA, 23 nt, Human
uccucagcuucccccaaaugugg

SEQ ID NO: 715713 - RNA, 29 nt, Human
ucucucggggccagaagagguuuccuggu

SEQ ID NO: 715714 - RNA, 21 nt, Human
ugaagggcaagaauaggagca

SEQ ID NO: 715715 - RNA, 19 nt, Human
ugacagcagcaacaaggaa

SEQ ID NO: 715716 - RNA, 25 nt, Human
ugacagcagcaacaaggaaguggag

SEQ ID NO: 715717 - RNA, 21 nt, Human
ugccucaggcaagggccuuac

SEQ ID NO: 715718 - RNA, 24 nt, Human
uggaagcucuuuggucagucccag

SEQ ID NO: 715719 - RNA, 22 nt, Human
uggaggguugagaacugaggac

SEQ ID NO: 715720 - RNA, 22 nt, Human
uggccagggaaaggaggaaggg

SEQ ID NO: 715721 - RNA, 19 nt, Human
uggcccggcggcuggacga

SEQ ID NO: 715722 - RNA, 25 nt, Human
uggcugacuguuccucccuccucag

SEQ ID NO: 715723 - RNA, 23 nt, Human
uucccaggcccuaaacaaaccuu

SEQ ID NO: 715724 - RNA, 21 nt, Human
uuucccucagccuccccucca

SEQ ID NO: 715725 - RNA, 27 nt, Human
agacagaaaaaaugcaguuguaugagg

SEQ ID NO: 715726 - RNA, 19 nt, Human
auaauagacagaaaaaaug

SEQ ID NO: 715727 - RNA, 22 nt, Human
auugaagaaguaggaaaaacag

SEQ ID NO: 715728 - RNA, 24 nt, Human
uaaggacaauccuuccauugaaga

SEQ ID NO: 715729 - RNA, 19 nt, Human
uagacagaaaaaaugcagu

SEQ ID NO: 715730 - RNA, 26 nt, Human
uagacagaaaaaaugcaguuguauga

SEQ ID NO: 715731 - RNA, 18 nt, Human
uauuuuacugaaaaucug

SEQ ID NO: 715732 - RNA, 20 nt, Human
uauuuuacugaaaaucugga

SEQ ID NO: 715733 - RNA, 20 nt, Human
ugaagaaguaggaaaaacag

SEQ ID NO: 715734 - RNA, 18 nt, Human
ugagauauaucuuacuca

SEQ ID NO: 715735 - RNA, 20 nt, Human
uucccauaauagacagaaaa

SEQ ID NO: 715736 - RNA, 19 nt, Human
uuuagaacauaaaacuaaa

SEQ ID NO: 715737 - RNA, 18 nt, Human
aaccauggucuccaguuc

SEQ ID NO: 715738 - RNA, 19 nt, Human
aagcacaggcgugcacacg

SEQ ID NO: 715739 - RNA, 22 nt, Human
aagcagacuuuuuuuuuuuuuu

SEQ ID NO: 715740 - RNA, 20 nt, Human
acaauccuuauugaagcuuu

SEQ ID NO: 715741 - RNA, 21 nt, Human
acagagucuacccuaaacucg

SEQ ID NO: 715742 - RNA, 23 nt, Human
agcacaggcgugcacacgcccuu

SEQ ID NO: 715743 - RNA, 21 nt, Human
agccgccccugcccccgcccg

SEQ ID NO: 715744 - RNA, 27 nt, Human
agcgacagggaccagccggcugcggga

SEQ ID NO: 715745 - RNA, 22 nt, Human
agcgcaggggcagcgacaggga

SEQ ID NO: 715746 - RNA, 20 nt, Human
aggcaaaauuaugcaaugug

SEQ ID NO: 715747 - RNA, 21 nt, Human
caaagcagacuuuuuuuuuuu

SEQ ID NO: 715748 - RNA, 21 nt, Human
caagccccuuacggagccaug

SEQ ID NO: 715749 - RNA, 24 nt, Human
cacaaagcagacuuuuuuuuuuuu

SEQ ID NO: 715750 - RNA, 23 nt, Human
cacacaauccuuauugaagcuuu

SEQ ID NO: 715751 - RNA, 24 nt, Human
cacacgcccuugcacaugcaccac

SEQ ID NO: 715752 - RNA, 20 nt, Human
cacaugcaccacagugaggu

SEQ ID NO: 715753 - RNA, 20 nt, Human
caccagacucccacuucuaa

SEQ ID NO: 715754 - RNA, 21 nt, Human
ccacaaguaaaagacuucaca

SEQ ID NO: 715755 - RNA, 23 nt, Human
ccaccagacucccacuucuaaag

SEQ ID NO: 715756 - RNA, 23 nt, Human
ccccauguguuggagcugcugcc

SEQ ID NO: 715757 - RNA, 26 nt, Human
ccccuuacggagccauggauaggaau

SEQ ID NO: 715758 - RNA, 19 nt, Human
ccgcuggacuucuugacua

SEQ ID NO: 715759 - RNA, 18 nt, Human
ccuaaacucguuugugcc

SEQ ID NO: 715760 - RNA, 19 nt, Human
cuccgcccgggcggcugcg

SEQ ID NO: 715761 - RNA, 23 nt, Human
gaccauauugaucuggcacuuaa

SEQ ID NO: 715762 - RNA, 19 nt, Human
gacugcacugggaccucua

SEQ ID NO: 715763 - RNA, 20 nt, Human
gacuuuuuuuuuuuuuugga

SEQ ID NO: 715764 - RNA, 22 nt, Human
gagcgcagccggagccccgccg

SEQ ID NO: 715765 - RNA, 23 nt, Human
gagcugcugaggauggagcuggc

SEQ ID NO: 715766 - RNA, 28 nt, Human
gauggcaaagcacaggcgucacagaggu

SEQ ID NO: 715767 - RNA, 18 nt, Human
gcacaggcgugcacacgc

SEQ ID NO: 715768 - RNA, 22 nt, Human
gcacaggcgugcacacgcccuu

SEQ ID NO: 715769 - RNA, 21 nt, Human
gcacuauuauggugaguuucu

SEQ ID NO: 715770 - RNA, 21 nt, Human
gccucaagccccuuacggagc

SEQ ID NO: 715771 - RNA, 19 nt, Human
gcggcugcggcugaaugga

SEQ ID NO: 715772 - RNA, 21 nt, Human
gcgugcacacgcccuugcaca

SEQ ID NO: 715773 - RNA, 25 nt, Human
gcgugcacacgcccuugcacaugca

SEQ ID NO: 715774 - RNA, 22 nt, Human
ggagccgccccugcccccgccc

SEQ ID NO: 715775 - RNA, 23 nt, Human
gucauccuuaaggauaugauucu

SEQ ID NO: 715776 - RNA, 21 nt, Human
uaaaaaaauaucauacauuag

SEQ ID NO: 715777 - RNA, 21 nt, Human
uacaaguaacuuuucugcuac

SEQ ID NO: 715778 - RNA, 24 nt, Human
uauagugaguaaggagguguuuac

SEQ ID NO: 715779 - RNA, 20 nt, Human
ucacaaagcagacuuuuuuu

SEQ ID NO: 715780 - RNA, 23 nt, Human
uccacaaguaaaagacuucacaa

SEQ ID NO: 715781 - RNA, 20 nt, Human
uccccuuggcggcggcggcg

SEQ ID NO: 715782 - RNA, 22 nt, Human
ucccggaguggaagcucagcuu

SEQ ID NO: 715783 - RNA, 18 nt, Human
uccgcaccgggcgggugg

SEQ ID NO: 715784 - RNA, 20 nt, Human
ucuauauugggacgccgcug

SEQ ID NO: 715785 - RNA, 20 nt, Human
ucuggacagacugcacuggg

SEQ ID NO: 715786 - RNA, 22 nt, Human
ucuggacagacugcacugggac

SEQ ID NO: 715787 - RNA, 19 nt, Human
ugaauggauccaauauggc

SEQ ID NO: 715788 - RNA, 21 nt, Human
ugaauggauccaauauggcca

SEQ ID NO: 715789 - RNA, 20 nt, Human
uggaacagcuguuuacaaca

SEQ ID NO: 715790 - RNA, 18 nt, Human
uggcggcggcggcgggag

SEQ ID NO: 715791 - RNA, 20 nt, Human
ugggcugggacgagcgcagg

SEQ ID NO: 715792 - RNA, 18 nt, Human
ugguccugagcuggcccc

SEQ ID NO: 715793 - RNA, 19 nt, Human
uuccaccagacucccacuu

SEQ ID NO: 715794 - RNA, 19 nt, Human
uuugauguucccugaugga

SEQ ID NO: 715795 - RNA, 23 nt, Human
uuuuuuuuuuuuuuggucccgga

SEQ ID NO: 715796 - RNA, 24 nt, Human
aaaaaaaaaagaaaaaagaaaaag

SEQ ID NO: 715797 - RNA, 21 nt, Human
aaaaaaagaacaaagaaaaca

SEQ ID NO: 715798 - RNA, 21 nt, Human
aaaaaacacucagacaaaucc

SEQ ID NO: 715799 - RNA, 19 nt, Human
aaaaaauagaaccagcuau

SEQ ID NO: 715800 - RNA, 22 nt, Human
aaaaagaaaaaagaaaaagcaa

SEQ ID NO: 715801 - RNA, 23 nt, Human
aaaagaaaaagcaacuggaagag

SEQ ID NO: 715802 - RNA, 18 nt, Human
aaacaaaagagagagaac

SEQ ID NO: 715803 - RNA, 18 nt, Human
aaacacacagagacaaga

SEQ ID NO: 715804 - RNA, 19 nt, Human
aaacaucgcaacaaauuuc

SEQ ID NO: 715805 - RNA, 19 nt, Human
aaaggucaacaagcugaag

SEQ ID NO: 715806 - RNA, 20 nt, Human
aaauacacaucuauuuacaa

SEQ ID NO: 715807 - RNA, 19 nt, Human
aacauggugaaaccccauc

SEQ ID NO: 715808 - RNA, 20 nt, Human
aacauggugaaaccccaucu

SEQ ID NO: 715809 - RNA, 21 nt, Human
aacauggugaaaccccaucuc

SEQ ID NO: 715810 - RNA, 21 nt, Human
aacauggugaaaccccaucuc

SEQ ID NO: 715811 - RNA, 21 nt, Human
aaccaaugacugcuccagaga

SEQ ID NO: 715812 - RNA, 20 nt, Human
aaccaguacccaaaccaaac

SEQ ID NO: 715813 - RNA, 23 nt, Human
aaccaguacccaaaccaaacaca

SEQ ID NO: 715814 - RNA, 19 nt, Human
aaccauuuuuauccauccu

SEQ ID NO: 715815 - RNA, 23 nt, Human
aacuccuaaauaaaaguaauuuu

SEQ ID NO: 715816 - RNA, 21 nt, Human
aacuccuacggugaccuugac

SEQ ID NO: 715817 - RNA, 21 nt, Human
aacuggaggccgggcguggug

SEQ ID NO: 715818 - RNA, 19 nt, Human
aagagauuggggggagccu

SEQ ID NO: 715819 - RNA, 23 nt, Human
aagagggaugaauauaacuuucu

SEQ ID NO: 715820 - RNA, 18 nt, Human
aagcaacuggaagagauu

SEQ ID NO: 715821 - RNA, 21 nt, Human
aagccgaggugggcagaucac

SEQ ID NO: 715822 - RNA, 18 nt, Human
aaggaaaagcacgagugu

SEQ ID NO: 715823 - RNA, 18 nt, Human
aagggcccggccgcguuc

SEQ ID NO: 715824 - RNA, 20 nt, Human
aagggguccaguggacacug

SEQ ID NO: 715825 - RNA, 22 nt, Human
aagggguccaguggacacugcu

SEQ ID NO: 715826 - RNA, 20 nt, Human
aauaaagcaccaaccaauga

SEQ ID NO: 715827 - RNA, 24 nt, Human
aaucgcucgaacccgggaggcaga

SEQ ID NO: 715828 - RNA, 18 nt, Human
aauuagccaagcaugaug

SEQ ID NO: 715829 - RNA, 19 nt, Human
acagaagcaucauuaagcc

SEQ ID NO: 715830 - RNA, 24 nt, Human
accccaucucuacuaaaaauacaa

SEQ ID NO: 715831 - RNA, 19 nt, Human
acccucagcuuauucccag

SEQ ID NO: 715832 - RNA, 24 nt, Human
accugaggucaggaguucgaggcc

SEQ ID NO: 715833 - RNA, 20 nt, Human
accugcuggcuuggucacuu

SEQ ID NO: 715834 - RNA, 19 nt, Human
acugcacuacagccugggu

SEQ ID NO: 715835 - RNA, 24 nt, Human
acugcacuacagccugggugacag

SEQ ID NO: 715836 - RNA, 26 nt, Human
acugcacuacagccugggugacagag

SEQ ID NO: 715837 - RNA, 24 nt, Human
agacaaauccacaagaagugggca

SEQ ID NO: 715838 - RNA, 22 nt, Human
agacuggaguuuguuacugcaa

SEQ ID NO: 715839 - RNA, 24 nt, Human
agacuggaguuuguuacugcaaac

SEQ ID NO: 715840 - RNA, 18 nt, Human
agagacugcagugagcug

SEQ ID NO: 715841 - RNA, 24 nt, Human
agagacugcagugagcugagauua

SEQ ID NO: 715842 - RNA, 23 nt, Human
agagcaaaaaaacauaacaaacc

SEQ ID NO: 715843 - RNA, 28 nt, Human
agauaacacaaagaaaggucaacaagcu

SEQ ID NO: 715844 - RNA, 23 nt, Human
agauagaucugaacucauagcua

SEQ ID NO: 715845 - RNA, 23 nt, Human
agaucaccugaggucaggaguuc

SEQ ID NO: 715846 - RNA, 21 nt, Human
agcaaaaaaacauaacaaacc

SEQ ID NO: 715847 - RNA, 20 nt, Human
agcaacuucucccccagaug

SEQ ID NO: 715848 - RNA, 24 nt, Human
agcacuuuaggaagccgagguggg

SEQ ID NO: 715849 - RNA, 22 nt, Human
agccuggccaacauggugaaac

SEQ ID NO: 715850 - RNA, 24 nt, Human
agccuggccaacauggugaaaccc

SEQ ID NO: 715851 - RNA, 22 nt, Human
agccugggugacagaguaagac

SEQ ID NO: 715852 - RNA, 24 nt, Human
agccugggugacagaguaagaccu

SEQ ID NO: 715853 - RNA, 18 nt, Human
agcuaggaccgugcaugc

SEQ ID NO: 715854 - RNA, 22 nt, Human
aggaagccgaggugggcagauc

SEQ ID NO: 715855 - RNA, 25 nt, Human
aggcaaauaaacacacagagacaag

SEQ ID NO: 715856 - RNA, 26 nt, Human
aggcaaauaaacacacagagacaaga

SEQ ID NO: 715857 - RNA, 20 nt, Human
aggcagagacugcagugagc

SEQ ID NO: 715858 - RNA, 24 nt, Human
aggcagagacugcagugagcugag

SEQ ID NO: 715859 - RNA, 18 nt, Human
aggcaggagaaucgcucg

SEQ ID NO: 715860 - RNA, 24 nt, Human
aggcaggagaaucgcucgaacccg

SEQ ID NO: 715861 - RNA, 21 nt, Human
aggcagucuagccaagaccaa

SEQ ID NO: 715862 - RNA, 19 nt, Human
aggcaucacgucagggugg

SEQ ID NO: 715863 - RNA, 20 nt, Human
aggcugaggcaggagaaucg

SEQ ID NO: 715864 - RNA, 20 nt, Human
aggcugaggcaggagaaucg

SEQ ID NO: 715865 - RNA, 22 nt, Human
aggugggcagaucaccugaggu

SEQ ID NO: 715866 - RNA, 26 nt, Human
aggugggcagaucaccugaggucagg

SEQ ID NO: 715867 - RNA, 23 nt, Human
aucauuuauuaccagauuaucua

SEQ ID NO: 715868 - RNA, 18 nt, Human
augacugcuccagagaau

SEQ ID NO: 715869 - RNA, 24 nt, Human
auuaugccacugcacuacagccug

SEQ ID NO: 715870 - RNA, 23 nt, Human
auuuugcagaaaaacccauauuu

SEQ ID NO: 715871 - RNA, 22 nt, Human
caaaaaacacucagacaaaucc

SEQ ID NO: 715872 - RNA, 24 nt, Human
caaaaacccuacucaucucacuga

SEQ ID NO: 715873 - RNA, 26 nt, Human
caaaaucaucccaaaugcauucauaa

SEQ ID NO: 715874 - RNA, 22 nt, Human
caaagaaugaagacgcuucuua

SEQ ID NO: 715875 - RNA, 19 nt, Human
caaauaaacacacagagac

SEQ ID NO: 715876 - RNA, 24 nt, Human
caacauggugaaaccccaucucua

SEQ ID NO: 715877 - RNA, 22 nt, Human
caaccaaugacugcuccagaga

SEQ ID NO: 715878 - RNA, 20 nt, Human
caaccaguacccaaaccaaa

SEQ ID NO: 715879 - RNA, 22 nt, Human
caagaagugggcaacaugagcc

SEQ ID NO: 715880 - RNA, 18 nt, Human
caagacagcaacacuaga

SEQ ID NO: 715881 - RNA, 23 nt, Human
caccugaggucaggaguucgagg

SEQ ID NO: 715882 - RNA, 19 nt, Human
cacgccugcaaucccagca

SEQ ID NO: 715883 - RNA, 23 nt, Human
cacuacagccugggugacagagu

SEQ ID NO: 715884 - RNA, 23 nt, Human
cacugcacuacagccugggugac

SEQ ID NO: 715885 - RNA, 24 nt, Human
cacugcacuacagccugggugaca

SEQ ID NO: 715886 - RNA, 19 nt, Human
cacugcagagcaaaaaaac

SEQ ID NO: 715887 - RNA, 23 nt, Human
cacugcagagcaaaaaaacauaa

SEQ ID NO: 715888 - RNA, 22 nt, Human
cacugcuuuucccccacagaga

SEQ ID NO: 715889 - RNA, 19 nt, Human
cagaagagucuuuaaggaa

SEQ ID NO: 715890 - RNA, 24 nt, Human
cagaucaccugaggucaggaguuc

SEQ ID NO: 715891 - RNA, 27 nt, Human
cagaucaccugaggucaggaguucgag

SEQ ID NO: 715892 - RNA, 18 nt, Human
cagcaaccuuuuuuuguu

SEQ ID NO: 715893 - RNA, 24 nt, Human
cagcacuuuaggaagccgaggugg

SEQ ID NO: 715894 - RNA, 21 nt, Human
cagcaucaggaaaaugaaaac

SEQ ID NO: 715895 - RNA, 24 nt, Human
cagcuacucgggaggcugaggcag

SEQ ID NO: 715896 - RNA, 19 nt, Human
cauaaaccagauccacgug

SEQ ID NO: 715897 - RNA, 19 nt, Human
caucacgucaggguggugu

SEQ ID NO: 715898 - RNA, 18 nt, Human
caucauuaagcuucuauu

SEQ ID NO: 715899 - RNA, 22 nt, Human
caucccaaaugcauucauaaac

SEQ ID NO: 715900 - RNA, 20 nt, Human
cauuucacuacucauuaaca

SEQ ID NO: 715901 - RNA, 20 nt, Human
ccacugcacuacagccuggg

SEQ ID NO: 715902 - RNA, 20 nt, Human
ccacugcacuacagccuggg

SEQ ID NO: 715903 - RNA, 21 nt, Human
ccacugcacuacagccugggu

SEQ ID NO: 715904 - RNA, 23 nt, Human
ccacugcacuacagccuggguga

SEQ ID NO: 715905 - RNA, 24 nt, Human
ccacugcacuacagccugggugac

SEQ ID NO: 715906 - RNA, 22 nt, Human
cccgaucauaaaauaaguuacu

SEQ ID NO: 715907 - RNA, 23 nt, Human
ccuggccaacauggugaaacccc

SEQ ID NO: 715908 - RNA, 24 nt, Human
ccuggccaacauggugaaacccca

SEQ ID NO: 715909 - RNA, 20 nt, Human
ccugggugacagaguaagac

SEQ ID NO: 715910 - RNA, 21 nt, Human
ccuguagucccagcuacucgg

SEQ ID NO: 715911 - RNA, 22 nt, Human
ccuguagucccagcuacucggg

SEQ ID NO: 715912 - RNA, 23 nt, Human
ccuuccccaacaguucagcaccc

SEQ ID NO: 715913 - RNA, 19 nt, Human
ccuuucccacauaacuggg

SEQ ID NO: 715914 - RNA, 21 nt, Human
cgagaaccucacacacugcua

SEQ ID NO: 715915 - RNA, 24 nt, Human
cgaggccagccuggccaacauggu

SEQ ID NO: 715916 - RNA, 20 nt, Human
cgaggugggcagaucaccug

SEQ ID NO: 715917 - RNA, 24 nt, Human
cgaggugggcagaucaccugaggu

SEQ ID NO: 715918 - RNA, 22 nt, Human
cgcaacaaauuucuaaaaaaug

SEQ ID NO: 715919 - RNA, 23 nt, Human
cggaagaaggcgguggcggggcc

SEQ ID NO: 715920 - RNA, 24 nt, Human
cggcggcgccgagacucggucccc

SEQ ID NO: 715921 - RNA, 18 nt, Human
cggcggcggggccggcgg

SEQ ID NO: 715922 - RNA, 20 nt, Human
cucacacacugcuaugcucc

SEQ ID NO: 715923 - RNA, 22 nt, Human
cucacgccugcaaucccagcac

SEQ ID NO: 715924 - RNA, 24 nt, Human
cucacgccugcaaucccagcacuu

SEQ ID NO: 715925 - RNA, 22 nt, Human
cucagcuuauucccagggucca

SEQ ID NO: 715926 - RNA, 22 nt, Human
cugagcugcaauagaggcauca

SEQ ID NO: 715927 - RNA, 20 nt, Human
cugcagugagcugagauuau

SEQ ID NO: 715928 - RNA, 21 nt, Human
cugcagugagcugagauuaug

SEQ ID NO: 715929 - RNA, 23 nt, Human
cuggccaacauggugaaacccca

SEQ ID NO: 715930 - RNA, 23 nt, Human
cuuacaaucccaaacaaaaaccc

SEQ ID NO: 715931 - RNA, 20 nt, Human
cuuuggagcacagugauggc

SEQ ID NO: 715932 - RNA, 21 nt, Human
gaacacacucauaaugguaac

SEQ ID NO: 715933 - RNA, 21 nt, Human
gacagugagcaacuucucccc

SEQ ID NO: 715934 - RNA, 19 nt, Human
gacuggaccugccuguggc

SEQ ID NO: 715935 - RNA, 23 nt, Human
gagcacagugauggcaaaagugg

SEQ ID NO: 715936 - RNA, 24 nt, Human
gagcacagugauggcaaaaguggc

SEQ ID NO: 715937 - RNA, 23 nt, Human
gaggugggcagaucaccugaggu

SEQ ID NO: 715938 - RNA, 24 nt, Human
gaucaccugaggucaggaguucga

SEQ ID NO: 715939 - RNA, 19 nt, Human
gaucugguuaccaaaauca

SEQ ID NO: 715940 - RNA, 20 nt, Human
gcacugcagagcaaaaaaac

SEQ ID NO: 715941 - RNA, 23 nt, Human
gcagagcaaaaaaacauaacaaa

SEQ ID NO: 715942 - RNA, 24 nt, Human
gccaacauggugaaaccccaucuc

SEQ ID NO: 715943 - RNA, 24 nt, Human
gccacugcacuacagccuggguga

SEQ ID NO: 715944 - RNA, 23 nt, Human
gccgagacucgguccccaagggc

SEQ ID NO: 715945 - RNA, 24 nt, Human
gcucacaucacaguaaacuaccac

SEQ ID NO: 715946 - RNA, 18 nt, Human
ggagagcacuggcaggca

SEQ ID NO: 715947 - RNA, 20 nt, Human
ggaggcagagacugcaguga

SEQ ID NO: 715948 - RNA, 25 nt, Human
ggcagaucaccugaggucaggaguu

SEQ ID NO: 715949 - RNA, 20 nt, Human
ggcccggccgcguucgcccg

SEQ ID NO: 715950 - RNA, 24 nt, Human
ggcgcggcccgcgcccguuccccg

SEQ ID NO: 715951 - RNA, 21 nt, Human
ggcucacgccugcaaucccag

SEQ ID NO: 715952 - RNA, 21 nt, Human
gggcaggauggcgcuggagag

SEQ ID NO: 715953 - RNA, 23 nt, Human
gggcgugguggcucacgccugca

SEQ ID NO: 715954 - RNA, 24 nt, Human
gggcgugguggcucacgccugcaa

SEQ ID NO: 715955 - RNA, 20 nt, Human
gggcuuugggagucagagga

SEQ ID NO: 715956 - RNA, 18 nt, Human
ggggagccuuaugugcug

SEQ ID NO: 715957 - RNA, 18 nt, Human
gguccuaggggugccaca

SEQ ID NO: 715958 - RNA, 24 nt, Human
gguggcucacgccugcaaucccag

SEQ ID NO: 715959 - RNA, 22 nt, Human
ggugguguccagggcaggaugg

SEQ ID NO: 715960 - RNA, 20 nt, Human
guagaacacauaaugaaaug

SEQ ID NO: 715961 - RNA, 19 nt, Human
guauguaaacacaauguug

SEQ ID NO: 715962 - RNA, 25 nt, Human
gugcaagcaggagaacuccaguucu

SEQ ID NO: 715963 - RNA, 18 nt, Human
gugccuguagucccagcu

SEQ ID NO: 715964 - RNA, 18 nt, Human
guggcggggcccugcccc

SEQ ID NO: 715965 - RNA, 24 nt, Human
guggcuacagucacccuuccccaa

SEQ ID NO: 715966 - RNA, 21 nt, Human
uaaaaauacaaaaauuagcca

SEQ ID NO: 715967 - RNA, 22 nt, Human
uaaaaauagaaaacagcaaccu

SEQ ID NO: 715968 - RNA, 19 nt, Human
uaaacacacagagacaaga

SEQ ID NO: 715969 - RNA, 19 nt, Human
uaaacuagccuauuucccc

SEQ ID NO: 715970 - RNA, 21 nt, Human
uaaagaacacauccaguacca

SEQ ID NO: 715971 - RNA, 21 nt, Human
uaaagcaccaaccaaugacug

SEQ ID NO: 715972 - RNA, 21 nt, Human
uaaauuguacaaacaucgcaa

SEQ ID NO: 715973 - RNA, 19 nt, Human
uaaccauccccaaaugcau

SEQ ID NO: 715974 - RNA, 21 nt, Human
uaagcuucuauugggcuuucu

SEQ ID NO: 715975 - RNA, 18 nt, Human
uacaaucccaaacaaaaa

SEQ ID NO: 715976 - RNA, 22 nt, Human
uaccagauuaucuacccagaaa

SEQ ID NO: 715977 - RNA, 20 nt, Human
uaccagcacuuuuggagaag

SEQ ID NO: 715978 - RNA, 22 nt, Human
uacccuguggcuugcuguagca

SEQ ID NO: 715979 - RNA, 23 nt, Human
uaccuucucuagugcaagcagga

SEQ ID NO: 715980 - RNA, 18 nt, Human
uacugcaacagacuggag

SEQ ID NO: 715981 - RNA, 18 nt, Human
uacugcaacagacuggag

SEQ ID NO: 715982 - RNA, 21 nt, Human
uacuuugcaacuagaauacac

SEQ ID NO: 715983 - RNA, 24 nt, Human
uaggaagccgaggugggcagauca

SEQ ID NO: 715984 - RNA, 20 nt, Human
ucaccugaggucaggaguuc

SEQ ID NO: 715985 - RNA, 21 nt, Human
ucagauggaaauuuugcagaa

SEQ ID NO: 715986 - RNA, 21 nt, Human
ucagcuuauucccagggucca

SEQ ID NO: 715987 - RNA, 22 nt, Human
uccagggcaggauggcgcugga

SEQ ID NO: 715988 - RNA, 20 nt, Human
ucccaaacaaaaacccuacu

SEQ ID NO: 715989 - RNA, 24 nt, Human
uccccuuaaacugaucauuuaaau

SEQ ID NO: 715990 - RNA, 21 nt, Human
ucccuagaaaaaaaaugucug

SEQ ID NO: 715991 - RNA, 19 nt, Human
uccugcuauccacugcugc

SEQ ID NO: 715992 - RNA, 24 nt, Human
ucgggaggcugaggcaggagaauc

SEQ ID NO: 715993 - RNA, 24 nt, Human
ucuauuggcauuugucacccugga

SEQ ID NO: 715994 - RNA, 23 nt, Human
ucucuacuaaaaauacaaaaauu

SEQ ID NO: 715995 - RNA, 21 nt, Human
ugaaaaugacaccguacuuga

SEQ ID NO: 715996 - RNA, 19 nt, Human
ugaaaccccaucucuacua

SEQ ID NO: 715997 - RNA, 24 nt, Human
ugaauccaagacagcaacacuaga

SEQ ID NO: 715998 - RNA, 27 nt, Human
ugaauuuguuugcuugcccaaaauauu

SEQ ID NO: 715999 - RNA, 25 nt, Human
ugacaggggcagcuccuuggguccc

SEQ ID NO: 716000 - RNA, 22 nt, Human
ugaccagcccuuuacaaaaauu

SEQ ID NO: 716001 - RNA, 18 nt, Human
ugacuggaccugccugug

SEQ ID NO: 716002 - RNA, 21 nt, Human
ugagaacaaugccaauacugc

SEQ ID NO: 716003 - RNA, 23 nt, Human
ugagaacaaugccaauacugcca

SEQ ID NO: 716004 - RNA, 18 nt, Human
ugagaagucagauaagga

SEQ ID NO: 716005 - RNA, 24 nt, Human
ugagauuaugccacugcacuacag

SEQ ID NO: 716006 - RNA, 22 nt, Human
ugagcugagauuaugccacugc

SEQ ID NO: 716007 - RNA, 20 nt, Human
ugaggcaggagaaucgcucg

SEQ ID NO: 716008 - RNA, 24 nt, Human
ugaggcaggagaaucgcucgaacc

SEQ ID NO: 716009 - RNA, 25 nt, Human
ugaggcaggagaaucgcucgaaccc

SEQ ID NO: 716010 - RNA, 19 nt, Human
ugagguauuucaguuaaug

SEQ ID NO: 716011 - RNA, 21 nt, Human
ugaguugguggaaaugugggc

SEQ ID NO: 716012 - RNA, 21 nt, Human
ugaguugguggaaaugugggc

SEQ ID NO: 716013 - RNA, 24 nt, Human
ugaguugguggaaaugugggcguu

SEQ ID NO: 716014 - RNA, 19 nt, Human
ugaugcaguaccagcacuu

SEQ ID NO: 716015 - RNA, 24 nt, Human
ugauggugggugccuguaguccca

SEQ ID NO: 716016 - RNA, 21 nt, Human
ugauucucucuuuaccuucuc

SEQ ID NO: 716017 - RNA, 22 nt, Human
ugcauucauaaaccagauccac

SEQ ID NO: 716018 - RNA, 23 nt, Human
ugccuguagucccagcuacucgg

SEQ ID NO: 716019 - RNA, 24 nt, Human
ugccuguagucccagcuacucggg

SEQ ID NO: 716020 - RNA, 20 nt, Human
ugcuccagagaaugcccagc

SEQ ID NO: 716021 - RNA, 22 nt, Human
ugcugugggcuuuuauuuggug

SEQ ID NO: 716022 - RNA, 20 nt, Human
ugcuucuuuugguguucaca

SEQ ID NO: 716023 - RNA, 21 nt, Human
uggaaaaaauaaagccucuga

SEQ ID NO: 716024 - RNA, 23 nt, Human
uggaagagauuggggggagccuu

SEQ ID NO: 716025 - RNA, 19 nt, Human
uggagaagggugugguucu

SEQ ID NO: 716026 - RNA, 23 nt, Human
uggaggccgggcgugguggcuca

SEQ ID NO: 716027 - RNA, 24 nt, Human
uggccaacauggugaaaccccauc

SEQ ID NO: 716028 - RNA, 24 nt, Human
uggcucacgccugcaaucccagca

SEQ ID NO: 716029 - RNA, 24 nt, Human
ugggagucagaggagccggaagaa

SEQ ID NO: 716030 - RNA, 24 nt, Human
ugguggcucacgccugcaauccca

SEQ ID NO: 716031 - RNA, 21 nt, Human
uggugggugccuguaguccca

SEQ ID NO: 716032 - RNA, 20 nt, Human
uguuacugcaacagacugga

SEQ ID NO: 716033 - RNA, 20 nt, Human
uguuacugcaacagacugga

SEQ ID NO: 716034 - RNA, 25 nt, Human
uuaaaauauauuagcaggucauuaa

SEQ ID NO: 716035 - RNA, 18 nt, Human
uuaaccagguccaacuag

SEQ ID NO: 716036 - RNA, 24 nt, Human
uuaauagucuuacaaucccaaaca

SEQ ID NO: 716037 - RNA, 25 nt, Human
uuacaauaaagcaccaaccaaugac

SEQ ID NO: 716038 - RNA, 22 nt, Human
uucagcacccucagcuuauucc

SEQ ID NO: 716039 - RNA, 21 nt, Human
uuccauguggcuacagucacc

SEQ ID NO: 716040 - RNA, 22 nt, Human
uuccccaacaguucagcacccu

SEQ ID NO: 716041 - RNA, 21 nt, Human
uucucgggcuggccgggcccc

SEQ ID NO: 716042 - RNA, 23 nt, Human
uuggucccaaacauauuagucuc

SEQ ID NO: 716043 - RNA, 24 nt, Human
uuuaccuuucccacauaacugggg

SEQ ID NO: 716044 - RNA, 21 nt, Human
uuugcagugacuggaccugcc

SEQ ID NO: 716045 - RNA, 20 nt, Human
uuuggaauucucagugaauu

SEQ ID NO: 716046 - RNA, 20 nt, Human
aaaaaaaagguaggccgagc

SEQ ID NO: 716047 - RNA, 23 nt, Human
aaaaaaaucuaacacuauaucac

SEQ ID NO: 716048 - RNA, 24 nt, Human
aaaaaaccugaauccaguuagaac

SEQ ID NO: 716049 - RNA, 25 nt, Human
aaaccagagaaaccugacuagaaaa

SEQ ID NO: 716050 - RNA, 23 nt, Human
aaagaaaaaaauuaaaaguacaa

SEQ ID NO: 716051 - RNA, 21 nt, Human
aaagguuaggauaacaaacac

SEQ ID NO: 716052 - RNA, 19 nt, Human
aaaguaacuacagauuuuc

SEQ ID NO: 716053 - RNA, 27 nt, Human
aaauacuagaggucagcaggugacacu

SEQ ID NO: 716054 - RNA, 23 nt, Human
aacauggugaaacuccuccgucu

SEQ ID NO: 716055 - RNA, 24 nt, Human
aacauggugaaacuccuccgucuc

SEQ ID NO: 716056 - RNA, 19 nt, Human
aaccaauuagaacccucuc

SEQ ID NO: 716057 - RNA, 18 nt, Human
aacccagucaaucccuaa

SEQ ID NO: 716058 - RNA, 19 nt, Human
aacuauuucugcuccuucu

SEQ ID NO: 716059 - RNA, 20 nt, Human
aagcaaaacgaaacugcaaa

SEQ ID NO: 716060 - RNA, 21 nt, Human
aagcacaggauggagaggacc

SEQ ID NO: 716061 - RNA, 23 nt, Human
aaggugcugacugacaaggggga

SEQ ID NO: 716062 - RNA, 18 nt, Human
aaucgcuugaaucuggga

SEQ ID NO: 716063 - RNA, 24 nt, Human
aaucgcuugaaucugggaggcgga

SEQ ID NO: 716064 - RNA, 20 nt, Human
aauggaaaauucacagacca

SEQ ID NO: 716065 - RNA, 20 nt, Human
acacuaaaucuacuacgcau

SEQ ID NO: 716066 - RNA, 19 nt, Human
acagaccaggugaugcagu

SEQ ID NO: 716067 - RNA, 24 nt, Human
acagagcgagaguccgucucaaaa

SEQ ID NO: 716068 - RNA, 22 nt, Human
acagaggaaaagugauucuaaa

SEQ ID NO: 716069 - RNA, 22 nt, Human
accacugcacuccagccugggc

SEQ ID NO: 716070 - RNA, 23 nt, Human
accacugcacuccagccugggcg

SEQ ID NO: 716071 - RNA, 25 nt, Human
accacugcacuccagccugggcgac

SEQ ID NO: 716072 - RNA, 22 nt, Human
accaugaaggccuccacugccc

SEQ ID NO: 716073 - RNA, 24 nt, Human
accccgucucuacuaaaaauacaa

SEQ ID NO: 716074 - RNA, 24 nt, Human
acucagagaccaggauuuuuuucg

SEQ ID NO: 716075 - RNA, 19 nt, Human
acuccagccuggacaagag

SEQ ID NO: 716076 - RNA, 24 nt, Human
acugcacuccagccugggcgacag

SEQ ID NO: 716077 - RNA, 26 nt, Human
acugcacuccagccugggcgacagag

SEQ ID NO: 716078 - RNA, 25 nt, Human
acugcacuccagccugggcgacagg

SEQ ID NO: 716079 - RNA, 24 nt, Human
acugucugaaagauguuuauccca

SEQ ID NO: 716080 - RNA, 21 nt, Human
agaaagcccugucugcaugug

SEQ ID NO: 716081 - RNA, 25 nt, Human
agaaagugaccaauggcaacccugc

SEQ ID NO: 716082 - RNA, 18 nt, Human
agaaauccugcauccucu

SEQ ID NO: 716083 - RNA, 21 nt, Human
agaaguacaaccucugcucag

SEQ ID NO: 716084 - RNA, 21 nt, Human
agagccagaagccagggagcu

SEQ ID NO: 716085 - RNA, 24 nt, Human
agagguggcagugagccgagaucg

SEQ ID NO: 716086 - RNA, 18 nt, Human
agcacaggauggagagga

SEQ ID NO: 716087 - RNA, 23 nt, Human
agcacaguggcucacaccuguaa

SEQ ID NO: 716088 - RNA, 24 nt, Human
agcacuuugggaggcugaggcagg

SEQ ID NO: 716089 - RNA, 20 nt, Human
agccagaagccagggagcua

SEQ ID NO: 716090 - RNA, 20 nt, Human
agccagcggagagccuuauu

SEQ ID NO: 716091 - RNA, 23 nt, Human
agccgggcauggcggugggcgcc

SEQ ID NO: 716092 - RNA, 22 nt, Human
agccuggccaacauggugaaac

SEQ ID NO: 716093 - RNA, 24 nt, Human
agccuggccaacauggugaaacuc

SEQ ID NO: 716094 - RNA, 19 nt, Human
agccuggccaauauaguga

SEQ ID NO: 716095 - RNA, 22 nt, Human
agccuggccaauauagugaaac

SEQ ID NO: 716096 - RNA, 24 nt, Human
agccuggccaauauagugaaaccc

SEQ ID NO: 716097 - RNA, 19 nt, Human
aggaaaagcauccuuucca

SEQ ID NO: 716098 - RNA, 20 nt, Human
aggcaggagaaucgcuugaa

SEQ ID NO: 716099 - RNA, 24 nt, Human
aggcaggagaaucgcuugaaucug

SEQ ID NO: 716100 - RNA, 21 nt, Human
aggcaggcggauuacuugagg

SEQ ID NO: 716101 - RNA, 22 nt, Human
aggcaggcggauuacuugaggg

SEQ ID NO: 716102 - RNA, 22 nt, Human
aggcaggcggauuacuugaggu

SEQ ID NO: 716103 - RNA, 22 nt, Human
aggccgagcacaguggcucaca

SEQ ID NO: 716104 - RNA, 24 nt, Human
aggcggagauugcggugagcugag

SEQ ID NO: 716105 - RNA, 24 nt, Human
aggcggugagcuugcugggggccg

SEQ ID NO: 716106 - RNA, 21 nt, Human
aggcugagacagauuuccaca

SEQ ID NO: 716107 - RNA, 24 nt, Human
aggcugaggcaggagaaguguuug

SEQ ID NO: 716108 - RNA, 20 nt, Human
aggcugaggcaggagaaucg

SEQ ID NO: 716109 - RNA, 24 nt, Human
aggcugaggcaggagaaucgcuug

SEQ ID NO: 716110 - RNA, 21 nt, Human
aggcugaggcaggcggauuac

SEQ ID NO: 716111 - RNA, 24 nt, Human
aggcugaggcaggcggauuacuug

SEQ ID NO: 716112 - RNA, 24 nt, Human
agggagagguggcagugagccgag

SEQ ID NO: 716113 - RNA, 20 nt, Human
agguuaggauaacaaacacu

SEQ ID NO: 716114 - RNA, 24 nt, Human
aguggcucacaccuguaauuccag

SEQ ID NO: 716115 - RNA, 21 nt, Human
auaauccuggcuaccugggag

SEQ ID NO: 716116 - RNA, 22 nt, Human
auacuccagccuggacaagagc

SEQ ID NO: 716117 - RNA, 22 nt, Human
auagaagauacgaaaauaacua

SEQ ID NO: 716118 - RNA, 21 nt, Human
aucacgucuguaaucccagca

SEQ ID NO: 716119 - RNA, 23 nt, Human
aucacuugaggucaggaggucga

SEQ ID NO: 716120 - RNA, 24 nt, Human
aucgcaccauuauacuccagccug

SEQ ID NO: 716121 - RNA, 26 nt, Human
augcauucuuuaauacaucaaaaaaa

SEQ ID NO: 716122 - RNA, 22 nt, Human
auuauacuccagccuggacaag

SEQ ID NO: 716123 - RNA, 24 nt, Human
caaaaaacaaaaaaaaaagguagg

SEQ ID NO: 716124 - RNA, 21 nt, Human
caacaguguccggcacucagu

SEQ ID NO: 716125 - RNA, 27 nt, Human
caacauggugaaacuccuccgucucua

SEQ ID NO: 716126 - RNA, 24 nt, Human
caagcccaggcaggaaauaaagga

SEQ ID NO: 716127 - RNA, 20 nt, Human
caaggaggcggugagcuugc

SEQ ID NO: 716128 - RNA, 23 nt, Human
caagucuuucaccuaacagcaca

SEQ ID NO: 716129 - RNA, 24 nt, Human
caauauagugaaaccccgucucua

SEQ ID NO: 716130 - RNA, 25 nt, Human
caauggcaacccugcacaguugcaa

SEQ ID NO: 716131 - RNA, 24 nt, Human
cacaccuguaauuccagcaccuug

SEQ ID NO: 716132 - RNA, 24 nt, Human
cacaucacuugaggucaggagguc

SEQ ID NO: 716133 - RNA, 24 nt, Human
caccauuauacuccagccuggaca

SEQ ID NO: 716134 - RNA, 22 nt, Human
cacccacuguacgacucucaau

SEQ ID NO: 716135 - RNA, 21 nt, Human
caccuguaauuccagcaccuu

SEQ ID NO: 716136 - RNA, 23 nt, Human
caccuguaauuccagcaccuugg

SEQ ID NO: 716137 - RNA, 24 nt, Human
caccuguaauuccagcaccuuggg

SEQ ID NO: 716138 - RNA, 24 nt, Human
cacgucuguaaucccagcacuuug

SEQ ID NO: 716139 - RNA, 24 nt, Human
cacuccagccugggcgacagagcg

SEQ ID NO: 716140 - RNA, 19 nt, Human
cacugcacuccagccuggg

SEQ ID NO: 716141 - RNA, 20 nt, Human
cacugcacuccagccugggc

SEQ ID NO: 716142 - RNA, 22 nt, Human
cacugcacuccagccugggcga

SEQ ID NO: 716143 - RNA, 23 nt, Human
cacugcacuccagccugggcgac

SEQ ID NO: 716144 - RNA, 24 nt, Human
cacugcacuccagccugggcgaca

SEQ ID NO: 716145 - RNA, 25 nt, Human
cacugcacuccagccugggcgacaa

SEQ ID NO: 716146 - RNA, 20 nt, Human
cacugcacuccagccugggg

SEQ ID NO: 716147 - RNA, 21 nt, Human
cacuguaacuaauaaaauugc

SEQ ID NO: 716148 - RNA, 23 nt, Human
cagaaaagauuacaagcacugag

SEQ ID NO: 716149 - RNA, 22 nt, Human
cagaaccaauuagaacccucuc

SEQ ID NO: 716150 - RNA, 24 nt, Human
cagcaccuugggaggccgagaugg

SEQ ID NO: 716151 - RNA, 24 nt, Human
cagcacuuugggaggcugaggcag

SEQ ID NO: 716152 - RNA, 26 nt, Human
cagcacuuugggaggcugaggcaggc

SEQ ID NO: 716153 - RNA, 24 nt, Human
cagcaggugacacuggcccugcug

SEQ ID NO: 716154 - RNA, 24 nt, Human
caggccaggcgcggccugguguga

SEQ ID NO: 716155 - RNA, 18 nt, Human
caucacuugaggucagga

SEQ ID NO: 716156 - RNA, 24 nt, Human
caucacuugaggucaggaggucga

SEQ ID NO: 716157 - RNA, 23 nt, Human
caugacucuagcucuagggcaaa

SEQ ID NO: 716158 - RNA, 20 nt, Human
cauguggaauguucucuagg

SEQ ID NO: 716159 - RNA, 19 nt, Human
cauuauacuccagccugga

SEQ ID NO: 716160 - RNA, 24 nt, Human
cauuauacuccagccuggacaaga

SEQ ID NO: 716161 - RNA, 22 nt, Human
ccaaauaaaaagucagaaaccc

SEQ ID NO: 716162 - RNA, 24 nt, Human
ccaaugacgcauagcugagcaagg

SEQ ID NO: 716163 - RNA, 22 nt, Human
ccaaugccaaaugcaugccggg

SEQ ID NO: 716164 - RNA, 20 nt, Human
ccacugcacuccagccuggg

SEQ ID NO: 716165 - RNA, 20 nt, Human
ccacugcacuccagccuggg

SEQ ID NO: 716166 - RNA, 21 nt, Human
ccacugcacuccagccugggc

SEQ ID NO: 716167 - RNA, 23 nt, Human
ccacugcacuccagccugggcga

SEQ ID NO: 716168 - RNA, 23 nt, Human
ccacugcacuccagccugggcga

SEQ ID NO: 716169 - RNA, 19 nt, Human
ccacugcccggcugccucg

SEQ ID NO: 716170 - RNA, 21 nt, Human
ccagagaaaccugacuagaaa

SEQ ID NO: 716171 - RNA, 21 nt, Human
ccagucaaucccuaaaccuaa

SEQ ID NO: 716172 - RNA, 23 nt, Human
ccagucaaucccuaaaccuaaag

SEQ ID NO: 716173 - RNA, 21 nt, Human
ccaugagggagagguggcagu

SEQ ID NO: 716174 - RNA, 21 nt, Human
ccauuauacuccagccuggac

SEQ ID NO: 716175 - RNA, 24 nt, Human
ccauuauacuccagccuggacaag

SEQ ID NO: 716176 - RNA, 19 nt, Human
cccaaugcaggaauaaagu

SEQ ID NO: 716177 - RNA, 23 nt, Human
cccaggcaggaaauaaaggaaua

SEQ ID NO: 716178 - RNA, 20 nt, Human
cccuggcauggcugcucucc

SEQ ID NO: 716179 - RNA, 23 nt, Human
cccuggcauggcugcucucccug

SEQ ID NO: 716180 - RNA, 20 nt, Human
cccuguggggcaggacuggg

SEQ ID NO: 716181 - RNA, 19 nt, Human
ccggcaguggggcccagga

SEQ ID NO: 716182 - RNA, 18 nt, Human
ccuccgucucuacuaaaa

SEQ ID NO: 716183 - RNA, 19 nt, Human
ccucugaggacaggcucaa

SEQ ID NO: 716184 - RNA, 22 nt, Human
ccucugccauccucacccacuc

SEQ ID NO: 716185 - RNA, 18 nt, Human
ccuggccaacauggugaa

SEQ ID NO: 716186 - RNA, 23 nt, Human
ccuggccaacauggugaaacucc

SEQ ID NO: 716187 - RNA, 23 nt, Human
ccuggccaacauggugaaacucc

SEQ ID NO: 716188 - RNA, 23 nt, Human
ccuggccaauauagugaaacccc

SEQ ID NO: 716189 - RNA, 24 nt, Human
ccuggccaauauagugaaaccccg

SEQ ID NO: 716190 - RNA, 21 nt, Human
ccuggcuaccugggaggcuga

SEQ ID NO: 716191 - RNA, 19 nt, Human
ccuguaaucccagcuccug

SEQ ID NO: 716192 - RNA, 23 nt, Human
ccuuggggccacugaaggguggc

SEQ ID NO: 716193 - RNA, 24 nt, Human
cgagaccagccuggccaauauagu

SEQ ID NO: 716194 - RNA, 24 nt, Human
cgagauggacacaucacuugaggu

SEQ ID NO: 716195 - RNA, 26 nt, Human
cgagauggacacaucacuugagguca

SEQ ID NO: 716196 - RNA, 24 nt, Human
cgauaccagccuggccaacauggu

SEQ ID NO: 716197 - RNA, 22 nt, Human
cgccuguaaucccagcuccuga

SEQ ID NO: 716198 - RNA, 19 nt, Human
cgcuucagaaguacuguca

SEQ ID NO: 716199 - RNA, 24 nt, Human
cggauuacuugaggucagcaguuc

SEQ ID NO: 716200 - RNA, 24 nt, Human
cgggguuguccuucuuacuuuuuc

SEQ ID NO: 716201 - RNA, 23 nt, Human
cgucuguaaucccagcacuuugg

SEQ ID NO: 716202 - RNA, 24 nt, Human
cgucuguaaucccagcacuuuggg

SEQ ID NO: 716203 - RNA, 21 nt, Human
cuaacucagagcaagagucgg

SEQ ID NO: 716204 - RNA, 24 nt, Human
cucacaccuguaauuccagcaccu

SEQ ID NO: 716205 - RNA, 20 nt, Human
cucagucuggccuuggggcc

SEQ ID NO: 716206 - RNA, 18 nt, Human
cucugugcccaucauggu

SEQ ID NO: 716207 - RNA, 23 nt, Human
cugaaaacacugacaccuuccca

SEQ ID NO: 716208 - RNA, 22 nt, Human
cugcaguaccuacacuugacuu

SEQ ID NO: 716209 - RNA, 20 nt, Human
cuggaccaaugccaaaugca

SEQ ID NO: 716210 - RNA, 24 nt, Human
cugggggccacagaagcacaggau

SEQ ID NO: 716211 - RNA, 25 nt, Human
cuguaucguccucauuggccaaaua

SEQ ID NO: 716212 - RNA, 24 nt, Human
cuuagaacugaaaacacugacacc

SEQ ID NO: 716213 - RNA, 21 nt, Human
cuuagcuggggagaaggggac

SEQ ID NO: 716214 - RNA, 19 nt, Human
cuugaaucugggaggcgga

SEQ ID NO: 716215 - RNA, 22 nt, Human
cuuuuacauuuaacagugacua

SEQ ID NO: 716216 - RNA, 21 nt, Human
gaaaagcauccuuuccaggga

SEQ ID NO: 716217 - RNA, 21 nt, Human
gaaaccugacuagaaaacuga

SEQ ID NO: 716218 - RNA, 19 nt, Human
gaagaauuuaaaaaaacac

SEQ ID NO: 716219 - RNA, 18 nt, Human
gacaccuucccaagguga

SEQ ID NO: 716220 - RNA, 19 nt, Human
gacccggucccggcagugg

SEQ ID NO: 716221 - RNA, 23 nt, Human
gagaaucgcuugaaucugggagg

SEQ ID NO: 716222 - RNA, 23 nt, Human
gagauugcggugagcugagaucg

SEQ ID NO: 716223 - RNA, 19 nt, Human
gagccagaagccagggagc

SEQ ID NO: 716224 - RNA, 19 nt, Human
gaguaugagccugugggaa

SEQ ID NO: 716225 - RNA, 24 nt, Human
gauuacuugaggucagcaguucga

SEQ ID NO: 716226 - RNA, 24 nt, Human
gcacuccagccugggcgacagagc

SEQ ID NO: 716227 - RNA, 19 nt, Human
gcaggccaggcgcggccug

SEQ ID NO: 716228 - RNA, 24 nt, Human
gcaggugggaaaucaugucauuau

SEQ ID NO: 716229 - RNA, 24 nt, Human
gccaauauagugaaaccccgucuc

SEQ ID NO: 716230 - RNA, 27 nt, Human
gccacugcaccacugcacuccagccug

SEQ ID NO: 716231 - RNA, 20 nt, Human
gcccugcugcccagggaugg

SEQ ID NO: 716232 - RNA, 18 nt, Human
gccgggaaggaagcagug

SEQ ID NO: 716233 - RNA, 18 nt, Human
gccuauauguugauaaaa

SEQ ID NO: 716234 - RNA, 23 nt, Human
gcggugggcgccuguaaucccag

SEQ ID NO: 716235 - RNA, 23 nt, Human
gcucuagggcaaaggaaauacua

SEQ ID NO: 716236 - RNA, 21 nt, Human
gcugccucgccauccucugag

SEQ ID NO: 716237 - RNA, 21 nt, Human
gcugccucgccauccucugag

SEQ ID NO: 716238 - RNA, 20 nt, Human
gcugggggccacagaagcac

SEQ ID NO: 716239 - RNA, 22 nt, Human
ggagauugcggugagcugagau

SEQ ID NO: 716240 - RNA, 24 nt, Human
ggagauugcggugagcugagaucg

SEQ ID NO: 716241 - RNA, 22 nt, Human
ggagcacauauucuuuaauagc

SEQ ID NO: 716242 - RNA, 20 nt, Human
ggauggagaggaccgagaga

SEQ ID NO: 716243 - RNA, 23 nt, Human
ggauuacuugaggucagcaguuc

SEQ ID NO: 716244 - RNA, 23 nt, Human
ggcauggcggugggcgccuguaa

SEQ ID NO: 716245 - RNA, 23 nt, Human
ggcgccuguaaucccagcuccug

SEQ ID NO: 716246 - RNA, 20 nt, Human
ggcgggcggcuauaauccug

SEQ ID NO: 716247 - RNA, 24 nt, Human
ggcggugggcgccuguaaucccag

SEQ ID NO: 716248 - RNA, 27 nt, Human
gggcaaaggaaauacuagaggucagcc

SEQ ID NO: 716249 - RNA, 22 nt, Human
gggcgccuguaaucccagcucc

SEQ ID NO: 716250 - RNA, 22 nt, Human
ggguggggauuagguaagggcc

SEQ ID NO: 716251 - RNA, 24 nt, Human
gguggaucacgucuguaaucccag

SEQ ID NO: 716252 - RNA, 20 nt, Human
guacaaccucugcucaguca

SEQ ID NO: 716253 - RNA, 20 nt, Human
gucucaaaaaaaaaaaaaag

SEQ ID NO: 716254 - RNA, 19 nt, Human
guggaggacaagcccaggc

SEQ ID NO: 716255 - RNA, 23 nt, Human
guggaucacgucuguaaucccag

SEQ ID NO: 716256 - RNA, 18 nt, Human
guggcaaaccuaagccuc

SEQ ID NO: 716257 - RNA, 18 nt, Human
uaaaacuggcuuacagua

SEQ ID NO: 716258 - RNA, 20 nt, Human
uaaaaugaaagcaggccagg

SEQ ID NO: 716259 - RNA, 22 nt, Human
uaaaaugaaagcaggccaggcg

SEQ ID NO: 716260 - RNA, 23 nt, Human
uaaaggaauaaaaaacuuucaga

SEQ ID NO: 716261 - RNA, 24 nt, Human
uaaaucuacuacgcauacauguag

SEQ ID NO: 716262 - RNA, 19 nt, Human
uaacucagcucuaacucag

SEQ ID NO: 716263 - RNA, 21 nt, Human
uaacugauggaggugccacac

SEQ ID NO: 716264 - RNA, 25 nt, Human
uaagccucugugcuuuguggccaua

SEQ ID NO: 716265 - RNA, 19 nt, Human
uacacuugacuuccaagaa

SEQ ID NO: 716266 - RNA, 18 nt, Human
uaccaugaaggccuccac

SEQ ID NO: 716267 - RNA, 20 nt, Human
uaccuuaaggccaaugaggg

SEQ ID NO: 716268 - RNA, 24 nt, Human
uacuaaaaaagaacauacaaaaua

SEQ ID NO: 716269 - RNA, 23 nt, Human
uacuagaggucagcaggugacac

SEQ ID NO: 716270 - RNA, 21 nt, Human
uacuccagccuggacaagagc

SEQ ID NO: 716271 - RNA, 22 nt, Human
uacuccagccuggacaagagcg

SEQ ID NO: 716272 - RNA, 25 nt, Human
uagaaaaaaccugaauccaguuaga

SEQ ID NO: 716273 - RNA, 18 nt, Human
uagaaauccugcauccuc

SEQ ID NO: 716274 - RNA, 22 nt, Human
uagaacacccacuguacgacuc

SEQ ID NO: 716275 - RNA, 28 nt, Human
uaggauaacaaacacuaaaaggucaucc

SEQ ID NO: 716276 - RNA, 22 nt, Human
uagggcaaaggaaauacuagag

SEQ ID NO: 716277 - RNA, 25 nt, Human
uaggguggaggacaagcccaggcag

SEQ ID NO: 716278 - RNA, 20 nt, Human
uauacagcucugaaaccaga

SEQ ID NO: 716279 - RNA, 22 nt, Human
uaugacugcuaccuuaaggcca

SEQ ID NO: 716280 - RNA, 21 nt, Human
uaugucucucuccuccaagga

SEQ ID NO: 716281 - RNA, 18 nt, Human
ucaaaaaaaaaaaaaagu

SEQ ID NO: 716282 - RNA, 26 nt, Human
ucaaaaaaaaaaaaaagucaaguucc

SEQ ID NO: 716283 - RNA, 18 nt, Human
ucacagcugagcacaggc

SEQ ID NO: 716284 - RNA, 23 nt, Human
ucacgucuguaaucccagcacuu

SEQ ID NO: 716285 - RNA, 20 nt, Human
ucagacccggucccggcagu

SEQ ID NO: 716286 - RNA, 20 nt, Human
ucagcuaucaugacucuagc

SEQ ID NO: 716287 - RNA, 20 nt, Human
ucauuggccaaauaaaaagu

SEQ ID NO: 716288 - RNA, 22 nt, Human
uccaaacuuuuaucuugauacu

SEQ ID NO: 716289 - RNA, 18 nt, Human
uccacuggaugagccuca

SEQ ID NO: 716290 - RNA, 22 nt, Human
uccacuggaugagccucagucu

SEQ ID NO: 716291 - RNA, 23 nt, Human
uccagccugggcgacagagcgag

SEQ ID NO: 716292 - RNA, 24 nt, Human
uccagccugggcgacagagcgaga

SEQ ID NO: 716293 - RNA, 20 nt, Human
uccaguuagaacacccacug

SEQ ID NO: 716294 - RNA, 21 nt, Human
ucccaaggugagaaagugacc

SEQ ID NO: 716295 - RNA, 20 nt, Human
ucccggcaguggggcccagg

SEQ ID NO: 716296 - RNA, 19 nt, Human
uccguaaagcacuuacaac

SEQ ID NO: 716297 - RNA, 23 nt, Human
uccgucucaaaaaaaaaaaaaag

SEQ ID NO: 716298 - RNA, 22 nt, Human
uccugcgcaggcaaaggagagg

SEQ ID NO: 716299 - RNA, 20 nt, Human
uccugguggaucacgucugu

SEQ ID NO: 716300 - RNA, 18 nt, Human
ucgcuugaaucugggagg

SEQ ID NO: 716301 - RNA, 20 nt, Human
ucgggagugguggcgggcgg

SEQ ID NO: 716302 - RNA, 18 nt, Human
ucucaaaaaaaaaaaaaa

SEQ ID NO: 716303 - RNA, 21 nt, Human
ucucuaaucugugcucagccc

SEQ ID NO: 716304 - RNA, 23 nt, Human
ucucuacuaaaaauacaaaaauu

SEQ ID NO: 716305 - RNA, 20 nt, Human
ucugucccagagcccuggug

SEQ ID NO: 716306 - RNA, 22 nt, Human
ucugugguccuuuccagucugu

SEQ ID NO: 716307 - RNA, 20 nt, Human
ucuuagcuggggagaagggg

SEQ ID NO: 716308 - RNA, 22 nt, Human
ucuuagcuggggagaaggggac

SEQ ID NO: 716309 - RNA, 20 nt, Human
ucuuuaaggagagaaacagc

SEQ ID NO: 716310 - RNA, 22 nt, Human
ugaaguuaugugugacauuucu

SEQ ID NO: 716311 - RNA, 18 nt, Human
ugacacuggcccugcugc

SEQ ID NO: 716312 - RNA, 18 nt, Human
ugaccaaugcuucauuuu

SEQ ID NO: 716313 - RNA, 22 nt, Human
ugacuugagagugagucaccau

SEQ ID NO: 716314 - RNA, 18 nt, Human
ugagcacaggcccugcag

SEQ ID NO: 716315 - RNA, 22 nt, Human
ugagccgagaucgagccacugc

SEQ ID NO: 716316 - RNA, 18 nt, Human
ugagcugagaucgcacca

SEQ ID NO: 716317 - RNA, 22 nt, Human
ugagcuuucauuuguuaccaug

SEQ ID NO: 716318 - RNA, 25 nt, Human
ugaggcaggagaaguguuugaaacc

SEQ ID NO: 716319 - RNA, 20 nt, Human
ugaggcaggagaaucgcuug

SEQ ID NO: 716320 - RNA, 22 nt, Human
ugaggcaggagaaucgcuugaa

SEQ ID NO: 716321 - RNA, 23 nt, Human
ugaggcaggagaaucgcuugaau

SEQ ID NO: 716322 - RNA, 25 nt, Human
ugaggcaggagaaucgcuugaaucu

SEQ ID NO: 716323 - RNA, 20 nt, Human
ugaggcaggcggauuacuuc

SEQ ID NO: 716324 - RNA, 24 nt, Human
ugaggcaggcggauuacuugaggu

SEQ ID NO: 716325 - RNA, 26 nt, Human
ugaggcaggcggauuacuugagguca

SEQ ID NO: 716326 - RNA, 22 nt, Human
ugaggucagcaguucgagacca

SEQ ID NO: 716327 - RNA, 21 nt, Human
ugagucaccauuuucuuggag

SEQ ID NO: 716328 - RNA, 18 nt, Human
ugcaaauuucaguaucuc

SEQ ID NO: 716329 - RNA, 18 nt, Human
ugcaaggucacucgcugu

SEQ ID NO: 716330 - RNA, 21 nt, Human
ugcaccacugcacuccagccu

SEQ ID NO: 716331 - RNA, 18 nt, Human
ugcccagggauggccagg

SEQ ID NO: 716332 - RNA, 19 nt, Human
ugcucagcccaggaaggca

SEQ ID NO: 716333 - RNA, 21 nt, Human
ugcugcccagggauggccagg

SEQ ID NO: 716334 - RNA, 19 nt, Human
uggaauccacuaguucugg

SEQ ID NO: 716335 - RNA, 19 nt, Human
uggaaugaaaauuauaaaa

SEQ ID NO: 716336 - RNA, 22 nt, Human
uggaggcgagacaggcacugug

SEQ ID NO: 716337 - RNA, 22 nt, Human
uggaucacgucuguaaucccag

SEQ ID NO: 716338 - RNA, 24 nt, Human
uggaucacgucuguaaucccagca

SEQ ID NO: 716339 - RNA, 22 nt, Human
uggcagcagcuuacucagaggu

SEQ ID NO: 716340 - RNA, 18 nt, Human
uggcagugagccgagauc

SEQ ID NO: 716341 - RNA, 25 nt, Human
uggcagugagccgagaucgagccac

SEQ ID NO: 716342 - RNA, 25 nt, Human
uggcauggcugcucucccugauggg

SEQ ID NO: 716343 - RNA, 23 nt, Human
uggccaacauggugaaacuccuc

SEQ ID NO: 716344 - RNA, 24 nt, Human
uggcggugggcgccuguaauccca

SEQ ID NO: 716345 - RNA, 24 nt, Human
uggcuaccugggaggcugaggcag

SEQ ID NO: 716346 - RNA, 18 nt, Human
uggcuagaucccuguggg

SEQ ID NO: 716347 - RNA, 24 nt, Human
uggcuaugaaagauucuaaaaggu

SEQ ID NO: 716348 - RNA, 21 nt, Human
uggcucacaccuguaauucca

SEQ ID NO: 716349 - RNA, 24 nt, Human
uggcucacaccuguaauuccagca

SEQ ID NO: 716350 - RNA, 25 nt, Human
uggcuuacaguaaucuuguuuucug

SEQ ID NO: 716351 - RNA, 19 nt, Human
ugggaggccgagauggaca

SEQ ID NO: 716352 - RNA, 24 nt, Human
ugggaggccgagauggacacauca

SEQ ID NO: 716353 - RNA, 24 nt, Human
ugggaggcggagauugcggugagc

SEQ ID NO: 716354 - RNA, 18 nt, Human
ugggaggcugaggcagga

SEQ ID NO: 716355 - RNA, 19 nt, Human
ugggaggcugaggcaggag

SEQ ID NO: 716356 - RNA, 18 nt, Human
ugggaggcugaggcaggc

SEQ ID NO: 716357 - RNA, 20 nt, Human
ugggaggcugaggcaggcgg

SEQ ID NO: 716358 - RNA, 22 nt, Human
ugggaggcugaggcaggcggau

SEQ ID NO: 716359 - RNA, 22 nt, Human
uggggagaaggggacagaggaa

SEQ ID NO: 716360 - RNA, 18 nt, Human
uggggcaggacugggcac

SEQ ID NO: 716361 - RNA, 20 nt, Human
uggggcccaggauacggggu

SEQ ID NO: 716362 - RNA, 24 nt, Human
ugguggaucacgucuguaauccca

SEQ ID NO: 716363 - RNA, 21 nt, Human
ugucccagagcccugguggga

SEQ ID NO: 716364 - RNA, 25 nt, Human
uguccuuguaugucucucuccucca

SEQ ID NO: 716365 - RNA, 22 nt, Human
uuaugugugacauuucuaaacu

SEQ ID NO: 716366 - RNA, 21 nt, Human
uuauuggcauggugggugccu

SEQ ID NO: 716367 - RNA, 25 nt, Human
uucaaaaaaacaaaaaacaaaaaaa

SEQ ID NO: 716368 - RNA, 20 nt, Human
uucccccagcccuggaaucc

SEQ ID NO: 716369 - RNA, 24 nt, Human
uugaaucugggaggcggagauugc

SEQ ID NO: 716370 - RNA, 18 nt, Human
uuggagggcaggugggaa

SEQ ID NO: 716371 - RNA, 24 nt, Human
uuggcauguggaauguucucuagg

SEQ ID NO: 716372 - RNA, 22 nt, Human
uuuaagaagguucuccacugga

SEQ ID NO: 716373 - RNA, 19 nt, Human
uuucaaaaaaacaaaaaac

SEQ ID NO: 716374 - RNA, 27 nt, Human
uuucaaaaaaacaaaaaacaaaaaaaa

SEQ ID NO: 716375 - RNA, 21 nt, Human
uuucccccagcccuggaaucc

SEQ ID NO: 716376 - RNA, 24 nt, Human
uuucuuggagggcaggugggaaau

SEQ ID NO: 716377 - RNA, 24 nt, Human
uuuucuggcuaugaaagauucuaa

SEQ ID NO: 716378 - RNA, 22 nt, Human
uuuucuguaucguccucauugg

SEQ ID NO: 716379 - RNA, 22 nt, Human
aagaagcagcgaaaagccauaa

SEQ ID NO: 716380 - RNA, 25 nt, Human
aagaagcagcgaaaagccauaaaua

SEQ ID NO: 716381 - RNA, 26 nt, Human
aagcagcgaaaagccauaaauaacag

SEQ ID NO: 716382 - RNA, 19 nt, Human
aagggcccucgccaaacca

SEQ ID NO: 716383 - RNA, 22 nt, Human
acgagagcaguacaaauauucc

SEQ ID NO: 716384 - RNA, 19 nt, Human
agaaucagagaagacaggg

SEQ ID NO: 716385 - RNA, 22 nt, Human
agacaagagauggggcaccaag

SEQ ID NO: 716386 - RNA, 23 nt, Human
agacaagagauggggcaccaaga

SEQ ID NO: 716387 - RNA, 18 nt, Human
agacacuucggcaccacc

SEQ ID NO: 716388 - RNA, 21 nt, Human
agacagggaggaggggcaagg

SEQ ID NO: 716389 - RNA, 22 nt, Human
agacagggaggaggggcaaggu

SEQ ID NO: 716390 - RNA, 23 nt, Human
agacagggaggaggggcaaggug

SEQ ID NO: 716391 - RNA, 19 nt, Human
agagaagacagggaggagg

SEQ ID NO: 716392 - RNA, 22 nt, Human
agaguccaaacaccaccuggcg

SEQ ID NO: 716393 - RNA, 21 nt, Human
aggcacauggucuagagucca

SEQ ID NO: 716394 - RNA, 26 nt, Human
aggcagcaagcgggaaccucccagaa

SEQ ID NO: 716395 - RNA, 18 nt, Human
aggcaggaaggagagcug

SEQ ID NO: 716396 - RNA, 20 nt, Human
aggcaggaaggagagcuggu

SEQ ID NO: 716397 - RNA, 22 nt, Human
aggggcuggccugccucccccg

SEQ ID NO: 716398 - RNA, 21 nt, Human
augcacacugcaaagucuccg

SEQ ID NO: 716399 - RNA, 24 nt, Human
auggggcaccaagaagcagcgaaa

SEQ ID NO: 716400 - RNA, 21 nt, Human
caaaacaaggguguggcgagc

SEQ ID NO: 716401 - RNA, 23 nt, Human
caagaagcagcgaaaagccauaa

SEQ ID NO: 716402 - RNA, 27 nt, Human
cacauggucuagaguccaaacaccacc

SEQ ID NO: 716403 - RNA, 24 nt, Human
caccccucauuucccuccuucuca

SEQ ID NO: 716404 - RNA, 21 nt, Human
cacugggggcagagccuuuua

SEQ ID NO: 716405 - RNA, 18 nt, Human
cagagaagacagggagga

SEQ ID NO: 716406 - RNA, 22 nt, Human
cagcagccucucaaauggcacg

SEQ ID NO: 716407 - RNA, 20 nt, Human
ccagagggacugugucagca

SEQ ID NO: 716408 - RNA, 20 nt, Human
ccccucauuucccuccuucu

SEQ ID NO: 716409 - RNA, 24 nt, Human
cccuggcugaaggcagcaagcggg

SEQ ID NO: 716410 - RNA, 18 nt, Human
ccgcagggcagguggaag

SEQ ID NO: 716411 - RNA, 21 nt, Human
ccgcccgaggcgggcugcgcg

SEQ ID NO: 716412 - RNA, 18 nt, Human
ccgcugugggguucaagc

SEQ ID NO: 716413 - RNA, 19 nt, Human
ccggcccaggacggugcgg

SEQ ID NO: 716414 - RNA, 23 nt, Human
ccggccucccgccucccgccucc

SEQ ID NO: 716415 - RNA, 24 nt, Human
ccguggcagguagggaccuccucu

SEQ ID NO: 716416 - RNA, 19 nt, Human
ccucauuucccuccuucuc

SEQ ID NO: 716417 - RNA, 18 nt, Human
ccucccgcccgaggcggg

SEQ ID NO: 716418 - RNA, 25 nt, Human
ccuccuucucaggaucuaaaggcag

SEQ ID NO: 716419 - RNA, 20 nt, Human
ccucugucuccguacggggg

SEQ ID NO: 716420 - RNA, 18 nt, Human
ccugggcaccggcccagg

SEQ ID NO: 716421 - RNA, 20 nt, Human
ccuucugucuucucccuucc

SEQ ID NO: 716422 - RNA, 18 nt, Human
cggccugggcccggccuc

SEQ ID NO: 716423 - RNA, 25 nt, Human
cggggcugcggcuccgggggcgacg

SEQ ID NO: 716424 - RNA, 22 nt, Human
cuccguacgggggagcgucuuc

SEQ ID NO: 716425 - RNA, 24 nt, Human
cucugaggagcgcccuggcugaag

SEQ ID NO: 716426 - RNA, 22 nt, Human
cugggcccggccucccgccucc

SEQ ID NO: 716427 - RNA, 24 nt, Human
cuugccuauuaaacucuccgcucc

SEQ ID NO: 716428 - RNA, 19 nt, Human
gaaccucccagaagagcac

SEQ ID NO: 716429 - RNA, 19 nt, Human
gacagcagugggguugggc

SEQ ID NO: 716430 - RNA, 24 nt, Human
gacagcagugggguugggccacau

SEQ ID NO: 716431 - RNA, 23 nt, Human
gagcagagcugcggagaaaggaa

SEQ ID NO: 716432 - RNA, 21 nt, Human
gagccggccuggcggcgggac

SEQ ID NO: 716433 - RNA, 24 nt, Human
gcaccaagaagcagcgaaaagcca

SEQ ID NO: 716434 - RNA, 18 nt, Human
gccauaaauaacagaagc

SEQ ID NO: 716435 - RNA, 21 nt, Human
gccauaaauaacagaagcaaa

SEQ ID NO: 716436 - RNA, 20 nt, Human
gcggagcgggggcgggagcc

SEQ ID NO: 716437 - RNA, 21 nt, Human
gcggcggcggcggcgacugca

SEQ ID NO: 716438 - RNA, 20 nt, Human
gcgggagccacaacauggcg

SEQ ID NO: 716439 - RNA, 20 nt, Human
gcugcggcuccgggggcgga

SEQ ID NO: 716440 - RNA, 19 nt, Human
gcuggggcugccgcggcgg

SEQ ID NO: 716441 - RNA, 23 nt, Human
ggaaaauagagcucugaggagcg

SEQ ID NO: 716442 - RNA, 24 nt, Human
ggaaggagagcuggugucugcagg

SEQ ID NO: 716443 - RNA, 18 nt, Human
ggagcagagcugcggaga

SEQ ID NO: 716444 - RNA, 23 nt, Human
ggcggcggcggcgacugcaggcc

SEQ ID NO: 716445 - RNA, 22 nt, Human
ggcggcgggaccuggcuggggc

SEQ ID NO: 716446 - RNA, 18 nt, Human
ggcgggagccggccuggc

SEQ ID NO: 716447 - RNA, 23 nt, Human
ggcgggggauuggcggggggggc

SEQ ID NO: 716448 - RNA, 19 nt, Human
gggcaaggugaucaagggc

SEQ ID NO: 716449 - RNA, 22 nt, Human
ggggcggagcgggggcgggagc

SEQ ID NO: 716450 - RNA, 22 nt, Human
ggggcuggccugccuggggcag

SEQ ID NO: 716451 - RNA, 19 nt, Human
uaccuaggcacauggucua

SEQ ID NO: 716452 - RNA, 22 nt, Human
uagggaccuccucuuucggcuu

SEQ ID NO: 716453 - RNA, 21 nt, Human
uaggggcuggccugccugggg

SEQ ID NO: 716454 - RNA, 22 nt, Human
ucccagagggacugugucagca

SEQ ID NO: 716455 - RNA, 21 nt, Human
uccuucugucuucucccuucc

SEQ ID NO: 716456 - RNA, 20 nt, Human
ucucaggaucuaaaggcagg

SEQ ID NO: 716457 - RNA, 28 nt, Human
ucucccagagggacugugucagcacccc

SEQ ID NO: 716458 - RNA, 20 nt, Human
ucugucuucucccuuccuuc

SEQ ID NO: 716459 - RNA, 21 nt, Human
ugacaauuaguucucaggacu

SEQ ID NO: 716460 - RNA, 22 nt, Human
ugagggaaaagaaucagagaag

SEQ ID NO: 716461 - RNA, 23 nt, Human
ugcaggccagagucucggccgcg

SEQ ID NO: 716462 - RNA, 19 nt, Human
uggcaagggcugacuggua

SEQ ID NO: 716463 - RNA, 22 nt, Human
uggcacgagagcaguacaaaua

SEQ ID NO: 716464 - RNA, 23 nt, Human
uggcacgagagcaguacaaauau

SEQ ID NO: 716465 - RNA, 19 nt, Human
uggcagguagggaccuccu

SEQ ID NO: 716466 - RNA, 18 nt, Human
uggcugaaggcagcaagc

SEQ ID NO: 716467 - RNA, 22 nt, Human
uggcuggggcugccgcggcggg

SEQ ID NO: 716468 - RNA, 24 nt, Human
uggggcaccaagaagcagcgaaaa

SEQ ID NO: 716469 - RNA, 18 nt, Human
uggggcugccgcggcggg

SEQ ID NO: 716470 - RNA, 25 nt, Human
uggggcugggggauacccagcacug

SEQ ID NO: 716471 - RNA, 19 nt, Human
ugggguuggaaggacacag

SEQ ID NO: 716472 - RNA, 20 nt, Human
uucagagcugugaggguccu

SEQ ID NO: 716473 - RNA, 19 nt, Human
uucucccuuccuucuugcc

SEQ ID NO: 716474 - RNA, 20 nt, Human
aaaaaaaaaaaaaaaaacaa

SEQ ID NO: 716475 - RNA, 24 nt, Human
aaaaaaaaaaaaaaaaacaaguaa

SEQ ID NO: 716476 - RNA, 21 nt, Human
aaaaagaaaucuuuuaauaaa

SEQ ID NO: 716477 - RNA, 20 nt, Human
aaaaauauuauuccucugcc

SEQ ID NO: 716478 - RNA, 23 nt, Human
aaaacagaacucuaacccaaaua

SEQ ID NO: 716479 - RNA, 22 nt, Human
aaacaaaacagaacucuaaccc

SEQ ID NO: 716480 - RNA, 24 nt, Human
aaacaaaacagaacucuaacccaa

SEQ ID NO: 716481 - RNA, 23 nt, Human
aaacagaaacaaaacagaacucu

SEQ ID NO: 716482 - RNA, 19 nt, Human
aaacaugaaaaacuggaug

SEQ ID NO: 716483 - RNA, 22 nt, Human
aaagaaccuucuggcauccagc

SEQ ID NO: 716484 - RNA, 23 nt, Human
aacaaaacagaacucuaacccaa

SEQ ID NO: 716485 - RNA, 21 nt, Human
aacaaguaaccuuugaaacug

SEQ ID NO: 716486 - RNA, 18 nt, Human
aacagaauaaugcuucug

SEQ ID NO: 716487 - RNA, 20 nt, Human
aaccagacguggugaggugu

SEQ ID NO: 716488 - RNA, 23 nt, Human
aacugcaaaagcccugcaggaua

SEQ ID NO: 716489 - RNA, 19 nt, Human
aagaaaauaauaacaaaaa

SEQ ID NO: 716490 - RNA, 20 nt, Human
aagcaauuuccaucccccuu

SEQ ID NO: 716491 - RNA, 21 nt, Human
aagcugguuuuucacaauggc

SEQ ID NO: 716492 - RNA, 21 nt, Human
aauaaauuuuaaagagcaaga

SEQ ID NO: 716493 - RNA, 25 nt, Human
acaaaaagaucccuuuuaauuuaaa

SEQ ID NO: 716494 - RNA, 21 nt, Human
acaaaccacugacuacauagc

SEQ ID NO: 716495 - RNA, 24 nt, Human
acacaauccaaagaggagggaacc

SEQ ID NO: 716496 - RNA, 24 nt, Human
acagaaaacagaaacaaaacagaa

SEQ ID NO: 716497 - RNA, 23 nt, Human
acauagcaauacuccaguauagc

SEQ ID NO: 716498 - RNA, 24 nt, Human
acauccagugccccaaaccaaaac

SEQ ID NO: 716499 - RNA, 20 nt, Human
acaugcuuacuuuuacagga

SEQ ID NO: 716500 - RNA, 24 nt, Human
accagguacuucuacagacgcucc

SEQ ID NO: 716501 - RNA, 19 nt, Human
accauccaaaagaugucag

SEQ ID NO: 716502 - RNA, 21 nt, Human
acuugaggcaaacaugaaaaa

SEQ ID NO: 716503 - RNA, 21 nt, Human
agaaaggccccuggugcccuc

SEQ ID NO: 716504 - RNA, 22 nt, Human
agaacagaagaaacugcaaaag

SEQ ID NO: 716505 - RNA, 19 nt, Human
agaagaaacugcaaaagcc

SEQ ID NO: 716506 - RNA, 22 nt, Human
agaagaaacugcaaaagcccug

SEQ ID NO: 716507 - RNA, 24 nt, Human
agacaaaaaaaauuuaucaaagag

SEQ ID NO: 716508 - RNA, 21 nt, Human
agacacagaaaacagaaacaa

SEQ ID NO: 716509 - RNA, 19 nt, Human
agacguggugagguguugc

SEQ ID NO: 716510 - RNA, 23 nt, Human
aggaagaggguauagaaucaggg

SEQ ID NO: 716511 - RNA, 18 nt, Human
aggcagaaggaucacuug

SEQ ID NO: 716512 - RNA, 23 nt, Human
aggcagaaggaucacuugagccc

SEQ ID NO: 716513 - RNA, 18 nt, Human
aggcugaggcagaaggau

SEQ ID NO: 716514 - RNA, 24 nt, Human
aggcugaggcagaaggaucacuug

SEQ ID NO: 716515 - RNA, 22 nt, Human
agggcccagcccgucccaccuc

SEQ ID NO: 716516 - RNA, 19 nt, Human
aggggaaaggggaggagga

SEQ ID NO: 716517 - RNA, 21 nt, Human
agguaacccugucccaaaaaa

SEQ ID NO: 716518 - RNA, 24 nt, Human
agguacaguggugcucaccuguaa

SEQ ID NO: 716519 - RNA, 21 nt, Human
agucccaccuguuugcccaga

SEQ ID NO: 716520 - RNA, 24 nt, Human
aguggugcucaccuguaaucccag

SEQ ID NO: 716521 - RNA, 21 nt, Human
auaaaacacguuuccugacag

SEQ ID NO: 716522 - RNA, 23 nt, Human
auaaggcagcuuucuacaacagu

SEQ ID NO: 716523 - RNA, 20 nt, Human
auacauuucuuauuuacaga

SEQ ID NO: 716524 - RNA, 18 nt, Human
auccagugccccaaacca

SEQ ID NO: 716525 - RNA, 20 nt, Human
auccuuagaggugggaaaac

SEQ ID NO: 716526 - RNA, 19 nt, Human
auggagagcuagcaaaccc

SEQ ID NO: 716527 - RNA, 18 nt, Human
caaaaugcaaaauaccau

SEQ ID NO: 716528 - RNA, 24 nt, Human
caaaccaaaaccaauauaaggcac

SEQ ID NO: 716529 - RNA, 20 nt, Human
caaggauuaaccagacgugg

SEQ ID NO: 716530 - RNA, 23 nt, Human
caauccaaagaugccccaucuau

SEQ ID NO: 716531 - RNA, 22 nt, Human
cacagaaaacagaaacaaaacc

SEQ ID NO: 716532 - RNA, 20 nt, Human
cacagaacagaagaaacugc

SEQ ID NO: 716533 - RNA, 21 nt, Human
caccauguggcuaaacaggcc

SEQ ID NO: 716534 - RNA, 21 nt, Human
caccauguggcuaaacaggcc

SEQ ID NO: 716535 - RNA, 22 nt, Human
caccugcagcauuguguaguuu

SEQ ID NO: 716536 - RNA, 23 nt, Human
caccuguaaucccagcuacucgg

SEQ ID NO: 716537 - RNA, 24 nt, Human
caccuguaaucccagcuacucggg

SEQ ID NO: 716538 - RNA, 21 nt, Human
caccuguuugcccagagacaa

SEQ ID NO: 716539 - RNA, 23 nt, Human
cacuagacacagaaaacagaaac

SEQ ID NO: 716540 - RNA, 27 nt, Human
cacuagacacagaaaacagaaacaaaa

SEQ ID NO: 716541 - RNA, 22 nt, Human
cagaaaacagaaacaaaacaga

SEQ ID NO: 716542 - RNA, 21 nt, Human
cagaacacagaacagaagaaa

SEQ ID NO: 716543 - RNA, 19 nt, Human
cagagcgggagaggagggg

SEQ ID NO: 716544 - RNA, 21 nt, Human
cagauugcacaacugcacuga

SEQ ID NO: 716545 - RNA, 24 nt, Human
cagcuacucgggaggcugaggcag

SEQ ID NO: 716546 - RNA, 23 nt, Human
caggcaggaagaacucaccuccu

SEQ ID NO: 716547 - RNA, 19 nt, Human
cagggcauuuuauugaaca

SEQ ID NO: 716548 - RNA, 21 nt, Human
caguaaacugaacuacgaaau

SEQ ID NO: 716549 - RNA, 19 nt, Human
cagugccccaaaccaaaac

SEQ ID NO: 716550 - RNA, 18 nt, Human
caugcaugcaugugugug

SEQ ID NO: 716551 - RNA, 18 nt, Human
ccagcaaagugaagagac

SEQ ID NO: 716552 - RNA, 19 nt, Human
ccagccccacaaaccacug

SEQ ID NO: 716553 - RNA, 24 nt, Human
ccauaacacuuaaaauuuucaaga

SEQ ID NO: 716554 - RNA, 18 nt, Human
cccaaaaaaauaucaaga

SEQ ID NO: 716555 - RNA, 22 nt, Human
cccaccacugccgccacagaag

SEQ ID NO: 716556 - RNA, 19 nt, Human
cccacugguauuaauucca

SEQ ID NO: 716557 - RNA, 21 nt, Human
cccagcccgucccaccuccuc

SEQ ID NO: 716558 - RNA, 23 nt, Human
cccagguaacccugucccaaaaa

SEQ ID NO: 716559 - RNA, 29 nt, Human
cccucagucucacccacugguauuaauuc

SEQ ID NO: 716560 - RNA, 18 nt, Human
cccugaggauucaguuac

SEQ ID NO: 716561 - RNA, 23 nt, Human
ccugagcccugugaaaccuggga

SEQ ID NO: 716562 - RNA, 21 nt, Human
ccuguaaucccagcuacucgg

SEQ ID NO: 716563 - RNA, 21 nt, Human
ccuugcagaaagaaggaagag

SEQ ID NO: 716564 - RNA, 24 nt, Human
ccuuucuuaugcaaaauaaauaaa

SEQ ID NO: 716565 - RNA, 24 nt, Human
cgggaggcugaggcagaaggauca

SEQ ID NO: 716566 - RNA, 18 nt, Human
cgugcuaugugaggcugg

SEQ ID NO: 716567 - RNA, 23 nt, Human
cuaccuuuucaccagcacuacau

SEQ ID NO: 716568 - RNA, 18 nt, Human
cucaauccucuaacaaag

SEQ ID NO: 716569 - RNA, 19 nt, Human
cucaccuguaaucccagcu

SEQ ID NO: 716570 - RNA, 24 nt, Human
cuccuccucagccauucucuaccc

SEQ ID NO: 716571 - RNA, 23 nt, Human
cugaaaauacucuuuucaaaaau

SEQ ID NO: 716572 - RNA, 19 nt, Human
cugcucagccacccugugg

SEQ ID NO: 716573 - RNA, 18 nt, Human
cuggaacuaugggaguuc

SEQ ID NO: 716574 - RNA, 24 nt, Human
cuggacuuuggcauggucuggguu

SEQ ID NO: 716575 - RNA, 21 nt, Human
cuguaaucccagcuacucggg

SEQ ID NO: 716576 - RNA, 23 nt, Human
gaaaagauguacaugaaauccuu

SEQ ID NO: 716577 - RNA, 28 nt, Human
gaaacaaaacagaacucuaacccaaauu

SEQ ID NO: 716578 - RNA, 18 nt, Human
gaaagaaggaagagggua

SEQ ID NO: 716579 - RNA, 19 nt, Human
gaagaaacugcaaaagccc

SEQ ID NO: 716580 - RNA, 18 nt, Human
gacacagaaaacagaaac

SEQ ID NO: 716581 - RNA, 20 nt, Human
gacacuguuaauaaacagaa

SEQ ID NO: 716582 - RNA, 21 nt, Human
gaccccaauuaucuaacaaca

SEQ ID NO: 716583 - RNA, 19 nt, Human
gagguguugcacagaaauu

SEQ ID NO: 716584 - RNA, 21 nt, Human
gcacuagaauaggagcuggau

SEQ ID NO: 716585 - RNA, 23 nt, Human
gcagcuuucuacaacaguucugc

SEQ ID NO: 716586 - RNA, 19 nt, Human
gcaugcaugcaugugugug

SEQ ID NO: 716587 - RNA, 18 nt, Human
gccaagcaauuuccaucc

SEQ ID NO: 716588 - RNA, 24 nt, Human
gccaagcaauuuccaucccccuuu

SEQ ID NO: 716589 - RNA, 26 nt, Human
gccagguacaguggugcuccccaugg

SEQ ID NO: 716590 - RNA, 21 nt, Human
ggaaaacagugacaggugaga

SEQ ID NO: 716591 - RNA, 21 nt, Human
ggcaggaagaacucaccuccu

SEQ ID NO: 716592 - RNA, 18 nt, Human
ggcucagagccgccgcaa

SEQ ID NO: 716593 - RNA, 23 nt, Human
gggaggcugaggcagaaggauca

SEQ ID NO: 716594 - RNA, 19 nt, Human
ggggaaaggggaggaggaa

SEQ ID NO: 716595 - RNA, 19 nt, Human
ggucugguucaagaugagg

SEQ ID NO: 716596 - RNA, 24 nt, Human
guaaccuuugaaacuggcucaaag

SEQ ID NO: 716597 - RNA, 27 nt, Human
uaaaaagauuuaccuuucuuaugcaaa

SEQ ID NO: 716598 - RNA, 18 nt, Human
uaaaaggcaccugauucu

SEQ ID NO: 716599 - RNA, 24 nt, Human
uaaagcgcgggggccuccccgccg

SEQ ID NO: 716600 - RNA, 23 nt, Human
uaaauacauagaaaauuauuuaa

SEQ ID NO: 716601 - RNA, 24 nt, Human
uaaauacauagaaaauuauuuaag

SEQ ID NO: 716602 - RNA, 19 nt, Human
uacaggugguaaucauuca

SEQ ID NO: 716603 - RNA, 20 nt, Human
uacccaggauuucagaacac

SEQ ID NO: 716604 - RNA, 24 nt, Human
uagacacagaaaacagaaacaaaa

SEQ ID NO: 716605 - RNA, 26 nt, Human
uagacacagaaaacagaaacaaaaca

SEQ ID NO: 716606 - RNA, 19 nt, Human
uagacacuagcuacacgug

SEQ ID NO: 716607 - RNA, 18 nt, Human
uagcacaacuuccuccuu

SEQ ID NO: 716608 - RNA, 23 nt, Human
uaggagcuggaugcugggaaugg

SEQ ID NO: 716609 - RNA, 22 nt, Human
uauucaaaaugcaaaauaccau

SEQ ID NO: 716610 - RNA, 19 nt, Human
ucacaggcaggaagaacuc

SEQ ID NO: 716611 - RNA, 18 nt, Human
ucagcccugcugcacugu

SEQ ID NO: 716612 - RNA, 19 nt, Human
ucagggaguuccacaggua

SEQ ID NO: 716613 - RNA, 22 nt, Human
uccaaagaggaauuacaggugg

SEQ ID NO: 716614 - RNA, 27 nt, Human
uccagaaagcagaaaggaaugucucau

SEQ ID NO: 716615 - RNA, 19 nt, Human
ucccaccuguuugcccaga

SEQ ID NO: 716616 - RNA, 21 nt, Human
ucccuaaaaggcaccugauuc

SEQ ID NO: 716617 - RNA, 21 nt, Human
ucccuauuccaggagcaugag

SEQ ID NO: 716618 - RNA, 29 nt, Human
uccucgauuucccaaggggucccuggccc

SEQ ID NO: 716619 - RNA, 23 nt, Human
uccugacagccuguggccccugg

SEQ ID NO: 716620 - RNA, 25 nt, Human
ucgggaggcugaggcagaaggauca

SEQ ID NO: 716621 - RNA, 18 nt, Human
ucuaaaacaagaaaagcc

SEQ ID NO: 716622 - RNA, 19 nt, Human
ucuaaaacaagaaaagccc

SEQ ID NO: 716623 - RNA, 18 nt, Human
ucuacacaauccaaagag

SEQ ID NO: 716624 - RNA, 18 nt, Human
ugaaacuggcucaaagaa

SEQ ID NO: 716625 - RNA, 18 nt, Human
ugaaaggcaaagacuggc

SEQ ID NO: 716626 - RNA, 18 nt, Human
ugacuuaaaaaaaaaaaa

SEQ ID NO: 716627 - RNA, 20 nt, Human
ugaggcagaaggaucacuug

SEQ ID NO: 716628 - RNA, 24 nt, Human
ugaggcagaaggaucacuugagcc

SEQ ID NO: 716629 - RNA, 25 nt, Human
ugaggcagaaggaucacuugagccc

SEQ ID NO: 716630 - RNA, 19 nt, Human
ugaucuaaaacaagaaaag

SEQ ID NO: 716631 - RNA, 19 nt, Human
ugauucuggaacuauggga

SEQ ID NO: 716632 - RNA, 21 nt, Human
ugcacaacugcacugaccaaa

SEQ ID NO: 716633 - RNA, 21 nt, Human
ugccccaucuauugugcuuau

SEQ ID NO: 716634 - RNA, 22 nt, Human
uggacgggguagucuggaagcu

SEQ ID NO: 716635 - RNA, 21 nt, Human
uggggagaaggggaaagggga

SEQ ID NO: 716636 - RNA, 23 nt, Human
ugguggggagaaggggaaagggg

SEQ ID NO: 716637 - RNA, 20 nt, Human
ugugaaaccugggacacagg

SEQ ID NO: 716638 - RNA, 21 nt, Human
ugugcaugcaugcaugugugu

SEQ ID NO: 716639 - RNA, 23 nt, Human
uguguaauuaacauuuucaauga

SEQ ID NO: 716640 - RNA, 24 nt, Human
ugugugcaugcaugcaugugugug

SEQ ID NO: 716641 - RNA, 26 nt, Human
uuaaaaaaaaaaaaaaaaaaacaagu

SEQ ID NO: 716642 - RNA, 24 nt, Human
uuaacauuuucaaugagucaguga

SEQ ID NO: 716643 - RNA, 18 nt, Human
uuagacagugcuuauuuc

SEQ ID NO: 716644 - RNA, 21 nt, Human
uuccugacagccuguggcccc

SEQ ID NO: 716645 - RNA, 20 nt, Human
uugaauacagaagcugguuu

SEQ ID NO: 716646 - RNA, 19 nt, Human
uuggacgggguagucugga

SEQ ID NO: 716647 - RNA, 23 nt, Human
uuggacgggguagucuggaagcu

SEQ ID NO: 716648 - RNA, 21 nt, Human
uuuaaaaaaaugaaggaaaga

SEQ ID NO: 716649 - RNA, 20 nt, Human
uuuacuagaaugcguuucca

SEQ ID NO: 716650 - RNA, 21 nt, Human
uuucagacuggacuuuggcau

SEQ ID NO: 716651 - RNA, 19 nt, Human
uuuuuuguaaaaagauuua

SEQ ID NO: 716652 - RNA, 24 nt, Human
aaaaaggugacauuugaaaaagga

SEQ ID NO: 716653 - RNA, 24 nt, Human
aaaaugaaaaaaauuaacaaagaa

SEQ ID NO: 716654 - RNA, 21 nt, Human
aaccaaccucuggacaaccug

SEQ ID NO: 716655 - RNA, 18 nt, Human
aagaaaagagagcugaga

SEQ ID NO: 716656 - RNA, 19 nt, Human
aagaagaaaagagagcuga

SEQ ID NO: 716657 - RNA, 21 nt, Human
aagaagaaaagagagcugaga

SEQ ID NO: 716658 - RNA, 18 nt, Human
aauaucuacuccagagaa

SEQ ID NO: 716659 - RNA, 21 nt, Human
acaaaagaaauauuuugaaga

SEQ ID NO: 716660 - RNA, 19 nt, Human
acauauacuugucaaugug

SEQ ID NO: 716661 - RNA, 22 nt, Human
accaaccucuggacaaccugca

SEQ ID NO: 716662 - RNA, 21 nt, Human
accuacuacaacugggcuguu

SEQ ID NO: 716663 - RNA, 22 nt, Human
acuacaacugggcuguuucacc

SEQ ID NO: 716664 - RNA, 21 nt, Human
acuccagagaacucaaagaaa

SEQ ID NO: 716665 - RNA, 24 nt, Human
agaaagcaaaaagcaaaggaaccc

SEQ ID NO: 716666 - RNA, 18 nt, Human
agaaauuaaucaaggcug

SEQ ID NO: 716667 - RNA, 19 nt, Human
agaagaaagagaauauuaa

SEQ ID NO: 716668 - RNA, 23 nt, Human
aggcacaaaagaaauauuuugaa

SEQ ID NO: 716669 - RNA, 23 nt, Human
aggcgguugggcggcggcggcgg

SEQ ID NO: 716670 - RNA, 18 nt, Human
aggcuccuucauuuaccu

SEQ ID NO: 716671 - RNA, 27 nt, Human
agguauacaaaaacugucagccaaacu

SEQ ID NO: 716672 - RNA, 22 nt, Human
auaggggaaauucucuuccuca

SEQ ID NO: 716673 - RNA, 23 nt, Human
auggggcaaaggcaaagguuggg

SEQ ID NO: 716674 - RNA, 18 nt, Human
auguagccaaaagagagg

SEQ ID NO: 716675 - RNA, 21 nt, Human
auuaccaugaagguaucaaau

SEQ ID NO: 716676 - RNA, 22 nt, Human
caaaauacaggacaccuaccac

SEQ ID NO: 716677 - RNA, 23 nt, Human
caaaauguagcaaauacauuuug

SEQ ID NO: 716678 - RNA, 18 nt, Human
caacacaaaaacccugac

SEQ ID NO: 716679 - RNA, 19 nt, Human
caagaacacaacuggggga

SEQ ID NO: 716680 - RNA, 25 nt, Human
caagacaauuuacuauggaaaaaug

SEQ ID NO: 716681 - RNA, 21 nt, Human
cacuuugggaaaggcucugga

SEQ ID NO: 716682 - RNA, 26 nt, Human
cagaaaaggagaaagcaaaaagcaaa

SEQ ID NO: 716683 - RNA, 22 nt, Human
cagaaaccuagugcauaaauag

SEQ ID NO: 716684 - RNA, 24 nt, Human
cagacauguuuuuauccacccccc

SEQ ID NO: 716685 - RNA, 19 nt, Human
cagcucccgcccucggccc

SEQ ID NO: 716686 - RNA, 22 nt, Human
cauuuucaaaaacugcaagaca

SEQ ID NO: 716687 - RNA, 18 nt, Human
ccaaaauauuuacugagc

SEQ ID NO: 716688 - RNA, 24 nt, Human
ccaaacaaaauacaggacaccuac

SEQ ID NO: 716689 - RNA, 19 nt, Human
ccagagaacucaaagaaaa

SEQ ID NO: 716690 - RNA, 26 nt, Human
cccaaacaaaauacaggacaccuacc

SEQ ID NO: 716691 - RNA, 22 nt, Human
ccccccgccggggccgcccccc

SEQ ID NO: 716692 - RNA, 20 nt, Human
cccccgcgccucagcucccg

SEQ ID NO: 716693 - RNA, 21 nt, Human
cccccgcgccucagcucccgc

SEQ ID NO: 716694 - RNA, 23 nt, Human
cccccuaaccgcucgcuuucuuc

SEQ ID NO: 716695 - RNA, 18 nt, Human
cccgccccccgccggggc

SEQ ID NO: 716696 - RNA, 23 nt, Human
cccggcccgucaggccucagccg

SEQ ID NO: 716697 - RNA, 20 nt, Human
cccugggcccagcuguuccc

SEQ ID NO: 716698 - RNA, 20 nt, Human
ccgcgccucagcucccgccc

SEQ ID NO: 716699 - RNA, 19 nt, Human
ccucgcccccgccccccgc

SEQ ID NO: 716700 - RNA, 22 nt, Human
ccucugacaaaccaaccucugg

SEQ ID NO: 716701 - RNA, 22 nt, Human
ccugccccuuaauccccuccuc

SEQ ID NO: 716702 - RNA, 24 nt, Human
cggcggcugaggcggcgcggagca

SEQ ID NO: 716703 - RNA, 19 nt, Human
cggcugaggcggcgcggag

SEQ ID NO: 716704 - RNA, 21 nt, Human
cggucggagugguaaccgccc

SEQ ID NO: 716705 - RNA, 18 nt, Human
cucacuuugggaaaggcu

SEQ ID NO: 716706 - RNA, 20 nt, Human
cuccacgccgcggcccggcc

SEQ ID NO: 716707 - RNA, 18 nt, Human
cucccgcccucggcccuc

SEQ ID NO: 716708 - RNA, 19 nt, Human
cuccucgcccccgcccccc

SEQ ID NO: 716709 - RNA, 21 nt, Human
cucgcaccugccccuuaaucc

SEQ ID NO: 716710 - RNA, 18 nt, Human
cucuggggagucacaugc

SEQ ID NO: 716711 - RNA, 19 nt, Human
cucuggggagucacaugcu

SEQ ID NO: 716712 - RNA, 27 nt, Human
cugaagcacuguuuugauguuugcuuu

SEQ ID NO: 716713 - RNA, 19 nt, Human
gaaaacaacacaaaaaccc

SEQ ID NO: 716714 - RNA, 19 nt, Human
gaagauguagccaaaagag

SEQ ID NO: 716715 - RNA, 21 nt, Human
gagcauuuuccuuggaaguag

SEQ ID NO: 716716 - RNA, 24 nt, Human
gcaccugccccuuaauccccuccu

SEQ ID NO: 716717 - RNA, 23 nt, Human
gccaaaagagaggcaaaacacau

SEQ ID NO: 716718 - RNA, 20 nt, Human
gcccagcuguucccaauagc

SEQ ID NO: 716719 - RNA, 22 nt, Human
gcccggcccgucaggccucagc

SEQ ID NO: 716720 - RNA, 26 nt, Human
gcccucggcccucguccgcccggccc

SEQ ID NO: 716721 - RNA, 19 nt, Human
gcggcggcggcggcugagg

SEQ ID NO: 716722 - RNA, 22 nt, Human
gcggcggcggcggcugaggcgg

SEQ ID NO: 716723 - RNA, 23 nt, Human
gcggcggcggcggcugaggcggc

SEQ ID NO: 716724 - RNA, 21 nt, Human
gcgguugggcggcggcggcga

SEQ ID NO: 716725 - RNA, 20 nt, Human
gcuaagaagaaaagagagcu

SEQ ID NO: 716726 - RNA, 18 nt, Human
ggaauccuucacaaaugc

SEQ ID NO: 716727 - RNA, 19 nt, Human
ggaauccuucacaaaugcc

SEQ ID NO: 716728 - RNA, 18 nt, Human
ggcggcggcggcggcuga

SEQ ID NO: 716729 - RNA, 21 nt, Human
gggcggcggcggcggcugagg

SEQ ID NO: 716730 - RNA, 24 nt, Human
gggcggcggcggcggcugaggcgg

SEQ ID NO: 716731 - RNA, 18 nt, Human
uaaaaauggaaaauggcc

SEQ ID NO: 716732 - RNA, 21 nt, Human
uaaaaauggaaaauggccucu

SEQ ID NO: 716733 - RNA, 20 nt, Human
uaaagcagguauacaaaaac

SEQ ID NO: 716734 - RNA, 24 nt, Human
uaacaacguuacaagaacacaacu

SEQ ID NO: 716735 - RNA, 22 nt, Human
uagccucugacaaaccaaccuc

SEQ ID NO: 716736 - RNA, 22 nt, Human
uaggcacaaaagaaauauuuug

SEQ ID NO: 716737 - RNA, 20 nt, Human
uauaacacagcuccaucaua

SEQ ID NO: 716738 - RNA, 25 nt, Human
uauggcauguuuacacauguacaua

SEQ ID NO: 716739 - RNA, 26 nt, Human
uauggguuuuccccaauauauggggc

SEQ ID NO: 716740 - RNA, 19 nt, Human
uauuacaacuauauuuccc

SEQ ID NO: 716741 - RNA, 18 nt, Human
ucagaaaaggagaaagca

SEQ ID NO: 716742 - RNA, 23 nt, Human
ucagucaggugaaauaguuauga

SEQ ID NO: 716743 - RNA, 20 nt, Human
uccacgccgcggcccggcaa

SEQ ID NO: 716744 - RNA, 24 nt, Human
uccagagaacucaaagaaaaagca

SEQ ID NO: 716745 - RNA, 25 nt, Human
ucccacuacacuuuccaaaacuaga

SEQ ID NO: 716746 - RNA, 18 nt, Human
uccggucggagugguaac

SEQ ID NO: 716747 - RNA, 22 nt, Human
uccuucacaaaugccuaaacag

SEQ ID NO: 716748 - RNA, 21 nt, Human
ucgcggcuccugcccggcucc

SEQ ID NO: 716749 - RNA, 22 nt, Human
ucggagugguaaccgccccccu

SEQ ID NO: 716750 - RNA, 19 nt, Human
ugaaaacaacacaaaaacc

SEQ ID NO: 716751 - RNA, 18 nt, Human
ugacaguaucuaagaugg

SEQ ID NO: 716752 - RNA, 21 nt, Human
ugccuaaacagagaaucagag

SEQ ID NO: 716753 - RNA, 22 nt, Human
ugccuaaacagagaaucagagc

SEQ ID NO: 716754 - RNA, 20 nt, Human
ugcuaaaauccuuuuggugu

SEQ ID NO: 716755 - RNA, 19 nt, Human
uggaaaacuggacuauaua

SEQ ID NO: 716756 - RNA, 19 nt, Human
uggcauguuuacacaugua

SEQ ID NO: 716757 - RNA, 22 nt, Human
ugggcggcggcggcggcugagg

SEQ ID NO: 716758 - RNA, 22 nt, Human
uuaaagcagguauacaaaaacu

SEQ ID NO: 716759 - RNA, 22 nt, Human
uugaaaacaacacaaaaacccu

SEQ ID NO: 716760 - RNA, 21 nt, Human
uugaaauuuacaacugaaggc

SEQ ID NO: 716761 - RNA, 24 nt, Human
uugggcggcggcggcggcugaggc

SEQ ID NO: 716762 - RNA, 23 nt, Human
uuugacaguaucuaagauggugg

SEQ ID NO: 716763 - RNA, 18 nt, Human
uuuguaaacacuauccac

SEQ ID NO: 716764 - RNA, 19 nt, Human
uuuguaaacacuauccaca

SEQ ID NO: 716765 - RNA, 23 nt, Human
uuuuauccaccccccccccccgc

SEQ ID NO: 716766 - RNA, 23 nt, Human
aaaaaaaaaaaaaaaaagcagag

SEQ ID NO: 716767 - RNA, 20 nt, Human
aaaacaacaucaugguacaa

SEQ ID NO: 716768 - RNA, 21 nt, Human
aaaacaacaucaugguacaac

SEQ ID NO: 716769 - RNA, 20 nt, Human
aaaaugccauuugucacugc

SEQ ID NO: 716770 - RNA, 21 nt, Human
aaaaugccauuugucacuggu

SEQ ID NO: 716771 - RNA, 22 nt, Human
aaagaaaaauuugaggcauuuu

SEQ ID NO: 716772 - RNA, 19 nt, Human
aaccacaaacaccauucuc

SEQ ID NO: 716773 - RNA, 19 nt, Human
aagaaaaccaacuugagga

SEQ ID NO: 716774 - RNA, 22 nt, Human
aagagaaaaaagaaaaucucaa

SEQ ID NO: 716775 - RNA, 26 nt, Human
aagcagaacaaaaacgaaacccucga

SEQ ID NO: 716776 - RNA, 24 nt, Human
aagcugguuacuugcuugcagugc

SEQ ID NO: 716777 - RNA, 19 nt, Human
aaggacucacuggcggacg

SEQ ID NO: 716778 - RNA, 21 nt, Human
aaugacacaaaaggaaacuua

SEQ ID NO: 716779 - RNA, 24 nt, Human
aauucccuuuugcagcaaagaggc

SEQ ID NO: 716780 - RNA, 19 nt, Human
acagcacaguuggcaugga

SEQ ID NO: 716781 - RNA, 18 nt, Human
acuacagcucgccagcgg

SEQ ID NO: 716782 - RNA, 21 nt, Human
acuggagugagaagcugguua

SEQ ID NO: 716783 - RNA, 22 nt, Human
agaacaaaaacgaaacccucga

SEQ ID NO: 716784 - RNA, 21 nt, Human
agacacucacucucagagaac

SEQ ID NO: 716785 - RNA, 18 nt, Human
agacaggcaugcaccacc

SEQ ID NO: 716786 - RNA, 23 nt, Human
agcacagcucccacaucagcacu

SEQ ID NO: 716787 - RNA, 24 nt, Human
agcacagcucccacaucagcacug

SEQ ID NO: 716788 - RNA, 25 nt, Human
agcagaacaaaaacgaaacccucga

SEQ ID NO: 716789 - RNA, 19 nt, Human
aggaaacuuaaauuaccaa

SEQ ID NO: 716790 - RNA, 21 nt, Human
aggcaugcaccaccacuaccc

SEQ ID NO: 716791 - RNA, 23 nt, Human
aggcauuuuaaaacaaaauaauu

SEQ ID NO: 716792 - RNA, 19 nt, Human
agugcagcacuucuggaag

SEQ ID NO: 716793 - RNA, 18 nt, Human
auaagcaucaucacacga

SEQ ID NO: 716794 - RNA, 22 nt, Human
auauagcaaucuguauuucacc

SEQ ID NO: 716795 - RNA, 19 nt, Human
aucagguuuuuucagacau

SEQ ID NO: 716796 - RNA, 22 nt, Human
augaagcagaacaaaaacgaaa

SEQ ID NO: 716797 - RNA, 26 nt, Human
augaagcagaacaaaaacgaaacccu

SEQ ID NO: 716798 - RNA, 20 nt, Human
augacaggagggccugggug

SEQ ID NO: 716799 - RNA, 20 nt, Human
augccacaguccccuaccaa

SEQ ID NO: 716800 - RNA, 24 nt, Human
auggaggcuuaauaaaaaauacca

SEQ ID NO: 716801 - RNA, 20 nt, Human
caaacaccauucucucacga

SEQ ID NO: 716802 - RNA, 23 nt, Human
caacuacaaaaaaaaauccccau

SEQ ID NO: 716803 - RNA, 19 nt, Human
caacucacagaagaaaacc

SEQ ID NO: 716804 - RNA, 21 nt, Human
caacucacagaagaaaaccaa

SEQ ID NO: 716805 - RNA, 20 nt, Human
caacuucugguaacauguca

SEQ ID NO: 716806 - RNA, 23 nt, Human
cacaaaaggaaacuuaaauuacc

SEQ ID NO: 716807 - RNA, 23 nt, Human
cacacagacaggcaugcaccacc

SEQ ID NO: 716808 - RNA, 21 nt, Human
cacagacaggcaugcaccacc

SEQ ID NO: 716809 - RNA, 21 nt, Human
cacagacaggcaugcaccacc

SEQ ID NO: 716810 - RNA, 22 nt, Human
caccaccacuacccgucgcccg

SEQ ID NO: 716811 - RNA, 21 nt, Human
cacgcaagccgcaacuacagc

SEQ ID NO: 716812 - RNA, 22 nt, Human
cacugcaagcuccuaaccagcg

SEQ ID NO: 716813 - RNA, 22 nt, Human
cacugccucuacgaggccacac

SEQ ID NO: 716814 - RNA, 23 nt, Human
cacugcgcugcaaugcucacacc

SEQ ID NO: 716815 - RNA, 22 nt, Human
cagaagacugcugcuggcuagg

SEQ ID NO: 716816 - RNA, 23 nt, Human
cagacacugcaagcuccuaacca

SEQ ID NO: 716817 - RNA, 19 nt, Human
cagagugcuggggaacacg

SEQ ID NO: 716818 - RNA, 19 nt, Human
cagcucccacaucagcacu

SEQ ID NO: 716819 - RNA, 24 nt, Human
caucagaaccaagguuucuggggu

SEQ ID NO: 716820 - RNA, 20 nt, Human
ccacaccugccucugccaag

SEQ ID NO: 716821 - RNA, 21 nt, Human
ccacccgccagugacagccgg

SEQ ID NO: 716822 - RNA, 19 nt, Human
ccagcggggcacacagaca

SEQ ID NO: 716823 - RNA, 22 nt, Human
ccagcuuucugaguauugagag

SEQ ID NO: 716824 - RNA, 27 nt, Human
ccaguuacuuaaaaaaaaaaaaaaaaa

SEQ ID NO: 716825 - RNA, 22 nt, Human
ccauuugucacugcugcaucuc

SEQ ID NO: 716826 - RNA, 26 nt, Human
cccacaggccucagacacugcaagcu

SEQ ID NO: 716827 - RNA, 23 nt, Human
ccccgcgcugugagcugcuggcg

SEQ ID NO: 716828 - RNA, 20 nt, Human
cccuuaauuuagaaaaacuc

SEQ ID NO: 716829 - RNA, 22 nt, Human
ccuccgagcaacguuucaguuc

SEQ ID NO: 716830 - RNA, 19 nt, Human
ccuguagugggccgcgagg

SEQ ID NO: 716831 - RNA, 23 nt, Human
cgcaguaacugaguaacucugac

SEQ ID NO: 716832 - RNA, 19 nt, Human
cgcugcaaugcucacaccu

SEQ ID NO: 716833 - RNA, 20 nt, Human
cggcuuagguggaagcacag

SEQ ID NO: 716834 - RNA, 20 nt, Human
cuacaaaaaaaaauccccau

SEQ ID NO: 716835 - RNA, 20 nt, Human
cuauucacaaugugcuuuga

SEQ ID NO: 716836 - RNA, 18 nt, Human
cucacagaagaaaaccaa

SEQ ID NO: 716837 - RNA, 23 nt, Human
cugacaacuacaaaaaaaaaucc

SEQ ID NO: 716838 - RNA, 20 nt, Human
cuggggguaaaggagggugu

SEQ ID NO: 716839 - RNA, 18 nt, Human
cugggguggccccugcag

SEQ ID NO: 716840 - RNA, 27 nt, Human
cuuaaaaaaaaaaaaaaaaagcagagu

SEQ ID NO: 716841 - RNA, 20 nt, Human
cuuaaaaaaaaaaaaaguau

SEQ ID NO: 716842 - RNA, 24 nt, Human
cuuacgauccugccaguuuuugcu

SEQ ID NO: 716843 - RNA, 21 nt, Human
gacaacuacaaaaaaaaaucc

SEQ ID NO: 716844 - RNA, 18 nt, Human
gacuuuccaauucccuuu

SEQ ID NO: 716845 - RNA, 21 nt, Human
gagugagaagcugguuacuug

SEQ ID NO: 716846 - RNA, 22 nt, Human
gcagaacaaaaacgaaacccuc

SEQ ID NO: 716847 - RNA, 20 nt, Human
gcagcaaagaggcagaauca

SEQ ID NO: 716848 - RNA, 19 nt, Human
gccaacccagggccgggcu

SEQ ID NO: 716849 - RNA, 18 nt, Human
gccagcgcccucgccucg

SEQ ID NO: 716850 - RNA, 19 nt, Human
gcccuggcccuuccguagc

SEQ ID NO: 716851 - RNA, 19 nt, Human
gcugcccuccucaugcagc

SEQ ID NO: 716852 - RNA, 22 nt, Human
ggaaaggacuucucauuauuaa

SEQ ID NO: 716853 - RNA, 19 nt, Human
gggaaaaaccacaaacacc

SEQ ID NO: 716854 - RNA, 22 nt, Human
gggagagugucucguuuguggu

SEQ ID NO: 716855 - RNA, 24 nt, Human
gguguuaacuuaaaaaaaaaaaaa

SEQ ID NO: 716856 - RNA, 20 nt, Human
guaaaagagcaggaacuuua

SEQ ID NO: 716857 - RNA, 19 nt, Human
guacagggagauguccaca

SEQ ID NO: 716858 - RNA, 20 nt, Human
gugagcugcuggcggccagc

SEQ ID NO: 716859 - RNA, 18 nt, Human
uaaauaaaauucaagucu

SEQ ID NO: 716860 - RNA, 22 nt, Human
uaaauccaugugcugaugcaga

SEQ ID NO: 716861 - RNA, 22 nt, Human
uaacacagcgcucugcgacccc

SEQ ID NO: 716862 - RNA, 19 nt, Human
uaacauuuuguggaauaaa

SEQ ID NO: 716863 - RNA, 21 nt, Human
uaagcaccaaccuaaaauaag

SEQ ID NO: 716864 - RNA, 22 nt, Human
uacaaaaguuaaggcaaaguca

SEQ ID NO: 716865 - RNA, 23 nt, Human
uacauaacucuuaaauccaugug

SEQ ID NO: 716866 - RNA, 18 nt, Human
uaugaaagccacucucau

SEQ ID NO: 716867 - RNA, 22 nt, Human
uauuaaaaaccaaggacucacu

SEQ ID NO: 716868 - RNA, 20 nt, Human
uauuuacaacuguacaagcg

SEQ ID NO: 716869 - RNA, 19 nt, Human
ucacagaucaauuauuucu

SEQ ID NO: 716870 - RNA, 24 nt, Human
ucagugggcaacaaaguguauguu

SEQ ID NO: 716871 - RNA, 22 nt, Human
ucccacaggccucagacacugc

SEQ ID NO: 716872 - RNA, 25 nt, Human
ucuacaucccgcucaacagcaacau

SEQ ID NO: 716873 - RNA, 20 nt, Human
ucuauaaccugagauacugc

SEQ ID NO: 716874 - RNA, 22 nt, Human
ucuccaaccagagugcugggga

SEQ ID NO: 716875 - RNA, 21 nt, Human
ucugcagcccuguagugggcc

SEQ ID NO: 716876 - RNA, 23 nt, Human
ucuuguuaaauaacauuuugugg

SEQ ID NO: 716877 - RNA, 24 nt, Human
ugaaaaaagaucaacuguugaaga

SEQ ID NO: 716878 - RNA, 22 nt, Human
ugaaacuggagugagaagcugg

SEQ ID NO: 716879 - RNA, 19 nt, Human
ugaagcagaacaaaaacga

SEQ ID NO: 716880 - RNA, 23 nt, Human
ugaagcagaacaaaaacgaaacc

SEQ ID NO: 716881 - RNA, 20 nt, Human
ugaaugacacaaaaggaaac

SEQ ID NO: 716882 - RNA, 20 nt, Human
ugacacaaaaggaaacuuaa

SEQ ID NO: 716883 - RNA, 21 nt, Human
ugagaagcugguuacuugcuu

SEQ ID NO: 716884 - RNA, 19 nt, Human
ugaggcccucgucuuggag

SEQ ID NO: 716885 - RNA, 22 nt, Human
ugaugacaggagggccugggug

SEQ ID NO: 716886 - RNA, 18 nt, Human
ugaugcagaagacugcug

SEQ ID NO: 716887 - RNA, 22 nt, Human
ugaugcagaagacugcugcugg

SEQ ID NO: 716888 - RNA, 18 nt, Human
ugaugugaugacaggagg

SEQ ID NO: 716889 - RNA, 19 nt, Human
ugcaccaccacuacccguc

SEQ ID NO: 716890 - RNA, 20 nt, Human
ugcaccaccacuacccgucg

SEQ ID NO: 716891 - RNA, 20 nt, Human
ugcuaacuuuagugcauccu

SEQ ID NO: 716892 - RNA, 20 nt, Human
ugcuggggguaaaggagggu

SEQ ID NO: 716893 - RNA, 18 nt, Human
uggaagugaaucaaugag

SEQ ID NO: 716894 - RNA, 19 nt, Human
uggcgcggccagcacugcc

SEQ ID NO: 716895 - RNA, 18 nt, Human
uggcggccagcgcccucg

SEQ ID NO: 716896 - RNA, 19 nt, Human
uggcuaaugcacgcgcugc

SEQ ID NO: 716897 - RNA, 21 nt, Human
uggcuauuucucuguauuuga

SEQ ID NO: 716898 - RNA, 19 nt, Human
uggcugauggcgcccuggc

SEQ ID NO: 716899 - RNA, 21 nt, Human
uggcugauggcgcccuggccc

SEQ ID NO: 716900 - RNA, 20 nt, Human
ugggguggccccugcagguu

SEQ ID NO: 716901 - RNA, 22 nt, Human
ugggguggccccugcagguuca

SEQ ID NO: 716902 - RNA, 23 nt, Human
uguacuacaguaugcuuacucag

SEQ ID NO: 716903 - RNA, 19 nt, Human
uguggcuauuucucuguau

SEQ ID NO: 716904 - RNA, 22 nt, Human
uguguuuugggaauggcugaug

SEQ ID NO: 716905 - RNA, 23 nt, Human
uguuaaauaacauuuuguggaau

SEQ ID NO: 716906 - RNA, 26 nt, Human
uuaaaaaaaaaaaaaaaaagcagagu

SEQ ID NO: 716907 - RNA, 19 nt, Human
uucaagagggggagaaucc

SEQ ID NO: 716908 - RNA, 20 nt, Human
uugaaacuggagugagaagc

SEQ ID NO: 716909 - RNA, 18 nt, Human
uuuauccuccaccagcca

SEQ ID NO: 716910 - RNA, 21 nt, Human
aaaagcugaaucaaaaacaau

SEQ ID NO: 716911 - RNA, 26 nt, Human
aaacucacuguacccucauaucgcac

SEQ ID NO: 716912 - RNA, 21 nt, Human
aaaugcgccuuccaaaaacac

SEQ ID NO: 716913 - RNA, 23 nt, Human
aacagaauuuggacugccaaacu

SEQ ID NO: 716914 - RNA, 18 nt, Human
aacauggcugagcugccc

SEQ ID NO: 716915 - RNA, 23 nt, Human
aaccguguuggagaagucaaagc

SEQ ID NO: 716916 - RNA, 21 nt, Human
aacgugcuucugagaucagga

SEQ ID NO: 716917 - RNA, 28 nt, Human
aacucacuguacccucauaucgcacucu

SEQ ID NO: 716918 - RNA, 18 nt, Human
aagcccacaacgugcuuc

SEQ ID NO: 716919 - RNA, 21 nt, Human
aagcccacaacgugcuucuga

SEQ ID NO: 716920 - RNA, 20 nt, Human
aagccucuucccggaguccc

SEQ ID NO: 716921 - RNA, 18 nt, Human
aagcugaagccuuaugac

SEQ ID NO: 716922 - RNA, 21 nt, Human
aaguaccuccuuugggguccc

SEQ ID NO: 716923 - RNA, 19 nt, Human
acacacccacaugugcuua

SEQ ID NO: 716924 - RNA, 24 nt, Human
acacaggagaggcaaagccaaggg

SEQ ID NO: 716925 - RNA, 22 nt, Human
acagacaacauaacagcacagc

SEQ ID NO: 716926 - RNA, 22 nt, Human
acaggacacaggagaggcaaag

SEQ ID NO: 716927 - RNA, 21 nt, Human
acaggcaguccccauaccccu

SEQ ID NO: 716928 - RNA, 26 nt, Human
acagugaaaacaauuagccauccaaa

SEQ ID NO: 716929 - RNA, 25 nt, Human
acccagaagcugaagccuuaugacc

SEQ ID NO: 716930 - RNA, 24 nt, Human
accccacccaccacccagaagcug

SEQ ID NO: 716931 - RNA, 21 nt, Human
accucacugcagaucagggug

SEQ ID NO: 716932 - RNA, 18 nt, Human
accucucaaccugggcgg

SEQ ID NO: 716933 - RNA, 20 nt, Human
accuuuacaaggcaccagca

SEQ ID NO: 716934 - RNA, 18 nt, Human
acuucggagaugccuaag

SEQ ID NO: 716935 - RNA, 18 nt, Human
agaaaaagauggccaaag

SEQ ID NO: 716936 - RNA, 19 nt, Human
agaaaaagauggccaaaga

SEQ ID NO: 716937 - RNA, 19 nt, Human
agaaagacaggacacagga

SEQ ID NO: 716938 - RNA, 27 nt, Human
agaaagacaggacacaggagaggcaaa

SEQ ID NO: 716939 - RNA, 20 nt, Human
agacaggacacaggagaggc

SEQ ID NO: 716940 - RNA, 22 nt, Human
agagcagagcucaggacuugag

SEQ ID NO: 716941 - RNA, 20 nt, Human
agccagccuguguucuguca

SEQ ID NO: 716942 - RNA, 23 nt, Human
agccauccaaaaagcugaaucaa

SEQ ID NO: 716943 - RNA, 21 nt, Human
agcucaggacuugagaugacu

SEQ ID NO: 716944 - RNA, 18 nt, Human
aggaagccuucacuuugc

SEQ ID NO: 716945 - RNA, 24 nt, Human
aggagaugguugugcugcaguuca

SEQ ID NO: 716946 - RNA, 21 nt, Human
aggaggaaguaccuccuuugg

SEQ ID NO: 716947 - RNA, 19 nt, Human
aggcucaaaugcgccuucc

SEQ ID NO: 716948 - RNA, 18 nt, Human
agguaguuuccgccgcaa

SEQ ID NO: 716949 - RNA, 21 nt, Human
agguuucagagaugccaaacc

SEQ ID NO: 716950 - RNA, 18 nt, Human
aguuauccagggaaggga

SEQ ID NO: 716951 - RNA, 21 nt, Human
aucgcacucuuucuucuuugc

SEQ ID NO: 716952 - RNA, 22 nt, Human
augagugcuccucugcaccccc

SEQ ID NO: 716953 - RNA, 23 nt, Human
caaaaagcugaaucaaaaacaau

SEQ ID NO: 716954 - RNA, 20 nt, Human
caaagcgcuucagaagacca

SEQ ID NO: 716955 - RNA, 23 nt, Human
caaugagugcuccucugcacccc

SEQ ID NO: 716956 - RNA, 24 nt, Human
cacaacgugcuucugagaucagga

SEQ ID NO: 716957 - RNA, 21 nt, Human
cacacccacaugugcuuagac

SEQ ID NO: 716958 - RNA, 19 nt, Human
cacagggcugguugguuuc

SEQ ID NO: 716959 - RNA, 22 nt, Human
cacauccucgaccugagacaca

SEQ ID NO: 716960 - RNA, 19 nt, Human
caccacccagaagcugaag

SEQ ID NO: 716961 - RNA, 21 nt, Human
caccacccagaagcugaagcc

SEQ ID NO: 716962 - RNA, 19 nt, Human
caccagcaggcggcagagc

SEQ ID NO: 716963 - RNA, 24 nt, Human
cacccacacagcagcccugagggc

SEQ ID NO: 716964 - RNA, 23 nt, Human
cacccccccauaucaauggcagu

SEQ ID NO: 716965 - RNA, 20 nt, Human
caccuuucccucuucuuucc

SEQ ID NO: 716966 - RNA, 19 nt, Human
cacuuugcccagcgcuacu

SEQ ID NO: 716967 - RNA, 20 nt, Human
cagaauuuggacugccaaac

SEQ ID NO: 716968 - RNA, 20 nt, Human
cagacgagggacuccaggug

SEQ ID NO: 716969 - RNA, 18 nt, Human
cagcacagacaacauaac

SEQ ID NO: 716970 - RNA, 23 nt, Human
cagcagcccugagggcaucagug

SEQ ID NO: 716971 - RNA, 23 nt, Human
cagcagcccugagggcaucagug

SEQ ID NO: 716972 - RNA, 21 nt, Human
cagcuuaacacacccacacag

SEQ ID NO: 716973 - RNA, 20 nt, Human
caggaaaucagguccccccc

SEQ ID NO: 716974 - RNA, 18 nt, Human
caggcugcagagaacaga

SEQ ID NO: 716975 - RNA, 18 nt, Human
cagggccagacccgggcg

SEQ ID NO: 716976 - RNA, 21 nt, Human
cagggcuugcuggagaggaga

SEQ ID NO: 716977 - RNA, 25 nt, Human
cauaacagcacagcuaauccgugaa

SEQ ID NO: 716978 - RNA, 21 nt, Human
cauuuuagcucacaaggcuca

SEQ ID NO: 716979 - RNA, 22 nt, Human
ccacccaccacccagaagcuga

SEQ ID NO: 716980 - RNA, 18 nt, Human
ccacccagaagcugaagc

SEQ ID NO: 716981 - RNA, 25 nt, Human
ccagauaggaaauauuaaauccauu

SEQ ID NO: 716982 - RNA, 25 nt, Human
ccauaccccucauuccaugcccacc

SEQ ID NO: 716983 - RNA, 22 nt, Human
cccacacagcagcccugagggc

SEQ ID NO: 716984 - RNA, 23 nt, Human
cccacagcacagugaaaacaauu

SEQ ID NO: 716985 - RNA, 20 nt, Human
cccaccacccagaagcugaa

SEQ ID NO: 716986 - RNA, 18 nt, Human
cccaccccaccccaccca

SEQ ID NO: 716987 - RNA, 18 nt, Human
cccaccccaccccaccca

SEQ ID NO: 716988 - RNA, 19 nt, Human
cccaccccaccccacccac

SEQ ID NO: 716989 - RNA, 22 nt, Human
cccaccccaccccacccaccac

SEQ ID NO: 716990 - RNA, 30 nt, Human
cccaccccaccccacccaccacccagaagg

SEQ ID NO: 716991 - RNA, 18 nt, Human
ccccaagaaagccucuuc

SEQ ID NO: 716992 - RNA, 18 nt, Human
ccccacccaccacccaga

SEQ ID NO: 716993 - RNA, 26 nt, Human
ccccacccaccacccagaagcugaaa

SEQ ID NO: 716994 - RNA, 31 nt, Human
ccccaccccacccaccacccagaagcugaaa

SEQ ID NO: 716995 - RNA, 18 nt, Human
ccccagucuguccuggau

SEQ ID NO: 716996 - RNA, 23 nt, Human
ccccauaccccucauuccaugcc

SEQ ID NO: 716997 - RNA, 23 nt, Human
ccccggggccgggcgcuuagccc

SEQ ID NO: 716998 - RNA, 19 nt, Human
cccuggaccauuagaaccu

SEQ ID NO: 716999 - RNA, 22 nt, Human
cccuggaccauuagaaccucua

SEQ ID NO: 717000 - RNA, 22 nt, Human
ccgccugccccagcccuacagc

SEQ ID NO: 717001 - RNA, 18 nt, Human
ccgccuggcccggccucc

SEQ ID NO: 717002 - RNA, 18 nt, Human
ccguaggccagggccaga

SEQ ID NO: 717003 - RNA, 24 nt, Human
ccguguuggagaagucaaagcgau

SEQ ID NO: 717004 - RNA, 26 nt, Human
ccugccccagcccuacagccgguucc

SEQ ID NO: 717005 - RNA, 21 nt, Human
ccuggagcauuuuggcuggga

SEQ ID NO: 717006 - RNA, 18 nt, Human
ccugguuuucuguguucc

SEQ ID NO: 717007 - RNA, 22 nt, Human
ccuguguucugucaggcugcug

SEQ ID NO: 717008 - RNA, 20 nt, Human
cggggccgggcgcuuagccc

SEQ ID NO: 717009 - RNA, 21 nt, Human
cucacuguacccucauaucgc

SEQ ID NO: 717010 - RNA, 24 nt, Human
cuccucugcacccccccauaucaa

SEQ ID NO: 717011 - RNA, 24 nt, Human
cugaaguccuucugccugugccga

SEQ ID NO: 717012 - RNA, 20 nt, Human
cugaaucaaaaacaaugcca

SEQ ID NO: 717013 - RNA, 19 nt, Human
cugcacccccccauaucaa

SEQ ID NO: 717014 - RNA, 22 nt, Human
cuggagcauuuuggcugggagg

SEQ ID NO: 717015 - RNA, 20 nt, Human
cugguugguuucaccugcag

SEQ ID NO: 717016 - RNA, 27 nt, Human
cuuaacacacccacacagcagcccuga

SEQ ID NO: 717017 - RNA, 18 nt, Human
cuucagggcuugcuggag

SEQ ID NO: 717018 - RNA, 20 nt, Human
cuuccggggcuacgaagcgc

SEQ ID NO: 717019 - RNA, 24 nt, Human
gaagucuguuuuuagaaccgagaa

SEQ ID NO: 717020 - RNA, 22 nt, Human
gacggacagugaaucaaggcug

SEQ ID NO: 717021 - RNA, 21 nt, Human
gacuccaggugaucuauccac

SEQ ID NO: 717022 - RNA, 24 nt, Human
gacuccaggugaucuauccaccuc

SEQ ID NO: 717023 - RNA, 20 nt, Human
gcaaagccaagggggcaccc

SEQ ID NO: 717024 - RNA, 22 nt, Human
gcaccuuucccucuucuuucca

SEQ ID NO: 717025 - RNA, 20 nt, Human
gcagaaagacaggacacagg

SEQ ID NO: 717026 - RNA, 22 nt, Human
gccagccuguguucugucaggc

SEQ ID NO: 717027 - RNA, 20 nt, Human
gcccaccccaccccacccac

SEQ ID NO: 717028 - RNA, 22 nt, Human
gcccagcgcuacuucggagaug

SEQ ID NO: 717029 - RNA, 18 nt, Human
gccccggggccgggcgcu

SEQ ID NO: 717030 - RNA, 20 nt, Human
gcccguaggccagggccaga

SEQ ID NO: 717031 - RNA, 19 nt, Human
gccggauccgcggccccgg

SEQ ID NO: 717032 - RNA, 21 nt, Human
gcugagcugcccagcagagcu

SEQ ID NO: 717033 - RNA, 20 nt, Human
ggagaggagaugguugugcu

SEQ ID NO: 717034 - RNA, 23 nt, Human
ggcaaaaguaaaacaaaaggagg

SEQ ID NO: 717035 - RNA, 27 nt, Human
guaaaacaaaaggaggcuggcagcccc

SEQ ID NO: 717036 - RNA, 25 nt, Human
gugaggaggaaguaccuccuuuggg

SEQ ID NO: 717037 - RNA, 22 nt, Human
gugagguuucacugugcaacag

SEQ ID NO: 717038 - RNA, 24 nt, Human
uaaaggcugccguagguuuccaag

SEQ ID NO: 717039 - RNA, 18 nt, Human
uaacacacccacacagca

SEQ ID NO: 717040 - RNA, 23 nt, Human
uaacagcacagcuaauccgugaa

SEQ ID NO: 717041 - RNA, 23 nt, Human
uaacgaguauaccuuuacaaggc

SEQ ID NO: 717042 - RNA, 24 nt, Human
uacacacccacaugugcuuagaca

SEQ ID NO: 717043 - RNA, 18 nt, Human
uacagccccgccuggccc

SEQ ID NO: 717044 - RNA, 22 nt, Human
uacccuggagcauuuuggcugg

SEQ ID NO: 717045 - RNA, 18 nt, Human
uagaaccgagaaccagga

SEQ ID NO: 717046 - RNA, 22 nt, Human
uagaaccucuagggccuguaac

SEQ ID NO: 717047 - RNA, 24 nt, Human
ucaaaugcgccuuccaaaaacacc

SEQ ID NO: 717048 - RNA, 23 nt, Human
ucacugcagaucagggugaagga

SEQ ID NO: 717049 - RNA, 23 nt, Human
uccaaaauugacuaaaggcugcc

SEQ ID NO: 717050 - RNA, 20 nt, Human
uccacacauggcugccggau

SEQ ID NO: 717051 - RNA, 18 nt, Human
uccaccucacugcagauc

SEQ ID NO: 717052 - RNA, 19 nt, Human
uccaugcccaccccacccc

SEQ ID NO: 717053 - RNA, 24 nt, Human
uccaugcccaccccaccccaccca

SEQ ID NO: 717054 - RNA, 19 nt, Human
ucccagugcuauuacaggc

SEQ ID NO: 717055 - RNA, 21 nt, Human
uccccauaccccucauuccau

SEQ ID NO: 717056 - RNA, 21 nt, Human
ucccucuucuuuccacugccc

SEQ ID NO: 717057 - RNA, 18 nt, Human
uccgccgcaaacugaacc

SEQ ID NO: 717058 - RNA, 22 nt, Human
ucggcagucccccaagucuucc

SEQ ID NO: 717059 - RNA, 30 nt, Human
ucuaaacacauccucgaccugagacacagg

SEQ ID NO: 717060 - RNA, 22 nt, Human
ucucuaaacacauccucgaccu

SEQ ID NO: 717061 - RNA, 22 nt, Human
ugaaaacaauuagccauccaaa

SEQ ID NO: 717062 - RNA, 24 nt, Human
ugaaacaaaguacagucuccucuc

SEQ ID NO: 717063 - RNA, 18 nt, Human
ugaaggagaggcucucac

SEQ ID NO: 717064 - RNA, 22 nt, Human
ugaaucaaaaacaaugccaauc

SEQ ID NO: 717065 - RNA, 25 nt, Human
ugacaccagaacagugacagucaaa

SEQ ID NO: 717066 - RNA, 18 nt, Human
ugacucaguugcucaaaa

SEQ ID NO: 717067 - RNA, 19 nt, Human
ugagaucaggaagccuuca

SEQ ID NO: 717068 - RNA, 20 nt, Human
ugagggcaucagugaggagg

SEQ ID NO: 717069 - RNA, 24 nt, Human
ugcaagaaaauaaaccuccgagau

SEQ ID NO: 717070 - RNA, 18 nt, Human
ugcugcaguucacuuggu

SEQ ID NO: 717071 - RNA, 22 nt, Human
ugcuggagaggagaugguugug

SEQ ID NO: 717072 - RNA, 24 nt, Human
ugcuggagaggagaugguugugcc

SEQ ID NO: 717073 - RNA, 23 nt, Human
uggaucuccaucauggacaauga

SEQ ID NO: 717074 - RNA, 22 nt, Human
uggcacaggcuuggagacuucc

SEQ ID NO: 717075 - RNA, 18 nt, Human
uggccaaagaggggaaaa

SEQ ID NO: 717076 - RNA, 18 nt, Human
uggcugagcugcccagca

SEQ ID NO: 717077 - RNA, 22 nt, Human
uggcugccggauccgcggcccc

SEQ ID NO: 717078 - RNA, 19 nt, Human
uucacugguugcaagaaaa

SEQ ID NO: 717079 - RNA, 18 nt, Human
uuccccaagaaagccucu

SEQ ID NO: 717080 - RNA, 21 nt, Human
uuccuuggcagguggauggca

SEQ ID NO: 717081 - RNA, 19 nt, Human
uugacaccagaacagugac

SEQ ID NO: 717082 - RNA, 22 nt, Human
uugaucaguuugcaauauaaag

SEQ ID NO: 717083 - RNA, 22 nt, Human
uuggcugggaggcaaaauccca

SEQ ID NO: 717084 - RNA, 23 nt, Human
uuggcugggaggcaaaaucccag

SEQ ID NO: 717085 - RNA, 25 nt, Human
uuuccgccgcaaacugaaccuuauc

SEQ ID NO: 717086 - RNA, 18 nt, Human
uuugaaacaaaguacagu

SEQ ID NO: 717087 - RNA, 21 nt, Human
uuugcagacaccaggccugcu

SEQ ID NO: 717088 - RNA, 22 nt, Human
cauuucugucauaauuaguggg

SEQ ID NO: 717089 - RNA, 21 nt, Human
gccgcaacucuugcgcacguu

SEQ ID NO: 717090 - RNA, 22 nt, Human
uauacaguucugugccugaaac

SEQ ID NO: 717091 - RNA, 21 nt, Human
uccucugcccgccgccgcaac

SEQ ID NO: 717092 - RNA, 23 nt, Human
ugguaguccucugcccgccgccg

SEQ ID NO: 717093 - RNA, 21 nt, Human
uuggauauacaguucugugcc

SEQ ID NO: 717094 - RNA, 24 nt, Human
aaacaaaagccagaaaaugcagaa

SEQ ID NO: 717095 - RNA, 18 nt, Human
aaacaagaagccugcuuu

SEQ ID NO: 717096 - RNA, 25 nt, Human
aaacauuacuaauaacaauaacaau

SEQ ID NO: 717097 - RNA, 20 nt, Human
aaccucaaauccaccacguc

SEQ ID NO: 717098 - RNA, 22 nt, Human
aagagccaaaagacgugccugc

SEQ ID NO: 717099 - RNA, 18 nt, Human
aagccgucccccacccaa

SEQ ID NO: 717100 - RNA, 24 nt, Human
aaguguugcaaaguaaccugaacc

SEQ ID NO: 717101 - RNA, 19 nt, Human
aauaugggacuauggacga

SEQ ID NO: 717102 - RNA, 19 nt, Human
aauggugggaagaauggaa

SEQ ID NO: 717103 - RNA, 25 nt, Human
acacggccccagggaggagggaacc

SEQ ID NO: 717104 - RNA, 20 nt, Human
accugaaccgucaaguaauu

SEQ ID NO: 717105 - RNA, 20 nt, Human
acuugcugggguggcucagg

SEQ ID NO: 717106 - RNA, 20 nt, Human
acuuuugauaaugcauaaaa

SEQ ID NO: 717107 - RNA, 18 nt, Human
agaagcccacugucuaca

SEQ ID NO: 717108 - RNA, 22 nt, Human
agaagcccacugucuacaaaaa

SEQ ID NO: 717109 - RNA, 21 nt, Human
agacagaugccuugugccccu

SEQ ID NO: 717110 - RNA, 21 nt, Human
agccaagaaaacaaaagccag

SEQ ID NO: 717111 - RNA, 23 nt, Human
agccagcaccugggcuuuccugg

SEQ ID NO: 717112 - RNA, 29 nt, Human
aggcaaagaguggggacagaagggacccc

SEQ ID NO: 717113 - RNA, 20 nt, Human
aggcgccagagcucagcacc

SEQ ID NO: 717114 - RNA, 18 nt, Human
aggggcggggaggcaaag

SEQ ID NO: 717115 - RNA, 18 nt, Human
aguaaaaaaaaaaaaaaa

SEQ ID NO: 717116 - RNA, 22 nt, Human
aguaacaaguagaauccagaac

SEQ ID NO: 717117 - RNA, 18 nt, Human
agucuucugauuucuuag

SEQ ID NO: 717118 - RNA, 19 nt, Human
auauauauauauauauaua

SEQ ID NO: 717119 - RNA, 19 nt, Human
auauauauauauauauaua

SEQ ID NO: 717120 - RNA, 19 nt, Human
auauauauauauauauaua

SEQ ID NO: 717121 - RNA, 19 nt, Human
auauauauauauauauaua

SEQ ID NO: 717122 - RNA, 19 nt, Human
auauauauauauauauaua

SEQ ID NO: 717123 - RNA, 19 nt, Human
auauauauauauauauaua

SEQ ID NO: 717124 - RNA, 19 nt, Human
auauauauauauauauaua

SEQ ID NO: 717125 - RNA, 19 nt, Human
auauauauauauauauaua

SEQ ID NO: 717126 - RNA, 19 nt, Human
auauauauauauauauaua

SEQ ID NO: 717127 - RNA, 19 nt, Human
auauauauauauauauaua

SEQ ID NO: 717128 - RNA, 19 nt, Human
auauauauauauauauaua

SEQ ID NO: 717129 - RNA, 19 nt, Human
auauauauauauauauaua

SEQ ID NO: 717130 - RNA, 21 nt, Human
auggaacaggcacacggcccc

SEQ ID NO: 717131 - RNA, 19 nt, Human
caaaagacgugccugcucc

SEQ ID NO: 717132 - RNA, 21 nt, Human
caagaaaacaaaagccagaaa

SEQ ID NO: 717133 - RNA, 22 nt, Human
caaguaauuuaaacucaguaac

SEQ ID NO: 717134 - RNA, 24 nt, Human
caaguagaauccagaaccaaacau

SEQ ID NO: 717135 - RNA, 27 nt, Human
cacacacaacaaguaucuuuuuuucca

SEQ ID NO: 717136 - RNA, 21 nt, Human
cacaggugggaggcugcuggg

SEQ ID NO: 717137 - RNA, 19 nt, Human
caccuccuuccucucucuu

SEQ ID NO: 717138 - RNA, 19 nt, Human
caccuccuuccucucucuu

SEQ ID NO: 717139 - RNA, 18 nt, Human
cacguaaaugcguauaua

SEQ ID NO: 717140 - RNA, 24 nt, Human
cagaggaaugugucuccgcaacuu

SEQ ID NO: 717141 - RNA, 23 nt, Human
cagauucuuggcagggaggcggc

SEQ ID NO: 717142 - RNA, 20 nt, Human
cagcacccuagucaucuagg

SEQ ID NO: 717143 - RNA, 18 nt, Human
cagcaccugggcuuuccu

SEQ ID NO: 717144 - RNA, 19 nt, Human
cagggaccguccuaucucu

SEQ ID NO: 717145 - RNA, 24 nt, Human
caguaacaaguagaauccagaacc

SEQ ID NO: 717146 - RNA, 20 nt, Human
cagucaccauucacuuucag

SEQ ID NO: 717147 - RNA, 21 nt, Human
cauaaaucaacagaagagucu

SEQ ID NO: 717148 - RNA, 24 nt, Human
caucuagggcaccugaaccugcuc

SEQ ID NO: 717149 - RNA, 18 nt, Human
cauuacugaggaagaggu

SEQ ID NO: 717150 - RNA, 19 nt, Human
cauuccuaacagucaccau

SEQ ID NO: 717151 - RNA, 23 nt, Human
ccaaaagacgugccugcucccag

SEQ ID NO: 717152 - RNA, 22 nt, Human
cccaaaauaacuuuacagaaca

SEQ ID NO: 717153 - RNA, 20 nt, Human
cccacagcaccugaacguca

SEQ ID NO: 717154 - RNA, 21 nt, Human
cccacugucuacaaaaacugc

SEQ ID NO: 717155 - RNA, 18 nt, Human
ccccggcuguucuuccau

SEQ ID NO: 717156 - RNA, 22 nt, Human
ccccugugacagugcucagccu

SEQ ID NO: 717157 - RNA, 31 nt, Human
ccccugugacagugcucagccucgccacucu

SEQ ID NO: 717158 - RNA, 21 nt, Human
cccuccgccaagccugcuucc

SEQ ID NO: 717159 - RNA, 24 nt, Human
ccggugguggcggcacagcuuucu

SEQ ID NO: 717160 - RNA, 20 nt, Human
cgaaggacggacgcggccgg

SEQ ID NO: 717161 - RNA, 18 nt, Human
cggccaggucacaggugg

SEQ ID NO: 717162 - RNA, 20 nt, Human
cggccucucucagauucuug

SEQ ID NO: 717163 - RNA, 21 nt, Human
cggggaggcaaagagugggga

SEQ ID NO: 717164 - RNA, 18 nt, Human
cgugccugcucccaggag

SEQ ID NO: 717165 - RNA, 20 nt, Human
cucagaaauauuaccaucac

SEQ ID NO: 717166 - RNA, 19 nt, Human
cucagauucuuggcaggga

SEQ ID NO: 717167 - RNA, 22 nt, Human
cucaucaucauaccccuccgcc

SEQ ID NO: 717168 - RNA, 24 nt, Human
cugcauggacauuccuaauuacac

SEQ ID NO: 717169 - RNA, 20 nt, Human
cugguguaagaauaucagaa

SEQ ID NO: 717170 - RNA, 26 nt, Human
cuucuacauggggggcgcagcagcug

SEQ ID NO: 717171 - RNA, 23 nt, Human
cuuugcccaaaauaacuuuacag

SEQ ID NO: 717172 - RNA, 22 nt, Human
gaaaacaaaagccagaaaaugc

SEQ ID NO: 717173 - RNA, 18 nt, Human
gaacaggcacacggcccc

SEQ ID NO: 717174 - RNA, 20 nt, Human
gaauguagcccuguuacaaa

SEQ ID NO: 717175 - RNA, 23 nt, Human
gaguuccccggcuguucuuccau

SEQ ID NO: 717176 - RNA, 23 nt, Human
gaucaaccucaaauccaccacgu

SEQ ID NO: 717177 - RNA, 20 nt, Human
gcagcagcuggcagccagca

SEQ ID NO: 717178 - RNA, 19 nt, Human
gccggugguggcggcacag

SEQ ID NO: 717179 - RNA, 21 nt, Human
gcucccaggaggugcaccuuc

SEQ ID NO: 717180 - RNA, 24 nt, Human
gcucgggaugugaggugucugcuc

SEQ ID NO: 717181 - RNA, 24 nt, Human
ggaaaagaaaauauuuauaucugu

SEQ ID NO: 717182 - RNA, 27 nt, Human
ggcaaugggaaaagaaaagggagggcc

SEQ ID NO: 717183 - RNA, 19 nt, Human
ggccaggucacagguggga

SEQ ID NO: 717184 - RNA, 18 nt, Human
ggcgcagcagcuggcagc

SEQ ID NO: 717185 - RNA, 22 nt, Human
ggcggggaggcaaagagugggg

SEQ ID NO: 717186 - RNA, 20 nt, Human
ggcuggugauccccacccuu

SEQ ID NO: 717187 - RNA, 22 nt, Human
gggaaacuacugaaaugauuaa

SEQ ID NO: 717188 - RNA, 22 nt, Human
gggacagaaggcgccagagcuc

SEQ ID NO: 717189 - RNA, 24 nt, Human
gggaccuggggugcgucggaaaca

SEQ ID NO: 717190 - RNA, 22 nt, Human
gggagaaaagacacccacuugc

SEQ ID NO: 717191 - RNA, 19 nt, Human
gggcgcagcagcuggcagc

SEQ ID NO: 717192 - RNA, 24 nt, Human
gggcgcagcagcuggcagccagca

SEQ ID NO: 717193 - RNA, 22 nt, Human
gggcggggaggcaaagaguggg

SEQ ID NO: 717194 - RNA, 19 nt, Human
gguggcucagggaaggggc

SEQ ID NO: 717195 - RNA, 22 nt, Human
gguguaagaauaucagaaaaaa

SEQ ID NO: 717196 - RNA, 18 nt, Human
guccuaucucuccauggu

SEQ ID NO: 717197 - RNA, 21 nt, Human
gucuucugauuucuuaggugg

SEQ ID NO: 717198 - RNA, 23 nt, Human
gugucacggcaaugggaaaagaa

SEQ ID NO: 717199 - RNA, 31 nt, Human
guguguguguguguuuguguguguguguguu

SEQ ID NO: 717200 - RNA, 18 nt, Human
guuacauugcaucguuug

SEQ ID NO: 717201 - RNA, 18 nt, Human
uaaaacacagagaaacag

SEQ ID NO: 717202 - RNA, 21 nt, Human
uaaacaagacuuuguaucaga

SEQ ID NO: 717203 - RNA, 19 nt, Human
uaaauacccacuaagacaa

SEQ ID NO: 717204 - RNA, 18 nt, Human
uaacaaguagaauccaga

SEQ ID NO: 717205 - RNA, 22 nt, Human
uaacuaaaacacagagaaacag

SEQ ID NO: 717206 - RNA, 21 nt, Human
uaagaaaauaugggacuaugg

SEQ ID NO: 717207 - RNA, 19 nt, Human
uaagacagaugccuugugc

SEQ ID NO: 717208 - RNA, 23 nt, Human
uaaugcauaaaaucauaugugca

SEQ ID NO: 717209 - RNA, 19 nt, Human
uaccaucacacauaguguc

SEQ ID NO: 717210 - RNA, 31 nt, Human
uaggguguguguguguguuugugugugugug

SEQ ID NO: 717211 - RNA, 22 nt, Human
uauaagcuagccaguuacauug

SEQ ID NO: 717212 - RNA, 24 nt, Human
uauauaagcuagccaguuacauug

SEQ ID NO: 717213 - RNA, 19 nt, Human
uauauauauauauauauau

SEQ ID NO: 717214 - RNA, 19 nt, Human
uauauauauauauauauau

SEQ ID NO: 717215 - RNA, 19 nt, Human
uauauauauauauauauau

SEQ ID NO: 717216 - RNA, 19 nt, Human
uauauauauauauauauau

SEQ ID NO: 717217 - RNA, 19 nt, Human
uauauauauauauauauau

SEQ ID NO: 717218 - RNA, 19 nt, Human
uauauauauauauauauau

SEQ ID NO: 717219 - RNA, 19 nt, Human
ucaaggcagcaguaacuuu

SEQ ID NO: 717220 - RNA, 20 nt, Human
ucaccuccuuccucucucuu

SEQ ID NO: 717221 - RNA, 21 nt, Human
ucacuagucccugacauuccu

SEQ ID NO: 717222 - RNA, 23 nt, Human
ucauccccacagucccucuuaac

SEQ ID NO: 717223 - RNA, 18 nt, Human
uccagugucucaaacuug

SEQ ID NO: 717224 - RNA, 20 nt, Human
uccagugucucaaacuuguc

SEQ ID NO: 717225 - RNA, 25 nt, Human
uccauggucagaagagccaaaagac

SEQ ID NO: 717226 - RNA, 19 nt, Human
ucccacagacgugucuccu

SEQ ID NO: 717227 - RNA, 19 nt, Human
ucccacagacgugucuccu

SEQ ID NO: 717228 - RNA, 18 nt, Human
uccgcaacuuugcccaaa

SEQ ID NO: 717229 - RNA, 20 nt, Human
uccgccaagccugcuuccca

SEQ ID NO: 717230 - RNA, 20 nt, Human
uccugggaauguggaaaugc

SEQ ID NO: 717231 - RNA, 18 nt, Human
uccuuccucucucuuauu

SEQ ID NO: 717232 - RNA, 19 nt, Human
ucuacaaaaacugcacuag

SEQ ID NO: 717233 - RNA, 21 nt, Human
ucuagaauauagcaucuucau

SEQ ID NO: 717234 - RNA, 21 nt, Human
ucuuggcagggaggcggcggg

SEQ ID NO: 717235 - RNA, 23 nt, Human
ugcauggacauuccuaauuacac

SEQ ID NO: 717236 - RNA, 18 nt, Human
ugcguacacugcaugguu

SEQ ID NO: 717237 - RNA, 21 nt, Human
ugcucccaggaggugcaccuu

SEQ ID NO: 717238 - RNA, 20 nt, Human
uggaauaccauuucaauugc

SEQ ID NO: 717239 - RNA, 20 nt, Human
uggagccagugaacaaugag

SEQ ID NO: 717240 - RNA, 18 nt, Human
uggaggucaccaggccca

SEQ ID NO: 717241 - RNA, 19 nt, Human
uggcucagggaaggggcgg

SEQ ID NO: 717242 - RNA, 18 nt, Human
uggggacagaaggcgcca

SEQ ID NO: 717243 - RNA, 19 nt, Human
ugugccugccaguacuacu

SEQ ID NO: 717244 - RNA, 20 nt, Human
ugugugugugugugucugug

SEQ ID NO: 717245 - RNA, 21 nt, Human
uguguguguguguuugugugu

SEQ ID NO: 717246 - RNA, 28 nt, Human
uguguguguguguuugugugugugugug

SEQ ID NO: 717247 - RNA, 21 nt, Human
uguguguguguuugugugugu

SEQ ID NO: 717248 - RNA, 21 nt, Human
uguguguguuugugugugugu

SEQ ID NO: 717249 - RNA, 23 nt, Human
uguguguguuugugugugugugu

SEQ ID NO: 717250 - RNA, 24 nt, Human
uguugcgcuagcucucuuccgagg

SEQ ID NO: 717251 - RNA, 22 nt, Human
uuaaacucaguaacaaguagaa

SEQ ID NO: 717252 - RNA, 19 nt, Human
uuaacaaggagaggcaucu

SEQ ID NO: 717253 - RNA, 19 nt, Human
uuacaccaacaggacagau

SEQ ID NO: 717254 - RNA, 21 nt, Human
uuacugaggaagagguauaug

SEQ ID NO: 717255 - RNA, 19 nt, Human
uucacaauuaaaaaaaaac

SEQ ID NO: 717256 - RNA, 21 nt, Human
uucacagaacauuuucauuca

SEQ ID NO: 717257 - RNA, 22 nt, Human
uucagccaagaaaacaaaagcc

SEQ ID NO: 717258 - RNA, 18 nt, Human
uugugccccuacugugcc

SEQ ID NO: 717259 - RNA, 21 nt, Human
uuuaaacucaguaacaaguag

SEQ ID NO: 717260 - RNA, 23 nt, Human
uuugugugugugugugucugugu

SEQ ID NO: 717261 - RNA, 22 nt, Human
aaaaaaaaaaaaaaaaaaagaa

SEQ ID NO: 717262 - RNA, 22 nt, Human
aaaaagccagguuaacuaaaac

SEQ ID NO: 717263 - RNA, 20 nt, Human
aaaaagccagguuaacuagu

SEQ ID NO: 717264 - RNA, 19 nt, Human
aaaacagacgcacgaucua

SEQ ID NO: 717265 - RNA, 21 nt, Human
aaacccuccaccgucgucuuc

SEQ ID NO: 717266 - RNA, 19 nt, Human
aaagaacacuaucaccugc

SEQ ID NO: 717267 - RNA, 18 nt, Human
aaagcucuaaauccuugg

SEQ ID NO: 717268 - RNA, 24 nt, Human
aaagugcugggauuacagguguga

SEQ ID NO: 717269 - RNA, 21 nt, Human
aaauauuucaaacaggaacuc

SEQ ID NO: 717270 - RNA, 20 nt, Human
aacagauaaacauuaccagg

SEQ ID NO: 717271 - RNA, 23 nt, Human
aacaggcaggacaagacggcaca

SEQ ID NO: 717272 - RNA, 19 nt, Human
aagaagccccagguggggc

SEQ ID NO: 717273 - RNA, 18 nt, Human
aagcaacuaugagaagac

SEQ ID NO: 717274 - RNA, 24 nt, Human
aagcuccagaacugaaacaaagga

SEQ ID NO: 717275 - RNA, 22 nt, Human
aagcugcaucaacuuaaggaac

SEQ ID NO: 717276 - RNA, 21 nt, Human
aaggcuacaggugagccuggc

SEQ ID NO: 717277 - RNA, 24 nt, Human
aaguagcugggauuacaggcgugu

SEQ ID NO: 717278 - RNA, 25 nt, Human
aaguagcugggauuacaggcgugug

SEQ ID NO: 717279 - RNA, 18 nt, Human
aagugcugggauuacagg

SEQ ID NO: 717280 - RNA, 19 nt, Human
aagugcugggauuacaggu

SEQ ID NO: 717281 - RNA, 20 nt, Human
acaaacacacacauggcccc

SEQ ID NO: 717282 - RNA, 21 nt, Human
acacagacgucagacaaguca

SEQ ID NO: 717283 - RNA, 20 nt, Human
acaggguuucaccacauugg

SEQ ID NO: 717284 - RNA, 24 nt, Human
acaggguuucaccacauuggccag

SEQ ID NO: 717285 - RNA, 27 nt, Human
acaucacaaacacacacauggccccac

SEQ ID NO: 717286 - RNA, 20 nt, Human
accaaaacuggaaguagagc

SEQ ID NO: 717287 - RNA, 19 nt, Human
acccaggcuggagugcggu

SEQ ID NO: 717288 - RNA, 22 nt, Human
accucaugauccgcccgcacug

SEQ ID NO: 717289 - RNA, 18 nt, Human
acucugucacccaggcug

SEQ ID NO: 717290 - RNA, 25 nt, Human
acucugucacccaggcuggagugcg

SEQ ID NO: 717291 - RNA, 20 nt, Human
acugcacacagacgucagac

SEQ ID NO: 717292 - RNA, 20 nt, Human
agaacugaaacaaaggaaaa

SEQ ID NO: 717293 - RNA, 18 nt, Human
agacggcacaucuguccu

SEQ ID NO: 717294 - RNA, 20 nt, Human
agagaccuuaacaccaagag

SEQ ID NO: 717295 - RNA, 18 nt, Human
agagcucauuuuuauaaa

SEQ ID NO: 717296 - RNA, 24 nt, Human
agagguuagaagcugcaucaacuu

SEQ ID NO: 717297 - RNA, 21 nt, Human
agcacaacgaccaucuaacag

SEQ ID NO: 717298 - RNA, 23 nt, Human
agcagcaggagaggugguugaga

SEQ ID NO: 717299 - RNA, 27 nt, Human
agcauugucauccuuugauccuauggc

SEQ ID NO: 717300 - RNA, 24 nt, Human
agcgauucuccugccucagccucc

SEQ ID NO: 717301 - RNA, 22 nt, Human
aggauuguucuguggcccccaa

SEQ ID NO: 717302 - RNA, 24 nt, Human
aggcagaggaaucaagggcagggg

SEQ ID NO: 717303 - RNA, 24 nt, Human
aggcgugugccaccacgcccagcu

SEQ ID NO: 717304 - RNA, 27 nt, Human
aggcuacaggugagccuggccugagca

SEQ ID NO: 717305 - RNA, 21 nt, Human
agggaaggacccagcucugcu

SEQ ID NO: 717306 - RNA, 23 nt, Human
aggugugagccacugugccuggc

SEQ ID NO: 717307 - RNA, 20 nt, Human
agugcgguggcgcaaucucg

SEQ ID NO: 717308 - RNA, 24 nt, Human
agugcgguggcgcaaucucggcuc

SEQ ID NO: 717309 - RNA, 20 nt, Human
agugcugggauuacaggugu

SEQ ID NO: 717310 - RNA, 24 nt, Human
aguggcucaguucugcaacaggug

SEQ ID NO: 717311 - RNA, 31 nt, Human
augaugauaauuaaaaaaaaaaaaaaaaaaa

SEQ ID NO: 717312 - RNA, 19 nt, Human
auuacaggcgugugccacc

SEQ ID NO: 717313 - RNA, 19 nt, Human
caaaacaucccauccucua

SEQ ID NO: 717314 - RNA, 22 nt, Human
caaaacaucccauccucuaccc

SEQ ID NO: 717315 - RNA, 26 nt, Human
caaagaucacaccugcaccaaaaagc

SEQ ID NO: 717316 - RNA, 24 nt, Human
caaagugcugggauuacaggugug

SEQ ID NO: 717317 - RNA, 25 nt, Human
caaagugcugggauuacagguguga

SEQ ID NO: 717318 - RNA, 19 nt, Human
caaauaaguggacgaaaug

SEQ ID NO: 717319 - RNA, 22 nt, Human
caagcgauucuccugccucagc

SEQ ID NO: 717320 - RNA, 27 nt, Human
caagcgauucuccugccucagccuccc

SEQ ID NO: 717321 - RNA, 19 nt, Human
cacagcugccucugagguc

SEQ ID NO: 717322 - RNA, 18 nt, Human
cacauuaacggggggagg

SEQ ID NO: 717323 - RNA, 26 nt, Human
cacauuaacgggggggaagggggagg

SEQ ID NO: 717324 - RNA, 24 nt, Human
cacauuggccaggcuggucucaaa

SEQ ID NO: 717325 - RNA, 23 nt, Human
caccaaaaagccagguuaacuaa

SEQ ID NO: 717326 - RNA, 21 nt, Human
caccacauuggccaggcuggu

SEQ ID NO: 717327 - RNA, 24 nt, Human
caccacauuggccaggcuggucuc

SEQ ID NO: 717328 - RNA, 27 nt, Human
caccacauuggccaggcuggucucaaa

SEQ ID NO: 717329 - RNA, 24 nt, Human
caccacgcccagcuaauuuuugua

SEQ ID NO: 717330 - RNA, 18 nt, Human
caccagggaaggacccag

SEQ ID NO: 717331 - RNA, 24 nt, Human
cacccaggcuggagugcgguggcg

SEQ ID NO: 717332 - RNA, 23 nt, Human
cacucugucacccaggcuggagu

SEQ ID NO: 717333 - RNA, 24 nt, Human
cacucugucacccaggcuggagug

SEQ ID NO: 717334 - RNA, 18 nt, Human
cacugcaaccucugccuc

SEQ ID NO: 717335 - RNA, 21 nt, Human
cacugcaaccucugccuccca

SEQ ID NO: 717336 - RNA, 21 nt, Human
cagaaagaacacuaucaccug

SEQ ID NO: 717337 - RNA, 21 nt, Human
cagaacugaaacaaaggaaaa

SEQ ID NO: 717338 - RNA, 19 nt, Human
cagaagcacaacgaccauc

SEQ ID NO: 717339 - RNA, 20 nt, Human
cagcacccacgcccauuucu

SEQ ID NO: 717340 - RNA, 19 nt, Human
cagcagcaggagagguggu

SEQ ID NO: 717341 - RNA, 23 nt, Human
cagcagguggaaacgcaguucag

SEQ ID NO: 717342 - RNA, 23 nt, Human
cagcugccucugaggucucugag

SEQ ID NO: 717343 - RNA, 20 nt, Human
cagcuuccagggcagcaccc

SEQ ID NO: 717344 - RNA, 22 nt, Human
cagggcagcacccacgcccauu

SEQ ID NO: 717345 - RNA, 24 nt, Human
caggguuucaccacauuggccagg

SEQ ID NO: 717346 - RNA, 19 nt, Human
caguaaaaaaaaaaaaaaa

SEQ ID NO: 717347 - RNA, 19 nt, Human
caguucagagcacgggcgg

SEQ ID NO: 717348 - RNA, 26 nt, Human
ccaaacccuccaccgucgucuucaaa

SEQ ID NO: 717349 - RNA, 21 nt, Human
ccaaagugcugggauuacagg

SEQ ID NO: 717350 - RNA, 21 nt, Human
ccaaagugcugggauuacagg

SEQ ID NO: 717351 - RNA, 24 nt, Human
ccaaagugcugggauuacaggugu

SEQ ID NO: 717352 - RNA, 22 nt, Human
ccaagguagaugaagaaaguca

SEQ ID NO: 717353 - RNA, 22 nt, Human
ccaaguagcugggauuacaggc

SEQ ID NO: 717354 - RNA, 24 nt, Human
ccaaguagcugggauuacaggcgu

SEQ ID NO: 717355 - RNA, 20 nt, Human
ccaccacgcccagcuaauuu

SEQ ID NO: 717356 - RNA, 19 nt, Human
ccacccaaggacuucacuu

SEQ ID NO: 717357 - RNA, 24 nt, Human
ccaccgucgucuucaaauuaccca

SEQ ID NO: 717358 - RNA, 20 nt, Human
ccacugugccuggccuggau

SEQ ID NO: 717359 - RNA, 24 nt, Human
ccagcaacugccagugcucccucc

SEQ ID NO: 717360 - RNA, 19 nt, Human
ccagggcagcacccacgcc

SEQ ID NO: 717361 - RNA, 21 nt, Human
ccagggcagcacccacgccca

SEQ ID NO: 717362 - RNA, 24 nt, Human
cccaaauaaguggacgaaaugccc

SEQ ID NO: 717363 - RNA, 23 nt, Human
cccaaguagcugggauuacaggc

SEQ ID NO: 717364 - RNA, 23 nt, Human
cccaaguagcugggauuacaggc

SEQ ID NO: 717365 - RNA, 20 nt, Human
cccagguucaagcgauucuc

SEQ ID NO: 717366 - RNA, 23 nt, Human
cccagguucaagcgauucuccug

SEQ ID NO: 717367 - RNA, 24 nt, Human
ccucccagguucaagcgauucucc

SEQ ID NO: 717368 - RNA, 21 nt, Human
ccucucccacuucccugggag

SEQ ID NO: 717369 - RNA, 21 nt, Human
ccugccgacggcugacugcac

SEQ ID NO: 717370 - RNA, 20 nt, Human
ccuucagcgacagagcuggc

SEQ ID NO: 717371 - RNA, 22 nt, Human
cgcugguggagccucagcccug

SEQ ID NO: 717372 - RNA, 18 nt, Human
cggcguaaggcuacaggu

SEQ ID NO: 717373 - RNA, 21 nt, Human
cgugugccaccacgcccagcu

SEQ ID NO: 717374 - RNA, 24 nt, Human
cucacucugucacccaggcuggag

SEQ ID NO: 717375 - RNA, 24 nt, Human
cucacugcaaccucugccucccag

SEQ ID NO: 717376 - RNA, 24 nt, Human
cucacugcaaccucugccucccag

SEQ ID NO: 717377 - RNA, 23 nt, Human
cucagccucccaaguagcuggga

SEQ ID NO: 717378 - RNA, 22 nt, Human
cucaucagcuuccaccaaccac

SEQ ID NO: 717379 - RNA, 24 nt, Human
cuccugaccucaugauccgcccgc

SEQ ID NO: 717380 - RNA, 25 nt, Human
cuccugccucagccucccaaguagc

SEQ ID NO: 717381 - RNA, 23 nt, Human
cugcaaccucugccucccagguu

SEQ ID NO: 717382 - RNA, 24 nt, Human
cugcaaccucugccucccagguuc

SEQ ID NO: 717383 - RNA, 23 nt, Human
cugccucagccucccaaguagcu

SEQ ID NO: 717384 - RNA, 21 nt, Human
cuggacccaucaaccugccga

SEQ ID NO: 717385 - RNA, 19 nt, Human
cugucacccaggcuggagu

SEQ ID NO: 717386 - RNA, 22 nt, Human
cuuaaagcucccugaaggaccu

SEQ ID NO: 717387 - RNA, 28 nt, Human
cuucaagaucaccaagguagaugaagaa

SEQ ID NO: 717388 - RNA, 18 nt, Human
cuuccacucuucugcuau

SEQ ID NO: 717389 - RNA, 25 nt, Human
cuuugaggcagaggaaucaagggca

SEQ ID NO: 717390 - RNA, 18 nt, Human
gacuuggcuuuuugaguc

SEQ ID NO: 717391 - RNA, 18 nt, Human
gagacuguugaguucggc

SEQ ID NO: 717392 - RNA, 22 nt, Human
gaggagccuaugagacuguuga

SEQ ID NO: 717393 - RNA, 22 nt, Human
gaggcagaggaaucaagggcag

SEQ ID NO: 717394 - RNA, 21 nt, Human
gaucaccaagguagaugaaga

SEQ ID NO: 717395 - RNA, 18 nt, Human
gauuacaggcgugugcca

SEQ ID NO: 717396 - RNA, 18 nt, Human
gauuacaggugugagcca

SEQ ID NO: 717397 - RNA, 21 nt, Human
gauuacaggugugagccacug

SEQ ID NO: 717398 - RNA, 24 nt, Human
gauuacaggugugagccacugugc

SEQ ID NO: 717399 - RNA, 22 nt, Human
gcaaccucugccucccagguuc

SEQ ID NO: 717400 - RNA, 20 nt, Human
gcagcaggagaggugguuga

SEQ ID NO: 717401 - RNA, 19 nt, Human
gccacugugccuggccugg

SEQ ID NO: 717402 - RNA, 22 nt, Human
gcccagcuaauuuuuguauuuu

SEQ ID NO: 717403 - RNA, 20 nt, Human
gcccgcacuggccucccaaa

SEQ ID NO: 717404 - RNA, 20 nt, Human
gccucagccucccaaguagc

SEQ ID NO: 717405 - RNA, 24 nt, Human
gcgauucuccugccucagccuccc

SEQ ID NO: 717406 - RNA, 21 nt, Human
gcuccuucagcgacagagcug

SEQ ID NO: 717407 - RNA, 18 nt, Human
gcugcaggaaggggagag

SEQ ID NO: 717408 - RNA, 23 nt, Human
gcuggucucaaacuccugaccuc

SEQ ID NO: 717409 - RNA, 19 nt, Human
ggaaggggagagaacggag

SEQ ID NO: 717410 - RNA, 21 nt, Human
ggaaucaagggcaggggccag

SEQ ID NO: 717411 - RNA, 24 nt, Human
ggaaucaagggcaggggccaguuc

SEQ ID NO: 717412 - RNA, 20 nt, Human
ggacagagucaucagggaca

SEQ ID NO: 717413 - RNA, 19 nt, Human
ggccaccagggaaggaccc

SEQ ID NO: 717414 - RNA, 19 nt, Human
ggcccggagggagggcugc

SEQ ID NO: 717415 - RNA, 24 nt, Human
ggcuggucucaaacuccugaccuc

SEQ ID NO: 717416 - RNA, 18 nt, Human
gggcagcacccacgccca

SEQ ID NO: 717417 - RNA, 21 nt, Human
ggggggaggggggcagcacac

SEQ ID NO: 717418 - RNA, 20 nt, Human
gggugcgguugagggagcua

SEQ ID NO: 717419 - RNA, 18 nt, Human
guagcugggauuacaggc

SEQ ID NO: 717420 - RNA, 18 nt, Human
gugugccaccacgcccag

SEQ ID NO: 717421 - RNA, 22 nt, Human
uaaacauuaccaggcuacacag

SEQ ID NO: 717422 - RNA, 19 nt, Human
uaaagcucccugaaggacc

SEQ ID NO: 717423 - RNA, 20 nt, Human
uaagaagauggugggugagg

SEQ ID NO: 717424 - RNA, 20 nt, Human
uaaggaacaucacaaacaca

SEQ ID NO: 717425 - RNA, 22 nt, Human
uaaggcaagagagacucggcca

SEQ ID NO: 717426 - RNA, 24 nt, Human
uaauuuuuguauuuuuggaagaga

SEQ ID NO: 717427 - RNA, 22 nt, Human
uacacagaguuaagugcauaau

SEQ ID NO: 717428 - RNA, 24 nt, Human
uacaggcgugugccaccacgccca

SEQ ID NO: 717429 - RNA, 22 nt, Human
uacaggugugagccacugugcc

SEQ ID NO: 717430 - RNA, 23 nt, Human
uacaggugugagccacugugccu

SEQ ID NO: 717431 - RNA, 26 nt, Human
uaccagcaagcaacuaugagaagaca

SEQ ID NO: 717432 - RNA, 21 nt, Human
uacuuagaccagacguugggg

SEQ ID NO: 717433 - RNA, 23 nt, Human
uaggauggcaucagggaccugcc

SEQ ID NO: 717434 - RNA, 21 nt, Human
uauguuaguucaacgaaagcu

SEQ ID NO: 717435 - RNA, 23 nt, Human
ucaaaaggacuucaccaucaaca

SEQ ID NO: 717436 - RNA, 24 nt, Human
ucaaagaucacaccugcaccaaaa

SEQ ID NO: 717437 - RNA, 23 nt, Human
ucaaauauuucaaacaggaacuc

SEQ ID NO: 717438 - RNA, 21 nt, Human
ucaaucccagaacaaaaauga

SEQ ID NO: 717439 - RNA, 21 nt, Human
ucacaaacacacacauggccc

SEQ ID NO: 717440 - RNA, 19 nt, Human
ucacagagguuagaagcuu

SEQ ID NO: 717441 - RNA, 22 nt, Human
ucaccacagacucuggacccau

SEQ ID NO: 717442 - RNA, 22 nt, Human
ucacccaggcuggagugcggug

SEQ ID NO: 717443 - RNA, 19 nt, Human
ucacugcaaccucugccuc

SEQ ID NO: 717444 - RNA, 24 nt, Human
ucacugcaaccucugccucccagg

SEQ ID NO: 717445 - RNA, 25 nt, Human
ucacugcaaccucugccucccaggu

SEQ ID NO: 717446 - RNA, 19 nt, Human
ucagaagcacaacgaccau

SEQ ID NO: 717447 - RNA, 26 nt, Human
ucagcauuaucaaaugaacagauaaa

SEQ ID NO: 717448 - RNA, 20 nt, Human
ucagccucccaaguagcugg

SEQ ID NO: 717449 - RNA, 24 nt, Human
ucagggucuucuagcccuacaugg

SEQ ID NO: 717450 - RNA, 22 nt, Human
ucaguaaaaaaaaaaaaaaaga

SEQ ID NO: 717451 - RNA, 23 nt, Human
ucaguucugauggaaacaccugg

SEQ ID NO: 717452 - RNA, 25 nt, Human
ucaguucugauggaaacaccuggug

SEQ ID NO: 717453 - RNA, 23 nt, Human
ucauucuuaaagcucccugaagg

SEQ ID NO: 717454 - RNA, 23 nt, Human
ucccaaagugcugggauuacagg

SEQ ID NO: 717455 - RNA, 24 nt, Human
ucccaaguagcugggauuacaggc

SEQ ID NO: 717456 - RNA, 21 nt, Human
ucccagguucaagcgauucuc

SEQ ID NO: 717457 - RNA, 24 nt, Human
ucccagguucaagcgauucuccug

SEQ ID NO: 717458 - RNA, 26 nt, Human
ucccucucacgcugguggagccucag

SEQ ID NO: 717459 - RNA, 18 nt, Human
ucuagucacagcccuuca

SEQ ID NO: 717460 - RNA, 23 nt, Human
ucucacucugucacccaggcugg

SEQ ID NO: 717461 - RNA, 24 nt, Human
ucucacucugucacccaggcugga

SEQ ID NO: 717462 - RNA, 22 nt, Human
ucugaccccaguccaggacagg

SEQ ID NO: 717463 - RNA, 24 nt, Human
ucugucacccaggcuggagugcgg

SEQ ID NO: 717464 - RNA, 19 nt, Human
ugaaacaaaggaaaauugg

SEQ ID NO: 717465 - RNA, 26 nt, Human
ugaacagaagggagaacagccucagg

SEQ ID NO: 717466 - RNA, 19 nt, Human
ugaauaaauaacuggguau

SEQ ID NO: 717467 - RNA, 18 nt, Human
ugacaugcaggugaaacc

SEQ ID NO: 717468 - RNA, 23 nt, Human
ugacaugcaggugaaaccuagag

SEQ ID NO: 717469 - RNA, 21 nt, Human
ugaccaaagaagcuaaggcaa

SEQ ID NO: 717470 - RNA, 22 nt, Human
ugaccaaagaagcuaaggcaag

SEQ ID NO: 717471 - RNA, 20 nt, Human
ugaccuggagaaagagcugg

SEQ ID NO: 717472 - RNA, 22 nt, Human
ugagacggagucucacucuguc

SEQ ID NO: 717473 - RNA, 22 nt, Human
ugaggcagaggaaucaagggca

SEQ ID NO: 717474 - RNA, 21 nt, Human
ugauaccaaacccuccaccgu

SEQ ID NO: 717475 - RNA, 23 nt, Human
ugcaaagccgcuccaagccacca

SEQ ID NO: 717476 - RNA, 24 nt, Human
ugcaaagugcuuccaaaacauccc

SEQ ID NO: 717477 - RNA, 24 nt, Human
ugccucagccucccaaguagcugg

SEQ ID NO: 717478 - RNA, 22 nt, Human
ugcgguggcgcaaucucggcuc

SEQ ID NO: 717479 - RNA, 23 nt, Human
ugcgguggcgcaaucucggcuca

SEQ ID NO: 717480 - RNA, 24 nt, Human
ugcugggauuacaggugugagcca

SEQ ID NO: 717481 - RNA, 24 nt, Human
uggagugcgguggcgcaaucucgg

SEQ ID NO: 717482 - RNA, 24 nt, Human
uggccaggcuggucucaaacuccu

SEQ ID NO: 717483 - RNA, 21 nt, Human
uggccugagcaucaguucugu

SEQ ID NO: 717484 - RNA, 19 nt, Human
uggcucaguucugcaacag

SEQ ID NO: 717485 - RNA, 21 nt, Human
uggcuuucagaucccaacuuu

SEQ ID NO: 717486 - RNA, 18 nt, Human
ugggauuacaggcgugug

SEQ ID NO: 717487 - RNA, 19 nt, Human
ugggauuacaggcgugugc

SEQ ID NO: 717488 - RNA, 21 nt, Human
ugggauuacaggcgugugcca

SEQ ID NO: 717489 - RNA, 22 nt, Human
ugggauuacaggcgugugccac

SEQ ID NO: 717490 - RNA, 24 nt, Human
ugggauuacaggcgugugccacca

SEQ ID NO: 717491 - RNA, 21 nt, Human
ugggauuacaggugugagcca

SEQ ID NO: 717492 - RNA, 22 nt, Human
ugggauuacaggugugagccac

SEQ ID NO: 717493 - RNA, 22 nt, Human
ugggauuacaggugugagccac

SEQ ID NO: 717494 - RNA, 22 nt, Human
ugggauuacaggugugagccac

SEQ ID NO: 717495 - RNA, 24 nt, Human
ugggauuacaggugugagccacug

SEQ ID NO: 717496 - RNA, 21 nt, Human
uggggucauucuuaaagcucc

SEQ ID NO: 717497 - RNA, 22 nt, Human
ugguggagccucagcccuggcc

SEQ ID NO: 717498 - RNA, 20 nt, Human
ugugucaccuuuuuguuuuu

SEQ ID NO: 717499 - RNA, 19 nt, Human
uuacucagaagcacaacga

SEQ ID NO: 717500 - RNA, 21 nt, Human
uucaagcgauucuccugccuc

SEQ ID NO: 717501 - RNA, 23 nt, Human
uucaagcgauucuccugccucag

SEQ ID NO: 717502 - RNA, 24 nt, Human
uucaagcgauucuccugccucagc

SEQ ID NO: 717503 - RNA, 18 nt, Human
uucacagagguuagaagc

SEQ ID NO: 717504 - RNA, 23 nt, Human
uucuagcccuacauggcuuucag

SEQ ID NO: 717505 - RNA, 19 nt, Human
uucuguggggucauucuua

SEQ ID NO: 717506 - RNA, 20 nt, Human
uugaggcagaggaaucaagg

SEQ ID NO: 717507 - RNA, 24 nt, Human
uugaggcagaggaaucaagggcag

SEQ ID NO: 717508 - RNA, 24 nt, Human
uuuuuggaagagacaggguuucac

SEQ ID NO: 717509 - RNA, 20 nt, Human
uuuuuguauuuuuggaagag

SEQ ID NO: 717510 - RNA, 23 nt, Human
uuuuuguauuuuuggaagagaca

SEQ ID NO: 717511 - RNA, 24 nt, Human
uuuuuguuuuuugagacggagucu

SEQ ID NO: 717512 - RNA, 21 nt, Human
aaacaaaaaguguccaauaug

SEQ ID NO: 717513 - RNA, 22 nt, Human
aaagagcuggggugcaacagga

SEQ ID NO: 717514 - RNA, 22 nt, Human
aaaguccaggcaggggaugaca

SEQ ID NO: 717515 - RNA, 23 nt, Human
aagaaugucaguugcaacacuau

SEQ ID NO: 717516 - RNA, 23 nt, Human
aagcacaaaggcuguagccacca

SEQ ID NO: 717517 - RNA, 22 nt, Human
aagcaccauaaacaaaauuuga

SEQ ID NO: 717518 - RNA, 19 nt, Human
aagcagaugaccuggacgc

SEQ ID NO: 717519 - RNA, 22 nt, Human
aagcauauuugcagcauuucuu

SEQ ID NO: 717520 - RNA, 19 nt, Human
aaggauccagcccaugggc

SEQ ID NO: 717521 - RNA, 23 nt, Human
aaggauccagcccaugggcugug

SEQ ID NO: 717522 - RNA, 18 nt, Human
acauaggucagcagugac

SEQ ID NO: 717523 - RNA, 21 nt, Human
accugucccaaaccuuggccc

SEQ ID NO: 717524 - RNA, 23 nt, Human
acuauuaucccagcuaccaaauu

SEQ ID NO: 717525 - RNA, 24 nt, Human
acuccaguguacacauugacaguc

SEQ ID NO: 717526 - RNA, 22 nt, Human
acucuuaaaagcacaaaggcug

SEQ ID NO: 717527 - RNA, 20 nt, Human
acugggaggagacaaagagc

SEQ ID NO: 717528 - RNA, 23 nt, Human
agcaaaaaacaaaaaguguccaa

SEQ ID NO: 717529 - RNA, 22 nt, Human
agcaccauaaacaaaauuugaa

SEQ ID NO: 717530 - RNA, 21 nt, Human
agccacaacagcaucccagcc

SEQ ID NO: 717531 - RNA, 18 nt, Human
agccccugggcagucucc

SEQ ID NO: 717532 - RNA, 23 nt, Human
agcuaugccacuaaaggccaugc

SEQ ID NO: 717533 - RNA, 22 nt, Human
aggagccagaagaaguggggag

SEQ ID NO: 717534 - RNA, 22 nt, Human
aggauccagcccaugggcugug

SEQ ID NO: 717535 - RNA, 23 nt, Human
aggcaggggaugacagugcaggu

SEQ ID NO: 717536 - RNA, 25 nt, Human
aggcuguagccaccauugucugcca

SEQ ID NO: 717537 - RNA, 22 nt, Human
aggcuugggaaugggggugggg

SEQ ID NO: 717538 - RNA, 22 nt, Human
auaaacaaaauuugaaagcaaa

SEQ ID NO: 717539 - RNA, 22 nt, Human
auacacagacauaacuauugga

SEQ ID NO: 717540 - RNA, 20 nt, Human
auccuaacaaaccaucugcc

SEQ ID NO: 717541 - RNA, 24 nt, Human
augggcugugugccugcugccugu

SEQ ID NO: 717542 - RNA, 22 nt, Human
augucaaaaagcaccauaaaca

SEQ ID NO: 717543 - RNA, 22 nt, Human
augugcaaaauuuagcuacaag

SEQ ID NO: 717544 - RNA, 21 nt, Human
caaacaucaaccaauacccca

SEQ ID NO: 717545 - RNA, 21 nt, Human
caaagaccaagggaagacccu

SEQ ID NO: 717546 - RNA, 18 nt, Human
caagccaagacaacgagu

SEQ ID NO: 717547 - RNA, 19 nt, Human
caagccccugggcagucuc

SEQ ID NO: 717548 - RNA, 19 nt, Human
cacacucauguaaacaaga

SEQ ID NO: 717549 - RNA, 24 nt, Human
cacaguucuuguuuuggggaggga

SEQ ID NO: 717550 - RNA, 24 nt, Human
cagaagcacuggccaaagucaaag

SEQ ID NO: 717551 - RNA, 18 nt, Human
cagaauccaggacggggc

SEQ ID NO: 717552 - RNA, 20 nt, Human
caggacggggcucucugccg

SEQ ID NO: 717553 - RNA, 19 nt, Human
caggcgugggcgcagcucu

SEQ ID NO: 717554 - RNA, 20 nt, Human
caguucaauccccuagccua

SEQ ID NO: 717555 - RNA, 23 nt, Human
cauagcauaacgagcacagacau

SEQ ID NO: 717556 - RNA, 21 nt, Human
cauguaaacaagaccucucuc

SEQ ID NO: 717557 - RNA, 24 nt, Human
cauucuccccgcugcugccagagg

SEQ ID NO: 717558 - RNA, 20 nt, Human
ccaaacaagcagaugaccug

SEQ ID NO: 717559 - RNA, 22 nt, Human
ccagcccaugagacuccucucc

SEQ ID NO: 717560 - RNA, 20 nt, Human
ccagcccugccccagcacac

SEQ ID NO: 717561 - RNA, 22 nt, Human
ccagccgccgccgccgccgccu

SEQ ID NO: 717562 - RNA, 21 nt, Human
ccauucuccccgcugcugcca

SEQ ID NO: 717563 - RNA, 18 nt, Human
cccaugagacuccucucc

SEQ ID NO: 717564 - RNA, 19 nt, Human
cccaugagacuccucucca

SEQ ID NO: 717565 - RNA, 18 nt, Human
cccccgccucccggcucc

SEQ ID NO: 717566 - RNA, 19 nt, Human
cccgccgccgccgccgccg

SEQ ID NO: 717567 - RNA, 18 nt, Human
cccgcucccgcccuccuc

SEQ ID NO: 717568 - RNA, 18 nt, Human
cccggcuccgcgccgccc

SEQ ID NO: 717569 - RNA, 19 nt, Human
cccuccucccuccgcaacc

SEQ ID NO: 717570 - RNA, 18 nt, Human
ccgccgccccggcgccug

SEQ ID NO: 717571 - RNA, 18 nt, Human
ccgccgccgccgccgccg

SEQ ID NO: 717572 - RNA, 18 nt, Human
ccgccgccgccgccgccg

SEQ ID NO: 717573 - RNA, 19 nt, Human
ccgccgccgccgccgccuc

SEQ ID NO: 717574 - RNA, 21 nt, Human
ccgccgccgccgccgccucgg

SEQ ID NO: 717575 - RNA, 18 nt, Human
ccgccgccgccgccgcgc

SEQ ID NO: 717576 - RNA, 26 nt, Human
ccgccgccgccgccgcgccuucccgg

SEQ ID NO: 717577 - RNA, 18 nt, Human
ccgccgccgccgccucgg

SEQ ID NO: 717578 - RNA, 24 nt, Human
ccgccgccgccgccucggacgccg

SEQ ID NO: 717579 - RNA, 19 nt, Human
ccgccgccgccucggacgc

SEQ ID NO: 717580 - RNA, 20 nt, Human
ccggccccucccccgccucc

SEQ ID NO: 717581 - RNA, 20 nt, Human
ccgggacuagcgcugcgggg

SEQ ID NO: 717582 - RNA, 19 nt, Human
ccucccggcuccgcgccgc

SEQ ID NO: 717583 - RNA, 21 nt, Human
ccucccggcuccgcgccgccc

SEQ ID NO: 717584 - RNA, 23 nt, Human
cgcacaaagaccaagggaagacc

SEQ ID NO: 717585 - RNA, 20 nt, Human
cgcaggcuucguggcggccg

SEQ ID NO: 717586 - RNA, 19 nt, Human
cgcgaagaaucaaagaaag

SEQ ID NO: 717587 - RNA, 21 nt, Human
cgugguggggcaucugcuuac

SEQ ID NO: 717588 - RNA, 18 nt, Human
cuaacaaaccaucugcca

SEQ ID NO: 717589 - RNA, 20 nt, Human
cuaaguauagcauagauacu

SEQ ID NO: 717590 - RNA, 20 nt, Human
cucccccgccucccggcucc

SEQ ID NO: 717591 - RNA, 22 nt, Human
cuccgcgccgcccgcucccgcc

SEQ ID NO: 717592 - RNA, 18 nt, Human
cucuuuccccuggccauc

SEQ ID NO: 717593 - RNA, 22 nt, Human
cugacaucaugaacacuuuuca

SEQ ID NO: 717594 - RNA, 22 nt, Human
cuggccaaagucaaagccacaa

SEQ ID NO: 717595 - RNA, 21 nt, Human
cuggggugcaacaggaggaaa

SEQ ID NO: 717596 - RNA, 23 nt, Human
cugguuuuugaucuuucuacaug

SEQ ID NO: 717597 - RNA, 20 nt, Human
cuguagcccccguugaaagc

SEQ ID NO: 717598 - RNA, 21 nt, Human
cuguugagaaaguuugauaug

SEQ ID NO: 717599 - RNA, 25 nt, Human
cuuccauuuccuugaagacugagac

SEQ ID NO: 717600 - RNA, 23 nt, Human
cuuccuguagcccccguugaaag

SEQ ID NO: 717601 - RNA, 18 nt, Human
cuucguggcggccgugac

SEQ ID NO: 717602 - RNA, 19 nt, Human
cuuggcccacuucauccug

SEQ ID NO: 717603 - RNA, 19 nt, Human
cuuucccaaugcuggggau

SEQ ID NO: 717604 - RNA, 22 nt, Human
gaacaguaucccagaguaacug

SEQ ID NO: 717605 - RNA, 20 nt, Human
gaaggauccagcccaugggc

SEQ ID NO: 717606 - RNA, 18 nt, Human
gacaaagccaagccccug

SEQ ID NO: 717607 - RNA, 20 nt, Human
gagcaaaaaacaaaaagugu

SEQ ID NO: 717608 - RNA, 23 nt, Human
gagcacagacaucaggagacuag

SEQ ID NO: 717609 - RNA, 21 nt, Human
gaggcuugggaaugggggugg

SEQ ID NO: 717610 - RNA, 22 nt, Human
gaguccgggggaaugguaugug

SEQ ID NO: 717611 - RNA, 18 nt, Human
gaugcaaaauaaauuaga

SEQ ID NO: 717612 - RNA, 22 nt, Human
gccacaacagcaucccagccca

SEQ ID NO: 717613 - RNA, 18 nt, Human
gcccacuucauccugccc

SEQ ID NO: 717614 - RNA, 22 nt, Human
gccugcugccugugggauggua

SEQ ID NO: 717615 - RNA, 22 nt, Human
gcuccagccgccgccgccgccg

SEQ ID NO: 717616 - RNA, 21 nt, Human
gcuucaccagcgcuucucugu

SEQ ID NO: 717617 - RNA, 18 nt, Human
gcuucaguggcaugugaa

SEQ ID NO: 717618 - RNA, 24 nt, Human
ggaaagacagcauaauauaguagg

SEQ ID NO: 717619 - RNA, 20 nt, Human
ggaaggaggcaggggcuaag

SEQ ID NO: 717620 - RNA, 25 nt, Human
ggaaggaguaaaagugagggagugg

SEQ ID NO: 717621 - RNA, 18 nt, Human
ggaaugguaugugugguc

SEQ ID NO: 717622 - RNA, 24 nt, Human
ggacaaaugcacagaaaauucagc

SEQ ID NO: 717623 - RNA, 25 nt, Human
ggacaaaugcacagaaaauucagcc

SEQ ID NO: 717624 - RNA, 23 nt, Human
ggacagaauccaggacggggcuc

SEQ ID NO: 717625 - RNA, 25 nt, Human
ggagaggaugucuccauugucuggg

SEQ ID NO: 717626 - RNA, 19 nt, Human
ggaguccuuccugacgcac

SEQ ID NO: 717627 - RNA, 21 nt, Human
ggaugacagugcaggucagau

SEQ ID NO: 717628 - RNA, 25 nt, Human
ggccccucccccgccucccggcucc

SEQ ID NO: 717629 - RNA, 20 nt, Human
gggaaugggggugggggugg

SEQ ID NO: 717630 - RNA, 22 nt, Human
gggaugccuggaaguccccggu

SEQ ID NO: 717631 - RNA, 20 nt, Human
ggugggggguggggguggga

SEQ ID NO: 717632 - RNA, 24 nt, Human
gguuuugugcucuaaagccuuugu

SEQ ID NO: 717633 - RNA, 24 nt, Human
gucuugggugguaagcuuauggau

SEQ ID NO: 717634 - RNA, 23 nt, Human
uaaaaaaauccacaacugugugu

SEQ ID NO: 717635 - RNA, 25 nt, Human
uaaaaaaauccacaacugugugugc

SEQ ID NO: 717636 - RNA, 23 nt, Human
uaaaacuucuacaauacacacau

SEQ ID NO: 717637 - RNA, 22 nt, Human
uaaaagcacaaaggcuguagcc

SEQ ID NO: 717638 - RNA, 23 nt, Human
uaaaagcacaaaggcuguagcca

SEQ ID NO: 717639 - RNA, 26 nt, Human
uaaaagcacaaaggcuguagccacca

SEQ ID NO: 717640 - RNA, 22 nt, Human
uaaacauaccaauaucaaauaa

SEQ ID NO: 717641 - RNA, 22 nt, Human
uaaaucacaguucuuguuuugg

SEQ ID NO: 717642 - RNA, 22 nt, Human
uaacaguugccucgagaugcuc

SEQ ID NO: 717643 - RNA, 21 nt, Human
uaaggcaggagagccagucug

SEQ ID NO: 717644 - RNA, 25 nt, Human
uaauggcaggccccucaauauuucu

SEQ ID NO: 717645 - RNA, 24 nt, Human
uacaccaaaaagaacuaaaaggua

SEQ ID NO: 717646 - RNA, 18 nt, Human
uacaugggauggcuacaa

SEQ ID NO: 717647 - RNA, 21 nt, Human
uagaaugagcaauacacagac

SEQ ID NO: 717648 - RNA, 20 nt, Human
uaggaugcaaaauaaauuag

SEQ ID NO: 717649 - RNA, 20 nt, Human
uaguuuuucccccaaagagu

SEQ ID NO: 717650 - RNA, 24 nt, Human
uaucaaaauucuuaaaaauagcca

SEQ ID NO: 717651 - RNA, 18 nt, Human
uauucaguguauccaguu

SEQ ID NO: 717652 - RNA, 19 nt, Human
ucacaaagaaagaaguaca

SEQ ID NO: 717653 - RNA, 21 nt, Human
ucagcccuaucaccccaaaca

SEQ ID NO: 717654 - RNA, 23 nt, Human
ucagcccuaucaccccaaacauc

SEQ ID NO: 717655 - RNA, 24 nt, Human
ucaggccccucucagucgcugacc

SEQ ID NO: 717656 - RNA, 23 nt, Human
ucaguaaguagaaugagcaauac

SEQ ID NO: 717657 - RNA, 24 nt, Human
ucaguaaguguuucuuguuugacu

SEQ ID NO: 717658 - RNA, 24 nt, Human
uccacaaucccagcccacucuuaa

SEQ ID NO: 717659 - RNA, 23 nt, Human
ucccagcagaagucaggccccuc

SEQ ID NO: 717660 - RNA, 22 nt, Human
ucccgcccuccucccuccgcaa

SEQ ID NO: 717661 - RNA, 21 nt, Human
ucccggguuuaaaagccgcgg

SEQ ID NO: 717662 - RNA, 22 nt, Human
ucuagcaccuuccuguagcccc

SEQ ID NO: 717663 - RNA, 19 nt, Human
ucuaugugcuagauguuga

SEQ ID NO: 717664 - RNA, 20 nt, Human
ucuccagagagugagcucua

SEQ ID NO: 717665 - RNA, 20 nt, Human
ucuccaggugaccucuaccc

SEQ ID NO: 717666 - RNA, 27 nt, Human
ucucuucauccuucagauccuaacaaa

SEQ ID NO: 717667 - RNA, 21 nt, Human
ucugcccgccgccgccgccgc

SEQ ID NO: 717668 - RNA, 20 nt, Human
ucuggcgccccgcacuccca

SEQ ID NO: 717669 - RNA, 21 nt, Human
ucuugggugguaagcuuaugg

SEQ ID NO: 717670 - RNA, 19 nt, Human
ugaaagcaaagcacuugga

SEQ ID NO: 717671 - RNA, 21 nt, Human
ugaaggaacagaaggagcaaa

SEQ ID NO: 717672 - RNA, 19 nt, Human
ugaccucuacccuucucuu

SEQ ID NO: 717673 - RNA, 19 nt, Human
ugacugaagcaacauggca

SEQ ID NO: 717674 - RNA, 23 nt, Human
ugaguaaauacauaaggaggcca

SEQ ID NO: 717675 - RNA, 24 nt, Human
ugcaacacuauuuacaaugaagau

SEQ ID NO: 717676 - RNA, 21 nt, Human
ugcacagaaaauucagcccua

SEQ ID NO: 717677 - RNA, 20 nt, Human
ugccaaaucacaaacguucu

SEQ ID NO: 717678 - RNA, 21 nt, Human
ugccaaaucacaaacguucua

SEQ ID NO: 717679 - RNA, 25 nt, Human
ugccccagcacacucauguaaacaa

SEQ ID NO: 717680 - RNA, 22 nt, Human
ugccugcugggugggaguccgg

SEQ ID NO: 717681 - RNA, 24 nt, Human
ugccuggaaguccccggucaggcc

SEQ ID NO: 717682 - RNA, 23 nt, Human
ugccuggcuguaaguagcucuga

SEQ ID NO: 717683 - RNA, 21 nt, Human
ugccugugggaugguacacuc

SEQ ID NO: 717684 - RNA, 23 nt, Human
ugcggggggaccguggccccgag

SEQ ID NO: 717685 - RNA, 22 nt, Human
ugcuuuggggaaagccccaucc

SEQ ID NO: 717686 - RNA, 29 nt, Human
uggaggcuugggaaugggggugggggugg

SEQ ID NO: 717687 - RNA, 20 nt, Human
uggauccugccguggugggg

SEQ ID NO: 717688 - RNA, 19 nt, Human
uggauuggauuuuguccuu

SEQ ID NO: 717689 - RNA, 20 nt, Human
uggauuggauuuuguccuuu

SEQ ID NO: 717690 - RNA, 21 nt, Human
uggccaaagucaaagccacaa

SEQ ID NO: 717691 - RNA, 23 nt, Human
uggcccacuucauccugcccuuc

SEQ ID NO: 717692 - RNA, 18 nt, Human
ugggcaaacaauaugccc

SEQ ID NO: 717693 - RNA, 20 nt, Human
uggggagggaugaggagaag

SEQ ID NO: 717694 - RNA, 18 nt, Human
uggggguggggguggggg

SEQ ID NO: 717695 - RNA, 23 nt, Human
ugggggugggggugggggucggg

SEQ ID NO: 717696 - RNA, 21 nt, Human
ugggugaugaaugcuagguga

SEQ ID NO: 717697 - RNA, 22 nt, Human
ugucaggaaaguguggaaggau

SEQ ID NO: 717698 - RNA, 25 nt, Human
ugucaggaaaguguggaaggaucca

SEQ ID NO: 717699 - RNA, 19 nt, Human
ugucugggcgaccuaccag

SEQ ID NO: 717700 - RNA, 22 nt, Human
ugugaauauaacuuacgcugcu

SEQ ID NO: 717701 - RNA, 18 nt, Human
ugugccugcugccugugg

SEQ ID NO: 717702 - RNA, 18 nt, Human
uguggaaggauccagccc

SEQ ID NO: 717703 - RNA, 19 nt, Human
uguggaaggauccagccca

SEQ ID NO: 717704 - RNA, 22 nt, Human
ugugugugcguguguacauuua

SEQ ID NO: 717705 - RNA, 24 nt, Human
uuacauaauuaacccauauuuaac

SEQ ID NO: 717706 - RNA, 20 nt, Human
uucaaauccuagcuaugcca

SEQ ID NO: 717707 - RNA, 20 nt, Human
uuccccuggccaucaucuuu

SEQ ID NO: 717708 - RNA, 25 nt, Human
uuccuuuuccucuucuccagagagu

SEQ ID NO: 717709 - RNA, 22 nt, Human
uuggauuuuguccuuuuuuucc

SEQ ID NO: 717710 - RNA, 23 nt, Human
uugggaauggggguggggguggg

SEQ ID NO: 717711 - RNA, 23 nt, Human
uuguccuuuuuuuccuaaaacuu

SEQ ID NO: 717712 - RNA, 23 nt, Human
uuucuuaacccuuccauuuccuu

SEQ ID NO: 717713 - RNA, 23 nt, Human
uuugguacaaacuuucuggaggg

SEQ ID NO: 717714 - RNA, 23 nt, Human
aaaacaaagcgagcagcaggaaa

SEQ ID NO: 717715 - RNA, 23 nt, Human
aaaaccaaagcuggaagcccaga

SEQ ID NO: 717716 - RNA, 18 nt, Human
aaaauacagagacaaaga

SEQ ID NO: 717717 - RNA, 22 nt, Human
aaacaaaagggaaagucauuca

SEQ ID NO: 717718 - RNA, 19 nt, Human
aaacaccuauggaugaucu

SEQ ID NO: 717719 - RNA, 23 nt, Human
aaaccaaagcuggaagcccagaa

SEQ ID NO: 717720 - RNA, 27 nt, Human
aaaccaaucucuaaacagaacccagag

SEQ ID NO: 717721 - RNA, 18 nt, Human
aacaaagcgagcagcagg

SEQ ID NO: 717722 - RNA, 21 nt, Human
aacaaagcugcuuuuccuauu

SEQ ID NO: 717723 - RNA, 18 nt, Human
aaccaaagcuggaagccc

SEQ ID NO: 717724 - RNA, 21 nt, Human
aaccccagaaauggaccggaa

SEQ ID NO: 717725 - RNA, 21 nt, Human
aacuuugccucucaaauccac

SEQ ID NO: 717726 - RNA, 24 nt, Human
aagaggccagggagaggccuggcg

SEQ ID NO: 717727 - RNA, 18 nt, Human
aagcagaagaaacaccua

SEQ ID NO: 717728 - RNA, 21 nt, Human
aagccggggccgagaacugua

SEQ ID NO: 717729 - RNA, 21 nt, Human
aagucacuucuugacccucug

SEQ ID NO: 717730 - RNA, 18 nt, Human
aaguguaaccgucaaacc

SEQ ID NO: 717731 - RNA, 20 nt, Human
aauccacagcaguuuccccu

SEQ ID NO: 717732 - RNA, 21 nt, Human
aauucagucuguucuaaguug

SEQ ID NO: 717733 - RNA, 21 nt, Human
accuaccgccccgcccccgac

SEQ ID NO: 717734 - RNA, 20 nt, Human
accuuagcugaccccacucc

SEQ ID NO: 717735 - RNA, 20 nt, Human
acgagaagccugugucuagc

SEQ ID NO: 717736 - RNA, 22 nt, Human
acugaggucagucuauguuguu

SEQ ID NO: 717737 - RNA, 19 nt, Human
acugcagcucugccugcuc

SEQ ID NO: 717738 - RNA, 21 nt, Human
agaaacccacaaggccuggcc

SEQ ID NO: 717739 - RNA, 18 nt, Human
agaagaaaagaaagaaag

SEQ ID NO: 717740 - RNA, 24 nt, Human
agaggaguguugcugaagccugga

SEQ ID NO: 717741 - RNA, 20 nt, Human
agcagcuggugggcagggga

SEQ ID NO: 717742 - RNA, 20 nt, Human
agcauuaaugccccaaacaa

SEQ ID NO: 717743 - RNA, 22 nt, Human
agccagucagagacacagcccc

SEQ ID NO: 717744 - RNA, 20 nt, Human
agcccagggcagugcuccga

SEQ ID NO: 717745 - RNA, 21 nt, Human
agccugccccaaaggccacgc

SEQ ID NO: 717746 - RNA, 19 nt, Human
agcugcuuucugcuggccu

SEQ ID NO: 717747 - RNA, 19 nt, Human
aggaaagggagacuaccca

SEQ ID NO: 717748 - RNA, 26 nt, Human
aggcccaggccaaguggccaagagga

SEQ ID NO: 717749 - RNA, 24 nt, Human
aggcgcaccgggaugccagccugc

SEQ ID NO: 717750 - RNA, 21 nt, Human
aggcggaggugaggccugggu

SEQ ID NO: 717751 - RNA, 25 nt, Human
agucagagacacagccccacuucug

SEQ ID NO: 717752 - RNA, 23 nt, Human
augccccaaacaaagcugcuuuu

SEQ ID NO: 717753 - RNA, 20 nt, Human
caaaauacagagacaaagau

SEQ ID NO: 717754 - RNA, 19 nt, Human
caagcagaagaaacaccua

SEQ ID NO: 717755 - RNA, 21 nt, Human
caaggcagggcucguucugca

SEQ ID NO: 717756 - RNA, 20 nt, Human
caaguagcaaccuuagcuga

SEQ ID NO: 717757 - RNA, 24 nt, Human
caccgggggccagggaugggccca

SEQ ID NO: 717758 - RNA, 20 nt, Human
cagcacagugugguuccuca

SEQ ID NO: 717759 - RNA, 20 nt, Human
cagcacuagaaacugcacac

SEQ ID NO: 717760 - RNA, 20 nt, Human
cagcagcugauaugguuggg

SEQ ID NO: 717761 - RNA, 22 nt, Human
cagcuccccuguccucugcccc

SEQ ID NO: 717762 - RNA, 22 nt, Human
cagcuccccuguccucugcccc

SEQ ID NO: 717763 - RNA, 19 nt, Human
cagcugagccaacuuugcc

SEQ ID NO: 717764 - RNA, 20 nt, Human
caguucauaaagagcagcag

SEQ ID NO: 717765 - RNA, 25 nt, Human
cauaaagagcagcagcugauauggu

SEQ ID NO: 717766 - RNA, 19 nt, Human
caucgggaaccccagaaau

SEQ ID NO: 717767 - RNA, 22 nt, Human
ccaaagcuggaagcccagaaau

SEQ ID NO: 717768 - RNA, 20 nt, Human
ccacccgaaugggcuccuuc

SEQ ID NO: 717769 - RNA, 21 nt, Human
ccagcagccaaguguaaccgu

SEQ ID NO: 717770 - RNA, 18 nt, Human
ccagcccagggcagugcu

SEQ ID NO: 717771 - RNA, 28 nt, Human
cccagagcuagagcagacuagccaaggc

SEQ ID NO: 717772 - RNA, 21 nt, Human
ccccugaaagggacaggaagu

SEQ ID NO: 717773 - RNA, 18 nt, Human
cccgcccccgacagaggc

SEQ ID NO: 717774 - RNA, 20 nt, Human
cccugaaaggggcaggaaau

SEQ ID NO: 717775 - RNA, 19 nt, Human
ccgacccacugagcugcac

SEQ ID NO: 717776 - RNA, 19 nt, Human
ccgccuucucuuccgaccc

SEQ ID NO: 717777 - RNA, 18 nt, Human
ccuaugccaggaaagcuc

SEQ ID NO: 717778 - RNA, 21 nt, Human
ccucugaaccaaccucagcuc

SEQ ID NO: 717779 - RNA, 22 nt, Human
ccuggauuauucauccugggac

SEQ ID NO: 717780 - RNA, 25 nt, Human
ccuguggcugggacagguacugagc

SEQ ID NO: 717781 - RNA, 18 nt, Human
cguggugguggcaggccc

SEQ ID NO: 717782 - RNA, 24 nt, Human
cucaaauccacagcaguuuccccu

SEQ ID NO: 717783 - RNA, 20 nt, Human
cuccacagccaaggcagggc

SEQ ID NO: 717784 - RNA, 20 nt, Human
cucccugcucaaacccgagc

SEQ ID NO: 717785 - RNA, 24 nt, Human
cugaggacagaggcuaugcaggcu

SEQ ID NO: 717786 - RNA, 23 nt, Human
cuggccucugaaccaaccucagc

SEQ ID NO: 717787 - RNA, 22 nt, Human
cuucucauuuauuaauucaguc

SEQ ID NO: 717788 - RNA, 18 nt, Human
gaaaauaacaaaaccaaa

SEQ ID NO: 717789 - RNA, 23 nt, Human
gaaaauaacaaaaccaaagcugg

SEQ ID NO: 717790 - RNA, 19 nt, Human
gaacccagagcuagagcag

SEQ ID NO: 717791 - RNA, 21 nt, Human
gagaagaaaagaaagaaaggc

SEQ ID NO: 717792 - RNA, 22 nt, Human
gagcagcagcugauaugguugg

SEQ ID NO: 717793 - RNA, 19 nt, Human
gagcagcuggugggcaggg

SEQ ID NO: 717794 - RNA, 19 nt, Human
gcacacgcagagccugucg

SEQ ID NO: 717795 - RNA, 24 nt, Human
gcacccaaguuccguccugaggac

SEQ ID NO: 717796 - RNA, 24 nt, Human
gcccaucugaagucucccacccga

SEQ ID NO: 717797 - RNA, 23 nt, Human
gccccgcccccgacagaggccca

SEQ ID NO: 717798 - RNA, 24 nt, Human
gcgagcagcaggaaagcuuaagaa

SEQ ID NO: 717799 - RNA, 27 nt, Human
gcuuuaggguuccuggucaacucuuuc

SEQ ID NO: 717800 - RNA, 21 nt, Human
ggaaagcucggagccugcuaa

SEQ ID NO: 717801 - RNA, 22 nt, Human
ggaaagcucggagccugcuaaa

SEQ ID NO: 717802 - RNA, 20 nt, Human
ggaaagcuuaagaagcagag

SEQ ID NO: 717803 - RNA, 20 nt, Human
ggaaagcuuaagaagcagag

SEQ ID NO: 717804 - RNA, 19 nt, Human
ggccaagaggagguccugc

SEQ ID NO: 717805 - RNA, 20 nt, Human
ggccccuuaggaggaagacg

SEQ ID NO: 717806 - RNA, 27 nt, Human
gggcaggaaaugaaguaaaagggaccc

SEQ ID NO: 717807 - RNA, 18 nt, Human
ggugguggcagugggagc

SEQ ID NO: 717808 - RNA, 19 nt, Human
ggugguggcagugggagcc

SEQ ID NO: 717809 - RNA, 18 nt, Human
gucgggaaggucuuaugc

SEQ ID NO: 717810 - RNA, 20 nt, Human
gugaggcgauggcgguggug

SEQ ID NO: 717811 - RNA, 19 nt, Human
gugguggcaggcccaggcc

SEQ ID NO: 717812 - RNA, 20 nt, Human
uaaaacaaaagggaaaguca

SEQ ID NO: 717813 - RNA, 18 nt, Human
uaaagugcccacaggagg

SEQ ID NO: 717814 - RNA, 23 nt, Human
uaacaaaaccaaagcuggaagcc

SEQ ID NO: 717815 - RNA, 19 nt, Human
uaagcacaaaagacagcuu

SEQ ID NO: 717816 - RNA, 23 nt, Human
uaccaacaaagaauucaaauuca

SEQ ID NO: 717817 - RNA, 24 nt, Human
uaccaagaaguggaggagggccug

SEQ ID NO: 717818 - RNA, 21 nt, Human
uacgagaagccugugucuagc

SEQ ID NO: 717819 - RNA, 24 nt, Human
uauagcagcuucaagcagaagaaa

SEQ ID NO: 717820 - RNA, 23 nt, Human
ucaaagacagacccaauucagac

SEQ ID NO: 717821 - RNA, 18 nt, Human
ucaguccauugccacacc

SEQ ID NO: 717822 - RNA, 19 nt, Human
uccacaccgggggccaggg

SEQ ID NO: 717823 - RNA, 25 nt, Human
uccacagcaguuuccccugcauuuc

SEQ ID NO: 717824 - RNA, 18 nt, Human
uccccugcauuucuacuc

SEQ ID NO: 717825 - RNA, 25 nt, Human
ucuaaggcuguguucuuacgagaag

SEQ ID NO: 717826 - RNA, 22 nt, Human
ucuagccccugaaagggacagg

SEQ ID NO: 717827 - RNA, 20 nt, Human
ucugcaggacgugguggugg

SEQ ID NO: 717828 - RNA, 19 nt, Human
ugaaaauaacaaaaccaaa

SEQ ID NO: 717829 - RNA, 21 nt, Human
ugaaaauaacaaaaccaaagc

SEQ ID NO: 717830 - RNA, 22 nt, Human
ugaaaauaacaaaaccaaagcu

SEQ ID NO: 717831 - RNA, 23 nt, Human
ugaaaauaacaaaaccaaagcug

SEQ ID NO: 717832 - RNA, 22 nt, Human
ugaaaggggcaggaaaugaagu

SEQ ID NO: 717833 - RNA, 18 nt, Human
ugaccccacuccaagcau

SEQ ID NO: 717834 - RNA, 18 nt, Human
ugagccccaaucacacag

SEQ ID NO: 717835 - RNA, 21 nt, Human
ugagccugcuccguuccccuc

SEQ ID NO: 717836 - RNA, 23 nt, Human
ugaggacagaggcuaugcaggcu

SEQ ID NO: 717837 - RNA, 24 nt, Human
ugaggacagaggcuaugcaggcug

SEQ ID NO: 717838 - RNA, 20 nt, Human
ugagucccaggccccaaccu

SEQ ID NO: 717839 - RNA, 20 nt, Human
ugauuagacaaaucacaaau

SEQ ID NO: 717840 - RNA, 18 nt, Human
ugcacacuuaucuucauu

SEQ ID NO: 717841 - RNA, 23 nt, Human
ugcacugucaccuuauuuagccu

SEQ ID NO: 717842 - RNA, 20 nt, Human
ugcaggacguggugguggca

SEQ ID NO: 717843 - RNA, 23 nt, Human
ugcaggugaggcgauggcggugg

SEQ ID NO: 717844 - RNA, 19 nt, Human
ugccagccugccccaaagg

SEQ ID NO: 717845 - RNA, 25 nt, Human
ugccagccugccccaaaggccacgc

SEQ ID NO: 717846 - RNA, 20 nt, Human
ugccugagccugcuccguuc

SEQ ID NO: 717847 - RNA, 21 nt, Human
ugcucaggugccucuaaggcu

SEQ ID NO: 717848 - RNA, 19 nt, Human
ugcuccguuccccucaccc

SEQ ID NO: 717849 - RNA, 20 nt, Human
uggaagcccagaaauauuua

SEQ ID NO: 717850 - RNA, 20 nt, Human
uggcaaguagcaaccuuagc

SEQ ID NO: 717851 - RNA, 18 nt, Human
uggccucugaaccaaccu

SEQ ID NO: 717852 - RNA, 18 nt, Human
uggccucugaaccaaccu

SEQ ID NO: 717853 - RNA, 20 nt, Human
uggccugggcaucucaaaga

SEQ ID NO: 717854 - RNA, 21 nt, Human
uggccugggcaucucaaagac

SEQ ID NO: 717855 - RNA, 22 nt, Human
uggcggugguggcagugggagc

SEQ ID NO: 717856 - RNA, 22 nt, Human
ugggaaagaggaguguugcuga

SEQ ID NO: 717857 - RNA, 22 nt, Human
ugggacagguacugagcccauc

SEQ ID NO: 717858 - RNA, 22 nt, Human
uggguuaagaaugugccuaaca

SEQ ID NO: 717859 - RNA, 23 nt, Human
uggucaacucuuggaagaaagcc

SEQ ID NO: 717860 - RNA, 19 nt, Human
uggugguggcaggcccagg

SEQ ID NO: 717861 - RNA, 21 nt, Human
uggugguggcaggcccaggcc

SEQ ID NO: 717862 - RNA, 19 nt, Human
uguacaguuaugaaaauaa

SEQ ID NO: 717863 - RNA, 21 nt, Human
uuagcagauagaaacccacaa

SEQ ID NO: 717864 - RNA, 23 nt, Human
uuagcugaccccacuccaagcau

SEQ ID NO: 717865 - RNA, 23 nt, Human
uucagagaaucaaaaugagcccc

SEQ ID NO: 717866 - RNA, 18 nt, Human
uucccaucgggaacccca

SEQ ID NO: 717867 - RNA, 18 nt, Human
uuuggccacugaaccuuc

SEQ ID NO: 717868 - RNA, 19 nt, Human
aaacaaacaaaaaaaaauc

SEQ ID NO: 717869 - RNA, 21 nt, Human
aaauagccaagaauuuaacag

SEQ ID NO: 717870 - RNA, 19 nt, Human
aaaugaccuccaucuagaa

SEQ ID NO: 717871 - RNA, 26 nt, Human
aacuccacaagaaaacaaacaaaaaa

SEQ ID NO: 717872 - RNA, 24 nt, Human
aagaaaaaggcaacaaaacccaaa

SEQ ID NO: 717873 - RNA, 25 nt, Human
aagaaugaaaaauacauaaaaacgu

SEQ ID NO: 717874 - RNA, 20 nt, Human
aagacaagcacaugcacacc

SEQ ID NO: 717875 - RNA, 22 nt, Human
aagcaagaagagaaagagggac

SEQ ID NO: 717876 - RNA, 19 nt, Human
aagcauuuucugcaguuga

SEQ ID NO: 717877 - RNA, 19 nt, Human
aagccuaaaugcuccaaag

SEQ ID NO: 717878 - RNA, 22 nt, Human
acaaaacccaaauguucaaagc

SEQ ID NO: 717879 - RNA, 18 nt, Human
acaaaacuaaaaagccac

SEQ ID NO: 717880 - RNA, 20 nt, Human
acaaaacuaaaaagccacac

SEQ ID NO: 717881 - RNA, 20 nt, Human
acaagaugcgccggcucccc

SEQ ID NO: 717882 - RNA, 20 nt, Human
accaaggagaaacgggagcc

SEQ ID NO: 717883 - RNA, 22 nt, Human
accacgggaaaaacaaucucag

SEQ ID NO: 717884 - RNA, 18 nt, Human
accccacaccccaaaucc

SEQ ID NO: 717885 - RNA, 19 nt, Human
accgcugagucacccaggc

SEQ ID NO: 717886 - RNA, 19 nt, Human
acuccacaagaaaacaaac

SEQ ID NO: 717887 - RNA, 21 nt, Human
acugcaguuaagaugcaaaaa

SEQ ID NO: 717888 - RNA, 22 nt, Human
agaacaaguauaguacacucuu

SEQ ID NO: 717889 - RNA, 21 nt, Human
agaguccaccgcgcccuaccu

SEQ ID NO: 717890 - RNA, 21 nt, Human
agcaaaaccaccacacaggga

SEQ ID NO: 717891 - RNA, 20 nt, Human
agcaggccacaccacuuucu

SEQ ID NO: 717892 - RNA, 19 nt, Human
agccaaagauuucucuggg

SEQ ID NO: 717893 - RNA, 22 nt, Human
agcccuuuccuaauaaacagca

SEQ ID NO: 717894 - RNA, 18 nt, Human
agcugcagcagccaaaga

SEQ ID NO: 717895 - RNA, 19 nt, Human
aggaagcuggaguucuuua

SEQ ID NO: 717896 - RNA, 28 nt, Human
aggcaacaaaacccaaauguucaaagca

SEQ ID NO: 717897 - RNA, 21 nt, Human
aggcugccgggcggcgcggcg

SEQ ID NO: 717898 - RNA, 22 nt, Human
aggggaaaagaaauccuaagag

SEQ ID NO: 717899 - RNA, 25 nt, Human
aggggcugcgggcggcugccgagcg

SEQ ID NO: 717900 - RNA, 24 nt, Human
agguaguagucccugcgugugcug

SEQ ID NO: 717901 - RNA, 19 nt, Human
agucccugcgugugcuggg

SEQ ID NO: 717902 - RNA, 19 nt, Human
agugugcaccuuugccacc

SEQ ID NO: 717903 - RNA, 20 nt, Human
auaaacagcagcuguccaaa

SEQ ID NO: 717904 - RNA, 23 nt, Human
caaaacccaaauguucaaagcaa

SEQ ID NO: 717905 - RNA, 21 nt, Human
caaacacaaaaugagaucgaa

SEQ ID NO: 717906 - RNA, 25 nt, Human
caacaaaacccaaauguucaaagcc

SEQ ID NO: 717907 - RNA, 18 nt, Human
caaccacgggaaaaacaa

SEQ ID NO: 717908 - RNA, 22 nt, Human
caauacaaccacgggaaaaaca

SEQ ID NO: 717909 - RNA, 19 nt, Human
cacaaaacuaaaaagccac

SEQ ID NO: 717910 - RNA, 23 nt, Human
cacaagaaaacaaacaaaaaaaa

SEQ ID NO: 717911 - RNA, 27 nt, Human
cacacagacccucaaugacuccacagu

SEQ ID NO: 717912 - RNA, 25 nt, Human
cacacccacccaccuuaaaguguca

SEQ ID NO: 717913 - RNA, 24 nt, Human
cacgggaaaaacaaucucagccca

SEQ ID NO: 717914 - RNA, 20 nt, Human
cacugaagaguaauuuucca

SEQ ID NO: 717915 - RNA, 23 nt, Human
cagaaaguaacaaucugcaacua

SEQ ID NO: 717916 - RNA, 19 nt, Human
cagcaaaaccaccacacag

SEQ ID NO: 717917 - RNA, 21 nt, Human
cagcagccaaagauuucucug

SEQ ID NO: 717918 - RNA, 20 nt, Human
cagccaccuaaaacagacuu

SEQ ID NO: 717919 - RNA, 22 nt, Human
caggccacaccacuuucuuccc

SEQ ID NO: 717920 - RNA, 22 nt, Human
caggggcagaguccaccgcgcc

SEQ ID NO: 717921 - RNA, 19 nt, Human
cagucccacggagcgacag

SEQ ID NO: 717922 - RNA, 24 nt, Human
cauauuaacauauaaagauuuaau

SEQ ID NO: 717923 - RNA, 26 nt, Human
cauucucaacgcauucuccggaacgg

SEQ ID NO: 717924 - RNA, 23 nt, Human
ccacaagaaaacaaacaaaaaaa

SEQ ID NO: 717925 - RNA, 23 nt, Human
ccacacacagaacuugcccagag

SEQ ID NO: 717926 - RNA, 19 nt, Human
ccagaaaguaacaaucugc

SEQ ID NO: 717927 - RNA, 21 nt, Human
ccagaacauucucucaaacac

SEQ ID NO: 717928 - RNA, 21 nt, Human
cccacaccccaaauccuuggc

SEQ ID NO: 717929 - RNA, 21 nt, Human
ccccagaagaaaacaaaaaga

SEQ ID NO: 717930 - RNA, 20 nt, Human
ccggcgggggcgccucuccu

SEQ ID NO: 717931 - RNA, 27 nt, Human
ccuaaaacagacuuucccucuucaggc

SEQ ID NO: 717932 - RNA, 24 nt, Human
ccucugagcuucagcuacuuaacu

SEQ ID NO: 717933 - RNA, 20 nt, Human
ccuggccucugccuguggcc

SEQ ID NO: 717934 - RNA, 22 nt, Human
ccuguggcacaaugccaugaga

SEQ ID NO: 717935 - RNA, 20 nt, Human
cgcacacacacacacacaca

SEQ ID NO: 717936 - RNA, 23 nt, Human
cgccccaacccaccacacacaga

SEQ ID NO: 717937 - RNA, 25 nt, Human
cgcgcacacacacacacacacaccc

SEQ ID NO: 717938 - RNA, 20 nt, Human
cggcgggggcgccucuccuc

SEQ ID NO: 717939 - RNA, 18 nt, Human
cggcuccccgggcucacc

SEQ ID NO: 717940 - RNA, 18 nt, Human
cggugaggacacacagac

SEQ ID NO: 717941 - RNA, 21 nt, Human
cgugaaaucagaacaauacaa

SEQ ID NO: 717942 - RNA, 19 nt, Human
cuaaaugaccuccaucuag

SEQ ID NO: 717943 - RNA, 22 nt, Human
cuaauaaacagcagcuguccaa

SEQ ID NO: 717944 - RNA, 20 nt, Human
cuaaugaaucaacauccuga

SEQ ID NO: 717945 - RNA, 20 nt, Human
cucaaacacaaaaugagauc

SEQ ID NO: 717946 - RNA, 20 nt, Human
cucuacccgccccaacccuc

SEQ ID NO: 717947 - RNA, 19 nt, Human
cucugggugaugagguggc

SEQ ID NO: 717948 - RNA, 23 nt, Human
cugaugcuccaggcaugcuacgc

SEQ ID NO: 717949 - RNA, 22 nt, Human
cugcagcagccaaagauuucuc

SEQ ID NO: 717950 - RNA, 24 nt, Human
cugcagcagccaaagauuucucuc

SEQ ID NO: 717951 - RNA, 22 nt, Human
cugcaguuaagaugcaaaaagc

SEQ ID NO: 717952 - RNA, 28 nt, Human
cugugcucaagguugugucccggguccg

SEQ ID NO: 717953 - RNA, 25 nt, Human
gaaaaaggcaacaaaacccaaaugu

SEQ ID NO: 717954 - RNA, 23 nt, Human
gaaaacaaacaaaaaaaaaucag

SEQ ID NO: 717955 - RNA, 21 nt, Human
gaacaaauguaaccugggcac

SEQ ID NO: 717956 - RNA, 21 nt, Human
gaacaaguauaguacacucuu

SEQ ID NO: 717957 - RNA, 21 nt, Human
gaagacaucugaguaaaaacc

SEQ ID NO: 717958 - RNA, 21 nt, Human
gaagcauuuucugcaguugau

SEQ ID NO: 717959 - RNA, 20 nt, Human
gagaaacgggagccaguccc

SEQ ID NO: 717960 - RNA, 20 nt, Human
gagaaauaaaaacaacaaac

SEQ ID NO: 717961 - RNA, 18 nt, Human
gagagcuaaaugaccucc

SEQ ID NO: 717962 - RNA, 19 nt, Human
gagcgacagucagcaaaag

SEQ ID NO: 717963 - RNA, 20 nt, Human
gaguaaaaggaagcuggagu

SEQ ID NO: 717964 - RNA, 23 nt, Human
gcauacgaccccacaccccaaau

SEQ ID NO: 717965 - RNA, 20 nt, Human
gccccaacccaccacacaca

SEQ ID NO: 717966 - RNA, 21 nt, Human
gccccaacccaccacacacag

SEQ ID NO: 717967 - RNA, 19 nt, Human
gcggcgcggcggccggcgg

SEQ ID NO: 717968 - RNA, 19 nt, Human
gcggcgcggcggccggcgg

SEQ ID NO: 717969 - RNA, 18 nt, Human
gcuaugagaaauaaaaac

SEQ ID NO: 717970 - RNA, 19 nt, Human
gcugcacaauguuuucagc

SEQ ID NO: 717971 - RNA, 22 nt, Human
ggaaaaacaaucucagcccagg

SEQ ID NO: 717972 - RNA, 23 nt, Human
ggaguucuuuacaaaagaagcuu

SEQ ID NO: 717973 - RNA, 24 nt, Human
gggaaaaaaaaucuuuaacaggau

SEQ ID NO: 717974 - RNA, 26 nt, Human
gggaaaagaaauccuaagagagaaaa

SEQ ID NO: 717975 - RNA, 18 nt, Human
gggcggcgcggcggccgg

SEQ ID NO: 717976 - RNA, 20 nt, Human
gguagucagccaccuaaaac

SEQ ID NO: 717977 - RNA, 23 nt, Human
ggugcugcaucuucucaccugug

SEQ ID NO: 717978 - RNA, 21 nt, Human
guaaauaaauaacagcaacau

SEQ ID NO: 717979 - RNA, 18 nt, Human
guagagaugcuugacaug

SEQ ID NO: 717980 - RNA, 22 nt, Human
uaaaaaccuauuucugauguua

SEQ ID NO: 717981 - RNA, 22 nt, Human
uaaauaacagcaacauaaaacc

SEQ ID NO: 717982 - RNA, 21 nt, Human
uaaaugaccuccaucuagaac

SEQ ID NO: 717983 - RNA, 23 nt, Human
uaacuccacaagaaaacaaacaa

SEQ ID NO: 717984 - RNA, 24 nt, Human
uaacuccacaagaaaacaaacaaa

SEQ ID NO: 717985 - RNA, 20 nt, Human
uaacugcaguaugagagcag

SEQ ID NO: 717986 - RNA, 21 nt, Human
uaagaaaaaggcaacaaaacc

SEQ ID NO: 717987 - RNA, 21 nt, Human
uaagacaagcacaugcacacc

SEQ ID NO: 717988 - RNA, 22 nt, Human
uaagacaagcacaugcacaccc

SEQ ID NO: 717989 - RNA, 24 nt, Human
uaagacaagcacaugcacacccau

SEQ ID NO: 717990 - RNA, 20 nt, Human
uaagaugcaaaaagcaguga

SEQ ID NO: 717991 - RNA, 23 nt, Human
uaaugaaucaacauccugauagc

SEQ ID NO: 717992 - RNA, 22 nt, Human
uagaacaaauguaaccugggca

SEQ ID NO: 717993 - RNA, 19 nt, Human
uagcaagaaagucacgaac

SEQ ID NO: 717994 - RNA, 23 nt, Human
uauggaacacucaccacaaagaa

SEQ ID NO: 717995 - RNA, 27 nt, Human
ucaaagcaaaucauagauuucacagcc

SEQ ID NO: 717996 - RNA, 18 nt, Human
ucaaauguucacaauuuc

SEQ ID NO: 717997 - RNA, 20 nt, Human
ucagauacugaauaaacaac

SEQ ID NO: 717998 - RNA, 19 nt, Human
ucagcaggccacaccacuu

SEQ ID NO: 717999 - RNA, 22 nt, Human
ucagcccaggaauggaaacugg

SEQ ID NO: 718000 - RNA, 19 nt, Human
ucaguuaauugaagaggaa

SEQ ID NO: 718001 - RNA, 21 nt, Human
uccacaagaaaacaaacaaaa

SEQ ID NO: 718002 - RNA, 20 nt, Human
uccccagaagaaaacaaaaa

SEQ ID NO: 718003 - RNA, 18 nt, Human
uccuacuggaaauguaca

SEQ ID NO: 718004 - RNA, 19 nt, Human
ucgcauacgaccccacacc

SEQ ID NO: 718005 - RNA, 21 nt, Human
ucuacccgccccaacccacca

SEQ ID NO: 718006 - RNA, 23 nt, Human
ucucagcccaggaauggaaacug

SEQ ID NO: 718007 - RNA, 21 nt, Human
ucucgcauacgaccccacacc

SEQ ID NO: 718008 - RNA, 20 nt, Human
ucucugggugaugagguggc

SEQ ID NO: 718009 - RNA, 20 nt, Human
ucugcaguugauauucuguu

SEQ ID NO: 718010 - RNA, 21 nt, Human
ugaaaaauacauaaaaacgua

SEQ ID NO: 718011 - RNA, 18 nt, Human
ugagaaauaaaaacaaca

SEQ ID NO: 718012 - RNA, 21 nt, Human
ugagagcagguaagggguggg

SEQ ID NO: 718013 - RNA, 18 nt, Human
ugagauggggaggagccg

SEQ ID NO: 718014 - RNA, 20 nt, Human
ugagauggggaggagccgcu

SEQ ID NO: 718015 - RNA, 22 nt, Human
ugagauggggaggagccgcuga

SEQ ID NO: 718016 - RNA, 21 nt, Human
ugaggacacacagacccucaa

SEQ ID NO: 718017 - RNA, 19 nt, Human
ugaguugguuaaaaaagaa

SEQ ID NO: 718018 - RNA, 22 nt, Human
ugaguugguuaaaaaagaaaaa

SEQ ID NO: 718019 - RNA, 24 nt, Human
ugaguugguuaaaaaagaaaaaaa

SEQ ID NO: 718020 - RNA, 23 nt, Human
ugauacuucuaagacaagcacau

SEQ ID NO: 718021 - RNA, 20 nt, Human
ugaugcuccaggcaugcuac

SEQ ID NO: 718022 - RNA, 24 nt, Human
ugcaaaaagcagugauacuucuaa

SEQ ID NO: 718023 - RNA, 20 nt, Human
ugcacagauguuaccagugu

SEQ ID NO: 718024 - RNA, 21 nt, Human
ugcccaaaugaguggugaagc

SEQ ID NO: 718025 - RNA, 22 nt, Human
ugcccagaacauucucucaaac

SEQ ID NO: 718026 - RNA, 22 nt, Human
uggaaacugguacuucagugcu

SEQ ID NO: 718027 - RNA, 24 nt, Human
uggaacacucaccacaaagaaccc

SEQ ID NO: 718028 - RNA, 25 nt, Human
uggaacacucaccacaaagaacccc

SEQ ID NO: 718029 - RNA, 26 nt, Human
uggagaacaaagccuaaaugcuccaa

SEQ ID NO: 718030 - RNA, 23 nt, Human
ugguuaaaaaagaaaaacaaugu

SEQ ID NO: 718031 - RNA, 27 nt, Human
uguacaugagauuuugcugaauggaga

SEQ ID NO: 718032 - RNA, 19 nt, Human
ugugaagcauuuucugcag

SEQ ID NO: 718033 - RNA, 21 nt, Human
ugugaagcauuuucugcaguu

SEQ ID NO: 718034 - RNA, 23 nt, Human
ugugcaccuuugccaccuggagc

SEQ ID NO: 718035 - RNA, 18 nt, Human
uguguaugcauucauaua

SEQ ID NO: 718036 - RNA, 21 nt, Human
uguuaccaguguaugucucag

SEQ ID NO: 718037 - RNA, 25 nt, Human
uuaggggaaaagaaauccuaagaga

SEQ ID NO: 718038 - RNA, 26 nt, Human
uucacaaaacuaaaaagccacacuuu

SEQ ID NO: 718039 - RNA, 22 nt, Human
uucauaccacagugcguuucag

SEQ ID NO: 718040 - RNA, 22 nt, Human
uucucugggugaugagguggcc

SEQ ID NO: 718041 - RNA, 22 nt, Human
uucuucaguuagcaagaaaguc

SEQ ID NO: 718042 - RNA, 19 nt, Human
uugcugaaagccucugagc

SEQ ID NO: 718043 - RNA, 25 nt, Human
uuucucugggugaugagguggccuu

SEQ ID NO: 718044 - RNA, 18 nt, Human
uuuuccaucacauaucau

SEQ ID NO: 718045 - RNA, 18 nt, Human
caucacagcuggcggccu

SEQ ID NO: 718046 - RNA, 20 nt, Human
ccagcaggccggcuccuucc

SEQ ID NO: 718047 - RNA, 21 nt, Human
ccccuuguggccacgcugccc

SEQ ID NO: 718048 - RNA, 18 nt, Human
ccuucucugacagcagca

SEQ ID NO: 718049 - RNA, 21 nt, Human
cuccuucccucucgggcgcca

SEQ ID NO: 718050 - RNA, 18 nt, Human
cuuguggccacgcugccc

SEQ ID NO: 718051 - RNA, 19 nt, Human
gacggcagcgccacgcagg

SEQ ID NO: 718052 - RNA, 24 nt, Human
gccacgcugcccagcaggccggcu

SEQ ID NO: 718053 - RNA, 23 nt, Human
ggcaguggcucccccggccugag

SEQ ID NO: 718054 - RNA, 21 nt, Human
uacaguacacgugggggacgg

SEQ ID NO: 718055 - RNA, 20 nt, Human
ucccccggccugaggagugc

SEQ ID NO: 718056 - RNA, 21 nt, Human
ugccgccccuuguggccacgc

SEQ ID NO: 718057 - RNA, 24 nt, Human
uguauaaauaaaacauuuuuuaau

SEQ ID NO: 718058 - RNA, 21 nt, Human
aaaagaauccuuucccagcca

SEQ ID NO: 718059 - RNA, 19 nt, Human
aaacuguacagaacagccu

SEQ ID NO: 718060 - RNA, 19 nt, Human
aaagacacgaagacuaugu

SEQ ID NO: 718061 - RNA, 21 nt, Human
aaagacccagccucaucugcu

SEQ ID NO: 718062 - RNA, 19 nt, Human
aaagagacguggagacauu

SEQ ID NO: 718063 - RNA, 23 nt, Human
aacaacccuaucaucccaaaggu

SEQ ID NO: 718064 - RNA, 22 nt, Human
aacaacucagccucagcccucc

SEQ ID NO: 718065 - RNA, 23 nt, Human
aacacugcuggacaaccuucugg

SEQ ID NO: 718066 - RNA, 20 nt, Human
aacagcagaugcucccccac

SEQ ID NO: 718067 - RNA, 22 nt, Human
aacagcccuacccacagaaccu

SEQ ID NO: 718068 - RNA, 18 nt, Human
aacguaggcuaagauugu

SEQ ID NO: 718069 - RNA, 31 nt, Human
aacguggucacguacacacacacacacagug

SEQ ID NO: 718070 - RNA, 20 nt, Human
aacuccuugggaggcccaag

SEQ ID NO: 718071 - RNA, 22 nt, Human
aagaacacacaggcucugcccc

SEQ ID NO: 718072 - RNA, 18 nt, Human
aagaagcagcauuuuaaa

SEQ ID NO: 718073 - RNA, 18 nt, Human
aagaaggaggagguucca

SEQ ID NO: 718074 - RNA, 23 nt, Human
aagaauccuuucccagccagacc

SEQ ID NO: 718075 - RNA, 21 nt, Human
aagacaagacagaaaacaaag

SEQ ID NO: 718076 - RNA, 20 nt, Human
aagacagaaaacaaagcaga

SEQ ID NO: 718077 - RNA, 21 nt, Human
aagacagaaaacaaagcagag

SEQ ID NO: 718078 - RNA, 19 nt, Human
aagacccagccucaucugc

SEQ ID NO: 718079 - RNA, 21 nt, Human
aagcagaaaugaggaaagacc

SEQ ID NO: 718080 - RNA, 24 nt, Human
aagcagaaaugaggaaagacccag

SEQ ID NO: 718081 - RNA, 20 nt, Human
aagcagagaccaccaggagc

SEQ ID NO: 718082 - RNA, 25 nt, Human
aagcagaggcaggugggaggucgac

SEQ ID NO: 718083 - RNA, 19 nt, Human
aagcagcugccccaccuuc

SEQ ID NO: 718084 - RNA, 19 nt, Human
aagcuccaaccagacaugg

SEQ ID NO: 718085 - RNA, 19 nt, Human
aaggaaaccagcccacgga

SEQ ID NO: 718086 - RNA, 22 nt, Human
aaggaaaccagcccacggagac

SEQ ID NO: 718087 - RNA, 21 nt, Human
aagugcagccacacugcauca

SEQ ID NO: 718088 - RNA, 21 nt, Human
aaguucccucucuccucccau

SEQ ID NO: 718089 - RNA, 22 nt, Human
aaugcacaaaaacuggagcccc

SEQ ID NO: 718090 - RNA, 22 nt, Human
acaaaagaggagcaucacuaaa

SEQ ID NO: 718091 - RNA, 23 nt, Human
acaaagcagagaccaccaggagc

SEQ ID NO: 718092 - RNA, 21 nt, Human
acaagacagaaaacaaagcag

SEQ ID NO: 718093 - RNA, 19 nt, Human
acacacacgcacgcacaca

SEQ ID NO: 718094 - RNA, 23 nt, Human
acacacacgcacgcacacacgca

SEQ ID NO: 718095 - RNA, 24 nt, Human
acacacacgcacgcacacacgcac

SEQ ID NO: 718096 - RNA, 19 nt, Human
acacaggcucugccccagg

SEQ ID NO: 718097 - RNA, 26 nt, Human
acagaaaacaaagcagagaccaccag

SEQ ID NO: 718098 - RNA, 21 nt, Human
acagacgugucagccucacac

SEQ ID NO: 718099 - RNA, 18 nt, Human
acagagcagaaauacaaa

SEQ ID NO: 718100 - RNA, 26 nt, Human
acagugcuagaggcaaccagagagac

SEQ ID NO: 718101 - RNA, 19 nt, Human
acaucagaccccuccucca

SEQ ID NO: 718102 - RNA, 23 nt, Human
acccuaucaucccaaagguguag

SEQ ID NO: 718103 - RNA, 20 nt, Human
acgaagagaggaaagcagag

SEQ ID NO: 718104 - RNA, 19 nt, Human
acgcggggcggggaggggc

SEQ ID NO: 718105 - RNA, 19 nt, Human
acucagugaaagacagucc

SEQ ID NO: 718106 - RNA, 19 nt, Human
acucugaggaguggaagag

SEQ ID NO: 718107 - RNA, 19 nt, Human
agaaaacaaagcagagacc

SEQ ID NO: 718108 - RNA, 21 nt, Human
agaaaacaaagcagagaccac

SEQ ID NO: 718109 - RNA, 18 nt, Human
agaaacagacccuuaagu

SEQ ID NO: 718110 - RNA, 18 nt, Human
agaaagcaagcagaggca

SEQ ID NO: 718111 - RNA, 19 nt, Human
agaaagcaagcagaggcag

SEQ ID NO: 718112 - RNA, 24 nt, Human
agaaccuccuuaccgagucaugcc

SEQ ID NO: 718113 - RNA, 21 nt, Human
agaauguuguacgaaacagcc

SEQ ID NO: 718114 - RNA, 25 nt, Human
agacacaaaagaggagcaucacuaa

SEQ ID NO: 718115 - RNA, 20 nt, Human
agacagaaaacaaagcagag

SEQ ID NO: 718116 - RNA, 23 nt, Human
agacagaaaacaaagcagagacc

SEQ ID NO: 718117 - RNA, 29 nt, Human
agacaggagaugaagaacaaagggacccc

SEQ ID NO: 718118 - RNA, 23 nt, Human
agacagggagggggccuccacag

SEQ ID NO: 718119 - RNA, 19 nt, Human
agagaacaaggucccacca

SEQ ID NO: 718120 - RNA, 24 nt, Human
agagaggaaagcagagucuguuag

SEQ ID NO: 718121 - RNA, 19 nt, Human
agagcagaaauacaaagac

SEQ ID NO: 718122 - RNA, 19 nt, Human
agagcauuuccgccuaaag

SEQ ID NO: 718123 - RNA, 20 nt, Human
agagcugaggagggacaggg

SEQ ID NO: 718124 - RNA, 23 nt, Human
agaggagguggaaugacaaagag

SEQ ID NO: 718125 - RNA, 23 nt, Human
agagggcagcaguggggcacagg

SEQ ID NO: 718126 - RNA, 20 nt, Human
agcaaacagcccuacccaca

SEQ ID NO: 718127 - RNA, 21 nt, Human
agcaauuucuugcagaguuug

SEQ ID NO: 718128 - RNA, 22 nt, Human
agccaacaggcaugcagcagga

SEQ ID NO: 718129 - RNA, 24 nt, Human
agccaagcugacuggaacccaggc

SEQ ID NO: 718130 - RNA, 19 nt, Human
agccaugcugggcccacac

SEQ ID NO: 718131 - RNA, 20 nt, Human
agccgggagagucaagagug

SEQ ID NO: 718132 - RNA, 19 nt, Human
agcguaccccugccucagg

SEQ ID NO: 718133 - RNA, 22 nt, Human
agcucagcaacuccugggcagc

SEQ ID NO: 718134 - RNA, 18 nt, Human
agcuccuggguucugccu

SEQ ID NO: 718135 - RNA, 19 nt, Human
agcugacuggaacccaggc

SEQ ID NO: 718136 - RNA, 19 nt, Human
aggaagauggggaauauga

SEQ ID NO: 718137 - RNA, 20 nt, Human
aggaaugagcccugaggggg

SEQ ID NO: 718138 - RNA, 22 nt, Human
aggaggaggcagggaagcaggg

SEQ ID NO: 718139 - RNA, 22 nt, Human
aggaggcccuuugggcugagau

SEQ ID NO: 718140 - RNA, 20 nt, Human
aggaguggucuuaagaagcc

SEQ ID NO: 718141 - RNA, 27 nt, Human
aggcacgcggggcggggaggggcggcg

SEQ ID NO: 718142 - RNA, 21 nt, Human
aggcgcggcccggccccaggc

SEQ ID NO: 718143 - RNA, 21 nt, Human
aggcucugccccaggccagga

SEQ ID NO: 718144 - RNA, 18 nt, Human
aggcuugaagagacagga

SEQ ID NO: 718145 - RNA, 23 nt, Human
agggcaacucaucuacaacauca

SEQ ID NO: 718146 - RNA, 20 nt, Human
agguaggaggaggcagggaa

SEQ ID NO: 718147 - RNA, 21 nt, Human
agguugagggagaaggcgggg

SEQ ID NO: 718148 - RNA, 20 nt, Human
aguaggcgcggcccggcccc

SEQ ID NO: 718149 - RNA, 21 nt, Human
aucccaaagguguagaguauu

SEQ ID NO: 718150 - RNA, 21 nt, Human
auugcucugagaugcucaggc

SEQ ID NO: 718151 - RNA, 24 nt, Human
auuuggggaggaaauuaccuucuu

SEQ ID NO: 718152 - RNA, 20 nt, Human
caaagaaguacccuuggagg

SEQ ID NO: 718153 - RNA, 22 nt, Human
caaagcagagaccaccaggagc

SEQ ID NO: 718154 - RNA, 23 nt, Human
caaagcagagaccaccaggagca

SEQ ID NO: 718155 - RNA, 19 nt, Human
caaaggcagcaauuucuug

SEQ ID NO: 718156 - RNA, 24 nt, Human
caaaggcagcaauuucuugcagag

SEQ ID NO: 718157 - RNA, 23 nt, Human
caacaagacacaaagagacgugg

SEQ ID NO: 718158 - RNA, 28 nt, Human
caacaagacacaaagagacguggagaca

SEQ ID NO: 718159 - RNA, 19 nt, Human
caacaagcaccugccccaa

SEQ ID NO: 718160 - RNA, 21 nt, Human
caacaagcaccugccccaagc

SEQ ID NO: 718161 - RNA, 22 nt, Human
caacaucaagcaaaggcagcaa

SEQ ID NO: 718162 - RNA, 21 nt, Human
caagaaaugaggugaaggcaa

SEQ ID NO: 718163 - RNA, 19 nt, Human
caagacacaaagagacggu

SEQ ID NO: 718164 - RNA, 20 nt, Human
caagaccucgugcuucacug

SEQ ID NO: 718165 - RNA, 22 nt, Human
caaggcccuguccuuacuggcc

SEQ ID NO: 718166 - RNA, 23 nt, Human
caauugacuucugccaaaacacc

SEQ ID NO: 718167 - RNA, 18 nt, Human
cacaacccaacaucacug

SEQ ID NO: 718168 - RNA, 25 nt, Human
cacacacacacacacgcacgcacac

SEQ ID NO: 718169 - RNA, 21 nt, Human
cacaccuccacuguccugcug

SEQ ID NO: 718170 - RNA, 21 nt, Human
caccacggccuggaacccccg

SEQ ID NO: 718171 - RNA, 23 nt, Human
cacccagccugggcaucaggggc

SEQ ID NO: 718172 - RNA, 20 nt, Human
caccccccguccucaaacag

SEQ ID NO: 718173 - RNA, 19 nt, Human
cacgguggaguggggaggc

SEQ ID NO: 718174 - RNA, 26 nt, Human
cacguacacacacacacacacgcacg

SEQ ID NO: 718175 - RNA, 22 nt, Human
cacuaacaacccuaucauccca

SEQ ID NO: 718176 - RNA, 22 nt, Human
cacuccugucucugccauaugc

SEQ ID NO: 718177 - RNA, 20 nt, Human
cacugccuccaugccccuac

SEQ ID NO: 718178 - RNA, 20 nt, Human
cacuggcuaaugggguggau

SEQ ID NO: 718179 - RNA, 21 nt, Human
cagaaaacaaagcagagacca

SEQ ID NO: 718180 - RNA, 23 nt, Human
cagagaccaccaggagcaggcac

SEQ ID NO: 718181 - RNA, 18 nt, Human
cagagauaggagccuggg

SEQ ID NO: 718182 - RNA, 19 nt, Human
cagaggaaugaggguaugg

SEQ ID NO: 718183 - RNA, 23 nt, Human
cagaggcaggugggugccuggag

SEQ ID NO: 718184 - RNA, 18 nt, Human
cagcaaacagcccuaccc

SEQ ID NO: 718185 - RNA, 20 nt, Human
cagcagaugcucccccaccc

SEQ ID NO: 718186 - RNA, 21 nt, Human
cagcaggacaagggguccaga

SEQ ID NO: 718187 - RNA, 19 nt, Human
cagcaucugggcauggacc

SEQ ID NO: 718188 - RNA, 23 nt, Human
cagcccacggagacaggaaccag

SEQ ID NO: 718189 - RNA, 21 nt, Human
cagcuaagucugagcucccag

SEQ ID NO: 718190 - RNA, 21 nt, Human
caggaccaggcagcaccgacu

SEQ ID NO: 718191 - RNA, 22 nt, Human
caggcugcuggagcccagcuaa

SEQ ID NO: 718192 - RNA, 24 nt, Human
caggcugcuggagcccagcuaagu

SEQ ID NO: 718193 - RNA, 18 nt, Human
caggggcugaaggaaacc

SEQ ID NO: 718194 - RNA, 21 nt, Human
caggguuucaucugggcaagg

SEQ ID NO: 718195 - RNA, 22 nt, Human
caguaaagaagagaucaggcau

SEQ ID NO: 718196 - RNA, 23 nt, Human
caguaaagaagagaucaggcaug

SEQ ID NO: 718197 - RNA, 20 nt, Human
cagugauuccacagaggaug

SEQ ID NO: 718198 - RNA, 18 nt, Human
cagugcuacauccacaaa

SEQ ID NO: 718199 - RNA, 20 nt, Human
caguuuuggcagccagggac

SEQ ID NO: 718200 - RNA, 28 nt, Human
cauaccaaaaacccauugcagggaaaag

SEQ ID NO: 718201 - RNA, 18 nt, Human
caucaagcaaaggcagca

SEQ ID NO: 718202 - RNA, 18 nt, Human
caucaagcaaaggcagca

SEQ ID NO: 718203 - RNA, 18 nt, Human
caucacagggggcugccu

SEQ ID NO: 718204 - RNA, 20 nt, Human
caugccccuacaacuuuggu

SEQ ID NO: 718205 - RNA, 23 nt, Human
cauuuggaaagucuaaaaaaagg

SEQ ID NO: 718206 - RNA, 19 nt, Human
ccaaagcagaaacacucau

SEQ ID NO: 718207 - RNA, 26 nt, Human
ccaaaugaacaacuucaugcagugaa

SEQ ID NO: 718208 - RNA, 19 nt, Human
ccacacaccuccacugucc

SEQ ID NO: 718209 - RNA, 19 nt, Human
ccacacugcaucacacaga

SEQ ID NO: 718210 - RNA, 18 nt, Human
ccaccccagcaaacaacc

SEQ ID NO: 718211 - RNA, 20 nt, Human
ccagaggaggcgaugugaua

SEQ ID NO: 718212 - RNA, 22 nt, Human
ccagcccacggagacaggaacc

SEQ ID NO: 718213 - RNA, 24 nt, Human
ccagcccacggagacaggaaccag

SEQ ID NO: 718214 - RNA, 23 nt, Human
ccagccugggcaucaggggcuga

SEQ ID NO: 718215 - RNA, 23 nt, Human
ccagcuagaaccuccccugugcu

SEQ ID NO: 718216 - RNA, 23 nt, Human
ccagggugggagacuucuggagg

SEQ ID NO: 718217 - RNA, 24 nt, Human
ccaggugcaccaggcucgcaaccc

SEQ ID NO: 718218 - RNA, 19 nt, Human
ccaguagccaacaggcaug

SEQ ID NO: 718219 - RNA, 23 nt, Human
ccaguggccuccuccccaucucu

SEQ ID NO: 718220 - RNA, 25 nt, Human
cccaacaucacugcagggccacucc

SEQ ID NO: 718221 - RNA, 23 nt, Human
cccacaacccaacaucacugcag

SEQ ID NO: 718222 - RNA, 22 nt, Human
cccacacaagcccaagcucagg

SEQ ID NO: 718223 - RNA, 21 nt, Human
cccacagaaccuccuuaccga

SEQ ID NO: 718224 - RNA, 19 nt, Human
cccagaaaagugaggagcc

SEQ ID NO: 718225 - RNA, 19 nt, Human
cccaggcucagggacccuu

SEQ ID NO: 718226 - RNA, 18 nt, Human
cccaguugucaaaucaag

SEQ ID NO: 718227 - RNA, 20 nt, Human
ccccagaggcaagggucacc

SEQ ID NO: 718228 - RNA, 22 nt, Human
ccccagggcccuggccagggag

SEQ ID NO: 718229 - RNA, 19 nt, Human
ccccaguggcaggccucuc

SEQ ID NO: 718230 - RNA, 18 nt, Human
ccccaucucuaugcaccc

SEQ ID NO: 718231 - RNA, 22 nt, Human
ccccgggaccccgccccgcgaa

SEQ ID NO: 718232 - RNA, 25 nt, Human
ccccgggaccccgccccgcgaaccc

SEQ ID NO: 718233 - RNA, 21 nt, Human
ccccuccccacaccaccaucc

SEQ ID NO: 718234 - RNA, 27 nt, Human
ccccugccucaggugcuggggccacag

SEQ ID NO: 718235 - RNA, 18 nt, Human
cccgccccgcgaacccgg

SEQ ID NO: 718236 - RNA, 22 nt, Human
cccgcgaacccggcaguaggcg

SEQ ID NO: 718237 - RNA, 19 nt, Human
cccucacaggcacagccau

SEQ ID NO: 718238 - RNA, 19 nt, Human
cccuccuccagcuagaacc

SEQ ID NO: 718239 - RNA, 23 nt, Human
cccuggccagggagcuagguggg

SEQ ID NO: 718240 - RNA, 20 nt, Human
cccugugcuaacccuucccc

SEQ ID NO: 718241 - RNA, 18 nt, Human
ccgagucaugcccaccag

SEQ ID NO: 718242 - RNA, 21 nt, Human
ccgagucaugcccaccaggaa

SEQ ID NO: 718243 - RNA, 21 nt, Human
ccggagcggcuccaguggggu

SEQ ID NO: 718244 - RNA, 23 nt, Human
ccggcagucccucccagcugugc

SEQ ID NO: 718245 - RNA, 18 nt, Human
ccuagagcugaggaggga

SEQ ID NO: 718246 - RNA, 19 nt, Human
ccucaggaggacuguuugc

SEQ ID NO: 718247 - RNA, 19 nt, Human
ccucucgccuuucacccua

SEQ ID NO: 718248 - RNA, 20 nt, Human
ccugcagccacugcagaaac

SEQ ID NO: 718249 - RNA, 20 nt, Human
ccugcauccaugaugcugag

SEQ ID NO: 718250 - RNA, 21 nt, Human
ccugccacccgggaaccacaa

SEQ ID NO: 718251 - RNA, 21 nt, Human
ccuggaacccccaguggcagg

SEQ ID NO: 718252 - RNA, 18 nt, Human
ccugggacuugcugcauc

SEQ ID NO: 718253 - RNA, 24 nt, Human
ccuuccuuccccaccccccguccu

SEQ ID NO: 718254 - RNA, 20 nt, Human
ccuucugaaaugaugucugg

SEQ ID NO: 718255 - RNA, 19 nt, Human
ccuuucuacugcuacccca

SEQ ID NO: 718256 - RNA, 19 nt, Human
ccuuugggcugagaugacc

SEQ ID NO: 718257 - RNA, 26 nt, Human
cgcacacacgcacacacuacagucuc

SEQ ID NO: 718258 - RNA, 20 nt, Human
cgcacacacuacagucucca

SEQ ID NO: 718259 - RNA, 25 nt, Human
cgcacgcacacacgcacacacuaca

SEQ ID NO: 718260 - RNA, 22 nt, Human
cgccacugccuccaugccccua

SEQ ID NO: 718261 - RNA, 18 nt, Human
cggagccaggcugcugga

SEQ ID NO: 718262 - RNA, 25 nt, Human
cguaacacagaaccaugccagccaa

SEQ ID NO: 718263 - RNA, 25 nt, Human
cguacacacacacacacacgcacgc

SEQ ID NO: 718264 - RNA, 33 nt, Human
cguggucacguacacacacacacacacgcagug

SEQ ID NO: 718265 - RNA, 22 nt, Human
cuaacccuuccccagaggcaag

SEQ ID NO: 718266 - RNA, 22 nt, Human
cucacaggcacagccaugcugg

SEQ ID NO: 718267 - RNA, 18 nt, Human
cucagaucuucaacucuc

SEQ ID NO: 718268 - RNA, 22 nt, Human
cucagccucagcccuccuuauu

SEQ ID NO: 718269 - RNA, 24 nt, Human
cucagccucagcccuccuuauucc

SEQ ID NO: 718270 - RNA, 24 nt, Human
cucaguugccccuggaauucccaa

SEQ ID NO: 718271 - RNA, 23 nt, Human
cucaucuacaacaucaagcaaag

SEQ ID NO: 718272 - RNA, 25 nt, Human
cuccaugccccuacaacuuugguua

SEQ ID NO: 718273 - RNA, 21 nt, Human
cuccccaucucuaugcaccca

SEQ ID NO: 718274 - RNA, 20 nt, Human
cuccuccagcuagaaccucc

SEQ ID NO: 718275 - RNA, 22 nt, Human
cuccuuauuccagcaaacagcc

SEQ ID NO: 718276 - RNA, 19 nt, Human
cugcagggccacuccuguc

SEQ ID NO: 718277 - RNA, 22 nt, Human
cugccccaggccaggaccaggc

SEQ ID NO: 718278 - RNA, 22 nt, Human
cugccccgggaccccgccccgc

SEQ ID NO: 718279 - RNA, 18 nt, Human
cugccggagcggcuccag

SEQ ID NO: 718280 - RNA, 18 nt, Human
cugcugagcaguuuuggc

SEQ ID NO: 718281 - RNA, 20 nt, Human
cugcuuucuccccuaccaga

SEQ ID NO: 718282 - RNA, 18 nt, Human
cugggcccacacaagccc

SEQ ID NO: 718283 - RNA, 18 nt, Human
cugggcccacacaagccc

SEQ ID NO: 718284 - RNA, 19 nt, Human
cugggcccacacaagccca

SEQ ID NO: 718285 - RNA, 23 nt, Human
cuggguacccucugccuccccag

SEQ ID NO: 718286 - RNA, 24 nt, Human
cuggguacccucugccuccccagg

SEQ ID NO: 718287 - RNA, 22 nt, Human
cuucaaucaugcuuguuuuguu

SEQ ID NO: 718288 - RNA, 19 nt, Human
cuuccacacaccuccacug

SEQ ID NO: 718289 - RNA, 24 nt, Human
cuuccccaccccccguccucaaac

SEQ ID NO: 718290 - RNA, 21 nt, Human
cuuucccagccagaccaggcc

SEQ ID NO: 718291 - RNA, 24 nt, Human
cuuucuacugcuaccccagguagc

SEQ ID NO: 718292 - RNA, 22 nt, Human
gaacccccaguggcaggccucu

SEQ ID NO: 718293 - RNA, 19 nt, Human
gaagaaggaggagguucca

SEQ ID NO: 718294 - RNA, 20 nt, Human
gaagcuccaaccagacaugg

SEQ ID NO: 718295 - RNA, 18 nt, Human
gaauauaucauaaacagg

SEQ ID NO: 718296 - RNA, 19 nt, Human
gacaggagaugaagaacaa

SEQ ID NO: 718297 - RNA, 23 nt, Human
gacaggcuagguccagaguggcu

SEQ ID NO: 718298 - RNA, 18 nt, Human
gacagugacugcucuaga

SEQ ID NO: 718299 - RNA, 18 nt, Human
gacauugcucugagaugc

SEQ ID NO: 718300 - RNA, 20 nt, Human
gagaagaaaacucugaggag

SEQ ID NO: 718301 - RNA, 20 nt, Human
gagaagcuccaaccagacau

SEQ ID NO: 718302 - RNA, 22 nt, Human
gagcaguuuuggcagccaggga

SEQ ID NO: 718303 - RNA, 23 nt, Human
gaggacagagcccuuuguccauu

SEQ ID NO: 718304 - RNA, 21 nt, Human
gaggcaaccagagagacacaa

SEQ ID NO: 718305 - RNA, 21 nt, Human
gaggcuucugcucuccucaag

SEQ ID NO: 718306 - RNA, 21 nt, Human
gagggcagcaguggggcacag

SEQ ID NO: 718307 - RNA, 23 nt, Human
gagugccuuccacacaccuccac

SEQ ID NO: 718308 - RNA, 20 nt, Human
gcaacucaucuacaacauca

SEQ ID NO: 718309 - RNA, 18 nt, Human
gcaacuccugggcagcag

SEQ ID NO: 718310 - RNA, 24 nt, Human
gcaagggucaccacggccuggaac

SEQ ID NO: 718311 - RNA, 22 nt, Human
gcaaugggccuggggagagcau

SEQ ID NO: 718312 - RNA, 23 nt, Human
gcacagccaugcugggcccacac

SEQ ID NO: 718313 - RNA, 26 nt, Human
gcagaaauacaaagacagacgcucug

SEQ ID NO: 718314 - RNA, 20 nt, Human
gcagcaguggggcacaggaa

SEQ ID NO: 718315 - RNA, 18 nt, Human
gcagggcucuucuuuucc

SEQ ID NO: 718316 - RNA, 22 nt, Human
gccacagccauuucagcaccug

SEQ ID NO: 718317 - RNA, 18 nt, Human
gccaugugaagaauuuuc

SEQ ID NO: 718318 - RNA, 23 nt, Human
gcccaggcccacuggcagagcuc

SEQ ID NO: 718319 - RNA, 22 nt, Human
gccccaagccaaucuaggcccc

SEQ ID NO: 718320 - RNA, 19 nt, Human
gccccgggaccccgccccg

SEQ ID NO: 718321 - RNA, 20 nt, Human
gccgggguccagacagggag

SEQ ID NO: 718322 - RNA, 21 nt, Human
gccucaggaggacuguuugcu

SEQ ID NO: 718323 - RNA, 19 nt, Human
gcggggggauguguccaca

SEQ ID NO: 718324 - RNA, 18 nt, Human
gcucccagaggaggcgau

SEQ ID NO: 718325 - RNA, 20 nt, Human
gcucccccaccccagcaaac

SEQ ID NO: 718326 - RNA, 19 nt, Human
gcucugccccaggccagga

SEQ ID NO: 718327 - RNA, 18 nt, Human
gcuucaauugacuucugc

SEQ ID NO: 718328 - RNA, 20 nt, Human
ggaaagcagggaagcccgga

SEQ ID NO: 718329 - RNA, 21 nt, Human
ggaaccccaggggaagaggag

SEQ ID NO: 718330 - RNA, 20 nt, Human
ggacccugguugcaugucag

SEQ ID NO: 718331 - RNA, 20 nt, Human
ggaggcuucugcucuccuca

SEQ ID NO: 718332 - RNA, 23 nt, Human
ggagggaaucauggggagagcag

SEQ ID NO: 718333 - RNA, 19 nt, Human
ggaggggagggagggaaag

SEQ ID NO: 718334 - RNA, 20 nt, Human
ggaguggggaggcuugaaga

SEQ ID NO: 718335 - RNA, 24 nt, Human
ggcacgcggggcggggaggggcgg

SEQ ID NO: 718336 - RNA, 22 nt, Human
ggcagugauuccacagaggaug

SEQ ID NO: 718337 - RNA, 22 nt, Human
ggcauggaagagggacccuggu

SEQ ID NO: 718338 - RNA, 18 nt, Human
ggccccaggcuggcgcgg

SEQ ID NO: 718339 - RNA, 19 nt, Human
ggccuggggagagcauuuc

SEQ ID NO: 718340 - RNA, 25 nt, Human
ggcggggaggggcggcgagggaggc

SEQ ID NO: 718341 - RNA, 18 nt, Human
gggaagcccggaggggua

SEQ ID NO: 718342 - RNA, 20 nt, Human
gggacagggacaggucuggg

SEQ ID NO: 718343 - RNA, 19 nt, Human
gggagggaaucauggggag

SEQ ID NO: 718344 - RNA, 21 nt, Human
gggagucauuuuggagaugau

SEQ ID NO: 718345 - RNA, 18 nt, Human
gggcauggaagagggacc

SEQ ID NO: 718346 - RNA, 20 nt, Human
gggcauuccugagucagacu

SEQ ID NO: 718347 - RNA, 19 nt, Human
gggcucaccugauugugug

SEQ ID NO: 718348 - RNA, 23 nt, Human
gggcucuucuuuuccaucucccu

SEQ ID NO: 718349 - RNA, 19 nt, Human
gggcugaaggaaaccagcc

SEQ ID NO: 718350 - RNA, 20 nt, Human
ggggaacaacucagccucag

SEQ ID NO: 718351 - RNA, 22 nt, Human
ggggcaggugcugccccgggac

SEQ ID NO: 718352 - RNA, 24 nt, Human
ggggcggggaggggcggcgaggga

SEQ ID NO: 718353 - RNA, 28 nt, Human
ggggggaggggagggagggaaaguuccg

SEQ ID NO: 718354 - RNA, 18 nt, Human
gggguucccagagggccc

SEQ ID NO: 718355 - RNA, 21 nt, Human
gggugccuggagcagauggcu

SEQ ID NO: 718356 - RNA, 21 nt, Human
gggugggagacuucuggaggg

SEQ ID NO: 718357 - RNA, 21 nt, Human
ggucagggccacccucagggc

SEQ ID NO: 718358 - RNA, 18 nt, Human
ggugcuggggccacagcc

SEQ ID NO: 718359 - RNA, 23 nt, Human
guccugcugcuuucuccccuacc

SEQ ID NO: 718360 - RNA, 25 nt, Human
gugcaccugccacccgggaaccaca

SEQ ID NO: 718361 - RNA, 23 nt, Human
gugcagccacacugcaucacaca

SEQ ID NO: 718362 - RNA, 23 nt, Human
guggaacaaaagacaagacagaa

SEQ ID NO: 718363 - RNA, 21 nt, Human
guggagggcaacucaucuaca

SEQ ID NO: 718364 - RNA, 19 nt, Human
gugggacagaaugaacaga

SEQ ID NO: 718365 - RNA, 23 nt, Human
guggggcacaggaaagcagggaa

SEQ ID NO: 718366 - RNA, 24 nt, Human
uaaaagaauaauuccccaagguca

SEQ ID NO: 718367 - RNA, 18 nt, Human
uaaaaggguccggaggug

SEQ ID NO: 718368 - RNA, 22 nt, Human
uaaacagugugcuugucagucc

SEQ ID NO: 718369 - RNA, 22 nt, Human
uaacacagaaccaugccagcca

SEQ ID NO: 718370 - RNA, 19 nt, Human
uaauauaagaauagaggcu

SEQ ID NO: 718371 - RNA, 26 nt, Human
uacacacacacacacacgcacgcaca

SEQ ID NO: 718372 - RNA, 18 nt, Human
uaccaaaaacccauugca

SEQ ID NO: 718373 - RNA, 20 nt, Human
uacccaaggucacaguuucu

SEQ ID NO: 718374 - RNA, 20 nt, Human
uacccacagaaccuccuuac

SEQ ID NO: 718375 - RNA, 18 nt, Human
uacuggagaagaaaacuc

SEQ ID NO: 718376 - RNA, 22 nt, Human
uacuggagccuuuuucauacca

SEQ ID NO: 718377 - RNA, 19 nt, Human
uacuuugaagggaaauaag

SEQ ID NO: 718378 - RNA, 23 nt, Human
uagaagaaaccagauggggaguc

SEQ ID NO: 718379 - RNA, 26 nt, Human
uagaauucucagaucuucaacucucc

SEQ ID NO: 718380 - RNA, 21 nt, Human
uagcagauaacaugcccucuu

SEQ ID NO: 718381 - RNA, 19 nt, Human
uagggcauuugcacaaggc

SEQ ID NO: 718382 - RNA, 23 nt, Human
uaucucucucuuugcaggaugca

SEQ ID NO: 718383 - RNA, 20 nt, Human
ucacaggcacagccaugcca

SEQ ID NO: 718384 - RNA, 18 nt, Human
ucacagggggcugccucc

SEQ ID NO: 718385 - RNA, 20 nt, Human
ucacugauguggcuucccuc

SEQ ID NO: 718386 - RNA, 19 nt, Human
ucacuggaagaaggaggag

SEQ ID NO: 718387 - RNA, 24 nt, Human
ucagacaagccccugcauccauga

SEQ ID NO: 718388 - RNA, 18 nt, Human
ucagcccauaucaucacc

SEQ ID NO: 718389 - RNA, 22 nt, Human
ucagcccccaugaaaugcuggc

SEQ ID NO: 718390 - RNA, 22 nt, Human
ucagccucacacaacuuuaccc

SEQ ID NO: 718391 - RNA, 18 nt, Human
ucaggcagagauaggagc

SEQ ID NO: 718392 - RNA, 21 nt, Human
ucaugcuuuucaacaagcacc

SEQ ID NO: 718393 - RNA, 20 nt, Human
uccaaagaaguacccuugga

SEQ ID NO: 718394 - RNA, 22 nt, Human
uccaagaacuugacgaacggua

SEQ ID NO: 718395 - RNA, 20 nt, Human
uccacacaccuccacugucc

SEQ ID NO: 718396 - RNA, 20 nt, Human
uccagaucagagacuuuuaa

SEQ ID NO: 718397 - RNA, 20 nt, Human
uccagcaaacagcccuaccc

SEQ ID NO: 718398 - RNA, 22 nt, Human
uccagcaaacagcccuacccac

SEQ ID NO: 718399 - RNA, 22 nt, Human
uccauaaggcgccacugccucc

SEQ ID NO: 718400 - RNA, 26 nt, Human
ucccaagccccauucuguuagccaag

SEQ ID NO: 718401 - RNA, 19 nt, Human
ucccagccagaccaggcca

SEQ ID NO: 718402 - RNA, 19 nt, Human
ucccccaccccagcaaaca

SEQ ID NO: 718403 - RNA, 19 nt, Human
uccccgggguggcagggcc

SEQ ID NO: 718404 - RNA, 19 nt, Human
ucccugcagccacugcaga

SEQ ID NO: 718405 - RNA, 20 nt, Human
ucccuguagccagcuguccc

SEQ ID NO: 718406 - RNA, 21 nt, Human
ucccuguagccagcugucccu

SEQ ID NO: 718407 - RNA, 19 nt, Human
uccgcccgccugcgcugcc

SEQ ID NO: 718408 - RNA, 21 nt, Human
uccugagucagacuucaggau

SEQ ID NO: 718409 - RNA, 21 nt, Human
uccuggggugacugcuggucu

SEQ ID NO: 718410 - RNA, 25 nt, Human
uccuuuggguuucuuuucaacaagg

SEQ ID NO: 718411 - RNA, 23 nt, Human
ucgcaacacccugacagugacug

SEQ ID NO: 718412 - RNA, 23 nt, Human
ucuccacugccagcugggaugag

SEQ ID NO: 718413 - RNA, 23 nt, Human
ucucuccagccagguggagggca

SEQ ID NO: 718414 - RNA, 22 nt, Human
ucucugcaggcagcuccccacc

SEQ ID NO: 718415 - RNA, 21 nt, Human
ucugcaggcagcuccccaccg

SEQ ID NO: 718416 - RNA, 23 nt, Human
ucuugcagaguuugcacagugcu

SEQ ID NO: 718417 - RNA, 22 nt, Human
ucuuuuccaucucccugcagcc

SEQ ID NO: 718418 - RNA, 18 nt, Human
ugaaaugcuggcauugcc

SEQ ID NO: 718419 - RNA, 25 nt, Human
ugaacagagcagaaauacaaagaca

SEQ ID NO: 718420 - RNA, 21 nt, Human
ugaacagauagaacgugguca

SEQ ID NO: 718421 - RNA, 21 nt, Human
ugaauggaggccccaagucau

SEQ ID NO: 718422 - RNA, 19 nt, Human
ugagaaagcaagcagaggc

SEQ ID NO: 718423 - RNA, 27 nt, Human
ugagcaguuuuggcagccagggacugu

SEQ ID NO: 718424 - RNA, 19 nt, Human
ugaggaaagacccagccuc

SEQ ID NO: 718425 - RNA, 26 nt, Human
ugaggaaagacccagccucaucugcu

SEQ ID NO: 718426 - RNA, 19 nt, Human
ugaggaagauggggaauau

SEQ ID NO: 718427 - RNA, 23 nt, Human
ugaggaagauggggaauaugagg

SEQ ID NO: 718428 - RNA, 25 nt, Human
ugaggaguggaagagaaagguagga

SEQ ID NO: 718429 - RNA, 19 nt, Human
ugaggugaaggcaaucagg

SEQ ID NO: 718430 - RNA, 21 nt, Human
ugaggugaaggcaaucagggc

SEQ ID NO: 718431 - RNA, 18 nt, Human
ugagucauguccacacaa

SEQ ID NO: 718432 - RNA, 21 nt, Human
ugauuccacagaggaugagcu

SEQ ID NO: 718433 - RNA, 20 nt, Human
ugauugugugggcuuccccu

SEQ ID NO: 718434 - RNA, 20 nt, Human
ugccccaaccucuucugagg

SEQ ID NO: 718435 - RNA, 21 nt, Human
ugccccaggccaggaccaggc

SEQ ID NO: 718436 - RNA, 22 nt, Human
ugccccaggccaggaccaggca

SEQ ID NO: 718437 - RNA, 23 nt, Human
ugccccgggaccccgccccgcga

SEQ ID NO: 718438 - RNA, 25 nt, Human
ugccucagcccccaugaaaugcugg

SEQ ID NO: 718439 - RNA, 18 nt, Human
ugccucccaacagcacac

SEQ ID NO: 718440 - RNA, 18 nt, Human
ugccugcccaggcccacu

SEQ ID NO: 718441 - RNA, 18 nt, Human
ugccugggacuugcugca

SEQ ID NO: 718442 - RNA, 28 nt, Human
ugccugggacuugcugcaucccaagagc

SEQ ID NO: 718443 - RNA, 19 nt, Human
ugcuacauccacaaacauc

SEQ ID NO: 718444 - RNA, 21 nt, Human
ugcuacauuucucagaaaaca

SEQ ID NO: 718445 - RNA, 23 nt, Human
ugcuacauuucucagaaaacagu

SEQ ID NO: 718446 - RNA, 19 nt, Human
uggaaagagugccuuccac

SEQ ID NO: 718447 - RNA, 18 nt, Human
uggaacaaaagacaagac

SEQ ID NO: 718448 - RNA, 24 nt, Human
uggaacaaaagacaagacagaaaa

SEQ ID NO: 718449 - RNA, 30 nt, Human
uggaacaaaagacaagacagaaaacagugg

SEQ ID NO: 718450 - RNA, 19 nt, Human
uggaacccaggcucaggga

SEQ ID NO: 718451 - RNA, 22 nt, Human
uggaagaaggaggagguuccag

SEQ ID NO: 718452 - RNA, 22 nt, Human
uggaagagaaagguaggaggag

SEQ ID NO: 718453 - RNA, 23 nt, Human
uggaagagggacccugguugcau

SEQ ID NO: 718454 - RNA, 19 nt, Human
uggacaaccuucuggcccu

SEQ ID NO: 718455 - RNA, 23 nt, Human
uggaccagaugagagccugcacc

SEQ ID NO: 718456 - RNA, 24 nt, Human
uggagaagaaaacucugaggagug

SEQ ID NO: 718457 - RNA, 26 nt, Human
uggaggccccaagucauucagacccc

SEQ ID NO: 718458 - RNA, 23 nt, Human
uggcagccagggacuguagguag

SEQ ID NO: 718459 - RNA, 22 nt, Human
uggcagggccucaggcagcucg

SEQ ID NO: 718460 - RNA, 20 nt, Human
uggcagugaguuggccccag

SEQ ID NO: 718461 - RNA, 21 nt, Human
uggcaucauugugaacuccuu

SEQ ID NO: 718462 - RNA, 23 nt, Human
uggcaugaccaugggaggacugg

SEQ ID NO: 718463 - RNA, 22 nt, Human
uggcauugccugggacuugcug

SEQ ID NO: 718464 - RNA, 20 nt, Human
uggccaggaacccuggaacc

SEQ ID NO: 718465 - RNA, 22 nt, Human
uggcugccugcccaggcccacu

SEQ ID NO: 718466 - RNA, 19 nt, Human
ugggaggacuggcuugacc

SEQ ID NO: 718467 - RNA, 21 nt, Human
ugggaggcccaaggcccuguc

SEQ ID NO: 718468 - RNA, 21 nt, Human
ugggcaggccaggugggguuc

SEQ ID NO: 718469 - RNA, 18 nt, Human
uggggagagcauuuccgc

SEQ ID NO: 718470 - RNA, 19 nt, Human
uggggagagcauuuccgcc

SEQ ID NO: 718471 - RNA, 25 nt, Human
uggggagagcauuuccgccuaaaga

SEQ ID NO: 718472 - RNA, 24 nt, Human
uggggaugaguaacuuauuuggug

SEQ ID NO: 718473 - RNA, 20 nt, Human
uggguggcaugaccauggga

SEQ ID NO: 718474 - RNA, 20 nt, Human
uggguggcaugaccauggga

SEQ ID NO: 718475 - RNA, 21 nt, Human
ugguagaagaaaccagauggg

SEQ ID NO: 718476 - RNA, 22 nt, Human
ugguuaugaauggaggccccaa

SEQ ID NO: 718477 - RNA, 19 nt, Human
uguccugugggucacuaac

SEQ ID NO: 718478 - RNA, 20 nt, Human
uguuaggauucccagaguuc

SEQ ID NO: 718479 - RNA, 21 nt, Human
uuaaaaauggaggcuucugcu

SEQ ID NO: 718480 - RNA, 19 nt, Human
uuaaaagaauccuuuccca

SEQ ID NO: 718481 - RNA, 20 nt, Human
uuauuccagcaaacagcccu

SEQ ID NO: 718482 - RNA, 22 nt, Human
uucaacucucccacugauguca

SEQ ID NO: 718483 - RNA, 18 nt, Human
uucaucugggcaaggggg

SEQ ID NO: 718484 - RNA, 22 nt, Human
uuccagccucauagagaaaguc

SEQ ID NO: 718485 - RNA, 22 nt, Human
uucccagaguucuugucugagg

SEQ ID NO: 718486 - RNA, 23 nt, Human
uuccccaccccccguccucaaac

SEQ ID NO: 718487 - RNA, 20 nt, Human
uuccuggcaucauugugaac

SEQ ID NO: 718488 - RNA, 21 nt, Human
uugagcuaucaggcccacucu

SEQ ID NO: 718489 - RNA, 22 nt, Human
uuuauugucuuuaaaaauggag

SEQ ID NO: 718490 - RNA, 18 nt, Human
uuucccagccagaccagg

SEQ ID NO: 718491 - RNA, 21 nt, Human
aaccacgacggaguggcagcc

SEQ ID NO: 718492 - RNA, 23 nt, Human
aaccacgacggaguggcagccuc

SEQ ID NO: 718493 - RNA, 19 nt, Human
aggccccgccuucacuuuc

SEQ ID NO: 718494 - RNA, 21 nt, Human
aggugccaucgauggggaaug

SEQ ID NO: 718495 - RNA, 21 nt, Human
cagcagagacuggaaauggca

SEQ ID NO: 718496 - RNA, 21 nt, Human
caggccccgccuucacuuucu

SEQ ID NO: 718497 - RNA, 22 nt, Human
ccccaggacugagucaggcccc

SEQ ID NO: 718498 - RNA, 21 nt, Human
ccccgccuucacuuucucuuu

SEQ ID NO: 718499 - RNA, 21 nt, Human
ccccgccuucacuuucucuuu

SEQ ID NO: 718500 - RNA, 21 nt, Human
cccuuggagcccucgcagccc

SEQ ID NO: 718501 - RNA, 23 nt, Human
cucucucuauauuaaaaauaaaa

SEQ ID NO: 718502 - RNA, 20 nt, Human
cuucuugcccuuugcucucc

SEQ ID NO: 718503 - RNA, 18 nt, Human
gagcccucgcagcccuuc

SEQ ID NO: 718504 - RNA, 20 nt, Human
gccuucacuuucucuuucuu

SEQ ID NO: 718505 - RNA, 19 nt, Human
ggaaugagguggacaggcc

SEQ ID NO: 718506 - RNA, 25 nt, Human
ggacacucagcagagacuggaaaug

SEQ ID NO: 718507 - RNA, 28 nt, Human
ggaccagggcagggccugggacagggaa

SEQ ID NO: 718508 - RNA, 19 nt, Human
ggccugguuaccgcucuug

SEQ ID NO: 718509 - RNA, 20 nt, Human
gggcagggccugggacaggg

SEQ ID NO: 718510 - RNA, 22 nt, Human
gucuccuacucugugcagcugg

SEQ ID NO: 718511 - RNA, 19 nt, Human
gugccaucgauggggaaug

SEQ ID NO: 718512 - RNA, 21 nt, Human
uaccgcucuugagccucaguc

SEQ ID NO: 718513 - RNA, 22 nt, Human
uaccgcucuugagccucagucu

SEQ ID NO: 718514 - RNA, 20 nt, Human
ucacuuucucuuucuucuca

SEQ ID NO: 718515 - RNA, 19 nt, Human
ucagcagagacuggaaaug

SEQ ID NO: 718516 - RNA, 27 nt, Human
ugacugggcugaggccuugugggggga

SEQ ID NO: 718517 - RNA, 27 nt, Human
ugacugggcugaggccuugugggggga

SEQ ID NO: 718518 - RNA, 18 nt, Human
uggcagccucgagggucu

SEQ ID NO: 718519 - RNA, 20 nt, Human
uggcagccucgagggucugg

SEQ ID NO: 718520 - RNA, 18 nt, Human
uggggggaccagggcagg

SEQ ID NO: 718521 - RNA, 19 nt, Human
uguggggggaccagggcag

SEQ ID NO: 718522 - RNA, 24 nt, Human
uucucugcugugaucugcaccgac

SEQ ID NO: 718523 - RNA, 23 nt, Human
uuggagcccucgcagcccuuccu

SEQ ID NO: 718524 - RNA, 24 nt, Human
aaaaacccaaaacuaaauuugcag

SEQ ID NO: 718525 - RNA, 24 nt, Human
aaaaaugaccucuggauccgagca

SEQ ID NO: 718526 - RNA, 21 nt, Human
aaaacaaauaaacaaaaugcc

SEQ ID NO: 718527 - RNA, 21 nt, Human
aaaaugccuauaagcacuuuc

SEQ ID NO: 718528 - RNA, 20 nt, Human
aaacaaauaaacaaaaugcc

SEQ ID NO: 718529 - RNA, 21 nt, Human
aaacaaauaaacaaaaugccu

SEQ ID NO: 718530 - RNA, 21 nt, Human
aaacagaaaccaugacagggc

SEQ ID NO: 718531 - RNA, 18 nt, Human
aaagaacaggauugagau

SEQ ID NO: 718532 - RNA, 20 nt, Human
aacaaaaaugaccucuggau

SEQ ID NO: 718533 - RNA, 18 nt, Human
aagaagcauaaacaaggc

SEQ ID NO: 718534 - RNA, 22 nt, Human
aagaagcauaaacaaggccaga

SEQ ID NO: 718535 - RNA, 22 nt, Human
aagcaaauaaagcccacaccac

SEQ ID NO: 718536 - RNA, 18 nt, Human
aaguguuagggcuuaaaa

SEQ ID NO: 718537 - RNA, 24 nt, Human
acaaacaaaaacauacauuauaug

SEQ ID NO: 718538 - RNA, 18 nt, Human
acaacaaaacacacacaa

SEQ ID NO: 718539 - RNA, 24 nt, Human
acaauaacaacaaaacacacacaa

SEQ ID NO: 718540 - RNA, 20 nt, Human
acacugacagcgagugacgc

SEQ ID NO: 718541 - RNA, 21 nt, Human
acaugcgucaccccuauaggc

SEQ ID NO: 718542 - RNA, 23 nt, Human
acccaaacagaaaguaccaacug

SEQ ID NO: 718543 - RNA, 22 nt, Human
acuacccaaacagaaaguacca

SEQ ID NO: 718544 - RNA, 22 nt, Human
agaaaaaaaaaaaaaaaaagaa

SEQ ID NO: 718545 - RNA, 23 nt, Human
agaaaagccuaugaaaucaugga

SEQ ID NO: 718546 - RNA, 27 nt, Human
agacaagaagcauaaacaaggccagag

SEQ ID NO: 718547 - RNA, 21 nt, Human
agacaaguguuagggcuuaaa

SEQ ID NO: 718548 - RNA, 20 nt, Human
agaggugacaaauguacaug

SEQ ID NO: 718549 - RNA, 20 nt, Human
agaucaagcaggcuggagac

SEQ ID NO: 718550 - RNA, 20 nt, Human
aggauugggacagcagggca

SEQ ID NO: 718551 - RNA, 22 nt, Human
agggcugcgggucccuggcaac

SEQ ID NO: 718552 - RNA, 18 nt, Human
auuggcuggggcaugugg

SEQ ID NO: 718553 - RNA, 19 nt, Human
auuugcaguaauuaaugua

SEQ ID NO: 718554 - RNA, 21 nt, Human
caaaacuaaauuugcagaugc

SEQ ID NO: 718555 - RNA, 20 nt, Human
caaaauccagcaacaaacaa

SEQ ID NO: 718556 - RNA, 22 nt, Human
caaacgaugcuccaacaggcac

SEQ ID NO: 718557 - RNA, 23 nt, Human
caaacuguuggcuugaaccuaua

SEQ ID NO: 718558 - RNA, 19 nt, Human
caaaugacuuaugauuguc

SEQ ID NO: 718559 - RNA, 22 nt, Human
caacaaaacacacacaaaaaaa

SEQ ID NO: 718560 - RNA, 24 nt, Human
caacuggcgacaccaacuuaucua

SEQ ID NO: 718561 - RNA, 20 nt, Human
caaggccagagucuccuuaa

SEQ ID NO: 718562 - RNA, 23 nt, Human
caauuuguauuggcuggggcagu

SEQ ID NO: 718563 - RNA, 18 nt, Human
cacaggccaaacagaaac

SEQ ID NO: 718564 - RNA, 19 nt, Human
cacuguauugcuugcaaac

SEQ ID NO: 718565 - RNA, 21 nt, Human
cagaaaaaaaaaaaaaaaaaa

SEQ ID NO: 718566 - RNA, 24 nt, Human
cagaaaaucaaaugcuuaauaaca

SEQ ID NO: 718567 - RNA, 22 nt, Human
cagccagcaauuuacugcucaa

SEQ ID NO: 718568 - RNA, 18 nt, Human
caggauagggaagaaaga

SEQ ID NO: 718569 - RNA, 21 nt, Human
caggccaaacagaaaccauga

SEQ ID NO: 718570 - RNA, 22 nt, Human
cauggaguuuagggcagggugu

SEQ ID NO: 718571 - RNA, 19 nt, Human
ccaaacagaaaccaugaca

SEQ ID NO: 718572 - RNA, 30 nt, Human
ccacaacagaaaaaaaaaaaaaaaaagaaa

SEQ ID NO: 718573 - RNA, 20 nt, Human
ccaugcucacuaauaugaac

SEQ ID NO: 718574 - RNA, 18 nt, Human
ccauuuccauuugcuuuu

SEQ ID NO: 718575 - RNA, 18 nt, Human
cccaagggaagaaaagcc

SEQ ID NO: 718576 - RNA, 21 nt, Human
ccccaagggaagaaaagccua

SEQ ID NO: 718577 - RNA, 24 nt, Human
ccuaggacuacccaaacagaaagu

SEQ ID NO: 718578 - RNA, 22 nt, Human
ccucaacaauaacaacaaaaca

SEQ ID NO: 718579 - RNA, 20 nt, Human
ccuccagagccagggagaua

SEQ ID NO: 718580 - RNA, 20 nt, Human
ccucuguacacugugccucu

SEQ ID NO: 718581 - RNA, 25 nt, Human
ccucuugcaaggauuucugaagaau

SEQ ID NO: 718582 - RNA, 24 nt, Human
ccuguaaucacgacaaguauugcu

SEQ ID NO: 718583 - RNA, 21 nt, Human
cgaaugaaccugaacaacuga

SEQ ID NO: 718584 - RNA, 24 nt, Human
cgggguggggucucggggcggggu

SEQ ID NO: 718585 - RNA, 23 nt, Human
cuacuaaauccuucagagcuaaa

SEQ ID NO: 718586 - RNA, 22 nt, Human
cucaacaauaacaacaaaacac

SEQ ID NO: 718587 - RNA, 20 nt, Human
cucacuagcagcccacauga

SEQ ID NO: 718588 - RNA, 21 nt, Human
cucgggguggggucucggggc

SEQ ID NO: 718589 - RNA, 22 nt, Human
cucuggauccgagcagcucaga

SEQ ID NO: 718590 - RNA, 27 nt, Human
cuguaacuaagaacagaaccggggucc

SEQ ID NO: 718591 - RNA, 19 nt, Human
cuguguuuucuaauuagaa

SEQ ID NO: 718592 - RNA, 21 nt, Human
gaaagagaggugacaaaugua

SEQ ID NO: 718593 - RNA, 20 nt, Human
gcaaauaaagcccacaccac

SEQ ID NO: 718594 - RNA, 20 nt, Human
gcaggcuggagacaggagac

SEQ ID NO: 718595 - RNA, 30 nt, Human
gcuacuggcuuuuccaccagggcugcgggg

SEQ ID NO: 718596 - RNA, 21 nt, Human
gcugcaccuccagagccaggg

SEQ ID NO: 718597 - RNA, 19 nt, Human
gcugcuguaacuaagaaca

SEQ ID NO: 718598 - RNA, 18 nt, Human
ggcuggggcauguggcug

SEQ ID NO: 718599 - RNA, 23 nt, Human
gggaaucccaugucucagaucuu

SEQ ID NO: 718600 - RNA, 23 nt, Human
gggagaagagugcauaaaaauac

SEQ ID NO: 718601 - RNA, 24 nt, Human
gggccagauuuuccaauuuguauu

SEQ ID NO: 718602 - RNA, 24 nt, Human
ggggccuaucagacugcuuucugc

SEQ ID NO: 718603 - RNA, 19 nt, Human
ggguagggggaggacugcu

SEQ ID NO: 718604 - RNA, 21 nt, Human
gucccuggcagcacagccagc

SEQ ID NO: 718605 - RNA, 25 nt, Human
uaaaaaaacccaaaacuaaauuugc

SEQ ID NO: 718606 - RNA, 22 nt, Human
uaaaaaguaaacuuacauacaa

SEQ ID NO: 718607 - RNA, 27 nt, Human
uaaacaaagaacaggauugagauuaga

SEQ ID NO: 718608 - RNA, 21 nt, Human
uaacugguuuccauuuuccuu

SEQ ID NO: 718609 - RNA, 24 nt, Human
uaauaauaaaaaaacccaaaacua

SEQ ID NO: 718610 - RNA, 21 nt, Human
uaauaugaacacaggccaaac

SEQ ID NO: 718611 - RNA, 24 nt, Human
uacauacaaugacacaaaaauuua

SEQ ID NO: 718612 - RNA, 18 nt, Human
uacaugaagcuuaucuug

SEQ ID NO: 718613 - RNA, 19 nt, Human
uacaugcacguguguguau

SEQ ID NO: 718614 - RNA, 21 nt, Human
uacccuaggacuacccaaaca

SEQ ID NO: 718615 - RNA, 22 nt, Human
uauaugcuuuuacauauauaca

SEQ ID NO: 718616 - RNA, 27 nt, Human
uauuauaacccucauggcucuaucccg

SEQ ID NO: 718617 - RNA, 24 nt, Human
uauugcucuuaaacaaagaacagg

SEQ ID NO: 718618 - RNA, 19 nt, Human
ucaaaauuuuaccaagggc

SEQ ID NO: 718619 - RNA, 22 nt, Human
ucaaagauggcugagggggaag

SEQ ID NO: 718620 - RNA, 19 nt, Human
ucaaaugcuuaauaacaaa

SEQ ID NO: 718621 - RNA, 22 nt, Human
ucaagcaggcuggagacaggag

SEQ ID NO: 718622 - RNA, 19 nt, Human
ucagugauauuggccucuu

SEQ ID NO: 718623 - RNA, 19 nt, Human
ucaguggugggcuagcugg

SEQ ID NO: 718624 - RNA, 21 nt, Human
ucaguggugggcuagcugguc

SEQ ID NO: 718625 - RNA, 22 nt, Human
uccaacaggcacaugcgucacc

SEQ ID NO: 718626 - RNA, 21 nt, Human
uccagggauaaaguucugcaa

SEQ ID NO: 718627 - RNA, 18 nt, Human
ucccuaggugaaauucaa

SEQ ID NO: 718628 - RNA, 19 nt, Human
uccgggguggggucucggg

SEQ ID NO: 718629 - RNA, 22 nt, Human
ucgggguggggucucggggcgg

SEQ ID NO: 718630 - RNA, 18 nt, Human
ucuucuguugcuguguuu

SEQ ID NO: 718631 - RNA, 20 nt, Human
ugaaacaaaauccagcaaca

SEQ ID NO: 718632 - RNA, 18 nt, Human
ugaaagugcuuuugaugc

SEQ ID NO: 718633 - RNA, 22 nt, Human
ugaaauucaacauagauaugcc

SEQ ID NO: 718634 - RNA, 22 nt, Human
ugaacacaggccaaacagaaac

SEQ ID NO: 718635 - RNA, 22 nt, Human
ugaaccaucaauagggaagccc

SEQ ID NO: 718636 - RNA, 18 nt, Human
ugaagaaggaugaagcug

SEQ ID NO: 718637 - RNA, 19 nt, Human
ugacaagaaauaaaaauaa

SEQ ID NO: 718638 - RNA, 24 nt, Human
ugacaagaaauaaaaauaaauaaa

SEQ ID NO: 718639 - RNA, 25 nt, Human
ugacaagaaauaaaaauaaauaaag

SEQ ID NO: 718640 - RNA, 19 nt, Human
ugagauuagaaagaauaac

SEQ ID NO: 718641 - RNA, 19 nt, Human
ugaugaagaaggaugaagc

SEQ ID NO: 718642 - RNA, 22 nt, Human
ugcagaugcagugggauauucu

SEQ ID NO: 718643 - RNA, 21 nt, Human
ugcagugggauauucuuuaaa

SEQ ID NO: 718644 - RNA, 20 nt, Human
uggcauccaaauaugccucu

SEQ ID NO: 718645 - RNA, 23 nt, Human
uggcugcaccuccagagccaggg

SEQ ID NO: 718646 - RNA, 23 nt, Human
uggcuggggcauguggcugggga

SEQ ID NO: 718647 - RNA, 18 nt, Human
ugggcuagcugguuaccu

SEQ ID NO: 718648 - RNA, 18 nt, Human
ugguaaauuaggcucucc

SEQ ID NO: 718649 - RNA, 23 nt, Human
ugguauauagaaaagcuaggauu

SEQ ID NO: 718650 - RNA, 19 nt, Human
uguagugggacacaggggc

SEQ ID NO: 718651 - RNA, 25 nt, Human
ugugcacacacuguaacaaaaauga

SEQ ID NO: 718652 - RNA, 19 nt, Human
uguguguagugggacacag

SEQ ID NO: 718653 - RNA, 24 nt, Human
uuacaguguuuuuaaaaaacaaaa

SEQ ID NO: 718654 - RNA, 20 nt, Human
uucaggaaguacuuaaggac

SEQ ID NO: 718655 - RNA, 20 nt, Human
uugcuccggaagcaucagaa

SEQ ID NO: 718656 - RNA, 24 nt, Human
uugggacagcagggcaggauaggg

SEQ ID NO: 718657 - RNA, 27 nt, Human
uuuguaaucuccaacuaaacauuuccu

SEQ ID NO: 718658 - RNA, 21 nt, Human
uuuguauuggcuggggcaugu

SEQ ID NO: 718659 - RNA, 23 nt, Human
uuuuuaaaaaacaaaacaaauaa

SEQ ID NO: 718660 - RNA, 21 nt, Human
aaaaaaaaaaaaaaaaacaaa

SEQ ID NO: 718661 - RNA, 26 nt, Human
aaaaaaaaaaaaaaaaacaaacacca

SEQ ID NO: 718662 - RNA, 23 nt, Human
aaaaaaacaaacaccaacaacaa

SEQ ID NO: 718663 - RNA, 19 nt, Human
aaaaaaacccaaaaacucu

SEQ ID NO: 718664 - RNA, 25 nt, Human
aaaaagacaaggccaggaaggcccc

SEQ ID NO: 718665 - RNA, 20 nt, Human
aaaauccagaagaauccuaa

SEQ ID NO: 718666 - RNA, 24 nt, Human
aaacaaaaaaaagacaaggccagg

SEQ ID NO: 718667 - RNA, 19 nt, Human
aaacaaaaaaacccaaaaa

SEQ ID NO: 718668 - RNA, 21 nt, Human
aaacaaacaaaaaaacccaaa

SEQ ID NO: 718669 - RNA, 23 nt, Human
aaacaaacaccaacaacaaacaa

SEQ ID NO: 718670 - RNA, 18 nt, Human
aaacccagaaaggggcaa

SEQ ID NO: 718671 - RNA, 19 nt, Human
aaaggggcaaccugcccag

SEQ ID NO: 718672 - RNA, 23 nt, Human
aaauuucagaaaaaagcaaaaca

SEQ ID NO: 718673 - RNA, 20 nt, Human
aacaaaaaaaagacaaggcc

SEQ ID NO: 718674 - RNA, 24 nt, Human
aacaaacucauaaaguggccagga

SEQ ID NO: 718675 - RNA, 27 nt, Human
aagaagccagggcaggguguggggacu

SEQ ID NO: 718676 - RNA, 18 nt, Human
aagaauccuaaagucggc

SEQ ID NO: 718677 - RNA, 22 nt, Human
aagcaaaacaaacauuccuuac

SEQ ID NO: 718678 - RNA, 19 nt, Human
aagcaaaauauucuccaag

SEQ ID NO: 718679 - RNA, 19 nt, Human
aagcaaacccaaacugauu

SEQ ID NO: 718680 - RNA, 20 nt, Human
aagcuggucaucuaugcagc

SEQ ID NO: 718681 - RNA, 19 nt, Human
aaggcgacuggggccauua

SEQ ID NO: 718682 - RNA, 18 nt, Human
aaguaggaaaagcagcag

SEQ ID NO: 718683 - RNA, 21 nt, Human
aauaaaauaaagcaaacccaa

SEQ ID NO: 718684 - RNA, 22 nt, Human
acaaaaccccagaguaacaaga

SEQ ID NO: 718685 - RNA, 26 nt, Human
acaaaaccccagaguaaccgggacgu

SEQ ID NO: 718686 - RNA, 18 nt, Human
acaaacaaaaaaacccaa

SEQ ID NO: 718687 - RNA, 28 nt, Human
acaaacaaacaaaaaaacccaaaaacuc

SEQ ID NO: 718688 - RNA, 21 nt, Human
acaaacaccaacaacaaacaa

SEQ ID NO: 718689 - RNA, 23 nt, Human
acaacaaacaaacaaaaaaaccc

SEQ ID NO: 718690 - RNA, 22 nt, Human
acacauggcuaugggagagcgc

SEQ ID NO: 718691 - RNA, 19 nt, Human
acaccaacaacaaacaaac

SEQ ID NO: 718692 - RNA, 22 nt, Human
acaggacagacccaggcccggc

SEQ ID NO: 718693 - RNA, 23 nt, Human
accagcucccuaccuaacuaugc

SEQ ID NO: 718694 - RNA, 19 nt, Human
accuucuccaaccagcucc

SEQ ID NO: 718695 - RNA, 21 nt, Human
acucaacagggccaggagcuu

SEQ ID NO: 718696 - RNA, 21 nt, Human
acucucaacucaacagggcca

SEQ ID NO: 718697 - RNA, 23 nt, Human
acucucaccccaauuagagccac

SEQ ID NO: 718698 - RNA, 18 nt, Human
agacaagggcacugcugu

SEQ ID NO: 718699 - RNA, 20 nt, Human
agacaugcagcacagggucc

SEQ ID NO: 718700 - RNA, 19 nt, Human
agcagacaugcagcacagg

SEQ ID NO: 718701 - RNA, 18 nt, Human
agccugggcuugugcucc

SEQ ID NO: 718702 - RNA, 21 nt, Human
agcugaauaaaccccaaacaa

SEQ ID NO: 718703 - RNA, 20 nt, Human
aggaaggccgaugcuggaag

SEQ ID NO: 718704 - RNA, 20 nt, Human
aggagcuggugggggcugcc

SEQ ID NO: 718705 - RNA, 23 nt, Human
aggaggggaggagacgagagggg

SEQ ID NO: 718706 - RNA, 22 nt, Human
aggcacaaguaaacacagcagc

SEQ ID NO: 718707 - RNA, 24 nt, Human
aggcagauggcgagaaucuuccuu

SEQ ID NO: 718708 - RNA, 18 nt, Human
aggcaggaggcaagaggg

SEQ ID NO: 718709 - RNA, 24 nt, Human
aggcccacaggagcuggugggggc

SEQ ID NO: 718710 - RNA, 24 nt, Human
aggcccaggagccucugggaagug

SEQ ID NO: 718711 - RNA, 19 nt, Human
aggcucaggggaggagcag

SEQ ID NO: 718712 - RNA, 19 nt, Human
agggagagggaggaagggc

SEQ ID NO: 718713 - RNA, 23 nt, Human
agggagagggaggaagggcugag

SEQ ID NO: 718714 - RNA, 21 nt, Human
auaaaaccaaacaaacucaua

SEQ ID NO: 718715 - RNA, 21 nt, Human
augacagggaaacuggacagg

SEQ ID NO: 718716 - RNA, 23 nt, Human
augcgagggguggcagggaaggg

SEQ ID NO: 718717 - RNA, 20 nt, Human
auuucaccagggaucaagcu

SEQ ID NO: 718718 - RNA, 18 nt, Human
auuucauucucuacgcaa

SEQ ID NO: 718719 - RNA, 18 nt, Human
caaaaaaacccaaaaacu

SEQ ID NO: 718720 - RNA, 22 nt, Human
caaaacaaacauuccuuacugc

SEQ ID NO: 718721 - RNA, 23 nt, Human
caaacaaacaaaaaaacccaaaa

SEQ ID NO: 718722 - RNA, 24 nt, Human
caaacaaacaaaaaaacccaaaaa

SEQ ID NO: 718723 - RNA, 25 nt, Human
caaacaaacaaaaaaacccaaaaac

SEQ ID NO: 718724 - RNA, 26 nt, Human
caaacaaacucauaaaguggccagga

SEQ ID NO: 718725 - RNA, 26 nt, Human
caacaaacaaacaaaaaaacccaaaa

SEQ ID NO: 718726 - RNA, 22 nt, Human
cacagcacauaaaauacagaaa

SEQ ID NO: 718727 - RNA, 21 nt, Human
cacagcccacguacaucucuc

SEQ ID NO: 718728 - RNA, 19 nt, Human
caccaacaacaaacaaaca

SEQ ID NO: 718729 - RNA, 21 nt, Human
caccaacaacaaacaaacaaa

SEQ ID NO: 718730 - RNA, 22 nt, Human
caccaacaacaaacaaacaaaa

SEQ ID NO: 718731 - RNA, 27 nt, Human
caccaacaacaaacaaacaaaaaaacc

SEQ ID NO: 718732 - RNA, 24 nt, Human
caccacaaacccagaaaggggcaa

SEQ ID NO: 718733 - RNA, 18 nt, Human
caccagggucaacccagg

SEQ ID NO: 718734 - RNA, 21 nt, Human
caccccucccccuuuugucac

SEQ ID NO: 718735 - RNA, 18 nt, Human
caccccucugcccaccuc

SEQ ID NO: 718736 - RNA, 26 nt, Human
cagaagcccuagaaauagcagcacau

SEQ ID NO: 718737 - RNA, 23 nt, Human
cagcaacuacaccauucagacca

SEQ ID NO: 718738 - RNA, 22 nt, Human
cagcacagcaagcagcaggcca

SEQ ID NO: 718739 - RNA, 22 nt, Human
cagcagcacagcaagcagcagg

SEQ ID NO: 718740 - RNA, 21 nt, Human
cagcagugcagccacuaaggc

SEQ ID NO: 718741 - RNA, 18 nt, Human
cagccauuuuccuucucu

SEQ ID NO: 718742 - RNA, 24 nt, Human
cagcccacguacaucucuccuccu

SEQ ID NO: 718743 - RNA, 18 nt, Human
cagcugggacugggaggg

SEQ ID NO: 718744 - RNA, 18 nt, Human
caggagcuugugccuuug

SEQ ID NO: 718745 - RNA, 25 nt, Human
cagggccaggagcuugugccuuugg

SEQ ID NO: 718746 - RNA, 18 nt, Human
cagggugggggaaaggca

SEQ ID NO: 718747 - RNA, 21 nt, Human
cagggugggggaaaggcacaa

SEQ ID NO: 718748 - RNA, 20 nt, Human
cagguaagguggcuggagag

SEQ ID NO: 718749 - RNA, 21 nt, Human
cagugcagccacuaaggcuug

SEQ ID NO: 718750 - RNA, 18 nt, Human
caucuaugcagcugaaua

SEQ ID NO: 718751 - RNA, 18 nt, Human
cauggacaugauucucca

SEQ ID NO: 718752 - RNA, 23 nt, Human
cauuaagguuggggugcacaugg

SEQ ID NO: 718753 - RNA, 23 nt, Human
ccaauuagagccacuucugccac

SEQ ID NO: 718754 - RNA, 21 nt, Human
ccaccugcugcuacccuuguc

SEQ ID NO: 718755 - RNA, 19 nt, Human
ccacucuugacucaagagc

SEQ ID NO: 718756 - RNA, 21 nt, Human
ccagcaggcccaagagaagcu

SEQ ID NO: 718757 - RNA, 23 nt, Human
ccaggagcuugugccuuugggcc

SEQ ID NO: 718758 - RNA, 21 nt, Human
ccaggauauuaaaccugcacu

SEQ ID NO: 718759 - RNA, 21 nt, Human
ccaggcccggcccccugugug

SEQ ID NO: 718760 - RNA, 23 nt, Human
ccagggaaacaaaaaaaagacaa

SEQ ID NO: 718761 - RNA, 22 nt, Human
ccagugacaagaaggaggggag

SEQ ID NO: 718762 - RNA, 19 nt, Human
cccacaggagcuggugggg

SEQ ID NO: 718763 - RNA, 26 nt, Human
cccagaagcccuagaaauagcagcac

SEQ ID NO: 718764 - RNA, 21 nt, Human
cccagcaaagcugggccugcc

SEQ ID NO: 718765 - RNA, 22 nt, Human
cccagccacagugcuucagaaa

SEQ ID NO: 718766 - RNA, 19 nt, Human
ccccaagcagacaggcuca

SEQ ID NO: 718767 - RNA, 22 nt, Human
ccccaggccccugugggcagca

SEQ ID NO: 718768 - RNA, 21 nt, Human
ccccagggcccuguacuccag

SEQ ID NO: 718769 - RNA, 21 nt, Human
ccccuccgucaccacaaaccc

SEQ ID NO: 718770 - RNA, 23 nt, Human
cccgugccaccacccaugaagcu

SEQ ID NO: 718771 - RNA, 18 nt, Human
ccuagaaauagcagcacu

SEQ ID NO: 718772 - RNA, 22 nt, Human
ccuauagggcccucagagauac

SEQ ID NO: 718773 - RNA, 18 nt, Human
ccuccccuccgucaccac

SEQ ID NO: 718774 - RNA, 21 nt, Human
ccuccgucaccacaaacccag

SEQ ID NO: 718775 - RNA, 22 nt, Human
ccugcacucacaggcccaggag

SEQ ID NO: 718776 - RNA, 19 nt, Human
ccugggcacaguuacuaag

SEQ ID NO: 718777 - RNA, 18 nt, Human
ccuucuaguucuagcacc

SEQ ID NO: 718778 - RNA, 24 nt, Human
ccuucuaguucuagcaccuucucc

SEQ ID NO: 718779 - RNA, 23 nt, Human
ccuuuggugcuggccauucuccu

SEQ ID NO: 718780 - RNA, 20 nt, Human
cgugccaccacccaugaagc

SEQ ID NO: 718781 - RNA, 23 nt, Human
cuccacaccccucugcccaccuc

SEQ ID NO: 718782 - RNA, 24 nt, Human
cuccaggcugcuccacaccccucu

SEQ ID NO: 718783 - RNA, 21 nt, Human
cucuacgcaaggauguuccuc

SEQ ID NO: 718784 - RNA, 24 nt, Human
cucucaguaagggacaaagcccag

SEQ ID NO: 718785 - RNA, 20 nt, Human
cucugggaagugggccucau

SEQ ID NO: 718786 - RNA, 19 nt, Human
cugaauaaaccccaaacaa

SEQ ID NO: 718787 - RNA, 19 nt, Human
cugagggcucagcugggac

SEQ ID NO: 718788 - RNA, 24 nt, Human
cugcaauguacaggauaccaaaaa

SEQ ID NO: 718789 - RNA, 21 nt, Human
cugcugugggugagguaaggc

SEQ ID NO: 718790 - RNA, 24 nt, Human
cugcugugggugagguaaggcgac

SEQ ID NO: 718791 - RNA, 18 nt, Human
cugcuucccugcuaggcc

SEQ ID NO: 718792 - RNA, 19 nt, Human
cugcuucccugcuaggccu

SEQ ID NO: 718793 - RNA, 21 nt, Human
cuucuaagaugacagcaguug

SEQ ID NO: 718794 - RNA, 23 nt, Human
cuuuucauuucaccagggaucaa

SEQ ID NO: 718795 - RNA, 20 nt, Human
cuuuuuuuuuucuuuggggg

SEQ ID NO: 718796 - RNA, 25 nt, Human
gaagcaaguggucugagggcucagc

SEQ ID NO: 718797 - RNA, 21 nt, Human
gaaggcuuuucauuucaccag

SEQ ID NO: 718798 - RNA, 21 nt, Human
gacauaacuggaggaagaagc

SEQ ID NO: 718799 - RNA, 18 nt, Human
gacccagaggcuuaggaa

SEQ ID NO: 718800 - RNA, 18 nt, Human
gaggagacgagaggggag

SEQ ID NO: 718801 - RNA, 20 nt, Human
gaggagggggagggcaagau

SEQ ID NO: 718802 - RNA, 19 nt, Human
gaggaguaaggaugcagaa

SEQ ID NO: 718803 - RNA, 22 nt, Human
gcaaaauauucuccaaguccca

SEQ ID NO: 718804 - RNA, 27 nt, Human
gcaaaauauucuccaagucccaccuug

SEQ ID NO: 718805 - RNA, 20 nt, Human
gcaaagagccagcuccucca

SEQ ID NO: 718806 - RNA, 24 nt, Human
gcaacccucaaaggaaacaggaca

SEQ ID NO: 718807 - RNA, 26 nt, Human
gcaagaugaaugggaaagaaaauauu

SEQ ID NO: 718808 - RNA, 22 nt, Human
gcagcagcacagcaagcagcag

SEQ ID NO: 718809 - RNA, 23 nt, Human
gccaggagcuugugccuuugggc

SEQ ID NO: 718810 - RNA, 24 nt, Human
gccaggcaaagagccagcuccucc

SEQ ID NO: 718811 - RNA, 23 nt, Human
gccccaggccccugugggcagca

SEQ ID NO: 718812 - RNA, 21 nt, Human
gcgagggguggcagggaaggg

SEQ ID NO: 718813 - RNA, 21 nt, Human
gcucacagcuuccacgccgcc

SEQ ID NO: 718814 - RNA, 18 nt, Human
gcuccucccccagggccc

SEQ ID NO: 718815 - RNA, 22 nt, Human
gcuggccauucuccugcaucag

SEQ ID NO: 718816 - RNA, 24 nt, Human
ggaaacucucaacucaacagggcc

SEQ ID NO: 718817 - RNA, 22 nt, Human
ggaagaaagacauaacuggagg

SEQ ID NO: 718818 - RNA, 23 nt, Human
ggaagugggccucaucaaagcca

SEQ ID NO: 718819 - RNA, 21 nt, Human
ggacugggagggaaagggcua

SEQ ID NO: 718820 - RNA, 18 nt, Human
ggaggagggggagggcaa

SEQ ID NO: 718821 - RNA, 26 nt, Human
ggaggagggggagggcaagaugaagu

SEQ ID NO: 718822 - RNA, 21 nt, Human
ggaggggaggagacgagaggg

SEQ ID NO: 718823 - RNA, 18 nt, Human
ggccaggagcuugugccu

SEQ ID NO: 718824 - RNA, 18 nt, Human
ggccaggagcuugugccu

SEQ ID NO: 718825 - RNA, 19 nt, Human
ggcgggagggagggaggag

SEQ ID NO: 718826 - RNA, 22 nt, Human
ggcuccucccccagggcccugu

SEQ ID NO: 718827 - RNA, 19 nt, Human
ggcuggaggggacccagag

SEQ ID NO: 718828 - RNA, 23 nt, Human
gggaacacagcacauaaaauaca

SEQ ID NO: 718829 - RNA, 18 nt, Human
gggagggaaagggcuaag

SEQ ID NO: 718830 - RNA, 19 nt, Human
gggagggaaagggcuaagg

SEQ ID NO: 718831 - RNA, 21 nt, Human
gggagggagggaggagguggg

SEQ ID NO: 718832 - RNA, 20 nt, Human
gggaugggggcgcucacagc

SEQ ID NO: 718833 - RNA, 18 nt, Human
gggcacaguuacuaaggc

SEQ ID NO: 718834 - RNA, 19 nt, Human
gggcaggguguggggacug

SEQ ID NO: 718835 - RNA, 20 nt, Human
gggccaggcaaagagccagc

SEQ ID NO: 718836 - RNA, 21 nt, Human
ggggaagugugggaguggcca

SEQ ID NO: 718837 - RNA, 21 nt, Human
ggggacaaaaccccagaguaa

SEQ ID NO: 718838 - RNA, 20 nt, Human
ggggccaggcaaagagccag

SEQ ID NO: 718839 - RNA, 19 nt, Human
gucaacccagggcaagccc

SEQ ID NO: 718840 - RNA, 22 nt, Human
gugggcagcaagaaagccagag

SEQ ID NO: 718841 - RNA, 20 nt, Human
guguuguuuuaaaccauuau

SEQ ID NO: 718842 - RNA, 21 nt, Human
guuuuuuuaaaaagaaaaaau

SEQ ID NO: 718843 - RNA, 29 nt, Human
uaaaauaaagcaaacccaaacugauugaa

SEQ ID NO: 718844 - RNA, 20 nt, Human
uaaaauacagaaauggcaaa

SEQ ID NO: 718845 - RNA, 19 nt, Human
uaacagccugccaccugcu

SEQ ID NO: 718846 - RNA, 22 nt, Human
uaaggcgacuggggccauuagg

SEQ ID NO: 718847 - RNA, 21 nt, Human
uaagggacaaagcccagaagc

SEQ ID NO: 718848 - RNA, 21 nt, Human
uaagguacugaaaauaaacug

SEQ ID NO: 718849 - RNA, 22 nt, Human
uacacagauacacagguggcag

SEQ ID NO: 718850 - RNA, 30 nt, Human
uaccaaaaaauauauauauaaaauaaagaa

SEQ ID NO: 718851 - RNA, 18 nt, Human
uagaauguacauugaaau

SEQ ID NO: 718852 - RNA, 19 nt, Human
uagcagcacauggcugaug

SEQ ID NO: 718853 - RNA, 18 nt, Human
ucaaaggaaacaggacag

SEQ ID NO: 718854 - RNA, 18 nt, Human
ucacccgggagccggcgg

SEQ ID NO: 718855 - RNA, 18 nt, Human
ucagaccaaacauaugcc

SEQ ID NO: 718856 - RNA, 18 nt, Human
ucagaccaaacauaugcc

SEQ ID NO: 718857 - RNA, 22 nt, Human
ucagcccuucccccagggggcc

SEQ ID NO: 718858 - RNA, 20 nt, Human
ucagcucaagugugccaaaa

SEQ ID NO: 718859 - RNA, 20 nt, Human
ucaggccauuaagguugggg

SEQ ID NO: 718860 - RNA, 18 nt, Human
uccacgccgccgcuugcg

SEQ ID NO: 718861 - RNA, 19 nt, Human
uccccuccgucaccacaaa

SEQ ID NO: 718862 - RNA, 20 nt, Human
uccgucaccacaaacccaga

SEQ ID NO: 718863 - RNA, 22 nt, Human
uccgucaccacaaacccagaaa

SEQ ID NO: 718864 - RNA, 18 nt, Human
uccugcacucacaggccc

SEQ ID NO: 718865 - RNA, 24 nt, Human
uccugccccaggccccugugggca

SEQ ID NO: 718866 - RNA, 21 nt, Human
ucuccaaccagcucccuaccu

SEQ ID NO: 718867 - RNA, 18 nt, Human
ucucuccuccuugcuugg

SEQ ID NO: 718868 - RNA, 18 nt, Human
ucugacagaugggaaggc

SEQ ID NO: 718869 - RNA, 21 nt, Human
ucugccacucuugacucaaga

SEQ ID NO: 718870 - RNA, 18 nt, Human
ucugcccaccucaggcca

SEQ ID NO: 718871 - RNA, 18 nt, Human
ucuguuuuggaggaagac

SEQ ID NO: 718872 - RNA, 22 nt, Human
ugaaacagugaaaaauaaaagc

SEQ ID NO: 718873 - RNA, 21 nt, Human
ugaaacgggaacacagcacau

SEQ ID NO: 718874 - RNA, 25 nt, Human
ugaauaaaccccaaacaaaaagugc

SEQ ID NO: 718875 - RNA, 23 nt, Human
ugaaugggaaagaaaauauuagc

SEQ ID NO: 718876 - RNA, 18 nt, Human
ugacaagaaggaggggag

SEQ ID NO: 718877 - RNA, 20 nt, Human
ugacaagaaggaggggagga

SEQ ID NO: 718878 - RNA, 20 nt, Human
ugacucaagagcucucacac

SEQ ID NO: 718879 - RNA, 21 nt, Human
ugaggaggauccucaggaccg

SEQ ID NO: 718880 - RNA, 24 nt, Human
ugaguaccauucugcaaaggauuc

SEQ ID NO: 718881 - RNA, 19 nt, Human
ugagucagcucaagugugc

SEQ ID NO: 718882 - RNA, 19 nt, Human
ugcaaagggcaguaggggc

SEQ ID NO: 718883 - RNA, 22 nt, Human
ugcaauguacaggauaccaaaa

SEQ ID NO: 718884 - RNA, 23 nt, Human
ugccccaggccccugugggcagc

SEQ ID NO: 718885 - RNA, 22 nt, Human
ugcuccacaccccucugcccac

SEQ ID NO: 718886 - RNA, 24 nt, Human
ugcuuugccccugcauccccuucu

SEQ ID NO: 718887 - RNA, 19 nt, Human
uggaggaagaagcugucac

SEQ ID NO: 718888 - RNA, 18 nt, Human
uggcagggaagggcagaa

SEQ ID NO: 718889 - RNA, 18 nt, Human
uggcagggaagggcagaa

SEQ ID NO: 718890 - RNA, 24 nt, Human
uggcuggaggggacccagaggcuu

SEQ ID NO: 718891 - RNA, 22 nt, Human
ugggaagugggccucaucaaag

SEQ ID NO: 718892 - RNA, 18 nt, Human
ugggacugggagggaaag

SEQ ID NO: 718893 - RNA, 18 nt, Human
ugggagggaaagggcuaa

SEQ ID NO: 718894 - RNA, 21 nt, Human
ugggagggaaagggcuaaggg

SEQ ID NO: 718895 - RNA, 18 nt, Human
ugggcagaggaagcgggc

SEQ ID NO: 718896 - RNA, 25 nt, Human
ugggggaggggaagugugggagugg

SEQ ID NO: 718897 - RNA, 18 nt, Human
ugucacugcuuucuguuu

SEQ ID NO: 718898 - RNA, 18 nt, Human
ugucucucagccaggccc

SEQ ID NO: 718899 - RNA, 22 nt, Human
uguggccgguuucuuccaccug

SEQ ID NO: 718900 - RNA, 22 nt, Human
ugugggcagaggaagcgggcgg

SEQ ID NO: 718901 - RNA, 23 nt, Human
uguuuuggaggaagacaagggca

SEQ ID NO: 718902 - RNA, 21 nt, Human
uuaagcugugaagccugcaug

SEQ ID NO: 718903 - RNA, 19 nt, Human
uuaauuauuuagaaaugca

SEQ ID NO: 718904 - RNA, 24 nt, Human
uuccuugaguuuccagcaaggugg

SEQ ID NO: 718905 - RNA, 18 nt, Human
uucuaggccacccacgcc

SEQ ID NO: 718906 - RNA, 18 nt, Human
uuucauucucuacgcaag

SEQ ID NO: 718907 - RNA, 22 nt, Human
uuugccccugcauccccuucua

SEQ ID NO: 718908 - RNA, 21 nt, Human
uuugggggugaggaguaagga

SEQ ID NO: 718909 - RNA, 19 nt, Human
uuuuucuuugggggugagg

SEQ ID NO: 718910 - RNA, 19 nt, Human
aaaaaaacaaaaggcaaac

SEQ ID NO: 718911 - RNA, 25 nt, Human
aaaaaaacaaaaggcaaacacaaau

SEQ ID NO: 718912 - RNA, 22 nt, Human
aaaaggcaaacacaaaucuaaa

SEQ ID NO: 718913 - RNA, 24 nt, Human
aaacaaaaggcaaacacaaaucua

SEQ ID NO: 718914 - RNA, 25 nt, Human
aaacaaaauguaguucuugccaaag

SEQ ID NO: 718915 - RNA, 21 nt, Human
aaaccagaaaucaaaaaaaaa

SEQ ID NO: 718916 - RNA, 18 nt, Human
aaagacauggauaaagcc

SEQ ID NO: 718917 - RNA, 22 nt, Human
aaagacauggauaaagcccaag

SEQ ID NO: 718918 - RNA, 19 nt, Human
aaagcccaagagagcccag

SEQ ID NO: 718919 - RNA, 24 nt, Human
aaagugcugggauuacaggcguga

SEQ ID NO: 718920 - RNA, 18 nt, Human
aacacuucuccaaaucca

SEQ ID NO: 718921 - RNA, 25 nt, Human
aaccagaaaucaaaaaaaaaagucc

SEQ ID NO: 718922 - RNA, 19 nt, Human
aacugguuuugaaaccccu

SEQ ID NO: 718923 - RNA, 23 nt, Human
aagacauggauaaagcccaagag

SEQ ID NO: 718924 - RNA, 22 nt, Human
aagaugaagagaggaaagagga

SEQ ID NO: 718925 - RNA, 19 nt, Human
aagugcugggauuacaggc

SEQ ID NO: 718926 - RNA, 19 nt, Human
aagugcugggauuacaggc

SEQ ID NO: 718927 - RNA, 26 nt, Human
aagugcugggauuacaggcgugagcu

SEQ ID NO: 718928 - RNA, 27 nt, Human
aauguccacucaucgucacugucagac

SEQ ID NO: 718929 - RNA, 22 nt, Human
acaaaucuaaagacauggauaa

SEQ ID NO: 718930 - RNA, 24 nt, Human
accauauauauguauacacacaca

SEQ ID NO: 718931 - RNA, 22 nt, Human
accgccacugccgccgccgccg

SEQ ID NO: 718932 - RNA, 24 nt, Human
accguguuagucagauuggucuug

SEQ ID NO: 718933 - RNA, 20 nt, Human
acgcggccuuuccgcuucuu

SEQ ID NO: 718934 - RNA, 18 nt, Human
acucugucacccagacug

SEQ ID NO: 718935 - RNA, 25 nt, Human
acucugucacccagacuggagugca

SEQ ID NO: 718936 - RNA, 25 nt, Human
acugccgccgccgccgccgcugcuc

SEQ ID NO: 718937 - RNA, 19 nt, Human
acuggagugcaguggcacg

SEQ ID NO: 718938 - RNA, 19 nt, Human
agagaugggguuucaccgu

SEQ ID NO: 718939 - RNA, 22 nt, Human
agaggaaagaggaucgcaggug

SEQ ID NO: 718940 - RNA, 19 nt, Human
agcugaaaaaaaucugaaa

SEQ ID NO: 718941 - RNA, 19 nt, Human
aggaaguacaaagcagagc

SEQ ID NO: 718942 - RNA, 20 nt, Human
aggcacgcaccaccaugccc

SEQ ID NO: 718943 - RNA, 21 nt, Human
agggauucuccugucucagcc

SEQ ID NO: 718944 - RNA, 19 nt, Human
agggggcuaaacuggggag

SEQ ID NO: 718945 - RNA, 24 nt, Human
aggugauccacccgccuaggccuc

SEQ ID NO: 718946 - RNA, 18 nt, Human
aguagcugggauuacagg

SEQ ID NO: 718947 - RNA, 23 nt, Human
aguagcugggauuacaggcacgc

SEQ ID NO: 718948 - RNA, 20 nt, Human
agugcaguggcacgaucuug

SEQ ID NO: 718949 - RNA, 23 nt, Human
agugcaguggcacgaucuuggcu

SEQ ID NO: 718950 - RNA, 24 nt, Human
agugcaguggcacgaucuuggcuc

SEQ ID NO: 718951 - RNA, 18 nt, Human
agugcugggauuacaggc

SEQ ID NO: 718952 - RNA, 24 nt, Human
aguuuuguaguuuuaguagagaug

SEQ ID NO: 718953 - RNA, 21 nt, Human
auggggcaugcagggucagaa

SEQ ID NO: 718954 - RNA, 20 nt, Human
augggguuucaccguguuag

SEQ ID NO: 718955 - RNA, 24 nt, Human
augggguuucaccguguuagucag

SEQ ID NO: 718956 - RNA, 26 nt, Human
augggguuucaccguguuagucagau

SEQ ID NO: 718957 - RNA, 20 nt, Human
auuuuucuggcuuuuccuuu

SEQ ID NO: 718958 - RNA, 21 nt, Human
caaagcagcaaaacagaauca

SEQ ID NO: 718959 - RNA, 24 nt, Human
caaagugcugggauuacaggcgug

SEQ ID NO: 718960 - RNA, 19 nt, Human
caacacuucuccaaaucca

SEQ ID NO: 718961 - RNA, 21 nt, Human
caacacuucuccaaauccaaa

SEQ ID NO: 718962 - RNA, 21 nt, Human
caagcagucaguuuaucucuu

SEQ ID NO: 718963 - RNA, 22 nt, Human
caagggauucuccugucucagc

SEQ ID NO: 718964 - RNA, 26 nt, Human
cacacaaaggcgaccgcgcaugcgcg

SEQ ID NO: 718965 - RNA, 20 nt, Human
cacacacacaaaacugcacc

SEQ ID NO: 718966 - RNA, 24 nt, Human
cacagcuaccacaaagcuguguua

SEQ ID NO: 718967 - RNA, 21 nt, Human
caccacaaccuccgccuccca

SEQ ID NO: 718968 - RNA, 22 nt, Human
caccacaaccuccgccucccag

SEQ ID NO: 718969 - RNA, 23 nt, Human
caccacuccuuugcccaagugaa

SEQ ID NO: 718970 - RNA, 23 nt, Human
cacccgccuaggccucccaaagu

SEQ ID NO: 718971 - RNA, 24 nt, Human
caccguguuagucagauuggucuu

SEQ ID NO: 718972 - RNA, 22 nt, Human
cacucugucacccagacuggag

SEQ ID NO: 718973 - RNA, 23 nt, Human
cacucugucacccagacuggagu

SEQ ID NO: 718974 - RNA, 18 nt, Human
cacuggguggggcccugg

SEQ ID NO: 718975 - RNA, 23 nt, Human
cacuuggagcuuuacaccugaga

SEQ ID NO: 718976 - RNA, 19 nt, Human
cagcagucaggccuguuua

SEQ ID NO: 718977 - RNA, 22 nt, Human
cagcccaaagaggcuaaaucaa

SEQ ID NO: 718978 - RNA, 19 nt, Human
caggugcccaauccccgcu

SEQ ID NO: 718979 - RNA, 19 nt, Human
cagguucaagggauucucc

SEQ ID NO: 718980 - RNA, 19 nt, Human
caguggcacgaucuuggcu

SEQ ID NO: 718981 - RNA, 21 nt, Human
caucaccacuccuuugcccaa

SEQ ID NO: 718982 - RNA, 22 nt, Human
ccaaagcagcaaaacagaauca

SEQ ID NO: 718983 - RNA, 20 nt, Human
ccaaagugcugggauuacag

SEQ ID NO: 718984 - RNA, 22 nt, Human
ccaaagugcugggauuacaggc

SEQ ID NO: 718985 - RNA, 22 nt, Human
ccaaagugcugggauuacaggc

SEQ ID NO: 718986 - RNA, 24 nt, Human
ccaaagugcugggauuacaggcgu

SEQ ID NO: 718987 - RNA, 21 nt, Human
ccaaauccaaaugauacuaaa

SEQ ID NO: 718988 - RNA, 19 nt, Human
ccaagagagcccaggccca

SEQ ID NO: 718989 - RNA, 23 nt, Human
ccacaaccuccgccucccagguu

SEQ ID NO: 718990 - RNA, 24 nt, Human
ccacaaccuccgccucccagguuc

SEQ ID NO: 718991 - RNA, 19 nt, Human
ccacacacuuacacacaca

SEQ ID NO: 718992 - RNA, 23 nt, Human
ccacugccgccgccgccgccgcu

SEQ ID NO: 718993 - RNA, 24 nt, Human
ccacugccgccgccgccgccgcug

SEQ ID NO: 718994 - RNA, 22 nt, Human
ccagcuccaugguaauacugaa

SEQ ID NO: 718995 - RNA, 22 nt, Human
ccaggcccacacuggguggggc

SEQ ID NO: 718996 - RNA, 24 nt, Human
ccagggacaagagcuccugaucca

SEQ ID NO: 718997 - RNA, 23 nt, Human
ccaugggaagagcaagacauuca

SEQ ID NO: 718998 - RNA, 19 nt, Human
cccaauccccgcuccccca

SEQ ID NO: 718999 - RNA, 19 nt, Human
cccacacaaaggcgaccgc

SEQ ID NO: 719000 - RNA, 20 nt, Human
cccagcagcuccaggacucu

SEQ ID NO: 719001 - RNA, 24 nt, Human
ccccgaguagcugggauuacaggc

SEQ ID NO: 719002 - RNA, 22 nt, Human
ccccgcuccccccacaagguca

SEQ ID NO: 719003 - RNA, 23 nt, Human
cccgaguagcugggauuacaggc

SEQ ID NO: 719004 - RNA, 24 nt, Human
cccgaguagcugggauuacaggca

SEQ ID NO: 719005 - RNA, 19 nt, Human
cccggacuccccucuugcc

SEQ ID NO: 719006 - RNA, 23 nt, Human
ccgaguagcugggauuacaggca

SEQ ID NO: 719007 - RNA, 23 nt, Human
ccgccgccgccgccgcugcucga

SEQ ID NO: 719008 - RNA, 20 nt, Human
ccgcgcaugcgcgcuccgcu

SEQ ID NO: 719009 - RNA, 24 nt, Human
ccucccagguucaagggauucucc

SEQ ID NO: 719010 - RNA, 18 nt, Human
ccucccugguaccuggcc

SEQ ID NO: 719011 - RNA, 22 nt, Human
ccugaccucaggugauccaccc

SEQ ID NO: 719012 - RNA, 23 nt, Human
ccugaccucaggugauccacccg

SEQ ID NO: 719013 - RNA, 22 nt, Human
cgcccggacuccccucuugccc

SEQ ID NO: 719014 - RNA, 21 nt, Human
cgccgccgccgccgcugcucg

SEQ ID NO: 719015 - RNA, 25 nt, Human
cgcgguuaaaaaaacaaaaggcaaa

SEQ ID NO: 719016 - RNA, 18 nt, Human
cuaaacccagaaguuacc

SEQ ID NO: 719017 - RNA, 25 nt, Human
cuacagcagucaggccuguuuagua

SEQ ID NO: 719018 - RNA, 21 nt, Human
cuaggccucccaaagugcugg

SEQ ID NO: 719019 - RNA, 24 nt, Human
cucaccacaaccuccgccucccag

SEQ ID NO: 719020 - RNA, 24 nt, Human
cucagccccccgaguagcugggau

SEQ ID NO: 719021 - RNA, 22 nt, Human
cuccaaaguugggaaaggaugg

SEQ ID NO: 719022 - RNA, 23 nt, Human
cuccagcccaaagaggcuaaauc

SEQ ID NO: 719023 - RNA, 22 nt, Human
cuccugucucagccccccgagu

SEQ ID NO: 719024 - RNA, 22 nt, Human
cucgucgcugccgcuguccucu

SEQ ID NO: 719025 - RNA, 23 nt, Human
cugaaaaaaaucugaaacagcua

SEQ ID NO: 719026 - RNA, 23 nt, Human
cugcacaauauauaugcugacca

SEQ ID NO: 719027 - RNA, 19 nt, Human
cugccaggacacagccugc

SEQ ID NO: 719028 - RNA, 24 nt, Human
cugcuggcuucgcccuagcugcac

SEQ ID NO: 719029 - RNA, 20 nt, Human
cugguuuugaaaccccuucu

SEQ ID NO: 719030 - RNA, 19 nt, Human
cuguacccaugggaagagc

SEQ ID NO: 719031 - RNA, 20 nt, Human
cuguagaggagaccgccugg

SEQ ID NO: 719032 - RNA, 24 nt, Human
cuguccucuguguccgagucgauc

SEQ ID NO: 719033 - RNA, 23 nt, Human
cugucucagccccccgaguagcu

SEQ ID NO: 719034 - RNA, 26 nt, Human
cuuacacacacacacauacacacucu

SEQ ID NO: 719035 - RNA, 24 nt, Human
cuucuuauuuuuauugcucccaaa

SEQ ID NO: 719036 - RNA, 23 nt, Human
cuugcccgccugccagugggacc

SEQ ID NO: 719037 - RNA, 22 nt, Human
cuuggagcuuuacaccugagag

SEQ ID NO: 719038 - RNA, 18 nt, Human
gaaaggaugggaagagua

SEQ ID NO: 719039 - RNA, 22 nt, Human
gaccucaggugauccacccgcc

SEQ ID NO: 719040 - RNA, 21 nt, Human
gagaaagaugaagagaggaaa

SEQ ID NO: 719041 - RNA, 24 nt, Human
gagaugggguuucaccguguuagu

SEQ ID NO: 719042 - RNA, 24 nt, Human
gauuacaggcacgcaccaccaugc

SEQ ID NO: 719043 - RNA, 18 nt, Human
gauuacaggcgugagcua

SEQ ID NO: 719044 - RNA, 19 nt, Human
gauuacaggcgugagcuac

SEQ ID NO: 719045 - RNA, 23 nt, Human
gauuacaggcgugagcuacugca

SEQ ID NO: 719046 - RNA, 25 nt, Human
gauucccagcuccaugguaauacug

SEQ ID NO: 719047 - RNA, 24 nt, Human
gauuggucuugaacuccugaccuc

SEQ ID NO: 719048 - RNA, 18 nt, Human
gcaaaacagaaucaccag

SEQ ID NO: 719049 - RNA, 20 nt, Human
gcaccaccaugcccggcuaa

SEQ ID NO: 719050 - RNA, 21 nt, Human
gccagggacaagagcuccuga

SEQ ID NO: 719051 - RNA, 22 nt, Human
gcccugggggaggggaggcugg

SEQ ID NO: 719052 - RNA, 20 nt, Human
gccgccgccgccgccgcugc

SEQ ID NO: 719053 - RNA, 27 nt, Human
gcucucaaauuagacccccccccccca

SEQ ID NO: 719054 - RNA, 24 nt, Human
ggauaaagcccaagagagcccagg

SEQ ID NO: 719055 - RNA, 23 nt, Human
gggccaaggcagucuguagagga

SEQ ID NO: 719056 - RNA, 21 nt, Human
gggcccugggggaggggaggc

SEQ ID NO: 719057 - RNA, 19 nt, Human
ggggaggggaggcuggugg

SEQ ID NO: 719058 - RNA, 22 nt, Human
gggguuucaccguguuagucag

SEQ ID NO: 719059 - RNA, 18 nt, Human
ggguggggcccuggggga

SEQ ID NO: 719060 - RNA, 22 nt, Human
ggguggggcccugggggagggg

SEQ ID NO: 719061 - RNA, 19 nt, Human
ggucuugaacuccugaccu

SEQ ID NO: 719062 - RNA, 18 nt, Human
gguggucccccggcuccc

SEQ ID NO: 719063 - RNA, 21 nt, Human
guacccaugggaagagcaaga

SEQ ID NO: 719064 - RNA, 18 nt, Human
guagcugggauuacaggc

SEQ ID NO: 719065 - RNA, 24 nt, Human
gugauccacccgccuaggccuccc

SEQ ID NO: 719066 - RNA, 20 nt, Human
guucucgucgcugccgcugu

SEQ ID NO: 719067 - RNA, 26 nt, Human
guucucgucgcugccgcuguccucug

SEQ ID NO: 719068 - RNA, 23 nt, Human
uaaaaaaaugauaaaaaaaucca

SEQ ID NO: 719069 - RNA, 20 nt, Human
uaaaaccagaaaucaaaaaa

SEQ ID NO: 719070 - RNA, 24 nt, Human
uaaguuuuguaguuuuaguagaga

SEQ ID NO: 719071 - RNA, 18 nt, Human
uacaaucauaauacuccu

SEQ ID NO: 719072 - RNA, 22 nt, Human
uacacacacacacauacacagg

SEQ ID NO: 719073 - RNA, 22 nt, Human
uacacagccauaauguaaucaa

SEQ ID NO: 719074 - RNA, 20 nt, Human
uacacagcuacagcagucag

SEQ ID NO: 719075 - RNA, 19 nt, Human
uacaggcgugagcuacugc

SEQ ID NO: 719076 - RNA, 18 nt, Human
uagaccccccccccccac

SEQ ID NO: 719077 - RNA, 19 nt, Human
uagaccccccccccccaca

SEQ ID NO: 719078 - RNA, 21 nt, Human
uaguagagaugggguuucacc

SEQ ID NO: 719079 - RNA, 24 nt, Human
uaguagagaugggguuucaccgug

SEQ ID NO: 719080 - RNA, 26 nt, Human
uaguagagaugggguuucaccguguu

SEQ ID NO: 719081 - RNA, 18 nt, Human
uagucagauuggucuuga

SEQ ID NO: 719082 - RNA, 24 nt, Human
uagucagauuggucuugaacuccu

SEQ ID NO: 719083 - RNA, 31 nt, Human
uauguauacacacacacaaaacugcacaugg

SEQ ID NO: 719084 - RNA, 27 nt, Human
uauuacacagccauaauguaaucaaca

SEQ ID NO: 719085 - RNA, 24 nt, Human
ucacauuuaaugaguuucuuucuu

SEQ ID NO: 719086 - RNA, 24 nt, Human
ucaccacaaccuccgccucccagg

SEQ ID NO: 719087 - RNA, 25 nt, Human
ucaccacaaccuccgccucccaggu

SEQ ID NO: 719088 - RNA, 27 nt, Human
ucaccacaaccuccgccucccagguuc

SEQ ID NO: 719089 - RNA, 24 nt, Human
ucaccguguuagucagauuggucu

SEQ ID NO: 719090 - RNA, 20 nt, Human
ucacugcgcuuucgcuuugc

SEQ ID NO: 719091 - RNA, 22 nt, Human
uccacacacuuacacacacaca

SEQ ID NO: 719092 - RNA, 24 nt, Human
uccacacacuuacacacacacaca

SEQ ID NO: 719093 - RNA, 24 nt, Human
ucccaaagugcugggauuacaggc

SEQ ID NO: 719094 - RNA, 21 nt, Human
ucccagguucaagggauucuc

SEQ ID NO: 719095 - RNA, 24 nt, Human
ucccagguucaagggauucuccug

SEQ ID NO: 719096 - RNA, 22 nt, Human
uccccgcuccccccacaagguc

SEQ ID NO: 719097 - RNA, 25 nt, Human
ucccugguaccuggccaugggcuuc

SEQ ID NO: 719098 - RNA, 20 nt, Human
uccuuguacgaaagcagggu

SEQ ID NO: 719099 - RNA, 22 nt, Human
ucgaucacgacgcggccuuucc

SEQ ID NO: 719100 - RNA, 21 nt, Human
ucgcaggugcccaauccccgc

SEQ ID NO: 719101 - RNA, 22 nt, Human
ucgcuuugccagggacaagagc

SEQ ID NO: 719102 - RNA, 22 nt, Human
ucuaaagacauggauaaagccc

SEQ ID NO: 719103 - RNA, 24 nt, Human
ucucacucugucacccagacugga

SEQ ID NO: 719104 - RNA, 26 nt, Human
ucucacucugucacccagacuggagu

SEQ ID NO: 719105 - RNA, 27 nt, Human
ucucacucugucacccagacuggagug

SEQ ID NO: 719106 - RNA, 19 nt, Human
ucuccacauucauauucag

SEQ ID NO: 719107 - RNA, 21 nt, Human
ucuccgagucugacgaggcug

SEQ ID NO: 719108 - RNA, 24 nt, Human
ucugucacccagacuggagugcag

SEQ ID NO: 719109 - RNA, 23 nt, Human
ucuugaacuccugaccucaggug

SEQ ID NO: 719110 - RNA, 20 nt, Human
ucuugguauauauagucagc

SEQ ID NO: 719111 - RNA, 22 nt, Human
ugaaaaaaaucugaaacagcua

SEQ ID NO: 719112 - RNA, 23 nt, Human
ugaaagauuuguuaaaugccacu

SEQ ID NO: 719113 - RNA, 21 nt, Human
ugaccucaggugauccacccg

SEQ ID NO: 719114 - RNA, 24 nt, Human
ugaccucaggugauccacccgccu

SEQ ID NO: 719115 - RNA, 27 nt, Human
ugacucacaggcggcuccuucuccucu

SEQ ID NO: 719116 - RNA, 25 nt, Human
ugacuccagcgaauuaucuggauuc

SEQ ID NO: 719117 - RNA, 22 nt, Human
ugaggcggagucucacucuguc

SEQ ID NO: 719118 - RNA, 20 nt, Human
ugauaaaaaaauccacacac

SEQ ID NO: 719119 - RNA, 24 nt, Human
ugcaggucagggggcuaaacuggg

SEQ ID NO: 719120 - RNA, 22 nt, Human
ugcaguggcacgaucuuggcuc

SEQ ID NO: 719121 - RNA, 19 nt, Human
ugccaggacacagccugca

SEQ ID NO: 719122 - RNA, 18 nt, Human
ugccccaggggcuccagc

SEQ ID NO: 719123 - RNA, 21 nt, Human
ugccgaauguucaaugggugg

SEQ ID NO: 719124 - RNA, 22 nt, Human
ugcucaaguacagcugaaaaaa

SEQ ID NO: 719125 - RNA, 24 nt, Human
ugcugaccauauauauguauacac

SEQ ID NO: 719126 - RNA, 22 nt, Human
ugcuggcuucgcccuagcugca

SEQ ID NO: 719127 - RNA, 23 nt, Human
ugcuggcuucgcccuagcugcac

SEQ ID NO: 719128 - RNA, 20 nt, Human
ugcugggauuacaggcguga

SEQ ID NO: 719129 - RNA, 23 nt, Human
uggagugcaguggcacgaucuug

SEQ ID NO: 719130 - RNA, 24 nt, Human
uggagugcaguggcacgaucuugg

SEQ ID NO: 719131 - RNA, 21 nt, Human
uggauaaagcccaagagagcc

SEQ ID NO: 719132 - RNA, 24 nt, Human
uggcacgaucuuggcucaccacaa

SEQ ID NO: 719133 - RNA, 24 nt, Human
ugggaagagcaagacauucacugc

SEQ ID NO: 719134 - RNA, 25 nt, Human
ugggaagagcaagacauucacugcc

SEQ ID NO: 719135 - RNA, 22 nt, Human
ugggaauggggaaguuacacag

SEQ ID NO: 719136 - RNA, 21 nt, Human
ugggauuacaggcacgcacca

SEQ ID NO: 719137 - RNA, 24 nt, Human
ugggauuacaggcacgcaccacca

SEQ ID NO: 719138 - RNA, 18 nt, Human
ugggauuacaggcgugag

SEQ ID NO: 719139 - RNA, 19 nt, Human
ugggauuacaggcgugagc

SEQ ID NO: 719140 - RNA, 22 nt, Human
ugggauuacaggcgugagcuac

SEQ ID NO: 719141 - RNA, 22 nt, Human
ugggauuacaggcgugagcuac

SEQ ID NO: 719142 - RNA, 24 nt, Human
ugggauuacaggcgugagcuacug

SEQ ID NO: 719143 - RNA, 24 nt, Human
ugggauuacaggcgugagcuacug

SEQ ID NO: 719144 - RNA, 25 nt, Human
ugggauuacaggcgugagcuacugc

SEQ ID NO: 719145 - RNA, 21 nt, Human
uggggcccugggggaggggag

SEQ ID NO: 719146 - RNA, 20 nt, Human
ugggggaggggaggcuggug

SEQ ID NO: 719147 - RNA, 19 nt, Human
ugggguuucaccguguuag

SEQ ID NO: 719148 - RNA, 18 nt, Human
ugguaccuggccaugggc

SEQ ID NO: 719149 - RNA, 20 nt, Human
uggugggagauggugugcag

SEQ ID NO: 719150 - RNA, 20 nt, Human
uguagaggagaccgccuggu

SEQ ID NO: 719151 - RNA, 27 nt, Human
uguauacacacacacaaaacugcacag

SEQ ID NO: 719152 - RNA, 24 nt, Human
ugucucagccccccgaguagcugg

SEQ ID NO: 719153 - RNA, 21 nt, Human
uguuugcucuccacauucaua

SEQ ID NO: 719154 - RNA, 20 nt, Human
uuaaaaaaacaaaaggcaaa

SEQ ID NO: 719155 - RNA, 22 nt, Human
uuaaaaccagaaaucaaaaaaa

SEQ ID NO: 719156 - RNA, 24 nt, Human
uuaaauacaacuuacaaguccaug

SEQ ID NO: 719157 - RNA, 21 nt, Human
uuacacuuggagcuuuacacc

SEQ ID NO: 719158 - RNA, 21 nt, Human
uuaccaaguucauuuuuaugu

SEQ ID NO: 719159 - RNA, 18 nt, Human
uuaguagagaugggguuu

SEQ ID NO: 719160 - RNA, 22 nt, Human
uuaguagagaugggguuucacc

SEQ ID NO: 719161 - RNA, 24 nt, Human
uuaguagagaugggguuucaccgu

SEQ ID NO: 719162 - RNA, 21 nt, Human
uuuagauuagucucucgugga

SEQ ID NO: 719163 - RNA, 23 nt, Human
uuuuaguagagaugggguuucac

SEQ ID NO: 719164 - RNA, 18 nt, Human
uuuuguaguuuuaguaga

SEQ ID NO: 719165 - RNA, 19 nt, Human
uuuuguaguuuuaguagag

SEQ ID NO: 719166 - RNA, 24 nt, Human
aaacaggaucuacucaccagcaac

SEQ ID NO: 719167 - RNA, 19 nt, Human
aacagagcccuccaacucg

SEQ ID NO: 719168 - RNA, 22 nt, Human
aacaggcgagugugaagccaaa

SEQ ID NO: 719169 - RNA, 24 nt, Human
aaccgcgcgcccacacucagcccc

SEQ ID NO: 719170 - RNA, 18 nt, Human
aacuccaagaccuuccuc

SEQ ID NO: 719171 - RNA, 24 nt, Human
aacucgccccuuccagcugaggug

SEQ ID NO: 719172 - RNA, 22 nt, Human
aagaacacagcaucccugccuc

SEQ ID NO: 719173 - RNA, 19 nt, Human
aaggccucuucggggccuc

SEQ ID NO: 719174 - RNA, 18 nt, Human
aaguguagccucccaggc

SEQ ID NO: 719175 - RNA, 18 nt, Human
acacagguggcuaaguac

SEQ ID NO: 719176 - RNA, 22 nt, Human
acaccuaagccucccgaauaca

SEQ ID NO: 719177 - RNA, 22 nt, Human
acacugccccaggcggaaggcc

SEQ ID NO: 719178 - RNA, 24 nt, Human
acaggaucuacucaccagcaacaa

SEQ ID NO: 719179 - RNA, 23 nt, Human
acaggcgagugugaagccaaagg

SEQ ID NO: 719180 - RNA, 23 nt, Human
accuaagccucccgaauacauca

SEQ ID NO: 719181 - RNA, 18 nt, Human
acuagauuagacccagga

SEQ ID NO: 719182 - RNA, 22 nt, Human
acucaucgcgguccucuccggg

SEQ ID NO: 719183 - RNA, 22 nt, Human
agaauugcacaccuaagccucc

SEQ ID NO: 719184 - RNA, 21 nt, Human
agagcccuccaacucgcccuu

SEQ ID NO: 719185 - RNA, 22 nt, Human
agcaaacaauaaaaccuuccug

SEQ ID NO: 719186 - RNA, 19 nt, Human
aggaucuacucaccagcaa

SEQ ID NO: 719187 - RNA, 22 nt, Human
aggcugaauaugcagcuuguca

SEQ ID NO: 719188 - RNA, 21 nt, Human
aggggggcaugaacugugucu

SEQ ID NO: 719189 - RNA, 21 nt, Human
agggucaaaaauucaaaaacu

SEQ ID NO: 719190 - RNA, 21 nt, Human
auaaaacaaggcugucccccu

SEQ ID NO: 719191 - RNA, 23 nt, Human
auauacagcacuucccugugacu

SEQ ID NO: 719192 - RNA, 18 nt, Human
caaagcaacacagguggc

SEQ ID NO: 719193 - RNA, 23 nt, Human
caaagccaauaaauaaaaugggu

SEQ ID NO: 719194 - RNA, 24 nt, Human
caaagccaauaaauaaaaugggug

SEQ ID NO: 719195 - RNA, 23 nt, Human
caagcagccucaugacaucuucc

SEQ ID NO: 719196 - RNA, 22 nt, Human
caaucccaacaucacaaaagga

SEQ ID NO: 719197 - RNA, 18 nt, Human
cacacucagccccgaccu

SEQ ID NO: 719198 - RNA, 19 nt, Human
cacaguuuuuuuccuguuc

SEQ ID NO: 719199 - RNA, 23 nt, Human
caccccauugccuucucaucagu

SEQ ID NO: 719200 - RNA, 24 nt, Human
caccccauugccuucucaucaguc

SEQ ID NO: 719201 - RNA, 19 nt, Human
cacugaaggagcuuaaugg

SEQ ID NO: 719202 - RNA, 22 nt, Human
cagaaagaacacagcaucccug

SEQ ID NO: 719203 - RNA, 22 nt, Human
cagagcccuccaacucgccccu

SEQ ID NO: 719204 - RNA, 24 nt, Human
cagcaacacaugagcaagaaguuc

SEQ ID NO: 719205 - RNA, 20 nt, Human
caggauucuggcaaacaauc

SEQ ID NO: 719206 - RNA, 23 nt, Human
caugcaacugggacacacagacc

SEQ ID NO: 719207 - RNA, 18 nt, Human
ccaggcaagcagccucau

SEQ ID NO: 719208 - RNA, 21 nt, Human
cccaacaucacaaaaggaaca

SEQ ID NO: 719209 - RNA, 23 nt, Human
cccacacucagccccgaccugaa

SEQ ID NO: 719210 - RNA, 24 nt, Human
ccccauugccuucucaucagucua

SEQ ID NO: 719211 - RNA, 19 nt, Human
cccucaaaguccuacaggc

SEQ ID NO: 719212 - RNA, 20 nt, Human
cccuccuucuucuucuggaa

SEQ ID NO: 719213 - RNA, 23 nt, Human
ccgccguaaaccugggcgacugc

SEQ ID NO: 719214 - RNA, 18 nt, Human
ccgcgcgcccacacucag

SEQ ID NO: 719215 - RNA, 21 nt, Human
ccuuccagcugagguguggcu

SEQ ID NO: 719216 - RNA, 22 nt, Human
ccuugaaaaauuuucuucccuc

SEQ ID NO: 719217 - RNA, 22 nt, Human
cgagaauaggaucuuagcccuc

SEQ ID NO: 719218 - RNA, 21 nt, Human
cggacacuuacacacgcagcg

SEQ ID NO: 719219 - RNA, 20 nt, Human
cuagagcuugugugcuggug

SEQ ID NO: 719220 - RNA, 21 nt, Human
cuccagcaauucccaguugcc

SEQ ID NO: 719221 - RNA, 21 nt, Human
cuccgcagccgggccugugug

SEQ ID NO: 719222 - RNA, 24 nt, Human
cuccuuggaaaaacugaggcugaa

SEQ ID NO: 719223 - RNA, 25 nt, Human
cucuagggcaggggguugggagccc

SEQ ID NO: 719224 - RNA, 21 nt, Human
cugcuacaaauggagcagaag

SEQ ID NO: 719225 - RNA, 19 nt, Human
cuuccugacuggucucugg

SEQ ID NO: 719226 - RNA, 23 nt, Human
cuucggggccucggggcgggcgc

SEQ ID NO: 719227 - RNA, 24 nt, Human
cuugaaaaauuuucuucccuccuu

SEQ ID NO: 719228 - RNA, 21 nt, Human
gaaccugcuagccaaacuugg

SEQ ID NO: 719229 - RNA, 21 nt, Human
gagcccuccaacucgccccuu

SEQ ID NO: 719230 - RNA, 19 nt, Human
gagcuugugugcuggugga

SEQ ID NO: 719231 - RNA, 22 nt, Human
gcaacaaucccaacaucacaaa

SEQ ID NO: 719232 - RNA, 22 nt, Human
gcagcagauucaaagcaacaca

SEQ ID NO: 719233 - RNA, 24 nt, Human
gcagcagauucaaagcaacacagg

SEQ ID NO: 719234 - RNA, 18 nt, Human
gcagcggccggcgaagac

SEQ ID NO: 719235 - RNA, 20 nt, Human
gcccacacucagccccgacc

SEQ ID NO: 719236 - RNA, 20 nt, Human
gcccuggggcccacggacac

SEQ ID NO: 719237 - RNA, 18 nt, Human
gccgccguaaaccugggc

SEQ ID NO: 719238 - RNA, 24 nt, Human
gccguaaaccugggcgaccggcgc

SEQ ID NO: 719239 - RNA, 21 nt, Human
gccguaaaccugggcgacugc

SEQ ID NO: 719240 - RNA, 19 nt, Human
gcugagguguggcuuugga

SEQ ID NO: 719241 - RNA, 20 nt, Human
ggaauuuauuuuccauuuag

SEQ ID NO: 719242 - RNA, 20 nt, Human
ggaggauggcaaaaggagaa

SEQ ID NO: 719243 - RNA, 19 nt, Human
ggcaggggguugggagcaa

SEQ ID NO: 719244 - RNA, 21 nt, Human
gggcaggggguugggagcaaa

SEQ ID NO: 719245 - RNA, 24 nt, Human
guagucuuauuucaaauaucaaaa

SEQ ID NO: 719246 - RNA, 21 nt, Human
guccucuccgggagccucggc

SEQ ID NO: 719247 - RNA, 21 nt, Human
gugcacagggccaggauucug

SEQ ID NO: 719248 - RNA, 20 nt, Human
guggcuaaguacacaugagg

SEQ ID NO: 719249 - RNA, 19 nt, Human
uaacuccaagaccuuccuc

SEQ ID NO: 719250 - RNA, 23 nt, Human
uaagcacaugugugcacagggcc

SEQ ID NO: 719251 - RNA, 23 nt, Human
uagccucccaggcaagcagccuc

SEQ ID NO: 719252 - RNA, 25 nt, Human
uaguaagaaaagggaaaguagucuu

SEQ ID NO: 719253 - RNA, 24 nt, Human
uaugugaugaaaaaguauagcuuu

SEQ ID NO: 719254 - RNA, 19 nt, Human
ucaaagcaacacagguggc

SEQ ID NO: 719255 - RNA, 20 nt, Human
ucaaagucuagggcuggaga

SEQ ID NO: 719256 - RNA, 19 nt, Human
ucagcacaggcccaauucu

SEQ ID NO: 719257 - RNA, 18 nt, Human
uccaggcccucaaagucc

SEQ ID NO: 719258 - RNA, 22 nt, Human
uccauucuccuuggaaaaacug

SEQ ID NO: 719259 - RNA, 18 nt, Human
ucuaauacauuggcugga

SEQ ID NO: 719260 - RNA, 21 nt, Human
ucuccagcaauucccaguugc

SEQ ID NO: 719261 - RNA, 23 nt, Human
ucuuccacaaaccacuuuaauug

SEQ ID NO: 719262 - RNA, 23 nt, Human
ucuucccugccuuuuaucacccu

SEQ ID NO: 719263 - RNA, 22 nt, Human
ugaagccaaagggcucccagug

SEQ ID NO: 719264 - RNA, 18 nt, Human
ugagaagguuguuuucuc

SEQ ID NO: 719265 - RNA, 18 nt, Human
ugaggggaagguaugggg

SEQ ID NO: 719266 - RNA, 21 nt, Human
ugcagucugacaaaagaccuu

SEQ ID NO: 719267 - RNA, 22 nt, Human
ugccuuugggcaagaauugcac

SEQ ID NO: 719268 - RNA, 21 nt, Human
ugcuaguccuacucuuugugc

SEQ ID NO: 719269 - RNA, 20 nt, Human
ugcucaucgagaauaggauc

SEQ ID NO: 719270 - RNA, 20 nt, Human
ugcuucaagaacuuuggagc

SEQ ID NO: 719271 - RNA, 19 nt, Human
uggagccauaaagucacug

SEQ ID NO: 719272 - RNA, 23 nt, Human
uggcaauauccauuauuucccuc

SEQ ID NO: 719273 - RNA, 24 nt, Human
uggcauaaaacaaggcuguccccc

SEQ ID NO: 719274 - RNA, 22 nt, Human
uggcuggacuccugcagguacu

SEQ ID NO: 719275 - RNA, 27 nt, Human
uggcuuuggaggaaaacucuguggccc

SEQ ID NO: 719276 - RNA, 23 nt, Human
ugggaaacuagauuagacccagg

SEQ ID NO: 719277 - RNA, 28 nt, Human
ugggaguaucuuuuccagcuaccugugg

SEQ ID NO: 719278 - RNA, 23 nt, Human
uggggagagaaaaguggcauaaa

SEQ ID NO: 719279 - RNA, 23 nt, Human
ugggugcuguucagggaaccggg

SEQ ID NO: 719280 - RNA, 23 nt, Human
ugucugauguacugauuuuguga

SEQ ID NO: 719281 - RNA, 19 nt, Human
uguugggaaacagcaacac

SEQ ID NO: 719282 - RNA, 24 nt, Human
uuaaaggacugauuauaaccguaa

SEQ ID NO: 719283 - RNA, 21 nt, Human
uucuggcaaacaaucucaggg

SEQ ID NO: 719284 - RNA, 21 nt, Human
uucuuccacaaaccacuuuaa

SEQ ID NO: 719285 - RNA, 24 nt, Human
uugaaaaauuuucuucccuccuuc

SEQ ID NO: 719286 - RNA, 21 nt, Human
uuggcagucagcuuugaaguc

SEQ ID NO: 719287 - RNA, 26 nt, Human
uuuggcagucagcuuugaagucuucu

SEQ ID NO: 719288 - RNA, 21 nt, Human
uuuuaucacccugucagcugg

SEQ ID NO: 719289 - RNA, 21 nt, Human
uuuugugccacauuugagcca

SEQ ID NO: 719290 - RNA, 23 nt, Human
aaaaaaaaaauccaagauuugaa

SEQ ID NO: 719291 - RNA, 24 nt, Human
aaaaaaaauccaaaccagaaauac

SEQ ID NO: 719292 - RNA, 24 nt, Human
aaaaauccaaaccagaaauacacc

SEQ ID NO: 719293 - RNA, 26 nt, Human
aaacaaagaaggaaaaaaaaauccaa

SEQ ID NO: 719294 - RNA, 21 nt, Human
aaagagaaucucuuagggaaa

SEQ ID NO: 719295 - RNA, 21 nt, Human
aacccacaaaaaaacucaucc

SEQ ID NO: 719296 - RNA, 22 nt, Human
aacccacaaaaaaacucauccc

SEQ ID NO: 719297 - RNA, 19 nt, Human
aaccucacugaagcucugg

SEQ ID NO: 719298 - RNA, 21 nt, Human
aagaaaaagcaacccacaaaa

SEQ ID NO: 719299 - RNA, 22 nt, Human
aagcaacccacaaaaaaacuca

SEQ ID NO: 719300 - RNA, 23 nt, Human
acaaaaaaacucaucccccacag

SEQ ID NO: 719301 - RNA, 21 nt, Human
acaauccgaccaaaaaaaggc

SEQ ID NO: 719302 - RNA, 24 nt, Human
acagacaaguggaugcuuggcuug

SEQ ID NO: 719303 - RNA, 21 nt, Human
acaggcccucccgccccccac

SEQ ID NO: 719304 - RNA, 20 nt, Human
acaguucacugcaagucucc

SEQ ID NO: 719305 - RNA, 19 nt, Human
acccuagcggccuuggcca

SEQ ID NO: 719306 - RNA, 21 nt, Human
acgcagccccaggauccagga

SEQ ID NO: 719307 - RNA, 21 nt, Human
acugcaagucucuucucuucu

SEQ ID NO: 719308 - RNA, 24 nt, Human
agaagagggaaagagaggucuggc

SEQ ID NO: 719309 - RNA, 18 nt, Human
agaccaaaaguagaaugg

SEQ ID NO: 719310 - RNA, 20 nt, Human
agagggcagggagagaaugc

SEQ ID NO: 719311 - RNA, 22 nt, Human
agagggcagggagagaaugccu

SEQ ID NO: 719312 - RNA, 18 nt, Human
agcaguaaagaccacggc

SEQ ID NO: 719313 - RNA, 18 nt, Human
agcggccuuggccauccc

SEQ ID NO: 719314 - RNA, 24 nt, Human
aggaaaaaaaaauccaaaccagaa

SEQ ID NO: 719315 - RNA, 21 nt, Human
aggaggcuggggagaagaggg

SEQ ID NO: 719316 - RNA, 18 nt, Human
aggauccaggaacacugu

SEQ ID NO: 719317 - RNA, 23 nt, Human
aggcauuuuuuuaauuaaaaaua

SEQ ID NO: 719318 - RNA, 24 nt, Human
aggcucggaaaccucacugaagcu

SEQ ID NO: 719319 - RNA, 24 nt, Human
aggggcagggccagggagguggau

SEQ ID NO: 719320 - RNA, 20 nt, Human
agugcaggggcagggccagg

SEQ ID NO: 719321 - RNA, 24 nt, Human
aguguuuuggguguccccaaaagg

SEQ ID NO: 719322 - RNA, 20 nt, Human
auccugagggguaaggaccc

SEQ ID NO: 719323 - RNA, 18 nt, Human
auggggcuggcuaaagaa

SEQ ID NO: 719324 - RNA, 18 nt, Human
caaaagacuccaauaucg

SEQ ID NO: 719325 - RNA, 20 nt, Human
caacagcccugaggaacuga

SEQ ID NO: 719326 - RNA, 23 nt, Human
caacccacaaaaaaacucauccc

SEQ ID NO: 719327 - RNA, 24 nt, Human
cacaagccugagugcaggggcagg

SEQ ID NO: 719328 - RNA, 26 nt, Human
cacgcagccccaggauccaggaacac

SEQ ID NO: 719329 - RNA, 20 nt, Human
cacugaagaaaaagcaaccc

SEQ ID NO: 719330 - RNA, 23 nt, Human
cacugcaagucucuucucuucuu

SEQ ID NO: 719331 - RNA, 20 nt, Human
cagcccuggaggaggcuggg

SEQ ID NO: 719332 - RNA, 21 nt, Human
cagcccuggaggaggcugggg

SEQ ID NO: 719333 - RNA, 24 nt, Human
cauucccccuaaaaagagaaucuc

SEQ ID NO: 719334 - RNA, 22 nt, Human
ccacaaaaaaacucauccccca

SEQ ID NO: 719335 - RNA, 22 nt, Human
ccacaaaaaaacucauccccca

SEQ ID NO: 719336 - RNA, 23 nt, Human
ccagaaauacaccugaauaaaca

SEQ ID NO: 719337 - RNA, 24 nt, Human
ccagcaaacuccggcugcucugaa

SEQ ID NO: 719338 - RNA, 23 nt, Human
ccauucccccuaaaaagagaauc

SEQ ID NO: 719339 - RNA, 21 nt, Human
cccccaguacuuccaggggau

SEQ ID NO: 719340 - RNA, 22 nt, Human
cccuuuucuccaacuugaugcu

SEQ ID NO: 719341 - RNA, 18 nt, Human
ccgagcuggagcugugcu

SEQ ID NO: 719342 - RNA, 26 nt, Human
ccgccccccacgcagccccaggaucc

SEQ ID NO: 719343 - RNA, 24 nt, Human
ccucccgccccccacgcagcccca

SEQ ID NO: 719344 - RNA, 18 nt, Human
ccuccgaaacggcgccuc

SEQ ID NO: 719345 - RNA, 18 nt, Human
ccuuccaucuuccuucuc

SEQ ID NO: 719346 - RNA, 20 nt, Human
cgaccaaaaaaaggcauaca

SEQ ID NO: 719347 - RNA, 21 nt, Human
cgcaagauuaucuacaggccc

SEQ ID NO: 719348 - RNA, 22 nt, Human
cgguggauuuauccauccugga

SEQ ID NO: 719349 - RNA, 20 nt, Human
cuccgaaacggcgccucccc

SEQ ID NO: 719350 - RNA, 19 nt, Human
cucuuagggaaaaaaaaaa

SEQ ID NO: 719351 - RNA, 20 nt, Human
cugaagaaaaagcaacccac

SEQ ID NO: 719352 - RNA, 18 nt, Human
cugaagcucuggcguguc

SEQ ID NO: 719353 - RNA, 19 nt, Human
cugcaagucucuucucuuc

SEQ ID NO: 719354 - RNA, 19 nt, Human
cuggcagaggcuggcuggc

SEQ ID NO: 719355 - RNA, 18 nt, Human
cuggcccccaguacuucc

SEQ ID NO: 719356 - RNA, 21 nt, Human
cuguccgagcuggagcugugc

SEQ ID NO: 719357 - RNA, 21 nt, Human
cuucuuguccauuccugggga

SEQ ID NO: 719358 - RNA, 22 nt, Human
gaaaaacgcaagauuaucuaca

SEQ ID NO: 719359 - RNA, 22 nt, Human
gaaaagcaguaaagaccacggc

SEQ ID NO: 719360 - RNA, 18 nt, Human
gaacaaaagacuccaaua

SEQ ID NO: 719361 - RNA, 23 nt, Human
gaacgacagaacuuaccuuccau

SEQ ID NO: 719362 - RNA, 22 nt, Human
gaagaaaaagcaacccacaaaa

SEQ ID NO: 719363 - RNA, 21 nt, Human
gaccaaaaaaaggcauacagg

SEQ ID NO: 719364 - RNA, 24 nt, Human
gaccaaaaaaaggcauacaggcau

SEQ ID NO: 719365 - RNA, 20 nt, Human
gacccuagcggccuuggcca

SEQ ID NO: 719366 - RNA, 22 nt, Human
gagagcgguaccuccugaggaa

SEQ ID NO: 719367 - RNA, 18 nt, Human
gaguaugaccccagaggc

SEQ ID NO: 719368 - RNA, 23 nt, Human
gaugcuugguggaugccgcuugg

SEQ ID NO: 719369 - RNA, 21 nt, Human
gcacaaaaacaguucacugca

SEQ ID NO: 719370 - RNA, 18 nt, Human
gcagcagccgaggucuuc

SEQ ID NO: 719371 - RNA, 19 nt, Human
gccccagguccaggguuuc

SEQ ID NO: 719372 - RNA, 22 nt, Human
gcccccaguacuuccaggggau

SEQ ID NO: 719373 - RNA, 23 nt, Human
gccugagugcaggggcagggcca

SEQ ID NO: 719374 - RNA, 20 nt, Human
gcucccggagucuccuucac

SEQ ID NO: 719375 - RNA, 19 nt, Human
gcuuugucguggccucagu

SEQ ID NO: 719376 - RNA, 19 nt, Human
ggagaggcucggaaaccuc

SEQ ID NO: 719377 - RNA, 21 nt, Human
ggaggagccaggccagccacg

SEQ ID NO: 719378 - RNA, 23 nt, Human
ggaggaggcuggggagaagaggg

SEQ ID NO: 719379 - RNA, 18 nt, Human
ggauuuauccauccugga

SEQ ID NO: 719380 - RNA, 19 nt, Human
ggcagcagccgaggucuuc

SEQ ID NO: 719381 - RNA, 20 nt, Human
ggcgaaggcagcagccgagg

SEQ ID NO: 719382 - RNA, 21 nt, Human
gggaaagagaggucuggcaga

SEQ ID NO: 719383 - RNA, 20 nt, Human
gggagguggauuucggggaa

SEQ ID NO: 719384 - RNA, 19 nt, Human
gggcagggagaggcucgga

SEQ ID NO: 719385 - RNA, 18 nt, Human
gggccccgcuccagcucc

SEQ ID NO: 719386 - RNA, 21 nt, Human
gggcggagaccaaaaguagaa

SEQ ID NO: 719387 - RNA, 19 nt, Human
gggguggaggggauggggc

SEQ ID NO: 719388 - RNA, 24 nt, Human
uaaaaagagaaucucuuagggaaa

SEQ ID NO: 719389 - RNA, 19 nt, Human
uaagaugacgaaaaacgca

SEQ ID NO: 719390 - RNA, 18 nt, Human
uaaucucugggccucccu

SEQ ID NO: 719391 - RNA, 20 nt, Human
uacaggcccucccgcccccc

SEQ ID NO: 719392 - RNA, 28 nt, Human
uaugaccccagaggccagagagggcagg

SEQ ID NO: 719393 - RNA, 20 nt, Human
ucaccagcauccugagcuuu

SEQ ID NO: 719394 - RNA, 21 nt, Human
uccaagauuugaaugaacaaa

SEQ ID NO: 719395 - RNA, 18 nt, Human
ucccccacagaacuggaa

SEQ ID NO: 719396 - RNA, 19 nt, Human
uccgaccaaaaaaaggcau

SEQ ID NO: 719397 - RNA, 22 nt, Human
uccugagcuuugucuuguguug

SEQ ID NO: 719398 - RNA, 23 nt, Human
uccugagggguaaggacccuagc

SEQ ID NO: 719399 - RNA, 24 nt, Human
ucggaaaccucacugaagcucugg

SEQ ID NO: 719400 - RNA, 21 nt, Human
ucuacaggcccucccgccccc

SEQ ID NO: 719401 - RNA, 22 nt, Human
ucuacaggcccucccgcccccc

SEQ ID NO: 719402 - RNA, 21 nt, Human
ucuguaaucucugggccuccc

SEQ ID NO: 719403 - RNA, 20 nt, Human
ucuuguagcaacuaagacuu

SEQ ID NO: 719404 - RNA, 22 nt, Human
ugaagaaaaagcaacccacaaa

SEQ ID NO: 719405 - RNA, 27 nt, Human
ugaccaaaacccuuaucucgguggauu

SEQ ID NO: 719406 - RNA, 20 nt, Human
ugagucaggggucccggagg

SEQ ID NO: 719407 - RNA, 23 nt, Human
ugagugcaggggcagggccaggg

SEQ ID NO: 719408 - RNA, 21 nt, Human
ugauuuaaaaagucagaaaaa

SEQ ID NO: 719409 - RNA, 19 nt, Human
ugcaaggguuagcagcugc

SEQ ID NO: 719410 - RNA, 18 nt, Human
ugccgcuuggcgcugcag

SEQ ID NO: 719411 - RNA, 23 nt, Human
ugcuccuggugaaaagaugaccc

SEQ ID NO: 719412 - RNA, 22 nt, Human
ugcuuugucguggccucagugg

SEQ ID NO: 719413 - RNA, 19 nt, Human
uggaagauccugggauacc

SEQ ID NO: 719414 - RNA, 19 nt, Human
uggaagauccugggauacc

SEQ ID NO: 719415 - RNA, 18 nt, Human
uggaggaggcuggggaga

SEQ ID NO: 719416 - RNA, 18 nt, Human
uggaggggauggggcugg

SEQ ID NO: 719417 - RNA, 22 nt, Human
uggauguggucucuuguaacuu

SEQ ID NO: 719418 - RNA, 24 nt, Human
uggcacaaaaacaguucacugcaa

SEQ ID NO: 719419 - RNA, 20 nt, Human
uggcagaggcuggcuggcac

SEQ ID NO: 719420 - RNA, 18 nt, Human
uggcucagggccaggcau

SEQ ID NO: 719421 - RNA, 21 nt, Human
uggcucagggccaggcauggg

SEQ ID NO: 719422 - RNA, 21 nt, Human
uggcuggaaacccugccuugg

SEQ ID NO: 719423 - RNA, 28 nt, Human
ugggaaauacuuggccccagguccaggg

SEQ ID NO: 719424 - RNA, 22 nt, Human
uggggagugauccugaggggua

SEQ ID NO: 719425 - RNA, 22 nt, Human
uggggcagugaggggagggaca

SEQ ID NO: 719426 - RNA, 19 nt, Human
ugggguggaggggaugggg

SEQ ID NO: 719427 - RNA, 22 nt, Human
ugggguggaggggauggggcug

SEQ ID NO: 719428 - RNA, 19 nt, Human
uguccgagcuggagcugug

SEQ ID NO: 719429 - RNA, 22 nt, Human
uguugggagucccacaagggcu

SEQ ID NO: 719430 - RNA, 24 nt, Human
uuaaaacaaagaaggaaaaaaaaa

SEQ ID NO: 719431 - RNA, 21 nt, Human
uuauccauccuggauccauuu

SEQ ID NO: 719432 - RNA, 21 nt, Human
uucacucaccaucgccgucgc

SEQ ID NO: 719433 - RNA, 25 nt, Human
uucacucaccaucgccgucgccauu

SEQ ID NO: 719434 - RNA, 19 nt, Human
uuccaucuuccuucucaca

SEQ ID NO: 719435 - RNA, 23 nt, Human
uucuuggcacaaaaacaguucac

SEQ ID NO: 719436 - RNA, 20 nt, Human
uugagaaauucacugguuug

SEQ ID NO: 719437 - RNA, 20 nt, Human
uugaugcuugguggaugccg

SEQ ID NO: 719438 - RNA, 18 nt, Human
uugggcagcccuggagga

SEQ ID NO: 719439 - RNA, 18 nt, Human
uuucuuggcacaaaaaca

SEQ ID NO: 719440 - RNA, 21 nt, Human
uuugcuccuggugaaaagaug

SEQ ID NO: 719441 - RNA, 18 nt, Human
uuuugcgugccugcaguc

SEQ ID NO: 719442 - RNA, 23 nt, Human
aaaaacaaccuccagucaaagcc

SEQ ID NO: 719443 - RNA, 25 nt, Human
aaaaacuucucaauguauaacacac

SEQ ID NO: 719444 - RNA, 23 nt, Human
aaaaucccuucauguuauaacuc

SEQ ID NO: 719445 - RNA, 18 nt, Human
aaaaugguaacauuuccu

SEQ ID NO: 719446 - RNA, 20 nt, Human
aaagagccaaccaugcccac

SEQ ID NO: 719447 - RNA, 22 nt, Human
aaagccaguaaaaacuucucaa

SEQ ID NO: 719448 - RNA, 22 nt, Human
aaaguaacaauguguuaagauu

SEQ ID NO: 719449 - RNA, 21 nt, Human
aaauccauaucucaaaucaag

SEQ ID NO: 719450 - RNA, 24 nt, Human
aagcaaacagcagcuuuacaaaca

SEQ ID NO: 719451 - RNA, 20 nt, Human
aagcaaauaugagacagaac

SEQ ID NO: 719452 - RNA, 20 nt, Human
aagcagguauacaaacuccu

SEQ ID NO: 719453 - RNA, 18 nt, Human
aagcugaaacagaucuga

SEQ ID NO: 719454 - RNA, 21 nt, Human
aaguuccuuuccuugaccucc

SEQ ID NO: 719455 - RNA, 18 nt, Human
aauucccaccccucccuc

SEQ ID NO: 719456 - RNA, 19 nt, Human
acaaaccuacugaagcaga

SEQ ID NO: 719457 - RNA, 21 nt, Human
acagcaaacaaaccuacugaa

SEQ ID NO: 719458 - RNA, 21 nt, Human
acgccacuggccgaggaggcg

SEQ ID NO: 719459 - RNA, 19 nt, Human
acggaugugugcaugugug

SEQ ID NO: 719460 - RNA, 25 nt, Human
acucaaucaaauccauaucucaaau

SEQ ID NO: 719461 - RNA, 19 nt, Human
agagacaguaagaucugcc

SEQ ID NO: 719462 - RNA, 18 nt, Human
agcacaauaauaaaguug

SEQ ID NO: 719463 - RNA, 22 nt, Human
aggggggugggggggacaguug

SEQ ID NO: 719464 - RNA, 19 nt, Human
agguaaguaagaagcaaau

SEQ ID NO: 719465 - RNA, 26 nt, Human
auacagcaaaagaugaaaaucccuuc

SEQ ID NO: 719466 - RNA, 24 nt, Human
auaccccuuccuucucaguuuugu

SEQ ID NO: 719467 - RNA, 23 nt, Human
auagacagcaucuaucacuuucc

SEQ ID NO: 719468 - RNA, 18 nt, Human
augaaccaacccuuacuc

SEQ ID NO: 719469 - RNA, 19 nt, Human
auggaggaggcgguggcag

SEQ ID NO: 719470 - RNA, 20 nt, Human
auuaagcuaauaugaacauc

SEQ ID NO: 719471 - RNA, 22 nt, Human
caaaaacaaccuccagucaaag

SEQ ID NO: 719472 - RNA, 22 nt, Human
caaaauguugagaugaagcaua

SEQ ID NO: 719473 - RNA, 23 nt, Human
caaaccuacugaagcagaaaucu

SEQ ID NO: 719474 - RNA, 26 nt, Human
caaagagccaaccaugcccaccacgg

SEQ ID NO: 719475 - RNA, 19 nt, Human
caaaucaagaguccugaac

SEQ ID NO: 719476 - RNA, 21 nt, Human
caaauccauaucucaaaucaa

SEQ ID NO: 719477 - RNA, 25 nt, Human
caaaugaggcuagcuagcuauaauc

SEQ ID NO: 719478 - RNA, 21 nt, Human
caagaguccugaaccagaagc

SEQ ID NO: 719479 - RNA, 22 nt, Human
cacacacacguacggaugugug

SEQ ID NO: 719480 - RNA, 20 nt, Human
caccccucccuccuccccca

SEQ ID NO: 719481 - RNA, 25 nt, Human
caccccucccuccucccccagcuua

SEQ ID NO: 719482 - RNA, 20 nt, Human
caccugucaacaugugccuu

SEQ ID NO: 719483 - RNA, 22 nt, Human
cagugacuucugacuaaacauu

SEQ ID NO: 719484 - RNA, 23 nt, Human
ccaaccaugcccacuucaaaaaa

SEQ ID NO: 719485 - RNA, 20 nt, Human
ccaccccucccuccuccccc

SEQ ID NO: 719486 - RNA, 24 nt, Human
ccaguaaaaccaccucuacacauu

SEQ ID NO: 719487 - RNA, 25 nt, Human
cccaacacuaauuaauuacaauaau

SEQ ID NO: 719488 - RNA, 20 nt, Human
ccccccgcucggguccagac

SEQ ID NO: 719489 - RNA, 21 nt, Human
ccuccaaagccuguaauucaa

SEQ ID NO: 719490 - RNA, 24 nt, Human
ccuccagucaaagccaguaaaaac

SEQ ID NO: 719491 - RNA, 22 nt, Human
ccucccccagcuuauuuagaaa

SEQ ID NO: 719492 - RNA, 18 nt, Human
ccugcagccgcaacgggc

SEQ ID NO: 719493 - RNA, 18 nt, Human
cgcaacgggcccgcgcua

SEQ ID NO: 719494 - RNA, 20 nt, Human
cgcucggguccagacugggu

SEQ ID NO: 719495 - RNA, 22 nt, Human
cuaaaucaucaaccaagaaucc

SEQ ID NO: 719496 - RNA, 20 nt, Human
cuauccuuagaaccuuguuc

SEQ ID NO: 719497 - RNA, 22 nt, Human
cucaaggcuaggugcaaaauag

SEQ ID NO: 719498 - RNA, 21 nt, Human
cucaauguauaacacacauua

SEQ ID NO: 719499 - RNA, 22 nt, Human
cucuaucauuucuuuaaaccaa

SEQ ID NO: 719500 - RNA, 23 nt, Human
cuuaccugcuguguuccuuuaaa

SEQ ID NO: 719501 - RNA, 24 nt, Human
gaagcaugcaagagaacacaccag

SEQ ID NO: 719502 - RNA, 22 nt, Human
gcaaacagcagcuuuacaaaca

SEQ ID NO: 719503 - RNA, 18 nt, Human
gcaaagcccugccccaga

SEQ ID NO: 719504 - RNA, 21 nt, Human
gcaaagcccugccccagauaa

SEQ ID NO: 719505 - RNA, 22 nt, Human
gcaaaggaaauuuacaccauaa

SEQ ID NO: 719506 - RNA, 19 nt, Human
ggaggaggcgguggcagcu

SEQ ID NO: 719507 - RNA, 18 nt, Human
ggaugugugcaugugugu

SEQ ID NO: 719508 - RNA, 21 nt, Human
gggacaguugggggugguggg

SEQ ID NO: 719509 - RNA, 24 nt, Human
gggggugggggggacaguuggggg

SEQ ID NO: 719510 - RNA, 21 nt, Human
ggggugggggggacaguuggg

SEQ ID NO: 719511 - RNA, 23 nt, Human
ggugugaugugccaacaaaauuu

SEQ ID NO: 719512 - RNA, 20 nt, Human
gucauugcuauguggaaggu

SEQ ID NO: 719513 - RNA, 21 nt, Human
gugugagggggguggggggga

SEQ ID NO: 719514 - RNA, 19 nt, Human
uaaaacaucaaaacuagca

SEQ ID NO: 719515 - RNA, 20 nt, Human
uaaaacuuccuccucuaagc

SEQ ID NO: 719516 - RNA, 19 nt, Human
uaaaauaccaucucugcaa

SEQ ID NO: 719517 - RNA, 22 nt, Human
uaaaauaccaucucugcaaaaa

SEQ ID NO: 719518 - RNA, 23 nt, Human
uaagaagcaaauaugagacagaa

SEQ ID NO: 719519 - RNA, 19 nt, Human
uaagaugguggcuccacug

SEQ ID NO: 719520 - RNA, 22 nt, Human
uaagcaaacagcagcuuuacaa

SEQ ID NO: 719521 - RNA, 22 nt, Human
uaaguaagaagcaaauaugaga

SEQ ID NO: 719522 - RNA, 21 nt, Human
uacaaaauaagcugaaacaga

SEQ ID NO: 719523 - RNA, 27 nt, Human
uacaaacuccuagagaagggcagagau

SEQ ID NO: 719524 - RNA, 22 nt, Human
uacacagcuccugaacuuucac

SEQ ID NO: 719525 - RNA, 20 nt, Human
uacaucauuuacaaacauau

SEQ ID NO: 719526 - RNA, 21 nt, Human
uacuauuucagaggcuucauu

SEQ ID NO: 719527 - RNA, 19 nt, Human
uagaggagguggaguccug

SEQ ID NO: 719528 - RNA, 20 nt, Human
uagcacaauaauaaaguuga

SEQ ID NO: 719529 - RNA, 24 nt, Human
uaguacagaagaauccccacuagu

SEQ ID NO: 719530 - RNA, 21 nt, Human
uaguuugucauucuuccacca

SEQ ID NO: 719531 - RNA, 18 nt, Human
uauaaaacaucaaaacua

SEQ ID NO: 719532 - RNA, 25 nt, Human
uauaaaauaauacaaauacuuucaa

SEQ ID NO: 719533 - RNA, 20 nt, Human
uauaagacucuguuucugaa

SEQ ID NO: 719534 - RNA, 25 nt, Human
ucaaaaaauauauaaaaacuuuccu

SEQ ID NO: 719535 - RNA, 18 nt, Human
ucacugaaguccaggugg

SEQ ID NO: 719536 - RNA, 19 nt, Human
ucagggcagggauaauacc

SEQ ID NO: 719537 - RNA, 22 nt, Human
uccacagcuggagauagagagc

SEQ ID NO: 719538 - RNA, 24 nt, Human
ucccaccccucccuccucccccag

SEQ ID NO: 719539 - RNA, 19 nt, Human
uccugaacuuucacaauuc

SEQ ID NO: 719540 - RNA, 18 nt, Human
uccuucauacagcaaaag

SEQ ID NO: 719541 - RNA, 23 nt, Human
uccuugaccuccugacaguaacu

SEQ ID NO: 719542 - RNA, 21 nt, Human
ucgggccgcuuucuccauggc

SEQ ID NO: 719543 - RNA, 19 nt, Human
ucucaguuuugugccugcu

SEQ ID NO: 719544 - RNA, 22 nt, Human
ucuccugccucugugaggcaaa

SEQ ID NO: 719545 - RNA, 26 nt, Human
ucugugaggcaaagcccugccccaga

SEQ ID NO: 719546 - RNA, 23 nt, Human
ugaaccaacccuuacucuuccca

SEQ ID NO: 719547 - RNA, 19 nt, Human
ugaagcaaacacugauaac

SEQ ID NO: 719548 - RNA, 20 nt, Human
ugacuccacccccaguucuu

SEQ ID NO: 719549 - RNA, 18 nt, Human
ugauugacuaacauuuuc

SEQ ID NO: 719550 - RNA, 21 nt, Human
ugcaaaauagguauuuuuuaa

SEQ ID NO: 719551 - RNA, 22 nt, Human
ugcaugugugugaggggggugg

SEQ ID NO: 719552 - RNA, 19 nt, Human
ugcucaaggcuaggugcaa

SEQ ID NO: 719553 - RNA, 21 nt, Human
uggaaaacacacacacguacc

SEQ ID NO: 719554 - RNA, 20 nt, Human
uggaggaggcgguggcagcu

SEQ ID NO: 719555 - RNA, 24 nt, Human
uggaguccugaagcaaacacugau

SEQ ID NO: 719556 - RNA, 21 nt, Human
uggccgaggaggcggcuccag

SEQ ID NO: 719557 - RNA, 22 nt, Human
uggguuccggaccuccgccccu

SEQ ID NO: 719558 - RNA, 19 nt, Human
uggguuguccucuagaggu

SEQ ID NO: 719559 - RNA, 21 nt, Human
ugugcaugugugugagggggg

SEQ ID NO: 719560 - RNA, 19 nt, Human
ugugccuagcuuuuuguaa

SEQ ID NO: 719561 - RNA, 21 nt, Human
uguggaaggugcucaaggcua

SEQ ID NO: 719562 - RNA, 20 nt, Human
ugugguauauuuagaaauua

SEQ ID NO: 719563 - RNA, 21 nt, Human
uuauccuucauacagcaaaag

SEQ ID NO: 719564 - RNA, 24 nt, Human
uucaaaaugucuuuuaaguaagca

SEQ ID NO: 719565 - RNA, 23 nt, Human
uucacaauucacaaauacuaaau

SEQ ID NO: 719566 - RNA, 23 nt, Human
uucuccauggccccccgcucggg

SEQ ID NO: 719567 - RNA, 20 nt, Human
uugauuacaaaauaagcuga

SEQ ID NO: 719568 - RNA, 24 nt, Human
uuguggaccacauaaaaguugcau

SEQ ID NO: 719569 - RNA, 19 nt, Human
uuucuugugaugaugaacc

SEQ ID NO: 719570 - RNA, 27 nt, Human
uuuuuuuuuuuaagcaaacagcagcuu

SEQ ID NO: 719571 - RNA, 22 nt, Human
aaaguacaacacaaaguuguau

SEQ ID NO: 719572 - RNA, 21 nt, Human
aagaaagaucugaaagaagcg

SEQ ID NO: 719573 - RNA, 19 nt, Human
aagcacaacagcaaaucuc

SEQ ID NO: 719574 - RNA, 19 nt, Human
agaagcgaguggucugagc

SEQ ID NO: 719575 - RNA, 21 nt, Human
agacagguggugaaaacgcag

SEQ ID NO: 719576 - RNA, 19 nt, Human
agaggaggguggggagggg

SEQ ID NO: 719577 - RNA, 22 nt, Human
agaggaggguggggaggggagc

SEQ ID NO: 719578 - RNA, 18 nt, Human
aggaggguggggagggga

SEQ ID NO: 719579 - RNA, 21 nt, Human
aggaggguggggaggggagcu

SEQ ID NO: 719580 - RNA, 18 nt, Human
aggguggggaggggagcu

SEQ ID NO: 719581 - RNA, 21 nt, Human
aggguggggaggggagcugca

SEQ ID NO: 719582 - RNA, 23 nt, Human
caaacagcacagaaaaugcauau

SEQ ID NO: 719583 - RNA, 20 nt, Human
caaacagcacagaaaaugcu

SEQ ID NO: 719584 - RNA, 20 nt, Human
cagcacagaaaaugcauaug

SEQ ID NO: 719585 - RNA, 23 nt, Human
cuaaaagcacaacagcaaaucuc

SEQ ID NO: 719586 - RNA, 18 nt, Human
gaagacagguggugaaaa

SEQ ID NO: 719587 - RNA, 23 nt, Human
gaggguggggaggggagcugcag

SEQ ID NO: 719588 - RNA, 20 nt, Human
gggaggggagcugcaguaag

SEQ ID NO: 719589 - RNA, 20 nt, Human
ggguggggaggggagcugca

SEQ ID NO: 719590 - RNA, 24 nt, Human
gucucagaaacuggcacaucauga

SEQ ID NO: 719591 - RNA, 19 nt, Human
uaaguugacuuacauuucu

SEQ ID NO: 719592 - RNA, 21 nt, Human
uaccucaaguacaaacagcac

SEQ ID NO: 719593 - RNA, 18 nt, Human
uaucucaagacuuggcua

SEQ ID NO: 719594 - RNA, 18 nt, Human
ucugaaagaagcgagugg

SEQ ID NO: 719595 - RNA, 27 nt, Human
ugcaaagaagaggaggguggggagggg

SEQ ID NO: 719596 - RNA, 23 nt, Human
ugcuugggucuguuuugcaaaga

SEQ ID NO: 719597 - RNA, 20 nt, Human
uggcugaguccagacuuuuc

SEQ ID NO: 719598 - RNA, 24 nt, Human
uggucugagccugcccugcuuggg

SEQ ID NO: 719599 - RNA, 21 nt, Human
ugucacaugccaggauuucug

SEQ ID NO: 719600 - RNA, 22 nt, Human
uucucagauguacaggucuuau

SEQ ID NO: 719601 - RNA, 22 nt, Human
uuucugaaucaacucaaauuau

SEQ ID NO: 719602 - RNA, 19 nt, Human
aaagcccgacucucacugu

SEQ ID NO: 719603 - RNA, 23 nt, Human
aacaccccuguuccuggggcucc

SEQ ID NO: 719604 - RNA, 18 nt, Human
aaccugccaguucuccuu

SEQ ID NO: 719605 - RNA, 19 nt, Human
aagaagggucugagagggc

SEQ ID NO: 719606 - RNA, 23 nt, Human
aagagcacugcacgcauuauccc

SEQ ID NO: 719607 - RNA, 20 nt, Human
aagagcagaagguggcccag

SEQ ID NO: 719608 - RNA, 18 nt, Human
aaggugcagaggucuaug

SEQ ID NO: 719609 - RNA, 21 nt, Human
aauggauccaaauccaaguga

SEQ ID NO: 719610 - RNA, 24 nt, Human
aauggcccuaaggaugcucugggc

SEQ ID NO: 719611 - RNA, 21 nt, Human
aaugggacugaaaacguagaa

SEQ ID NO: 719612 - RNA, 19 nt, Human
acaaagcaggaggugggcg

SEQ ID NO: 719613 - RNA, 19 nt, Human
acccacaccucugcaccgc

SEQ ID NO: 719614 - RNA, 24 nt, Human
acccacaccucugcaccgcccccc

SEQ ID NO: 719615 - RNA, 19 nt, Human
accccuggugguggcagug

SEQ ID NO: 719616 - RNA, 21 nt, Human
accccuguuccuggggcuccu

SEQ ID NO: 719617 - RNA, 19 nt, Human
acccuauugcagcuccugg

SEQ ID NO: 719618 - RNA, 21 nt, Human
accuggagagaaaauacuccu

SEQ ID NO: 719619 - RNA, 19 nt, Human
acugugagagagggaacau

SEQ ID NO: 719620 - RNA, 24 nt, Human
agacccuccccaccaucucugagg

SEQ ID NO: 719621 - RNA, 21 nt, Human
agaccucuuguuuucaugccc

SEQ ID NO: 719622 - RNA, 22 nt, Human
agagagggaacaugugggcagg

SEQ ID NO: 719623 - RNA, 20 nt, Human
agagauggcuagcaggagag

SEQ ID NO: 719624 - RNA, 18 nt, Human
agagcagagggcagggag

SEQ ID NO: 719625 - RNA, 20 nt, Human
agagggcacagggaggaugg

SEQ ID NO: 719626 - RNA, 18 nt, Human
agcagaagguggcccagg

SEQ ID NO: 719627 - RNA, 19 nt, Human
agcugugaaacaggaaaga

SEQ ID NO: 719628 - RNA, 24 nt, Human
aggaaccugccaguucuccuuggu

SEQ ID NO: 719629 - RNA, 24 nt, Human
aggcaggaaccugccaguucuccu

SEQ ID NO: 719630 - RNA, 19 nt, Human
agggaaaccacuagcagcu

SEQ ID NO: 719631 - RNA, 19 nt, Human
aggugauaagcaauggaca

SEQ ID NO: 719632 - RNA, 23 nt, Human
aguaauccaagacgcagacaacc

SEQ ID NO: 719633 - RNA, 19 nt, Human
agucaagaccagaguagcu

SEQ ID NO: 719634 - RNA, 21 nt, Human
auaaucccaaaauguaaccaa

SEQ ID NO: 719635 - RNA, 20 nt, Human
aucccacaucugcuguaugu

SEQ ID NO: 719636 - RNA, 19 nt, Human
augggucuuugaagugugg

SEQ ID NO: 719637 - RNA, 20 nt, Human
caaaauacccaggcuuccuc

SEQ ID NO: 719638 - RNA, 21 nt, Human
caagaagggucugagagggcu

SEQ ID NO: 719639 - RNA, 21 nt, Human
cacaccucugcaccgcccccc

SEQ ID NO: 719640 - RNA, 18 nt, Human
caccccaaucaauccggc

SEQ ID NO: 719641 - RNA, 18 nt, Human
cacccccuccccagcagg

SEQ ID NO: 719642 - RNA, 22 nt, Human
caccccuaggccucaucugccc

SEQ ID NO: 719643 - RNA, 18 nt, Human
cacccuguguuggucucc

SEQ ID NO: 719644 - RNA, 22 nt, Human
caccgcgcccccaggacccagc

SEQ ID NO: 719645 - RNA, 21 nt, Human
caccugggggcccucgccccu

SEQ ID NO: 719646 - RNA, 22 nt, Human
cacuuuauaaacauccccagcc

SEQ ID NO: 719647 - RNA, 20 nt, Human
cagaguagcugagcagaggc

SEQ ID NO: 719648 - RNA, 18 nt, Human
cagcccagagagcaggcc

SEQ ID NO: 719649 - RNA, 19 nt, Human
cagcccagccucuagcuuu

SEQ ID NO: 719650 - RNA, 23 nt, Human
cagccgaccucagagcacccugc

SEQ ID NO: 719651 - RNA, 22 nt, Human
caggagacagccauccccaaua

SEQ ID NO: 719652 - RNA, 18 nt, Human
caggauguccccuggacc

SEQ ID NO: 719653 - RNA, 23 nt, Human
cauaacucccccuacuccuaaaa

SEQ ID NO: 719654 - RNA, 19 nt, Human
cauucugcaucuccaucca

SEQ ID NO: 719655 - RNA, 23 nt, Human
ccaaauaaaugccaaagagacua

SEQ ID NO: 719656 - RNA, 23 nt, Human
ccaagugagaaaaagcaggagac

SEQ ID NO: 719657 - RNA, 25 nt, Human
ccacaccgcagccgaccucagagca

SEQ ID NO: 719658 - RNA, 22 nt, Human
ccagaccagaagagccucugcc

SEQ ID NO: 719659 - RNA, 19 nt, Human
ccagcccagagagcaggcc

SEQ ID NO: 719660 - RNA, 20 nt, Human
ccagcccagagagcaggccc

SEQ ID NO: 719661 - RNA, 21 nt, Human
ccagccucuagcuuuccagaa

SEQ ID NO: 719662 - RNA, 23 nt, Human
ccauccugggcuccuccagaacc

SEQ ID NO: 719663 - RNA, 18 nt, Human
ccauucugcaucuccauc

SEQ ID NO: 719664 - RNA, 18 nt, Human
cccaggggaucccucccc

SEQ ID NO: 719665 - RNA, 19 nt, Human
ccccagguggaaaaagugg

SEQ ID NO: 719666 - RNA, 20 nt, Human
cccccaggacccagcgggcc

SEQ ID NO: 719667 - RNA, 26 nt, Human
cccccuacuccuaaaaccuacccuuc

SEQ ID NO: 719668 - RNA, 21 nt, Human
ccccgcugcuaucccccucca

SEQ ID NO: 719669 - RNA, 18 nt, Human
ccccuaggccucaucugc

SEQ ID NO: 719670 - RNA, 22 nt, Human
cccgcagcuccccucucccucc

SEQ ID NO: 719671 - RNA, 21 nt, Human
cccgccccucagggaccuggc

SEQ ID NO: 719672 - RNA, 18 nt, Human
cccgguuucccccucggg

SEQ ID NO: 719673 - RNA, 19 nt, Human
cccuaggccucaucugccc

SEQ ID NO: 719674 - RNA, 26 nt, Human
cccuaggccucaucugcccgccccuc

SEQ ID NO: 719675 - RNA, 18 nt, Human
cccuauaugccuaccuca

SEQ ID NO: 719676 - RNA, 19 nt, Human
cccuccauggccaccuccc

SEQ ID NO: 719677 - RNA, 22 nt, Human
cccuccucccuccucagguccc

SEQ ID NO: 719678 - RNA, 19 nt, Human
cccucgggggccccuccuu

SEQ ID NO: 719679 - RNA, 20 nt, Human
cccuggggucugcucucggc

SEQ ID NO: 719680 - RNA, 20 nt, Human
cccuguguuggucucccucc

SEQ ID NO: 719681 - RNA, 19 nt, Human
cccuguuccuggggcuccu

SEQ ID NO: 719682 - RNA, 18 nt, Human
ccgccccucagggaccug

SEQ ID NO: 719683 - RNA, 18 nt, Human
ccgccugagcuccuccuc

SEQ ID NO: 719684 - RNA, 19 nt, Human
ccgggguuggggugggggg

SEQ ID NO: 719685 - RNA, 23 nt, Human
ccucaccacucacccccucccca

SEQ ID NO: 719686 - RNA, 18 nt, Human
ccucagagcacccugccu

SEQ ID NO: 719687 - RNA, 19 nt, Human
ccucaucugcccgccccuc

SEQ ID NO: 719688 - RNA, 26 nt, Human
ccuccgggaccugcgcgccagccacc

SEQ ID NO: 719689 - RNA, 24 nt, Human
ccuccgguccaggcagggauccca

SEQ ID NO: 719690 - RNA, 23 nt, Human
ccuccugccuccuugcuggggaa

SEQ ID NO: 719691 - RNA, 21 nt, Human
ccuccuugcuggggaagugcc

SEQ ID NO: 719692 - RNA, 19 nt, Human
ccucgccccuccugccucc

SEQ ID NO: 719693 - RNA, 21 nt, Human
ccucgugcuagacaggccuuc

SEQ ID NO: 719694 - RNA, 19 nt, Human
ccucugugaaccuggagug

SEQ ID NO: 719695 - RNA, 19 nt, Human
ccugggcuccuccagaacc

SEQ ID NO: 719696 - RNA, 18 nt, Human
ccuguguuggucucccuc

SEQ ID NO: 719697 - RNA, 20 nt, Human
cgacaccacgacagaagccc

SEQ ID NO: 719698 - RNA, 21 nt, Human
cgcagacaaccuugcuuuuaa

SEQ ID NO: 719699 - RNA, 19 nt, Human
cgcauuaucucaguaaucc

SEQ ID NO: 719700 - RNA, 19 nt, Human
cggaaucagaucucgcaua

SEQ ID NO: 719701 - RNA, 18 nt, Human
cgggagcacaaagcagga

SEQ ID NO: 719702 - RNA, 24 nt, Human
cguagaaaaaccaaauaaaugcca

SEQ ID NO: 719703 - RNA, 22 nt, Human
cuagaacaugggucuuugaagu

SEQ ID NO: 719704 - RNA, 22 nt, Human
cucaaacuagacauucagaagu

SEQ ID NO: 719705 - RNA, 22 nt, Human
cucaccacucacccccucccca

SEQ ID NO: 719706 - RNA, 20 nt, Human
cuccagacccuccggggcuc

SEQ ID NO: 719707 - RNA, 21 nt, Human
cuccagcccagagagcaggcc

SEQ ID NO: 719708 - RNA, 24 nt, Human
cucccccuacuccuaaaaccuacc

SEQ ID NO: 719709 - RNA, 25 nt, Human
cuccccgcugcuaucccccuccauc

SEQ ID NO: 719710 - RNA, 22 nt, Human
cuccuaaaaccuacccuucacc

SEQ ID NO: 719711 - RNA, 19 nt, Human
cugaauccaagaagacugu

SEQ ID NO: 719712 - RNA, 22 nt, Human
cugcugccacuuccagggaaac

SEQ ID NO: 719713 - RNA, 23 nt, Human
cuguuaggaagcgggagcacaaa

SEQ ID NO: 719714 - RNA, 21 nt, Human
cuucaugcgccccagcucccc

SEQ ID NO: 719715 - RNA, 21 nt, Human
cuugguuccccaggucccagc

SEQ ID NO: 719716 - RNA, 19 nt, Human
gacagguaggguggucccc

SEQ ID NO: 719717 - RNA, 24 nt, Human
gacaucuuguccuaggguagaggc

SEQ ID NO: 719718 - RNA, 18 nt, Human
gaccaccugggggcccuc

SEQ ID NO: 719719 - RNA, 20 nt, Human
gagcacccugccucaacugu

SEQ ID NO: 719720 - RNA, 22 nt, Human
gagcagcagagagggcacaggg

SEQ ID NO: 719721 - RNA, 26 nt, Human
gagcaggcccaggccgugccucccac

SEQ ID NO: 719722 - RNA, 21 nt, Human
gagggaacaugugggcaggga

SEQ ID NO: 719723 - RNA, 24 nt, Human
gcacaggauuaaccauccccagga

SEQ ID NO: 719724 - RNA, 18 nt, Human
gcagcagagagggcacag

SEQ ID NO: 719725 - RNA, 19 nt, Human
gcagcuccccucucccucc

SEQ ID NO: 719726 - RNA, 18 nt, Human
gcauuaucucaguaaucc

SEQ ID NO: 719727 - RNA, 20 nt, Human
gccaccugcccgacucccgg

SEQ ID NO: 719728 - RNA, 18 nt, Human
gccagcggccgggguugg

SEQ ID NO: 719729 - RNA, 22 nt, Human
gccagcggccgggguuggggug

SEQ ID NO: 719730 - RNA, 20 nt, Human
gcccguagcgacaccacgac

SEQ ID NO: 719731 - RNA, 21 nt, Human
gccgggguugggguggggggg

SEQ ID NO: 719732 - RNA, 20 nt, Human
gccucuagcuuuccagaagc

SEQ ID NO: 719733 - RNA, 19 nt, Human
gcgccagccaccgcgcccc

SEQ ID NO: 719734 - RNA, 20 nt, Human
gcguuaggaauggaggagca

SEQ ID NO: 719735 - RNA, 19 nt, Human
gcucuagcuugcaagagca

SEQ ID NO: 719736 - RNA, 20 nt, Human
ggaaaagagacccuccccac

SEQ ID NO: 719737 - RNA, 19 nt, Human
ggaaugcucucacuuccuc

SEQ ID NO: 719738 - RNA, 21 nt, Human
ggaaugcucucacuuccucuc

SEQ ID NO: 719739 - RNA, 26 nt, Human
ggacagaccugaugccugggguuugg

SEQ ID NO: 719740 - RNA, 21 nt, Human
ggagcagcagagagggcacag

SEQ ID NO: 719741 - RNA, 23 nt, Human
ggaggugggcggcaggcgaguga

SEQ ID NO: 719742 - RNA, 20 nt, Human
ggcagggagauagugugaga

SEQ ID NO: 719743 - RNA, 19 nt, Human
ggcgagugagcauuaccgc

SEQ ID NO: 719744 - RNA, 21 nt, Human
gggaaacucagaggaugccaa

SEQ ID NO: 719745 - RNA, 18 nt, Human
gggagguugggguggacc

SEQ ID NO: 719746 - RNA, 21 nt, Human
gggagguugggguggaccugg

SEQ ID NO: 719747 - RNA, 25 nt, Human
gggauccuaggaggcugggggauca

SEQ ID NO: 719748 - RNA, 24 nt, Human
gggccacugaaaggggcucugugg

SEQ ID NO: 719749 - RNA, 19 nt, Human
gggcggcaggcgagugagc

SEQ ID NO: 719750 - RNA, 20 nt, Human
ggggaagaaggcuuauuugg

SEQ ID NO: 719751 - RNA, 24 nt, Human
ggggcuccugcuccccacuccagc

SEQ ID NO: 719752 - RNA, 22 nt, Human
ggggcucuggcccgcagcuccc

SEQ ID NO: 719753 - RNA, 20 nt, Human
gggucggcugugacucacca

SEQ ID NO: 719754 - RNA, 18 nt, Human
gguuggggugggggggcc

SEQ ID NO: 719755 - RNA, 21 nt, Human
guagugcgcgccagccgcccc

SEQ ID NO: 719756 - RNA, 21 nt, Human
guccacgacauuggaccccag

SEQ ID NO: 719757 - RNA, 23 nt, Human
gucuguggccuguuaggaagcgg

SEQ ID NO: 719758 - RNA, 18 nt, Human
gugaaccuggagugauuc

SEQ ID NO: 719759 - RNA, 20 nt, Human
gugacauggauuaggggucu

SEQ ID NO: 719760 - RNA, 21 nt, Human
gugcagaggucuaugccagga

SEQ ID NO: 719761 - RNA, 19 nt, Human
guggcagugggggagaaag

SEQ ID NO: 719762 - RNA, 18 nt, Human
guggccuguuaggaagcg

SEQ ID NO: 719763 - RNA, 23 nt, Human
gugggcggcaggcgagugagcau

SEQ ID NO: 719764 - RNA, 20 nt, Human
guggucccccuugaaaaguc

SEQ ID NO: 719765 - RNA, 20 nt, Human
guuacgccaccugcccgacu

SEQ ID NO: 719766 - RNA, 19 nt, Human
uaaaugacuauaaaaaugu

SEQ ID NO: 719767 - RNA, 19 nt, Human
uaauccaagacgcagacaa

SEQ ID NO: 719768 - RNA, 18 nt, Human
uacccaggcuuccuccag

SEQ ID NO: 719769 - RNA, 18 nt, Human
uagccccaaucacagcaa

SEQ ID NO: 719770 - RNA, 18 nt, Human
uagcgacaccacgacaga

SEQ ID NO: 719771 - RNA, 20 nt, Human
uagcuguaucugaugcacua

SEQ ID NO: 719772 - RNA, 22 nt, Human
uaggaggcugggggaucaucug

SEQ ID NO: 719773 - RNA, 24 nt, Human
uaggaggcugggggaucaucugcc

SEQ ID NO: 719774 - RNA, 18 nt, Human
ucacuccauuauauaugg

SEQ ID NO: 719775 - RNA, 20 nt, Human
uccaaauccaagugagaaaa

SEQ ID NO: 719776 - RNA, 21 nt, Human
uccacgacauuggaccccagg

SEQ ID NO: 719777 - RNA, 23 nt, Human
uccacugguggaaaaauuguuuu

SEQ ID NO: 719778 - RNA, 19 nt, Human
ucccaggggaucccucccc

SEQ ID NO: 719779 - RNA, 22 nt, Human
uccccacuggcgaucccuuccc

SEQ ID NO: 719780 - RNA, 21 nt, Human
uccccaggaaaugccucccuc

SEQ ID NO: 719781 - RNA, 21 nt, Human
ucccccuugaaaagucagcca

SEQ ID NO: 719782 - RNA, 24 nt, Human
ucccgugucaaaauacccaggcuu

SEQ ID NO: 719783 - RNA, 23 nt, Human
ucccugguaccaaaaagguuggg

SEQ ID NO: 719784 - RNA, 20 nt, Human
uccgcacacgcaccaauccc

SEQ ID NO: 719785 - RNA, 19 nt, Human
uccuguuggcgugggcugc

SEQ ID NO: 719786 - RNA, 20 nt, Human
uccuuggaaaaggacagcaa

SEQ ID NO: 719787 - RNA, 23 nt, Human
ucgacccacaccucugcaccgcc

SEQ ID NO: 719788 - RNA, 20 nt, Human
ucggcaccccuaggccucau

SEQ ID NO: 719789 - RNA, 21 nt, Human
ucucugggaaaggcggcagag

SEQ ID NO: 719790 - RNA, 21 nt, Human
ucugacccucggcugcccugc

SEQ ID NO: 719791 - RNA, 24 nt, Human
ucugaugcacuagguggcagggag

SEQ ID NO: 719792 - RNA, 23 nt, Human
ucuggacagaccugaugccuggg

SEQ ID NO: 719793 - RNA, 20 nt, Human
ucuggggaccaccugggggc

SEQ ID NO: 719794 - RNA, 22 nt, Human
ugaauggcagacaguaauccaa

SEQ ID NO: 719795 - RNA, 18 nt, Human
ugacugagggaugaccag

SEQ ID NO: 719796 - RNA, 18 nt, Human
ugagaaaaagcaggagac

SEQ ID NO: 719797 - RNA, 19 nt, Human
ugagaaaaagcaggagacu

SEQ ID NO: 719798 - RNA, 21 nt, Human
ugaggaaaagagacccucccc

SEQ ID NO: 719799 - RNA, 19 nt, Human
ugaggaaacaggcucagag

SEQ ID NO: 719800 - RNA, 20 nt, Human
ugaggaaacaggcucagaga

SEQ ID NO: 719801 - RNA, 21 nt, Human
ugaggaaacaggcucagagag

SEQ ID NO: 719802 - RNA, 23 nt, Human
ugaggaaacaggcucagagaggu

SEQ ID NO: 719803 - RNA, 22 nt, Human
ugaggggaaauauuuuacccug

SEQ ID NO: 719804 - RNA, 20 nt, Human
ugaguuggcauuacuauccc

SEQ ID NO: 719805 - RNA, 23 nt, Human
ugaugaucugagaugaaacaguu

SEQ ID NO: 719806 - RNA, 18 nt, Human
ugcagcuccuggguuugg

SEQ ID NO: 719807 - RNA, 25 nt, Human
ugccaaaugauaaauuccuaaaaac

SEQ ID NO: 719808 - RNA, 18 nt, Human
ugccaguucuccuuggug

SEQ ID NO: 719809 - RNA, 19 nt, Human
ugccaguucuccuuggugc

SEQ ID NO: 719810 - RNA, 18 nt, Human
ugcccgccccucagggac

SEQ ID NO: 719811 - RNA, 21 nt, Human
ugccucagagcuuuagcccca

SEQ ID NO: 719812 - RNA, 22 nt, Human
ugccuccuugcuggggaagugc

SEQ ID NO: 719813 - RNA, 18 nt, Human
ugcuccagcccagagagc

SEQ ID NO: 719814 - RNA, 20 nt, Human
ugcucugggcuggacaggcc

SEQ ID NO: 719815 - RNA, 19 nt, Human
ugcuuccuucucuccaggu

SEQ ID NO: 719816 - RNA, 19 nt, Human
uggaaaaagugggucccau

SEQ ID NO: 719817 - RNA, 25 nt, Human
uggaaugcuuccuucucuccagguc

SEQ ID NO: 719818 - RNA, 20 nt, Human
uggacaggccaaggggaucc

SEQ ID NO: 719819 - RNA, 23 nt, Human
uggcagggagugagucuuggagu

SEQ ID NO: 719820 - RNA, 23 nt, Human
uggccagagagaaugacucugau

SEQ ID NO: 719821 - RNA, 18 nt, Human
uggcuccuccagacccuc

SEQ ID NO: 719822 - RNA, 21 nt, Human
ugggcuggcucuagcuugcaa

SEQ ID NO: 719823 - RNA, 23 nt, Human
uggggaagugcccaguccagugc

SEQ ID NO: 719824 - RNA, 18 nt, Human
ugugaaagauaaggcuuc

SEQ ID NO: 719825 - RNA, 20 nt, Human
ugugcagaucagugccaaau

SEQ ID NO: 719826 - RNA, 21 nt, Human
ugugggcagggauaaaggcag

SEQ ID NO: 719827 - RNA, 19 nt, Human
uguuaggaagcgggagcac

SEQ ID NO: 719828 - RNA, 20 nt, Human
uuacugucuccaccccagac

SEQ ID NO: 719829 - RNA, 19 nt, Human
uuccccuauccuugguucc

SEQ ID NO: 719830 - RNA, 19 nt, Human
uuccuggggcuccugcucc

SEQ ID NO: 719831 - RNA, 18 nt, Human
uuuggcaaaggcugaaug

SEQ ID NO: 719832 - RNA, 22 nt, Human
uuuuccacaaaaccggucccug

SEQ ID NO: 719833 - RNA, 25 nt, Human
uuuucuuggcaauccucugaaacgg

SEQ ID NO: 719834 - RNA, 20 nt, Human
aaaaaagcaaaagcaaauga

SEQ ID NO: 719835 - RNA, 21 nt, Human
aaaacaaaacaaaacaaaaaa

SEQ ID NO: 719836 - RNA, 19 nt, Human
aaaaguacucuacuguucu

SEQ ID NO: 719837 - RNA, 19 nt, Human
aaaauauacuauuaauccc

SEQ ID NO: 719838 - RNA, 19 nt, Human
aaacaaaacaaaacaaaaa

SEQ ID NO: 719839 - RNA, 23 nt, Human
aaagcaaaagcaaaugagccuga

SEQ ID NO: 719840 - RNA, 20 nt, Human
aaagucuaaauggguaaaaa

SEQ ID NO: 719841 - RNA, 23 nt, Human
aaauaaaaauaggauuggauuca

SEQ ID NO: 719842 - RNA, 25 nt, Human
aaaucaauuuucaaaugauuaccag

SEQ ID NO: 719843 - RNA, 24 nt, Human
aacaaaaaagcaaaagcaaaugag

SEQ ID NO: 719844 - RNA, 23 nt, Human
aacaaucugcauuaucaaaaaua

SEQ ID NO: 719845 - RNA, 24 nt, Human
aaccaaaaaauucacaaaauuauu

SEQ ID NO: 719846 - RNA, 21 nt, Human
aagcaaaagcaaaugagccug

SEQ ID NO: 719847 - RNA, 18 nt, Human
aagucagccucaaguacc

SEQ ID NO: 719848 - RNA, 22 nt, Human
aaucauucaacaaaaaagcaaa

SEQ ID NO: 719849 - RNA, 22 nt, Human
aaucugaaugaaaaaagggucu

SEQ ID NO: 719850 - RNA, 24 nt, Human
acaaaacaaaacaaaaaacuguua

SEQ ID NO: 719851 - RNA, 25 nt, Human
acaaaacaaaacaaaaaacuguuaa

SEQ ID NO: 719852 - RNA, 24 nt, Human
acauacacagcaguugcacuaaca

SEQ ID NO: 719853 - RNA, 19 nt, Human
acuauuuugccuccuccuu

SEQ ID NO: 719854 - RNA, 25 nt, Human
agaaggaagaaaacaauuugccugg

SEQ ID NO: 719855 - RNA, 20 nt, Human
agaaggcagccacugcauuu

SEQ ID NO: 719856 - RNA, 20 nt, Human
agacaauagaaggcagccac

SEQ ID NO: 719857 - RNA, 20 nt, Human
agcuaugacacauuauggua

SEQ ID NO: 719858 - RNA, 26 nt, Human
aggaaaaaaaaaaguauaaccagugg

SEQ ID NO: 719859 - RNA, 21 nt, Human
aggcuuugcgcuuaugcaauu

SEQ ID NO: 719860 - RNA, 23 nt, Human
agguggccuuaaaaauccaaaca

SEQ ID NO: 719861 - RNA, 21 nt, Human
aguauaaccaguggugugaau

SEQ ID NO: 719862 - RNA, 20 nt, Human
aguugcacuaacagcagcac

SEQ ID NO: 719863 - RNA, 21 nt, Human
auaaagcaagaaaacaagggg

SEQ ID NO: 719864 - RNA, 23 nt, Human
auaaagcaagaaaacaaggggag

SEQ ID NO: 719865 - RNA, 18 nt, Human
auagaaggcagccacugc

SEQ ID NO: 719866 - RNA, 24 nt, Human
aucccguguaucuuuggauuccau

SEQ ID NO: 719867 - RNA, 19 nt, Human
auggguagggguuggggug

SEQ ID NO: 719868 - RNA, 23 nt, Human
caaaacaaaaaacuguuaaacac

SEQ ID NO: 719869 - RNA, 19 nt, Human
caacaaaaaagcaaaagca

SEQ ID NO: 719870 - RNA, 18 nt, Human
caccaaaaaucugucccu

SEQ ID NO: 719871 - RNA, 23 nt, Human
caccaaaaaucugucccuuuccc

SEQ ID NO: 719872 - RNA, 20 nt, Human
caccaccuccccccaccaaa

SEQ ID NO: 719873 - RNA, 22 nt, Human
caccuccccccaccaaaaucug

SEQ ID NO: 719874 - RNA, 20 nt, Human
cagauuucccaacaaucugc

SEQ ID NO: 719875 - RNA, 26 nt, Human
ccaaucaauaaaaaaggaaaaaaaaa

SEQ ID NO: 719876 - RNA, 20 nt, Human
cccagaauaaagcaagaaaa

SEQ ID NO: 719877 - RNA, 19 nt, Human
ccccaccaccuccccccac

SEQ ID NO: 719878 - RNA, 20 nt, Human
ccccaccaccuccccccacc

SEQ ID NO: 719879 - RNA, 22 nt, Human
ccccaccaccuccccccaccaa

SEQ ID NO: 719880 - RNA, 19 nt, Human
cccccaccaccucccccca

SEQ ID NO: 719881 - RNA, 20 nt, Human
cccggcccccaccuccuucc

SEQ ID NO: 719882 - RNA, 19 nt, Human
cccuucaaacuugcccaga

SEQ ID NO: 719883 - RNA, 21 nt, Human
ccuaaaaugcagaguucucug

SEQ ID NO: 719884 - RNA, 20 nt, Human
cgaagaaaucagguggccuu

SEQ ID NO: 719885 - RNA, 22 nt, Human
cgaaugcaugacgaagaaauca

SEQ ID NO: 719886 - RNA, 22 nt, Human
cuggaaucaguuacuuccuuac

SEQ ID NO: 719887 - RNA, 20 nt, Human
cuuuuccccucauuuuugau

SEQ ID NO: 719888 - RNA, 23 nt, Human
gacaauagaaggcagccacugca

SEQ ID NO: 719889 - RNA, 25 nt, Human
gagcaccugaagcaaagguaaagca

SEQ ID NO: 719890 - RNA, 18 nt, Human
gauacugaugaauguucu

SEQ ID NO: 719891 - RNA, 18 nt, Human
ggaauuguuaacagccug

SEQ ID NO: 719892 - RNA, 18 nt, Human
ggacuucuuucaugacuu

SEQ ID NO: 719893 - RNA, 24 nt, Human
ggugauggguagggguuggggugg

SEQ ID NO: 719894 - RNA, 22 nt, Human
guauaaccaguggugugaauaa

SEQ ID NO: 719895 - RNA, 19 nt, Human
gugugaauaauacaagaaa

SEQ ID NO: 719896 - RNA, 23 nt, Human
uaaaaacacacaaaugcacugca

SEQ ID NO: 719897 - RNA, 18 nt, Human
uaaaaauccaaacacgaa

SEQ ID NO: 719898 - RNA, 21 nt, Human
uaaaaguauuaaugaaaaaga

SEQ ID NO: 719899 - RNA, 19 nt, Human
uaaguguaaacuacccugg

SEQ ID NO: 719900 - RNA, 21 nt, Human
uaauuuuaaauauagacagua

SEQ ID NO: 719901 - RNA, 19 nt, Human
uacaaaaacccaaagacau

SEQ ID NO: 719902 - RNA, 18 nt, Human
uacaaauccaaugaagaa

SEQ ID NO: 719903 - RNA, 20 nt, Human
uacacagcaguugcacuaag

SEQ ID NO: 719904 - RNA, 25 nt, Human
uacccuaaaaugcagaguucucuga

SEQ ID NO: 719905 - RNA, 27 nt, Human
uacgaacaaagaaucugaaugaaaaaa

SEQ ID NO: 719906 - RNA, 18 nt, Human
uacucagggcaaauacaa

SEQ ID NO: 719907 - RNA, 22 nt, Human
uaguuaagucagccucaaguac

SEQ ID NO: 719908 - RNA, 18 nt, Human
uaguucagggaacaacaa

SEQ ID NO: 719909 - RNA, 21 nt, Human
uaucaaaaauaggaagacaau

SEQ ID NO: 719910 - RNA, 22 nt, Human
uaucaaaaauaggaagacaaua

SEQ ID NO: 719911 - RNA, 24 nt, Human
uaucaaaaauaggaagacaauaga

SEQ ID NO: 719912 - RNA, 22 nt, Human
uaucucccccaccaccuccccc

SEQ ID NO: 719913 - RNA, 19 nt, Human
uauuuugcuaagcuagcuu

SEQ ID NO: 719914 - RNA, 21 nt, Human
ucaaauaacugcucuacgaac

SEQ ID NO: 719915 - RNA, 20 nt, Human
ucaacaaaaaagcaaaagca

SEQ ID NO: 719916 - RNA, 18 nt, Human
ucagggaacaacaaccaa

SEQ ID NO: 719917 - RNA, 22 nt, Human
ucagggcaaauacaaucucaau

SEQ ID NO: 719918 - RNA, 22 nt, Human
ucagguucaccaaaaaucuguc

SEQ ID NO: 719919 - RNA, 25 nt, Human
uccaaugaagaaacaugauguaacu

SEQ ID NO: 719920 - RNA, 19 nt, Human
uccauaacuguuuuucaaa

SEQ ID NO: 719921 - RNA, 19 nt, Human
ucccuaaauccaaugauua

SEQ ID NO: 719922 - RNA, 19 nt, Human
ucucaaacuguuguuuuuc

SEQ ID NO: 719923 - RNA, 22 nt, Human
ucucccccaccaccucccccca

SEQ ID NO: 719924 - RNA, 22 nt, Human
ucugccacaagucagguucacc

SEQ ID NO: 719925 - RNA, 18 nt, Human
ugaagaaacaugauguaa

SEQ ID NO: 719926 - RNA, 21 nt, Human
ugagccugaaaaaggaacuaa

SEQ ID NO: 719927 - RNA, 21 nt, Human
ugauacaagagccccgauuug

SEQ ID NO: 719928 - RNA, 19 nt, Human
ugauggguagggguugggg

SEQ ID NO: 719929 - RNA, 20 nt, Human
ugauggguagggguuggggu

SEQ ID NO: 719930 - RNA, 23 nt, Human
ugcccagaauaaagcaagaaaac

SEQ ID NO: 719931 - RNA, 25 nt, Human
uggaaacaggaauuccacauuggug

SEQ ID NO: 719932 - RNA, 19 nt, Human
ugggguggguagaaggaag

SEQ ID NO: 719933 - RNA, 20 nt, Human
uggguagggguugggguggg

SEQ ID NO: 719934 - RNA, 21 nt, Human
uuaaaaauccaaacacgaaug

SEQ ID NO: 719935 - RNA, 20 nt, Human
uuacuuccuuacagauuucc

SEQ ID NO: 719936 - RNA, 24 nt, Human
uuauuuacaaaaacccaaagacau

SEQ ID NO: 719937 - RNA, 18 nt, Human
uucaaauaacugcucuac

SEQ ID NO: 719938 - RNA, 23 nt, Human
aaaacaaaucaaacaaaccagaa

SEQ ID NO: 719939 - RNA, 22 nt, Human
aaacaaaucaaacaaaccagaa

SEQ ID NO: 719940 - RNA, 24 nt, Human
aaacaucuguaagaccacaaaaaa

SEQ ID NO: 719941 - RNA, 19 nt, Human
aaacaugagagaguacaaa

SEQ ID NO: 719942 - RNA, 23 nt, Human
aaagagauauuuaaaaccauuaa

SEQ ID NO: 719943 - RNA, 21 nt, Human
aaagauguguuccaacucucc

SEQ ID NO: 719944 - RNA, 18 nt, Human
aaagcagacggaaaagaa

SEQ ID NO: 719945 - RNA, 22 nt, Human
aaauccacacauaagcuaaaga

SEQ ID NO: 719946 - RNA, 19 nt, Human
aacaagauggcaagcacug

SEQ ID NO: 719947 - RNA, 19 nt, Human
aaccugcaagauucccaag

SEQ ID NO: 719948 - RNA, 20 nt, Human
aacuacuuuuguagcacaac

SEQ ID NO: 719949 - RNA, 20 nt, Human
aacucuaaccacugcuggca

SEQ ID NO: 719950 - RNA, 20 nt, Human
aagacacuuuagaccaagga

SEQ ID NO: 719951 - RNA, 20 nt, Human
aagaccacaaaaaaaaaaug

SEQ ID NO: 719952 - RNA, 21 nt, Human
aagcaaagaaggaagcacgug

SEQ ID NO: 719953 - RNA, 19 nt, Human
aagcagcaggcauaaacuu

SEQ ID NO: 719954 - RNA, 18 nt, Human
aagccuaccucaggcccu

SEQ ID NO: 719955 - RNA, 22 nt, Human
aagucaaagagauauuuaaaac

SEQ ID NO: 719956 - RNA, 23 nt, Human
aagucuuuugacaaaccaacucu

SEQ ID NO: 719957 - RNA, 18 nt, Human
acagcccgaguggaagcc

SEQ ID NO: 719958 - RNA, 21 nt, Human
acaggacuguaguaagacggc

SEQ ID NO: 719959 - RNA, 21 nt, Human
accgaaacgccugaugacccc

SEQ ID NO: 719960 - RNA, 26 nt, Human
agaaaaauaaaaaauaauacaaaaaa

SEQ ID NO: 719961 - RNA, 23 nt, Human
agaacauguacacaugugugguu

SEQ ID NO: 719962 - RNA, 23 nt, Human
agaaggaagagggaguaugugag

SEQ ID NO: 719963 - RNA, 20 nt, Human
agaguacaaagaugacaggg

SEQ ID NO: 719964 - RNA, 19 nt, Human
agcuaggugaaaaaagagg

SEQ ID NO: 719965 - RNA, 21 nt, Human
aggaaaagcaaguauuuguca

SEQ ID NO: 719966 - RNA, 22 nt, Human
aggaagcacgugggaaagugag

SEQ ID NO: 719967 - RNA, 19 nt, Human
aggaauuccgagugcuggu

SEQ ID NO: 719968 - RNA, 19 nt, Human
aggaggaacagaagcaaag

SEQ ID NO: 719969 - RNA, 18 nt, Human
aggauagucuucauuauc

SEQ ID NO: 719970 - RNA, 22 nt, Human
aggauagucuucauuaucaggc

SEQ ID NO: 719971 - RNA, 18 nt, Human
aggaugcagguuuucucu

SEQ ID NO: 719972 - RNA, 21 nt, Human
aggugcuuacaggaaaggaua

SEQ ID NO: 719973 - RNA, 21 nt, Human
auaaauccaggucaaaaaucc

SEQ ID NO: 719974 - RNA, 19 nt, Human
auagguauaccgaaacgcc

SEQ ID NO: 719975 - RNA, 24 nt, Human
aucaaguaaacagugucaggaauu

SEQ ID NO: 719976 - RNA, 18 nt, Human
auccagaacauguacaca

SEQ ID NO: 719977 - RNA, 20 nt, Human
augaaucuauuguuugguag

SEQ ID NO: 719978 - RNA, 24 nt, Human
caaaaugauaccuccagaguuccc

SEQ ID NO: 719979 - RNA, 26 nt, Human
caaauuaaaaacaugaaaauuacacc

SEQ ID NO: 719980 - RNA, 22 nt, Human
caacaaaauguaagacaugcaa

SEQ ID NO: 719981 - RNA, 20 nt, Human
caacaacaaagagcacgacc

SEQ ID NO: 719982 - RNA, 22 nt, Human
caacaacaaagagcacgaccac

SEQ ID NO: 719983 - RNA, 22 nt, Human
caacaagcuaagggaaaaauca

SEQ ID NO: 719984 - RNA, 21 nt, Human
caaccuuuccuacaugccaag

SEQ ID NO: 719985 - RNA, 21 nt, Human
caagaugauagccaaagacca

SEQ ID NO: 719986 - RNA, 22 nt, Human
caaggcauuuggggaaccaaag

SEQ ID NO: 719987 - RNA, 18 nt, Human
caaguaaacagugucagg

SEQ ID NO: 719988 - RNA, 18 nt, Human
caaguaaacagugucagg

SEQ ID NO: 719989 - RNA, 19 nt, Human
caaguaaacagugucagga

SEQ ID NO: 719990 - RNA, 23 nt, Human
caaguauggauggaaccagacca

SEQ ID NO: 719991 - RNA, 22 nt, Human
caauuuacagaaaggcaucuga

SEQ ID NO: 719992 - RNA, 21 nt, Human
cacacacaaaaugaaugcuac

SEQ ID NO: 719993 - RNA, 21 nt, Human
cacuuccccaagaugcaaaaa

SEQ ID NO: 719994 - RNA, 18 nt, Human
cagaauacgaagaccaac

SEQ ID NO: 719995 - RNA, 19 nt, Human
cagcaccuugaguacaccu

SEQ ID NO: 719996 - RNA, 21 nt, Human
cagcccugggcggccgacaug

SEQ ID NO: 719997 - RNA, 20 nt, Human
cagcggagccuccuuccugu

SEQ ID NO: 719998 - RNA, 19 nt, Human
caggaggaacagaagcaaa

SEQ ID NO: 719999 - RNA, 21 nt, Human
caguaaccugugccacuuucu

SEQ ID NO: 720000 - RNA, 22 nt, Human
caguuuauaguuuuuccaggau

SEQ ID NO: 720001 - RNA, 19 nt, Human
ccaaggcauuuggggaacc

SEQ ID NO: 720002 - RNA, 24 nt, Human
ccagaccacaucucucuucagcuc

SEQ ID NO: 720003 - RNA, 22 nt, Human
ccagaguucccugaagagagga

SEQ ID NO: 720004 - RNA, 24 nt, Human
cccacugucccagcccugggcggc

SEQ ID NO: 720005 - RNA, 22 nt, Human
cccccgcugcccccacuguccc

SEQ ID NO: 720006 - RNA, 20 nt, Human
ccccgcugcccccacugucc

SEQ ID NO: 720007 - RNA, 18 nt, Human
cccggucccgucagcgcc

SEQ ID NO: 720008 - RNA, 22 nt, Human
cccucauccacccuagagcuca

SEQ ID NO: 720009 - RNA, 22 nt, Human
cccugggcggccgacaugaccc

SEQ ID NO: 720010 - RNA, 18 nt, Human
ccgagugcugguuauagg

SEQ ID NO: 720011 - RNA, 22 nt, Human
ccucauccacccuagagcucaa

SEQ ID NO: 720012 - RNA, 23 nt, Human
ccuggagcucagggcaggagaug

SEQ ID NO: 720013 - RNA, 21 nt, Human
cgugcugguggaggucugugg

SEQ ID NO: 720014 - RNA, 22 nt, Human
cucacuucuauccuaaggacca

SEQ ID NO: 720015 - RNA, 24 nt, Human
cucccaugcgagucuccugcugug

SEQ ID NO: 720016 - RNA, 23 nt, Human
cuccggcaacaaaauguaagaca

SEQ ID NO: 720017 - RNA, 18 nt, Human
cugcugccaucagaccca

SEQ ID NO: 720018 - RNA, 20 nt, Human
cugcugccaucagacccagc

SEQ ID NO: 720019 - RNA, 20 nt, Human
cuguaagaccacaaaaaaaa

SEQ ID NO: 720020 - RNA, 22 nt, Human
cugugucgcacacagcuuuucc

SEQ ID NO: 720021 - RNA, 22 nt, Human
cuuguucaauuuagaauauauu

SEQ ID NO: 720022 - RNA, 19 nt, Human
gaaaaaagaggcacuuaaa

SEQ ID NO: 720023 - RNA, 24 nt, Human
gaaaggauagggaggaaaaagaaa

SEQ ID NO: 720024 - RNA, 18 nt, Human
gacaugacccgcuaacga

SEQ ID NO: 720025 - RNA, 18 nt, Human
gaccauaaacccucaucc

SEQ ID NO: 720026 - RNA, 19 nt, Human
gaccaugaaagucuaagca

SEQ ID NO: 720027 - RNA, 21 nt, Human
gagcacgaccacgacacacac

SEQ ID NO: 720028 - RNA, 27 nt, Human
gagcauucagucuuuggucccugacuu

SEQ ID NO: 720029 - RNA, 26 nt, Human
gaggauagucuucauuaucaggccaa

SEQ ID NO: 720030 - RNA, 20 nt, Human
gccccgggaggaccagcgcu

SEQ ID NO: 720031 - RNA, 19 nt, Human
gccuaccucaggcccugcg

SEQ ID NO: 720032 - RNA, 20 nt, Human
gcugaagucaugcagcaaag

SEQ ID NO: 720033 - RNA, 21 nt, Human
ggaaaaacaggugcuuacagg

SEQ ID NO: 720034 - RNA, 21 nt, Human
ggaggucuguggccuggccag

SEQ ID NO: 720035 - RNA, 22 nt, Human
uaaaacacacaggucuucgaug

SEQ ID NO: 720036 - RNA, 21 nt, Human
uaaaauucuuggcauaauuug

SEQ ID NO: 720037 - RNA, 22 nt, Human
uaaaguaaugagcucacuuccc

SEQ ID NO: 720038 - RNA, 21 nt, Human
uaaaugaagaaagcaucauuu

SEQ ID NO: 720039 - RNA, 20 nt, Human
uaaaugauacuugguucucc

SEQ ID NO: 720040 - RNA, 21 nt, Human
uaacguaucuuuugcuuaaaa

SEQ ID NO: 720041 - RNA, 21 nt, Human
uaagaaaacauggacuugaaa

SEQ ID NO: 720042 - RNA, 19 nt, Human
uaagagcaacaacaaagag

SEQ ID NO: 720043 - RNA, 22 nt, Human
uacagaaaggcaucugauguau

SEQ ID NO: 720044 - RNA, 23 nt, Human
uacccccaagaccuuguauccaa

SEQ ID NO: 720045 - RNA, 19 nt, Human
uaccuccagaguucccuga

SEQ ID NO: 720046 - RNA, 20 nt, Human
uagaauauuguaugacaugg

SEQ ID NO: 720047 - RNA, 18 nt, Human
uaggugaaaaaagaggca

SEQ ID NO: 720048 - RNA, 23 nt, Human
uaguuuuuaaaugauacuugguu

SEQ ID NO: 720049 - RNA, 20 nt, Human
uaguuuuuccaggaugugga

SEQ ID NO: 720050 - RNA, 23 nt, Human
uaugacauggaacuauucagaau

SEQ ID NO: 720051 - RNA, 21 nt, Human
uauuccuuuuccuuuucuacc

SEQ ID NO: 720052 - RNA, 31 nt, Human
ucaacucuaacaaaccuaaggaacaaugagg

SEQ ID NO: 720053 - RNA, 23 nt, Human
ucaagagccaaagaaauguguuc

SEQ ID NO: 720054 - RNA, 18 nt, Human
ucagcuaacagugaccag

SEQ ID NO: 720055 - RNA, 19 nt, Human
ucaggcccucccgauucau

SEQ ID NO: 720056 - RNA, 19 nt, Human
ucagugcuggucauaccau

SEQ ID NO: 720057 - RNA, 19 nt, Human
ucccccgacccccgcugcc

SEQ ID NO: 720058 - RNA, 19 nt, Human
uccccuagcagccagaugg

SEQ ID NO: 720059 - RNA, 18 nt, Human
ucccugaagagaggauag

SEQ ID NO: 720060 - RNA, 19 nt, Human
uccgagugcugguuauagg

SEQ ID NO: 720061 - RNA, 21 nt, Human
uccgagugcugguuauaggua

SEQ ID NO: 720062 - RNA, 23 nt, Human
uccuacaugccaagcugugugau

SEQ ID NO: 720063 - RNA, 21 nt, Human
ucuaccucaaagaagacugcc

SEQ ID NO: 720064 - RNA, 24 nt, Human
ucuccugcugugaguuggccccgg

SEQ ID NO: 720065 - RNA, 23 nt, Human
ucuucaggaaggaugaccugugg

SEQ ID NO: 720066 - RNA, 22 nt, Human
ugaaaacacuaaguuaaacauc

SEQ ID NO: 720067 - RNA, 23 nt, Human
ugaagaagucaaagagauauuua

SEQ ID NO: 720068 - RNA, 18 nt, Human
ugaagucaugcagcaaag

SEQ ID NO: 720069 - RNA, 20 nt, Human
ugacccagcggaaccagcgg

SEQ ID NO: 720070 - RNA, 21 nt, Human
ugacuugcucugggagagaac

SEQ ID NO: 720071 - RNA, 18 nt, Human
ugagaaaauggcagguac

SEQ ID NO: 720072 - RNA, 22 nt, Human
ugagaaaauggcagguaccugg

SEQ ID NO: 720073 - RNA, 21 nt, Human
ugagauguccauaaacugaaa

SEQ ID NO: 720074 - RNA, 20 nt, Human
ugagccucuugcucagcucc

SEQ ID NO: 720075 - RNA, 20 nt, Human
ugcagguuuucucugccugg

SEQ ID NO: 720076 - RNA, 20 nt, Human
ugcauguaaugggucaggag

SEQ ID NO: 720077 - RNA, 18 nt, Human
ugccaucagacccagcua

SEQ ID NO: 720078 - RNA, 24 nt, Human
ugccaucagacccagcuacuacuc

SEQ ID NO: 720079 - RNA, 22 nt, Human
ugccugagaaaauggcagguac

SEQ ID NO: 720080 - RNA, 23 nt, Human
ugcucagcuccccuagcagccag

SEQ ID NO: 720081 - RNA, 23 nt, Human
ugcugugaguuggccccgggagg

SEQ ID NO: 720082 - RNA, 18 nt, Human
uggacuaauggagcugcu

SEQ ID NO: 720083 - RNA, 22 nt, Human
ugggccccuagaggagcugcuc

SEQ ID NO: 720084 - RNA, 20 nt, Human
uggugccauacuccuguagc

SEQ ID NO: 720085 - RNA, 23 nt, Human
ugguggcaggagguuaagugcua

SEQ ID NO: 720086 - RNA, 20 nt, Human
uguacacaugugugguucua

SEQ ID NO: 720087 - RNA, 19 nt, Human
uguauaaauccaggucaaa

SEQ ID NO: 720088 - RNA, 22 nt, Human
ugucaggaauuccgagugcugg

SEQ ID NO: 720089 - RNA, 19 nt, Human
ugucccagcccugggcggc

SEQ ID NO: 720090 - RNA, 20 nt, Human
ugucccagcccugggcggcc

SEQ ID NO: 720091 - RNA, 22 nt, Human
ugugcauguaaugggucaggag

SEQ ID NO: 720092 - RNA, 24 nt, Human
uuaaagcagacggaaaagaaggca

SEQ ID NO: 720093 - RNA, 24 nt, Human
uuaagauuucaaccuauucugugu

SEQ ID NO: 720094 - RNA, 24 nt, Human
uuagacacaucuugaaaacacuaa

SEQ ID NO: 720095 - RNA, 25 nt, Human
uuagccuucucagcuuccccuaaau

SEQ ID NO: 720096 - RNA, 26 nt, Human
uucaacucuaauuguucagccugacu

SEQ ID NO: 720097 - RNA, 20 nt, Human
uugccacccuggacagccug

SEQ ID NO: 720098 - RNA, 20 nt, Human
uuggccaccacaaguuuuuc

SEQ ID NO: 720099 - RNA, 18 nt, Human
uuuaggaaacuccuuaca

SEQ ID NO: 720100 - RNA, 22 nt, Human
uuucucuuucccagaacugaac

SEQ ID NO: 720101 - RNA, 20 nt, Human
uuugugguuguugcuguugc

SEQ ID NO: 720102 - RNA, 24 nt, Human
aaagugcugggauuacagguguga

SEQ ID NO: 720103 - RNA, 24 nt, Human
aaagugcugggauuacagguguga

SEQ ID NO: 720104 - RNA, 21 nt, Human
aaauaauuauuacacaaaacc

SEQ ID NO: 720105 - RNA, 27 nt, Human
aagcaauucuccugccucagucuccca

SEQ ID NO: 720106 - RNA, 18 nt, Human
aaggcaccacacuggaaa

SEQ ID NO: 720107 - RNA, 22 nt, Human
aaguagcugggauuacaggugc

SEQ ID NO: 720108 - RNA, 18 nt, Human
aagugcugggauuacagg

SEQ ID NO: 720109 - RNA, 18 nt, Human
aagugcugggauuacagg

SEQ ID NO: 720110 - RNA, 19 nt, Human
aagugcugggauuacaggu

SEQ ID NO: 720111 - RNA, 19 nt, Human
aagugcugggauuacaggu

SEQ ID NO: 720112 - RNA, 21 nt, Human
aaugucacuucaaauuccuga

SEQ ID NO: 720113 - RNA, 23 nt, Human
acaaaaccuauguaacacacacu

SEQ ID NO: 720114 - RNA, 18 nt, Human
acaaugagagacccacac

SEQ ID NO: 720115 - RNA, 18 nt, Human
acaauuuucaccaguacc

SEQ ID NO: 720116 - RNA, 19 nt, Human
acagacaggguuucaccau

SEQ ID NO: 720117 - RNA, 22 nt, Human
acagacgcuagcggacaaacca

SEQ ID NO: 720118 - RNA, 19 nt, Human
acaggguuucaccauguug

SEQ ID NO: 720119 - RNA, 20 nt, Human
acaggguuucaccauguugu

SEQ ID NO: 720120 - RNA, 24 nt, Human
acaggguuucaccauguuguucag

SEQ ID NO: 720121 - RNA, 23 nt, Human
accacuuugacacuuuucaugcu

SEQ ID NO: 720122 - RNA, 23 nt, Human
accauguuguucaggcuggucuc

SEQ ID NO: 720123 - RNA, 25 nt, Human
acccaucucggccucccaaagugcu

SEQ ID NO: 720124 - RNA, 27 nt, Human
agaaaaacagccugagguucucuugaa

SEQ ID NO: 720125 - RNA, 20 nt, Human
agaauuuaaauguacuagaa

SEQ ID NO: 720126 - RNA, 23 nt, Human
agaugaagaaucugagacucaga

SEQ ID NO: 720127 - RNA, 24 nt, Human
agcgcucuuucaaaaugccaccuu

SEQ ID NO: 720128 - RNA, 21 nt, Human
aggaaaucauuagguauauuc

SEQ ID NO: 720129 - RNA, 25 nt, Human
aggguuccuuucacuccaauuucuu

SEQ ID NO: 720130 - RNA, 22 nt, Human
aggugccugccaccaggcccag

SEQ ID NO: 720131 - RNA, 24 nt, Human
agucagaauauccagguuauaauc

SEQ ID NO: 720132 - RNA, 20 nt, Human
agugcaguggcacaaucuug

SEQ ID NO: 720133 - RNA, 24 nt, Human
agugcaguggcacaaucuuggcuc

SEQ ID NO: 720134 - RNA, 23 nt, Human
auaaaggagcagcuuuaguguca

SEQ ID NO: 720135 - RNA, 19 nt, Human
auaaagugcaaaagcuaua

SEQ ID NO: 720136 - RNA, 21 nt, Human
auaguacacaacuguaaauaa

SEQ ID NO: 720137 - RNA, 24 nt, Human
augauccacccaucucggccuccc

SEQ ID NO: 720138 - RNA, 24 nt, Human
augauccacccaucucggccuccc

SEQ ID NO: 720139 - RNA, 24 nt, Human
augugaggcauauaaaaggcacca

SEQ ID NO: 720140 - RNA, 19 nt, Human
auuacaggugccugccacc

SEQ ID NO: 720141 - RNA, 19 nt, Human
caaaacagcaggcuuggac

SEQ ID NO: 720142 - RNA, 24 nt, Human
caaagugcugggauuacaggugug

SEQ ID NO: 720143 - RNA, 24 nt, Human
caaagugcugggauuacaggugug

SEQ ID NO: 720144 - RNA, 19 nt, Human
caacuccaaucccaaaaga

SEQ ID NO: 720145 - RNA, 21 nt, Human
caagcaauucuccugccucag

SEQ ID NO: 720146 - RNA, 20 nt, Human
cacacuggaaagaauccaag

SEQ ID NO: 720147 - RNA, 20 nt, Human
cacacuuuauaguacacaac

SEQ ID NO: 720148 - RNA, 21 nt, Human
caccaggcccagcuaauuuuu

SEQ ID NO: 720149 - RNA, 24 nt, Human
caccauguuguucaggcuggucuc

SEQ ID NO: 720150 - RNA, 22 nt, Human
cacccaucucggccucccaaag

SEQ ID NO: 720151 - RNA, 22 nt, Human
cacccaucucggccucccaaag

SEQ ID NO: 720152 - RNA, 23 nt, Human
cacccaucucggccucccaaagu

SEQ ID NO: 720153 - RNA, 23 nt, Human
cacccaucucggccucccaaagu

SEQ ID NO: 720154 - RNA, 21 nt, Human
caccgcacccagcacuuuggc

SEQ ID NO: 720155 - RNA, 24 nt, Human
cagaaaaacagccugagguucucu

SEQ ID NO: 720156 - RNA, 19 nt, Human
cagaacauccugugacuga

SEQ ID NO: 720157 - RNA, 20 nt, Human
cagaacauccugugacugac

SEQ ID NO: 720158 - RNA, 20 nt, Human
cagacagacgcuagcggaca

SEQ ID NO: 720159 - RNA, 22 nt, Human
cagccagaaagccaguuauauc

SEQ ID NO: 720160 - RNA, 23 nt, Human
cagccucucucauguauaccaag

SEQ ID NO: 720161 - RNA, 24 nt, Human
caggguuucaccauguuguucagg

SEQ ID NO: 720162 - RNA, 19 nt, Human
caggugccugccaccaggc

SEQ ID NO: 720163 - RNA, 23 nt, Human
cauguuguucaggcuggucucaa

SEQ ID NO: 720164 - RNA, 20 nt, Human
ccaaagugcugggauuacag

SEQ ID NO: 720165 - RNA, 20 nt, Human
ccaaagugcugggauuacag

SEQ ID NO: 720166 - RNA, 21 nt, Human
ccaaagugcugggauuacagg

SEQ ID NO: 720167 - RNA, 21 nt, Human
ccaaagugcugggauuacagg

SEQ ID NO: 720168 - RNA, 21 nt, Human
ccaaagugcugggauuacagg

SEQ ID NO: 720169 - RNA, 21 nt, Human
ccaaagugcugggauuacagg

SEQ ID NO: 720170 - RNA, 24 nt, Human
ccaaagugcugggauuacaggugu

SEQ ID NO: 720171 - RNA, 24 nt, Human
ccaaagugcugggauuacaggugu

SEQ ID NO: 720172 - RNA, 21 nt, Human
ccaaguagcugggauuacagg

SEQ ID NO: 720173 - RNA, 19 nt, Human
ccaguuucaagcaauucuc

SEQ ID NO: 720174 - RNA, 23 nt, Human
ccauacacuccacaacuccaauc

SEQ ID NO: 720175 - RNA, 22 nt, Human
cccaaguagcugggauuacagg

SEQ ID NO: 720176 - RNA, 22 nt, Human
cccaaguagcugggauuacagg

SEQ ID NO: 720177 - RNA, 24 nt, Human
cccaaguagcugggauuacaggug

SEQ ID NO: 720178 - RNA, 19 nt, Human
cccuaaguucaucaucuuu

SEQ ID NO: 720179 - RNA, 20 nt, Human
ccuaguaacuaacaaucuac

SEQ ID NO: 720180 - RNA, 24 nt, Human
ccuguagcagaguaaaaccggggc

SEQ ID NO: 720181 - RNA, 24 nt, Human
ccuuccaguuucaagcaauucucc

SEQ ID NO: 720182 - RNA, 19 nt, Human
cuaccacccuacacacacc

SEQ ID NO: 720183 - RNA, 20 nt, Human
cuauguaacacacacuuuau

SEQ ID NO: 720184 - RNA, 23 nt, Human
cucaaaaaugacaucugagagga

SEQ ID NO: 720185 - RNA, 24 nt, Human
cucacugcaaccucugccuuccag

SEQ ID NO: 720186 - RNA, 24 nt, Human
cucagucucccaaguagcugggau

SEQ ID NO: 720187 - RNA, 20 nt, Human
cugcaaccucugccuuccag

SEQ ID NO: 720188 - RNA, 23 nt, Human
cugcaaccucugccuuccaguuu

SEQ ID NO: 720189 - RNA, 24 nt, Human
cugcaaccucugccuuccaguuuc

SEQ ID NO: 720190 - RNA, 28 nt, Human
cugccauacacuccacaacuccaauccc

SEQ ID NO: 720191 - RNA, 23 nt, Human
cugccucagucucccaaguagcu

SEQ ID NO: 720192 - RNA, 18 nt, Human
cuuaaauaacuuuuccac

SEQ ID NO: 720193 - RNA, 18 nt, Human
cuuccuugacuacauccu

SEQ ID NO: 720194 - RNA, 22 nt, Human
cuucuuauucagcaauuuagca

SEQ ID NO: 720195 - RNA, 19 nt, Human
gaacacgauuaaacaaguc

SEQ ID NO: 720196 - RNA, 21 nt, Human
gaacauccugugacugacccu

SEQ ID NO: 720197 - RNA, 20 nt, Human
gaagguguuuaaccaguuua

SEQ ID NO: 720198 - RNA, 21 nt, Human
gacagcauaaacaaaaacaau

SEQ ID NO: 720199 - RNA, 23 nt, Human
gacaggguuucaccauguuguuc

SEQ ID NO: 720200 - RNA, 23 nt, Human
gaccacucaaaaaugacaucuga

SEQ ID NO: 720201 - RNA, 22 nt, Human
gaccucaugauccacccaucuc

SEQ ID NO: 720202 - RNA, 24 nt, Human
gaccucaugauccacccaucucgg

SEQ ID NO: 720203 - RNA, 24 nt, Human
gaccucaugauccacccaucucgg

SEQ ID NO: 720204 - RNA, 19 nt, Human
gauguaucuguauaucaua

SEQ ID NO: 720205 - RNA, 18 nt, Human
gauuacaggugccugcca

SEQ ID NO: 720206 - RNA, 18 nt, Human
gauuacaggugugagaca

SEQ ID NO: 720207 - RNA, 18 nt, Human
gauuacaggugugagaca

SEQ ID NO: 720208 - RNA, 22 nt, Human
gauuacaggugugagacaccgc

SEQ ID NO: 720209 - RNA, 22 nt, Human
gauuacaggugugagacaccgc

SEQ ID NO: 720210 - RNA, 22 nt, Human
gccauacacuccacaacuccaa

SEQ ID NO: 720211 - RNA, 24 nt, Human
gcccagcuaauuuuuuuguauuuu

SEQ ID NO: 720212 - RNA, 24 nt, Human
gccuaguaacuaacaaucuacaga

SEQ ID NO: 720213 - RNA, 24 nt, Human
gccucagucucccaaguagcuggg

SEQ ID NO: 720214 - RNA, 19 nt, Human
gcuagagugcaguggcaca

SEQ ID NO: 720215 - RNA, 19 nt, Human
gcuagcggacaaaccacuu

SEQ ID NO: 720216 - RNA, 20 nt, Human
gcucacugcaaccucugccu

SEQ ID NO: 720217 - RNA, 23 nt, Human
gcugcuuuuugaucugaugacag

SEQ ID NO: 720218 - RNA, 19 nt, Human
gcuggcagcaccuuggccu

SEQ ID NO: 720219 - RNA, 19 nt, Human
gcuuauugcccaggcuaga

SEQ ID NO: 720220 - RNA, 18 nt, Human
ggaaaggauugcuggcag

SEQ ID NO: 720221 - RNA, 22 nt, Human
ggaguuuugcuuauugcccagg

SEQ ID NO: 720222 - RNA, 19 nt, Human
ggccccugacugucacuuc

SEQ ID NO: 720223 - RNA, 20 nt, Human
ggcuggucucaacugcugac

SEQ ID NO: 720224 - RNA, 20 nt, Human
ggcuggucucaacugcugac

SEQ ID NO: 720225 - RNA, 19 nt, Human
gugugucagaacauccugu

SEQ ID NO: 720226 - RNA, 23 nt, Human
guucugcagacagacgcuagcgg

SEQ ID NO: 720227 - RNA, 21 nt, Human
uaaauaacuuuuccacagaug

SEQ ID NO: 720228 - RNA, 18 nt, Human
uaaauacaaaucuaaaua

SEQ ID NO: 720229 - RNA, 20 nt, Human
uaaaucaugucuaaauacaa

SEQ ID NO: 720230 - RNA, 25 nt, Human
uaagaaaaagcacugggccaggagu

SEQ ID NO: 720231 - RNA, 24 nt, Human
uaauagauacccuguggauguauc

SEQ ID NO: 720232 - RNA, 18 nt, Human
uaaucuguaggguuccuu

SEQ ID NO: 720233 - RNA, 22 nt, Human
uacacuccacaacuccaauccc

SEQ ID NO: 720234 - RNA, 22 nt, Human
uacagacaggguuucaccaugu

SEQ ID NO: 720235 - RNA, 24 nt, Human
uaccaagaauggaagccgaaggcu

SEQ ID NO: 720236 - RNA, 23 nt, Human
uagagugcaguggcacaaucuug

SEQ ID NO: 720237 - RNA, 24 nt, Human
uagagugcaguggcacaaucuugg

SEQ ID NO: 720238 - RNA, 21 nt, Human
uagcagaguaaaacuggacca

SEQ ID NO: 720239 - RNA, 22 nt, Human
uaggaaugucacuucaaauucc

SEQ ID NO: 720240 - RNA, 24 nt, Human
uaguacacaacuguaaauaagaau

SEQ ID NO: 720241 - RNA, 24 nt, Human
uaguacagacaggguuucaccaug

SEQ ID NO: 720242 - RNA, 18 nt, Human
uaguaugugauguuaccu

SEQ ID NO: 720243 - RNA, 19 nt, Human
uauagccauaucugcucac

SEQ ID NO: 720244 - RNA, 22 nt, Human
uaucaucacugucagaaaaaca

SEQ ID NO: 720245 - RNA, 19 nt, Human
uauguaacacacacuuuau

SEQ ID NO: 720246 - RNA, 25 nt, Human
uauguaacacacacuuuauaguaca

SEQ ID NO: 720247 - RNA, 22 nt, Human
uauugcccaggcuagagugcag

SEQ ID NO: 720248 - RNA, 18 nt, Human
ucaaaaggucagaaguuu

SEQ ID NO: 720249 - RNA, 24 nt, Human
ucaacacuuccuuuuauucuaaaa

SEQ ID NO: 720250 - RNA, 27 nt, Human
ucaacugcugaccucaugauccaccca

SEQ ID NO: 720251 - RNA, 27 nt, Human
ucaacugcugaccucaugauccaccca

SEQ ID NO: 720252 - RNA, 21 nt, Human
ucaccauguuguucaggcugg

SEQ ID NO: 720253 - RNA, 18 nt, Human
ucacugcaaccucugccu

SEQ ID NO: 720254 - RNA, 19 nt, Human
ucacugcaaccucugccuu

SEQ ID NO: 720255 - RNA, 23 nt, Human
ucacugcaaccucugccuuccag

SEQ ID NO: 720256 - RNA, 19 nt, Human
ucagaaagauaaaggagca

SEQ ID NO: 720257 - RNA, 20 nt, Human
ucagaacauccugugacuga

SEQ ID NO: 720258 - RNA, 27 nt, Human
ucauccauuuucuuuucaacacuuccu

SEQ ID NO: 720259 - RNA, 23 nt, Human
uccaagagaaugaaaaaucacuu

SEQ ID NO: 720260 - RNA, 24 nt, Human
uccaagagaaugaaaaaucacuuc

SEQ ID NO: 720261 - RNA, 19 nt, Human
uccacaacuccaaucccaa

SEQ ID NO: 720262 - RNA, 20 nt, Human
uccagauuacagaugaagaa

SEQ ID NO: 720263 - RNA, 23 nt, Human
ucccaaagugcugggauuacagg

SEQ ID NO: 720264 - RNA, 23 nt, Human
ucccaaagugcugggauuacagg

SEQ ID NO: 720265 - RNA, 23 nt, Human
ucccaaguagcugggauuacagg

SEQ ID NO: 720266 - RNA, 20 nt, Human
uccuaaauccucagacagcc

SEQ ID NO: 720267 - RNA, 20 nt, Human
ucucagccagaaagccaguu

SEQ ID NO: 720268 - RNA, 20 nt, Human
ucucggccucccaaagugcu

SEQ ID NO: 720269 - RNA, 20 nt, Human
ucucggccucccaaagugcu

SEQ ID NO: 720270 - RNA, 27 nt, Human
ucucucauguauaccaagaauggaagc

SEQ ID NO: 720271 - RNA, 19 nt, Human
ucuugaacuccuaaauccu

SEQ ID NO: 720272 - RNA, 20 nt, Human
ugaaacagcuuugugacacu

SEQ ID NO: 720273 - RNA, 24 nt, Human
ugaaacagcuuugugacacugaag

SEQ ID NO: 720274 - RNA, 22 nt, Human
ugaacuagaaaggauugauuau

SEQ ID NO: 720275 - RNA, 20 nt, Human
ugacacugaaggaaucuacu

SEQ ID NO: 720276 - RNA, 18 nt, Human
ugacagcauaaacaaaaa

SEQ ID NO: 720277 - RNA, 21 nt, Human
ugacagcauaaacaaaaacaa

SEQ ID NO: 720278 - RNA, 23 nt, Human
ugaccucaugauccacccaucuc

SEQ ID NO: 720279 - RNA, 18 nt, Human
ugacuuccaggcugagau

SEQ ID NO: 720280 - RNA, 21 nt, Human
ugagaacacgauuaaacaagu

SEQ ID NO: 720281 - RNA, 22 nt, Human
ugagaacacgauuaaacaaguc

SEQ ID NO: 720282 - RNA, 22 nt, Human
ugagaacacgauuaaacaaguc

SEQ ID NO: 720283 - RNA, 24 nt, Human
ugauccacccaucucggccuccca

SEQ ID NO: 720284 - RNA, 24 nt, Human
ugauccacccaucucggccuccca

SEQ ID NO: 720285 - RNA, 22 nt, Human
ugaugacagauggcuuggagau

SEQ ID NO: 720286 - RNA, 20 nt, Human
ugcaaccucugccuuccagu

SEQ ID NO: 720287 - RNA, 22 nt, Human
ugcaguggcacaaucuuggcuc

SEQ ID NO: 720288 - RNA, 27 nt, Human
ugccauacacuccacaacuccaauccc

SEQ ID NO: 720289 - RNA, 24 nt, Human
ugcccaggcuagagugcaguggca

SEQ ID NO: 720290 - RNA, 23 nt, Human
ugccucagucucccaaguagcug

SEQ ID NO: 720291 - RNA, 24 nt, Human
ugccucagucucccaaguagcugg

SEQ ID NO: 720292 - RNA, 24 nt, Human
ugcugggauuacaggugugagaca

SEQ ID NO: 720293 - RNA, 24 nt, Human
ugcugggauuacaggugugagaca

SEQ ID NO: 720294 - RNA, 21 nt, Human
ugcuugcccagcgcucuuuca

SEQ ID NO: 720295 - RNA, 19 nt, Human
uggaaaggauugcuggcag

SEQ ID NO: 720296 - RNA, 23 nt, Human
uggaaucagggccccugacuguc

SEQ ID NO: 720297 - RNA, 25 nt, Human
uggaccacucaaaaaugacaucuga

SEQ ID NO: 720298 - RNA, 23 nt, Human
uggaguuuugcuuauugcccagg

SEQ ID NO: 720299 - RNA, 24 nt, Human
uggcacaaucuuggcucacugcaa

SEQ ID NO: 720300 - RNA, 19 nt, Human
uggcagcaccuuggccucu

SEQ ID NO: 720301 - RNA, 21 nt, Human
ugggauuacaggugccugcca

SEQ ID NO: 720302 - RNA, 22 nt, Human
ugggauuacaggugccugccac

SEQ ID NO: 720303 - RNA, 24 nt, Human
ugggauuacaggugccugccacca

SEQ ID NO: 720304 - RNA, 18 nt, Human
ugggauuacaggugugag

SEQ ID NO: 720305 - RNA, 18 nt, Human
ugggauuacaggugugag

SEQ ID NO: 720306 - RNA, 18 nt, Human
ugggauuacaggugugag

SEQ ID NO: 720307 - RNA, 18 nt, Human
ugggauuacaggugugag

SEQ ID NO: 720308 - RNA, 21 nt, Human
ugggauuacaggugugagaca

SEQ ID NO: 720309 - RNA, 21 nt, Human
ugggauuacaggugugagaca

SEQ ID NO: 720310 - RNA, 22 nt, Human
ugggauuacaggugugagacac

SEQ ID NO: 720311 - RNA, 22 nt, Human
ugggauuacaggugugagacac

SEQ ID NO: 720312 - RNA, 23 nt, Human
ugggauuacaggugugagacacc

SEQ ID NO: 720313 - RNA, 23 nt, Human
ugggauuacaggugugagacacc

SEQ ID NO: 720314 - RNA, 24 nt, Human
ugggauuacaggugugagacaccg

SEQ ID NO: 720315 - RNA, 24 nt, Human
ugggauuacaggugugagacaccg

SEQ ID NO: 720316 - RNA, 19 nt, Human
uggguucaaaacagcaggc

SEQ ID NO: 720317 - RNA, 25 nt, Human
ugucaagcuuugggccccccgaauu

SEQ ID NO: 720318 - RNA, 18 nt, Human
ugugcugagccaguuuug

SEQ ID NO: 720319 - RNA, 23 nt, Human
uguuacgacaaccuccaaugagg

SEQ ID NO: 720320 - RNA, 20 nt, Human
uguucaggcuggucucaacu

SEQ ID NO: 720321 - RNA, 21 nt, Human
uuaaggaaaucauuagguaua

SEQ ID NO: 720322 - RNA, 19 nt, Human
uuaauggucauccauuuuc

SEQ ID NO: 720323 - RNA, 20 nt, Human
uuacagaugcacgagcacuu

SEQ ID NO: 720324 - RNA, 24 nt, Human
uuaguacagacaggguuucaccau

SEQ ID NO: 720325 - RNA, 23 nt, Human
uuauucuaaaaggaaauuuuguc

SEQ ID NO: 720326 - RNA, 20 nt, Human
uucaaaaugccaccuugcca

SEQ ID NO: 720327 - RNA, 20 nt, Human
uucaaaaugccaccuugcca

SEQ ID NO: 720328 - RNA, 21 nt, Human
uucaagcaauucuccugccuc

SEQ ID NO: 720329 - RNA, 24 nt, Human
uucaagcaauucuccugccucagu

SEQ ID NO: 720330 - RNA, 25 nt, Human
uuccacagaugauaggaaugucacu

SEQ ID NO: 720331 - RNA, 24 nt, Human
uuccagaaaacuuuuucuuccuug

SEQ ID NO: 720332 - RNA, 24 nt, Human
uuccaguuucaagcaauucuccug

SEQ ID NO: 720333 - RNA, 20 nt, Human
uuccuugacuacauccucag

SEQ ID NO: 720334 - RNA, 20 nt, Human
uuccuuuuauucuaaaagga

SEQ ID NO: 720335 - RNA, 21 nt, Human
uuccuuuuuuucuuuuuugag

SEQ ID NO: 720336 - RNA, 19 nt, Human
uucugauuuggagucucuu

SEQ ID NO: 720337 - RNA, 18 nt, Human
uugcccaggcuagagugc

SEQ ID NO: 720338 - RNA, 19 nt, Human
uuuauagccauaucugcuu

SEQ ID NO: 720339 - RNA, 24 nt, Human
uuucaccauguuguucaggcuggu

SEQ ID NO: 720340 - RNA, 24 nt, Human
uuucuuuuuccuuuuuuucuuuuu

SEQ ID NO: 720341 - RNA, 22 nt, Human
uuucuuuuuuuaaaaaaugugg

SEQ ID NO: 720342 - RNA, 22 nt, Human
uuugccccuuaacacaaagaug

SEQ ID NO: 720343 - RNA, 19 nt, Human
uuuuaaggaaaucauuagg

SEQ ID NO: 720344 - RNA, 21 nt, Human
uuuuacagauauggcauuacu

SEQ ID NO: 720345 - RNA, 23 nt, Human
uuuugcuuauugcccaggcuaga

SEQ ID NO: 720346 - RNA, 22 nt, Human
uuuuguauuuuuaguacagaca

SEQ ID NO: 720347 - RNA, 24 nt, Human
uuuuuaguacagacaggguuucac

SEQ ID NO: 720348 - RNA, 21 nt, Human
aaaaaacgcuuauaaacacca

SEQ ID NO: 720349 - RNA, 22 nt, Human
aaaaaacgcuuauaaacaccau

SEQ ID NO: 720350 - RNA, 23 nt, Human
aaacaauggaacaucaggucaaa

SEQ ID NO: 720351 - RNA, 24 nt, Human
aaacaauggaacaucaggucaaac

SEQ ID NO: 720352 - RNA, 18 nt, Human
aaagguccuuaucuuucu

SEQ ID NO: 720353 - RNA, 27 nt, Human
aaauagacaaugaggaucguaaagaaa

SEQ ID NO: 720354 - RNA, 21 nt, Human
aacuucucagagaagcuacac

SEQ ID NO: 720355 - RNA, 21 nt, Human
aagcaguuauggacuggcuca

SEQ ID NO: 720356 - RNA, 24 nt, Human
aauuuacuuuccaaugaaaaaaau

SEQ ID NO: 720357 - RNA, 23 nt, Human
acaacagugacaagacauacacu

SEQ ID NO: 720358 - RNA, 19 nt, Human
acacuuucuuuccaaugaa

SEQ ID NO: 720359 - RNA, 22 nt, Human
acagaguugucuucuuucaaag

SEQ ID NO: 720360 - RNA, 20 nt, Human
acucccuaugccaucugcau

SEQ ID NO: 720361 - RNA, 23 nt, Human
agaccugaauauaacgagaaaau

SEQ ID NO: 720362 - RNA, 23 nt, Human
agccaccaucuucaguucuggga

SEQ ID NO: 720363 - RNA, 19 nt, Human
aggacgcucuagcuuaaaa

SEQ ID NO: 720364 - RNA, 26 nt, Human
aggggaaaaauacucuaauauuuuga

SEQ ID NO: 720365 - RNA, 21 nt, Human
aguggcaaggaaugggaaaga

SEQ ID NO: 720366 - RNA, 24 nt, Human
aucagccuuuuaugauuuuaguuu

SEQ ID NO: 720367 - RNA, 18 nt, Human
caagugggaaauaaacuu

SEQ ID NO: 720368 - RNA, 24 nt, Human
cacuggaaucuuuacagcuuacca

SEQ ID NO: 720369 - RNA, 20 nt, Human
cagaauauaccacaucccac

SEQ ID NO: 720370 - RNA, 21 nt, Human
cagaguugucuucuuucaaag

SEQ ID NO: 720371 - RNA, 23 nt, Human
cauaaucuacacuuaaaugacau

SEQ ID NO: 720372 - RNA, 25 nt, Human
caucauaggacuucaaagaauggaa

SEQ ID NO: 720373 - RNA, 27 nt, Human
caucuucaguucugggagccugaguuu

SEQ ID NO: 720374 - RNA, 20 nt, Human
caugugaaugcuauacaagu

SEQ ID NO: 720375 - RNA, 20 nt, Human
cauuuugcaauuacauaugc

SEQ ID NO: 720376 - RNA, 18 nt, Human
ccauuucccccuaaaaca

SEQ ID NO: 720377 - RNA, 22 nt, Human
cccuugguugcugaccuagggc

SEQ ID NO: 720378 - RNA, 25 nt, Human
ccuaaaacugcucugucagggacuu

SEQ ID NO: 720379 - RNA, 21 nt, Human
cgcuuauaaacaccauugcuc

SEQ ID NO: 720380 - RNA, 18 nt, Human
cuaugcucuucuguggag

SEQ ID NO: 720381 - RNA, 18 nt, Human
cuuagaaacguuguagag

SEQ ID NO: 720382 - RNA, 21 nt, Human
gacaaugaggaucguaaagaa

SEQ ID NO: 720383 - RNA, 22 nt, Human
ggugacggaggagcagccggaa

SEQ ID NO: 720384 - RNA, 23 nt, Human
guugugcacccuuuuucuacagg

SEQ ID NO: 720385 - RNA, 22 nt, Human
uaaaaaaacgcuuauaaacacc

SEQ ID NO: 720386 - RNA, 23 nt, Human
uaaacucacucucagaaaaccau

SEQ ID NO: 720387 - RNA, 20 nt, Human
uaaauaaaaacaccaacguu

SEQ ID NO: 720388 - RNA, 23 nt, Human
uaaauaucacaacagugacaaga

SEQ ID NO: 720389 - RNA, 23 nt, Human
uaacuacaacaacuauggcagaa

SEQ ID NO: 720390 - RNA, 19 nt, Human
uaaucaccaaaaaaggcuu

SEQ ID NO: 720391 - RNA, 21 nt, Human
uaaucuacacuuaaaugacau

SEQ ID NO: 720392 - RNA, 21 nt, Human
uacucccuaugccaucugcau

SEQ ID NO: 720393 - RNA, 22 nt, Human
uagagauggaaaagugauuugg

SEQ ID NO: 720394 - RNA, 20 nt, Human
uagcaacuaaauccagacac

SEQ ID NO: 720395 - RNA, 19 nt, Human
uauuacuguaauuaaaaug

SEQ ID NO: 720396 - RNA, 18 nt, Human
ucaaacaacucuugcuac

SEQ ID NO: 720397 - RNA, 21 nt, Human
ucacauugaagcuuuugcucc

SEQ ID NO: 720398 - RNA, 25 nt, Human
ucacucucagaaaaccauucucaaa

SEQ ID NO: 720399 - RNA, 18 nt, Human
ucaggcugaauauugcug

SEQ ID NO: 720400 - RNA, 20 nt, Human
uccccaaauggcacaagccu

SEQ ID NO: 720401 - RNA, 20 nt, Human
ucucagagaagcuacacugg

SEQ ID NO: 720402 - RNA, 18 nt, Human
ucuguggaguuuuccucu

SEQ ID NO: 720403 - RNA, 24 nt, Human
ucuucaguucugggagccugaguu

SEQ ID NO: 720404 - RNA, 27 nt, Human
ugaaaaaaaucagccauuggcgauaua

SEQ ID NO: 720405 - RNA, 19 nt, Human
ugaauuguuuggcucaaaa

SEQ ID NO: 720406 - RNA, 25 nt, Human
ugccaucugcauauuggcacccugc

SEQ ID NO: 720407 - RNA, 22 nt, Human
ugcuacauuagcuaaaacacag

SEQ ID NO: 720408 - RNA, 20 nt, Human
uggaaaagugauuuggcuga

SEQ ID NO: 720409 - RNA, 18 nt, Human
uggcagaaaugcuuucag

SEQ ID NO: 720410 - RNA, 21 nt, Human
uggcgauauaacuacaacaac

SEQ ID NO: 720411 - RNA, 21 nt, Human
uggcuaaaaguggccuaugcu

SEQ ID NO: 720412 - RNA, 18 nt, Human
uggcucaaaaaugcacac

SEQ ID NO: 720413 - RNA, 23 nt, Human
ugggguuugcugcagaaauggug

SEQ ID NO: 720414 - RNA, 18 nt, Human
uguauuugugacuuaauc

SEQ ID NO: 720415 - RNA, 23 nt, Human
ugugaaugcuauacaagugggaa

SEQ ID NO: 720416 - RNA, 18 nt, Human
uuaaaauaaacuuuugga

SEQ ID NO: 720417 - RNA, 21 nt, Human
uuaaauaucacaacagugaca

SEQ ID NO: 720418 - RNA, 19 nt, Human
uuaguucuaacaacaaacc

SEQ ID NO: 720419 - RNA, 25 nt, Human
uucaaagaauggaagaauauagccc

SEQ ID NO: 720420 - RNA, 26 nt, Human
uucaaagaauggaagaauauagcccc

SEQ ID NO: 720421 - RNA, 18 nt, Human
uucagagggauaaucauc

SEQ ID NO: 720422 - RNA, 22 nt, Human
uucccccuaaaacagaacugau

SEQ ID NO: 720423 - RNA, 22 nt, Human
uucuucagagggauaaucaucc

SEQ ID NO: 720424 - RNA, 18 nt, Human
uugaagccaaugaaaucc

SEQ ID NO: 720425 - RNA, 21 nt, Human
uugucuucuuucaaagguccu

SEQ ID NO: 720426 - RNA, 18 nt, Human
uuuaaaauaaacuuuugg

SEQ ID NO: 720427 - RNA, 21 nt, Human
uuugcuccuuuuuacaaggua

SEQ ID NO: 720428 - RNA, 24 nt, Human
aaguuaccuuuugaagaugagaca

SEQ ID NO: 720429 - RNA, 25 nt, Human
acaacagggcacgagccuccggacc

SEQ ID NO: 720430 - RNA, 27 nt, Human
cagccaggaacaacacccauuaggcac

SEQ ID NO: 720431 - RNA, 23 nt, Human
caggagacucggcgagaaaaccc

SEQ ID NO: 720432 - RNA, 22 nt, Human
cccaggagacucggcgagaaaa

SEQ ID NO: 720433 - RNA, 21 nt, Human
ccccacaacagggcacgagcc

SEQ ID NO: 720434 - RNA, 19 nt, Human
cgagaaaaccccucaggcc

SEQ ID NO: 720435 - RNA, 19 nt, Human
cucaggcccuggacaucaa

SEQ ID NO: 720436 - RNA, 18 nt, Human
gagccuccggaccgcccc

SEQ ID NO: 720437 - RNA, 18 nt, Human
gagccuccggaccgcccc

SEQ ID NO: 720438 - RNA, 19 nt, Human
ggcccuggacaucaagucc

SEQ ID NO: 720439 - RNA, 23 nt, Human
ugacagaaaaggagaaaggcuuc

SEQ ID NO: 720440 - RNA, 21 nt, Human
ugagacaagacagguucuaag

SEQ ID NO: 720441 - RNA, 22 nt, Human
ugagacaagacagguucuaagc

SEQ ID NO: 720442 - RNA, 21 nt, Human
uucuaagcuaaucagacgugu

SEQ ID NO: 720443 - RNA, 25 nt, Human
uucuaagcuaaucagacguguccac

SEQ ID NO: 720444 - RNA, 18 nt, Human
aaacaaaagaaaugcaca

SEQ ID NO: 720445 - RNA, 23 nt, Human
aaacaaacaaaagaaaugcacag

SEQ ID NO: 720446 - RNA, 22 nt, Human
aaacagcaacaaacaaacaaaa

SEQ ID NO: 720447 - RNA, 23 nt, Human
aaagcuccuccaggcucugcagc

SEQ ID NO: 720448 - RNA, 24 nt, Human
aacaaaaggaaagaaaacagcuac

SEQ ID NO: 720449 - RNA, 20 nt, Human
aacagggggcagucaagaug

SEQ ID NO: 720450 - RNA, 19 nt, Human
aacuguguaaccaccaccc

SEQ ID NO: 720451 - RNA, 22 nt, Human
aacuguguaaccaccacccagu

SEQ ID NO: 720452 - RNA, 24 nt, Human
aagaaaccguucuuugaacacaug

SEQ ID NO: 720453 - RNA, 19 nt, Human
aagaugccgccacccacca

SEQ ID NO: 720454 - RNA, 18 nt, Human
aagcaggagggagaaggg

SEQ ID NO: 720455 - RNA, 20 nt, Human
aagcaggugaagcucaugga

SEQ ID NO: 720456 - RNA, 20 nt, Human
aaggaagcccugggggcuga

SEQ ID NO: 720457 - RNA, 23 nt, Human
aaggucacaaaucaaggagcuga

SEQ ID NO: 720458 - RNA, 24 nt, Human
aaguugccugcugcugcucagagc

SEQ ID NO: 720459 - RNA, 21 nt, Human
acacacacacacauacacaca

SEQ ID NO: 720460 - RNA, 19 nt, Human
acacacaugcaugcacaca

SEQ ID NO: 720461 - RNA, 23 nt, Human
accaacaacaaaaggaaagaaaa

SEQ ID NO: 720462 - RNA, 19 nt, Human
accacaucggcccaguuuu

SEQ ID NO: 720463 - RNA, 25 nt, Human
accacccaguguccccaagagagca

SEQ ID NO: 720464 - RNA, 25 nt, Human
accugggccaccugggacagaccuc

SEQ ID NO: 720465 - RNA, 21 nt, Human
acugccagguugggagccuca

SEQ ID NO: 720466 - RNA, 21 nt, Human
agaagggcagacaggggucgg

SEQ ID NO: 720467 - RNA, 18 nt, Human
agacagagagagcacgug

SEQ ID NO: 720468 - RNA, 25 nt, Human
agacagcuuggcgaggcacccuguc

SEQ ID NO: 720469 - RNA, 19 nt, Human
agacaggggucgguugagc

SEQ ID NO: 720470 - RNA, 25 nt, Human
agacggaaauccaagcacuugaaca

SEQ ID NO: 720471 - RNA, 19 nt, Human
agagagcagcccagaucau

SEQ ID NO: 720472 - RNA, 19 nt, Human
agaggcgcggcugccucag

SEQ ID NO: 720473 - RNA, 20 nt, Human
agaggcuaguucagucccuu

SEQ ID NO: 720474 - RNA, 24 nt, Human
agagggagagagaaucagagaggc

SEQ ID NO: 720475 - RNA, 23 nt, Human
agauguugauuccagggcagagu

SEQ ID NO: 720476 - RNA, 18 nt, Human
agcagcccagaucauggc

SEQ ID NO: 720477 - RNA, 23 nt, Human
agcauccuuaacaacccccaccc

SEQ ID NO: 720478 - RNA, 23 nt, Human
aggagcaguguggaucaaggaca

SEQ ID NO: 720479 - RNA, 25 nt, Human
aggagcgaggcaucgaggagagggc

SEQ ID NO: 720480 - RNA, 18 nt, Human
aggagggagaagggcaga

SEQ ID NO: 720481 - RNA, 19 nt, Human
aggcaggaguugcaccaag

SEQ ID NO: 720482 - RNA, 18 nt, Human
aggcaggguccccaagug

SEQ ID NO: 720483 - RNA, 21 nt, Human
aggccccuuggucaagacccu

SEQ ID NO: 720484 - RNA, 20 nt, Human
aggcgggcuggagugaaggg

SEQ ID NO: 720485 - RNA, 21 nt, Human
aggcugaaggcaggcgggcug

SEQ ID NO: 720486 - RNA, 22 nt, Human
aggcugcagcuuucggcagcug

SEQ ID NO: 720487 - RNA, 19 nt, Human
aggggucagggcugggcug

SEQ ID NO: 720488 - RNA, 21 nt, Human
augccaacggaccccaccccc

SEQ ID NO: 720489 - RNA, 19 nt, Human
auggcccuaauuccccuac

SEQ ID NO: 720490 - RNA, 28 nt, Human
caaagcucagccauuuguucuccccagg

SEQ ID NO: 720491 - RNA, 19 nt, Human
caacaaacaaacaaaagaa

SEQ ID NO: 720492 - RNA, 19 nt, Human
caacccccacccccacccc

SEQ ID NO: 720493 - RNA, 20 nt, Human
caacccccacccccaccccg

SEQ ID NO: 720494 - RNA, 20 nt, Human
caagagagcagcccagaucu

SEQ ID NO: 720495 - RNA, 21 nt, Human
caagaugccgccacccaccac

SEQ ID NO: 720496 - RNA, 20 nt, Human
cacacacgcugcacucacca

SEQ ID NO: 720497 - RNA, 22 nt, Human
cacacacgcugcacucaccacg

SEQ ID NO: 720498 - RNA, 20 nt, Human
caccaccccucccuuccaag

SEQ ID NO: 720499 - RNA, 23 nt, Human
caccaccugggccaccugggaca

SEQ ID NO: 720500 - RNA, 18 nt, Human
caccacgcacugaagggc

SEQ ID NO: 720501 - RNA, 19 nt, Human
caccaggauggcccccagg

SEQ ID NO: 720502 - RNA, 18 nt, Human
cacccaccacucacccag

SEQ ID NO: 720503 - RNA, 23 nt, Human
caccccucccuuccaagcuccca

SEQ ID NO: 720504 - RNA, 22 nt, Human
cacccuguucuaccugcaccac

SEQ ID NO: 720505 - RNA, 24 nt, Human
caccucccccagcacccaugggcc

SEQ ID NO: 720506 - RNA, 20 nt, Human
cacugcauugaccccacacc

SEQ ID NO: 720507 - RNA, 21 nt, Human
cagaugcugggaggcugggga

SEQ ID NO: 720508 - RNA, 19 nt, Human
cagcacuggacgcggagag

SEQ ID NO: 720509 - RNA, 23 nt, Human
cagcaggggcuguaacuguagca

SEQ ID NO: 720510 - RNA, 26 nt, Human
cagcaguuaaaucuacagacggaaau

SEQ ID NO: 720511 - RNA, 21 nt, Human
cagccagaagacccagagaca

SEQ ID NO: 720512 - RNA, 24 nt, Human
cagcccagaucauggcuccaccac

SEQ ID NO: 720513 - RNA, 19 nt, Human
cagcuacaaggaggccgaa

SEQ ID NO: 720514 - RNA, 26 nt, Human
cagcucuccucccgcggucugccucc

SEQ ID NO: 720515 - RNA, 19 nt, Human
cagggcugggcuggaggac

SEQ ID NO: 720516 - RNA, 22 nt, Human
caucucaacaccuaaaagcucc

SEQ ID NO: 720517 - RNA, 18 nt, Human
cauggucucagagugcgg

SEQ ID NO: 720518 - RNA, 20 nt, Human
ccaacggaccccacccccuc

SEQ ID NO: 720519 - RNA, 21 nt, Human
ccaauccuagcaagagcagaa

SEQ ID NO: 720520 - RNA, 21 nt, Human
ccacacacacacacacauaca

SEQ ID NO: 720521 - RNA, 18 nt, Human
ccacacccaccacucacc

SEQ ID NO: 720522 - RNA, 23 nt, Human
ccaccaggauggcccccagguuc

SEQ ID NO: 720523 - RNA, 26 nt, Human
ccacccaccaccccucccuuccaagc

SEQ ID NO: 720524 - RNA, 20 nt, Human
ccagggucuaggauucagag

SEQ ID NO: 720525 - RNA, 18 nt, Human
ccauuuguucuccccagg

SEQ ID NO: 720526 - RNA, 18 nt, Human
cccacacccaccacucac

SEQ ID NO: 720527 - RNA, 21 nt, Human
cccacacccaccacucaccca

SEQ ID NO: 720528 - RNA, 21 nt, Human
cccaccaccccucccuuccaa

SEQ ID NO: 720529 - RNA, 19 nt, Human
cccacccccaccccgagga

SEQ ID NO: 720530 - RNA, 25 nt, Human
cccaggccaugcuuccuucuccauc

SEQ ID NO: 720531 - RNA, 20 nt, Human
ccccagcauccuuaacaacc

SEQ ID NO: 720532 - RNA, 21 nt, Human
cccccagcauccuuaacaacc

SEQ ID NO: 720533 - RNA, 22 nt, Human
cccccucuccucacccuguucu

SEQ ID NO: 720534 - RNA, 23 nt, Human
cccccucuccucacccuguucua

SEQ ID NO: 720535 - RNA, 23 nt, Human
cccccucuccucacccuguucuc

SEQ ID NO: 720536 - RNA, 23 nt, Human
ccccugcaauccuaccagaggcu

SEQ ID NO: 720537 - RNA, 22 nt, Human
ccccugggacugccgccagccc

SEQ ID NO: 720538 - RNA, 20 nt, Human
cccugccccucccuccccuu

SEQ ID NO: 720539 - RNA, 20 nt, Human
cccugccccucccuccccuu

SEQ ID NO: 720540 - RNA, 24 nt, Human
cccuuccucugaacuccuuccuuc

SEQ ID NO: 720541 - RNA, 19 nt, Human
ccgccacccaccaccccuc

SEQ ID NO: 720542 - RNA, 22 nt, Human
ccucagagcccggcugcaccug

SEQ ID NO: 720543 - RNA, 22 nt, Human
ccucccuuccaagcucccaggc

SEQ ID NO: 720544 - RNA, 19 nt, Human
ccugaacugagccggggcu

SEQ ID NO: 720545 - RNA, 19 nt, Human
ccugucccuggccucucag

SEQ ID NO: 720546 - RNA, 20 nt, Human
cgacacgaggcagggucccc

SEQ ID NO: 720547 - RNA, 22 nt, Human
cgaggcacccugucccuggccu

SEQ ID NO: 720548 - RNA, 24 nt, Human
cgcacacacgcugcacucaccacg

SEQ ID NO: 720549 - RNA, 18 nt, Human
cggcuguccucagcucuc

SEQ ID NO: 720550 - RNA, 23 nt, Human
cucccaguccccccagguggagc

SEQ ID NO: 720551 - RNA, 20 nt, Human
cuccccuggcaggaggaaga

SEQ ID NO: 720552 - RNA, 18 nt, Human
cuccuucuguggugucuc

SEQ ID NO: 720553 - RNA, 19 nt, Human
cucucagcugcugcccucc

SEQ ID NO: 720554 - RNA, 18 nt, Human
cugagccggggccggggc

SEQ ID NO: 720555 - RNA, 20 nt, Human
cugcagccacagccuccucc

SEQ ID NO: 720556 - RNA, 21 nt, Human
cugcagcuuucggcagcugcu

SEQ ID NO: 720557 - RNA, 18 nt, Human
cugcugcaaccuaccaga

SEQ ID NO: 720558 - RNA, 20 nt, Human
cugcugcuccuggcccucag

SEQ ID NO: 720559 - RNA, 20 nt, Human
cuggguggcaggccccuugg

SEQ ID NO: 720560 - RNA, 19 nt, Human
cuguagcaucagcaucacg

SEQ ID NO: 720561 - RNA, 23 nt, Human
cugucacccgucccagccaucug

SEQ ID NO: 720562 - RNA, 24 nt, Human
cuuaacaacccccacccccacccc

SEQ ID NO: 720563 - RNA, 22 nt, Human
cuuccaagcucccaggccaugc

SEQ ID NO: 720564 - RNA, 19 nt, Human
cuugagugcccaucaacgc

SEQ ID NO: 720565 - RNA, 21 nt, Human
cuugcuguggcugggcguccu

SEQ ID NO: 720566 - RNA, 20 nt, Human
gaaaacagcuacaaggaggc

SEQ ID NO: 720567 - RNA, 19 nt, Human
gacagagagaggacaggag

SEQ ID NO: 720568 - RNA, 19 nt, Human
gacaucaagaggacagggg

SEQ ID NO: 720569 - RNA, 18 nt, Human
gacccccucuccucaccc

SEQ ID NO: 720570 - RNA, 19 nt, Human
gagaggacaggagaaagag

SEQ ID NO: 720571 - RNA, 22 nt, Human
gagaggacaggagaaagagggg

SEQ ID NO: 720572 - RNA, 20 nt, Human
gagagggagagagaaucaga

SEQ ID NO: 720573 - RNA, 18 nt, Human
gagccgacccccucuccu

SEQ ID NO: 720574 - RNA, 18 nt, Human
gaggacacggcuggggga

SEQ ID NO: 720575 - RNA, 21 nt, Human
gaggaugggggcgcaggggaa

SEQ ID NO: 720576 - RNA, 20 nt, Human
gaggcuggggacugccaggu

SEQ ID NO: 720577 - RNA, 24 nt, Human
gagggagaagggcagacagggguc

SEQ ID NO: 720578 - RNA, 19 nt, Human
gaggggacugggggaccug

SEQ ID NO: 720579 - RNA, 22 nt, Human
gagggugacaucaagaggacag

SEQ ID NO: 720580 - RNA, 21 nt, Human
gaguguuaagggucagggagg

SEQ ID NO: 720581 - RNA, 21 nt, Human
gaucugacauccaccuccccc

SEQ ID NO: 720582 - RNA, 18 nt, Human
gcagggcuggaugacuca

SEQ ID NO: 720583 - RNA, 19 nt, Human
gcgggcuggagugaagggg

SEQ ID NO: 720584 - RNA, 25 nt, Human
gcugcaaccuaccagaucugacauc

SEQ ID NO: 720585 - RNA, 19 nt, Human
gcugcccuccuccucugcc

SEQ ID NO: 720586 - RNA, 23 nt, Human
gcuggagugaaggggggugacca

SEQ ID NO: 720587 - RNA, 21 nt, Human
gcuugcuguggcugggcgucc

SEQ ID NO: 720588 - RNA, 18 nt, Human
ggaagccccucugcgggg

SEQ ID NO: 720589 - RNA, 20 nt, Human
ggacacccuuccucugaacu

SEQ ID NO: 720590 - RNA, 19 nt, Human
ggacaggagaaagagggga

SEQ ID NO: 720591 - RNA, 24 nt, Human
ggaccagucucaguggggcgaaag

SEQ ID NO: 720592 - RNA, 20 nt, Human
ggaccuggaacgacgcgaca

SEQ ID NO: 720593 - RNA, 20 nt, Human
ggagagggagagagaaucag

SEQ ID NO: 720594 - RNA, 24 nt, Human
ggagagggcacuggaggggcuggg

SEQ ID NO: 720595 - RNA, 22 nt, Human
ggccuggggcagccaaggggag

SEQ ID NO: 720596 - RNA, 20 nt, Human
ggcugaaggcaggcgggcug

SEQ ID NO: 720597 - RNA, 18 nt, Human
ggcugggcuggaggacac

SEQ ID NO: 720598 - RNA, 22 nt, Human
gggaggugaaggacagagagag

SEQ ID NO: 720599 - RNA, 20 nt, Human
gggcacacacccccuuagcc

SEQ ID NO: 720600 - RNA, 21 nt, Human
gggcuggagugaaggggggug

SEQ ID NO: 720601 - RNA, 18 nt, Human
ggggagugggggcaggaa

SEQ ID NO: 720602 - RNA, 23 nt, Human
ggggauguuggggaacagcgagg

SEQ ID NO: 720603 - RNA, 20 nt, Human
ggggucagggcugggcugga

SEQ ID NO: 720604 - RNA, 20 nt, Human
ggguagaaaccaagggguca

SEQ ID NO: 720605 - RNA, 18 nt, Human
ggugaccaccccccacgu

SEQ ID NO: 720606 - RNA, 18 nt, Human
guggagcaggguccuucu

SEQ ID NO: 720607 - RNA, 19 nt, Human
guggaguguacuuguuucc

SEQ ID NO: 720608 - RNA, 23 nt, Human
uaaaacauauuuacaaggacaca

SEQ ID NO: 720609 - RNA, 26 nt, Human
uaaaacauauuuacaaggacacacaa

SEQ ID NO: 720610 - RNA, 27 nt, Human
uaaaaccaacaacaaaaggaaagaaaa

SEQ ID NO: 720611 - RNA, 22 nt, Human
uaacaacccccacccccacccc

SEQ ID NO: 720612 - RNA, 21 nt, Human
uaaccaccacccagugucccc

SEQ ID NO: 720613 - RNA, 20 nt, Human
uacuuguuuccuuaggcuga

SEQ ID NO: 720614 - RNA, 19 nt, Human
uagacagcucccugccccu

SEQ ID NO: 720615 - RNA, 28 nt, Human
uaggagaugcacuugucugaaaaagccc

SEQ ID NO: 720616 - RNA, 21 nt, Human
uaggauucagagcugccccau

SEQ ID NO: 720617 - RNA, 21 nt, Human
uauggaacagcauuucccuga

SEQ ID NO: 720618 - RNA, 22 nt, Human
uauggaguuaaguggggcucug

SEQ ID NO: 720619 - RNA, 24 nt, Human
ucaacaccuaaaagcuccuccagg

SEQ ID NO: 720620 - RNA, 24 nt, Human
ucaacgcacacgcacacagucuaa

SEQ ID NO: 720621 - RNA, 22 nt, Human
ucaacuguguaaccaccaccca

SEQ ID NO: 720622 - RNA, 20 nt, Human
ucaaggucacaaaucaagga

SEQ ID NO: 720623 - RNA, 18 nt, Human
ucacacugucacccgucc

SEQ ID NO: 720624 - RNA, 18 nt, Human
ucacagccccaagucugg

SEQ ID NO: 720625 - RNA, 20 nt, Human
ucagaacugggcugcggaau

SEQ ID NO: 720626 - RNA, 19 nt, Human
ucagagcucugcuguugag

SEQ ID NO: 720627 - RNA, 18 nt, Human
ucaucugaggcugguggg

SEQ ID NO: 720628 - RNA, 22 nt, Human
uccaucacccuuggacccucuc

SEQ ID NO: 720629 - RNA, 18 nt, Human
ucccaccccgcugcuggc

SEQ ID NO: 720630 - RNA, 22 nt, Human
ucccaggccaccaggauggccc

SEQ ID NO: 720631 - RNA, 23 nt, Human
ucccaggccaccaggauggcccc

SEQ ID NO: 720632 - RNA, 19 nt, Human
ucccaggccaugcuuccuu

SEQ ID NO: 720633 - RNA, 22 nt, Human
uccccaaguggaggcagggcgg

SEQ ID NO: 720634 - RNA, 18 nt, Human
ucccccagcacccauggg

SEQ ID NO: 720635 - RNA, 19 nt, Human
ucccugccccucccucccc

SEQ ID NO: 720636 - RNA, 18 nt, Human
uccucagcucuccucccg

SEQ ID NO: 720637 - RNA, 20 nt, Human
uccucagcucuccucccgcg

SEQ ID NO: 720638 - RNA, 20 nt, Human
ucggaagauguugauuccag

SEQ ID NO: 720639 - RNA, 18 nt, Human
ucggcagcugcuucucuc

SEQ ID NO: 720640 - RNA, 23 nt, Human
ucucugaguggucucucaaggca

SEQ ID NO: 720641 - RNA, 19 nt, Human
ucucugcugcaaccuacca

SEQ ID NO: 720642 - RNA, 18 nt, Human
ucugccgccaccaccuuc

SEQ ID NO: 720643 - RNA, 21 nt, Human
ucugcugggaacuuccucggg

SEQ ID NO: 720644 - RNA, 20 nt, Human
ucugugccacacacaugcca

SEQ ID NO: 720645 - RNA, 22 nt, Human
ucugugccacacacaugccaug

SEQ ID NO: 720646 - RNA, 24 nt, Human
ugaaaaagcccagcacuggacgcg

SEQ ID NO: 720647 - RNA, 19 nt, Human
ugagaggaugggggcgcag

SEQ ID NO: 720648 - RNA, 23 nt, Human
ugagccgacccccucuccucacc

SEQ ID NO: 720649 - RNA, 18 nt, Human
ugagggaaguggggcugg

SEQ ID NO: 720650 - RNA, 18 nt, Human
ugagggaaguggggcugg

SEQ ID NO: 720651 - RNA, 21 nt, Human
ugagggaaguggggcuggaca

SEQ ID NO: 720652 - RNA, 20 nt, Human
ugcaccaccugggccaccug

SEQ ID NO: 720653 - RNA, 19 nt, Human
ugcacucacacugucaccc

SEQ ID NO: 720654 - RNA, 20 nt, Human
ugcagcuuucggcagcugcu

SEQ ID NO: 720655 - RNA, 21 nt, Human
ugccacacacacacacacaua

SEQ ID NO: 720656 - RNA, 20 nt, Human
ugccgccaccaccuucauuc

SEQ ID NO: 720657 - RNA, 19 nt, Human
ugcggaaugggaagcaguu

SEQ ID NO: 720658 - RNA, 21 nt, Human
uggaaagcaguuugcucuggc

SEQ ID NO: 720659 - RNA, 23 nt, Human
uggaggggcuggguggcaggccc

SEQ ID NO: 720660 - RNA, 23 nt, Human
uggaguuaaguggggcucugcua

SEQ ID NO: 720661 - RNA, 20 nt, Human
uggcaggaggaagaucaugg

SEQ ID NO: 720662 - RNA, 20 nt, Human
uggcccccagguucacacac

SEQ ID NO: 720663 - RNA, 24 nt, Human
uggccucucagcugcugcccuccu

SEQ ID NO: 720664 - RNA, 26 nt, Human
ugggagccucacccagagagccucac

SEQ ID NO: 720665 - RNA, 22 nt, Human
ugggaggcuggggacugccagg

SEQ ID NO: 720666 - RNA, 22 nt, Human
ugggaggcuggggacugccagg

SEQ ID NO: 720667 - RNA, 19 nt, Human
ugggcuggaggacacggcu

SEQ ID NO: 720668 - RNA, 25 nt, Human
uggggaggugaaggacagagagagg

SEQ ID NO: 720669 - RNA, 22 nt, Human
uggggcagccaaggggaguucc

SEQ ID NO: 720670 - RNA, 23 nt, Human
ugggggaucucauuucauggauu

SEQ ID NO: 720671 - RNA, 25 nt, Human
uggguggcaggccccuuggucaagg

SEQ ID NO: 720672 - RNA, 24 nt, Human
uggucuggguucgaccuggggggu

SEQ ID NO: 720673 - RNA, 22 nt, Human
ugguuaggagaugcacuugucu

SEQ ID NO: 720674 - RNA, 24 nt, Human
uguacuuguuuccuuaggcugagu

SEQ ID NO: 720675 - RNA, 19 nt, Human
uguccucagcucuccuccc

SEQ ID NO: 720676 - RNA, 21 nt, Human
ugugaauguauuuuaaaacca

SEQ ID NO: 720677 - RNA, 21 nt, Human
uguggccucagagcccggcug

SEQ ID NO: 720678 - RNA, 20 nt, Human
uguggcugggcguccuggcc

SEQ ID NO: 720679 - RNA, 20 nt, Human
ugugggacaacagggggcag

SEQ ID NO: 720680 - RNA, 23 nt, Human
ugugugaauguauuuuaaaacca

SEQ ID NO: 720681 - RNA, 26 nt, Human
uguguggaguguacuuguuuccuuag

SEQ ID NO: 720682 - RNA, 21 nt, Human
uguugagucccccccggcagc

SEQ ID NO: 720683 - RNA, 23 nt, Human
uuaaaaauaacauuugauuuccu

SEQ ID NO: 720684 - RNA, 22 nt, Human
uuaaggaauuugcuuugcugag

SEQ ID NO: 720685 - RNA, 18 nt, Human
uucagagcugccccaucu

SEQ ID NO: 720686 - RNA, 18 nt, Human
uuccccaggccccccagc

SEQ ID NO: 720687 - RNA, 19 nt, Human
uucuuccagcauggcccua

SEQ ID NO: 720688 - RNA, 23 nt, Human
uugaccccacacccaccacucac

SEQ ID NO: 720689 - RNA, 23 nt, Human
uugaggccgcccuucagcuccac

SEQ ID NO: 720690 - RNA, 21 nt, Human
uugauuccagggcagagugag

SEQ ID NO: 720691 - RNA, 19 nt, Human
uuuccauuuucuuaaaaau

SEQ ID NO: 720692 - RNA, 23 nt, Human
uuuuaauguccuuccucccaccc

SEQ ID NO: 720693 - RNA, 27 nt, Human
aaaaaaaaaaaaaaaaaagacauaaaa

SEQ ID NO: 720694 - RNA, 24 nt, Human
aaaaaaaaagacauaaaauacaaa

SEQ ID NO: 720695 - RNA, 23 nt, Human
aaaaaaagagaacaaacaaacaa

SEQ ID NO: 720696 - RNA, 27 nt, Human
aaaaaaagagaacaaacaaacaaaaaa

SEQ ID NO: 720697 - RNA, 21 nt, Human
aaaaaaagggacuagaaaugc

SEQ ID NO: 720698 - RNA, 25 nt, Human
aaaauaaauccauugugaaaccaga

SEQ ID NO: 720699 - RNA, 26 nt, Human
aaaauaaauccauugugaaaccagaa

SEQ ID NO: 720700 - RNA, 27 nt, Human
aaacagccagcaaaaccaugagguuuu

SEQ ID NO: 720701 - RNA, 22 nt, Human
aaacauaauucagaguucaugc

SEQ ID NO: 720702 - RNA, 22 nt, Human
aaauaaauauauaaaaucaaga

SEQ ID NO: 720703 - RNA, 19 nt, Human
aacaaggaaaacaaaacag

SEQ ID NO: 720704 - RNA, 19 nt, Human
aacuguaacaucucccucc

SEQ ID NO: 720705 - RNA, 21 nt, Human
aacuguaugaccuguugccuu

SEQ ID NO: 720706 - RNA, 21 nt, Human
aagggaaacagugcaagagaa

SEQ ID NO: 720707 - RNA, 21 nt, Human
aauaacccaaaccuuuuucca

SEQ ID NO: 720708 - RNA, 23 nt, Human
aauagcaaacaccaacauguccc

SEQ ID NO: 720709 - RNA, 20 nt, Human
aaugucauugaaaccuaaaa

SEQ ID NO: 720710 - RNA, 20 nt, Human
acaauagaaaaagagaaagg

SEQ ID NO: 720711 - RNA, 18 nt, Human
acagugcaagagaagcag

SEQ ID NO: 720712 - RNA, 21 nt, Human
accagcucacugcaccucggc

SEQ ID NO: 720713 - RNA, 20 nt, Human
accauucuguuuauucuugu

SEQ ID NO: 720714 - RNA, 20 nt, Human
accccuuuuucuccccuuag

SEQ ID NO: 720715 - RNA, 27 nt, Human
agaaaauaaauccauugugaaaccaga

SEQ ID NO: 720716 - RNA, 22 nt, Human
agagagaaaauaaauccauugu

SEQ ID NO: 720717 - RNA, 21 nt, Human
agcaaacaccaacaugucccu

SEQ ID NO: 720718 - RNA, 21 nt, Human
agcuggccaauucaauagcaa

SEQ ID NO: 720719 - RNA, 26 nt, Human
aggaaaaaaagagaacaaacaaacaa

SEQ ID NO: 720720 - RNA, 21 nt, Human
aggcaguuuaaagauuauuug

SEQ ID NO: 720721 - RNA, 20 nt, Human
agguacuaaagaaaacccag

SEQ ID NO: 720722 - RNA, 23 nt, Human
auaugaaaaugugaacacuguuu

SEQ ID NO: 720723 - RNA, 24 nt, Human
auucuguuuauucuuguuuccuca

SEQ ID NO: 720724 - RNA, 22 nt, Human
caaaaaaagggacuagaaaugc

SEQ ID NO: 720725 - RNA, 23 nt, Human
caaacaaacaaggaaaacaaaac

SEQ ID NO: 720726 - RNA, 20 nt, Human
caaacugcaaagcagccuuc

SEQ ID NO: 720727 - RNA, 24 nt, Human
caaacugcaaagcagccuuccaag

SEQ ID NO: 720728 - RNA, 21 nt, Human
caaagcagccuuccaagagaa

SEQ ID NO: 720729 - RNA, 22 nt, Human
caaauaaggagugguuaaguau

SEQ ID NO: 720730 - RNA, 21 nt, Human
caacccacguuuuggucucau

SEQ ID NO: 720731 - RNA, 20 nt, Human
caagaauggcaaaaaaaaaa

SEQ ID NO: 720732 - RNA, 23 nt, Human
caaugccacacagcaagcagagc

SEQ ID NO: 720733 - RNA, 22 nt, Human
caccucggcucgaagcugagga

SEQ ID NO: 720734 - RNA, 18 nt, Human
cacuggcuagaagaaugc

SEQ ID NO: 720735 - RNA, 21 nt, Human
cacuguauauacauacaaaau

SEQ ID NO: 720736 - RNA, 21 nt, Human
caggaaaagccuagcaugaaa

SEQ ID NO: 720737 - RNA, 18 nt, Human
cauaugccucuaaaaagu

SEQ ID NO: 720738 - RNA, 21 nt, Human
caucucccuccuguaacaauc

SEQ ID NO: 720739 - RNA, 23 nt, Human
caugaaacaaacaaacaaggaaa

SEQ ID NO: 720740 - RNA, 24 nt, Human
caugcgcuuugauacaaacagcaa

SEQ ID NO: 720741 - RNA, 23 nt, Human
ccaauucaauagcaaacaccaac

SEQ ID NO: 720742 - RNA, 19 nt, Human
ccaguaaauaagugcuuga

SEQ ID NO: 720743 - RNA, 24 nt, Human
ccagucaccacugcaaaacaaaug

SEQ ID NO: 720744 - RNA, 22 nt, Human
ccggcucgccgcccaggcuccc

SEQ ID NO: 720745 - RNA, 23 nt, Human
ccggcucgccgcccaggcucccg

SEQ ID NO: 720746 - RNA, 19 nt, Human
ccucaagaauggcaaaaaa

SEQ ID NO: 720747 - RNA, 23 nt, Human
cgccucgcgguccccccaccagc

SEQ ID NO: 720748 - RNA, 20 nt, Human
cgcuuugauacaaacagcaa

SEQ ID NO: 720749 - RNA, 19 nt, Human
cucgccucgcggucccccc

SEQ ID NO: 720750 - RNA, 19 nt, Human
cugaaaccaaacacaaaua

SEQ ID NO: 720751 - RNA, 22 nt, Human
cugcaaaacaaaugcauccauc

SEQ ID NO: 720752 - RNA, 19 nt, Human
cugcaccucggcucgaagc

SEQ ID NO: 720753 - RNA, 19 nt, Human
cuguacaaauaacucaggu

SEQ ID NO: 720754 - RNA, 24 nt, Human
cuugccauuaacauuuccuguucu

SEQ ID NO: 720755 - RNA, 23 nt, Human
gaaaagccuagcaugaaacaaac

SEQ ID NO: 720756 - RNA, 23 nt, Human
gaaacaaacaaacaaggaaaaca

SEQ ID NO: 720757 - RNA, 21 nt, Human
gagaacaaugccacacagcaa

SEQ ID NO: 720758 - RNA, 22 nt, Human
gccaauucaauagcaaacacca

SEQ ID NO: 720759 - RNA, 20 nt, Human
guuggggugaaaacauguca

SEQ ID NO: 720760 - RNA, 24 nt, Human
uaaauaaagcuacaguugaucaga

SEQ ID NO: 720761 - RNA, 20 nt, Human
uaacaguauuucaguuaagc

SEQ ID NO: 720762 - RNA, 19 nt, Human
uacaaaauuuaaacagcaa

SEQ ID NO: 720763 - RNA, 22 nt, Human
uaccuccuuccagaaguuggcc

SEQ ID NO: 720764 - RNA, 23 nt, Human
uagaaaugccacaaaauuauuuu

SEQ ID NO: 720765 - RNA, 21 nt, Human
uagaagaaugcaaaaggaaaa

SEQ ID NO: 720766 - RNA, 21 nt, Human
uagcaaacaccaacauguccc

SEQ ID NO: 720767 - RNA, 20 nt, Human
uagcaccagauaguuggggu

SEQ ID NO: 720768 - RNA, 22 nt, Human
uagguacuaaagaaaacccaga

SEQ ID NO: 720769 - RNA, 19 nt, Human
uaguguaaauacaaacugc

SEQ ID NO: 720770 - RNA, 27 nt, Human
uauacacauauacaaaauuuaaacagc

SEQ ID NO: 720771 - RNA, 23 nt, Human
uauauaaaaucaagacaaucaag

SEQ ID NO: 720772 - RNA, 18 nt, Human
uauauacauacaaaauuu

SEQ ID NO: 720773 - RNA, 19 nt, Human
uaugcuuguuuucucaaaa

SEQ ID NO: 720774 - RNA, 20 nt, Human
uauuauacaacauaugaaag

SEQ ID NO: 720775 - RNA, 25 nt, Human
uauucuuguuuccucauccacaaaa

SEQ ID NO: 720776 - RNA, 21 nt, Human
uauuuggcauaugccucuaaa

SEQ ID NO: 720777 - RNA, 20 nt, Human
ucuauauuuccucaagaaug

SEQ ID NO: 720778 - RNA, 20 nt, Human
ucugaccuacuucagcagua

SEQ ID NO: 720779 - RNA, 21 nt, Human
ucugucugaccccuuuuucuc

SEQ ID NO: 720780 - RNA, 21 nt, Human
ugaaaaguggccccucuagga

SEQ ID NO: 720781 - RNA, 25 nt, Human
ugaaaaguggccccucuaggacagg

SEQ ID NO: 720782 - RNA, 19 nt, Human
ugaaacaaacaaacaagga

SEQ ID NO: 720783 - RNA, 21 nt, Human
ugaaacaaacaaacaaggaaa

SEQ ID NO: 720784 - RNA, 23 nt, Human
ugaaaccuaaaaccaguuugcug

SEQ ID NO: 720785 - RNA, 25 nt, Human
ugaaaccuaaaaccaguuugcugua

SEQ ID NO: 720786 - RNA, 21 nt, Human
ugaaaugcuacauaggagacc

SEQ ID NO: 720787 - RNA, 19 nt, Human
ugaacacuguuugcaaaga

SEQ ID NO: 720788 - RNA, 21 nt, Human
ugacaacagaguauugcaaug

SEQ ID NO: 720789 - RNA, 23 nt, Human
ugcaaaaggaaaaaaagagaaca

SEQ ID NO: 720790 - RNA, 21 nt, Human
ugcaagauuaucccuuuggaa

SEQ ID NO: 720791 - RNA, 20 nt, Human
ugccacacagcaagcagagc

SEQ ID NO: 720792 - RNA, 19 nt, Human
ugguaaaauaguggucaag

SEQ ID NO: 720793 - RNA, 24 nt, Human
ugguuaaguaugcuuaaucacuac

SEQ ID NO: 720794 - RNA, 19 nt, Human
uguauacacacacacugua

SEQ ID NO: 720795 - RNA, 21 nt, Human
uguauacacacacacuguaua

SEQ ID NO: 720796 - RNA, 21 nt, Human
uguauuccaugacaacagagu

SEQ ID NO: 720797 - RNA, 23 nt, Human
uuaacugaaaauucaagccacag

SEQ ID NO: 720798 - RNA, 22 nt, Human
uuauaaacagccagcaaaacca

SEQ ID NO: 720799 - RNA, 25 nt, Human
uucagauauugguuuaugcaaacug

SEQ ID NO: 720800 - RNA, 20 nt, Human
uucuguauaaacuucaaaag

SEQ ID NO: 720801 - RNA, 20 nt, Human
aaaaacccaaaagaauccaa

SEQ ID NO: 720802 - RNA, 23 nt, Human
aaaaagugaauuaacacuggaaa

SEQ ID NO: 720803 - RNA, 21 nt, Human
aaaacaaccagaacacucccc

SEQ ID NO: 720804 - RNA, 18 nt, Human
aaaagcaagcccagggac

SEQ ID NO: 720805 - RNA, 21 nt, Human
aaaagcagcuuuuacaaaaac

SEQ ID NO: 720806 - RNA, 20 nt, Human
aaaagcauggccucuccuuu

SEQ ID NO: 720807 - RNA, 19 nt, Human
aaacaaaacaaaaacccaa

SEQ ID NO: 720808 - RNA, 23 nt, Human
aaacaacaaaacaaaaccagauu

SEQ ID NO: 720809 - RNA, 21 nt, Human
aaagagcagaaacaggagccc

SEQ ID NO: 720810 - RNA, 21 nt, Human
aacgcucucuucacagggaug

SEQ ID NO: 720811 - RNA, 19 nt, Human
aagaaaagggagagaaaug

SEQ ID NO: 720812 - RNA, 23 nt, Human
aagaaucacuuccaagcugugug

SEQ ID NO: 720813 - RNA, 21 nt, Human
aagaauccaaaacaacaaaac

SEQ ID NO: 720814 - RNA, 22 nt, Human
aagcagaugccuuuaagucagg

SEQ ID NO: 720815 - RNA, 19 nt, Human
aagcagcgggggccgcaca

SEQ ID NO: 720816 - RNA, 21 nt, Human
aagcccuccaaagaaggaccc

SEQ ID NO: 720817 - RNA, 18 nt, Human
aaggacaaaaucaccuuu

SEQ ID NO: 720818 - RNA, 23 nt, Human
aaggaugcucagagucugguucu

SEQ ID NO: 720819 - RNA, 18 nt, Human
aagggcaaaagaaaaggg

SEQ ID NO: 720820 - RNA, 20 nt, Human
aaggggugcuggaccugggc

SEQ ID NO: 720821 - RNA, 21 nt, Human
aaggugcccacuagguaggaa

SEQ ID NO: 720822 - RNA, 23 nt, Human
aauuucuguuccugccauccgcc

SEQ ID NO: 720823 - RNA, 25 nt, Human
acaaaaacccaaaagaauccaaaac

SEQ ID NO: 720824 - RNA, 23 nt, Human
acacagggcauccggccuuccaa

SEQ ID NO: 720825 - RNA, 22 nt, Human
acagcucagaggcugaagucug

SEQ ID NO: 720826 - RNA, 21 nt, Human
acagcuucugagcuccuucca

SEQ ID NO: 720827 - RNA, 19 nt, Human
acaggcaaggccauggggc

SEQ ID NO: 720828 - RNA, 19 nt, Human
accacccugcagccgcuug

SEQ ID NO: 720829 - RNA, 18 nt, Human
accauaguuacaaauucu

SEQ ID NO: 720830 - RNA, 22 nt, Human
accggagccuccuccucagcga

SEQ ID NO: 720831 - RNA, 20 nt, Human
acgagacagcagacagccug

SEQ ID NO: 720832 - RNA, 19 nt, Human
acuggagagacugagggac

SEQ ID NO: 720833 - RNA, 20 nt, Human
acugugcccauccuaccaga

SEQ ID NO: 720834 - RNA, 20 nt, Human
acuucuugaccccaggccag

SEQ ID NO: 720835 - RNA, 19 nt, Human
agaaaaaacaaccagaaca

SEQ ID NO: 720836 - RNA, 24 nt, Human
agaacaaagcaagcccuccaaaga

SEQ ID NO: 720837 - RNA, 25 nt, Human
agaacaaagcaagcccuccaaagaa

SEQ ID NO: 720838 - RNA, 23 nt, Human
agacaaaguucacagggcccaga

SEQ ID NO: 720839 - RNA, 21 nt, Human
agagaccauuccagacucacc

SEQ ID NO: 720840 - RNA, 20 nt, Human
agcagaaacaggagcccaga

SEQ ID NO: 720841 - RNA, 23 nt, Human
agcagcugcaggcgaaaacggcg

SEQ ID NO: 720842 - RNA, 23 nt, Human
agcaugcaccacagaagauaucc

SEQ ID NO: 720843 - RNA, 22 nt, Human
agcccgacggguggggggaggg

SEQ ID NO: 720844 - RNA, 20 nt, Human
agcucccagacucaaacuuc

SEQ ID NO: 720845 - RNA, 20 nt, Human
agcuggaagggcaggggcuc

SEQ ID NO: 720846 - RNA, 21 nt, Human
aggaaggcugcauuuaaugcu

SEQ ID NO: 720847 - RNA, 18 nt, Human
aggaaggggauagagcug

SEQ ID NO: 720848 - RNA, 18 nt, Human
aggaggaaggggauagag

SEQ ID NO: 720849 - RNA, 22 nt, Human
aggaggaaggggauagagcugg

SEQ ID NO: 720850 - RNA, 24 nt, Human
aggcaaggccauggggcuuuccaa

SEQ ID NO: 720851 - RNA, 27 nt, Human
aggcaggagauuagaaaaaggggaccc

SEQ ID NO: 720852 - RNA, 19 nt, Human
aggcaguggcaugaggagg

SEQ ID NO: 720853 - RNA, 19 nt, Human
aggcgaaaacggcggcggc

SEQ ID NO: 720854 - RNA, 24 nt, Human
aggcgaaaacggcggcggcggcgg

SEQ ID NO: 720855 - RNA, 23 nt, Human
agggagagaaaugcccuagguuc

SEQ ID NO: 720856 - RNA, 24 nt, Human
agggguuugcauccuggggccagu

SEQ ID NO: 720857 - RNA, 20 nt, Human
aggguuuccugauuuuuccc

SEQ ID NO: 720858 - RNA, 20 nt, Human
agguaagaaagaacagcaac

SEQ ID NO: 720859 - RNA, 20 nt, Human
agguaggaggaaggggauag

SEQ ID NO: 720860 - RNA, 18 nt, Human
auaaaauguucgugcccc

SEQ ID NO: 720861 - RNA, 19 nt, Human
caaaaacccaaaagaaucc

SEQ ID NO: 720862 - RNA, 19 nt, Human
caaaacaaaacaaaaaccc

SEQ ID NO: 720863 - RNA, 22 nt, Human
caaaacaaaacaaaaacccaaa

SEQ ID NO: 720864 - RNA, 19 nt, Human
caaaacaacaaaacaaaac

SEQ ID NO: 720865 - RNA, 27 nt, Human
caaaagaauccaaaacaacaaaacaaa

SEQ ID NO: 720866 - RNA, 19 nt, Human
caaagaaggacccccagau

SEQ ID NO: 720867 - RNA, 19 nt, Human
caagcccuccaaagaagga

SEQ ID NO: 720868 - RNA, 21 nt, Human
cacagcaaggauauccaggga

SEQ ID NO: 720869 - RNA, 23 nt, Human
caccauagauccagacuaucugg

SEQ ID NO: 720870 - RNA, 19 nt, Human
cacccaccuuuacaaaacc

SEQ ID NO: 720871 - RNA, 19 nt, Human
cacccccucugggcacaga

SEQ ID NO: 720872 - RNA, 18 nt, Human
caccuggaaugugguucc

SEQ ID NO: 720873 - RNA, 24 nt, Human
cacuccggacuguguuuugaaaac

SEQ ID NO: 720874 - RNA, 22 nt, Human
cacuggaucuggacagugggca

SEQ ID NO: 720875 - RNA, 21 nt, Human
cacuugacuuuuccaagccuu

SEQ ID NO: 720876 - RNA, 20 nt, Human
cagaaacaggagcccagaga

SEQ ID NO: 720877 - RNA, 19 nt, Human
cagaacagauaauuuagaa

SEQ ID NO: 720878 - RNA, 19 nt, Human
cagaauggggcccaccccc

SEQ ID NO: 720879 - RNA, 23 nt, Human
cagaauuuccaaaugcuauuucu

SEQ ID NO: 720880 - RNA, 21 nt, Human
cagaugucuucacagaauuuc

SEQ ID NO: 720881 - RNA, 18 nt, Human
cagcagaaagagcagagg

SEQ ID NO: 720882 - RNA, 21 nt, Human
cagcaggguucugggaagccu

SEQ ID NO: 720883 - RNA, 18 nt, Human
cagcccccuuggcaugcc

SEQ ID NO: 720884 - RNA, 18 nt, Human
cagcccccuuggcaugcc

SEQ ID NO: 720885 - RNA, 23 nt, Human
cagccuucagaugaaccacugca

SEQ ID NO: 720886 - RNA, 20 nt, Human
cagcucugaguuccuacccu

SEQ ID NO: 720887 - RNA, 22 nt, Human
cagcuucugagcuccuuccaac

SEQ ID NO: 720888 - RNA, 18 nt, Human
cagcuuuuacaaaaacca

SEQ ID NO: 720889 - RNA, 24 nt, Human
caggagcccagagaccauuccaga

SEQ ID NO: 720890 - RNA, 21 nt, Human
caggcccaaagcugaucucac

SEQ ID NO: 720891 - RNA, 24 nt, Human
cagggacaggacacuuagggaaga

SEQ ID NO: 720892 - RNA, 20 nt, Human
cagggccagaugcuuuggcc

SEQ ID NO: 720893 - RNA, 18 nt, Human
cagguucucagccugggg

SEQ ID NO: 720894 - RNA, 19 nt, Human
caguaaauaccauaguuac

SEQ ID NO: 720895 - RNA, 21 nt, Human
cauaguaggugcuaagauagg

SEQ ID NO: 720896 - RNA, 22 nt, Human
cauauacaacgcucucuucaca

SEQ ID NO: 720897 - RNA, 22 nt, Human
cauccuaccagaggcacaugac

SEQ ID NO: 720898 - RNA, 22 nt, Human
caugaggcaagcaccgcuccuc

SEQ ID NO: 720899 - RNA, 22 nt, Human
cauggggcuuuccaaucuuuac

SEQ ID NO: 720900 - RNA, 20 nt, Human
cauuccagacucaccaggua

SEQ ID NO: 720901 - RNA, 23 nt, Human
ccaaagccaugaggcaagcaccc

SEQ ID NO: 720902 - RNA, 20 nt, Human
ccaagcuuggcaagcagcgg

SEQ ID NO: 720903 - RNA, 20 nt, Human
ccacaaugcccucccucccc

SEQ ID NO: 720904 - RNA, 21 nt, Human
ccacccugcagccgcuuggca

SEQ ID NO: 720905 - RNA, 22 nt, Human
ccacuagguaggaaggcugcau

SEQ ID NO: 720906 - RNA, 24 nt, Human
cccacaaugcccucccucccccca

SEQ ID NO: 720907 - RNA, 21 nt, Human
cccacauggaggcagcagggu

SEQ ID NO: 720908 - RNA, 21 nt, Human
cccacccucccccaaauucua

SEQ ID NO: 720909 - RNA, 20 nt, Human
cccagccaagcgcugggugc

SEQ ID NO: 720910 - RNA, 21 nt, Human
cccagccaagcgcugggugcc

SEQ ID NO: 720911 - RNA, 21 nt, Human
ccccacaaugcccucccuccc

SEQ ID NO: 720912 - RNA, 19 nt, Human
ccccagaggggcugcuggc

SEQ ID NO: 720913 - RNA, 19 nt, Human
ccccagggcucauuacagg

SEQ ID NO: 720914 - RNA, 18 nt, Human
cccccacccucccccaaa

SEQ ID NO: 720915 - RNA, 19 nt, Human
cccccagaggggcugcugg

SEQ ID NO: 720916 - RNA, 23 nt, Human
cccccagaucucugggaacgggg

SEQ ID NO: 720917 - RNA, 22 nt, Human
ccccucucuggauucccaagcu

SEQ ID NO: 720918 - RNA, 22 nt, Human
cccucccuccaugcuugccaag

SEQ ID NO: 720919 - RNA, 24 nt, Human
cccugcuaucaguggcuggaaugg

SEQ ID NO: 720920 - RNA, 20 nt, Human
cccuucuucccucuccuucc

SEQ ID NO: 720921 - RNA, 22 nt, Human
cccuucuucccucuccuucccc

SEQ ID NO: 720922 - RNA, 21 nt, Human
ccggagccuccuccucagcga

SEQ ID NO: 720923 - RNA, 24 nt, Human
ccucccuccccccacccuccccca

SEQ ID NO: 720924 - RNA, 20 nt, Human
ccucccuucuucccucuccu

SEQ ID NO: 720925 - RNA, 23 nt, Human
ccucccuucuucccucuccuucc

SEQ ID NO: 720926 - RNA, 20 nt, Human
ccuccucuuccucuccucuc

SEQ ID NO: 720927 - RNA, 28 nt, Human
ccucuaccacagcaaggauauccaggga

SEQ ID NO: 720928 - RNA, 24 nt, Human
ccucuucuuccuuucuccucucug

SEQ ID NO: 720929 - RNA, 22 nt, Human
ccugaggagaaaggcugggguc

SEQ ID NO: 720930 - RNA, 21 nt, Human
ccuggccuuacccccccuggg

SEQ ID NO: 720931 - RNA, 19 nt, Human
ccuuggaagcccaggaagg

SEQ ID NO: 720932 - RNA, 25 nt, Human
cggaggcugcugcugggcaauccag

SEQ ID NO: 720933 - RNA, 21 nt, Human
cggcggcggcggcggcugagg

SEQ ID NO: 720934 - RNA, 19 nt, Human
cgugccccacccccagagg

SEQ ID NO: 720935 - RNA, 23 nt, Human
cuaccacagcaaggauauccagg

SEQ ID NO: 720936 - RNA, 18 nt, Human
cuagaacaaccuucaccc

SEQ ID NO: 720937 - RNA, 18 nt, Human
cucaagccuccugagccu

SEQ ID NO: 720938 - RNA, 22 nt, Human
cucaucagcacccagaacagau

SEQ ID NO: 720939 - RNA, 18 nt, Human
cuccaaagaaggaccccc

SEQ ID NO: 720940 - RNA, 25 nt, Human
cuccaaguagcuagaggccuggccu

SEQ ID NO: 720941 - RNA, 25 nt, Human
cuccccccacccucccccaaauucu

SEQ ID NO: 720942 - RNA, 20 nt, Human
cuccuggcucuaggccaagg

SEQ ID NO: 720943 - RNA, 23 nt, Human
cuccuggcucuaggccaaggagg

SEQ ID NO: 720944 - RNA, 19 nt, Human
cuccuuccccacaaugccc

SEQ ID NO: 720945 - RNA, 19 nt, Human
cuccuuccccacaaugccc

SEQ ID NO: 720946 - RNA, 21 nt, Human
cucuaggccaaggaggcugau

SEQ ID NO: 720947 - RNA, 21 nt, Human
cucuccuuccccacaaugccc

SEQ ID NO: 720948 - RNA, 23 nt, Human
cucugggucccuccccagggcuc

SEQ ID NO: 720949 - RNA, 19 nt, Human
cugaggccggcugaacugg

SEQ ID NO: 720950 - RNA, 28 nt, Human
cugaggcggcgaugcccuugucuucucc

SEQ ID NO: 720951 - RNA, 19 nt, Human
cugaucuucaaaacaaaac

SEQ ID NO: 720952 - RNA, 22 nt, Human
cugaucuucaaaacaaaacaaa

SEQ ID NO: 720953 - RNA, 19 nt, Human
cugccccucucuggauucc

SEQ ID NO: 720954 - RNA, 23 nt, Human
cugggccucaguuuccucaucug

SEQ ID NO: 720955 - RNA, 21 nt, Human
cugggucccuccccagggcuc

SEQ ID NO: 720956 - RNA, 19 nt, Human
cugugcccauccuaccaga

SEQ ID NO: 720957 - RNA, 20 nt, Human
cuguuuugucccuuucuagc

SEQ ID NO: 720958 - RNA, 20 nt, Human
cuucagagcugccagcaccc

SEQ ID NO: 720959 - RNA, 21 nt, Human
cuucauuugcaauuucuguuc

SEQ ID NO: 720960 - RNA, 18 nt, Human
cuuccuccucuuccucuc

SEQ ID NO: 720961 - RNA, 19 nt, Human
cuugcuggggucaggccca

SEQ ID NO: 720962 - RNA, 20 nt, Human
cuuggggccccccuuugcuc

SEQ ID NO: 720963 - RNA, 18 nt, Human
gaagggcaaaagaaaagg

SEQ ID NO: 720964 - RNA, 19 nt, Human
gaaguccuuuccgcuucuc

SEQ ID NO: 720965 - RNA, 26 nt, Human
gacuguguuuugaaaacaccuauaaa

SEQ ID NO: 720966 - RNA, 22 nt, Human
gagauuagaaaaagcagcuuuu

SEQ ID NO: 720967 - RNA, 24 nt, Human
gagcagcugcaggcgaaaacggcc

SEQ ID NO: 720968 - RNA, 19 nt, Human
gagcugccagcacccaccu

SEQ ID NO: 720969 - RNA, 23 nt, Human
gaggagcuugagucacaccauag

SEQ ID NO: 720970 - RNA, 19 nt, Human
gagggggacaguuggggag

SEQ ID NO: 720971 - RNA, 21 nt, Human
gauaugaaacagggaagcaga

SEQ ID NO: 720972 - RNA, 21 nt, Human
gaugaaccacugcaauaaacc

SEQ ID NO: 720973 - RNA, 20 nt, Human
gaugacacagggcauccggc

SEQ ID NO: 720974 - RNA, 21 nt, Human
gaugagccugucuccugggcc

SEQ ID NO: 720975 - RNA, 22 nt, Human
gccagguaagaaagaacagcaa

SEQ ID NO: 720976 - RNA, 23 nt, Human
gcccacucuacuacugccccucu

SEQ ID NO: 720977 - RNA, 18 nt, Human
gccuguguggggaucaga

SEQ ID NO: 720978 - RNA, 21 nt, Human
gccuuuggguuggacucaaca

SEQ ID NO: 720979 - RNA, 19 nt, Human
gcggcggcggcggcugagg

SEQ ID NO: 720980 - RNA, 22 nt, Human
gcggcggcggcggcugaggcgg

SEQ ID NO: 720981 - RNA, 24 nt, Human
gcggcggcggcggcugaggcggcg

SEQ ID NO: 720982 - RNA, 23 nt, Human
gcugcaggcgaaaacggcggcgg

SEQ ID NO: 720983 - RNA, 21 nt, Human
gcuuagucagugccucgcugg

SEQ ID NO: 720984 - RNA, 19 nt, Human
ggaaaagcaagcccaggga

SEQ ID NO: 720985 - RNA, 21 nt, Human
ggacagugggcaggcucucag

SEQ ID NO: 720986 - RNA, 20 nt, Human
ggagaaggucucugggacag

SEQ ID NO: 720987 - RNA, 23 nt, Human
ggccagaugcuuuggccagagac

SEQ ID NO: 720988 - RNA, 19 nt, Human
ggccagugaggagaggggg

SEQ ID NO: 720989 - RNA, 23 nt, Human
ggccaugaauggcacagguaacc

SEQ ID NO: 720990 - RNA, 22 nt, Human
gggaagggcaaaagaaaaggga

SEQ ID NO: 720991 - RNA, 22 nt, Human
gggaccggagccuccuccucag

SEQ ID NO: 720992 - RNA, 21 nt, Human
ggggccagugcuguagcucac

SEQ ID NO: 720993 - RNA, 20 nt, Human
ggguggggggaggggacgcu

SEQ ID NO: 720994 - RNA, 20 nt, Human
gguaaccaagagcuuggccu

SEQ ID NO: 720995 - RNA, 18 nt, Human
guaaaggacaaacccugc

SEQ ID NO: 720996 - RNA, 18 nt, Human
guaaccaagagcuuggcc

SEQ ID NO: 720997 - RNA, 23 nt, Human
gucuccucuucuuccuuucuccu

SEQ ID NO: 720998 - RNA, 22 nt, Human
gugcugccaguuagaugugccu

SEQ ID NO: 720999 - RNA, 18 nt, Human
guggcagcagaaagagca

SEQ ID NO: 721000 - RNA, 23 nt, Human
gugugccucgguuggccuuuggg

SEQ ID NO: 721001 - RNA, 27 nt, Human
uaaaaugaauuaaaaaauacaaaauca

SEQ ID NO: 721002 - RNA, 20 nt, Human
uaaaauggaggacuuuggca

SEQ ID NO: 721003 - RNA, 19 nt, Human
uaaaauguucgugccccac

SEQ ID NO: 721004 - RNA, 21 nt, Human
uaaagugaaaccucaucagca

SEQ ID NO: 721005 - RNA, 20 nt, Human
uaaaugaaagcaguuuuuua

SEQ ID NO: 721006 - RNA, 22 nt, Human
uaagaaaaaacaaccagaacac

SEQ ID NO: 721007 - RNA, 20 nt, Human
uacacacaggcaaggccaug

SEQ ID NO: 721008 - RNA, 20 nt, Human
uacagcuuacaguaaauacc

SEQ ID NO: 721009 - RNA, 23 nt, Human
uacaggauggaaaagcagacuuc

SEQ ID NO: 721010 - RNA, 18 nt, Human
uaccuaugguaccuccca

SEQ ID NO: 721011 - RNA, 24 nt, Human
uacugccccucucuggauucccaa

SEQ ID NO: 721012 - RNA, 19 nt, Human
uagaggccuggccuuaccc

SEQ ID NO: 721013 - RNA, 21 nt, Human
uagauuaaaaugaauuaaaaa

SEQ ID NO: 721014 - RNA, 18 nt, Human
uagccccucccuccaugc

SEQ ID NO: 721015 - RNA, 18 nt, Human
uagccgccgaggagcccg

SEQ ID NO: 721016 - RNA, 24 nt, Human
uaggccugaggagaaaggcugggg

SEQ ID NO: 721017 - RNA, 22 nt, Human
uauaaaguacaguuagccccuc

SEQ ID NO: 721018 - RNA, 28 nt, Human
uaugaaacagggaagcagaugccuuuaa

SEQ ID NO: 721019 - RNA, 24 nt, Human
uauugcuauugcuuuuccuucacu

SEQ ID NO: 721020 - RNA, 21 nt, Human
ucaaaacaaaacaaaaaccca

SEQ ID NO: 721021 - RNA, 22 nt, Human
ucaacagcaugcaccacagaag

SEQ ID NO: 721022 - RNA, 22 nt, Human
ucaagauuauuacagacaacuc

SEQ ID NO: 721023 - RNA, 25 nt, Human
ucacagggcccagaauggggcccac

SEQ ID NO: 721024 - RNA, 23 nt, Human
ucagagcugccagcacccaccug

SEQ ID NO: 721025 - RNA, 19 nt, Human
ucagguagaaguagaagaa

SEQ ID NO: 721026 - RNA, 19 nt, Human
ucagguaggaggaagggga

SEQ ID NO: 721027 - RNA, 19 nt, Human
ucagugccucgcugggaac

SEQ ID NO: 721028 - RNA, 25 nt, Human
uccaaaacaacaaaacaaaaccaga

SEQ ID NO: 721029 - RNA, 18 nt, Human
uccagauuuggaugggcu

SEQ ID NO: 721030 - RNA, 21 nt, Human
uccauaaccuguuuccucauu

SEQ ID NO: 721031 - RNA, 20 nt, Human
ucccaggggucccucuucuc

SEQ ID NO: 721032 - RNA, 24 nt, Human
uccccacaaugcccucccuccccc

SEQ ID NO: 721033 - RNA, 25 nt, Human
uccccacaaugcccucccucccccc

SEQ ID NO: 721034 - RNA, 22 nt, Human
uccccagguucucagccugggg

SEQ ID NO: 721035 - RNA, 24 nt, Human
ucccugacucucuuaggccugagg

SEQ ID NO: 721036 - RNA, 18 nt, Human
ucccuuguccucucuugc

SEQ ID NO: 721037 - RNA, 21 nt, Human
uccgcuucucugggccucagu

SEQ ID NO: 721038 - RNA, 19 nt, Human
uccgguguggaaucccauc

SEQ ID NO: 721039 - RNA, 19 nt, Human
uccuaaaguuccuuggaag

SEQ ID NO: 721040 - RNA, 19 nt, Human
uccuaccacccugcagccg

SEQ ID NO: 721041 - RNA, 21 nt, Human
uccuaccacccugcagccgcu

SEQ ID NO: 721042 - RNA, 19 nt, Human
uccuggaaccauauaaugc

SEQ ID NO: 721043 - RNA, 19 nt, Human
uccuggagguggagucagg

SEQ ID NO: 721044 - RNA, 23 nt, Human
uccuggcugagacuagcagggac

SEQ ID NO: 721045 - RNA, 22 nt, Human
uccugggcauugugaccccaaa

SEQ ID NO: 721046 - RNA, 19 nt, Human
ucucaagccuccugagccu

SEQ ID NO: 721047 - RNA, 21 nt, Human
ucucagggauuaggaagccag

SEQ ID NO: 721048 - RNA, 18 nt, Human
ucucaugaggaagaaauu

SEQ ID NO: 721049 - RNA, 23 nt, Human
ucuccuggagguggagucaggua

SEQ ID NO: 721050 - RNA, 23 nt, Human
ucucugcuugccucuagacuggg

SEQ ID NO: 721051 - RNA, 21 nt, Human
ucucugggaacgggguaccuc

SEQ ID NO: 721052 - RNA, 18 nt, Human
ucucuuucccugacucuc

SEQ ID NO: 721053 - RNA, 22 nt, Human
ucuggagaugcuggucuugcug

SEQ ID NO: 721054 - RNA, 20 nt, Human
ucuuccuccucuuccucucc

SEQ ID NO: 721055 - RNA, 23 nt, Human
ucuugcuggggucaggcccaaag

SEQ ID NO: 721056 - RNA, 22 nt, Human
ugaaagcaguuuuuuaaagucc

SEQ ID NO: 721057 - RNA, 19 nt, Human
ugaaggccaucagaacaaa

SEQ ID NO: 721058 - RNA, 19 nt, Human
ugaaggcuggguccuggaa

SEQ ID NO: 721059 - RNA, 24 nt, Human
ugaagugcuuugaccucugugaug

SEQ ID NO: 721060 - RNA, 20 nt, Human
ugacagcucagaggcugaag

SEQ ID NO: 721061 - RNA, 19 nt, Human
ugaccucugugaugcaccu

SEQ ID NO: 721062 - RNA, 20 nt, Human
ugacucccacugucuuccuc

SEQ ID NO: 721063 - RNA, 18 nt, Human
ugagacuagcagggaccu

SEQ ID NO: 721064 - RNA, 20 nt, Human
ugaggaagugccaggucagu

SEQ ID NO: 721065 - RNA, 19 nt, Human
ugaggagagggggucaggu

SEQ ID NO: 721066 - RNA, 20 nt, Human
ugaggagccaaaacuuggug

SEQ ID NO: 721067 - RNA, 18 nt, Human
ugagguccagcuguuagu

SEQ ID NO: 721068 - RNA, 25 nt, Human
ugccaagagacccagcagguggcag

SEQ ID NO: 721069 - RNA, 24 nt, Human
ugcccauccuaccagaggcacaug

SEQ ID NO: 721070 - RNA, 18 nt, Human
ugccuaauuucagaaacg

SEQ ID NO: 721071 - RNA, 19 nt, Human
ugccucugggucccucccc

SEQ ID NO: 721072 - RNA, 18 nt, Human
ugccugugcgcucagagg

SEQ ID NO: 721073 - RNA, 20 nt, Human
ugcucagagucugguucugg

SEQ ID NO: 721074 - RNA, 18 nt, Human
ugcuggcccagccaagcg

SEQ ID NO: 721075 - RNA, 20 nt, Human
uggaagacacuggucaaagg

SEQ ID NO: 721076 - RNA, 21 nt, Human
uggaauguugaagcuggccug

SEQ ID NO: 721077 - RNA, 21 nt, Human
uggagguggagucagguacag

SEQ ID NO: 721078 - RNA, 18 nt, Human
uggcacagguaaccaaga

SEQ ID NO: 721079 - RNA, 19 nt, Human
uggcagcagaaagagcaga

SEQ ID NO: 721080 - RNA, 19 nt, Human
uggcaugaggaggagagag

SEQ ID NO: 721081 - RNA, 21 nt, Human
uggcaugaggaggagagaggg

SEQ ID NO: 721082 - RNA, 25 nt, Human
uggcaugaggaggagagagggguuu

SEQ ID NO: 721083 - RNA, 18 nt, Human
uggccuggucagguagga

SEQ ID NO: 721084 - RNA, 20 nt, Human
ugggaaaagcaagcccaggg

SEQ ID NO: 721085 - RNA, 18 nt, Human
ugggaacgggguaccuca

SEQ ID NO: 721086 - RNA, 18 nt, Human
ugggagaauacaggaugg

SEQ ID NO: 721087 - RNA, 20 nt, Human
ugggagaauacaggauggaa

SEQ ID NO: 721088 - RNA, 23 nt, Human
ugggauccccagggacaggacac

SEQ ID NO: 721089 - RNA, 23 nt, Human
ugggauccuaccacccugcagcc

SEQ ID NO: 721090 - RNA, 19 nt, Human
uggggucaggcccaaagcu

SEQ ID NO: 721091 - RNA, 22 nt, Human
uguaccccugauccuggccaua

SEQ ID NO: 721092 - RNA, 20 nt, Human
ugucuccugggccucauccu

SEQ ID NO: 721093 - RNA, 24 nt, Human
ugugauaugaaacagggaagcaga

SEQ ID NO: 721094 - RNA, 19 nt, Human
uguuuccucauuugucaau

SEQ ID NO: 721095 - RNA, 23 nt, Human
uguuuugucccuuucuagcuuug

SEQ ID NO: 721096 - RNA, 20 nt, Human
uuaaagucccaaauguuguc

SEQ ID NO: 721097 - RNA, 25 nt, Human
uuacugguguugaaagaacaaaagu

SEQ ID NO: 721098 - RNA, 21 nt, Human
uuagcaagucucaagccuccu

SEQ ID NO: 721099 - RNA, 20 nt, Human
uuagccccucccuccaugcu

SEQ ID NO: 721100 - RNA, 26 nt, Human
uuagccccucccuccaugcuugccaa

SEQ ID NO: 721101 - RNA, 24 nt, Human
uucaaaccaaagccaugaggcaag

SEQ ID NO: 721102 - RNA, 24 nt, Human
uucagaaacgaggaguuuucuagg

SEQ ID NO: 721103 - RNA, 24 nt, Human
uucagcucugcgggugggucccaa

SEQ ID NO: 721104 - RNA, 21 nt, Human
uucaguacgugagccugugug

SEQ ID NO: 721105 - RNA, 22 nt, Human
uucaugugauuccuuucugaag

SEQ ID NO: 721106 - RNA, 20 nt, Human
uuccaaggccucgggaugcu

SEQ ID NO: 721107 - RNA, 20 nt, Human
uuccccagguucucagccug

SEQ ID NO: 721108 - RNA, 18 nt, Human
uuccuccucuuccucucc

SEQ ID NO: 721109 - RNA, 21 nt, Human
uugcaaagcuguuacaucugu

SEQ ID NO: 721110 - RNA, 25 nt, Human
uugcagugacuccccaagcuuggcc

SEQ ID NO: 721111 - RNA, 21 nt, Human
uugugaccccaaaguguuuug

SEQ ID NO: 721112 - RNA, 21 nt, Human
uuuggcauuuuucaaacacgu

SEQ ID NO: 721113 - RNA, 18 nt, Human
uuugucccuuucuagcuu

SEQ ID NO: 721114 - RNA, 21 nt, Human
aaacaacaguuccugggcccg

SEQ ID NO: 721115 - RNA, 19 nt, Human
aaccaccugcggccaggca

SEQ ID NO: 721116 - RNA, 21 nt, Human
aagccccugguccauacccag

SEQ ID NO: 721117 - RNA, 18 nt, Human
aagcccggcaaacaagga

SEQ ID NO: 721118 - RNA, 26 nt, Human
aagcuaaagacaaaaauaagggaccc

SEQ ID NO: 721119 - RNA, 20 nt, Human
aaggagccguggaugaagcg

SEQ ID NO: 721120 - RNA, 21 nt, Human
aaggagcucaguguggggagg

SEQ ID NO: 721121 - RNA, 21 nt, Human
acacacaccacccgcuuccag

SEQ ID NO: 721122 - RNA, 18 nt, Human
acacccccacguccaccc

SEQ ID NO: 721123 - RNA, 21 nt, Human
acacccccacguccaccccca

SEQ ID NO: 721124 - RNA, 19 nt, Human
acagggcagccccaagcuc

SEQ ID NO: 721125 - RNA, 19 nt, Human
accagggggggacaccugc

SEQ ID NO: 721126 - RNA, 18 nt, Human
acccaggaggccuccaca

SEQ ID NO: 721127 - RNA, 19 nt, Human
acccccacguccaccccca

SEQ ID NO: 721128 - RNA, 20 nt, Human
acccguacacccaaccccag

SEQ ID NO: 721129 - RNA, 24 nt, Human
acggcagaggcaccaagcucugcu

SEQ ID NO: 721130 - RNA, 21 nt, Human
acucuuuccuuuaaagcuaaa

SEQ ID NO: 721131 - RNA, 21 nt, Human
agaacccguacacccaacccc

SEQ ID NO: 721132 - RNA, 23 nt, Human
agcaccuccuccauacagacagc

SEQ ID NO: 721133 - RNA, 20 nt, Human
agcccggcaaacaaggacca

SEQ ID NO: 721134 - RNA, 21 nt, Human
agcugaaagaauccugagaaa

SEQ ID NO: 721135 - RNA, 18 nt, Human
agcugggcccagaggccu

SEQ ID NO: 721136 - RNA, 18 nt, Human
aggagcugggcccagagg

SEQ ID NO: 721137 - RNA, 23 nt, Human
aggaggccuccacagggcagccc

SEQ ID NO: 721138 - RNA, 19 nt, Human
aggcaggcgggugugcggc

SEQ ID NO: 721139 - RNA, 19 nt, Human
aggcagggguggggguggc

SEQ ID NO: 721140 - RNA, 22 nt, Human
aggcggggugggcaacuggggc

SEQ ID NO: 721141 - RNA, 21 nt, Human
agggaggcuggccuggccagg

SEQ ID NO: 721142 - RNA, 21 nt, Human
agggggcaagggcgugggagg

SEQ ID NO: 721143 - RNA, 20 nt, Human
agggggcgaggcaggggugg

SEQ ID NO: 721144 - RNA, 20 nt, Human
aggggugggcagcagcccgg

SEQ ID NO: 721145 - RNA, 18 nt, Human
agggguggggguggccau

SEQ ID NO: 721146 - RNA, 23 nt, Human
agggguggggguggccauggggc

SEQ ID NO: 721147 - RNA, 24 nt, Human
agggguggggguggccauggggcu

SEQ ID NO: 721148 - RNA, 23 nt, Human
agggugcuggcugggagcugacg

SEQ ID NO: 721149 - RNA, 20 nt, Human
agugaacccuccgagaagcc

SEQ ID NO: 721150 - RNA, 22 nt, Human
agugaacccuccgagaagcccg

SEQ ID NO: 721151 - RNA, 18 nt, Human
auggcagguuagugccug

SEQ ID NO: 721152 - RNA, 18 nt, Human
auggguuuggcaacugug

SEQ ID NO: 721153 - RNA, 19 nt, Human
caaccccagcucagcuaaa

SEQ ID NO: 721154 - RNA, 28 nt, Human
caagugcccugccaucucagacaguccc

SEQ ID NO: 721155 - RNA, 18 nt, Human
cacacguaaacaucaggu

SEQ ID NO: 721156 - RNA, 22 nt, Human
cacacguaaacaucaggugggc

SEQ ID NO: 721157 - RNA, 27 nt, Human
caccaaaugaccccacagucgaccucu

SEQ ID NO: 721158 - RNA, 18 nt, Human
caccacccgcuuccagcc

SEQ ID NO: 721159 - RNA, 22 nt, Human
caccagaggcuggaagcagugg

SEQ ID NO: 721160 - RNA, 20 nt, Human
cacccaggaccuuggaagcc

SEQ ID NO: 721161 - RNA, 23 nt, Human
cacccaggaccuuggaagcccac

SEQ ID NO: 721162 - RNA, 23 nt, Human
cacccccaccaaccacggccaac

SEQ ID NO: 721163 - RNA, 19 nt, Human
cacccccacguccaccccc

SEQ ID NO: 721164 - RNA, 26 nt, Human
cacccccgcccccccucacacacaca

SEQ ID NO: 721165 - RNA, 19 nt, Human
caccugcggccaggcaggc

SEQ ID NO: 721166 - RNA, 21 nt, Human
cagaacccguacacccaaccc

SEQ ID NO: 721167 - RNA, 28 nt, Human
cagaacccguacacccaaccccagcuca

SEQ ID NO: 721168 - RNA, 18 nt, Human
cagaggccuguagggggc

SEQ ID NO: 721169 - RNA, 21 nt, Human
cagcaggcucuuggggcgggg

SEQ ID NO: 721170 - RNA, 28 nt, Human
cagccuccaguccccagugccgcucccu

SEQ ID NO: 721171 - RNA, 22 nt, Human
caggcucagaggaacagaaccc

SEQ ID NO: 721172 - RNA, 21 nt, Human
cagggguggggguggccaugg

SEQ ID NO: 721173 - RNA, 19 nt, Human
caguuccugggcccguccc

SEQ ID NO: 721174 - RNA, 20 nt, Human
cauugccaggcagggugugg

SEQ ID NO: 721175 - RNA, 20 nt, Human
ccaaaugaccccacagucga

SEQ ID NO: 721176 - RNA, 20 nt, Human
ccacaagaccaccugagaac

SEQ ID NO: 721177 - RNA, 25 nt, Human
ccacccccgcccccccucacacaca

SEQ ID NO: 721178 - RNA, 23 nt, Human
ccacggcagaggcaccaagcucu

SEQ ID NO: 721179 - RNA, 24 nt, Human
ccaggcaggguguggagcucaccc

SEQ ID NO: 721180 - RNA, 20 nt, Human
cccacguccacccccaccaa

SEQ ID NO: 721181 - RNA, 22 nt, Human
cccacguccacccccaccaacc

SEQ ID NO: 721182 - RNA, 19 nt, Human
cccauugaggcugcccagg

SEQ ID NO: 721183 - RNA, 23 nt, Human
ccccacguccacccccaccaacc

SEQ ID NO: 721184 - RNA, 18 nt, Human
ccccagugccgcuccccc

SEQ ID NO: 721185 - RNA, 19 nt, Human
cccccaccaaccacggcca

SEQ ID NO: 721186 - RNA, 21 nt, Human
cccccgcccccccucacacac

SEQ ID NO: 721187 - RNA, 23 nt, Human
ccccgcccccccucacacacaca

SEQ ID NO: 721188 - RNA, 19 nt, Human
ccccugguccauacccagg

SEQ ID NO: 721189 - RNA, 19 nt, Human
cccugguccauacccagga

SEQ ID NO: 721190 - RNA, 26 nt, Human
ccguacacccaaccccagcucagcua

SEQ ID NO: 721191 - RNA, 21 nt, Human
ccuacagaggcccauagcccc

SEQ ID NO: 721192 - RNA, 21 nt, Human
ccuccauacagacagcaggcu

SEQ ID NO: 721193 - RNA, 23 nt, Human
ccugcggccaggcaggccggggc

SEQ ID NO: 721194 - RNA, 22 nt, Human
ccuguagggggcgaggcagggg

SEQ ID NO: 721195 - RNA, 21 nt, Human
cgaaagacagccacaagacca

SEQ ID NO: 721196 - RNA, 23 nt, Human
cgagaagcccggcaaacaaggac

SEQ ID NO: 721197 - RNA, 21 nt, Human
cgagggggcaagggcguggga

SEQ ID NO: 721198 - RNA, 18 nt, Human
cggcagaggcaccaagcu

SEQ ID NO: 721199 - RNA, 22 nt, Human
cuaaaaguaaacaggggacaca

SEQ ID NO: 721200 - RNA, 18 nt, Human
cuccuccauacagacagc

SEQ ID NO: 721201 - RNA, 23 nt, Human
cuugaccuuggcagcagccuggc

SEQ ID NO: 721202 - RNA, 22 nt, Human
cuuuaaagcuaaagacaaaaau

SEQ ID NO: 721203 - RNA, 22 nt, Human
gaacaaauuccaugacaaauca

SEQ ID NO: 721204 - RNA, 23 nt, Human
gaacgaauguacagugaacccuc

SEQ ID NO: 721205 - RNA, 20 nt, Human
gaagaggaggcgggguaaug

SEQ ID NO: 721206 - RNA, 23 nt, Human
gaagcccggcaaacaaggaccag

SEQ ID NO: 721207 - RNA, 23 nt, Human
gaccaguucccaggcaaaggcug

SEQ ID NO: 721208 - RNA, 19 nt, Human
gagcucaguguggggagga

SEQ ID NO: 721209 - RNA, 19 nt, Human
gcacccaggaccuuggaag

SEQ ID NO: 721210 - RNA, 18 nt, Human
gccaugcacccggcugca

SEQ ID NO: 721211 - RNA, 27 nt, Human
gccuggacuagccgugugcaugggagg

SEQ ID NO: 721212 - RNA, 21 nt, Human
ggacagggugaguagggugcu

SEQ ID NO: 721213 - RNA, 20 nt, Human
ggcaacuguguuggcaccag

SEQ ID NO: 721214 - RNA, 18 nt, Human
ggcaagugcccugccauc

SEQ ID NO: 721215 - RNA, 20 nt, Human
ggcaugcaggggugggcagc

SEQ ID NO: 721216 - RNA, 25 nt, Human
ggcuggaagcaguggggcuccugcc

SEQ ID NO: 721217 - RNA, 18 nt, Human
ggcuuagaggcuccggca

SEQ ID NO: 721218 - RNA, 20 nt, Human
gggcugccccagcaggggcc

SEQ ID NO: 721219 - RNA, 21 nt, Human
gggguggggguggccaugggg

SEQ ID NO: 721220 - RNA, 24 nt, Human
gggguggggguggccauggggcug

SEQ ID NO: 721221 - RNA, 19 nt, Human
gggugaguagggugcuggc

SEQ ID NO: 721222 - RNA, 19 nt, Human
ggguggggguggccauggg

SEQ ID NO: 721223 - RNA, 21 nt, Human
ggguggggguggccauggggc

SEQ ID NO: 721224 - RNA, 20 nt, Human
gguggggguggccauggggc

SEQ ID NO: 721225 - RNA, 20 nt, Human
gugggaggcacccgcccaca

SEQ ID NO: 721226 - RNA, 18 nt, Human
guggugcaggccaagcug

SEQ ID NO: 721227 - RNA, 23 nt, Human
guucccagcugaaagaauccuga

SEQ ID NO: 721228 - RNA, 23 nt, Human
uaaaauaaccauuuuccgaaaga

SEQ ID NO: 721229 - RNA, 22 nt, Human
uaaugcccuugagggcuugacc

SEQ ID NO: 721230 - RNA, 18 nt, Human
uacacccaaccccagcuc

SEQ ID NO: 721231 - RNA, 21 nt, Human
uacccaggaggccuccacagg

SEQ ID NO: 721232 - RNA, 18 nt, Human
uagaacaaauuccaugac

SEQ ID NO: 721233 - RNA, 19 nt, Human
ucagacagucccaggaaca

SEQ ID NO: 721234 - RNA, 23 nt, Human
ucaggccuggagggggcaccugc

SEQ ID NO: 721235 - RNA, 18 nt, Human
uccacccccaccaaccac

SEQ ID NO: 721236 - RNA, 22 nt, Human
uccacccccaccaaccacggcc

SEQ ID NO: 721237 - RNA, 23 nt, Human
uccacccccaccaaccacggcca

SEQ ID NO: 721238 - RNA, 19 nt, Human
ucccaggaacaggugagcc

SEQ ID NO: 721239 - RNA, 23 nt, Human
ucccccagcagcuggcccuguca

SEQ ID NO: 721240 - RNA, 21 nt, Human
uccgacucucauaccauugcc

SEQ ID NO: 721241 - RNA, 20 nt, Human
uccugggcccgucccugccc

SEQ ID NO: 721242 - RNA, 19 nt, Human
ucgugcgcucacccccgcc

SEQ ID NO: 721243 - RNA, 21 nt, Human
ugaacccuccgagaagcccuu

SEQ ID NO: 721244 - RNA, 23 nt, Human
ugaagccaaaaggggagggcgug

SEQ ID NO: 721245 - RNA, 25 nt, Human
ugacaaaucauauaaaaaggguuuc

SEQ ID NO: 721246 - RNA, 18 nt, Human
ugagaaaacaacaguucc

SEQ ID NO: 721247 - RNA, 21 nt, Human
ugagaaaacaacaguuccugg

SEQ ID NO: 721248 - RNA, 24 nt, Human
ugagccugcccaccuccauguuug

SEQ ID NO: 721249 - RNA, 18 nt, Human
ugauggcgugaagccaaa

SEQ ID NO: 721250 - RNA, 19 nt, Human
ugccaggcaggguguggag

SEQ ID NO: 721251 - RNA, 18 nt, Human
ugccaucucagacagucc

SEQ ID NO: 721252 - RNA, 26 nt, Human
ugcccugccaucucagacagucccaa

SEQ ID NO: 721253 - RNA, 19 nt, Human
ugcgcucacccccgccaga

SEQ ID NO: 721254 - RNA, 23 nt, Human
ugcucaccugccauguucccagc

SEQ ID NO: 721255 - RNA, 19 nt, Human
uggcagguuagugccuggc

SEQ ID NO: 721256 - RNA, 20 nt, Human
uggccaggagcugggcccag

SEQ ID NO: 721257 - RNA, 18 nt, Human
uggccuggccaggucugg

SEQ ID NO: 721258 - RNA, 18 nt, Human
uggcucagcucucaacaa

SEQ ID NO: 721259 - RNA, 21 nt, Human
uggcucagcucucaacaagcc

SEQ ID NO: 721260 - RNA, 18 nt, Human
uggcugggagcugacgag

SEQ ID NO: 721261 - RNA, 19 nt, Human
ugggcagcagcccggugga

SEQ ID NO: 721262 - RNA, 19 nt, Human
uggggcuggacagggugag

SEQ ID NO: 721263 - RNA, 22 nt, Human
uggggucaggugggagccacca

SEQ ID NO: 721264 - RNA, 19 nt, Human
ugucugcaccugugugcau

SEQ ID NO: 721265 - RNA, 19 nt, Human
ugugaacuuaaaacauugc

SEQ ID NO: 721266 - RNA, 25 nt, Human
uucacaaacgucccauugaggcugc

SEQ ID NO: 721267 - RNA, 24 nt, Human
uuccagccuccaguccccagugcc

SEQ ID NO: 721268 - RNA, 20 nt, Human
uugagggcuugaccuuggca

SEQ ID NO: 721269 - RNA, 21 nt, Human
uuggcaccaaaugaccccaca

SEQ ID NO: 721270 - RNA, 23 nt, Human
uuuccuuuaaagcuaaagacaaa

SEQ ID NO: 721271 - RNA, 24 nt, Human
aaaaaucuauacccuccauucuuc

SEQ ID NO: 721272 - RNA, 22 nt, Human
aaaccugcacuuguccccccaa

SEQ ID NO: 721273 - RNA, 20 nt, Human
aaccucauuauccgggcccc

SEQ ID NO: 721274 - RNA, 31 nt, Human
aagacuucccccucccaguuucuucugaggg

SEQ ID NO: 721275 - RNA, 18 nt, Human
aaggagcagccuguucca

SEQ ID NO: 721276 - RNA, 25 nt, Human
aagggaagaagggucagcugaagag

SEQ ID NO: 721277 - RNA, 24 nt, Human
aagggggagggagggaugaggagc

SEQ ID NO: 721278 - RNA, 23 nt, Human
aaguauccuuccaaccggccccc

SEQ ID NO: 721279 - RNA, 19 nt, Human
aauaaagggggagggaggg

SEQ ID NO: 721280 - RNA, 21 nt, Human
acaaaaaacgguaauaaaggg

SEQ ID NO: 721281 - RNA, 20 nt, Human
acacuggugcuggucugagu

SEQ ID NO: 721282 - RNA, 23 nt, Human
acauccuagaaggagcagccugu

SEQ ID NO: 721283 - RNA, 24 nt, Human
acauccuagaaggagcagccuguu

SEQ ID NO: 721284 - RNA, 22 nt, Human
acccaaccucauuauccgggcc

SEQ ID NO: 721285 - RNA, 19 nt, Human
acccugagauauagguagu

SEQ ID NO: 721286 - RNA, 18 nt, Human
acuccgcucagggaccag

SEQ ID NO: 721287 - RNA, 21 nt, Human
acuuugugauccuugaggcug

SEQ ID NO: 721288 - RNA, 25 nt, Human
agaaaagagaauaaauaagggaaga

SEQ ID NO: 721289 - RNA, 21 nt, Human
agaaaccugcacuuguccccc

SEQ ID NO: 721290 - RNA, 19 nt, Human
agagagggcaucuagcggu

SEQ ID NO: 721291 - RNA, 27 nt, Human
agagcccuccucauagugaagcugccc

SEQ ID NO: 721292 - RNA, 24 nt, Human
agagggcuuuccuggcccaggcac

SEQ ID NO: 721293 - RNA, 21 nt, Human
agccaugaugauugaaguucc

SEQ ID NO: 721294 - RNA, 23 nt, Human
aggaagggguauggaaggggagg

SEQ ID NO: 721295 - RNA, 21 nt, Human
aggagaaguugccugcucaag

SEQ ID NO: 721296 - RNA, 24 nt, Human
aggaggggaggcaggaaggugggg

SEQ ID NO: 721297 - RNA, 24 nt, Human
aggaggggaggcaggaaggugggg

SEQ ID NO: 721298 - RNA, 23 nt, Human
aggcacuuagagguuacauaacu

SEQ ID NO: 721299 - RNA, 24 nt, Human
aggcaguguggccuggccuaggag

SEQ ID NO: 721300 - RNA, 20 nt, Human
aggugggaggagggugaggg

SEQ ID NO: 721301 - RNA, 23 nt, Human
augaaaggugagaaggugggagg

SEQ ID NO: 721302 - RNA, 18 nt, Human
augaggagcaggagggga

SEQ ID NO: 721303 - RNA, 23 nt, Human
caaguauccuuccaaccggcccc

SEQ ID NO: 721304 - RNA, 18 nt, Human
cacacagcaauggacauc

SEQ ID NO: 721305 - RNA, 19 nt, Human
cacacuaaaaaaagcccag

SEQ ID NO: 721306 - RNA, 26 nt, Human
cacacuaaaaaaagcccagacuucac

SEQ ID NO: 721307 - RNA, 19 nt, Human
cagagccucggagacugcc

SEQ ID NO: 721308 - RNA, 23 nt, Human
cagcaggaggcaaaugcuucugg

SEQ ID NO: 721309 - RNA, 27 nt, Human
caggcucccggcucccuccuucccaca

SEQ ID NO: 721310 - RNA, 20 nt, Human
caggggugggagagagaaga

SEQ ID NO: 721311 - RNA, 20 nt, Human
ccaaccggccccauggccca

SEQ ID NO: 721312 - RNA, 22 nt, Human
ccacacauauaaauagaaaaga

SEQ ID NO: 721313 - RNA, 22 nt, Human
ccacagcugcugcuccucagca

SEQ ID NO: 721314 - RNA, 20 nt, Human
ccaggcucccggcucccucc

SEQ ID NO: 721315 - RNA, 21 nt, Human
cccacacaugccggacagggc

SEQ ID NO: 721316 - RNA, 21 nt, Human
cccacaccauccaugucacaa

SEQ ID NO: 721317 - RNA, 20 nt, Human
cccacagagccacugcucac

SEQ ID NO: 721318 - RNA, 24 nt, Human
cccacaggcaguguggccuggccu

SEQ ID NO: 721319 - RNA, 21 nt, Human
cccagguuccggggagagccc

SEQ ID NO: 721320 - RNA, 24 nt, Human
cccauggcccaggguggacggggc

SEQ ID NO: 721321 - RNA, 19 nt, Human
ccccaucccgggccggccc

SEQ ID NO: 721322 - RNA, 22 nt, Human
ccccccaaauauauaaaacuaa

SEQ ID NO: 721323 - RNA, 18 nt, Human
cccccucccaguuucuuc

SEQ ID NO: 721324 - RNA, 25 nt, Human
ccccuguguccucccaccuacccca

SEQ ID NO: 721325 - RNA, 22 nt, Human
cccggaacccagagggcuuucc

SEQ ID NO: 721326 - RNA, 19 nt, Human
cccggcucccuccuuccca

SEQ ID NO: 721327 - RNA, 18 nt, Human
ccucccagccaccagucc

SEQ ID NO: 721328 - RNA, 19 nt, Human
ccucccagccaccaguccc

SEQ ID NO: 721329 - RNA, 21 nt, Human
ccucggagacugcccaucccc

SEQ ID NO: 721330 - RNA, 18 nt, Human
ccugagggagguguggga

SEQ ID NO: 721331 - RNA, 22 nt, Human
ccugcacuuguccccccaaaua

SEQ ID NO: 721332 - RNA, 22 nt, Human
ccugucucuuccauccuuucuc

SEQ ID NO: 721333 - RNA, 23 nt, Human
ccuugaggcugcgggucuccagg

SEQ ID NO: 721334 - RNA, 20 nt, Human
ccuuggguuuggauuugaag

SEQ ID NO: 721335 - RNA, 19 nt, Human
cuaauugaaaaaaaaaauc

SEQ ID NO: 721336 - RNA, 21 nt, Human
cucaaacccaggcaggcaguc

SEQ ID NO: 721337 - RNA, 20 nt, Human
cucagagcugggggcugggg

SEQ ID NO: 721338 - RNA, 19 nt, Human
cucagcacuucauuuacuu

SEQ ID NO: 721339 - RNA, 19 nt, Human
cuccagagccuccugucuc

SEQ ID NO: 721340 - RNA, 20 nt, Human
cuccucagcacuuugagggu

SEQ ID NO: 721341 - RNA, 18 nt, Human
cuccucucccucccagcc

SEQ ID NO: 721342 - RNA, 21 nt, Human
cugcugcuccucagcacuuug

SEQ ID NO: 721343 - RNA, 22 nt, Human
cuggcccuggggugagugggca

SEQ ID NO: 721344 - RNA, 18 nt, Human
cuucccacagagccacug

SEQ ID NO: 721345 - RNA, 21 nt, Human
cuucccccucccaguuucuuc

SEQ ID NO: 721346 - RNA, 25 nt, Human
gaacccagagggcuuuccuggccca

SEQ ID NO: 721347 - RNA, 23 nt, Human
gacagaaaagaagggucaccugg

SEQ ID NO: 721348 - RNA, 20 nt, Human
gacauauagaguggaauaaa

SEQ ID NO: 721349 - RNA, 24 nt, Human
gagacaguggucuggagggggagc

SEQ ID NO: 721350 - RNA, 19 nt, Human
gaggaggugggaguaccca

SEQ ID NO: 721351 - RNA, 23 nt, Human
gcacaacugucuucgagacagug

SEQ ID NO: 721352 - RNA, 22 nt, Human
gcucaggccagcuuccuucugc

SEQ ID NO: 721353 - RNA, 24 nt, Human
ggaaacucacuuugugauccuuga

SEQ ID NO: 721354 - RNA, 23 nt, Human
ggaggaggugggaguacccaggu

SEQ ID NO: 721355 - RNA, 20 nt, Human
ggaguggaggaggugggagu

SEQ ID NO: 721356 - RNA, 24 nt, Human
ggcgagaaaagcugccggccuucu

SEQ ID NO: 721357 - RNA, 26 nt, Human
ggcgaugcgcacacuaaaaaaagccc

SEQ ID NO: 721358 - RNA, 19 nt, Human
gggaauacccacacaugcc

SEQ ID NO: 721359 - RNA, 18 nt, Human
gggcccuccucucccucc

SEQ ID NO: 721360 - RNA, 18 nt, Human
gggcguggaguggaggag

SEQ ID NO: 721361 - RNA, 24 nt, Human
ggggagggagggaugaggagcagg

SEQ ID NO: 721362 - RNA, 28 nt, Human
ggggcugggguuaccauuggccuugggu

SEQ ID NO: 721363 - RNA, 24 nt, Human
gggggagggagggaugaggagcag

SEQ ID NO: 721364 - RNA, 23 nt, Human
gggugcccaccucucaugugcuu

SEQ ID NO: 721365 - RNA, 18 nt, Human
ggugggaggagggugagg

SEQ ID NO: 721366 - RNA, 18 nt, Human
guccauguccucggcacc

SEQ ID NO: 721367 - RNA, 22 nt, Human
gucugaguggggaccugaggga

SEQ ID NO: 721368 - RNA, 22 nt, Human
guggcugcuggucccagggcuu

SEQ ID NO: 721369 - RNA, 20 nt, Human
uaaaaaaagcccagacuuca

SEQ ID NO: 721370 - RNA, 21 nt, Human
uaacacucagcacuucauuua

SEQ ID NO: 721371 - RNA, 23 nt, Human
uaagaucucaagcacgggaacca

SEQ ID NO: 721372 - RNA, 23 nt, Human
uacccaaaggcaugugcccuaaa

SEQ ID NO: 721373 - RNA, 24 nt, Human
uacccaaaggcaugugcccuaaac

SEQ ID NO: 721374 - RNA, 20 nt, Human
uagaaggagcagccuguucc

SEQ ID NO: 721375 - RNA, 18 nt, Human
uaggaguucggugucucc

SEQ ID NO: 721376 - RNA, 18 nt, Human
ucacuugguuugucugug

SEQ ID NO: 721377 - RNA, 25 nt, Human
ucagagcuggguccucagagcuggg

SEQ ID NO: 721378 - RNA, 18 nt, Human
ucaggccagcuuccuucu

SEQ ID NO: 721379 - RNA, 21 nt, Human
ucaucuguucacggagggucc

SEQ ID NO: 721380 - RNA, 24 nt, Human
uccacaaugugugucaucuaccca

SEQ ID NO: 721381 - RNA, 23 nt, Human
uccacaugcuaucuacccaaagg

SEQ ID NO: 721382 - RNA, 21 nt, Human
uccacugccaugguggcugcu

SEQ ID NO: 721383 - RNA, 18 nt, Human
ucccacagagccacugcu

SEQ ID NO: 721384 - RNA, 21 nt, Human
ucccaccuaccccagggguca

SEQ ID NO: 721385 - RNA, 22 nt, Human
ucccagccaccagucccucguc

SEQ ID NO: 721386 - RNA, 18 nt, Human
ucccggaacccagagggc

SEQ ID NO: 721387 - RNA, 18 nt, Human
ucccggcucccuccuucc

SEQ ID NO: 721388 - RNA, 20 nt, Human
ucccgggccggcccugcucu

SEQ ID NO: 721389 - RNA, 21 nt, Human
ucccgggccggcccugcucuc

SEQ ID NO: 721390 - RNA, 20 nt, Human
uccggggagagcccuccuca

SEQ ID NO: 721391 - RNA, 18 nt, Human
uccucccaccuaccccag

SEQ ID NO: 721392 - RNA, 21 nt, Human
uccuucugccuaggccuccgg

SEQ ID NO: 721393 - RNA, 22 nt, Human
uccuugaggcugcgggucucca

SEQ ID NO: 721394 - RNA, 19 nt, Human
ucucagaggcagacacugg

SEQ ID NO: 721395 - RNA, 24 nt, Human
ucucagaggcagacacuggugcug

SEQ ID NO: 721396 - RNA, 22 nt, Human
ucucuggggaaggcuucccacc

SEQ ID NO: 721397 - RNA, 20 nt, Human
ucuugguaggugugaugcug

SEQ ID NO: 721398 - RNA, 20 nt, Human
ugaaaggugagaagguggga

SEQ ID NO: 721399 - RNA, 25 nt, Human
ugaaaggugagaaggugggaggagg

SEQ ID NO: 721400 - RNA, 26 nt, Human
ugaaggaaaagcgcuugauaaggcgg

SEQ ID NO: 721401 - RNA, 19 nt, Human
ugaaguucccauuuuacag

SEQ ID NO: 721402 - RNA, 18 nt, Human
ugagaaaacugaggcacu

SEQ ID NO: 721403 - RNA, 18 nt, Human
ugagaaggugggaggagg

SEQ ID NO: 721404 - RNA, 21 nt, Human
ugagaaggugggaggagggug

SEQ ID NO: 721405 - RNA, 19 nt, Human
ugaggaaacugaggucccc

SEQ ID NO: 721406 - RNA, 23 nt, Human
ugaggaaacugagguccccaaag

SEQ ID NO: 721407 - RNA, 23 nt, Human
ugaggcugcgggucuccagggca

SEQ ID NO: 721408 - RNA, 19 nt, Human
ugagggaggugaagagggg

SEQ ID NO: 721409 - RNA, 18 nt, Human
ugagggaggugugggagc

SEQ ID NO: 721410 - RNA, 21 nt, Human
ugagggaggugugggagcccc

SEQ ID NO: 721411 - RNA, 19 nt, Human
ugcaauauaugcauguaag

SEQ ID NO: 721412 - RNA, 21 nt, Human
ugcaugcaauauaugcaugua

SEQ ID NO: 721413 - RNA, 22 nt, Human
ugccaugguggcugcugguccc

SEQ ID NO: 721414 - RNA, 23 nt, Human
ugccaugguggcugcugguccca

SEQ ID NO: 721415 - RNA, 19 nt, Human
ugcuggggcguggagugga

SEQ ID NO: 721416 - RNA, 18 nt, Human
uggagacauggcuggugg

SEQ ID NO: 721417 - RNA, 26 nt, Human
ugggacagaaaagaagggucaccugg

SEQ ID NO: 721418 - RNA, 20 nt, Human
ugggagagagaagagacaga

SEQ ID NO: 721419 - RNA, 21 nt, Human
ugggaggagggugaggguuga

SEQ ID NO: 721420 - RNA, 18 nt, Human
ugggcacaacugucuucg

SEQ ID NO: 721421 - RNA, 20 nt, Human
uggggaccugagggaggugu

SEQ ID NO: 721422 - RNA, 18 nt, Human
uggguccucagagcuggg

SEQ ID NO: 721423 - RNA, 20 nt, Human
ugguaggugugaugcugggg

SEQ ID NO: 721424 - RNA, 18 nt, Human
ugguggcugcugguccca

SEQ ID NO: 721425 - RNA, 23 nt, Human
uguauaagaucucaagcacggga

SEQ ID NO: 721426 - RNA, 18 nt, Human
ugucaucuacccaaccuc

SEQ ID NO: 721427 - RNA, 21 nt, Human
ugugucaucuacccaaccuca

SEQ ID NO: 721428 - RNA, 21 nt, Human
uucaaaggauaaccaguuguc

SEQ ID NO: 721429 - RNA, 20 nt, Human
uuccacaugcuaucuaccca

SEQ ID NO: 721430 - RNA, 19 nt, Human
uucuaagacuucccccucc

SEQ ID NO: 721431 - RNA, 18 nt, Human
uucucagaggcagacacu

SEQ ID NO: 721432 - RNA, 21 nt, Human
uucuucugaggcaacaguuaa

SEQ ID NO: 721433 - RNA, 20 nt, Human
uugaguuuuuugcuacaauu

SEQ ID NO: 721434 - RNA, 18 nt, Human
uuucaaaggauaaccagu

SEQ ID NO: 721435 - RNA, 18 nt, Human
uuucaaaggauaaccagu

SEQ ID NO: 721436 - RNA, 26 nt, Human
uuugcccacauuucagaaugagagag

SEQ ID NO: 721437 - RNA, 20 nt, Human
aaaaagaaacaaaagguuua

SEQ ID NO: 721438 - RNA, 23 nt, Human
aaaauaagacccauggcaaagag

SEQ ID NO: 721439 - RNA, 19 nt, Human
aaacauucaugaacauuua

SEQ ID NO: 721440 - RNA, 24 nt, Human
aaacauucaugaacauuuaaauaa

SEQ ID NO: 721441 - RNA, 23 nt, Human
aaagaaccaaguaaaugacagac

SEQ ID NO: 721442 - RNA, 23 nt, Human
aaauauguaggggccuagggggu

SEQ ID NO: 721443 - RNA, 21 nt, Human
aaauuguguaucaagaaacua

SEQ ID NO: 721444 - RNA, 23 nt, Human
aacacgguggaaaaaaaacuggu

SEQ ID NO: 721445 - RNA, 20 nt, Human
aaggaagaaugggaagagaa

SEQ ID NO: 721446 - RNA, 23 nt, Human
aaggacacacagcacaccagagc

SEQ ID NO: 721447 - RNA, 21 nt, Human
aagucugcaauggagcuaggc

SEQ ID NO: 721448 - RNA, 18 nt, Human
aauugcacaacacaugca

SEQ ID NO: 721449 - RNA, 21 nt, Human
aauuucuacccuaucuaucuc

SEQ ID NO: 721450 - RNA, 18 nt, Human
acaacacaugcaacaugg

SEQ ID NO: 721451 - RNA, 19 nt, Human
acacagcacaccagagcag

SEQ ID NO: 721452 - RNA, 21 nt, Human
acauaguuucaaggcuuaaaa

SEQ ID NO: 721453 - RNA, 18 nt, Human
accaaggcaccaagccag

SEQ ID NO: 721454 - RNA, 23 nt, Human
acuaaaucaaagcuuaaaacaac

SEQ ID NO: 721455 - RNA, 22 nt, Human
acugaaaucacaagagcuauaa

SEQ ID NO: 721456 - RNA, 25 nt, Human
acugaaaucacaagagcuauaacug

SEQ ID NO: 721457 - RNA, 18 nt, Human
acuugcugguucuggaac

SEQ ID NO: 721458 - RNA, 18 nt, Human
agaagagccuacaggcau

SEQ ID NO: 721459 - RNA, 21 nt, Human
agaaugccaugcuagcugugg

SEQ ID NO: 721460 - RNA, 24 nt, Human
agacuuuuccaggguauaagggug

SEQ ID NO: 721461 - RNA, 24 nt, Human
agcaacucucaggcugccgucuca

SEQ ID NO: 721462 - RNA, 20 nt, Human
agcaaucuccggaacacaga

SEQ ID NO: 721463 - RNA, 23 nt, Human
agcccaguacaucucaccugcag

SEQ ID NO: 721464 - RNA, 24 nt, Human
aggaauggacagagcauguagaca

SEQ ID NO: 721465 - RNA, 18 nt, Human
aggcagcauacaucucag

SEQ ID NO: 721466 - RNA, 22 nt, Human
aggcaugaagauaaccuggagc

SEQ ID NO: 721467 - RNA, 19 nt, Human
aggcucuggaaaacacugg

SEQ ID NO: 721468 - RNA, 19 nt, Human
agguaauuacagacuuuuc

SEQ ID NO: 721469 - RNA, 24 nt, Human
auauaauaaaaagcccaguacauc

SEQ ID NO: 721470 - RNA, 26 nt, Human
aucucacucuguuucaaaggguugaa

SEQ ID NO: 721471 - RNA, 18 nt, Human
aucugccacuaaagcuac

SEQ ID NO: 721472 - RNA, 22 nt, Human
augaagauaaccuggagccuau

SEQ ID NO: 721473 - RNA, 22 nt, Human
augggaagagaagaauacaaau

SEQ ID NO: 721474 - RNA, 20 nt, Human
auguuuuuuaaaagacauuc

SEQ ID NO: 721475 - RNA, 21 nt, Human
auuagaaacuauaccaaaaac

SEQ ID NO: 721476 - RNA, 24 nt, Human
auucuuggcauuucaauauagguu

SEQ ID NO: 721477 - RNA, 25 nt, Human
auuuccuuuccuccuccuuccuuuc

SEQ ID NO: 721478 - RNA, 22 nt, Human
caaaauuaccacgcuaaauggc

SEQ ID NO: 721479 - RNA, 20 nt, Human
caaagagccaucccugauaa

SEQ ID NO: 721480 - RNA, 19 nt, Human
caaagcuuaaaacaacagc

SEQ ID NO: 721481 - RNA, 21 nt, Human
caaagcuuaaaacaacagcuc

SEQ ID NO: 721482 - RNA, 19 nt, Human
caaaggguugaaagcaauu

SEQ ID NO: 721483 - RNA, 20 nt, Human
caacaaaaagacuaaggaca

SEQ ID NO: 721484 - RNA, 19 nt, Human
caagagcuauaacugccag

SEQ ID NO: 721485 - RNA, 20 nt, Human
caccagagcagcaccguccu

SEQ ID NO: 721486 - RNA, 21 nt, Human
caccagagcagcaccguccuu

SEQ ID NO: 721487 - RNA, 20 nt, Human
caccucaagucuaaacacgg

SEQ ID NO: 721488 - RNA, 21 nt, Human
cagaggugauuucaccauuuu

SEQ ID NO: 721489 - RNA, 19 nt, Human
cagcugccucuuguauucc

SEQ ID NO: 721490 - RNA, 21 nt, Human
caggucuccaacuaccagaua

SEQ ID NO: 721491 - RNA, 20 nt, Human
cauccaauuucucuggaaac

SEQ ID NO: 721492 - RNA, 24 nt, Human
cauccaauuucucuggaaacauaa

SEQ ID NO: 721493 - RNA, 20 nt, Human
cauggaccaaggcaccaagc

SEQ ID NO: 721494 - RNA, 24 nt, Human
cauuaaugcucuacauaauuuggu

SEQ ID NO: 721495 - RNA, 21 nt, Human
cauucacuacuuuauccacuc

SEQ ID NO: 721496 - RNA, 18 nt, Human
ccacaggcaggcagggca

SEQ ID NO: 721497 - RNA, 18 nt, Human
ccagccagugacagaaau

SEQ ID NO: 721498 - RNA, 19 nt, Human
ccagcuuaccucauaguua

SEQ ID NO: 721499 - RNA, 22 nt, Human
cccacaggcuaaaacuugccag

SEQ ID NO: 721500 - RNA, 23 nt, Human
cccacauuuugggagucugugac

SEQ ID NO: 721501 - RNA, 19 nt, Human
cccauagcaucugcccaaa

SEQ ID NO: 721502 - RNA, 22 nt, Human
ccccuaaaaaaauaaaaaaaaa

SEQ ID NO: 721503 - RNA, 23 nt, Human
cccuagaauggaaucuauuagca

SEQ ID NO: 721504 - RNA, 25 nt, Human
cccuaucuaucucacucuguuucaa

SEQ ID NO: 721505 - RNA, 22 nt, Human
ccuccuuccuuucacuacucaa

SEQ ID NO: 721506 - RNA, 22 nt, Human
cuaaaacaacaaaaagacuaag

SEQ ID NO: 721507 - RNA, 21 nt, Human
cucauaguuaucccuucaauc

SEQ ID NO: 721508 - RNA, 22 nt, Human
cucuccuuccucagggauccca

SEQ ID NO: 721509 - RNA, 22 nt, Human
cugaaugagcacccagaggcau

SEQ ID NO: 721510 - RNA, 18 nt, Human
cugacccuuuggaagucu

SEQ ID NO: 721511 - RNA, 19 nt, Human
cugagcccaucuuguuuuu

SEQ ID NO: 721512 - RNA, 31 nt, Human
cuuucauucaccaaaauucuauuauacaugg

SEQ ID NO: 721513 - RNA, 19 nt, Human
cuuuccuccuccuuccuuu

SEQ ID NO: 721514 - RNA, 24 nt, Human
ggaaaacacugguggaaauaauca

SEQ ID NO: 721515 - RNA, 22 nt, Human
ggacccaaagagcuaucagcaa

SEQ ID NO: 721516 - RNA, 21 nt, Human
ggcaugaagauaaccuggagc

SEQ ID NO: 721517 - RNA, 19 nt, Human
gguggugagaaaaggcuga

SEQ ID NO: 721518 - RNA, 24 nt, Human
guaauuacagacuuuuccagggua

SEQ ID NO: 721519 - RNA, 24 nt, Human
guccacguaaagauaacugaccac

SEQ ID NO: 721520 - RNA, 18 nt, Human
gugaaaauaagacccaug

SEQ ID NO: 721521 - RNA, 18 nt, Human
guggaaauaaucaacugc

SEQ ID NO: 721522 - RNA, 24 nt, Human
uaaaaaacaaaacaauaaaaaucu

SEQ ID NO: 721523 - RNA, 19 nt, Human
uaaaaaaucaucugccuuu

SEQ ID NO: 721524 - RNA, 21 nt, Human
uaaaaaucuauuuuccuccca

SEQ ID NO: 721525 - RNA, 23 nt, Human
uaaaacaacaaaaagacuaagga

SEQ ID NO: 721526 - RNA, 24 nt, Human
uaaaacaacaaaaagacuaaggac

SEQ ID NO: 721527 - RNA, 21 nt, Human
uaaaacaacagcuccuggggc

SEQ ID NO: 721528 - RNA, 22 nt, Human
uaaaauggaacagugggacccc

SEQ ID NO: 721529 - RNA, 20 nt, Human
uaaacagagaaagaggagaa

SEQ ID NO: 721530 - RNA, 23 nt, Human
uaaagucacugaaauaaaagcug

SEQ ID NO: 721531 - RNA, 20 nt, Human
uaaaguuccuuuuacccuuc

SEQ ID NO: 721532 - RNA, 22 nt, Human
uaacagacguaaaaaucaugaa

SEQ ID NO: 721533 - RNA, 19 nt, Human
uaacccauagcaucugccc

SEQ ID NO: 721534 - RNA, 24 nt, Human
uaacugccagagaaaaauuaaaug

SEQ ID NO: 721535 - RNA, 24 nt, Human
uaagguauuacccacaggcuaaaa

SEQ ID NO: 721536 - RNA, 21 nt, Human
uaaguaggggaggcaccaaaa

SEQ ID NO: 721537 - RNA, 20 nt, Human
uacugaaaucacaagagcua

SEQ ID NO: 721538 - RNA, 24 nt, Human
uaguaaccaucuagaaucaacuca

SEQ ID NO: 721539 - RNA, 18 nt, Human
uaguucacagguaaggga

SEQ ID NO: 721540 - RNA, 19 nt, Human
ucaacuguaacccauagca

SEQ ID NO: 721541 - RNA, 20 nt, Human
ucacucuggagcacuugcug

SEQ ID NO: 721542 - RNA, 19 nt, Human
ucauaugucagacuugagu

SEQ ID NO: 721543 - RNA, 19 nt, Human
uccagagcccuggagccca

SEQ ID NO: 721544 - RNA, 18 nt, Human
uccaucugagcccaucuu

SEQ ID NO: 721545 - RNA, 19 nt, Human
uccaucugagcccaucuug

SEQ ID NO: 721546 - RNA, 19 nt, Human
ucccuaaguaggggaggca

SEQ ID NO: 721547 - RNA, 22 nt, Human
ucccuguguucuguuggucucu

SEQ ID NO: 721548 - RNA, 19 nt, Human
ucucacucuguuucaaagg

SEQ ID NO: 721549 - RNA, 23 nt, Human
ucuccagagaauccugagaccac

SEQ ID NO: 721550 - RNA, 21 nt, Human
ucucucuggaaguugcagccu

SEQ ID NO: 721551 - RNA, 23 nt, Human
ucuucaaguagugacugagccag

SEQ ID NO: 721552 - RNA, 26 nt, Human
ugaaaggaauggacagagcauguaga

SEQ ID NO: 721553 - RNA, 21 nt, Human
ugaaagggcaaaggcagggua

SEQ ID NO: 721554 - RNA, 18 nt, Human
ugaaauaaagacaugauc

SEQ ID NO: 721555 - RNA, 20 nt, Human
ugaaaucacaagagcuauaa

SEQ ID NO: 721556 - RNA, 23 nt, Human
ugaaaucacaagagcuauaacug

SEQ ID NO: 721557 - RNA, 26 nt, Human
ugaagaccacaaagaaaaagaaccaa

SEQ ID NO: 721558 - RNA, 20 nt, Human
ugaagcaaucugagugggaa

SEQ ID NO: 721559 - RNA, 19 nt, Human
ugaaugagcacccagaggc

SEQ ID NO: 721560 - RNA, 22 nt, Human
ugagcacccagaggcaugaaga

SEQ ID NO: 721561 - RNA, 21 nt, Human
ugagguaguugucacuuagga

SEQ ID NO: 721562 - RNA, 23 nt, Human
ugccaugaccaucuaucuuccug

SEQ ID NO: 721563 - RNA, 22 nt, Human
uggaaaaaaaacuggucuagag

SEQ ID NO: 721564 - RNA, 18 nt, Human
uggaaaauuaugguaacu

SEQ ID NO: 721565 - RNA, 18 nt, Human
uggaaacuugacagcuga

SEQ ID NO: 721566 - RNA, 18 nt, Human
uggaacaugaguuuguua

SEQ ID NO: 721567 - RNA, 22 nt, Human
uggaauuagaaacuauaccaaa

SEQ ID NO: 721568 - RNA, 26 nt, Human
uggagaacguauaaaaagcauccaaa

SEQ ID NO: 721569 - RNA, 22 nt, Human
uggcaaaagaaucugaaacuaa

SEQ ID NO: 721570 - RNA, 20 nt, Human
uggcuggucuaaaggaguca

SEQ ID NO: 721571 - RNA, 22 nt, Human
uggcuggucuaaaggagucauu

SEQ ID NO: 721572 - RNA, 25 nt, Human
ugguaacugcaggcuguaacaguuu

SEQ ID NO: 721573 - RNA, 22 nt, Human
uggucugagagaugagacugua

SEQ ID NO: 721574 - RNA, 18 nt, Human
ugguguggaaauccaaag

SEQ ID NO: 721575 - RNA, 24 nt, Human
uguaacccauagcaucugcccaaa

SEQ ID NO: 721576 - RNA, 19 nt, Human
uguagagagagaacauuuu

SEQ ID NO: 721577 - RNA, 20 nt, Human
ugugucacucuggagcacuu

SEQ ID NO: 721578 - RNA, 21 nt, Human
uguuccuaaaggcaaauagga

SEQ ID NO: 721579 - RNA, 23 nt, Human
uguuuuaugccagcugccucuug

SEQ ID NO: 721580 - RNA, 18 nt, Human
uuaaaaaaucaucugccu

SEQ ID NO: 721581 - RNA, 19 nt, Human
uuaaaacaacagcuccugg

SEQ ID NO: 721582 - RNA, 23 nt, Human
uuaaaauuggaauuagaaacuau

SEQ ID NO: 721583 - RNA, 23 nt, Human
uuauaggcaagcuaucaccuccc

SEQ ID NO: 721584 - RNA, 21 nt, Human
uucaaacauucaugaacauuu

SEQ ID NO: 721585 - RNA, 18 nt, Human
uucaccaaaauucuauua

SEQ ID NO: 721586 - RNA, 24 nt, Human
uuccucacagaugacauugcuggu

SEQ ID NO: 721587 - RNA, 22 nt, Human
uugaguccagagaauacuagaa

SEQ ID NO: 721588 - RNA, 22 nt, Human
uugaucccuguguucuguuggu

SEQ ID NO: 721589 - RNA, 24 nt, Human
uugguuucaguuaauauguaauau

SEQ ID NO: 721590 - RNA, 24 nt, Human
uuuaauuuccuuuccuccuccuuc

SEQ ID NO: 721591 - RNA, 21 nt, Human
uuucccaauguaaaguuccuu

SEQ ID NO: 721592 - RNA, 22 nt, Human
uuuccuccuccuuccuuucacu

SEQ ID NO: 721593 - RNA, 23 nt, Human
uuuccuuuccuccuccuuccuuu

SEQ ID NO: 721594 - RNA, 24 nt, Human
uuuuaccauguacauaauucacaa

SEQ ID NO: 721595 - RNA, 20 nt, Human
agcuccgugccucaguuucc

SEQ ID NO: 721596 - RNA, 24 nt, Human
aggcuggggugggaggccccaggg

SEQ ID NO: 721597 - RNA, 22 nt, Human
augggccucagggaggcugggg

SEQ ID NO: 721598 - RNA, 20 nt, Human
caccagggcgcaguguagag

SEQ ID NO: 721599 - RNA, 18 nt, Human
cagccaggcugggcaugg

SEQ ID NO: 721600 - RNA, 21 nt, Human
cagccaggcugggcauggggc

SEQ ID NO: 721601 - RNA, 21 nt, Human
ccccaggguccggcaggaggg

SEQ ID NO: 721602 - RNA, 19 nt, Human
ccugucugacggggcaggc

SEQ ID NO: 721603 - RNA, 20 nt, Human
gaguaugggccucagggagg

SEQ ID NO: 721604 - RNA, 22 nt, Human
gccucagggaggcugggguggg

SEQ ID NO: 721605 - RNA, 22 nt, Human
ggccucagggaggcuggggugg

SEQ ID NO: 721606 - RNA, 19 nt, Human
gggcagcagcauuugcggg

SEQ ID NO: 721607 - RNA, 20 nt, Human
ggguagcgagugggaugggg

SEQ ID NO: 721608 - RNA, 23 nt, Human
ggguggucagccagcaccagggc

SEQ ID NO: 721609 - RNA, 18 nt, Human
uaaaaggccgggaccugu

SEQ ID NO: 721610 - RNA, 22 nt, Human
uccgugccucaguuuccccauc

SEQ ID NO: 721611 - RNA, 19 nt, Human
ucuccguggaguaugggcc

SEQ ID NO: 721612 - RNA, 18 nt, Human
ucucgggcucagccaggc

SEQ ID NO: 721613 - RNA, 24 nt, Human
ucuguggagaccccugcaggcccc

SEQ ID NO: 721614 - RNA, 23 nt, Human
ugcaggccccguccagugccugg

SEQ ID NO: 721615 - RNA, 19 nt, Human
uggcaugagggggaggagc

SEQ ID NO: 721616 - RNA, 22 nt, Human
ugggaggccccaggguccggca

SEQ ID NO: 721617 - RNA, 19 nt, Human
uggggcagcagcauuugcg

SEQ ID NO: 721618 - RNA, 19 nt, Human
uggggccccugucugacgg

SEQ ID NO: 721619 - RNA, 20 nt, Human
uggggugggaggccccaggg

SEQ ID NO: 721620 - RNA, 23 nt, Human
uggggugggaggccccagggucc

SEQ ID NO: 721621 - RNA, 22 nt, Human
uggugucugagucacuguccag

SEQ ID NO: 721622 - RNA, 19 nt, Human
uguagagcuggggcagcag

SEQ ID NO: 721623 - RNA, 21 nt, Human
uguagagcuggggcagcagca

SEQ ID NO: 721624 - RNA, 20 nt, Human
ugugugggguuggcaugagg

SEQ ID NO: 721625 - RNA, 25 nt, Human
uucaaagaacauuaaaaggccggga

SEQ ID NO: 721626 - RNA, 28 nt, Human
aaaaaggaaacguaauaaaaacaaggga

SEQ ID NO: 721627 - RNA, 18 nt, Human
aaaaggaaacguaauaaa

SEQ ID NO: 721628 - RNA, 20 nt, Human
aaaaugcuagcuacaucuuu

SEQ ID NO: 721629 - RNA, 21 nt, Human
aacacuucuugccuauagaug

SEQ ID NO: 721630 - RNA, 19 nt, Human
aaccuccaucggccaucuc

SEQ ID NO: 721631 - RNA, 22 nt, Human
aacuucaguguauacuucgcaa

SEQ ID NO: 721632 - RNA, 18 nt, Human
aagcuucaguggucaugg

SEQ ID NO: 721633 - RNA, 27 nt, Human
acgacacaacuucaguguauacuucgc

SEQ ID NO: 721634 - RNA, 18 nt, Human
agaaaccaugccaaagac

SEQ ID NO: 721635 - RNA, 20 nt, Human
agaaggaagguaguuaccag

SEQ ID NO: 721636 - RNA, 22 nt, Human
agaaggaagguaguuaccaggg

SEQ ID NO: 721637 - RNA, 19 nt, Human
agacgcuggaggaaggguu

SEQ ID NO: 721638 - RNA, 21 nt, Human
agaggggaagaugguggccac

SEQ ID NO: 721639 - RNA, 22 nt, Human
agaguucugcauggacuuggag

SEQ ID NO: 721640 - RNA, 18 nt, Human
aggaggauagauuuggag

SEQ ID NO: 721641 - RNA, 21 nt, Human
aggauccuuuauuaaaauauc

SEQ ID NO: 721642 - RNA, 22 nt, Human
aggggaagaugguggccacagu

SEQ ID NO: 721643 - RNA, 23 nt, Human
aggguggugguggcuaaaagaug

SEQ ID NO: 721644 - RNA, 21 nt, Human
auagaacuaggauuacaacaa

SEQ ID NO: 721645 - RNA, 20 nt, Human
auccgggcuggacucccccc

SEQ ID NO: 721646 - RNA, 21 nt, Human
augccuuccagaaacagcacc

SEQ ID NO: 721647 - RNA, 24 nt, Human
auggcgagaaggggagcugggguc

SEQ ID NO: 721648 - RNA, 23 nt, Human
caaaaaacguaaacggcauaaca

SEQ ID NO: 721649 - RNA, 22 nt, Human
caaacgccacucuccaagcacc

SEQ ID NO: 721650 - RNA, 19 nt, Human
caaaucccgucacacuaaa

SEQ ID NO: 721651 - RNA, 18 nt, Human
caaguggggaaacuuccu

SEQ ID NO: 721652 - RNA, 22 nt, Human
cagaccaccagaaugaaacacu

SEQ ID NO: 721653 - RNA, 25 nt, Human
ccaagaggggaagaugguggccaca

SEQ ID NO: 721654 - RNA, 20 nt, Human
ccaagcaccugccccaugcc

SEQ ID NO: 721655 - RNA, 24 nt, Human
ccaagcaccugccccaugcccacc

SEQ ID NO: 721656 - RNA, 20 nt, Human
ccagaaugaaacacauccuc

SEQ ID NO: 721657 - RNA, 22 nt, Human
cccaugcccaccuuuccaaagg

SEQ ID NO: 721658 - RNA, 18 nt, Human
ccccggggccgccgccgg

SEQ ID NO: 721659 - RNA, 20 nt, Human
ccccggggccgccgccggcc

SEQ ID NO: 721660 - RNA, 24 nt, Human
cccucccuuaccccauccuguuga

SEQ ID NO: 721661 - RNA, 18 nt, Human
cccugagcgccgcggccc

SEQ ID NO: 721662 - RNA, 19 nt, Human
ccgcccgggcccugagcgc

SEQ ID NO: 721663 - RNA, 23 nt, Human
ccuagaaaccaugccaaagacgc

SEQ ID NO: 721664 - RNA, 23 nt, Human
ccuccauggcccacagguuucua

SEQ ID NO: 721665 - RNA, 22 nt, Human
cuauagauggacaagauggaug

SEQ ID NO: 721666 - RNA, 21 nt, Human
cucaauauccgggcuggacuc

SEQ ID NO: 721667 - RNA, 22 nt, Human
cuccaagcaccugccccaugcc

SEQ ID NO: 721668 - RNA, 19 nt, Human
cuccccaacaggucaugcg

SEQ ID NO: 721669 - RNA, 22 nt, Human
cugaaaauggucacuguuuccu

SEQ ID NO: 721670 - RNA, 20 nt, Human
cuguugaggagaguaagugc

SEQ ID NO: 721671 - RNA, 19 nt, Human
cuucucaucuucauucugg

SEQ ID NO: 721672 - RNA, 23 nt, Human
gaaaacaccaagaggggaagaug

SEQ ID NO: 721673 - RNA, 22 nt, Human
gaacuaggauuacaacaaaaaa

SEQ ID NO: 721674 - RNA, 18 nt, Human
gaaggguuccucugaguu

SEQ ID NO: 721675 - RNA, 18 nt, Human
gaggaaggguuccucuga

SEQ ID NO: 721676 - RNA, 22 nt, Human
gaggagcaggggggugcagaaa

SEQ ID NO: 721677 - RNA, 18 nt, Human
gcccacaucucuacaaca

SEQ ID NO: 721678 - RNA, 23 nt, Human
gcccgggcccugagcgccgcggc

SEQ ID NO: 721679 - RNA, 21 nt, Human
gcccggggccccucgggcgcc

SEQ ID NO: 721680 - RNA, 22 nt, Human
gcccggggccccucgggcgccc

SEQ ID NO: 721681 - RNA, 19 nt, Human
gccugggcugggugugaga

SEQ ID NO: 721682 - RNA, 19 nt, Human
ggacuuggaguugcagaug

SEQ ID NO: 721683 - RNA, 22 nt, Human
ggagucacucaauucagccuuc

SEQ ID NO: 721684 - RNA, 22 nt, Human
ggcccggggccccucgggcgcc

SEQ ID NO: 721685 - RNA, 18 nt, Human
ggcgagaaggggagcugg

SEQ ID NO: 721686 - RNA, 19 nt, Human
ggggagcuggggucucuag

SEQ ID NO: 721687 - RNA, 20 nt, Human
gguggugguggcuaaaagau

SEQ ID NO: 721688 - RNA, 19 nt, Human
gguuuguguaugugugugu

SEQ ID NO: 721689 - RNA, 23 nt, Human
gguuuguguuuuguugacuguuu

SEQ ID NO: 721690 - RNA, 21 nt, Human
guaauaaaaacaagggagaga

SEQ ID NO: 721691 - RNA, 20 nt, Human
gucccuugcccccucacccu

SEQ ID NO: 721692 - RNA, 21 nt, Human
gucuuauaguguuuugugaug

SEQ ID NO: 721693 - RNA, 20 nt, Human
guggagacugcagccugggc

SEQ ID NO: 721694 - RNA, 18 nt, Human
guggggaaacuuccuggg

SEQ ID NO: 721695 - RNA, 19 nt, Human
guugaguuccucccucccu

SEQ ID NO: 721696 - RNA, 24 nt, Human
uaaagccaaauuuaguucucuagg

SEQ ID NO: 721697 - RNA, 18 nt, Human
uacaacaggauuuccgug

SEQ ID NO: 721698 - RNA, 22 nt, Human
uacagaacguguuccuuuuuuu

SEQ ID NO: 721699 - RNA, 18 nt, Human
uacuucgcaacaguugug

SEQ ID NO: 721700 - RNA, 19 nt, Human
uagaaaccaugccaaagac

SEQ ID NO: 721701 - RNA, 18 nt, Human
uagaacuaggauuacaac

SEQ ID NO: 721702 - RNA, 18 nt, Human
uagauggacaagauggau

SEQ ID NO: 721703 - RNA, 20 nt, Human
uaguggcaaaaacgacacaa

SEQ ID NO: 721704 - RNA, 19 nt, Human
uauacaauucuguauuuag

SEQ ID NO: 721705 - RNA, 22 nt, Human
uauauucaccuucucaucuuca

SEQ ID NO: 721706 - RNA, 25 nt, Human
ucaaaagacuauacuaagugcuuaa

SEQ ID NO: 721707 - RNA, 18 nt, Human
ucacagacagauguggaa

SEQ ID NO: 721708 - RNA, 18 nt, Human
uccagauuugauuacucu

SEQ ID NO: 721709 - RNA, 21 nt, Human
ucccuugcccccucacccugc

SEQ ID NO: 721710 - RNA, 24 nt, Human
ucguuuacagaacguguuccuuuu

SEQ ID NO: 721711 - RNA, 20 nt, Human
ucuggggagucacucaauuc

SEQ ID NO: 721712 - RNA, 20 nt, Human
ucuuauaguguuuugugaug

SEQ ID NO: 721713 - RNA, 21 nt, Human
ucuuuuuagcacaguuucugg

SEQ ID NO: 721714 - RNA, 23 nt, Human
ugaaaauggucacuguuuccuau

SEQ ID NO: 721715 - RNA, 18 nt, Human
ugaagaggagcagggggg

SEQ ID NO: 721716 - RNA, 24 nt, Human
ugaauauguggugccauuuugcuu

SEQ ID NO: 721717 - RNA, 26 nt, Human
ugacagcauccugauuuuauaacugg

SEQ ID NO: 721718 - RNA, 21 nt, Human
ugacccaccugcucacacagc

SEQ ID NO: 721719 - RNA, 23 nt, Human
ugagaaagaagauggcgagaagg

SEQ ID NO: 721720 - RNA, 19 nt, Human
ugcaaaacagaccaccaga

SEQ ID NO: 721721 - RNA, 23 nt, Human
ugcaaaacagaccaccagaauga

SEQ ID NO: 721722 - RNA, 22 nt, Human
ugcagaaaaguggaggcaaugg

SEQ ID NO: 721723 - RNA, 22 nt, Human
ugcucuggaauacccacacucc

SEQ ID NO: 721724 - RNA, 18 nt, Human
uggacuccccccagcccc

SEQ ID NO: 721725 - RNA, 18 nt, Human
uggaggcugggauauggu

SEQ ID NO: 721726 - RNA, 24 nt, Human
uggauaaaaauguauacaguggaa

SEQ ID NO: 721727 - RNA, 19 nt, Human
uggcgagaaggggagcugg

SEQ ID NO: 721728 - RNA, 20 nt, Human
uggcgagaaggggagcuggg

SEQ ID NO: 721729 - RNA, 20 nt, Human
uggcgagaaggggagcuggg

SEQ ID NO: 721730 - RNA, 21 nt, Human
uggcuaaaagauguuucauuu

SEQ ID NO: 721731 - RNA, 21 nt, Human
ugggauaaauuccaaaggauc

SEQ ID NO: 721732 - RNA, 20 nt, Human
ugggaugaccaacacuguca

SEQ ID NO: 721733 - RNA, 22 nt, Human
uguggagacugcagccugggcu

SEQ ID NO: 721734 - RNA, 18 nt, Human
uguguaugugugugugug

SEQ ID NO: 721735 - RNA, 24 nt, Human
uguguguguguuuuuuaaccguuu

SEQ ID NO: 721736 - RNA, 21 nt, Human
uuacaauggcacggacauucu

SEQ ID NO: 721737 - RNA, 22 nt, Human
uuaucuguccccuucugguugc

SEQ ID NO: 721738 - RNA, 22 nt, Human
uucacacgggaaauggggucgc

SEQ ID NO: 721739 - RNA, 19 nt, Human
uuccagaaacagcaccacg

SEQ ID NO: 721740 - RNA, 30 nt, Human
uucugccuccugcagaggggucagggugaa

SEQ ID NO: 721741 - RNA, 18 nt, Human
uugcccccucacccugcc

SEQ ID NO: 721742 - RNA, 20 nt, Human
uugcuguccacauuuugaug

SEQ ID NO: 721743 - RNA, 21 nt, Human
uugcuguccacauuuugaugg

SEQ ID NO: 721744 - RNA, 19 nt, Human
uuuacagaacguguuccuu

SEQ ID NO: 721745 - RNA, 18 nt, Human
uuugugauggcuuugaau

SEQ ID NO: 721746 - RNA, 21 nt, Human
uuuguguaugugugugugugu

SEQ ID NO: 721747 - RNA, 18 nt, Human
aaaaaggaaaagaaaaac

SEQ ID NO: 721748 - RNA, 22 nt, Human
aaaacgaggaggcagaaaccua

SEQ ID NO: 721749 - RNA, 23 nt, Human
aaacaaaauauguguuaccaaga

SEQ ID NO: 721750 - RNA, 23 nt, Human
aaacaaacaacaaaggcccagaa

SEQ ID NO: 721751 - RNA, 24 nt, Human
aaacgaggaggcagaaaccuaggg

SEQ ID NO: 721752 - RNA, 22 nt, Human
aaacggcaccuucagcaccucc

SEQ ID NO: 721753 - RNA, 21 nt, Human
aaagauaggaggggagaacag

SEQ ID NO: 721754 - RNA, 19 nt, Human
aacagagcaacgccaaugg

SEQ ID NO: 721755 - RNA, 22 nt, Human
aacagagcaacgccaauggaac

SEQ ID NO: 721756 - RNA, 19 nt, Human
aaccccugcccccugccuc

SEQ ID NO: 721757 - RNA, 18 nt, Human
aacuagcugcccaguugc

SEQ ID NO: 721758 - RNA, 21 nt, Human
aacuagcugcccaguugcauc

SEQ ID NO: 721759 - RNA, 23 nt, Human
aagaggaaguagagagaagggac

SEQ ID NO: 721760 - RNA, 19 nt, Human
aagcggccaaacaaugguu

SEQ ID NO: 721761 - RNA, 20 nt, Human
aagcggccaaacaaugguuu

SEQ ID NO: 721762 - RNA, 20 nt, Human
aagcuaccaaaucauccuca

SEQ ID NO: 721763 - RNA, 20 nt, Human
aaguucguccucuguguuuc

SEQ ID NO: 721764 - RNA, 21 nt, Human
aauuauguagaaaacaacccc

SEQ ID NO: 721765 - RNA, 21 nt, Human
acaaacaacaaaggcccagaa

SEQ ID NO: 721766 - RNA, 20 nt, Human
acaaggcaggaaaaggggau

SEQ ID NO: 721767 - RNA, 18 nt, Human
acaaugguuugguugggu

SEQ ID NO: 721768 - RNA, 19 nt, Human
acagaguaugcugcaggcc

SEQ ID NO: 721769 - RNA, 20 nt, Human
acugagcuauauaaaaucau

SEQ ID NO: 721770 - RNA, 23 nt, Human
acuggauucaacagcuugccauc

SEQ ID NO: 721771 - RNA, 18 nt, Human
agaaaacaacccccaauu

SEQ ID NO: 721772 - RNA, 19 nt, Human
agaaauaaccagcagcccu

SEQ ID NO: 721773 - RNA, 18 nt, Human
agacuuggauaugaggau

SEQ ID NO: 721774 - RNA, 20 nt, Human
agagacucaagaaaucacca

SEQ ID NO: 721775 - RNA, 23 nt, Human
agagcaguggcuucucugggcug

SEQ ID NO: 721776 - RNA, 20 nt, Human
agagcugagggagaacagga

SEQ ID NO: 721777 - RNA, 18 nt, Human
agaggaaaagagaaagcg

SEQ ID NO: 721778 - RNA, 19 nt, Human
agaggaaguagagagaaag

SEQ ID NO: 721779 - RNA, 21 nt, Human
agaugcagaaucuggugaugg

SEQ ID NO: 721780 - RNA, 23 nt, Human
agcagaaggcagacggaaugaug

SEQ ID NO: 721781 - RNA, 21 nt, Human
agcccugugcugguguuggaa

SEQ ID NO: 721782 - RNA, 18 nt, Human
agcgggugggcuggggca

SEQ ID NO: 721783 - RNA, 26 nt, Human
agcgggugggcuggggcaggaggggc

SEQ ID NO: 721784 - RNA, 20 nt, Human
aggacuuaguggggacgcag

SEQ ID NO: 721785 - RNA, 19 nt, Human
aggcagcucagcagcaaac

SEQ ID NO: 721786 - RNA, 20 nt, Human
aggcaggaaaaggggaugaa

SEQ ID NO: 721787 - RNA, 18 nt, Human
agggccugggcaggggug

SEQ ID NO: 721788 - RNA, 21 nt, Human
aggggcuugaucccaggaggg

SEQ ID NO: 721789 - RNA, 22 nt, Human
agggguuuguuuuuccgcuuau

SEQ ID NO: 721790 - RNA, 20 nt, Human
aggguuacaaggcagguagu

SEQ ID NO: 721791 - RNA, 19 nt, Human
aggugaagagaggggaggc

SEQ ID NO: 721792 - RNA, 24 nt, Human
aguacaguuuguauauauauauau

SEQ ID NO: 721793 - RNA, 20 nt, Human
auggagcagggccaggaaga

SEQ ID NO: 721794 - RNA, 28 nt, Human
caaaacacacaacaauauuuaaaaacaa

SEQ ID NO: 721795 - RNA, 22 nt, Human
caaacaggaacagagagggaac

SEQ ID NO: 721796 - RNA, 18 nt, Human
caaauaaccucccauggc

SEQ ID NO: 721797 - RNA, 19 nt, Human
cacacucccuuuuccagcc

SEQ ID NO: 721798 - RNA, 21 nt, Human
cacauuugaagaccuuguuuu

SEQ ID NO: 721799 - RNA, 21 nt, Human
cagaaaaggguuacaaggcag

SEQ ID NO: 721800 - RNA, 20 nt, Human
cagaguaaagcuccugggcu

SEQ ID NO: 721801 - RNA, 18 nt, Human
cagaguagacaaggggau

SEQ ID NO: 721802 - RNA, 21 nt, Human
cagcaacacugccccuccagc

SEQ ID NO: 721803 - RNA, 22 nt, Human
cagcaccagcuugcucccagug

SEQ ID NO: 721804 - RNA, 18 nt, Human
cagcaggacuuagugggg

SEQ ID NO: 721805 - RNA, 21 nt, Human
cagcucagcagcaaacuccag

SEQ ID NO: 721806 - RNA, 22 nt, Human
cagcucuccaagccuugccugg

SEQ ID NO: 721807 - RNA, 20 nt, Human
caggaagaucaggagagcug

SEQ ID NO: 721808 - RNA, 21 nt, Human
caggacuuaguggggacgcag

SEQ ID NO: 721809 - RNA, 20 nt, Human
caggaugaucaacaccauuu

SEQ ID NO: 721810 - RNA, 23 nt, Human
caggccagugccacagauacaaa

SEQ ID NO: 721811 - RNA, 24 nt, Human
caguggaaaagaagaggcaagacc

SEQ ID NO: 721812 - RNA, 19 nt, Human
cagugucccuggggagccc

SEQ ID NO: 721813 - RNA, 19 nt, Human
caucagaguagacaagggg

SEQ ID NO: 721814 - RNA, 19 nt, Human
ccaagaggucuaaaacaau

SEQ ID NO: 721815 - RNA, 20 nt, Human
ccaagcaguggaaaagaaga

SEQ ID NO: 721816 - RNA, 20 nt, Human
ccaauaaagcuaccaaauca

SEQ ID NO: 721817 - RNA, 19 nt, Human
ccaccucacaggagcccca

SEQ ID NO: 721818 - RNA, 20 nt, Human
ccagcaccagcuugcuccca

SEQ ID NO: 721819 - RNA, 18 nt, Human
ccagcccgggccuccagc

SEQ ID NO: 721820 - RNA, 19 nt, Human
ccagccuuuguuugugggg

SEQ ID NO: 721821 - RNA, 18 nt, Human
ccaggagaaauaaccagc

SEQ ID NO: 721822 - RNA, 18 nt, Human
ccagggaaagugaagcug

SEQ ID NO: 721823 - RNA, 26 nt, Human
ccagugccacagauacaaaacacagu

SEQ ID NO: 721824 - RNA, 22 nt, Human
cccagugucccuggggagcccu

SEQ ID NO: 721825 - RNA, 24 nt, Human
ccccaauaaagcuaccaaccauug

SEQ ID NO: 721826 - RNA, 27 nt, Human
cccccugccucacaggccggguccuuc

SEQ ID NO: 721827 - RNA, 20 nt, Human
ccccugcugagcaucucauc

SEQ ID NO: 721828 - RNA, 19 nt, Human
cccugcccccugccucaca

SEQ ID NO: 721829 - RNA, 24 nt, Human
cccuggggagcccugugcuggugu

SEQ ID NO: 721830 - RNA, 18 nt, Human
ccuccagcccgggccucc

SEQ ID NO: 721831 - RNA, 22 nt, Human
ccugggaggggcuugaucccag

SEQ ID NO: 721832 - RNA, 20 nt, Human
ccuuuguuugugggguggga

SEQ ID NO: 721833 - RNA, 20 nt, Human
cgccccaaccugcucccaau

SEQ ID NO: 721834 - RNA, 20 nt, Human
cgggccuccagcucgcccca

SEQ ID NO: 721835 - RNA, 20 nt, Human
cuaguuuaucugccugaggc

SEQ ID NO: 721836 - RNA, 23 nt, Human
cuccaagaacugcugggugcucc

SEQ ID NO: 721837 - RNA, 20 nt, Human
cuccugaggaagagguaggg

SEQ ID NO: 721838 - RNA, 22 nt, Human
cucgcaacucuaaguccugcca

SEQ ID NO: 721839 - RNA, 20 nt, Human
cugagcagcuccuacucuuc

SEQ ID NO: 721840 - RNA, 30 nt, Human
cuugguuggggugacucagguggggugggg

SEQ ID NO: 721841 - RNA, 19 nt, Human
gaacaggaaaauugggagg

SEQ ID NO: 721842 - RNA, 18 nt, Human
gaacccaaggcugcccag

SEQ ID NO: 721843 - RNA, 20 nt, Human
gaaggaagaggcagcucagc

SEQ ID NO: 721844 - RNA, 22 nt, Human
gagagaaagggaaaaaaguggg

SEQ ID NO: 721845 - RNA, 24 nt, Human
gagagggaaccuuggcuccaccuc

SEQ ID NO: 721846 - RNA, 23 nt, Human
gagaucacuggaaagcuuccugg

SEQ ID NO: 721847 - RNA, 25 nt, Human
gagcaacgccaauggaacaaaaucu

SEQ ID NO: 721848 - RNA, 21 nt, Human
gagcagcuccuacucuucagg

SEQ ID NO: 721849 - RNA, 19 nt, Human
gaggaaagggaggucacug

SEQ ID NO: 721850 - RNA, 18 nt, Human
gaggaagauaucagaugg

SEQ ID NO: 721851 - RNA, 22 nt, Human
gaggaaguagagagaaagggaa

SEQ ID NO: 721852 - RNA, 21 nt, Human
gaggaggcagaaaccuaggga

SEQ ID NO: 721853 - RNA, 18 nt, Human
gaggaugcauauggagca

SEQ ID NO: 721854 - RNA, 21 nt, Human
gaggcuguuuuggggcccugc

SEQ ID NO: 721855 - RNA, 24 nt, Human
gagggcagcagaaggcagacggaa

SEQ ID NO: 721856 - RNA, 24 nt, Human
gaucacuggaaagcuuccugggau

SEQ ID NO: 721857 - RNA, 20 nt, Human
gauggugagaggguauacgg

SEQ ID NO: 721858 - RNA, 24 nt, Human
gauggugagggguauggcugcugu

SEQ ID NO: 721859 - RNA, 25 nt, Human
gcaaacuccaggagaaagggaacgc

SEQ ID NO: 721860 - RNA, 21 nt, Human
gcaaagcacuagggagaugca

SEQ ID NO: 721861 - RNA, 18 nt, Human
gcagcagaaggcagacgg

SEQ ID NO: 721862 - RNA, 21 nt, Human
gccagggccuccaggaaacag

SEQ ID NO: 721863 - RNA, 23 nt, Human
gcccucugcagucuuaacucgca

SEQ ID NO: 721864 - RNA, 26 nt, Human
gccuucaucuccacagaggccacuac

SEQ ID NO: 721865 - RNA, 23 nt, Human
gcugcaggccagugccacagaua

SEQ ID NO: 721866 - RNA, 24 nt, Human
gcugggcagaaaaggguuacaagg

SEQ ID NO: 721867 - RNA, 19 nt, Human
ggaaaaggggaugaaggga

SEQ ID NO: 721868 - RNA, 19 nt, Human
ggacagggccugggagggg

SEQ ID NO: 721869 - RNA, 20 nt, Human
ggaggacucagaacccaacu

SEQ ID NO: 721870 - RNA, 19 nt, Human
ggauaggauggggaccccu

SEQ ID NO: 721871 - RNA, 20 nt, Human
ggaugacggugucugcacua

SEQ ID NO: 721872 - RNA, 27 nt, Human
ggccaaacaaugguuugguugggcugu

SEQ ID NO: 721873 - RNA, 19 nt, Human
ggccugggaggggcuugau

SEQ ID NO: 721874 - RNA, 18 nt, Human
ggcugaaauucagucacc

SEQ ID NO: 721875 - RNA, 22 nt, Human
gggaagccccgugagcaauguc

SEQ ID NO: 721876 - RNA, 18 nt, Human
gggcaaggaguuggggaa

SEQ ID NO: 721877 - RNA, 21 nt, Human
gggcagcagaaggcagacgga

SEQ ID NO: 721878 - RNA, 18 nt, Human
gggcaggaaugcagggcc

SEQ ID NO: 721879 - RNA, 20 nt, Human
gggcaggaggggcuggggac

SEQ ID NO: 721880 - RNA, 21 nt, Human
gggcaucagaguagacaaggg

SEQ ID NO: 721881 - RNA, 19 nt, Human
gggccaacuagcugcccag

SEQ ID NO: 721882 - RNA, 21 nt, Human
gggcuggggacagggccuggg

SEQ ID NO: 721883 - RNA, 19 nt, Human
gggcuggggcaggaggggc

SEQ ID NO: 721884 - RNA, 23 nt, Human
ggggauggugagaggguauacgg

SEQ ID NO: 721885 - RNA, 22 nt, Human
ggggcagaugccuuggucuucc

SEQ ID NO: 721886 - RNA, 18 nt, Human
ggggcugccuucugggcc

SEQ ID NO: 721887 - RNA, 21 nt, Human
gggggggcugguacugcucca

SEQ ID NO: 721888 - RNA, 19 nt, Human
ggguauggcugcugugcug

SEQ ID NO: 721889 - RNA, 19 nt, Human
gguuggggugacucaggug

SEQ ID NO: 721890 - RNA, 20 nt, Human
gguuggggugacucaggugg

SEQ ID NO: 721891 - RNA, 22 nt, Human
guauauauauauauuuauauau

SEQ ID NO: 721892 - RNA, 19 nt, Human
gucacuuuuggcacucugg

SEQ ID NO: 721893 - RNA, 23 nt, Human
gugucccuggggagcccugugcu

SEQ ID NO: 721894 - RNA, 19 nt, Human
guguggggaucccccuggg

SEQ ID NO: 721895 - RNA, 21 nt, Human
uaaaacaaacaacaaaggccc

SEQ ID NO: 721896 - RNA, 24 nt, Human
uaaagagcagcucuccaagccuug

SEQ ID NO: 721897 - RNA, 21 nt, Human
uaacugaugucuaaacggcac

SEQ ID NO: 721898 - RNA, 18 nt, Human
uaagcuccccacaccuug

SEQ ID NO: 721899 - RNA, 19 nt, Human
uacagaagggaagaaucag

SEQ ID NO: 721900 - RNA, 19 nt, Human
uacaguuuguauauauaua

SEQ ID NO: 721901 - RNA, 18 nt, Human
uacauguacaaggcagga

SEQ ID NO: 721902 - RNA, 24 nt, Human
uacauguacauguacaaggcagga

SEQ ID NO: 721903 - RNA, 20 nt, Human
uacccagugcuugggggugg

SEQ ID NO: 721904 - RNA, 21 nt, Human
uagaaaacaacccccaauuuc

SEQ ID NO: 721905 - RNA, 23 nt, Human
uagccacaggaguccaccagcug

SEQ ID NO: 721906 - RNA, 25 nt, Human
uaggauggggaccccugcugagcau

SEQ ID NO: 721907 - RNA, 22 nt, Human
uauauauauuuauauauauaua

SEQ ID NO: 721908 - RNA, 20 nt, Human
uauauauuuauauauauaua

SEQ ID NO: 721909 - RNA, 21 nt, Human
uaugagggaggcuguuuuggg

SEQ ID NO: 721910 - RNA, 24 nt, Human
uauuucccauuuuccaaacugagu

SEQ ID NO: 721911 - RNA, 24 nt, Human
ucaaagcacagcuccacugaguac

SEQ ID NO: 721912 - RNA, 22 nt, Human
ucaacaccauuuaacugauguc

SEQ ID NO: 721913 - RNA, 21 nt, Human
ucacaggagccccaggagggc

SEQ ID NO: 721914 - RNA, 20 nt, Human
ucacaggcagcucaaggccc

SEQ ID NO: 721915 - RNA, 22 nt, Human
ucagaacccaacuugaacaaaa

SEQ ID NO: 721916 - RNA, 21 nt, Human
ucagagcauucuagaggcugg

SEQ ID NO: 721917 - RNA, 18 nt, Human
uccaagguuccccaagcg

SEQ ID NO: 721918 - RNA, 25 nt, Human
uccagccuuuguuugugggguggga

SEQ ID NO: 721919 - RNA, 24 nt, Human
uccaggaaacaggucccagaguac

SEQ ID NO: 721920 - RNA, 22 nt, Human
ucccaaugggagggcugagcac

SEQ ID NO: 721921 - RNA, 18 nt, Human
ucccaggggcugccuucu

SEQ ID NO: 721922 - RNA, 21 nt, Human
uccccugguugcuucccguga

SEQ ID NO: 721923 - RNA, 19 nt, Human
ucccuggggagcccugugc

SEQ ID NO: 721924 - RNA, 24 nt, Human
ucuaaggaacaaauaaccucccau

SEQ ID NO: 721925 - RNA, 21 nt, Human
ucuccaagccuugccugaucu

SEQ ID NO: 721926 - RNA, 23 nt, Human
ucugcagucuuaacucgcaacuc

SEQ ID NO: 721927 - RNA, 24 nt, Human
ucugcagucuuaacucgcaacucu

SEQ ID NO: 721928 - RNA, 18 nt, Human
ucugccugaggcuuaaga

SEQ ID NO: 721929 - RNA, 19 nt, Human
ucuggagaacccaaggcug

SEQ ID NO: 721930 - RNA, 18 nt, Human
ucugggcugaggccaugu

SEQ ID NO: 721931 - RNA, 18 nt, Human
ucugucagucuuuaucuc

SEQ ID NO: 721932 - RNA, 22 nt, Human
ucuuuagcuucuccucuauggg

SEQ ID NO: 721933 - RNA, 20 nt, Human
ugacauggguggccucaaag

SEQ ID NO: 721934 - RNA, 23 nt, Human
ugacccauaaacccuuagcccuu

SEQ ID NO: 721935 - RNA, 24 nt, Human
ugaccuggcagacuccaagguucc

SEQ ID NO: 721936 - RNA, 20 nt, Human
ugagagaauaaauauuuuug

SEQ ID NO: 721937 - RNA, 21 nt, Human
ugaggaagagguagggucagg

SEQ ID NO: 721938 - RNA, 22 nt, Human
ugaggaagagguagggucaggu

SEQ ID NO: 721939 - RNA, 23 nt, Human
ugaggaagguagaggaaaagaga

SEQ ID NO: 721940 - RNA, 19 nt, Human
ugaggaugcauauggagca

SEQ ID NO: 721941 - RNA, 21 nt, Human
ugaggcuuaagagccaagcag

SEQ ID NO: 721942 - RNA, 23 nt, Human
ugagggaggcuguuuuggggccc

SEQ ID NO: 721943 - RNA, 23 nt, Human
ugaguacauucugagacucuaau

SEQ ID NO: 721944 - RNA, 22 nt, Human
ugaugucuaaacggcaccuuca

SEQ ID NO: 721945 - RNA, 19 nt, Human
ugcaggccagugccacaga

SEQ ID NO: 721946 - RNA, 20 nt, Human
ugccaagaggucuaaaacaa

SEQ ID NO: 721947 - RNA, 21 nt, Human
ugccacagauacaaaacacac

SEQ ID NO: 721948 - RNA, 23 nt, Human
ugccacagauacaaaacacacaa

SEQ ID NO: 721949 - RNA, 25 nt, Human
ugccacagauacaaaacacacaaca

SEQ ID NO: 721950 - RNA, 23 nt, Human
ugccacagguagcucccaccugu

SEQ ID NO: 721951 - RNA, 28 nt, Human
ugccaugguggcuuucaccugcucuucu

SEQ ID NO: 721952 - RNA, 20 nt, Human
ugccuucugggccuugcccu

SEQ ID NO: 721953 - RNA, 18 nt, Human
ugcucagagcacugccca

SEQ ID NO: 721954 - RNA, 19 nt, Human
ugcuccagcaccagcuugc

SEQ ID NO: 721955 - RNA, 18 nt, Human
ugcugcaggccagugcca

SEQ ID NO: 721956 - RNA, 22 nt, Human
uggaacaaaaucuaugaacagc

SEQ ID NO: 721957 - RNA, 19 nt, Human
uggagcagggccaggaaga

SEQ ID NO: 721958 - RNA, 22 nt, Human
uggccaagccagaaaacaaugc

SEQ ID NO: 721959 - RNA, 18 nt, Human
uggcugcugugcugucuu

SEQ ID NO: 721960 - RNA, 20 nt, Human
ugggaggaaggaagaggcag

SEQ ID NO: 721961 - RNA, 18 nt, Human
ugggagggcugagcacca

SEQ ID NO: 721962 - RNA, 22 nt, Human
ugggaugcccaaguaauuaaaa

SEQ ID NO: 721963 - RNA, 22 nt, Human
ugggcuggggcaggaggggcug

SEQ ID NO: 721964 - RNA, 24 nt, Human
ugggcuggggcaggaggggcuggg

SEQ ID NO: 721965 - RNA, 19 nt, Human
uggggccaacuagcugccc

SEQ ID NO: 721966 - RNA, 18 nt, Human
uggggugggauaggaugg

SEQ ID NO: 721967 - RNA, 19 nt, Human
uggggugggaugacggugu

SEQ ID NO: 721968 - RNA, 19 nt, Human
ugggugcucccaggggcug

SEQ ID NO: 721969 - RNA, 18 nt, Human
uggugagaggguauacgg

SEQ ID NO: 721970 - RNA, 23 nt, Human
ugguggaaacggcaaacaggaug

SEQ ID NO: 721971 - RNA, 23 nt, Human
ugguggcuuucaccugcucuucu

SEQ ID NO: 721972 - RNA, 18 nt, Human
ugguggucuuggcccuug

SEQ ID NO: 721973 - RNA, 24 nt, Human
ugguugggcuguguuucagaguau

SEQ ID NO: 721974 - RNA, 22 nt, Human
uguacaaaggcaaaaagaguac

SEQ ID NO: 721975 - RNA, 19 nt, Human
uguaggguuccaggguccu

SEQ ID NO: 721976 - RNA, 22 nt, Human
uguauauauauauauuuauaua

SEQ ID NO: 721977 - RNA, 20 nt, Human
ugugagggccugggcagggg

SEQ ID NO: 721978 - RNA, 18 nt, Human
uuaagaagaggaaguaga

SEQ ID NO: 721979 - RNA, 22 nt, Human
uuccacggaggaaagggagguc

SEQ ID NO: 721980 - RNA, 24 nt, Human
uuccacggaggaaagggaggucac

SEQ ID NO: 721981 - RNA, 21 nt, Human
uucuaaggagagcagagaaau

SEQ ID NO: 721982 - RNA, 19 nt, Human
uugcucccagugucccugg

SEQ ID NO: 721983 - RNA, 19 nt, Human
uuggucugguggucuuggc

SEQ ID NO: 721984 - RNA, 21 nt, Human
uuguuuucacaauuauguaga

SEQ ID NO: 721985 - RNA, 24 nt, Human
uuuacaauauauacagaguaugcu

SEQ ID NO: 721986 - RNA, 19 nt, Human
uuucccaguacaaagagua

SEQ ID NO: 721987 - RNA, 21 nt, Human
uuugaagaccuuguuuucaca

SEQ ID NO: 721988 - RNA, 22 nt, Human
uuugcuaaguaccagcucucca

SEQ ID NO: 721989 - RNA, 20 nt, Human
uuuguauauauauauauuua

SEQ ID NO: 721990 - RNA, 24 nt, Human
uuuuagggguaguuuuccggucaa

SEQ ID NO: 721991 - RNA, 18 nt, Human
aaacuggcuccucccuca

SEQ ID NO: 721992 - RNA, 24 nt, Human
aaauauaggagcuccccuaggcuu

SEQ ID NO: 721993 - RNA, 18 nt, Human
aacuucgccucuuggcuc

SEQ ID NO: 721994 - RNA, 19 nt, Human
aagcuucccaaauauagga

SEQ ID NO: 721995 - RNA, 25 nt, Human
aagggcccaccaucucagggccacc

SEQ ID NO: 721996 - RNA, 18 nt, Human
aaguucaccugaggucac

SEQ ID NO: 721997 - RNA, 24 nt, Human
acacagcagccaggggguacccag

SEQ ID NO: 721998 - RNA, 23 nt, Human
accaguuuccguggccaagucaa

SEQ ID NO: 721999 - RNA, 22 nt, Human
accccauagccaagcccccacc

SEQ ID NO: 722000 - RNA, 19 nt, Human
acuucugaucacagaccug

SEQ ID NO: 722001 - RNA, 19 nt, Human
agaaggagcagacacgugg

SEQ ID NO: 722002 - RNA, 26 nt, Human
agagaugggagcaacacugacaggga

SEQ ID NO: 722003 - RNA, 20 nt, Human
agagggacagggaguagggu

SEQ ID NO: 722004 - RNA, 21 nt, Human
agagguuccccaagcauccau

SEQ ID NO: 722005 - RNA, 21 nt, Human
agccaagcccccacccaccuc

SEQ ID NO: 722006 - RNA, 19 nt, Human
aggacagggacgcgaggaa

SEQ ID NO: 722007 - RNA, 18 nt, Human
aggaguggggucgugggg

SEQ ID NO: 722008 - RNA, 23 nt, Human
aggaguggggucguggggguggg

SEQ ID NO: 722009 - RNA, 20 nt, Human
aggggcagaccccgcacagc

SEQ ID NO: 722010 - RNA, 21 nt, Human
agucauuacuuuacuggcuga

SEQ ID NO: 722011 - RNA, 21 nt, Human
auagccaagcccccacccacc

SEQ ID NO: 722012 - RNA, 22 nt, Human
auuacuguccuuuaagaacagu

SEQ ID NO: 722013 - RNA, 24 nt, Human
caacacugacagggaaggaccaga

SEQ ID NO: 722014 - RNA, 19 nt, Human
caaccagugaaccaguuuc

SEQ ID NO: 722015 - RNA, 22 nt, Human
caacuuucccaccgguggggcu

SEQ ID NO: 722016 - RNA, 20 nt, Human
cacccacccucgguggccac

SEQ ID NO: 722017 - RNA, 19 nt, Human
caccccauagccaagcccc

SEQ ID NO: 722018 - RNA, 21 nt, Human
caccccauagccaagccccca

SEQ ID NO: 722019 - RNA, 23 nt, Human
caccccauagccaagcccccacc

SEQ ID NO: 722020 - RNA, 23 nt, Human
cacccugcuauuuguuauaccuu

SEQ ID NO: 722021 - RNA, 21 nt, Human
cagaaggagcagacacguggc

SEQ ID NO: 722022 - RNA, 22 nt, Human
cagaaggagcagacacguggca

SEQ ID NO: 722023 - RNA, 22 nt, Human
cagaccccgcacagcguguacc

SEQ ID NO: 722024 - RNA, 19 nt, Human
cagcagagggaaaaggggc

SEQ ID NO: 722025 - RNA, 19 nt, Human
cagcaguuuuccuuuuuuu

SEQ ID NO: 722026 - RNA, 18 nt, Human
caggaaagaauggaaccu

SEQ ID NO: 722027 - RNA, 20 nt, Human
caggccacuggggugaagga

SEQ ID NO: 722028 - RNA, 20 nt, Human
cagggccacccacccucggu

SEQ ID NO: 722029 - RNA, 23 nt, Human
cagggccacccacccucgguggc

SEQ ID NO: 722030 - RNA, 24 nt, Human
cauagccaagcccccacccaccuc

SEQ ID NO: 722031 - RNA, 24 nt, Human
caucccuacagguauagcuaagga

SEQ ID NO: 722032 - RNA, 24 nt, Human
cauuccuucagcuuucaggugacu

SEQ ID NO: 722033 - RNA, 21 nt, Human
ccaauggcuuccucuuuuucu

SEQ ID NO: 722034 - RNA, 22 nt, Human
ccacuggggcuccuggggggag

SEQ ID NO: 722035 - RNA, 20 nt, Human
ccagcagugcuggguggagg

SEQ ID NO: 722036 - RNA, 21 nt, Human
ccaggaguggggucguggggg

SEQ ID NO: 722037 - RNA, 19 nt, Human
cccaaggaccuaauuucua

SEQ ID NO: 722038 - RNA, 21 nt, Human
cccagcccuggcaaacuggcc

SEQ ID NO: 722039 - RNA, 24 nt, Human
cccauagccaagcccccacccacc

SEQ ID NO: 722040 - RNA, 21 nt, Human
ccccaagcauccaugcccaag

SEQ ID NO: 722041 - RNA, 19 nt, Human
cccccacgugcugcccaac

SEQ ID NO: 722042 - RNA, 20 nt, Human
cccccacgugcugcccaacc

SEQ ID NO: 722043 - RNA, 21 nt, Human
ccccgcacagcguguaccccc

SEQ ID NO: 722044 - RNA, 19 nt, Human
ccccugccccuggccccgg

SEQ ID NO: 722045 - RNA, 23 nt, Human
cccugcacgcgcucccuccccca

SEQ ID NO: 722046 - RNA, 20 nt, Human
ccggccgccccacucccugg

SEQ ID NO: 722047 - RNA, 19 nt, Human
ccuagaccaaaccaauggc

SEQ ID NO: 722048 - RNA, 19 nt, Human
ccucccccagauucugauc

SEQ ID NO: 722049 - RNA, 19 nt, Human
ccucgguggccacuagaug

SEQ ID NO: 722050 - RNA, 21 nt, Human
ccugccccuggccccggaggc

SEQ ID NO: 722051 - RNA, 20 nt, Human
ccugcccucugcucugacaa

SEQ ID NO: 722052 - RNA, 21 nt, Human
ccugcccucugcucugacaag

SEQ ID NO: 722053 - RNA, 22 nt, Human
ccuggccccggaggcccagaug

SEQ ID NO: 722054 - RNA, 21 nt, Human
ccuggggggagagagagagga

SEQ ID NO: 722055 - RNA, 19 nt, Human
ccuugggaaagaagccaga

SEQ ID NO: 722056 - RNA, 19 nt, Human
cgaggaacaccccaccccc

SEQ ID NO: 722057 - RNA, 21 nt, Human
cgaggaacaccccacccccuc

SEQ ID NO: 722058 - RNA, 23 nt, Human
cgccccacucccuggcagccgcg

SEQ ID NO: 722059 - RNA, 18 nt, Human
cguggagcccaugcccca

SEQ ID NO: 722060 - RNA, 24 nt, Human
cguggagcccaugccccaucccuu

SEQ ID NO: 722061 - RNA, 23 nt, Human
cguuggcagcagagggaaaaggg

SEQ ID NO: 722062 - RNA, 24 nt, Human
cuacuagauccaaucugcaggcac

SEQ ID NO: 722063 - RNA, 24 nt, Human
cucaccccauagccaagcccccac

SEQ ID NO: 722064 - RNA, 24 nt, Human
cucccuggcagccgcggcuuccag

SEQ ID NO: 722065 - RNA, 20 nt, Human
cugcacgcgcucccuccccc

SEQ ID NO: 722066 - RNA, 24 nt, Human
cugcacgcgcucccucccccagau

SEQ ID NO: 722067 - RNA, 23 nt, Human
cugcuccaggaaagaauggaacc

SEQ ID NO: 722068 - RNA, 19 nt, Human
cugugcacaagcuucccaa

SEQ ID NO: 722069 - RNA, 23 nt, Human
cuguuguugcugcagcugggccu

SEQ ID NO: 722070 - RNA, 23 nt, Human
gaaaaggggcugaauaaagguua

SEQ ID NO: 722071 - RNA, 20 nt, Human
gaaccuagaccaaaccaaug

SEQ ID NO: 722072 - RNA, 19 nt, Human
gaauggaaccuagaccaaa

SEQ ID NO: 722073 - RNA, 18 nt, Human
gaccuguuauguucuuca

SEQ ID NO: 722074 - RNA, 18 nt, Human
gagaggagaagauauggg

SEQ ID NO: 722075 - RNA, 19 nt, Human
gagaggagaagauaugggg

SEQ ID NO: 722076 - RNA, 23 nt, Human
gagcagcagagacaaggcgcagg

SEQ ID NO: 722077 - RNA, 20 nt, Human
gagguggagaggccagccca

SEQ ID NO: 722078 - RNA, 22 nt, Human
gaguggggucgugggggugggu

SEQ ID NO: 722079 - RNA, 19 nt, Human
gcagcagagggaaaagggg

SEQ ID NO: 722080 - RNA, 24 nt, Human
gcagcagagggaaaaggggcugaa

SEQ ID NO: 722081 - RNA, 19 nt, Human
gccacuggggcuccugggg

SEQ ID NO: 722082 - RNA, 22 nt, Human
gcguguacccccucccagcccu

SEQ ID NO: 722083 - RNA, 18 nt, Human
gcuccuggggggagagag

SEQ ID NO: 722084 - RNA, 18 nt, Human
ggaaagaauggaaccuag

SEQ ID NO: 722085 - RNA, 20 nt, Human
ggaaccuagaccaaaccaag

SEQ ID NO: 722086 - RNA, 25 nt, Human
ggagaggccagcccagguccugcug

SEQ ID NO: 722087 - RNA, 20 nt, Human
ggcagcaguuuuccuuuuuu

SEQ ID NO: 722088 - RNA, 21 nt, Human
gggacgcgaggaacaccccac

SEQ ID NO: 722089 - RNA, 18 nt, Human
gggagaagcugaggucug

SEQ ID NO: 722090 - RNA, 19 nt, Human
gggagguggagaggccagc

SEQ ID NO: 722091 - RNA, 18 nt, Human
gggccaaggccuaggaag

SEQ ID NO: 722092 - RNA, 21 nt, Human
ggggagaggagaagauauggg

SEQ ID NO: 722093 - RNA, 20 nt, Human
gggggagagagagaggaggu

SEQ ID NO: 722094 - RNA, 21 nt, Human
ggggguggguggagggggcaa

SEQ ID NO: 722095 - RNA, 23 nt, Human
ggguggcgcugagaagagcacgg

SEQ ID NO: 722096 - RNA, 18 nt, Human
ggugaugaggcuggggga

SEQ ID NO: 722097 - RNA, 22 nt, Human
ggugaugaggcugggggaagga

SEQ ID NO: 722098 - RNA, 21 nt, Human
gugaccuuccccugaacagaa

SEQ ID NO: 722099 - RNA, 19 nt, Human
guggccaagucagcaggga

SEQ ID NO: 722100 - RNA, 20 nt, Human
guguaauggaggagcccagg

SEQ ID NO: 722101 - RNA, 23 nt, Human
guugcaaucuggcugcugagggu

SEQ ID NO: 722102 - RNA, 20 nt, Human
uaagaacaguaggaaucugc

SEQ ID NO: 722103 - RNA, 24 nt, Human
uacccccucccagcccugcaggcc

SEQ ID NO: 722104 - RNA, 23 nt, Human
uaccugacuugcgggugcucagc

SEQ ID NO: 722105 - RNA, 23 nt, Human
uagcagaaaccuggagguucaga

SEQ ID NO: 722106 - RNA, 23 nt, Human
uagcagccucggccugaccacgc

SEQ ID NO: 722107 - RNA, 18 nt, Human
uaggagcuccccuaggcu

SEQ ID NO: 722108 - RNA, 19 nt, Human
uagggugccaaccagugaa

SEQ ID NO: 722109 - RNA, 23 nt, Human
ucacugagagguuccccaagcau

SEQ ID NO: 722110 - RNA, 24 nt, Human
ucagggccacccacccucgguggc

SEQ ID NO: 722111 - RNA, 20 nt, Human
uccacaggcaacuuucccac

SEQ ID NO: 722112 - RNA, 23 nt, Human
uccacaggcaacuuucccaccgg

SEQ ID NO: 722113 - RNA, 18 nt, Human
uccaggaguggggucgug

SEQ ID NO: 722114 - RNA, 18 nt, Human
uccaugcccaaggaccua

SEQ ID NO: 722115 - RNA, 24 nt, Human
uccccaagcauccaugcccaagga

SEQ ID NO: 722116 - RNA, 26 nt, Human
uccccaagcauccaugcccaaggacc

SEQ ID NO: 722117 - RNA, 23 nt, Human
ucccugcacgcgcucccuccccc

SEQ ID NO: 722118 - RNA, 22 nt, Human
ucccuggcagccgcggcuucca

SEQ ID NO: 722119 - RNA, 19 nt, Human
ucccuuguucccuggcacc

SEQ ID NO: 722120 - RNA, 23 nt, Human
uccguggccaagucagcagggaa

SEQ ID NO: 722121 - RNA, 20 nt, Human
uccucaagcuacuucucuca

SEQ ID NO: 722122 - RNA, 18 nt, Human
ucugcauccaccucuccc

SEQ ID NO: 722123 - RNA, 24 nt, Human
ucuggcuacaguguaauggaggag

SEQ ID NO: 722124 - RNA, 21 nt, Human
ucugguggaggggccaaggcc

SEQ ID NO: 722125 - RNA, 23 nt, Human
ugacagggaaggaccagaggucu

SEQ ID NO: 722126 - RNA, 20 nt, Human
ugaccacgcccccacgugcu

SEQ ID NO: 722127 - RNA, 24 nt, Human
ugacucaggaggguuuccagacac

SEQ ID NO: 722128 - RNA, 18 nt, Human
ugacucccaccugcccuc

SEQ ID NO: 722129 - RNA, 19 nt, Human
ugagaagagcacggugaug

SEQ ID NO: 722130 - RNA, 21 nt, Human
ugaugaggcugggggaaggag

SEQ ID NO: 722131 - RNA, 18 nt, Human
ugccacuggggcuccugg

SEQ ID NO: 722132 - RNA, 21 nt, Human
ugccccuggccccggaggccc

SEQ ID NO: 722133 - RNA, 25 nt, Human
ugcugaggguggcgcugagaagagc

SEQ ID NO: 722134 - RNA, 21 nt, Human
uggaagucauuacuuuacuga

SEQ ID NO: 722135 - RNA, 20 nt, Human
uggaauggguccgccucuac

SEQ ID NO: 722136 - RNA, 19 nt, Human
uggaggagcccagguagca

SEQ ID NO: 722137 - RNA, 20 nt, Human
uggagggggcaauggcaagu

SEQ ID NO: 722138 - RNA, 19 nt, Human
uggcaaguccccucugccc

SEQ ID NO: 722139 - RNA, 22 nt, Human
uggcacccggccugcuccagga

SEQ ID NO: 722140 - RNA, 20 nt, Human
uggcagcaccuuccucuggu

SEQ ID NO: 722141 - RNA, 22 nt, Human
uggccaagucagcagggaagcc

SEQ ID NO: 722142 - RNA, 18 nt, Human
uggcugcugaggguggcg

SEQ ID NO: 722143 - RNA, 20 nt, Human
ugggagcaacacugacaggg

SEQ ID NO: 722144 - RNA, 19 nt, Human
uggggucgugggggugggu

SEQ ID NO: 722145 - RNA, 20 nt, Human
ugguggaggggccaaggccu

SEQ ID NO: 722146 - RNA, 19 nt, Human
ugugacucaguccuccagu

SEQ ID NO: 722147 - RNA, 19 nt, Human
ugugcagaggguggcaggg

SEQ ID NO: 722148 - RNA, 21 nt, Human
ugugcagaggguggcagggug

SEQ ID NO: 722149 - RNA, 24 nt, Human
uguuauguucuucagaccagacuc

SEQ ID NO: 722150 - RNA, 21 nt, Human
uucagaccagacucaaaaggc

SEQ ID NO: 722151 - RNA, 27 nt, Human
uucaggugacucccaccugcccucugc

SEQ ID NO: 722152 - RNA, 22 nt, Human
uuccagacacagcagccagggg

SEQ ID NO: 722153 - RNA, 22 nt, Human
uuccccaagcauccaugcccaa

SEQ ID NO: 722154 - RNA, 19 nt, Human
uuccccugccccuggcccc

SEQ ID NO: 722155 - RNA, 19 nt, Human
uuggcucuacgagcaacaa

SEQ ID NO: 722156 - RNA, 21 nt, Human
uuucaggugacucccaccugc

SEQ ID NO: 722157 - RNA, 23 nt, Human
uuucuuuuuuuggggggcagcag

SEQ ID NO: 722158 - RNA, 22 nt, Human
uuugguuggauccuaaaaaggc

SEQ ID NO: 722159 - RNA, 21 nt, Human
aaaaaacagcaggagcccaag

SEQ ID NO: 722160 - RNA, 25 nt, Human
aaaaacaaaacaaaaccaugauuca

SEQ ID NO: 722161 - RNA, 24 nt, Human
aaaacaaaaccaugauucaaaaca

SEQ ID NO: 722162 - RNA, 22 nt, Human
aaacaaaaccaugauucaaaac

SEQ ID NO: 722163 - RNA, 21 nt, Human
aaacaaauacccugaaaaccg

SEQ ID NO: 722164 - RNA, 20 nt, Human
aaacaagaacauccuugaac

SEQ ID NO: 722165 - RNA, 18 nt, Human
aaacagcacagaaguccu

SEQ ID NO: 722166 - RNA, 19 nt, Human
aaacagcacagaaguccuc

SEQ ID NO: 722167 - RNA, 18 nt, Human
aacaaaaagggcugccag

SEQ ID NO: 722168 - RNA, 23 nt, Human
aacaaaacaaaaccaugauucaa

SEQ ID NO: 722169 - RNA, 21 nt, Human
aacaaaguucacaggauggug

SEQ ID NO: 722170 - RNA, 24 nt, Human
aacaagaacauccuugaacuucau

SEQ ID NO: 722171 - RNA, 21 nt, Human
aacacuuccaggcagcggcca

SEQ ID NO: 722172 - RNA, 19 nt, Human
aacagcugccagagugccc

SEQ ID NO: 722173 - RNA, 25 nt, Human
aaccucucucccuucuuuuacccac

SEQ ID NO: 722174 - RNA, 21 nt, Human
aagacucacuucugaucuuug

SEQ ID NO: 722175 - RNA, 21 nt, Human
aagcaaaggcaaacagugaca

SEQ ID NO: 722176 - RNA, 22 nt, Human
aagcagaacucacgauccauac

SEQ ID NO: 722177 - RNA, 22 nt, Human
aagcaggaggagaggcccagag

SEQ ID NO: 722178 - RNA, 22 nt, Human
aagccagcgagaggcaggugug

SEQ ID NO: 722179 - RNA, 18 nt, Human
aagcugggagccucacuc

SEQ ID NO: 722180 - RNA, 23 nt, Human
acaagaacauccuugaacuucau

SEQ ID NO: 722181 - RNA, 20 nt, Human
acaauaccagcuucucacac

SEQ ID NO: 722182 - RNA, 19 nt, Human
acaccaaguacaacaaagu

SEQ ID NO: 722183 - RNA, 22 nt, Human
acagagggcgggcucugaagug

SEQ ID NO: 722184 - RNA, 19 nt, Human
acagucuuuggcugugcug

SEQ ID NO: 722185 - RNA, 24 nt, Human
accauccacacucugaagaggaua

SEQ ID NO: 722186 - RNA, 19 nt, Human
acucucuccacccauggaa

SEQ ID NO: 722187 - RNA, 21 nt, Human
acuggcgccaguggagguuuc

SEQ ID NO: 722188 - RNA, 20 nt, Human
agaaaaaaauucaccaagga

SEQ ID NO: 722189 - RNA, 21 nt, Human
agaacucacgauccauaccuc

SEQ ID NO: 722190 - RNA, 20 nt, Human
agacagccuggaggcgggcu

SEQ ID NO: 722191 - RNA, 19 nt, Human
agacaggacaagcaaaggc

SEQ ID NO: 722192 - RNA, 18 nt, Human
agacccccucuggcccag

SEQ ID NO: 722193 - RNA, 25 nt, Human
agaggcagguguguaaagggagccu

SEQ ID NO: 722194 - RNA, 18 nt, Human
agaugcaaauggcaaaga

SEQ ID NO: 722195 - RNA, 21 nt, Human
agcacagaaguccucauucuc

SEQ ID NO: 722196 - RNA, 21 nt, Human
agcacaguaacucuccgccau

SEQ ID NO: 722197 - RNA, 20 nt, Human
agcccaggaggaguucagau

SEQ ID NO: 722198 - RNA, 18 nt, Human
agccucucagcaugcagg

SEQ ID NO: 722199 - RNA, 19 nt, Human
agccucugcaaccucggag

SEQ ID NO: 722200 - RNA, 23 nt, Human
agccuggaggcgggcuggucaga

SEQ ID NO: 722201 - RNA, 18 nt, Human
agcugagcaaggcuggca

SEQ ID NO: 722202 - RNA, 21 nt, Human
aggcugguuauagcaggcauu

SEQ ID NO: 722203 - RNA, 22 nt, Human
agggaggccacgggaagcccug

SEQ ID NO: 722204 - RNA, 25 nt, Human
aggguauggccacugacaagcacca

SEQ ID NO: 722205 - RNA, 19 nt, Human
agguuuucccgagccuaac

SEQ ID NO: 722206 - RNA, 18 nt, Human
agucuguguucuucagga

SEQ ID NO: 722207 - RNA, 21 nt, Human
augggacaacagcugccagag

SEQ ID NO: 722208 - RNA, 24 nt, Human
auggucaccaaaggacacuggcuu

SEQ ID NO: 722209 - RNA, 21 nt, Human
auggugggaaugugggcugca

SEQ ID NO: 722210 - RNA, 20 nt, Human
augucacaccauccacagcu

SEQ ID NO: 722211 - RNA, 24 nt, Human
auuacuaagacccccucuggccca

SEQ ID NO: 722212 - RNA, 21 nt, Human
auuacugaaaucuucucugua

SEQ ID NO: 722213 - RNA, 18 nt, Human
auucacaagcagaacuca

SEQ ID NO: 722214 - RNA, 24 nt, Human
caaaacaaaaccaugauucaaaac

SEQ ID NO: 722215 - RNA, 19 nt, Human
caaaacaaauacccugaaa

SEQ ID NO: 722216 - RNA, 21 nt, Human
caaaacaaauacccugaaaac

SEQ ID NO: 722217 - RNA, 25 nt, Human
caaauaggcacaaauugagaccuau

SEQ ID NO: 722218 - RNA, 21 nt, Human
caacacucaccaguugcccaa

SEQ ID NO: 722219 - RNA, 19 nt, Human
caaguacaacaaaguucac

SEQ ID NO: 722220 - RNA, 23 nt, Human
cacagcagccaccuaugucaaca

SEQ ID NO: 722221 - RNA, 24 nt, Human
cacagcagccaccuaugucaacau

SEQ ID NO: 722222 - RNA, 20 nt, Human
cacaguauucacaagcagag

SEQ ID NO: 722223 - RNA, 24 nt, Human
caccuuagacaaacuucccccagg

SEQ ID NO: 722224 - RNA, 21 nt, Human
cacuacacaguucaacaagac

SEQ ID NO: 722225 - RNA, 21 nt, Human
cagacaggacaagcaaaggca

SEQ ID NO: 722226 - RNA, 22 nt, Human
cagcagcugucucacaguauuu

SEQ ID NO: 722227 - RNA, 21 nt, Human
cagccucgagcuccuguuccc

SEQ ID NO: 722228 - RNA, 19 nt, Human
caggaagcucccauccuga

SEQ ID NO: 722229 - RNA, 19 nt, Human
caggagaugugcccuccac

SEQ ID NO: 722230 - RNA, 19 nt, Human
cauccacucucacuagaca

SEQ ID NO: 722231 - RNA, 24 nt, Human
caugcaaaaacaaaacaaaaccau

SEQ ID NO: 722232 - RNA, 18 nt, Human
cauggcuccugagcccug

SEQ ID NO: 722233 - RNA, 24 nt, Human
cauuacuaagacccccucuggccc

SEQ ID NO: 722234 - RNA, 24 nt, Human
cauuuuaaaaaacagcaggagccc

SEQ ID NO: 722235 - RNA, 21 nt, Human
ccaaauaggcacaaauugaga

SEQ ID NO: 722236 - RNA, 20 nt, Human
ccaagauaucccuccaugcc

SEQ ID NO: 722237 - RNA, 20 nt, Human
ccacccagcucagucaagaa

SEQ ID NO: 722238 - RNA, 25 nt, Human
ccacccagcucagucaagaauguug

SEQ ID NO: 722239 - RNA, 23 nt, Human
ccaccuuagacaaacuuccccca

SEQ ID NO: 722240 - RNA, 21 nt, Human
ccacgggaagcccuggggagu

SEQ ID NO: 722241 - RNA, 20 nt, Human
ccagaaaaguguuggcuuuu

SEQ ID NO: 722242 - RNA, 21 nt, Human
ccagaaaaguguuggcuuuuu

SEQ ID NO: 722243 - RNA, 19 nt, Human
ccagacaggacaagcaaag

SEQ ID NO: 722244 - RNA, 22 nt, Human
ccagacaggacaagcaaaggca

SEQ ID NO: 722245 - RNA, 22 nt, Human
ccaguauccucacaaacacccu

SEQ ID NO: 722246 - RNA, 20 nt, Human
cccaaacuagaaaacgggau

SEQ ID NO: 722247 - RNA, 22 nt, Human
cccagaguaaguagcacagagg

SEQ ID NO: 722248 - RNA, 22 nt, Human
cccccuguccaccuuagacaaa

SEQ ID NO: 722249 - RNA, 18 nt, Human
cccgagccuaaccaggug

SEQ ID NO: 722250 - RNA, 19 nt, Human
cccuggacacuaaaagguu

SEQ ID NO: 722251 - RNA, 19 nt, Human
cccuguuggucccugaggc

SEQ ID NO: 722252 - RNA, 19 nt, Human
ccuccaguauccucacaaa

SEQ ID NO: 722253 - RNA, 18 nt, Human
ccuccugccuuggcuggg

SEQ ID NO: 722254 - RNA, 23 nt, Human
ccucuagaagccuccacuagucu

SEQ ID NO: 722255 - RNA, 21 nt, Human
ccucucucccuucuuuuaccc

SEQ ID NO: 722256 - RNA, 22 nt, Human
ccugaaauuagccaugcaauga

SEQ ID NO: 722257 - RNA, 21 nt, Human
ccugagcccuggacacuaaaa

SEQ ID NO: 722258 - RNA, 21 nt, Human
ccuggguggccucagacaguc

SEQ ID NO: 722259 - RNA, 22 nt, Human
cggcacugaaggaggguguggg

SEQ ID NO: 722260 - RNA, 19 nt, Human
cuacaaacaagaacauccu

SEQ ID NO: 722261 - RNA, 21 nt, Human
cuaggucuaaaggaaaagcca

SEQ ID NO: 722262 - RNA, 22 nt, Human
cucacaguauucacaagcagaa

SEQ ID NO: 722263 - RNA, 19 nt, Human
cucacagucguacuccauc

SEQ ID NO: 722264 - RNA, 21 nt, Human
cucacagucguacuccaucuc

SEQ ID NO: 722265 - RNA, 21 nt, Human
cucacuagacaccuccucgga

SEQ ID NO: 722266 - RNA, 22 nt, Human
cuccaguauccucacaaacacc

SEQ ID NO: 722267 - RNA, 26 nt, Human
cucguucacacccaggacaggagaug

SEQ ID NO: 722268 - RNA, 23 nt, Human
cucuauuggggcuggggggcccu

SEQ ID NO: 722269 - RNA, 20 nt, Human
cucucacuagacaccuccuc

SEQ ID NO: 722270 - RNA, 24 nt, Human
cugcccagccaaagaagugacagu

SEQ ID NO: 722271 - RNA, 19 nt, Human
cugucacaacacucaccag

SEQ ID NO: 722272 - RNA, 20 nt, Human
cuucaggagaugugcccucc

SEQ ID NO: 722273 - RNA, 23 nt, Human
gaacacaggcaucucuccugagg

SEQ ID NO: 722274 - RNA, 20 nt, Human
gaacucacgauccauaccuc

SEQ ID NO: 722275 - RNA, 23 nt, Human
gaacucacgauccauaccucuga

SEQ ID NO: 722276 - RNA, 20 nt, Human
gaccagaccccaaaccagaa

SEQ ID NO: 722277 - RNA, 21 nt, Human
gagcaauaccaucaacucaac

SEQ ID NO: 722278 - RNA, 22 nt, Human
gagucugaguccuccugccuug

SEQ ID NO: 722279 - RNA, 21 nt, Human
gagugagcugguuguggguua

SEQ ID NO: 722280 - RNA, 25 nt, Human
gauaucccuccaugcccccggcacu

SEQ ID NO: 722281 - RNA, 18 nt, Human
gcaggagagguggaacac

SEQ ID NO: 722282 - RNA, 18 nt, Human
gcagguguguaaagggag

SEQ ID NO: 722283 - RNA, 23 nt, Human
gcaugcaaaaacaaaacaaaacc

SEQ ID NO: 722284 - RNA, 18 nt, Human
gcgggcucugaaguggac

SEQ ID NO: 722285 - RNA, 19 nt, Human
ggagaugugcccuccacuu

SEQ ID NO: 722286 - RNA, 23 nt, Human
ggcagguucucacccuaaagaag

SEQ ID NO: 722287 - RNA, 25 nt, Human
gggccagggggcugacagguucaug

SEQ ID NO: 722288 - RNA, 18 nt, Human
gggcugggucaggcugcg

SEQ ID NO: 722289 - RNA, 22 nt, Human
ggggccuggguggccucagaca

SEQ ID NO: 722290 - RNA, 24 nt, Human
ggggccuggguggccucagacagu

SEQ ID NO: 722291 - RNA, 21 nt, Human
gggucaggcugcggcacaagg

SEQ ID NO: 722292 - RNA, 19 nt, Human
gguagagaaggaaaugagc

SEQ ID NO: 722293 - RNA, 27 nt, Human
guagaucuccuucaaccagcccucaaa

SEQ ID NO: 722294 - RNA, 28 nt, Human
guagaucuccuucaaccagcccucaaag

SEQ ID NO: 722295 - RNA, 24 nt, Human
guagaugcaaauggcaaagaagag

SEQ ID NO: 722296 - RNA, 20 nt, Human
guggauguacuacggcuccc

SEQ ID NO: 722297 - RNA, 20 nt, Human
guggguuacucucuccaccc

SEQ ID NO: 722298 - RNA, 18 nt, Human
gugguauagugagcuggg

SEQ ID NO: 722299 - RNA, 18 nt, Human
guucauggaagggcaggc

SEQ ID NO: 722300 - RNA, 18 nt, Human
uaaaaaacagcaggagcc

SEQ ID NO: 722301 - RNA, 23 nt, Human
uaaaaaacagcaggagcccaaga

SEQ ID NO: 722302 - RNA, 23 nt, Human
uaaaaaacagcaggagcccaaga

SEQ ID NO: 722303 - RNA, 21 nt, Human
uaaagugaagaugaucucuca

SEQ ID NO: 722304 - RNA, 21 nt, Human
uaagugaaaucugaaccagaa

SEQ ID NO: 722305 - RNA, 21 nt, Human
uaauaaauaccuuccucuuuc

SEQ ID NO: 722306 - RNA, 19 nt, Human
uaccccaaacuagaaaacg

SEQ ID NO: 722307 - RNA, 19 nt, Human
uagacaaacuucccccagg

SEQ ID NO: 722308 - RNA, 24 nt, Human
uagacaccuccucggagucugagu

SEQ ID NO: 722309 - RNA, 22 nt, Human
uagcaaaggcccuacaaacaag

SEQ ID NO: 722310 - RNA, 20 nt, Human
uagcacagagggcgggcucu

SEQ ID NO: 722311 - RNA, 21 nt, Human
uagcccagaguaaguagcaca

SEQ ID NO: 722312 - RNA, 22 nt, Human
uaggaacacaaugcagaaaaaa

SEQ ID NO: 722313 - RNA, 21 nt, Human
uaggaaggcagguucucaccc

SEQ ID NO: 722314 - RNA, 18 nt, Human
uauccagacaggacaagc

SEQ ID NO: 722315 - RNA, 18 nt, Human
uauuggggcuggggggcc

SEQ ID NO: 722316 - RNA, 22 nt, Human
uauuggggcuggggggcccuuc

SEQ ID NO: 722317 - RNA, 19 nt, Human
ucaagacucaguuacccca

SEQ ID NO: 722318 - RNA, 21 nt, Human
ucacacccaggacaggagaug

SEQ ID NO: 722319 - RNA, 24 nt, Human
ucacagcagccaccuaugucaaca

SEQ ID NO: 722320 - RNA, 19 nt, Human
ucagucaagaaugucacac

SEQ ID NO: 722321 - RNA, 18 nt, Human
ucagugccacacucgaug

SEQ ID NO: 722322 - RNA, 23 nt, Human
uccacagcauuuucacagcagcc

SEQ ID NO: 722323 - RNA, 18 nt, Human
uccagaaugcuucucucu

SEQ ID NO: 722324 - RNA, 27 nt, Human
ucccaaauaaaugcuguagaugcaaau

SEQ ID NO: 722325 - RNA, 19 nt, Human
ucccaggcagaaaaaaauu

SEQ ID NO: 722326 - RNA, 19 nt, Human
ucccauggcuuccagaaug

SEQ ID NO: 722327 - RNA, 20 nt, Human
ucccccaacaauaugagcaa

SEQ ID NO: 722328 - RNA, 24 nt, Human
ucccgagccuaaccaggugugguc

SEQ ID NO: 722329 - RNA, 18 nt, Human
uccgugagcccaggaggc

SEQ ID NO: 722330 - RNA, 24 nt, Human
uccuucucaaccaagcccuugcuu

SEQ ID NO: 722331 - RNA, 23 nt, Human
ucuagaagccuccacuagucugc

SEQ ID NO: 722332 - RNA, 19 nt, Human
ucuaggaaggcagguucuc

SEQ ID NO: 722333 - RNA, 18 nt, Human
ucuauuggggcugggggg

SEQ ID NO: 722334 - RNA, 19 nt, Human
ucuccacagccacccagcu

SEQ ID NO: 722335 - RNA, 22 nt, Human
ucucuaaccuccaacaaaaagg

SEQ ID NO: 722336 - RNA, 23 nt, Human
ucucuagcacauuacuaagaccc

SEQ ID NO: 722337 - RNA, 25 nt, Human
ucugagguugcuucauggucgggac

SEQ ID NO: 722338 - RNA, 26 nt, Human
ucugagguugcuucauggucgggacc

SEQ ID NO: 722339 - RNA, 24 nt, Human
ucuguaguggauguacuacggcuc

SEQ ID NO: 722340 - RNA, 24 nt, Human
ucuguguucuucaggagaugugcc

SEQ ID NO: 722341 - RNA, 21 nt, Human
ucuuaugcucacuauugaagg

SEQ ID NO: 722342 - RNA, 22 nt, Human
ugaaagggaaaugaccagaccc

SEQ ID NO: 722343 - RNA, 20 nt, Human
ugaagcagacagcagcuguc

SEQ ID NO: 722344 - RNA, 18 nt, Human
ugacagguucauggaagg

SEQ ID NO: 722345 - RNA, 21 nt, Human
ugacagucuuuggcugugcug

SEQ ID NO: 722346 - RNA, 19 nt, Human
ugaccacuggcgccagugg

SEQ ID NO: 722347 - RNA, 25 nt, Human
ugaccagaccccaaaccagaaaguc

SEQ ID NO: 722348 - RNA, 24 nt, Human
ugaccuccaguauccucacaaaca

SEQ ID NO: 722349 - RNA, 22 nt, Human
ugacuaugcaaaacaaauaccc

SEQ ID NO: 722350 - RNA, 21 nt, Human
ugagagaugcuguuggccagg

SEQ ID NO: 722351 - RNA, 22 nt, Human
ugagcaauggguuccuucucaa

SEQ ID NO: 722352 - RNA, 22 nt, Human
ugagcccaggaggaguucagau

SEQ ID NO: 722353 - RNA, 20 nt, Human
ugagcccaggaggccacacc

SEQ ID NO: 722354 - RNA, 21 nt, Human
ugagcccaggaggccacaccc

SEQ ID NO: 722355 - RNA, 23 nt, Human
ugaggcaaacagcacagaagucc

SEQ ID NO: 722356 - RNA, 19 nt, Human
ugaguccuccugccuuggc

SEQ ID NO: 722357 - RNA, 22 nt, Human
ugauugacagguccaugggccu

SEQ ID NO: 722358 - RNA, 22 nt, Human
ugcaaaaacaaaacaaaaccuu

SEQ ID NO: 722359 - RNA, 20 nt, Human
ugcacaaaggaaagaugacc

SEQ ID NO: 722360 - RNA, 18 nt, Human
ugcagccucgagcuccug

SEQ ID NO: 722361 - RNA, 19 nt, Human
ugccucuugauuuuucccc

SEQ ID NO: 722362 - RNA, 19 nt, Human
ugcugcagagcuguagacg

SEQ ID NO: 722363 - RNA, 24 nt, Human
ugcuuaggccaggagaugcccgca

SEQ ID NO: 722364 - RNA, 21 nt, Human
uggaccugaagcagacagcag

SEQ ID NO: 722365 - RNA, 23 nt, Human
uggcaaagaagagcacuacacag

SEQ ID NO: 722366 - RNA, 20 nt, Human
uggcaagccaaggggcaugg

SEQ ID NO: 722367 - RNA, 21 nt, Human
uggcuaggucuaaaggaaaag

SEQ ID NO: 722368 - RNA, 23 nt, Human
uggcuccugagcccuggacacuu

SEQ ID NO: 722369 - RNA, 20 nt, Human
uggcugaccuuaauggacau

SEQ ID NO: 722370 - RNA, 22 nt, Human
ugggaagcugagcaaggcugac

SEQ ID NO: 722371 - RNA, 19 nt, Human
ugggacaacagcugccaga

SEQ ID NO: 722372 - RNA, 23 nt, Human
ugggagguagccugaccuccagu

SEQ ID NO: 722373 - RNA, 22 nt, Human
ugguuugcuuuaaagugaagau

SEQ ID NO: 722374 - RNA, 22 nt, Human
uuaaaaaacagcaggagcccaa

SEQ ID NO: 722375 - RNA, 18 nt, Human
uuaauuggcuccuccagu

SEQ ID NO: 722376 - RNA, 22 nt, Human
uuacuaagacccccucuggccc

SEQ ID NO: 722377 - RNA, 22 nt, Human
uuagcacaguuccagaacauga

SEQ ID NO: 722378 - RNA, 19 nt, Human
uuauugcagcacaaggaca

SEQ ID NO: 722379 - RNA, 20 nt, Human
uucacaagcagaacucacga

SEQ ID NO: 722380 - RNA, 21 nt, Human
uucacacccaggacaggagau

SEQ ID NO: 722381 - RNA, 26 nt, Human
uucccaggcagaaaaaaauucaccaa

SEQ ID NO: 722382 - RNA, 23 nt, Human
uucuaagucauguucugguuuuu

SEQ ID NO: 722383 - RNA, 24 nt, Human
uugcuucauggucaccaaaggaca

SEQ ID NO: 722384 - RNA, 20 nt, Human
uuggcuccuccaguucugag

SEQ ID NO: 722385 - RNA, 21 nt, Human
uuggcuccuccaguucugagg

SEQ ID NO: 722386 - RNA, 20 nt, Human
uuggcuccugggguucgagg

SEQ ID NO: 722387 - RNA, 24 nt, Human
uuggggcuggggggcccuucuugg

SEQ ID NO: 722388 - RNA, 22 nt, Human
uuucuccggguagaucuccuuc

SEQ ID NO: 722389 - RNA, 23 nt, Human
uuuucccccuguccaccuuagaa

SEQ ID NO: 722390 - RNA, 18 nt, Human
aagccuguucccacuccu

SEQ ID NO: 722391 - RNA, 22 nt, Human
aagggauccuuauugaguccca

SEQ ID NO: 722392 - RNA, 21 nt, Human
aaugauguaccugggaauguc

SEQ ID NO: 722393 - RNA, 23 nt, Human
acacagccuccucucaaaggucc

SEQ ID NO: 722394 - RNA, 21 nt, Human
acauauccauuucuuucucuc

SEQ ID NO: 722395 - RNA, 24 nt, Human
agacaaggccaaaaauaaaaaaaa

SEQ ID NO: 722396 - RNA, 23 nt, Human
agccaacgaccagcggcguccag

SEQ ID NO: 722397 - RNA, 21 nt, Human
aggaagaaagacaaggccaaa

SEQ ID NO: 722398 - RNA, 23 nt, Human
aggcaaugcuggugacugcccag

SEQ ID NO: 722399 - RNA, 27 nt, Human
aggccaaaaauaaaaaaaaagggaccc

SEQ ID NO: 722400 - RNA, 22 nt, Human
aucaaauucccaggcacucuaa

SEQ ID NO: 722401 - RNA, 18 nt, Human
aucuacucacucccucca

SEQ ID NO: 722402 - RNA, 18 nt, Human
augaggcuccgagcucug

SEQ ID NO: 722403 - RNA, 18 nt, Human
caacgaccagcggcgucc

SEQ ID NO: 722404 - RNA, 21 nt, Human
caaggccauaugacuaaaaug

SEQ ID NO: 722405 - RNA, 18 nt, Human
cacagcaggcgggagaac

SEQ ID NO: 722406 - RNA, 23 nt, Human
ccagcggcguccaucaguccucc

SEQ ID NO: 722407 - RNA, 19 nt, Human
cccaauuaucuacucacuc

SEQ ID NO: 722408 - RNA, 22 nt, Human
cccauagccagaggaagggaga

SEQ ID NO: 722409 - RNA, 26 nt, Human
ccgucccguccuagccuuuaauuaac

SEQ ID NO: 722410 - RNA, 20 nt, Human
ccuccgugcaaaugaaaaau

SEQ ID NO: 722411 - RNA, 21 nt, Human
ccuguucccacuccucaaaug

SEQ ID NO: 722412 - RNA, 19 nt, Human
cuggaagaagguccccucu

SEQ ID NO: 722413 - RNA, 22 nt, Human
cuuauugagucccaguuggcua

SEQ ID NO: 722414 - RNA, 18 nt, Human
gcguguuccugcaucugu

SEQ ID NO: 722415 - RNA, 19 nt, Human
ggacauucccacacagugc

SEQ ID NO: 722416 - RNA, 21 nt, Human
ggagaacguccagggcucaga

SEQ ID NO: 722417 - RNA, 25 nt, Human
ggagagaagccaacgaccagcggcg

SEQ ID NO: 722418 - RNA, 21 nt, Human
ggcccuggugggauuuaucca

SEQ ID NO: 722419 - RNA, 22 nt, Human
gugguacagaaauguuuugaua

SEQ ID NO: 722420 - RNA, 22 nt, Human
uaaaaaaaaggaagaaagacaa

SEQ ID NO: 722421 - RNA, 21 nt, Human
uacccuguccuucuuuggcau

SEQ ID NO: 722422 - RNA, 23 nt, Human
uagcaacuuaucuaauuugugcu

SEQ ID NO: 722423 - RNA, 22 nt, Human
ucaaagguccgggaaacugauu

SEQ ID NO: 722424 - RNA, 18 nt, Human
ucaggacgggucuccaca

SEQ ID NO: 722425 - RNA, 23 nt, Human
uccagagaaaaugugaugggaac

SEQ ID NO: 722426 - RNA, 23 nt, Human
ucucuucaauucacuguggguuc

SEQ ID NO: 722427 - RNA, 19 nt, Human
ucuuccaucugagcuguag

SEQ ID NO: 722428 - RNA, 21 nt, Human
ugaaagguagucaagacacag

SEQ ID NO: 722429 - RNA, 19 nt, Human
ugagagcacaguccaaaaa

SEQ ID NO: 722430 - RNA, 20 nt, Human
ugagccuccuguagcaacuu

SEQ ID NO: 722431 - RNA, 22 nt, Human
ugagcuguagccuuugggaacc

SEQ ID NO: 722432 - RNA, 21 nt, Human
ugaggcacugggggagaaauu

SEQ ID NO: 722433 - RNA, 23 nt, Human
ugaggugaugaggcccugguggg

SEQ ID NO: 722434 - RNA, 25 nt, Human
ugaugcaacuucuccugggaggaac

SEQ ID NO: 722435 - RNA, 18 nt, Human
ugccccugggcccucccc

SEQ ID NO: 722436 - RNA, 21 nt, Human
ugcugguuuugaaagguaguc

SEQ ID NO: 722437 - RNA, 19 nt, Human
uggaagaagguccccucuu

SEQ ID NO: 722438 - RNA, 20 nt, Human
uggcauggccuucugcugcu

SEQ ID NO: 722439 - RNA, 23 nt, Human
uggcauggccuucugcugcuucc

SEQ ID NO: 722440 - RNA, 18 nt, Human
uggucgaggcaaugcugg

SEQ ID NO: 722441 - RNA, 20 nt, Human
uucaggacgggucuccacag

SEQ ID NO: 722442 - RNA, 20 nt, Human
uucgccgaagccuguuccca

SEQ ID NO: 722443 - RNA, 20 nt, Human
uugagucccaguuggcuaau

SEQ ID NO: 722444 - RNA, 23 nt, Human
uugguugguaugguaacugaugc

SEQ ID NO: 722445 - RNA, 21 nt, Human
uuuggcauggccuucugcugc

SEQ ID NO: 722446 - RNA, 25 nt, Human
uuugucuuucucucuccccuguugc

SEQ ID NO: 722447 - RNA, 24 nt, Human
aaaaccgugaacuaaugccgaagg

SEQ ID NO: 722448 - RNA, 23 nt, Human
aaacaauucugagucaaagauuc

SEQ ID NO: 722449 - RNA, 24 nt, Human
aaacaccaaacaguuuguauuccu

SEQ ID NO: 722450 - RNA, 20 nt, Human
aaacauccuggguggucugg

SEQ ID NO: 722451 - RNA, 24 nt, Human
aaaugaucaagugaaacagaaagc

SEQ ID NO: 722452 - RNA, 20 nt, Human
aaaugguuuuaccccaacua

SEQ ID NO: 722453 - RNA, 21 nt, Human
aacagucagagaagccuuaaa

SEQ ID NO: 722454 - RNA, 18 nt, Human
aagauacucuccccaagu

SEQ ID NO: 722455 - RNA, 24 nt, Human
aaugaaugaacauucuuaaaugac

SEQ ID NO: 722456 - RNA, 20 nt, Human
acacgagcugaccgagggac

SEQ ID NO: 722457 - RNA, 19 nt, Human
agguuucggggggcucggg

SEQ ID NO: 722458 - RNA, 24 nt, Human
caaaaaccgugaacuaaugccggu

SEQ ID NO: 722459 - RNA, 23 nt, Human
caaccucugaaccaacguccccc

SEQ ID NO: 722460 - RNA, 24 nt, Human
caaggacaaauggauccagcggga

SEQ ID NO: 722461 - RNA, 19 nt, Human
cacaaaaucacccaugguc

SEQ ID NO: 722462 - RNA, 19 nt, Human
cacccucucuuugcuccca

SEQ ID NO: 722463 - RNA, 18 nt, Human
cagaaaguaaagugaggc

SEQ ID NO: 722464 - RNA, 20 nt, Human
cagaaaguaaagugaggcug

SEQ ID NO: 722465 - RNA, 19 nt, Human
cagcgcccuccacucauuc

SEQ ID NO: 722466 - RNA, 19 nt, Human
caggagcuacucaaagucu

SEQ ID NO: 722467 - RNA, 22 nt, Human
cagugugcgaccagcucugagu

SEQ ID NO: 722468 - RNA, 23 nt, Human
cauucuacaauuucuacacuuaa

SEQ ID NO: 722469 - RNA, 21 nt, Human
cauuuuggaaaacauccuggg

SEQ ID NO: 722470 - RNA, 21 nt, Human
ccaaccucugaaccaacgucc

SEQ ID NO: 722471 - RNA, 19 nt, Human
ccaggaaggaucugugcua

SEQ ID NO: 722472 - RNA, 19 nt, Human
ccuccuacgggagaagaau

SEQ ID NO: 722473 - RNA, 20 nt, Human
ccucucucaaaaaccgugaa

SEQ ID NO: 722474 - RNA, 23 nt, Human
ccuguggcagagacagcuccggc

SEQ ID NO: 722475 - RNA, 24 nt, Human
cgaccauguggcucuccuguggca

SEQ ID NO: 722476 - RNA, 19 nt, Human
cgggcagagccgaccggaa

SEQ ID NO: 722477 - RNA, 20 nt, Human
cggggggcucgggguugagg

SEQ ID NO: 722478 - RNA, 27 nt, Human
cuaccaaccucugaaccaacguccccc

SEQ ID NO: 722479 - RNA, 22 nt, Human
cuccuucccagugacugggcca

SEQ ID NO: 722480 - RNA, 21 nt, Human
cugcugugucucccugggggc

SEQ ID NO: 722481 - RNA, 21 nt, Human
cuuaaagcuuugcaucaguga

SEQ ID NO: 722482 - RNA, 21 nt, Human
cuuuucggcaaacaauucuga

SEQ ID NO: 722483 - RNA, 19 nt, Human
gaaaacauccugggugguc

SEQ ID NO: 722484 - RNA, 20 nt, Human
gaaacagaaagccaggaagg

SEQ ID NO: 722485 - RNA, 21 nt, Human
gaaaugaagcccaaaucaaac

SEQ ID NO: 722486 - RNA, 18 nt, Human
gaaucugaaaggauggug

SEQ ID NO: 722487 - RNA, 18 nt, Human
gaaugaacauucuuaaau

SEQ ID NO: 722488 - RNA, 20 nt, Human
gaccacccugagccaucaug

SEQ ID NO: 722489 - RNA, 22 nt, Human
gaggaggcccgucucugaguuc

SEQ ID NO: 722490 - RNA, 19 nt, Human
gaggcgcugauugagaaca

SEQ ID NO: 722491 - RNA, 25 nt, Human
gcagaaccuacagaaauuaucuacu

SEQ ID NO: 722492 - RNA, 21 nt, Human
gcagagacagcuccggcuuca

SEQ ID NO: 722493 - RNA, 18 nt, Human
gcagagcagggguugggg

SEQ ID NO: 722494 - RNA, 20 nt, Human
ggagcuacucaaagucucag

SEQ ID NO: 722495 - RNA, 24 nt, Human
ggaugaccacccugagccaucaug

SEQ ID NO: 722496 - RNA, 19 nt, Human
gggaagcaucgggcagggc

SEQ ID NO: 722497 - RNA, 20 nt, Human
gggcagagccgaccggaaga

SEQ ID NO: 722498 - RNA, 24 nt, Human
gggcuccuucccagugacugggcc

SEQ ID NO: 722499 - RNA, 18 nt, Human
gggguuggggucugccuc

SEQ ID NO: 722500 - RNA, 20 nt, Human
ggugcagagcagggguuggg

SEQ ID NO: 722501 - RNA, 22 nt, Human
gugcagagcagggguugggguc

SEQ ID NO: 722502 - RNA, 18 nt, Human
guggcugcuccagguugc

SEQ ID NO: 722503 - RNA, 23 nt, Human
uaaauuuaaaacaccaaacaguu

SEQ ID NO: 722504 - RNA, 23 nt, Human
uaacuaaggccucucucaaaaac

SEQ ID NO: 722505 - RNA, 23 nt, Human
uaagauacucuccccaagugcua

SEQ ID NO: 722506 - RNA, 18 nt, Human
uacacacgaaaugaagcc

SEQ ID NO: 722507 - RNA, 21 nt, Human
uacgggagaagaaucgauuug

SEQ ID NO: 722508 - RNA, 23 nt, Human
ucaaaugguuuuaccccaacuaa

SEQ ID NO: 722509 - RNA, 24 nt, Human
ucaaaugguuuuaccccaacuaaa

SEQ ID NO: 722510 - RNA, 23 nt, Human
ucaagugaaacagaaagccagga

SEQ ID NO: 722511 - RNA, 20 nt, Human
ucacaucauucuuuucggca

SEQ ID NO: 722512 - RNA, 24 nt, Human
ucacaucauucuuuucggcaaaca

SEQ ID NO: 722513 - RNA, 18 nt, Human
ucacugggcagugacuca

SEQ ID NO: 722514 - RNA, 23 nt, Human
ucagccagguucaaacacggcga

SEQ ID NO: 722515 - RNA, 23 nt, Human
ucagucacccucucuuugcuccc

SEQ ID NO: 722516 - RNA, 20 nt, Human
uccccaagugcuaccaaccu

SEQ ID NO: 722517 - RNA, 20 nt, Human
uccuacacacgaaaugaagc

SEQ ID NO: 722518 - RNA, 18 nt, Human
ucgaccccagaacagcgg

SEQ ID NO: 722519 - RNA, 20 nt, Human
ucgaccccagaacagcgggc

SEQ ID NO: 722520 - RNA, 20 nt, Human
ucggggcagaaauacuaagu

SEQ ID NO: 722521 - RNA, 21 nt, Human
ucucuggggcuccuucccagu

SEQ ID NO: 722522 - RNA, 19 nt, Human
ugaaacagaaagccaggaa

SEQ ID NO: 722523 - RNA, 25 nt, Human
ugacaagaauacgaagaguuucaga

SEQ ID NO: 722524 - RNA, 19 nt, Human
ugacucacagcugggcuug

SEQ ID NO: 722525 - RNA, 20 nt, Human
ugagaacacagcgcccuccc

SEQ ID NO: 722526 - RNA, 21 nt, Human
ugagauuuuaccgguucgaaa

SEQ ID NO: 722527 - RNA, 20 nt, Human
ugcaucagugagaggaggcc

SEQ ID NO: 722528 - RNA, 24 nt, Human
ugccucagucacccucucuuugcu

SEQ ID NO: 722529 - RNA, 31 nt, Human
ugcuaauuccacauucuacaauuucuacacc

SEQ ID NO: 722530 - RNA, 23 nt, Human
ugcuaccaaccucugaaccaacg

SEQ ID NO: 722531 - RNA, 21 nt, Human
ugcucacggaaagugcagccu

SEQ ID NO: 722532 - RNA, 23 nt, Human
uggaugaccacccugagccauca

SEQ ID NO: 722533 - RNA, 18 nt, Human
uggcagagacagcuccgg

SEQ ID NO: 722534 - RNA, 20 nt, Human
uggcagagacagcuccggcu

SEQ ID NO: 722535 - RNA, 21 nt, Human
uggcagagacagcuccggcuu

SEQ ID NO: 722536 - RNA, 24 nt, Human
uggcagucgaccccagaacagcgg

SEQ ID NO: 722537 - RNA, 21 nt, Human
uggcggacacaggucucccuu

SEQ ID NO: 722538 - RNA, 23 nt, Human
uggucugggcuaaaugaucaagu

SEQ ID NO: 722539 - RNA, 23 nt, Human
uguggcucuccuguggcagagac

SEQ ID NO: 722540 - RNA, 21 nt, Human
uuaaagcuuugcaucagugag

SEQ ID NO: 722541 - RNA, 20 nt, Human
uuaaaggaagcgcgggacuc

SEQ ID NO: 722542 - RNA, 22 nt, Human
uuggaaaacauccugggugguc

SEQ ID NO: 722543 - RNA, 21 nt, Human
uuugcacuugucugaaauauu

SEQ ID NO: 722544 - RNA, 18 nt, Human
aaaagccucuugagagaa

SEQ ID NO: 722545 - RNA, 18 nt, Human
aacuauuuacucauggcu

SEQ ID NO: 722546 - RNA, 22 nt, Human
aagaaaggagacaucuguucau

SEQ ID NO: 722547 - RNA, 22 nt, Human
aauaacaaaauauacagagaga

SEQ ID NO: 722548 - RNA, 21 nt, Human
agacaaauguaauuuaugacc

SEQ ID NO: 722549 - RNA, 21 nt, Human
agagcagcucauuggcaucau

SEQ ID NO: 722550 - RNA, 20 nt, Human
agccccaguagcaaaaaccc

SEQ ID NO: 722551 - RNA, 20 nt, Human
agcuuccuccccagggggag

SEQ ID NO: 722552 - RNA, 19 nt, Human
auacagagagaagaaagga

SEQ ID NO: 722553 - RNA, 23 nt, Human
auauaaaauaacaaaauauacag

SEQ ID NO: 722554 - RNA, 19 nt, Human
augagccacuggggaccuu

SEQ ID NO: 722555 - RNA, 19 nt, Human
auugcauaugugcucuccu

SEQ ID NO: 722556 - RNA, 19 nt, Human
caauagcugaagggucccc

SEQ ID NO: 722557 - RNA, 22 nt, Human
caauccgggcaucaaaagccag

SEQ ID NO: 722558 - RNA, 22 nt, Human
cacaguagaauccauccccacc

SEQ ID NO: 722559 - RNA, 18 nt, Human
cagguugcugaaguccaa

SEQ ID NO: 722560 - RNA, 23 nt, Human
caucgaucuucccuacaauuucc

SEQ ID NO: 722561 - RNA, 21 nt, Human
cauguauggcuuugcaaaggu

SEQ ID NO: 722562 - RNA, 24 nt, Human
ccccucuccucuucuuccucacca

SEQ ID NO: 722563 - RNA, 24 nt, Human
ccuccucgucucuccuucccaggc

SEQ ID NO: 722564 - RNA, 20 nt, Human
ccucucagauccgguggccg

SEQ ID NO: 722565 - RNA, 22 nt, Human
ccugaggcuccccccucucaga

SEQ ID NO: 722566 - RNA, 24 nt, Human
ccuuuugugaaaccuccccucaga

SEQ ID NO: 722567 - RNA, 20 nt, Human
cgccgagaguccaacauuag

SEQ ID NO: 722568 - RNA, 18 nt, Human
cguguauauauauguaua

SEQ ID NO: 722569 - RNA, 24 nt, Human
cucauuggcaucauuuugggcugc

SEQ ID NO: 722570 - RNA, 23 nt, Human
cuccaaaucgacagauccggaga

SEQ ID NO: 722571 - RNA, 19 nt, Human
cucccgggaucagcuugcc

SEQ ID NO: 722572 - RNA, 22 nt, Human
cucccgggaucagcuugccuuc

SEQ ID NO: 722573 - RNA, 22 nt, Human
cugcugcuaugucucagagccu

SEQ ID NO: 722574 - RNA, 19 nt, Human
cuuugagucuuuaugagcc

SEQ ID NO: 722575 - RNA, 19 nt, Human
gacacaguagaauccaucc

SEQ ID NO: 722576 - RNA, 20 nt, Human
gaggcaagagaccuggacgg

SEQ ID NO: 722577 - RNA, 23 nt, Human
gaucagcuucaggauguugagac

SEQ ID NO: 722578 - RNA, 21 nt, Human
gccucuccccucuccucuucu

SEQ ID NO: 722579 - RNA, 19 nt, Human
gcugaaguccaagucaucu

SEQ ID NO: 722580 - RNA, 20 nt, Human
gucuggacucaauggauaac

SEQ ID NO: 722581 - RNA, 24 nt, Human
uaaaauaacaaaauauacagagag

SEQ ID NO: 722582 - RNA, 24 nt, Human
uaaauguccuaucacucuaaaggg

SEQ ID NO: 722583 - RNA, 18 nt, Human
uaaugagauauucuauaa

SEQ ID NO: 722584 - RNA, 22 nt, Human
uacacacaaaguaaauaaaagu

SEQ ID NO: 722585 - RNA, 30 nt, Human
uacacacaaaguaaauaaaaguucauguag

SEQ ID NO: 722586 - RNA, 25 nt, Human
uaccuggaguuuuaacuauaugaaa

SEQ ID NO: 722587 - RNA, 20 nt, Human
uacguguauauauauguaua

SEQ ID NO: 722588 - RNA, 20 nt, Human
uacguguauauauauguaua

SEQ ID NO: 722589 - RNA, 22 nt, Human
uacguguauauauauguauaau

SEQ ID NO: 722590 - RNA, 23 nt, Human
uacuaaauguccuaucacucuaa

SEQ ID NO: 722591 - RNA, 24 nt, Human
uagaggcaagagaccuggacggug

SEQ ID NO: 722592 - RNA, 23 nt, Human
uagcaggaugggaucagcuucag

SEQ ID NO: 722593 - RNA, 22 nt, Human
uagccaaaugucaucacuuucu

SEQ ID NO: 722594 - RNA, 23 nt, Human
uaggcaacagagcacuugaaagc

SEQ ID NO: 722595 - RNA, 28 nt, Human
uauacagcuuugagucuuuaugagccac

SEQ ID NO: 722596 - RNA, 18 nt, Human
uauuacagauauauucuc

SEQ ID NO: 722597 - RNA, 21 nt, Human
ucagaacuggccuccugugcu

SEQ ID NO: 722598 - RNA, 19 nt, Human
ucagccaauccagauuaag

SEQ ID NO: 722599 - RNA, 20 nt, Human
ucaggcauugcauaugugcu

SEQ ID NO: 722600 - RNA, 25 nt, Human
ucaucgaucuucccuacaauuuccu

SEQ ID NO: 722601 - RNA, 21 nt, Human
ucauuaaauguuccuuuuuuu

SEQ ID NO: 722602 - RNA, 19 nt, Human
ucccaugauuacaguagcc

SEQ ID NO: 722603 - RNA, 18 nt, Human
ucgcgccgagaguccaac

SEQ ID NO: 722604 - RNA, 18 nt, Human
ucuccuucccaggcucug

SEQ ID NO: 722605 - RNA, 24 nt, Human
ucuuuuacguguauauauauguau

SEQ ID NO: 722606 - RNA, 18 nt, Human
ugaagagcauuugugcug

SEQ ID NO: 722607 - RNA, 25 nt, Human
ugaauguuugaugguagcaggaugg

SEQ ID NO: 722608 - RNA, 18 nt, Human
ugacuccucccucuucuc

SEQ ID NO: 722609 - RNA, 18 nt, Human
ugacuccucccucuucuc

SEQ ID NO: 722610 - RNA, 20 nt, Human
ugacuccucccucuucuccu

SEQ ID NO: 722611 - RNA, 20 nt, Human
ugauaugguuuccaaguagc

SEQ ID NO: 722612 - RNA, 21 nt, Human
ugaugcaugaagcccuaugcu

SEQ ID NO: 722613 - RNA, 19 nt, Human
ugauuuggaauuggcaccu

SEQ ID NO: 722614 - RNA, 24 nt, Human
ugcaaauacuuuacuaaauguccu

SEQ ID NO: 722615 - RNA, 22 nt, Human
ugcaugaagcccuaugcugaga

SEQ ID NO: 722616 - RNA, 23 nt, Human
ugcccagaccuucagcacugacc

SEQ ID NO: 722617 - RNA, 18 nt, Human
ugcugcccuccagcuucc

SEQ ID NO: 722618 - RNA, 19 nt, Human
ugcuucggcagcuuucagu

SEQ ID NO: 722619 - RNA, 23 nt, Human
uggacgguggccucuccccucuc

SEQ ID NO: 722620 - RNA, 18 nt, Human
uggcagccuuagccucug

SEQ ID NO: 722621 - RNA, 20 nt, Human
uggcagccuuagccucuguu

SEQ ID NO: 722622 - RNA, 18 nt, Human
uggcugcuucggcagcuu

SEQ ID NO: 722623 - RNA, 21 nt, Human
uggcugggagguguccugagg

SEQ ID NO: 722624 - RNA, 19 nt, Human
ugggcugcaaggaacccau

SEQ ID NO: 722625 - RNA, 20 nt, Human
ugguagcaggaugggaucag

SEQ ID NO: 722626 - RNA, 23 nt, Human
uguccugaggcuccccccucuca

SEQ ID NO: 722627 - RNA, 24 nt, Human
ugucucagagccuucuggcuggga

SEQ ID NO: 722628 - RNA, 23 nt, Human
uucuccccgggaaguuuuuuaaa

SEQ ID NO: 722629 - RNA, 23 nt, Human
uucucucucggaaggucuccaaa

SEQ ID NO: 722630 - RNA, 24 nt, Human
uucugaguucacgacuuuaacuaa

SEQ ID NO: 722631 - RNA, 18 nt, Human
uugaguugggaugagggg

SEQ ID NO: 722632 - RNA, 19 nt, Human
uugauuccgagugaauguu

SEQ ID NO: 722633 - RNA, 18 nt, Human
uugcuugggagaaaucau

SEQ ID NO: 722634 - RNA, 18 nt, Human
uuuaacuaaucgcaugca

SEQ ID NO: 722635 - RNA, 20 nt, Human
uuuggugagcuuccucccca

SEQ ID NO: 722636 - RNA, 23 nt, Human
uuugugaaaccuccccucagagc

SEQ ID NO: 722637 - RNA, 28 nt, Human
aaaaaaaaaacaaaacaguaaaagaaaa

SEQ ID NO: 722638 - RNA, 29 nt, Human
aaaaacagcagaaccaguccacgugcccu

SEQ ID NO: 722639 - RNA, 22 nt, Human
aaaaacgccacaaggucaacag

SEQ ID NO: 722640 - RNA, 18 nt, Human
aaaccccuuucugggccc

SEQ ID NO: 722641 - RNA, 18 nt, Human
aaagagggugucuccaag

SEQ ID NO: 722642 - RNA, 18 nt, Human
aaagcgacugccaaaaac

SEQ ID NO: 722643 - RNA, 18 nt, Human
aaaggcccaagagagcaa

SEQ ID NO: 722644 - RNA, 20 nt, Human
aacauuugggcaagcagcag

SEQ ID NO: 722645 - RNA, 20 nt, Human
aaccaguccacgugccccca

SEQ ID NO: 722646 - RNA, 19 nt, Human
aagaaacacuaauagaaaa

SEQ ID NO: 722647 - RNA, 26 nt, Human
aagaaacacuaauagaaaauugccca

SEQ ID NO: 722648 - RNA, 22 nt, Human
aagcaucaguagucuccaagcc

SEQ ID NO: 722649 - RNA, 18 nt, Human
aagcuccagagagcaugg

SEQ ID NO: 722650 - RNA, 21 nt, Human
aaggacucaaguaccagucug

SEQ ID NO: 722651 - RNA, 19 nt, Human
aaguaccugggucacaagg

SEQ ID NO: 722652 - RNA, 18 nt, Human
aagugcuuuuuccaguuc

SEQ ID NO: 722653 - RNA, 18 nt, Human
acacaggggagcaugcgg

SEQ ID NO: 722654 - RNA, 23 nt, Human
acagccgaggaucacagcugcag

SEQ ID NO: 722655 - RNA, 24 nt, Human
acaguaaugaaaaaggauguuguc

SEQ ID NO: 722656 - RNA, 25 nt, Human
acauaucaccuccauguucaucccu

SEQ ID NO: 722657 - RNA, 19 nt, Human
accauguggcauggaggau

SEQ ID NO: 722658 - RNA, 21 nt, Human
accuugucuuccaacuuccac

SEQ ID NO: 722659 - RNA, 18 nt, Human
acucuggaggcuacagcu

SEQ ID NO: 722660 - RNA, 22 nt, Human
acugccaaaggacgccccagga

SEQ ID NO: 722661 - RNA, 25 nt, Human
agaaaaaaaaaacaaaacaguaaaa

SEQ ID NO: 722662 - RNA, 22 nt, Human
agaaaagcgacugccaaaaaca

SEQ ID NO: 722663 - RNA, 19 nt, Human
agaaaugcccgaagggaaa

SEQ ID NO: 722664 - RNA, 23 nt, Human
agaagacgggcuccccacucucc

SEQ ID NO: 722665 - RNA, 23 nt, Human
agccauaugccuaggcaugcccc

SEQ ID NO: 722666 - RNA, 19 nt, Human
aggcaggaacuguagcagc

SEQ ID NO: 722667 - RNA, 24 nt, Human
aguaaaagaaaaggcccaagagag

SEQ ID NO: 722668 - RNA, 25 nt, Human
aguaugaaagcaggauuagaaaaaa

SEQ ID NO: 722669 - RNA, 18 nt, Human
aucaguagucuccaagcc

SEQ ID NO: 722670 - RNA, 21 nt, Human
auucaagaaaaagcuuacaga

SEQ ID NO: 722671 - RNA, 30 nt, Human
caaaaacagcagaaccaguccacgugcccu

SEQ ID NO: 722672 - RNA, 25 nt, Human
caacagugaaccuaauaagcuuccu

SEQ ID NO: 722673 - RNA, 19 nt, Human
caaggcauugccaaagucc

SEQ ID NO: 722674 - RNA, 18 nt, Human
cacagggaugcagcuucc

SEQ ID NO: 722675 - RNA, 20 nt, Human
caccaguuucccaacagggc

SEQ ID NO: 722676 - RNA, 19 nt, Human
cacucuggaggcuacagcu

SEQ ID NO: 722677 - RNA, 18 nt, Human
cagaaagggucuauccau

SEQ ID NO: 722678 - RNA, 18 nt, Human
cagcaaagccuucuuaaa

SEQ ID NO: 722679 - RNA, 19 nt, Human
caggacucuguguacuugc

SEQ ID NO: 722680 - RNA, 25 nt, Human
caggauuagaaaaaaaaaacaaaac

SEQ ID NO: 722681 - RNA, 18 nt, Human
cagggguuggcagguguu

SEQ ID NO: 722682 - RNA, 22 nt, Human
cagguaacuuuuggccccuuuc

SEQ ID NO: 722683 - RNA, 19 nt, Human
caucaguagucuccaagcc

SEQ ID NO: 722684 - RNA, 23 nt, Human
cauuuauuuaucuacuguacaaa

SEQ ID NO: 722685 - RNA, 22 nt, Human
ccaaaaacagcagaaccagucc

SEQ ID NO: 722686 - RNA, 22 nt, Human
ccaagaaaggacaaaugaugac

SEQ ID NO: 722687 - RNA, 21 nt, Human
ccaaggaccugugauaagcac

SEQ ID NO: 722688 - RNA, 21 nt, Human
ccaguccacgugcccccagcu

SEQ ID NO: 722689 - RNA, 23 nt, Human
cccaagaaauaacacucucucau

SEQ ID NO: 722690 - RNA, 19 nt, Human
ccccacucucccaccaaga

SEQ ID NO: 722691 - RNA, 19 nt, Human
ccccucucuccuggcuccu

SEQ ID NO: 722692 - RNA, 19 nt, Human
cccgagccggggguugcag

SEQ ID NO: 722693 - RNA, 23 nt, Human
cccgucaaugccaacagacagcc

SEQ ID NO: 722694 - RNA, 25 nt, Human
cccuaguguccugacgccaaggacc

SEQ ID NO: 722695 - RNA, 24 nt, Human
cccugaugcuggaucccggacccc

SEQ ID NO: 722696 - RNA, 20 nt, Human
cccugcgaacaggagggcuc

SEQ ID NO: 722697 - RNA, 23 nt, Human
ccugaugagaagaggcaaucacc

SEQ ID NO: 722698 - RNA, 20 nt, Human
ccuuguuucaggacucugug

SEQ ID NO: 722699 - RNA, 19 nt, Human
cgacugccaaaaacagcag

SEQ ID NO: 722700 - RNA, 21 nt, Human
cgacugccaaaaacagcagaa

SEQ ID NO: 722701 - RNA, 21 nt, Human
cgcccagaagcuccagagagc

SEQ ID NO: 722702 - RNA, 20 nt, Human
cgugugccaucucccucagc

SEQ ID NO: 722703 - RNA, 23 nt, Human
cuacugagaucuucaaaggacca

SEQ ID NO: 722704 - RNA, 22 nt, Human
cucagacaugcuuccaggaggc

SEQ ID NO: 722705 - RNA, 28 nt, Human
cucccaccaagagaccccagaguugguc

SEQ ID NO: 722706 - RNA, 18 nt, Human
cugcuccuaugggccacc

SEQ ID NO: 722707 - RNA, 20 nt, Human
cuguagcagcucaggagggc

SEQ ID NO: 722708 - RNA, 25 nt, Human
cuuuuagcagacuacauaaugggga

SEQ ID NO: 722709 - RNA, 22 nt, Human
gaaaccccuuucugggcccaag

SEQ ID NO: 722710 - RNA, 21 nt, Human
gaaagugcuuuuuccaguucu

SEQ ID NO: 722711 - RNA, 21 nt, Human
gaaccaguccacgugccccca

SEQ ID NO: 722712 - RNA, 19 nt, Human
gaagcuccagagagcaugg

SEQ ID NO: 722713 - RNA, 22 nt, Human
gaaggggcggcagcacucagca

SEQ ID NO: 722714 - RNA, 20 nt, Human
gaccauguggcauggaggau

SEQ ID NO: 722715 - RNA, 22 nt, Human
gacuucucucuagugcagggug

SEQ ID NO: 722716 - RNA, 20 nt, Human
gagccaacuggaugacagga

SEQ ID NO: 722717 - RNA, 19 nt, Human
gagccccgugugccaucuc

SEQ ID NO: 722718 - RNA, 18 nt, Human
gaggauccugggguauag

SEQ ID NO: 722719 - RNA, 24 nt, Human
gcaaagccuucuuaaaaacacaaa

SEQ ID NO: 722720 - RNA, 21 nt, Human
gccccacucuggaggcuacag

SEQ ID NO: 722721 - RNA, 18 nt, Human
ggaacuguagcagcucag

SEQ ID NO: 722722 - RNA, 22 nt, Human
ggagccaacuggaugacaggag

SEQ ID NO: 722723 - RNA, 21 nt, Human
gggccaaagagggugucucca

SEQ ID NO: 722724 - RNA, 21 nt, Human
gggcggcagcacucagcagaa

SEQ ID NO: 722725 - RNA, 20 nt, Human
gggcuccccacucucccacc

SEQ ID NO: 722726 - RNA, 21 nt, Human
gggcuuggucucugccaauuu

SEQ ID NO: 722727 - RNA, 25 nt, Human
ggucacaaggacauaaauaaaagaa

SEQ ID NO: 722728 - RNA, 19 nt, Human
guaccuuuuccccacacug

SEQ ID NO: 722729 - RNA, 19 nt, Human
guagagcacuccuauucac

SEQ ID NO: 722730 - RNA, 24 nt, Human
guagagcacuccuauucaccaaag

SEQ ID NO: 722731 - RNA, 19 nt, Human
gugugccaucucccucagc

SEQ ID NO: 722732 - RNA, 23 nt, Human
uaaaaacacaaauuugggaaguc

SEQ ID NO: 722733 - RNA, 18 nt, Human
uaaaagaaaaggcccaag

SEQ ID NO: 722734 - RNA, 18 nt, Human
uaaauaaaagaacuggcc

SEQ ID NO: 722735 - RNA, 23 nt, Human
uaagaugcucugaaaaagugcua

SEQ ID NO: 722736 - RNA, 20 nt, Human
uagaaugcuaaaggaucccc

SEQ ID NO: 722737 - RNA, 23 nt, Human
uagcagcaugguccucuucucau

SEQ ID NO: 722738 - RNA, 21 nt, Human
uagccaagacaaucaacucaa

SEQ ID NO: 722739 - RNA, 18 nt, Human
uagcuggccccccaagua

SEQ ID NO: 722740 - RNA, 25 nt, Human
uagugagggccaaagagggugucuc

SEQ ID NO: 722741 - RNA, 19 nt, Human
uagugccaaaggguuuugu

SEQ ID NO: 722742 - RNA, 21 nt, Human
ucaacagugaaccuaauaagc

SEQ ID NO: 722743 - RNA, 22 nt, Human
ucagaaaagcgacugccaaaaa

SEQ ID NO: 722744 - RNA, 18 nt, Human
ucagcacccaugugccaa

SEQ ID NO: 722745 - RNA, 18 nt, Human
ucaggcaggaacuguagc

SEQ ID NO: 722746 - RNA, 21 nt, Human
ucagucuaucugcuuuucuca

SEQ ID NO: 722747 - RNA, 19 nt, Human
ucauauucuucagucuauc

SEQ ID NO: 722748 - RNA, 23 nt, Human
ucaucuuccaagauacagcagca

SEQ ID NO: 722749 - RNA, 28 nt, Human
uccaggguagagaaauacagcccaagaa

SEQ ID NO: 722750 - RNA, 19 nt, Human
uccaucagacuuugucaca

SEQ ID NO: 722751 - RNA, 20 nt, Human
ucccaggguggugauaaacc

SEQ ID NO: 722752 - RNA, 22 nt, Human
ucccaggguggugauaaaccuu

SEQ ID NO: 722753 - RNA, 23 nt, Human
ucccaggguggugauaaaccuuc

SEQ ID NO: 722754 - RNA, 23 nt, Human
ucuccaagccagccauaugccuu

SEQ ID NO: 722755 - RNA, 21 nt, Human
ucuguaacuugcgcccagaag

SEQ ID NO: 722756 - RNA, 21 nt, Human
ucuucagucuaucugcuuuuc

SEQ ID NO: 722757 - RNA, 24 nt, Human
ugaaagaaaaacgccacaagguca

SEQ ID NO: 722758 - RNA, 20 nt, Human
ugaaagcaggauuagaaaaa

SEQ ID NO: 722759 - RNA, 23 nt, Human
ugacaggucuagccaagacaauc

SEQ ID NO: 722760 - RNA, 19 nt, Human
ugagaaggacucaaguacc

SEQ ID NO: 722761 - RNA, 20 nt, Human
ugauagcagcaugguccucu

SEQ ID NO: 722762 - RNA, 23 nt, Human
ugaugcuggaucccggaccccaa

SEQ ID NO: 722763 - RNA, 24 nt, Human
ugcaaucaacugccaaaggacgcc

SEQ ID NO: 722764 - RNA, 18 nt, Human
ugccaaaaacagcagaac

SEQ ID NO: 722765 - RNA, 24 nt, Human
ugcccccagcuggaaaccccuuuc

SEQ ID NO: 722766 - RNA, 25 nt, Human
ugcuacaaaauuuucuucaguagaa

SEQ ID NO: 722767 - RNA, 23 nt, Human
uggagcaaaggggaguacagggg

SEQ ID NO: 722768 - RNA, 24 nt, Human
uggagcacaguguggauuuaaggg

SEQ ID NO: 722769 - RNA, 25 nt, Human
uggccaaaauaagaaacacuaauag

SEQ ID NO: 722770 - RNA, 24 nt, Human
ugggaaggggcggcagcacucagc

SEQ ID NO: 722771 - RNA, 22 nt, Human
ugggaugaacuggaugaacucc

SEQ ID NO: 722772 - RNA, 24 nt, Human
ugggaugaacuggaugaacuccag

SEQ ID NO: 722773 - RNA, 22 nt, Human
uggggaagucaguggcccaagc

SEQ ID NO: 722774 - RNA, 21 nt, Human
ugugauuaauaaucauuucca

SEQ ID NO: 722775 - RNA, 20 nt, Human
uucaccaaagcagguaacuu

SEQ ID NO: 722776 - RNA, 24 nt, Human
uucacucaugucuggucuccuuca

SEQ ID NO: 722777 - RNA, 19 nt, Human
uuuccaguucugacaccac

SEQ ID NO: 722778 - RNA, 18 nt, Human
uuucccaggguggugaua

SEQ ID NO: 722779 - RNA, 21 nt, Human
uuucugggcccaaggggcagc

SEQ ID NO: 722780 - RNA, 23 nt, Human
uuuuggcaauaaagauggcuugu

SEQ ID NO: 722781 - RNA, 23 nt, Human
aaaguaacagaaaaccauaugcc

SEQ ID NO: 722782 - RNA, 18 nt, Human
aaccgcuccucuuuguuc

SEQ ID NO: 722783 - RNA, 20 nt, Human
aagacguccccucccaccuc

SEQ ID NO: 722784 - RNA, 21 nt, Human
aagaguaaaaacaauuuacaa

SEQ ID NO: 722785 - RNA, 24 nt, Human
aagcagccccuuuuucuuuuucga

SEQ ID NO: 722786 - RNA, 23 nt, Human
aagcauuuugagaagggagaaag

SEQ ID NO: 722787 - RNA, 21 nt, Human
aagguuggaguacuggugcuu

SEQ ID NO: 722788 - RNA, 18 nt, Human
aagucuaccacacuggcc

SEQ ID NO: 722789 - RNA, 20 nt, Human
aaguuacuuucucuccuuuu

SEQ ID NO: 722790 - RNA, 21 nt, Human
acaaaagaaaggcagucugaa

SEQ ID NO: 722791 - RNA, 23 nt, Human
acaacgaaaguaacagaaaacca

SEQ ID NO: 722792 - RNA, 19 nt, Human
acacacccacacagagcuu

SEQ ID NO: 722793 - RNA, 22 nt, Human
acacauggauuuccuuuaauaa

SEQ ID NO: 722794 - RNA, 20 nt, Human
acacccacacagagcuuaac

SEQ ID NO: 722795 - RNA, 21 nt, Human
acagguagggagggagcuaca

SEQ ID NO: 722796 - RNA, 20 nt, Human
accucgcuucccuuuacagc

SEQ ID NO: 722797 - RNA, 23 nt, Human
accucgcuucccuuuacagcuaa

SEQ ID NO: 722798 - RNA, 19 nt, Human
acgccagagagaggcccca

SEQ ID NO: 722799 - RNA, 20 nt, Human
agaccagagucaaagugaaa

SEQ ID NO: 722800 - RNA, 28 nt, Human
agacugccagcggugacagagagcaacc

SEQ ID NO: 722801 - RNA, 25 nt, Human
agacuggaauuacagguagggaggg

SEQ ID NO: 722802 - RNA, 19 nt, Human
agcagccccuuuuucuuuu

SEQ ID NO: 722803 - RNA, 21 nt, Human
agcauuccucuggcccuaccu

SEQ ID NO: 722804 - RNA, 18 nt, Human
aggagcauagcucucucg

SEQ ID NO: 722805 - RNA, 23 nt, Human
agggcaggggagacaugaucuga

SEQ ID NO: 722806 - RNA, 18 nt, Human
agucaugaaagcccuagu

SEQ ID NO: 722807 - RNA, 24 nt, Human
augaagccuuaagucuaccacacu

SEQ ID NO: 722808 - RNA, 18 nt, Human
augcugccgggcccuugu

SEQ ID NO: 722809 - RNA, 21 nt, Human
caaagacuggaauuacaggua

SEQ ID NO: 722810 - RNA, 26 nt, Human
caacaacaaacgcguguugcagcaac

SEQ ID NO: 722811 - RNA, 20 nt, Human
cacacuggcccgguuaaggu

SEQ ID NO: 722812 - RNA, 21 nt, Human
caccugcaggcuucaggugug

SEQ ID NO: 722813 - RNA, 20 nt, Human
cacugcacccagcuuuuuca

SEQ ID NO: 722814 - RNA, 22 nt, Human
cacugcacccagcuuuuucagc

SEQ ID NO: 722815 - RNA, 18 nt, Human
cagagagcaaccgcuccu

SEQ ID NO: 722816 - RNA, 18 nt, Human
cagcacgccagagagagg

SEQ ID NO: 722817 - RNA, 25 nt, Human
cagcaggcaaaugcuguaagccaag

SEQ ID NO: 722818 - RNA, 18 nt, Human
cagcggucucccaaagcu

SEQ ID NO: 722819 - RNA, 20 nt, Human
cauaaaugaagacuaagggc

SEQ ID NO: 722820 - RNA, 19 nt, Human
ccacacagagcuuaaccac

SEQ ID NO: 722821 - RNA, 20 nt, Human
ccaccucccaaaucagagcu

SEQ ID NO: 722822 - RNA, 19 nt, Human
ccagcggucucccaaagcu

SEQ ID NO: 722823 - RNA, 22 nt, Human
cccacacagagcuuaaccacac

SEQ ID NO: 722824 - RNA, 20 nt, Human
ccgggcccuugugggaaggc

SEQ ID NO: 722825 - RNA, 21 nt, Human
ccucagcaccugcaggcuuca

SEQ ID NO: 722826 - RNA, 22 nt, Human
ccuuggguuaaguuucuaaagu

SEQ ID NO: 722827 - RNA, 18 nt, Human
cggccaaaucgcgcucuc

SEQ ID NO: 722828 - RNA, 21 nt, Human
cguccccucccaccucccaaa

SEQ ID NO: 722829 - RNA, 20 nt, Human
cucccaggacuaccagaacc

SEQ ID NO: 722830 - RNA, 21 nt, Human
cucccaggacuaccagaaccc

SEQ ID NO: 722831 - RNA, 19 nt, Human
cucucccacagcacgccag

SEQ ID NO: 722832 - RNA, 21 nt, Human
cucucuggucacgagggugag

SEQ ID NO: 722833 - RNA, 20 nt, Human
cucugucucgagggagugcg

SEQ ID NO: 722834 - RNA, 19 nt, Human
cugaaugcacgacacauac

SEQ ID NO: 722835 - RNA, 21 nt, Human
cugcaggcuucagguguggcg

SEQ ID NO: 722836 - RNA, 22 nt, Human
cugccgggcccuugugggaagg

SEQ ID NO: 722837 - RNA, 23 nt, Human
cuuaaaaagcgaaaguucauaaa

SEQ ID NO: 722838 - RNA, 20 nt, Human
cuucacggccaaaucgcgcu

SEQ ID NO: 722839 - RNA, 22 nt, Human
cuuccuauaguaaacauguuug

SEQ ID NO: 722840 - RNA, 19 nt, Human
gaaccuaguagguacagug

SEQ ID NO: 722841 - RNA, 20 nt, Human
gaagauaccaucuauuccau

SEQ ID NO: 722842 - RNA, 23 nt, Human
gaagauggguauggacucauuug

SEQ ID NO: 722843 - RNA, 21 nt, Human
gacgacuucaccucgcuuccc

SEQ ID NO: 722844 - RNA, 23 nt, Human
gacguccccucccaccucccaaa

SEQ ID NO: 722845 - RNA, 20 nt, Human
gacuucaccucgcuucccuu

SEQ ID NO: 722846 - RNA, 18 nt, Human
gaugauugugcuuugagg

SEQ ID NO: 722847 - RNA, 21 nt, Human
gcaggggagacaugaucugaa

SEQ ID NO: 722848 - RNA, 19 nt, Human
ggagauggacuguggggga

SEQ ID NO: 722849 - RNA, 18 nt, Human
gggaaggccugcaugaug

SEQ ID NO: 722850 - RNA, 23 nt, Human
guagggagggagcuacaggugau

SEQ ID NO: 722851 - RNA, 26 nt, Human
guuaaagugcauuccuggggugguug

SEQ ID NO: 722852 - RNA, 19 nt, Human
uaaaaugcacagccuguac

SEQ ID NO: 722853 - RNA, 24 nt, Human
uaaacuaggaauuucaagaccaga

SEQ ID NO: 722854 - RNA, 27 nt, Human
uaaagcaucccaaaguacaccugaaga

SEQ ID NO: 722855 - RNA, 20 nt, Human
uaaccccacaaugaagccuc

SEQ ID NO: 722856 - RNA, 22 nt, Human
uaaggcagaacaucaaggcgaa

SEQ ID NO: 722857 - RNA, 24 nt, Human
uaaucaaagaaagcuuaaaggccc

SEQ ID NO: 722858 - RNA, 26 nt, Human
uaauucacuucauaaaugaagacuaa

SEQ ID NO: 722859 - RNA, 20 nt, Human
uacaaaagaaaggcagucug

SEQ ID NO: 722860 - RNA, 22 nt, Human
uaccugaacccucaggaggaac

SEQ ID NO: 722861 - RNA, 18 nt, Human
uaggaaaugauuauuaaa

SEQ ID NO: 722862 - RNA, 18 nt, Human
uagguucuccagcuuggc

SEQ ID NO: 722863 - RNA, 23 nt, Human
uauuacaauuuauaauagcguuu

SEQ ID NO: 722864 - RNA, 18 nt, Human
ucaagcuugcuuggauuu

SEQ ID NO: 722865 - RNA, 23 nt, Human
ucacugcacccagcuuuuucagc

SEQ ID NO: 722866 - RNA, 21 nt, Human
ucagcaccugcaggcuucagg

SEQ ID NO: 722867 - RNA, 21 nt, Human
uccccagcggucucccaaagc

SEQ ID NO: 722868 - RNA, 21 nt, Human
ucccuggguggcauccuucag

SEQ ID NO: 722869 - RNA, 24 nt, Human
ucccuggguggcauccuucaguuc

SEQ ID NO: 722870 - RNA, 21 nt, Human
uccucuggcccuaccucucca

SEQ ID NO: 722871 - RNA, 22 nt, Human
uccucuggcccuaccucuccag

SEQ ID NO: 722872 - RNA, 21 nt, Human
ucucaggagauacucucccug

SEQ ID NO: 722873 - RNA, 21 nt, Human
ucugcugaguuccuggucuca

SEQ ID NO: 722874 - RNA, 18 nt, Human
ucuuccucaguagauagg

SEQ ID NO: 722875 - RNA, 20 nt, Human
ugaaacuaguaucuuaaaau

SEQ ID NO: 722876 - RNA, 18 nt, Human
ugaacccucaggaggaac

SEQ ID NO: 722877 - RNA, 19 nt, Human
ugaaugcacgacacauaca

SEQ ID NO: 722878 - RNA, 23 nt, Human
ugacaaaugcacaaagacuggaa

SEQ ID NO: 722879 - RNA, 18 nt, Human
ugagagcagacugccagc

SEQ ID NO: 722880 - RNA, 20 nt, Human
ugagagcagacugccagcgg

SEQ ID NO: 722881 - RNA, 19 nt, Human
ugagcugcgugcuucauca

SEQ ID NO: 722882 - RNA, 24 nt, Human
ugauagcuaugcgcccccguuugu

SEQ ID NO: 722883 - RNA, 23 nt, Human
ugaucgaauguggccucagcacc

SEQ ID NO: 722884 - RNA, 20 nt, Human
ugcacacacccacacagagc

SEQ ID NO: 722885 - RNA, 23 nt, Human
ugcauuaugaggcaagcauuuug

SEQ ID NO: 722886 - RNA, 27 nt, Human
ugccacagaauagaacauuaaaagcaa

SEQ ID NO: 722887 - RNA, 25 nt, Human
ugcuguaccugaacccucaggagga

SEQ ID NO: 722888 - RNA, 21 nt, Human
ugcuuugaggaggagcauagc

SEQ ID NO: 722889 - RNA, 19 nt, Human
uggacugugggggauggag

SEQ ID NO: 722890 - RNA, 28 nt, Human
uggagauggcacacugguuccgaccacg

SEQ ID NO: 722891 - RNA, 19 nt, Human
uggcacacugguugaaaga

SEQ ID NO: 722892 - RNA, 21 nt, Human
uggcauccuucaguucauuuu

SEQ ID NO: 722893 - RNA, 19 nt, Human
ugggaaggccugcaugaug

SEQ ID NO: 722894 - RNA, 21 nt, Human
uggugcuuuaccaaacaaagu

SEQ ID NO: 722895 - RNA, 25 nt, Human
uggugucaggggagaagauuggguu

SEQ ID NO: 722896 - RNA, 19 nt, Human
ugguugaaagaaaaaaaaa

SEQ ID NO: 722897 - RNA, 24 nt, Human
ugguugguuuaaagugguugguag

SEQ ID NO: 722898 - RNA, 21 nt, Human
ugugggggauggagcucuccu

SEQ ID NO: 722899 - RNA, 22 nt, Human
ugugucaggaugaagaccacug

SEQ ID NO: 722900 - RNA, 28 nt, Human
uucaccuugucaugcugccgggcccuug

SEQ ID NO: 722901 - RNA, 20 nt, Human
uucagcaguuucuugccuuu

SEQ ID NO: 722902 - RNA, 25 nt, Human
uucaucaacuuaguauugcauuggu

SEQ ID NO: 722903 - RNA, 21 nt, Human
uucuagguucuccagcuuggc

SEQ ID NO: 722904 - RNA, 20 nt, Human
uugagacauauuucuuugua

SEQ ID NO: 722905 - RNA, 23 nt, Human
uuuauaaaccguccauaaauuac

SEQ ID NO: 722906 - RNA, 21 nt, Human
uuucaguuguugaaguaugcc

SEQ ID NO: 722907 - RNA, 21 nt, Human
uuuccccagcggucucccaaa

SEQ ID NO: 722908 - RNA, 23 nt, Human
uuucucugucucgagggagugcg

SEQ ID NO: 722909 - RNA, 22 nt, Human
uuuggaguguucagagccaaca

SEQ ID NO: 722910 - RNA, 23 nt, Human
uuuggaguguucagagccaacac

SEQ ID NO: 722911 - RNA, 20 nt, Human
uuuuccacaaaguuucucug

SEQ ID NO: 722912 - RNA, 24 nt, Human
aaacgcacagccuacagaacauaa

SEQ ID NO: 722913 - RNA, 19 nt, Human
aaaguaccugucggggacc

SEQ ID NO: 722914 - RNA, 22 nt, Human
aaauuucccccuaaaaauaagc

SEQ ID NO: 722915 - RNA, 19 nt, Human
aacaggauauuguuuaggu

SEQ ID NO: 722916 - RNA, 19 nt, Human
aagcagaacucuacaguuu

SEQ ID NO: 722917 - RNA, 19 nt, Human
aaggacagaaaaggaggag

SEQ ID NO: 722918 - RNA, 21 nt, Human
aagggcaccaccaaggccacc

SEQ ID NO: 722919 - RNA, 19 nt, Human
aaugacacacuuuuuaguu

SEQ ID NO: 722920 - RNA, 25 nt, Human
acacaaaaaacaaugguagucacuc

SEQ ID NO: 722921 - RNA, 25 nt, Human
acacacacacacacagacacacaca

SEQ ID NO: 722922 - RNA, 33 nt, Human
acacacacacacacagacacacacacacacagu

SEQ ID NO: 722923 - RNA, 20 nt, Human
acacacacacacacguucac

SEQ ID NO: 722924 - RNA, 31 nt, Human; identical to SEQ ID NO: 639497

SEQ ID NO: 722925 - RNA, 18 nt, Human
acacagccaucugacugc

SEQ ID NO: 722926 - RNA, 18 nt, Human
acacaucuaacccacugg

SEQ ID NO: 722927 - RNA, 21 nt, Human
acacuuuuuaguucugccuuu

SEQ ID NO: 722928 - RNA, 18 nt, Human
acagaacauaauaaaugc

SEQ ID NO: 722929 - RNA, 22 nt, Human
acaugcaagacuccguaccucc

SEQ ID NO: 722930 - RNA, 21 nt, Human
acccugaagcauaaagaaaac

SEQ ID NO: 722931 - RNA, 19 nt, Human
accuuggcucucuggaucc

SEQ ID NO: 722932 - RNA, 20 nt, Human
accuuggcucucuggaucca

SEQ ID NO: 722933 - RNA, 22 nt, Human
acugaagcucgccccaugcguu

SEQ ID NO: 722934 - RNA, 20 nt, Human
acugcuaaacaacaccgaga

SEQ ID NO: 722935 - RNA, 22 nt, Human
acugguucuaucucucauucua

SEQ ID NO: 722936 - RNA, 23 nt, Human
agaaagaaaagauaauguuacaa

SEQ ID NO: 722937 - RNA, 25 nt, Human
agaaaucaucccuuuuuaaaacccu

SEQ ID NO: 722938 - RNA, 23 nt, Human
agaguuuggugcaagcuuccuuu

SEQ ID NO: 722939 - RNA, 21 nt, Human
agcauaaagaaaacaaauuuc

SEQ ID NO: 722940 - RNA, 18 nt, Human
agccaggcccgccgaggg

SEQ ID NO: 722941 - RNA, 24 nt, Human
agcugaauuuuuuuuaagaaccca

SEQ ID NO: 722942 - RNA, 24 nt, Human
agguggcaucacuggcuuguugag

SEQ ID NO: 722943 - RNA, 25 nt, Human
agugguacauuuucuuaccuugcug

SEQ ID NO: 722944 - RNA, 24 nt, Human
auagaacuuucagguggcccaaaa

SEQ ID NO: 722945 - RNA, 20 nt, Human
auauacacaauugcugaguc

SEQ ID NO: 722946 - RNA, 24 nt, Human
auauuagaaauaccuugucaacaa

SEQ ID NO: 722947 - RNA, 23 nt, Human
augaauccuccuucauugaaugu

SEQ ID NO: 722948 - RNA, 21 nt, Human
auuucuauuaacaagcaucuc

SEQ ID NO: 722949 - RNA, 23 nt, Human
auuuuccuucuaacacuauagac

SEQ ID NO: 722950 - RNA, 18 nt, Human
caaaaaaugccaagggca

SEQ ID NO: 722951 - RNA, 22 nt, Human
caaaaaaugccaagggcaccac

SEQ ID NO: 722952 - RNA, 18 nt, Human
caaaagcaccuaaaagcu

SEQ ID NO: 722953 - RNA, 19 nt, Human
caaaagcaccuaaaagcug

SEQ ID NO: 722954 - RNA, 18 nt, Human
caaaauccucgcuuccuc

SEQ ID NO: 722955 - RNA, 18 nt, Human
caaacgcacagccuacag

SEQ ID NO: 722956 - RNA, 19 nt, Human
caacacugguucuaucucu

SEQ ID NO: 722957 - RNA, 25 nt, Human
caacauaagaaugauaguaucuccu

SEQ ID NO: 722958 - RNA, 21 nt, Human
caagcccaagacaggcugaag

SEQ ID NO: 722959 - RNA, 22 nt, Human
caagcccaagacaggcugaagc

SEQ ID NO: 722960 - RNA, 18 nt, Human
caaggcaggaguucuuug

SEQ ID NO: 722961 - RNA, 23 nt, Human
caaugauaagcaguccaccauga

SEQ ID NO: 722962 - RNA, 25 nt, Human
cacacacacacacacguucacaccc

SEQ ID NO: 722963 - RNA, 22 nt, Human
cacacacacagacacacacaca

SEQ ID NO: 722964 - RNA, 21 nt, Human
caccaaggccaccagccucag

SEQ ID NO: 722965 - RNA, 24 nt, Human
cacguucacacccucgcgcgcgca

SEQ ID NO: 722966 - RNA, 22 nt, Human
cacucuccuccccgcgcacaaa

SEQ ID NO: 722967 - RNA, 21 nt, Human
cacugcuggcgacacugaagc

SEQ ID NO: 722968 - RNA, 23 nt, Human
cagaacauaauaaaugcuuaaug

SEQ ID NO: 722969 - RNA, 28 nt, Human
cagacacacacacacacacacguucaca

SEQ ID NO: 722970 - RNA, 19 nt, Human
cagcacagguggagcaagg

SEQ ID NO: 722971 - RNA, 24 nt, Human
cagccaggcccgccgagggcagca

SEQ ID NO: 722972 - RNA, 19 nt, Human
cagccccaccccagcaaaa

SEQ ID NO: 722973 - RNA, 18 nt, Human
cagugggugauggcaggc

SEQ ID NO: 722974 - RNA, 22 nt, Human
cagugggugauggcaggcuucc

SEQ ID NO: 722975 - RNA, 31 nt, Human
caucgcaggucuuacacacacacacacagug

SEQ ID NO: 722976 - RNA, 21 nt, Human
ccacaaaaaaugccaagggca

SEQ ID NO: 722977 - RNA, 21 nt, Human
ccagcaaaauccucgcuuccu

SEQ ID NO: 722978 - RNA, 18 nt, Human
ccagcuacaaaaacucaa

SEQ ID NO: 722979 - RNA, 19 nt, Human
cccccgggggauccccgcc

SEQ ID NO: 722980 - RNA, 22 nt, Human
ccccuuucuauugccucagucc

SEQ ID NO: 722981 - RNA, 18 nt, Human
cccgaugacuuuacauuu

SEQ ID NO: 722982 - RNA, 26 nt, Human
cccuaaaaauaagcauuacagaaaaa

SEQ ID NO: 722983 - RNA, 19 nt, Human
cccuccauccaucaaggca

SEQ ID NO: 722984 - RNA, 21 nt, Human
cccuucuuccucauuacgccc

SEQ ID NO: 722985 - RNA, 21 nt, Human
ccgcccaccgcccgcggcagc

SEQ ID NO: 722986 - RNA, 19 nt, Human
ccgccgagggcagcacagg

SEQ ID NO: 722987 - RNA, 18 nt, Human
ccuagagggagggguggc

SEQ ID NO: 722988 - RNA, 20 nt, Human
ccuaugagcccuacaaacac

SEQ ID NO: 722989 - RNA, 22 nt, Human
ccucugggaaguuacuuaaccu

SEQ ID NO: 722990 - RNA, 21 nt, Human
ccuuagaguuuuacccagccu

SEQ ID NO: 722991 - RNA, 20 nt, Human
cgccgagggcagcacaggug

SEQ ID NO: 722992 - RNA, 24 nt, Human
cgggaguacugcuuuguggguggg

SEQ ID NO: 722993 - RNA, 19 nt, Human
cgugcacacacaggcugca

SEQ ID NO: 722994 - RNA, 19 nt, Human
cuacccugaaccagucaac

SEQ ID NO: 722995 - RNA, 23 nt, Human
cuauacugcuaaacaacaccgag

SEQ ID NO: 722996 - RNA, 18 nt, Human
cuauucuaaaagaguggg

SEQ ID NO: 722997 - RNA, 25 nt, Human
cuccccuuucuauugccucaguccu

SEQ ID NO: 722998 - RNA, 22 nt, Human
cuccguaccuccacagauggcc

SEQ ID NO: 722999 - RNA, 22 nt, Human
cucuccuccccgcgcacaaaag

SEQ ID NO: 723000 - RNA, 18 nt, Human
cucugcgcggggccagcc

SEQ ID NO: 723001 - RNA, 24 nt, Human
cucuuccccgggacguagccccag

SEQ ID NO: 723002 - RNA, 19 nt, Human
cugaaugucauauaguuca

SEQ ID NO: 723003 - RNA, 21 nt, Human
cugcuggcccugagcaucacu

SEQ ID NO: 723004 - RNA, 19 nt, Human
cuggucaccugauaaggca

SEQ ID NO: 723005 - RNA, 19 nt, Human
cuguccagagcucuuagcg

SEQ ID NO: 723006 - RNA, 21 nt, Human
cuucuuggccaugaccucugg

SEQ ID NO: 723007 - RNA, 24 nt, Human
gaagaaguccacuguaaaccuaga

SEQ ID NO: 723008 - RNA, 21 nt, Human
gaauauauacacaauugcuga

SEQ ID NO: 723009 - RNA, 22 nt, Human
gacagaaaaggaggaggggcag

SEQ ID NO: 723010 - RNA, 21 nt, Human
gcaaacaaccauaacccuggu

SEQ ID NO: 723011 - RNA, 20 nt, Human
gcaagcuuccuuugauguuu

SEQ ID NO: 723012 - RNA, 20 nt, Human
gccucaggaccaagggugga

SEQ ID NO: 723013 - RNA, 24 nt, Human
gcgacacugaagcucgccccaugc

SEQ ID NO: 723014 - RNA, 21 nt, Human
gcucacacuugguaccacaac

SEQ ID NO: 723015 - RNA, 20 nt, Human
guggaaagcagaacucuaca

SEQ ID NO: 723016 - RNA, 18 nt, Human
guuggucauuccaucucg

SEQ ID NO: 723017 - RNA, 21 nt, Human
guuuuucucuguccagagcuc

SEQ ID NO: 723018 - RNA, 23 nt, Human
uaaaagagcaaaguuuuuguuuu

SEQ ID NO: 723019 - RNA, 19 nt, Human
uaagacagaaaucaucccu

SEQ ID NO: 723020 - RNA, 22 nt, Human
uaagauggucccaugaggauga

SEQ ID NO: 723021 - RNA, 18 nt, Human
uacaagagaaaccguguu

SEQ ID NO: 723022 - RNA, 18 nt, Human
uacaguuuaaaaaauuug

SEQ ID NO: 723023 - RNA, 20 nt, Human
uacccugaagcauaaagaaa

SEQ ID NO: 723024 - RNA, 19 nt, Human
uaccuugcuucuucaucag

SEQ ID NO: 723025 - RNA, 19 nt, Human
uagaaauaccuugucaacu

SEQ ID NO: 723026 - RNA, 19 nt, Human
uagcacagaauuaaaaacc

SEQ ID NO: 723027 - RNA, 23 nt, Human
uaugccagaaauucacauuugca

SEQ ID NO: 723028 - RNA, 22 nt, Human
uauuucagaguuuuggaauaua

SEQ ID NO: 723029 - RNA, 18 nt, Human
uauuuuggaaaguaccug

SEQ ID NO: 723030 - RNA, 23 nt, Human
ucacacuugguaccacaacacug

SEQ ID NO: 723031 - RNA, 18 nt, Human
ucacagcggcuaagacag

SEQ ID NO: 723032 - RNA, 23 nt, Human
ucacauuugcaugcaaacaacca

SEQ ID NO: 723033 - RNA, 18 nt, Human
ucaguuaaaagagcaaag

SEQ ID NO: 723034 - RNA, 23 nt, Human
ucaguucuuggagccacuacuuc

SEQ ID NO: 723035 - RNA, 21 nt, Human
uccaaacgcacagccuacaga

SEQ ID NO: 723036 - RNA, 21 nt, Human
uccgggagaugacaaaagcac

SEQ ID NO: 723037 - RNA, 24 nt, Human
uccuccucgucgucaucgcagguc

SEQ ID NO: 723038 - RNA, 19 nt, Human
ucgcgcgcgcaccugcugu

SEQ ID NO: 723039 - RNA, 19 nt, Human
ucuaaucuucccacaaaaa

SEQ ID NO: 723040 - RNA, 28 nt, Human
ucucugggccuucagagggccgacuuuc

SEQ ID NO: 723041 - RNA, 23 nt, Human
ugaaaacauaagacccacuuuuc

SEQ ID NO: 723042 - RNA, 21 nt, Human
ugaagagaguuuggugcaagc

SEQ ID NO: 723043 - RNA, 22 nt, Human
ugaagugaauacaucuauguca

SEQ ID NO: 723044 - RNA, 20 nt, Human
ugacaaaagcaccuaaaagc

SEQ ID NO: 723045 - RNA, 23 nt, Human
ugacaaaagcaccuaaaagcuga

SEQ ID NO: 723046 - RNA, 23 nt, Human
ugacaagacaggacucacuuucu

SEQ ID NO: 723047 - RNA, 20 nt, Human
ugagauugugccagcuacaa

SEQ ID NO: 723048 - RNA, 23 nt, Human
ugcaacaggauauuguuuaggug

SEQ ID NO: 723049 - RNA, 21 nt, Human
ugcaugcaaacaaccauaacc

SEQ ID NO: 723050 - RNA, 24 nt, Human
ugccaagggcaccaccaaggccac

SEQ ID NO: 723051 - RNA, 20 nt, Human
uggaaggaucagagaggcca

SEQ ID NO: 723052 - RNA, 19 nt, Human
uggggcgugcacacacagg

SEQ ID NO: 723053 - RNA, 19 nt, Human
ugggugauggcaggcuucu

SEQ ID NO: 723054 - RNA, 19 nt, Human
uguaaaccagcaacuaaag

SEQ ID NO: 723055 - RNA, 19 nt, Human
uguaaugccauggguauga

SEQ ID NO: 723056 - RNA, 19 nt, Human
uguuucauucaccuucucu

SEQ ID NO: 723057 - RNA, 19 nt, Human
uuaauugucuuucauguuu

SEQ ID NO: 723058 - RNA, 22 nt, Human
uuagagaaagaaaagauaaugu

SEQ ID NO: 723059 - RNA, 19 nt, Human
uucacauuugcaugcaaac

SEQ ID NO: 723060 - RNA, 22 nt, Human
uucaucagcaaugcauuccuag

SEQ ID NO: 723061 - RNA, 20 nt, Human
uuccccgggacguagcccca

SEQ ID NO: 723062 - RNA, 22 nt, Human
uuccuccucgucgucaucgcua

SEQ ID NO: 723063 - RNA, 18 nt, Human
uucuagggccuguuuuuc

SEQ ID NO: 723064 - RNA, 22 nt, Human
uucucuggcacuccugcccugg

SEQ ID NO: 723065 - RNA, 25 nt, Human
uucuuaccuugcugcauguuuuuca

SEQ ID NO: 723066 - RNA, 21 nt, Human
uuguucaucuuuaauaugaga

SEQ ID NO: 723067 - RNA, 24 nt, Human
uuguuccuccucgucgucaucgca

SEQ ID NO: 723068 - RNA, 22 nt, Human
uuuaaguauauaccuuagaguu

SEQ ID NO: 723069 - RNA, 19 nt, Human
uuucuuaccuugcugcaug

SEQ ID NO: 723070 - RNA, 18 nt, Human
aaaaaaggcagacucaga

SEQ ID NO: 723071 - RNA, 18 nt, Human
aaaaaucuugguucagag

SEQ ID NO: 723072 - RNA, 20 nt, Human
aaaaggaagcagcuuccuaa

SEQ ID NO: 723073 - RNA, 24 nt, Human
aaagaacuggccaucuccagacaa

SEQ ID NO: 723074 - RNA, 26 nt, Human
aaagaacuggccaucuccagacaaac

SEQ ID NO: 723075 - RNA, 20 nt, Human
aaagaagcgcacucccuucc

SEQ ID NO: 723076 - RNA, 22 nt, Human
aaaggccaaggcagaggaggug

SEQ ID NO: 723077 - RNA, 18 nt, Human
aacaggacaacccggguc

SEQ ID NO: 723078 - RNA, 23 nt, Human
aacuugucucucaaacaggagau

SEQ ID NO: 723079 - RNA, 23 nt, Human
aaggcagacucagaagggcaagc

SEQ ID NO: 723080 - RNA, 22 nt, Human
aagggugcugcaguaacugaag

SEQ ID NO: 723081 - RNA, 25 nt, Human
aagggugcugcaguaacugaagaag

SEQ ID NO: 723082 - RNA, 22 nt, Human
acacaacagcuccucaaggucu

SEQ ID NO: 723083 - RNA, 23 nt, Human
acagguagcacuugccccaaagc

SEQ ID NO: 723084 - RNA, 21 nt, Human
acauaagcagauaauugagac

SEQ ID NO: 723085 - RNA, 23 nt, Human
accacagagauucacugccagac

SEQ ID NO: 723086 - RNA, 23 nt, Human
accaccccccaccgccuccccug

SEQ ID NO: 723087 - RNA, 19 nt, Human
accccgccuuucaaggcua

SEQ ID NO: 723088 - RNA, 23 nt, Human
acccgcuccccccaccacccccc

SEQ ID NO: 723089 - RNA, 30 nt, Human
acccgcuccccccaccaccccccaccgccc

SEQ ID NO: 723090 - RNA, 23 nt, Human
acuuuaguccuucuuggacagcc

SEQ ID NO: 723091 - RNA, 23 nt, Human
agaaagacuggcccaaccacaga

SEQ ID NO: 723092 - RNA, 21 nt, Human
agacaaacacacauagauucc

SEQ ID NO: 723093 - RNA, 19 nt, Human
agacucagaagggcaagca

SEQ ID NO: 723094 - RNA, 21 nt, Human
agaggaggugagggcugggag

SEQ ID NO: 723095 - RNA, 18 nt, Human
agaugccugcaccugaaa

SEQ ID NO: 723096 - RNA, 19 nt, Human
agcaaggggcucacagcag

SEQ ID NO: 723097 - RNA, 18 nt, Human
agcacagcucaggacugc

SEQ ID NO: 723098 - RNA, 18 nt, Human
agcacccgcuccccccac

SEQ ID NO: 723099 - RNA, 19 nt, Human
agcuacuaaagcacgucca

SEQ ID NO: 723100 - RNA, 21 nt, Human
agcucuguugcagcagaacaa

SEQ ID NO: 723101 - RNA, 20 nt, Human
aggagcgcaaacaggacugc

SEQ ID NO: 723102 - RNA, 21 nt, Human
aggcaaguaggguccaaucca

SEQ ID NO: 723103 - RNA, 18 nt, Human
aggcagaggaggugaggg

SEQ ID NO: 723104 - RNA, 19 nt, Human
aggcagaggaggugagggc

SEQ ID NO: 723105 - RNA, 19 nt, Human
aggcagccaggaggaaggc

SEQ ID NO: 723106 - RNA, 25 nt, Human
aggcugagauucucuugggccagaa

SEQ ID NO: 723107 - RNA, 21 nt, Human
agggaaauccacaggguuucu

SEQ ID NO: 723108 - RNA, 24 nt, Human
agggugcugcaguaacugaagaag

SEQ ID NO: 723109 - RNA, 24 nt, Human
aggucugcuggcuuugccgggaug

SEQ ID NO: 723110 - RNA, 20 nt, Human
agugagcugaagggcccggg

SEQ ID NO: 723111 - RNA, 21 nt, Human
agugccucuuuuaaauggaga

SEQ ID NO: 723112 - RNA, 21 nt, Human
aucccaaauuaagggcugcaa

SEQ ID NO: 723113 - RNA, 22 nt, Human
auggaugggaccaauaggcuga

SEQ ID NO: 723114 - RNA, 25 nt, Human
caaaaaaggcagacucagaagggca

SEQ ID NO: 723115 - RNA, 19 nt, Human
caaacccagaaucuucuga

SEQ ID NO: 723116 - RNA, 19 nt, Human
caacaggcagcucugugcu

SEQ ID NO: 723117 - RNA, 19 nt, Human
caacccgggucaagaacca

SEQ ID NO: 723118 - RNA, 20 nt, Human
caacuggaaaaccucgaaug

SEQ ID NO: 723119 - RNA, 22 nt, Human
caagcagacgccagagaaggac

SEQ ID NO: 723120 - RNA, 21 nt, Human
caaggggcucacagcagcagc

SEQ ID NO: 723121 - RNA, 19 nt, Human
caaguaggguccaauccaa

SEQ ID NO: 723122 - RNA, 23 nt, Human
cacaaacuguagggccagccgac

SEQ ID NO: 723123 - RNA, 18 nt, Human
cacaccuuuucucaaaca

SEQ ID NO: 723124 - RNA, 19 nt, Human
cacagagauucacugccag

SEQ ID NO: 723125 - RNA, 23 nt, Human
cacagcucaggacugcauccuuu

SEQ ID NO: 723126 - RNA, 22 nt, Human
caccagagacacugacuucagc

SEQ ID NO: 723127 - RNA, 22 nt, Human
cacccgcuccccccaccacccc

SEQ ID NO: 723128 - RNA, 25 nt, Human
cacccgcuccccccaccacccccca

SEQ ID NO: 723129 - RNA, 21 nt, Human
caccugcagcuccgccagcuu

SEQ ID NO: 723130 - RNA, 18 nt, Human
caccuuuucucuccccag

SEQ ID NO: 723131 - RNA, 18 nt, Human
cacuucagugagcugaag

SEQ ID NO: 723132 - RNA, 24 nt, Human
cagacaaacacacauagauuccaa

SEQ ID NO: 723133 - RNA, 21 nt, Human
cagagaaaagaagcgcacucc

SEQ ID NO: 723134 - RNA, 20 nt, Human
cagagcugcagagcuuucuu

SEQ ID NO: 723135 - RNA, 23 nt, Human
cagagcuuucuuuaggccccaca

SEQ ID NO: 723136 - RNA, 20 nt, Human
cagcagaacaaagggauuuc

SEQ ID NO: 723137 - RNA, 33 nt, Human
cagcgcacaggaacaugcacacgugugugcagu

SEQ ID NO: 723138 - RNA, 21 nt, Human
cagcgugguguucaaaggcuu

SEQ ID NO: 723139 - RNA, 23 nt, Human
caggaccaaaacuucucaucuga

SEQ ID NO: 723140 - RNA, 19 nt, Human
ccaaccuagggcagagcca

SEQ ID NO: 723141 - RNA, 21 nt, Human
ccacagagauucacugccaga

SEQ ID NO: 723142 - RNA, 21 nt, Human
ccaccaccccccaccgccucc

SEQ ID NO: 723143 - RNA, 23 nt, Human
ccaccaccccccaccgccucccc

SEQ ID NO: 723144 - RNA, 23 nt, Human
ccaccgccuccccuguaucccug

SEQ ID NO: 723145 - RNA, 19 nt, Human
ccaucuccagacaaacaca

SEQ ID NO: 723146 - RNA, 19 nt, Human
cccacaugucugcauaucc

SEQ ID NO: 723147 - RNA, 23 nt, Human
cccaccgccuccccuguaucccc

SEQ ID NO: 723148 - RNA, 23 nt, Human
cccaccgccuccccuguaucccu

SEQ ID NO: 723149 - RNA, 21 nt, Human
ccccacaugucugcauaucca

SEQ ID NO: 723150 - RNA, 27 nt, Human
ccccaccaccccccaccgccuccccug

SEQ ID NO: 723151 - RNA, 24 nt, Human
ccccaccgccuccccuguaucccu

SEQ ID NO: 723152 - RNA, 22 nt, Human
cccccaccaccccccaccgccu

SEQ ID NO: 723153 - RNA, 24 nt, Human
cccccaccaccccccaccgccucc

SEQ ID NO: 723154 - RNA, 20 nt, Human
ccccccaccaccccccaccg

SEQ ID NO: 723155 - RNA, 23 nt, Human
ccccccaccgccuccccuguauc

SEQ ID NO: 723156 - RNA, 19 nt, Human
cccugcugcaaagacccuc

SEQ ID NO: 723157 - RNA, 20 nt, Human
ccgcuccccccaccaccccc

SEQ ID NO: 723158 - RNA, 20 nt, Human
ccucaacacaacagcuccuc

SEQ ID NO: 723159 - RNA, 18 nt, Human
ccuccucccuuuucuucc

SEQ ID NO: 723160 - RNA, 19 nt, Human
ccucggggaagcccccagg

SEQ ID NO: 723161 - RNA, 18 nt, Human
ccugcagcuccgccagcu

SEQ ID NO: 723162 - RNA, 23 nt, Human
ccuggccaccuuuucucucccca

SEQ ID NO: 723163 - RNA, 19 nt, Human
ccuggccccacugcccaag

SEQ ID NO: 723164 - RNA, 20 nt, Human
ccuggccccacugcccaagg

SEQ ID NO: 723165 - RNA, 22 nt, Human
cgacuucucagagaugcauccu

SEQ ID NO: 723166 - RNA, 20 nt, Human
cgggaugagcaaagagcaag

SEQ ID NO: 723167 - RNA, 23 nt, Human
cgggaugagcaaagagcaagggg

SEQ ID NO: 723168 - RNA, 23 nt, Human
cuaggauccuggccaccuuuucu

SEQ ID NO: 723169 - RNA, 21 nt, Human
cucaaggaaggaaaagccaaa

SEQ ID NO: 723170 - RNA, 22 nt, Human
cucaaggaaggaaaagccaaac

SEQ ID NO: 723171 - RNA, 23 nt, Human
cucacagcagcagcugacgauga

SEQ ID NO: 723172 - RNA, 18 nt, Human
cuccccccaccacccccc

SEQ ID NO: 723173 - RNA, 21 nt, Human
cuccccccaccaccccccacc

SEQ ID NO: 723174 - RNA, 23 nt, Human
cuccccccaccaccccccaccgc

SEQ ID NO: 723175 - RNA, 25 nt, Human
cuccccccaccaccccccaccgccu

SEQ ID NO: 723176 - RNA, 24 nt, Human
cucggggaagcccccaggcaggcc

SEQ ID NO: 723177 - RNA, 20 nt, Human
cucucaggccacguguuccu

SEQ ID NO: 723178 - RNA, 22 nt, Human
cucugauuugguuugacuggcu

SEQ ID NO: 723179 - RNA, 21 nt, Human
cucugcagccagaggcaccuc

SEQ ID NO: 723180 - RNA, 22 nt, Human
cucuggcagcucuagugccucu

SEQ ID NO: 723181 - RNA, 28 nt, Human
cucugugcuugugagcacccgcuccccc

SEQ ID NO: 723182 - RNA, 24 nt, Human
cucuugcccguguuagccucacag

SEQ ID NO: 723183 - RNA, 22 nt, Human
cugaagagacugaagggaagca

SEQ ID NO: 723184 - RNA, 23 nt, Human
cugcauauccauccugugguccu

SEQ ID NO: 723185 - RNA, 21 nt, Human
cugccccugcugcaaagaccc

SEQ ID NO: 723186 - RNA, 21 nt, Human
cugccccugcugcaaagaccc

SEQ ID NO: 723187 - RNA, 19 nt, Human
cuggagcuuucugggcugc

SEQ ID NO: 723188 - RNA, 22 nt, Human
cuggagcuuucugggcugccug

SEQ ID NO: 723189 - RNA, 19 nt, Human
cuggcagcucuagugccuc

SEQ ID NO: 723190 - RNA, 18 nt, Human
cuggccaccaaggauucc

SEQ ID NO: 723191 - RNA, 23 nt, Human
cuguccacaaacuguagggccag

SEQ ID NO: 723192 - RNA, 19 nt, Human
gacaguggaggaguccugg

SEQ ID NO: 723193 - RNA, 24 nt, Human
gacuaccuuccaaagacuccagga

SEQ ID NO: 723194 - RNA, 21 nt, Human
gacuauacaaacaggacaacu

SEQ ID NO: 723195 - RNA, 22 nt, Human
gacuuaagaaaggccaaggcag

SEQ ID NO: 723196 - RNA, 21 nt, Human
gagaacgguagaaagacuggc

SEQ ID NO: 723197 - RNA, 18 nt, Human
gagacugaagggaagcag

SEQ ID NO: 723198 - RNA, 24 nt, Human
gagagggugguguggcuggcaaca

SEQ ID NO: 723199 - RNA, 20 nt, Human
gagauucucuugggccagaa

SEQ ID NO: 723200 - RNA, 21 nt, Human
gagcaaggggcucacagcagc

SEQ ID NO: 723201 - RNA, 22 nt, Human
gagcugcagagcuuucuuuagg

SEQ ID NO: 723202 - RNA, 20 nt, Human
gcagagcuuucuuuaggccc

SEQ ID NO: 723203 - RNA, 22 nt, Human
gcagagcuuucuuuaggcccca

SEQ ID NO: 723204 - RNA, 24 nt, Human
gcagagcuuucuuuaggccccaca

SEQ ID NO: 723205 - RNA, 24 nt, Human
gcaucgccaucacugcuguugccc

SEQ ID NO: 723206 - RNA, 24 nt, Human
gccaccuuuucucuccccagacuc

SEQ ID NO: 723207 - RNA, 23 nt, Human
gcccguacacuucagugagcuga

SEQ ID NO: 723208 - RNA, 20 nt, Human
gccucuggagcuuucugggc

SEQ ID NO: 723209 - RNA, 19 nt, Human
gcuccccccaccacccccc

SEQ ID NO: 723210 - RNA, 21 nt, Human
gcuccccccaccaccccccac

SEQ ID NO: 723211 - RNA, 20 nt, Human
gcugcaguaacugaagaagg

SEQ ID NO: 723212 - RNA, 23 nt, Human
gcuugggagaagagacaccugga

SEQ ID NO: 723213 - RNA, 23 nt, Human
ggaaaacagguuuauuccacagg

SEQ ID NO: 723214 - RNA, 24 nt, Human
ggaaaagccaaacuuuagcccaaa

SEQ ID NO: 723215 - RNA, 23 nt, Human
ggaaacagguauugccaaccuuc

SEQ ID NO: 723216 - RNA, 20 nt, Human
ggaaauccacaggguuucug

SEQ ID NO: 723217 - RNA, 21 nt, Human
ggaaggccucaaacagaggga

SEQ ID NO: 723218 - RNA, 19 nt, Human
ggagcucgguguagaaagu

SEQ ID NO: 723219 - RNA, 19 nt, Human
ggaggaguccugggcucug

SEQ ID NO: 723220 - RNA, 18 nt, Human
ggaugagcaaagagcaag

SEQ ID NO: 723221 - RNA, 22 nt, Human
ggcagacucagaagggcaagca

SEQ ID NO: 723222 - RNA, 25 nt, Human
ggcaucgccaucacugcuguugccc

SEQ ID NO: 723223 - RNA, 23 nt, Human
ggcucccaggcagccaggaggaa

SEQ ID NO: 723224 - RNA, 18 nt, Human
gggaaggaaggaaaagag

SEQ ID NO: 723225 - RNA, 20 nt, Human
gggccagaagggcugccagu

SEQ ID NO: 723226 - RNA, 22 nt, Human
gggcuuucuuuccaauguaggg

SEQ ID NO: 723227 - RNA, 19 nt, Human
gguuagccuuucuuucccu

SEQ ID NO: 723228 - RNA, 20 nt, Human
gugguccugaagagacugaa

SEQ ID NO: 723229 - RNA, 24 nt, Human
guuuuggugguguuuuucuguugg

SEQ ID NO: 723230 - RNA, 19 nt, Human
uaaaguaaagugccucuuu

SEQ ID NO: 723231 - RNA, 19 nt, Human
uaagaaaggccaaggcaga

SEQ ID NO: 723232 - RNA, 19 nt, Human
uaagacagagaaaagaagc

SEQ ID NO: 723233 - RNA, 20 nt, Human
uaagaggagcuacuaaagca

SEQ ID NO: 723234 - RNA, 18 nt, Human
uacagucuuucuccucuc

SEQ ID NO: 723235 - RNA, 19 nt, Human
uagaaagugggaggucauc

SEQ ID NO: 723236 - RNA, 21 nt, Human
uagagaaacauggcacuugcg

SEQ ID NO: 723237 - RNA, 25 nt, Human
uagggcagagccagagaagucccac

SEQ ID NO: 723238 - RNA, 19 nt, Human
uagggccagccgacuucuc

SEQ ID NO: 723239 - RNA, 22 nt, Human
uauacacauacccacagcuuuc

SEQ ID NO: 723240 - RNA, 18 nt, Human
uauuguggcuuguuugua

SEQ ID NO: 723241 - RNA, 22 nt, Human
ucaaauagguaaaaucgaguca

SEQ ID NO: 723242 - RNA, 23 nt, Human
ucacugcuguugcccagcucuca

SEQ ID NO: 723243 - RNA, 23 nt, Human
ucagaugccugcaccugaaaacc

SEQ ID NO: 723244 - RNA, 24 nt, Human
uccaaccuagggcagagccagaga

SEQ ID NO: 723245 - RNA, 24 nt, Human
uccacagguagcacuugccccaaa

SEQ ID NO: 723246 - RNA, 20 nt, Human
uccaccaaccagaugugacu

SEQ ID NO: 723247 - RNA, 18 nt, Human
uccagacaaacacacaua

SEQ ID NO: 723248 - RNA, 23 nt, Human
uccagaggcccaauuccaaagcc

SEQ ID NO: 723249 - RNA, 21 nt, Human
uccauccugugguccugaaga

SEQ ID NO: 723250 - RNA, 18 nt, Human
uccaucugccugcugccu

SEQ ID NO: 723251 - RNA, 18 nt, Human
ucccauucucucacccac

SEQ ID NO: 723252 - RNA, 18 nt, Human
uccccccaccacccccca

SEQ ID NO: 723253 - RNA, 21 nt, Human
uccccccaccaccccccaccg

SEQ ID NO: 723254 - RNA, 19 nt, Human
uccugggcucuggcagcuc

SEQ ID NO: 723255 - RNA, 20 nt, Human
uccuuccaugacaagcuggg

SEQ ID NO: 723256 - RNA, 23 nt, Human
ucgccaucacugcuguugcccag

SEQ ID NO: 723257 - RNA, 19 nt, Human
ucuauccgucgaccccgcc

SEQ ID NO: 723258 - RNA, 25 nt, Human
ucuccagacaaacacacauagauuc

SEQ ID NO: 723259 - RNA, 21 nt, Human
ucucugauuugguuugacugg

SEQ ID NO: 723260 - RNA, 23 nt, Human
ucucuggccaccaaggauuccuc

SEQ ID NO: 723261 - RNA, 18 nt, Human
ucucugggggaacuuguc

SEQ ID NO: 723262 - RNA, 19 nt, Human
ucuguaaaagcccucuagg

SEQ ID NO: 723263 - RNA, 21 nt, Human
ucuguugcagcagaacaaagg

SEQ ID NO: 723264 - RNA, 18 nt, Human
ugaagggaagcaggaggg

SEQ ID NO: 723265 - RNA, 24 nt, Human
ugaagggaagcaggagggaaaagg

SEQ ID NO: 723266 - RNA, 19 nt, Human
ugaccccacaugucugcau

SEQ ID NO: 723267 - RNA, 22 nt, Human
ugaccuauucauuauucccuca

SEQ ID NO: 723268 - RNA, 24 nt, Human
ugaccuuuaaccucggggaagccc

SEQ ID NO: 723269 - RNA, 18 nt, Human
ugacucaaggaaggaaaa

SEQ ID NO: 723270 - RNA, 21 nt, Human
ugacucccuuuucuaagacag

SEQ ID NO: 723271 - RNA, 20 nt, Human
ugagcgugacuuaagaaagg

SEQ ID NO: 723272 - RNA, 24 nt, Human
ugagggcugggagugaugaguccc

SEQ ID NO: 723273 - RNA, 21 nt, Human
ugagguagaaagaacuggcca

SEQ ID NO: 723274 - RNA, 24 nt, Human
ugauggggucuguuugcccagguu

SEQ ID NO: 723275 - RNA, 21 nt, Human
ugcaguaggccagaaucucca

SEQ ID NO: 723276 - RNA, 23 nt, Human
ugccugauggggucuguuugccc

SEQ ID NO: 723277 - RNA, 23 nt, Human
ugccugcaccugaaaacccuucu

SEQ ID NO: 723278 - RNA, 22 nt, Human
ugcgugaaagguccuauccuug

SEQ ID NO: 723279 - RNA, 24 nt, Human
ugcucaaaucguccacaucucgcc

SEQ ID NO: 723280 - RNA, 21 nt, Human
uggaaaacagguuuauuccac

SEQ ID NO: 723281 - RNA, 19 nt, Human
uggaaugggaaggaaggaa

SEQ ID NO: 723282 - RNA, 18 nt, Human
ugggaagagcucuguugc

SEQ ID NO: 723283 - RNA, 22 nt, Human
ugggaagagcucuguugcagca

SEQ ID NO: 723284 - RNA, 25 nt, Human
ugggaagagcucuguugcagcagaa

SEQ ID NO: 723285 - RNA, 21 nt, Human
ugggagagggugguguggcug

SEQ ID NO: 723286 - RNA, 22 nt, Human
ugggagagggugguguggcugg

SEQ ID NO: 723287 - RNA, 21 nt, Human
ugggagagggugguguggcuu

SEQ ID NO: 723288 - RNA, 20 nt, Human
ugggagugaugagucccuug

SEQ ID NO: 723289 - RNA, 24 nt, Human
uggggaggaguagggcuuucuuuc

SEQ ID NO: 723290 - RNA, 21 nt, Human
ugguguggcuggcaacacagu

SEQ ID NO: 723291 - RNA, 22 nt, Human
ugguguuuuucuguuggagacu

SEQ ID NO: 723292 - RNA, 21 nt, Human
ugucuauaagaaugccacagc

SEQ ID NO: 723293 - RNA, 18 nt, Human
ugugguccugaagagacu

SEQ ID NO: 723294 - RNA, 21 nt, Human
uguucagaaaugcuugggcgu

SEQ ID NO: 723295 - RNA, 24 nt, Human
uguuccagaaggcgcucacacucc

SEQ ID NO: 723296 - RNA, 24 nt, Human
uuaguccuucuuggacagccgugu

SEQ ID NO: 723297 - RNA, 19 nt, Human
uucacugccagacucugcc

SEQ ID NO: 723298 - RNA, 23 nt, Human
uugaagucacugaguaugacaca

SEQ ID NO: 723299 - RNA, 23 nt, Human
uugcagcagaacaaagggauuuc

SEQ ID NO: 723300 - RNA, 18 nt, Human
uugccccaaagccaucuc

SEQ ID NO: 723301 - RNA, 21 nt, Human
uugcccgggaaggcaaguagg

SEQ ID NO: 723302 - RNA, 22 nt, Human
aaaagaaacuggauauuuauuu

SEQ ID NO: 723303 - RNA, 25 nt, Human
aaaaggaaaaaaaaaugugaaaaaa

SEQ ID NO: 723304 - RNA, 19 nt, Human
aaacuucucuugaguugag

SEQ ID NO: 723305 - RNA, 18 nt, Human
aaaggaacuugaacucca

SEQ ID NO: 723306 - RNA, 23 nt, Human
aaaggggaucaucccaggaaggg

SEQ ID NO: 723307 - RNA, 19 nt, Human
aacaaaagucauggcuuua

SEQ ID NO: 723308 - RNA, 19 nt, Human
aacaagcaccaucacucuc

SEQ ID NO: 723309 - RNA, 21 nt, Human
aaccaagguaauauguccuuc

SEQ ID NO: 723310 - RNA, 28 nt, Human
aagcaaacaaaagucauggcuuuaacaa

SEQ ID NO: 723311 - RNA, 24 nt, Human
aaggaaaaaaaaaugugaaaaaaa

SEQ ID NO: 723312 - RNA, 19 nt, Human
aagggaaagggaaaagggg

SEQ ID NO: 723313 - RNA, 21 nt, Human
acaaaacagaacaguacagaa

SEQ ID NO: 723314 - RNA, 24 nt, Human
acaaaacagaacaguacagaacuc

SEQ ID NO: 723315 - RNA, 20 nt, Human
acacauuuuuuuuuccuuug

SEQ ID NO: 723316 - RNA, 20 nt, Human
acagaggagagaagccugaa

SEQ ID NO: 723317 - RNA, 22 nt, Human
acaugugaaucaugaguugaau

SEQ ID NO: 723318 - RNA, 26 nt, Human
acccuggcgaccgcccgcucucgcug

SEQ ID NO: 723319 - RNA, 18 nt, Human
agaacaguacagaacucg

SEQ ID NO: 723320 - RNA, 22 nt, Human
agaucaugcuccugucagcgcg

SEQ ID NO: 723321 - RNA, 22 nt, Human
agauggagaggaaaacaaagag

SEQ ID NO: 723322 - RNA, 24 nt, Human
agccucauccuucaugcuaccuca

SEQ ID NO: 723323 - RNA, 23 nt, Human
aggaaaaaaaaaugugaaaaaaa

SEQ ID NO: 723324 - RNA, 21 nt, Human
aggaaaaggaaaaaaaaaugu

SEQ ID NO: 723325 - RNA, 19 nt, Human
aggaaaaugucaggcgagg

SEQ ID NO: 723326 - RNA, 21 nt, Human
aguacuauguugcccuugauc

SEQ ID NO: 723327 - RNA, 21 nt, Human
auaagacaaugggggcugaag

SEQ ID NO: 723328 - RNA, 24 nt, Human
auacacagaccuugagacagcugu

SEQ ID NO: 723329 - RNA, 18 nt, Human
auagaaauggaaguaaac

SEQ ID NO: 723330 - RNA, 25 nt, Human
auauguccuucuucccuuucuccag

SEQ ID NO: 723331 - RNA, 24 nt, Human
auauguuuucacugaaugcuaaaa

SEQ ID NO: 723332 - RNA, 19 nt, Human
aucgcuuuauccucccgcu

SEQ ID NO: 723333 - RNA, 18 nt, Human
aucuuggcagcccuggcc

SEQ ID NO: 723334 - RNA, 21 nt, Human
auugaaaacagaggagagaag

SEQ ID NO: 723335 - RNA, 24 nt, Human
caaguguagcuuaacuugcauuca

SEQ ID NO: 723336 - RNA, 19 nt, Human
cacugucacggcggagggg

SEQ ID NO: 723337 - RNA, 19 nt, Human
cagcagguguuuucuugcu

SEQ ID NO: 723338 - RNA, 22 nt, Human
cagcagguguuuucuugcuguu

SEQ ID NO: 723339 - RNA, 21 nt, Human
cagcgcgcagauuagagcugg

SEQ ID NO: 723340 - RNA, 21 nt, Human
cagcuccuaguucuggaguug

SEQ ID NO: 723341 - RNA, 24 nt, Human
cagcuuccuaguguggucccgaug

SEQ ID NO: 723342 - RNA, 27 nt, Human
cauugcauugcaucagcagcagguguu

SEQ ID NO: 723343 - RNA, 19 nt, Human
ccacaugugaaucaugagu

SEQ ID NO: 723344 - RNA, 21 nt, Human
ccaggaaaaugucaggcgagg

SEQ ID NO: 723345 - RNA, 18 nt, Human
cccuccuaaacuucucuu

SEQ ID NO: 723346 - RNA, 18 nt, Human
cccuggccugggcacaga

SEQ ID NO: 723347 - RNA, 18 nt, Human
ccuggagugcuuaaugcu

SEQ ID NO: 723348 - RNA, 18 nt, Human
cgaggagggggccgguuc

SEQ ID NO: 723349 - RNA, 20 nt, Human
cgaggagggggccgguucgg

SEQ ID NO: 723350 - RNA, 19 nt, Human
cgcuuuauccucccgcuug

SEQ ID NO: 723351 - RNA, 22 nt, Human
cuaacaagcaccaucacucucu

SEQ ID NO: 723352 - RNA, 19 nt, Human
cucgcugcgcucuggcugc

SEQ ID NO: 723353 - RNA, 22 nt, Human
cugaaugcuaaaagaaacugga

SEQ ID NO: 723354 - RNA, 18 nt, Human
cugcagcuuccuagugug

SEQ ID NO: 723355 - RNA, 20 nt, Human
cugcgcucuggcugccgggu

SEQ ID NO: 723356 - RNA, 21 nt, Human
cuggcuggggaggggacccug

SEQ ID NO: 723357 - RNA, 18 nt, Human
cuugaacuccaugauuaa

SEQ ID NO: 723358 - RNA, 27 nt, Human
gaaaacagaggagagaagccgguaccc

SEQ ID NO: 723359 - RNA, 20 nt, Human
gacccuggcgaccgcccgcu

SEQ ID NO: 723360 - RNA, 22 nt, Human
gagccugcagcuguuuuucuga

SEQ ID NO: 723361 - RNA, 19 nt, Human
gaucuggccaccugcuuug

SEQ ID NO: 723362 - RNA, 19 nt, Human
gcuccuaguucuggaguug

SEQ ID NO: 723363 - RNA, 19 nt, Human
gcuuccuaguguggucccg

SEQ ID NO: 723364 - RNA, 24 nt, Human
ggacaugugcacaaguuuguccuu

SEQ ID NO: 723365 - RNA, 22 nt, Human
gggaaaaggggaucaucccagg

SEQ ID NO: 723366 - RNA, 18 nt, Human
gggaaagggaaaagggga

SEQ ID NO: 723367 - RNA, 22 nt, Human
ggugccccgagagagcggaggc

SEQ ID NO: 723368 - RNA, 18 nt, Human
gguuuauuucaaauguag

SEQ ID NO: 723369 - RNA, 22 nt, Human
guagauggagaggaaaacaaag

SEQ ID NO: 723370 - RNA, 21 nt, Human
uaacaagcaccaucacucucu

SEQ ID NO: 723371 - RNA, 18 nt, Human
uaacgcagcacacuucau

SEQ ID NO: 723372 - RNA, 21 nt, Human
uaagacaaugggggcugaagc

SEQ ID NO: 723373 - RNA, 19 nt, Human
uacacauuuuuuuuuccuu

SEQ ID NO: 723374 - RNA, 19 nt, Human
uaccaaaaucaaaggagag

SEQ ID NO: 723375 - RNA, 23 nt, Human
uagaucuuagaagaaggcaguuc

SEQ ID NO: 723376 - RNA, 24 nt, Human
uagggaugcucccccuccuaaacu

SEQ ID NO: 723377 - RNA, 20 nt, Human
uauuucaaauguaguugaga

SEQ ID NO: 723378 - RNA, 21 nt, Human
uauuucaaauguaguugagag

SEQ ID NO: 723379 - RNA, 20 nt, Human
ucagagucgcacgguguucc

SEQ ID NO: 723380 - RNA, 24 nt, Human
ucaugcacagcuuuugucaauccu

SEQ ID NO: 723381 - RNA, 22 nt, Human
ucccuaacaagcaccaucacuc

SEQ ID NO: 723382 - RNA, 25 nt, Human
ucccuucaaugauagaaauggaagu

SEQ ID NO: 723383 - RNA, 19 nt, Human
uccguaauagccacagccg

SEQ ID NO: 723384 - RNA, 18 nt, Human
uccucccgcuugcauccc

SEQ ID NO: 723385 - RNA, 22 nt, Human
ucgcuuuauccucccgcuugca

SEQ ID NO: 723386 - RNA, 20 nt, Human
ucggcgagugugugcgcgag

SEQ ID NO: 723387 - RNA, 19 nt, Human
ucucuugaguugagcccac

SEQ ID NO: 723388 - RNA, 26 nt, Human
ugaaaaaaaaauaucaaaguuuuaaa

SEQ ID NO: 723389 - RNA, 22 nt, Human
ugagacagcuguuuuuuaauau

SEQ ID NO: 723390 - RNA, 22 nt, Human
ugagcccacaauccccacaacc

SEQ ID NO: 723391 - RNA, 19 nt, Human
ugaguugagcccacaaucc

SEQ ID NO: 723392 - RNA, 24 nt, Human
ugcaaaggaacuugaacuccauga

SEQ ID NO: 723393 - RNA, 21 nt, Human
uggaaguaaacauuuauuacc

SEQ ID NO: 723394 - RNA, 19 nt, Human
uggcagcccuggccugggc

SEQ ID NO: 723395 - RNA, 20 nt, Human
uggcagcccuggccugggca

SEQ ID NO: 723396 - RNA, 18 nt, Human
ugucacuggccaggaaaa

SEQ ID NO: 723397 - RNA, 22 nt, Human
uguggcuagacuaaacaaaaca

SEQ ID NO: 723398 - RNA, 22 nt, Human
uguuaaucguuagaagugucau

SEQ ID NO: 723399 - RNA, 23 nt, Human
uuggguuuauuucaaauguaguu

SEQ ID NO: 723400 - RNA, 18 nt, Human
uuugcaccguaugucuag

SEQ ID NO: 723401 - RNA, 19 nt, Human
uuugcaccguaugucuagg

SEQ ID NO: 723402 - RNA, 22 nt, Human
uuuuaauauugcauacaggcua

SEQ ID NO: 723403 - RNA, 22 nt, Human
aaaagaacuugucacaaguuug

SEQ ID NO: 723404 - RNA, 19 nt, Human
aaacaggcauagcugagac

SEQ ID NO: 723405 - RNA, 23 nt, Human
aaacaggcauagcugagaccaga

SEQ ID NO: 723406 - RNA, 19 nt, Human
aaagaacuugucacaaguu

SEQ ID NO: 723407 - RNA, 20 nt, Human
aacacaccugcccccagccu

SEQ ID NO: 723408 - RNA, 21 nt, Human
aaccaggaggagcagugggcu

SEQ ID NO: 723409 - RNA, 19 nt, Human
aaccagggcccuuagcaca

SEQ ID NO: 723410 - RNA, 25 nt, Human
aaccucguaaccaaaugggaagcug

SEQ ID NO: 723411 - RNA, 18 nt, Human
aagaaguauaaacaaccc

SEQ ID NO: 723412 - RNA, 18 nt, Human
aagucucccucugccuuc

SEQ ID NO: 723413 - RNA, 19 nt, Human
aaucauugucaccucuuug

SEQ ID NO: 723414 - RNA, 20 nt, Human
acaccugagacuugguccaa

SEQ ID NO: 723415 - RNA, 19 nt, Human
accagacacaguuccccca

SEQ ID NO: 723416 - RNA, 19 nt, Human
accagccucaaagguggau

SEQ ID NO: 723417 - RNA, 19 nt, Human
accaggaggagcagugggc

SEQ ID NO: 723418 - RNA, 23 nt, Human
accggcagcuuacuaccagccca

SEQ ID NO: 723419 - RNA, 24 nt, Human
accucguaaccaaaugggaagcug

SEQ ID NO: 723420 - RNA, 19 nt, Human
accuugggugcugcccugg

SEQ ID NO: 723421 - RNA, 19 nt, Human
accuugggugcugcccugg

SEQ ID NO: 723422 - RNA, 22 nt, Human
acuacagagagccaggcaggac

SEQ ID NO: 723423 - RNA, 21 nt, Human
acugcucacuucuguuacaga

SEQ ID NO: 723424 - RNA, 22 nt, Human
acuggcuaccaguauuccuucc

SEQ ID NO: 723425 - RNA, 26 nt, Human
agaaaccaaucaagaaguauaaacaa

SEQ ID NO: 723426 - RNA, 23 nt, Human
agaagccaagucucccucugccu

SEQ ID NO: 723427 - RNA, 24 nt, Human
agaagccaagucucccucugccuu

SEQ ID NO: 723428 - RNA, 22 nt, Human
agacuugguccaagcaccuuuc

SEQ ID NO: 723429 - RNA, 18 nt, Human
agagaaaauguuaggguc

SEQ ID NO: 723430 - RNA, 24 nt, Human
agaggaagagguaaggcccaggug

SEQ ID NO: 723431 - RNA, 19 nt, Human
agauaguaaauucccuggc

SEQ ID NO: 723432 - RNA, 23 nt, Human
agcagccagggagaggaacagcu

SEQ ID NO: 723433 - RNA, 24 nt, Human
agcagccagggagaggaacagcuu

SEQ ID NO: 723434 - RNA, 19 nt, Human
agcagugggcuccuucaag

SEQ ID NO: 723435 - RNA, 19 nt, Human
agccucuaaguuuagcccu

SEQ ID NO: 723436 - RNA, 20 nt, Human
agccugggucaguaugguac

SEQ ID NO: 723437 - RNA, 23 nt, Human
agccugggucaguaugguacagu

SEQ ID NO: 723438 - RNA, 21 nt, Human
aggcaauaaaaauaaauuguc

SEQ ID NO: 723439 - RNA, 22 nt, Human
aggcagaaguaaagcccaagca

SEQ ID NO: 723440 - RNA, 22 nt, Human
agggcccuuagcacaaaagggc

SEQ ID NO: 723441 - RNA, 20 nt, Human
agggguugugcugggccgug

SEQ ID NO: 723442 - RNA, 18 nt, Human
agguaaggcccaggugua

SEQ ID NO: 723443 - RNA, 22 nt, Human
aggucguggcaagggccugagg

SEQ ID NO: 723444 - RNA, 24 nt, Human
agguuaugauaaagauagacacua

SEQ ID NO: 723445 - RNA, 24 nt, Human
agucagggccuggaaaagaucuuc

SEQ ID NO: 723446 - RNA, 22 nt, Human
auaaauugucucacuaaccuug

SEQ ID NO: 723447 - RNA, 23 nt, Human
auaaauugucucacuaaccuugg

SEQ ID NO: 723448 - RNA, 22 nt, Human
aucauuacacucgccaugcagu

SEQ ID NO: 723449 - RNA, 20 nt, Human
auccagagcagcagccaggg

SEQ ID NO: 723450 - RNA, 20 nt, Human
auccuggagacaaaggaccc

SEQ ID NO: 723451 - RNA, 23 nt, Human
aucuaaccagggauuugccaaca

SEQ ID NO: 723452 - RNA, 22 nt, Human
caaagcaccaacucagggugcc

SEQ ID NO: 723453 - RNA, 19 nt, Human
caaccagaguuccuccagg

SEQ ID NO: 723454 - RNA, 25 nt, Human
caacucugguucuuucauuuuccag

SEQ ID NO: 723455 - RNA, 24 nt, Human
caauaaaaauaaauugucucacua

SEQ ID NO: 723456 - RNA, 22 nt, Human
cacacauaaagcagaagugugc

SEQ ID NO: 723457 - RNA, 22 nt, Human
cacaccugagacuugguccaag

SEQ ID NO: 723458 - RNA, 30 nt, Human
cacccuagaugauucuuccccaaagacggg

SEQ ID NO: 723459 - RNA, 18 nt, Human
cacccugcccuccacccu

SEQ ID NO: 723460 - RNA, 20 nt, Human
caccggcagcuuacuaccag

SEQ ID NO: 723461 - RNA, 18 nt, Human
caccguuucccuucuugg

SEQ ID NO: 723462 - RNA, 19 nt, Human
cagcagagggacucucaca

SEQ ID NO: 723463 - RNA, 22 nt, Human
cagcagccagggagaggaacag

SEQ ID NO: 723464 - RNA, 24 nt, Human
cagccaccaguucaggccauacua

SEQ ID NO: 723465 - RNA, 19 nt, Human
cagccagggagaggaacag

SEQ ID NO: 723466 - RNA, 20 nt, Human
cagcccaggaggggacuuug

SEQ ID NO: 723467 - RNA, 19 nt, Human
cagcgugccaucaugcugc

SEQ ID NO: 723468 - RNA, 24 nt, Human
cagcgugccaucaugcugcuggag

SEQ ID NO: 723469 - RNA, 18 nt, Human
caggcugcagcagaacaa

SEQ ID NO: 723470 - RNA, 19 nt, Human
caguccucuuucccauugu

SEQ ID NO: 723471 - RNA, 19 nt, Human
cauagcugagaccagaagc

SEQ ID NO: 723472 - RNA, 19 nt, Human
caugcccuugaagcaaacc

SEQ ID NO: 723473 - RNA, 20 nt, Human
cauuauagggcacguuauag

SEQ ID NO: 723474 - RNA, 19 nt, Human
ccaaaagaacuugucacaa

SEQ ID NO: 723475 - RNA, 20 nt, Human
ccacuacacucuagcagccu

SEQ ID NO: 723476 - RNA, 18 nt, Human
ccacucagagggaggcag

SEQ ID NO: 723477 - RNA, 21 nt, Human
ccacucccuacagaaacccug

SEQ ID NO: 723478 - RNA, 19 nt, Human
ccaguccacauaacacugu

SEQ ID NO: 723479 - RNA, 22 nt, Human
ccaguccacauaacacugugcc

SEQ ID NO: 723480 - RNA, 19 nt, Human
ccaugcccuugaagcaaac

SEQ ID NO: 723481 - RNA, 20 nt, Human
cccaaagacgggguuuugaa

SEQ ID NO: 723482 - RNA, 22 nt, Human
cccacacagaacagaacccagg

SEQ ID NO: 723483 - RNA, 24 nt, Human
cccagggcaaaugauuguguucca

SEQ ID NO: 723484 - RNA, 19 nt, Human
ccccacaggcccacacaga

SEQ ID NO: 723485 - RNA, 21 nt, Human
cccccacucccuacagaaacc

SEQ ID NO: 723486 - RNA, 25 nt, Human
cccuccccaucaucauuacacucgc

SEQ ID NO: 723487 - RNA, 21 nt, Human
cccuguaccuucccucuuucc

SEQ ID NO: 723488 - RNA, 21 nt, Human
ccuacagaaacccugugcuaa

SEQ ID NO: 723489 - RNA, 26 nt, Human
ccuacuguguaaauguagauuuugga

SEQ ID NO: 723490 - RNA, 19 nt, Human
ccuagcaucuccuuccacg

SEQ ID NO: 723491 - RNA, 23 nt, Human
ccucaaagguggauguaacagaa

SEQ ID NO: 723492 - RNA, 19 nt, Human
ccucucaucugacuggggc

SEQ ID NO: 723493 - RNA, 22 nt, Human
ccucucccaguccucuuuccca

SEQ ID NO: 723494 - RNA, 19 nt, Human
ccugauccaaagcaccaac

SEQ ID NO: 723495 - RNA, 19 nt, Human
ccugcagcugccccacuuc

SEQ ID NO: 723496 - RNA, 23 nt, Human
ccugcccacccugcccuccaccc

SEQ ID NO: 723497 - RNA, 21 nt, Human
ccuggcacaggaggacuucaa

SEQ ID NO: 723498 - RNA, 23 nt, Human
ccugugcuaaggcaaaguugaga

SEQ ID NO: 723499 - RNA, 24 nt, Human
ccuugggugcugcccugggccgcc

SEQ ID NO: 723500 - RNA, 20 nt, Human
cggggaccuggcaggaaucc

SEQ ID NO: 723501 - RNA, 18 nt, Human
cguggcaagggccugagg

SEQ ID NO: 723502 - RNA, 22 nt, Human
cguguucaucucaacaccagga

SEQ ID NO: 723503 - RNA, 19 nt, Human
cuacugcacacccaccauc

SEQ ID NO: 723504 - RNA, 18 nt, Human
cuagcagcccccacuccc

SEQ ID NO: 723505 - RNA, 21 nt, Human
cucacuucuguuacagagcca

SEQ ID NO: 723506 - RNA, 24 nt, Human
cucagggaccgcuggguuaucucu

SEQ ID NO: 723507 - RNA, 23 nt, Human
cuccaacacaccugcccccagcc

SEQ ID NO: 723508 - RNA, 22 nt, Human
cuccccacaggcccacacagaa

SEQ ID NO: 723509 - RNA, 23 nt, Human
cuccuuccacgcucccaggagcu

SEQ ID NO: 723510 - RNA, 20 nt, Human
cugagacuugguccaagcac

SEQ ID NO: 723511 - RNA, 22 nt, Human
cugaggccuguuccucacaggc

SEQ ID NO: 723512 - RNA, 21 nt, Human
cugcugcccuuucgccugggc

SEQ ID NO: 723513 - RNA, 18 nt, Human
cuggaggcggcuggagcu

SEQ ID NO: 723514 - RNA, 20 nt, Human
cuggccauccagagcagcag

SEQ ID NO: 723515 - RNA, 24 nt, Human
cuggcuaccaguauuccuucccag

SEQ ID NO: 723516 - RNA, 19 nt, Human
cugggccuggggggcccca

SEQ ID NO: 723517 - RNA, 20 nt, Human
cuuccagguuaggcacugug

SEQ ID NO: 723518 - RNA, 22 nt, Human
cuuccugcccacccugcccucc

SEQ ID NO: 723519 - RNA, 22 nt, Human
cuugguccuucaguugccaaaa

SEQ ID NO: 723520 - RNA, 19 nt, Human
cuugucuagagacucccca

SEQ ID NO: 723521 - RNA, 21 nt, Human
cuuuaugcaacauacgucuuc

SEQ ID NO: 723522 - RNA, 19 nt, Human
gaagccaucugguucuuag

SEQ ID NO: 723523 - RNA, 20 nt, Human
gaauaggcucagcuccucua

SEQ ID NO: 723524 - RNA, 20 nt, Human
gacuccccacaggcccacac

SEQ ID NO: 723525 - RNA, 19 nt, Human
gagcugaagccaucugguu

SEQ ID NO: 723526 - RNA, 27 nt, Human
gaguuugcccagaccuugggugcugcc

SEQ ID NO: 723527 - RNA, 18 nt, Human
gcagcuuacuaccagccc

SEQ ID NO: 723528 - RNA, 23 nt, Human
gcaggaccaaggacacccagggc

SEQ ID NO: 723529 - RNA, 19 nt, Human
gcccagguguaggauagcc

SEQ ID NO: 723530 - RNA, 18 nt, Human
gcccugggccgccgagcc

SEQ ID NO: 723531 - RNA, 21 nt, Human
gcugggccguggggguggugc

SEQ ID NO: 723532 - RNA, 18 nt, Human
ggagagcugagauuacaa

SEQ ID NO: 723533 - RNA, 23 nt, Human
ggagguugcucaaaagggaugca

SEQ ID NO: 723534 - RNA, 20 nt, Human
ggcgacagcgugccaucaug

SEQ ID NO: 723535 - RNA, 18 nt, Human
gggaaacagaaaccagga

SEQ ID NO: 723536 - RNA, 22 nt, Human
gggaagcugcagccaggcuucc

SEQ ID NO: 723537 - RNA, 21 nt, Human
gggcgacagcgugccaucaug

SEQ ID NO: 723538 - RNA, 20 nt, Human
ggggcaccuguccuacuucu

SEQ ID NO: 723539 - RNA, 18 nt, Human
guaccuucccucuuuccu

SEQ ID NO: 723540 - RNA, 23 nt, Human
gucuacugcacacccaccaucac

SEQ ID NO: 723541 - RNA, 19 nt, Human
guggauccuggagacaaag

SEQ ID NO: 723542 - RNA, 20 nt, Human
guguuaaaaucuagggugug

SEQ ID NO: 723543 - RNA, 21 nt, Human
guguucaucucaacaccagga

SEQ ID NO: 723544 - RNA, 18 nt, Human
uaaagacagccauacugc

SEQ ID NO: 723545 - RNA, 21 nt, Human
uaaagcagaagugugccuugc

SEQ ID NO: 723546 - RNA, 21 nt, Human
uaaaguaaggaguacugauua

SEQ ID NO: 723547 - RNA, 21 nt, Human
uaaguccucccauccccauac

SEQ ID NO: 723548 - RNA, 18 nt, Human
uagaggaagagguaaggc

SEQ ID NO: 723549 - RNA, 23 nt, Human
uagcacaaaagggcagaagacac

SEQ ID NO: 723550 - RNA, 20 nt, Human
uagcagccucuaaguuuagc

SEQ ID NO: 723551 - RNA, 18 nt, Human
uagccaaccugcagauga

SEQ ID NO: 723552 - RNA, 18 nt, Human
uagccuaaguaggucgug

SEQ ID NO: 723553 - RNA, 19 nt, Human
uaggaugccaguagaggaa

SEQ ID NO: 723554 - RNA, 21 nt, Human
uagggguugugcugggccgug

SEQ ID NO: 723555 - RNA, 19 nt, Human
uauguucucauuucuccuc

SEQ ID NO: 723556 - RNA, 20 nt, Human
ucaaagguggauguaacaga

SEQ ID NO: 723557 - RNA, 21 nt, Human
ucacuuccugcccacccugcc

SEQ ID NO: 723558 - RNA, 19 nt, Human
ucagcuccucuagagagcu

SEQ ID NO: 723559 - RNA, 22 nt, Human
ucagggugccucuggaucagag

SEQ ID NO: 723560 - RNA, 19 nt, Human
ucaucccucuccccagcgc

SEQ ID NO: 723561 - RNA, 20 nt, Human
ucauuuuccagauaauuggu

SEQ ID NO: 723562 - RNA, 22 nt, Human
uccaagcaccuuuccuccaaga

SEQ ID NO: 723563 - RNA, 23 nt, Human
ucccaaaguggcuucccugaucc

SEQ ID NO: 723564 - RNA, 21 nt, Human
ucccucuuuccugcucuaggg

SEQ ID NO: 723565 - RNA, 21 nt, Human
ucccugucuauaagaagcuua

SEQ ID NO: 723566 - RNA, 21 nt, Human
uccggaacuaauccccucuag

SEQ ID NO: 723567 - RNA, 22 nt, Human
uccuggagauucuacacgccag

SEQ ID NO: 723568 - RNA, 20 nt, Human
uccuucccagagcuaggggc

SEQ ID NO: 723569 - RNA, 18 nt, Human
ucucccaguccucuuucc

SEQ ID NO: 723570 - RNA, 20 nt, Human
ucugccuucuucacuagcuc

SEQ ID NO: 723571 - RNA, 18 nt, Human
ucuuccccaaagacgggg

SEQ ID NO: 723572 - RNA, 24 nt, Human
ugaaaauggcaagaaaccaaucaa

SEQ ID NO: 723573 - RNA, 26 nt, Human
ugaagcaaaccacgugcacggggucc

SEQ ID NO: 723574 - RNA, 22 nt, Human
ugaccagacacaguucccccag

SEQ ID NO: 723575 - RNA, 25 nt, Human
ugaccagacacaguucccccagcca

SEQ ID NO: 723576 - RNA, 22 nt, Human
ugacccaugcccuugaagcaaa

SEQ ID NO: 723577 - RNA, 21 nt, Human
ugaggaaggggaaacagaaac

SEQ ID NO: 723578 - RNA, 22 nt, Human
ugcagccaggcuuccuggagau

SEQ ID NO: 723579 - RNA, 20 nt, Human
ugccaaaagaacuugucaca

SEQ ID NO: 723580 - RNA, 26 nt, Human
ugccaacacauuuguuagucuguaaa

SEQ ID NO: 723581 - RNA, 20 nt, Human
ugccagggccuagcaucucc

SEQ ID NO: 723582 - RNA, 25 nt, Human
ugccagggccuagcaucuccuucca

SEQ ID NO: 723583 - RNA, 24 nt, Human
ugcucuagggguugugcugggccg

SEQ ID NO: 723584 - RNA, 20 nt, Human
ugcuuauuaucauuuauucc

SEQ ID NO: 723585 - RNA, 18 nt, Human
uggagccaacagucucag

SEQ ID NO: 723586 - RNA, 18 nt, Human
uggaggcggcuggagcug

SEQ ID NO: 723587 - RNA, 20 nt, Human
uggaucagagugagcagcag

SEQ ID NO: 723588 - RNA, 18 nt, Human
uggcaagaaaccaaucaa

SEQ ID NO: 723589 - RNA, 19 nt, Human
uggcaagggccugaggccu

SEQ ID NO: 723590 - RNA, 23 nt, Human
uggcacaggaggacuucaagcag

SEQ ID NO: 723591 - RNA, 22 nt, Human
ugggaagcugcagccaggcuuc

SEQ ID NO: 723592 - RNA, 20 nt, Human
uggggaagugaugggauuag

SEQ ID NO: 723593 - RNA, 20 nt, Human
uggggagagugaggaagggg

SEQ ID NO: 723594 - RNA, 20 nt, Human
ugguguaaaucaccaaaaag

SEQ ID NO: 723595 - RNA, 21 nt, Human
uguagagaaugcucugcaguu

SEQ ID NO: 723596 - RNA, 18 nt, Human
ugucauugcagagcaugg

SEQ ID NO: 723597 - RNA, 20 nt, Human
uguuacagagccaagucaac

SEQ ID NO: 723598 - RNA, 21 nt, Human
uuauagugagaaugcaguguu

SEQ ID NO: 723599 - RNA, 30 nt, Human
uuauuaucauuuauuccuuacaacaacccc

SEQ ID NO: 723600 - RNA, 25 nt, Human
uucccaguuugguuucucuacaugu

SEQ ID NO: 723601 - RNA, 22 nt, Human
uucccuucuugguccuucaguu

SEQ ID NO: 723602 - RNA, 21 nt, Human
uugguccuucaguugccaaaa

SEQ ID NO: 723603 - RNA, 22 nt, Human
uuucucuacauguccugcagcu

SEQ ID NO: 723604 - RNA, 20 nt, Human
uuugccaacacauuuguuaa

SEQ ID NO: 723605 - RNA, 20 nt, Human
aaacacacaaugcaucuaac

SEQ ID NO: 723606 - RNA, 20 nt, Human
aaaggagcuuggggaggugg

SEQ ID NO: 723607 - RNA, 20 nt, Human
aacugcccccugcuuccccc

SEQ ID NO: 723608 - RNA, 20 nt, Human
aagcaagaaggggccuggag

SEQ ID NO: 723609 - RNA, 22 nt, Human
aagcacuuccuuucugacccag

SEQ ID NO: 723610 - RNA, 21 nt, Human
aagcucuccccucugcuuucc

SEQ ID NO: 723611 - RNA, 24 nt, Human
aagcugcuccccaggccucuucug

SEQ ID NO: 723612 - RNA, 21 nt, Human
aaggagcuuggggaggugggc

SEQ ID NO: 723613 - RNA, 22 nt, Human
aaggggccuggaguuagcuggg

SEQ ID NO: 723614 - RNA, 23 nt, Human
aaggggccuggaguuagcugggu

SEQ ID NO: 723615 - RNA, 19 nt, Human
aauuuguuuuuucuucccc

SEQ ID NO: 723616 - RNA, 18 nt, Human
acagaaacugcccccugc

SEQ ID NO: 723617 - RNA, 18 nt, Human
acaggcagcaccccccuc

SEQ ID NO: 723618 - RNA, 20 nt, Human
acccacaggcagcacccccc

SEQ ID NO: 723619 - RNA, 18 nt, Human
acucaaaaauggggccuc

SEQ ID NO: 723620 - RNA, 21 nt, Human
acugcccccugcuucccccua

SEQ ID NO: 723621 - RNA, 23 nt, Human
agaaacugcccccugcuuccccc

SEQ ID NO: 723622 - RNA, 22 nt, Human
agaaagggugguccugccuggu

SEQ ID NO: 723623 - RNA, 18 nt, Human
agaccugagaauguggug

SEQ ID NO: 723624 - RNA, 22 nt, Human
agagccaagccccuuagcccuc

SEQ ID NO: 723625 - RNA, 23 nt, Human
agcaacucuagccacugccaccu

SEQ ID NO: 723626 - RNA, 19 nt, Human
agcaguuuccccaccuugg

SEQ ID NO: 723627 - RNA, 18 nt, Human
agccaagccccuuagccc

SEQ ID NO: 723628 - RNA, 18 nt, Human
aggcagcaccccccucag

SEQ ID NO: 723629 - RNA, 21 nt, Human
aggggccuggaguuagcuggg

SEQ ID NO: 723630 - RNA, 20 nt, Human
aggguuucucaucacugaug

SEQ ID NO: 723631 - RNA, 20 nt, Human
agguaccagggugaagaggg

SEQ ID NO: 723632 - RNA, 18 nt, Human
aguccucuccuuuugaag

SEQ ID NO: 723633 - RNA, 20 nt, Human
agugcagugagugggaccuu

SEQ ID NO: 723634 - RNA, 19 nt, Human
aucuguugggcuccucccu

SEQ ID NO: 723635 - RNA, 21 nt, Human
auuguccucaaaccccaagga

SEQ ID NO: 723636 - RNA, 22 nt, Human
caacuaagcaacaugaccacca

SEQ ID NO: 723637 - RNA, 18 nt, Human
caagaaggggccuggagu

SEQ ID NO: 723638 - RNA, 19 nt, Human
cacaauccugaggccugcc

SEQ ID NO: 723639 - RNA, 19 nt, Human
cacaccacucccccagcug

SEQ ID NO: 723640 - RNA, 21 nt, Human
cacacugccugccucccccca

SEQ ID NO: 723641 - RNA, 23 nt, Human
cacacugccugccuccccccaga

SEQ ID NO: 723642 - RNA, 18 nt, Human
caccagggaggagggcug

SEQ ID NO: 723643 - RNA, 18 nt, Human
cacccaguucccacacca

SEQ ID NO: 723644 - RNA, 19 nt, Human
cacccaguucccacaccac

SEQ ID NO: 723645 - RNA, 20 nt, Human
cacgcaggcccuaagucucc

SEQ ID NO: 723646 - RNA, 26 nt, Human
cagcaccccccucaguagugcuuccc

SEQ ID NO: 723647 - RNA, 19 nt, Human
caggaaaaaccuccugaag

SEQ ID NO: 723648 - RNA, 24 nt, Human
cagggaccuguggcucagucugug

SEQ ID NO: 723649 - RNA, 23 nt, Human
cagucacacugccugccuccccc

SEQ ID NO: 723650 - RNA, 24 nt, Human
cauaggccucuuucccuaaaacac

SEQ ID NO: 723651 - RNA, 18 nt, Human
ccaacaaagaugaauagc

SEQ ID NO: 723652 - RNA, 18 nt, Human
ccacugccaccucccugc

SEQ ID NO: 723653 - RNA, 21 nt, Human
ccagcaggccuggcguuuucc

SEQ ID NO: 723654 - RNA, 22 nt, Human
cccacaggcagcaccccccuca

SEQ ID NO: 723655 - RNA, 25 nt, Human
cccagcgcugagcagaguccucucc

SEQ ID NO: 723656 - RNA, 19 nt, Human
cccauccaucucaaggcug

SEQ ID NO: 723657 - RNA, 18 nt, Human
ccccaaaagcugcucccc

SEQ ID NO: 723658 - RNA, 23 nt, Human
ccccaaaagcugcuccccaggcc

SEQ ID NO: 723659 - RNA, 26 nt, Human
ccccaaaagcugcuccccaggccucu

SEQ ID NO: 723660 - RNA, 20 nt, Human
ccccacugacucccugaccc

SEQ ID NO: 723661 - RNA, 23 nt, Human
ccccagagguaucgaacccugcc

SEQ ID NO: 723662 - RNA, 23 nt, Human
ccccagccacauaugcccaggcc

SEQ ID NO: 723663 - RNA, 18 nt, Human
ccccaggggacuuaaccc

SEQ ID NO: 723664 - RNA, 23 nt, Human
ccccagugcagugagugggaccc

SEQ ID NO: 723665 - RNA, 23 nt, Human
cccccagacuggccucugagccc

SEQ ID NO: 723666 - RNA, 24 nt, Human
cccccagacuggccucugagcccc

SEQ ID NO: 723667 - RNA, 18 nt, Human
ccccccagacuggccucu

SEQ ID NO: 723668 - RNA, 21 nt, Human
cccccugcuucccccuaauuu

SEQ ID NO: 723669 - RNA, 21 nt, Human
ccccugcuucccccuaauuuu

SEQ ID NO: 723670 - RNA, 21 nt, Human
ccuacaacaugugagcauccu

SEQ ID NO: 723671 - RNA, 24 nt, Human
ccuacaauuaauagggccgggguc

SEQ ID NO: 723672 - RNA, 24 nt, Human
ccuauuuucuuccuuuucaguucc

SEQ ID NO: 723673 - RNA, 23 nt, Human
ccucagggcaggucauggaaccc

SEQ ID NO: 723674 - RNA, 21 nt, Human
ccuccacuccacuaccaucug

SEQ ID NO: 723675 - RNA, 22 nt, Human
ccuccauguccauagcaguuuc

SEQ ID NO: 723676 - RNA, 23 nt, Human
ccucugagccccaaaagcugcuc

SEQ ID NO: 723677 - RNA, 20 nt, Human
ccugaaggugagaccugaga

SEQ ID NO: 723678 - RNA, 19 nt, Human
ccugccuucucccucuccc

SEQ ID NO: 723679 - RNA, 21 nt, Human
ccugccuucucccucucccca

SEQ ID NO: 723680 - RNA, 22 nt, Human
ccugccuucucccucuccccag

SEQ ID NO: 723681 - RNA, 24 nt, Human
ccugcggggcagccuucugucggg

SEQ ID NO: 723682 - RNA, 21 nt, Human
ccugcuucaauccucccaaga

SEQ ID NO: 723683 - RNA, 21 nt, Human
ccugguuaaaggagcuugggg

SEQ ID NO: 723684 - RNA, 19 nt, Human
ccuucagucacacugccug

SEQ ID NO: 723685 - RNA, 23 nt, Human
cgccgaggacucugggguccuuc

SEQ ID NO: 723686 - RNA, 19 nt, Human
cgccugacccuacgaacug

SEQ ID NO: 723687 - RNA, 23 nt, Human
cguacaagagccaagccccuuag

SEQ ID NO: 723688 - RNA, 24 nt, Human
cucacaacccuggagggcuccagg

SEQ ID NO: 723689 - RNA, 19 nt, Human
cuccccagcaggccuggcc

SEQ ID NO: 723690 - RNA, 23 nt, Human
cucccgggucagugccauugcgg

SEQ ID NO: 723691 - RNA, 20 nt, Human
cuccgcacaauccugaggcc

SEQ ID NO: 723692 - RNA, 20 nt, Human
cuccgcacaauccugaggcc

SEQ ID NO: 723693 - RNA, 18 nt, Human
cuccuauuuucuuccuuu

SEQ ID NO: 723694 - RNA, 24 nt, Human
cuccucugggggcuccagagcucc

SEQ ID NO: 723695 - RNA, 20 nt, Human
cucugucuuaucuccucugg

SEQ ID NO: 723696 - RNA, 22 nt, Human
cugcaguguuccagggaccggc

SEQ ID NO: 723697 - RNA, 21 nt, Human
cugcuccccaggccucuucug

SEQ ID NO: 723698 - RNA, 23 nt, Human
cuggccucugagccccaaaagcu

SEQ ID NO: 723699 - RNA, 18 nt, Human
cuggggucugggaaaagc

SEQ ID NO: 723700 - RNA, 29 nt, Human
gaaggggccuggaguuagcuggguuccgg

SEQ ID NO: 723701 - RNA, 23 nt, Human
gacccacaggcagcaccccccuc

SEQ ID NO: 723702 - RNA, 19 nt, Human
gacccuacgaacugugcgc

SEQ ID NO: 723703 - RNA, 21 nt, Human
gaccuguggcucagucugugg

SEQ ID NO: 723704 - RNA, 20 nt, Human
gacuagcagcgguucucccu

SEQ ID NO: 723705 - RNA, 25 nt, Human
gacuggccucugagccccaaaagcc

SEQ ID NO: 723706 - RNA, 19 nt, Human
gagaccugagaauguggug

SEQ ID NO: 723707 - RNA, 19 nt, Human
gagggcugccuuauccugc

SEQ ID NO: 723708 - RNA, 21 nt, Human
gaggguuuggcugcacagugc

SEQ ID NO: 723709 - RNA, 23 nt, Human
gagucugggagcugcugaccuca

SEQ ID NO: 723710 - RNA, 21 nt, Human
gccaccucccugcuucaaucc

SEQ ID NO: 723711 - RNA, 22 nt, Human
gcccccugcuucccccuaauuu

SEQ ID NO: 723712 - RNA, 23 nt, Human
gcccugaugacuuggagaaggcu

SEQ ID NO: 723713 - RNA, 23 nt, Human
gccugccuccccccagacuggcc

SEQ ID NO: 723714 - RNA, 26 nt, Human
gcggggcagccuugcuaccaacaaag

SEQ ID NO: 723715 - RNA, 23 nt, Human
gcucuccccucugcuuuccccac

SEQ ID NO: 723716 - RNA, 20 nt, Human
gcugagcagaguccucuccu

SEQ ID NO: 723717 - RNA, 22 nt, Human
ggaauuagaggucucuuccaca

SEQ ID NO: 723718 - RNA, 22 nt, Human
ggagcugcugaccucagggcag

SEQ ID NO: 723719 - RNA, 20 nt, Human
ggaggagggcugccuuaucc

SEQ ID NO: 723720 - RNA, 23 nt, Human
ggaggcccacacgcaggcccuaa

SEQ ID NO: 723721 - RNA, 20 nt, Human
ggcuccucccuccaccaggg

SEQ ID NO: 723722 - RNA, 23 nt, Human
gggagggaagcuccugguuaaag

SEQ ID NO: 723723 - RNA, 19 nt, Human
ggggccuggggccugcaug

SEQ ID NO: 723724 - RNA, 20 nt, Human
ggguucuuucuccuccacuc

SEQ ID NO: 723725 - RNA, 19 nt, Human
gguguggggagaacccuug

SEQ ID NO: 723726 - RNA, 22 nt, Human
gugaagagggugauacggccuc

SEQ ID NO: 723727 - RNA, 21 nt, Human
gugagggagagguguuuucug

SEQ ID NO: 723728 - RNA, 23 nt, Human
guuccacccaguucccacaccac

SEQ ID NO: 723729 - RNA, 19 nt, Human
guucuccgcacaauccuga

SEQ ID NO: 723730 - RNA, 21 nt, Human
uaaaagcacuauuuuuuccca

SEQ ID NO: 723731 - RNA, 19 nt, Human
uaagaaauucuguggcccu

SEQ ID NO: 723732 - RNA, 21 nt, Human
uaagaaauucuguggcccuga

SEQ ID NO: 723733 - RNA, 22 nt, Human
uacagacuuaaagggcuuuuuu

SEQ ID NO: 723734 - RNA, 19 nt, Human
uacugaccauguuucugca

SEQ ID NO: 723735 - RNA, 19 nt, Human
uagcucacucugggaggga

SEQ ID NO: 723736 - RNA, 21 nt, Human
uaggcuggggcguuaugcaga

SEQ ID NO: 723737 - RNA, 22 nt, Human
uauuuuuucccaggguucuuuc

SEQ ID NO: 723738 - RNA, 19 nt, Human
uccacccaguucccacacc

SEQ ID NO: 723739 - RNA, 25 nt, Human
uccaggacagcgcauuacugggguu

SEQ ID NO: 723740 - RNA, 21 nt, Human
uccauagcaguuucaaguuuc

SEQ ID NO: 723741 - RNA, 19 nt, Human
ucccaggguucuuucuccu

SEQ ID NO: 723742 - RNA, 24 nt, Human
uccccacugacucccugacccuau

SEQ ID NO: 723743 - RNA, 20 nt, Human
uccccaggccucuucuggga

SEQ ID NO: 723744 - RNA, 22 nt, Human
uccccaggccucuucugggaac

SEQ ID NO: 723745 - RNA, 18 nt, Human
ucccgggucagugccauu

SEQ ID NO: 723746 - RNA, 24 nt, Human
ucccguacaagagccaagccccuu

SEQ ID NO: 723747 - RNA, 18 nt, Human
ucccuggcugggcaggga

SEQ ID NO: 723748 - RNA, 25 nt, Human
uccggaagcaagaaggggccuggag

SEQ ID NO: 723749 - RNA, 25 nt, Human
uccuauuuucuuccuuuucaguucc

SEQ ID NO: 723750 - RNA, 20 nt, Human
uccucaaaccccaaggaccc

SEQ ID NO: 723751 - RNA, 22 nt, Human
uccugaaggugagaccugagaa

SEQ ID NO: 723752 - RNA, 21 nt, Human
ucuccccagccacauaugccc

SEQ ID NO: 723753 - RNA, 19 nt, Human
ucucccucuccccagcagg

SEQ ID NO: 723754 - RNA, 18 nt, Human
ucucuacugccuuauaag

SEQ ID NO: 723755 - RNA, 18 nt, Human
ucugcuacagacuuaaag

SEQ ID NO: 723756 - RNA, 22 nt, Human
ucugggucaccccucucuugag

SEQ ID NO: 723757 - RNA, 21 nt, Human
ucuguugggcuccucccucca

SEQ ID NO: 723758 - RNA, 23 nt, Human
ugaauagcugaaguuuaaaauca

SEQ ID NO: 723759 - RNA, 20 nt, Human
ugaccauguuucugcacccc

SEQ ID NO: 723760 - RNA, 18 nt, Human
ugacccagcgcugagcag

SEQ ID NO: 723761 - RNA, 18 nt, Human
ugacuccugacgggcccc

SEQ ID NO: 723762 - RNA, 20 nt, Human
ugagaccugagaauguggug

SEQ ID NO: 723763 - RNA, 25 nt, Human
ugagagcaucugcuucuggcuuugc

SEQ ID NO: 723764 - RNA, 20 nt, Human
ugagcugccacuggcggcag

SEQ ID NO: 723765 - RNA, 18 nt, Human
ugaggacagaauuugagg

SEQ ID NO: 723766 - RNA, 19 nt, Human
ugagggcaaaggagucugg

SEQ ID NO: 723767 - RNA, 20 nt, Human
ugagggcaaaggagucuggg

SEQ ID NO: 723768 - RNA, 24 nt, Human
ugagggcaaaggagucugggagcu

SEQ ID NO: 723769 - RNA, 24 nt, Human
ugaggggccuggggccugcaugug

SEQ ID NO: 723770 - RNA, 21 nt, Human
ugauuggacaagaggguuugg

SEQ ID NO: 723771 - RNA, 26 nt, Human
ugcaaaaaucugggucaccccucucu

SEQ ID NO: 723772 - RNA, 19 nt, Human
ugccuccccccagacuggc

SEQ ID NO: 723773 - RNA, 21 nt, Human
ugccugguguggggagaaccc

SEQ ID NO: 723774 - RNA, 23 nt, Human
ugccugguguggggagaacccuu

SEQ ID NO: 723775 - RNA, 24 nt, Human
ugccugguguggggagaacccuug

SEQ ID NO: 723776 - RNA, 19 nt, Human
ugcgguacuuccccgaccc

SEQ ID NO: 723777 - RNA, 19 nt, Human
ugcugggagagaacauugu

SEQ ID NO: 723778 - RNA, 30 nt, Human
uggccucugagccccaaaagcugcucccuc

SEQ ID NO: 723779 - RNA, 18 nt, Human
uggcugcacagugccuuc

SEQ ID NO: 723780 - RNA, 19 nt, Human
uggcugggcagggagaaag

SEQ ID NO: 723781 - RNA, 21 nt, Human
uggcugggcagggagaaaggg

SEQ ID NO: 723782 - RNA, 19 nt, Human
ugggaaaagccggaaggcg

SEQ ID NO: 723783 - RNA, 19 nt, Human
ugggaaaagccggaaggcg

SEQ ID NO: 723784 - RNA, 21 nt, Human
ugggagcugcugaccucagga

SEQ ID NO: 723785 - RNA, 19 nt, Human
uggggaggugggcaagaga

SEQ ID NO: 723786 - RNA, 22 nt, Human
uggggugucuggauccccacca

SEQ ID NO: 723787 - RNA, 23 nt, Human
uggggugucuggauccccaccag

SEQ ID NO: 723788 - RNA, 19 nt, Human
ugguccugccugguguggg

SEQ ID NO: 723789 - RNA, 23 nt, Human
uggugugggaggugagaugggcc

SEQ ID NO: 723790 - RNA, 18 nt, Human
ugucuggauccccaccag

SEQ ID NO: 723791 - RNA, 19 nt, Human
ugugagcaguuuccccacc

SEQ ID NO: 723792 - RNA, 18 nt, Human
uguggcucagucuguggg

SEQ ID NO: 723793 - RNA, 19 nt, Human
uguggggagaacccuugca

SEQ ID NO: 723794 - RNA, 19 nt, Human
uuacucccgggucagugcc

SEQ ID NO: 723795 - RNA, 20 nt, Human
uuacugggguuggcaagcac

SEQ ID NO: 723796 - RNA, 18 nt, Human
uuaggucauggaauuaga

SEQ ID NO: 723797 - RNA, 23 nt, Human
uucaacuaagcaacaugaccacc

SEQ ID NO: 723798 - RNA, 19 nt, Human
uucaggaaaaaccuccuga

SEQ ID NO: 723799 - RNA, 20 nt, Human
uucaguuucugcuaccaucu

SEQ ID NO: 723800 - RNA, 18 nt, Human
uucaucugagccgaucug

SEQ ID NO: 723801 - RNA, 22 nt, Human
uucccaucugaccuccaugucc

SEQ ID NO: 723802 - RNA, 21 nt, Human
uuccccauuuugggguuuuga

SEQ ID NO: 723803 - RNA, 19 nt, Human
uucgcaagcuuccggaagc

SEQ ID NO: 723804 - RNA, 19 nt, Human
uuggcguucuguuaggaag

SEQ ID NO: 723805 - RNA, 22 nt, Human
uugggaccucuuccuacaauua

SEQ ID NO: 723806 - RNA, 23 nt, Human
uuucccuaaaacacacaaugcau

SEQ ID NO: 723807 - RNA, 22 nt, Human
uuuucaguuccacccaguuccc

SEQ ID NO: 723808 - RNA, 19 nt, Human
uuuugggggaaaaaaucca

SEQ ID NO: 723809 - RNA, 22 nt, Human
aaaaccagaaagaaaacuguac

SEQ ID NO: 723810 - RNA, 22 nt, Human
aaaccaacauagaugaaaguaa

SEQ ID NO: 723811 - RNA, 23 nt, Human
aaagguucuagaaaagggaagug

SEQ ID NO: 723812 - RNA, 18 nt, Human
aaaguaagugugcggguc

SEQ ID NO: 723813 - RNA, 22 nt, Human
aaccagaaagaaaacuguacaa

SEQ ID NO: 723814 - RNA, 24 nt, Human
aacccgggaaggaacaaagggcuu

SEQ ID NO: 723815 - RNA, 25 nt, Human
aagcacaacuaaaaauuaaaaccag

SEQ ID NO: 723816 - RNA, 22 nt, Human
acagugcaggcucaggacaaac

SEQ ID NO: 723817 - RNA, 22 nt, Human
accucauuuggacauggaaaac

SEQ ID NO: 723818 - RNA, 19 nt, Human
acucccaccaacaaaagcu

SEQ ID NO: 723819 - RNA, 24 nt, Human
acucccaccaacaaaagcuggagc

SEQ ID NO: 723820 - RNA, 22 nt, Human
agaaagaaaacuguacaaagca

SEQ ID NO: 723821 - RNA, 22 nt, Human
agcccggccucagcuuccuggc

SEQ ID NO: 723822 - RNA, 18 nt, Human
aggacagugcaggcucag

SEQ ID NO: 723823 - RNA, 22 nt, Human
aggcagcgcguccaccagggag

SEQ ID NO: 723824 - RNA, 21 nt, Human
aggccuccggagaccacuccc

SEQ ID NO: 723825 - RNA, 18 nt, Human
agggaagugugaagucag

SEQ ID NO: 723826 - RNA, 23 nt, Human
agucagaucugggauuucggcau

SEQ ID NO: 723827 - RNA, 20 nt, Human
agugcggugugggguguggu

SEQ ID NO: 723828 - RNA, 23 nt, Human
auggacuccgggccgcgggggcu

SEQ ID NO: 723829 - RNA, 21 nt, Human
auugcacuacagucccauggg

SEQ ID NO: 723830 - RNA, 19 nt, Human
caaacccgggaaggaacaa

SEQ ID NO: 723831 - RNA, 19 nt, Human
caaacccgggaaggaacaa

SEQ ID NO: 723832 - RNA, 28 nt, Human
caaagcacaacuaaaaauuaaaaccaga

SEQ ID NO: 723833 - RNA, 20 nt, Human
caacauagaugaaaguaagu

SEQ ID NO: 723834 - RNA, 26 nt, Human
caaggcacaacagacacagagagaug

SEQ ID NO: 723835 - RNA, 22 nt, Human
cacaacagacacagagagaugc

SEQ ID NO: 723836 - RNA, 22 nt, Human
cacagcagccguccauagaggc

SEQ ID NO: 723837 - RNA, 18 nt, Human
caccaacaaaagcuggag

SEQ ID NO: 723838 - RNA, 23 nt, Human
caccaacaaaagcuggagcuauc

SEQ ID NO: 723839 - RNA, 24 nt, Human
caccaaggacugggccugggccag

SEQ ID NO: 723840 - RNA, 21 nt, Human
caccuagacgcggguuuaauu

SEQ ID NO: 723841 - RNA, 22 nt, Human
cacgcaggaaaaggaauguuua

SEQ ID NO: 723842 - RNA, 19 nt, Human
cacggguggaggcuguggg

SEQ ID NO: 723843 - RNA, 19 nt, Human
cacucccaccaacaaaagc

SEQ ID NO: 723844 - RNA, 18 nt, Human
cagcaccgaagagcagca

SEQ ID NO: 723845 - RNA, 19 nt, Human
cagcaccgaagagcagcag

SEQ ID NO: 723846 - RNA, 21 nt, Human
cagcagcuggcuccgccgggg

SEQ ID NO: 723847 - RNA, 24 nt, Human
cagcucccccacgccccaugcacc

SEQ ID NO: 723848 - RNA, 18 nt, Human
cagcugaagagcgcucuc

SEQ ID NO: 723849 - RNA, 19 nt, Human
caggaggcgggcagccugc

SEQ ID NO: 723850 - RNA, 20 nt, Human
caggcuaaaaaaagcagcca

SEQ ID NO: 723851 - RNA, 21 nt, Human
cauccagguuccauuugcacc

SEQ ID NO: 723852 - RNA, 22 nt, Human
ccccacgccccaugcacccucc

SEQ ID NO: 723853 - RNA, 25 nt, Human
ccccuccggacucgucggccccgcc

SEQ ID NO: 723854 - RNA, 18 nt, Human
ccccugugcccgccacag

SEQ ID NO: 723855 - RNA, 25 nt, Human
ccccugugcccgccacagacgccgg

SEQ ID NO: 723856 - RNA, 21 nt, Human
cccuccggacucgucggcccc

SEQ ID NO: 723857 - RNA, 18 nt, Human
cccugcagaaggcauggg

SEQ ID NO: 723858 - RNA, 22 nt, Human
cccugggccaaaccagcugccc

SEQ ID NO: 723859 - RNA, 21 nt, Human
ccgaagccccugugcccgcca

SEQ ID NO: 723860 - RNA, 21 nt, Human
ccgcaggucccgugaccgccc

SEQ ID NO: 723861 - RNA, 19 nt, Human
ccgcgugacucggccaggg

SEQ ID NO: 723862 - RNA, 25 nt, Human
ccuaccugggacacacgugcacaca

SEQ ID NO: 723863 - RNA, 24 nt, Human
ccuaugaugggacaaagccggggc

SEQ ID NO: 723864 - RNA, 26 nt, Human
ccuccggacucgucggccccgccggg

SEQ ID NO: 723865 - RNA, 22 nt, Human
ccucugaggaugcaucugguuu

SEQ ID NO: 723866 - RNA, 23 nt, Human
ccugugccgucccuaccugggac

SEQ ID NO: 723867 - RNA, 21 nt, Human
ccuguucccugggcaacgggg

SEQ ID NO: 723868 - RNA, 22 nt, Human
cggagccagcccgcaggucccc

SEQ ID NO: 723869 - RNA, 21 nt, Human
cggcaucuugaccucauuugg

SEQ ID NO: 723870 - RNA, 24 nt, Human
cgggagggggcgggauguguggca

SEQ ID NO: 723871 - RNA, 18 nt, Human
cggggccggcaccggggc

SEQ ID NO: 723872 - RNA, 18 nt, Human
cuccaggaggcgggcagc

SEQ ID NO: 723873 - RNA, 22 nt, Human
cuccgcgugacucggccagggc

SEQ ID NO: 723874 - RNA, 19 nt, Human
cucucaagcccggccucag

SEQ ID NO: 723875 - RNA, 23 nt, Human
cugcugcagcaaucacgccagcc

SEQ ID NO: 723876 - RNA, 19 nt, Human
cugugccgucccuaccugg

SEQ ID NO: 723877 - RNA, 21 nt, Human
cuuccuggccagagcgucugg

SEQ ID NO: 723878 - RNA, 23 nt, Human
gaacauauuuuaucacccuccac

SEQ ID NO: 723879 - RNA, 18 nt, Human
gacucaaagcacaacuaa

SEQ ID NO: 723880 - RNA, 24 nt, Human
gagaccaggacggcagcaguggga

SEQ ID NO: 723881 - RNA, 23 nt, Human
gagcagcagcuggcuccgccggg

SEQ ID NO: 723882 - RNA, 22 nt, Human
gcaccggggccagcaccgaaga

SEQ ID NO: 723883 - RNA, 19 nt, Human
gcccgcaggucccgugacc

SEQ ID NO: 723884 - RNA, 20 nt, Human
gcgggcagccugcgccgugu

SEQ ID NO: 723885 - RNA, 23 nt, Human
gcuccaucuggcccuggggcuac

SEQ ID NO: 723886 - RNA, 20 nt, Human
ggacugggccugggccaggg

SEQ ID NO: 723887 - RNA, 21 nt, Human
ggacugggccugggccagggg

SEQ ID NO: 723888 - RNA, 19 nt, Human
ggcccugggccaaaccagc

SEQ ID NO: 723889 - RNA, 18 nt, Human
ggccucagcuuccuggcc

SEQ ID NO: 723890 - RNA, 18 nt, Human
ggccuggggcugccucug

SEQ ID NO: 723891 - RNA, 20 nt, Human
ggcugccacucggagccagc

SEQ ID NO: 723892 - RNA, 22 nt, Human
gggcagugaggugugguguggu

SEQ ID NO: 723893 - RNA, 19 nt, Human
gggcggggugggcacugcc

SEQ ID NO: 723894 - RNA, 26 nt, Human
gggcugccgggagccuguucccuggg

SEQ ID NO: 723895 - RNA, 18 nt, Human
gggggcucccgcggcagc

SEQ ID NO: 723896 - RNA, 19 nt, Human
ggugugggguguggugugu

SEQ ID NO: 723897 - RNA, 18 nt, Human
guccaccagggagucacu

SEQ ID NO: 723898 - RNA, 23 nt, Human
gugaggagagcuuugccauccgu

SEQ ID NO: 723899 - RNA, 26 nt, Human
gugcggguccaaccuggccagaggug

SEQ ID NO: 723900 - RNA, 25 nt, Human
gugcgguguggggugugguguguug

SEQ ID NO: 723901 - RNA, 22 nt, Human
gugcucugcagcuuugucucug

SEQ ID NO: 723902 - RNA, 21 nt, Human
gugugguguggugaggugugc

SEQ ID NO: 723903 - RNA, 24 nt, Human
guguguuguguguuguggugugca

SEQ ID NO: 723904 - RNA, 18 nt, Human
uaaaaccagaaagaaaac

SEQ ID NO: 723905 - RNA, 21 nt, Human
uaaaaccagaaagaaaacugu

SEQ ID NO: 723906 - RNA, 18 nt, Human
uagaggcacugguuucaa

SEQ ID NO: 723907 - RNA, 21 nt, Human
uaucacccuccaccugcggcc

SEQ ID NO: 723908 - RNA, 19 nt, Human
ucaagugucaacccauacc

SEQ ID NO: 723909 - RNA, 24 nt, Human
ucaccuagacgcggguuuaauugc

SEQ ID NO: 723910 - RNA, 23 nt, Human
uccaccugcggccugggggcucc

SEQ ID NO: 723911 - RNA, 20 nt, Human
ucccaugggugaggagagcu

SEQ ID NO: 723912 - RNA, 23 nt, Human
ucccugggcaacggggccggcac

SEQ ID NO: 723913 - RNA, 20 nt, Human
uccgaagccccugugcccgc

SEQ ID NO: 723914 - RNA, 22 nt, Human
uccgggccgcgggggcugccgg

SEQ ID NO: 723915 - RNA, 22 nt, Human
ucggaaaacauaucucucuucu

SEQ ID NO: 723916 - RNA, 23 nt, Human
ucucuggggggacaccccccuau

SEQ ID NO: 723917 - RNA, 21 nt, Human
ucugggaggccuccggagacc

SEQ ID NO: 723918 - RNA, 23 nt, Human
ugaccuuuggcuccaucuggccc

SEQ ID NO: 723919 - RNA, 18 nt, Human
ugacucaaagcacaacua

SEQ ID NO: 723920 - RNA, 20 nt, Human
ugagaccaggacggcagcac

SEQ ID NO: 723921 - RNA, 26 nt, Human
ugagcgacccuugcucagcuccccca

SEQ ID NO: 723922 - RNA, 25 nt, Human
ugcagccgggcagucgccacugucc

SEQ ID NO: 723923 - RNA, 18 nt, Human
ugccugccccucugaggc

SEQ ID NO: 723924 - RNA, 23 nt, Human
ugcggugugguguggugaggugu

SEQ ID NO: 723925 - RNA, 21 nt, Human
uggaacgagacagaaaccaac

SEQ ID NO: 723926 - RNA, 23 nt, Human
uggaaugugcucugcagcuuugu

SEQ ID NO: 723927 - RNA, 20 nt, Human
uggccagagcgucuggcaug

SEQ ID NO: 723928 - RNA, 22 nt, Human
uggccagagcgucuggcaugga

SEQ ID NO: 723929 - RNA, 22 nt, Human
uggcccuggggcuacuaaugug

SEQ ID NO: 723930 - RNA, 23 nt, Human
uggugugcaugugcguggguucu

SEQ ID NO: 723931 - RNA, 20 nt, Human
ugucuggacaaguguugagg

SEQ ID NO: 723932 - RNA, 24 nt, Human
uguguuguggugugcaugugcgug

SEQ ID NO: 723933 - RNA, 23 nt, Human
uguuuauuugucaucuagggaaa

SEQ ID NO: 723934 - RNA, 21 nt, Human
uucccugggcaacggggccgg

SEQ ID NO: 723935 - RNA, 18 nt, Human
uugaccucauuuggacau

SEQ ID NO: 723936 - RNA, 19 nt, Human
uuuacaaaagguucuagaa

SEQ ID NO: 723937 - RNA, 20 nt, Human
uuuacaaaagguucuagaaa

SEQ ID NO: 723938 - RNA, 19 nt, Human
aaaaacagaccguucaggc

SEQ ID NO: 723939 - RNA, 18 nt, Human
aaacaaacaaaaaacccc

SEQ ID NO: 723940 - RNA, 22 nt, Human
aaacaaacaaaaaaccccagga

SEQ ID NO: 723941 - RNA, 24 nt, Human
aaacuucacagaauauauauucua

SEQ ID NO: 723942 - RNA, 25 nt, Human
aaagaaaaaaaccuuauuuguaaac

SEQ ID NO: 723943 - RNA, 19 nt, Human
aaagaaaaaauucagagac

SEQ ID NO: 723944 - RNA, 23 nt, Human
aaagauuuuuuuaaaaagcaagc

SEQ ID NO: 723945 - RNA, 18 nt, Human
aaauagccacaaugaaag

SEQ ID NO: 723946 - RNA, 18 nt, Human
aacaguagugugaaacuc

SEQ ID NO: 723947 - RNA, 19 nt, Human
aacguuaaagaaaaaauuc

SEQ ID NO: 723948 - RNA, 21 nt, Human
aagaaacaugaauaauaagcu

SEQ ID NO: 723949 - RNA, 22 nt, Human
aagagaaacuuaucaaaagcaa

SEQ ID NO: 723950 - RNA, 22 nt, Human
aagaggaaaugaaaagagggac

SEQ ID NO: 723951 - RNA, 21 nt, Human
aagauggaaugccaaaaucac

SEQ ID NO: 723952 - RNA, 19 nt, Human
aagcaaaugguuagcaaac

SEQ ID NO: 723953 - RNA, 18 nt, Human
aagcacccaaaacugacc

SEQ ID NO: 723954 - RNA, 20 nt, Human
aagcacccaaaacugaccua

SEQ ID NO: 723955 - RNA, 23 nt, Human
aagcacccaaaacugaccuaaaa

SEQ ID NO: 723956 - RNA, 23 nt, Human
aaguuuuauuucuuccucauacc

SEQ ID NO: 723957 - RNA, 21 nt, Human
acaaacaaacaaaaaacccca

SEQ ID NO: 723958 - RNA, 22 nt, Human
acacaugcauacacaaacaaac

SEQ ID NO: 723959 - RNA, 23 nt, Human
acgccaugccauaucuaccuagu

SEQ ID NO: 723960 - RNA, 19 nt, Human
acugcuaaacuccaaugua

SEQ ID NO: 723961 - RNA, 20 nt, Human
agaaaccagugcaagaugga

SEQ ID NO: 723962 - RNA, 19 nt, Human
agaaauaagcaucccuugc

SEQ ID NO: 723963 - RNA, 23 nt, Human
agagaaauaagcaucccuugcaa

SEQ ID NO: 723964 - RNA, 23 nt, Human
agaggacaguaaguguccacaga

SEQ ID NO: 723965 - RNA, 18 nt, Human
agcaaaccaccaaauagg

SEQ ID NO: 723966 - RNA, 18 nt, Human
aggcucacggaacagcag

SEQ ID NO: 723967 - RNA, 20 nt, Human
aguugcucagaacauggguu

SEQ ID NO: 723968 - RNA, 19 nt, Human
auaacuaaacccaagucuc

SEQ ID NO: 723969 - RNA, 19 nt, Human
aucacaacacuuccccugg

SEQ ID NO: 723970 - RNA, 25 nt, Human
aucauauugcuucugugaaaaaaau

SEQ ID NO: 723971 - RNA, 18 nt, Human
auggaacaaggcucacgg

SEQ ID NO: 723972 - RNA, 20 nt, Human
auuacaaauaagcacccaaa

SEQ ID NO: 723973 - RNA, 20 nt, Human
auucuaucaggccuaagaaa

SEQ ID NO: 723974 - RNA, 25 nt, Human
caaaaucaccaccaacucgacacga

SEQ ID NO: 723975 - RNA, 23 nt, Human
caaacaaaaaaccccaggaaugc

SEQ ID NO: 723976 - RNA, 21 nt, Human
caaaccaccaaauaggagucu

SEQ ID NO: 723977 - RNA, 22 nt, Human
caacuggaagaccaugcuuaug

SEQ ID NO: 723978 - RNA, 21 nt, Human
caagauggaaugccaaaauca

SEQ ID NO: 723979 - RNA, 24 nt, Human
caagauucacaaauaauaguguca

SEQ ID NO: 723980 - RNA, 22 nt, Human
caagcuaaaucaaaauaaucca

SEQ ID NO: 723981 - RNA, 21 nt, Human
caaguugaaaagauuuuuuua

SEQ ID NO: 723982 - RNA, 24 nt, Human
caccaaauaggagucucagguccc

SEQ ID NO: 723983 - RNA, 23 nt, Human
cacccacccaaccaaaagaaagu

SEQ ID NO: 723984 - RNA, 20 nt, Human
cacuguguggucaucagaac

SEQ ID NO: 723985 - RNA, 20 nt, Human
cagaacauggguuggaugua

SEQ ID NO: 723986 - RNA, 20 nt, Human
caguuucacccacuguaaga

SEQ ID NO: 723987 - RNA, 25 nt, Human
cauaaauaagcaaguauucccucca

SEQ ID NO: 723988 - RNA, 21 nt, Human
cauuaaguaaaacagugauug

SEQ ID NO: 723989 - RNA, 21 nt, Human
ccacccaaccaaaagaaaguc

SEQ ID NO: 723990 - RNA, 21 nt, Human
ccagaaaaaaagaacugcuaa

SEQ ID NO: 723991 - RNA, 19 nt, Human
ccaguguuugaaagauagc

SEQ ID NO: 723992 - RNA, 27 nt, Human
cccaaccaaaagaaagucaguuucacc

SEQ ID NO: 723993 - RNA, 20 nt, Human
cccuguguauaaacauuaag

SEQ ID NO: 723994 - RNA, 22 nt, Human
ccuaaaauuuucuacucaaucc

SEQ ID NO: 723995 - RNA, 20 nt, Human
ccugcaacuggaagaccauu

SEQ ID NO: 723996 - RNA, 20 nt, Human
cggcggcagcagcacgggcg

SEQ ID NO: 723997 - RNA, 22 nt, Human
cggcggcagcagcacgggcgag

SEQ ID NO: 723998 - RNA, 18 nt, Human
cguuaaagaaaaaauuca

SEQ ID NO: 723999 - RNA, 19 nt, Human
cuaagccuauacuagaaac

SEQ ID NO: 724000 - RNA, 24 nt, Human
cuacaaucuacaaaacuauacaaa

SEQ ID NO: 724001 - RNA, 18 nt, Human
cuacagaagagaggggag

SEQ ID NO: 724002 - RNA, 18 nt, Human
cuacuugaacacuggggc

SEQ ID NO: 724003 - RNA, 22 nt, Human
cuagcaucacaacacuuccccu

SEQ ID NO: 724004 - RNA, 18 nt, Human
cucacggaacagcagcac

SEQ ID NO: 724005 - RNA, 21 nt, Human
cugaugccaguguuugaaaga

SEQ ID NO: 724006 - RNA, 19 nt, Human
cugcaauaaagaaaaaucc

SEQ ID NO: 724007 - RNA, 20 nt, Human
gaaaaaaaaauccaauacaa

SEQ ID NO: 724008 - RNA, 24 nt, Human
gaauaguuuucuacuuucucuuuu

SEQ ID NO: 724009 - RNA, 20 nt, Human
gcaucagguauaagaagcac

SEQ ID NO: 724010 - RNA, 22 nt, Human
gccaggcauuccacuaacaaaa

SEQ ID NO: 724011 - RNA, 21 nt, Human
ggaaaacaacaaagaaaaaaa

SEQ ID NO: 724012 - RNA, 24 nt, Human
ggaaauaaccuaucuaauaauacc

SEQ ID NO: 724013 - RNA, 25 nt, Human
ggaacucuccaaaccaugggugcac

SEQ ID NO: 724014 - RNA, 21 nt, Human
ggaagaccaugcuuaugaaca

SEQ ID NO: 724015 - RNA, 22 nt, Human
ggcaagauuaaguaaaacaagu

SEQ ID NO: 724016 - RNA, 23 nt, Human
guagaggacaguaaguguccaca

SEQ ID NO: 724017 - RNA, 26 nt, Human
uaaaaagcaagcuaaaucaaaauaau

SEQ ID NO: 724018 - RNA, 23 nt, Human
uaacaaaacgccaugccauaucu

SEQ ID NO: 724019 - RNA, 20 nt, Human
uaaccuaucuaauaauacca

SEQ ID NO: 724020 - RNA, 21 nt, Human
uaacguuaaagaaaaaauuca

SEQ ID NO: 724021 - RNA, 21 nt, Human
uaagaaacagaucaagacuua

SEQ ID NO: 724022 - RNA, 21 nt, Human
uaagauaaaccaugacacuug

SEQ ID NO: 724023 - RNA, 22 nt, Human
uaagcaaguauucccuccaaga

SEQ ID NO: 724024 - RNA, 21 nt, Human
uaagccuauacuagaaaccag

SEQ ID NO: 724025 - RNA, 25 nt, Human
uaaggaaauaacuuucaagcaauau

SEQ ID NO: 724026 - RNA, 25 nt, Human
uaauauguacauuaacaaacuucac

SEQ ID NO: 724027 - RNA, 22 nt, Human
uacaaauaagcacccaaaacug

SEQ ID NO: 724028 - RNA, 21 nt, Human
uacacaaacaaacaaaaaacc

SEQ ID NO: 724029 - RNA, 25 nt, Human
uacacaauauaaaacaaugacagau

SEQ ID NO: 724030 - RNA, 23 nt, Human
uacauaaaaaacugaaaucaaga

SEQ ID NO: 724031 - RNA, 23 nt, Human
uacauuaacaaacuucacagaau

SEQ ID NO: 724032 - RNA, 21 nt, Human
uacccaagagaaacuuaucaa

SEQ ID NO: 724033 - RNA, 23 nt, Human
uagaagaggaaaacaacaaagaa

SEQ ID NO: 724034 - RNA, 20 nt, Human
uagaagaggaaaugaaaaga

SEQ ID NO: 724035 - RNA, 21 nt, Human
uagcagaaaagccaaaaacau

SEQ ID NO: 724036 - RNA, 21 nt, Human
uagcaguauuaugaccaacau

SEQ ID NO: 724037 - RNA, 23 nt, Human
uaggaacucuccaaaccaugggu

SEQ ID NO: 724038 - RNA, 22 nt, Human
uaggagucucaggucccuuaau

SEQ ID NO: 724039 - RNA, 22 nt, Human
uaguaucugcacaauuuucugu

SEQ ID NO: 724040 - RNA, 23 nt, Human
uauguacauuaacaaacuucaca

SEQ ID NO: 724041 - RNA, 18 nt, Human
ucacagaauauauauucu

SEQ ID NO: 724042 - RNA, 20 nt, Human
ucaccgguggggcaaaaaaa

SEQ ID NO: 724043 - RNA, 24 nt, Human
ucaggcacaaaacaaaucgcauuu

SEQ ID NO: 724044 - RNA, 24 nt, Human
uccaauacaaucuaauauguacau

SEQ ID NO: 724045 - RNA, 24 nt, Human
uccauuagaacaauaaaaauuuca

SEQ ID NO: 724046 - RNA, 19 nt, Human
ucuguaacuugaguguccu

SEQ ID NO: 724047 - RNA, 26 nt, Human
ucuguaauuaggcuuuucacuaaaac

SEQ ID NO: 724048 - RNA, 24 nt, Human
ucuguucagauuuuauuugaaauc

SEQ ID NO: 724049 - RNA, 24 nt, Human
ugaaagauagccuacagaagauua

SEQ ID NO: 724050 - RNA, 19 nt, Human
ugaauaaacacugaggcau

SEQ ID NO: 724051 - RNA, 23 nt, Human
ugaauuaaacacucccuaaaauc

SEQ ID NO: 724052 - RNA, 19 nt, Human
ugcaucagguauaagaagc

SEQ ID NO: 724053 - RNA, 18 nt, Human
ugccaaaaucaccaccaa

SEQ ID NO: 724054 - RNA, 24 nt, Human
ugccaaaaucaccaccaacucgac

SEQ ID NO: 724055 - RNA, 18 nt, Human
ugccccuccuucggcggc

SEQ ID NO: 724056 - RNA, 22 nt, Human
ugcuuaugaacauucuagucaa

SEQ ID NO: 724057 - RNA, 20 nt, Human
uggaacaaggcucacggaac

SEQ ID NO: 724058 - RNA, 23 nt, Human
uggccaaaccuuguuagaaaauu

SEQ ID NO: 724059 - RNA, 21 nt, Human
ugggaguggggggggaccaac

SEQ ID NO: 724060 - RNA, 19 nt, Human
uuaaaguuuggggggaaau

SEQ ID NO: 724061 - RNA, 21 nt, Human
uuacauugaagcuccaugagg

SEQ ID NO: 724062 - RNA, 23 nt, Human
uuagaauaguuuucuacuuucuc

SEQ ID NO: 724063 - RNA, 18 nt, Human
uucaagaaaaaaaaaucc

SEQ ID NO: 724064 - RNA, 20 nt, Human
uucagaacuuacgccaccau

SEQ ID NO: 724065 - RNA, 20 nt, Human
uuccccugggauuuguacuu

SEQ ID NO: 724066 - RNA, 23 nt, Human
uugcaauucaagaaaaaaaaauc

SEQ ID NO: 724067 - RNA, 22 nt, Human
uuguuagaauaguuuucuacuu

SEQ ID NO: 724068 - RNA, 22 nt, Human
uuugaagagaaauaagcauccc

SEQ ID NO: 724069 - RNA, 21 nt, Human
aaacaaaaucuacaucugaaa

SEQ ID NO: 724070 - RNA, 20 nt, Human
aaacugcacaaaacaguaca

SEQ ID NO: 724071 - RNA, 23 nt, Human
aaaguucugauggaaucuuuuga

SEQ ID NO: 724072 - RNA, 22 nt, Human
aaccaagaagaaaaaaauggcc

SEQ ID NO: 724073 - RNA, 20 nt, Human
aagaaaguagacaaacugca

SEQ ID NO: 724074 - RNA, 20 nt, Human
aagaagcccugaaguuuuca

SEQ ID NO: 724075 - RNA, 22 nt, Human
aagagagggaauggggguguca

SEQ ID NO: 724076 - RNA, 22 nt, Human
aagcucuaguuccagcucugcu

SEQ ID NO: 724077 - RNA, 20 nt, Human
aaguagacaaacugcacaaa

SEQ ID NO: 724078 - RNA, 24 nt, Human
aauaugaucuugcuucaaaauacu

SEQ ID NO: 724079 - RNA, 23 nt, Human
accaaacuuucaaugagacaaag

SEQ ID NO: 724080 - RNA, 19 nt, Human
agaaaagccacucccuugg

SEQ ID NO: 724081 - RNA, 22 nt, Human
agaaaguagacaaacugcacaa

SEQ ID NO: 724082 - RNA, 24 nt, Human
agaaaguagacaaacugcacaaaa

SEQ ID NO: 724083 - RNA, 25 nt, Human
agacaaacugcacaaaaccggaccc

SEQ ID NO: 724084 - RNA, 18 nt, Human
agacaaagaguuuaaauu

SEQ ID NO: 724085 - RNA, 23 nt, Human
agcagcuaacagaaaugcuuugu

SEQ ID NO: 724086 - RNA, 22 nt, Human
agccauuacccucuacuaagaa

SEQ ID NO: 724087 - RNA, 24 nt, Human
aggacaaacaugagauaagcauag

SEQ ID NO: 724088 - RNA, 23 nt, Human
aggaugauucaaaacuacaacug

SEQ ID NO: 724089 - RNA, 18 nt, Human
agggaugggaaccaagaa

SEQ ID NO: 724090 - RNA, 20 nt, Human
auacagaaaagaagcccuga

SEQ ID NO: 724091 - RNA, 22 nt, Human
auacucuaccacaaaaccaaca

SEQ ID NO: 724092 - RNA, 18 nt, Human
caaaaaauacuucacuaa

SEQ ID NO: 724093 - RNA, 25 nt, Human
caaagaaccagcaaaauuggagacc

SEQ ID NO: 724094 - RNA, 22 nt, Human
caaccucugugucucaguuccu

SEQ ID NO: 724095 - RNA, 24 nt, Human
caagaaaagccacucccuuggaag

SEQ ID NO: 724096 - RNA, 19 nt, Human
caagaagaaaaaaauggcc

SEQ ID NO: 724097 - RNA, 18 nt, Human
caaggagccuaauauccu

SEQ ID NO: 724098 - RNA, 26 nt, Human
cacacugagaagcagcuaacagaaau

SEQ ID NO: 724099 - RNA, 19 nt, Human
cacuaaagaacuaaagugg

SEQ ID NO: 724100 - RNA, 20 nt, Human
ccaucuacugcaacauuuga

SEQ ID NO: 724101 - RNA, 24 nt, Human
cgaguagcuuccauuaaaugucuc

SEQ ID NO: 724102 - RNA, 23 nt, Human
cuugaagcugcccaucuacugca

SEQ ID NO: 724103 - RNA, 22 nt, Human
cuuuuugacaaugaaaccuuaa

SEQ ID NO: 724104 - RNA, 20 nt, Human
gaacuaaacugaaagaaaau

SEQ ID NO: 724105 - RNA, 22 nt, Human
gaacuaaacugaaagaaaauaa

SEQ ID NO: 724106 - RNA, 18 nt, Human
gaagaagagagggaaugg

SEQ ID NO: 724107 - RNA, 19 nt, Human
gaagaagagagggaauggg

SEQ ID NO: 724108 - RNA, 19 nt, Human
gagguguaacuguagugag

SEQ ID NO: 724109 - RNA, 21 nt, Human
gagguucuugguaacuauccc

SEQ ID NO: 724110 - RNA, 19 nt, Human
gcaauguugcuuuucuucu

SEQ ID NO: 724111 - RNA, 20 nt, Human
gcccaugaccagcccaagua

SEQ ID NO: 724112 - RNA, 22 nt, Human
ggaagaagagagggaauggggg

SEQ ID NO: 724113 - RNA, 19 nt, Human
ggagaguguucccaaucuc

SEQ ID NO: 724114 - RNA, 21 nt, Human
ggaggacaaacaugagauaag

SEQ ID NO: 724115 - RNA, 18 nt, Human
gucacuaaagaacuaaag

SEQ ID NO: 724116 - RNA, 20 nt, Human
uaaacaccauguacauuauu

SEQ ID NO: 724117 - RNA, 24 nt, Human
uaaagugggaaaauuguuuuauca

SEQ ID NO: 724118 - RNA, 21 nt, Human
uaaaugucucugcccaugacc

SEQ ID NO: 724119 - RNA, 20 nt, Human
uaacaauguaacaaaaaauc

SEQ ID NO: 724120 - RNA, 23 nt, Human
uaacccuaacuucccgagaacac

SEQ ID NO: 724121 - RNA, 23 nt, Human
uaacuucccgagaacacguuuaa

SEQ ID NO: 724122 - RNA, 24 nt, Human
uaagaaaguagacaaacugcacaa

SEQ ID NO: 724123 - RNA, 27 nt, Human
uacaaaaaauacuucacuaagaaagua

SEQ ID NO: 724124 - RNA, 24 nt, Human
uacagaaaagaagcccugaaguuu

SEQ ID NO: 724125 - RNA, 25 nt, Human
uacauacaacuuuuacucuuccaca

SEQ ID NO: 724126 - RNA, 22 nt, Human
uaccucaaaaacaaaaucuaca

SEQ ID NO: 724127 - RNA, 19 nt, Human
uagacaaacugcacaaaac

SEQ ID NO: 724128 - RNA, 22 nt, Human
uagcacaaaucuuucuuucaca

SEQ ID NO: 724129 - RNA, 23 nt, Human
uaggcucaauuuaagaaacacaa

SEQ ID NO: 724130 - RNA, 24 nt, Human
uaguuucuuucaaaacuuuugagu

SEQ ID NO: 724131 - RNA, 19 nt, Human
ucaaaauuuucuuuaaccc

SEQ ID NO: 724132 - RNA, 29 nt, Human
ucaacuucucuggaccucaguuuccucaa

SEQ ID NO: 724133 - RNA, 18 nt, Human
ucauuaacacuuguaaca

SEQ ID NO: 724134 - RNA, 20 nt, Human
uccaaagaaccagcaaaauu

SEQ ID NO: 724135 - RNA, 18 nt, Human
ucuaacaagugacagagu

SEQ ID NO: 724136 - RNA, 20 nt, Human
ucugcauuaugguaacugaa

SEQ ID NO: 724137 - RNA, 18 nt, Human
ucuuuuuuucugaaaacu

SEQ ID NO: 724138 - RNA, 21 nt, Human
ugaaaauguucauuacagaaa

SEQ ID NO: 724139 - RNA, 20 nt, Human
ugaaagagcucuccaucucc

SEQ ID NO: 724140 - RNA, 21 nt, Human
ugaaauaaaaaccaagaaaau

SEQ ID NO: 724141 - RNA, 21 nt, Human
ugacaaugaaaccuuaaguac

SEQ ID NO: 724142 - RNA, 20 nt, Human
ugagaaacuccuucaguucu

SEQ ID NO: 724143 - RNA, 18 nt, Human
ugccaaaaacucuucaag

SEQ ID NO: 724144 - RNA, 26 nt, Human
uggaaaaaaaauuuacuugccaaaaa

SEQ ID NO: 724145 - RNA, 22 nt, Human
uggaagaagagagggaaugggg

SEQ ID NO: 724146 - RNA, 18 nt, Human
ugguggaagaagagaggg

SEQ ID NO: 724147 - RNA, 20 nt, Human
uguacagacuuaauuuguua

SEQ ID NO: 724148 - RNA, 21 nt, Human
ugucauuaacacuuguaacaa

SEQ ID NO: 724149 - RNA, 21 nt, Human
ugugaccuugggaaaacuuca

SEQ ID NO: 724150 - RNA, 21 nt, Human
uguuaacacaagaacuccauu

SEQ ID NO: 724151 - RNA, 24 nt, Human
uguuuauggaggacaaacaugaga

SEQ ID NO: 724152 - RNA, 22 nt, Human
uguuucacggacaucuucaggu

SEQ ID NO: 724153 - RNA, 26 nt, Human
uuaacccuaacuucccgagaacacgu

SEQ ID NO: 724154 - RNA, 21 nt, Human
uuaugcacugccucugggucc

SEQ ID NO: 724155 - RNA, 19 nt, Human
uucacagaacuaacagguu

SEQ ID NO: 724156 - RNA, 23 nt, Human
uugaaagccuaggucugcuaaau

SEQ ID NO: 724157 - RNA, 22 nt, Human
uugccaaaaacucuucaagcau

SEQ ID NO: 724158 - RNA, 23 nt, Human
uugccaaaaacucuucaagcauu

SEQ ID NO: 724159 - RNA, 18 nt, Human
uuguccuaauuuggacau

SEQ ID NO: 724160 - RNA, 20 nt, Human
uuuacaguuucuguuucuag

SEQ ID NO: 724161 - RNA, 24 nt, Human
uuuacauaaaagguacaaaaauau

SEQ ID NO: 724162 - RNA, 28 nt, Human
uuuagaacuaaaagggaaaagccgcaaa

SEQ ID NO: 724163 - RNA, 23 nt, Human
aaaaauuucucaacaauuuauaa

SEQ ID NO: 724164 - RNA, 21 nt, Human
aaaaggucuaaagucaaagag

SEQ ID NO: 724165 - RNA, 18 nt, Human
aaacacugaaagcaccac

SEQ ID NO: 724166 - RNA, 19 nt, Human
aaacacugaaagcaccacu

SEQ ID NO: 724167 - RNA, 19 nt, Human
aagagccuggaaagacacc

SEQ ID NO: 724168 - RNA, 24 nt, Human
accaaagugcaaagccaguucucc

SEQ ID NO: 724169 - RNA, 21 nt, Human
acuuccucucauugcagaaac

SEQ ID NO: 724170 - RNA, 27 nt, Human
agaaaccaugaaagaauaccgguaccc

SEQ ID NO: 724171 - RNA, 24 nt, Human
agacaccaugaaaucaccucaacu

SEQ ID NO: 724172 - RNA, 22 nt, Human
agagacaaggucucgcucuguu

SEQ ID NO: 724173 - RNA, 18 nt, Human
agagagcauacuguguga

SEQ ID NO: 724174 - RNA, 21 nt, Human
agcaauucuccagccucagcc

SEQ ID NO: 724175 - RNA, 19 nt, Human
agcuggugaagccacccca

SEQ ID NO: 724176 - RNA, 25 nt, Human
aggugucaaaggcaaguaacacuuc

SEQ ID NO: 724177 - RNA, 22 nt, Human
agucacuguugugauagguuuu

SEQ ID NO: 724178 - RNA, 18 nt, Human
augcagaggugucaaagg

SEQ ID NO: 724179 - RNA, 25 nt, Human
auuacaaauuauccaauuuuugauu

SEQ ID NO: 724180 - RNA, 19 nt, Human
auuuuccuuuuucagagaa

SEQ ID NO: 724181 - RNA, 21 nt, Human
caaaaacacugaaagcaccac

SEQ ID NO: 724182 - RNA, 21 nt, Human
caaaaacacugaaagcaccac

SEQ ID NO: 724183 - RNA, 23 nt, Human
caaacucaacauaucagcagcaa

SEQ ID NO: 724184 - RNA, 22 nt, Human
caaagugcaaagccaguucucc

SEQ ID NO: 724185 - RNA, 18 nt, Human
caagagccuggaaagaca

SEQ ID NO: 724186 - RNA, 25 nt, Human
cacaccuggccuugaaacauuauuu

SEQ ID NO: 724187 - RNA, 18 nt, Human
cacuuuuaccaacaaagc

SEQ ID NO: 724188 - RNA, 18 nt, Human
cagaagaagagcauccag

SEQ ID NO: 724189 - RNA, 19 nt, Human
cagaagaagagcauccaga

SEQ ID NO: 724190 - RNA, 20 nt, Human
cagaagaagagcauccagac

SEQ ID NO: 724191 - RNA, 20 nt, Human
cauauagauguacaaauaua

SEQ ID NO: 724192 - RNA, 20 nt, Human
cauauagauguacaaauaua

SEQ ID NO: 724193 - RNA, 23 nt, Human
ccaaaaacacugaaagcaccagu

SEQ ID NO: 724194 - RNA, 20 nt, Human
ccagaagaagagcauccaga

SEQ ID NO: 724195 - RNA, 21 nt, Human
ccagggguagcuggugaagcc

SEQ ID NO: 724196 - RNA, 21 nt, Human
cccgccgccggcccgcaacca

SEQ ID NO: 724197 - RNA, 19 nt, Human
ccugagguuccagagaagu

SEQ ID NO: 724198 - RNA, 26 nt, Human
ccuucaguaacagguuuuuggcggac

SEQ ID NO: 724199 - RNA, 21 nt, Human
cgccggcccgcaaccagccgc

SEQ ID NO: 724200 - RNA, 21 nt, Human
cuagccucaagcaauucucca

SEQ ID NO: 724201 - RNA, 23 nt, Human
cuccagccucagccucccaaagu

SEQ ID NO: 724202 - RNA, 21 nt, Human
cucugcuuuuuccagaagaag

SEQ ID NO: 724203 - RNA, 25 nt, Human
cuucauagccccuuaacaugucacu

SEQ ID NO: 724204 - RNA, 22 nt, Human
cuuuuugacaaaagaauugugg

SEQ ID NO: 724205 - RNA, 21 nt, Human
gaacacuaucugccaaaaaca

SEQ ID NO: 724206 - RNA, 25 nt, Human
gagaaagugaaauauauuuaaauau

SEQ ID NO: 724207 - RNA, 22 nt, Human
gagugcagugggagucacagcu

SEQ ID NO: 724208 - RNA, 22 nt, Human
gcagaaaccaugaaagaauacg

SEQ ID NO: 724209 - RNA, 18 nt, Human
gcaugggaaaucacauga

SEQ ID NO: 724210 - RNA, 23 nt, Human
gccucaagcaauucuccagccuc

SEQ ID NO: 724211 - RNA, 20 nt, Human
gccucagccucccaaaguag

SEQ ID NO: 724212 - RNA, 19 nt, Human
ggaaaauggagaggauucu

SEQ ID NO: 724213 - RNA, 22 nt, Human
ggaacacuaucugccaaaaaca

SEQ ID NO: 724214 - RNA, 21 nt, Human
ggagaggauucucaaaacaga

SEQ ID NO: 724215 - RNA, 21 nt, Human
ggaucuagucauuaaaacaua

SEQ ID NO: 724216 - RNA, 19 nt, Human
guucuucaauuucuuucuc

SEQ ID NO: 724217 - RNA, 26 nt, Human
uaaaaaaacuaaacucuucaugucag

SEQ ID NO: 724218 - RNA, 25 nt, Human
uaaacuguauuuuaacuuagcacaa

SEQ ID NO: 724219 - RNA, 19 nt, Human
uaaauuaagaguauaaacu

SEQ ID NO: 724220 - RNA, 18 nt, Human
uaacaaucuguaacucug

SEQ ID NO: 724221 - RNA, 24 nt, Human
uacucauagucaguguuacacuag

SEQ ID NO: 724222 - RNA, 21 nt, Human
uacugccgagaaaugggcggg

SEQ ID NO: 724223 - RNA, 22 nt, Human
uagagacaaggucucgcucugu

SEQ ID NO: 724224 - RNA, 20 nt, Human
uagaugcaaacauauauaca

SEQ ID NO: 724225 - RNA, 25 nt, Human
uagccucaagcaauucuccagccuc

SEQ ID NO: 724226 - RNA, 24 nt, Human
uauguagaugcaaacauauauaca

SEQ ID NO: 724227 - RNA, 26 nt, Human
uauguagaugcaaacauauauacaca

SEQ ID NO: 724228 - RNA, 18 nt, Human
ucaugucagcucugaaau

SEQ ID NO: 724229 - RNA, 21 nt, Human
uccagaagaagagcauccaga

SEQ ID NO: 724230 - RNA, 25 nt, Human
ucggaggaacugugacgauguagca

SEQ ID NO: 724231 - RNA, 19 nt, Human
ucuaaagucaaagagaaag

SEQ ID NO: 724232 - RNA, 23 nt, Human
ucuaagacaggaggaaagaugag

SEQ ID NO: 724233 - RNA, 19 nt, Human
ucuccagccucagccuccc

SEQ ID NO: 724234 - RNA, 20 nt, Human
ucuccgccagcccgccgccg

SEQ ID NO: 724235 - RNA, 24 nt, Human
ucucgcucuguuccccgagcugga

SEQ ID NO: 724236 - RNA, 20 nt, Human
ucuguguaaccaaagugcaa

SEQ ID NO: 724237 - RNA, 22 nt, Human
ugaaaucaccucaacucaagug

SEQ ID NO: 724238 - RNA, 23 nt, Human
uggaacacuaucugccaaaaaca

SEQ ID NO: 724239 - RNA, 24 nt, Human
uggaacacuaucugccaaaaacac

SEQ ID NO: 724240 - RNA, 18 nt, Human
uggagugcagugggaguc

SEQ ID NO: 724241 - RNA, 24 nt, Human
ugggauuucaggcaugaaucacca

SEQ ID NO: 724242 - RNA, 20 nt, Human
ugggcggguccugagguucc

SEQ ID NO: 724243 - RNA, 22 nt, Human
uguaaccaaagugcaaagccag

SEQ ID NO: 724244 - RNA, 23 nt, Human
ugucaaaggcaaguaacacuacc

SEQ ID NO: 724245 - RNA, 23 nt, Human
uuaaaauaaucauuacacuuccu

SEQ ID NO: 724246 - RNA, 20 nt, Human
uuagauccaaugcugaguga

SEQ ID NO: 724247 - RNA, 20 nt, Human
uucaauuucuuucuccaauu

SEQ ID NO: 724248 - RNA, 18 nt, Human
uuccccgagcuggagugc

SEQ ID NO: 724249 - RNA, 22 nt, Human
uucuaagacaggaggaaagaug

SEQ ID NO: 724250 - RNA, 22 nt, Human
uuggaucuagucauuaaaacau

SEQ ID NO: 724251 - RNA, 25 nt, Human
aaaaccaaaaccaaacagaacaaaa

SEQ ID NO: 724252 - RNA, 19 nt, Human
aaaacccuccaaauauugc

SEQ ID NO: 724253 - RNA, 20 nt, Human
aaacaaaaccaaaaccaaac

SEQ ID NO: 724254 - RNA, 21 nt, Human
aaacaaaccccaucugaaacc

SEQ ID NO: 724255 - RNA, 21 nt, Human
aaacagaacaaaacaaacccc

SEQ ID NO: 724256 - RNA, 19 nt, Human
aaacauaaucuaagaccgc

SEQ ID NO: 724257 - RNA, 22 nt, Human
aaaccaaacagaacaaaacaaa

SEQ ID NO: 724258 - RNA, 20 nt, Human
aaagcccuguccaaggcccc

SEQ ID NO: 724259 - RNA, 23 nt, Human
aaaggcaccaccaacaaacuggg

SEQ ID NO: 724260 - RNA, 19 nt, Human
aacaaaacaaaccccaucu

SEQ ID NO: 724261 - RNA, 18 nt, Human
aaccacuaaaggcaccac

SEQ ID NO: 724262 - RNA, 23 nt, Human
aagcagggccaaggacugggggc

SEQ ID NO: 724263 - RNA, 19 nt, Human
aagcgagggggcugagggu

SEQ ID NO: 724264 - RNA, 18 nt, Human
acaaaccccaucugaaac

SEQ ID NO: 724265 - RNA, 18 nt, Human
acagaacaaaacaaaccc

SEQ ID NO: 724266 - RNA, 22 nt, Human
acaugcagugugcguacgugug

SEQ ID NO: 724267 - RNA, 21 nt, Human
accaccaacaaacugggaaau

SEQ ID NO: 724268 - RNA, 22 nt, Human
accacuaaaggcaccaccaaca

SEQ ID NO: 724269 - RNA, 18 nt, Human
acccagcugugucuuugg

SEQ ID NO: 724270 - RNA, 23 nt, Human
acccuccaaauauugcacauggc

SEQ ID NO: 724271 - RNA, 19 nt, Human
agaaagcccuguccaaggc

SEQ ID NO: 724272 - RNA, 19 nt, Human
agaacaaaacaaaccccau

SEQ ID NO: 724273 - RNA, 24 nt, Human
agaccgcaaugacccacccacccc

SEQ ID NO: 724274 - RNA, 20 nt, Human
agagggucgggagaagccau

SEQ ID NO: 724275 - RNA, 21 nt, Human
agcaagagaaacauaaucuaa

SEQ ID NO: 724276 - RNA, 25 nt, Human
aggcagagcccacgcaggcacaugg

SEQ ID NO: 724277 - RNA, 18 nt, Human
aggcaggugggcgggcga

SEQ ID NO: 724278 - RNA, 21 nt, Human
aggcaggugggcgggcgaguc

SEQ ID NO: 724279 - RNA, 22 nt, Human
aggcaggugggcgggcgagucc

SEQ ID NO: 724280 - RNA, 20 nt, Human
aggcuggggcccuggaaagu

SEQ ID NO: 724281 - RNA, 23 nt, Human
agggaaccacuaaaggcaccacc

SEQ ID NO: 724282 - RNA, 21 nt, Human
aggggcuucccuuggcagaag

SEQ ID NO: 724283 - RNA, 22 nt, Human
agggucagagguccuggucagc

SEQ ID NO: 724284 - RNA, 20 nt, Human
agguagaggcugcucucaag

SEQ ID NO: 724285 - RNA, 24 nt, Human
agucugcgugugggcuagggagag

SEQ ID NO: 724286 - RNA, 23 nt, Human
aguggcucucugugguccagggg

SEQ ID NO: 724287 - RNA, 21 nt, Human
aucacccccaccccaggugac

SEQ ID NO: 724288 - RNA, 22 nt, Human
aucacugcccccuaauagucag

SEQ ID NO: 724289 - RNA, 20 nt, Human
augacuggaagcaccggggc

SEQ ID NO: 724290 - RNA, 18 nt, Human
augcuuccgcgaagacaa

SEQ ID NO: 724291 - RNA, 22 nt, Human
caaaacaaaccccaucugaaac

SEQ ID NO: 724292 - RNA, 25 nt, Human
caaaaccaaaaccaaacagaaccga

SEQ ID NO: 724293 - RNA, 27 nt, Human
caaaaccaaacagaacaaaacaaaccc

SEQ ID NO: 724294 - RNA, 23 nt, Human
caaacagaacaaaacaaacccca

SEQ ID NO: 724295 - RNA, 24 nt, Human
caaacagaacaaaacaaaccccau

SEQ ID NO: 724296 - RNA, 22 nt, Human
caaagccugacagguccccaga

SEQ ID NO: 724297 - RNA, 20 nt, Human
caaauauugcacauggcccu

SEQ ID NO: 724298 - RNA, 19 nt, Human
cacccaccccaaacaaaac

SEQ ID NO: 724299 - RNA, 23 nt, Human
cacccaccccaaacaaaaccaaa

SEQ ID NO: 724300 - RNA, 21 nt, Human
caccccaggugaccaggucac

SEQ ID NO: 724301 - RNA, 22 nt, Human
cacgcaggcacaugugugcccc

SEQ ID NO: 724302 - RNA, 23 nt, Human
cacugcccccuaauagucagcau

SEQ ID NO: 724303 - RNA, 19 nt, Human
cagccccucagcuuugggg

SEQ ID NO: 724304 - RNA, 20 nt, Human
cagccuuccugcugcccucc

SEQ ID NO: 724305 - RNA, 22 nt, Human
cagggugguccccagggcagga

SEQ ID NO: 724306 - RNA, 20 nt, Human
cagugcaugagacacaggga

SEQ ID NO: 724307 - RNA, 18 nt, Human
caguggguguuccaucag

SEQ ID NO: 724308 - RNA, 24 nt, Human
caucuugaucuagaggacugaggg

SEQ ID NO: 724309 - RNA, 23 nt, Human
ccaaaaccaaacagaacaaaaca

SEQ ID NO: 724310 - RNA, 28 nt, Human
ccaaaaccaaacagaacaaaacaaaccc

SEQ ID NO: 724311 - RNA, 22 nt, Human
ccaaacaaaaccaaaaccaaac

SEQ ID NO: 724312 - RNA, 26 nt, Human
ccaaacaaaaccaaaaccaaacagaa

SEQ ID NO: 724313 - RNA, 24 nt, Human
ccaaacagaacaaaacaaacccca

SEQ ID NO: 724314 - RNA, 24 nt, Human
ccagggcaggaauagguuucuuuu

SEQ ID NO: 724315 - RNA, 23 nt, Human
cccacccaccccaaacaaaacca

SEQ ID NO: 724316 - RNA, 21 nt, Human
cccaccccaaacaaaaccaaa

SEQ ID NO: 724317 - RNA, 24 nt, Human
ccccaccccaggugaccaggucac

SEQ ID NO: 724318 - RNA, 21 nt, Human
ccccacccgaucaugacugga

SEQ ID NO: 724319 - RNA, 18 nt, Human
ccccagccccgugggguc

SEQ ID NO: 724320 - RNA, 20 nt, Human
ccccaucaggcuggggcccu

SEQ ID NO: 724321 - RNA, 23 nt, Human
cccccaccccaggugaccagguc

SEQ ID NO: 724322 - RNA, 21 nt, Human
ccccucagcuuuggggggucc

SEQ ID NO: 724323 - RNA, 18 nt, Human
cccgugggguccagaccc

SEQ ID NO: 724324 - RNA, 23 nt, Human
ccuccaaggugaccauaugugcc

SEQ ID NO: 724325 - RNA, 21 nt, Human
ccuccagaaaacccuccaaau

SEQ ID NO: 724326 - RNA, 21 nt, Human
ccugggccacggcagacaggg

SEQ ID NO: 724327 - RNA, 22 nt, Human
ccuuccugcugcccuccagaaa

SEQ ID NO: 724328 - RNA, 24 nt, Human
cgaagacaaggcagagcccacgca

SEQ ID NO: 724329 - RNA, 21 nt, Human
cuccuaccugagagaaagccc

SEQ ID NO: 724330 - RNA, 18 nt, Human
cuuccugcugcccuccag

SEQ ID NO: 724331 - RNA, 22 nt, Human
gcaaugacccacccaccccaaa

SEQ ID NO: 724332 - RNA, 21 nt, Human
gcaggcugaaggcaggugggc

SEQ ID NO: 724333 - RNA, 22 nt, Human
gccugacagguccccagauggc

SEQ ID NO: 724334 - RNA, 19 nt, Human
gcgggcgaguccugggcca

SEQ ID NO: 724335 - RNA, 23 nt, Human
gcuggccaguggguguuccauca

SEQ ID NO: 724336 - RNA, 23 nt, Human
ggacugagggcagccccaucagg

SEQ ID NO: 724337 - RNA, 18 nt, Human
ggacugggggcgacugug

SEQ ID NO: 724338 - RNA, 18 nt, Human
ggcucaggggcgcauggg

SEQ ID NO: 724339 - RNA, 18 nt, Human
ggcuccuaggucugcccu

SEQ ID NO: 724340 - RNA, 20 nt, Human
gggaaccacuaaaggcacca

SEQ ID NO: 724341 - RNA, 20 nt, Human
gggaagcagggccaaggacu

SEQ ID NO: 724342 - RNA, 20 nt, Human
gggcaggaauagguuucuuu

SEQ ID NO: 724343 - RNA, 20 nt, Human
gggcgggcgaguccugggcc

SEQ ID NO: 724344 - RNA, 22 nt, Human
gggucagaguggcucucugugg

SEQ ID NO: 724345 - RNA, 18 nt, Human
gguccuggucagcccaca

SEQ ID NO: 724346 - RNA, 22 nt, Human
guccaaggccccaucaguguuc

SEQ ID NO: 724347 - RNA, 23 nt, Human
guuuagggccuuggacaugcagu

SEQ ID NO: 724348 - RNA, 20 nt, Human
uaaaaagaaacauaaauacu

SEQ ID NO: 724349 - RNA, 22 nt, Human
uaaaggcaccaccaacaaacug

SEQ ID NO: 724350 - RNA, 28 nt, Human
uaaaggcaccaccaacaaacuggagacc

SEQ ID NO: 724351 - RNA, 22 nt, Human
uaaauaagugcuugggaaggua

SEQ ID NO: 724352 - RNA, 23 nt, Human
uacuccuggucaaagucugcgug

SEQ ID NO: 724353 - RNA, 20 nt, Human
uagagucccagggugguccc

SEQ ID NO: 724354 - RNA, 21 nt, Human
uagcugaagaagcgagggggc

SEQ ID NO: 724355 - RNA, 24 nt, Human
uagggaaccacuaaaggcaccacc

SEQ ID NO: 724356 - RNA, 21 nt, Human
ucagcccacaugucccccacc

SEQ ID NO: 724357 - RNA, 21 nt, Human
uccaaagagaguuaauacaug

SEQ ID NO: 724358 - RNA, 19 nt, Human
uccaggaaggcuugguuag

SEQ ID NO: 724359 - RNA, 25 nt, Human
uccccagauggcaaucacugcccuu

SEQ ID NO: 724360 - RNA, 21 nt, Human
uccccagccuuccugcugccc

SEQ ID NO: 724361 - RNA, 22 nt, Human
ucccuccaggaaggcuugguua

SEQ ID NO: 724362 - RNA, 20 nt, Human
uccucaaaucacccccaccc

SEQ ID NO: 724363 - RNA, 19 nt, Human
uccugaaggggcuucccuu

SEQ ID NO: 724364 - RNA, 19 nt, Human
ugacuggaagcaccggggc

SEQ ID NO: 724365 - RNA, 25 nt, Human
ugagagaaagcccuguccaaggcug

SEQ ID NO: 724366 - RNA, 18 nt, Human
ugaggagaucaugggccc

SEQ ID NO: 724367 - RNA, 23 nt, Human
ugcccuccagaaaacccuccaaa

SEQ ID NO: 724368 - RNA, 22 nt, Human
ugcguacgugugugucuguaug

SEQ ID NO: 724369 - RNA, 21 nt, Human
uggaguuuuagcugaagaagc

SEQ ID NO: 724370 - RNA, 21 nt, Human
uggaguuuuagcugaagaagc

SEQ ID NO: 724371 - RNA, 23 nt, Human
uggccuggcuggccagugggugu

SEQ ID NO: 724372 - RNA, 22 nt, Human
ugggcgggcgaguccugggcca

SEQ ID NO: 724373 - RNA, 20 nt, Human
ugugugccccuggcuggaua

SEQ ID NO: 724374 - RNA, 18 nt, Human
uucaucauccaaagagag

SEQ ID NO: 724375 - RNA, 22 nt, Human
uuuuuuuuuugcagucaucugg

SEQ ID NO: 724376 - RNA, 18 nt, Human
uuuuuuuuuuuuuuuuug

SEQ ID NO: 724377 - RNA, 22 nt, Human
uuuuuuuuuuuuuuuuugcagu

SEQ ID NO: 724378 - RNA, 24 nt, Human
aaaaacaaucaggggguggugggc

SEQ ID NO: 724379 - RNA, 23 nt, Human
aagcugccuccagggacugaggc

SEQ ID NO: 724380 - RNA, 20 nt, Human
aagggugacccucagggucu

SEQ ID NO: 724381 - RNA, 23 nt, Human
acaaagcaagaggacuguguagc

SEQ ID NO: 724382 - RNA, 26 nt, Human
acaaagcaagaggacuguguagcccc

SEQ ID NO: 724383 - RNA, 22 nt, Human
acccaccccgccauccuggccu

SEQ ID NO: 724384 - RNA, 22 nt, Human
acccauccugccccaccucagu

SEQ ID NO: 724385 - RNA, 23 nt, Human
accucaguuuagggagccccggc

SEQ ID NO: 724386 - RNA, 25 nt, Human
acugggggugcagagcccccccagg

SEQ ID NO: 724387 - RNA, 26 nt, Human
acuguguagccccccaggacagaauu

SEQ ID NO: 724388 - RNA, 21 nt, Human
agaaaaacaaucagggggugg

SEQ ID NO: 724389 - RNA, 18 nt, Human
aggcagaagcugccucca

SEQ ID NO: 724390 - RNA, 21 nt, Human
aggcagaagcugccuccaggg

SEQ ID NO: 724391 - RNA, 22 nt, Human
aggcgcggggcgguggcggcgg

SEQ ID NO: 724392 - RNA, 19 nt, Human
agggacugaggcucccucg

SEQ ID NO: 724393 - RNA, 24 nt, Human
auaaauaggggugugggcacccau

SEQ ID NO: 724394 - RNA, 21 nt, Human
caaacagaccccacucgugga

SEQ ID NO: 724395 - RNA, 19 nt, Human
cacugcguggcucguaggc

SEQ ID NO: 724396 - RNA, 19 nt, Human
cagcagcaauggguuccau

SEQ ID NO: 724397 - RNA, 19 nt, Human
cagcagcaauggguuccau

SEQ ID NO: 724398 - RNA, 21 nt, Human
cagccaccaccaccucggggg

SEQ ID NO: 724399 - RNA, 21 nt, Human
cagcuucuucuccgcaaagaa

SEQ ID NO: 724400 - RNA, 21 nt, Human
caggaacagaugaggcagggu

SEQ ID NO: 724401 - RNA, 24 nt, Human
caggacagaaucuguacaggccgg

SEQ ID NO: 724402 - RNA, 25 nt, Human
cauccuggccuggcugagccgggga

SEQ ID NO: 724403 - RNA, 21 nt, Human
cauccuggggccgccgcuugc

SEQ ID NO: 724404 - RNA, 21 nt, Human
ccacccggaacagguagcugc

SEQ ID NO: 724405 - RNA, 24 nt, Human
ccagcccagcaaaagggacccacc

SEQ ID NO: 724406 - RNA, 19 nt, Human
cccacgcuuggagaugggg

SEQ ID NO: 724407 - RNA, 23 nt, Human
cccacucguggauccggcuccgg

SEQ ID NO: 724408 - RNA, 22 nt, Human
cccaggacugggggugcagagc

SEQ ID NO: 724409 - RNA, 21 nt, Human
cccauccugccccaccucagu

SEQ ID NO: 724410 - RNA, 19 nt, Human
ccccagggggagaacaugg

SEQ ID NO: 724411 - RNA, 18 nt, Human
cccccaggacagaaucug

SEQ ID NO: 724412 - RNA, 21 nt, Human
cccccucuuccucccccuccu

SEQ ID NO: 724413 - RNA, 19 nt, Human
ccccugaguguccacgccc

SEQ ID NO: 724414 - RNA, 19 nt, Human
cccgccauccuggccuggc

SEQ ID NO: 724415 - RNA, 18 nt, Human
cccggggcccauccuggg

SEQ ID NO: 724416 - RNA, 19 nt, Human
ccggcaccccagguuucca

SEQ ID NO: 724417 - RNA, 22 nt, Human
ccggcaccccagguuuccacag

SEQ ID NO: 724418 - RNA, 21 nt, Human
ccuccucuuccucccccucuu

SEQ ID NO: 724419 - RNA, 25 nt, Human
cgcucagcagccgccgcugucggac

SEQ ID NO: 724420 - RNA, 23 nt, Human
cgggaucuuguugucuuccagug

SEQ ID NO: 724421 - RNA, 18 nt, Human
cucagccaccaccaccuc

SEQ ID NO: 724422 - RNA, 20 nt, Human
cuccagggacugaggcuccc

SEQ ID NO: 724423 - RNA, 26 nt, Human
cuccccaucgcugcugcugcugcugu

SEQ ID NO: 724424 - RNA, 19 nt, Human
cucccccuccucuucgccc

SEQ ID NO: 724425 - RNA, 25 nt, Human
cucccccucuuccucccccuccucc

SEQ ID NO: 724426 - RNA, 19 nt, Human
cuccucccgcugcugcugc

SEQ ID NO: 724427 - RNA, 23 nt, Human
cuccucccgcugcugcugcaguu

SEQ ID NO: 724428 - RNA, 22 nt, Human
cucgcugggcuuggggccccca

SEQ ID NO: 724429 - RNA, 18 nt, Human
cugagcccacuaaggcug

SEQ ID NO: 724430 - RNA, 24 nt, Human
cugaggcucccucgcugggcuugg

SEQ ID NO: 724431 - RNA, 19 nt, Human
cugcacguagcgcuucucc

SEQ ID NO: 724432 - RNA, 20 nt, Human
cugcacguagcgcuucuccc

SEQ ID NO: 724433 - RNA, 21 nt, Human
cugcagcagccgcucguacgu

SEQ ID NO: 724434 - RNA, 23 nt, Human
gaacagguagcugcugccaaugc

SEQ ID NO: 724435 - RNA, 18 nt, Human
gaacauggccacugcccc

SEQ ID NO: 724436 - RNA, 18 nt, Human
gagaugggggcauguggg

SEQ ID NO: 724437 - RNA, 18 nt, Human
gcagaagcugccuccagg

SEQ ID NO: 724438 - RNA, 21 nt, Human
gcagagcccccccagggggag

SEQ ID NO: 724439 - RNA, 22 nt, Human
gccggcaccccagguuuccaca

SEQ ID NO: 724440 - RNA, 22 nt, Human
gcgcggggcgguggcggcgggg

SEQ ID NO: 724441 - RNA, 18 nt, Human
gcgcucagcagccgccgc

SEQ ID NO: 724442 - RNA, 21 nt, Human
gcguggcucguaggcgcgggg

SEQ ID NO: 724443 - RNA, 20 nt, Human
gcugcagcagccgcucguac

SEQ ID NO: 724444 - RNA, 20 nt, Human
gcugcaguugcugcggcuug

SEQ ID NO: 724445 - RNA, 20 nt, Human
ggaacagaugaggcaggguu

SEQ ID NO: 724446 - RNA, 21 nt, Human
ggagaacauggccacugcccc

SEQ ID NO: 724447 - RNA, 19 nt, Human
ggagaugggggcauguggg

SEQ ID NO: 724448 - RNA, 20 nt, Human
ggagggcggcggcgccgggc

SEQ ID NO: 724449 - RNA, 19 nt, Human
ggaucuuguugucuuccag

SEQ ID NO: 724450 - RNA, 18 nt, Human
ggcggcgggggugggggc

SEQ ID NO: 724451 - RNA, 23 nt, Human
gggaauaaauaggggugugggca

SEQ ID NO: 724452 - RNA, 18 nt, Human
gggcaggggugacaggag

SEQ ID NO: 724453 - RNA, 21 nt, Human
gggcaggggugacaggagagg

SEQ ID NO: 724454 - RNA, 21 nt, Human
ggggcgguggcggcgggggug

SEQ ID NO: 724455 - RNA, 22 nt, Human
ggggcgguggcggcgggggugg

SEQ ID NO: 724456 - RNA, 19 nt, Human
gggggugggggcggagggc

SEQ ID NO: 724457 - RNA, 18 nt, Human
ggggugggggcggagggc

SEQ ID NO: 724458 - RNA, 18 nt, Human
ggggugggggcggagggc

SEQ ID NO: 724459 - RNA, 23 nt, Human
gggguggugggcaggggugacag

SEQ ID NO: 724460 - RNA, 24 nt, Human
gugcagcagugguugaugaaucug

SEQ ID NO: 724461 - RNA, 20 nt, Human
guggcggcgggggugggggc

SEQ ID NO: 724462 - RNA, 22 nt, Human
gugggggcggagggcggcggcg

SEQ ID NO: 724463 - RNA, 22 nt, Human
guggugggcaggggugacagga

SEQ ID NO: 724464 - RNA, 22 nt, Human
guuccaggcacggaguccccag

SEQ ID NO: 724465 - RNA, 19 nt, Human
uaagccgcagguaacucau

SEQ ID NO: 724466 - RNA, 23 nt, Human
uagcugcugccaaugcccuccug

SEQ ID NO: 724467 - RNA, 23 nt, Human
uauaaaaauguggcgucggguuu

SEQ ID NO: 724468 - RNA, 18 nt, Human
ucagcaggucacugucca

SEQ ID NO: 724469 - RNA, 19 nt, Human
ucagggucuggcaggaaca

SEQ ID NO: 724470 - RNA, 21 nt, Human
ucccgcugcugcugcaguugc

SEQ ID NO: 724471 - RNA, 18 nt, Human
ucccggggcccauccugg

SEQ ID NO: 724472 - RNA, 19 nt, Human
ucccucgcugggcuugggg

SEQ ID NO: 724473 - RNA, 19 nt, Human
uccucuucgcccuccuccc

SEQ ID NO: 724474 - RNA, 23 nt, Human
uccucuucgcccuccucccgcug

SEQ ID NO: 724475 - RNA, 21 nt, Human
ucgcugggcuuggggccccca

SEQ ID NO: 724476 - RNA, 21 nt, Human
ucugcugcagcagccgcucuu

SEQ ID NO: 724477 - RNA, 24 nt, Human
ucugugccacacagacacgggauc

SEQ ID NO: 724478 - RNA, 21 nt, Human
ucugugccacacagacacggu

SEQ ID NO: 724479 - RNA, 25 nt, Human
ugacccacguauucgaugaccaucu

SEQ ID NO: 724480 - RNA, 18 nt, Human
ugagccagucagccccgc

SEQ ID NO: 724481 - RNA, 26 nt, Human
ugaggcaggguuccaggcacggaguc

SEQ ID NO: 724482 - RNA, 26 nt, Human
ugcagcagugguugaugaaucuggcc

SEQ ID NO: 724483 - RNA, 18 nt, Human
ugccacacagacacggga

SEQ ID NO: 724484 - RNA, 19 nt, Human
ugccgggccgagacugggc

SEQ ID NO: 724485 - RNA, 21 nt, Human
ugcguuuugggguggucaggu

SEQ ID NO: 724486 - RNA, 21 nt, Human
ugcuacaaaacauuuacagcu

SEQ ID NO: 724487 - RNA, 18 nt, Human
ugcugcugcaguugcugc

SEQ ID NO: 724488 - RNA, 21 nt, Human
ugcugcugcaguugcugcggc

SEQ ID NO: 724489 - RNA, 20 nt, Human
ugcugcugucagaggacucc

SEQ ID NO: 724490 - RNA, 19 nt, Human
ugcuuggaguagaucacga

SEQ ID NO: 724491 - RNA, 19 nt, Human
uggccacugccccagagac

SEQ ID NO: 724492 - RNA, 20 nt, Human
uggcucguaggcgcggggcg

SEQ ID NO: 724493 - RNA, 21 nt, Human
uggcugagccggggagugacc

SEQ ID NO: 724494 - RNA, 22 nt, Human
uggugggcaggggugacaggag

SEQ ID NO: 724495 - RNA, 23 nt, Human
uguacaggccggcaccccagguu

SEQ ID NO: 724496 - RNA, 21 nt, Human
ugucauacaggauggucaucu

SEQ ID NO: 724497 - RNA, 20 nt, Human
uguccucugaguccaggccc

SEQ ID NO: 724498 - RNA, 25 nt, Human
uuccacaggaaacagcugcuggcug

SEQ ID NO: 724499 - RNA, 20 nt, Human
uugcugcggcuugggcuccu

SEQ ID NO: 724500 - RNA, 19 nt, Human
aaaaaaaaacaccuggaau

SEQ ID NO: 724501 - RNA, 25 nt, Human
aaaaaaugugauaauacagcaagau

SEQ ID NO: 724502 - RNA, 21 nt, Human
aaaaacagaagaagggaaggc

SEQ ID NO: 724503 - RNA, 25 nt, Human
aaaaugcuaauucacauucuuuuug

SEQ ID NO: 724504 - RNA, 20 nt, Human
aaaauuggaaacaagcauuu

SEQ ID NO: 724505 - RNA, 27 nt, Human
aaacaccuggaauaaaaauuagaaaca

SEQ ID NO: 724506 - RNA, 25 nt, Human
aaaccaaugucagcuuuaaucucua

SEQ ID NO: 724507 - RNA, 23 nt, Human
aaacuaauacugccagacucuac

SEQ ID NO: 724508 - RNA, 24 nt, Human
aacuggccucuccuggcucuccug

SEQ ID NO: 724509 - RNA, 19 nt, Human
aacuugccagggagaacca

SEQ ID NO: 724510 - RNA, 20 nt, Human
aagcauuucaaggaaacaau

SEQ ID NO: 724511 - RNA, 22 nt, Human
aaggcagaaaagucgccacaga

SEQ ID NO: 724512 - RNA, 23 nt, Human
aaguaagaaaaaaaaacaccugg

SEQ ID NO: 724513 - RNA, 20 nt, Human
acagaagaagcuacacuaca

SEQ ID NO: 724514 - RNA, 24 nt, Human
agaacaaucaaagaccaagggagc

SEQ ID NO: 724515 - RNA, 18 nt, Human
agaagaagggaaggcaga

SEQ ID NO: 724516 - RNA, 21 nt, Human
agagauuuccuggcccagagc

SEQ ID NO: 724517 - RNA, 19 nt, Human
agcaagcagagacucauca

SEQ ID NO: 724518 - RNA, 21 nt, Human
aggaagcuaaaaccaauguca

SEQ ID NO: 724519 - RNA, 21 nt, Human
agggaaggcagaaaagucgcc

SEQ ID NO: 724520 - RNA, 18 nt, Human
agggugggcaguaaccau

SEQ ID NO: 724521 - RNA, 21 nt, Human
auucuaagucagaauggaaug

SEQ ID NO: 724522 - RNA, 19 nt, Human
auucuugacuacauucuga

SEQ ID NO: 724523 - RNA, 23 nt, Human
auugcuguccuggacauuggggu

SEQ ID NO: 724524 - RNA, 25 nt, Human
caaaagcagcagcaacauuggagac

SEQ ID NO: 724525 - RNA, 24 nt, Human
caacaagcagcaugagcagcaaaa

SEQ ID NO: 724526 - RNA, 18 nt, Human
cacaaaaaacagaagaag

SEQ ID NO: 724527 - RNA, 25 nt, Human
cacaaaaaacagaagaagggaaggc

SEQ ID NO: 724528 - RNA, 18 nt, Human
caccaucccacagugaug

SEQ ID NO: 724529 - RNA, 23 nt, Human
caccuggaauaaaaauuagaaac

SEQ ID NO: 724530 - RNA, 23 nt, Human
cagaagaagcuacacuacaagug

SEQ ID NO: 724531 - RNA, 18 nt, Human
cagaaugcguccugggcu

SEQ ID NO: 724532 - RNA, 24 nt, Human
cagagcagcagcaacugaggugag

SEQ ID NO: 724533 - RNA, 25 nt, Human
cagauggcugaggaagcuaaaacca

SEQ ID NO: 724534 - RNA, 23 nt, Human
cagcaacauggggggaaagcugg

SEQ ID NO: 724535 - RNA, 19 nt, Human
cagcaugagcagcaaaagc

SEQ ID NO: 724536 - RNA, 18 nt, Human
cagccaaguggcagugac

SEQ ID NO: 724537 - RNA, 24 nt, Human
cagugaggagucccaacauucccu

SEQ ID NO: 724538 - RNA, 22 nt, Human
ccaaaacagauccaacagaugg

SEQ ID NO: 724539 - RNA, 19 nt, Human
ccagggagaaccaagaaaa

SEQ ID NO: 724540 - RNA, 21 nt, Human
ccagggagaaccaagaaaacu

SEQ ID NO: 724541 - RNA, 24 nt, Human
ccauagccaaggcagaguuaggac

SEQ ID NO: 724542 - RNA, 18 nt, Human
cccagcgcucagaauucu

SEQ ID NO: 724543 - RNA, 23 nt, Human
cccagcgcucagaauucuaaguc

SEQ ID NO: 724544 - RNA, 20 nt, Human
ccccugggcacauacagcuc

SEQ ID NO: 724545 - RNA, 22 nt, Human
ccuccugcaaacgggcccagau

SEQ ID NO: 724546 - RNA, 21 nt, Human
ccuggcccagagcagcagcaa

SEQ ID NO: 724547 - RNA, 24 nt, Human
ccuugcuuuccauaccaggcugag

SEQ ID NO: 724548 - RNA, 19 nt, Human
cucauagcacacuugaugc

SEQ ID NO: 724549 - RNA, 22 nt, Human
cugccagacucuacuuggaaac

SEQ ID NO: 724550 - RNA, 23 nt, Human
gaaaacaacaagcagcaugagca

SEQ ID NO: 724551 - RNA, 19 nt, Human
gaggaggcugcagcugugu

SEQ ID NO: 724552 - RNA, 24 nt, Human
gaucacaaaaaacagaagaaggga

SEQ ID NO: 724553 - RNA, 22 nt, Human
gaugagggaauccauagagaga

SEQ ID NO: 724554 - RNA, 25 nt, Human
gcaaacgggcccagauccgcccucu

SEQ ID NO: 724555 - RNA, 21 nt, Human
gcaccauagccaaggcagagu

SEQ ID NO: 724556 - RNA, 25 nt, Human
gcagcaaaagcagcagcaacauggg

SEQ ID NO: 724557 - RNA, 22 nt, Human
gccacagagagaaaaggcuaac

SEQ ID NO: 724558 - RNA, 21 nt, Human
gcccaccccugggcacauaca

SEQ ID NO: 724559 - RNA, 18 nt, Human
gcucacuguggggagagg

SEQ ID NO: 724560 - RNA, 25 nt, Human
gcucccagcaacauuccccagccuu

SEQ ID NO: 724561 - RNA, 18 nt, Human
gcugcuggcucacugugg

SEQ ID NO: 724562 - RNA, 22 nt, Human
ggagaaccaagaaaacuagaug

SEQ ID NO: 724563 - RNA, 21 nt, Human
gggaaggcagaaaagucgcca

SEQ ID NO: 724564 - RNA, 21 nt, Human
gggugggguaagggugggcag

SEQ ID NO: 724565 - RNA, 18 nt, Human
gugacaacuggccucucc

SEQ ID NO: 724566 - RNA, 22 nt, Human
guuggaccaaaacagauccaac

SEQ ID NO: 724567 - RNA, 24 nt, Human
uaacuuuauaaaaaaugugauaau

SEQ ID NO: 724568 - RNA, 25 nt, Human
uaagaaaaaaaaacaccuggaauaa

SEQ ID NO: 724569 - RNA, 22 nt, Human
uagcacacuugaugcugcagca

SEQ ID NO: 724570 - RNA, 22 nt, Human
ucaccaucccacagugaugagc

SEQ ID NO: 724571 - RNA, 18 nt, Human
uccgcccucuuauaaggc

SEQ ID NO: 724572 - RNA, 18 nt, Human
ucuaacagaagaagcuac

SEQ ID NO: 724573 - RNA, 21 nt, Human
ugaaagagaaguaaugagaau

SEQ ID NO: 724574 - RNA, 22 nt, Human
ugaaagagaaguaaugagaaua

SEQ ID NO: 724575 - RNA, 19 nt, Human
ugaccagaaugcguccugg

SEQ ID NO: 724576 - RNA, 19 nt, Human
ugagagaaauagcacgggg

SEQ ID NO: 724577 - RNA, 25 nt, Human
ugagcagcaaaagcagcagcaacau

SEQ ID NO: 724578 - RNA, 22 nt, Human
ugagccagacaccccagggacc

SEQ ID NO: 724579 - RNA, 20 nt, Human
ugagcucagcaagcagagac

SEQ ID NO: 724580 - RNA, 18 nt, Human
ugagcugagggguggggu

SEQ ID NO: 724581 - RNA, 20 nt, Human
ugagcugaggggugggguaa

SEQ ID NO: 724582 - RNA, 20 nt, Human
ugaggaagcuaaaaccaaug

SEQ ID NO: 724583 - RNA, 18 nt, Human
ugaggggugggguaaggg

SEQ ID NO: 724584 - RNA, 18 nt, Human
ugaggggugggguaaggg

SEQ ID NO: 724585 - RNA, 21 nt, Human
ugccagacucuacuuggaaac

SEQ ID NO: 724586 - RNA, 21 nt, Human
ugcuccaaucugcagcucugc

SEQ ID NO: 724587 - RNA, 23 nt, Human
uggaaacaagcauuucaaggaaa

SEQ ID NO: 724588 - RNA, 19 nt, Human
uggcacagguagcuaagaa

SEQ ID NO: 724589 - RNA, 20 nt, Human
uggcucacuguggggagagg

SEQ ID NO: 724590 - RNA, 18 nt, Human
uggcugcuggcucacugu

SEQ ID NO: 724591 - RNA, 24 nt, Human
uggcuuagcuggcucccuccucug

SEQ ID NO: 724592 - RNA, 20 nt, Human
ugggcucgggguggccagug

SEQ ID NO: 724593 - RNA, 20 nt, Human
ugggguuuucuuuuuuucug

SEQ ID NO: 724594 - RNA, 21 nt, Human
ugggugaauucuugacuacau

SEQ ID NO: 724595 - RNA, 21 nt, Human
ugucaaguaagaaaaaaaaac

SEQ ID NO: 724596 - RNA, 20 nt, Human
ugucuucugccccagcgcuc

SEQ ID NO: 724597 - RNA, 21 nt, Human
uguggcaggagaugagggaau

SEQ ID NO: 724598 - RNA, 21 nt, Human
uucccauugcuguccuggaca

SEQ ID NO: 724599 - RNA, 22 nt, Human
uuccgaaggaugaggaggcugc

SEQ ID NO: 724600 - RNA, 24 nt, Human
uuggagaggcagcugggaaugcuc

SEQ ID NO: 724601 - RNA, 21 nt, Human
acccgugucuccgccucagua

SEQ ID NO: 724602 - RNA, 23 nt, Human
agccagauggaguuuggugugcc

SEQ ID NO: 724603 - RNA, 18 nt, Human
aggcaggcgggcggggcg

SEQ ID NO: 724604 - RNA, 25 nt, Human
aggcaggcgggcggggcguccggcc

SEQ ID NO: 724605 - RNA, 23 nt, Human
agugcccgcuacccccagauggc

SEQ ID NO: 724606 - RNA, 21 nt, Human
aguggguggggugggcagugc

SEQ ID NO: 724607 - RNA, 20 nt, Human
cagcaguggccccaggagcc

SEQ ID NO: 724608 - RNA, 19 nt, Human
caggcaggcgggcggggcg

SEQ ID NO: 724609 - RNA, 22 nt, Human
caggcaugugcugguggccccg

SEQ ID NO: 724610 - RNA, 25 nt, Human
cccaggagcccuggagauugggcac

SEQ ID NO: 724611 - RNA, 22 nt, Human
ccccagaaagccaaucaucacc

SEQ ID NO: 724612 - RNA, 20 nt, Human
ccccagauggcugccucagu

SEQ ID NO: 724613 - RNA, 20 nt, Human
cccccagauggcugccucag

SEQ ID NO: 724614 - RNA, 23 nt, Human
cccccagauggcugccucagucc

SEQ ID NO: 724615 - RNA, 22 nt, Human
cccccugccccagcucucuggg

SEQ ID NO: 724616 - RNA, 18 nt, Human
cccugccccagcucucug

SEQ ID NO: 724617 - RNA, 19 nt, Human
cuaaaaaaaaaaaaaaagu

SEQ ID NO: 724618 - RNA, 25 nt, Human
cuccccagaaagccaaucaucaccc

SEQ ID NO: 724619 - RNA, 24 nt, Human
cucugauaagagugcccgcuaccc

SEQ ID NO: 724620 - RNA, 21 nt, Human
cugggacgaugguccggcucc

SEQ ID NO: 724621 - RNA, 24 nt, Human
gcccccugccccagcucucuggga

SEQ ID NO: 724622 - RNA, 30 nt, Human
gcgcgggcaggcaggcgggcggggcguccc

SEQ ID NO: 724623 - RNA, 18 nt, Human
gcuaaaaaaaaaaaaaaa

SEQ ID NO: 724624 - RNA, 20 nt, Human
gcugguggccccgcggcgcc

SEQ ID NO: 724625 - RNA, 18 nt, Human
ggcaggcaggcgggcggg

SEQ ID NO: 724626 - RNA, 20 nt, Human
ggcaggcaggcgggcggggc

SEQ ID NO: 724627 - RNA, 26 nt, Human
ggguacaacagaccacaguggguggg

SEQ ID NO: 724628 - RNA, 21 nt, Human
ggugggcagugcuacggggcu

SEQ ID NO: 724629 - RNA, 21 nt, Human
guacaacagaccacagugggu

SEQ ID NO: 724630 - RNA, 20 nt, Human
gugugcccugucucauugga

SEQ ID NO: 724631 - RNA, 24 nt, Human
uauuugcuaaaaaaaaaaaaaaag

SEQ ID NO: 724632 - RNA, 18 nt, Human
uccccagaaagccaauca

SEQ ID NO: 724633 - RNA, 21 nt, Human
uccuuucacagccaauuccgg

SEQ ID NO: 724634 - RNA, 18 nt, Human
ucucugggacgauggucc

SEQ ID NO: 724635 - RNA, 24 nt, Human
ucucugggacgaugguccggcucu

SEQ ID NO: 724636 - RNA, 25 nt, Human
ucugggacgaugguccggcuccagc

SEQ ID NO: 724637 - RNA, 21 nt, Human
ugaggggagcugccaaugggg

SEQ ID NO: 724638 - RNA, 20 nt, Human
ugccucaguccuuucacagc

SEQ ID NO: 724639 - RNA, 23 nt, Human
ugccucaguccuuucacagccaa

SEQ ID NO: 724640 - RNA, 26 nt, Human
ugcgcgggcaggcaggcgggcggggc

SEQ ID NO: 724641 - RNA, 19 nt, Human
ugcuaaaaaaaaaaaaaaa

SEQ ID NO: 724642 - RNA, 22 nt, Human
ugcuaaaaaaaaaaaaaaaguu

SEQ ID NO: 724643 - RNA, 18 nt, Human
ugggguggaagggcuggg

SEQ ID NO: 724644 - RNA, 19 nt, Human
ugggguggaagggcugggc

SEQ ID NO: 724645 - RNA, 18 nt, Human
uggggugggcagugcuac

SEQ ID NO: 724646 - RNA, 21 nt, Human
uggggugggcagugcuacggg

SEQ ID NO: 724647 - RNA, 24 nt, Human
uggggugggcagugcuacggggcu

SEQ ID NO: 724648 - RNA, 22 nt, Human
uggugugcccugucucauugga

SEQ ID NO: 724649 - RNA, 19 nt, Human
aaaaaaaccucuaacagcc

SEQ ID NO: 724650 - RNA, 20 nt, Human
aaaaaaauccaagagccucu

SEQ ID NO: 724651 - RNA, 18 nt, Human
aaaaaccagccagcacac

SEQ ID NO: 724652 - RNA, 20 nt, Human
aaaaagccugggugccagac

SEQ ID NO: 724653 - RNA, 19 nt, Human
aaaaaggcaucaaacccuu

SEQ ID NO: 724654 - RNA, 24 nt, Human
aaaagaaaaaaaaaaaaccucuaa

SEQ ID NO: 724655 - RNA, 23 nt, Human
aaaauaaauaucacuuaugccaa

SEQ ID NO: 724656 - RNA, 22 nt, Human
aaacuuuuuacauaugauacau

SEQ ID NO: 724657 - RNA, 21 nt, Human
aaauucagcagaacuucuuuc

SEQ ID NO: 724658 - RNA, 22 nt, Human
aacauaugaaaaaaagccaaaa

SEQ ID NO: 724659 - RNA, 22 nt, Human
aagugaguuuucucaaagccaa

SEQ ID NO: 724660 - RNA, 23 nt, Human
aaguggcucuuguucuaggaagg

SEQ ID NO: 724661 - RNA, 23 nt, Human
acagaggccaaaauaaauaucac

SEQ ID NO: 724662 - RNA, 23 nt, Human
acaugcggaacaaaucauaaaac

SEQ ID NO: 724663 - RNA, 19 nt, Human
accacagcccaaacaaccg

SEQ ID NO: 724664 - RNA, 21 nt, Human
accuacagcccaaacaaccag

SEQ ID NO: 724665 - RNA, 22 nt, Human
agaaauaacaagagaauaucac

SEQ ID NO: 724666 - RNA, 20 nt, Human
agaaccagaaacuauaaaac

SEQ ID NO: 724667 - RNA, 19 nt, Human
agaauaucacugucugaaa

SEQ ID NO: 724668 - RNA, 22 nt, Human
agaaugaaauccagagacaacc

SEQ ID NO: 724669 - RNA, 21 nt, Human
agcagcuugucuguuccagga

SEQ ID NO: 724670 - RNA, 24 nt, Human
agccccaccuuagacaggcucaga

SEQ ID NO: 724671 - RNA, 18 nt, Human
aggaacuucugccucagc

SEQ ID NO: 724672 - RNA, 21 nt, Human
agggggagagagguggacuca

SEQ ID NO: 724673 - RNA, 21 nt, Human
agucagcuucggacccacggu

SEQ ID NO: 724674 - RNA, 20 nt, Human
agugcaagaaaaucugcuga

SEQ ID NO: 724675 - RNA, 23 nt, Human
augaauuaugccaccuacagccc

SEQ ID NO: 724676 - RNA, 22 nt, Human
auuuucuuucuauugguccucc

SEQ ID NO: 724677 - RNA, 24 nt, Human
caaaaagaauaaaaagccugggug

SEQ ID NO: 724678 - RNA, 26 nt, Human
caaaagaagcuuaccuuaaaagcuaa

SEQ ID NO: 724679 - RNA, 22 nt, Human
caaccacagcccaaacaaccag

SEQ ID NO: 724680 - RNA, 25 nt, Human
caacuagcuuaacaccagaaaauaa

SEQ ID NO: 724681 - RNA, 22 nt, Human
cacaccaggaauccaccuucuc

SEQ ID NO: 724682 - RNA, 27 nt, Human
cacaccaggaauccaccuucuccccaa

SEQ ID NO: 724683 - RNA, 18 nt, Human
cacagcccaaacaaccag

SEQ ID NO: 724684 - RNA, 25 nt, Human
caccaacccagucccaguguugggc

SEQ ID NO: 724685 - RNA, 21 nt, Human
caccaggaauccaccuucucc

SEQ ID NO: 724686 - RNA, 19 nt, Human
caccuuagacaggcucaga

SEQ ID NO: 724687 - RNA, 20 nt, Human
cacuucuuuuagcuucaguu

SEQ ID NO: 724688 - RNA, 18 nt, Human
cagaaacuauaaaacugg

SEQ ID NO: 724689 - RNA, 24 nt, Human
cagaaccagaaacuauaaaacugg

SEQ ID NO: 724690 - RNA, 21 nt, Human
cagacccccacaaaggggcug

SEQ ID NO: 724691 - RNA, 23 nt, Human
cagacccccacaaaggggcuggg

SEQ ID NO: 724692 - RNA, 20 nt, Human
cagcccugaaaaaccagcca

SEQ ID NO: 724693 - RNA, 24 nt, Human
cagcucaucugaccauucaguugg

SEQ ID NO: 724694 - RNA, 24 nt, Human
cagcugggugagucagucccacgg

SEQ ID NO: 724695 - RNA, 18 nt, Human
caggaaaugcuggcuggg

SEQ ID NO: 724696 - RNA, 20 nt, Human
caucugaaaaaaagccaaaa

SEQ ID NO: 724697 - RNA, 23 nt, Human
ccaaaauaaacaugaauuaugcc

SEQ ID NO: 724698 - RNA, 20 nt, Human
ccacagcccaaacaaccaga

SEQ ID NO: 724699 - RNA, 21 nt, Human
ccacucaguggaaccaggaag

SEQ ID NO: 724700 - RNA, 24 nt, Human
ccauaaaaaaaaaaagaaaaaaaa

SEQ ID NO: 724701 - RNA, 23 nt, Human
cccaccuuagacaggcucagaau

SEQ ID NO: 724702 - RNA, 18 nt, Human
ccuacagcccaaacaacc

SEQ ID NO: 724703 - RNA, 22 nt, Human
cggaacaaaucauaaaacuaac

SEQ ID NO: 724704 - RNA, 21 nt, Human
cucaucugaccauucaguugg

SEQ ID NO: 724705 - RNA, 21 nt, Human
cucuaagugaguuuucucaaa

SEQ ID NO: 724706 - RNA, 20 nt, Human
cugcaugugugucccccaac

SEQ ID NO: 724707 - RNA, 23 nt, Human
cugcaugugugucccccaacucu

SEQ ID NO: 724708 - RNA, 22 nt, Human
cuuagccccaccuuagacaggc

SEQ ID NO: 724709 - RNA, 18 nt, Human
cuugcucgaucuuaaaac

SEQ ID NO: 724710 - RNA, 20 nt, Human
gacccaacagaccacagaga

SEQ ID NO: 724711 - RNA, 25 nt, Human
gaccuucuuccugugauacugugga

SEQ ID NO: 724712 - RNA, 21 nt, Human
gagucagcuucggacccacgg

SEQ ID NO: 724713 - RNA, 24 nt, Human
gaguuuucucaaagccaaaagucu

SEQ ID NO: 724714 - RNA, 24 nt, Human
gcagaacuucuuucuuucuuaaaa

SEQ ID NO: 724715 - RNA, 22 nt, Human
gccauaaaaaaaaaaagaaaaa

SEQ ID NO: 724716 - RNA, 21 nt, Human
ggaaagcuggaguauuguuau

SEQ ID NO: 724717 - RNA, 22 nt, Human
ggaaccaggaaguaugacccaa

SEQ ID NO: 724718 - RNA, 19 nt, Human
ggacaccaacccaguccca

SEQ ID NO: 724719 - RNA, 18 nt, Human
gguucucaccuucuucag

SEQ ID NO: 724720 - RNA, 24 nt, Human
gucagcagaggggacaccaaccca

SEQ ID NO: 724721 - RNA, 22 nt, Human
guucucaccuucuucaguguuc

SEQ ID NO: 724722 - RNA, 23 nt, Human
uaaacauaaaacaugcggaacaa

SEQ ID NO: 724723 - RNA, 23 nt, Human
uaaauuuuagcuuggugaacaua

SEQ ID NO: 724724 - RNA, 18 nt, Human
uaauggcugggacuaugc

SEQ ID NO: 724725 - RNA, 25 nt, Human
uagaugauauacucugccccugaag

SEQ ID NO: 724726 - RNA, 22 nt, Human
uagcugaguggaacaaaacuug

SEQ ID NO: 724727 - RNA, 21 nt, Human
uauucucagagaaugaaaucc

SEQ ID NO: 724728 - RNA, 22 nt, Human
uauugguccuccucucagcugg

SEQ ID NO: 724729 - RNA, 23 nt, Human
ucaaaaucaaccacuuugcuccu

SEQ ID NO: 724730 - RNA, 21 nt, Human
ucaaagaaaacugauugaaag

SEQ ID NO: 724731 - RNA, 20 nt, Human
ucagaauuuauuccucuacu

SEQ ID NO: 724732 - RNA, 19 nt, Human
ucaguccucagaaccagaa

SEQ ID NO: 724733 - RNA, 21 nt, Human
uccuaaguuuuuggaaagccc

SEQ ID NO: 724734 - RNA, 19 nt, Human
ucuacuaagucuucaguca

SEQ ID NO: 724735 - RNA, 23 nt, Human
ucuaggaagagaagcuccuugcu

SEQ ID NO: 724736 - RNA, 23 nt, Human
ucucccaggcucugugauauucu

SEQ ID NO: 724737 - RNA, 18 nt, Human
ucucucauagucaaugga

SEQ ID NO: 724738 - RNA, 19 nt, Human
ucuuucacacacuaccuug

SEQ ID NO: 724739 - RNA, 23 nt, Human
ugaaaaaccagccagcacaccag

SEQ ID NO: 724740 - RNA, 18 nt, Human
ugacccaacagaccacag

SEQ ID NO: 724741 - RNA, 21 nt, Human
ugacccaacagaccacagaga

SEQ ID NO: 724742 - RNA, 23 nt, Human
ugcaagaaaaucugcugauggaa

SEQ ID NO: 724743 - RNA, 20 nt, Human
uggaaccaggaaguaugacu

SEQ ID NO: 724744 - RNA, 20 nt, Human
uggaagaugauuuucaucag

SEQ ID NO: 724745 - RNA, 18 nt, Human
uggacucaaaugugaauu

SEQ ID NO: 724746 - RNA, 19 nt, Human
uggcgacggucauccuccu

SEQ ID NO: 724747 - RNA, 18 nt, Human
uggcugggugggaguggg

SEQ ID NO: 724748 - RNA, 19 nt, Human
uggcuucuacauccucacu

SEQ ID NO: 724749 - RNA, 23 nt, Human
uggcuucuacauccucacuucuu

SEQ ID NO: 724750 - RNA, 24 nt, Human
ugggccacucaguggaaccaggaa

SEQ ID NO: 724751 - RNA, 25 nt, Human
uggugaacauaugaaaaaaagccaa

SEQ ID NO: 724752 - RNA, 25 nt, Human
uggugaacaucugaaaaaaagccaa

SEQ ID NO: 724753 - RNA, 25 nt, Human
ugugucccccaacucuccccuaggg

SEQ ID NO: 724754 - RNA, 18 nt, Human
uguguuuuuugguggugc

SEQ ID NO: 724755 - RNA, 18 nt, Human
uuagaaauaacaagagaa

SEQ ID NO: 724756 - RNA, 19 nt, Human
uucaucuucucccaggcuc

SEQ ID NO: 724757 - RNA, 22 nt, Human
uucuuuuagcuucaguuccaga

SEQ ID NO: 724758 - RNA, 21 nt, Human
uuggugaacaucugaaaaaaa

SEQ ID NO: 724759 - RNA, 24 nt, Human
aaaggagauguuuaucuaagucug

SEQ ID NO: 724760 - RNA, 19 nt, Human
aaauaaauggaaaaagcca

SEQ ID NO: 724761 - RNA, 22 nt, Human
aagcggaaauaaauauccaaag

SEQ ID NO: 724762 - RNA, 22 nt, Human
aaggaacaucuugggggcugug

SEQ ID NO: 724763 - RNA, 21 nt, Human
aauggaaaaagccacacuaag

SEQ ID NO: 724764 - RNA, 19 nt, Human
acacacacaaagggaggcc

SEQ ID NO: 724765 - RNA, 22 nt, Human
acagacagagucauuucaaaac

SEQ ID NO: 724766 - RNA, 22 nt, Human
acagucgagggcaggugacgua

SEQ ID NO: 724767 - RNA, 18 nt, Human
acagugaccugguccaau

SEQ ID NO: 724768 - RNA, 22 nt, Human
accugggugaggugggguccuu

SEQ ID NO: 724769 - RNA, 21 nt, Human
acgagcacaccuccacaacaa

SEQ ID NO: 724770 - RNA, 24 nt, Human
acgagcacaccuccacaacaauau

SEQ ID NO: 724771 - RNA, 19 nt, Human
acuaagaacucugaaacaa

SEQ ID NO: 724772 - RNA, 21 nt, Human
agaaaaccauucagcccucuc

SEQ ID NO: 724773 - RNA, 24 nt, Human
agaaaaccauucagcccucucagc

SEQ ID NO: 724774 - RNA, 18 nt, Human
agacagagaccauguucu

SEQ ID NO: 724775 - RNA, 24 nt, Human
agacagagucauuucaaaaccaga

SEQ ID NO: 724776 - RNA, 21 nt, Human
agagggagagugacagacuca

SEQ ID NO: 724777 - RNA, 22 nt, Human
agcgcggcucccgagacuaccc

SEQ ID NO: 724778 - RNA, 18 nt, Human
agcuggaggggaacuggc

SEQ ID NO: 724779 - RNA, 19 nt, Human
agcuggaggggaacuggcu

SEQ ID NO: 724780 - RNA, 23 nt, Human
aggaaauccucaccccacacacc

SEQ ID NO: 724781 - RNA, 19 nt, Human
aggccccuccucccaaucc

SEQ ID NO: 724782 - RNA, 19 nt, Human
aggggaacuggcucugggc

SEQ ID NO: 724783 - RNA, 23 nt, Human
aggugcuggaagcugucucuguu

SEQ ID NO: 724784 - RNA, 19 nt, Human
agugaaaaaggaauucaag

SEQ ID NO: 724785 - RNA, 24 nt, Human
agugaguaacaaagaaucacuuaa

SEQ ID NO: 724786 - RNA, 21 nt, Human
caacaauauucaaagccaagg

SEQ ID NO: 724787 - RNA, 24 nt, Human
caagaccaguuggagcccagagac

SEQ ID NO: 724788 - RNA, 21 nt, Human
caaguugccagccccagcuga

SEQ ID NO: 724789 - RNA, 28 nt, Human
cacaccuccacaacaauauucaaagcca

SEQ ID NO: 724790 - RNA, 19 nt, Human
caccagugaccagagaggu

SEQ ID NO: 724791 - RNA, 21 nt, Human
caccuccacaacaauauucaa

SEQ ID NO: 724792 - RNA, 24 nt, Human
cagaaagggacgagcacaccucca

SEQ ID NO: 724793 - RNA, 21 nt, Human
cagcagagcggcccagcgccc

SEQ ID NO: 724794 - RNA, 18 nt, Human
cagcccagcacugacauu

SEQ ID NO: 724795 - RNA, 23 nt, Human
cagcuacccagagggcuucuaag

SEQ ID NO: 724796 - RNA, 23 nt, Human
cagcuugauccucucuaccccuc

SEQ ID NO: 724797 - RNA, 18 nt, Human
cagugaccugguccaauu

SEQ ID NO: 724798 - RNA, 18 nt, Human
caucuagacaagaagauc

SEQ ID NO: 724799 - RNA, 18 nt, Human
caugagguugaaaacugc

SEQ ID NO: 724800 - RNA, 20 nt, Human
ccacacacacaaagggaggc

SEQ ID NO: 724801 - RNA, 21 nt, Human
ccacucccccuccuuggcagg

SEQ ID NO: 724802 - RNA, 22 nt, Human
ccagcacugacauucagccgga

SEQ ID NO: 724803 - RNA, 22 nt, Human
cccacacaccuggagguguccc

SEQ ID NO: 724804 - RNA, 26 nt, Human
cccacagacagagucauuucaaaacc

SEQ ID NO: 724805 - RNA, 24 nt, Human
cccagagacuucugacagcaggcu

SEQ ID NO: 724806 - RNA, 20 nt, Human
ccccaugggcgccacucccc

SEQ ID NO: 724807 - RNA, 19 nt, Human
ccccccgcuccacccugcc

SEQ ID NO: 724808 - RNA, 22 nt, Human
cccccgcuccacccugccuucc

SEQ ID NO: 724809 - RNA, 23 nt, Human
cccggcccacagcccagcacuga

SEQ ID NO: 724810 - RNA, 24 nt, Human
cccggcccacagcccagcacugac

SEQ ID NO: 724811 - RNA, 20 nt, Human
cccucggcaggccuugccgg

SEQ ID NO: 724812 - RNA, 21 nt, Human
cccucggcaggccuugccggg

SEQ ID NO: 724813 - RNA, 23 nt, Human
cccugguggacuuggggagggug

SEQ ID NO: 724814 - RNA, 21 nt, Human
cccuugcagcuggaggggaac

SEQ ID NO: 724815 - RNA, 21 nt, Human
ccgagacuacccuauggccag

SEQ ID NO: 724816 - RNA, 20 nt, Human
ccgcuggucccagccugcac

SEQ ID NO: 724817 - RNA, 19 nt, Human
ccucaccccacacaccugg

SEQ ID NO: 724818 - RNA, 22 nt, Human
ccucccagucaccuuuaauccu

SEQ ID NO: 724819 - RNA, 23 nt, Human
ccucccgggcaugcuguccagcc

SEQ ID NO: 724820 - RNA, 26 nt, Human
ccucucuaccccucuugcucuuaaaa

SEQ ID NO: 724821 - RNA, 21 nt, Human
ccucugcugguccucccgggc

SEQ ID NO: 724822 - RNA, 20 nt, Human
ccucuggaugccaggggccc

SEQ ID NO: 724823 - RNA, 21 nt, Human
ccugacuuggcaaacccagcc

SEQ ID NO: 724824 - RNA, 22 nt, Human
ccugcaagcccacauggggacu

SEQ ID NO: 724825 - RNA, 18 nt, Human
ccugguccaauucuucug

SEQ ID NO: 724826 - RNA, 21 nt, Human
ccugucugggagcgccccagc

SEQ ID NO: 724827 - RNA, 20 nt, Human
ccuugggguggggcagccac

SEQ ID NO: 724828 - RNA, 19 nt, Human
cgcagggauaggugguuga

SEQ ID NO: 724829 - RNA, 21 nt, Human
cgccuugggguggggcagcca

SEQ ID NO: 724830 - RNA, 20 nt, Human
cggcccagcgcccgcggcgg

SEQ ID NO: 724831 - RNA, 21 nt, Human
cggcggccccgacccgucucu

SEQ ID NO: 724832 - RNA, 19 nt, Human
cggcggcggaggcggugga

SEQ ID NO: 724833 - RNA, 19 nt, Human
cggcgguagcacaagcgga

SEQ ID NO: 724834 - RNA, 22 nt, Human
cgugguuuguccuuccuuuggg

SEQ ID NO: 724835 - RNA, 20 nt, Human
cuacauuccuccuuuuccug

SEQ ID NO: 724836 - RNA, 21 nt, Human
cucacggaggccccuccuccc

SEQ ID NO: 724837 - RNA, 18 nt, Human
cuccccggcccacagccc

SEQ ID NO: 724838 - RNA, 22 nt, Human
cucccgagacuacccuauggcc

SEQ ID NO: 724839 - RNA, 20 nt, Human
cucccgagcuggccgaguag

SEQ ID NO: 724840 - RNA, 20 nt, Human
cugaagacauagcugugccc

SEQ ID NO: 724841 - RNA, 23 nt, Human
cugcaagcccacauggggacugc

SEQ ID NO: 724842 - RNA, 23 nt, Human
cuggaagcugucucuguuugguu

SEQ ID NO: 724843 - RNA, 22 nt, Human
cuggccccaucugaccugcugg

SEQ ID NO: 724844 - RNA, 19 nt, Human
cuggcccuuccugccuggg

SEQ ID NO: 724845 - RNA, 18 nt, Human
cuggguguggcguguccc

SEQ ID NO: 724846 - RNA, 18 nt, Human
cugugguccuucucucca

SEQ ID NO: 724847 - RNA, 21 nt, Human
cuuaguguugauguuuuugga

SEQ ID NO: 724848 - RNA, 21 nt, Human
cuuccccccgcuccacccugc

SEQ ID NO: 724849 - RNA, 21 nt, Human
gaagcaugagucaugcuggcg

SEQ ID NO: 724850 - RNA, 22 nt, Human
gaccucugaggcuaugaccuga

SEQ ID NO: 724851 - RNA, 25 nt, Human
gagcagugucuuuuauccuccgcug

SEQ ID NO: 724852 - RNA, 21 nt, Human
gagcccagagacuucugacag

SEQ ID NO: 724853 - RNA, 18 nt, Human
gaggguggaucacggccu

SEQ ID NO: 724854 - RNA, 18 nt, Human
gaggugccgguggguccg

SEQ ID NO: 724855 - RNA, 23 nt, Human
gaggugccgguggguccugccac

SEQ ID NO: 724856 - RNA, 24 nt, Human
gaguuccugcggccagcccugcuc

SEQ ID NO: 724857 - RNA, 20 nt, Human
gaugcggcggcggaggcggu

SEQ ID NO: 724858 - RNA, 19 nt, Human
gcagagcggcccagcgccc

SEQ ID NO: 724859 - RNA, 24 nt, Human
gccacacuaagaacucugaaacag

SEQ ID NO: 724860 - RNA, 22 nt, Human
gcccacagcccagcacugacau

SEQ ID NO: 724861 - RNA, 18 nt, Human
gcccauguggcccccuuu

SEQ ID NO: 724862 - RNA, 18 nt, Human
gccccaucugaccugcug

SEQ ID NO: 724863 - RNA, 25 nt, Human
gcccugguggacuuggggagggugg

SEQ ID NO: 724864 - RNA, 18 nt, Human
gcccuuuucuuggccagg

SEQ ID NO: 724865 - RNA, 22 nt, Human
gccuucccacacuccuggcucu

SEQ ID NO: 724866 - RNA, 20 nt, Human
gcuccgggagagggacuggg

SEQ ID NO: 724867 - RNA, 20 nt, Human
gcugccugcuggguguggcg

SEQ ID NO: 724868 - RNA, 20 nt, Human
gcuggcccuuccugccuggg

SEQ ID NO: 724869 - RNA, 24 nt, Human
gcugucucuguuugguuuugguga

SEQ ID NO: 724870 - RNA, 20 nt, Human
gcuucuucccauucaaggga

SEQ ID NO: 724871 - RNA, 19 nt, Human
ggacagcggcagaggaggg

SEQ ID NO: 724872 - RNA, 27 nt, Human
ggagaaaucuuuccaugaugggagaag

SEQ ID NO: 724873 - RNA, 25 nt, Human
ggaguuccugcggccagcccugcuc

SEQ ID NO: 724874 - RNA, 19 nt, Human
ggccccugagagugacccu

SEQ ID NO: 724875 - RNA, 19 nt, Human
ggccgaggagacagagacc

SEQ ID NO: 724876 - RNA, 18 nt, Human
ggcucccgagacuacccu

SEQ ID NO: 724877 - RNA, 18 nt, Human
ggcuggugacagaggagc

SEQ ID NO: 724878 - RNA, 20 nt, Human
gggacagcggcagaggaggg

SEQ ID NO: 724879 - RNA, 19 nt, Human
gggacugggcugggacagc

SEQ ID NO: 724880 - RNA, 22 nt, Human
gggacugggcugggacagcggc

SEQ ID NO: 724881 - RNA, 20 nt, Human
gggagagugacagacucaga

SEQ ID NO: 724882 - RNA, 24 nt, Human
gggagcuccugaagacauagcugu

SEQ ID NO: 724883 - RNA, 19 nt, Human
ggggaacuggcucugggcc

SEQ ID NO: 724884 - RNA, 24 nt, Human
gggggcugugucugaugcaucugg

SEQ ID NO: 724885 - RNA, 23 nt, Human
ggucccgaggcucagaggcaucg

SEQ ID NO: 724886 - RNA, 20 nt, Human
gguccuuguaccugcagcca

SEQ ID NO: 724887 - RNA, 22 nt, Human
ggucgugguuuguccuuccuuu

SEQ ID NO: 724888 - RNA, 25 nt, Human
ggucgugguuuguccuuccuuuggg

SEQ ID NO: 724889 - RNA, 22 nt, Human
guccagaaagggacgagcacac

SEQ ID NO: 724890 - RNA, 18 nt, Human
guccgaauggggaaggga

SEQ ID NO: 724891 - RNA, 20 nt, Human
gucgugguuuguccuuccuu

SEQ ID NO: 724892 - RNA, 20 nt, Human
gugggcacaucugcuggcag

SEQ ID NO: 724893 - RNA, 21 nt, Human
guucucacugggacaaaaauu

SEQ ID NO: 724894 - RNA, 23 nt, Human
uaaaaaauaauccaaacuuucca

SEQ ID NO: 724895 - RNA, 21 nt, Human
uacacuuuucacaugacauca

SEQ ID NO: 724896 - RNA, 21 nt, Human
uagagaugguaacacugaaga

SEQ ID NO: 724897 - RNA, 21 nt, Human
uagagggugucuuccuuugau

SEQ ID NO: 724898 - RNA, 24 nt, Human
uauggccaggcuccggcggauacc

SEQ ID NO: 724899 - RNA, 20 nt, Human
ucaaaaucaguucaccccac

SEQ ID NO: 724900 - RNA, 21 nt, Human
ucacggaggccccuccuccca

SEQ ID NO: 724901 - RNA, 20 nt, Human
ucacugggacaaaaauuauu

SEQ ID NO: 724902 - RNA, 21 nt, Human
ucagagcucuggggacaccau

SEQ ID NO: 724903 - RNA, 21 nt, Human
ucaguacccacgaagcaugag

SEQ ID NO: 724904 - RNA, 20 nt, Human
ucaugccggaccagcagagc

SEQ ID NO: 724905 - RNA, 23 nt, Human
uccaaacuuuccaggaagguacu

SEQ ID NO: 724906 - RNA, 20 nt, Human
ucccacacuccuggcucuuc

SEQ ID NO: 724907 - RNA, 23 nt, Human
ucccagucaccuuuaauccucug

SEQ ID NO: 724908 - RNA, 23 nt, Human
ucccgggcaugcuguccagcccu

SEQ ID NO: 724909 - RNA, 24 nt, Human
ucccgucuccugaugcuguggucc

SEQ ID NO: 724910 - RNA, 19 nt, Human
ucccugaguggccggugca

SEQ ID NO: 724911 - RNA, 20 nt, Human
uccuccccggcccacagccc

SEQ ID NO: 724912 - RNA, 25 nt, Human
uccuuuggguuucugcccauguggg

SEQ ID NO: 724913 - RNA, 22 nt, Human
ucuacaaauuucuacguacagu

SEQ ID NO: 724914 - RNA, 22 nt, Human
ucucuguuugguuuuggugaag

SEQ ID NO: 724915 - RNA, 20 nt, Human
ucugaccugcugggacaggu

SEQ ID NO: 724916 - RNA, 19 nt, Human
ucugcagauggccacggug

SEQ ID NO: 724917 - RNA, 21 nt, Human
ucugcagauggccacgguggu

SEQ ID NO: 724918 - RNA, 21 nt, Human
ugacagaggagccauaugaca

SEQ ID NO: 724919 - RNA, 19 nt, Human
ugaccagagaggugagggg

SEQ ID NO: 724920 - RNA, 23 nt, Human
ugacgggagcuccugaagacaua

SEQ ID NO: 724921 - RNA, 19 nt, Human
ugagauggcugcugggggc

SEQ ID NO: 724922 - RNA, 19 nt, Human
ugagugucagaagccacag

SEQ ID NO: 724923 - RNA, 20 nt, Human
ugcaggcuguuccuccuggu

SEQ ID NO: 724924 - RNA, 22 nt, Human
ugccaggggcccagcguguccu

SEQ ID NO: 724925 - RNA, 24 nt, Human
ugccggaccagcagagcggcccag

SEQ ID NO: 724926 - RNA, 18 nt, Human
ugccgggacagcuggcug

SEQ ID NO: 724927 - RNA, 23 nt, Human
ugccgggacagcuggcugggccg

SEQ ID NO: 724928 - RNA, 18 nt, Human
ugccugggggagcgccuc

SEQ ID NO: 724929 - RNA, 21 nt, Human
ugcucacggaggccccuccuc

SEQ ID NO: 724930 - RNA, 19 nt, Human
ugcugccccacagacagag

SEQ ID NO: 724931 - RNA, 20 nt, Human
ugcuucagauuuauuuauug

SEQ ID NO: 724932 - RNA, 23 nt, Human
uggaagcaaagguccuuguaccu

SEQ ID NO: 724933 - RNA, 25 nt, Human
uggaggugucccccagacgcaaguu

SEQ ID NO: 724934 - RNA, 19 nt, Human
uggcaggucuggaggaaag

SEQ ID NO: 724935 - RNA, 23 nt, Human
uggccuccaaugggcuggcuccc

SEQ ID NO: 724936 - RNA, 18 nt, Human
uggcucccgagcuggccu

SEQ ID NO: 724937 - RNA, 20 nt, Human
uggcugggccgaggagacag

SEQ ID NO: 724938 - RNA, 24 nt, Human
uggcugggccgaggagacagagac

SEQ ID NO: 724939 - RNA, 18 nt, Human
ugggacagcggcagagga

SEQ ID NO: 724940 - RNA, 19 nt, Human
ugggccgaggagacagaga

SEQ ID NO: 724941 - RNA, 19 nt, Human
ugggcugugagugcugugu

SEQ ID NO: 724942 - RNA, 19 nt, Human
uggggaagggaaccauggg

SEQ ID NO: 724943 - RNA, 24 nt, Human
uggggagcuggcuacauuccuccu

SEQ ID NO: 724944 - RNA, 21 nt, Human
uggggcuggugacagaggagc

SEQ ID NO: 724945 - RNA, 20 nt, Human
ugggguggggcagccacuug

SEQ ID NO: 724946 - RNA, 23 nt, Human
ugguaacacugaagaaggugcug

SEQ ID NO: 724947 - RNA, 19 nt, Human
ugguccaauucuucugugc

SEQ ID NO: 724948 - RNA, 18 nt, Human
uggucuuccccccgcucc

SEQ ID NO: 724949 - RNA, 19 nt, Human
uggugaagagaaaugagga

SEQ ID NO: 724950 - RNA, 20 nt, Human
ugguggacuuggggagggug

SEQ ID NO: 724951 - RNA, 21 nt, Human
ugguuuguccuuccuuugggu

SEQ ID NO: 724952 - RNA, 21 nt, Human
ugucagaagccacagccccca

SEQ ID NO: 724953 - RNA, 25 nt, Human
ugucuggacuggccugucugggagc

SEQ ID NO: 724954 - RNA, 20 nt, Human
ugugguccuucucuccauga

SEQ ID NO: 724955 - RNA, 20 nt, Human
uucaaagccaagguuuggga

SEQ ID NO: 724956 - RNA, 19 nt, Human
uuccuccuggucacgccuu

SEQ ID NO: 724957 - RNA, 23 nt, Human
uugauccucucuaccccucuugc

SEQ ID NO: 724958 - RNA, 25 nt, Human
uugccagccccagcugaaagaggcc

SEQ ID NO: 724959 - RNA, 18 nt, Human
uugccgggacagcuggcu

SEQ ID NO: 724960 - RNA, 24 nt, Human
uugcucuuaaaaaauuaagcaaca

SEQ ID NO: 724961 - RNA, 24 nt, Human
uugggggcugugucugaugcaucu

SEQ ID NO: 724962 - RNA, 25 nt, Human
uuuacauauuuuuagcucaaggaaa

SEQ ID NO: 724963 - RNA, 25 nt, Human
uuuauugcaucuagacaagaagauc

SEQ ID NO: 724964 - RNA, 23 nt, Human
uuuucauuuccacccucguguuc

SEQ ID NO: 724965 - RNA, 22 nt, Human
aaaaccuaucaguaaacuaaaa

SEQ ID NO: 724966 - RNA, 20 nt, Human
aaacacaacacagaacagaa

SEQ ID NO: 724967 - RNA, 19 nt, Human
aaacagaugacuauaucaa

SEQ ID NO: 724968 - RNA, 24 nt, Human
aaacagcccgggguguugcugaau

SEQ ID NO: 724969 - RNA, 20 nt, Human
aaacagguacucacagauca

SEQ ID NO: 724970 - RNA, 23 nt, Human
aaaccacacuuugugcugaacaa

SEQ ID NO: 724971 - RNA, 21 nt, Human
aaaccucccuuuaccuccucu

SEQ ID NO: 724972 - RNA, 18 nt, Human
aaagagucccagaugggu

SEQ ID NO: 724973 - RNA, 20 nt, Human
aaagccccuuagaaaaccaa

SEQ ID NO: 724974 - RNA, 24 nt, Human
aaaucaaaugaacagaaagucaaa

SEQ ID NO: 724975 - RNA, 22 nt, Human
aaauccuguuucuuuggaaaug

SEQ ID NO: 724976 - RNA, 20 nt, Human
aagacaggaggcuuccaaac

SEQ ID NO: 724977 - RNA, 22 nt, Human
aaguuaagcagucuugggcuug

SEQ ID NO: 724978 - RNA, 21 nt, Human
acacauuuccuucuuaaauuc

SEQ ID NO: 724979 - RNA, 28 nt, Human
acaccacgggccaaacacuucuggacca

SEQ ID NO: 724980 - RNA, 20 nt, Human
acagcaauagauaguaaacc

SEQ ID NO: 724981 - RNA, 23 nt, Human
acagcccgggguguugcugaauc

SEQ ID NO: 724982 - RNA, 22 nt, Human
acagucagaacgcacacccugc

SEQ ID NO: 724983 - RNA, 20 nt, Human
accaccaccuugaaauuuuu

SEQ ID NO: 724984 - RNA, 23 nt, Human
accccugguucuccacaucucuc

SEQ ID NO: 724985 - RNA, 19 nt, Human
acccugaucaaucugauca

SEQ ID NO: 724986 - RNA, 21 nt, Human
acuggagugccaggauacuag

SEQ ID NO: 724987 - RNA, 23 nt, Human
agaacagaauuccuaccaaggca

SEQ ID NO: 724988 - RNA, 19 nt, Human
agacaugacuuuggugggg

SEQ ID NO: 724989 - RNA, 18 nt, Human
agaccaccccauagagcc

SEQ ID NO: 724990 - RNA, 18 nt, Human
agagacaaucuggagaag

SEQ ID NO: 724991 - RNA, 20 nt, Human
agcaacaaaaucaaaugaac

SEQ ID NO: 724992 - RNA, 26 nt, Human
agcaauagauaguaaacacuuaaaua

SEQ ID NO: 724993 - RNA, 24 nt, Human
agcugacaaagcuccggcacuguu

SEQ ID NO: 724994 - RNA, 18 nt, Human
agcugguccugaguacau

SEQ ID NO: 724995 - RNA, 21 nt, Human
aggcaaaauuauaacuucagc

SEQ ID NO: 724996 - RNA, 22 nt, Human
aggccagggacucccagagcuc

SEQ ID NO: 724997 - RNA, 23 nt, Human
aggcuggggaagggggucuagug

SEQ ID NO: 724998 - RNA, 23 nt, Human
aucuacaccacgggccaaacacu

SEQ ID NO: 724999 - RNA, 21 nt, Human
augagcuacugauccuaugac

SEQ ID NO: 725000 - RNA, 19 nt, Human
auggagccucugcuguuua

SEQ ID NO: 725001 - RNA, 20 nt, Human
auggagucagcucaucuaca

SEQ ID NO: 725002 - RNA, 19 nt, Human
caaaaccagccucaaaaga

SEQ ID NO: 725003 - RNA, 24 nt, Human
caaaaucaaaugaacagaaaguca

SEQ ID NO: 725004 - RNA, 21 nt, Human
caaagccccuuagaaaaccaa

SEQ ID NO: 725005 - RNA, 19 nt, Human
caaaguaaacagguuaccc

SEQ ID NO: 725006 - RNA, 24 nt, Human
caacaaaucucaugagcuacugau

SEQ ID NO: 725007 - RNA, 19 nt, Human
caacaacaguaacagcuua

SEQ ID NO: 725008 - RNA, 20 nt, Human
caacacagaacagaauuccu

SEQ ID NO: 725009 - RNA, 23 nt, Human
caacaguaacagcuuaugugcua

SEQ ID NO: 725010 - RNA, 22 nt, Human
cacaacacagaacagaauuccu

SEQ ID NO: 725011 - RNA, 18 nt, Human
cacacucugcagccaccc

SEQ ID NO: 725012 - RNA, 20 nt, Human
cacaguuucagguuaaguac

SEQ ID NO: 725013 - RNA, 21 nt, Human
caccaagacacucauggccaa

SEQ ID NO: 725014 - RNA, 23 nt, Human
caccacgggccaaacacuucugg

SEQ ID NO: 725015 - RNA, 19 nt, Human
caccaggggcagugccagg

SEQ ID NO: 725016 - RNA, 23 nt, Human
caccaggggcagugccagggcug

SEQ ID NO: 725017 - RNA, 22 nt, Human
caccccauagagcccacuccca

SEQ ID NO: 725018 - RNA, 20 nt, Human
cacccugccuccugacucau

SEQ ID NO: 725019 - RNA, 21 nt, Human
cacuucauggagucagcucau

SEQ ID NO: 725020 - RNA, 20 nt, Human
cagaacagaauuccuaccaa

SEQ ID NO: 725021 - RNA, 23 nt, Human
cagaaguggccaaaacagaugac

SEQ ID NO: 725022 - RNA, 21 nt, Human
cagagcuuccuagcgggugcu

SEQ ID NO: 725023 - RNA, 23 nt, Human
cagaggaagcagacaugacuuug

SEQ ID NO: 725024 - RNA, 23 nt, Human
cagcagagcuuccuagcgggugc

SEQ ID NO: 725025 - RNA, 24 nt, Human
cagccucaaaagaaugaaaaacau

SEQ ID NO: 725026 - RNA, 23 nt, Human
cagcuccuaugaaauuaccuccu

SEQ ID NO: 725027 - RNA, 25 nt, Human
caguaacacccacagugaaaaccuc

SEQ ID NO: 725028 - RNA, 23 nt, Human
caguuaauccggcucugcggcgc

SEQ ID NO: 725029 - RNA, 24 nt, Human
caugucacuuguuccccucaaccc

SEQ ID NO: 725030 - RNA, 24 nt, Human
cauugcuggucaucccaguuggag

SEQ ID NO: 725031 - RNA, 24 nt, Human
ccaaaacagaugacuauaucaaag

SEQ ID NO: 725032 - RNA, 21 nt, Human
ccaccucuccaccaagacacu

SEQ ID NO: 725033 - RNA, 22 nt, Human
ccaccucuccaccaagacacuc

SEQ ID NO: 725034 - RNA, 24 nt, Human
ccaccucuccaccaagacacucau

SEQ ID NO: 725035 - RNA, 19 nt, Human
ccagagagccaggcacucc

SEQ ID NO: 725036 - RNA, 18 nt, Human
ccaguuacucaggucccu

SEQ ID NO: 725037 - RNA, 24 nt, Human
ccaguuggaggccugcaguaacac

SEQ ID NO: 725038 - RNA, 24 nt, Human
cccaaaaccagccucaaaagaaug

SEQ ID NO: 725039 - RNA, 27 nt, Human
cccaaagcuuucugaccuaaauagaaa

SEQ ID NO: 725040 - RNA, 20 nt, Human
cccacagaaggccggacguc

SEQ ID NO: 725041 - RNA, 18 nt, Human
cccauagagcccacuccc

SEQ ID NO: 725042 - RNA, 20 nt, Human
ccccaccucuccaccaagac

SEQ ID NO: 725043 - RNA, 19 nt, Human
ccggcacacucugcagcca

SEQ ID NO: 725044 - RNA, 24 nt, Human
ccucacaaguaugcaagaucgagg

SEQ ID NO: 725045 - RNA, 21 nt, Human
ccucuccuguccauccaggcu

SEQ ID NO: 725046 - RNA, 21 nt, Human
ccuggaauuuaacugucccga

SEQ ID NO: 725047 - RNA, 27 nt, Human
cggcacuguuagcacaaaguaaacaac

SEQ ID NO: 725048 - RNA, 19 nt, Human
cgggugcuguggcaucagu

SEQ ID NO: 725049 - RNA, 24 nt, Human
cgucaacaacucuucucuguuuca

SEQ ID NO: 725050 - RNA, 22 nt, Human
cucaaaagaaugaaaaacauag

SEQ ID NO: 725051 - RNA, 23 nt, Human
cucaaaagaaugaaaaacauagc

SEQ ID NO: 725052 - RNA, 20 nt, Human
cucacagaucagaaaagcag

SEQ ID NO: 725053 - RNA, 24 nt, Human
cucucucacaccagcauuucaaaa

SEQ ID NO: 725054 - RNA, 23 nt, Human
cugaaccagcugccauccaauag

SEQ ID NO: 725055 - RNA, 22 nt, Human
cugcaggacaccccuucuggcu

SEQ ID NO: 725056 - RNA, 23 nt, Human
cuggagacaaacagguacucaca

SEQ ID NO: 725057 - RNA, 19 nt, Human
gaaaacaaguugggaaugg

SEQ ID NO: 725058 - RNA, 23 nt, Human
gaagaggauguucaaggcuuaaa

SEQ ID NO: 725059 - RNA, 20 nt, Human
gagcuccccguggcucugcc

SEQ ID NO: 725060 - RNA, 23 nt, Human
gagcuuccuagcgggugcugugg

SEQ ID NO: 725061 - RNA, 19 nt, Human
gcucucagccacucggcug

SEQ ID NO: 725062 - RNA, 21 nt, Human
gcugacaaagcuccggcacug

SEQ ID NO: 725063 - RNA, 18 nt, Human
gcugaggccagggacucc

SEQ ID NO: 725064 - RNA, 20 nt, Human
gcuguggcaucagugaguca

SEQ ID NO: 725065 - RNA, 22 nt, Human
gcuguugcuucucaacaacagu

SEQ ID NO: 725066 - RNA, 21 nt, Human
ggaaggaguuagacgucaaca

SEQ ID NO: 725067 - RNA, 22 nt, Human
ggagaagccagucagcaaugaa

SEQ ID NO: 725068 - RNA, 19 nt, Human
ggagcuccccguggcucug

SEQ ID NO: 725069 - RNA, 18 nt, Human
gggaaacgggaaguucag

SEQ ID NO: 725070 - RNA, 27 nt, Human
gggaaggguuuuaaagaaacaucaaaa

SEQ ID NO: 725071 - RNA, 20 nt, Human
gggcuggggacaagcagcag

SEQ ID NO: 725072 - RNA, 23 nt, Human
ggggucaccaacagggagagggu

SEQ ID NO: 725073 - RNA, 21 nt, Human
gggguggggggaaacgggaag

SEQ ID NO: 725074 - RNA, 21 nt, Human
ggugggguggggggaaacggg

SEQ ID NO: 725075 - RNA, 21 nt, Human
gucagcucaucuacaccacgg

SEQ ID NO: 725076 - RNA, 18 nt, Human
gugcagaccaccccauag

SEQ ID NO: 725077 - RNA, 22 nt, Human
gugccagggcugaggccaggga

SEQ ID NO: 725078 - RNA, 23 nt, Human
uaaaaccuaucaguaaacuaaaa

SEQ ID NO: 725079 - RNA, 23 nt, Human
uaaacuaaaacuagagaggcugg

SEQ ID NO: 725080 - RNA, 21 nt, Human
uaaagucucuuauacaaaaga

SEQ ID NO: 725081 - RNA, 20 nt, Human
uaacacccacagugaaaacc

SEQ ID NO: 725082 - RNA, 20 nt, Human
uaagcagacaccaacauccc

SEQ ID NO: 725083 - RNA, 26 nt, Human
uacacagaccacccagcauccaugau

SEQ ID NO: 725084 - RNA, 22 nt, Human
uacagcaauagauaguaaacac

SEQ ID NO: 725085 - RNA, 19 nt, Human
uacagugucuaucuagaau

SEQ ID NO: 725086 - RNA, 23 nt, Human
uaccagguaucccagggugcccu

SEQ ID NO: 725087 - RNA, 25 nt, Human
uagaucccaaaaccagccucaaaag

SEQ ID NO: 725088 - RNA, 24 nt, Human
uagcaaaaaccugucuaggaaaaa

SEQ ID NO: 725089 - RNA, 21 nt, Human
uaggacagacagucagaacgc

SEQ ID NO: 725090 - RNA, 23 nt, Human
uauaaaaaaaaacuuuuacccau

SEQ ID NO: 725091 - RNA, 20 nt, Human
uauacaaaaacaaaaauaaa

SEQ ID NO: 725092 - RNA, 22 nt, Human
ucaaaugaacagaaagucaaaa

SEQ ID NO: 725093 - RNA, 22 nt, Human
ucaacaacucuucucuguuuca

SEQ ID NO: 725094 - RNA, 19 nt, Human
ucacuguucaaucagcaga

SEQ ID NO: 725095 - RNA, 23 nt, Human
ucaguaaacuaaaacuagagagg

SEQ ID NO: 725096 - RNA, 18 nt, Human
ucccaaaaccagccucaa

SEQ ID NO: 725097 - RNA, 19 nt, Human
uccccucaacccugucccc

SEQ ID NO: 725098 - RNA, 21 nt, Human
ucccugcugagggcuggaacc

SEQ ID NO: 725099 - RNA, 21 nt, Human
uccuggcugcugcuugggagc

SEQ ID NO: 725100 - RNA, 21 nt, Human
ucucacaccagcauuucaaaa

SEQ ID NO: 725101 - RNA, 23 nt, Human
ucucugccccacagaaggccgga

SEQ ID NO: 725102 - RNA, 18 nt, Human
ucugacugggaccaacug

SEQ ID NO: 725103 - RNA, 22 nt, Human
ucugcagccacccacggagggc

SEQ ID NO: 725104 - RNA, 19 nt, Human
ugaaaaacauagcccugca

SEQ ID NO: 725105 - RNA, 21 nt, Human
ugaaaaccucccuuuaccucc

SEQ ID NO: 725106 - RNA, 22 nt, Human
ugaccaccaccuugaaauuuuu

SEQ ID NO: 725107 - RNA, 18 nt, Human
ugacccuuaucccaccuc

SEQ ID NO: 725108 - RNA, 22 nt, Human
ugacuauaucaaagugguuccc

SEQ ID NO: 725109 - RNA, 21 nt, Human
ugagcuggaggcagaggaagc

SEQ ID NO: 725110 - RNA, 18 nt, Human
ugaggccagggacuccca

SEQ ID NO: 725111 - RNA, 22 nt, Human
ugaggggacugcccugcugacc

SEQ ID NO: 725112 - RNA, 19 nt, Human
ugccaggauacuaaucucu

SEQ ID NO: 725113 - RNA, 18 nt, Human
ugcccugcugaccugucu

SEQ ID NO: 725114 - RNA, 22 nt, Human
ugcugcugucagauacaucccc

SEQ ID NO: 725115 - RNA, 22 nt, Human
uggaaggaguuagacgucaaca

SEQ ID NO: 725116 - RNA, 22 nt, Human
uggagacaaacagguacucaca

SEQ ID NO: 725117 - RNA, 21 nt, Human
uggagucagcucaucuacacc

SEQ ID NO: 725118 - RNA, 21 nt, Human
uggcaaaaagggaaaacuuca

SEQ ID NO: 725119 - RNA, 28 nt, Human
uggcaaaaagggaaaacuucacaguuuc

SEQ ID NO: 725120 - RNA, 18 nt, Human
uggcacugcaggacaccc

SEQ ID NO: 725121 - RNA, 18 nt, Human
uggccuggagacaaacag

SEQ ID NO: 725122 - RNA, 20 nt, Human
ugggagaagaggauguucaa

SEQ ID NO: 725123 - RNA, 21 nt, Human
ugggagaagaggauguucaag

SEQ ID NO: 725124 - RNA, 22 nt, Human
ugggagaagaggauguucaagg

SEQ ID NO: 725125 - RNA, 24 nt, Human
ugggcaaagccccuuagaaaacca

SEQ ID NO: 725126 - RNA, 19 nt, Human
ugggcuuggggaaaggggc

SEQ ID NO: 725127 - RNA, 24 nt, Human
uggggaaaggggcacagaaggagg

SEQ ID NO: 725128 - RNA, 22 nt, Human
ugggggcggcgaguggauugga

SEQ ID NO: 725129 - RNA, 21 nt, Human
uggguuuagauggucaaaggu

SEQ ID NO: 725130 - RNA, 20 nt, Human
ugucuugucccugcugaggg

SEQ ID NO: 725131 - RNA, 25 nt, Human
uguuccccucaacccuguccccaau

SEQ ID NO: 725132 - RNA, 20 nt, Human
uuaaaaaugcaaaauaaaau

SEQ ID NO: 725133 - RNA, 23 nt, Human
uuaaauauuaggaggucaguacu

SEQ ID NO: 725134 - RNA, 21 nt, Human
uuagauaucagcauccuggcu

SEQ ID NO: 725135 - RNA, 21 nt, Human
uuauucuaaauaaaaaccaca

SEQ ID NO: 725136 - RNA, 21 nt, Human
uucagaagagggugagcugga

SEQ ID NO: 725137 - RNA, 20 nt, Human
uucccuggguuuauuaugcu

SEQ ID NO: 725138 - RNA, 21 nt, Human
uucuuugggcaaagccccuua

SEQ ID NO: 725139 - RNA, 22 nt, Human
uuuaaacuggccacuguacaag

SEQ ID NO: 725140 - RNA, 24 nt, Human
uuuggugggguggggggaaacggg

SEQ ID NO: 725141 - RNA, 20 nt, Human
aaauuuuuaaaugugccacu

SEQ ID NO: 725142 - RNA, 21 nt, Human
aacaacuuuaaacauuuggua

SEQ ID NO: 725143 - RNA, 21 nt, Human
aagagccacugggcagcugga

SEQ ID NO: 725144 - RNA, 18 nt, Human
aagcaaaguccacuuaug

SEQ ID NO: 725145 - RNA, 20 nt, Human
aaggacacuggcccacaagc

SEQ ID NO: 725146 - RNA, 22 nt, Human
aagguuaaucucacaagacacu

SEQ ID NO: 725147 - RNA, 21 nt, Human
aaguacacacuccauuuacaa

SEQ ID NO: 725148 - RNA, 23 nt, Human
aaguuguaaccagcauagcacca

SEQ ID NO: 725149 - RNA, 26 nt, Human
acaaagacaaacacaagucuuuucug

SEQ ID NO: 725150 - RNA, 21 nt, Human
acaaggacacuggcccacaag

SEQ ID NO: 725151 - RNA, 22 nt, Human
accaaaucaccacugguuacac

SEQ ID NO: 725152 - RNA, 20 nt, Human
acccaaaaccaguuauaauc

SEQ ID NO: 725153 - RNA, 20 nt, Human
acccgccccccucccacccc

SEQ ID NO: 725154 - RNA, 18 nt, Human
acgggacuuccucccccu

SEQ ID NO: 725155 - RNA, 19 nt, Human
acugacauggaugccuuga

SEQ ID NO: 725156 - RNA, 19 nt, Human
acuggccucagcguugucu

SEQ ID NO: 725157 - RNA, 20 nt, Human
agaaaaaacuguuaaaacau

SEQ ID NO: 725158 - RNA, 19 nt, Human
agagauuccagguuccauc

SEQ ID NO: 725159 - RNA, 24 nt, Human
agagguaagcgggcaggcuccugg

SEQ ID NO: 725160 - RNA, 19 nt, Human
agauaagccccaaaagcaa

SEQ ID NO: 725161 - RNA, 22 nt, Human
agaugccaagcgccccuggaac

SEQ ID NO: 725162 - RNA, 26 nt, Human
agcagaacaaagacaaacacaagucu

SEQ ID NO: 725163 - RNA, 19 nt, Human
agcauguaucagagauaag

SEQ ID NO: 725164 - RNA, 22 nt, Human
agccacugggcagcuggaagcc

SEQ ID NO: 725165 - RNA, 20 nt, Human
agccuagaaaauauuuaccc

SEQ ID NO: 725166 - RNA, 20 nt, Human
aggcagggcuccagcaugua

SEQ ID NO: 725167 - RNA, 19 nt, Human
agggaaggagggcugcacc

SEQ ID NO: 725168 - RNA, 19 nt, Human
agggcugcaccgcucugcc

SEQ ID NO: 725169 - RNA, 21 nt, Human
agggucuguacuguuaaaagu

SEQ ID NO: 725170 - RNA, 19 nt, Human
auacugcucaaacagcaca

SEQ ID NO: 725171 - RNA, 20 nt, Human
augccaagcgccccuggaac

SEQ ID NO: 725172 - RNA, 23 nt, Human
auggagaacaggcuuguccucgg

SEQ ID NO: 725173 - RNA, 21 nt, Human
auucagguacccaaaaccagu

SEQ ID NO: 725174 - RNA, 20 nt, Human
auuuacccaugaacacuacc

SEQ ID NO: 725175 - RNA, 22 nt, Human
caaaacaugacuccacaucagc

SEQ ID NO: 725176 - RNA, 22 nt, Human
caagguuaaucucacaagacac

SEQ ID NO: 725177 - RNA, 21 nt, Human
cacacguagaaacugacagac

SEQ ID NO: 725178 - RNA, 23 nt, Human
caccagaaaagauucuacaugau

SEQ ID NO: 725179 - RNA, 18 nt, Human
caccccgccucuaguccc

SEQ ID NO: 725180 - RNA, 22 nt, Human
cagaacaaagacaaacacaagu

SEQ ID NO: 725181 - RNA, 19 nt, Human
cagcaaggugaggcugggg

SEQ ID NO: 725182 - RNA, 19 nt, Human
cagcagaacaaagacaaac

SEQ ID NO: 725183 - RNA, 22 nt, Human
cagcagaacaaagacaaacaca

SEQ ID NO: 725184 - RNA, 18 nt, Human
cauguaaaggguggaugg

SEQ ID NO: 725185 - RNA, 21 nt, Human
cauuuugcaucacuauacagg

SEQ ID NO: 725186 - RNA, 27 nt, Human
ccaaaaccaguuauaauccagguagaa

SEQ ID NO: 725187 - RNA, 19 nt, Human
ccaaauggaagggaaggag

SEQ ID NO: 725188 - RNA, 23 nt, Human
ccacaaaacaugacuccacauca

SEQ ID NO: 725189 - RNA, 19 nt, Human
ccacugggcagcuggaagc

SEQ ID NO: 725190 - RNA, 20 nt, Human
ccacugggcagcuggaagcc

SEQ ID NO: 725191 - RNA, 21 nt, Human
ccagaaaaaacuguuaaaaca

SEQ ID NO: 725192 - RNA, 20 nt, Human
ccaggcagggccucucauuu

SEQ ID NO: 725193 - RNA, 23 nt, Human
cccacugugucccaagguuaauc

SEQ ID NO: 725194 - RNA, 24 nt, Human
cccaugaacacuaccauguuugga

SEQ ID NO: 725195 - RNA, 19 nt, Human
ccccaaaagcaaaguccac

SEQ ID NO: 725196 - RNA, 20 nt, Human
ccccaaaagcaaaguccacu

SEQ ID NO: 725197 - RNA, 21 nt, Human
ccccaaggaagcaccugguuu

SEQ ID NO: 725198 - RNA, 23 nt, Human
ccccaaggaagcaccugguuuca

SEQ ID NO: 725199 - RNA, 22 nt, Human
ccccccucccaccccgccucua

SEQ ID NO: 725200 - RNA, 22 nt, Human
ccccuggacgcacacuuggccu

SEQ ID NO: 725201 - RNA, 21 nt, Human
ccccuggacgcacacuugguc

SEQ ID NO: 725202 - RNA, 19 nt, Human
ccccuuccacccgcccccc

SEQ ID NO: 725203 - RNA, 18 nt, Human
ccguuacgggacuuccuc

SEQ ID NO: 725204 - RNA, 21 nt, Human
ccuaacauggaacuguaacau

SEQ ID NO: 725205 - RNA, 21 nt, Human
ccuagugccuccaacagucuc

SEQ ID NO: 725206 - RNA, 20 nt, Human
ccucccaccccgccucuagu

SEQ ID NO: 725207 - RNA, 21 nt, Human
ccugguuucagggauugcauc

SEQ ID NO: 725208 - RNA, 26 nt, Human
cuaacagcccugauggcagugucaga

SEQ ID NO: 725209 - RNA, 21 nt, Human
cucacacguagaaacugacag

SEQ ID NO: 725210 - RNA, 22 nt, Human
cucccuggguccaggcagggcc

SEQ ID NO: 725211 - RNA, 24 nt, Human
cugaaggaggcggugaccccucuc

SEQ ID NO: 725212 - RNA, 18 nt, Human
cugacugcauuacucaac

SEQ ID NO: 725213 - RNA, 22 nt, Human
cuggacccagugucagcaccaa

SEQ ID NO: 725214 - RNA, 24 nt, Human
cuuccacccgccccccucccaccc

SEQ ID NO: 725215 - RNA, 20 nt, Human
gaaggaggcggugaccccuc

SEQ ID NO: 725216 - RNA, 20 nt, Human
gacuuccucccccuuccacc

SEQ ID NO: 725217 - RNA, 19 nt, Human
gaggcuggggaagugaggc

SEQ ID NO: 725218 - RNA, 24 nt, Human
gaguugcuauauggggaggggaga

SEQ ID NO: 725219 - RNA, 23 nt, Human
gcccuagugccuccaacagucuc

SEQ ID NO: 725220 - RNA, 30 nt, Human
gcuacagcauguacaaggacacuggcccag

SEQ ID NO: 725221 - RNA, 18 nt, Human
gcuccucucccugggucc

SEQ ID NO: 725222 - RNA, 21 nt, Human
gcuccuggcaccaccuccucc

SEQ ID NO: 725223 - RNA, 19 nt, Human
ggaggggagagugaagaaa

SEQ ID NO: 725224 - RNA, 18 nt, Human
ggcaccaccuccuccaaa

SEQ ID NO: 725225 - RNA, 18 nt, Human
ggcuccuggcaccaccuc

SEQ ID NO: 725226 - RNA, 18 nt, Human
gguguguccucaaaggcc

SEQ ID NO: 725227 - RNA, 19 nt, Human
guccucggguaggaugugu

SEQ ID NO: 725228 - RNA, 24 nt, Human
guuacgggacuuccucccccuucc

SEQ ID NO: 725229 - RNA, 19 nt, Human
guuuuccagggaacccugg

SEQ ID NO: 725230 - RNA, 25 nt, Human
uaaaaauaaaaaauacaguacuuug

SEQ ID NO: 725231 - RNA, 25 nt, Human
uaaaccagaaaaaacuguuaaaaca

SEQ ID NO: 725232 - RNA, 23 nt, Human
uaaagcauuuguggcagacaggu

SEQ ID NO: 725233 - RNA, 26 nt, Human
uaaccaaucaaaauucagguacccaa

SEQ ID NO: 725234 - RNA, 19 nt, Human
uaaccugugcuguuccccu

SEQ ID NO: 725235 - RNA, 18 nt, Human
uaagacaggcaccaaauc

SEQ ID NO: 725236 - RNA, 20 nt, Human
uaagagccacugggcagcug

SEQ ID NO: 725237 - RNA, 18 nt, Human
uaagagguagaugagaga

SEQ ID NO: 725238 - RNA, 22 nt, Human
uaagccccaaaagcaaagucca

SEQ ID NO: 725239 - RNA, 18 nt, Human
uaaggcuaaccaaucaaa

SEQ ID NO: 725240 - RNA, 22 nt, Human
uacagaucauaggaacccuggg

SEQ ID NO: 725241 - RNA, 21 nt, Human
uacaucauguaaaggguggau

SEQ ID NO: 725242 - RNA, 18 nt, Human
uaggaacccugggacugg

SEQ ID NO: 725243 - RNA, 20 nt, Human
uaguccccuagcuccuccag

SEQ ID NO: 725244 - RNA, 19 nt, Human
ucacucagaaaugcagcag

SEQ ID NO: 725245 - RNA, 19 nt, Human
ucagcagagguaagcgggc

SEQ ID NO: 725246 - RNA, 19 nt, Human
ucaguccaugggagaugcc

SEQ ID NO: 725247 - RNA, 22 nt, Human
uccagcuacacauacuuagcuu

SEQ ID NO: 725248 - RNA, 23 nt, Human
ucccaccccgccucuaguccccu

SEQ ID NO: 725249 - RNA, 22 nt, Human
ucccuggguccaggcagggccu

SEQ ID NO: 725250 - RNA, 18 nt, Human
uccuggcaccaccuccuc

SEQ ID NO: 725251 - RNA, 19 nt, Human
ucuagauuaacaggagaga

SEQ ID NO: 725252 - RNA, 20 nt, Human
ucucagaugcuacuugauua

SEQ ID NO: 725253 - RNA, 21 nt, Human
ucuccaggcuaacccacugug

SEQ ID NO: 725254 - RNA, 22 nt, Human
ucuccaggcuaacccacugugu

SEQ ID NO: 725255 - RNA, 19 nt, Human
ugccaagcgccccuggaac

SEQ ID NO: 725256 - RNA, 18 nt, Human
ugcuaaacuguuuaagag

SEQ ID NO: 725257 - RNA, 22 nt, Human
uggaagccucgaacccaaaggc

SEQ ID NO: 725258 - RNA, 18 nt, Human
uggcaccaccuccuccaa

SEQ ID NO: 725259 - RNA, 18 nt, Human
uggcagugucagaggaca

SEQ ID NO: 725260 - RNA, 21 nt, Human
ugguuaaaauacugcucaaac

SEQ ID NO: 725261 - RNA, 24 nt, Human
ugucuaagaaagcuauauaaaaca

SEQ ID NO: 725262 - RNA, 18 nt, Human
uuaaaacaucuauccaac

SEQ ID NO: 725263 - RNA, 25 nt, Human
uuaacugcuuaccaaaagaaauuca

SEQ ID NO: 725264 - RNA, 27 nt, Human
uuacgggacuuccucccccuuccaccc

SEQ ID NO: 725265 - RNA, 23 nt, Human
uucacaggaccucauauccucca

SEQ ID NO: 725266 - RNA, 20 nt, Human
uucuccaggcuaacccacug

SEQ ID NO: 725267 - RNA, 25 nt, Human
uuggauuucaaacaacuuuaaacau

SEQ ID NO: 725268 - RNA, 25 nt, Human
uuucagggauugcaucccuuuccca

SEQ ID NO: 725269 - RNA, 22 nt, Human
aaaaagcuauaaaauacaguga

SEQ ID NO: 725270 - RNA, 24 nt, Human
aaaagacaacaccugaggccuggg

SEQ ID NO: 725271 - RNA, 22 nt, Human
aaacccagaagcugaucaacag

SEQ ID NO: 725272 - RNA, 24 nt, Human
aaagugcugggauuacaggcguga

SEQ ID NO: 725273 - RNA, 19 nt, Human
aaauucuccaaauuuccuc

SEQ ID NO: 725274 - RNA, 21 nt, Human
aacauggugaggugaaugcuc

SEQ ID NO: 725275 - RNA, 19 nt, Human
aaccacccuuguccccaag

SEQ ID NO: 725276 - RNA, 19 nt, Human
aagagccacgcaggguugg

SEQ ID NO: 725277 - RNA, 18 nt, Human
aagcacgugccugaaaau

SEQ ID NO: 725278 - RNA, 25 nt, Human
aagcaguaaagaauuacuucacaca

SEQ ID NO: 725279 - RNA, 19 nt, Human
aagugcugggauuacaggc

SEQ ID NO: 725280 - RNA, 19 nt, Human
aagugcugggauuacaggc

SEQ ID NO: 725281 - RNA, 26 nt, Human
aagugcugggauuacaggcgugagcc

SEQ ID NO: 725282 - RNA, 21 nt, Human
acacaauguccugcugaugcc

SEQ ID NO: 725283 - RNA, 25 nt, Human
acagcaccuacauggagaccacaca

SEQ ID NO: 725284 - RNA, 18 nt, Human
acagcaggacuaaaaacc

SEQ ID NO: 725285 - RNA, 19 nt, Human
acagcaggacuaaaaaccc

SEQ ID NO: 725286 - RNA, 22 nt, Human
accacacaaacggcuucacaca

SEQ ID NO: 725287 - RNA, 24 nt, Human
accauauuggccaggcuggucucg

SEQ ID NO: 725288 - RNA, 19 nt, Human
acccaggcuggagugcagu

SEQ ID NO: 725289 - RNA, 20 nt, Human
accccaggugacugcuucca

SEQ ID NO: 725290 - RNA, 25 nt, Human
acucugucacccaggcuggagugca

SEQ ID NO: 725291 - RNA, 18 nt, Human
agaaaaacgagaacauaa

SEQ ID NO: 725292 - RNA, 26 nt, Human
agaauuacuucacacaaaguccuuuc

SEQ ID NO: 725293 - RNA, 21 nt, Human
agacaacaccugaggccuggg

SEQ ID NO: 725294 - RNA, 19 nt, Human
agagaaaaacaaacuggaa

SEQ ID NO: 725295 - RNA, 20 nt, Human
agaguuccaguuuggaagcc

SEQ ID NO: 725296 - RNA, 19 nt, Human
agccugacaacacaguacu

SEQ ID NO: 725297 - RNA, 24 nt, Human
agcgauucuucugcuucagccucc

SEQ ID NO: 725298 - RNA, 18 nt, Human
aggcaggcaggcaggcag

SEQ ID NO: 725299 - RNA, 20 nt, Human
aggcaggcaggcaggcuggc

SEQ ID NO: 725300 - RNA, 21 nt, Human
aggcaggcaggcuggcuggcc

SEQ ID NO: 725301 - RNA, 21 nt, Human
aggcaggcuggcuggccuggg

SEQ ID NO: 725302 - RNA, 23 nt, Human
aggccagacgccugugucuccag

SEQ ID NO: 725303 - RNA, 19 nt, Human
aggcggugccgggaacaca

SEQ ID NO: 725304 - RNA, 25 nt, Human
aggcuggagugcaguggcacaaucu

SEQ ID NO: 725305 - RNA, 20 nt, Human
aggcuucuaaguccuuuccu

SEQ ID NO: 725306 - RNA, 23 nt, Human
agggugcugcuggguggcgagga

SEQ ID NO: 725307 - RNA, 23 nt, Human
aggguuuccaaaaaauggucagu

SEQ ID NO: 725308 - RNA, 24 nt, Human
aggugauccaccugccucggccuc

SEQ ID NO: 725309 - RNA, 21 nt, Human
agguggcugggcucagacacc

SEQ ID NO: 725310 - RNA, 19 nt, Human
agguuuaaaggcuuggagc

SEQ ID NO: 725311 - RNA, 21 nt, Human
aguacuaaaaacucagguggc

SEQ ID NO: 725312 - RNA, 18 nt, Human
aguagcugggacuacagg

SEQ ID NO: 725313 - RNA, 21 nt, Human
agugcaguggcacaaucucag

SEQ ID NO: 725314 - RNA, 18 nt, Human
agugcugggauuacaggc

SEQ ID NO: 725315 - RNA, 24 nt, Human
auacaggguacuguggacacauua

SEQ ID NO: 725316 - RNA, 18 nt, Human
aucucacucugucaccca

SEQ ID NO: 725317 - RNA, 18 nt, Human
augggguuucaccauauu

SEQ ID NO: 725318 - RNA, 20 nt, Human
augggguuucaccauauugg

SEQ ID NO: 725319 - RNA, 24 nt, Human
augggguuucaccauauuggccag

SEQ ID NO: 725320 - RNA, 24 nt, Human
auuuuuguauuuuuaguagagaug

SEQ ID NO: 725321 - RNA, 22 nt, Human
caaaaacccagaagcugaucaa

SEQ ID NO: 725322 - RNA, 23 nt, Human
caaaaacccagaagcugaucaac

SEQ ID NO: 725323 - RNA, 18 nt, Human
caaaggacacacacguuc

SEQ ID NO: 725324 - RNA, 24 nt, Human
caaagugcugggauuacaggcgug

SEQ ID NO: 725325 - RNA, 23 nt, Human
caacacacagcaggacuaaaaac

SEQ ID NO: 725326 - RNA, 21 nt, Human
caacacaguacuaaaaacuca

SEQ ID NO: 725327 - RNA, 23 nt, Human
caacagcaauuuaaaagcaguaa

SEQ ID NO: 725328 - RNA, 20 nt, Human
caagagccacgcaggguugg

SEQ ID NO: 725329 - RNA, 22 nt, Human
caagcgauucuucugcuucagc

SEQ ID NO: 725330 - RNA, 20 nt, Human
caaggcacccacgcccaacc

SEQ ID NO: 725331 - RNA, 23 nt, Human
cacacaauguccugcugaugccc

SEQ ID NO: 725332 - RNA, 24 nt, Human
cacagcaggacuaaaaacccaaga

SEQ ID NO: 725333 - RNA, 18 nt, Human
cacagcucugggcgggca

SEQ ID NO: 725334 - RNA, 24 nt, Human
caccacacccggcuaauuuuugua

SEQ ID NO: 725335 - RNA, 21 nt, Human
caccacgcccagccucuuuuu

SEQ ID NO: 725336 - RNA, 21 nt, Human
caccauauuggccaggcuggu

SEQ ID NO: 725337 - RNA, 24 nt, Human
caccauauuggccaggcuggucuc

SEQ ID NO: 725338 - RNA, 27 nt, Human
caccauauuggccaggcuggucucgaa

SEQ ID NO: 725339 - RNA, 19 nt, Human
cacccuuguccccaaggaa

SEQ ID NO: 725340 - RNA, 23 nt, Human
caccugccucggccucccaaagu

SEQ ID NO: 725341 - RNA, 23 nt, Human
cacucaagguguggaggagggag

SEQ ID NO: 725342 - RNA, 23 nt, Human
cacucugucacccaggcuggagu

SEQ ID NO: 725343 - RNA, 24 nt, Human
cacucugucacccaggcuggagug

SEQ ID NO: 725344 - RNA, 21 nt, Human
cacuguaaccuccgccucccg

SEQ ID NO: 725345 - RNA, 23 nt, Human
cacuguaaccuccgccucccggg

SEQ ID NO: 725346 - RNA, 24 nt, Human
cagaaccacggcaaaagaucauaa

SEQ ID NO: 725347 - RNA, 18 nt, Human
cagcaaugcauccccaca

SEQ ID NO: 725348 - RNA, 24 nt, Human
cagcaaugcauccccacacagcac

SEQ ID NO: 725349 - RNA, 20 nt, Human
cagcaccuggaauuaccagu

SEQ ID NO: 725350 - RNA, 20 nt, Human
cagcaggugcagccuugcuc

SEQ ID NO: 725351 - RNA, 18 nt, Human
cagcaguguaccuccggc

SEQ ID NO: 725352 - RNA, 24 nt, Human
cauauuggccaggcuggucucgaa

SEQ ID NO: 725353 - RNA, 19 nt, Human
caugugauccaauguagag

SEQ ID NO: 725354 - RNA, 25 nt, Human
cauuccacucucuuacuaaaaggau

SEQ ID NO: 725355 - RNA, 22 nt, Human
ccaaaaaaguuagaacccaaaa

SEQ ID NO: 725356 - RNA, 23 nt, Human
ccaaaaaaguuagaacccaaaaa

SEQ ID NO: 725357 - RNA, 26 nt, Human
ccaaaaaaguuagaacccaaaaaccc

SEQ ID NO: 725358 - RNA, 22 nt, Human
ccaaagugcugggauuacaggc

SEQ ID NO: 725359 - RNA, 22 nt, Human
ccaaagugcugggauuacaggc

SEQ ID NO: 725360 - RNA, 24 nt, Human
ccaaagugcugggauuacaggcgu

SEQ ID NO: 725361 - RNA, 23 nt, Human
ccaaauuuccucuaauguuuccu

SEQ ID NO: 725362 - RNA, 20 nt, Human
ccaaccacccuuguccccaa

SEQ ID NO: 725363 - RNA, 25 nt, Human
ccaaccaugcaaaggacacacacgu

SEQ ID NO: 725364 - RNA, 18 nt, Human
ccacacagcacaaaagaa

SEQ ID NO: 725365 - RNA, 22 nt, Human
ccacccccagaaaccccaggug

SEQ ID NO: 725366 - RNA, 23 nt, Human
ccacggcaaaagaucauaaauac

SEQ ID NO: 725367 - RNA, 20 nt, Human
ccagaaaccccaggugacug

SEQ ID NO: 725368 - RNA, 22 nt, Human
ccaucguuucagaagccagguu

SEQ ID NO: 725369 - RNA, 26 nt, Human
cccagaaaccccaggugacugcuucc

SEQ ID NO: 725370 - RNA, 22 nt, Human
cccagcgcaccgccuuggaccg

SEQ ID NO: 725371 - RNA, 18 nt, Human
ccccaaggaacccucccu

SEQ ID NO: 725372 - RNA, 27 nt, Human
ccccacacagcacaaaagacaacaccc

SEQ ID NO: 725373 - RNA, 19 nt, Human
ccccacagcucugggcggg

SEQ ID NO: 725374 - RNA, 30 nt, Human
ccccagaaaccccaggugacugcuuccaag

SEQ ID NO: 725375 - RNA, 20 nt, Human
ccccaggugacugcuuccaa

SEQ ID NO: 725376 - RNA, 20 nt, Human
ccccugaaggccagacgccu

SEQ ID NO: 725377 - RNA, 23 nt, Human
cccgaguagcugggacuacaggc

SEQ ID NO: 725378 - RNA, 24 nt, Human
cccgaguagcugggacuacaggcg

SEQ ID NO: 725379 - RNA, 23 nt, Human
cccggguucaagcgauucuucug

SEQ ID NO: 725380 - RNA, 23 nt, Human
cccuaaauccacaggauguuauc

SEQ ID NO: 725381 - RNA, 18 nt, Human
cccuagcaagccccugaa

SEQ ID NO: 725382 - RNA, 20 nt, Human
ccgcagucccagggugcugc

SEQ ID NO: 725383 - RNA, 24 nt, Human
ccgcagucccagggugcugcuggg

SEQ ID NO: 725384 - RNA, 24 nt, Human
ccgccucccggguucaagcgauuc

SEQ ID NO: 725385 - RNA, 24 nt, Human
ccucccggguucaagcgauucuuc

SEQ ID NO: 725386 - RNA, 21 nt, Human
ccugaccuuaggugauccacc

SEQ ID NO: 725387 - RNA, 23 nt, Human
ccugaccuuaggugauccaccug

SEQ ID NO: 725388 - RNA, 21 nt, Human
ccugugcuggagcaucaagga

SEQ ID NO: 725389 - RNA, 26 nt, Human
cgagaacauaaauguguuauuacaau

SEQ ID NO: 725390 - RNA, 24 nt, Human
cgaggaacuguccacccccagaaa

SEQ ID NO: 725391 - RNA, 22 nt, Human
cgcccaaccaugcaaaggacac

SEQ ID NO: 725392 - RNA, 23 nt, Human
cuaauuuuuguauuuuuaguaga

SEQ ID NO: 725393 - RNA, 22 nt, Human
cucaagguguggaggagggagg

SEQ ID NO: 725394 - RNA, 18 nt, Human
cucacaaugucaaugcaa

SEQ ID NO: 725395 - RNA, 24 nt, Human
cucacucugucacccaggcuggag

SEQ ID NO: 725396 - RNA, 24 nt, Human
cucacuguaaccuccgccucccgg

SEQ ID NO: 725397 - RNA, 23 nt, Human
cugccucggccucccaaagugcu

SEQ ID NO: 725398 - RNA, 23 nt, Human
cugcuucagccucccgaguagcu

SEQ ID NO: 725399 - RNA, 24 nt, Human
cuggaaaagcuuauauggaguuag

SEQ ID NO: 725400 - RNA, 19 nt, Human
cuguccacccccagaaacc

SEQ ID NO: 725401 - RNA, 24 nt, Human
cugugucuucaauauacccaaaaa

SEQ ID NO: 725402 - RNA, 23 nt, Human
cuucagcaguguaccuccggcac

SEQ ID NO: 725403 - RNA, 24 nt, Human
gaaaauaucccuaaauccacagga

SEQ ID NO: 725404 - RNA, 19 nt, Human
gaacucgaaauacagggua

SEQ ID NO: 725405 - RNA, 21 nt, Human
gaaggaucgaagggcagcagg

SEQ ID NO: 725406 - RNA, 31 nt, Human
gacacacacguucacacaugcacacacaugg

SEQ ID NO: 725407 - RNA, 19 nt, Human
gacagcagcuggcuggucc

SEQ ID NO: 725408 - RNA, 24 nt, Human
gaccuuaggugauccaccugccuc

SEQ ID NO: 725409 - RNA, 23 nt, Human
gagaugggguuucaccauauugg

SEQ ID NO: 725410 - RNA, 24 nt, Human
gagaugggguuucaccauauuggc

SEQ ID NO: 725411 - RNA, 22 nt, Human
gaggagggaggagaggguuucc

SEQ ID NO: 725412 - RNA, 24 nt, Human
gaggagggaggagaggguuuccaa

SEQ ID NO: 725413 - RNA, 24 nt, Human
gagggaggagaggguuuccaaaaa

SEQ ID NO: 725414 - RNA, 20 nt, Human
gaguagcugggacuacaggc

SEQ ID NO: 725415 - RNA, 26 nt, Human
gaguagcugggacuacaggcgcacgc

SEQ ID NO: 725416 - RNA, 18 nt, Human
gauaguguuaaacaaacc

SEQ ID NO: 725417 - RNA, 18 nt, Human
gauuacaggcgugagcca

SEQ ID NO: 725418 - RNA, 21 nt, Human
gauuacaggcgugagccacca

SEQ ID NO: 725419 - RNA, 22 nt, Human
gauuacaggcgugagccaccac

SEQ ID NO: 725420 - RNA, 23 nt, Human
gcacauggacagcagcuggcugg

SEQ ID NO: 725421 - RNA, 24 nt, Human
gcgauucuucugcuucagccuccc

SEQ ID NO: 725422 - RNA, 24 nt, Human
gcucugcacauggacagcagcugg

SEQ ID NO: 725423 - RNA, 26 nt, Human
gcuggagcaucaaggauugaccucug

SEQ ID NO: 725424 - RNA, 19 nt, Human
gcuggagugcaguggcaca

SEQ ID NO: 725425 - RNA, 21 nt, Human
gcuuggagcugccaaccaccc

SEQ ID NO: 725426 - RNA, 18 nt, Human
ggaacuguccacccccag

SEQ ID NO: 725427 - RNA, 21 nt, Human
ggaagaucaaacuucugcaga

SEQ ID NO: 725428 - RNA, 22 nt, Human
ggagaggcacuauuaaaacaug

SEQ ID NO: 725429 - RNA, 18 nt, Human
ggaggagggaggagaggg

SEQ ID NO: 725430 - RNA, 19 nt, Human
ggauuacaggcgugagcca

SEQ ID NO: 725431 - RNA, 20 nt, Human
ggcaggcaggcaggcaggca

SEQ ID NO: 725432 - RNA, 24 nt, Human
ggcuggucucgaacuccugaccuu

SEQ ID NO: 725433 - RNA, 24 nt, Human
gggcagcaggugcagccuugcucu

SEQ ID NO: 725434 - RNA, 22 nt, Human
gggguuucaccauauuggccag

SEQ ID NO: 725435 - RNA, 22 nt, Human
ggguuucaccauauuggccagg

SEQ ID NO: 725436 - RNA, 21 nt, Human
gguagcgguuuccuuguaaca

SEQ ID NO: 725437 - RNA, 19 nt, Human
ggucucgaacuccugaccu

SEQ ID NO: 725438 - RNA, 18 nt, Human
guaaagucugaagcaaga

SEQ ID NO: 725439 - RNA, 24 nt, Human
gugagccaccacgcccagccucuu

SEQ ID NO: 725440 - RNA, 19 nt, Human
gugauccaccugccucggc

SEQ ID NO: 725441 - RNA, 24 nt, Human
gugauccaccugccucggccuccc

SEQ ID NO: 725442 - RNA, 19 nt, Human
guggaggagggaggagagg

SEQ ID NO: 725443 - RNA, 24 nt, Human
guuuguuguaagucuccuccucca

SEQ ID NO: 725444 - RNA, 25 nt, Human
uaaaaaaaauauuaauacugucaaa

SEQ ID NO: 725445 - RNA, 18 nt, Human
uaaaaacccaagagcugu

SEQ ID NO: 725446 - RNA, 19 nt, Human
uaaaagcaguaaagaauua

SEQ ID NO: 725447 - RNA, 19 nt, Human
uaaaauacagugauuggug

SEQ ID NO: 725448 - RNA, 22 nt, Human
uaaagaacuuucuguaaccuca

SEQ ID NO: 725449 - RNA, 18 nt, Human
uaaauacaggcagcaaug

SEQ ID NO: 725450 - RNA, 18 nt, Human
uaacauauauuaaaaugg

SEQ ID NO: 725451 - RNA, 22 nt, Human
uaacauuaauaagagaugcuuc

SEQ ID NO: 725452 - RNA, 24 nt, Human
uaauuuuuguauuuuuaguagaga

SEQ ID NO: 725453 - RNA, 23 nt, Human
uacaaaacaguucuuuguaaaca

SEQ ID NO: 725454 - RNA, 23 nt, Human
uacaggcgcacgccaccacaccc

SEQ ID NO: 725455 - RNA, 24 nt, Human
uacaggcgugagccaccacgccca

SEQ ID NO: 725456 - RNA, 25 nt, Human
uacauacauacauacauacauauag

SEQ ID NO: 725457 - RNA, 24 nt, Human
uacauacauacauacauauauaua

SEQ ID NO: 725458 - RNA, 25 nt, Human
uacauacauacauacauauauauau

SEQ ID NO: 725459 - RNA, 20 nt, Human
uacaugaaaaaaaaagcuau

SEQ ID NO: 725460 - RNA, 25 nt, Human
uagaaaacuaucuuacaaguagaac

SEQ ID NO: 725461 - RNA, 25 nt, Human
uagaacccaaaaacccagaagcuga

SEQ ID NO: 725462 - RNA, 21 nt, Human
uagagaaaaacaaacuggaaa

SEQ ID NO: 725463 - RNA, 19 nt, Human
uaguagagaugggguuuca

SEQ ID NO: 725464 - RNA, 23 nt, Human
uaguagagaugggguuucaccau

SEQ ID NO: 725465 - RNA, 26 nt, Human
uaguagagaugggguuucaccauauu

SEQ ID NO: 725466 - RNA, 18 nt, Human
uauucuauauuuugccca

SEQ ID NO: 725467 - RNA, 24 nt, Human
ucacccaggcuggagugcaguggc

SEQ ID NO: 725468 - RNA, 24 nt, Human
ucacucugucacccaggcuggagu

SEQ ID NO: 725469 - RNA, 23 nt, Human
ucacuguaaccuccgccucccgg

SEQ ID NO: 725470 - RNA, 24 nt, Human
ucacuguaaccuccgccucccggg

SEQ ID NO: 725471 - RNA, 25 nt, Human
ucacuguaaccuccgccucccgggu

SEQ ID NO: 725472 - RNA, 22 nt, Human
ucagaaccacggcaaaagauca

SEQ ID NO: 725473 - RNA, 23 nt, Human
ucagccucccgaguagcugggac

SEQ ID NO: 725474 - RNA, 22 nt, Human
ucagguggcugggcucagacac

SEQ ID NO: 725475 - RNA, 24 nt, Human
ucccaaagugcugggauuacaggc

SEQ ID NO: 725476 - RNA, 24 nt, Human
ucccgaguagcugggacuacaggc

SEQ ID NO: 725477 - RNA, 20 nt, Human
ucccggguucaagcgauucu

SEQ ID NO: 725478 - RNA, 24 nt, Human
ucccggguucaagcgauucuucug

SEQ ID NO: 725479 - RNA, 25 nt, Human
ucccugggauggggcgcacuggucc

SEQ ID NO: 725480 - RNA, 18 nt, Human
ucggccucccaaagugcu

SEQ ID NO: 725481 - RNA, 23 nt, Human
ucucacucugucacccaggcugg

SEQ ID NO: 725482 - RNA, 24 nt, Human
ucucacucugucacccaggcugga

SEQ ID NO: 725483 - RNA, 26 nt, Human
ucucacucugucacccaggcuggagu

SEQ ID NO: 725484 - RNA, 27 nt, Human
ucucacucugucacccaggcuggagug

SEQ ID NO: 725485 - RNA, 27 nt, Human
ucugacaaaaaauaaaagauguccaaa

SEQ ID NO: 725486 - RNA, 18 nt, Human
ucugcagaauuuugacag

SEQ ID NO: 725487 - RNA, 24 nt, Human
ucugucacccaggcuggagugcag

SEQ ID NO: 725488 - RNA, 21 nt, Human
ucuuacuaaaaggauaugcuu

SEQ ID NO: 725489 - RNA, 19 nt, Human
ucuucuggauccauucugg

SEQ ID NO: 725490 - RNA, 24 nt, Human
ucuucuggauccauucuggcugga

SEQ ID NO: 725491 - RNA, 18 nt, Human
ucuuuuuuuuuuuucuug

SEQ ID NO: 725492 - RNA, 23 nt, Human
ugaaaaaaaaagcuauaaaauac

SEQ ID NO: 725493 - RNA, 23 nt, Human
ugaaaaugucuauauacaaaaca

SEQ ID NO: 725494 - RNA, 22 nt, Human
ugaagcaagaaugcacagaugu

SEQ ID NO: 725495 - RNA, 24 nt, Human
ugacaaaaaauaaaagauguccaa

SEQ ID NO: 725496 - RNA, 24 nt, Human
ugacaaaaaauaaaagauguccaa

SEQ ID NO: 725497 - RNA, 25 nt, Human
ugacaaaaaauaaaagauguccaaa

SEQ ID NO: 725498 - RNA, 26 nt, Human
ugacaaaaaauaaaagauguccaaaa

SEQ ID NO: 725499 - RNA, 18 nt, Human
ugacagcuaacacagaca

SEQ ID NO: 725500 - RNA, 24 nt, Human
ugaccuuaggugauccaccugccu

SEQ ID NO: 725501 - RNA, 22 nt, Human
ugagacggaaucucacucuguc

SEQ ID NO: 725502 - RNA, 22 nt, Human
ugcacacacaugcgcuuuggcg

SEQ ID NO: 725503 - RNA, 22 nt, Human
ugcaguggcacaaucucagcuc

SEQ ID NO: 725504 - RNA, 21 nt, Human
ugccucggccucccaaagugc

SEQ ID NO: 725505 - RNA, 24 nt, Human
ugccucggccucccaaagugcugg

SEQ ID NO: 725506 - RNA, 23 nt, Human
ugcucagaaccacggcaaaagau

SEQ ID NO: 725507 - RNA, 18 nt, Human
ugcucugcacauggacag

SEQ ID NO: 725508 - RNA, 24 nt, Human
ugcugggauuacaggcgugagcca

SEQ ID NO: 725509 - RNA, 24 nt, Human
ugcuucagccucccgaguagcugg

SEQ ID NO: 725510 - RNA, 18 nt, Human
uggaggagggaggagagg

SEQ ID NO: 725511 - RNA, 18 nt, Human
uggagugcaguggcacaa

SEQ ID NO: 725512 - RNA, 23 nt, Human
uggagugcaguggcacaaucuca

SEQ ID NO: 725513 - RNA, 24 nt, Human
uggagugcaguggcacaaucucag

SEQ ID NO: 725514 - RNA, 20 nt, Human
uggcacaaucucagcucacu

SEQ ID NO: 725515 - RNA, 24 nt, Human
uggccaggcuggucucgaacuccu

SEQ ID NO: 725516 - RNA, 19 nt, Human
uggcccugggguggggaca

SEQ ID NO: 725517 - RNA, 18 nt, Human
uggcgagaccccucugcc

SEQ ID NO: 725518 - RNA, 21 nt, Human
ugggaagagccugacaacaca

SEQ ID NO: 725519 - RNA, 20 nt, Human
ugggaagagccugacaacca

SEQ ID NO: 725520 - RNA, 22 nt, Human
ugggacuacaggcgcacgccac

SEQ ID NO: 725521 - RNA, 24 nt, Human
ugggacuacaggcgcacgccacca

SEQ ID NO: 725522 - RNA, 18 nt, Human
ugggauggggcgcacugg

SEQ ID NO: 725523 - RNA, 18 nt, Human
ugggauuacaggcgugag

SEQ ID NO: 725524 - RNA, 19 nt, Human
ugggauuacaggcgugagc

SEQ ID NO: 725525 - RNA, 22 nt, Human
ugggauuacaggcgugagccac

SEQ ID NO: 725526 - RNA, 23 nt, Human
ugggauuacaggcgugagccacc

SEQ ID NO: 725527 - RNA, 24 nt, Human
ugggauuacaggcgugagccacca

SEQ ID NO: 725528 - RNA, 21 nt, Human
ugggcgggcaggcaggcaggc

SEQ ID NO: 725529 - RNA, 27 nt, Human
ugggcgggcaggcaggcaggcaggccc

SEQ ID NO: 725530 - RNA, 24 nt, Human
ugggguuucaccauauuggccagg

SEQ ID NO: 725531 - RNA, 24 nt, Human
uguccccaaggaacccucccuggg

SEQ ID NO: 725532 - RNA, 19 nt, Human
uguccuggccaugugugga

SEQ ID NO: 725533 - RNA, 24 nt, Human
uguggcaguguccuggccaugugu

SEQ ID NO: 725534 - RNA, 24 nt, Human
uguguguuuacauacauacauaca

SEQ ID NO: 725535 - RNA, 26 nt, Human
uguguuuacauacauacauacauaca

SEQ ID NO: 725536 - RNA, 20 nt, Human
uuaauagagaaaaacaaacu

SEQ ID NO: 725537 - RNA, 21 nt, Human
uuaggugauccaccugccucg

SEQ ID NO: 725538 - RNA, 18 nt, Human
uuaguagagaugggguuu

SEQ ID NO: 725539 - RNA, 22 nt, Human
uuaguagagaugggguuucacc

SEQ ID NO: 725540 - RNA, 24 nt, Human
uuaguagagaugggguuucaccau

SEQ ID NO: 725541 - RNA, 23 nt, Human
uucaagcgauucuucugcuucag

SEQ ID NO: 725542 - RNA, 24 nt, Human
uucaagcgauucuucugcuucagc

SEQ ID NO: 725543 - RNA, 27 nt, Human
uucacacaugcacacacaugcgcuuug

SEQ ID NO: 725544 - RNA, 24 nt, Human
uucagccucccgaguagcugggac

SEQ ID NO: 725545 - RNA, 18 nt, Human
uuccaaaaaauggucagu

SEQ ID NO: 725546 - RNA, 19 nt, Human
uucccuagcaagccccuga

SEQ ID NO: 725547 - RNA, 21 nt, Human
uucugcuucaauaaagcuggg

SEQ ID NO: 725548 - RNA, 23 nt, Human
uugcuggaaaagcuuauauggag

SEQ ID NO: 725549 - RNA, 24 nt, Human
uuggagaggcacuauuaaaacaug

SEQ ID NO: 725550 - RNA, 23 nt, Human
uuguauuuuuaguagagaugggg

SEQ ID NO: 725551 - RNA, 24 nt, Human
uuucaccauauuggccaggcuggu

SEQ ID NO: 725552 - RNA, 19 nt, Human
uuuccaaaaaauggucagu

SEQ ID NO: 725553 - RNA, 20 nt, Human
uuugcugagguagcgguuuc

SEQ ID NO: 725554 - RNA, 24 nt, Human
uuugcugagguagcgguuuccuug

SEQ ID NO: 725555 - RNA, 21 nt, Human
uuuggcgagaccccucugcca

SEQ ID NO: 725556 - RNA, 20 nt, Human
uuuguaaacauggugaggug

SEQ ID NO: 725557 - RNA, 18 nt, Human
uuuguaaggcuucuaagu

SEQ ID NO: 725558 - RNA, 19 nt, Human
uuuguaaggcuucuaaguc

SEQ ID NO: 725559 - RNA, 24 nt, Human
uuuuuaguagagaugggguuucac

SEQ ID NO: 725560 - RNA, 21 nt, Human
uuuuucucagacuuuuucaaa

SEQ ID NO: 725561 - RNA, 22 nt, Human
uuuuucuuuuuuuuuuaaaugg

SEQ ID NO: 725562 - RNA, 20 nt, Human
uuuuuguauuuuuaguagag

SEQ ID NO: 725563 - RNA, 25 nt, Human
aaaacaauuccagacucccacccca

SEQ ID NO: 725564 - RNA, 18 nt, Human
aaacaauuccagacuccc

SEQ ID NO: 725565 - RNA, 21 nt, Human
aaacccagccgggauggcuga

SEQ ID NO: 725566 - RNA, 26 nt, Human
aaaugcuccccaaguccccuuuccac

SEQ ID NO: 725567 - RNA, 25 nt, Human
aaccugcugccuccgagggcaccuu

SEQ ID NO: 725568 - RNA, 23 nt, Human
aagcccuccccaggccaggcucc

SEQ ID NO: 725569 - RNA, 18 nt, Human
acccaggagggcucaaag

SEQ ID NO: 725570 - RNA, 21 nt, Human
acgcccugcacagcuuaggac

SEQ ID NO: 725571 - RNA, 22 nt, Human
acucccaccccagccccaaggc

SEQ ID NO: 725572 - RNA, 21 nt, Human
agacucccaccccagccccaa

SEQ ID NO: 725573 - RNA, 20 nt, Human
agaggaaccggggucgccag

SEQ ID NO: 725574 - RNA, 19 nt, Human
agagggguggggggagggc

SEQ ID NO: 725575 - RNA, 22 nt, Human
agcaucuggugguggccacgcc

SEQ ID NO: 725576 - RNA, 19 nt, Human
agcugugacacggugagua

SEQ ID NO: 725577 - RNA, 20 nt, Human
aggagaggugggggaaggcg

SEQ ID NO: 725578 - RNA, 22 nt, Human
aggcagagagugugaccccggg

SEQ ID NO: 725579 - RNA, 24 nt, Human
aggcgacagagagaccagcaaacc

SEQ ID NO: 725580 - RNA, 23 nt, Human
aggcgccgggacgcuggugagcc

SEQ ID NO: 725581 - RNA, 23 nt, Human
caagacggcgacccuccauaaac

SEQ ID NO: 725582 - RNA, 23 nt, Human
caauuccagacucccaccccagc

SEQ ID NO: 725583 - RNA, 25 nt, Human
cacagcuuaggaccaggucacuucu

SEQ ID NO: 725584 - RNA, 23 nt, Human
cacagugcagggcguggcugccu

SEQ ID NO: 725585 - RNA, 28 nt, Human
caccccagccccaaggccccuucaaagg

SEQ ID NO: 725586 - RNA, 20 nt, Human
cacccccggcuuucagagcu

SEQ ID NO: 725587 - RNA, 19 nt, Human
caccuuaaaaaacuagacc

SEQ ID NO: 725588 - RNA, 21 nt, Human
cacuuugaaaacaauuccaga

SEQ ID NO: 725589 - RNA, 19 nt, Human
cagcagcuaaucgccccca

SEQ ID NO: 725590 - RNA, 18 nt, Human
cagcaguggccugcccac

SEQ ID NO: 725591 - RNA, 23 nt, Human
cagccgggauggcugagccacag

SEQ ID NO: 725592 - RNA, 23 nt, Human
cagcuucuggggaacgggccccc

SEQ ID NO: 725593 - RNA, 23 nt, Human
caggcuagagaagagcuaggggc

SEQ ID NO: 725594 - RNA, 24 nt, Human
cagggccagagcccugcucacuag

SEQ ID NO: 725595 - RNA, 19 nt, Human
cagggccucaaaccugcug

SEQ ID NO: 725596 - RNA, 20 nt, Human
caggggucagucaggcagag

SEQ ID NO: 725597 - RNA, 20 nt, Human
caguucccccgcacgcccug

SEQ ID NO: 725598 - RNA, 18 nt, Human
cauaacccagcuccuggc

SEQ ID NO: 725599 - RNA, 19 nt, Human
caugacaccaagcggagcg

SEQ ID NO: 725600 - RNA, 20 nt, Human
caugacaccaagcggagcga

SEQ ID NO: 725601 - RNA, 23 nt, Human
ccaagcugagcgcagguaagaca

SEQ ID NO: 725602 - RNA, 21 nt, Human
ccaccccagccccaaggcccc

SEQ ID NO: 725603 - RNA, 20 nt, Human
ccaccugaggccugacucca

SEQ ID NO: 725604 - RNA, 19 nt, Human
ccacgccuccugcagcaga

SEQ ID NO: 725605 - RNA, 18 nt, Human
ccacggggacuuccuggg

SEQ ID NO: 725606 - RNA, 24 nt, Human
ccagccccaaggccccuucaaagg

SEQ ID NO: 725607 - RNA, 19 nt, Human
ccaggagaggugggggaag

SEQ ID NO: 725608 - RNA, 18 nt, Human
ccaggucacuucuccaca

SEQ ID NO: 725609 - RNA, 21 nt, Human
cccaccagccacccgcuaccu

SEQ ID NO: 725610 - RNA, 22 nt, Human
cccaggccaggcuccugcccac

SEQ ID NO: 725611 - RNA, 21 nt, Human
cccccagggccucaaaccugc

SEQ ID NO: 725612 - RNA, 18 nt, Human
cccccggcuuucagagcg

SEQ ID NO: 725613 - RNA, 19 nt, Human
ccccucagccuccgagccg

SEQ ID NO: 725614 - RNA, 21 nt, Human
ccccuuuccacaguguuuggg

SEQ ID NO: 725615 - RNA, 23 nt, Human
cccucagagaaucacaugacacc

SEQ ID NO: 725616 - RNA, 24 nt, Human
ccucacaggcccaagcccucccca

SEQ ID NO: 725617 - RNA, 23 nt, Human
ccuccgagccgacgaugcggucu

SEQ ID NO: 725618 - RNA, 18 nt, Human
ccucucugggguccugcc

SEQ ID NO: 725619 - RNA, 18 nt, Human
ccugcagcagaggggugg

SEQ ID NO: 725620 - RNA, 22 nt, Human
ccugcagcagaggggugggggg

SEQ ID NO: 725621 - RNA, 20 nt, Human
ccuggcuuaggaggcauugg

SEQ ID NO: 725622 - RNA, 22 nt, Human
ccuggcuuaggaggcauuggcg

SEQ ID NO: 725623 - RNA, 19 nt, Human
ccugggcugauggcaaacc

SEQ ID NO: 725624 - RNA, 24 nt, Human
cgacagagagaccagcaaacccac

SEQ ID NO: 725625 - RNA, 18 nt, Human
cggccgcggcagccccuc

SEQ ID NO: 725626 - RNA, 22 nt, Human
cgggcacccaccaaggugggcc

SEQ ID NO: 725627 - RNA, 19 nt, Human
cuaccucuaagccaggccu

SEQ ID NO: 725628 - RNA, 19 nt, Human
cuagagaagagcuaggggc

SEQ ID NO: 725629 - RNA, 23 nt, Human
cucacaggcccaagcccucccca

SEQ ID NO: 725630 - RNA, 22 nt, Human
cucccaccccagccccaaggcc

SEQ ID NO: 725631 - RNA, 23 nt, Human
cucccaccccagccccaaggccc

SEQ ID NO: 725632 - RNA, 20 nt, Human
cuccccaggccaggcuccug

SEQ ID NO: 725633 - RNA, 26 nt, Human
cucuaagccaggccugaguggcuccc

SEQ ID NO: 725634 - RNA, 19 nt, Human
cugacuccaagcugagcgc

SEQ ID NO: 725635 - RNA, 19 nt, Human
cugagccacacucaccccc

SEQ ID NO: 725636 - RNA, 20 nt, Human
cugcacagcuuaggaccagg

SEQ ID NO: 725637 - RNA, 19 nt, Human
cugcagcagaggggugggg

SEQ ID NO: 725638 - RNA, 21 nt, Human
cugcagcagaggggugggggg

SEQ ID NO: 725639 - RNA, 18 nt, Human
cugcagcagcgccccugu

SEQ ID NO: 725640 - RNA, 24 nt, Human
cugccugcccucucugggguccug

SEQ ID NO: 725641 - RNA, 18 nt, Human
cugcugcacaggcaucca

SEQ ID NO: 725642 - RNA, 23 nt, Human
cuggccacaucugagggucuucc

SEQ ID NO: 725643 - RNA, 19 nt, Human
cugggcacaggugugugcc

SEQ ID NO: 725644 - RNA, 23 nt, Human
cuucuggggaacgggccccccag

SEQ ID NO: 725645 - RNA, 21 nt, Human
gaaaaugcuccccaagucccc

SEQ ID NO: 725646 - RNA, 18 nt, Human
gaagcugugcgcagccuc

SEQ ID NO: 725647 - RNA, 18 nt, Human
gacacagaggaaccgggg

SEQ ID NO: 725648 - RNA, 19 nt, Human
gagggcaccuucggggaga

SEQ ID NO: 725649 - RNA, 19 nt, Human
gcaaagacuccucagggcc

SEQ ID NO: 725650 - RNA, 22 nt, Human
gcacugggugggcccauagacc

SEQ ID NO: 725651 - RNA, 19 nt, Human
gcagcuucuggggaacggg

SEQ ID NO: 725652 - RNA, 28 nt, Human
gccccaaggccccuucaaaggcaguccu

SEQ ID NO: 725653 - RNA, 19 nt, Human
gcggagcgaggagcgaggc

SEQ ID NO: 725654 - RNA, 18 nt, Human
gcugccugcccucucugg

SEQ ID NO: 725655 - RNA, 22 nt, Human
ggagaauccucacaggcccaag

SEQ ID NO: 725656 - RNA, 19 nt, Human
ggaggggaggcgggaagag

SEQ ID NO: 725657 - RNA, 22 nt, Human
ggaguaaagaggacacagagga

SEQ ID NO: 725658 - RNA, 20 nt, Human
ggcacccaccaaggugggcc

SEQ ID NO: 725659 - RNA, 23 nt, Human
ggcacugggugggcccauagacc

SEQ ID NO: 725660 - RNA, 20 nt, Human
ggcagccccucagccuccga

SEQ ID NO: 725661 - RNA, 24 nt, Human
ggcauccagcuccaaggcugggug

SEQ ID NO: 725662 - RNA, 20 nt, Human
ggccccuucaaaggcagucc

SEQ ID NO: 725663 - RNA, 18 nt, Human
ggccgcggcagccccuca

SEQ ID NO: 725664 - RNA, 22 nt, Human
ggccgcggcagccccucagccu

SEQ ID NO: 725665 - RNA, 19 nt, Human
gggaaggcgacagagagac

SEQ ID NO: 725666 - RNA, 21 nt, Human
gggcaagacggcgacccucca

SEQ ID NO: 725667 - RNA, 19 nt, Human
gggcucaaagugcugacag

SEQ ID NO: 725668 - RNA, 21 nt, Human
gggguggggaguaaagaggac

SEQ ID NO: 725669 - RNA, 22 nt, Human
gguggcugcauccacagggcag

SEQ ID NO: 725670 - RNA, 23 nt, Human
uaaaaaacuagaccuuuuaauca

SEQ ID NO: 725671 - RNA, 19 nt, Human
uaaacggcccugccugccc

SEQ ID NO: 725672 - RNA, 19 nt, Human
uaggaccaggucacuucuc

SEQ ID NO: 725673 - RNA, 21 nt, Human
uaugaaugggaaaaacccacc

SEQ ID NO: 725674 - RNA, 18 nt, Human
ucaauacauugcaaagac

SEQ ID NO: 725675 - RNA, 24 nt, Human
ucagagcggggucagcagaugggc

SEQ ID NO: 725676 - RNA, 22 nt, Human
ucagggauggggcaaugagggc

SEQ ID NO: 725677 - RNA, 21 nt, Human
uccacagggcaguucccccgc

SEQ ID NO: 725678 - RNA, 19 nt, Human
uccacaguguuugggcagc

SEQ ID NO: 725679 - RNA, 26 nt, Human
uccacaguguuugggcagcccuaacg

SEQ ID NO: 725680 - RNA, 21 nt, Human
uccauaaacccaggagggcuc

SEQ ID NO: 725681 - RNA, 18 nt, Human
uccccaggccaggcuccu

SEQ ID NO: 725682 - RNA, 21 nt, Human
uccccaggccaggcuccugcc

SEQ ID NO: 725683 - RNA, 19 nt, Human
ucccggcugggcaaguuca

SEQ ID NO: 725684 - RNA, 19 nt, Human
uccugggcuuucucuggga

SEQ ID NO: 725685 - RNA, 24 nt, Human
ucuccacagugcagggcguggcug

SEQ ID NO: 725686 - RNA, 28 nt, Human
ugaaagcacuggcagcuucuggggaacg

SEQ ID NO: 725687 - RNA, 19 nt, Human
ugacaaggggacacagcug

SEQ ID NO: 725688 - RNA, 20 nt, Human
ugacagugcugguuuccagu

SEQ ID NO: 725689 - RNA, 24 nt, Human
ugaccaucacuuugaaaacaauuc

SEQ ID NO: 725690 - RNA, 22 nt, Human
ugacuaggcugggcuuguggug

SEQ ID NO: 725691 - RNA, 18 nt, Human
ugagggaggggaggcggg

SEQ ID NO: 725692 - RNA, 19 nt, Human
ugagggaggggaggcggga

SEQ ID NO: 725693 - RNA, 18 nt, Human
ugaggggcgguuuggcac

SEQ ID NO: 725694 - RNA, 19 nt, Human
ugaguggcuccugugcauc

SEQ ID NO: 725695 - RNA, 18 nt, Human
ugcaaagacuccucaggg

SEQ ID NO: 725696 - RNA, 20 nt, Human
ugcagcagaggggugggggg

SEQ ID NO: 725697 - RNA, 21 nt, Human
ugcagcagcgccccugucugu

SEQ ID NO: 725698 - RNA, 19 nt, Human
ugccuaucugugcccuggc

SEQ ID NO: 725699 - RNA, 23 nt, Human
ugccugcccucucugggguccug

SEQ ID NO: 725700 - RNA, 20 nt, Human
ugcggcucuccaccugaggc

SEQ ID NO: 725701 - RNA, 20 nt, Human
ugcuagguccaggagaggug

SEQ ID NO: 725702 - RNA, 21 nt, Human
ugcuccggggaacuucuucag

SEQ ID NO: 725703 - RNA, 22 nt, Human
ugcuccggggaacuucuucagu

SEQ ID NO: 725704 - RNA, 20 nt, Human
ugcugcacaggcauccagcu

SEQ ID NO: 725705 - RNA, 23 nt, Human
ugcuuugggaauucauggcuuug

SEQ ID NO: 725706 - RNA, 21 nt, Human
uggcagugagggccaaggaaa

SEQ ID NO: 725707 - RNA, 22 nt, Human
uggcagugagggccaaggaaag

SEQ ID NO: 725708 - RNA, 21 nt, Human
uggcugccugcccucucuggg

SEQ ID NO: 725709 - RNA, 22 nt, Human
ugggaaaaacccaccuuaaaaa

SEQ ID NO: 725710 - RNA, 27 nt, Human
ugggaaaaacccaccuuaaaaaacuag

SEQ ID NO: 725711 - RNA, 24 nt, Human
ugggcaaguucagugaugcuuugg

SEQ ID NO: 725712 - RNA, 22 nt, Human
ugggggaaggcgacagagagac

SEQ ID NO: 725713 - RNA, 18 nt, Human
uggggggagggccagggg

SEQ ID NO: 725714 - RNA, 23 nt, Human
ugguggccacgccuccugcagca

SEQ ID NO: 725715 - RNA, 19 nt, Human
ugguggcugcauccacagg

SEQ ID NO: 725716 - RNA, 23 nt, Human
ugucccagcaguggccugcccac

SEQ ID NO: 725717 - RNA, 27 nt, Human
ugucccggcugggcaaguucagugaug

SEQ ID NO: 725718 - RNA, 23 nt, Human
uguggaauugaaaaugcucccca

SEQ ID NO: 725719 - RNA, 20 nt, Human
uugggcagcccuaacggagg

SEQ ID NO: 725720 - RNA, 22 nt, Human
uugugguggagcguuaaugugg

SEQ ID NO: 725721 - RNA, 20 nt, Human
cagguggcugggcccugggg

SEQ ID NO: 725722 - RNA, 20 nt, Human
cccugcaucccagcuggcuc

SEQ ID NO: 725723 - RNA, 21 nt, Human
ccuggggucagagcacagggc

SEQ ID NO: 725724 - RNA, 18 nt, Human
ggaaggcguaggauggcu

SEQ ID NO: 725725 - RNA, 18 nt, Human
ggcaggaacgugagggcc

SEQ ID NO: 725726 - RNA, 22 nt, Human
ggcaggaacgugagggccaggu

SEQ ID NO: 725727 - RNA, 20 nt, Human
ggcuggggccgggcacccgg

SEQ ID NO: 725728 - RNA, 24 nt, Human
gggcacccggcuugcugggcagga

SEQ ID NO: 725729 - RNA, 21 nt, Human
gggucagagcacagggcuccc

SEQ ID NO: 725730 - RNA, 21 nt, Human
ggguccgcccaggccgagggu

SEQ ID NO: 725731 - RNA, 19 nt, Human
uccccuggguccgcccagg

SEQ ID NO: 725732 - RNA, 18 nt, Human
ugagggccagguggcugg

SEQ ID NO: 725733 - RNA, 21 nt, Human
ugggcaggaacgugagggcca

SEQ ID NO: 725734 - RNA, 20 nt, Human
uugggccgcccuccccuggg

SEQ ID NO: 725735 - RNA, 19 nt, Human
aaaaaacagaaacaaaaga

SEQ ID NO: 725736 - RNA, 27 nt, Human
aaagcacccagaguggcgagagagcac

SEQ ID NO: 725737 - RNA, 26 nt, Human
aaagcacccagaguggcggcgaaguc

SEQ ID NO: 725738 - RNA, 18 nt, Human
aacaaggaguacucaccc

SEQ ID NO: 725739 - RNA, 22 nt, Human
aagaaagggaaaaucaagacgc

SEQ ID NO: 725740 - RNA, 22 nt, Human
aaggagcccuguaaacaccugc

SEQ ID NO: 725741 - RNA, 20 nt, Human
acaaacaguccaugagaugc

SEQ ID NO: 725742 - RNA, 23 nt, Human
acaagccagagacaguaaagcac

SEQ ID NO: 725743 - RNA, 19 nt, Human
acaucugcaucauccucug

SEQ ID NO: 725744 - RNA, 19 nt, Human
accugagcccagggccugg

SEQ ID NO: 725745 - RNA, 23 nt, Human
acggaaacuacacagaaauacca

SEQ ID NO: 725746 - RNA, 19 nt, Human
agggggugcccagagggcc

SEQ ID NO: 725747 - RNA, 28 nt, Human
agugauggaaacaagccagagacaguaa

SEQ ID NO: 725748 - RNA, 18 nt, Human
aucuuaaaaaacagaaac

SEQ ID NO: 725749 - RNA, 20 nt, Human
caaauguggccaaaaugacc

SEQ ID NO: 725750 - RNA, 19 nt, Human
caagccagagacaguaaag

SEQ ID NO: 725751 - RNA, 21 nt, Human
caagccagagacaguaaagca

SEQ ID NO: 725752 - RNA, 25 nt, Human
caagccagagacaguaaagcaccca

SEQ ID NO: 725753 - RNA, 19 nt, Human
cacccaacccuuccccuuc

SEQ ID NO: 725754 - RNA, 22 nt, Human
cagaaacaaaagaaaacuucca

SEQ ID NO: 725755 - RNA, 22 nt, Human
cagagacaguaaagcacccaga

SEQ ID NO: 725756 - RNA, 21 nt, Human
cagcaggaacuaagcucagua

SEQ ID NO: 725757 - RNA, 26 nt, Human
caucaaagaaagggaaaaucaagacg

SEQ ID NO: 725758 - RNA, 31 nt, Human
caucaaagaaagggaaaaucaagacgcgacu

SEQ ID NO: 725759 - RNA, 18 nt, Human
cccaacccuuccccuucc

SEQ ID NO: 725760 - RNA, 22 nt, Human
cccuggcuggcccggcuauggg

SEQ ID NO: 725761 - RNA, 20 nt, Human
ccucucgggggugacccugg

SEQ ID NO: 725762 - RNA, 23 nt, Human
ccuguaaacaccugcacauguaa

SEQ ID NO: 725763 - RNA, 18 nt, Human
cucacaguagaaacaagg

SEQ ID NO: 725764 - RNA, 20 nt, Human
cuccugcccgucagcaccca

SEQ ID NO: 725765 - RNA, 25 nt, Human
cugcaucauccucugucggaacaca

SEQ ID NO: 725766 - RNA, 19 nt, Human
cuggcuggcccggcuaugg

SEQ ID NO: 725767 - RNA, 23 nt, Human
gaaaacuuccauuuuguaacauc

SEQ ID NO: 725768 - RNA, 19 nt, Human
gaaaggagcccuguaaaca

SEQ ID NO: 725769 - RNA, 22 nt, Human
gacugcccuuaagagaucuuga

SEQ ID NO: 725770 - RNA, 22 nt, Human
gagucucugggaggccaagccu

SEQ ID NO: 725771 - RNA, 19 nt, Human
gaucuuaaaaaacagaaac

SEQ ID NO: 725772 - RNA, 21 nt, Human
gcuuuugagggggugcccaga

SEQ ID NO: 725773 - RNA, 19 nt, Human
gggggugcccagagggccc

SEQ ID NO: 725774 - RNA, 23 nt, Human
gugcaccugagcccagggccugg

SEQ ID NO: 725775 - RNA, 22 nt, Human
uaaaaaacagaaacaaaagaaa

SEQ ID NO: 725776 - RNA, 23 nt, Human
uaaagcacccagaguggcgagag

SEQ ID NO: 725777 - RNA, 28 nt, Human
uaacaacauucacaacuucuuagaucuu

SEQ ID NO: 725778 - RNA, 21 nt, Human
uacacagaaauaccacuuagc

SEQ ID NO: 725779 - RNA, 26 nt, Human
uagaaacaaggaguacucacccucga

SEQ ID NO: 725780 - RNA, 23 nt, Human
uagggagugaaaaagagagucag

SEQ ID NO: 725781 - RNA, 21 nt, Human
uaucaaggaccaaaaacacua

SEQ ID NO: 725782 - RNA, 24 nt, Human
uaucaaggaccaaaaacacuacaa

SEQ ID NO: 725783 - RNA, 24 nt, Human
ucagcacccaacccuuccccuucc

SEQ ID NO: 725784 - RNA, 23 nt, Human
ucuacaccaggacagaaaggagc

SEQ ID NO: 725785 - RNA, 19 nt, Human
ucucugggaggccaagccu

SEQ ID NO: 725786 - RNA, 21 nt, Human
ugaaaaagagagucaguugug

SEQ ID NO: 725787 - RNA, 19 nt, Human
ugaccagggccaacaagcu

SEQ ID NO: 725788 - RNA, 20 nt, Human
ugagacaucaaagaaaggga

SEQ ID NO: 725789 - RNA, 28 nt, Human
ugagaugcagguguuugggacacacacu

SEQ ID NO: 725790 - RNA, 25 nt, Human
ugauuaacaacauucacaacuucuu

SEQ ID NO: 725791 - RNA, 24 nt, Human
ugcccagagggcccugguuaccuc

SEQ ID NO: 725792 - RNA, 18 nt, Human
uggaaacaagccagagac

SEQ ID NO: 725793 - RNA, 23 nt, Human
ugggaaagcaguuccagacggaa

SEQ ID NO: 725794 - RNA, 21 nt, Human
ugggaggccaagccuaggggc

SEQ ID NO: 725795 - RNA, 23 nt, Human
ugggcacaaacaguccaugagau

SEQ ID NO: 725796 - RNA, 20 nt, Human
uguaaacaccugcacaugua

SEQ ID NO: 725797 - RNA, 19 nt, Human
ugucuguacaucugcauca

SEQ ID NO: 725798 - RNA, 24 nt, Human
ugucuucuuugugcuccugcccgu

SEQ ID NO: 725799 - RNA, 25 nt, Human
uuccagugauggaaacaagguaccc

SEQ ID NO: 725800 - RNA, 20 nt, Human
uucuuugugcuccugcccgu

SEQ ID NO: 725801 - RNA, 20 nt, Human
uuugagggggugcccagagg

SEQ ID NO: 725802 - RNA, 20 nt, Human
aaaaggaaauccagcuaauu

SEQ ID NO: 725803 - RNA, 21 nt, Human
aaaauuuuuccaacccaaaau

SEQ ID NO: 725804 - RNA, 18 nt, Human
aaacgaagucuaacagac

SEQ ID NO: 725805 - RNA, 20 nt, Human
aacaagagcccucuaugaac

SEQ ID NO: 725806 - RNA, 25 nt, Human
aacaaguuuguguggcuguguuuca

SEQ ID NO: 725807 - RNA, 20 nt, Human
aagaaugguucccagaguga

SEQ ID NO: 725808 - RNA, 20 nt, Human
accccaccucacuagaggcc

SEQ ID NO: 725809 - RNA, 21 nt, Human
agacuugaaaucuuguuggca

SEQ ID NO: 725810 - RNA, 25 nt, Human
agcaaagcaucaggaaccaaggcag

SEQ ID NO: 725811 - RNA, 20 nt, Human
agcugaguuuauggccugaa

SEQ ID NO: 725812 - RNA, 21 nt, Human
aggagaaaugcaaagcaguuc

SEQ ID NO: 725813 - RNA, 24 nt, Human
aggauucucuguggauaaaugugg

SEQ ID NO: 725814 - RNA, 19 nt, Human
aggauuuucuuccacacug

SEQ ID NO: 725815 - RNA, 20 nt, Human
aggugggcugugggaggggg

SEQ ID NO: 725816 - RNA, 23 nt, Human
aguaggccaccuugcacuugagu

SEQ ID NO: 725817 - RNA, 21 nt, Human
augauguuaaaagaccaauuu

SEQ ID NO: 725818 - RNA, 22 nt, Human
augguuuuacaccuuguguggu

SEQ ID NO: 725819 - RNA, 24 nt, Human
caaagcaucaggaaccaaggcagg

SEQ ID NO: 725820 - RNA, 21 nt, Human
caaggagcuuugagaaacaau

SEQ ID NO: 725821 - RNA, 20 nt, Human
caccaugagacuagggugga

SEQ ID NO: 725822 - RNA, 22 nt, Human
cagaagucagaaccaaagcaag

SEQ ID NO: 725823 - RNA, 25 nt, Human
cagagagcuaccaaacaugcaacac

SEQ ID NO: 725824 - RNA, 20 nt, Human
cagcaaacuuuuucuguaaa

SEQ ID NO: 725825 - RNA, 18 nt, Human
caucgcugaaacuguggu

SEQ ID NO: 725826 - RNA, 20 nt, Human
caugaaauauucaaaaaaaa

SEQ ID NO: 725827 - RNA, 22 nt, Human
cauuuuggcaauugcaaccuaa

SEQ ID NO: 725828 - RNA, 21 nt, Human
ccaaugaccccuugguucccu

SEQ ID NO: 725829 - RNA, 19 nt, Human
ccaaugcaugauagaaaaa

SEQ ID NO: 725830 - RNA, 21 nt, Human
cccucaaacaaacuuucucac

SEQ ID NO: 725831 - RNA, 21 nt, Human
cugaaacuguggucaaaggca

SEQ ID NO: 725832 - RNA, 20 nt, Human
cugcugaacugcucagcucu

SEQ ID NO: 725833 - RNA, 18 nt, Human
cugucuguggaugucaaa

SEQ ID NO: 725834 - RNA, 21 nt, Human
cuuucuauuuuuccccuuaga

SEQ ID NO: 725835 - RNA, 19 nt, Human
gaaccaugaaccagaaaag

SEQ ID NO: 725836 - RNA, 20 nt, Human
gaagucagaaccaaagcaag

SEQ ID NO: 725837 - RNA, 18 nt, Human
gacaguacaaaaacaagu

SEQ ID NO: 725838 - RNA, 22 nt, Human
gacuauaaaggaaauauuuugu

SEQ ID NO: 725839 - RNA, 24 nt, Human
gagcaggggucagcaaacuuuuuc

SEQ ID NO: 725840 - RNA, 19 nt, Human
gaggugggcugugggaggg

SEQ ID NO: 725841 - RNA, 21 nt, Human
gcaaagcaucaggaaccaagg

SEQ ID NO: 725842 - RNA, 23 nt, Human
gcaaagcaucaggaaccaaggca

SEQ ID NO: 725843 - RNA, 19 nt, Human
gccaccuugcacuugaguu

SEQ ID NO: 725844 - RNA, 23 nt, Human
gcccauaauuuucauguaggaag

SEQ ID NO: 725845 - RNA, 24 nt, Human
gcggcuguagugugaaaguagcug

SEQ ID NO: 725846 - RNA, 24 nt, Human
ggaaaaagguaacaucagcccugu

SEQ ID NO: 725847 - RNA, 21 nt, Human
ggaaggacgggaggagacaga

SEQ ID NO: 725848 - RNA, 21 nt, Human
ggacgggaggagacagaggug

SEQ ID NO: 725849 - RNA, 19 nt, Human
ggaggugggcugugggagg

SEQ ID NO: 725850 - RNA, 20 nt, Human
guaaccucuggagcugaguu

SEQ ID NO: 725851 - RNA, 20 nt, Human
gucaaaggcagcuucgcuua

SEQ ID NO: 725852 - RNA, 19 nt, Human
uaaaagguaaccucuggag

SEQ ID NO: 725853 - RNA, 26 nt, Human
uaaaauagcagauaccuaaagggagc

SEQ ID NO: 725854 - RNA, 18 nt, Human
uaaaaucuuugaggcaca

SEQ ID NO: 725855 - RNA, 22 nt, Human
uaaacaagaacaaaacgggcac

SEQ ID NO: 725856 - RNA, 23 nt, Human
uaaaguaguuacaagcuccuucu

SEQ ID NO: 725857 - RNA, 19 nt, Human
uaacaucagcccugucucu

SEQ ID NO: 725858 - RNA, 21 nt, Human
uacaaaaugggaugcuacuga

SEQ ID NO: 725859 - RNA, 24 nt, Human
uacaagcuccuucuacccaggacu

SEQ ID NO: 725860 - RNA, 18 nt, Human
uacacugaacacuggauu

SEQ ID NO: 725861 - RNA, 18 nt, Human
uacagaacagcugaaaca

SEQ ID NO: 725862 - RNA, 24 nt, Human
uacagaacagcugaaacaaaauca

SEQ ID NO: 725863 - RNA, 21 nt, Human
uagaggccuacagacuugaaa

SEQ ID NO: 725864 - RNA, 24 nt, Human
uagcugugguuugccaccccaccu

SEQ ID NO: 725865 - RNA, 25 nt, Human
uaggguggaaccgcucucaccccuu

SEQ ID NO: 725866 - RNA, 23 nt, Human
uauuuacuuggggugaauguaca

SEQ ID NO: 725867 - RNA, 21 nt, Human
ucaauuuuuauuucugaauua

SEQ ID NO: 725868 - RNA, 23 nt, Human
ucacuacaccguguuaaugaagu

SEQ ID NO: 725869 - RNA, 23 nt, Human
ucagagugcaagagcuagagagc

SEQ ID NO: 725870 - RNA, 19 nt, Human
ucaugaaauauucaaaaaa

SEQ ID NO: 725871 - RNA, 22 nt, Human
uccacacugagcuacugcccuc

SEQ ID NO: 725872 - RNA, 18 nt, Human
uccagacaagugucugag

SEQ ID NO: 725873 - RNA, 22 nt, Human
ucccagaagucagaaccaaagc

SEQ ID NO: 725874 - RNA, 20 nt, Human
uccuacuuucuugcuaaggc

SEQ ID NO: 725875 - RNA, 18 nt, Human
uccuggacagcucucccc

SEQ ID NO: 725876 - RNA, 21 nt, Human
uccuucuacccaggacuccaa

SEQ ID NO: 725877 - RNA, 22 nt, Human
ucuaagggaacaaacuacugag

SEQ ID NO: 725878 - RNA, 23 nt, Human
ucuaggauucuauuuacuugggg

SEQ ID NO: 725879 - RNA, 19 nt, Human
ucuuagagaguaaccccau

SEQ ID NO: 725880 - RNA, 20 nt, Human
ucuuccacacugagcuacug

SEQ ID NO: 725881 - RNA, 20 nt, Human
ugaaaguagcuguagacagu

SEQ ID NO: 725882 - RNA, 23 nt, Human
ugaacaaacaggaauauugggua

SEQ ID NO: 725883 - RNA, 20 nt, Human
ugaacagcucuaugcccuca

SEQ ID NO: 725884 - RNA, 19 nt, Human
ugacuuccucacacaccuc

SEQ ID NO: 725885 - RNA, 18 nt, Human
ugaguaggccaccuugca

SEQ ID NO: 725886 - RNA, 20 nt, Human
ugaguucuuggcacuuaaaa

SEQ ID NO: 725887 - RNA, 26 nt, Human
ugcuaaggcucaacuaaaaucuuuga

SEQ ID NO: 725888 - RNA, 20 nt, Human
ugggagggggugggcuguag

SEQ ID NO: 725889 - RNA, 21 nt, Human
ugggagggggugggcuguagg

SEQ ID NO: 725890 - RNA, 20 nt, Human
ugggaugcuacugagugaaa

SEQ ID NO: 725891 - RNA, 18 nt, Human
ugggcugugggagggggu

SEQ ID NO: 725892 - RNA, 27 nt, Human
ugguaaacaagaacaaaacgggcacuu

SEQ ID NO: 725893 - RNA, 18 nt, Human
ugguucccuuaacuacag

SEQ ID NO: 725894 - RNA, 23 nt, Human
uguggaucaccaucaaacaaagc

SEQ ID NO: 725895 - RNA, 19 nt, Human
ugugggagggggugggcug

SEQ ID NO: 725896 - RNA, 20 nt, Human
uuaaagacuuuuauauuauu

SEQ ID NO: 725897 - RNA, 25 nt, Human
uucauaaaauaucuuaagaguaaac

SEQ ID NO: 725898 - RNA, 24 nt, Human
uuccccuuagaaauuuagaauggc

SEQ ID NO: 725899 - RNA, 20 nt, Human
uuuaaaccuaaugcaaucac

SEQ ID NO: 725900 - RNA, 21 nt, Human
uuuauggccugaaacucagag

SEQ ID NO: 725901 - RNA, 25 nt, Human
uuuccaccaugagacuaggguggaa

SEQ ID NO: 725902 - RNA, 21 nt, Human
uuuucauuacuuccugugaca

SEQ ID NO: 725903 - RNA, 21 nt, Human
aaaaaguuugaaauacauugg

SEQ ID NO: 725904 - RNA, 23 nt, Human
aaacauggaguuuccacgaaaaa

SEQ ID NO: 725905 - RNA, 20 nt, Human
aaccaccccucaaacaucca

SEQ ID NO: 725906 - RNA, 24 nt, Human
aagaacaccaccacuucaaccccc

SEQ ID NO: 725907 - RNA, 18 nt, Human
aagcucuguuugcuuuuc

SEQ ID NO: 725908 - RNA, 22 nt, Human
aauaaagcuaauaaggaacaaa

SEQ ID NO: 725909 - RNA, 20 nt, Human
aauaauaaacauggaguuuc

SEQ ID NO: 725910 - RNA, 24 nt, Human
aaucaaccaccuaaacacaugaca

SEQ ID NO: 725911 - RNA, 23 nt, Human
acaaccaccccucaaacauccaa

SEQ ID NO: 725912 - RNA, 20 nt, Human
acacagauagaaugugugau

SEQ ID NO: 725913 - RNA, 22 nt, Human
acugacucuguccucuccaucu

SEQ ID NO: 725914 - RNA, 19 nt, Human
agggucaguuuaguucugg

SEQ ID NO: 725915 - RNA, 19 nt, Human
agucugcgauuuuguuucu

SEQ ID NO: 725916 - RNA, 23 nt, Human
aguucuggcacaaagacugcugu

SEQ ID NO: 725917 - RNA, 20 nt, Human
auagggccccuuccugaaau

SEQ ID NO: 725918 - RNA, 20 nt, Human
augaacauggcacuuguuug

SEQ ID NO: 725919 - RNA, 24 nt, Human
caaagaacaccaccacuucaaccc

SEQ ID NO: 725920 - RNA, 24 nt, Human
caaaucaaccaccuaaacacauga

SEQ ID NO: 725921 - RNA, 23 nt, Human
caacagaaggaaggaggaaaacc

SEQ ID NO: 725922 - RNA, 26 nt, Human
caaccaccuaaacacaugacaagaca

SEQ ID NO: 725923 - RNA, 18 nt, Human
cacagcuuccuauuucuu

SEQ ID NO: 725924 - RNA, 22 nt, Human
caccaccacuucaacccccaau

SEQ ID NO: 725925 - RNA, 24 nt, Human
cauccaagguuccauuaagcucac

SEQ ID NO: 725926 - RNA, 28 nt, Human
ccacuucaacccccaaugaagggcccuc

SEQ ID NO: 725927 - RNA, 21 nt, Human
ccagcuugcucugcaacucug

SEQ ID NO: 725928 - RNA, 22 nt, Human
ccgaaggagacugacucugucc

SEQ ID NO: 725929 - RNA, 20 nt, Human
ccucugagaugacacagcuu

SEQ ID NO: 725930 - RNA, 19 nt, Human
cucaguuuaccaucaacac

SEQ ID NO: 725931 - RNA, 18 nt, Human
cugacucuguccucucca

SEQ ID NO: 725932 - RNA, 21 nt, Human
cugcugugugccacccuaaac

SEQ ID NO: 725933 - RNA, 23 nt, Human
cuugcagucaaaaaaguuugaaa

SEQ ID NO: 725934 - RNA, 18 nt, Human
cuugcucugcaacucugu

SEQ ID NO: 725935 - RNA, 22 nt, Human
cuuuacaaccaccccucaaaca

SEQ ID NO: 725936 - RNA, 19 nt, Human
cuuuuuauuucagccaagg

SEQ ID NO: 725937 - RNA, 21 nt, Human
gauggcaggauuauuccaguc

SEQ ID NO: 725938 - RNA, 19 nt, Human
gggccagacauuaaacacc

SEQ ID NO: 725939 - RNA, 23 nt, Human
guuaacgucaauaaggaugagua

SEQ ID NO: 725940 - RNA, 21 nt, Human
uaacuauuucugccaguuucc

SEQ ID NO: 725941 - RNA, 24 nt, Human
uacaaccaccccucaaacauccaa

SEQ ID NO: 725942 - RNA, 24 nt, Human
uaccaucaacacuaagguuuuacu

SEQ ID NO: 725943 - RNA, 20 nt, Human
uaccucaucuuggaaguuuc

SEQ ID NO: 725944 - RNA, 18 nt, Human
uccaccuguaaaaggaag

SEQ ID NO: 725945 - RNA, 20 nt, Human
ucuaaaccacggcagucugc

SEQ ID NO: 725946 - RNA, 21 nt, Human
ucuaaaccacggcagucugcg

SEQ ID NO: 725947 - RNA, 24 nt, Human
ugacauuauaaauggucuaaacca

SEQ ID NO: 725948 - RNA, 23 nt, Human
ugagaaaaggcauuuuuuaaaag

SEQ ID NO: 725949 - RNA, 27 nt, Human
uggaauccaagguaagcuacagaguuc

SEQ ID NO: 725950 - RNA, 23 nt, Human
uguaaagaugcuaaacaaucauu

SEQ ID NO: 725951 - RNA, 25 nt, Human
uuauuaaugauggcaggauuauucc

SEQ ID NO: 725952 - RNA, 20 nt, Human
uuccagucaauuaagcucug

SEQ ID NO: 725953 - RNA, 22 nt, Human
uuccuuuacaaccaccccucaa

SEQ ID NO: 725954 - RNA, 21 nt, Human
uucucaguuuaccaucaacac

SEQ ID NO: 725955 - RNA, 22 nt, Human
uucuucagguguaagagggagg

SEQ ID NO: 725956 - RNA, 22 nt, Human
uugcagucaaaaaaguuugaaa

SEQ ID NO: 725957 - RNA, 19 nt, Human
aaaacaacaaaaacgugag

SEQ ID NO: 725958 - RNA, 21 nt, Human
aaucuccaggcuccuauuugc

SEQ ID NO: 725959 - RNA, 22 nt, Human
aaugaugagaaaacaacaaaaa

SEQ ID NO: 725960 - RNA, 23 nt, Human
acaacaaaaacgugagucuuugc

SEQ ID NO: 725961 - RNA, 20 nt, Human
agccacgugcgccuggucug

SEQ ID NO: 725962 - RNA, 27 nt, Human
agucauuccuagugcuggagagaaagu

SEQ ID NO: 725963 - RNA, 25 nt, Human
cagaggcaggcagcguugcuugcgg

SEQ ID NO: 725964 - RNA, 25 nt, Human
cagcagcagaaguccguguccccag

SEQ ID NO: 725965 - RNA, 22 nt, Human
cagcucugcugggcagcggcaa

SEQ ID NO: 725966 - RNA, 20 nt, Human
ccccaugagccacgugcgcc

SEQ ID NO: 725967 - RNA, 18 nt, Human
ccgccugcuccaacgccc

SEQ ID NO: 725968 - RNA, 24 nt, Human
cggcaagauguggaggagcggcag

SEQ ID NO: 725969 - RNA, 24 nt, Human
gcaaaucucugacaaagagcagag

SEQ ID NO: 725970 - RNA, 25 nt, Human
gcaauucugccccaugagccacguu

SEQ ID NO: 725971 - RNA, 23 nt, Human
gccccaugagccacgugcgccug

SEQ ID NO: 725972 - RNA, 18 nt, Human
gggagaagccaaggagug

SEQ ID NO: 725973 - RNA, 21 nt, Human
gggcagcggcaagauguggag

SEQ ID NO: 725974 - RNA, 21 nt, Human
gggcagcggcaagauguggag

SEQ ID NO: 725975 - RNA, 20 nt, Human
guggaagguagggcuggcgc

SEQ ID NO: 725976 - RNA, 19 nt, Human
guggacccagaagccagcu

SEQ ID NO: 725977 - RNA, 18 nt, Human
uacauagucauuccuagu

SEQ ID NO: 725978 - RNA, 18 nt, Human
uccuuggcuggaauggug

SEQ ID NO: 725979 - RNA, 21 nt, Human
ucucugacaaagagcagagau

SEQ ID NO: 725980 - RNA, 19 nt, Human
ucugugguggaagguaggg

SEQ ID NO: 725981 - RNA, 20 nt, Human
ugacaaagagcagagaucuc

SEQ ID NO: 725982 - RNA, 23 nt, Human
ugacaaagagcagagaucucaag

SEQ ID NO: 725983 - RNA, 20 nt, Human
ugcggugggagaagccaagg

SEQ ID NO: 725984 - RNA, 23 nt, Human
ugcggugggagaagccaaggagu

SEQ ID NO: 725985 - RNA, 22 nt, Human
uggaagguagggcuggcgcagg

SEQ ID NO: 725986 - RNA, 22 nt, Human
uggaauggugagaagguggcac

SEQ ID NO: 725987 - RNA, 23 nt, Human
uggcgcagguggcagcagcagaa

SEQ ID NO: 725988 - RNA, 20 nt, Human
uggcuggaauggugagaagg

SEQ ID NO: 725989 - RNA, 19 nt, Human
ugggagaagccaaggagug

SEQ ID NO: 725990 - RNA, 19 nt, Human
ugggagaagccaaggagug

SEQ ID NO: 725991 - RNA, 19 nt, Human
uugcggugggagaagccaa

SEQ ID NO: 725992 - RNA, 18 nt, Human
aaacgccgaggcugcaau

SEQ ID NO: 725993 - RNA, 20 nt, Human
aacaaauuucaaugcugauu

SEQ ID NO: 725994 - RNA, 20 nt, Human
aagcaaccaaggcaauaaug

SEQ ID NO: 725995 - RNA, 18 nt, Human
accaugcaagaugcagaa

SEQ ID NO: 725996 - RNA, 24 nt, Human
auuacauagaaaauggcuauuaag

SEQ ID NO: 725997 - RNA, 20 nt, Human
auuuuuguuuuauuucagaa

SEQ ID NO: 725998 - RNA, 19 nt, Human
caagaugcagaaaauaaug

SEQ ID NO: 725999 - RNA, 23 nt, Human
cagcauuauuuuccauuaauguu

SEQ ID NO: 726000 - RNA, 22 nt, Human
cauauuacauagaaaauggcua

SEQ ID NO: 726001 - RNA, 22 nt, Human
cgcaugcgccuuucccaggacu

SEQ ID NO: 726002 - RNA, 20 nt, Human
gccgaggcugcaaugagagc

SEQ ID NO: 726003 - RNA, 23 nt, Human
gugcauugugcuaaucuacuuuu

SEQ ID NO: 726004 - RNA, 26 nt, Human
uaaugguuuuccuuucauucugguuu

SEQ ID NO: 726005 - RNA, 26 nt, Human
uauuacauagaaaauggcuauuaagg

SEQ ID NO: 726006 - RNA, 25 nt, Human
uauuuggauuuuaugaugaauuggu

SEQ ID NO: 726007 - RNA, 19 nt, Human
ucacacaccugaguguuug

SEQ ID NO: 726008 - RNA, 20 nt, Human
ucuacaaacgccgaggcugc

SEQ ID NO: 726009 - RNA, 21 nt, Human
ugauuguuccuuacccauuuu

SEQ ID NO: 726010 - RNA, 24 nt, Human
ugcauauuacauagaaaauggcua

SEQ ID NO: 726011 - RNA, 23 nt, Human
uguugcuuuggguagaagucuug

SEQ ID NO: 726012 - RNA, 20 nt, Human
uuaaaaaaaacccugcagac

SEQ ID NO: 726013 - RNA, 22 nt, Human
uuggguagaagucuugauucau

SEQ ID NO: 726014 - RNA, 24 nt, Human
uuuccuuucauucugguuuuccca

SEQ ID NO: 726015 - RNA, 23 nt, Human
uuugcaaaucuugauuggaguag

SEQ ID NO: 726016 - RNA, 19 nt, Human
uuuucaacagaauuggaga

SEQ ID NO: 726017 - RNA, 22 nt, Human
aacaagaaaacuuuuuguacac

SEQ ID NO: 726018 - RNA, 20 nt, Human
accaaaaugaaauguccaaa

SEQ ID NO: 726019 - RNA, 18 nt, Human
acuauucuaucuuacccu

SEQ ID NO: 726020 - RNA, 19 nt, Human
agaaaaguacaauaaagaa

SEQ ID NO: 726021 - RNA, 19 nt, Human
aggaaguaaaaaaacuuac

SEQ ID NO: 726022 - RNA, 22 nt, Human
agggaaacagggguagaugaga

SEQ ID NO: 726023 - RNA, 20 nt, Human
auaaaacucuaacaaaagua

SEQ ID NO: 726024 - RNA, 21 nt, Human
auaaagguacaagguagugag

SEQ ID NO: 726025 - RNA, 19 nt, Human
caaaaauaagacaugaaca

SEQ ID NO: 726026 - RNA, 21 nt, Human
cauguaagaaaaacaugcauu

SEQ ID NO: 726027 - RNA, 18 nt, Human
cugaguuaugcugguguc

SEQ ID NO: 726028 - RNA, 24 nt, Human
cuuaugaucggaaaacaacuugcc

SEQ ID NO: 726029 - RNA, 19 nt, Human
gcagguagaagaggaagaa

SEQ ID NO: 726030 - RNA, 21 nt, Human
gguacaagguagugagaagga

SEQ ID NO: 726031 - RNA, 20 nt, Human
gucauuguaaaauaaaacuc

SEQ ID NO: 726032 - RNA, 22 nt, Human
uaagaaaaacaugcauuaacau

SEQ ID NO: 726033 - RNA, 19 nt, Human
uagaagaggaagaaaacua

SEQ ID NO: 726034 - RNA, 23 nt, Human
uagugagaaggaaauacuacagu

SEQ ID NO: 726035 - RNA, 26 nt, Human
uaucuuacccuuaagauucaguuuca

SEQ ID NO: 726036 - RNA, 25 nt, Human
uauuaaagaauuucuugaugcucag

SEQ ID NO: 726037 - RNA, 24 nt, Human
ucaacaccaaaaugaaauguccaa

SEQ ID NO: 726038 - RNA, 22 nt, Human
ucuauuaucaacaccaaaauga

SEQ ID NO: 726039 - RNA, 21 nt, Human
uggauggcuuuucuaaauuuc

SEQ ID NO: 726040 - RNA, 19 nt, Human
ugguauaaggaauaaucaa

SEQ ID NO: 726041 - RNA, 26 nt, Human
uguaaaauaaaacucaauuaauuuga

SEQ ID NO: 726042 - RNA, 21 nt, Human
ugucauuguaaaauaaaacuc

SEQ ID NO: 726043 - RNA, 23 nt, Human
uuaaagaauuucuugaugcucag

SEQ ID NO: 726044 - RNA, 23 nt, Human
uuacccuuaagauucaguuucac

SEQ ID NO: 726045 - RNA, 21 nt, Human
uuacuugguucaugguucuac

SEQ ID NO: 726046 - RNA, 23 nt, Human
uuccuauguaaauaaagauacac

SEQ ID NO: 726047 - RNA, 24 nt, Human
uucuauuauaguucucuguaauaa

SEQ ID NO: 726048 - RNA, 21 nt, Human
uuucuuggcucuucaauuguu

SEQ ID NO: 726049 - RNA, 22 nt, Human
acccuguagauggcuuucuggg

SEQ ID NO: 726050 - RNA, 21 nt, Human
agacacugucccuggagccca

SEQ ID NO: 726051 - RNA, 22 nt, Human
agacacugucccuggagcccag

SEQ ID NO: 726052 - RNA, 20 nt, Human
agcugagacacuguuccacg

SEQ ID NO: 726053 - RNA, 22 nt, Human
agcuggaccccugaugcgucug

SEQ ID NO: 726054 - RNA, 22 nt, Human
aggugccagcacagggauacgu

SEQ ID NO: 726055 - RNA, 19 nt, Human
caacagcaccagacacugu

SEQ ID NO: 726056 - RNA, 22 nt, Human
cauaaacagacgccugggcucc

SEQ ID NO: 726057 - RNA, 27 nt, Human
cauccucaucuccaccuggccuaggga

SEQ ID NO: 726058 - RNA, 22 nt, Human
ccagugcugugucccaucccuc

SEQ ID NO: 726059 - RNA, 19 nt, Human
ccugggcuccuccucccuc

SEQ ID NO: 726060 - RNA, 24 nt, Human
cgaccaagcucuaccgcgacaguu

SEQ ID NO: 726061 - RNA, 22 nt, Human
cuggccccaauacuguuaccca

SEQ ID NO: 726062 - RNA, 19 nt, Human
cugggccacccgccuccag

SEQ ID NO: 726063 - RNA, 24 nt, Human
cugucccuggagcccaguggggca

SEQ ID NO: 726064 - RNA, 21 nt, Human
gaccaggcacuggccacagcc

SEQ ID NO: 726065 - RNA, 21 nt, Human
gcugugucccaucccucuccu

SEQ ID NO: 726066 - RNA, 19 nt, Human
ggauacguggccccagcuc

SEQ ID NO: 726067 - RNA, 19 nt, Human
ggauacguggccccagcuc

SEQ ID NO: 726068 - RNA, 24 nt, Human
gggaagggcucucgggcucugagu

SEQ ID NO: 726069 - RNA, 20 nt, Human
gucugucccuuuugcacucc

SEQ ID NO: 726070 - RNA, 19 nt, Human
guuccagcugagacacugu

SEQ ID NO: 726071 - RNA, 19 nt, Human
ucccucuccuggguggagg

SEQ ID NO: 726072 - RNA, 24 nt, Human
ucuccaccuggccuagggaacccu

SEQ ID NO: 726073 - RNA, 21 nt, Human
ucuggacaaggucacugggac

SEQ ID NO: 726074 - RNA, 21 nt, Human
ucugggccacccgccuccagg

SEQ ID NO: 726075 - RNA, 23 nt, Human
ucugggccacccgccuccagggg

SEQ ID NO: 726076 - RNA, 21 nt, Human
ugagucuggggguuaugaggg

SEQ ID NO: 726077 - RNA, 22 nt, Human
ugcgucugucccuuuugcacuc

SEQ ID NO: 726078 - RNA, 20 nt, Human
ugggcuccuccucccucuuc

SEQ ID NO: 726079 - RNA, 24 nt, Human
uucaucaggagagcuuggcaccuc

SEQ ID NO: 726080 - RNA, 21 nt, Human
uucugggccacccgccuccag

SEQ ID NO: 726081 - RNA, 19 nt, Human
aaacagcauggacccagca

SEQ ID NO: 726082 - RNA, 23 nt, Human
aaacaguaauucucacaugaaca

SEQ ID NO: 726083 - RNA, 22 nt, Human
aaaccaugaccagacagcugga

SEQ ID NO: 726084 - RNA, 19 nt, Human
aaaggcaaugcuucuggaa

SEQ ID NO: 726085 - RNA, 27 nt, Human
aaauaaauaaaccaaaccaugaccaga

SEQ ID NO: 726086 - RNA, 19 nt, Human
aacacaacucagacagggg

SEQ ID NO: 726087 - RNA, 24 nt, Human
aacaugcuccuccaaacuaggacg

SEQ ID NO: 726088 - RNA, 20 nt, Human
aagaguuaaggcacuuucuu

SEQ ID NO: 726089 - RNA, 21 nt, Human
aagcccuccccgugcccaccc

SEQ ID NO: 726090 - RNA, 18 nt, Human
aaguggcuucuuggagac

SEQ ID NO: 726091 - RNA, 22 nt, Human
acagcaacaaaaacacaacuca

SEQ ID NO: 726092 - RNA, 21 nt, Human
accaaaccaugaccagacagc

SEQ ID NO: 726093 - RNA, 19 nt, Human
accccuacccccccauccc

SEQ ID NO: 726094 - RNA, 21 nt, Human
acuccagcagccaccggccug

SEQ ID NO: 726095 - RNA, 20 nt, Human
agacagggggcgggacgggg

SEQ ID NO: 726096 - RNA, 18 nt, Human
agagaaauagaaacgcga

SEQ ID NO: 726097 - RNA, 21 nt, Human
agaggaacagcaacaaaaaca

SEQ ID NO: 726098 - RNA, 24 nt, Human
agcuguugaguucuggccugagag

SEQ ID NO: 726099 - RNA, 21 nt, Human
aggcugacaucugggcagggc

SEQ ID NO: 726100 - RNA, 21 nt, Human
agggggcauggacccaguacc

SEQ ID NO: 726101 - RNA, 20 nt, Human
agugcagcagcagcacccca

SEQ ID NO: 726102 - RNA, 18 nt, Human
aguggcucaugccaacag

SEQ ID NO: 726103 - RNA, 19 nt, Human
augcauuuacaagcaaauu

SEQ ID NO: 726104 - RNA, 22 nt, Human
caaaacagccccugaaggacaa

SEQ ID NO: 726105 - RNA, 27 nt, Human
caaaauaaauaaaccaaaccaugacca

SEQ ID NO: 726106 - RNA, 18 nt, Human
caacagaggaacagcaac

SEQ ID NO: 726107 - RNA, 25 nt, Human
caacagaggaacagcaacaaaaaca

SEQ ID NO: 726108 - RNA, 22 nt, Human
caacagcagagcuggccaucaa

SEQ ID NO: 726109 - RNA, 19 nt, Human
caacucagacagggggcgg

SEQ ID NO: 726110 - RNA, 21 nt, Human
caagaacacgcgcugcaccgc

SEQ ID NO: 726111 - RNA, 22 nt, Human
caagcccuccccgugcccaccc

SEQ ID NO: 726112 - RNA, 19 nt, Human
caccaaagggcauccagcc

SEQ ID NO: 726113 - RNA, 20 nt, Human
caccagcaccggaacccacc

SEQ ID NO: 726114 - RNA, 22 nt, Human
caccagcaccggaacccacccc

SEQ ID NO: 726115 - RNA, 19 nt, Human
caccgcaucgcucccucgc

SEQ ID NO: 726116 - RNA, 21 nt, Human
caccgcaucgcucccucgcaa

SEQ ID NO: 726117 - RNA, 25 nt, Human
caccggaacccaccccagccaauag

SEQ ID NO: 726118 - RNA, 18 nt, Human
caccuggggagggugggc

SEQ ID NO: 726119 - RNA, 23 nt, Human
cacgcuguggggcagcccagagu

SEQ ID NO: 726120 - RNA, 24 nt, Human
cagaacaggagcgaccuuuuccag

SEQ ID NO: 726121 - RNA, 22 nt, Human
cagcaacaaaaacacaacucag

SEQ ID NO: 726122 - RNA, 21 nt, Human
cagcaccggaacccaccccag

SEQ ID NO: 726123 - RNA, 18 nt, Human
cagcggcagcagccugag

SEQ ID NO: 726124 - RNA, 22 nt, Human
cagcugacccacgucuguggug

SEQ ID NO: 726125 - RNA, 23 nt, Human
caggggaagcccccucauucuua

SEQ ID NO: 726126 - RNA, 21 nt, Human
cauccauggccaccuuccucc

SEQ ID NO: 726127 - RNA, 19 nt, Human
cauuccuaaagcccacagu

SEQ ID NO: 726128 - RNA, 18 nt, Human
cauugcauccagucugug

SEQ ID NO: 726129 - RNA, 19 nt, Human
ccaagcccuccccgugccc

SEQ ID NO: 726130 - RNA, 22 nt, Human
ccacugguggcuggucuuccuc

SEQ ID NO: 726131 - RNA, 19 nt, Human
ccagccagcggcagcagcc

SEQ ID NO: 726132 - RNA, 22 nt, Human
ccaggcuggaagacaggucgcu

SEQ ID NO: 726133 - RNA, 18 nt, Human
ccauccauccauggccac

SEQ ID NO: 726134 - RNA, 18 nt, Human
ccaucuggugaccaggug

SEQ ID NO: 726135 - RNA, 24 nt, Human
cccacaguguccuaaggauccuau

SEQ ID NO: 726136 - RNA, 24 nt, Human
cccacaguguccuaaggauccuau

SEQ ID NO: 726137 - RNA, 24 nt, Human
cccaccccagccaauagucaggaa

SEQ ID NO: 726138 - RNA, 21 nt, Human
ccccaagaacacgcgcugcac

SEQ ID NO: 726139 - RNA, 24 nt, Human
ccccagcccuggcgugcccgcacc

SEQ ID NO: 726140 - RNA, 22 nt, Human
cccucuuucccuguugcugacc

SEQ ID NO: 726141 - RNA, 24 nt, Human
cccucuuucccuguugcugaccuc

SEQ ID NO: 726142 - RNA, 19 nt, Human
ccgcagaagccugggaucg

SEQ ID NO: 726143 - RNA, 18 nt, Human
ccgcaucgcucccucgca

SEQ ID NO: 726144 - RNA, 22 nt, Human
ccgccagaaagcccagccgcgu

SEQ ID NO: 726145 - RNA, 21 nt, Human
ccuccugugagccccucauug

SEQ ID NO: 726146 - RNA, 22 nt, Human
ccucuagauacucuccuagcuc

SEQ ID NO: 726147 - RNA, 26 nt, Human
ccugaugcuggacccaugagacuccc

SEQ ID NO: 726148 - RNA, 21 nt, Human
ccuggggaccccuaccccccc

SEQ ID NO: 726149 - RNA, 21 nt, Human
cgcaucgcucccucgcaaucu

SEQ ID NO: 726150 - RNA, 25 nt, Human
cgcaucgcucccucgcaaucuccug

SEQ ID NO: 726151 - RNA, 20 nt, Human
cgcccucuagauacucuccu

SEQ ID NO: 726152 - RNA, 18 nt, Human
cggaacccaccccagcca

SEQ ID NO: 726153 - RNA, 27 nt, Human
cggcugaguucuuccaauacggaagcc

SEQ ID NO: 726154 - RNA, 19 nt, Human
cgggacggggccaggaguc

SEQ ID NO: 726155 - RNA, 23 nt, Human
cuaaagccagagcugggacucca

SEQ ID NO: 726156 - RNA, 22 nt, Human
cuaguguaguucaauauucucu

SEQ ID NO: 726157 - RNA, 21 nt, Human
cucacacgcuguggggcagcc

SEQ ID NO: 726158 - RNA, 19 nt, Human
cuccagcagccaccggccu

SEQ ID NO: 726159 - RNA, 23 nt, Human
cucccuugcagcucugcacgcaa

SEQ ID NO: 726160 - RNA, 23 nt, Human
cucgcaaucuccugguuugggcu

SEQ ID NO: 726161 - RNA, 21 nt, Human
cucugcacgcaaaccuucccc

SEQ ID NO: 726162 - RNA, 20 nt, Human
cugaaaacaggcauuucacc

SEQ ID NO: 726163 - RNA, 24 nt, Human
cugaaaacaggcauuucaccaaag

SEQ ID NO: 726164 - RNA, 22 nt, Human
cugaguucuuccaauacggaag

SEQ ID NO: 726165 - RNA, 21 nt, Human
cugaugcuggacccaugagac

SEQ ID NO: 726166 - RNA, 23 nt, Human
cugcacgcaaaccuuccccaagg

SEQ ID NO: 726167 - RNA, 21 nt, Human
cuggacccaugagacucccag

SEQ ID NO: 726168 - RNA, 21 nt, Human
cuucuggaacccucucccuug

SEQ ID NO: 726169 - RNA, 23 nt, Human
gaagauccuggggaccccuaccc

SEQ ID NO: 726170 - RNA, 21 nt, Human
gaauggacgggucauguggga

SEQ ID NO: 726171 - RNA, 18 nt, Human
gacagguggaguggccuc

SEQ ID NO: 726172 - RNA, 20 nt, Human
gaccccuacccccccauccc

SEQ ID NO: 726173 - RNA, 22 nt, Human
gaccccucagcccacaaucggg

SEQ ID NO: 726174 - RNA, 19 nt, Human
gagacaacucaaccacuga

SEQ ID NO: 726175 - RNA, 19 nt, Human
gaucccuauucccaaaaau

SEQ ID NO: 726176 - RNA, 23 nt, Human
gcaaaacagccccugaaggacaa

SEQ ID NO: 726177 - RNA, 21 nt, Human
gcaacaaaaacacaacucaga

SEQ ID NO: 726178 - RNA, 20 nt, Human
gcacagggggcauggaccca

SEQ ID NO: 726179 - RNA, 22 nt, Human
gcaccggaacccaccccagcca

SEQ ID NO: 726180 - RNA, 21 nt, Human
gcagcaccccagcccuggcgu

SEQ ID NO: 726181 - RNA, 22 nt, Human
gcagcagcaccccagcccuggc

SEQ ID NO: 726182 - RNA, 20 nt, Human
gcagcagccugagcucccag

SEQ ID NO: 726183 - RNA, 20 nt, Human
gcaucgcucccucgcaaucu

SEQ ID NO: 726184 - RNA, 21 nt, Human
gccaucaacagaggaacagcc

SEQ ID NO: 726185 - RNA, 23 nt, Human
gcccucacaagaagaguuaaggc

SEQ ID NO: 726186 - RNA, 18 nt, Human
gcccuggcgugcccgcac

SEQ ID NO: 726187 - RNA, 21 nt, Human
gcggccgagccuucaucaacc

SEQ ID NO: 726188 - RNA, 23 nt, Human
gcucccaggcugacaucugggca

SEQ ID NO: 726189 - RNA, 20 nt, Human
gcugaccucaggccugaugc

SEQ ID NO: 726190 - RNA, 23 nt, Human
gcugcacccacaugcacagcccc

SEQ ID NO: 726191 - RNA, 20 nt, Human
gcuggucuuccucauggugc

SEQ ID NO: 726192 - RNA, 20 nt, Human
ggaggggcccuggugggagc

SEQ ID NO: 726193 - RNA, 24 nt, Human
ggaguggccucugugaaggcaaau

SEQ ID NO: 726194 - RNA, 18 nt, Human
ggcuggaagacaggucgc

SEQ ID NO: 726195 - RNA, 20 nt, Human
gggcauggugguaggagaca

SEQ ID NO: 726196 - RNA, 25 nt, Human
gggcgcugggaacugccaggcgcug

SEQ ID NO: 726197 - RNA, 21 nt, Human
gggcgggacggggccaggagu

SEQ ID NO: 726198 - RNA, 21 nt, Human
gguacaggucuugucuggaca

SEQ ID NO: 726199 - RNA, 19 nt, Human
guaggagacaacucaacca

SEQ ID NO: 726200 - RNA, 18 nt, Human
gucggccgggacagcccc

SEQ ID NO: 726201 - RNA, 20 nt, Human
gugccagaugccacaggacu

SEQ ID NO: 726202 - RNA, 19 nt, Human
gugcccuggagcacuagug

SEQ ID NO: 726203 - RNA, 22 nt, Human
guggcuucuuggagacuucgug

SEQ ID NO: 726204 - RNA, 21 nt, Human
guguggggcagcugacccacg

SEQ ID NO: 726205 - RNA, 21 nt, Human
uaaagcccacaguguccuaag

SEQ ID NO: 726206 - RNA, 19 nt, Human
uaaaguagccccaucggac

SEQ ID NO: 726207 - RNA, 20 nt, Human
uaaaugacacugccugggcu

SEQ ID NO: 726208 - RNA, 22 nt, Human
uaaaugacacugccugggcucc

SEQ ID NO: 726209 - RNA, 25 nt, Human
uaacaaaacaaaaauguuaacuaga

SEQ ID NO: 726210 - RNA, 21 nt, Human
uaacagaacaggagcgaccuu

SEQ ID NO: 726211 - RNA, 25 nt, Human
uaacuagaaaaacuccuuaugauga

SEQ ID NO: 726212 - RNA, 23 nt, Human
uaaggcacuuucuuuaacucugg

SEQ ID NO: 726213 - RNA, 22 nt, Human
uagaaaaacuccuuaugaugaa

SEQ ID NO: 726214 - RNA, 19 nt, Human
uagaaacgcgacuggcccu

SEQ ID NO: 726215 - RNA, 19 nt, Human
uaggagacaacucaaccac

SEQ ID NO: 726216 - RNA, 22 nt, Human
uaggagacaacucaaccacuga

SEQ ID NO: 726217 - RNA, 24 nt, Human
uauuuccugcuuuauuccuugcuc

SEQ ID NO: 726218 - RNA, 21 nt, Human
ucaagaauauuuacuagaaca

SEQ ID NO: 726219 - RNA, 24 nt, Human
ucagaaggaaaacuccagcagcca

SEQ ID NO: 726220 - RNA, 23 nt, Human
ucaggccugaugcuggacccaug

SEQ ID NO: 726221 - RNA, 24 nt, Human
ucagugaguuuaaaugacacugcc

SEQ ID NO: 726222 - RNA, 19 nt, Human
uccagaagauccuggggac

SEQ ID NO: 726223 - RNA, 21 nt, Human
uccauccauggccaccuuccu

SEQ ID NO: 726224 - RNA, 21 nt, Human
ucccacagaacugaaucccuu

SEQ ID NO: 726225 - RNA, 19 nt, Human
uccccaagaacacgcgcug

SEQ ID NO: 726226 - RNA, 20 nt, Human
uccugguuugggcugggcgg

SEQ ID NO: 726227 - RNA, 19 nt, Human
ucuaaagccagagcuggga

SEQ ID NO: 726228 - RNA, 24 nt, Human
ucuagauaggcggggccaagcccu

SEQ ID NO: 726229 - RNA, 20 nt, Human
ucuauagucauuccuaaagc

SEQ ID NO: 726230 - RNA, 24 nt, Human
ucuccagugaccaccuuucccaag

SEQ ID NO: 726231 - RNA, 23 nt, Human
ucuguggggcagugaccccgcuu

SEQ ID NO: 726232 - RNA, 23 nt, Human
ucuuggagacuucgugccagaug

SEQ ID NO: 726233 - RNA, 23 nt, Human
ugaacacgccuggauugugucgg

SEQ ID NO: 726234 - RNA, 18 nt, Human
ugaaggcaaaugagagca

SEQ ID NO: 726235 - RNA, 23 nt, Human
ugaaggcaaaugagagcaaaagu

SEQ ID NO: 726236 - RNA, 19 nt, Human
ugaagggcccagggcgcug

SEQ ID NO: 726237 - RNA, 22 nt, Human
ugaauggacgggucauguggga

SEQ ID NO: 726238 - RNA, 23 nt, Human
ugaauggacgggucaugugggag

SEQ ID NO: 726239 - RNA, 19 nt, Human
ugaccagacagcuggaucc

SEQ ID NO: 726240 - RNA, 25 nt, Human
ugagagcaaaagugggaacugagga

SEQ ID NO: 726241 - RNA, 21 nt, Human
ugagccccucauugcauccag

SEQ ID NO: 726242 - RNA, 23 nt, Human
ugaggacaccuaaguggagagac

SEQ ID NO: 726243 - RNA, 20 nt, Human
ugauggaagaggugccacug

SEQ ID NO: 726244 - RNA, 26 nt, Human
ugcaccgcaucgcucccucgcaaucu

SEQ ID NO: 726245 - RNA, 21 nt, Human
ugccaaacacaguuauauucu

SEQ ID NO: 726246 - RNA, 19 nt, Human
ugccgccagcugcacccac

SEQ ID NO: 726247 - RNA, 19 nt, Human
ugcuggacccaugagacuc

SEQ ID NO: 726248 - RNA, 20 nt, Human
ugcuugccuggccucuccuu

SEQ ID NO: 726249 - RNA, 19 nt, Human
ugcuuuauuccuugcucuc

SEQ ID NO: 726250 - RNA, 21 nt, Human
uggaagaggugccacuggaaa

SEQ ID NO: 726251 - RNA, 19 nt, Human
uggacccagcaccugggga

SEQ ID NO: 726252 - RNA, 24 nt, Human
uggacgggucaugugggaggggcc

SEQ ID NO: 726253 - RNA, 24 nt, Human
uggccaucaacagaggaacagcaa

SEQ ID NO: 726254 - RNA, 19 nt, Human
uggcucaugccaacagcag

SEQ ID NO: 726255 - RNA, 21 nt, Human
uggggagggugggcacagggg

SEQ ID NO: 726256 - RNA, 18 nt, Human
uggggcggcuccucccgg

SEQ ID NO: 726257 - RNA, 22 nt, Human
ugguaggagacaacucaaccac

SEQ ID NO: 726258 - RNA, 22 nt, Human
ugugagcaucuauagucauucc

SEQ ID NO: 726259 - RNA, 19 nt, Human
ugugggaggggcccuggug

SEQ ID NO: 726260 - RNA, 18 nt, Human
ugugugcugagcccacau

SEQ ID NO: 726261 - RNA, 20 nt, Human
uuagcugaaaacaggcauuu

SEQ ID NO: 726262 - RNA, 21 nt, Human
uucaccaaagggcauccagcc

SEQ ID NO: 726263 - RNA, 18 nt, Human
uucccgccagaaagccca

SEQ ID NO: 726264 - RNA, 21 nt, Human
uuccucauggugcuaugcagg

SEQ ID NO: 726265 - RNA, 20 nt, Human
uuggggcggcuccucccggc

SEQ ID NO: 726266 - RNA, 21 nt, Human
uuggugcccuggagcacuagu

SEQ ID NO: 726267 - RNA, 19 nt, Human
uugguucaaacagcaugga

SEQ ID NO: 726268 - RNA, 21 nt, Human
aaacagccccaccacagagga

SEQ ID NO: 726269 - RNA, 22 nt, Human
aaacagccccaccacagaggag

SEQ ID NO: 726270 - RNA, 23 nt, Human
aaacuggcuccuccucaaccaca

SEQ ID NO: 726271 - RNA, 19 nt, Human
aacacccacucaucccgcu

SEQ ID NO: 726272 - RNA, 28 nt, Human
aacacccacucaucccgcuaaugccggc

SEQ ID NO: 726273 - RNA, 21 nt, Human
aagacaagaguccccugaaug

SEQ ID NO: 726274 - RNA, 23 nt, Human
aagccaaacagccccaccacaga

SEQ ID NO: 726275 - RNA, 27 nt, Human
aauaccuacuuuucccuagagcuauug

SEQ ID NO: 726276 - RNA, 22 nt, Human
aaugaccgcauuaccccuccua

SEQ ID NO: 726277 - RNA, 23 nt, Human
acagccccaccacagaggaggcc

SEQ ID NO: 726278 - RNA, 19 nt, Human
accccuccuacccacuccc

SEQ ID NO: 726279 - RNA, 20 nt, Human
accccuccuacccacuccca

SEQ ID NO: 726280 - RNA, 20 nt, Human
acccuagaguccccucuuuu

SEQ ID NO: 726281 - RNA, 21 nt, Human
aggcagaaggggcacuugggg

SEQ ID NO: 726282 - RNA, 19 nt, Human
auaaauauauauauauaua

SEQ ID NO: 726283 - RNA, 22 nt, Human
auucccaucccuggaucuuugg

SEQ ID NO: 726284 - RNA, 24 nt, Human
caccacagaggaggcccacuuuca

SEQ ID NO: 726285 - RNA, 23 nt, Human
cagaggaacaggacugaggcaga

SEQ ID NO: 726286 - RNA, 19 nt, Human
cagcaaaugggaaaggcag

SEQ ID NO: 726287 - RNA, 24 nt, Human
cagccccaccacagaggaggccca

SEQ ID NO: 726288 - RNA, 19 nt, Human
cauauggucuaagcguacc

SEQ ID NO: 726289 - RNA, 23 nt, Human
caucuccuaagccaaacagcccc

SEQ ID NO: 726290 - RNA, 18 nt, Human
caugggcuagagacuggc

SEQ ID NO: 726291 - RNA, 20 nt, Human
ccaaacagccccaccacaga

SEQ ID NO: 726292 - RNA, 26 nt, Human
ccaaacagccccaccacagaggaggc

SEQ ID NO: 726293 - RNA, 21 nt, Human
ccaacagaaaagguugcuggc

SEQ ID NO: 726294 - RNA, 24 nt, Human
ccaaugaccgcauuaccccuccua

SEQ ID NO: 726295 - RNA, 19 nt, Human
ccccagaaaagugaagacc

SEQ ID NO: 726296 - RNA, 23 nt, Human
ccccagacaccgcuggugagagc

SEQ ID NO: 726297 - RNA, 22 nt, Human
ccccugaaugcacauauggucu

SEQ ID NO: 726298 - RNA, 19 nt, Human
cccugccggaacacccacu

SEQ ID NO: 726299 - RNA, 18 nt, Human
ccgcauuaccccuccuac

SEQ ID NO: 726300 - RNA, 19 nt, Human
ccuaggaugcucagagaag

SEQ ID NO: 726301 - RNA, 19 nt, Human
cggaacacccacucauccc

SEQ ID NO: 726302 - RNA, 24 nt, Human
cucauaauguuccagcccccgacu

SEQ ID NO: 726303 - RNA, 24 nt, Human
cuccaaugaccgcauuaccccucc

SEQ ID NO: 726304 - RNA, 25 nt, Human
cugcaguguuuggucuuuggccagu

SEQ ID NO: 726305 - RNA, 19 nt, Human
cugccggaacacccacuca

SEQ ID NO: 726306 - RNA, 24 nt, Human
cuuaaaauagaaccugauuaucuc

SEQ ID NO: 726307 - RNA, 20 nt, Human
gaggagccaauggcuucuuc

SEQ ID NO: 726308 - RNA, 24 nt, Human
gaggaggcccacuuucacagacuc

SEQ ID NO: 726309 - RNA, 28 nt, Human
gcacaacuacagaaauaaagggaacgcc

SEQ ID NO: 726310 - RNA, 20 nt, Human
gcagugaagcggcauuuccu

SEQ ID NO: 726311 - RNA, 21 nt, Human
gccggaacacccacucauccc

SEQ ID NO: 726312 - RNA, 18 nt, Human
gcuucauacaaagagaac

SEQ ID NO: 726313 - RNA, 19 nt, Human
ggcacuuggggaugauaug

SEQ ID NO: 726314 - RNA, 22 nt, Human
gggugagugcuggucaugggcu

SEQ ID NO: 726315 - RNA, 21 nt, Human
uaauaccuacuuuucccuaga

SEQ ID NO: 726316 - RNA, 25 nt, Human
uacaaagagaacuacuuccccagac

SEQ ID NO: 726317 - RNA, 22 nt, Human
uacccacucccauucccauccc

SEQ ID NO: 726318 - RNA, 23 nt, Human
uacuacagcaucuccuaagccaa

SEQ ID NO: 726319 - RNA, 18 nt, Human
uagagacuggcucugagg

SEQ ID NO: 726320 - RNA, 23 nt, Human
uaggaugcucagagaaggcuggg

SEQ ID NO: 726321 - RNA, 19 nt, Human
uagugugauaccacuaaug

SEQ ID NO: 726322 - RNA, 19 nt, Human
uccuaagccaaacagcccc

SEQ ID NO: 726323 - RNA, 26 nt, Human
ugcccagaggaacaggacugaggcag

SEQ ID NO: 726324 - RNA, 23 nt, Human
ugcugauugcuuaaaauagaacc

SEQ ID NO: 726325 - RNA, 18 nt, Human
ugcuggcaaagacaagag

SEQ ID NO: 726326 - RNA, 18 nt, Human
uguugcugguggaagggg

SEQ ID NO: 726327 - RNA, 18 nt, Human
uuaccccuccuacccacu

SEQ ID NO: 726328 - RNA, 19 nt, Human
uuaccccuccuacccacuc

SEQ ID NO: 726329 - RNA, 21 nt, Human
uuaccccuccuacccacuccc

SEQ ID NO: 726330 - RNA, 20 nt, Human
uucuuggggacccugcagug

SEQ ID NO: 726331 - RNA, 19 nt, Human
uuggggaugauauggaagg

SEQ ID NO: 726332 - RNA, 20 nt, Human
uuuccccagaaaagugaaga

SEQ ID NO: 726333 - RNA, 23 nt, Human
uuuggaaaaagcuucauaaucau

SEQ ID NO: 726334 - RNA, 21 nt, Human
aaacagccuguaaaagagaag

SEQ ID NO: 726335 - RNA, 19 nt, Human
aagccaaauuaaccccaaa

SEQ ID NO: 726336 - RNA, 24 nt, Human
aagcuucagcacacuuuacagcuu

SEQ ID NO: 726337 - RNA, 23 nt, Human
aagguggaaagaucacccuugua

SEQ ID NO: 726338 - RNA, 24 nt, Human
aaguaguucuagagcagaagcugg

SEQ ID NO: 726339 - RNA, 23 nt, Human
acauacaagguguaaccauaaag

SEQ ID NO: 726340 - RNA, 26 nt, Human
accaaagcuucagcacacuuuacagc

SEQ ID NO: 726341 - RNA, 21 nt, Human
agaagacauggcagaaugugc

SEQ ID NO: 726342 - RNA, 21 nt, Human
agaaugcuucaaaaguaccug

SEQ ID NO: 726343 - RNA, 19 nt, Human
agacuggaugaaccucagg

SEQ ID NO: 726344 - RNA, 23 nt, Human
agagguuagagacuggaugaacc

SEQ ID NO: 726345 - RNA, 18 nt, Human
agccaaauuaaccccaaa

SEQ ID NO: 726346 - RNA, 19 nt, Human
auuauaauacacaucagau

SEQ ID NO: 726347 - RNA, 19 nt, Human
caaaaguaccugaacugcu

SEQ ID NO: 726348 - RNA, 21 nt, Human
caaagugccuuuuuccugaaa

SEQ ID NO: 726349 - RNA, 28 nt, Human
caacuccaucuaaggaagaccuuucuaa

SEQ ID NO: 726350 - RNA, 19 nt, Human
caaugauuucugcaucucc

SEQ ID NO: 726351 - RNA, 23 nt, Human
cagaaugcuucaaaaguaccuga

SEQ ID NO: 726352 - RNA, 23 nt, Human
cagacccaggcccaaagacagaa

SEQ ID NO: 726353 - RNA, 28 nt, Human
caggcccaaagacagaaguuaccgggag

SEQ ID NO: 726354 - RNA, 23 nt, Human
caugauguaaugcaguccucccu

SEQ ID NO: 726355 - RNA, 27 nt, Human
ccaggcccaaagacagaaguuacccuc

SEQ ID NO: 726356 - RNA, 23 nt, Human
ccauuucacccaaaguaguucua

SEQ ID NO: 726357 - RNA, 19 nt, Human
cccaaagacagaaguuacc

SEQ ID NO: 726358 - RNA, 24 nt, Human
ccugaacugcuuccucacuacaag

SEQ ID NO: 726359 - RNA, 18 nt, Human
cugaacugcuuccucacu

SEQ ID NO: 726360 - RNA, 20 nt, Human
cuguaaaagagaagacaugg

SEQ ID NO: 726361 - RNA, 19 nt, Human
gaagagaauuccuuuaaaa

SEQ ID NO: 726362 - RNA, 25 nt, Human
gaagugguuaagcuggggggcagac

SEQ ID NO: 726363 - RNA, 21 nt, Human
gacagaaguuaccgggaggga

SEQ ID NO: 726364 - RNA, 18 nt, Human
gagaacucccuccuccuc

SEQ ID NO: 726365 - RNA, 23 nt, Human
gagaacucccuccuccucagccc

SEQ ID NO: 726366 - RNA, 24 nt, Human
gaggacagacccaggcccaaagac

SEQ ID NO: 726367 - RNA, 22 nt, Human
gcagaaugugcgagauucaucc

SEQ ID NO: 726368 - RNA, 23 nt, Human
gcucacugugggaucuuuccucu

SEQ ID NO: 726369 - RNA, 18 nt, Human
gcugucuuuggcauuaac

SEQ ID NO: 726370 - RNA, 22 nt, Human
ggaagugguuaagcuggggggc

SEQ ID NO: 726371 - RNA, 25 nt, Human
uaaauuaaaaacagcuugucacuuu

SEQ ID NO: 726372 - RNA, 19 nt, Human
uaaccccaaaauuuacagc

SEQ ID NO: 726373 - RNA, 22 nt, Human
uaagaaacacuacagaacaggg

SEQ ID NO: 726374 - RNA, 23 nt, Human
uaagaaacacuacagaacagggc

SEQ ID NO: 726375 - RNA, 28 nt, Human
uaauuaauguacuuauuccccugaaagg

SEQ ID NO: 726376 - RNA, 24 nt, Human
uacauuacucagaagagguaccaa

SEQ ID NO: 726377 - RNA, 24 nt, Human
uacgugaauaucaaagugccuuuu

SEQ ID NO: 726378 - RNA, 20 nt, Human
uagagcugcucaacaacuga

SEQ ID NO: 726379 - RNA, 22 nt, Human
uauaagccaaauuaaccccaaa

SEQ ID NO: 726380 - RNA, 20 nt, Human
uauuccaacaauacuggcgu

SEQ ID NO: 726381 - RNA, 21 nt, Human
ucacugugggaucuuuccucu

SEQ ID NO: 726382 - RNA, 23 nt, Human
ucauuugcuauuaccaccauuuc

SEQ ID NO: 726383 - RNA, 22 nt, Human
ucgagcauuaacaucugcagaa

SEQ ID NO: 726384 - RNA, 22 nt, Human
ucuacggugcuguguucaggga

SEQ ID NO: 726385 - RNA, 19 nt, Human
ugagacaguacuuuggggu

SEQ ID NO: 726386 - RNA, 22 nt, Human
ugagguagagucacuuggaagu

SEQ ID NO: 726387 - RNA, 22 nt, Human
ugcuauuaccaccauuucaccc

SEQ ID NO: 726388 - RNA, 23 nt, Human
uggaaagaucacccuuguagaag

SEQ ID NO: 726389 - RNA, 30 nt, Human
ugguauuauaauacacaucagauauuucaa

SEQ ID NO: 726390 - RNA, 21 nt, Human
ugucuuuggcauuaacucuag

SEQ ID NO: 726391 - RNA, 23 nt, Human
ugugaggauaagaaacacuacag

SEQ ID NO: 726392 - RNA, 19 nt, Human
uuggugagguagagucacu

SEQ ID NO: 726393 - RNA, 22 nt, Human
aaccauuuucacuuuucaagac

SEQ ID NO: 726394 - RNA, 19 nt, Human
aaggugcuauucacugaaa

SEQ ID NO: 726395 - RNA, 25 nt, Human
acaaucagacacaagcaguaauacc

SEQ ID NO: 726396 - RNA, 24 nt, Human
agauaaccaccgaggaccacgaac

SEQ ID NO: 726397 - RNA, 18 nt, Human
agcaguugucacucagga

SEQ ID NO: 726398 - RNA, 22 nt, Human
aggauuuaugacuuugagggag

SEQ ID NO: 726399 - RNA, 19 nt, Human
auuagcaauaccaagauaa

SEQ ID NO: 726400 - RNA, 23 nt, Human
caaaauacaggacaaucagacac

SEQ ID NO: 726401 - RNA, 21 nt, Human
caagcaguaauacccacgaga

SEQ ID NO: 726402 - RNA, 21 nt, Human
caagcugcagauaaccaccga

SEQ ID NO: 726403 - RNA, 19 nt, Human
cacaagcaguaauacccac

SEQ ID NO: 726404 - RNA, 19 nt, Human
cagauaaccaccgaggacc

SEQ ID NO: 726405 - RNA, 22 nt, Human
caggacccaccucuacaugcuc

SEQ ID NO: 726406 - RNA, 18 nt, Human
cauuccauucauaaauga

SEQ ID NO: 726407 - RNA, 26 nt, Human
ccaaagcacacgaucaccccguacaa

SEQ ID NO: 726408 - RNA, 18 nt, Human
ccaggaacaccuuaauau

SEQ ID NO: 726409 - RNA, 27 nt, Human
ccccccacccccagccagguuguccac

SEQ ID NO: 726410 - RNA, 23 nt, Human
cccuugagaacagggaaaaugga

SEQ ID NO: 726411 - RNA, 30 nt, Human
ccuaugaugacaacguggaaacucucuucu

SEQ ID NO: 726412 - RNA, 23 nt, Human
ccugacacaauauuaaacuagca

SEQ ID NO: 726413 - RNA, 21 nt, Human
gaaagcuacaauuauuauaac

SEQ ID NO: 726414 - RNA, 26 nt, Human
gacaaucagacacaagcaguaauacc

SEQ ID NO: 726415 - RNA, 18 nt, Human
gauuggugcaccgugugu

SEQ ID NO: 726416 - RNA, 20 nt, Human
guauacacauaccuaugcca

SEQ ID NO: 726417 - RNA, 20 nt, Human
gugcaccguguguauacaca

SEQ ID NO: 726418 - RNA, 25 nt, Human
uaauuauucaacacacauaugugua

SEQ ID NO: 726419 - RNA, 19 nt, Human
uacuucaacaauacucugu

SEQ ID NO: 726420 - RNA, 18 nt, Human
uagccucugauucucugc

SEQ ID NO: 726421 - RNA, 20 nt, Human
uaggacgaccugacacaaua

SEQ ID NO: 726422 - RNA, 22 nt, Human
uauuauaacuuacaugccuuca

SEQ ID NO: 726423 - RNA, 21 nt, Human
ucaagacaaacuucaucaggu

SEQ ID NO: 726424 - RNA, 22 nt, Human
ucaagacaaacuucaucaggua

SEQ ID NO: 726425 - RNA, 21 nt, Human
ucagacacaagcaguaauacc

SEQ ID NO: 726426 - RNA, 22 nt, Human
ucauuaccaggaacaccuuaau

SEQ ID NO: 726427 - RNA, 22 nt, Human
uccaagcaagguuuuggucacu

SEQ ID NO: 726428 - RNA, 18 nt, Human
uccaugacuaauacugga

SEQ ID NO: 726429 - RNA, 19 nt, Human
uccaugacuaauacuggaa

SEQ ID NO: 726430 - RNA, 18 nt, Human
ugcucaggugagcuggug

SEQ ID NO: 726431 - RNA, 22 nt, Human
uguaacucagcauacagcacac

SEQ ID NO: 726432 - RNA, 20 nt, Human
uguguauacacauaccuaug

SEQ ID NO: 726433 - RNA, 20 nt, Human
uguguauacauucuucucuu

SEQ ID NO: 726434 - RNA, 21 nt, Human
uuacugcacuuuucuguauuc

SEQ ID NO: 726435 - RNA, 18 nt, Human
uugcuucaaucaccauuu

SEQ ID NO: 726436 - RNA, 22 nt, Human
uuuauuagcaauaccaagauaa

SEQ ID NO: 726437 - RNA, 19 nt, Human
aaaagcacuauuagucacc

SEQ ID NO: 726438 - RNA, 20 nt, Human
aaaagcacuauuagucaccc

SEQ ID NO: 726439 - RNA, 22 nt, Human
aaacaaacaccagcucaagagc

SEQ ID NO: 726440 - RNA, 20 nt, Human
aaacuguaagcuggcuagug

SEQ ID NO: 726441 - RNA, 22 nt, Human
aaagagguacaccccuguuccu

SEQ ID NO: 726442 - RNA, 24 nt, Human
aaagagguacaccccuguuccuuc

SEQ ID NO: 726443 - RNA, 19 nt, Human
aaagugcuggaacuguagg

SEQ ID NO: 726444 - RNA, 23 nt, Human
aaagugcuggaacuguaggugug

SEQ ID NO: 726445 - RNA, 24 nt, Human
aaagugcuggaacuguaggugugg

SEQ ID NO: 726446 - RNA, 25 nt, Human
aaagugcuggaauuaacagguauga

SEQ ID NO: 726447 - RNA, 19 nt, Human
aaaguucucucaaguucuc

SEQ ID NO: 726448 - RNA, 20 nt, Human
aaaugaucagaacacaaaug

SEQ ID NO: 726449 - RNA, 20 nt, Human
aacauggugaaaacccgucu

SEQ ID NO: 726450 - RNA, 21 nt, Human
aacauggugaaaacccgucuc

SEQ ID NO: 726451 - RNA, 21 nt, Human
aacgucgcaagccgcaaacca

SEQ ID NO: 726452 - RNA, 21 nt, Human
aagaagauaaaacguccccuc

SEQ ID NO: 726453 - RNA, 23 nt, Human
aagaaguuuagcucacugaaagc

SEQ ID NO: 726454 - RNA, 24 nt, Human
aagcaauucucccauuuggccucc

SEQ ID NO: 726455 - RNA, 18 nt, Human
aagccgcaaaccagggga

SEQ ID NO: 726456 - RNA, 26 nt, Human
aagugauccucccaccucagcccucu

SEQ ID NO: 726457 - RNA, 24 nt, Human
aagugauccuccugucuuggccuc

SEQ ID NO: 726458 - RNA, 23 nt, Human
aaguucucucauaucccuuuccu

SEQ ID NO: 726459 - RNA, 20 nt, Human
aauugcuugaacccaggagg

SEQ ID NO: 726460 - RNA, 24 nt, Human
aauugcuugaacccaggaggcaga

SEQ ID NO: 726461 - RNA, 24 nt, Human
aauuuggaaaagagauuauagaau

SEQ ID NO: 726462 - RNA, 21 nt, Human
acaacucaaagcggcacucag

SEQ ID NO: 726463 - RNA, 24 nt, Human
acaaugguuccccacuccuggaca

SEQ ID NO: 726464 - RNA, 18 nt, Human
acagguaugagccaccac

SEQ ID NO: 726465 - RNA, 24 nt, Human
acccaggcuagagugaguugagac

SEQ ID NO: 726466 - RNA, 20 nt, Human
accucagcccucugaguagc

SEQ ID NO: 726467 - RNA, 23 nt, Human
accucagcccucugaguagcugg

SEQ ID NO: 726468 - RNA, 25 nt, Human
acucugucaccuaggcuggagugca

SEQ ID NO: 726469 - RNA, 18 nt, Human
acugaauuuauuagagcu

SEQ ID NO: 726470 - RNA, 19 nt, Human
agaaagaguauuugggaau

SEQ ID NO: 726471 - RNA, 19 nt, Human
agaacacaaaugggcagcc

SEQ ID NO: 726472 - RNA, 25 nt, Human
agaaguagcaaaaaauggauaccaa

SEQ ID NO: 726473 - RNA, 18 nt, Human
agacagggucuugcuaug

SEQ ID NO: 726474 - RNA, 23 nt, Human
agacagggucuugcuauguugcc

SEQ ID NO: 726475 - RNA, 22 nt, Human
agacccaacagagcccugagaa

SEQ ID NO: 726476 - RNA, 18 nt, Human
agacuaugccagaaaugg

SEQ ID NO: 726477 - RNA, 18 nt, Human
agacugaauuuauuagaa

SEQ ID NO: 726478 - RNA, 19 nt, Human
agagaauaaacucagccuu

SEQ ID NO: 726479 - RNA, 21 nt, Human
agagacagggucuugcuaugu

SEQ ID NO: 726480 - RNA, 25 nt, Human
agaggcaugagaauugcuugaaccc

SEQ ID NO: 726481 - RNA, 24 nt, Human
agagguugcagugaacugagauca

SEQ ID NO: 726482 - RNA, 22 nt, Human
agaucaagacucugucucaaaa

SEQ ID NO: 726483 - RNA, 24 nt, Human
agauggauugauucugcuauuggu

SEQ ID NO: 726484 - RNA, 18 nt, Human
agauguugaaaaaacccc

SEQ ID NO: 726485 - RNA, 25 nt, Human
agcaagaaggcaggugaguuuucuc

SEQ ID NO: 726486 - RNA, 24 nt, Human
agcacuuugggaggcugaggcggg

SEQ ID NO: 726487 - RNA, 18 nt, Human
agcucaagagccucugau

SEQ ID NO: 726488 - RNA, 18 nt, Human
agcuuuugcaguaucuuu

SEQ ID NO: 726489 - RNA, 20 nt, Human
aggcagagguugcagugaac

SEQ ID NO: 726490 - RNA, 24 nt, Human
aggcagagguugcagugaacugag

SEQ ID NO: 726491 - RNA, 18 nt, Human
aggcaugagaauugcuug

SEQ ID NO: 726492 - RNA, 22 nt, Human
aggcggguggaucaccugaggu

SEQ ID NO: 726493 - RNA, 26 nt, Human
aggcggguggaucaccugaggucagg

SEQ ID NO: 726494 - RNA, 21 nt, Human
aggcugaggcggguggaucac

SEQ ID NO: 726495 - RNA, 24 nt, Human
aggcugaggcggguggaucaccug

SEQ ID NO: 726496 - RNA, 21 nt, Human
aggcuggucuccaacuccugg

SEQ ID NO: 726497 - RNA, 22 nt, Human
aggcuggucuccaacuccuggc

SEQ ID NO: 726498 - RNA, 23 nt, Human
aguagcugggaccacaggcaugu

SEQ ID NO: 726499 - RNA, 22 nt, Human
agugagagagauguugaaaaaa

SEQ ID NO: 726500 - RNA, 24 nt, Human
agugaggcugggcacuguggcuca

SEQ ID NO: 726501 - RNA, 22 nt, Human
auaagcagacugaauuuauuag

SEQ ID NO: 726502 - RNA, 25 nt, Human
aucaauauaagaaacuuuccaucac

SEQ ID NO: 726503 - RNA, 19 nt, Human
augagguagacccaacaga

SEQ ID NO: 726504 - RNA, 22 nt, Human
auggcgcaugccuguaauucca

SEQ ID NO: 726505 - RNA, 23 nt, Human
auggcgcaugccuguaauuccag

SEQ ID NO: 726506 - RNA, 18 nt, Human
auggugaaaacccgucuc

SEQ ID NO: 726507 - RNA, 18 nt, Human
auugcacuccagccuaga

SEQ ID NO: 726508 - RNA, 23 nt, Human
auuuggaaaagagauuauagaau

SEQ ID NO: 726509 - RNA, 21 nt, Human
caaaagcacuauuagucaccc

SEQ ID NO: 726510 - RNA, 21 nt, Human
caaacaccagcucaagagccu

SEQ ID NO: 726511 - RNA, 23 nt, Human
caaacuugauuaaguggaaaaaa

SEQ ID NO: 726512 - RNA, 24 nt, Human
caaagugcuggaacuguaggugug

SEQ ID NO: 726513 - RNA, 25 nt, Human
caaagugcuggaauuaacagguaug

SEQ ID NO: 726514 - RNA, 22 nt, Human
caacauggugaaaacccgucuc

SEQ ID NO: 726515 - RNA, 24 nt, Human
caacauggugaaaacccgucucua

SEQ ID NO: 726516 - RNA, 24 nt, Human
cacaccuguaaucccagcacuuug

SEQ ID NO: 726517 - RNA, 24 nt, Human
cacaggcaugugcuaccaugccca

SEQ ID NO: 726518 - RNA, 23 nt, Human
caccugaggucaggaguuugaga

SEQ ID NO: 726519 - RNA, 23 nt, Human
caccuguaaucccagcacuuugg

SEQ ID NO: 726520 - RNA, 24 nt, Human
caccuguaaucccagcacuuuggg

SEQ ID NO: 726521 - RNA, 22 nt, Human
cacucugucaccuaggcuggag

SEQ ID NO: 726522 - RNA, 23 nt, Human
cacucugucaccuaggcuggagu

SEQ ID NO: 726523 - RNA, 19 nt, Human
cagaacacaaaugggcagc

SEQ ID NO: 726524 - RNA, 22 nt, Human
cagagaaugagacuaugccaga

SEQ ID NO: 726525 - RNA, 20 nt, Human
cagaggcaaugcccuaaaca

SEQ ID NO: 726526 - RNA, 22 nt, Human
cagcacuuugggaggcugaggc

SEQ ID NO: 726527 - RNA, 24 nt, Human
cagcacuuugggaggcugaggcgg

SEQ ID NO: 726528 - RNA, 24 nt, Human
cagcucacugcagccuugaccucu

SEQ ID NO: 726529 - RNA, 24 nt, Human
cagggucuugcuauguugcccagg

SEQ ID NO: 726530 - RNA, 22 nt, Human
caucauagucuagagaagugag

SEQ ID NO: 726531 - RNA, 23 nt, Human
cauucaacaacucaaagcggcac

SEQ ID NO: 726532 - RNA, 18 nt, Human
cauugcacuccagccuag

SEQ ID NO: 726533 - RNA, 20 nt, Human
cauugcacuccagccuagau

SEQ ID NO: 726534 - RNA, 21 nt, Human
cauugcacuccagccuagaug

SEQ ID NO: 726535 - RNA, 22 nt, Human
cauugcacuccagccuagauga

SEQ ID NO: 726536 - RNA, 23 nt, Human
cauugcacuccagccuagaugaa

SEQ ID NO: 726537 - RNA, 24 nt, Human
cauugcacuccagccuagaugaaa

SEQ ID NO: 726538 - RNA, 23 nt, Human
ccaaaagcacuauuagucaccca

SEQ ID NO: 726539 - RNA, 29 nt, Human
ccaaacacaaacuuagcauagagguaagg

SEQ ID NO: 726540 - RNA, 21 nt, Human
ccaaagugcuggaacuguagg

SEQ ID NO: 726541 - RNA, 24 nt, Human
ccaaagugcuggaacuguaggugu

SEQ ID NO: 726542 - RNA, 22 nt, Human
ccaaagugcuggaauuaacagg

SEQ ID NO: 726543 - RNA, 22 nt, Human
ccaaagugcuggaauuaacagg

SEQ ID NO: 726544 - RNA, 25 nt, Human
ccaaagugcuggaauuaacagguau

SEQ ID NO: 726545 - RNA, 24 nt, Human
ccaacucuugauaagccuccaaaa

SEQ ID NO: 726546 - RNA, 24 nt, Human
ccaauguuuuccuggagagcucuu

SEQ ID NO: 726547 - RNA, 18 nt, Human
ccaccaugcccugacucc

SEQ ID NO: 726548 - RNA, 22 nt, Human
ccaggaggcagagguugcagug

SEQ ID NO: 726549 - RNA, 19 nt, Human
ccauugcacuccagccuag

SEQ ID NO: 726550 - RNA, 21 nt, Human
ccauugcacuccagccuagau

SEQ ID NO: 726551 - RNA, 25 nt, Human
cccacuccuggacaagggacagaug

SEQ ID NO: 726552 - RNA, 23 nt, Human
cccaggcuagagugaguugagac

SEQ ID NO: 726553 - RNA, 21 nt, Human
cccccucuucuccaauccaaa

SEQ ID NO: 726554 - RNA, 21 nt, Human
ccccucuucuccaauccaaau

SEQ ID NO: 726555 - RNA, 19 nt, Human
cccuaaacaaacaccagcu

SEQ ID NO: 726556 - RNA, 20 nt, Human
cccuaaacaaacaccagcuc

SEQ ID NO: 726557 - RNA, 23 nt, Human
ccuaaacaaacaccagcucaaga

SEQ ID NO: 726558 - RNA, 21 nt, Human
ccuaggcuggucuccaacucc

SEQ ID NO: 726559 - RNA, 24 nt, Human
ccucccaccucagcccucugagua

SEQ ID NO: 726560 - RNA, 26 nt, Human
ccuccugucuuggccucccaaagugc

SEQ ID NO: 726561 - RNA, 24 nt, Human
ccucugaguagcugggaccacagg

SEQ ID NO: 726562 - RNA, 21 nt, Human
ccugacuccucccccaucucu

SEQ ID NO: 726563 - RNA, 23 nt, Human
ccugaggucaggaguuugagagc

SEQ ID NO: 726564 - RNA, 21 nt, Human
ccugcacuccucaaggucacc

SEQ ID NO: 726565 - RNA, 20 nt, Human
ccuggcuucaagcaauucuc

SEQ ID NO: 726566 - RNA, 22 nt, Human
ccugucuuggccucccaaagug

SEQ ID NO: 726567 - RNA, 18 nt, Human
ccuguguugccuaggcug

SEQ ID NO: 726568 - RNA, 23 nt, Human
ccuguguugccuaggcuggucuc

SEQ ID NO: 726569 - RNA, 22 nt, Human
cgcaaaccaggggacagagcag

SEQ ID NO: 726570 - RNA, 24 nt, Human
cgcucugucacccaggcuagagug

SEQ ID NO: 726571 - RNA, 24 nt, Human
cggguggaucaccugaggucagga

SEQ ID NO: 726572 - RNA, 23 nt, Human
cgucgcaagccgcaaaccagggg

SEQ ID NO: 726573 - RNA, 19 nt, Human
cucaagcagaaguuagggu

SEQ ID NO: 726574 - RNA, 24 nt, Human
cucaagucugcaauuccagcacuu

SEQ ID NO: 726575 - RNA, 24 nt, Human
cucaagugauccucccaccucagc

SEQ ID NO: 726576 - RNA, 22 nt, Human
cucacaccuguaaucccagcac

SEQ ID NO: 726577 - RNA, 24 nt, Human
cucacaccuguaaucccagcacuu

SEQ ID NO: 726578 - RNA, 24 nt, Human
cucacucugucaccuaggcuggag

SEQ ID NO: 726579 - RNA, 23 nt, Human
cucacugcagccuugaccucugg

SEQ ID NO: 726580 - RNA, 24 nt, Human
cucagcccucugaguagcugggac

SEQ ID NO: 726581 - RNA, 19 nt, Human
cucaucuccaaaauggacu

SEQ ID NO: 726582 - RNA, 19 nt, Human
cucccaccucagcccucug

SEQ ID NO: 726583 - RNA, 24 nt, Human
cucccaccucagcccucugaguag

SEQ ID NO: 726584 - RNA, 23 nt, Human
cucugucacccaggcuagaguga

SEQ ID NO: 726585 - RNA, 23 nt, Human
cucugucaccuaggcuggagugc

SEQ ID NO: 726586 - RNA, 19 nt, Human
cucugucucaaaaaaaaaa

SEQ ID NO: 726587 - RNA, 24 nt, Human
cugacuccucccccaucucuaugu

SEQ ID NO: 726588 - RNA, 19 nt, Human
cugcaauuccagcacuuug

SEQ ID NO: 726589 - RNA, 21 nt, Human
cugcugagccauucaggauac

SEQ ID NO: 726590 - RNA, 18 nt, Human
cuggaauuaacagguaug

SEQ ID NO: 726591 - RNA, 22 nt, Human
cuggcccaguaggagaaaugca

SEQ ID NO: 726592 - RNA, 23 nt, Human
cugucuuggccucccaaagugcu

SEQ ID NO: 726593 - RNA, 23 nt, Human
cuugcauauugaauacaguaugu

SEQ ID NO: 726594 - RNA, 24 nt, Human
gaacuguaggugugggccaccaug

SEQ ID NO: 726595 - RNA, 21 nt, Human
gacagaggcaaugcccuaaac

SEQ ID NO: 726596 - RNA, 21 nt, Human
gacucacaccuguaaucccag

SEQ ID NO: 726597 - RNA, 20 nt, Human
gagacuaugccagaaauggg

SEQ ID NO: 726598 - RNA, 25 nt, Human
gaguagcugggaccacaggcaugug

SEQ ID NO: 726599 - RNA, 24 nt, Human
gagugcaguagcaugaucacagcu

SEQ ID NO: 726600 - RNA, 19 nt, Human
gaucaagacucugucucaa

SEQ ID NO: 726601 - RNA, 21 nt, Human
gaucaccugaggucaggaguu

SEQ ID NO: 726602 - RNA, 24 nt, Human
gaucaccugaggucaggaguuuga

SEQ ID NO: 726603 - RNA, 23 nt, Human
gaugaaauuaauaguguucacaa

SEQ ID NO: 726604 - RNA, 19 nt, Human
gcaagccgcaaaccagggg

SEQ ID NO: 726605 - RNA, 20 nt, Human
gcaugugcuaccaugcccag

SEQ ID NO: 726606 - RNA, 19 nt, Human
gccagaaaugggaggaggc

SEQ ID NO: 726607 - RNA, 23 nt, Human
gccuaggcuggucuccaacuccu

SEQ ID NO: 726608 - RNA, 18 nt, Human
gcggggugacucacaccu

SEQ ID NO: 726609 - RNA, 22 nt, Human
gcucaagugauccucccaccuc

SEQ ID NO: 726610 - RNA, 20 nt, Human
gcugaaaucaagggcuaaua

SEQ ID NO: 726611 - RNA, 19 nt, Human
ggcuggucuccaacuccug

SEQ ID NO: 726612 - RNA, 20 nt, Human
gggccuaaagugauccuccu

SEQ ID NO: 726613 - RNA, 24 nt, Human
gggccuaaagugauccuccugucu

SEQ ID NO: 726614 - RNA, 21 nt, Human
gggcucaagugauccucccac

SEQ ID NO: 726615 - RNA, 21 nt, Human
gguggaucaccugaggucagg

SEQ ID NO: 726616 - RNA, 24 nt, Human
gucuugcuauguugcccagguugg

SEQ ID NO: 726617 - RNA, 20 nt, Human
gugcaguagcaugaucacag

SEQ ID NO: 726618 - RNA, 18 nt, Human
gugcuggaacuguaggug

SEQ ID NO: 726619 - RNA, 18 nt, Human
uaaaagcaagaaggcagg

SEQ ID NO: 726620 - RNA, 21 nt, Human
uaaaagcugguccuauuuccu

SEQ ID NO: 726621 - RNA, 24 nt, Human
uaaaauguaauuucucuaccacaa

SEQ ID NO: 726622 - RNA, 21 nt, Human
uaaacaaacaccagcucaaga

SEQ ID NO: 726623 - RNA, 19 nt, Human
uaaagugauccuccugucu

SEQ ID NO: 726624 - RNA, 23 nt, Human
uaaagugauccuccugucuuggc

SEQ ID NO: 726625 - RNA, 20 nt, Human
uaacagguaugagccaccac

SEQ ID NO: 726626 - RNA, 20 nt, Human
uaacauacagagaaugagac

SEQ ID NO: 726627 - RNA, 18 nt, Human
uaagugcauacuugagaa

SEQ ID NO: 726628 - RNA, 20 nt, Human
uaaguggaaaaaaauuggca

SEQ ID NO: 726629 - RNA, 24 nt, Human
uaauagaauccuuuuaucuucagg

SEQ ID NO: 726630 - RNA, 20 nt, Human
uaauuucuauggcuuccccu

SEQ ID NO: 726631 - RNA, 22 nt, Human
uacccaaacacaaacuuagcau

SEQ ID NO: 726632 - RNA, 20 nt, Human
uacguaaagaaagaacuauc

SEQ ID NO: 726633 - RNA, 19 nt, Human
uacugcugagccauucagg

SEQ ID NO: 726634 - RNA, 21 nt, Human
uagagaagugaggcugggcaa

SEQ ID NO: 726635 - RNA, 21 nt, Human
uagcaaaaaauggauaccaaa

SEQ ID NO: 726636 - RNA, 22 nt, Human
uagcaaaaaauggauaccaaaa

SEQ ID NO: 726637 - RNA, 24 nt, Human
uagcaugaucacagcucacugcag

SEQ ID NO: 726638 - RNA, 24 nt, Human
uauaaauucagaaugcaaggggga

SEQ ID NO: 726639 - RNA, 20 nt, Human
uauccaauguuuuccuggag

SEQ ID NO: 726640 - RNA, 21 nt, Human
uaugaaaagauauaucucauu

SEQ ID NO: 726641 - RNA, 19 nt, Human
uauguugcccagguugguc

SEQ ID NO: 726642 - RNA, 24 nt, Human
uauguugcccagguuggucuccaa

SEQ ID NO: 726643 - RNA, 22 nt, Human
ucaaaugaucagaacacaaaug

SEQ ID NO: 726644 - RNA, 22 nt, Human
ucaagagccucugaugccaacc

SEQ ID NO: 726645 - RNA, 22 nt, Human
ucaagucugcaauuccagcacu

SEQ ID NO: 726646 - RNA, 22 nt, Human
ucaaugcuguuaauagaauccu

SEQ ID NO: 726647 - RNA, 22 nt, Human
ucaccuaggcuggagugcagua

SEQ ID NO: 726648 - RNA, 19 nt, Human
ucaccugaggucaggaguu

SEQ ID NO: 726649 - RNA, 24 nt, Human
ucacucugucaccuaggcuggagu

SEQ ID NO: 726650 - RNA, 23 nt, Human
ucacugcagccuugaccucuggg

SEQ ID NO: 726651 - RNA, 18 nt, Human
ucagcccucugaguagcu

SEQ ID NO: 726652 - RNA, 24 nt, Human
ucaggcugugcggggugacucaca

SEQ ID NO: 726653 - RNA, 24 nt, Human
uccagcacuuuguuuuguuuugaa

SEQ ID NO: 726654 - RNA, 21 nt, Human
uccaggagcuugcuugacagg

SEQ ID NO: 726655 - RNA, 23 nt, Human
ucccaaagugcuggaacuguagg

SEQ ID NO: 726656 - RNA, 24 nt, Human
ucccaaagugcuggaauuaacagg

SEQ ID NO: 726657 - RNA, 20 nt, Human
ucccuguguugccuaggcug

SEQ ID NO: 726658 - RNA, 19 nt, Human
uccuggcuucaagcaauuc

SEQ ID NO: 726659 - RNA, 21 nt, Human
uccuuacagacaaaucaaggu

SEQ ID NO: 726660 - RNA, 23 nt, Human
uccuuggauuuuccuaaauuguu

SEQ ID NO: 726661 - RNA, 20 nt, Human
ucggccuccuccucuaucuc

SEQ ID NO: 726662 - RNA, 18 nt, Human
ucucaagcagaaguuagg

SEQ ID NO: 726663 - RNA, 23 nt, Human
ucucacucugucaccuaggcugg

SEQ ID NO: 726664 - RNA, 24 nt, Human
ucucacucugucaccuaggcugga

SEQ ID NO: 726665 - RNA, 22 nt, Human
ucuccaacucuugauaagccuc

SEQ ID NO: 726666 - RNA, 19 nt, Human
ucucccuguguugccuagg

SEQ ID NO: 726667 - RNA, 23 nt, Human
ucucccuguguugccuaggcugg

SEQ ID NO: 726668 - RNA, 24 nt, Human
ucucccuguguugccuaggcuggu

SEQ ID NO: 726669 - RNA, 19 nt, Human
ucucgcucugucacccagg

SEQ ID NO: 726670 - RNA, 23 nt, Human
ucucgcucugucacccaggcuag

SEQ ID NO: 726671 - RNA, 25 nt, Human
ucucgcucugucacccaggcuagag

SEQ ID NO: 726672 - RNA, 26 nt, Human
ucucgcucugucacccaggcuagagu

SEQ ID NO: 726673 - RNA, 21 nt, Human
ucucuacuaaaaaugcaaaaa

SEQ ID NO: 726674 - RNA, 23 nt, Human
ucugaguagcugggaccacaggc

SEQ ID NO: 726675 - RNA, 24 nt, Human
ucugaguagcugggaccacaggca

SEQ ID NO: 726676 - RNA, 22 nt, Human
ucugucacccaggcuagaguga

SEQ ID NO: 726677 - RNA, 24 nt, Human
ucugucaccuaggcuggagugcag

SEQ ID NO: 726678 - RNA, 19 nt, Human
ucugucucaaaaaaaaaaa

SEQ ID NO: 726679 - RNA, 19 nt, Human
ucuugcuauguugcccagg

SEQ ID NO: 726680 - RNA, 23 nt, Human
ucuugcuauguugcccagguugg

SEQ ID NO: 726681 - RNA, 24 nt, Human
ucuugcuauguugcccagguuggu

SEQ ID NO: 726682 - RNA, 20 nt, Human
ucuuggccucccaaagugcu

SEQ ID NO: 726683 - RNA, 24 nt, Human
ugaaaaaaccccucuucuauggca

SEQ ID NO: 726684 - RNA, 24 nt, Human
ugaaaaaaccccucuucuauggca

SEQ ID NO: 726685 - RNA, 18 nt, Human
ugaaaagauauaucucau

SEQ ID NO: 726686 - RNA, 25 nt, Human
ugaccucuggggcucaagugauccu

SEQ ID NO: 726687 - RNA, 22 nt, Human
ugacucacaccuguaaucccag

SEQ ID NO: 726688 - RNA, 24 nt, Human
ugacucacaccuguaaucccagca

SEQ ID NO: 726689 - RNA, 20 nt, Human
ugagaacagcaggaggaaaa

SEQ ID NO: 726690 - RNA, 20 nt, Human
ugagacagggucucacucug

SEQ ID NO: 726691 - RNA, 22 nt, Human
ugagaucaaaccauugcacucc

SEQ ID NO: 726692 - RNA, 24 nt, Human
ugagaucaaaccauugcacuccag

SEQ ID NO: 726693 - RNA, 20 nt, Human
ugaggcggguggaucaccug

SEQ ID NO: 726694 - RNA, 22 nt, Human
ugaggcggguggaucaccugag

SEQ ID NO: 726695 - RNA, 24 nt, Human
ugaggcggguggaucaccugaggu

SEQ ID NO: 726696 - RNA, 26 nt, Human
ugaggcggguggaucaccugagguca

SEQ ID NO: 726697 - RNA, 19 nt, Human
ugagguauauugucauaaa

SEQ ID NO: 726698 - RNA, 18 nt, Human
ugaggucaggaguuugag

SEQ ID NO: 726699 - RNA, 21 nt, Human
ugauaaguaauuaaaaacugc

SEQ ID NO: 726700 - RNA, 22 nt, Human
ugaucagaacacaaaugggcag

SEQ ID NO: 726701 - RNA, 22 nt, Human
ugcaagggggaagcacaaaguc

SEQ ID NO: 726702 - RNA, 27 nt, Human
ugcccagguuggucuccaacucugggc

SEQ ID NO: 726703 - RNA, 23 nt, Human
ugccuguaauuccagcugcccga

SEQ ID NO: 726704 - RNA, 22 nt, Human
ugcuauguugcccagguugguc

SEQ ID NO: 726705 - RNA, 21 nt, Human
uggaacuguaggugugggcca

SEQ ID NO: 726706 - RNA, 25 nt, Human
uggaauuaacagguaugagccacca

SEQ ID NO: 726707 - RNA, 19 nt, Human
uggagugcaguagcaugau

SEQ ID NO: 726708 - RNA, 19 nt, Human
uggagugcaguagcaugau

SEQ ID NO: 726709 - RNA, 21 nt, Human
uggagugcaguagcaugauca

SEQ ID NO: 726710 - RNA, 23 nt, Human
uggaucaccugaggucaggaguu

SEQ ID NO: 726711 - RNA, 24 nt, Human
uggaucaccugaggucaggaguuu

SEQ ID NO: 726712 - RNA, 18 nt, Human
uggccucccaaagugcug

SEQ ID NO: 726713 - RNA, 21 nt, Human
uggcgcaugccuguaauucca

SEQ ID NO: 726714 - RNA, 20 nt, Human
uggcuucaagcaauucuccc

SEQ ID NO: 726715 - RNA, 21 nt, Human
uggcuucaagcaauucuccca

SEQ ID NO: 726716 - RNA, 20 nt, Human
ugggaauuagaagagcuggg

SEQ ID NO: 726717 - RNA, 20 nt, Human
ugggaccacaggcaugugcu

SEQ ID NO: 726718 - RNA, 24 nt, Human
ugggaccacaggcaugugcuacca

SEQ ID NO: 726719 - RNA, 20 nt, Human
ugggaggcugaggcgggugg

SEQ ID NO: 726720 - RNA, 23 nt, Human
ugggaggcugaggcggguggauc

SEQ ID NO: 726721 - RNA, 24 nt, Human
ugggaggcugaggcggguggauca

SEQ ID NO: 726722 - RNA, 24 nt, Human
uggggcucaagugauccucccacc

SEQ ID NO: 726723 - RNA, 18 nt, Human
ugggucugagaacagcag

SEQ ID NO: 726724 - RNA, 20 nt, Human
ugguaggccuggaaggcaag

SEQ ID NO: 726725 - RNA, 25 nt, Human
ugucauaaauguaaauauaucaauu

SEQ ID NO: 726726 - RNA, 19 nt, Human
uguguugccuaggcugguc

SEQ ID NO: 726727 - RNA, 20 nt, Human
uguuccucaucuccaaaaug

SEQ ID NO: 726728 - RNA, 22 nt, Human
uguuccuucuucucauucuuac

SEQ ID NO: 726729 - RNA, 20 nt, Human
uuaaaauauaaucacuuugu

SEQ ID NO: 726730 - RNA, 18 nt, Human
uuacuuugagguauauug

SEQ ID NO: 726731 - RNA, 26 nt, Human
uucaggauacuugggcccuuaaaaga

SEQ ID NO: 726732 - RNA, 20 nt, Human
uuccaaaaaaaauaagaaaa

SEQ ID NO: 726733 - RNA, 21 nt, Human
uuccccucuguagagcucuaa

SEQ ID NO: 726734 - RNA, 22 nt, Human
uugagacagggucucacucugu

SEQ ID NO: 726735 - RNA, 19 nt, Human
uugcagugaacugagauca

SEQ ID NO: 726736 - RNA, 25 nt, Human
uugcagugaacugagaucaaaccau

SEQ ID NO: 726737 - RNA, 24 nt, Human
uugcuugaacccaggaggcagagg

SEQ ID NO: 726738 - RNA, 25 nt, Human
uugggaggcugaggcggguggauca

SEQ ID NO: 726739 - RNA, 21 nt, Human
uuggugugcaguaauguugca

SEQ ID NO: 726740 - RNA, 19 nt, Human
uuuggccucccaaagugcu

SEQ ID NO: 726741 - RNA, 22 nt, Human
uuugucgacacgggucucccug

SEQ ID NO: 726742 - RNA, 18 nt, Human
aacaaggauggacaaugg

SEQ ID NO: 726743 - RNA, 26 nt, Human
aagcagcaugccuaggccugggggca

SEQ ID NO: 726744 - RNA, 24 nt, Human
aaggacucacggacaacaaggaug

SEQ ID NO: 726745 - RNA, 21 nt, Human
aaggcaggcacacaauggcca

SEQ ID NO: 726746 - RNA, 19 nt, Human
aaggccuagccugcaugug

SEQ ID NO: 726747 - RNA, 18 nt, Human
aagggugggguggcagga

SEQ ID NO: 726748 - RNA, 24 nt, Human
aagggugggguggcaggagcgagg

SEQ ID NO: 726749 - RNA, 20 nt, Human
aaugcagaacgcaagggugg

SEQ ID NO: 726750 - RNA, 24 nt, Human
acaaaaccacggagucacuaaggc

SEQ ID NO: 726751 - RNA, 20 nt, Human
acccugggauuccucagagc

SEQ ID NO: 726752 - RNA, 18 nt, Human
accucagguggccaaagg

SEQ ID NO: 726753 - RNA, 18 nt, Human
agacaggcugugcagugc

SEQ ID NO: 726754 - RNA, 19 nt, Human
agacaggcugugcagugcc

SEQ ID NO: 726755 - RNA, 20 nt, Human
agagguacacuguacaaggc

SEQ ID NO: 726756 - RNA, 21 nt, Human
agagguggggucgguuggugg

SEQ ID NO: 726757 - RNA, 19 nt, Human
aggaggaaguggggauggc

SEQ ID NO: 726758 - RNA, 21 nt, Human
aggcagagcuagccuugcuuc

SEQ ID NO: 726759 - RNA, 18 nt, Human
aggcaguggcagugcugc

SEQ ID NO: 726760 - RNA, 19 nt, Human
aggccugggggcaggagcu

SEQ ID NO: 726761 - RNA, 18 nt, Human
agggccuccauguuccag

SEQ ID NO: 726762 - RNA, 23 nt, Human
aguaggugugucccccaaggcag

SEQ ID NO: 726763 - RNA, 23 nt, Human
caagcagcaugccuaggccuggg

SEQ ID NO: 726764 - RNA, 18 nt, Human
caaggauggacaaugggg

SEQ ID NO: 726765 - RNA, 21 nt, Human
caaggauggacaauggggugg

SEQ ID NO: 726766 - RNA, 22 nt, Human
caaggcggagcccccgcccgcc

SEQ ID NO: 726767 - RNA, 18 nt, Human
caauauacugggacugca

SEQ ID NO: 726768 - RNA, 20 nt, Human
caaugggguggucuggcccc

SEQ ID NO: 726769 - RNA, 28 nt, Human
cacaaaaccacggagucacuaaggcagg

SEQ ID NO: 726770 - RNA, 22 nt, Human
caccagggacagauggggacac

SEQ ID NO: 726771 - RNA, 30 nt, Human
cacccagggcccacaucuuccgacugcccc

SEQ ID NO: 726772 - RNA, 22 nt, Human
caccucucccugccggagccca

SEQ ID NO: 726773 - RNA, 23 nt, Human
cacgugcuugguggaggccaagg

SEQ ID NO: 726774 - RNA, 23 nt, Human
cacuguacaaggccggggaggcc

SEQ ID NO: 726775 - RNA, 19 nt, Human
cagaacgcaaggguggggu

SEQ ID NO: 726776 - RNA, 19 nt, Human
cagcaguccaggcugcggc

SEQ ID NO: 726777 - RNA, 21 nt, Human
caggcacacaauggccacacc

SEQ ID NO: 726778 - RNA, 23 nt, Human
caggcacacaauggccacacgug

SEQ ID NO: 726779 - RNA, 22 nt, Human
cagguucacucgugggcagcag

SEQ ID NO: 726780 - RNA, 20 nt, Human
caguggggcuacucccagau

SEQ ID NO: 726781 - RNA, 26 nt, Human
cauacacacucugcuccucacaaaac

SEQ ID NO: 726782 - RNA, 22 nt, Human
caucccggcccugauccgaggg

SEQ ID NO: 726783 - RNA, 19 nt, Human
cauggcagaugucugcgac

SEQ ID NO: 726784 - RNA, 24 nt, Human
ccacaucuuccgacugccccagaa

SEQ ID NO: 726785 - RNA, 24 nt, Human
ccacugcccggugcucggcuccgc

SEQ ID NO: 726786 - RNA, 18 nt, Human
ccagccccgggcagggcc

SEQ ID NO: 726787 - RNA, 20 nt, Human
ccaggcugcggcugcaggug

SEQ ID NO: 726788 - RNA, 20 nt, Human
cccccgcauacacagcuccu

SEQ ID NO: 726789 - RNA, 20 nt, Human
cccccgcgcccucgccgccu

SEQ ID NO: 726790 - RNA, 22 nt, Human
cccccgcgcccucgccgccucc

SEQ ID NO: 726791 - RNA, 18 nt, Human
ccccgcauacacagcucc

SEQ ID NO: 726792 - RNA, 20 nt, Human
ccccgcccgccgcgcucccc

SEQ ID NO: 726793 - RNA, 22 nt, Human
ccccgcgcccucgccgccuccg

SEQ ID NO: 726794 - RNA, 24 nt, Human
ccccucccaucccggcccugaucc

SEQ ID NO: 726795 - RNA, 20 nt, Human
ccccugcaccucucccugcc

SEQ ID NO: 726796 - RNA, 23 nt, Human
cccgcacccgugacgugugccua

SEQ ID NO: 726797 - RNA, 19 nt, Human
cccgccgccgccgccgccg

SEQ ID NO: 726798 - RNA, 24 nt, Human
cccgccgccgccgccgccgccgca

SEQ ID NO: 726799 - RNA, 23 nt, Human
cccucgccgccuccgcgccucuc

SEQ ID NO: 726800 - RNA, 27 nt, Human
ccgcauacacagcuccuccaagggggu

SEQ ID NO: 726801 - RNA, 30 nt, Human
ccgccgccgccgccgcagccacugcccggg

SEQ ID NO: 726802 - RNA, 18 nt, Human
ccgccgccgccgccgccg

SEQ ID NO: 726803 - RNA, 18 nt, Human
ccgccgccgccgccgccg

SEQ ID NO: 726804 - RNA, 19 nt, Human
ccgccgccgccgccgccgc

SEQ ID NO: 726805 - RNA, 22 nt, Human
ccgccgccgccgccgccgccgg

SEQ ID NO: 726806 - RNA, 18 nt, Human
ccggagcccaggcucugc

SEQ ID NO: 726807 - RNA, 21 nt, Human
ccucccaucccggcccugauc

SEQ ID NO: 726808 - RNA, 18 nt, Human
ccugagaagcauguggaa

SEQ ID NO: 726809 - RNA, 23 nt, Human
cgagcaagcagcaugccuaggcc

SEQ ID NO: 726810 - RNA, 24 nt, Human
cgccgagcgguccucagagccccc

SEQ ID NO: 726811 - RNA, 21 nt, Human
cgccuccgcgccucucggcuc

SEQ ID NO: 726812 - RNA, 19 nt, Human
cgggggcagggcugggcug

SEQ ID NO: 726813 - RNA, 22 nt, Human
cgggggcagggcugggcugggc

SEQ ID NO: 726814 - RNA, 19 nt, Human
cgugggcagcaguccaggc

SEQ ID NO: 726815 - RNA, 24 nt, Human
cuaggccccagccccgggcagggc

SEQ ID NO: 726816 - RNA, 20 nt, Human
cucugcacggcugcugccuc

SEQ ID NO: 726817 - RNA, 18 nt, Human
cucugcuccucacaaaac

SEQ ID NO: 726818 - RNA, 22 nt, Human
cugauccgagggcauccuggcc

SEQ ID NO: 726819 - RNA, 21 nt, Human
cugcuccucacaaaaccacgg

SEQ ID NO: 726820 - RNA, 20 nt, Human
cugcugccuccuggccccag

SEQ ID NO: 726821 - RNA, 18 nt, Human
cuguacaaggccggggag

SEQ ID NO: 726822 - RNA, 24 nt, Human
gacaaugggguggucuggcccccc

SEQ ID NO: 726823 - RNA, 19 nt, Human
gacuccccugcaccucucc

SEQ ID NO: 726824 - RNA, 18 nt, Human
gagcggccugaaggcggc

SEQ ID NO: 726825 - RNA, 19 nt, Human
gagcgguccucagagcccc

SEQ ID NO: 726826 - RNA, 25 nt, Human
gcacagagccucucgcccucugcca

SEQ ID NO: 726827 - RNA, 20 nt, Human
gcaggcugugcugggugcag

SEQ ID NO: 726828 - RNA, 20 nt, Human
gcccaggccgcuauagcccc

SEQ ID NO: 726829 - RNA, 20 nt, Human
gcccgggggcagggcugggc

SEQ ID NO: 726830 - RNA, 23 nt, Human
gcccgggggcagggcugggcugg

SEQ ID NO: 726831 - RNA, 20 nt, Human
gcccuuugucauguuucuca

SEQ ID NO: 726832 - RNA, 22 nt, Human
gcgguccucagagcccccgcgc

SEQ ID NO: 726833 - RNA, 21 nt, Human
gcucugcacggcugcugccuc

SEQ ID NO: 726834 - RNA, 19 nt, Human
gcugcccucgaacugaggc

SEQ ID NO: 726835 - RNA, 18 nt, Human
gcugggugcagaagggcu

SEQ ID NO: 726836 - RNA, 23 nt, Human
ggacacccaugcauccccugccu

SEQ ID NO: 726837 - RNA, 21 nt, Human
ggacucacggacaacaaggau

SEQ ID NO: 726838 - RNA, 20 nt, Human
ggcaaggccuagccugcaug

SEQ ID NO: 726839 - RNA, 23 nt, Human
ggcaggagcuaugcccuuccugg

SEQ ID NO: 726840 - RNA, 18 nt, Human
ggcagggcugggcugggc

SEQ ID NO: 726841 - RNA, 19 nt, Human
ggccugaaggcggcccggg

SEQ ID NO: 726842 - RNA, 23 nt, Human
ggccugggggucaccucaggugg

SEQ ID NO: 726843 - RNA, 24 nt, Human
ggcuacucccagaugugugagagg

SEQ ID NO: 726844 - RNA, 21 nt, Human
ggcugggcaggcugugcuggg

SEQ ID NO: 726845 - RNA, 24 nt, Human
ggcugggcaggcugugcugggugc

SEQ ID NO: 726846 - RNA, 24 nt, Human
gggaggcugugaccggauucuucc

SEQ ID NO: 726847 - RNA, 19 nt, Human
gggcaaggccuagccugca

SEQ ID NO: 726848 - RNA, 23 nt, Human
gggcaaggccuagccugcaugug

SEQ ID NO: 726849 - RNA, 18 nt, Human
gggggcagggcugggcug

SEQ ID NO: 726850 - RNA, 21 nt, Human
gggggcagggcugggcugggc

SEQ ID NO: 726851 - RNA, 19 nt, Human
ggugcagaagggcugcggg

SEQ ID NO: 726852 - RNA, 24 nt, Human
gugcccgggggcagggcugggcug

SEQ ID NO: 726853 - RNA, 20 nt, Human
gugcugcugaagugggcugc

SEQ ID NO: 726854 - RNA, 23 nt, Human
guggucuggcccccagacaggcu

SEQ ID NO: 726855 - RNA, 22 nt, Human
uaaggcaggcacacaauggcca

SEQ ID NO: 726856 - RNA, 23 nt, Human
uaaggcaggcacacaauggcccc

SEQ ID NO: 726857 - RNA, 21 nt, Human
uaauccuguggggccccaggu

SEQ ID NO: 726858 - RNA, 20 nt, Human
uaggccccagccccgggcag

SEQ ID NO: 726859 - RNA, 22 nt, Human
uaggccccagccccgggcaggg

SEQ ID NO: 726860 - RNA, 19 nt, Human
ucauccacuggcaaaagca

SEQ ID NO: 726861 - RNA, 24 nt, Human
uccaaggggguuucuggguuccua

SEQ ID NO: 726862 - RNA, 19 nt, Human
uccccugcaccucucccug

SEQ ID NO: 726863 - RNA, 26 nt, Human
ucccggcccgccgccgccgccgccgg

SEQ ID NO: 726864 - RNA, 19 nt, Human
ucgugggcagcaguccagg

SEQ ID NO: 726865 - RNA, 23 nt, Human
ucugccagacuuugguggcugcu

SEQ ID NO: 726866 - RNA, 18 nt, Human
ucuggguuccuaggccuc

SEQ ID NO: 726867 - RNA, 21 nt, Human
ugaccccucccaucccggccc

SEQ ID NO: 726868 - RNA, 22 nt, Human
ugacuccccugcaccucucccu

SEQ ID NO: 726869 - RNA, 22 nt, Human
ugcagaaagucugccagacuuu

SEQ ID NO: 726870 - RNA, 20 nt, Human
ugcggcugcagguggcagug

SEQ ID NO: 726871 - RNA, 19 nt, Human
ugcugcugaagugggcugc

SEQ ID NO: 726872 - RNA, 23 nt, Human
ugcugcugaagugggcugcuccc

SEQ ID NO: 726873 - RNA, 23 nt, Human
uggccccugacuugcccugcagg

SEQ ID NO: 726874 - RNA, 24 nt, Human
uggcugcuggacuaggccccagcc

SEQ ID NO: 726875 - RNA, 18 nt, Human
uggcuggggaggucuggg

SEQ ID NO: 726876 - RNA, 23 nt, Human
ugggcaggcugugcugggugcag

SEQ ID NO: 726877 - RNA, 18 nt, Human
ugggcugcucccacccag

SEQ ID NO: 726878 - RNA, 19 nt, Human
ugggguggcaggagcgagg

SEQ ID NO: 726879 - RNA, 20 nt, Human
ugggugcagaagggcugcgg

SEQ ID NO: 726880 - RNA, 18 nt, Human
uguggcaggaggcggcgc

SEQ ID NO: 726881 - RNA, 24 nt, Human
uguugggguagaggaggaaguggg

SEQ ID NO: 726882 - RNA, 22 nt, Human
uuccccgacagagucacccugg

SEQ ID NO: 726883 - RNA, 21 nt, Human
uuccuaggccucuuggcaucc

SEQ ID NO: 726884 - RNA, 24 nt, Human
uuucuggguuccuaggccucuugg

SEQ ID NO: 726885 - RNA, 25 nt, Human
uuucuggguuccuaggccucuuggc

SEQ ID NO: 726886 - RNA, 23 nt, Human
aagcagcuggaacucggugaugc

SEQ ID NO: 726887 - RNA, 19 nt, Human
agacaggugucauaauccc

SEQ ID NO: 726888 - RNA, 24 nt, Human
agaucagcaccacagccuuccagg

SEQ ID NO: 726889 - RNA, 18 nt, Human
aggcagggagcaaggacc

SEQ ID NO: 726890 - RNA, 19 nt, Human
caacagggaauacagaagc

SEQ ID NO: 726891 - RNA, 21 nt, Human
cuaaaggagugugcacagggc

SEQ ID NO: 726892 - RNA, 24 nt, Human
gcaccacagccuuccaggugucca

SEQ ID NO: 726893 - RNA, 18 nt, Human
guaagugucucgaauuuc

SEQ ID NO: 726894 - RNA, 24 nt, Human
uaaauccuuuaacugcuuugacca

SEQ ID NO: 726895 - RNA, 20 nt, Human
uaaggcagggagcaaggacc

SEQ ID NO: 726896 - RNA, 19 nt, Human
uaagugucucgaauuucuu

SEQ ID NO: 726897 - RNA, 21 nt, Human
ucagaaguuccaacaggaaaa

SEQ ID NO: 726898 - RNA, 20 nt, Human
ugaccaaaaacagaacaagu

SEQ ID NO: 726899 - RNA, 23 nt, Human
ugauaguaagugucucgaauuuc

SEQ ID NO: 726900 - RNA, 19 nt, Human
ugugcacagggcagaagca

SEQ ID NO: 726901 - RNA, 21 nt, Human
uuuaacugcuuugaccaaaaa

SEQ ID NO: 726902 - RNA, 18 nt, Human
uuuaggcuacuaaauccu

SEQ ID NO: 726903 - RNA, 19 nt, Human
aaggccccaaggcagggag

SEQ ID NO: 726904 - RNA, 26 nt, Human
acacggauaucauccccuccuccccc

SEQ ID NO: 726905 - RNA, 22 nt, Human
aggaaaagugcagagccagggc

SEQ ID NO: 726906 - RNA, 18 nt, Human
auccccuccuccccccag

SEQ ID NO: 726907 - RNA, 18 nt, Human
cacccucugggugccggg

SEQ ID NO: 726908 - RNA, 23 nt, Human
cacuuggcugagugggauggggu

SEQ ID NO: 726909 - RNA, 18 nt, Human
cagcacccucugggugcc

SEQ ID NO: 726910 - RNA, 21 nt, Human
cagcucuugggaggcucagga

SEQ ID NO: 726911 - RNA, 20 nt, Human
cagggcuaaggccccaaggc

SEQ ID NO: 726912 - RNA, 19 nt, Human
caggucgggggaggggcag

SEQ ID NO: 726913 - RNA, 22 nt, Human
ccaaggcagggaggccccccuc

SEQ ID NO: 726914 - RNA, 18 nt, Human
cccaggucgggggagggg

SEQ ID NO: 726915 - RNA, 21 nt, Human
ccccuccuccccccagacaca

SEQ ID NO: 726916 - RNA, 19 nt, Human
ccucucacagcagauuggc

SEQ ID NO: 726917 - RNA, 23 nt, Human
cugcagcucuugggaggcucagg

SEQ ID NO: 726918 - RNA, 20 nt, Human
cuucaugcagacacugaccc

SEQ ID NO: 726919 - RNA, 21 nt, Human
gagugggaugggguccgaggg

SEQ ID NO: 726920 - RNA, 22 nt, Human
gagugggaugggguccgagggu

SEQ ID NO: 726921 - RNA, 24 nt, Human
gauaucauccccuccuccccccag

SEQ ID NO: 726922 - RNA, 20 nt, Human
gccccaaggcagggaggccc

SEQ ID NO: 726923 - RNA, 22 nt, Human
gcccgugggcugcagcucuugg

SEQ ID NO: 726924 - RNA, 20 nt, Human
gugggcugcagcucuuggga

SEQ ID NO: 726925 - RNA, 24 nt, Human
uaaggccccaaggcagggaggccc

SEQ ID NO: 726926 - RNA, 19 nt, Human
uccccccagacacagaaag

SEQ ID NO: 726927 - RNA, 20 nt, Human
uccugggagaaggcagcagu

SEQ ID NO: 726928 - RNA, 22 nt, Human
ugggaaggcguccuucacagug

SEQ ID NO: 726929 - RNA, 20 nt, Human
ugggaugggguccgaggguc

SEQ ID NO: 726930 - RNA, 20 nt, Human
uggugggcagcacccucugg

SEQ ID NO: 726931 - RNA, 24 nt, Human
acucuagccucggugacagaguga

SEQ ID NO: 726932 - RNA, 23 nt, Human
agggagcuggggcuauagagaug

SEQ ID NO: 726933 - RNA, 22 nt, Human
agguugaggcugcaaugagcug

SEQ ID NO: 726934 - RNA, 20 nt, Human
ccacuguacucuagccucgg

SEQ ID NO: 726935 - RNA, 23 nt, Human
ccacuguacucuagccucgguga

SEQ ID NO: 726936 - RNA, 24 nt, Human
ccacuguacucuagccucggugac

SEQ ID NO: 726937 - RNA, 22 nt, Human
ccgcugccaccgccuauggccg

SEQ ID NO: 726938 - RNA, 23 nt, Human
ccgcugccaccgccuauggccgg

SEQ ID NO: 726939 - RNA, 22 nt, Human
cugaccucuugugugugugugu

SEQ ID NO: 726940 - RNA, 30 nt, Human
cugaccucuuguguguguguguguguggug

SEQ ID NO: 726941 - RNA, 19 nt, Human
cugcaggcuagguguggug

SEQ ID NO: 726942 - RNA, 19 nt, Human
cugggagguugaggcugca

SEQ ID NO: 726943 - RNA, 21 nt, Human
gacaacacaagguaugaaaca

SEQ ID NO: 726944 - RNA, 23 nt, Human
gagccaccagacaaugucacuug

SEQ ID NO: 726945 - RNA, 20 nt, Human
gagcuggggcuauagagaug

SEQ ID NO: 726946 - RNA, 24 nt, Human
gauugagccugggagguugaggcu

SEQ ID NO: 726947 - RNA, 24 nt, Human
gccacuguacucuagccucgguga

SEQ ID NO: 726948 - RNA, 24 nt, Human
gccugggagguugaggcugcaaug

SEQ ID NO: 726949 - RNA, 21 nt, Human
gcuaggugugguggugugcac

SEQ ID NO: 726950 - RNA, 18 nt, Human
gcuauagagaugguaggc

SEQ ID NO: 726951 - RNA, 19 nt, Human
gcugcaaugagcugugauu

SEQ ID NO: 726952 - RNA, 22 nt, Human
ggccgggguggggucagcccag

SEQ ID NO: 726953 - RNA, 18 nt, Human
gggaggcucaguuggaag

SEQ ID NO: 726954 - RNA, 24 nt, Human
guacucuagccucggugacagagu

SEQ ID NO: 726955 - RNA, 19 nt, Human
guguguguguguguguggc

SEQ ID NO: 726956 - RNA, 22 nt, Human
uacucuagccucggugacagag

SEQ ID NO: 726957 - RNA, 24 nt, Human
uacucuagccucggugacagagug

SEQ ID NO: 726958 - RNA, 20 nt, Human
ucucugcugccgcugccacc

SEQ ID NO: 726959 - RNA, 20 nt, Human
ucugcugccgcugccaccgc

SEQ ID NO: 726960 - RNA, 21 nt, Human
ucuuuauuuccguuuguuucc

SEQ ID NO: 726961 - RNA, 24 nt, Human
ugagccugggagguugaggcugca

SEQ ID NO: 726962 - RNA, 22 nt, Human
ugagcugugauugugccacugu

SEQ ID NO: 726963 - RNA, 22 nt, Human
ugcaaugagcugugauugugcc

SEQ ID NO: 726964 - RNA, 21 nt, Human
uggaggggaacugaccucuug

SEQ ID NO: 726965 - RNA, 21 nt, Human
uggcaguaggggagggaucgg

SEQ ID NO: 726966 - RNA, 19 nt, Human
uggcuggcaguaggggagg

SEQ ID NO: 726967 - RNA, 21 nt, Human
uggggucagcccagcuucugg

SEQ ID NO: 726968 - RNA, 20 nt, Human
uguguguguguguguggccu

SEQ ID NO: 726969 - RNA, 21 nt, Human
uguguguguguguguggccug

SEQ ID NO: 726970 - RNA, 18 nt, Human
ugugugugugugugugug

SEQ ID NO: 726971 - RNA, 18 nt, Human
uucucugcugccgcugcc

SEQ ID NO: 726972 - RNA, 18 nt, Human
uucucugcugccgcugcc

SEQ ID NO: 726973 - RNA, 25 nt, Human
uucucugcugccgcugccaccgccu

SEQ ID NO: 726974 - RNA, 21 nt, Human
aaaacaaaacaaaauuaaaac

SEQ ID NO: 726975 - RNA, 21 nt, Human
aaaacaaauaugacaauaccc

SEQ ID NO: 726976 - RNA, 26 nt, Human
aaaacaucaaaaacuauuuucaagga

SEQ ID NO: 726977 - RNA, 20 nt, Human
aaaacuaaugaggauggcau

SEQ ID NO: 726978 - RNA, 18 nt, Human
aaaagagacugucagaug

SEQ ID NO: 726979 - RNA, 25 nt, Human
aaacaaauaugacaauacccuaugu

SEQ ID NO: 726980 - RNA, 20 nt, Human
aaacaagaauaucaauggua

SEQ ID NO: 726981 - RNA, 22 nt, Human
aaacacauggccaugcacauaa

SEQ ID NO: 726982 - RNA, 18 nt, Human
aaacacugaagacugaug

SEQ ID NO: 726983 - RNA, 23 nt, Human
aaaccgcuuugaguucucuuugc

SEQ ID NO: 726984 - RNA, 26 nt, Human
aaagauuagaaaaaggaaaaaaauaa

SEQ ID NO: 726985 - RNA, 24 nt, Human
aaagugcugggauuacaggcaaga

SEQ ID NO: 726986 - RNA, 23 nt, Human
aaaucacucuagaccuuuaauuc

SEQ ID NO: 726987 - RNA, 21 nt, Human
aaccaggauugucuccaucuc

SEQ ID NO: 726988 - RNA, 18 nt, Human
aaccugguaaaaucaccu

SEQ ID NO: 726989 - RNA, 20 nt, Human
aacuauaauuuuagucaaca

SEQ ID NO: 726990 - RNA, 19 nt, Human
aagaagacuuuuaucagac

SEQ ID NO: 726991 - RNA, 21 nt, Human
aagcagaaacucuuaaguccc

SEQ ID NO: 726992 - RNA, 21 nt, Human
aaguauguaugacuucauguu

SEQ ID NO: 726993 - RNA, 18 nt, Human
aagugcugggauuacagg

SEQ ID NO: 726994 - RNA, 19 nt, Human
aagugcugggauuacaggc

SEQ ID NO: 726995 - RNA, 23 nt, Human
aaucuagcaaugauagcauaaua

SEQ ID NO: 726996 - RNA, 21 nt, Human
aaugcuuacaagucccuuuaa

SEQ ID NO: 726997 - RNA, 18 nt, Human
aaugucacuguuuucaaa

SEQ ID NO: 726998 - RNA, 25 nt, Human
acaaaacaucaaaaacuauuuucaa

SEQ ID NO: 726999 - RNA, 24 nt, Human
acaaaauuagaaugaccugaauca

SEQ ID NO: 727000 - RNA, 23 nt, Human
acacacacacacacacacacaca

SEQ ID NO: 727001 - RNA, 19 nt, Human
acccaggcuggagugcagu

SEQ ID NO: 727002 - RNA, 22 nt, Human
acccuaugugauauaauagaac

SEQ ID NO: 727003 - RNA, 18 nt, Human
accucgugauccccccac

SEQ ID NO: 727004 - RNA, 25 nt, Human
acucugucacccaggcuggagugca

SEQ ID NO: 727005 - RNA, 18 nt, Human
acugcaagcucugccucc

SEQ ID NO: 727006 - RNA, 21 nt, Human
acuucaaaagagacugucaga

SEQ ID NO: 727007 - RNA, 22 nt, Human
agaaauauuauuccugaucuuc

SEQ ID NO: 727008 - RNA, 24 nt, Human
agagaacagguccgccuguaaaca

SEQ ID NO: 727009 - RNA, 21 nt, Human
agagugaacuguguacauaua

SEQ ID NO: 727010 - RNA, 18 nt, Human
aggaagaaaagugaccac

SEQ ID NO: 727011 - RNA, 25 nt, Human
aggcuggagugcaguggcgcgaucu

SEQ ID NO: 727012 - RNA, 26 nt, Human
aggggguuucaccgugaugaaaccag

SEQ ID NO: 727013 - RNA, 24 nt, Human
aggguuccucuuuccugguguuuu

SEQ ID NO: 727014 - RNA, 21 nt, Human
agugcaguggcgcgaucucug

SEQ ID NO: 727015 - RNA, 24 nt, Human
agugcaguggcgcgaucucugcuc

SEQ ID NO: 727016 - RNA, 18 nt, Human
agugcugggauuacaggc

SEQ ID NO: 727017 - RNA, 23 nt, Human
auggaguuuuggguggccaggag

SEQ ID NO: 727018 - RNA, 18 nt, Human
augucaagguuuaguuua

SEQ ID NO: 727019 - RNA, 24 nt, Human
auucuaucacuuucucuggaaugg

SEQ ID NO: 727020 - RNA, 18 nt, Human
auuggaaaacuaaugagg

SEQ ID NO: 727021 - RNA, 20 nt, Human
auuuccauuuaccuaauagg

SEQ ID NO: 727022 - RNA, 27 nt, Human
caaaacaucaaaaacuauuuucaagga

SEQ ID NO: 727023 - RNA, 27 nt, Human
caaagugcugggauuacaggcaagagc

SEQ ID NO: 727024 - RNA, 24 nt, Human
caauauggagaacuuaugugacag

SEQ ID NO: 727025 - RNA, 24 nt, Human
cacacaaacucaaguacuccucuc

SEQ ID NO: 727026 - RNA, 20 nt, Human
cacacacacacacacacaca

SEQ ID NO: 727027 - RNA, 20 nt, Human
cacacacacacacacacaca

SEQ ID NO: 727028 - RNA, 20 nt, Human
cacacacacacacacacaca

SEQ ID NO: 727029 - RNA, 22 nt, Human
cacacacacacacacacacaca

SEQ ID NO: 727030 - RNA, 24 nt, Human
cacccaggcuggagugcaguggcg

SEQ ID NO: 727031 - RNA, 18 nt, Human
caccgcgcccaccaguuc

SEQ ID NO: 727032 - RNA, 24 nt, Human
cacucagaaugcucuguuugacua

SEQ ID NO: 727033 - RNA, 22 nt, Human
cacucugucacccaggcuggag

SEQ ID NO: 727034 - RNA, 23 nt, Human
cacucugucacccaggcuggagu

SEQ ID NO: 727035 - RNA, 22 nt, Human
cacugacacaaacacacacaca

SEQ ID NO: 727036 - RNA, 23 nt, Human
cacugcaagcucugccucccggg

SEQ ID NO: 727037 - RNA, 25 nt, Human
cacuguaugcaaacuguagccaaaa

SEQ ID NO: 727038 - RNA, 20 nt, Human
cagaaacacugucacaaaau

SEQ ID NO: 727039 - RNA, 23 nt, Human
cagaacauucaaauaaccuuagu

SEQ ID NO: 727040 - RNA, 20 nt, Human
cagauuaaaacaaauaugac

SEQ ID NO: 727041 - RNA, 18 nt, Human
cagcugggacuacaggug

SEQ ID NO: 727042 - RNA, 20 nt, Human
cagguccgccuguaaacacu

SEQ ID NO: 727043 - RNA, 19 nt, Human
caguguacgagaagccaua

SEQ ID NO: 727044 - RNA, 21 nt, Human
cauaauaaagggcauauucua

SEQ ID NO: 727045 - RNA, 24 nt, Human
caugauacugucucugaggaucaa

SEQ ID NO: 727046 - RNA, 22 nt, Human
caugcaccuacaaacacauggc

SEQ ID NO: 727047 - RNA, 19 nt, Human
ccaaagugcugggauuaca

SEQ ID NO: 727048 - RNA, 23 nt, Human
ccaaagugcugggauuacaggca

SEQ ID NO: 727049 - RNA, 20 nt, Human
ccacaucugcaaaaugaaau

SEQ ID NO: 727050 - RNA, 24 nt, Human
cccaaagugcugggauuacaggca

SEQ ID NO: 727051 - RNA, 19 nt, Human
cccaggguuccucuuuccu

SEQ ID NO: 727052 - RNA, 26 nt, Human
ccccccaccuuggccucccaaagugc

SEQ ID NO: 727053 - RNA, 24 nt, Human
cccgagcagcugggacuacaggug

SEQ ID NO: 727054 - RNA, 20 nt, Human
ccuaauucacuuugcuaaua

SEQ ID NO: 727055 - RNA, 19 nt, Human
cggcaaagcuguaagaaaa

SEQ ID NO: 727056 - RNA, 21 nt, Human
cuaaaagcuuaccacaacuua

SEQ ID NO: 727057 - RNA, 20 nt, Human
cucaaguacuccucucugcc

SEQ ID NO: 727058 - RNA, 24 nt, Human
cucacucugucacccaggcuggag

SEQ ID NO: 727059 - RNA, 24 nt, Human
cucacugcaagcucugccucccgg

SEQ ID NO: 727060 - RNA, 20 nt, Human
cucagaaugcucuguuugac

SEQ ID NO: 727061 - RNA, 21 nt, Human
cucccggguucaugccauucu

SEQ ID NO: 727062 - RNA, 18 nt, Human
cuccugaccucgugaucc

SEQ ID NO: 727063 - RNA, 22 nt, Human
cucucugccucauccuuauucc

SEQ ID NO: 727064 - RNA, 25 nt, Human
cuguaauaaaaaaaaucugauuuuc

SEQ ID NO: 727065 - RNA, 23 nt, Human
cuuaccacaacuuaaagaaaaac

SEQ ID NO: 727066 - RNA, 21 nt, Human
gaacauuuuaugcuugcuuua

SEQ ID NO: 727067 - RNA, 24 nt, Human
gaccucgugauccccccaccuugg

SEQ ID NO: 727068 - RNA, 19 nt, Human
gagauccucaauauucuaa

SEQ ID NO: 727069 - RNA, 20 nt, Human
gagcagcugggacuacaggu

SEQ ID NO: 727070 - RNA, 25 nt, Human
gagcagcugggacuacaggugacca

SEQ ID NO: 727071 - RNA, 18 nt, Human
gauuacaggcaagagcca

SEQ ID NO: 727072 - RNA, 20 nt, Human
gauuacuucuuuaugagauu

SEQ ID NO: 727073 - RNA, 21 nt, Human
gcaagagccaccgcgcccacc

SEQ ID NO: 727074 - RNA, 25 nt, Human
gccucccggguucaugccauucucc

SEQ ID NO: 727075 - RNA, 23 nt, Human
gccuggcuaauuuuuuguauuuu

SEQ ID NO: 727076 - RNA, 20 nt, Human
gcuacuguggaugucaaggu

SEQ ID NO: 727077 - RNA, 26 nt, Human
gcuggagugcaguggcgcgaucucug

SEQ ID NO: 727078 - RNA, 18 nt, Human
ggaaagaaaaauguucuc

SEQ ID NO: 727079 - RNA, 18 nt, Human
ggaaagaaauggcuuucu

SEQ ID NO: 727080 - RNA, 23 nt, Human
ggagcaggaagucaggcagguuu

SEQ ID NO: 727081 - RNA, 22 nt, Human
ggauuacaggcaagagccaccg

SEQ ID NO: 727082 - RNA, 26 nt, Human
ggggguuucaccgugaugaaaccagg

SEQ ID NO: 727083 - RNA, 24 nt, Human
gggguuucaccgugaugaaaccag

SEQ ID NO: 727084 - RNA, 24 nt, Human
guagaauccagauuacuucuuuau

SEQ ID NO: 727085 - RNA, 23 nt, Human
guagggaagcagaaacucuuaag

SEQ ID NO: 727086 - RNA, 18 nt, Human
gugagaucagaaauuuca

SEQ ID NO: 727087 - RNA, 18 nt, Human
uaaaaaaucucaaaguga

SEQ ID NO: 727088 - RNA, 24 nt, Human
uaaaaacacugaagacugauggaa

SEQ ID NO: 727089 - RNA, 23 nt, Human
uaaacacaaagaauauauaggua

SEQ ID NO: 727090 - RNA, 24 nt, Human
uaaacagucacuugucagucaaaa

SEQ ID NO: 727091 - RNA, 20 nt, Human
uaaacuaaaagcuuaccaca

SEQ ID NO: 727092 - RNA, 21 nt, Human
uaaagcagcuaaacuaaaagc

SEQ ID NO: 727093 - RNA, 22 nt, Human
uaaauaaacacaaagaauauau

SEQ ID NO: 727094 - RNA, 23 nt, Human
uaaccuuaguuuuucaguuuuac

SEQ ID NO: 727095 - RNA, 21 nt, Human
uaauauggggugagaucagaa

SEQ ID NO: 727096 - RNA, 24 nt, Human
uaauuuuuuguauuuuuagcagag

SEQ ID NO: 727097 - RNA, 25 nt, Human
uaauuuuuuguauuuuuagcagaga

SEQ ID NO: 727098 - RNA, 23 nt, Human
uacaaaauauaaacaguacugca

SEQ ID NO: 727099 - RNA, 25 nt, Human
uacaaaauauaaacaguacugcaua

SEQ ID NO: 727100 - RNA, 24 nt, Human
uacaggcaagagccaccgcgccca

SEQ ID NO: 727101 - RNA, 21 nt, Human
uacuguggaugucaagguuua

SEQ ID NO: 727102 - RNA, 18 nt, Human
uacuuguacacuaacauu

SEQ ID NO: 727103 - RNA, 20 nt, Human
uagaaaaaaguggcuuaaaa

SEQ ID NO: 727104 - RNA, 23 nt, Human
uagaacuucuguaauauagcaau

SEQ ID NO: 727105 - RNA, 18 nt, Human
uagaauuccaagccccuc

SEQ ID NO: 727106 - RNA, 23 nt, Human
uagaauuccaagccccucgacau

SEQ ID NO: 727107 - RNA, 18 nt, Human
uagcacguucauugauau

SEQ ID NO: 727108 - RNA, 24 nt, Human
uagcagagaggggguuucaccgug

SEQ ID NO: 727109 - RNA, 27 nt, Human
uaggaaauguuuguugcugaggcugac

SEQ ID NO: 727110 - RNA, 19 nt, Human
uaggaagaaaagugaccac

SEQ ID NO: 727111 - RNA, 21 nt, Human
uagugacaguagagagcaaag

SEQ ID NO: 727112 - RNA, 23 nt, Human
uauaaaacauuuaugaacauuuu

SEQ ID NO: 727113 - RNA, 20 nt, Human
uaugacccaggguuccucuu

SEQ ID NO: 727114 - RNA, 22 nt, Human
uauugauuuuccuccaaagcuu

SEQ ID NO: 727115 - RNA, 21 nt, Human
uauuucaacacaugcaccuac

SEQ ID NO: 727116 - RNA, 19 nt, Human
ucaaaagagacugucagau

SEQ ID NO: 727117 - RNA, 23 nt, Human
ucaaaucugccugaucaucaaua

SEQ ID NO: 727118 - RNA, 25 nt, Human
ucaauuacuggccauauuauauaau

SEQ ID NO: 727119 - RNA, 22 nt, Human
ucacccaggcuggagugcagug

SEQ ID NO: 727120 - RNA, 24 nt, Human
ucacucugucacccaggcuggagu

SEQ ID NO: 727121 - RNA, 18 nt, Human
ucacugcaagcucugccu

SEQ ID NO: 727122 - RNA, 18 nt, Human
ucacugcaagcucugccu

SEQ ID NO: 727123 - RNA, 24 nt, Human
ucacugcaagcucugccucccggg

SEQ ID NO: 727124 - RNA, 24 nt, Human
ucacugcagaaaaugagggaaaga

SEQ ID NO: 727125 - RNA, 26 nt, Human
ucacuuucucuggaauggucuucuca

SEQ ID NO: 727126 - RNA, 26 nt, Human
ucauccagauuaaaacaaauaugaca

SEQ ID NO: 727127 - RNA, 21 nt, Human
ucauugauauugauuuuccuc

SEQ ID NO: 727128 - RNA, 18 nt, Human
ucauuuuaugacccaggg

SEQ ID NO: 727129 - RNA, 19 nt, Human
uccagaaaugcuuacaagu

SEQ ID NO: 727130 - RNA, 20 nt, Human
uccagaaaugcuuacaaguc

SEQ ID NO: 727131 - RNA, 25 nt, Human
uccagauuaaaacaaauaugacaaa

SEQ ID NO: 727132 - RNA, 21 nt, Human
uccauugucacacaacagcau

SEQ ID NO: 727133 - RNA, 24 nt, Human
ucccaaagugcugggauuacaggc

SEQ ID NO: 727134 - RNA, 19 nt, Human
uccccccaccuuggccucc

SEQ ID NO: 727135 - RNA, 23 nt, Human
ucccgagcagcugggacuacagg

SEQ ID NO: 727136 - RNA, 21 nt, Human
ucccggguucaugccauucuc

SEQ ID NO: 727137 - RNA, 24 nt, Human
ucccggguucaugccauucuccug

SEQ ID NO: 727138 - RNA, 23 nt, Human
uccuaggaagaaaagugaccacc

SEQ ID NO: 727139 - RNA, 24 nt, Human
ucuaaaaucuuccauuuagaauuc

SEQ ID NO: 727140 - RNA, 25 nt, Human
ucuaaaaucuuccauuuagaauucc

SEQ ID NO: 727141 - RNA, 22 nt, Human
ucuaucacuuucucuggaaugg

SEQ ID NO: 727142 - RNA, 23 nt, Human
ucucacucugucacccaggcugg

SEQ ID NO: 727143 - RNA, 24 nt, Human
ucucacucugucacccaggcugga

SEQ ID NO: 727144 - RNA, 26 nt, Human
ucucacucugucacccaggcuggagu

SEQ ID NO: 727145 - RNA, 27 nt, Human
ucucacucugucacccaggcuggagug

SEQ ID NO: 727146 - RNA, 20 nt, Human
ucugccucauccuuauuccu

SEQ ID NO: 727147 - RNA, 23 nt, Human
ucuggagucccagucccuacccc

SEQ ID NO: 727148 - RNA, 24 nt, Human
ucugucacccaggcuggagugcag

SEQ ID NO: 727149 - RNA, 21 nt, Human
ucuuuguagggaagcagaaac

SEQ ID NO: 727150 - RNA, 19 nt, Human
ugaaaccaggauugucucc

SEQ ID NO: 727151 - RNA, 19 nt, Human
ugacaauacccuaugugau

SEQ ID NO: 727152 - RNA, 20 nt, Human
ugacaauacccuaugugaua

SEQ ID NO: 727153 - RNA, 22 nt, Human
ugacacaaacacacacacacac

SEQ ID NO: 727154 - RNA, 22 nt, Human
ugacaguagagagcaaaguucc

SEQ ID NO: 727155 - RNA, 18 nt, Human
ugaccucgugaucccccc

SEQ ID NO: 727156 - RNA, 20 nt, Human
ugaccugaaucaauuacugg

SEQ ID NO: 727157 - RNA, 20 nt, Human
ugagaucagcccauaauauc

SEQ ID NO: 727158 - RNA, 22 nt, Human
ugagccuuucaaggaagucugc

SEQ ID NO: 727159 - RNA, 22 nt, Human
ugaucaucuauuagucuguauu

SEQ ID NO: 727160 - RNA, 19 nt, Human
ugcagaaaaugagggaaag

SEQ ID NO: 727161 - RNA, 24 nt, Human
ugccucacccucccgagcagcugg

SEQ ID NO: 727162 - RNA, 19 nt, Human
ugccucccggguucaugcc

SEQ ID NO: 727163 - RNA, 21 nt, Human
ugcugggauuacaggcaagag

SEQ ID NO: 727164 - RNA, 18 nt, Human
ugcuugacaaucucagau

SEQ ID NO: 727165 - RNA, 22 nt, Human
uggagugcaguggcgcgaucuc

SEQ ID NO: 727166 - RNA, 24 nt, Human
uggagugcaguggcgcgaucucug

SEQ ID NO: 727167 - RNA, 18 nt, Human
uggaguucacugcagaaa

SEQ ID NO: 727168 - RNA, 18 nt, Human
uggcuucaguuguacuac

SEQ ID NO: 727169 - RNA, 21 nt, Human
ugggacuacaggugaccacca

SEQ ID NO: 727170 - RNA, 22 nt, Human
ugggauuacaggcaagagccac

SEQ ID NO: 727171 - RNA, 23 nt, Human
ugggauuacaggcaagagccacc

SEQ ID NO: 727172 - RNA, 24 nt, Human
ugggauuacaggcaagagccaccg

SEQ ID NO: 727173 - RNA, 20 nt, Human
uggggugagaucagaaauuu

SEQ ID NO: 727174 - RNA, 19 nt, Human
uggguagagagaggauguc

SEQ ID NO: 727175 - RNA, 20 nt, Human
uguauagaccuuaguuacca

SEQ ID NO: 727176 - RNA, 22 nt, Human
ugucacaaaauuagaaugaccu

SEQ ID NO: 727177 - RNA, 22 nt, Human
uguuaguaaaaaaguaacuuag

SEQ ID NO: 727178 - RNA, 20 nt, Human
uguuuuguuuuguuuuauua

SEQ ID NO: 727179 - RNA, 22 nt, Human
uuaagguagaauccagauuacu

SEQ ID NO: 727180 - RNA, 20 nt, Human
uuaaguggauaccuauuaaa

SEQ ID NO: 727181 - RNA, 22 nt, Human
uuagaauuccaagccccucgac

SEQ ID NO: 727182 - RNA, 22 nt, Human
uuagcagagaggggguuucacc

SEQ ID NO: 727183 - RNA, 24 nt, Human
uuagcagagaggggguuucaccgu

SEQ ID NO: 727184 - RNA, 21 nt, Human
uucaguuucuuuuugcauccc

SEQ ID NO: 727185 - RNA, 19 nt, Human
uucaugccauucuccugcc

SEQ ID NO: 727186 - RNA, 18 nt, Human
uucauuuuuuaaagagau

SEQ ID NO: 727187 - RNA, 23 nt, Human
uuccugaugcuacuguggauguc

SEQ ID NO: 727188 - RNA, 22 nt, Human
uucuccccucuagcuggaaagc

SEQ ID NO: 727189 - RNA, 19 nt, Human
uucugaauagaggaaagaa

SEQ ID NO: 727190 - RNA, 18 nt, Human
uuggccucccaaagugcu

SEQ ID NO: 727191 - RNA, 23 nt, Human
uuguauuuuuagcagagaggggg

SEQ ID NO: 727192 - RNA, 19 nt, Human
uuuaaggaaaagauuagaa

SEQ ID NO: 727193 - RNA, 18 nt, Human
uuuagaauuccaagcccc

SEQ ID NO: 727194 - RNA, 22 nt, Human
uuuauuuucuuuucucagacca

SEQ ID NO: 727195 - RNA, 21 nt, Human
uuuccagaaaugcuuacaagu

SEQ ID NO: 727196 - RNA, 18 nt, Human
uuuguuuuguuuuguuuu

SEQ ID NO: 727197 - RNA, 24 nt, Human
uuuuuagcagagaggggguuucac

SEQ ID NO: 727198 - RNA, 19 nt, Human
uuuuugguagcaaacugug

SEQ ID NO: 727199 - RNA, 21 nt, Human
uuuuuguauuuuuagcagaga

SEQ ID NO: 727200 - RNA, 18 nt, Human
uuuuuuguauuuuuagca

SEQ ID NO: 727201 - RNA, 20 nt, Human
ccacgugcacagcgcuccuc

SEQ ID NO: 727202 - RNA, 21 nt, Human
ccagagguuuuaucacacuuu

SEQ ID NO: 727203 - RNA, 22 nt, Human
ccaggaaccaggucuuggcuca

SEQ ID NO: 727204 - RNA, 23 nt, Human
ccucaggguccaccaggaaccag

SEQ ID NO: 727205 - RNA, 26 nt, Human
ccucuggaagucggagcgcucagccu

SEQ ID NO: 727206 - RNA, 22 nt, Human
ccuggaguuugagaucugccuc

SEQ ID NO: 727207 - RNA, 24 nt, Human
ccuggaguuugagaucugccuccc

SEQ ID NO: 727208 - RNA, 19 nt, Human
cgggagggcagggucgccg

SEQ ID NO: 727209 - RNA, 21 nt, Human
guagagcaagucugagccaga

SEQ ID NO: 727210 - RNA, 23 nt, Human
uccucaggguccaccaggaacca

SEQ ID NO: 727211 - RNA, 19 nt, Human
ucuuggcucacagccaggc

SEQ ID NO: 727212 - RNA, 23 nt, Human
ucuuggcucacagccaggcugga

SEQ ID NO: 727213 - RNA, 19 nt, Human
ugcacagcgcuccucugga

SEQ ID NO: 727214 - RNA, 19 nt, Human
uucacaguucugagccugg

SEQ ID NO: 727215 - RNA, 23 nt, Human
uuuucucacaauaaacucuuuau

SEQ ID NO: 727216 - RNA, 23 nt, Human
uuuuuuuuuuuuuuucucacaau

SEQ ID NO: 727217 - RNA, 20 nt, Human
aaaacccuucugauaacuca

SEQ ID NO: 727218 - RNA, 27 nt, Human
aaacaaaaggagaaagaaaagggaccc

SEQ ID NO: 727219 - RNA, 22 nt, Human
aaacaauaaaugguacagucau

SEQ ID NO: 727220 - RNA, 20 nt, Human
aaacacaauagcaaaacuca

SEQ ID NO: 727221 - RNA, 23 nt, Human
aaacacacacacacacacaaacc

SEQ ID NO: 727222 - RNA, 19 nt, Human
aaacacauguccaguucuu

SEQ ID NO: 727223 - RNA, 19 nt, Human
aaagaacacuuaaccaaau

SEQ ID NO: 727224 - RNA, 26 nt, Human
aaagcaaaucaauuacacaguaacau

SEQ ID NO: 727225 - RNA, 24 nt, Human
aacaaaacgucuuggcucuccuua

SEQ ID NO: 727226 - RNA, 21 nt, Human
aaccaagaaauaaaacaaucu

SEQ ID NO: 727227 - RNA, 21 nt, Human
aaccuaaaaugcguuuucccc

SEQ ID NO: 727228 - RNA, 18 nt, Human
aagaagaaauaucaaucc

SEQ ID NO: 727229 - RNA, 19 nt, Human
aagcauacuucauccugaa

SEQ ID NO: 727230 - RNA, 22 nt, Human
aauuagaaguguaacuaaacca

SEQ ID NO: 727231 - RNA, 21 nt, Human
acaaaaccacaagaaacuaag

SEQ ID NO: 727232 - RNA, 23 nt, Human
acaaaaucacaaaaccacaagaa

SEQ ID NO: 727233 - RNA, 23 nt, Human
acacaaauucugaaggcaacauc

SEQ ID NO: 727234 - RNA, 22 nt, Human
acacuacaccuuaaauguccaa

SEQ ID NO: 727235 - RNA, 23 nt, Human
acccuaaagaauaaugcacacca

SEQ ID NO: 727236 - RNA, 25 nt, Human
agaagccaccuucagaaggcagcag

SEQ ID NO: 727237 - RNA, 19 nt, Human
agcagaauacaaaaaucua

SEQ ID NO: 727238 - RNA, 24 nt, Human
agcagcuaagucacauaagaaagu

SEQ ID NO: 727239 - RNA, 21 nt, Human
aggaauuccuaacaaaacguc

SEQ ID NO: 727240 - RNA, 18 nt, Human
aggaggcuugggaagcac

SEQ ID NO: 727241 - RNA, 23 nt, Human
aggaggcuugggaagcacuuaua

SEQ ID NO: 727242 - RNA, 21 nt, Human
aggcaacaucauuuauaaaac

SEQ ID NO: 727243 - RNA, 20 nt, Human
aggcgaaaugggucugggac

SEQ ID NO: 727244 - RNA, 23 nt, Human
agucauccuuuucccucuuguua

SEQ ID NO: 727245 - RNA, 22 nt, Human
auaaaacacuguagaaugacca

SEQ ID NO: 727246 - RNA, 19 nt, Human
auauuuuuaguuuuguacc

SEQ ID NO: 727247 - RNA, 24 nt, Human
augugcaauccacaucucaaaaca

SEQ ID NO: 727248 - RNA, 22 nt, Human
auuuugacugggaaggccuggg

SEQ ID NO: 727249 - RNA, 18 nt, Human
caaaacacaauagcaaaa

SEQ ID NO: 727250 - RNA, 22 nt, Human
caaaacacaauagcaaaacuca

SEQ ID NO: 727251 - RNA, 23 nt, Human
caaaacacaauagcaaaacucaa

SEQ ID NO: 727252 - RNA, 24 nt, Human
caaaacccuucugauaacucaaau

SEQ ID NO: 727253 - RNA, 21 nt, Human
caaaaucacaaaaccacaaga

SEQ ID NO: 727254 - RNA, 24 nt, Human
caaaguauuagcauauauuacacu

SEQ ID NO: 727255 - RNA, 21 nt, Human
cacaaacccuugacaggagau

SEQ ID NO: 727256 - RNA, 21 nt, Human
cacacaucuccauauguccac

SEQ ID NO: 727257 - RNA, 19 nt, Human
cacagguuaauaggaggca

SEQ ID NO: 727258 - RNA, 21 nt, Human
cacaucauggugacaugacua

SEQ ID NO: 727259 - RNA, 24 nt, Human
cacuacaccuuaaauguccaaacc

SEQ ID NO: 727260 - RNA, 21 nt, Human
cagaauacaaaaaucuaaaaa

SEQ ID NO: 727261 - RNA, 23 nt, Human
cagaauauaaucaagaacucaua

SEQ ID NO: 727262 - RNA, 18 nt, Human
cagccuucagaacaaaua

SEQ ID NO: 727263 - RNA, 23 nt, Human
cauauguccacaagcucaaaaug

SEQ ID NO: 727264 - RNA, 21 nt, Human
ccaacuuguucacaaaaagug

SEQ ID NO: 727265 - RNA, 21 nt, Human
ccagacagugcucgugcgagc

SEQ ID NO: 727266 - RNA, 28 nt, Human
ccagccagcuagagagcuaccagacagu

SEQ ID NO: 727267 - RNA, 19 nt, Human
ccagccccaacggcggcga

SEQ ID NO: 727268 - RNA, 18 nt, Human
cccuccauaacuuaacaa

SEQ ID NO: 727269 - RNA, 25 nt, Human
ccgaggcgggccgggcagcaucucu

SEQ ID NO: 727270 - RNA, 19 nt, Human
ccugcucuugcuguucugu

SEQ ID NO: 727271 - RNA, 19 nt, Human
cgccucaaagccgaggcgg

SEQ ID NO: 727272 - RNA, 23 nt, Human
cgucuuggcucuccuuaaaacag

SEQ ID NO: 727273 - RNA, 24 nt, Human
cuaacccagaaaacaaacaauaac

SEQ ID NO: 727274 - RNA, 23 nt, Human
cuaaucaucaauauucagaauau

SEQ ID NO: 727275 - RNA, 22 nt, Human
cuacaccuuaaauguccaaacc

SEQ ID NO: 727276 - RNA, 22 nt, Human
cuacauuacaccacuuaucacc

SEQ ID NO: 727277 - RNA, 18 nt, Human
cugagaaagauacagaag

SEQ ID NO: 727278 - RNA, 22 nt, Human
cugccaucugaugagaaagccc

SEQ ID NO: 727279 - RNA, 22 nt, Human
cuuaagcucugcuacauuacac

SEQ ID NO: 727280 - RNA, 21 nt, Human
cuucaguauugucuuuuucaa

SEQ ID NO: 727281 - RNA, 20 nt, Human
gaacauuuacaaaggcaccg

SEQ ID NO: 727282 - RNA, 22 nt, Human
gaccaaauaaaacacuguagaa

SEQ ID NO: 727283 - RNA, 21 nt, Human
gagaaugcuucccuaguauag

SEQ ID NO: 727284 - RNA, 22 nt, Human
gagaccuuuagagaaacaaaag

SEQ ID NO: 727285 - RNA, 22 nt, Human
gagaccuuuagagaaacaaaag

SEQ ID NO: 727286 - RNA, 20 nt, Human
gagcaaaaggcuccucaaga

SEQ ID NO: 727287 - RNA, 30 nt, Human
gccugcuggauuuucaauucucugcagccc

SEQ ID NO: 727288 - RNA, 21 nt, Human
gcuuuuuguuguguguggguc

SEQ ID NO: 727289 - RNA, 22 nt, Human
ggcagcaucucucucgcccggc

SEQ ID NO: 727290 - RNA, 18 nt, Human
ggguacuuuguaaucacu

SEQ ID NO: 727291 - RNA, 21 nt, Human
ggguacuuuguaaucacuaug

SEQ ID NO: 727292 - RNA, 18 nt, Human
guagugauauauaccaau

SEQ ID NO: 727293 - RNA, 21 nt, Human
guaguguaaaauuauaaagca

SEQ ID NO: 727294 - RNA, 18 nt, Human
gucaagcuucaaaccuga

SEQ ID NO: 727295 - RNA, 21 nt, Human
gucacagacaaaauuaaagcc

SEQ ID NO: 727296 - RNA, 19 nt, Human
guuauuaaauacaacaaaa

SEQ ID NO: 727297 - RNA, 20 nt, Human
guucuauucuuaagcucugc

SEQ ID NO: 727298 - RNA, 22 nt, Human
guuuguagugauauauaccaau

SEQ ID NO: 727299 - RNA, 22 nt, Human
uaaaacacuguagaaugaccac

SEQ ID NO: 727300 - RNA, 21 nt, Human
uaaaaugcguuuuccccaguu

SEQ ID NO: 727301 - RNA, 25 nt, Human
uaaaaugcguuuuccccaguuugaa

SEQ ID NO: 727302 - RNA, 24 nt, Human
uaaauacaacaaaaucacaaaacc

SEQ ID NO: 727303 - RNA, 23 nt, Human
uaacaaaaaacauaaaaaacaca

SEQ ID NO: 727304 - RNA, 19 nt, Human
uaacccagaaaacaaacaa

SEQ ID NO: 727305 - RNA, 24 nt, Human
uaacucaaaucuuguauagaucaa

SEQ ID NO: 727306 - RNA, 22 nt, Human
uaagauaacuauuaaccuccga

SEQ ID NO: 727307 - RNA, 22 nt, Human
uaaguagauucacaauauucaa

SEQ ID NO: 727308 - RNA, 21 nt, Human
uacagucaugauuucagaauc

SEQ ID NO: 727309 - RNA, 24 nt, Human
uacuauaggaaaaagaaaccaagc

SEQ ID NO: 727310 - RNA, 18 nt, Human
uacucagaagcagaacga

SEQ ID NO: 727311 - RNA, 21 nt, Human
uagcauauauuacacucuggc

SEQ ID NO: 727312 - RNA, 20 nt, Human
uagcauuacagcaaauaaca

SEQ ID NO: 727313 - RNA, 21 nt, Human
uaguuucacuauuagaaagca

SEQ ID NO: 727314 - RNA, 22 nt, Human
uauauaacugacauuucucaag

SEQ ID NO: 727315 - RNA, 21 nt, Human
uauggcaagucaauucuguca

SEQ ID NO: 727316 - RNA, 19 nt, Human
ucaaaggaaucaaucccau

SEQ ID NO: 727317 - RNA, 24 nt, Human
ucaaucccagauacauugcuaaaa

SEQ ID NO: 727318 - RNA, 23 nt, Human
ucacagacaaaauuaaagccuau

SEQ ID NO: 727319 - RNA, 20 nt, Human
ucacuguuguuuagcuucuc

SEQ ID NO: 727320 - RNA, 18 nt, Human
ucagauacaugauauuuu

SEQ ID NO: 727321 - RNA, 23 nt, Human
uccaaugagagguucuuauuucc

SEQ ID NO: 727322 - RNA, 22 nt, Human
uccaguuugagaucacuuugag

SEQ ID NO: 727323 - RNA, 24 nt, Human
ucccuccauaacuuaacaacgcaa

SEQ ID NO: 727324 - RNA, 21 nt, Human
uccugcucuugcuguucuguu

SEQ ID NO: 727325 - RNA, 24 nt, Human
ucuaaagggcauuuauagcauuac

SEQ ID NO: 727326 - RNA, 21 nt, Human
ucuacccucaucuagaugguc

SEQ ID NO: 727327 - RNA, 18 nt, Human
ucuauucuuaagcucugc

SEQ ID NO: 727328 - RNA, 19 nt, Human
ucuucaaaauuugguuuag

SEQ ID NO: 727329 - RNA, 20 nt, Human
ugacauuucucaaguucuau

SEQ ID NO: 727330 - RNA, 21 nt, Human
ugacuggccaaagugaaaucu

SEQ ID NO: 727331 - RNA, 22 nt, Human
ugacugggaaggccugggagac

SEQ ID NO: 727332 - RNA, 20 nt, Human
ugcacaccacagcccucagc

SEQ ID NO: 727333 - RNA, 25 nt, Human
ugcuacauuacaccacuuaucaccu

SEQ ID NO: 727334 - RNA, 18 nt, Human
ugcucacacaaauggaag

SEQ ID NO: 727335 - RNA, 22 nt, Human
uggaacucucagaaagacacau

SEQ ID NO: 727336 - RNA, 18 nt, Human
uggcaagaauagcaucaa

SEQ ID NO: 727337 - RNA, 22 nt, Human
ugguuauuucuaagucacauuu

SEQ ID NO: 727338 - RNA, 21 nt, Human
ugucaaguucugccaacaugg

SEQ ID NO: 727339 - RNA, 18 nt, Human
ugucacagguuaauagga

SEQ ID NO: 727340 - RNA, 19 nt, Human
uguuaagagcgacagaaca

SEQ ID NO: 727341 - RNA, 25 nt, Human
uuaaacacacacacacacacaaacc

SEQ ID NO: 727342 - RNA, 22 nt, Human
uuaaauacaacaaaaucacaaa

SEQ ID NO: 727343 - RNA, 24 nt, Human
uuaaauacaacaaaaucacaaaac

SEQ ID NO: 727344 - RNA, 19 nt, Human
uuaaauguccaaaccuaca

SEQ ID NO: 727345 - RNA, 25 nt, Human
uuaacacuacaccuuaaauguccaa

SEQ ID NO: 727346 - RNA, 21 nt, Human
uucaaaccugacaaaagggau

SEQ ID NO: 727347 - RNA, 24 nt, Human
uugaaugcaaucuaaauauguauu

SEQ ID NO: 727348 - RNA, 23 nt, Human
uuuccaugucaccaauuauuuuc

SEQ ID NO: 727349 - RNA, 19 nt, Human
uuuccugcucuugcuguuc

SEQ ID NO: 727350 - RNA, 23 nt, Human
uuuccugcucuugcuguucuguu

SEQ ID NO: 727351 - RNA, 21 nt, Human
uuugagaucacuuugagaaua

SEQ ID NO: 727352 - RNA, 23 nt, Human
uuuucaggaggcuugggaagcac

SEQ ID NO: 727353 - RNA, 19 nt, Human
aaacaaagcaucccggugu

SEQ ID NO: 727354 - RNA, 18 nt, Human
aaacacagugcugccgac

SEQ ID NO: 727355 - RNA, 22 nt, Human
aaacccgggaagcgucugagug

SEQ ID NO: 727356 - RNA, 18 nt, Human
aaagaggagaccgggggc

SEQ ID NO: 727357 - RNA, 22 nt, Human
aagaggagaccgggggcggagc

SEQ ID NO: 727358 - RNA, 19 nt, Human
aagcccagagggugagcag

SEQ ID NO: 727359 - RNA, 22 nt, Human
acaaacaaagcaucccggugug

SEQ ID NO: 727360 - RNA, 19 nt, Human
acaaaugaccugguuucug

SEQ ID NO: 727361 - RNA, 19 nt, Human
acaagcgcaccacccagag

SEQ ID NO: 727362 - RNA, 22 nt, Human
acaaggugcugauugguguguu

SEQ ID NO: 727363 - RNA, 19 nt, Human
acagacccagcagccucca

SEQ ID NO: 727364 - RNA, 28 nt, Human
acagacccagcagccuccacccgaccca

SEQ ID NO: 727365 - RNA, 24 nt, Human
accacccagagcggugaccacacc

SEQ ID NO: 727366 - RNA, 20 nt, Human
acccagagcggugaccacac

SEQ ID NO: 727367 - RNA, 24 nt, Human
acccaguggauccugcacaggggc

SEQ ID NO: 727368 - RNA, 24 nt, Human
accccgcgguucggcucgggcauc

SEQ ID NO: 727369 - RNA, 19 nt, Human
acccgaguggguugucacu

SEQ ID NO: 727370 - RNA, 21 nt, Human
accuccccuucgcgcgaaucc

SEQ ID NO: 727371 - RNA, 19 nt, Human
accuggcggugaggacccc

SEQ ID NO: 727372 - RNA, 20 nt, Human
accugggggggacaccuggg

SEQ ID NO: 727373 - RNA, 24 nt, Human
acgaaccucggaaacuccaggagg

SEQ ID NO: 727374 - RNA, 22 nt, Human
acucgccgauggcccacaccac

SEQ ID NO: 727375 - RNA, 24 nt, Human
agaaggcuggcaccagcgcuggcc

SEQ ID NO: 727376 - RNA, 21 nt, Human
agagcaaaagaggagaccggg

SEQ ID NO: 727377 - RNA, 19 nt, Human
agcaagcuggcugcccagg

SEQ ID NO: 727378 - RNA, 20 nt, Human
agcacacugcccagaaagcc

SEQ ID NO: 727379 - RNA, 20 nt, Human
agcagcaguggcacgccggg

SEQ ID NO: 727380 - RNA, 21 nt, Human
agcagcaguggcacgccgggc

SEQ ID NO: 727381 - RNA, 25 nt, Human
agccugggggcggggcgugaggcuc

SEQ ID NO: 727382 - RNA, 24 nt, Human
agcgcaccacccagagcggugacc

SEQ ID NO: 727383 - RNA, 23 nt, Human
agcggugaccacacccgggaacu

SEQ ID NO: 727384 - RNA, 23 nt, Human
agcuccacucagguggcucccug

SEQ ID NO: 727385 - RNA, 22 nt, Human
agcuggccugggcgguggcccc

SEQ ID NO: 727386 - RNA, 22 nt, Human
aggaacccacggaggggagggg

SEQ ID NO: 727387 - RNA, 25 nt, Human
aggaacccacggaggggagggggga

SEQ ID NO: 727388 - RNA, 18 nt, Human
aggacucccgcgcccucc

SEQ ID NO: 727389 - RNA, 20 nt, Human
aggccgcgggggacaccagc

SEQ ID NO: 727390 - RNA, 22 nt, Human
aggccggccucccucuccacca

SEQ ID NO: 727391 - RNA, 19 nt, Human
aggcugcggacuuagcacc

SEQ ID NO: 727392 - RNA, 22 nt, Human
aggcugcggacuuagcaccagc

SEQ ID NO: 727393 - RNA, 24 nt, Human
aggcugucacuucucacuuucacu

SEQ ID NO: 727394 - RNA, 22 nt, Human
agggcugugaggacugccagca

SEQ ID NO: 727395 - RNA, 19 nt, Human
aggggaggugggcggggcc

SEQ ID NO: 727396 - RNA, 19 nt, Human
aggggcucccacagugcag

SEQ ID NO: 727397 - RNA, 27 nt, Human
aggggcucccacagugcaguggcgggg

SEQ ID NO: 727398 - RNA, 21 nt, Human
agguccccagcccugccccgc

SEQ ID NO: 727399 - RNA, 20 nt, Human
agguggcggggcuggggccc

SEQ ID NO: 727400 - RNA, 25 nt, Human
agugcaguggcgggcugaagggcuc

SEQ ID NO: 727401 - RNA, 21 nt, Human
auacagaguguugacaaaaag

SEQ ID NO: 727402 - RNA, 21 nt, Human
auagaggaacacagaagacug

SEQ ID NO: 727403 - RNA, 20 nt, Human
aucagaucuuggcuccggga

SEQ ID NO: 727404 - RNA, 19 nt, Human
aucccgagacccgcgcacu

SEQ ID NO: 727405 - RNA, 20 nt, Human
aucgcaggccgcgggggaca

SEQ ID NO: 727406 - RNA, 19 nt, Human
aucuuggcuccgggaggcc

SEQ ID NO: 727407 - RNA, 24 nt, Human
augaggccggccucccucuccacc

SEQ ID NO: 727408 - RNA, 22 nt, Human
caaaaacaaaagacuaggaaac

SEQ ID NO: 727409 - RNA, 22 nt, Human
caagggcaucaaaaggggcauu

SEQ ID NO: 727410 - RNA, 20 nt, Human
cacaaaugaccugguuucug

SEQ ID NO: 727411 - RNA, 25 nt, Human
cacagagcccacgcccacccggaac

SEQ ID NO: 727412 - RNA, 21 nt, Human
caccagacucaggagcccagc

SEQ ID NO: 727413 - RNA, 23 nt, Human
caccagcgcuggccucaggcccc

SEQ ID NO: 727414 - RNA, 23 nt, Human
caccgcgccucucccuccacacc

SEQ ID NO: 727415 - RNA, 19 nt, Human
caccgugggccuugccucc

SEQ ID NO: 727416 - RNA, 18 nt, Human
caccuccccuucgcgcga

SEQ ID NO: 727417 - RNA, 20 nt, Human
caccugaagguugcuccucc

SEQ ID NO: 727418 - RNA, 24 nt, Human
cacgcacgccuugguaugcacagu

SEQ ID NO: 727419 - RNA, 21 nt, Human
cacucgcccccuccauagucc

SEQ ID NO: 727420 - RNA, 20 nt, Human
cacugggaagugaucccgag

SEQ ID NO: 727421 - RNA, 19 nt, Human
cacuggggagaaggcuggc

SEQ ID NO: 727422 - RNA, 19 nt, Human
cagagcggugaccacaccc

SEQ ID NO: 727423 - RNA, 22 nt, Human
cagagcuaugggggauuggggg

SEQ ID NO: 727424 - RNA, 19 nt, Human
cagaggaggcgccaagagc

SEQ ID NO: 727425 - RNA, 19 nt, Human
cagaguggggagggggaag

SEQ ID NO: 727426 - RNA, 21 nt, Human
cagcacacugcccagaaagcc

SEQ ID NO: 727427 - RNA, 22 nt, Human
cagcagcugcugguccaggugc

SEQ ID NO: 727428 - RNA, 23 nt, Human
cagcuaaggcccagugagaaauc

SEQ ID NO: 727429 - RNA, 19 nt, Human
cagcuccaccaccagggag

SEQ ID NO: 727430 - RNA, 23 nt, Human
caggaacugagaacucagcacac

SEQ ID NO: 727431 - RNA, 19 nt, Human
cagggcaggaggggagcug

SEQ ID NO: 727432 - RNA, 21 nt, Human
caguggcgggcugaagggcuc

SEQ ID NO: 727433 - RNA, 19 nt, Human
caguuguacacgugcgcug

SEQ ID NO: 727434 - RNA, 18 nt, Human
caucgcaggccgcggggg

SEQ ID NO: 727435 - RNA, 19 nt, Human
caucgcggugauagcgggg

SEQ ID NO: 727436 - RNA, 22 nt, Human
cauguccccaccagauuaacua

SEQ ID NO: 727437 - RNA, 24 nt, Human
ccaaaaacaaaagacuaggaaaca

SEQ ID NO: 727438 - RNA, 19 nt, Human
ccacacccacugcugcagg

SEQ ID NO: 727439 - RNA, 18 nt, Human
ccacccgacccagccaca

SEQ ID NO: 727440 - RNA, 19 nt, Human
ccacccgacccagccacag

SEQ ID NO: 727441 - RNA, 22 nt, Human
ccaccgugggccuugccuccuc

SEQ ID NO: 727442 - RNA, 23 nt, Human
ccagccuuuccugcggccccggc

SEQ ID NO: 727443 - RNA, 18 nt, Human
ccaggacacccccgacgc

SEQ ID NO: 727444 - RNA, 23 nt, Human
ccaggggcagggccguguuggca

SEQ ID NO: 727445 - RNA, 23 nt, Human
cccacaccacgcuggugacgagg

SEQ ID NO: 727446 - RNA, 22 nt, Human
cccacacccacugcugcaggcg

SEQ ID NO: 727447 - RNA, 19 nt, Human
cccacagagcccacgccca

SEQ ID NO: 727448 - RNA, 21 nt, Human
cccacagagcccacgcccacc

SEQ ID NO: 727449 - RNA, 21 nt, Human
cccaccgcgccucucccucca

SEQ ID NO: 727450 - RNA, 24 nt, Human
cccagcccugccccgcaggaaggc

SEQ ID NO: 727451 - RNA, 20 nt, Human
cccaggaagguggcggggcu

SEQ ID NO: 727452 - RNA, 23 nt, Human
cccaggcagaggaggcgccaaga

SEQ ID NO: 727453 - RNA, 20 nt, Human
cccccacacccacugcugca

SEQ ID NO: 727454 - RNA, 21 nt, Human
ccccggcucagcggcccuggg

SEQ ID NO: 727455 - RNA, 19 nt, Human
cccgugcccugcuccaaag

SEQ ID NO: 727456 - RNA, 18 nt, Human
cccuccacaccuccccgc

SEQ ID NO: 727457 - RNA, 23 nt, Human
cccuccacaccuccccgcaagcu

SEQ ID NO: 727458 - RNA, 22 nt, Human
cccugcuccaaaggcacuccuc

SEQ ID NO: 727459 - RNA, 23 nt, Human
cccugggcuggggucaugcccuc

SEQ ID NO: 727460 - RNA, 23 nt, Human
cccuuuucccagcugccuccugg

SEQ ID NO: 727461 - RNA, 19 nt, Human
ccgauggcccacaccacgc

SEQ ID NO: 727462 - RNA, 21 nt, Human
ccgccaccagacgcgcacgaa

SEQ ID NO: 727463 - RNA, 22 nt, Human
ccggcucagcggcccugggcug

SEQ ID NO: 727464 - RNA, 18 nt, Human
ccggcuccggccuuggcc

SEQ ID NO: 727465 - RNA, 18 nt, Human
ccguguuggcaucgcggu

SEQ ID NO: 727466 - RNA, 22 nt, Human
ccuaugaccccauccccaucca

SEQ ID NO: 727467 - RNA, 21 nt, Human
ccuccacaccuccccgcaagc

SEQ ID NO: 727468 - RNA, 26 nt, Human
ccuccaggacuggcagcagcugccag

SEQ ID NO: 727469 - RNA, 22 nt, Human
ccuccagggcuucgaagaacuu

SEQ ID NO: 727470 - RNA, 20 nt, Human
ccuccucucccaggacuccc

SEQ ID NO: 727471 - RNA, 23 nt, Human
ccucggaaacuccaggagcugca

SEQ ID NO: 727472 - RNA, 18 nt, Human
ccucucccuccacaccuc

SEQ ID NO: 727473 - RNA, 21 nt, Human
ccucucccuccacaccucccc

SEQ ID NO: 727474 - RNA, 19 nt, Human
ccugcauaggccauggcgc

SEQ ID NO: 727475 - RNA, 18 nt, Human
ccugccccgcaggaaggc

SEQ ID NO: 727476 - RNA, 20 nt, Human
cgacccagccacagggccuc

SEQ ID NO: 727477 - RNA, 19 nt, Human
cgcaagcaccgcgugcagc

SEQ ID NO: 727478 - RNA, 22 nt, Human
cgcaccacccagagcggugacc

SEQ ID NO: 727479 - RNA, 20 nt, Human
cgcugcccaggaacuccagc

SEQ ID NO: 727480 - RNA, 22 nt, Human
cgcugcugcacaggcugcggac

SEQ ID NO: 727481 - RNA, 21 nt, Human
cggcugaccgugcgcagggcc

SEQ ID NO: 727482 - RNA, 24 nt, Human
cggggcgugaggcucucggggcgg

SEQ ID NO: 727483 - RNA, 19 nt, Human
cguggagcugguggcugga

SEQ ID NO: 727484 - RNA, 26 nt, Human
cuaggaaacagacccagcagccucca

SEQ ID NO: 727485 - RNA, 18 nt, Human
cuccaggagcugcagccc

SEQ ID NO: 727486 - RNA, 19 nt, Human
cucccacagugcaguggcg

SEQ ID NO: 727487 - RNA, 19 nt, Human
cucccgcgcccuccugagc

SEQ ID NO: 727488 - RNA, 18 nt, Human
cucccugggcugggguca

SEQ ID NO: 727489 - RNA, 23 nt, Human
cucccuggggccuucccuccgaa

SEQ ID NO: 727490 - RNA, 22 nt, Human
cucugugcagaccuaugacccc

SEQ ID NO: 727491 - RNA, 20 nt, Human
cugcccaggaacuccagcag

SEQ ID NO: 727492 - RNA, 19 nt, Human
cugggggggacaccugggc

SEQ ID NO: 727493 - RNA, 24 nt, Human
cuguggggcaggcgagcgcuuccu

SEQ ID NO: 727494 - RNA, 18 nt, Human
gaaccucggaaacuccag

SEQ ID NO: 727495 - RNA, 21 nt, Human
gaagguugcuccucccugggc

SEQ ID NO: 727496 - RNA, 24 nt, Human
gacacaaagguucuccaugucccc

SEQ ID NO: 727497 - RNA, 21 nt, Human
gagcaaaaggcucggagacaa

SEQ ID NO: 727498 - RNA, 20 nt, Human
gagccagaguggggaggggg

SEQ ID NO: 727499 - RNA, 21 nt, Human
gagccugggggcggggcguga

SEQ ID NO: 727500 - RNA, 24 nt, Human
gagcuggugagcuuugcccuuuuc

SEQ ID NO: 727501 - RNA, 20 nt, Human
gagggggaagaguuugagcc

SEQ ID NO: 727502 - RNA, 20 nt, Human
gaguggggagggggaagagu

SEQ ID NO: 727503 - RNA, 25 nt, Human
gcagccccacgcucucugagcuucg

SEQ ID NO: 727504 - RNA, 25 nt, Human
gccagcgccagccuuuccugcggcc

SEQ ID NO: 727505 - RNA, 18 nt, Human
gccagggguucccauccc

SEQ ID NO: 727506 - RNA, 18 nt, Human
gcccagacaccuccccuu

SEQ ID NO: 727507 - RNA, 21 nt, Human
gcccagacaccuccccuucgc

SEQ ID NO: 727508 - RNA, 21 nt, Human
gccggaggggaggugggcggg

SEQ ID NO: 727509 - RNA, 19 nt, Human
gccucagagaaacuguucu

SEQ ID NO: 727510 - RNA, 19 nt, Human
gccucccucuccaccagcc

SEQ ID NO: 727511 - RNA, 18 nt, Human
gcgggcugcaggucccca

SEQ ID NO: 727512 - RNA, 21 nt, Human
gcuagacacaaagguucucca

SEQ ID NO: 727513 - RNA, 19 nt, Human
gcuagauacagagugucua

SEQ ID NO: 727514 - RNA, 22 nt, Human
gcugguggcuggacugugagcc

SEQ ID NO: 727515 - RNA, 22 nt, Human
ggaaacagacccagcagccucc

SEQ ID NO: 727516 - RNA, 23 nt, Human
ggaaacuccaggagcugcagccc

SEQ ID NO: 727517 - RNA, 22 nt, Human
ggaacgcgacccaaggcccagg

SEQ ID NO: 727518 - RNA, 19 nt, Human
ggaggggaggugggcgggg

SEQ ID NO: 727519 - RNA, 18 nt, Human
ggcaggaggggagcugcg

SEQ ID NO: 727520 - RNA, 18 nt, Human
ggcagggcagcagagggg

SEQ ID NO: 727521 - RNA, 19 nt, Human
ggccagcccugaaaggggc

SEQ ID NO: 727522 - RNA, 18 nt, Human
ggccauggcgcuugcaac

SEQ ID NO: 727523 - RNA, 20 nt, Human
ggccauggcgcuugcaaccc

SEQ ID NO: 727524 - RNA, 19 nt, Human
ggccccacccacauccugc

SEQ ID NO: 727525 - RNA, 25 nt, Human
ggccggaggggaggugggcggggcc

SEQ ID NO: 727526 - RNA, 18 nt, Human
ggcggcggcgcccccugg

SEQ ID NO: 727527 - RNA, 21 nt, Human
ggcucccacagugcaguggcg

SEQ ID NO: 727528 - RNA, 21 nt, Human
ggcucggagacaaagcccaga

SEQ ID NO: 727529 - RNA, 25 nt, Human
gggaacucgcgccgcugccuuccgg

SEQ ID NO: 727530 - RNA, 19 nt, Human
gggaagaguuugagccugg

SEQ ID NO: 727531 - RNA, 20 nt, Human
gggaggccagcuucgucagc

SEQ ID NO: 727532 - RNA, 18 nt, Human
gggccagccccgcguguc

SEQ ID NO: 727533 - RNA, 20 nt, Human
gggccgaggccggaggggag

SEQ ID NO: 727534 - RNA, 24 nt, Human
gggcggcacugggugaccucgaau

SEQ ID NO: 727535 - RNA, 21 nt, Human
gggcggggccgaggccggagg

SEQ ID NO: 727536 - RNA, 19 nt, Human
ggggauugggggcggggcc

SEQ ID NO: 727537 - RNA, 21 nt, Human
ggggggacaccugggcagggc

SEQ ID NO: 727538 - RNA, 21 nt, Human
ggguucccaucccugguccuc

SEQ ID NO: 727539 - RNA, 18 nt, Human
gguggcggggcuggggcc

SEQ ID NO: 727540 - RNA, 20 nt, Human
gguucccaccgcgccucucc

SEQ ID NO: 727541 - RNA, 19 nt, Human
gucucuugccagcuccacc

SEQ ID NO: 727542 - RNA, 22 nt, Human
gugagcaggggggccagccccg

SEQ ID NO: 727543 - RNA, 23 nt, Human
gugcgacacagcugugccuuggu

SEQ ID NO: 727544 - RNA, 19 nt, Human
uaagccccucacugcccag

SEQ ID NO: 727545 - RNA, 21 nt, Human
uagcaagcuggcugcccaggc

SEQ ID NO: 727546 - RNA, 19 nt, Human
uagcagcaguggcacgccg

SEQ ID NO: 727547 - RNA, 18 nt, Human
uaggcaucuucagcaggg

SEQ ID NO: 727548 - RNA, 21 nt, Human
ucacuggggagaaggcuggca

SEQ ID NO: 727549 - RNA, 18 nt, Human
ucagcagcucuguggccc

SEQ ID NO: 727550 - RNA, 19 nt, Human
ucagguggcucccuggggc

SEQ ID NO: 727551 - RNA, 25 nt, Human
uccaaaaacaaaagacuaggaaaca

SEQ ID NO: 727552 - RNA, 19 nt, Human
uccaaguccccaccagacu

SEQ ID NO: 727553 - RNA, 21 nt, Human
uccccagggugcagggcaggu

SEQ ID NO: 727554 - RNA, 20 nt, Human
ucccgcgcccuccugagcuc

SEQ ID NO: 727555 - RNA, 21 nt, Human
ucccuccacaccuccccgcaa

SEQ ID NO: 727556 - RNA, 20 nt, Human
ucccugggcuggggucaugc

SEQ ID NO: 727557 - RNA, 19 nt, Human
uccgaggcccuguggccau

SEQ ID NO: 727558 - RNA, 22 nt, Human
uccgaggcccuguggccaugag

SEQ ID NO: 727559 - RNA, 20 nt, Human
uccggagggugggaccacag

SEQ ID NO: 727560 - RNA, 23 nt, Human
uccgugcugggugugagcacaaa

SEQ ID NO: 727561 - RNA, 19 nt, Human
ucgagcacagcagcugcug

SEQ ID NO: 727562 - RNA, 18 nt, Human
ucgccgauggcccacacc

SEQ ID NO: 727563 - RNA, 19 nt, Human
ucgcgccgcugccuuccgg

SEQ ID NO: 727564 - RNA, 19 nt, Human
ucuccaaguccccaccaga

SEQ ID NO: 727565 - RNA, 22 nt, Human
ucucccaggacucccgcgcccu

SEQ ID NO: 727566 - RNA, 22 nt, Human
ucucccuccacaccuccccgca

SEQ ID NO: 727567 - RNA, 24 nt, Human
ucugcuccacggugcaccuccgau

SEQ ID NO: 727568 - RNA, 24 nt, Human
ucuggccccacccacauccugcug

SEQ ID NO: 727569 - RNA, 24 nt, Human
ugacaaaaagguuuuccaaguccc

SEQ ID NO: 727570 - RNA, 21 nt, Human
ugaccacacccgggaacucgc

SEQ ID NO: 727571 - RNA, 20 nt, Human
ugaccugguuucuguagcag

SEQ ID NO: 727572 - RNA, 24 nt, Human
ugagaacucagcacacugcccaga

SEQ ID NO: 727573 - RNA, 20 nt, Human
ugagcaggggggccagcccc

SEQ ID NO: 727574 - RNA, 25 nt, Human
ugagcuagacacaaagguucuccaa

SEQ ID NO: 727575 - RNA, 19 nt, Human
ugcaaagagcgaacaaaca

SEQ ID NO: 727576 - RNA, 23 nt, Human
ugcacaaaugaccugguuucugu

SEQ ID NO: 727577 - RNA, 21 nt, Human
ugcaccgaagucccuggccac

SEQ ID NO: 727578 - RNA, 18 nt, Human
ugcaguggcgggcugaag

SEQ ID NO: 727579 - RNA, 22 nt, Human
ugccagcaggcugucacuucuc

SEQ ID NO: 727580 - RNA, 24 nt, Human
ugcccaggaacuccagcaggucuc

SEQ ID NO: 727581 - RNA, 20 nt, Human
ugcccugagcagguggcaac

SEQ ID NO: 727582 - RNA, 18 nt, Human
ugccugggagcaaaaggc

SEQ ID NO: 727583 - RNA, 20 nt, Human
ugccugggagcaaaaggcuc

SEQ ID NO: 727584 - RNA, 22 nt, Human
ugcggggcccacagagcccacg

SEQ ID NO: 727585 - RNA, 25 nt, Human
ugcugcacaggcugcggacuuagca

SEQ ID NO: 727586 - RNA, 30 nt, Human
ugcugccgacggaagcgccugccagcgccc

SEQ ID NO: 727587 - RNA, 25 nt, Human
uggaaacacaaacacagugcugccg

SEQ ID NO: 727588 - RNA, 19 nt, Human
uggaggccaccugaagguu

SEQ ID NO: 727589 - RNA, 22 nt, Human
uggcaacacucguuggggaggc

SEQ ID NO: 727590 - RNA, 18 nt, Human
uggcaccagcgcuggccu

SEQ ID NO: 727591 - RNA, 19 nt, Human
uggcacgccgggcugagcc

SEQ ID NO: 727592 - RNA, 19 nt, Human
uggcccggguacggauggc

SEQ ID NO: 727593 - RNA, 19 nt, Human
uggcggggcuagccggcgg

SEQ ID NO: 727594 - RNA, 23 nt, Human
uggcuggacugugagccaggguc

SEQ ID NO: 727595 - RNA, 18 nt, Human
uggcuuccgcgcccuccu

SEQ ID NO: 727596 - RNA, 21 nt, Human
ugggcagggcagcagaggggc

SEQ ID NO: 727597 - RNA, 19 nt, Human
uggggagaaggcuggcacc

SEQ ID NO: 727598 - RNA, 21 nt, Human
ugggggauugggggcggggcc

SEQ ID NO: 727599 - RNA, 20 nt, Human
uggggucaugcccuccgagg

SEQ ID NO: 727600 - RNA, 23 nt, Human
ugggugaccucgaauagcagagc

SEQ ID NO: 727601 - RNA, 27 nt, Human
ugguagguguaugcugcacccuccucu

SEQ ID NO: 727602 - RNA, 24 nt, Human
uguaaaucugaaaaacuauucuaa

SEQ ID NO: 727603 - RNA, 22 nt, Human
ugucacugcuggcucgggcagc

SEQ ID NO: 727604 - RNA, 18 nt, Human
uguguuuacaaaccuuga

SEQ ID NO: 727605 - RNA, 21 nt, Human
uguguuuacaaaccuugagcu

SEQ ID NO: 727606 - RNA, 21 nt, Human
uucaagggcaucaaaaggggc

SEQ ID NO: 727607 - RNA, 18 nt, Human
uucuugcccaucaacugu

SEQ ID NO: 727608 - RNA, 22 nt, Human
uugcaacccucccccggucccc

SEQ ID NO: 727609 - RNA, 20 nt, Human
uugcuccucccugggcuggg

SEQ ID NO: 727610 - RNA, 20 nt, Human
aaaaauguggcauccuuauc

SEQ ID NO: 727611 - RNA, 23 nt, Human
aaaaccccaucaaaaaacaaaag

SEQ ID NO: 727612 - RNA, 26 nt, Human
aaaagcagaagaaagagguuuaaacc

SEQ ID NO: 727613 - RNA, 23 nt, Human
aaacacaaauggacaaaaaugaa

SEQ ID NO: 727614 - RNA, 19 nt, Human
aaaccccaucaaaaaacaa

SEQ ID NO: 727615 - RNA, 20 nt, Human
aaaugaaagaaaaucuugcc

SEQ ID NO: 727616 - RNA, 21 nt, Human
aacaagagacaaaauacucac

SEQ ID NO: 727617 - RNA, 24 nt, Human
aaccugugcugauucugaaacaca

SEQ ID NO: 727618 - RNA, 20 nt, Human
aagcauugguuucauuuucu

SEQ ID NO: 727619 - RNA, 19 nt, Human
aauaucuacuaacccaggc

SEQ ID NO: 727620 - RNA, 18 nt, Human
accagucuucagcauaca

SEQ ID NO: 727621 - RNA, 23 nt, Human
acucagcuuauuagaauuacauu

SEQ ID NO: 727622 - RNA, 18 nt, Human
agagcuccuggagcagca

SEQ ID NO: 727623 - RNA, 19 nt, Human
agagucagauuucaaaauc

SEQ ID NO: 727624 - RNA, 20 nt, Human
aggaaaaagcagaagaaagg

SEQ ID NO: 727625 - RNA, 23 nt, Human
aggaagugugccuuaagaaaaug

SEQ ID NO: 727626 - RNA, 24 nt, Human
aguaaauaccaaauuaucauacaa

SEQ ID NO: 727627 - RNA, 24 nt, Human
aguggguagugguggugaagagga

SEQ ID NO: 727628 - RNA, 18 nt, Human
agugguggugaagaggau

SEQ ID NO: 727629 - RNA, 18 nt, Human
auaugaaaaguaugcccc

SEQ ID NO: 727630 - RNA, 19 nt, Human
auauuaaagagucacucag

SEQ ID NO: 727631 - RNA, 22 nt, Human
augaaagaaaaucuugccuucu

SEQ ID NO: 727632 - RNA, 18 nt, Human
auuuauagcuuuuucccc

SEQ ID NO: 727633 - RNA, 22 nt, Human
caacugaauugaacugggcuga

SEQ ID NO: 727634 - RNA, 18 nt, Human
caccuuaaaaaagagcac

SEQ ID NO: 727635 - RNA, 25 nt, Human
cacuguguaaccaagauccgcagcu

SEQ ID NO: 727636 - RNA, 20 nt, Human
cacuguguggcugcauaggc

SEQ ID NO: 727637 - RNA, 20 nt, Human
cacuucagaaaaagaacagg

SEQ ID NO: 727638 - RNA, 20 nt, Human
cagaaaaauggaaggcaaaa

SEQ ID NO: 727639 - RNA, 21 nt, Human
cagaagaaagagguuuaaacc

SEQ ID NO: 727640 - RNA, 21 nt, Human
cagcagguccuuucccuguuu

SEQ ID NO: 727641 - RNA, 21 nt, Human
cagugagucuguaaaaggcuc

SEQ ID NO: 727642 - RNA, 22 nt, Human
cauacaugaaauucuacuuccc

SEQ ID NO: 727643 - RNA, 21 nt, Human
cccugaaugaaggauaucaug

SEQ ID NO: 727644 - RNA, 19 nt, Human
ccucuggaaagcauugguu

SEQ ID NO: 727645 - RNA, 23 nt, Human
ccucuucccuuuucagcagcagg

SEQ ID NO: 727646 - RNA, 21 nt, Human
cuaaaugccacaaaaaucaug

SEQ ID NO: 727647 - RNA, 23 nt, Human
cuaaaugccacaaaaaucauguc

SEQ ID NO: 727648 - RNA, 23 nt, Human
cuaacauguaggagccuuugacc

SEQ ID NO: 727649 - RNA, 22 nt, Human
cuagauggguaugguaucauaa

SEQ ID NO: 727650 - RNA, 21 nt, Human
cuccuggagcagcaugagugc

SEQ ID NO: 727651 - RNA, 19 nt, Human
cugaaugaaggauaucaug

SEQ ID NO: 727652 - RNA, 21 nt, Human
cuguccuucagggcugaugga

SEQ ID NO: 727653 - RNA, 19 nt, Human
cuugcaucuaaauuccaaa

SEQ ID NO: 727654 - RNA, 19 nt, Human
cuuucuaaauuguuuucag

SEQ ID NO: 727655 - RNA, 22 nt, Human
gaaaucauaauacaagaaacug

SEQ ID NO: 727656 - RNA, 24 nt, Human
gaacaauguuuauggaaaaguucu

SEQ ID NO: 727657 - RNA, 23 nt, Human
gagugugugugugugugugugug

SEQ ID NO: 727658 - RNA, 19 nt, Human
gauuaauuauuuuucuggu

SEQ ID NO: 727659 - RNA, 18 nt, Human
gcagagaagagcuccugg

SEQ ID NO: 727660 - RNA, 19 nt, Human
gcagcaugagugcauuuac

SEQ ID NO: 727661 - RNA, 19 nt, Human
gccuuaacauguuuucagu

SEQ ID NO: 727662 - RNA, 22 nt, Human
gcuacagaaaugaauauaaacg

SEQ ID NO: 727663 - RNA, 19 nt, Human
gcucuuugagguuugaaga

SEQ ID NO: 727664 - RNA, 20 nt, Human
gcucuuugagguuugaagau

SEQ ID NO: 727665 - RNA, 22 nt, Human
gggaagaaaaaauaugcccuga

SEQ ID NO: 727666 - RNA, 21 nt, Human
gggaaguagggcgcugugcuc

SEQ ID NO: 727667 - RNA, 19 nt, Human
guaaaaauuagauauguau

SEQ ID NO: 727668 - RNA, 24 nt, Human
gugugugugcuuuuaaauuggagg

SEQ ID NO: 727669 - RNA, 18 nt, Human
gugugugugugugugugc

SEQ ID NO: 727670 - RNA, 22 nt, Human
gugugugugugugugugcuuuu

SEQ ID NO: 727671 - RNA, 21 nt, Human
gugugugugugugugugugug

SEQ ID NO: 727672 - RNA, 21 nt, Human
gugugugugugugugugugug

SEQ ID NO: 727673 - RNA, 21 nt, Human
guuagacucaacgcagugagu

SEQ ID NO: 727674 - RNA, 24 nt, Human
uaaaacaguugucuaaaugccaca

SEQ ID NO: 727675 - RNA, 22 nt, Human
uaaaaccccaucaaaaaacaaa

SEQ ID NO: 727676 - RNA, 21 nt, Human
uaaaaucaaguuagugcuaua

SEQ ID NO: 727677 - RNA, 22 nt, Human
uacccaucucuuaguauuaaag

SEQ ID NO: 727678 - RNA, 19 nt, Human
uaggagccuuugaccaguu

SEQ ID NO: 727679 - RNA, 19 nt, Human
uaggauaucccucuggaaa

SEQ ID NO: 727680 - RNA, 23 nt, Human
uaguugugguacaugggauggag

SEQ ID NO: 727681 - RNA, 22 nt, Human
uaucuccaaaauaucuucuaaa

SEQ ID NO: 727682 - RNA, 19 nt, Human
uaugaaaaguaugccccca

SEQ ID NO: 727683 - RNA, 18 nt, Human
uauuaaagagucacucag

SEQ ID NO: 727684 - RNA, 24 nt, Human
ucaaagcuucagucucauuuccgc

SEQ ID NO: 727685 - RNA, 20 nt, Human
ucaauaagauaugaaaagua

SEQ ID NO: 727686 - RNA, 19 nt, Human
ucaggaaaaagcagaagaa

SEQ ID NO: 727687 - RNA, 23 nt, Human
ucagucaauuccauuuauugaau

SEQ ID NO: 727688 - RNA, 21 nt, Human
ucccuaaaucaguuuugaaua

SEQ ID NO: 727689 - RNA, 21 nt, Human
ucccuguuuggugcagauugu

SEQ ID NO: 727690 - RNA, 25 nt, Human
ucccuguuuggugcagauuguguau

SEQ ID NO: 727691 - RNA, 18 nt, Human
uccgcagcguugcuguga

SEQ ID NO: 727692 - RNA, 20 nt, Human
uccgcagcguugcugugaug

SEQ ID NO: 727693 - RNA, 23 nt, Human
ucuaacauguaggagccuuugac

SEQ ID NO: 727694 - RNA, 19 nt, Human
ucucuuggucuuaacuugu

SEQ ID NO: 727695 - RNA, 22 nt, Human
ucugagcacauuggaggcugca

SEQ ID NO: 727696 - RNA, 21 nt, Human
ucugccuuuccuuuuaauccc

SEQ ID NO: 727697 - RNA, 18 nt, Human
ucugugucccaggcuuuc

SEQ ID NO: 727698 - RNA, 21 nt, Human
ugaaugaguagcuugcaucua

SEQ ID NO: 727699 - RNA, 22 nt, Human
ugagaccuuuucacagucacuu

SEQ ID NO: 727700 - RNA, 24 nt, Human
ugagaccuuuucacagucacuugg

SEQ ID NO: 727701 - RNA, 20 nt, Human
ugagauucaucucaguggug

SEQ ID NO: 727702 - RNA, 24 nt, Human
ugagugcauuuacugaaaagcuuu

SEQ ID NO: 727703 - RNA, 23 nt, Human
ugauacagaaauuaacuuaggca

SEQ ID NO: 727704 - RNA, 26 nt, Human
ugcucaggacacaguuguguugugac

SEQ ID NO: 727705 - RNA, 21 nt, Human
uggaaagauggagucuagcuc

SEQ ID NO: 727706 - RNA, 19 nt, Human
uggaaucuugugugcucag

SEQ ID NO: 727707 - RNA, 21 nt, Human
uggggaaaagauaacuugaaa

SEQ ID NO: 727708 - RNA, 22 nt, Human
uguaacuccagcuaaccugaga

SEQ ID NO: 727709 - RNA, 22 nt, Human
uguauaaucauuguuggcugcc

SEQ ID NO: 727710 - RNA, 19 nt, Human
ugucuguggggaaguaggg

SEQ ID NO: 727711 - RNA, 22 nt, Human
ugugaccaagcugucugucacc

SEQ ID NO: 727712 - RNA, 23 nt, Human
ugugugugugugcuuuuaaauug

SEQ ID NO: 727713 - RNA, 18 nt, Human
ugugugugugugugugug

SEQ ID NO: 727714 - RNA, 18 nt, Human
ugugugugugugugugug

SEQ ID NO: 727715 - RNA, 18 nt, Human
ugugugugugugugugug

SEQ ID NO: 727716 - RNA, 18 nt, Human
ugugugugugugugugug

SEQ ID NO: 727717 - RNA, 18 nt, Human
ugugugugugugugugug

SEQ ID NO: 727718 - RNA, 18 nt, Human
ugugugugugugugugug

SEQ ID NO: 727719 - RNA, 18 nt, Human
ugugugugugugugugug

SEQ ID NO: 727720 - RNA, 21 nt, Human
ugugugugugugugugugugu

SEQ ID NO: 727721 - RNA, 21 nt, Human
ugugugugugugugugugugu

SEQ ID NO: 727722 - RNA, 21 nt, Human
ugugugugugugugugugugu

SEQ ID NO: 727723 - RNA, 21 nt, Human
ugugugugugugugugugugu

SEQ ID NO: 727724 - RNA, 21 nt, Human
ugugugugugugugugugugu

SEQ ID NO: 727725 - RNA, 21 nt, Human
ugugugugugugugugugugu

SEQ ID NO: 727726 - RNA, 21 nt, Human
ugugugugugugugugugugu

SEQ ID NO: 727727 - RNA, 21 nt, Human
ugugugugugugugugugugu

SEQ ID NO: 727728 - RNA, 21 nt, Human
ugugugugugugugugugugu

SEQ ID NO: 727729 - RNA, 21 nt, Human
ugugugugugugugugugugu

SEQ ID NO: 727730 - RNA, 21 nt, Human
ugugugugugugugugugugu

SEQ ID NO: 727731 - RNA, 21 nt, Human
ugugugugugugugugugugu

SEQ ID NO: 727732 - RNA, 22 nt, Human
ugugugugugugugugugugug

SEQ ID NO: 727733 - RNA, 22 nt, Human
ugugugugugugugugugugug

SEQ ID NO: 727734 - RNA, 22 nt, Human
ugugugugugugugugugugug

SEQ ID NO: 727735 - RNA, 22 nt, Human
ugugugugugugugugugugug

SEQ ID NO: 727736 - RNA, 18 nt, Human
uguuggggaaaagauaac

SEQ ID NO: 727737 - RNA, 24 nt, Human
uuaaaaauagaaaaaaaauggagu

SEQ ID NO: 727738 - RNA, 23 nt, Human
uuaaauugacucaguuugucuug

SEQ ID NO: 727739 - RNA, 21 nt, Human
uuagacuuuccaacaggagug

SEQ ID NO: 727740 - RNA, 18 nt, Human
uuaguacagauuuuuggc

SEQ ID NO: 727741 - RNA, 19 nt, Human
uuaguggcguugggaaguu

SEQ ID NO: 727742 - RNA, 22 nt, Human
uuaucauacaagagaacuuuac

SEQ ID NO: 727743 - RNA, 22 nt, Human
uucaguagaaaaaaauaguaua

SEQ ID NO: 727744 - RNA, 23 nt, Human
uuccaaauauuuaauagguuuuc

SEQ ID NO: 727745 - RNA, 19 nt, Human
uuccuguuuucuguguccc

SEQ ID NO: 727746 - RNA, 20 nt, Human
uucugugucccaggcuuucc

SEQ ID NO: 727747 - RNA, 18 nt, Human
uugcuuuuugaugcuggc

SEQ ID NO: 727748 - RNA, 22 nt, Human
uuggcugccuuguaacuccagc

SEQ ID NO: 727749 - RNA, 19 nt, Human
uuggugacuagcauuagaa

SEQ ID NO: 727750 - RNA, 19 nt, Human
uugugauuaaaucuuacug

SEQ ID NO: 727751 - RNA, 18 nt, Human
uuuccuguuuucuguguc

SEQ ID NO: 727752 - RNA, 18 nt, Human
uuuccuguuuucuguguc

SEQ ID NO: 727753 - RNA, 24 nt, Human
uuucugugucccaggcuuuccaag

SEQ ID NO: 727754 - RNA, 22 nt, Human
uuuuauuggaaagauggagucu

SEQ ID NO: 727755 - RNA, 21 nt, Human
aaaaaaaacugacuuaauaca

SEQ ID NO: 727756 - RNA, 20 nt, Human
aaaaagaagacauggucaaa

SEQ ID NO: 727757 - RNA, 23 nt, Human
aaaacauucccaguucccacuga

SEQ ID NO: 727758 - RNA, 25 nt, Human
aaaaguaucaucaacaaaaaucaag

SEQ ID NO: 727759 - RNA, 22 nt, Human
aaacaagaccaauggcaaccuc

SEQ ID NO: 727760 - RNA, 23 nt, Human
aaagcgcaucguagaaaccaaga

SEQ ID NO: 727761 - RNA, 18 nt, Human
aaccucauuuucuuaccc

SEQ ID NO: 727762 - RNA, 20 nt, Human
aacggagaucuguucaaagc

SEQ ID NO: 727763 - RNA, 23 nt, Human
aagaagacauggucaaaugaaau

SEQ ID NO: 727764 - RNA, 23 nt, Human
aagacauggucaaaugaaaugug

SEQ ID NO: 727765 - RNA, 21 nt, Human
aagagaacauuagcaaagaca

SEQ ID NO: 727766 - RNA, 19 nt, Human
aaggagcccaaaggggaca

SEQ ID NO: 727767 - RNA, 24 nt, Human
aaggagcccaaaggggacaccugc

SEQ ID NO: 727768 - RNA, 18 nt, Human
aaggagggauggauuugg

SEQ ID NO: 727769 - RNA, 24 nt, Human
aaguuuucaccugcuaagaaugug

SEQ ID NO: 727770 - RNA, 24 nt, Human
aauauucuaacauuauauguacau

SEQ ID NO: 727771 - RNA, 20 nt, Human
aaugcaaggcaggaaaggcu

SEQ ID NO: 727772 - RNA, 21 nt, Human
acaacuggggcugcagcucug

SEQ ID NO: 727773 - RNA, 20 nt, Human
acaguaacaaaaguaucauc

SEQ ID NO: 727774 - RNA, 20 nt, Human
accucauuuucuuacccagg

SEQ ID NO: 727775 - RNA, 19 nt, Human
acuggggaaggagagagug

SEQ ID NO: 727776 - RNA, 24 nt, Human
agaaaagcgcaucguagaaaccaa

SEQ ID NO: 727777 - RNA, 18 nt, Human
agagagacuugaaaaacu

SEQ ID NO: 727778 - RNA, 22 nt, Human
agcauccugaaaacaucacaca

SEQ ID NO: 727779 - RNA, 20 nt, Human
aggcaccucugucuauugcu

SEQ ID NO: 727780 - RNA, 21 nt, Human
aggcuuuacauuagcccaaaa

SEQ ID NO: 727781 - RNA, 18 nt, Human
agggaaggagggauggau

SEQ ID NO: 727782 - RNA, 18 nt, Human
auccaaguugcauuggaa

SEQ ID NO: 727783 - RNA, 22 nt, Human
augaaacauugcauagcacaga

SEQ ID NO: 727784 - RNA, 24 nt, Human
caagagaacauuagcaaagacacc

SEQ ID NO: 727785 - RNA, 19 nt, Human
caccagcuaaaaacauucc

SEQ ID NO: 727786 - RNA, 20 nt, Human
cagaaccagaacguucagcu

SEQ ID NO: 727787 - RNA, 23 nt, Human
cagaccuggacucuaaaagcuaa

SEQ ID NO: 727788 - RNA, 20 nt, Human
cagagugacugcuccgaccc

SEQ ID NO: 727789 - RNA, 19 nt, Human
cagauaaguugaguccaag

SEQ ID NO: 727790 - RNA, 18 nt, Human
cagauaauaugccaggga

SEQ ID NO: 727791 - RNA, 19 nt, Human
cagauaauaugccagggac

SEQ ID NO: 727792 - RNA, 18 nt, Human
cagcgcccgugcccgugc

SEQ ID NO: 727793 - RNA, 23 nt, Human
cagcuuaaucacagcuauacauc

SEQ ID NO: 727794 - RNA, 20 nt, Human
cauuucaccacuuuuguacc

SEQ ID NO: 727795 - RNA, 21 nt, Human
ccaaaaaauuuagaaagacaa

SEQ ID NO: 727796 - RNA, 19 nt, Human
ccaagccagguggagcccc

SEQ ID NO: 727797 - RNA, 24 nt, Human
ccaccagcuaaaaacauucccagu

SEQ ID NO: 727798 - RNA, 20 nt, Human
ccccaaucccauugaccaag

SEQ ID NO: 727799 - RNA, 23 nt, Human
ccccggaccgcgaggggagccuc

SEQ ID NO: 727800 - RNA, 22 nt, Human
cccgugcccgugcgggucucug

SEQ ID NO: 727801 - RNA, 21 nt, Human
cccugauuguucucaucuucc

SEQ ID NO: 727802 - RNA, 19 nt, Human
ccucaguuaaaaagggcuc

SEQ ID NO: 727803 - RNA, 19 nt, Human
ccucauuuucuuacccaga

SEQ ID NO: 727804 - RNA, 22 nt, Human
ccuccagcgcagcgcccgugcc

SEQ ID NO: 727805 - RNA, 19 nt, Human
ccuucuccguggccauuuc

SEQ ID NO: 727806 - RNA, 21 nt, Human
ccuuucaaaauguggaauuaa

SEQ ID NO: 727807 - RNA, 24 nt, Human
cgacccggaaggagaggucaacga

SEQ ID NO: 727808 - RNA, 19 nt, Human
cguagaaaccaagauucug

SEQ ID NO: 727809 - RNA, 19 nt, Human
cucauggaagcccucuucc

SEQ ID NO: 727810 - RNA, 20 nt, Human
cuccugaauguugcagaaaa

SEQ ID NO: 727811 - RNA, 23 nt, Human
cuccugauccaggcgguccacgu

SEQ ID NO: 727812 - RNA, 24 nt, Human
cucuccuacucacaaaagcccuag

SEQ ID NO: 727813 - RNA, 18 nt, Human
cuucuaccaccagcuaaa

SEQ ID NO: 727814 - RNA, 20 nt, Human
gaaggaugugcauggagaag

SEQ ID NO: 727815 - RNA, 20 nt, Human
gagccacaggcccgcuguga

SEQ ID NO: 727816 - RNA, 19 nt, Human
gcuacgguuauucuucccu

SEQ ID NO: 727817 - RNA, 18 nt, Human
gcugggcuuauguaccac

SEQ ID NO: 727818 - RNA, 21 nt, Human
ggaaaagaaauuaacugcaga

SEQ ID NO: 727819 - RNA, 20 nt, Human
ggaaaagacagcuuugaaca

SEQ ID NO: 727820 - RNA, 19 nt, Human
ggccauccaaaaaauuuag

SEQ ID NO: 727821 - RNA, 21 nt, Human
ggcugugagucagauucuuga

SEQ ID NO: 727822 - RNA, 20 nt, Human
gggaaggagagagugaagac

SEQ ID NO: 727823 - RNA, 22 nt, Human
gggacaggcagcggggcgggag

SEQ ID NO: 727824 - RNA, 19 nt, Human
gguagggaaggagggaugg

SEQ ID NO: 727825 - RNA, 18 nt, Human
gguuucuuucuuugaccc

SEQ ID NO: 727826 - RNA, 25 nt, Human
gugaagaucagauaauaugccaggg

SEQ ID NO: 727827 - RNA, 20 nt, Human
uaaaagggccaucuccaagc

SEQ ID NO: 727828 - RNA, 23 nt, Human
uaaaggagcccaaaggggacacc

SEQ ID NO: 727829 - RNA, 25 nt, Human
uaaccagaccuggacucuaaaagcu

SEQ ID NO: 727830 - RNA, 23 nt, Human
uaaggacaguaacaaaaguauca

SEQ ID NO: 727831 - RNA, 18 nt, Human
uagaaagacaagucucag

SEQ ID NO: 727832 - RNA, 21 nt, Human
uagaaagacaagucucagaug

SEQ ID NO: 727833 - RNA, 18 nt, Human
uagggaaagaacagucaa

SEQ ID NO: 727834 - RNA, 26 nt, Human
uagggaaagaacagucaagguugagg

SEQ ID NO: 727835 - RNA, 26 nt, Human
uagugagcacaauuaagaaaccaaac

SEQ ID NO: 727836 - RNA, 18 nt, Human
uauggaaaauuaaggaca

SEQ ID NO: 727837 - RNA, 19 nt, Human
uauuuuagaauacuggucc

SEQ ID NO: 727838 - RNA, 23 nt, Human
ucacagcauauaauuugggauac

SEQ ID NO: 727839 - RNA, 21 nt, Human
uccaaaaaauuuagaaagaca

SEQ ID NO: 727840 - RNA, 19 nt, Human
uccaauuucaguugaacca

SEQ ID NO: 727841 - RNA, 24 nt, Human
uccaggaaccuguucugaacaccg

SEQ ID NO: 727842 - RNA, 24 nt, Human
ucccaaauuucaccaauguauucc

SEQ ID NO: 727843 - RNA, 19 nt, Human
uccccuggcccuuccugug

SEQ ID NO: 727844 - RNA, 19 nt, Human
ucccugaaccuccuugcug

SEQ ID NO: 727845 - RNA, 24 nt, Human
uccuccucuuuccccuccugucug

SEQ ID NO: 727846 - RNA, 23 nt, Human
uccuccugguucaaagaucucau

SEQ ID NO: 727847 - RNA, 24 nt, Human
ucuagaaagacagcaauagggcau

SEQ ID NO: 727848 - RNA, 23 nt, Human
ucuauaaucuggacucagccauc

SEQ ID NO: 727849 - RNA, 21 nt, Human
ucugcuccuuucaauggaauc

SEQ ID NO: 727850 - RNA, 24 nt, Human
ucuguaacuugucuguuacucagc

SEQ ID NO: 727851 - RNA, 24 nt, Human
ucuguucaaagcagcgcaaccacu

SEQ ID NO: 727852 - RNA, 27 nt, Human
ugaaaaaaaacugacuuaauacaucaa

SEQ ID NO: 727853 - RNA, 23 nt, Human
ugaaaacuagcugcuccuccagg

SEQ ID NO: 727854 - RNA, 24 nt, Human
ugaaaacuagcugcuccuccagga

SEQ ID NO: 727855 - RNA, 24 nt, Human
ugaaacauugcauagcacagauuc

SEQ ID NO: 727856 - RNA, 21 nt, Human
ugaaaugcuguuuaaaaucug

SEQ ID NO: 727857 - RNA, 19 nt, Human
ugaagacaagagaguuugc

SEQ ID NO: 727858 - RNA, 21 nt, Human
ugaagaucuccuccugguuca

SEQ ID NO: 727859 - RNA, 18 nt, Human
ugagaccccaguagcuga

SEQ ID NO: 727860 - RNA, 20 nt, Human
ugauaugagaaucuaaaaca

SEQ ID NO: 727861 - RNA, 20 nt, Human
ugauuguucucaucuucccu

SEQ ID NO: 727862 - RNA, 21 nt, Human
ugcaaaaacaguuguaugguu

SEQ ID NO: 727863 - RNA, 24 nt, Human
ugcauagcacagauucucuuccca

SEQ ID NO: 727864 - RNA, 21 nt, Human
ugcauuggaaguucacucauu

SEQ ID NO: 727865 - RNA, 18 nt, Human
ugcuccuuucaauggaau

SEQ ID NO: 727866 - RNA, 19 nt, Human
ugcuguuuaaaaucugcau

SEQ ID NO: 727867 - RNA, 21 nt, Human
uggaaucugugacuguuuggg

SEQ ID NO: 727868 - RNA, 19 nt, Human
uggaccacgcuuugcccuc

SEQ ID NO: 727869 - RNA, 24 nt, Human
uggagccccaaucccauugaccaa

SEQ ID NO: 727870 - RNA, 21 nt, Human
uggcaaccucauuuucuuacc

SEQ ID NO: 727871 - RNA, 19 nt, Human
ugguccauauuucaagcag

SEQ ID NO: 727872 - RNA, 23 nt, Human
uggugaugcaaacaagaccaaug

SEQ ID NO: 727873 - RNA, 20 nt, Human
uuaaaucuagaaagacagca

SEQ ID NO: 727874 - RNA, 22 nt, Human
uuagcccaaaaaagaggggcuu

SEQ ID NO: 727875 - RNA, 21 nt, Human
uuagcccagcagaaaagcugg

SEQ ID NO: 727876 - RNA, 18 nt, Human
uucaagcagaugagaggu

SEQ ID NO: 727877 - RNA, 23 nt, Human
uucaccaauguauuccuuucaaa

SEQ ID NO: 727878 - RNA, 20 nt, Human
uucaguguguuuggacccua

SEQ ID NO: 727879 - RNA, 20 nt, Human
uuccucagucagcuccguuc

SEQ ID NO: 727880 - RNA, 19 nt, Human
uucuaugccuaaaccuuaa

SEQ ID NO: 727881 - RNA, 21 nt, Human
uucuuacccagaauuccuacu

SEQ ID NO: 727882 - RNA, 21 nt, Human
uugcaaaaacaguuguauggu

SEQ ID NO: 727883 - RNA, 18 nt, Human
uugggaaggaugugcaug

SEQ ID NO: 727884 - RNA, 19 nt, Human
uuggggguuucauuuaagg

SEQ ID NO: 727885 - RNA, 19 nt, Human
uuguaugguuccuccucuu

SEQ ID NO: 727886 - RNA, 18 nt, Human
aaacaaaaacaaaagcaa

SEQ ID NO: 727887 - RNA, 21 nt, Human
aaacaaaacaaucucaccaca

SEQ ID NO: 727888 - RNA, 25 nt, Human
aaacaaaagcaaaaucacccgccca

SEQ ID NO: 727889 - RNA, 27 nt, Human
aaacaaacucacaaaacaaaaggaaac

SEQ ID NO: 727890 - RNA, 19 nt, Human
aaaccucucccgaaacaug

SEQ ID NO: 727891 - RNA, 23 nt, Human
aaaggaacugcccgcccagaaau

SEQ ID NO: 727892 - RNA, 22 nt, Human
aaauaauauuaacaugaagaca

SEQ ID NO: 727893 - RNA, 22 nt, Human
aaccccauccacuacccaucuc

SEQ ID NO: 727894 - RNA, 19 nt, Human
aacccggccccuacccagc

SEQ ID NO: 727895 - RNA, 21 nt, Human
aagacacccccaagccugaaa

SEQ ID NO: 727896 - RNA, 21 nt, Human
acaaaacaaaaggaaacaaaa

SEQ ID NO: 727897 - RNA, 22 nt, Human
acaaaacaaaaggaaacaaaac

SEQ ID NO: 727898 - RNA, 18 nt, Human
acaacagaaaccccaucc

SEQ ID NO: 727899 - RNA, 21 nt, Human
acaauugaaaaacacaacccu

SEQ ID NO: 727900 - RNA, 22 nt, Human
acacuaaaccacuaccauuagu

SEQ ID NO: 727901 - RNA, 23 nt, Human
accaaaugaaacgacuuuggcuu

SEQ ID NO: 727902 - RNA, 25 nt, Human
accacuaccauuaguacugcaaucu

SEQ ID NO: 727903 - RNA, 19 nt, Human
acccaaaggugacagagga

SEQ ID NO: 727904 - RNA, 22 nt, Human
acccaggcccccaaacaacccc

SEQ ID NO: 727905 - RNA, 21 nt, Human
accccauccacuacccaucuc

SEQ ID NO: 727906 - RNA, 23 nt, Human
acccccauccccuaccuuccagc

SEQ ID NO: 727907 - RNA, 22 nt, Human
accccccaccccccacccccau

SEQ ID NO: 727908 - RNA, 25 nt, Human
acccucgggaagaccagguuggcuc

SEQ ID NO: 727909 - RNA, 24 nt, Human
acgccacugcaauccagccugagc

SEQ ID NO: 727910 - RNA, 25 nt, Human
acguaaggcuuccagcccugcccag

SEQ ID NO: 727911 - RNA, 18 nt, Human
acugcaauccagccugag

SEQ ID NO: 727912 - RNA, 24 nt, Human
acugcaauccagccugagcaacag

SEQ ID NO: 727913 - RNA, 22 nt, Human
acugcaaucuagcagauuaacu

SEQ ID NO: 727914 - RNA, 24 nt, Human
agaagacacccccaagccugaaag

SEQ ID NO: 727915 - RNA, 19 nt, Human
agaugccagcaaucaaaac

SEQ ID NO: 727916 - RNA, 18 nt, Human
agcaaaggcacaacuggg

SEQ ID NO: 727917 - RNA, 22 nt, Human
agcacaauucacaaauacagcu

SEQ ID NO: 727918 - RNA, 22 nt, Human
aggcagguucuccucacuuccc

SEQ ID NO: 727919 - RNA, 19 nt, Human
aggcccccaaacaaccccu

SEQ ID NO: 727920 - RNA, 21 nt, Human
aggccugggacucccuggucc

SEQ ID NO: 727921 - RNA, 24 nt, Human
aggcugaagugggaggauugcuug

SEQ ID NO: 727922 - RNA, 20 nt, Human
aggcuuccagcccugcccag

SEQ ID NO: 727923 - RNA, 22 nt, Human
agggauccuccaucuucuuggg

SEQ ID NO: 727924 - RNA, 21 nt, Human
aggggguggcuggcgguguug

SEQ ID NO: 727925 - RNA, 19 nt, Human
aggucgaggcugcagugag

SEQ ID NO: 727926 - RNA, 19 nt, Human
auacugcaucuuuaaguaa

SEQ ID NO: 727927 - RNA, 24 nt, Human
aucacgccacugcaauccagccug

SEQ ID NO: 727928 - RNA, 19 nt, Human
auggugcacaggauaucuc

SEQ ID NO: 727929 - RNA, 19 nt, Human
auguaauccauuggugaag

SEQ ID NO: 727930 - RNA, 24 nt, Human
auugcuugagcccagggaggucga

SEQ ID NO: 727931 - RNA, 20 nt, Human
caaaagcaaaaucacccgcc

SEQ ID NO: 727932 - RNA, 23 nt, Human
caaacucacaaaacaaaaggaaa

SEQ ID NO: 727933 - RNA, 22 nt, Human
caacccccaguccagggacccu

SEQ ID NO: 727934 - RNA, 25 nt, Human
caagauacaacagaaaccccaucca

SEQ ID NO: 727935 - RNA, 21 nt, Human
caaggccaagacagugacagu

SEQ ID NO: 727936 - RNA, 23 nt, Human
caauccagccugagcaacagagc

SEQ ID NO: 727937 - RNA, 25 nt, Human
caauuuuaaacaaacucacaaaaca

SEQ ID NO: 727938 - RNA, 22 nt, Human
cacaaaacaaaaggaaacaaaa

SEQ ID NO: 727939 - RNA, 23 nt, Human
cacaaaacaaaaggaaacaaaac

SEQ ID NO: 727940 - RNA, 24 nt, Human
cacaaaacaaaaggaaacaaaaca

SEQ ID NO: 727941 - RNA, 25 nt, Human
cacaaaacaaaaggaaacaaaacaa

SEQ ID NO: 727942 - RNA, 21 nt, Human
cacaaauacagcuuaggacaa

SEQ ID NO: 727943 - RNA, 20 nt, Human
cacaacccaaaggugacaga

SEQ ID NO: 727944 - RNA, 23 nt, Human
cacacaguggaaaccaaaugaaa

SEQ ID NO: 727945 - RNA, 21 nt, Human
cacagggauccuccaucuucu

SEQ ID NO: 727946 - RNA, 20 nt, Human
caccaacccccaguccaggg

SEQ ID NO: 727947 - RNA, 23 nt, Human
caccaacccccaguccagggacc

SEQ ID NO: 727948 - RNA, 19 nt, Human
cacccaggcccccaaacaa

SEQ ID NO: 727949 - RNA, 21 nt, Human
cacccaggcccccaaacaacc

SEQ ID NO: 727950 - RNA, 22 nt, Human
cacccaggcccccaaacaaccc

SEQ ID NO: 727951 - RNA, 21 nt, Human
cacccccaagccugaaagcca

SEQ ID NO: 727952 - RNA, 19 nt, Human
caccccccaccccccaccc

SEQ ID NO: 727953 - RNA, 20 nt, Human
cacugaggcuggaagagccc

SEQ ID NO: 727954 - RNA, 21 nt, Human
cacugcaauccagccugagca

SEQ ID NO: 727955 - RNA, 24 nt, Human
cacugcaauccagccugagcaaca

SEQ ID NO: 727956 - RNA, 26 nt, Human
cagaagaacaguuucucugcuucacc

SEQ ID NO: 727957 - RNA, 25 nt, Human
cagcaaucaaaacugggccaagcag

SEQ ID NO: 727958 - RNA, 18 nt, Human
cagcacaguccacacagu

SEQ ID NO: 727959 - RNA, 24 nt, Human
cagcccagcuggacagccacacug

SEQ ID NO: 727960 - RNA, 22 nt, Human
cagcuuucuuggcucugggucc

SEQ ID NO: 727961 - RNA, 21 nt, Human
caggcccccaaacaaccccua

SEQ ID NO: 727962 - RNA, 22 nt, Human
caggggcuuaggguugcccagg

SEQ ID NO: 727963 - RNA, 18 nt, Human
cagguucuccucacuucc

SEQ ID NO: 727964 - RNA, 23 nt, Human
cagugugggcacccccauccccu

SEQ ID NO: 727965 - RNA, 22 nt, Human
caucuccuucccaugugaggcc

SEQ ID NO: 727966 - RNA, 21 nt, Human
caucuucuugggcaccugugg

SEQ ID NO: 727967 - RNA, 19 nt, Human
caugucugcaaccuggggc

SEQ ID NO: 727968 - RNA, 22 nt, Human
ccacccaggcccccaaacaacc

SEQ ID NO: 727969 - RNA, 22 nt, Human
ccaccccccaccccccaccccc

SEQ ID NO: 727970 - RNA, 19 nt, Human
ccacccucucuguaaacuc

SEQ ID NO: 727971 - RNA, 20 nt, Human
ccacugcaauccagccugag

SEQ ID NO: 727972 - RNA, 21 nt, Human
ccacugcaauccagccugagc

SEQ ID NO: 727973 - RNA, 20 nt, Human
ccagaucuguagcaaaggca

SEQ ID NO: 727974 - RNA, 18 nt, Human
ccaggcccccaaacaacc

SEQ ID NO: 727975 - RNA, 20 nt, Human
ccaugucugcaaccuggggc

SEQ ID NO: 727976 - RNA, 26 nt, Human
cccaaaucaacaaaccucucccgaaa

SEQ ID NO: 727977 - RNA, 26 nt, Human
cccacaagauacaacagaaaccccau

SEQ ID NO: 727978 - RNA, 24 nt, Human
cccagcgcugggagcccgcucucc

SEQ ID NO: 727979 - RNA, 24 nt, Human
cccagggaggucgaggcugcagug

SEQ ID NO: 727980 - RNA, 19 nt, Human
cccauaguggggacaaugg

SEQ ID NO: 727981 - RNA, 26 nt, Human
cccauccacuacccaucuccuuccca

SEQ ID NO: 727982 - RNA, 18 nt, Human
cccauuuuuuccuuuccc

SEQ ID NO: 727983 - RNA, 21 nt, Human
cccauuuuuuccuuucccuuu

SEQ ID NO: 727984 - RNA, 18 nt, Human
ccccaaacaaccccuaaa

SEQ ID NO: 727985 - RNA, 23 nt, Human
ccccauccacuacccaucuccuu

SEQ ID NO: 727986 - RNA, 21 nt, Human
ccccauccccuaccuuccagc

SEQ ID NO: 727987 - RNA, 25 nt, Human
ccccaugaccuugucuuuuccagag

SEQ ID NO: 727988 - RNA, 18 nt, Human
cccccaagccugaaagcc

SEQ ID NO: 727989 - RNA, 25 nt, Human
cccccaccccccacccccauuuuuu

SEQ ID NO: 727990 - RNA, 19 nt, Human
cccccaguccagggacccu

SEQ ID NO: 727991 - RNA, 20 nt, Human
ccccccaccccccaccccca

SEQ ID NO: 727992 - RNA, 20 nt, Human
ccccuaaaauaagacgcaaa

SEQ ID NO: 727993 - RNA, 21 nt, Human
cccuaaaauaagacgcaaacc

SEQ ID NO: 727994 - RNA, 20 nt, Human
ccgaccacccaggcccccaa

SEQ ID NO: 727995 - RNA, 22 nt, Human
ccgaccacccaggcccccaaac

SEQ ID NO: 727996 - RNA, 18 nt, Human
ccggccccuacccagcgc

SEQ ID NO: 727997 - RNA, 19 nt, Human
ccuccaucuucuugggcac

SEQ ID NO: 727998 - RNA, 19 nt, Human
ccugccuggguggggagca

SEQ ID NO: 727999 - RNA, 24 nt, Human
ccugggacucccugguccauuccc

SEQ ID NO: 728000 - RNA, 19 nt, Human
ccuugggggaagccggcug

SEQ ID NO: 728001 - RNA, 24 nt, Human
cgccacugcaauccagccugagca

SEQ ID NO: 728002 - RNA, 20 nt, Human
cgcccagaaauacccaaaau

SEQ ID NO: 728003 - RNA, 18 nt, Human
cgccggaacccggccccu

SEQ ID NO: 728004 - RNA, 26 nt, Human
cggaacccggccccuacccagcgcug

SEQ ID NO: 728005 - RNA, 22 nt, Human
cgguggcuucgcccacccucuc

SEQ ID NO: 728006 - RNA, 20 nt, Human
cguguggaaauccacuccca

SEQ ID NO: 728007 - RNA, 26 nt, Human
cuaaaauaagacgcaaaccaaaggcc

SEQ ID NO: 728008 - RNA, 22 nt, Human
cuauagaaaacaccaaccccca

SEQ ID NO: 728009 - RNA, 20 nt, Human
cucacaaaacaaaaggaaac

SEQ ID NO: 728010 - RNA, 23 nt, Human
cucaccgcucauccagugggcgg

SEQ ID NO: 728011 - RNA, 23 nt, Human
cuccucacuucccaaacugggaa

SEQ ID NO: 728012 - RNA, 20 nt, Human
cuccugaacacccuccuccu

SEQ ID NO: 728013 - RNA, 24 nt, Human
cucugggucccaggccugggacuc

SEQ ID NO: 728014 - RNA, 25 nt, Human
cuggcaccugggaacugcuuuuucu

SEQ ID NO: 728015 - RNA, 18 nt, Human
cuguggucccagccacuc

SEQ ID NO: 728016 - RNA, 18 nt, Human
cuuccagcccugcccagc

SEQ ID NO: 728017 - RNA, 22 nt, Human
cuucuggaggguccccucugaa

SEQ ID NO: 728018 - RNA, 18 nt, Human
gaaaccccauccacuacc

SEQ ID NO: 728019 - RNA, 22 nt, Human
gaacacccuccuccuuccuggg

SEQ ID NO: 728020 - RNA, 28 nt, Human
gaagaaugugaaacaaaaacaaaagcaa

SEQ ID NO: 728021 - RNA, 21 nt, Human
gaagacacccccaagccugaa

SEQ ID NO: 728022 - RNA, 23 nt, Human
gaagacacccccaagccugaaag

SEQ ID NO: 728023 - RNA, 21 nt, Human
gaagggggaguccuuggggga

SEQ ID NO: 728024 - RNA, 24 nt, Human
gaagugggaggauugcuugagccc

SEQ ID NO: 728025 - RNA, 20 nt, Human
gacaguuaugaaagaugguc

SEQ ID NO: 728026 - RNA, 21 nt, Human
gagcccgcucuccccgccacc

SEQ ID NO: 728027 - RNA, 25 nt, Human
gagcccgcucuccccgccaccggag

SEQ ID NO: 728028 - RNA, 23 nt, Human
gcagguucuccucacuucccaaa

SEQ ID NO: 728029 - RNA, 18 nt, Human
gcaugaucacgccacugc

SEQ ID NO: 728030 - RNA, 22 nt, Human
gccacugcaauccagccugagc

SEQ ID NO: 728031 - RNA, 21 nt, Human
gccagagaggcacacugaggc

SEQ ID NO: 728032 - RNA, 18 nt, Human
gccagcaaucaaaacugg

SEQ ID NO: 728033 - RNA, 18 nt, Human
gccccacggagagcgggc

SEQ ID NO: 728034 - RNA, 19 nt, Human
gccuggcccagaagcaggc

SEQ ID NO: 728035 - RNA, 22 nt, Human
gcuccuggcacagggauccucc

SEQ ID NO: 728036 - RNA, 20 nt, Human
gcuucgcccacccucucugu

SEQ ID NO: 728037 - RNA, 24 nt, Human
ggaaauccacucccagcgaagggg

SEQ ID NO: 728038 - RNA, 20 nt, Human
ggaacccggccccuacccag

SEQ ID NO: 728039 - RNA, 19 nt, Human
ggagcagggugagggaggg

SEQ ID NO: 728040 - RNA, 20 nt, Human
ggaggcugaagugggaggau

SEQ ID NO: 728041 - RNA, 22 nt, Human
ggaggcugaagugggaggauug

SEQ ID NO: 728042 - RNA, 21 nt, Human
ggaguccuugggggaagccgg

SEQ ID NO: 728043 - RNA, 19 nt, Human
ggcacccccauccccuacc

SEQ ID NO: 728044 - RNA, 25 nt, Human
ggcagcugaaucgguggcugugagg

SEQ ID NO: 728045 - RNA, 19 nt, Human
ggcaucuuugaggucaccc

SEQ ID NO: 728046 - RNA, 21 nt, Human
ggcgguguuggcuccagucug

SEQ ID NO: 728047 - RNA, 27 nt, Human
ggcugggcuucuggaggguccccucug

SEQ ID NO: 728048 - RNA, 21 nt, Human
ggcuuccagcccugcccagcu

SEQ ID NO: 728049 - RNA, 18 nt, Human
gggauggggugugguggg

SEQ ID NO: 728050 - RNA, 20 nt, Human
ggggaagccggcugggcuuc

SEQ ID NO: 728051 - RNA, 20 nt, Human
ggggguggguuuugaaggca

SEQ ID NO: 728052 - RNA, 19 nt, Human
guaggguaggggugggggu

SEQ ID NO: 728053 - RNA, 18 nt, Human
guccacacaguggaaacc

SEQ ID NO: 728054 - RNA, 24 nt, Human
guccagggacccuggcagcugaau

SEQ ID NO: 728055 - RNA, 18 nt, Human
gugggcacccccaucccc

SEQ ID NO: 728056 - RNA, 18 nt, Human
guuguccaccccccaccc

SEQ ID NO: 728057 - RNA, 22 nt, Human
uaaacaaacucacaaaacaaag

SEQ ID NO: 728058 - RNA, 28 nt, Human
uaaaccacuaccauuaguacugcaaucu

SEQ ID NO: 728059 - RNA, 25 nt, Human
uaaguacaaauaauauuaacaugaa

SEQ ID NO: 728060 - RNA, 18 nt, Human
uaccagggauaccugggg

SEQ ID NO: 728061 - RNA, 18 nt, Human
uacccaucuccuucccau

SEQ ID NO: 728062 - RNA, 24 nt, Human
uagaaaacaccaacccccagucca

SEQ ID NO: 728063 - RNA, 19 nt, Human
uaggguaggggugggggug

SEQ ID NO: 728064 - RNA, 18 nt, Human
uauaagccccaaaucaac

SEQ ID NO: 728065 - RNA, 20 nt, Human
ucaccgcucauccagugggc

SEQ ID NO: 728066 - RNA, 23 nt, Human
ucacgccacugcaauccagccug

SEQ ID NO: 728067 - RNA, 23 nt, Human
ucagaagacacccccaagccuga

SEQ ID NO: 728068 - RNA, 23 nt, Human
ucagcuuucuuggcucugggucc

SEQ ID NO: 728069 - RNA, 21 nt, Human
ucagugugggcacccccaucc

SEQ ID NO: 728070 - RNA, 24 nt, Human
uccacacaguggaaaccaaaugaa

SEQ ID NO: 728071 - RNA, 24 nt, Human
uccaccccccaccccccaccccca

SEQ ID NO: 728072 - RNA, 24 nt, Human
uccagccugagcaacagagcgaga

SEQ ID NO: 728073 - RNA, 25 nt, Human
uccaucuucuugggcaccuguggca

SEQ ID NO: 728074 - RNA, 22 nt, Human
ucccagauggcauguaauccau

SEQ ID NO: 728075 - RNA, 22 nt, Human
uccuccaucuucuugggcaccu

SEQ ID NO: 728076 - RNA, 20 nt, Human
uccuccucuauagaaaacac

SEQ ID NO: 728077 - RNA, 20 nt, Human
ucgacaaagaacacgagcca

SEQ ID NO: 728078 - RNA, 21 nt, Human
ucggcgguggcgucggcaccu

SEQ ID NO: 728079 - RNA, 22 nt, Human
ucuagcagauuaacucaacauc

SEQ ID NO: 728080 - RNA, 22 nt, Human
ucucaccacaggccuucgacaa

SEQ ID NO: 728081 - RNA, 21 nt, Human
ucucuguaaacucugguacug

SEQ ID NO: 728082 - RNA, 23 nt, Human
ucugcccauaguggggacaaugg

SEQ ID NO: 728083 - RNA, 19 nt, Human
ucuggcaggcgccaagcuc

SEQ ID NO: 728084 - RNA, 21 nt, Human
ucugggucccaggccugggac

SEQ ID NO: 728085 - RNA, 27 nt, Human
ucuguagcaaaggcacaaccggggucc

SEQ ID NO: 728086 - RNA, 18 nt, Human
ucuugggcgacucagccc

SEQ ID NO: 728087 - RNA, 19 nt, Human
ugaaaaacacaacccaaag

SEQ ID NO: 728088 - RNA, 18 nt, Human
ugaaacaaaaacaaaagc

SEQ ID NO: 728089 - RNA, 21 nt, Human
ugaaacaaaaacaaaagcaaa

SEQ ID NO: 728090 - RNA, 23 nt, Human
ugaagugggaggauugcuugagc

SEQ ID NO: 728091 - RNA, 24 nt, Human
ugaagugggaggauugcuugagcc

SEQ ID NO: 728092 - RNA, 21 nt, Human
ugaggccgaccacccaggccc

SEQ ID NO: 728093 - RNA, 22 nt, Human
ugagguugugcaggaaccagaa

SEQ ID NO: 728094 - RNA, 19 nt, Human
ugccagcaggccagagggg

SEQ ID NO: 728095 - RNA, 22 nt, Human
ugcccugccuggguggggagca

SEQ ID NO: 728096 - RNA, 21 nt, Human
ugccuggguggggagcagggu

SEQ ID NO: 728097 - RNA, 22 nt, Human
ugccuggguggggagcagggug

SEQ ID NO: 728098 - RNA, 18 nt, Human
ugccuucucuccaaaagu

SEQ ID NO: 728099 - RNA, 18 nt, Human
ugcugcccugccugggug

SEQ ID NO: 728100 - RNA, 18 nt, Human
ugcuggcaccugggaacu

SEQ ID NO: 728101 - RNA, 21 nt, Human
uggaggcugaagugggaggau

SEQ ID NO: 728102 - RNA, 27 nt, Human
uggcaagaugccagcaaucaaaacugg

SEQ ID NO: 728103 - RNA, 18 nt, Human
uggcauugccagcaggcc

SEQ ID NO: 728104 - RNA, 22 nt, Human
uggcuccagucugacccaaggg

SEQ ID NO: 728105 - RNA, 20 nt, Human
uggcuccugaacacccuccu

SEQ ID NO: 728106 - RNA, 21 nt, Human
uggcuccugaacacccuccuc

SEQ ID NO: 728107 - RNA, 20 nt, Human
uggcucugggucccaggccu

SEQ ID NO: 728108 - RNA, 20 nt, Human
uggcugugaggcccaaucug

SEQ ID NO: 728109 - RNA, 18 nt, Human
uggcuucuaauguacccu

SEQ ID NO: 728110 - RNA, 24 nt, Human
ugggaggauugcuugagcccaggg

SEQ ID NO: 728111 - RNA, 22 nt, Human
ugggauggcuuggacagggggc

SEQ ID NO: 728112 - RNA, 23 nt, Human
ugggucccaggccugggacuccc

SEQ ID NO: 728113 - RNA, 21 nt, Human
ugucuucacuggggcacugac

SEQ ID NO: 728114 - RNA, 19 nt, Human
ugugaaacaaaaacaaaag

SEQ ID NO: 728115 - RNA, 21 nt, Human
ugugguaggcguggcaaugcc

SEQ ID NO: 728116 - RNA, 21 nt, Human
uguggugggguaggguagggg

SEQ ID NO: 728117 - RNA, 20 nt, Human
uuaacucaacauccugcucu

SEQ ID NO: 728118 - RNA, 20 nt, Human
uucuugggcaccuguggcau

SEQ ID NO: 728119 - RNA, 20 nt, Human
uugcuugagcccagggaggg

SEQ ID NO: 728120 - RNA, 23 nt, Human
uuggaacugccauagucccuucc

SEQ ID NO: 728121 - RNA, 24 nt, Human
uuggcucugggucccaggccuggg

SEQ ID NO: 728122 - RNA, 18 nt, Human
uuugccccucugagguug

SEQ ID NO: 728123 - RNA, 18 nt, Human
uuugccccucugagguug

SEQ ID NO: 728124 - RNA, 18 nt, Human
uuuggcuuguggaggggg

SEQ ID NO: 728125 - RNA, 22 nt, Human
aaaaacagacuaugaagaacaa

SEQ ID NO: 728126 - RNA, 23 nt, Human
aaaagcacaaagcccuuuuugga

SEQ ID NO: 728127 - RNA, 24 nt, Human
aaaaugcugggaguacagguguga

SEQ ID NO: 728128 - RNA, 25 nt, Human
aaaauggugacccacauuaacuucu

SEQ ID NO: 728129 - RNA, 24 nt, Human
aaauggugacccacauuaacuucu

SEQ ID NO: 728130 - RNA, 20 nt, Human
aaauuaauagugacauucuc

SEQ ID NO: 728131 - RNA, 24 nt, Human
aacauuccacucaaaguaaaaaua

SEQ ID NO: 728132 - RNA, 18 nt, Human
aacuuucuccaaaacuau

SEQ ID NO: 728133 - RNA, 19 nt, Human
aagaagcuaugaacaccaa

SEQ ID NO: 728134 - RNA, 23 nt, Human
aagcaaaaaaaguauauaaauaa

SEQ ID NO: 728135 - RNA, 24 nt, Human
aagcaauucgccugucucagccuc

SEQ ID NO: 728136 - RNA, 24 nt, Human
aaguagcuggaacuacaggcaugc

SEQ ID NO: 728137 - RNA, 21 nt, Human
aaguuaaauuuaaaauggcac

SEQ ID NO: 728138 - RNA, 20 nt, Human
acaggcuuuuaucuuuaaau

SEQ ID NO: 728139 - RNA, 19 nt, Human
acaguacugggguaacaua

SEQ ID NO: 728140 - RNA, 19 nt, Human
acuggagugcaauggcaca

SEQ ID NO: 728141 - RNA, 22 nt, Human
acuuuuuuuuuuuuuuuuuuuu

SEQ ID NO: 728142 - RNA, 27 nt, Human
agaaaaaacagacuaugaagaacaaaa

SEQ ID NO: 728143 - RNA, 19 nt, Human
agaaagaucuuauaaccua

SEQ ID NO: 728144 - RNA, 26 nt, Human
agaacaguaucagcacacagcaggca

SEQ ID NO: 728145 - RNA, 20 nt, Human
agaagcaaaacuagugaaaa

SEQ ID NO: 728146 - RNA, 22 nt, Human
agacaucugggcauauaaaaua

SEQ ID NO: 728147 - RNA, 21 nt, Human
agagcgcagcucgguccgccg

SEQ ID NO: 728148 - RNA, 24 nt, Human
agaugggguuucgccauguuuggu

SEQ ID NO: 728149 - RNA, 21 nt, Human
agcuaugaacaccaaaaaaga

SEQ ID NO: 728150 - RNA, 24 nt, Human
aggugauccacccaccuuggccuc

SEQ ID NO: 728151 - RNA, 20 nt, Human
auccccauuacacagaacag

SEQ ID NO: 728152 - RNA, 21 nt, Human
augggguuucgccauguuugg

SEQ ID NO: 728153 - RNA, 22 nt, Human
augggguuucgccauguuuggu

SEQ ID NO: 728154 - RNA, 25 nt, Human
augggguuucgccauguuuggucag

SEQ ID NO: 728155 - RNA, 20 nt, Human
caaaacuagugaaaauaaaa

SEQ ID NO: 728156 - RNA, 19 nt, Human
caaaagcacaaacaguguc

SEQ ID NO: 728157 - RNA, 23 nt, Human
caaaagcacaaacagugucuggc

SEQ ID NO: 728158 - RNA, 24 nt, Human
caaaaugcugggaguacaggugug

SEQ ID NO: 728159 - RNA, 23 nt, Human
caccaaaauguaagcgccauaag

SEQ ID NO: 728160 - RNA, 19 nt, Human
caccaugccuaauuuuugu

SEQ ID NO: 728161 - RNA, 18 nt, Human
cacugcaaccucugccuc

SEQ ID NO: 728162 - RNA, 21 nt, Human
cacugcaaccucugccuccca

SEQ ID NO: 728163 - RNA, 19 nt, Human
cagcuccucuccccucgcc

SEQ ID NO: 728164 - RNA, 20 nt, Human
cagcucgguccgccgccgcc

SEQ ID NO: 728165 - RNA, 22 nt, Human
caggaauuaccaaacugaccaa

SEQ ID NO: 728166 - RNA, 25 nt, Human
caggcaauauucuuauccccugaag

SEQ ID NO: 728167 - RNA, 18 nt, Human
caguacagaugggguuuc

SEQ ID NO: 728168 - RNA, 24 nt, Human
caguacagaugggguuucgccaug

SEQ ID NO: 728169 - RNA, 22 nt, Human
caugaauaauaauccuuccccc

SEQ ID NO: 728170 - RNA, 21 nt, Human
caugccuaauuuuuguauuuu

SEQ ID NO: 728171 - RNA, 19 nt, Human
ccaaacugaccaaaugauc

SEQ ID NO: 728172 - RNA, 20 nt, Human
ccauguuuggucaggcuggu

SEQ ID NO: 728173 - RNA, 23 nt, Human
ccauguuuggucaggcuggucuc

SEQ ID NO: 728174 - RNA, 21 nt, Human
cccacaaugcuaugaauaagc

SEQ ID NO: 728175 - RNA, 19 nt, Human
cccacagucacacacuauc

SEQ ID NO: 728176 - RNA, 23 nt, Human
cccacggccccuucagcuccucu

SEQ ID NO: 728177 - RNA, 21 nt, Human
cccagguucaagcaauucgcc

SEQ ID NO: 728178 - RNA, 23 nt, Human
cccagguucaagcaauucgccug

SEQ ID NO: 728179 - RNA, 18 nt, Human
ccccuucagcuccucucc

SEQ ID NO: 728180 - RNA, 22 nt, Human
cccgacuggagugcaauggcac

SEQ ID NO: 728181 - RNA, 19 nt, Human
ccgccgccgccuucuccuc

SEQ ID NO: 728182 - RNA, 21 nt, Human
ccuaacauuucugucagacaa

SEQ ID NO: 728183 - RNA, 21 nt, Human
ccucccagguucaagcaauuc

SEQ ID NO: 728184 - RNA, 24 nt, Human
ccugaccucaggugauccacccac

SEQ ID NO: 728185 - RNA, 21 nt, Human
ccuucagcuccucuccccucg

SEQ ID NO: 728186 - RNA, 19 nt, Human
ccuucuccuccuccucccc

SEQ ID NO: 728187 - RNA, 20 nt, Human
cgccacgggccuugucagga

SEQ ID NO: 728188 - RNA, 24 nt, Human
cguuaucuugguaacauuuguugg

SEQ ID NO: 728189 - RNA, 20 nt, Human
cuaauuugcauuacacacac

SEQ ID NO: 728190 - RNA, 18 nt, Human
cucaaguuucucauccuu

SEQ ID NO: 728191 - RNA, 24 nt, Human
cucacugcaaccucugccucccag

SEQ ID NO: 728192 - RNA, 24 nt, Human
cucacugcaaccucugccucccag

SEQ ID NO: 728193 - RNA, 24 nt, Human
cucaggugauccacccaccuuggc

SEQ ID NO: 728194 - RNA, 25 nt, Human
cuccuaaaucaagcaugcuagaaaa

SEQ ID NO: 728195 - RNA, 23 nt, Human
cugcaaccucugccucccagguu

SEQ ID NO: 728196 - RNA, 24 nt, Human
cugcaaccucugccucccagguuc

SEQ ID NO: 728197 - RNA, 23 nt, Human
cugucucagccucccaaguagcu

SEQ ID NO: 728198 - RNA, 18 nt, Human
cuugguaacauuuguugg

SEQ ID NO: 728199 - RNA, 24 nt, Human
cuuuuuuuuuuuuuuuuuuuuggg

SEQ ID NO: 728200 - RNA, 23 nt, Human
gaaaaaacagacuaugaagaaca

SEQ ID NO: 728201 - RNA, 25 nt, Human
gaaaaaacagacuaugaagaacaaa

SEQ ID NO: 728202 - RNA, 20 nt, Human
gaccaaaauggugacccaca

SEQ ID NO: 728203 - RNA, 23 nt, Human
gaccucaggugauccacccaccu

SEQ ID NO: 728204 - RNA, 18 nt, Human
gagaagaagcuaugaaca

SEQ ID NO: 728205 - RNA, 24 nt, Human
gagaagaagcuaugaacaccaaaa

SEQ ID NO: 728206 - RNA, 18 nt, Human
gaguacaggugugagcca

SEQ ID NO: 728207 - RNA, 20 nt, Human
gaguacaggugugagccacc

SEQ ID NO: 728208 - RNA, 20 nt, Human
gaugggguuucgccauguuu

SEQ ID NO: 728209 - RNA, 19 nt, Human
gauuuuugucugucuuccu

SEQ ID NO: 728210 - RNA, 18 nt, Human
gcucgguccgccgccgcc

SEQ ID NO: 728211 - RNA, 18 nt, Human
gcucgguccgccgccgcc

SEQ ID NO: 728212 - RNA, 23 nt, Human
gcuggucucaaacuccugaccuc

SEQ ID NO: 728213 - RNA, 24 nt, Human
ggcuggucucaaacuccugaccuc

SEQ ID NO: 728214 - RNA, 21 nt, Human
guaaaacacaggcuuuuaucu

SEQ ID NO: 728215 - RNA, 22 nt, Human
guacagaugggguuucgccaug

SEQ ID NO: 728216 - RNA, 22 nt, Human
guacaggugugagccacccugc

SEQ ID NO: 728217 - RNA, 22 nt, Human
guaucagcacacagcaggcacu

SEQ ID NO: 728218 - RNA, 22 nt, Human
gugauccacccaccuuggccuc

SEQ ID NO: 728219 - RNA, 21 nt, Human
uaacauacaugaagccuaaca

SEQ ID NO: 728220 - RNA, 30 nt, Human
uaaccaggcaauauucuuauccggaaaucu

SEQ ID NO: 728221 - RNA, 19 nt, Human
uaauagugacauucucccu

SEQ ID NO: 728222 - RNA, 24 nt, Human
uaauuuuuguauuuucaguacaga

SEQ ID NO: 728223 - RNA, 26 nt, Human
uacacagaacaguaucagcacacagc

SEQ ID NO: 728224 - RNA, 22 nt, Human
uacagaugggguuucgccaugu

SEQ ID NO: 728225 - RNA, 22 nt, Human
uacaggcaugcaccaccaugcc

SEQ ID NO: 728226 - RNA, 19 nt, Human
uacaggugugagccacccu

SEQ ID NO: 728227 - RNA, 22 nt, Human
uacaggugugagccacccugcc

SEQ ID NO: 728228 - RNA, 24 nt, Human
uagaaaauauaacugcaugcaaca

SEQ ID NO: 728229 - RNA, 18 nt, Human
uauaaaaugagggaaagg

SEQ ID NO: 728230 - RNA, 19 nt, Human
ucacugcaaccucugccuc

SEQ ID NO: 728231 - RNA, 24 nt, Human
ucacugcaaccucugccucccagg

SEQ ID NO: 728232 - RNA, 25 nt, Human
ucacugcaaccucugccucccaggu

SEQ ID NO: 728233 - RNA, 18 nt, Human
ucagccucccaaguagcu

SEQ ID NO: 728234 - RNA, 20 nt, Human
ucagccucccaaguagcugg

SEQ ID NO: 728235 - RNA, 27 nt, Human
ucagcucacugcaaccucugccuccca

SEQ ID NO: 728236 - RNA, 21 nt, Human
ucaguacagaugggguuuccu

SEQ ID NO: 728237 - RNA, 24 nt, Human
ucaguacagaugggguuucgccau

SEQ ID NO: 728238 - RNA, 20 nt, Human
ucagucuuguucacugaauc

SEQ ID NO: 728239 - RNA, 22 nt, Human
uccacccaccuuggccucacaa

SEQ ID NO: 728240 - RNA, 24 nt, Human
ucccaaguagcuggaacuacaggc

SEQ ID NO: 728241 - RNA, 19 nt, Human
ucccagguucaagcaauuc

SEQ ID NO: 728242 - RNA, 21 nt, Human
ucccagguucaagcaauucgc

SEQ ID NO: 728243 - RNA, 24 nt, Human
ucccagguucaagcaauucgccug

SEQ ID NO: 728244 - RNA, 23 nt, Human
ucgccauguuuggucaggcuggu

SEQ ID NO: 728245 - RNA, 19 nt, Human
ucuccuccuccuccccgcc

SEQ ID NO: 728246 - RNA, 24 nt, Human
ucuugcucuguuaacccgacugga

SEQ ID NO: 728247 - RNA, 24 nt, Human
ugaaaagcacaaagcccuuuuugg

SEQ ID NO: 728248 - RNA, 18 nt, Human
ugaacauuccacucaaag

SEQ ID NO: 728249 - RNA, 20 nt, Human
ugaagaacaaaauauacaga

SEQ ID NO: 728250 - RNA, 19 nt, Human
ugacaggaauguaugcuuc

SEQ ID NO: 728251 - RNA, 23 nt, Human
ugaccaaaauggugacccacauu

SEQ ID NO: 728252 - RNA, 21 nt, Human
ugaccucaggugauccaccca

SEQ ID NO: 728253 - RNA, 24 nt, Human
ugaccucaggugauccacccaccu

SEQ ID NO: 728254 - RNA, 21 nt, Human
ugagaagaagcuaugaacacc

SEQ ID NO: 728255 - RNA, 23 nt, Human
ugagaagaagcuaugaacaccaa

SEQ ID NO: 728256 - RNA, 26 nt, Human
ugagaagaagcuaugaacaccaaaaa

SEQ ID NO: 728257 - RNA, 20 nt, Human
ugagaagaagcuaugaacca

SEQ ID NO: 728258 - RNA, 22 nt, Human
ugagacagugucuugcucuguu

SEQ ID NO: 728259 - RNA, 18 nt, Human
ugagccacccugccuggc

SEQ ID NO: 728260 - RNA, 21 nt, Human
ugauuuuugucugucuuccuc

SEQ ID NO: 728261 - RNA, 26 nt, Human
ugcauuacacacacaaaaagugcaca

SEQ ID NO: 728262 - RNA, 18 nt, Human
ugcuagaaaaaacagacu

SEQ ID NO: 728263 - RNA, 21 nt, Human
uggaacuacaggcaugcacca

SEQ ID NO: 728264 - RNA, 24 nt, Human
uggaacuacaggcaugcaccacca

SEQ ID NO: 728265 - RNA, 23 nt, Human
uggagugcaauggcacagucuca

SEQ ID NO: 728266 - RNA, 24 nt, Human
uggcacagucucagcucacugcaa

SEQ ID NO: 728267 - RNA, 21 nt, Human
uggcucaaaugguacugacag

SEQ ID NO: 728268 - RNA, 18 nt, Human
ugggaguacaggugugag

SEQ ID NO: 728269 - RNA, 22 nt, Human
ugggaguacaggugugagccac

SEQ ID NO: 728270 - RNA, 23 nt, Human
ugggaguacaggugugagccacc

SEQ ID NO: 728271 - RNA, 24 nt, Human
uggucaggcuggucucaaacuccu

SEQ ID NO: 728272 - RNA, 26 nt, Human
uguaaaacacaggcuuuuaucuuuaa

SEQ ID NO: 728273 - RNA, 21 nt, Human
uguaugcuucugaccaaaaug

SEQ ID NO: 728274 - RNA, 24 nt, Human
ugucucagccucccaaguagcugg

SEQ ID NO: 728275 - RNA, 21 nt, Human
ugucuggcaccuguaugagaa

SEQ ID NO: 728276 - RNA, 21 nt, Human
ugugcugucuuccccaaauuu

SEQ ID NO: 728277 - RNA, 23 nt, Human
uuacauuaaugaacauuccacuc

SEQ ID NO: 728278 - RNA, 25 nt, Human
uucccacagucacacacuaucugaa

SEQ ID NO: 728279 - RNA, 21 nt, Human
uugccuauaaauuuuaaaaaa

SEQ ID NO: 728280 - RNA, 23 nt, Human
uugccuauaaauuuuaaaaaauu

SEQ ID NO: 728281 - RNA, 24 nt, Human
uuugucugucuuccuccaccaaaa

SEQ ID NO: 728282 - RNA, 22 nt, Human
uuuucaguacagaugggguuuc

SEQ ID NO: 728283 - RNA, 18 nt, Human
aaagacugccagggcagc

SEQ ID NO: 728284 - RNA, 24 nt, Human
aaaguguugggauuauaggcauga

SEQ ID NO: 728285 - RNA, 23 nt, Human
aacuuagcagaaacccagggcuc

SEQ ID NO: 728286 - RNA, 25 nt, Human
aagaagcccaagccaaggcacuucc

SEQ ID NO: 728287 - RNA, 18 nt, Human
aagacugccagggcagcu

SEQ ID NO: 728288 - RNA, 18 nt, Human
aagcaaggccaggagaca

SEQ ID NO: 728289 - RNA, 25 nt, Human
aagcaauccuucugccucagccucc

SEQ ID NO: 728290 - RNA, 18 nt, Human
aagcagcacccaccuuca

SEQ ID NO: 728291 - RNA, 20 nt, Human
aagcagcacccaccuucagc

SEQ ID NO: 728292 - RNA, 19 nt, Human
aagcagcuucuuucuucuu

SEQ ID NO: 728293 - RNA, 22 nt, Human
aagcagcuucuuucuucuuuuu

SEQ ID NO: 728294 - RNA, 24 nt, Human
aagcaggccagaucaggcuucaag

SEQ ID NO: 728295 - RNA, 23 nt, Human
aaggugugguaugguagacaccu

SEQ ID NO: 728296 - RNA, 21 nt, Human
aaguguugggauuauaggcau

SEQ ID NO: 728297 - RNA, 21 nt, Human
aaugcugcuuguggguugcuu

SEQ ID NO: 728298 - RNA, 22 nt, Human
aauuaaacaguucccuaggaga

SEQ ID NO: 728299 - RNA, 23 nt, Human
acaaagagcagcgccuguaacuc

SEQ ID NO: 728300 - RNA, 19 nt, Human
acacuggaggcgagcgggc

SEQ ID NO: 728301 - RNA, 22 nt, Human
acccagaaaacacaagcagcuu

SEQ ID NO: 728302 - RNA, 19 nt, Human
acccucuccaaucagggau

SEQ ID NO: 728303 - RNA, 24 nt, Human
acuacaaccuauugagguaggcac

SEQ ID NO: 728304 - RNA, 24 nt, Human
acuauguugcccaggcuggucuug

SEQ ID NO: 728305 - RNA, 25 nt, Human
acuauguugcccaggcuggucuuga

SEQ ID NO: 728306 - RNA, 24 nt, Human
agaaacccagggcucucccacccu

SEQ ID NO: 728307 - RNA, 20 nt, Human
agaaugaccacugacauuaa

SEQ ID NO: 728308 - RNA, 18 nt, Human
agacaccccaacuugggc

SEQ ID NO: 728309 - RNA, 23 nt, Human
agacagggucucacuauguugcc

SEQ ID NO: 728310 - RNA, 18 nt, Human
agacuauaggcacgcacc

SEQ ID NO: 728311 - RNA, 21 nt, Human
agaugacacuuucucucuucc

SEQ ID NO: 728312 - RNA, 23 nt, Human
agcagcugagacuauaggcacgc

SEQ ID NO: 728313 - RNA, 23 nt, Human
agcaggugguugguuccagagau

SEQ ID NO: 728314 - RNA, 21 nt, Human
agccaucccuaguacaggacc

SEQ ID NO: 728315 - RNA, 23 nt, Human
agccugaggcggggcccgaucgc

SEQ ID NO: 728316 - RNA, 19 nt, Human
aggaaggugggcaaggcuc

SEQ ID NO: 728317 - RNA, 25 nt, Human
aggcaaaaaagcaacacuaaaagca

SEQ ID NO: 728318 - RNA, 22 nt, Human
aggcaagaagaaugaccuugau

SEQ ID NO: 728319 - RNA, 20 nt, Human
aggcaugagccaccacgccc

SEQ ID NO: 728320 - RNA, 19 nt, Human
aggccccaaggagacccaa

SEQ ID NO: 728321 - RNA, 18 nt, Human
aggcggggcccgaucgcg

SEQ ID NO: 728322 - RNA, 18 nt, Human
agggagggggaauuccag

SEQ ID NO: 728323 - RNA, 20 nt, Human
agggcaaacacagcagccuc

SEQ ID NO: 728324 - RNA, 22 nt, Human
aggggcgggagcgaaaccugcc

SEQ ID NO: 728325 - RNA, 27 nt, Human
auaauucuugacaccuacuuuucucug

SEQ ID NO: 728326 - RNA, 22 nt, Human
aucagaugccaagguaaacacc

SEQ ID NO: 728327 - RNA, 23 nt, Human
aucagccggccucagccucccaa

SEQ ID NO: 728328 - RNA, 21 nt, Human
auccuucugccucagccuccc

SEQ ID NO: 728329 - RNA, 20 nt, Human
augauucuuguggccacaaa

SEQ ID NO: 728330 - RNA, 18 nt, Human
auggagcgcuuucugugu

SEQ ID NO: 728331 - RNA, 22 nt, Human
auguugcccaggcuggucuuga

SEQ ID NO: 728332 - RNA, 20 nt, Human
auugcaaguugcucucagca

SEQ ID NO: 728333 - RNA, 23 nt, Human
auuuuuaaaccauucuaaaggca

SEQ ID NO: 728334 - RNA, 21 nt, Human
caaaaaagcaacacuaaaagc

SEQ ID NO: 728335 - RNA, 18 nt, Human
caacacuaaaagcaggcc

SEQ ID NO: 728336 - RNA, 19 nt, Human
caagaagcccaagccaagg

SEQ ID NO: 728337 - RNA, 19 nt, Human
caagagcccugacaccacc

SEQ ID NO: 728338 - RNA, 22 nt, Human
caagcaauccuucugccucagc

SEQ ID NO: 728339 - RNA, 23 nt, Human
caaggcccaggugcccaaacacc

SEQ ID NO: 728340 - RNA, 19 nt, Human
caaguuggugaccccugac

SEQ ID NO: 728341 - RNA, 20 nt, Human
caauccugcugcggcuucug

SEQ ID NO: 728342 - RNA, 18 nt, Human
cacaugugcacacacacc

SEQ ID NO: 728343 - RNA, 22 nt, Human
caccaccacgccuggcucauuu

SEQ ID NO: 728344 - RNA, 19 nt, Human
caccacgccuggcucauuu

SEQ ID NO: 728345 - RNA, 22 nt, Human
cacgcaccaccacgccuggcuc

SEQ ID NO: 728346 - RNA, 25 nt, Human
cacgcaggucaugaggauguguaau

SEQ ID NO: 728347 - RNA, 19 nt, Human
cacuauguugcccaggcug

SEQ ID NO: 728348 - RNA, 24 nt, Human
cacuauguugcccaggcuggucuu

SEQ ID NO: 728349 - RNA, 22 nt, Human
cacucagaauacacucccucag

SEQ ID NO: 728350 - RNA, 22 nt, Human
cacuuaacugcucaccaagcac

SEQ ID NO: 728351 - RNA, 18 nt, Human
cagaaugaccacugacau

SEQ ID NO: 728352 - RNA, 20 nt, Human
cagagaugagccccaacucu

SEQ ID NO: 728353 - RNA, 22 nt, Human
cagagcaagagguggacagaga

SEQ ID NO: 728354 - RNA, 21 nt, Human
cagccauaucugaagcagcac

SEQ ID NO: 728355 - RNA, 19 nt, Human
caggacccagggaauuugc

SEQ ID NO: 728356 - RNA, 22 nt, Human
caggagacaaggguaccagcca

SEQ ID NO: 728357 - RNA, 20 nt, Human
cagggcucucccacccucuc

SEQ ID NO: 728358 - RNA, 24 nt, Human
cagggucucacuauguugcccagg

SEQ ID NO: 728359 - RNA, 24 nt, Human
cagggucuugcuuugucacccagg

SEQ ID NO: 728360 - RNA, 20 nt, Human
caguccggggccgcgugcag

SEQ ID NO: 728361 - RNA, 21 nt, Human
cauggucccaggcccugcagu

SEQ ID NO: 728362 - RNA, 21 nt, Human
ccaaacaccaacaguaaugcu

SEQ ID NO: 728363 - RNA, 24 nt, Human
ccaaacaccaacaguaaugcugcu

SEQ ID NO: 728364 - RNA, 24 nt, Human
ccaaaguguugggauuauaggcau

SEQ ID NO: 728365 - RNA, 21 nt, Human
ccacauccaggggugcagagg

SEQ ID NO: 728366 - RNA, 21 nt, Human
ccagaucaggcuucaaguugg

SEQ ID NO: 728367 - RNA, 24 nt, Human
ccagcccacauggucccaggcccu

SEQ ID NO: 728368 - RNA, 23 nt, Human
ccagggcaaacacagcagccucc

SEQ ID NO: 728369 - RNA, 19 nt, Human
ccauacuucaaccucuggg

SEQ ID NO: 728370 - RNA, 22 nt, Human
cccaagccaaggcacuuccagc

SEQ ID NO: 728371 - RNA, 22 nt, Human
ccccaguacuccucgaggcacc

SEQ ID NO: 728372 - RNA, 25 nt, Human
ccccauucugcuggugcucccaaaa

SEQ ID NO: 728373 - RNA, 26 nt, Human
ccccauucugcuggugcucccaaaag

SEQ ID NO: 728374 - RNA, 22 nt, Human
cccuccuggacuggccaguucu

SEQ ID NO: 728375 - RNA, 21 nt, Human
ccucaggccccaaggagaccc

SEQ ID NO: 728376 - RNA, 28 nt, Human
ccuccaagcaauccuucugccucagccu

SEQ ID NO: 728377 - RNA, 26 nt, Human
ccugcaggccacaggcugaacaagcu

SEQ ID NO: 728378 - RNA, 27 nt, Human
ccugcggccaggacagcuguggaaggc

SEQ ID NO: 728379 - RNA, 18 nt, Human
ccuggcaacugugauugg

SEQ ID NO: 728380 - RNA, 19 nt, Human
ccuuggguuugggguugag

SEQ ID NO: 728381 - RNA, 18 nt, Human
cgccuugaacacccugcg

SEQ ID NO: 728382 - RNA, 23 nt, Human
cgggcggcccugaaacacugggc

SEQ ID NO: 728383 - RNA, 25 nt, Human
cguagcagaugccaccauggauacc

SEQ ID NO: 728384 - RNA, 20 nt, Human
cuagugaaaggaaggcuggg

SEQ ID NO: 728385 - RNA, 19 nt, Human
cucaaacucuccauacuuc

SEQ ID NO: 728386 - RNA, 23 nt, Human
cucaggccccaaggagacccaag

SEQ ID NO: 728387 - RNA, 18 nt, Human
cuccaagcaauccuucug

SEQ ID NO: 728388 - RNA, 24 nt, Human
cuccagcccacauggucccaggcc

SEQ ID NO: 728389 - RNA, 18 nt, Human
cuccagugggguauacag

SEQ ID NO: 728390 - RNA, 24 nt, Human
cuccagugggguauacagacagcc

SEQ ID NO: 728391 - RNA, 22 nt, Human
cugaagcaagcccuccuggacu

SEQ ID NO: 728392 - RNA, 19 nt, Human
cugccaagggaaauaccac

SEQ ID NO: 728393 - RNA, 23 nt, Human
cugccucagccucccgagcagcu

SEQ ID NO: 728394 - RNA, 18 nt, Human
cuggagcaccaauggagg

SEQ ID NO: 728395 - RNA, 24 nt, Human
cuggagcaccaauggaggucacca

SEQ ID NO: 728396 - RNA, 19 nt, Human
cuggaucacggugauuggu

SEQ ID NO: 728397 - RNA, 19 nt, Human
cuggucuugaacuccugca

SEQ ID NO: 728398 - RNA, 19 nt, Human
cugguuggagcaagugauc

SEQ ID NO: 728399 - RNA, 18 nt, Human
cuuaggccaugcuggccu

SEQ ID NO: 728400 - RNA, 19 nt, Human
cuucagccaucccuaguac

SEQ ID NO: 728401 - RNA, 20 nt, Human
cuuggccuuggcuuggucuu

SEQ ID NO: 728402 - RNA, 21 nt, Human
cuuggccuuggcuuggucuuc

SEQ ID NO: 728403 - RNA, 18 nt, Human
cuuucucucuuccuuggg

SEQ ID NO: 728404 - RNA, 18 nt, Human
gaacaagcuagcucuaaa

SEQ ID NO: 728405 - RNA, 20 nt, Human
gaaggcugggguuugagucc

SEQ ID NO: 728406 - RNA, 20 nt, Human
gacacuggaggcgagcgggc

SEQ ID NO: 728407 - RNA, 22 nt, Human
gacagggucuugcuuugucacc

SEQ ID NO: 728408 - RNA, 24 nt, Human
gaccuccaagcaauccuucugccu

SEQ ID NO: 728409 - RNA, 21 nt, Human
gaccuggcaaucgcucccccu

SEQ ID NO: 728410 - RNA, 20 nt, Human
gagaucauggcucacuccag

SEQ ID NO: 728411 - RNA, 23 nt, Human
gagcaagagguggacagagagga

SEQ ID NO: 728412 - RNA, 20 nt, Human
gaggucaccaggcaggggug

SEQ ID NO: 728413 - RNA, 21 nt, Human
gauuauaggcaugagccacca

SEQ ID NO: 728414 - RNA, 22 nt, Human
gauuauaggcaugagccaccac

SEQ ID NO: 728415 - RNA, 24 nt, Human
gcaacacuaaaagcaggccagauc

SEQ ID NO: 728416 - RNA, 22 nt, Human
gcagagcaagagguggacagag

SEQ ID NO: 728417 - RNA, 23 nt, Human
gcagagcaagagguggacagaga

SEQ ID NO: 728418 - RNA, 18 nt, Human
gcaugugacucgagcugg

SEQ ID NO: 728419 - RNA, 21 nt, Human
gcccacgggaaaccuccagga

SEQ ID NO: 728420 - RNA, 23 nt, Human
gccccgcccacacaagcaguuuc

SEQ ID NO: 728421 - RNA, 23 nt, Human
gccucagccucccaaaguguugg

SEQ ID NO: 728422 - RNA, 24 nt, Human
ggaagugggcuggagccuuuggga

SEQ ID NO: 728423 - RNA, 22 nt, Human
ggagcaccaauggaggucacca

SEQ ID NO: 728424 - RNA, 22 nt, Human
ggaucucuagccuggugugucc

SEQ ID NO: 728425 - RNA, 27 nt, Human
ggaugugcuguuccccacaaagagcag

SEQ ID NO: 728426 - RNA, 19 nt, Human
ggauuauaggcaugagcca

SEQ ID NO: 728427 - RNA, 19 nt, Human
ggcaaacacagcagccucc

SEQ ID NO: 728428 - RNA, 24 nt, Human
ggccaaucagagccuuccaugaga

SEQ ID NO: 728429 - RNA, 22 nt, Human
ggcugggguuugaguccuggcc

SEQ ID NO: 728430 - RNA, 24 nt, Human
ggcuggucuugaacuccugcacuc

SEQ ID NO: 728431 - RNA, 18 nt, Human
gggagcugugcugaaagc

SEQ ID NO: 728432 - RNA, 22 nt, Human
gggcaaacacagcagccuccac

SEQ ID NO: 728433 - RNA, 18 nt, Human
gggcaaggcucucuccca

SEQ ID NO: 728434 - RNA, 22 nt, Human
gggcggcccugaaacacugggc

SEQ ID NO: 728435 - RNA, 22 nt, Human
ggucaggcuuaggccaugcugg

SEQ ID NO: 728436 - RNA, 19 nt, Human
ggucuuccuuacacgaagc

SEQ ID NO: 728437 - RNA, 23 nt, Human
ggugcaguugagaggccugagga

SEQ ID NO: 728438 - RNA, 20 nt, Human
guaaugugggcugggcgcaa

SEQ ID NO: 728439 - RNA, 20 nt, Human
guggguugcuucuguccugg

SEQ ID NO: 728440 - RNA, 19 nt, Human
uaaauuuuacagcagggag

SEQ ID NO: 728441 - RNA, 23 nt, Human
uaagagaaaagcuagaaauucac

SEQ ID NO: 728442 - RNA, 20 nt, Human
uaagcaaggccaggagacaa

SEQ ID NO: 728443 - RNA, 19 nt, Human
uaagcuccuggauccagcc

SEQ ID NO: 728444 - RNA, 23 nt, Human
uaaugcuuccacguggguccccg

SEQ ID NO: 728445 - RNA, 21 nt, Human
uacaggggugagaucauggcu

SEQ ID NO: 728446 - RNA, 19 nt, Human
uacccagaaaacacaagca

SEQ ID NO: 728447 - RNA, 18 nt, Human
uaccugaagcaagcccuc

SEQ ID NO: 728448 - RNA, 24 nt, Human
uagacaccuuggccuuggcuuggu

SEQ ID NO: 728449 - RNA, 22 nt, Human
uagagacagggucucacuaugu

SEQ ID NO: 728450 - RNA, 19 nt, Human
uagagugugaauccugaaa

SEQ ID NO: 728451 - RNA, 21 nt, Human
uagcagacuccccucccccca

SEQ ID NO: 728452 - RNA, 18 nt, Human
uaggagagaaaggcaucu

SEQ ID NO: 728453 - RNA, 19 nt, Human
uaugcaggcaagcugcagg

SEQ ID NO: 728454 - RNA, 18 nt, Human
uaugguagacaccuuggc

SEQ ID NO: 728455 - RNA, 24 nt, Human
uaugguagacaccuuggccuuggc

SEQ ID NO: 728456 - RNA, 24 nt, Human
uauguugcccaggcuggucuugaa

SEQ ID NO: 728457 - RNA, 19 nt, Human
ucacugcaccucacugcaa

SEQ ID NO: 728458 - RNA, 24 nt, Human
uccaagcaauccuucugccucagc

SEQ ID NO: 728459 - RNA, 24 nt, Human
ucccaaaguguugggauuauaggc

SEQ ID NO: 728460 - RNA, 23 nt, Human
ucccacuacaaccuauugaggua

SEQ ID NO: 728461 - RNA, 22 nt, Human
uccguaaaaggcuucugugucc

SEQ ID NO: 728462 - RNA, 18 nt, Human
uccugcugcggcuucugc

SEQ ID NO: 728463 - RNA, 18 nt, Human
ucucacuauguugcccag

SEQ ID NO: 728464 - RNA, 19 nt, Human
ucucacuauguugcccagg

SEQ ID NO: 728465 - RNA, 23 nt, Human
ucucacuauguugcccaggcugg

SEQ ID NO: 728466 - RNA, 24 nt, Human
ucucacuauguugcccaggcuggu

SEQ ID NO: 728467 - RNA, 26 nt, Human
ucucacuauguugcccaggcuggucu

SEQ ID NO: 728468 - RNA, 27 nt, Human
ucucacuauguugcccaggcuggucuu

SEQ ID NO: 728469 - RNA, 20 nt, Human
ucuccagugugccuggcaac

SEQ ID NO: 728470 - RNA, 20 nt, Human
ucucuguggcuuacaaccaa

SEQ ID NO: 728471 - RNA, 21 nt, Human
ucugcuggugcucccaaaugc

SEQ ID NO: 728472 - RNA, 20 nt, Human
ucuggaacaggcaguuccag

SEQ ID NO: 728473 - RNA, 25 nt, Human
ucugggaagugggcuggagccuuuc

SEQ ID NO: 728474 - RNA, 21 nt, Human
ucugugguccagcuucucuug

SEQ ID NO: 728475 - RNA, 24 nt, Human
ucuguguucugggagcugugcuga

SEQ ID NO: 728476 - RNA, 19 nt, Human
ucuugcuuugucacccagg

SEQ ID NO: 728477 - RNA, 20 nt, Human
ucuugcuuugucacccagga

SEQ ID NO: 728478 - RNA, 23 nt, Human
ucuugcuuugucacccaggauga

SEQ ID NO: 728479 - RNA, 24 nt, Human
ucuugcuuugucacccaggaugaa

SEQ ID NO: 728480 - RNA, 21 nt, Human
ucuuuuuuugagacagggucu

SEQ ID NO: 728481 - RNA, 20 nt, Human
ugaaauuauaggcuuggggc

SEQ ID NO: 728482 - RNA, 18 nt, Human
ugacacuuucucucuucc

SEQ ID NO: 728483 - RNA, 22 nt, Human
ugaccccugacuggcugccuuc

SEQ ID NO: 728484 - RNA, 21 nt, Human
ugagacuauaggcacgcacca

SEQ ID NO: 728485 - RNA, 24 nt, Human
ugagacuauaggcacgcaccacca

SEQ ID NO: 728486 - RNA, 22 nt, Human
ugagacuccugccacgcagguc

SEQ ID NO: 728487 - RNA, 21 nt, Human
ugagagcaggugguugguucc

SEQ ID NO: 728488 - RNA, 18 nt, Human
ugaggauguguaaugugg

SEQ ID NO: 728489 - RNA, 19 nt, Human
ugagguaggcacugcuauc

SEQ ID NO: 728490 - RNA, 21 nt, Human
ugauaugggagcaauuaguuu

SEQ ID NO: 728491 - RNA, 23 nt, Human
ugcaaucagaugccaagguaaac

SEQ ID NO: 728492 - RNA, 23 nt, Human
ugcacacaugugcacacacaccu

SEQ ID NO: 728493 - RNA, 19 nt, Human
ugcacagagccugaggcgg

SEQ ID NO: 728494 - RNA, 21 nt, Human
ugcacagagccugaggcgggg

SEQ ID NO: 728495 - RNA, 23 nt, Human
ugcagagucaagaggccugggug

SEQ ID NO: 728496 - RNA, 21 nt, Human
ugcagcagagaugagccccaa

SEQ ID NO: 728497 - RNA, 21 nt, Human
ugccaccauggauaccugcug

SEQ ID NO: 728498 - RNA, 24 nt, Human
ugcccaggcuggucuugaacuccu

SEQ ID NO: 728499 - RNA, 20 nt, Human
ugccccagggcaaacacagc

SEQ ID NO: 728500 - RNA, 23 nt, Human
ugccccagggcaaacacagcagc

SEQ ID NO: 728501 - RNA, 24 nt, Human
ugccucagccucccgagcagcuga

SEQ ID NO: 728502 - RNA, 21 nt, Human
ugcggccaggacagcugugga

SEQ ID NO: 728503 - RNA, 25 nt, Human
ugcuuaagccaguuugggcugguuu

SEQ ID NO: 728504 - RNA, 26 nt, Human
ugcuuaagccaguuugggcugguuuu

SEQ ID NO: 728505 - RNA, 19 nt, Human
ugcuuuguugcuuaagcca

SEQ ID NO: 728506 - RNA, 24 nt, Human
uggaagaaagaaugaggucagcau

SEQ ID NO: 728507 - RNA, 18 nt, Human
uggauaccugcugguucu

SEQ ID NO: 728508 - RNA, 21 nt, Human
uggcaaucccuuccuuggauu

SEQ ID NO: 728509 - RNA, 24 nt, Human
uggcucacuccagccuugaccucc

SEQ ID NO: 728510 - RNA, 20 nt, Human
uggcucaguuacugcagcag

SEQ ID NO: 728511 - RNA, 18 nt, Human
uggcugacgucgcuaagc

SEQ ID NO: 728512 - RNA, 22 nt, Human
ugggaagugggcuggagccuuu

SEQ ID NO: 728513 - RNA, 18 nt, Human
ugggagcugugcugaaag

SEQ ID NO: 728514 - RNA, 18 nt, Human
ugggauuauaggcaugag

SEQ ID NO: 728515 - RNA, 19 nt, Human
ugggauuauaggcaugagc

SEQ ID NO: 728516 - RNA, 22 nt, Human
ugggauuauaggcaugagccac

SEQ ID NO: 728517 - RNA, 23 nt, Human
ugggauuauaggcaugagccacc

SEQ ID NO: 728518 - RNA, 24 nt, Human
ugggauuauaggcaugagccacca

SEQ ID NO: 728519 - RNA, 19 nt, Human
ugggcaaggcucucuccca

SEQ ID NO: 728520 - RNA, 21 nt, Human
ugggcagcaucuaggccuggg

SEQ ID NO: 728521 - RNA, 21 nt, Human
ugggguagggacuggcguggc

SEQ ID NO: 728522 - RNA, 22 nt, Human
ugggguagggacuggcguggcc

SEQ ID NO: 728523 - RNA, 22 nt, Human
ugguagacaccuuggccuuggc

SEQ ID NO: 728524 - RNA, 22 nt, Human
ugguccagauugggcaugaccc

SEQ ID NO: 728525 - RNA, 20 nt, Human
uggugaccccugacuggcug

SEQ ID NO: 728526 - RNA, 24 nt, Human
uguagagacagggucucacuaugu

SEQ ID NO: 728527 - RNA, 18 nt, Human
ugugacucgagcugggcc

SEQ ID NO: 728528 - RNA, 18 nt, Human
uuaacugcucaccaagca

SEQ ID NO: 728529 - RNA, 21 nt, Human
uucaagagcccugacaccacc

SEQ ID NO: 728530 - RNA, 19 nt, Human
uucaugcaacaauagugac

SEQ ID NO: 728531 - RNA, 19 nt, Human
uuccuggcccugcauugcu

SEQ ID NO: 728532 - RNA, 22 nt, Human
uucuguguccuucucuggggcu

SEQ ID NO: 728533 - RNA, 19 nt, Human
uucuguguucugggagcug

SEQ ID NO: 728534 - RNA, 21 nt, Human
uucuguguucugggagcugug

SEQ ID NO: 728535 - RNA, 18 nt, Human
uucuucuuuuuuugagac

SEQ ID NO: 728536 - RNA, 18 nt, Human
uugaagcaccugggcaug

SEQ ID NO: 728537 - RNA, 22 nt, Human
uugagacagggucuugcuuugu

SEQ ID NO: 728538 - RNA, 21 nt, Human
uugggauuauaggcaugagcc

SEQ ID NO: 728539 - RNA, 18 nt, Human
uuugggcugguuuucccu

SEQ ID NO: 728540 - RNA, 18 nt, Human
uuuguagagacagggucu

SEQ ID NO: 728541 - RNA, 24 nt, Human
uuuguagagacagggucucacuau

SEQ ID NO: 728542 - RNA, 22 nt, Human
aaaacauaaagcaauaaaauuu

SEQ ID NO: 728543 - RNA, 23 nt, Human
aaauacauguuuuucacaaauaa

SEQ ID NO: 728544 - RNA, 21 nt, Human
aacacguuuuuuaaacgugca

SEQ ID NO: 728545 - RNA, 21 nt, Human
aagcaaauauaugacauuaac

SEQ ID NO: 728546 - RNA, 24 nt, Human
acagcagcaaaagcaagcuaauac

SEQ ID NO: 728547 - RNA, 20 nt, Human
agaaaugagacauaccagaa

SEQ ID NO: 728548 - RNA, 21 nt, Human
agaaaugagacauaccagaac

SEQ ID NO: 728549 - RNA, 22 nt, Human
agaaaugagacauaccagaaca

SEQ ID NO: 728550 - RNA, 18 nt, Human
agauccucuccaagcccc

SEQ ID NO: 728551 - RNA, 20 nt, Human
aggcagccucuggcaaaaug

SEQ ID NO: 728552 - RNA, 19 nt, Human
aggucaaaacauaaagcaa

SEQ ID NO: 728553 - RNA, 24 nt, Human
aggugguggugguuggaagaaacc

SEQ ID NO: 728554 - RNA, 22 nt, Human
augagcaggacuuuucucaaaa

SEQ ID NO: 728555 - RNA, 21 nt, Human
caaaagaacagcuucagccuu

SEQ ID NO: 728556 - RNA, 19 nt, Human
caaaauggcccccgucuga

SEQ ID NO: 728557 - RNA, 20 nt, Human
caagccccaagcugcagaag

SEQ ID NO: 728558 - RNA, 27 nt, Human
caagccccaagcugcagaagaggcaaa

SEQ ID NO: 728559 - RNA, 19 nt, Human
caagcugcagaagaggcaa

SEQ ID NO: 728560 - RNA, 18 nt, Human
cacagcagcaaaagcaag

SEQ ID NO: 728561 - RNA, 20 nt, Human
cacagcagcaaaagcaagcu

SEQ ID NO: 728562 - RNA, 21 nt, Human
cagaagaggcaaaagaacagc

SEQ ID NO: 728563 - RNA, 18 nt, Human
cagcagcaaaagcaagcu

SEQ ID NO: 728564 - RNA, 20 nt, Human
cagcagcaaaagcaagcuaa

SEQ ID NO: 728565 - RNA, 20 nt, Human
cagcuucagccugccgccag

SEQ ID NO: 728566 - RNA, 23 nt, Human
ccaagccccaagcugcagaagag

SEQ ID NO: 728567 - RNA, 19 nt, Human
ccccacagcugccaccggg

SEQ ID NO: 728568 - RNA, 21 nt, Human
ccccacagcugccaccgggcg

SEQ ID NO: 728569 - RNA, 25 nt, Human
cccccgucugagcccuagaccccac

SEQ ID NO: 728570 - RNA, 22 nt, Human
ccccgucugagcccuagacccc

SEQ ID NO: 728571 - RNA, 20 nt, Human
cccuagaccccacagcugcc

SEQ ID NO: 728572 - RNA, 22 nt, Human
cccuagaccccacagcugccac

SEQ ID NO: 728573 - RNA, 23 nt, Human
ccugccgccaggccgcccccaac

SEQ ID NO: 728574 - RNA, 20 nt, Human
cgccaggccgcccccaacuc

SEQ ID NO: 728575 - RNA, 23 nt, Human
cgcccccaacuccgggaggcagc

SEQ ID NO: 728576 - RNA, 23 nt, Human
cugccgccaggccgcccccaacu

SEQ ID NO: 728577 - RNA, 21 nt, Human
gaaaugagacauaccagaaca

SEQ ID NO: 728578 - RNA, 18 nt, Human
gaacaugauuacauaaua

SEQ ID NO: 728579 - RNA, 20 nt, Human
gacauaccagaacaugauua

SEQ ID NO: 728580 - RNA, 19 nt, Human
gagacauaccagaacauga

SEQ ID NO: 728581 - RNA, 23 nt, Human
gauccucuccaagccccaagcug

SEQ ID NO: 728582 - RNA, 23 nt, Human
gcaggguugucaggugguggugg

SEQ ID NO: 728583 - RNA, 21 nt, Human
gcccccgucugagcccuagac

SEQ ID NO: 728584 - RNA, 20 nt, Human
ggcaaaauggcccccgucug

SEQ ID NO: 728585 - RNA, 23 nt, Human
uaaaauaaggcugagaaaugaga

SEQ ID NO: 728586 - RNA, 23 nt, Human
uaauuuuacauauagggcaacaa

SEQ ID NO: 728587 - RNA, 18 nt, Human
uacaaaacugggcagcag

SEQ ID NO: 728588 - RNA, 23 nt, Human
uacaguacuuguaagcccaugaa

SEQ ID NO: 728589 - RNA, 24 nt, Human
uacauguuuuucacaaauaauaua

SEQ ID NO: 728590 - RNA, 21 nt, Human
uagaaaguuccauuugucauc

SEQ ID NO: 728591 - RNA, 25 nt, Human
ucaucauguaaacacuuuuguucau

SEQ ID NO: 728592 - RNA, 22 nt, Human
uccaagccccaagcugcagaag

SEQ ID NO: 728593 - RNA, 20 nt, Human
uccacguuauaaaauaaggc

SEQ ID NO: 728594 - RNA, 22 nt, Human
ucccaugugacucagauuucau

SEQ ID NO: 728595 - RNA, 19 nt, Human
uccgggaggcagccucugg

SEQ ID NO: 728596 - RNA, 27 nt, Human
ucucaaaaauauuaaaauugaauucau

SEQ ID NO: 728597 - RNA, 19 nt, Human
ucuccaagccccaagcugc

SEQ ID NO: 728598 - RNA, 19 nt, Human
ucugaaaaaagcuauagaa

SEQ ID NO: 728599 - RNA, 18 nt, Human
ugaaaaaagcuauagaag

SEQ ID NO: 728600 - RNA, 21 nt, Human
ugaaaaaagcuauagaagacc

SEQ ID NO: 728601 - RNA, 21 nt, Human
ugacuuaauuugcuggaugug

SEQ ID NO: 728602 - RNA, 21 nt, Human
ugagcccuagaccccacagcu

SEQ ID NO: 728603 - RNA, 23 nt, Human
ugcagaagaggcaaaagaacagc

SEQ ID NO: 728604 - RNA, 18 nt, Human
ugcuggaugugaagugca

SEQ ID NO: 728605 - RNA, 22 nt, Human
uuaaauuucacaauuauguaga

SEQ ID NO: 728606 - RNA, 20 nt, Human
uucaucauacaguauuuuau

SEQ ID NO: 728607 - RNA, 21 nt, Human
uucaucauacaguauuuuauc

SEQ ID NO: 728608 - RNA, 21 nt, Human
uuccagauccucuccaagccc

SEQ ID NO: 728609 - RNA, 20 nt, Human
uuuaauguuuucuaaaacuu

SEQ ID NO: 728610 - RNA, 27 nt, Human
uuucacaauuauguagauaauugaacc

SEQ ID NO: 728611 - RNA, 24 nt, Human
uuuuagguuuuuaugugaugaaua

SEQ ID NO: 728612 - RNA, 23 nt, Human
aaaaaaaacaaaaccccaauccc

SEQ ID NO: 728613 - RNA, 19 nt, Human
aaaaaaacagccgggcaug

SEQ ID NO: 728614 - RNA, 22 nt, Human
aaaacacccaacaaacaaaaaa

SEQ ID NO: 728615 - RNA, 26 nt, Human
aaaaccccaauccccuacaaauaugg

SEQ ID NO: 728616 - RNA, 24 nt, Human
aaaacuuucccacauuccuuaugg

SEQ ID NO: 728617 - RNA, 24 nt, Human
aaaagagauucucuucaucgugga

SEQ ID NO: 728618 - RNA, 25 nt, Human
aaaauacacacuaaucugauguggg

SEQ ID NO: 728619 - RNA, 22 nt, Human
aaacagagauaaucauccagga

SEQ ID NO: 728620 - RNA, 18 nt, Human
aaagaagccaagcuagaa

SEQ ID NO: 728621 - RNA, 21 nt, Human
aaauggaauuugaagcuaaau

SEQ ID NO: 728622 - RNA, 23 nt, Human
aaauguaagaaagcaacacuuug

SEQ ID NO: 728623 - RNA, 24 nt, Human
aacagccgggcaugguggcucaug

SEQ ID NO: 728624 - RNA, 19 nt, Human
aacauggugaaaccccguc

SEQ ID NO: 728625 - RNA, 20 nt, Human
aacauggugaaaccccgucu

SEQ ID NO: 728626 - RNA, 21 nt, Human
aacauggugaaaccccgucuc

SEQ ID NO: 728627 - RNA, 22 nt, Human
aagaagccaagcuagaaaaaua

SEQ ID NO: 728628 - RNA, 18 nt, Human
aagcaagcaucuccacau

SEQ ID NO: 728629 - RNA, 18 nt, Human
aagcugagaaacaaggaa

SEQ ID NO: 728630 - RNA, 24 nt, Human
aaggugggcagaucacaaggucag

SEQ ID NO: 728631 - RNA, 24 nt, Human
aauacaagccuacucagaccaaaa

SEQ ID NO: 728632 - RNA, 24 nt, Human
aaucacuugaaccugggaggcgga

SEQ ID NO: 728633 - RNA, 19 nt, Human
acaaggaauaucaugaaac

SEQ ID NO: 728634 - RNA, 22 nt, Human
acacccaacaaacaaaaaaccc

SEQ ID NO: 728635 - RNA, 20 nt, Human
acagacaauucaaaugucag

SEQ ID NO: 728636 - RNA, 23 nt, Human
acaggagaaucacuugaaccugg

SEQ ID NO: 728637 - RNA, 19 nt, Human
acauuccuuauggugacag

SEQ ID NO: 728638 - RNA, 23 nt, Human
acccaacaaacaaaaaacccaau

SEQ ID NO: 728639 - RNA, 24 nt, Human
accccgucucuacuaaaaauacaa

SEQ ID NO: 728640 - RNA, 19 nt, Human
acugugaauucuccaaugc

SEQ ID NO: 728641 - RNA, 25 nt, Human
agaaaaauauacucucugaagggac

SEQ ID NO: 728642 - RNA, 22 nt, Human
agaaucacuugaaccugggagg

SEQ ID NO: 728643 - RNA, 22 nt, Human
agacaggagaaucacuugaacc

SEQ ID NO: 728644 - RNA, 24 nt, Human
agacaggagaaucacuugaaccug

SEQ ID NO: 728645 - RNA, 20 nt, Human
agaccaaaaagaaaauaaua

SEQ ID NO: 728646 - RNA, 23 nt, Human
agagacaaguuuucuggggagag

SEQ ID NO: 728647 - RNA, 21 nt, Human
agagaugcaacuuauuucaaa

SEQ ID NO: 728648 - RNA, 23 nt, Human
agccgggcaugguggcucaugcc

SEQ ID NO: 728649 - RNA, 22 nt, Human
agccuggccaacauggugaaac

SEQ ID NO: 728650 - RNA, 24 nt, Human
agccuggccaacauggugaaaccc

SEQ ID NO: 728651 - RNA, 25 nt, Human
agccugggcgacaggagcaagacuc

SEQ ID NO: 728652 - RNA, 23 nt, Human
agcugggaaugguggcaagugcc

SEQ ID NO: 728653 - RNA, 23 nt, Human
aggagacagaucacaaauccaga

SEQ ID NO: 728654 - RNA, 23 nt, Human
aggagcaagacuccaucucaaaa

SEQ ID NO: 728655 - RNA, 26 nt, Human
aggcagaaagagacuggaagugcaug

SEQ ID NO: 728656 - RNA, 21 nt, Human
aggccaaggugggcagaucac

SEQ ID NO: 728657 - RNA, 21 nt, Human
aggcggagguugcagugagcc

SEQ ID NO: 728658 - RNA, 24 nt, Human
aggcggagguugcagugagccgag

SEQ ID NO: 728659 - RNA, 22 nt, Human
agggauguacagcagagggaca

SEQ ID NO: 728660 - RNA, 18 nt, Human
aggugggcagaucacaag

SEQ ID NO: 728661 - RNA, 24 nt, Human
aggugggcagaucacaaggucagg

SEQ ID NO: 728662 - RNA, 21 nt, Human
aguaagaucucaccuggaaac

SEQ ID NO: 728663 - RNA, 18 nt, Human
auaaaagaaaucaggaaa

SEQ ID NO: 728664 - RNA, 23 nt, Human
auaaaauccacuuuuaccuaaag

SEQ ID NO: 728665 - RNA, 19 nt, Human
aucacaaggucaggaguuc

SEQ ID NO: 728666 - RNA, 20 nt, Human
aucacaaggucaggaguucc

SEQ ID NO: 728667 - RNA, 21 nt, Human
auccaaagcugagaaacaagg

SEQ ID NO: 728668 - RNA, 24 nt, Human
aucgugccauugcacuccagccug

SEQ ID NO: 728669 - RNA, 24 nt, Human
aucucaaaaaaauaaagaaaauaa

SEQ ID NO: 728670 - RNA, 24 nt, Human
aucuuaaaaaaacagccgggcaug

SEQ ID NO: 728671 - RNA, 19 nt, Human
auucagcaucuccagauuu

SEQ ID NO: 728672 - RNA, 24 nt, Human
auugcacuccagccugggcgacag

SEQ ID NO: 728673 - RNA, 23 nt, Human
auuugggugagaagagacagcua

SEQ ID NO: 728674 - RNA, 18 nt, Human
caaaaaaaacaaaacccc

SEQ ID NO: 728675 - RNA, 24 nt, Human
caaaaaaaacaaaaccccaauccc

SEQ ID NO: 728676 - RNA, 25 nt, Human
caaaaaaauaaagaaaauaaagaag

SEQ ID NO: 728677 - RNA, 24 nt, Human
caaaaugcacagacaauucaaaug

SEQ ID NO: 728678 - RNA, 24 nt, Human
caacauggugaaaccccgucucua

SEQ ID NO: 728679 - RNA, 21 nt, Human
caagacuccaucucaaaaaaa

SEQ ID NO: 728680 - RNA, 25 nt, Human
caagcuagaaaaauauacucucuga

SEQ ID NO: 728681 - RNA, 23 nt, Human
caaggaauaucaugaaaccaaga

SEQ ID NO: 728682 - RNA, 22 nt, Human
cacaaauccagagaugcaacuu

SEQ ID NO: 728683 - RNA, 25 nt, Human
cacuauaaacaaaagccuuucaaaa

SEQ ID NO: 728684 - RNA, 24 nt, Human
cacuccagccugggcgacaggagc

SEQ ID NO: 728685 - RNA, 21 nt, Human
cacugauuuuucccaaguucc

SEQ ID NO: 728686 - RNA, 21 nt, Human
cacuugaaccugggaggcgga

SEQ ID NO: 728687 - RNA, 21 nt, Human
cagcuucacaaguaggggcca

SEQ ID NO: 728688 - RNA, 22 nt, Human
cagcuucuaaacauucuuuccu

SEQ ID NO: 728689 - RNA, 21 nt, Human
cagguuuuagaacugaaaaga

SEQ ID NO: 728690 - RNA, 22 nt, Human
caucuaaaacaaaaugcacaga

SEQ ID NO: 728691 - RNA, 24 nt, Human
caugccuguaaucccugaacuuug

SEQ ID NO: 728692 - RNA, 25 nt, Human
cauuccccccaacaaaauucagcau

SEQ ID NO: 728693 - RNA, 19 nt, Human
cauugcacuccagccuggg

SEQ ID NO: 728694 - RNA, 21 nt, Human
cauugcacuccagccugggcg

SEQ ID NO: 728695 - RNA, 22 nt, Human
cauugcacuccagccugggcga

SEQ ID NO: 728696 - RNA, 24 nt, Human
cauugcacuccagccugggcgaca

SEQ ID NO: 728697 - RNA, 25 nt, Human
cauugcacuccagccugggcgacag

SEQ ID NO: 728698 - RNA, 24 nt, Human
ccaaugcuggcaaaccuucccaag

SEQ ID NO: 728699 - RNA, 22 nt, Human
ccagccugggcgacaggagcaa

SEQ ID NO: 728700 - RNA, 25 nt, Human
ccagggccagaagagaacucccucu

SEQ ID NO: 728701 - RNA, 23 nt, Human
ccagggccuguuccagcaccugc

SEQ ID NO: 728702 - RNA, 26 nt, Human
ccauaucaaaaggcaauaacacugag

SEQ ID NO: 728703 - RNA, 20 nt, Human
ccauugcacuccagccuggg

SEQ ID NO: 728704 - RNA, 21 nt, Human
ccauugcacuccagccugggc

SEQ ID NO: 728705 - RNA, 22 nt, Human
ccauugcacuccagccugggcg

SEQ ID NO: 728706 - RNA, 23 nt, Human
ccauugcacuccagccugggcga

SEQ ID NO: 728707 - RNA, 24 nt, Human
ccauugcacuccagccugggcgac

SEQ ID NO: 728708 - RNA, 19 nt, Human
cccaacaaaauucagcauc

SEQ ID NO: 728709 - RNA, 21 nt, Human
cccaauauagaaagaggaggu

SEQ ID NO: 728710 - RNA, 22 nt, Human
ccccagggccagaagagaacuc

SEQ ID NO: 728711 - RNA, 19 nt, Human
ccccccaacaaaauucagc

SEQ ID NO: 728712 - RNA, 19 nt, Human
ccccccaacaaaauucagc

SEQ ID NO: 728713 - RNA, 20 nt, Human
ccuaaguuaaaacacccaac

SEQ ID NO: 728714 - RNA, 18 nt, Human
ccucuuucucuccagaga

SEQ ID NO: 728715 - RNA, 23 nt, Human
ccuggccaacauggugaaacccc

SEQ ID NO: 728716 - RNA, 24 nt, Human
ccuggccaacauggugaaaccccg

SEQ ID NO: 728717 - RNA, 19 nt, Human
ccugggaggcggagguugc

SEQ ID NO: 728718 - RNA, 23 nt, Human
ccugggcgacaggagcaagacuc

SEQ ID NO: 728719 - RNA, 21 nt, Human
ccuguaaucccagcuacucgg

SEQ ID NO: 728720 - RNA, 22 nt, Human
ccuguaaucccugaacuuuggg

SEQ ID NO: 728721 - RNA, 24 nt, Human
ccuuucacugcauuuacugaaaca

SEQ ID NO: 728722 - RNA, 22 nt, Human
cgaaggcaagaggccucgaacc

SEQ ID NO: 728723 - RNA, 21 nt, Human
cgacaggagcaagacuccauc

SEQ ID NO: 728724 - RNA, 24 nt, Human
cgagaccagccuggccaacauggu

SEQ ID NO: 728725 - RNA, 24 nt, Human
cgggagacugagacaggagaauca

SEQ ID NO: 728726 - RNA, 20 nt, Human
cuaucuccagagaguagcaa

SEQ ID NO: 728727 - RNA, 18 nt, Human
cucagaccaaaaagaaaa

SEQ ID NO: 728728 - RNA, 24 nt, Human
cucaugccuguaaucccugaacuu

SEQ ID NO: 728729 - RNA, 19 nt, Human
cuccacauucuggaugaua

SEQ ID NO: 728730 - RNA, 24 nt, Human
cugaacuuugggaggccaaggugg

SEQ ID NO: 728731 - RNA, 23 nt, Human
cuguaaucccugaacuuugggag

SEQ ID NO: 728732 - RNA, 19 nt, Human
cuuugccagccugauucuu

SEQ ID NO: 728733 - RNA, 26 nt, Human
gaaggcacguggcaggguaggaguug

SEQ ID NO: 728734 - RNA, 23 nt, Human
gagaucgugccauugcacuccag

SEQ ID NO: 728735 - RNA, 23 nt, Human
gagguugcagugagccgagaucg

SEQ ID NO: 728736 - RNA, 22 nt, Human
gaucacaaggucaggaguucga

SEQ ID NO: 728737 - RNA, 24 nt, Human
gaucacaaggucaggaguucgaga

SEQ ID NO: 728738 - RNA, 23 nt, Human
gcaaaaaauuuagggauguacag

SEQ ID NO: 728739 - RNA, 24 nt, Human
gcagaaagagacuggaagugcaug

SEQ ID NO: 728740 - RNA, 19 nt, Human
gcaggguaggaguaggggg

SEQ ID NO: 728741 - RNA, 24 nt, Human
gccaacauggugaaaccccgucuc

SEQ ID NO: 728742 - RNA, 22 nt, Human
gccauugcacuccagccugggc

SEQ ID NO: 728743 - RNA, 24 nt, Human
gccauugcacuccagccugggcga

SEQ ID NO: 728744 - RNA, 23 nt, Human
ggaaugguggcaagugccuguaa

SEQ ID NO: 728745 - RNA, 20 nt, Human
ggacaccuacacggucuugu

SEQ ID NO: 728746 - RNA, 20 nt, Human
ggagguugcagugagccgag

SEQ ID NO: 728747 - RNA, 22 nt, Human
ggagguugcagugagccgagau

SEQ ID NO: 728748 - RNA, 23 nt, Human
ggagguugcagugagccgagauc

SEQ ID NO: 728749 - RNA, 24 nt, Human
ggagguugcagugagccgagaucg

SEQ ID NO: 728750 - RNA, 23 nt, Human
ggcagaucacaaggucaggaguu

SEQ ID NO: 728751 - RNA, 27 nt, Human
gggauaugaucaaaguuaacuugaaaa

SEQ ID NO: 728752 - RNA, 24 nt, Human
gggcaugguggcucaugccuguaa

SEQ ID NO: 728753 - RNA, 24 nt, Human
gggccagggccuguuccagcaccu

SEQ ID NO: 728754 - RNA, 26 nt, Human
ggguaggaguagggggguccaauuug

SEQ ID NO: 728755 - RNA, 22 nt, Human
ggucaaaaaaaacaaaacccca

SEQ ID NO: 728756 - RNA, 24 nt, Human
gguggcaagugccuguaaucccag

SEQ ID NO: 728757 - RNA, 24 nt, Human
gguggcucaugccuguaaucccug

SEQ ID NO: 728758 - RNA, 19 nt, Human
gucaagcuuucccaucggu

SEQ ID NO: 728759 - RNA, 19 nt, Human
guguuggagaauauaaagg

SEQ ID NO: 728760 - RNA, 18 nt, Human
guuuuagaacugaaaaga

SEQ ID NO: 728761 - RNA, 21 nt, Human
uaaaacaaaaugcacagacaa

SEQ ID NO: 728762 - RNA, 21 nt, Human
uaaaacacccaacaaacaaaa

SEQ ID NO: 728763 - RNA, 22 nt, Human
uaaaacacccaacaaacaaaaa

SEQ ID NO: 728764 - RNA, 23 nt, Human
uaaaacacccaacaaacaaaaaa

SEQ ID NO: 728765 - RNA, 26 nt, Human
uaaaaugagcaauuuagacuaccccc

SEQ ID NO: 728766 - RNA, 20 nt, Human
uaaacaaaagccuuucaaaa

SEQ ID NO: 728767 - RNA, 21 nt, Human
uaaagaaaauaaagaagccaa

SEQ ID NO: 728768 - RNA, 21 nt, Human
uaaagauaugagaugagacua

SEQ ID NO: 728769 - RNA, 21 nt, Human
uaacaccaucuaaaacaaaau

SEQ ID NO: 728770 - RNA, 19 nt, Human
uaagucucuaaacaagcau

SEQ ID NO: 728771 - RNA, 22 nt, Human
uaaguuaaaacacccaacaaac

SEQ ID NO: 728772 - RNA, 20 nt, Human
uaaucaaaaaagagaagauc

SEQ ID NO: 728773 - RNA, 20 nt, Human
uagaauucugagauaaucac

SEQ ID NO: 728774 - RNA, 19 nt, Human
uaggguacagugauuaaaa

SEQ ID NO: 728775 - RNA, 18 nt, Human
uagguuugaucugaaacc

SEQ ID NO: 728776 - RNA, 24 nt, Human
uauuacauuuaugcagucucucuc

SEQ ID NO: 728777 - RNA, 20 nt, Human
uauuucaaaaguccugguug

SEQ ID NO: 728778 - RNA, 18 nt, Human
ucacaaggucaggaguuc

SEQ ID NO: 728779 - RNA, 24 nt, Human
ucacaaggucaggaguucgagacc

SEQ ID NO: 728780 - RNA, 24 nt, Human
ucacuugaaccugggaggcggagg

SEQ ID NO: 728781 - RNA, 25 nt, Human
ucacuugaaccugggaggcggaggu

SEQ ID NO: 728782 - RNA, 22 nt, Human
ucagguagauaaugagaaggag

SEQ ID NO: 728783 - RNA, 23 nt, Human
ucagguuugcugcuuucuauccu

SEQ ID NO: 728784 - RNA, 23 nt, Human
ucaguaacaccaucuaaaacaaa

SEQ ID NO: 728785 - RNA, 21 nt, Human
ucaugccuguaaucccugaac

SEQ ID NO: 728786 - RNA, 18 nt, Human
uccacuauaaacaaaagc

SEQ ID NO: 728787 - RNA, 18 nt, Human
uccagccugggcgacagg

SEQ ID NO: 728788 - RNA, 19 nt, Human
uccaucucaaaaaaauaaa

SEQ ID NO: 728789 - RNA, 23 nt, Human
ucccgugaggcucuccucuuucu

SEQ ID NO: 728790 - RNA, 19 nt, Human
ucccucuacggagcgaagg

SEQ ID NO: 728791 - RNA, 23 nt, Human
ucgugccauugcacuccagccug

SEQ ID NO: 728792 - RNA, 21 nt, Human
ucuaaaagcuucccgugaggc

SEQ ID NO: 728793 - RNA, 24 nt, Human
ucuaaaauguaagaaagcaacacu

SEQ ID NO: 728794 - RNA, 19 nt, Human
ucuacagacauucccccca

SEQ ID NO: 728795 - RNA, 21 nt, Human
ucuauaagaaaaaauaucagu

SEQ ID NO: 728796 - RNA, 27 nt, Human
ucuaucuuaaaaaaacagccgggcaug

SEQ ID NO: 728797 - RNA, 27 nt, Human
ucuccacauucaucauguuuauugugc

SEQ ID NO: 728798 - RNA, 22 nt, Human
ucuccagagaugcucucucauc

SEQ ID NO: 728799 - RNA, 19 nt, Human
ucucuaaacaagcaucuca

SEQ ID NO: 728800 - RNA, 21 nt, Human
ucucuacuaaaaauacaaaaa

SEQ ID NO: 728801 - RNA, 19 nt, Human
ucucucucauguggauucu

SEQ ID NO: 728802 - RNA, 20 nt, Human
ugaaaagaauaagcaaguua

SEQ ID NO: 728803 - RNA, 24 nt, Human
ugaaccugggaggcggagguugca

SEQ ID NO: 728804 - RNA, 21 nt, Human
ugaagcuaaaggaguuaagug

SEQ ID NO: 728805 - RNA, 19 nt, Human
ugagaagagacagcuaggc

SEQ ID NO: 728806 - RNA, 24 nt, Human
ugagaaggagaugaguagagacaa

SEQ ID NO: 728807 - RNA, 24 nt, Human
ugagacaggagaaucacuugaacc

SEQ ID NO: 728808 - RNA, 19 nt, Human
ugagaugagacuagagcag

SEQ ID NO: 728809 - RNA, 22 nt, Human
ugagccgagaucgugccauugc

SEQ ID NO: 728810 - RNA, 24 nt, Human
ugaguggaucaguaaacaacggga

SEQ ID NO: 728811 - RNA, 19 nt, Human
ugcagcuucacaaguaggg

SEQ ID NO: 728812 - RNA, 19 nt, Human
ugcaguucuacagacauuc

SEQ ID NO: 728813 - RNA, 23 nt, Human
ugccuguaaucccagcuacucgg

SEQ ID NO: 728814 - RNA, 24 nt, Human
ugccuguaaucccagcuacucggg

SEQ ID NO: 728815 - RNA, 23 nt, Human
ugccuguaaucccugaacuuugg

SEQ ID NO: 728816 - RNA, 23 nt, Human
ugccuguaaucccugaacuuugg

SEQ ID NO: 728817 - RNA, 19 nt, Human
ugcuuucuauccuauuccc

SEQ ID NO: 728818 - RNA, 18 nt, Human
uggaucaguaaacaacgg

SEQ ID NO: 728819 - RNA, 24 nt, Human
uggccaacauggugaaaccccguc

SEQ ID NO: 728820 - RNA, 26 nt, Human
uggcuacuacuauaaaccuacagaau

SEQ ID NO: 728821 - RNA, 20 nt, Human
uggcucaugccuguaauccc

SEQ ID NO: 728822 - RNA, 22 nt, Human
uggcucaugccuguaaucccug

SEQ ID NO: 728823 - RNA, 21 nt, Human
uggcugagauuuccuacuuaa

SEQ ID NO: 728824 - RNA, 21 nt, Human
ugggaaugguggcaagugccu

SEQ ID NO: 728825 - RNA, 20 nt, Human
ugggaggccaaggugggcag

SEQ ID NO: 728826 - RNA, 24 nt, Human
ugggaggccaaggugggcagauca

SEQ ID NO: 728827 - RNA, 29 nt, Human
ugggaggcggagguugcagugacaacggu

SEQ ID NO: 728828 - RNA, 24 nt, Human
ugggaggcggagguugcagugagc

SEQ ID NO: 728829 - RNA, 22 nt, Human
ugggcagaucacaaggucagga

SEQ ID NO: 728830 - RNA, 19 nt, Human
ugggucaaaaaaaacaaaa

SEQ ID NO: 728831 - RNA, 24 nt, Human
ugggucaaaaaaaacaaaacccca

SEQ ID NO: 728832 - RNA, 20 nt, Human
uggucuugggaaauggaauu

SEQ ID NO: 728833 - RNA, 24 nt, Human
ugguggcaagugccuguaauccca

SEQ ID NO: 728834 - RNA, 23 nt, Human
ugguggcucaugccuguaauccc

SEQ ID NO: 728835 - RNA, 24 nt, Human
ugguuuguccuucauuuggaagac

SEQ ID NO: 728836 - RNA, 21 nt, Human
uguguuggagaauauaaaggu

SEQ ID NO: 728837 - RNA, 20 nt, Human
uuaaaaauaaaauccacuuu

SEQ ID NO: 728838 - RNA, 24 nt, Human
uuagcugggaaugguggcaagugc

SEQ ID NO: 728839 - RNA, 21 nt, Human
uuauugugcagauucucuggu

SEQ ID NO: 728840 - RNA, 20 nt, Human
uucaaaaguccugguugcuu

SEQ ID NO: 728841 - RNA, 23 nt, Human
uucaaaauacacacuaaucugau

SEQ ID NO: 728842 - RNA, 20 nt, Human
uucccaaguuccaaccucug

SEQ ID NO: 728843 - RNA, 26 nt, Human
uugaaaauaaugaauuuauuaauaau

SEQ ID NO: 728844 - RNA, 24 nt, Human
uugaaccugggaggcggagguugc

SEQ ID NO: 728845 - RNA, 18 nt, Human
uugcagugagccgagauc

SEQ ID NO: 728846 - RNA, 22 nt, Human
uugcagugagccgagaucgugc

SEQ ID NO: 728847 - RNA, 23 nt, Human
uugcagugagccgagaucgugcc

SEQ ID NO: 728848 - RNA, 22 nt, Human
uugcugaaugaauuaaagauau

SEQ ID NO: 728849 - RNA, 19 nt, Human
uugggaaauggaauuugaa

SEQ ID NO: 728850 - RNA, 19 nt, Human
uuuguuuuguuuuguuuug

SEQ ID NO: 728851 - RNA, 23 nt, Human
aaaacagacugggacuuggcuuc

SEQ ID NO: 728852 - RNA, 20 nt, Human
aaaacagaggcgcuggaagc

SEQ ID NO: 728853 - RNA, 19 nt, Human
aaaaugaucccugaucuga

SEQ ID NO: 728854 - RNA, 23 nt, Human
aaacaaugacuaacucauccuga

SEQ ID NO: 728855 - RNA, 21 nt, Human
aaagagacuucaaagcaaccg

SEQ ID NO: 728856 - RNA, 23 nt, Human
aaaggagcagcaaccugcauuua

SEQ ID NO: 728857 - RNA, 21 nt, Human
aaagugugugcuccagccccc

SEQ ID NO: 728858 - RNA, 19 nt, Human
aacaaugacuaacucaucc

SEQ ID NO: 728859 - RNA, 18 nt, Human
aacccacuuguaguuugg

SEQ ID NO: 728860 - RNA, 23 nt, Human
aaccguggagggaggaagaaggc

SEQ ID NO: 728861 - RNA, 23 nt, Human
aagaaggcaggguucagggccag

SEQ ID NO: 728862 - RNA, 20 nt, Human
aagcaguggaauaaacuagg

SEQ ID NO: 728863 - RNA, 26 nt, Human
aagggaaacagggagggaggggcggg

SEQ ID NO: 728864 - RNA, 18 nt, Human
aaggggagggccagggcc

SEQ ID NO: 728865 - RNA, 20 nt, Human
acaacacagcccccuccaca

SEQ ID NO: 728866 - RNA, 20 nt, Human
acaccccccacccucauccc

SEQ ID NO: 728867 - RNA, 22 nt, Human
acagcgaugagaucccucacac

SEQ ID NO: 728868 - RNA, 18 nt, Human
acaggcaaaggcuccaca

SEQ ID NO: 728869 - RNA, 19 nt, Human
acccagugaauucaccccu

SEQ ID NO: 728870 - RNA, 18 nt, Human
acccuucccacacccccc

SEQ ID NO: 728871 - RNA, 21 nt, Human
accgacggagggagggugguc

SEQ ID NO: 728872 - RNA, 19 nt, Human
accuuccucuccagccaac

SEQ ID NO: 728873 - RNA, 18 nt, Human
acucgggguuccucuggc

SEQ ID NO: 728874 - RNA, 26 nt, Human
acugaagcacagguggaggcugccug

SEQ ID NO: 728875 - RNA, 20 nt, Human
agaaaacagacugggacuug

SEQ ID NO: 728876 - RNA, 19 nt, Human
agaaacaugcuucccuuau

SEQ ID NO: 728877 - RNA, 20 nt, Human
agaaggcaggguucagggcc

SEQ ID NO: 728878 - RNA, 23 nt, Human
agacugagacaggaucaacauca

SEQ ID NO: 728879 - RNA, 19 nt, Human
agagagaauggggucugag

SEQ ID NO: 728880 - RNA, 22 nt, Human
agagagaauggggucugaggga

SEQ ID NO: 728881 - RNA, 20 nt, Human
agaggggagggagggaggga

SEQ ID NO: 728882 - RNA, 21 nt, Human
agccaaugguuucccaacaca

SEQ ID NO: 728883 - RNA, 18 nt, Human
agcccccuccacacagug

SEQ ID NO: 728884 - RNA, 19 nt, Human
agccuuagaaaugcaauau

SEQ ID NO: 728885 - RNA, 22 nt, Human
aggaagcggcuaggcucugaca

SEQ ID NO: 728886 - RNA, 24 nt, Human
aggaaggaaaaaaaaugaucccug

SEQ ID NO: 728887 - RNA, 18 nt, Human
aggacuuggaggugggag

SEQ ID NO: 728888 - RNA, 23 nt, Human
aggcccagccaaugguuucccaa

SEQ ID NO: 728889 - RNA, 22 nt, Human
aggcgcuggaagccaguggcga

SEQ ID NO: 728890 - RNA, 24 nt, Human
aggcgggagugaggaaggggaggg

SEQ ID NO: 728891 - RNA, 21 nt, Human
agggaagggaaacagggaggg

SEQ ID NO: 728892 - RNA, 23 nt, Human
agggaaggggaagggagggacga

SEQ ID NO: 728893 - RNA, 25 nt, Human
agggagggagggaagggaaacaggg

SEQ ID NO: 728894 - RNA, 21 nt, Human
agggagggaggggcggguagg

SEQ ID NO: 728895 - RNA, 19 nt, Human
aggggaaagcaaugcaacc

SEQ ID NO: 728896 - RNA, 19 nt, Human
aggggaagggagggacgag

SEQ ID NO: 728897 - RNA, 25 nt, Human
agugacccagggccugcccggccuc

SEQ ID NO: 728898 - RNA, 20 nt, Human
aguuuggguucagcuggaaa

SEQ ID NO: 728899 - RNA, 24 nt, Human
auuggccaaagagacuucaaagca

SEQ ID NO: 728900 - RNA, 22 nt, Human
caaaccccacaugcuucagggg

SEQ ID NO: 728901 - RNA, 25 nt, Human
caaaccccacaugcuucaggggggc

SEQ ID NO: 728902 - RNA, 24 nt, Human
cacaaggccccuggggccaggacc

SEQ ID NO: 728903 - RNA, 24 nt, Human
caccaggaaaaagaaacaugcuuc

SEQ ID NO: 728904 - RNA, 18 nt, Human
caccccccacccucaucc

SEQ ID NO: 728905 - RNA, 21 nt, Human
caccccccacccucaucccuc

SEQ ID NO: 728906 - RNA, 18 nt, Human
caccccuguccucccgcc

SEQ ID NO: 728907 - RNA, 18 nt, Human
caccugggaccagagggc

SEQ ID NO: 728908 - RNA, 20 nt, Human
caccuguuccaccccacacc

SEQ ID NO: 728909 - RNA, 21 nt, Human
caccuuccucuccagccaaca

SEQ ID NO: 728910 - RNA, 20 nt, Human
caccuugucgccaacaggcu

SEQ ID NO: 728911 - RNA, 19 nt, Human
cagaaucaaucaaucacga

SEQ ID NO: 728912 - RNA, 18 nt, Human
cagcagagaggggaggga

SEQ ID NO: 728913 - RNA, 19 nt, Human
cagcuggaaagcaggacau

SEQ ID NO: 728914 - RNA, 22 nt, Human
caggaaaaagaaacaugcuucc

SEQ ID NO: 728915 - RNA, 18 nt, Human
caggaccagggccugcca

SEQ ID NO: 728916 - RNA, 22 nt, Human
caggacgauccccaaacaguga

SEQ ID NO: 728917 - RNA, 23 nt, Human
caggaucaacaucagauggcugg

SEQ ID NO: 728918 - RNA, 21 nt, Human
caggcucuuuuuagagacagg

SEQ ID NO: 728919 - RNA, 24 nt, Human
cagggccagggaccagagguggcg

SEQ ID NO: 728920 - RNA, 18 nt, Human
cagugaggaggacuugga

SEQ ID NO: 728921 - RNA, 22 nt, Human
caguggugacaguaucagcccu

SEQ ID NO: 728922 - RNA, 21 nt, Human
caucaaggagcccguucggag

SEQ ID NO: 728923 - RNA, 22 nt, Human
ccaccgacucugccugcccucc

SEQ ID NO: 728924 - RNA, 18 nt, Human
ccacugaagcacaggugg

SEQ ID NO: 728925 - RNA, 30 nt, Human
ccagcagagaggggagggagggagggaagg

SEQ ID NO: 728926 - RNA, 18 nt, Human
ccagccaacaacagggcc

SEQ ID NO: 728927 - RNA, 26 nt, Human
ccagccggcucagggaggcggccagc

SEQ ID NO: 728928 - RNA, 24 nt, Human
ccagcgcacagacccagcagagag

SEQ ID NO: 728929 - RNA, 26 nt, Human
ccagcucugccucucaucacauacau

SEQ ID NO: 728930 - RNA, 20 nt, Human
ccaggccaucaaggagcccg

SEQ ID NO: 728931 - RNA, 21 nt, Human
ccagggccaccccuguccucc

SEQ ID NO: 728932 - RNA, 18 nt, Human
ccaguggugacaguauca

SEQ ID NO: 728933 - RNA, 24 nt, Human
cccaaggugcccacaacacagccc

SEQ ID NO: 728934 - RNA, 21 nt, Human
cccacaacacagcccccucca

SEQ ID NO: 728935 - RNA, 23 nt, Human
cccacaacacagcccccuccaca

SEQ ID NO: 728936 - RNA, 19 nt, Human
cccacaccccccacccuca

SEQ ID NO: 728937 - RNA, 23 nt, Human
cccacucccauccuuuuccccag

SEQ ID NO: 728938 - RNA, 23 nt, Human
cccacucgccacucucagacuca

SEQ ID NO: 728939 - RNA, 23 nt, Human
ccccacucccauccuuuucccca

SEQ ID NO: 728940 - RNA, 20 nt, Human
ccccacucgccacucucaga

SEQ ID NO: 728941 - RNA, 20 nt, Human
cccccuccacacaguguuuc

SEQ ID NO: 728942 - RNA, 19 nt, Human
ccccgcugcgccugacccc

SEQ ID NO: 728943 - RNA, 22 nt, Human
cccgccccuacagcugccccgg

SEQ ID NO: 728944 - RNA, 26 nt, Human
cccgcgucuggggcaccccauggggc

SEQ ID NO: 728945 - RNA, 24 nt, Human
cccggcuccucccucgaggccucc

SEQ ID NO: 728946 - RNA, 24 nt, Human
cccgugggccgccugccaggcccc

SEQ ID NO: 728947 - RNA, 24 nt, Human
cccugagcagccccgcaucagccc

SEQ ID NO: 728948 - RNA, 23 nt, Human
ccgccccuacagcugccccggcc

SEQ ID NO: 728949 - RNA, 19 nt, Human
ccguggagggaggaagaag

SEQ ID NO: 728950 - RNA, 19 nt, Human
ccuacaccuugucgccaac

SEQ ID NO: 728951 - RNA, 23 nt, Human
ccuccaaagugacccagggccuu

SEQ ID NO: 728952 - RNA, 18 nt, Human
ccuccucccugaccugag

SEQ ID NO: 728953 - RNA, 20 nt, Human
ccuguccaucuggcccugug

SEQ ID NO: 728954 - RNA, 18 nt, Human
ccugucguccacucccag

SEQ ID NO: 728955 - RNA, 24 nt, Human
ccuguggccaggccaucaaggagc

SEQ ID NO: 728956 - RNA, 24 nt, Human
ccuguuugccacaaggccccuggg

SEQ ID NO: 728957 - RNA, 22 nt, Human
ccuugcucuggggagguagguc

SEQ ID NO: 728958 - RNA, 20 nt, Human
cgacucugccugcccuccuc

SEQ ID NO: 728959 - RNA, 23 nt, Human
cgccugcugccaguuggcgacug

SEQ ID NO: 728960 - RNA, 20 nt, Human
cggcuccucccucgaggccu

SEQ ID NO: 728961 - RNA, 22 nt, Human
cggcuccucccucgaggccucc

SEQ ID NO: 728962 - RNA, 18 nt, Human
cgggggcacuccucucag

SEQ ID NO: 728963 - RNA, 18 nt, Human
cgggggugggggaagggg

SEQ ID NO: 728964 - RNA, 19 nt, Human
cuccagacuggccaccgac

SEQ ID NO: 728965 - RNA, 22 nt, Human
cuccagcucaggggccugggcc

SEQ ID NO: 728966 - RNA, 18 nt, Human
cuccaucucccccgcugc

SEQ ID NO: 728967 - RNA, 18 nt, Human
cucccugaccugagcucc

SEQ ID NO: 728968 - RNA, 22 nt, Human
cucuccucucuucgggggccuu

SEQ ID NO: 728969 - RNA, 21 nt, Human
cucugccugcccuccucccca

SEQ ID NO: 728970 - RNA, 22 nt, Human
cucuucgggggccuugccuccu

SEQ ID NO: 728971 - RNA, 18 nt, Human
cugaagcacagguggagg

SEQ ID NO: 728972 - RNA, 18 nt, Human
cugagcucccacucccag

SEQ ID NO: 728973 - RNA, 20 nt, Human
cugcagcugagggacacgac

SEQ ID NO: 728974 - RNA, 19 nt, Human
cugccaggcccccuggcug

SEQ ID NO: 728975 - RNA, 21 nt, Human
cugcccuccuccccauuucuu

SEQ ID NO: 728976 - RNA, 23 nt, Human
cugcccuccuccccauuucuuuc

SEQ ID NO: 728977 - RNA, 19 nt, Human
cuggaccgccucuuccaug

SEQ ID NO: 728978 - RNA, 26 nt, Human
cugucugggcccccgccccuacagcu

SEQ ID NO: 728979 - RNA, 18 nt, Human
cuguguucccaggcuggg

SEQ ID NO: 728980 - RNA, 21 nt, Human
cuguguucccaggcugggcug

SEQ ID NO: 728981 - RNA, 22 nt, Human
cuguguucccaggcugggcugg

SEQ ID NO: 728982 - RNA, 21 nt, Human
cuugcaugcucgggcuggggg

SEQ ID NO: 728983 - RNA, 19 nt, Human
cuugcucugagcucaccgu

SEQ ID NO: 728984 - RNA, 22 nt, Human
cuuucaagcaguggaauaaacu

SEQ ID NO: 728985 - RNA, 21 nt, Human
gaacugcaaacuccaucuccc

SEQ ID NO: 728986 - RNA, 19 nt, Human
gaagggagggacgaggcuc

SEQ ID NO: 728987 - RNA, 18 nt, Human
gaaggggagggccagggc

SEQ ID NO: 728988 - RNA, 19 nt, Human
gacccagcagagaggggag

SEQ ID NO: 728989 - RNA, 23 nt, Human
gacucggccaacauuuacauuua

SEQ ID NO: 728990 - RNA, 19 nt, Human
gagacaggcaaaggcucca

SEQ ID NO: 728991 - RNA, 20 nt, Human
gagcagcaaccugcauuuag

SEQ ID NO: 728992 - RNA, 20 nt, Human
gaggaagaaggcaggguuca

SEQ ID NO: 728993 - RNA, 21 nt, Human
gaucuguguccucaaaggccc

SEQ ID NO: 728994 - RNA, 25 nt, Human
gauggggaggggagaggcgggagug

SEQ ID NO: 728995 - RNA, 19 nt, Human
gccaagaaaccccgucuug

SEQ ID NO: 728996 - RNA, 23 nt, Human
gcccacaacacagcccccuccac

SEQ ID NO: 728997 - RNA, 23 nt, Human
gccccaaggugcccacaacacag

SEQ ID NO: 728998 - RNA, 22 nt, Human
gcggaggggaucgggcgcccca

SEQ ID NO: 728999 - RNA, 22 nt, Human
gcgggagugaggaaggggaggg

SEQ ID NO: 729000 - RNA, 18 nt, Human
gcuacacgucgccugcug

SEQ ID NO: 729001 - RNA, 22 nt, Human
gcugcggucccagagcuucggc

SEQ ID NO: 729002 - RNA, 18 nt, Human
gcuggggaggaagggcag

SEQ ID NO: 729003 - RNA, 18 nt, Human
ggaaacagggagggaggg

SEQ ID NO: 729004 - RNA, 19 nt, Human
ggaaacagggagggagggg

SEQ ID NO: 729005 - RNA, 22 nt, Human
ggaaacagggagggaggggccg

SEQ ID NO: 729006 - RNA, 19 nt, Human
ggaaggacgaacagagaga

SEQ ID NO: 729007 - RNA, 21 nt, Human
ggacaaaccccacaugcuuca

SEQ ID NO: 729008 - RNA, 20 nt, Human
ggacuuggaggugggaggug

SEQ ID NO: 729009 - RNA, 21 nt, Human
ggagaccccacuccccugccu

SEQ ID NO: 729010 - RNA, 19 nt, Human
ggagcagggcuguggcaag

SEQ ID NO: 729011 - RNA, 18 nt, Human
ggaggacuuggagguggg

SEQ ID NO: 729012 - RNA, 23 nt, Human
ggaggacuuggaggugggaggug

SEQ ID NO: 729013 - RNA, 18 nt, Human
ggaggagcuugagaaagu

SEQ ID NO: 729014 - RNA, 19 nt, Human
ggagggaggaagaaggcag

SEQ ID NO: 729015 - RNA, 23 nt, Human
ggaggggcggguaggggggaggg

SEQ ID NO: 729016 - RNA, 18 nt, Human
ggagguggagcgucagcu

SEQ ID NO: 729017 - RNA, 18 nt, Human
ggagugaggaaggggagg

SEQ ID NO: 729018 - RNA, 21 nt, Human
ggccacgauggcaagcucgcc

SEQ ID NO: 729019 - RNA, 18 nt, Human
ggccagggucuguggggc

SEQ ID NO: 729020 - RNA, 19 nt, Human
ggccggugucugaugccag

SEQ ID NO: 729021 - RNA, 20 nt, Human
ggcggguaggggggagggag

SEQ ID NO: 729022 - RNA, 21 nt, Human
ggcugcagugaggaggacuug

SEQ ID NO: 729023 - RNA, 18 nt, Human
ggcuggggaggaagggca

SEQ ID NO: 729024 - RNA, 19 nt, Human
ggcuggggaggaagggcag

SEQ ID NO: 729025 - RNA, 20 nt, Human
gggaagggagggacgaggcu

SEQ ID NO: 729026 - RNA, 20 nt, Human
gggagacugagacaggauca

SEQ ID NO: 729027 - RNA, 19 nt, Human
gggagaggcgggagugagg

SEQ ID NO: 729028 - RNA, 24 nt, Human
gggaggaagaaggcaggguucagg

SEQ ID NO: 729029 - RNA, 24 nt, Human
gggccucgcuggggcugcgguccc

SEQ ID NO: 729030 - RNA, 19 nt, Human
gggcggcugguggggaccg

SEQ ID NO: 729031 - RNA, 21 nt, Human
gggcuggggggcuugugcggg

SEQ ID NO: 729032 - RNA, 18 nt, Human
ggggauggacuuggggag

SEQ ID NO: 729033 - RNA, 20 nt, Human
ggggaugggucugaugggga

SEQ ID NO: 729034 - RNA, 18 nt, Human
gggggccucgcuggggcu

SEQ ID NO: 729035 - RNA, 25 nt, Human
gguacccuucccacaccccccaccc

SEQ ID NO: 729036 - RNA, 19 nt, Human
ggucuguggggcauccacu

SEQ ID NO: 729037 - RNA, 20 nt, Human
gguggcggggcuccuggccu

SEQ ID NO: 729038 - RNA, 25 nt, Human
gugcuccagcccccagagauggagc

SEQ ID NO: 729039 - RNA, 22 nt, Human
guggagcgcaagacaccaucua

SEQ ID NO: 729040 - RNA, 23 nt, Human
gugggggaagggggcagggaagg

SEQ ID NO: 729041 - RNA, 22 nt, Human
guucagcuggaaagcaggacau

SEQ ID NO: 729042 - RNA, 18 nt, Human
guuucuuuaaaaaaaaaa

SEQ ID NO: 729043 - RNA, 19 nt, Human
guuuggguucagcuggaaa

SEQ ID NO: 729044 - RNA, 22 nt, Human
uaaaacacaauaaacaaaagag

SEQ ID NO: 729045 - RNA, 20 nt, Human
uaacagccaauggggagcug

SEQ ID NO: 729046 - RNA, 21 nt, Human
uaauuugccagucucguucug

SEQ ID NO: 729047 - RNA, 23 nt, Human
uaggccugaggcugugggggcug

SEQ ID NO: 729048 - RNA, 23 nt, Human
uaggggggagggaguagaggaag

SEQ ID NO: 729049 - RNA, 21 nt, Human
uagguccugucguccacuccc

SEQ ID NO: 729050 - RNA, 18 nt, Human
ucaagcaguggaauaaac

SEQ ID NO: 729051 - RNA, 19 nt, Human
ucaaucagaauaaauaccg

SEQ ID NO: 729052 - RNA, 27 nt, Human
ucacauacauucagaggucaacucgga

SEQ ID NO: 729053 - RNA, 24 nt, Human
ucaccugacugucccuuccaugac

SEQ ID NO: 729054 - RNA, 23 nt, Human
ucacuucuucuucacacucuggu

SEQ ID NO: 729055 - RNA, 20 nt, Human
ucagaggucaacucggacgc

SEQ ID NO: 729056 - RNA, 21 nt, Human
ucagcccuuugagaaaacaga

SEQ ID NO: 729057 - RNA, 23 nt, Human
ucagggaggcggccagcccuucc

SEQ ID NO: 729058 - RNA, 20 nt, Human
uccacacaguguuucggagc

SEQ ID NO: 729059 - RNA, 22 nt, Human
uccacaccugggaccagagggc

SEQ ID NO: 729060 - RNA, 20 nt, Human
uccaugcgccaagaaccgcg

SEQ ID NO: 729061 - RNA, 24 nt, Human
ucccacaccccccacccucauccc

SEQ ID NO: 729062 - RNA, 20 nt, Human
ucccagccggcucagggagg

SEQ ID NO: 729063 - RNA, 22 nt, Human
ucccagcugcggaggggaucgg

SEQ ID NO: 729064 - RNA, 18 nt, Human
ucccaggucucuccucuc

SEQ ID NO: 729065 - RNA, 23 nt, Human
uccccaggcaggccugagagucu

SEQ ID NO: 729066 - RNA, 19 nt, Human
uccccauuucuuucucccg

SEQ ID NO: 729067 - RNA, 19 nt, Human
uccccugccuccucccuga

SEQ ID NO: 729068 - RNA, 19 nt, Human
uccgagcuggggcagugac

SEQ ID NO: 729069 - RNA, 21 nt, Human
uccgagcuggggcagugacac

SEQ ID NO: 729070 - RNA, 21 nt, Human
ucgggggugggggaagggggc

SEQ ID NO: 729071 - RNA, 23 nt, Human
ucugacccaagcggugccccggc

SEQ ID NO: 729072 - RNA, 18 nt, Human
ucugccugcccuccuccc

SEQ ID NO: 729073 - RNA, 20 nt, Human
ucugggagaccccacucccc

SEQ ID NO: 729074 - RNA, 20 nt, Human
ucuguccugcaguuccuguc

SEQ ID NO: 729075 - RNA, 18 nt, Human
ucuguguucccaggcugg

SEQ ID NO: 729076 - RNA, 19 nt, Human
ucuguguucccaggcuggg

SEQ ID NO: 729077 - RNA, 19 nt, Human
ucuguguucccaggcuggg

SEQ ID NO: 729078 - RNA, 19 nt, Human
ucuugggagagaccacuga

SEQ ID NO: 729079 - RNA, 23 nt, Human
ugaaaaauaaaacacaauaaaca

SEQ ID NO: 729080 - RNA, 24 nt, Human
ugaaaaauaaaacacaauaaacaa

SEQ ID NO: 729081 - RNA, 22 nt, Human
ugacaguaucagcccuuugaga

SEQ ID NO: 729082 - RNA, 20 nt, Human
ugacccaagcggugccccgg

SEQ ID NO: 729083 - RNA, 19 nt, Human
ugacccagggccugcccgg

SEQ ID NO: 729084 - RNA, 20 nt, Human
ugaccugagcucccacuccc

SEQ ID NO: 729085 - RNA, 20 nt, Human
ugacugucccuuccaugacc

SEQ ID NO: 729086 - RNA, 23 nt, Human
ugagaaagucugggaagaaaccg

SEQ ID NO: 729087 - RNA, 21 nt, Human
ugagcagccccgcaucagccc

SEQ ID NO: 729088 - RNA, 22 nt, Human
ugcagugaggaggacuuggagg

SEQ ID NO: 729089 - RNA, 20 nt, Human
ugccaagaaaccccgucuug

SEQ ID NO: 729090 - RNA, 21 nt, Human
ugccaagaaaccccgucuugu

SEQ ID NO: 729091 - RNA, 19 nt, Human
ugccacaaggccccugggg

SEQ ID NO: 729092 - RNA, 18 nt, Human
ugccccggccugaucugu

SEQ ID NO: 729093 - RNA, 22 nt, Human
ugccuggccacgauggcaagcu

SEQ ID NO: 729094 - RNA, 24 nt, Human
ugcuccagcccccagagauggagc

SEQ ID NO: 729095 - RNA, 22 nt, Human
ugcucgggcuggggggcuugug

SEQ ID NO: 729096 - RNA, 23 nt, Human
ugcucuggggagguagguccugu

SEQ ID NO: 729097 - RNA, 20 nt, Human
ugcucugguggcggccuggc

SEQ ID NO: 729098 - RNA, 23 nt, Human
uggaauaaacuaggcaaacagua

SEQ ID NO: 729099 - RNA, 22 nt, Human
uggacaccuguuccaccccaca

SEQ ID NO: 729100 - RNA, 24 nt, Human
uggagggaggaagaaggcaggguu

SEQ ID NO: 729101 - RNA, 22 nt, Human
uggaggguggcggggcuccugg

SEQ ID NO: 729102 - RNA, 26 nt, Human
uggauggacaggacgauccccaaaca

SEQ ID NO: 729103 - RNA, 20 nt, Human
uggcaagcaggccgccucgg

SEQ ID NO: 729104 - RNA, 18 nt, Human
uggcaagcucgcccuggg

SEQ ID NO: 729105 - RNA, 23 nt, Human
uggcaagcucgcccuggggccug

SEQ ID NO: 729106 - RNA, 18 nt, Human
uggccaaagagacuucaa

SEQ ID NO: 729107 - RNA, 21 nt, Human
uggccaggccaucaaggagcc

SEQ ID NO: 729108 - RNA, 24 nt, Human
uggcgaggaacacaggauuccagc

SEQ ID NO: 729109 - RNA, 21 nt, Human
uggggagcugccccuguggcc

SEQ ID NO: 729110 - RNA, 20 nt, Human
uggggaggaagggcagugag

SEQ ID NO: 729111 - RNA, 18 nt, Human
uggggaggggagaggcgg

SEQ ID NO: 729112 - RNA, 22 nt, Human
ugggucugauggggaggggaga

SEQ ID NO: 729113 - RNA, 19 nt, Human
ugucugagcagucucccuc

SEQ ID NO: 729114 - RNA, 21 nt, Human
ugugaguguuccgcgcagagg

SEQ ID NO: 729115 - RNA, 20 nt, Human
ugugcuccagcccccagaga

SEQ ID NO: 729116 - RNA, 23 nt, Human
uguuccaccccacaccuuccucu

SEQ ID NO: 729117 - RNA, 23 nt, Human
uuccccgcccaucaccucccggc

SEQ ID NO: 729118 - RNA, 18 nt, Human
uuccgcgcagaggaaagu

SEQ ID NO: 729119 - RNA, 20 nt, Human
uugcagcugcagggaaagcu

SEQ ID NO: 729120 - RNA, 18 nt, Human
uugcucccuuccccgucu

SEQ ID NO: 729121 - RNA, 22 nt, Human
uuggaggcccgcgucuggggca

SEQ ID NO: 729122 - RNA, 19 nt, Human
uuucagccuuccgaggucc

SEQ ID NO: 729123 - RNA, 24 nt, Human
aaaaacacaagcagaacuggagac

SEQ ID NO: 729124 - RNA, 23 nt, Human
aaaaugcucucagccuuguccca

SEQ ID NO: 729125 - RNA, 24 nt, Human
aaacaagcccccagauugguaaac

SEQ ID NO: 729126 - RNA, 21 nt, Human
aaaccaucucaagcaucauau

SEQ ID NO: 729127 - RNA, 22 nt, Human
aaacuaaaaagcggaaaagcac

SEQ ID NO: 729128 - RNA, 21 nt, Human
aaagagacagacauauacaca

SEQ ID NO: 729129 - RNA, 23 nt, Human
aaagagacagacauauacacaga

SEQ ID NO: 729130 - RNA, 18 nt, Human
aaaggaauggggauggga

SEQ ID NO: 729131 - RNA, 22 nt, Human
aacacuauugucuucaaaugug

SEQ ID NO: 729132 - RNA, 19 nt, Human
aagaagaaaagaaaaacaa

SEQ ID NO: 729133 - RNA, 23 nt, Human
aagcaugccuggcaccgaaauau

SEQ ID NO: 729134 - RNA, 20 nt, Human
aagggacuugcuugcuuucu

SEQ ID NO: 729135 - RNA, 24 nt, Human
aaguaaaaggcauuuacuauaauc

SEQ ID NO: 729136 - RNA, 20 nt, Human
aagucaaguccuuaaacacc

SEQ ID NO: 729137 - RNA, 21 nt, Human
acaaaaaaaggacaguauagg

SEQ ID NO: 729138 - RNA, 20 nt, Human
acaaaagaaaggucccuaca

SEQ ID NO: 729139 - RNA, 20 nt, Human
acaacuggaaacaaacaaaa

SEQ ID NO: 729140 - RNA, 19 nt, Human
acaagcagaacuacccaag

SEQ ID NO: 729141 - RNA, 22 nt, Human
acaccuccaaauuccccauacc

SEQ ID NO: 729142 - RNA, 24 nt, Human
acccaccaaacuccuccucugccu

SEQ ID NO: 729143 - RNA, 23 nt, Human
accccucccauggcccucccccc

SEQ ID NO: 729144 - RNA, 23 nt, Human
accccucccauggcccucccccc

SEQ ID NO: 729145 - RNA, 25 nt, Human
accccucccauggcccuccccccaa

SEQ ID NO: 729146 - RNA, 24 nt, Human
acuacuacaaugcaucuacaaaag

SEQ ID NO: 729147 - RNA, 19 nt, Human
acuacuucgugguuccccu

SEQ ID NO: 729148 - RNA, 21 nt, Human
acugcaaucucuggcuuaacc

SEQ ID NO: 729149 - RNA, 22 nt, Human
acugcuuugcauccauccaggu

SEQ ID NO: 729150 - RNA, 18 nt, Human
agaaaaacaagcccccag

SEQ ID NO: 729151 - RNA, 19 nt, Human
agaaaaacaagcccccaga

SEQ ID NO: 729152 - RNA, 21 nt, Human
agaaaagaaaaacaagccccc

SEQ ID NO: 729153 - RNA, 23 nt, Human
agaaaagacaaaucuuuuccaaa

SEQ ID NO: 729154 - RNA, 24 nt, Human
agaaaagacaaaucuuuuccaaaa

SEQ ID NO: 729155 - RNA, 26 nt, Human
agaaagagacagacauauacacagaa

SEQ ID NO: 729156 - RNA, 22 nt, Human
agaacaaaaaacugcacaggga

SEQ ID NO: 729157 - RNA, 23 nt, Human
agaagaaaagaaaaacaagcccc

SEQ ID NO: 729158 - RNA, 18 nt, Human
agaagcagaggguuaggg

SEQ ID NO: 729159 - RNA, 18 nt, Human
agaauacaaaaaaaggac

SEQ ID NO: 729160 - RNA, 23 nt, Human
agaguggggccgcuguggcugcc

SEQ ID NO: 729161 - RNA, 20 nt, Human
agcaggcagggggaccaggg

SEQ ID NO: 729162 - RNA, 20 nt, Human
agccguaacauaaaaugucc

SEQ ID NO: 729163 - RNA, 21 nt, Human
agccugcugggcacaguuaag

SEQ ID NO: 729164 - RNA, 22 nt, Human
agcgugcgacccggccagcccu

SEQ ID NO: 729165 - RNA, 21 nt, Human
agcuaugaagccucaucaaga

SEQ ID NO: 729166 - RNA, 22 nt, Human
aggcgggaggcaggcaggcaau

SEQ ID NO: 729167 - RNA, 21 nt, Human
aggcuucggaggaggccgagc

SEQ ID NO: 729168 - RNA, 19 nt, Human
agggagggaggaggaugga

SEQ ID NO: 729169 - RNA, 21 nt, Human
agggcaggggggugggggugc

SEQ ID NO: 729170 - RNA, 25 nt, Human
aggggggugggggugcaaacuaaaa

SEQ ID NO: 729171 - RNA, 18 nt, Human
aguucugcagcaggggag

SEQ ID NO: 729172 - RNA, 21 nt, Human
aguugccuacaaaaucuuuug

SEQ ID NO: 729173 - RNA, 18 nt, Human
auacacagaagaggggag

SEQ ID NO: 729174 - RNA, 23 nt, Human
auaccacuuuuaucuauugugau

SEQ ID NO: 729175 - RNA, 18 nt, Human
aucaagggcaggggggug

SEQ ID NO: 729176 - RNA, 23 nt, Human
caaaaacacaagcagaacuaccc

SEQ ID NO: 729177 - RNA, 21 nt, Human
caaacacugcaauccaguaug

SEQ ID NO: 729178 - RNA, 22 nt, Human
caaacuaaaaagcggaaaagca

SEQ ID NO: 729179 - RNA, 23 nt, Human
caaacuaaaaagcggaaaagcac

SEQ ID NO: 729180 - RNA, 24 nt, Human
caacuggaaacaaacaaaaaaagg

SEQ ID NO: 729181 - RNA, 24 nt, Human
caagcccccagauugguaaacaca

SEQ ID NO: 729182 - RNA, 22 nt, Human
caaggagagacuccacggugga

SEQ ID NO: 729183 - RNA, 26 nt, Human
caagggcaggggggugggggggaagc

SEQ ID NO: 729184 - RNA, 21 nt, Human
caagguacaguuacauccauu

SEQ ID NO: 729185 - RNA, 22 nt, Human
caauaaacaaauccuccucucu

SEQ ID NO: 729186 - RNA, 20 nt, Human
caauaugcaaaaacacaagc

SEQ ID NO: 729187 - RNA, 26 nt, Human
cacaccaccaaaauauaauaaauaaa

SEQ ID NO: 729188 - RNA, 33 nt, Human
caccaccaaaauauaauaaauaaaaaaaggagg

SEQ ID NO: 729189 - RNA, 24 nt, Human
cacccaggcacccaugguggagcc

SEQ ID NO: 729190 - RNA, 24 nt, Human
caccuccaaauuccccauaccccu

SEQ ID NO: 729191 - RNA, 24 nt, Human
cacucgcucacugacuggcagguu

SEQ ID NO: 729192 - RNA, 24 nt, Human
cacugcuuugcauccauccaggua

SEQ ID NO: 729193 - RNA, 24 nt, Human
cacuuagaaaagacaaaucuuuuc

SEQ ID NO: 729194 - RNA, 18 nt, Human
cagaauacaaaaaaagga

SEQ ID NO: 729195 - RNA, 21 nt, Human
cagcagcaugcauggggcugg

SEQ ID NO: 729196 - RNA, 24 nt, Human
caggcacuacuguuguuuauauuc

SEQ ID NO: 729197 - RNA, 19 nt, Human
caguccagaggaaucaugg

SEQ ID NO: 729198 - RNA, 18 nt, Human
cauaugcacaaugcauca

SEQ ID NO: 729199 - RNA, 24 nt, Human
caucaagauagacuuuuagguuuc

SEQ ID NO: 729200 - RNA, 25 nt, Human
cauuacccagaauacaaaaaaagga

SEQ ID NO: 729201 - RNA, 24 nt, Human
cauugaauuuggcaacauuuuauu

SEQ ID NO: 729202 - RNA, 21 nt, Human
cauuggggcucugcugcucac

SEQ ID NO: 729203 - RNA, 24 nt, Human
ccaacccccuuuaugcauuuaaaa

SEQ ID NO: 729204 - RNA, 24 nt, Human
ccaaucccaacacagucuaccauu

SEQ ID NO: 729205 - RNA, 21 nt, Human
ccaccaaacuccuccucugcc

SEQ ID NO: 729206 - RNA, 22 nt, Human
ccacccgggcggucaccuucuc

SEQ ID NO: 729207 - RNA, 21 nt, Human
ccaccggcgcauuucuuguga

SEQ ID NO: 729208 - RNA, 20 nt, Human
ccagaauacaaaaaaaggac

SEQ ID NO: 729209 - RNA, 23 nt, Human
ccauggcccuccccccaauccca

SEQ ID NO: 729210 - RNA, 22 nt, Human
cccaacacagucuaccauuucc

SEQ ID NO: 729211 - RNA, 18 nt, Human
cccaccaaacuccuccuc

SEQ ID NO: 729212 - RNA, 21 nt, Human
cccaccaaacuccuccucugc

SEQ ID NO: 729213 - RNA, 22 nt, Human
cccaccggcgcauuucuuguga

SEQ ID NO: 729214 - RNA, 21 nt, Human
cccagaauacaaaaaaaggac

SEQ ID NO: 729215 - RNA, 18 nt, Human
cccaugguggagcccgag

SEQ ID NO: 729216 - RNA, 20 nt, Human
ccccagggaugcccugccug

SEQ ID NO: 729217 - RNA, 22 nt, Human
cccccaaucccaacacagucua

SEQ ID NO: 729218 - RNA, 22 nt, Human
cccccaaucccaacacagucua

SEQ ID NO: 729219 - RNA, 23 nt, Human
cccccaaucccaacacagucuac

SEQ ID NO: 729220 - RNA, 23 nt, Human
cccccagauugguaaacacauug

SEQ ID NO: 729221 - RNA, 19 nt, Human
ccccugccccaacccccuu

SEQ ID NO: 729222 - RNA, 24 nt, Human
ccccugccccaacccccuuuaugc

SEQ ID NO: 729223 - RNA, 19 nt, Human
cccgugggccccacguggg

SEQ ID NO: 729224 - RNA, 19 nt, Human
cccuacaaaggaacagaga

SEQ ID NO: 729225 - RNA, 22 nt, Human
cccucccauggcccucccccca

SEQ ID NO: 729226 - RNA, 25 nt, Human
cccuccccccaaucccaacacaguc

SEQ ID NO: 729227 - RNA, 22 nt, Human
cccucuguccccaagaggagcc

SEQ ID NO: 729228 - RNA, 21 nt, Human
ccgagccacacaccaccaaaa

SEQ ID NO: 729229 - RNA, 19 nt, Human
ccgcggcugugagggcugu

SEQ ID NO: 729230 - RNA, 23 nt, Human
ccggccagcccuaggucacuaga

SEQ ID NO: 729231 - RNA, 22 nt, Human
ccgugggccccacgugggacuc

SEQ ID NO: 729232 - RNA, 20 nt, Human
ccuaugaucucaccuacacc

SEQ ID NO: 729233 - RNA, 23 nt, Human
ccugcuggaguccuagucagcca

SEQ ID NO: 729234 - RNA, 20 nt, Human
ccuggagugugauuuugggg

SEQ ID NO: 729235 - RNA, 28 nt, Human
cgaggggaccaacagaaacuggagaccc

SEQ ID NO: 729236 - RNA, 23 nt, Human
cggcuauguugacgauguacccc

SEQ ID NO: 729237 - RNA, 18 nt, Human
cggucaccuucucugugg

SEQ ID NO: 729238 - RNA, 19 nt, Human
cuacaugucugccuggaau

SEQ ID NO: 729239 - RNA, 23 nt, Human
cuagacuguggguccccaaggac

SEQ ID NO: 729240 - RNA, 19 nt, Human
cucccagucuggcuuccug

SEQ ID NO: 729241 - RNA, 20 nt, Human
cucucagccuugucccaccc

SEQ ID NO: 729242 - RNA, 19 nt, Human
cugcacccgugggccccac

SEQ ID NO: 729243 - RNA, 19 nt, Human
cuggaaacaaacaaaaaaa

SEQ ID NO: 729244 - RNA, 19 nt, Human
cuguggcugccacccgggc

SEQ ID NO: 729245 - RNA, 23 nt, Human
cuuaaacacccuacagaaacaaa

SEQ ID NO: 729246 - RNA, 26 nt, Human
cuuagaaaagacaaaucuuuuccaaa

SEQ ID NO: 729247 - RNA, 21 nt, Human
gaaaaacaagcccccagauug

SEQ ID NO: 729248 - RNA, 22 nt, Human
gaaaccgagccacacaccacca

SEQ ID NO: 729249 - RNA, 25 nt, Human
gaagggagggaggaggauggacagg

SEQ ID NO: 729250 - RNA, 23 nt, Human
gaauggcucgacuuccuggaguc

SEQ ID NO: 729251 - RNA, 33 nt, Human
gaccuggcacauggcuggugcucaaaacauaau

SEQ ID NO: 729252 - RNA, 22 nt, Human
gagaaaacccguuagacaacug

SEQ ID NO: 729253 - RNA, 24 nt, Human
gagccacacaccaccaaaauauaa

SEQ ID NO: 729254 - RNA, 22 nt, Human
gagcccgagcugacagaggugg

SEQ ID NO: 729255 - RNA, 19 nt, Human
gaggaugagagaagcagag

SEQ ID NO: 729256 - RNA, 20 nt, Human
gaguccuagucagccacggc

SEQ ID NO: 729257 - RNA, 19 nt, Human
gcaaaaaccaucucaagca

SEQ ID NO: 729258 - RNA, 19 nt, Human
gcacagguguuauuuauug

SEQ ID NO: 729259 - RNA, 21 nt, Human
gcaccuucagaaaaaucaaaa

SEQ ID NO: 729260 - RNA, 24 nt, Human
gcaggggaggggccacacgagggg

SEQ ID NO: 729261 - RNA, 23 nt, Human
gcagguuuccgaggcuucggagg

SEQ ID NO: 729262 - RNA, 20 nt, Human
gcagugaagcccucugguca

SEQ ID NO: 729263 - RNA, 22 nt, Human
gcaugagggcggaccccagcuc

SEQ ID NO: 729264 - RNA, 21 nt, Human
gcccagguccccagggaugcc

SEQ ID NO: 729265 - RNA, 25 nt, Human
gccuucacaccuccaaauuccccau

SEQ ID NO: 729266 - RNA, 21 nt, Human
gcuagacuccaagcuggcuac

SEQ ID NO: 729267 - RNA, 22 nt, Human
gcucucuuggguguuucuucac

SEQ ID NO: 729268 - RNA, 19 nt, Human
gcuggggcagggacuguuc

SEQ ID NO: 729269 - RNA, 20 nt, Human
ggaacagagauuucgcuuuc

SEQ ID NO: 729270 - RNA, 18 nt, Human
ggaagggagggaggagga

SEQ ID NO: 729271 - RNA, 22 nt, Human
ggaccagggagaguggggccgc

SEQ ID NO: 729272 - RNA, 22 nt, Human
ggacccagaagcaugccuggca

SEQ ID NO: 729273 - RNA, 18 nt, Human
ggaccuggcacauggcug

SEQ ID NO: 729274 - RNA, 21 nt, Human
ggaccuggcacauggcuggug

SEQ ID NO: 729275 - RNA, 22 nt, Human
ggacgaguucugcagcagggga

SEQ ID NO: 729276 - RNA, 18 nt, Human
ggauuccauaaaggugag

SEQ ID NO: 729277 - RNA, 21 nt, Human
ggccacacgaggggaccaaca

SEQ ID NO: 729278 - RNA, 18 nt, Human
ggcuaaaccacaggcacu

SEQ ID NO: 729279 - RNA, 18 nt, Human
gggcaggggggugggggu

SEQ ID NO: 729280 - RNA, 18 nt, Human
ggggaugggaguggggaa

SEQ ID NO: 729281 - RNA, 19 nt, Human
ggguggcucgggaagggag

SEQ ID NO: 729282 - RNA, 19 nt, Human
guaaguugggucuccuggg

SEQ ID NO: 729283 - RNA, 23 nt, Human
gucuccuuucaucaaaugcagcc

SEQ ID NO: 729284 - RNA, 18 nt, Human
guggaaugaaccaucucu

SEQ ID NO: 729285 - RNA, 18 nt, Human
guucagcuggggcaggga

SEQ ID NO: 729286 - RNA, 22 nt, Human
uaaaaagcggaaaagcacacag

SEQ ID NO: 729287 - RNA, 25 nt, Human
uaaaaauuccaaagcaucuucaaau

SEQ ID NO: 729288 - RNA, 20 nt, Human
uacaaaaaaaggacaguaua

SEQ ID NO: 729289 - RNA, 22 nt, Human
uacaaacuagcaacuaaagcac

SEQ ID NO: 729290 - RNA, 24 nt, Human
uacaaaucucuguuggcuuuagga

SEQ ID NO: 729291 - RNA, 24 nt, Human
uacaaaucucuguuggcuuuaggg

SEQ ID NO: 729292 - RNA, 23 nt, Human
uauagaacaaugaccauacggua

SEQ ID NO: 729293 - RNA, 22 nt, Human
uauaguggucagauucccagug

SEQ ID NO: 729294 - RNA, 22 nt, Human
uauauuuaaaugaagauuuuac

SEQ ID NO: 729295 - RNA, 18 nt, Human
uaucuauugugauuaccu

SEQ ID NO: 729296 - RNA, 26 nt, Human
uaugcaaaaacacaagcagaacuacc

SEQ ID NO: 729297 - RNA, 21 nt, Human
uauucaccaucaaggaggcca

SEQ ID NO: 729298 - RNA, 22 nt, Human
uauucuguaaaagaagcuuguu

SEQ ID NO: 729299 - RNA, 22 nt, Human
ucaaaagagcuauauuccgagu

SEQ ID NO: 729300 - RNA, 25 nt, Human
ucaacgagaaacugaagugggagau

SEQ ID NO: 729301 - RNA, 18 nt, Human
ucaagauagacuuuuagg

SEQ ID NO: 729302 - RNA, 23 nt, Human
ucacguaaguugggucuccuggg

SEQ ID NO: 729303 - RNA, 19 nt, Human
ucagcacaauguuucuggu

SEQ ID NO: 729304 - RNA, 23 nt, Human
ucaguacaaacuagcaacuaaag

SEQ ID NO: 729305 - RNA, 23 nt, Human
uccaaaaaacauuacccagaaua

SEQ ID NO: 729306 - RNA, 24 nt, Human
uccaaaaaacauuacccagaauac

SEQ ID NO: 729307 - RNA, 19 nt, Human
uccaaauuccccauacccc

SEQ ID NO: 729308 - RNA, 18 nt, Human
ucccacccucugucccca

SEQ ID NO: 729309 - RNA, 26 nt, Human
ucccagugacaauaaacaagguaccc

SEQ ID NO: 729310 - RNA, 24 nt, Human
ucccauggcccuccccccaauccc

SEQ ID NO: 729311 - RNA, 19 nt, Human
uccccagggaugcccugcc

SEQ ID NO: 729312 - RNA, 24 nt, Human
uccccauaccccuuccucucccuu

SEQ ID NO: 729313 - RNA, 23 nt, Human
ucggucagaaaugugcccuguua

SEQ ID NO: 729314 - RNA, 23 nt, Human
ucuggaagguggacagaggugac

SEQ ID NO: 729315 - RNA, 25 nt, Human
ucuggcuuccugauguucagcuggu

SEQ ID NO: 729316 - RNA, 23 nt, Human
ucugugaugcaagagaaaagagc

SEQ ID NO: 729317 - RNA, 26 nt, Human
ucuguucauucuagguuuccaaaauc

SEQ ID NO: 729318 - RNA, 21 nt, Human
ucuucaaaugaaucuguucau

SEQ ID NO: 729319 - RNA, 23 nt, Human
ucuuucuuuuuagcugugacacu

SEQ ID NO: 729320 - RNA, 19 nt, Human
ugaaacccaccaaacuccu

SEQ ID NO: 729321 - RNA, 20 nt, Human
ugaagccucaucaagauaga

SEQ ID NO: 729322 - RNA, 24 nt, Human
ugacaauaaacaaauccuccucuc

SEQ ID NO: 729323 - RNA, 20 nt, Human
ugacauggcucauccaacgg

SEQ ID NO: 729324 - RNA, 22 nt, Human
ugacauggcucauccaacgguc

SEQ ID NO: 729325 - RNA, 25 nt, Human
ugacauggcucauccaacggucugg

SEQ ID NO: 729326 - RNA, 20 nt, Human
ugacccgagggagcaggcgg

SEQ ID NO: 729327 - RNA, 23 nt, Human
ugagaaaacccguuagacaacug

SEQ ID NO: 729328 - RNA, 23 nt, Human
ugagggcggaccccagcucgggc

SEQ ID NO: 729329 - RNA, 18 nt, Human
ugaucucaccuacaccca

SEQ ID NO: 729330 - RNA, 20 nt, Human
ugauggaaccccaggucccu

SEQ ID NO: 729331 - RNA, 18 nt, Human
ugccuggaauggcucgac

SEQ ID NO: 729332 - RNA, 23 nt, Human
ugccuggaauggcucgacuuccu

SEQ ID NO: 729333 - RNA, 18 nt, Human
ugcucaggagcacauucu

SEQ ID NO: 729334 - RNA, 22 nt, Human
ugcuggaguccuagucagccac

SEQ ID NO: 729335 - RNA, 24 nt, Human
uggaaacaaacaaaaaaagggggg

SEQ ID NO: 729336 - RNA, 21 nt, Human
uggaaauugaucagugcccuc

SEQ ID NO: 729337 - RNA, 22 nt, Human
uggaauggcucgacuuccugga

SEQ ID NO: 729338 - RNA, 27 nt, Human
uggaauggcucgacuuccuggagucuc

SEQ ID NO: 729339 - RNA, 20 nt, Human
uggacaggcacgcaacaccu

SEQ ID NO: 729340 - RNA, 18 nt, Human
uggcacauggcuggugcu

SEQ ID NO: 729341 - RNA, 20 nt, Human
uggcccuccccccaaucccu

SEQ ID NO: 729342 - RNA, 23 nt, Human
uggcucauccaacggucuggugg

SEQ ID NO: 729343 - RNA, 19 nt, Human
ugggagaaaggaagucaag

SEQ ID NO: 729344 - RNA, 18 nt, Human
ugggaguggggaagggca

SEQ ID NO: 729345 - RNA, 20 nt, Human
ugggcacaguuaaguaaaag

SEQ ID NO: 729346 - RNA, 25 nt, Human
ugggcaguauaacaaauuuaacuuc

SEQ ID NO: 729347 - RNA, 18 nt, Human
uggggaugggagugggga

SEQ ID NO: 729348 - RNA, 22 nt, Human
ugguggguggcucgggaaggga

SEQ ID NO: 729349 - RNA, 22 nt, Human
uguaccccucccauggcccucc

SEQ ID NO: 729350 - RNA, 19 nt, Human
ugucccacccucugucccc

SEQ ID NO: 729351 - RNA, 23 nt, Human
uguuaauauauagaacaaugacc

SEQ ID NO: 729352 - RNA, 21 nt, Human
uguucagcuggggcagggacu

SEQ ID NO: 729353 - RNA, 21 nt, Human
uuaaaauuuuacaaagacuug

SEQ ID NO: 729354 - RNA, 23 nt, Human
uuaaagcauaagauuagguaauu

SEQ ID NO: 729355 - RNA, 21 nt, Human
uucacauuuuuaaaacugccu

SEQ ID NO: 729356 - RNA, 18 nt, Human
uuccccugccccaacccc

SEQ ID NO: 729357 - RNA, 20 nt, Human
uugcuuuaaauuuuuucacu

SEQ ID NO: 729358 - RNA, 24 nt, Human
uuuaaaauaccacuuuuaucuauu

SEQ ID NO: 729359 - RNA, 26 nt, Human
uuuagcugugacacugcuuuuacaau

SEQ ID NO: 729360 - RNA, 18 nt, Human
uuuuaaaacugccuuacc

SEQ ID NO: 729361 - RNA, 18 nt, Human
uuuucaaaauacuugggc

SEQ ID NO: 729362 - RNA, 20 nt, Human
uuuuuagcugugacacugcu

SEQ ID NO: 729363 - RNA, 24 nt, Human
aaaaaucugacuuguaaaaaucuc

SEQ ID NO: 729364 - RNA, 21 nt, Human
aaacagauaaauuuaauccgg

SEQ ID NO: 729365 - RNA, 23 nt, Human
aaagaaaccaucuaacuagugga

SEQ ID NO: 729366 - RNA, 22 nt, Human
aaagaaagaaaaaggaagaaga

SEQ ID NO: 729367 - RNA, 24 nt, Human
aagaaagaaaaaggaagaagaaaa

SEQ ID NO: 729368 - RNA, 20 nt, Human
aagaagaaaagaaagacuuc

SEQ ID NO: 729369 - RNA, 21 nt, Human
aagaagaaaagaaagacuuca

SEQ ID NO: 729370 - RNA, 20 nt, Human
aagcuccuaaauggaacccc

SEQ ID NO: 729371 - RNA, 21 nt, Human
aagcuccuaaauggaaccccu

SEQ ID NO: 729372 - RNA, 22 nt, Human
acaaaacagcacuugaaccaca

SEQ ID NO: 729373 - RNA, 23 nt, Human
acaagaaacccagagaugcuucc

SEQ ID NO: 729374 - RNA, 24 nt, Human
acacacacgucccagaccuaagca

SEQ ID NO: 729375 - RNA, 24 nt, Human
acacacucacgggacagcacagaa

SEQ ID NO: 729376 - RNA, 19 nt, Human
acaggcuagcgggacaggc

SEQ ID NO: 729377 - RNA, 20 nt, Human
acgggacagcacagaacuug

SEQ ID NO: 729378 - RNA, 25 nt, Human
acuaagaaaaacaucucuuuccccc

SEQ ID NO: 729379 - RNA, 23 nt, Human
agaaagcuccuaaauggaacccc

SEQ ID NO: 729380 - RNA, 20 nt, Human
aggauucuuuaacaaaugcc

SEQ ID NO: 729381 - RNA, 20 nt, Human
aguaagcaaaggcugagaga

SEQ ID NO: 729382 - RNA, 20 nt, Human
auaauugaaaaaagaaagaa

SEQ ID NO: 729383 - RNA, 21 nt, Human
aucucuuucccccaaacccaa

SEQ ID NO: 729384 - RNA, 24 nt, Human
augccuucaggaggauucggagag

SEQ ID NO: 729385 - RNA, 21 nt, Human
caaaacaaacagugcaagaug

SEQ ID NO: 729386 - RNA, 21 nt, Human
caaaguagacaacuaagaaaa

SEQ ID NO: 729387 - RNA, 23 nt, Human
caaaugccacaaguucuucaaau

SEQ ID NO: 729388 - RNA, 19 nt, Human
caagaaacccagagaugcu

SEQ ID NO: 729389 - RNA, 22 nt, Human
caagucacauggaagccaggaa

SEQ ID NO: 729390 - RNA, 21 nt, Human
caauuguuaagagucacacac

SEQ ID NO: 729391 - RNA, 18 nt, Human
cacagaagggaagcuuca

SEQ ID NO: 729392 - RNA, 23 nt, Human
cacauuugcauuucacuuccugu

SEQ ID NO: 729393 - RNA, 20 nt, Human
caccaguaagcaaaggcuga

SEQ ID NO: 729394 - RNA, 24 nt, Human
caccuagagaggaaggccauucca

SEQ ID NO: 729395 - RNA, 24 nt, Human
caccuccccacucagcucugauuu

SEQ ID NO: 729396 - RNA, 25 nt, Human
cacgauuaaaagaugcugagcugac

SEQ ID NO: 729397 - RNA, 23 nt, Human
cagcaacuccagugaaugguacu

SEQ ID NO: 729398 - RNA, 18 nt, Human
cagcucaaagcuguguuc

SEQ ID NO: 729399 - RNA, 23 nt, Human
caggcuagcgggacaggcuuugc

SEQ ID NO: 729400 - RNA, 19 nt, Human
caugguguucugucuugac

SEQ ID NO: 729401 - RNA, 20 nt, Human
cauuucacuuccuguaacac

SEQ ID NO: 729402 - RNA, 21 nt, Human
ccaauccaaaacaaacagugc

SEQ ID NO: 729403 - RNA, 21 nt, Human
ccacaagaaacccagagaugc

SEQ ID NO: 729404 - RNA, 21 nt, Human
ccacccgucagcggacaccuc

SEQ ID NO: 729405 - RNA, 20 nt, Human
ccacuuuugugugcagaauc

SEQ ID NO: 729406 - RNA, 21 nt, Human
ccagacgccacaagaaaccca

SEQ ID NO: 729407 - RNA, 26 nt, Human
ccauuccacaccagacgccacaagaa

SEQ ID NO: 729408 - RNA, 21 nt, Human
cccagaccuaagcagcaacug

SEQ ID NO: 729409 - RNA, 21 nt, Human
ccucgccuacccuucuccuuu

SEQ ID NO: 729410 - RNA, 19 nt, Human
ccugaaaauacacuccgaa

SEQ ID NO: 729411 - RNA, 23 nt, Human
cggaaacaccaguaagcaaaggc

SEQ ID NO: 729412 - RNA, 22 nt, Human
cgugcaaacucagccuuaugaa

SEQ ID NO: 729413 - RNA, 21 nt, Human
cuaagcagcaacuccagugaa

SEQ ID NO: 729414 - RNA, 24 nt, Human
cuccgaaccccucgccuacccuuc

SEQ ID NO: 729415 - RNA, 23 nt, Human
cucucauuuucagacagcaauug

SEQ ID NO: 729416 - RNA, 22 nt, Human
cuucaaagacaugccacgcacu

SEQ ID NO: 729417 - RNA, 20 nt, Human
gaaaaaagaaagaaaaagga

SEQ ID NO: 729418 - RNA, 21 nt, Human
gaaaagaaaaacaugauagaa

SEQ ID NO: 729419 - RNA, 27 nt, Human
gaaaagaaaaacaugauagaacacagg

SEQ ID NO: 729420 - RNA, 19 nt, Human
gcaccuagagaggaaggcc

SEQ ID NO: 729421 - RNA, 22 nt, Human
gggaagcuucaaacauccucaa

SEQ ID NO: 729422 - RNA, 20 nt, Human
ggguuuuuuccaugguguuc

SEQ ID NO: 729423 - RNA, 19 nt, Human
guaaaaucagacacgauua

SEQ ID NO: 729424 - RNA, 21 nt, Human
gucccaacacacaaaacagca

SEQ ID NO: 729425 - RNA, 22 nt, Human
gugcaagaugggaaaggggguu

SEQ ID NO: 729426 - RNA, 22 nt, Human
uaaaaaacaaggcacacuuaca

SEQ ID NO: 729427 - RNA, 23 nt, Human
uaaaaaacaaggcacacuuacaa

SEQ ID NO: 729428 - RNA, 21 nt, Human
uaaaagaugcugagcugacau

SEQ ID NO: 729429 - RNA, 22 nt, Human
uaaaagcuccuuuaaaaaaaau

SEQ ID NO: 729430 - RNA, 25 nt, Human
uaaaguccaccacucuuuacaugcu

SEQ ID NO: 729431 - RNA, 21 nt, Human
uaacuaguggaagaccuuacg

SEQ ID NO: 729432 - RNA, 19 nt, Human
uaaguggaucaaccuuggc

SEQ ID NO: 729433 - RNA, 23 nt, Human
uaaguggaucaaccuuggccuuc

SEQ ID NO: 729434 - RNA, 24 nt, Human
uaccaaauauaaacauuuccccaa

SEQ ID NO: 729435 - RNA, 19 nt, Human
uagaaagcuccuaaaugga

SEQ ID NO: 729436 - RNA, 22 nt, Human
uagcagaacugaaguccaagcg

SEQ ID NO: 729437 - RNA, 21 nt, Human
uagguagaauuccugucucuu

SEQ ID NO: 729438 - RNA, 22 nt, Human
uaugaacacaaugugcuuccga

SEQ ID NO: 729439 - RNA, 25 nt, Human
uauugacaacuguuuggucccaaca

SEQ ID NO: 729440 - RNA, 19 nt, Human
ucaaacaaaguagacaacu

SEQ ID NO: 729441 - RNA, 21 nt, Human
ucaacaccaauuauuauuacu

SEQ ID NO: 729442 - RNA, 21 nt, Human
ucacauggaagccaggaaccu

SEQ ID NO: 729443 - RNA, 18 nt, Human
ucagacagcaauuguuaa

SEQ ID NO: 729444 - RNA, 25 nt, Human
ucagcggacaccucaggcaccuaga

SEQ ID NO: 729445 - RNA, 22 nt, Human
uccacaccagacgccacaagaa

SEQ ID NO: 729446 - RNA, 18 nt, Human
uccaugacaucgagacca

SEQ ID NO: 729447 - RNA, 18 nt, Human
uccccaaaagaaaccauc

SEQ ID NO: 729448 - RNA, 24 nt, Human
ucccccaaacccaauccaaaacaa

SEQ ID NO: 729449 - RNA, 18 nt, Human
ucccgcugcugcugaagc

SEQ ID NO: 729450 - RNA, 21 nt, Human
uccgaaccccucgccuacccu

SEQ ID NO: 729451 - RNA, 20 nt, Human
ugaaaucagaguccauuuuc

SEQ ID NO: 729452 - RNA, 22 nt, Human
ugaaaucuuagaauaaggcaac

SEQ ID NO: 729453 - RNA, 23 nt, Human
ugaacacacaggcuagcgggaca

SEQ ID NO: 729454 - RNA, 20 nt, Human
ugacuuguaaaaaucucucu

SEQ ID NO: 729455 - RNA, 20 nt, Human
ugacuuguaaugauaccucu

SEQ ID NO: 729456 - RNA, 23 nt, Human
ugagcugacauacacacacauag

SEQ ID NO: 729457 - RNA, 21 nt, Human
ugcugcugaagcaccucccca

SEQ ID NO: 729458 - RNA, 23 nt, Human
ugcuuccgaagucuucucucuca

SEQ ID NO: 729459 - RNA, 20 nt, Human
uggaaccccaaaguagaaac

SEQ ID NO: 729460 - RNA, 19 nt, Human
uggaagcaaaaccgcuucc

SEQ ID NO: 729461 - RNA, 22 nt, Human
uggggccauguguugagaacug

SEQ ID NO: 729462 - RNA, 24 nt, Human
uggguuaauacugucggaaacacc

SEQ ID NO: 729463 - RNA, 21 nt, Human
uggugugugaacacacaggcu

SEQ ID NO: 729464 - RNA, 20 nt, Human
uuacaggguuuuuuccaugg

SEQ ID NO: 729465 - RNA, 21 nt, Human
uuaugaaaucuuagaauaagg

SEQ ID NO: 729466 - RNA, 22 nt, Human
uuccaacagcgagaaguaacga

SEQ ID NO: 729467 - RNA, 20 nt, Human
uuccccaaaagaaaccaucu

SEQ ID NO: 729468 - RNA, 28 nt, Human
uuuaaaagcuccuuuaaaaaaaauugcc

SEQ ID NO: 729469 - RNA, 23 nt, Human
aaaaaaacaacacaacaggcugg

SEQ ID NO: 729470 - RNA, 22 nt, Human
aaaaaaccaaaaugcagaauac

SEQ ID NO: 729471 - RNA, 24 nt, Human
aaaaaccaaaaugcagaauaccau

SEQ ID NO: 729472 - RNA, 19 nt, Human
aaacagcuccagagccccc

SEQ ID NO: 729473 - RNA, 20 nt, Human
aaaccaaaaugcagaauacc

SEQ ID NO: 729474 - RNA, 18 nt, Human
aaagaaacacaaagaagc

SEQ ID NO: 729475 - RNA, 21 nt, Human
aaagaaacacaaagaagcuaa

SEQ ID NO: 729476 - RNA, 19 nt, Human
aaagugcugggauuacagg

SEQ ID NO: 729477 - RNA, 19 nt, Human
aaagugcugggauuacagg

SEQ ID NO: 729478 - RNA, 20 nt, Human
aacaauuuagaucaacaucu

SEQ ID NO: 729479 - RNA, 19 nt, Human
aacagcuccagagccccca

SEQ ID NO: 729480 - RNA, 18 nt, Human
aaccucccucaugcuccc

SEQ ID NO: 729481 - RNA, 18 nt, Human
aacucuggccuacugugg

SEQ ID NO: 729482 - RNA, 23 nt, Human
aagaaacacaaagaagcuaagca

SEQ ID NO: 729483 - RNA, 25 nt, Human
aagagaaaaagaguaugaguagacu

SEQ ID NO: 729484 - RNA, 20 nt, Human
aaguagcugggaucacaggc

SEQ ID NO: 729485 - RNA, 26 nt, Human
aaguagcugggaucacaggcgcaugc

SEQ ID NO: 729486 - RNA, 24 nt, Human
aagugaucguccugcuuuggccuc

SEQ ID NO: 729487 - RNA, 18 nt, Human
aagugcugggauuacagg

SEQ ID NO: 729488 - RNA, 21 nt, Human
aagugcugggauuacaggggu

SEQ ID NO: 729489 - RNA, 26 nt, Human
aagugcugggauuacagggguaagcc

SEQ ID NO: 729490 - RNA, 18 nt, Human
aauacuguuguccccagu

SEQ ID NO: 729491 - RNA, 22 nt, Human
aauuaaaaaaaaaaaaaauucc

SEQ ID NO: 729492 - RNA, 21 nt, Human
accaaaaugcagaauaccaua

SEQ ID NO: 729493 - RNA, 19 nt, Human
acccagguuggaguacagu

SEQ ID NO: 729494 - RNA, 21 nt, Human
accccaagaugaagucauagg

SEQ ID NO: 729495 - RNA, 20 nt, Human
accucaaaacacacaaagca

SEQ ID NO: 729496 - RNA, 23 nt, Human
accucagccuuccaaguagcugg

SEQ ID NO: 729497 - RNA, 19 nt, Human
accuggcccgcugcugcuu

SEQ ID NO: 729498 - RNA, 21 nt, Human
acuucauuacaccgaagagaa

SEQ ID NO: 729499 - RNA, 23 nt, Human
agaaaaaaaaccaaaaugcagaa

SEQ ID NO: 729500 - RNA, 20 nt, Human
agaugccauuucacacaugg

SEQ ID NO: 729501 - RNA, 30 nt, Human
agcaugucgugugugugugugugugugugg

SEQ ID NO: 729502 - RNA, 19 nt, Human
agccaccacaccuggcccg

SEQ ID NO: 729503 - RNA, 20 nt, Human
aggcaaagaaacacaaagaa

SEQ ID NO: 729504 - RNA, 18 nt, Human
aggcaauacaauaaguca

SEQ ID NO: 729505 - RNA, 21 nt, Human
aggcagugaugauucuaaaac

SEQ ID NO: 729506 - RNA, 20 nt, Human
aguaauacaggcaugugcca

SEQ ID NO: 729507 - RNA, 22 nt, Human
agugaucguccugcuuuggccu

SEQ ID NO: 729508 - RNA, 18 nt, Human
auauguuauuuauccauu

SEQ ID NO: 729509 - RNA, 19 nt, Human
auguuucuuuugaaaccca

SEQ ID NO: 729510 - RNA, 24 nt, Human
auuaggaucacuacaagauuccug

SEQ ID NO: 729511 - RNA, 19 nt, Human
caaaaugcagaauaccaua

SEQ ID NO: 729512 - RNA, 22 nt, Human
caaacauugucacagaaacaaa

SEQ ID NO: 729513 - RNA, 26 nt, Human
caaaccaaacucuuaccuacuagguu

SEQ ID NO: 729514 - RNA, 22 nt, Human
caaagaaacacaaagaagcuaa

SEQ ID NO: 729515 - RNA, 24 nt, Human
caaagugcugggauuacaggggua

SEQ ID NO: 729516 - RNA, 24 nt, Human
caaguacaaaaggcaaagaaacac

SEQ ID NO: 729517 - RNA, 22 nt, Human
caagugaucguccugcuuuggc

SEQ ID NO: 729518 - RNA, 18 nt, Human
caauaguaguucauguag

SEQ ID NO: 729519 - RNA, 24 nt, Human
cacaccccaagaugaagucauagg

SEQ ID NO: 729520 - RNA, 21 nt, Human
caccuggcccgcugcugcuuc

SEQ ID NO: 729521 - RNA, 23 nt, Human
cacuuaagaaaaaaaaccaaaau

SEQ ID NO: 729522 - RNA, 23 nt, Human
cagaaaaccacggauuaggauca

SEQ ID NO: 729523 - RNA, 25 nt, Human
cagaaaauccccaaagcauacuuga

SEQ ID NO: 729524 - RNA, 23 nt, Human
cagaauaccauauuuuagaugaa

SEQ ID NO: 729525 - RNA, 20 nt, Human
cagcauccgguuucuuuagu

SEQ ID NO: 729526 - RNA, 21 nt, Human
cagccccaaucuccucgagug

SEQ ID NO: 729527 - RNA, 22 nt, Human
cagcuccagagcccccaacucu

SEQ ID NO: 729528 - RNA, 22 nt, Human
cauaggcacguuuccauaacuc

SEQ ID NO: 729529 - RNA, 18 nt, Human
caugucgugugugugugu

SEQ ID NO: 729530 - RNA, 18 nt, Human
caugucgugugugugugu

SEQ ID NO: 729531 - RNA, 19 nt, Human
ccaaagugcugggauuaca

SEQ ID NO: 729532 - RNA, 21 nt, Human
ccaaagugcugggauuacagg

SEQ ID NO: 729533 - RNA, 24 nt, Human
ccaaagugcugggauuacaggggu

SEQ ID NO: 729534 - RNA, 19 nt, Human
ccagagcccccaacucugg

SEQ ID NO: 729535 - RNA, 19 nt, Human
cccacacucauaggcaacu

SEQ ID NO: 729536 - RNA, 23 nt, Human
ccucaaucuaauuucuagaccuu

SEQ ID NO: 729537 - RNA, 26 nt, Human
ccucucaccucagccuuccaaguagc

SEQ ID NO: 729538 - RNA, 25 nt, Human
ccugcccuaucaagcuuaguagaag

SEQ ID NO: 729539 - RNA, 21 nt, Human
ccugggcucaagugaucgucc

SEQ ID NO: 729540 - RNA, 22 nt, Human
ccugggcucaagugaucguccu

SEQ ID NO: 729541 - RNA, 23 nt, Human
ccugggcucaagugaucguccug

SEQ ID NO: 729542 - RNA, 24 nt, Human
ccuguuacccagguuggaguacag

SEQ ID NO: 729543 - RNA, 22 nt, Human
ccuugcuagauacuuuuucuua

SEQ ID NO: 729544 - RNA, 20 nt, Human
cgagugauccucucaccuca

SEQ ID NO: 729545 - RNA, 22 nt, Human
cguccugcuuuggccucccaaa

SEQ ID NO: 729546 - RNA, 21 nt, Human
cgugugugugugugugugugu

SEQ ID NO: 729547 - RNA, 21 nt, Human
cguucaaguccuccuauuuau

SEQ ID NO: 729548 - RNA, 21 nt, Human
cuaagcaacugcaucaucagc

SEQ ID NO: 729549 - RNA, 22 nt, Human
cuacuagguugagcucaucugc

SEQ ID NO: 729550 - RNA, 21 nt, Human
cuagugucagcaguaagagaa

SEQ ID NO: 729551 - RNA, 20 nt, Human
cucaaacguuuucagcagca

SEQ ID NO: 729552 - RNA, 18 nt, Human
cucaaagucccuuacucc

SEQ ID NO: 729553 - RNA, 18 nt, Human
cucaagugaucguccugc

SEQ ID NO: 729554 - RNA, 23 nt, Human
cucaccucagccuuccaaguagc

SEQ ID NO: 729555 - RNA, 23 nt, Human
cucagccuuccaaguagcuggga

SEQ ID NO: 729556 - RNA, 21 nt, Human
cucagggccucuggggcagcc

SEQ ID NO: 729557 - RNA, 18 nt, Human
cucccucaugcuccccug

SEQ ID NO: 729558 - RNA, 20 nt, Human
cucccucaugcuccccugua

SEQ ID NO: 729559 - RNA, 23 nt, Human
cugcuuuggccucccaaagugcu

SEQ ID NO: 729560 - RNA, 18 nt, Human
cuggcuucucuuuaauca

SEQ ID NO: 729561 - RNA, 19 nt, Human
cugguauuauucacuuaag

SEQ ID NO: 729562 - RNA, 26 nt, Human
cuuuuuuuuuuuuuuuugagauaggg

SEQ ID NO: 729563 - RNA, 23 nt, Human
gaacgccuucuaaugccccccac

SEQ ID NO: 729564 - RNA, 21 nt, Human
gaucacaggcgcaugccacug

SEQ ID NO: 729565 - RNA, 24 nt, Human
gaucacaggcgcaugccacugugc

SEQ ID NO: 729566 - RNA, 18 nt, Human
gaucacuacaagauuccu

SEQ ID NO: 729567 - RNA, 18 nt, Human
gauuacagggguaagcca

SEQ ID NO: 729568 - RNA, 20 nt, Human
gcaaagaaacacaaagaagc

SEQ ID NO: 729569 - RNA, 19 nt, Human
gcccuguuacccagguugg

SEQ ID NO: 729570 - RNA, 18 nt, Human
gcccuuuucccacuuuuu

SEQ ID NO: 729571 - RNA, 19 nt, Human
gcucaagugaucguccugc

SEQ ID NO: 729572 - RNA, 21 nt, Human
gcucauggcagccccaaucuc

SEQ ID NO: 729573 - RNA, 22 nt, Human
gcuuuggccucccaaagugcug

SEQ ID NO: 729574 - RNA, 21 nt, Human
ggaaugacugaaaacgagcac

SEQ ID NO: 729575 - RNA, 19 nt, Human
ggauuacagggguaagcca

SEQ ID NO: 729576 - RNA, 21 nt, Human
ggcuaauuaaaaaaaaaaaaa

SEQ ID NO: 729577 - RNA, 19 nt, Human
gggcucaagugaucguccu

SEQ ID NO: 729578 - RNA, 23 nt, Human
guaauccuuucauuaucuuuucc

SEQ ID NO: 729579 - RNA, 18 nt, Human
guccugcuuuggccuccc

SEQ ID NO: 729580 - RNA, 24 nt, Human
gugauccucucaccucagccuucc

SEQ ID NO: 729581 - RNA, 21 nt, Human
gugugugugugugugucaaug

SEQ ID NO: 729582 - RNA, 18 nt, Human
gugugugugugugugugu

SEQ ID NO: 729583 - RNA, 21 nt, Human
gugugugugugugugugugug

SEQ ID NO: 729584 - RNA, 21 nt, Human
gugugugugugugugugugug

SEQ ID NO: 729585 - RNA, 20 nt, Human
guuuugaagauuugagaagu

SEQ ID NO: 729586 - RNA, 23 nt, Human
uaaaaaaaaaaaaaauuccagag

SEQ ID NO: 729587 - RNA, 20 nt, Human
uaaaacauaaugaaauucua

SEQ ID NO: 729588 - RNA, 18 nt, Human
uaaauuucaguuuuuaca

SEQ ID NO: 729589 - RNA, 21 nt, Human
uaaauuucaguuuuuacaaau

SEQ ID NO: 729590 - RNA, 19 nt, Human
uaacaugaaaagacuagcu

SEQ ID NO: 729591 - RNA, 21 nt, Human
uaagaaaaaaaaccaaaaugc

SEQ ID NO: 729592 - RNA, 24 nt, Human
uaagaaaaaaaaccaaaaugcaga

SEQ ID NO: 729593 - RNA, 23 nt, Human
uaagagaaaaagaguaugaguag

SEQ ID NO: 729594 - RNA, 20 nt, Human
uaaggcaauacaauaaguca

SEQ ID NO: 729595 - RNA, 23 nt, Human
uacaaaaggcaaagaaacacaaa

SEQ ID NO: 729596 - RNA, 19 nt, Human
uacaaguacaaaaggcaaa

SEQ ID NO: 729597 - RNA, 22 nt, Human
uacaaguacaaaaggcaaagaa

SEQ ID NO: 729598 - RNA, 22 nt, Human
uacagggguaagccaccacacc

SEQ ID NO: 729599 - RNA, 22 nt, Human
uacagggguaagccaccacacc

SEQ ID NO: 729600 - RNA, 23 nt, Human
uacagggguaagccaccacaccu

SEQ ID NO: 729601 - RNA, 23 nt, Human
uacaugaaaacugcuucaaagcu

SEQ ID NO: 729602 - RNA, 21 nt, Human
uacccagguuggaguacagug

SEQ ID NO: 729603 - RNA, 18 nt, Human
uagagugacaaaacucag

SEQ ID NO: 729604 - RNA, 23 nt, Human
uagauugcacuccugcccuauca

SEQ ID NO: 729605 - RNA, 25 nt, Human
uagcaggaacacuacacuacgugcc

SEQ ID NO: 729606 - RNA, 21 nt, Human
uaggacacaccccaagaugaa

SEQ ID NO: 729607 - RNA, 18 nt, Human
uauguugcccaagcuggu

SEQ ID NO: 729608 - RNA, 23 nt, Human
uauguugcccaagcugguguuga

SEQ ID NO: 729609 - RNA, 24 nt, Human
uauguugcccaagcugguguugaa

SEQ ID NO: 729610 - RNA, 21 nt, Human
uauguuucuuuugaaacccac

SEQ ID NO: 729611 - RNA, 22 nt, Human
ucaaaacacacaaagcauucuu

SEQ ID NO: 729612 - RNA, 21 nt, Human
ucaaacuacuuuuucuucucu

SEQ ID NO: 729613 - RNA, 24 nt, Human
ucagauccagcuuguggaugcacu

SEQ ID NO: 729614 - RNA, 25 nt, Human
ucauaggcacguuuccauaacuccc

SEQ ID NO: 729615 - RNA, 23 nt, Human
ucauugguccccuuacuagguuu

SEQ ID NO: 729616 - RNA, 19 nt, Human
uccaaguagcugggaucac

SEQ ID NO: 729617 - RNA, 23 nt, Human
uccaaguagcugggaucacaggc

SEQ ID NO: 729618 - RNA, 24 nt, Human
uccaaguagcugggaucacaggcg

SEQ ID NO: 729619 - RNA, 22 nt, Human
uccagagcccccaacucuggcc

SEQ ID NO: 729620 - RNA, 23 nt, Human
uccaggcagcaggagucuuaaga

SEQ ID NO: 729621 - RNA, 23 nt, Human
ucccaaagugcugggauuacagg

SEQ ID NO: 729622 - RNA, 22 nt, Human
uccccaaagcauacuugaucau

SEQ ID NO: 729623 - RNA, 19 nt, Human
ucccucaaacguuuucagc

SEQ ID NO: 729624 - RNA, 21 nt, Human
uccguaguuuuaauccagagg

SEQ ID NO: 729625 - RNA, 18 nt, Human
uccugggcucaagugauc

SEQ ID NO: 729626 - RNA, 24 nt, Human
uccugggcucaagugaucguccug

SEQ ID NO: 729627 - RNA, 28 nt, Human
ucgagugauccucucaccucagccuucc

SEQ ID NO: 729628 - RNA, 19 nt, Human
ucucagggccucuggggca

SEQ ID NO: 729629 - RNA, 18 nt, Human
ucuccuguccucuucuaa

SEQ ID NO: 729630 - RNA, 24 nt, Human
ucuuagucaauuuacauuccaggg

SEQ ID NO: 729631 - RNA, 21 nt, Human
ucuuauguugcccaagcuggu

SEQ ID NO: 729632 - RNA, 19 nt, Human
ucuucuguaaaugacucua

SEQ ID NO: 729633 - RNA, 23 nt, Human
ucuucuuauguugcccaagcugg

SEQ ID NO: 729634 - RNA, 24 nt, Human
ucuucuuauguugcccaagcuggu

SEQ ID NO: 729635 - RNA, 24 nt, Human
ucuugcccuguuacccagguugga

SEQ ID NO: 729636 - RNA, 23 nt, Human
ucuuuucuuauuguuggauugac

SEQ ID NO: 729637 - RNA, 21 nt, Human
ugaaaacugcuucaaagcuaa

SEQ ID NO: 729638 - RNA, 18 nt, Human
ugaaaagacuagcuguga

SEQ ID NO: 729639 - RNA, 19 nt, Human
ugaaaaggcaaauguaggc

SEQ ID NO: 729640 - RNA, 23 nt, Human
ugaaaugcuccagaaaaccacgg

SEQ ID NO: 729641 - RNA, 20 nt, Human
ugacaaaacucagauccagc

SEQ ID NO: 729642 - RNA, 19 nt, Human
ugaccaaaccaaacucuua

SEQ ID NO: 729643 - RNA, 18 nt, Human
ugacuaugccauccugca

SEQ ID NO: 729644 - RNA, 22 nt, Human
ugagauagggucuugcccuguu

SEQ ID NO: 729645 - RNA, 18 nt, Human
ugauuaguaacaggaauc

SEQ ID NO: 729646 - RNA, 20 nt, Human
ugcaaaaggaaaauuacuuu

SEQ ID NO: 729647 - RNA, 19 nt, Human
ugcuucaaagcuaaagaca

SEQ ID NO: 729648 - RNA, 21 nt, Human
uggaguacagugccaagacca

SEQ ID NO: 729649 - RNA, 23 nt, Human
uggcagcauccgguuucuuuagu

SEQ ID NO: 729650 - RNA, 20 nt, Human
uggcucauggcagccccaau

SEQ ID NO: 729651 - RNA, 23 nt, Human
uggcucauggcagccccaaucuc

SEQ ID NO: 729652 - RNA, 21 nt, Human
ugggaauguuuugaacagaau

SEQ ID NO: 729653 - RNA, 21 nt, Human
ugggaucacaggcgcaugcca

SEQ ID NO: 729654 - RNA, 22 nt, Human
ugggaucacaggcgcaugccac

SEQ ID NO: 729655 - RNA, 22 nt, Human
ugggaucacaggcgcaugccac

SEQ ID NO: 729656 - RNA, 22 nt, Human
ugggaucacaggcgcaugccac

SEQ ID NO: 729657 - RNA, 24 nt, Human
ugggaucacaggcgcaugccacug

SEQ ID NO: 729658 - RNA, 22 nt, Human
ugggauuacagggguaagccac

SEQ ID NO: 729659 - RNA, 24 nt, Human
ugggauuacagggguaagccacca

SEQ ID NO: 729660 - RNA, 20 nt, Human
ugggcucaagugaucguccu

SEQ ID NO: 729661 - RNA, 24 nt, Human
ugggcucaagugaucguccugcuu

SEQ ID NO: 729662 - RNA, 21 nt, Human
uggggaaacagcuccagagcc

SEQ ID NO: 729663 - RNA, 19 nt, Human
ugguaagcugggcuucagc

SEQ ID NO: 729664 - RNA, 27 nt, Human
ugguaagcugggcuucaggacagagag

SEQ ID NO: 729665 - RNA, 22 nt, Human
ugguccccuuacuagguuuuga

SEQ ID NO: 729666 - RNA, 19 nt, Human
uguaaagugcuauacacuu

SEQ ID NO: 729667 - RNA, 18 nt, Human
uguaugggauaggaauua

SEQ ID NO: 729668 - RNA, 22 nt, Human
ugucagcaguaagagaaaaaga

SEQ ID NO: 729669 - RNA, 20 nt, Human
uguggagaacuuacaggcug

SEQ ID NO: 729670 - RNA, 19 nt, Human
uguguaaagugcuauacac

SEQ ID NO: 729671 - RNA, 19 nt, Human
ugugugucaauguggagaa

SEQ ID NO: 729672 - RNA, 18 nt, Human
ugugugugugugugugug

SEQ ID NO: 729673 - RNA, 18 nt, Human
ugugugugugugugugug

SEQ ID NO: 729674 - RNA, 18 nt, Human
ugugugugugugugugug

SEQ ID NO: 729675 - RNA, 18 nt, Human
ugugugugugugugugug

SEQ ID NO: 729676 - RNA, 18 nt, Human
ugugugugugugugugug

SEQ ID NO: 729677 - RNA, 18 nt, Human
ugugugugugugugugug

SEQ ID NO: 729678 - RNA, 18 nt, Human
ugugugugugugugugug

SEQ ID NO: 729679 - RNA, 18 nt, Human
ugugugugugugugugug

SEQ ID NO: 729680 - RNA, 18 nt, Human
ugugugugugugugugug

SEQ ID NO: 729681 - RNA, 21 nt, Human
ugugugugugugugugugugu

SEQ ID NO: 729682 - RNA, 21 nt, Human
ugugugugugugugugugugu

SEQ ID NO: 729683 - RNA, 21 nt, Human
ugugugugugugugugugugu

SEQ ID NO: 729684 - RNA, 21 nt, Human
ugugugugugugugugugugu

SEQ ID NO: 729685 - RNA, 21 nt, Human
ugugugugugugugugugugu

SEQ ID NO: 729686 - RNA, 21 nt, Human
ugugugugugugugugugugu

SEQ ID NO: 729687 - RNA, 21 nt, Human
ugugugugugugugugugugu

SEQ ID NO: 729688 - RNA, 21 nt, Human
ugugugugugugugugugugu

SEQ ID NO: 729689 - RNA, 21 nt, Human
ugugugugugugugugugugu

SEQ ID NO: 729690 - RNA, 21 nt, Human
ugugugugugugugugugugu

SEQ ID NO: 729691 - RNA, 21 nt, Human
ugugugugugugugugugugu

SEQ ID NO: 729692 - RNA, 21 nt, Human
ugugugugugugugugugugu

SEQ ID NO: 729693 - RNA, 21 nt, Human
ugugugugugugugugugugu

SEQ ID NO: 729694 - RNA, 21 nt, Human
ugugugugugugugugugugu

SEQ ID NO: 729695 - RNA, 21 nt, Human
ugugugugugugugugugugu

SEQ ID NO: 729696 - RNA, 21 nt, Human
ugugugugugugugugugugu

SEQ ID NO: 729697 - RNA, 22 nt, Human
ugugugugugugugugugugug

SEQ ID NO: 729698 - RNA, 22 nt, Human
ugugugugugugugugugugug

SEQ ID NO: 729699 - RNA, 22 nt, Human
ugugugugugugugugugugug

SEQ ID NO: 729700 - RNA, 22 nt, Human
ugugugugugugugugugugug

SEQ ID NO: 729701 - RNA, 22 nt, Human
ugugugugugugugugugugug

SEQ ID NO: 729702 - RNA, 21 nt, Human
uguugaacuccugggcucaag

SEQ ID NO: 729703 - RNA, 26 nt, Human
uuaaauuauuauuucaaaaaaacaac

SEQ ID NO: 729704 - RNA, 24 nt, Human
uuaauacuguuguccccaguccgu

SEQ ID NO: 729705 - RNA, 24 nt, Human
uuauccauuaccaacacuucuuuu

SEQ ID NO: 729706 - RNA, 21 nt, Human
uucaaacacaucgucagugaa

SEQ ID NO: 729707 - RNA, 18 nt, Human
uucacaaaaaaggguaca

SEQ ID NO: 729708 - RNA, 23 nt, Human
uucagcuaaauggcuauauaggu

SEQ ID NO: 729709 - RNA, 19 nt, Human
uuccuaggcugugaaaugc

SEQ ID NO: 729710 - RNA, 23 nt, Human
uucuuauguugcccaagcuggug

SEQ ID NO: 729711 - RNA, 19 nt, Human
uucuuuugaaacccacacu

SEQ ID NO: 729712 - RNA, 21 nt, Human
uugaaacccacacucauaggc

SEQ ID NO: 729713 - RNA, 24 nt, Human
uugaaaccuaaugggggaugcccc

SEQ ID NO: 729714 - RNA, 25 nt, Human
uugaaaccuaaugggggaugccccc

SEQ ID NO: 729715 - RNA, 24 nt, Human
uuuauaauacacucacauuuauac

SEQ ID NO: 729716 - RNA, 22 nt, Human
uuuauguuucuuuugaaaccca

SEQ ID NO: 729717 - RNA, 18 nt, Human
uuucaaaaaaacaacacu

SEQ ID NO: 729718 - RNA, 22 nt, Human
uuuccaaccucccucaugcucc

SEQ ID NO: 729719 - RNA, 19 nt, Human
uuugaagauuugagaaguu

SEQ ID NO: 729720 - RNA, 19 nt, Human
uuuggccucccaaagugcu

SEQ ID NO: 729721 - RNA, 19 nt, Human
uuuuacaucaauaaaccuc

SEQ ID NO: 729722 - RNA, 25 nt, Human
uuuuugagccugggauacucaaagu

SEQ ID NO: 729723 - RNA, 24 nt, Human
uuuuuuuuuugagauagggucuug

SEQ ID NO: 729724 - RNA, 23 nt, Human
uuuuuuuuuuuugagauaggguc

SEQ ID NO: 729725 - RNA, 20 nt, Human
aaaaaaauucaaaacacaga

SEQ ID NO: 729726 - RNA, 24 nt, Human
aaaaagaaacucugaaggugccuc

SEQ ID NO: 729727 - RNA, 23 nt, Human
aaaaaucuaaucauuuauaaaga

SEQ ID NO: 729728 - RNA, 22 nt, Human
aaaacagaugcuauacauaaua

SEQ ID NO: 729729 - RNA, 24 nt, Human
aaacacagauugaaaaaauaaccc

SEQ ID NO: 729730 - RNA, 18 nt, Human
aaacagaaaacuuacaua

SEQ ID NO: 729731 - RNA, 23 nt, Human
aaagaaacucugaaggugccuuu

SEQ ID NO: 729732 - RNA, 22 nt, Human
aaaggccagcucaucagacucc

SEQ ID NO: 729733 - RNA, 22 nt, Human
aaaguccccaauauguaacccu

SEQ ID NO: 729734 - RNA, 21 nt, Human
aaauaguaucagaagaaagca

SEQ ID NO: 729735 - RNA, 26 nt, Human
aagaaagcauucuccauauauuagcu

SEQ ID NO: 729736 - RNA, 19 nt, Human
aaggagaaacauaagaaca

SEQ ID NO: 729737 - RNA, 20 nt, Human
aaucacagcgcaaugauuuc

SEQ ID NO: 729738 - RNA, 22 nt, Human
acaacaguuccuuaccugaaca

SEQ ID NO: 729739 - RNA, 20 nt, Human
acuacauuuucacaaacaga

SEQ ID NO: 729740 - RNA, 18 nt, Human
agcuaacauauaguaugc

SEQ ID NO: 729741 - RNA, 20 nt, Human
agggaaccucaggcuacuac

SEQ ID NO: 729742 - RNA, 20 nt, Human
aguacauagcauuacugcug

SEQ ID NO: 729743 - RNA, 18 nt, Human
agugaguacauuaacuac

SEQ ID NO: 729744 - RNA, 24 nt, Human
caaaacaaaaguuuuccugaugaa

SEQ ID NO: 729745 - RNA, 26 nt, Human
caacuauacuuaaaaagaaacucuga

SEQ ID NO: 729746 - RNA, 18 nt, Human
caacugauacacuaggga

SEQ ID NO: 729747 - RNA, 22 nt, Human
cacaaacagaaaacuuacauac

SEQ ID NO: 729748 - RNA, 19 nt, Human
cacaaaggccagcucauca

SEQ ID NO: 729749 - RNA, 23 nt, Human
cacaauaaaaaaauucaaaacac

SEQ ID NO: 729750 - RNA, 22 nt, Human
cagaagaaagcauucuccauau

SEQ ID NO: 729751 - RNA, 18 nt, Human
cagauugaaaaaauaacc

SEQ ID NO: 729752 - RNA, 25 nt, Human
cagcgcaaugauuucaauaucccuu

SEQ ID NO: 729753 - RNA, 25 nt, Human
cauauaacacauuuacauucgugug

SEQ ID NO: 729754 - RNA, 18 nt, Human
cauuggugggggggaaag

SEQ ID NO: 729755 - RNA, 22 nt, Human
ccccuuucaucccggaggcagg

SEQ ID NO: 729756 - RNA, 18 nt, Human
ccucaggcuacuacaccu

SEQ ID NO: 729757 - RNA, 21 nt, Human
ccugaacauaaacaaagaaaa

SEQ ID NO: 729758 - RNA, 26 nt, Human
ccuuucaucccggaggcagggguugg

SEQ ID NO: 729759 - RNA, 18 nt, Human
cucaggcuacuacaccuc

SEQ ID NO: 729760 - RNA, 18 nt, Human
cucuuacaucugguaccu

SEQ ID NO: 729761 - RNA, 20 nt, Human
gaggcaggggugagguguuu

SEQ ID NO: 729762 - RNA, 22 nt, Human
gcacaaagguguaguucuccca

SEQ ID NO: 729763 - RNA, 20 nt, Human
ggaggcaggggugagguguu

SEQ ID NO: 729764 - RNA, 18 nt, Human
ggauuacaguuuaaguca

SEQ ID NO: 729765 - RNA, 18 nt, Human
uaaaaagaaacucugaag

SEQ ID NO: 729766 - RNA, 21 nt, Human
uaaaacagcuaacauauagua

SEQ ID NO: 729767 - RNA, 18 nt, Human
uaacuuaacagaauucag

SEQ ID NO: 729768 - RNA, 20 nt, Human
uaagaacacacuauuuuuau

SEQ ID NO: 729769 - RNA, 24 nt, Human
uaccugaacauaaacaaagaaaac

SEQ ID NO: 729770 - RNA, 18 nt, Human
uagauauaauugaaauga

SEQ ID NO: 729771 - RNA, 22 nt, Human
uaugaugacuguuggcaaauac

SEQ ID NO: 729772 - RNA, 19 nt, Human
ucaaaguuguuguugcaau

SEQ ID NO: 729773 - RNA, 21 nt, Human
ucacuauaaguuuugcugcuc

SEQ ID NO: 729774 - RNA, 19 nt, Human
ucucccagcugcauaugua

SEQ ID NO: 729775 - RNA, 24 nt, Human
ugaaaaaauaacccauguggcuaa

SEQ ID NO: 729776 - RNA, 19 nt, Human
ugcacaaaggccagcucau

SEQ ID NO: 729777 - RNA, 22 nt, Human
ugcacaaaggccagcucaucag

SEQ ID NO: 729778 - RNA, 18 nt, Human
uggaaagacacuuuaaaa

SEQ ID NO: 729779 - RNA, 21 nt, Human
uggcaaauacucuuuuguucu

SEQ ID NO: 729780 - RNA, 20 nt, Human
ugucaaaauacaaaacaaaa

SEQ ID NO: 729781 - RNA, 19 nt, Human
ugucaagagacuucaguug

SEQ ID NO: 729782 - RNA, 22 nt, Human
ugugcacaugguaaacaucaua

SEQ ID NO: 729783 - RNA, 26 nt, Human
uguuguugcaauucaaaauacaaaga

SEQ ID NO: 729784 - RNA, 23 nt, Human
uguuuacaagacaugucuccaua

SEQ ID NO: 729785 - RNA, 23 nt, Human
uuaacuacauuuucacaaacaga

SEQ ID NO: 729786 - RNA, 24 nt, Human
uuaugacucuuacaucugguaccu

SEQ ID NO: 729787 - RNA, 24 nt, Human
uucaaaaaucuaaucauuuauaaa

SEQ ID NO: 729788 - RNA, 19 nt, Human
uucacaaacagaaaacuua

SEQ ID NO: 729789 - RNA, 21 nt, Human
uucauuguugauaucaaaguu

SEQ ID NO: 729790 - RNA, 27 nt, Human
uucauuguugauaucaaaguuguuguu

SEQ ID NO: 729791 - RNA, 26 nt, Human
uucuuuaauugcauauauuuaugacu

SEQ ID NO: 729792 - RNA, 24 nt, Human
uugcuucauuguugauaucaaagu

SEQ ID NO: 729793 - RNA, 26 nt, Human
aaaaacacaaaaagauuagccaugcg

SEQ ID NO: 729794 - RNA, 22 nt, Human
aaacagugugaaacuccaucuc

SEQ ID NO: 729795 - RNA, 20 nt, Human
aacagugugaaacuccaucu

SEQ ID NO: 729796 - RNA, 24 nt, Human
aacuccacacauccccaaaacccu

SEQ ID NO: 729797 - RNA, 20 nt, Human
aacuggcaucacccccaucc

SEQ ID NO: 729798 - RNA, 23 nt, Human
aagacucaaaaaaaaaaaagcaa

SEQ ID NO: 729799 - RNA, 25 nt, Human
aagcaugagccaugguaaggaaaac

SEQ ID NO: 729800 - RNA, 22 nt, Human
aaguguuuaaacugccaaugua

SEQ ID NO: 729801 - RNA, 29 nt, Human
acagagcaagacucaaaaaaaaaaaagcc

SEQ ID NO: 729802 - RNA, 25 nt, Human
accacugcacuccaaacugggugac

SEQ ID NO: 729803 - RNA, 24 nt, Human
acccauguaugccuccaaaaccuc

SEQ ID NO: 729804 - RNA, 19 nt, Human
acccauuuuugccuugaca

SEQ ID NO: 729805 - RNA, 22 nt, Human
acccauuuuugccuugacacca

SEQ ID NO: 729806 - RNA, 26 nt, Human
acucaaaaaaaaaaaagcaaguguuu

SEQ ID NO: 729807 - RNA, 19 nt, Human
acugcacuccaaacugggu

SEQ ID NO: 729808 - RNA, 24 nt, Human
acugcacuccaaacugggugacag

SEQ ID NO: 729809 - RNA, 23 nt, Human
agaaauguucaggugcagccccc

SEQ ID NO: 729810 - RNA, 22 nt, Human
agaaccagaggccaagccacug

SEQ ID NO: 729811 - RNA, 20 nt, Human
agaaucccagaacuacaccc

SEQ ID NO: 729812 - RNA, 21 nt, Human
agacuugaggggcaacugaug

SEQ ID NO: 729813 - RNA, 18 nt, Human
agagcaaugcagguggga

SEQ ID NO: 729814 - RNA, 25 nt, Human
agccagccuccccgcccggccgcac

SEQ ID NO: 729815 - RNA, 22 nt, Human
agccaguccaugacaacccccu

SEQ ID NO: 729816 - RNA, 19 nt, Human
agccaugguaacaaguggc

SEQ ID NO: 729817 - RNA, 20 nt, Human
agccaugguaaggaaaaccc

SEQ ID NO: 729818 - RNA, 22 nt, Human
agcggcccuggggggaaggggc

SEQ ID NO: 729819 - RNA, 23 nt, Human
agcggcccuggggggaaggggca

SEQ ID NO: 729820 - RNA, 19 nt, Human
aggaaaaccugaacacuca

SEQ ID NO: 729821 - RNA, 23 nt, Human
aggaaaugguggugaguagucaa

SEQ ID NO: 729822 - RNA, 24 nt, Human
aggaaaugguggugaguagucaac

SEQ ID NO: 729823 - RNA, 22 nt, Human
aggagagggagggugacacuag

SEQ ID NO: 729824 - RNA, 25 nt, Human
aggagcacugcuggguauuuauuua

SEQ ID NO: 729825 - RNA, 24 nt, Human
aggaggagucccucauggaucgcg

SEQ ID NO: 729826 - RNA, 26 nt, Human
aggcaggcagagcauuugaagucagg

SEQ ID NO: 729827 - RNA, 22 nt, Human
aggccagaaucaugugagaaga

SEQ ID NO: 729828 - RNA, 21 nt, Human
aggccgaggcaggcagagcau

SEQ ID NO: 729829 - RNA, 24 nt, Human
aggccgaggucgcagugagccgag

SEQ ID NO: 729830 - RNA, 18 nt, Human
agguguccuuuccucucc

SEQ ID NO: 729831 - RNA, 24 nt, Human
aguacaagaaacacauggaaggga

SEQ ID NO: 729832 - RNA, 20 nt, Human
augccuccaaaaccucacca

SEQ ID NO: 729833 - RNA, 21 nt, Human
auguaugccuccaaaaccuca

SEQ ID NO: 729834 - RNA, 24 nt, Human
auugaggaaauaaagaaaagggag

SEQ ID NO: 729835 - RNA, 21 nt, Human
caaaaacacaaaaagauuagc

SEQ ID NO: 729836 - RNA, 21 nt, Human
caaagagaagagagaaacagu

SEQ ID NO: 729837 - RNA, 21 nt, Human
caaauugauuucaggaaaugg

SEQ ID NO: 729838 - RNA, 24 nt, Human
caacaccuagggaggccgaggcag

SEQ ID NO: 729839 - RNA, 24 nt, Human
caacugaagcagcaucugagacac

SEQ ID NO: 729840 - RNA, 20 nt, Human
caagccacugcaacucuggu

SEQ ID NO: 729841 - RNA, 20 nt, Human
caaguaaccaccuauacaga

SEQ ID NO: 729842 - RNA, 25 nt, Human
caaguaaccaccuauacagaugcca

SEQ ID NO: 729843 - RNA, 19 nt, Human
cacacuuagccccugucau

SEQ ID NO: 729844 - RNA, 20 nt, Human
caccagaucugcaaaaucaa

SEQ ID NO: 729845 - RNA, 22 nt, Human
cacccccauccgugcuguggga

SEQ ID NO: 729846 - RNA, 19 nt, Human
cacgccuguaaucccaaca

SEQ ID NO: 729847 - RNA, 22 nt, Human
cacuagaaauguucaggugcag

SEQ ID NO: 729848 - RNA, 23 nt, Human
cacugcacuccaaacugggugac

SEQ ID NO: 729849 - RNA, 24 nt, Human
cacugcacuccaaacugggugaca

SEQ ID NO: 729850 - RNA, 25 nt, Human
cacugcacuccaaacugggugacag

SEQ ID NO: 729851 - RNA, 22 nt, Human
cagaaccucuguauccggugac

SEQ ID NO: 729852 - RNA, 26 nt, Human
cagacaaccccgagaguguccgccac

SEQ ID NO: 729853 - RNA, 24 nt, Human
cagagcauuugaagucaggaacuu

SEQ ID NO: 729854 - RNA, 20 nt, Human
caggaagagaggagucucau

SEQ ID NO: 729855 - RNA, 24 nt, Human
caggcagagcauuugaagucagga

SEQ ID NO: 729856 - RNA, 20 nt, Human
caguacaagaaacacaugga

SEQ ID NO: 729857 - RNA, 21 nt, Human
cagugcacagcuuuuguaagg

SEQ ID NO: 729858 - RNA, 19 nt, Human
cagugccugccugggcauu

SEQ ID NO: 729859 - RNA, 22 nt, Human
caguggccucugaggacaggac

SEQ ID NO: 729860 - RNA, 24 nt, Human
cauccgugcugugggagcuaaagg

SEQ ID NO: 729861 - RNA, 24 nt, Human
caucugagacacaggggcucugca

SEQ ID NO: 729862 - RNA, 19 nt, Human
caugauaagagauagaggg

SEQ ID NO: 729863 - RNA, 21 nt, Human
caugccccgguguagggcaga

SEQ ID NO: 729864 - RNA, 18 nt, Human
cauucuccgucaugcccc

SEQ ID NO: 729865 - RNA, 21 nt, Human
ccaccaaaaacacaaaaagau

SEQ ID NO: 729866 - RNA, 18 nt, Human
ccacccgggaggcugaac

SEQ ID NO: 729867 - RNA, 21 nt, Human
ccaccugcuuucaagaguggg

SEQ ID NO: 729868 - RNA, 18 nt, Human
ccacugcaacucuggugc

SEQ ID NO: 729869 - RNA, 24 nt, Human
ccacugcaacucuggugcuugauc

SEQ ID NO: 729870 - RNA, 24 nt, Human
ccacugcacuccaaacugggugac

SEQ ID NO: 729871 - RNA, 20 nt, Human
ccagccuaccuuuguccuuu

SEQ ID NO: 729872 - RNA, 19 nt, Human
ccaggcccauguccuccug

SEQ ID NO: 729873 - RNA, 22 nt, Human
ccaguccaugacaaccccuggc

SEQ ID NO: 729874 - RNA, 21 nt, Human
ccauguaugccuccaaaaccu

SEQ ID NO: 729875 - RNA, 23 nt, Human
cccaaaacccuuuguaagugcag

SEQ ID NO: 729876 - RNA, 23 nt, Human
cccaagcagaagaguugguuuau

SEQ ID NO: 729877 - RNA, 26 nt, Human
cccacuucuaacuggcaucaccccca

SEQ ID NO: 729878 - RNA, 22 nt, Human
cccagccuuggcuuccccuggc

SEQ ID NO: 729879 - RNA, 19 nt, Human
cccauaaaucuccccuucc

SEQ ID NO: 729880 - RNA, 21 nt, Human
cccccaagcagaagaguuggu

SEQ ID NO: 729881 - RNA, 25 nt, Human
ccccccgucuccaccugcaaauaac

SEQ ID NO: 729882 - RNA, 21 nt, Human
ccccgcccggccgcacgcccg

SEQ ID NO: 729883 - RNA, 23 nt, Human
ccuacaaucccagccacccggga

SEQ ID NO: 729884 - RNA, 20 nt, Human
ccuccaaaaccucaccaguc

SEQ ID NO: 729885 - RNA, 19 nt, Human
ccugcaaauaaccucaccc

SEQ ID NO: 729886 - RNA, 22 nt, Human
ccugcugugugaauggguggag

SEQ ID NO: 729887 - RNA, 21 nt, Human
ccuguaaucccaacaccuagg

SEQ ID NO: 729888 - RNA, 23 nt, Human
cgaucugcucucuuggagaggcu

SEQ ID NO: 729889 - RNA, 21 nt, Human
cgcccggccgcacgcccguca

SEQ ID NO: 729890 - RNA, 23 nt, Human
cggccggcccagccuuggcuucc

SEQ ID NO: 729891 - RNA, 30 nt, Human
cucaccaguccuugaacuccacacaucccc

SEQ ID NO: 729892 - RNA, 19 nt, Human
cucacgccuguaaucccaa

SEQ ID NO: 729893 - RNA, 23 nt, Human
cucacgccuguaaucccaacacc

SEQ ID NO: 729894 - RNA, 22 nt, Human
cuccaccaaaaacacaaaaaga

SEQ ID NO: 729895 - RNA, 22 nt, Human
cuccaucuccaccaaaaacaca

SEQ ID NO: 729896 - RNA, 19 nt, Human
cucugcacgugggccuuuc

SEQ ID NO: 729897 - RNA, 19 nt, Human
cugcaccacugcacuccaa

SEQ ID NO: 729898 - RNA, 19 nt, Human
cugccauauccuugagguc

SEQ ID NO: 729899 - RNA, 21 nt, Human
cugggugacagagcaagacuc

SEQ ID NO: 729900 - RNA, 21 nt, Human
cuuggagaggcuaugccagcc

SEQ ID NO: 729901 - RNA, 27 nt, Human
cuuguagggcggccggcccagccuugg

SEQ ID NO: 729902 - RNA, 20 nt, Human
cuuucaagagcagcuaagcc

SEQ ID NO: 729903 - RNA, 25 nt, Human
cuuucuagcuguagucagugucacu

SEQ ID NO: 729904 - RNA, 21 nt, Human
gaagagaggagucucaugaua

SEQ ID NO: 729905 - RNA, 18 nt, Human
gaagguacuucccuggag

SEQ ID NO: 729906 - RNA, 20 nt, Human
gacaaccccuggcuucugag

SEQ ID NO: 729907 - RNA, 20 nt, Human
gacacacuuugcugcgaggc

SEQ ID NO: 729908 - RNA, 18 nt, Human
gacacuagaaauguucag

SEQ ID NO: 729909 - RNA, 22 nt, Human
gagaucaguucuguguucugga

SEQ ID NO: 729910 - RNA, 23 nt, Human
gagaucaguucuguguucuggaa

SEQ ID NO: 729911 - RNA, 24 nt, Human
gagcacgguggcucacgccuguaa

SEQ ID NO: 729912 - RNA, 19 nt, Human
gagcauuugaagucaggaa

SEQ ID NO: 729913 - RNA, 24 nt, Human
gagcggcccuggggggaaggggca

SEQ ID NO: 729914 - RNA, 27 nt, Human
gagcggcccuggggggaaggggcauuc

SEQ ID NO: 729915 - RNA, 25 nt, Human
gaggcaggcagagcauuugaaguca

SEQ ID NO: 729916 - RNA, 18 nt, Human
gaguucuagcaggcuuga

SEQ ID NO: 729917 - RNA, 18 nt, Human
gaucaucugcagccaugg

SEQ ID NO: 729918 - RNA, 21 nt, Human
gauucuggacaaguaacagcu

SEQ ID NO: 729919 - RNA, 19 nt, Human
gcagccccccgucuccacc

SEQ ID NO: 729920 - RNA, 21 nt, Human
gcaguacaagaaacacaugga

SEQ ID NO: 729921 - RNA, 23 nt, Human
gccuccaaaaccucaccaguccu

SEQ ID NO: 729922 - RNA, 20 nt, Human
gcgguauugguugguugugg

SEQ ID NO: 729923 - RNA, 23 nt, Human
ggaacucuccaaaccugacccau

SEQ ID NO: 729924 - RNA, 20 nt, Human
ggaggggaaauguauucuuu

SEQ ID NO: 729925 - RNA, 24 nt, Human
ggaggugugggggagccagccucc

SEQ ID NO: 729926 - RNA, 23 nt, Human
ggcaacugaagcagcaucugaga

SEQ ID NO: 729927 - RNA, 21 nt, Human
ggccagcacaguggccucuga

SEQ ID NO: 729928 - RNA, 24 nt, Human
ggcggccggcccagccuuggcuuc

SEQ ID NO: 729929 - RNA, 21 nt, Human
ggcuucugagaguuagccgac

SEQ ID NO: 729930 - RNA, 26 nt, Human
ggugacagagcaagacucaaaaaaaa

SEQ ID NO: 729931 - RNA, 20 nt, Human
ggugcuugauggaaagcaug

SEQ ID NO: 729932 - RNA, 23 nt, Human
gguggcucacgccuguaauccca

SEQ ID NO: 729933 - RNA, 21 nt, Human
guaaccaccuauacagaugcc

SEQ ID NO: 729934 - RNA, 19 nt, Human
guccgcaaacagugugaaa

SEQ ID NO: 729935 - RNA, 19 nt, Human
guccuuuccucucccucag

SEQ ID NO: 729936 - RNA, 21 nt, Human
gucgcagugagccgagacugc

SEQ ID NO: 729937 - RNA, 22 nt, Human
gugcagccccccgucuccaccu

SEQ ID NO: 729938 - RNA, 21 nt, Human
uaacacagauuggggcaugga

SEQ ID NO: 729939 - RNA, 18 nt, Human
uaacuggcaucaccccca

SEQ ID NO: 729940 - RNA, 18 nt, Human
uacaggauaucugcucug

SEQ ID NO: 729941 - RNA, 19 nt, Human
uacauuuuuauugaggaaa

SEQ ID NO: 729942 - RNA, 23 nt, Human
uaccacacugcaggaagagagga

SEQ ID NO: 729943 - RNA, 20 nt, Human
ucaaaaaaaaaaaagcaagu

SEQ ID NO: 729944 - RNA, 18 nt, Human
ucaaaaggagugggggaa

SEQ ID NO: 729945 - RNA, 21 nt, Human
ucaaacuccugaaguaaccac

SEQ ID NO: 729946 - RNA, 23 nt, Human
ucaacccauguaugccuccaaaa

SEQ ID NO: 729947 - RNA, 19 nt, Human
ucacauaggagcacugcug

SEQ ID NO: 729948 - RNA, 24 nt, Human
ucacccagaaccagaggccaagcc

SEQ ID NO: 729949 - RNA, 19 nt, Human
ucagccagacaucggucau

SEQ ID NO: 729950 - RNA, 19 nt, Human
uccaaaaccucaccagucc

SEQ ID NO: 729951 - RNA, 19 nt, Human
uccaaaaccucaccagucc

SEQ ID NO: 729952 - RNA, 21 nt, Human
uccagcauugacagguguccu

SEQ ID NO: 729953 - RNA, 21 nt, Human
uccaucuccaccaaaaacaca

SEQ ID NO: 729954 - RNA, 20 nt, Human
uccccaaaacccuuuguaag

SEQ ID NO: 729955 - RNA, 19 nt, Human
uccccccaagcagaagagu

SEQ ID NO: 729956 - RNA, 19 nt, Human
uccugcugugugaaugggu

SEQ ID NO: 729957 - RNA, 22 nt, Human
ucgcagugagccgagacugcac

SEQ ID NO: 729958 - RNA, 22 nt, Human
ucgcgguauugguugguugugg

SEQ ID NO: 729959 - RNA, 22 nt, Human
ucuccaccaccugcuuucaaga

SEQ ID NO: 729960 - RNA, 22 nt, Human
ucugcagaaccucuguauccgg

SEQ ID NO: 729961 - RNA, 22 nt, Human
ucuggaacagcucuccuuuucc

SEQ ID NO: 729962 - RNA, 24 nt, Human
ucuuggccaggacagccugggggu

SEQ ID NO: 729963 - RNA, 22 nt, Human
ugaaacuccaucuccaccaaaa

SEQ ID NO: 729964 - RNA, 20 nt, Human
ugaaauugacaucaggccua

SEQ ID NO: 729965 - RNA, 23 nt, Human
ugaacuugaauccaggaggccga

SEQ ID NO: 729966 - RNA, 22 nt, Human
ugaagcagcaucugagacacag

SEQ ID NO: 729967 - RNA, 20 nt, Human
ugaagucaggaacuugguac

SEQ ID NO: 729968 - RNA, 26 nt, Human
ugacagagcaagacucaaaaaaaaaa

SEQ ID NO: 729969 - RNA, 18 nt, Human
ugaccccaguagaacaca

SEQ ID NO: 729970 - RNA, 23 nt, Human
ugagaacaguguccacaaaggua

SEQ ID NO: 729971 - RNA, 20 nt, Human
ugagaagaguccugcugugu

SEQ ID NO: 729972 - RNA, 22 nt, Human
ugagaucaguucuguguucugg

SEQ ID NO: 729973 - RNA, 21 nt, Human
ugaggaaauaaagaaaaggga

SEQ ID NO: 729974 - RNA, 22 nt, Human
ugaggaaauaaagaaaagggag

SEQ ID NO: 729975 - RNA, 22 nt, Human
ugaggaaauaaagaaaagggag

SEQ ID NO: 729976 - RNA, 21 nt, Human
ugcaaauaaccucacccagaa

SEQ ID NO: 729977 - RNA, 23 nt, Human
ugcagccccccgucuccaccugc

SEQ ID NO: 729978 - RNA, 21 nt, Human
ugcgccuggcuuucuagcugu

SEQ ID NO: 729979 - RNA, 21 nt, Human
ugcuugauggaaagcaugagc

SEQ ID NO: 729980 - RNA, 18 nt, Human
uggaaagagcggcccugg

SEQ ID NO: 729981 - RNA, 18 nt, Human
uggaaagcaugagccaug

SEQ ID NO: 729982 - RNA, 19 nt, Human
uggccacaguucugcagaa

SEQ ID NO: 729983 - RNA, 24 nt, Human
uggcucacgccuguaaucccaaca

SEQ ID NO: 729984 - RNA, 20 nt, Human
ugggaggugugggggagcca

SEQ ID NO: 729985 - RNA, 19 nt, Human
uggguggagggcauucucc

SEQ ID NO: 729986 - RNA, 24 nt, Human
ugguugguuguggugauuugggga

SEQ ID NO: 729987 - RNA, 21 nt, Human
ugguuugggauucuggacaag

SEQ ID NO: 729988 - RNA, 21 nt, Human
uguagggcagauggccacagu

SEQ ID NO: 729989 - RNA, 24 nt, Human
uuaggcugagcacgguggcucacg

SEQ ID NO: 729990 - RNA, 23 nt, Human
uucaaauugauuucaggaaaugg

SEQ ID NO: 729991 - RNA, 18 nt, Human
uucugggggcaugugguc

SEQ ID NO: 729992 - RNA, 23 nt, Human
uugacaccaucgauuuucccugu

SEQ ID NO: 729993 - RNA, 20 nt, Human
uugguuguggugauuugggg

SEQ ID NO: 729994 - RNA, 20 nt, Human
uugugcgccuggcuuucuag

SEQ ID NO: 729995 - RNA, 23 nt, Human
uuuuugccuugacaccaucgauu

SEQ ID NO: 729996 - RNA, 23 nt, Human
aaaaagacuucaacauacuuuua

SEQ ID NO: 729997 - RNA, 18 nt, Human
aaacacuaucgucaaaau

SEQ ID NO: 729998 - RNA, 19 nt, Human
aaacagaauaaacaucuuu

SEQ ID NO: 729999 - RNA, 19 nt, Human
aaagaacaauaacaaccac

SEQ ID NO: 730000 - RNA, 21 nt, Human
aaagacucagcccagaucggc

SEQ ID NO: 730001 - RNA, 24 nt, Human
aacaauaacaaccacaauaacaac

SEQ ID NO: 730002 - RNA, 21 nt, Human
aacagcaaccuacacauuagu

SEQ ID NO: 730003 - RNA, 22 nt, Human
aaccacaauaacaacuaucacc

SEQ ID NO: 730004 - RNA, 22 nt, Human
aaguagacaauaauagcuaaca

SEQ ID NO: 730005 - RNA, 25 nt, Human
aauccuucccuucccucuacuccac

SEQ ID NO: 730006 - RNA, 20 nt, Human
acaauaacaaccacaauaac

SEQ ID NO: 730007 - RNA, 22 nt, Human
acaauaacaacuaucaccccaa

SEQ ID NO: 730008 - RNA, 22 nt, Human
acagaaaaugcuugaaagguua

SEQ ID NO: 730009 - RNA, 20 nt, Human
accagaacacauuaggaccc

SEQ ID NO: 730010 - RNA, 26 nt, Human
acucaaaugcaaaaucaacaaaucug

SEQ ID NO: 730011 - RNA, 18 nt, Human
agacaagucauacaugua

SEQ ID NO: 730012 - RNA, 18 nt, Human
agcagagcacugugcgua

SEQ ID NO: 730013 - RNA, 23 nt, Human
aggcaggccggagaaccugaagc

SEQ ID NO: 730014 - RNA, 23 nt, Human
agucaauaacagaaaaugcuuga

SEQ ID NO: 730015 - RNA, 22 nt, Human
auaucuuuguaccugacaaaca

SEQ ID NO: 730016 - RNA, 22 nt, Human
augguacaaccguucaacagaa

SEQ ID NO: 730017 - RNA, 25 nt, Human
caaaaugaaagggcauggcugagua

SEQ ID NO: 730018 - RNA, 24 nt, Human
caaacccaaauuccucagaagucu

SEQ ID NO: 730019 - RNA, 25 nt, Human
caaccacaauaacaacuaucacccc

SEQ ID NO: 730020 - RNA, 21 nt, Human
cacaauaacaacuaucacccc

SEQ ID NO: 730021 - RNA, 23 nt, Human
cacauauugggaaccuaccccua

SEQ ID NO: 730022 - RNA, 19 nt, Human
caccgcaggcaaguccagc

SEQ ID NO: 730023 - RNA, 18 nt, Human
cacgaucuucgcacaaca

SEQ ID NO: 730024 - RNA, 22 nt, Human
caggcaaguccagccgaagucu

SEQ ID NO: 730025 - RNA, 21 nt, Human
caguguacugaacauacugua

SEQ ID NO: 730026 - RNA, 21 nt, Human
ccaccaaaaaucaugacuacg

SEQ ID NO: 730027 - RNA, 22 nt, Human
ccccuaaagaacaauaacaacc

SEQ ID NO: 730028 - RNA, 20 nt, Human
ccuaaagaacaauaacaacc

SEQ ID NO: 730029 - RNA, 22 nt, Human
cgaagaaucuccuucaucgcca

SEQ ID NO: 730030 - RNA, 23 nt, Human
cgacaacuuacccagagccgccu

SEQ ID NO: 730031 - RNA, 18 nt, Human
cucccagacaagccgaaa

SEQ ID NO: 730032 - RNA, 21 nt, Human
cucccagacaagccgaaaccc

SEQ ID NO: 730033 - RNA, 20 nt, Human
cuccuucaucgccaaacagc

SEQ ID NO: 730034 - RNA, 23 nt, Human
cugcaauuacagaaaaagacuuc

SEQ ID NO: 730035 - RNA, 21 nt, Human
cuggaagggaggccuggagcu

SEQ ID NO: 730036 - RNA, 20 nt, Human
cuguugccuucuuucuggcc

SEQ ID NO: 730037 - RNA, 24 nt, Human
cuucaugccaaugagcuacuccuc

SEQ ID NO: 730038 - RNA, 18 nt, Human
cuucgcacaacagcaacc

SEQ ID NO: 730039 - RNA, 26 nt, Human
gaaaagcauuauaugagacaaaggca

SEQ ID NO: 730040 - RNA, 22 nt, Human
gaaaauguuaauaacuuagaca

SEQ ID NO: 730041 - RNA, 18 nt, Human
gaacaauaacaaccacaa

SEQ ID NO: 730042 - RNA, 19 nt, Human
gcagcccacagaacgacaa

SEQ ID NO: 730043 - RNA, 20 nt, Human
ggaaguaagacuaugaaaua

SEQ ID NO: 730044 - RNA, 22 nt, Human
ggagcucugcuaucaccaaucc

SEQ ID NO: 730045 - RNA, 18 nt, Human
gggcauggcugaguaugg

SEQ ID NO: 730046 - RNA, 19 nt, Human
ggggagcaggugucaccgc

SEQ ID NO: 730047 - RNA, 18 nt, Human
ggguuuuucguuuucuug

SEQ ID NO: 730048 - RNA, 19 nt, Human
gguaaauaacuccuuacaa

SEQ ID NO: 730049 - RNA, 22 nt, Human
guggcauuuuucuggacaaggg

SEQ ID NO: 730050 - RNA, 24 nt, Human
uaaaaaaaagucuacaauuucuaa

SEQ ID NO: 730051 - RNA, 23 nt, Human
uaagcaaaauuuagauggagaag

SEQ ID NO: 730052 - RNA, 21 nt, Human
uaauuuguaaacugcucaacu

SEQ ID NO: 730053 - RNA, 24 nt, Human
uacaaaauauuagaaacacuaucg

SEQ ID NO: 730054 - RNA, 23 nt, Human
uacaauuaaaugaacauuaucac

SEQ ID NO: 730055 - RNA, 22 nt, Human
uacucaaaugcaaaaucaacaa

SEQ ID NO: 730056 - RNA, 21 nt, Human
uagaaaguaguaacucaagua

SEQ ID NO: 730057 - RNA, 18 nt, Human
uagaggaugacucacugc

SEQ ID NO: 730058 - RNA, 22 nt, Human
uagcagacaaaauauaguucaa

SEQ ID NO: 730059 - RNA, 22 nt, Human
uagcaucaaucagggaugacca

SEQ ID NO: 730060 - RNA, 20 nt, Human
uagcuaacacuuaccgggca

SEQ ID NO: 730061 - RNA, 25 nt, Human
uaucaagugcccauacucuuugaca

SEQ ID NO: 730062 - RNA, 21 nt, Human
uaugaaaagcauuauaugaga

SEQ ID NO: 730063 - RNA, 20 nt, Human
uaugguacaaccguucaaca

SEQ ID NO: 730064 - RNA, 28 nt, Human
uauuaaaaauacuuacaaacaauucuua

SEQ ID NO: 730065 - RNA, 22 nt, Human
ucaaaugcaaaaucaacaaauc

SEQ ID NO: 730066 - RNA, 18 nt, Human
ucccagacaagccgaaac

SEQ ID NO: 730067 - RNA, 21 nt, Human
uccucagaagucugaguccac

SEQ ID NO: 730068 - RNA, 22 nt, Human
ucgcacaacagcaaccuacaca

SEQ ID NO: 730069 - RNA, 22 nt, Human
ucuauuagcugugcaagaaaua

SEQ ID NO: 730070 - RNA, 21 nt, Human
ucugcaauuacagaaaaagac

SEQ ID NO: 730071 - RNA, 24 nt, Human
ucugcaauuacagaaaaagacuuc

SEQ ID NO: 730072 - RNA, 18 nt, Human
ucuggacaagggagaggg

SEQ ID NO: 730073 - RNA, 22 nt, Human
ugaagacacuggcauuucagug

SEQ ID NO: 730074 - RNA, 18 nt, Human
ugaccagaacacauuagg

SEQ ID NO: 730075 - RNA, 28 nt, Human
ugacucccagacaagccgaaaccccuuu

SEQ ID NO: 730076 - RNA, 21 nt, Human
ugauaaaacauuccaccaaaa

SEQ ID NO: 730077 - RNA, 19 nt, Human
ugccacagugucuaaaagc

SEQ ID NO: 730078 - RNA, 19 nt, Human
uggaagggaggccuggagc

SEQ ID NO: 730079 - RNA, 20 nt, Human
uggcauuauguaucaagugc

SEQ ID NO: 730080 - RNA, 24 nt, Human
uggguaaauaacuccuuacaauau

SEQ ID NO: 730081 - RNA, 25 nt, Human
ugguaaaaaaaagucuacaauuucu

SEQ ID NO: 730082 - RNA, 19 nt, Human
uguaccugacaaacagaau

SEQ ID NO: 730083 - RNA, 23 nt, Human
uguguacacaagagagcuggaug

SEQ ID NO: 730084 - RNA, 21 nt, Human
uuaaaugaacauuaucacuga

SEQ ID NO: 730085 - RNA, 19 nt, Human
uuaggaccccagauuauuc

SEQ ID NO: 730086 - RNA, 25 nt, Human
uuagucuacaaaggggaacaaaccc

SEQ ID NO: 730087 - RNA, 21 nt, Human
uuccuagguuaaugggcaugu

SEQ ID NO: 730088 - RNA, 18 nt, Human
uuuaacaggcugaagauc

SEQ ID NO: 730089 - RNA, 23 nt, Human
uuugaaaaaaauaaaauguuuaa

SEQ ID NO: 730090 - RNA, 22 nt, Human
uuuggcaauuauaaggggcaaa

SEQ ID NO: 730091 - RNA, 21 nt, Human
uuuguaccugacaaacagaau

SEQ ID NO: 730092 - RNA, 20 nt, Human
aaaaggagacgggauauaaa

SEQ ID NO: 730093 - RNA, 19 nt, Human
aaaauacuguagaagcaaa

SEQ ID NO: 730094 - RNA, 22 nt, Human
aaaauacuguagaagcaaaauu

SEQ ID NO: 730095 - RNA, 22 nt, Human
aaacaaacaaaaaucacacuag

SEQ ID NO: 730096 - RNA, 26 nt, Human
aaacaaacaaaaaucacacuagccac

SEQ ID NO: 730097 - RNA, 26 nt, Human
aaaccaaauuuuacuacgguugugaa

SEQ ID NO: 730098 - RNA, 18 nt, Human
aacauucagcuuaaaaau

SEQ ID NO: 730099 - RNA, 23 nt, Human
aaccuuacguuaagcacauccac

SEQ ID NO: 730100 - RNA, 19 nt, Human
aacuaacuauaagcaauau

SEQ ID NO: 730101 - RNA, 19 nt, Human
aagcaaaaaguacaacagc

SEQ ID NO: 730102 - RNA, 22 nt, Human
aagcaaaaaguacaacagcuau

SEQ ID NO: 730103 - RNA, 23 nt, Human
aagcauuucccaagucacagaag

SEQ ID NO: 730104 - RNA, 20 nt, Human
aagccgcagaagauuccgaa

SEQ ID NO: 730105 - RNA, 19 nt, Human
aaggaaacaaacaaaaauc

SEQ ID NO: 730106 - RNA, 26 nt, Human
aaggaaacaaacaaaaaucacacuag

SEQ ID NO: 730107 - RNA, 23 nt, Human
aagucacagaagccccaaagaac

SEQ ID NO: 730108 - RNA, 21 nt, Human
acaaagccaauaacguaugcc

SEQ ID NO: 730109 - RNA, 24 nt, Human
acacugaucucauuucaacuguca

SEQ ID NO: 730110 - RNA, 20 nt, Human
acagaagccccaaagaacuc

SEQ ID NO: 730111 - RNA, 21 nt, Human
acagaagccccaaagaacucc

SEQ ID NO: 730112 - RNA, 19 nt, Human
acagacaaagccaauaacg

SEQ ID NO: 730113 - RNA, 19 nt, Human
accaagcccugagcacacu

SEQ ID NO: 730114 - RNA, 19 nt, Human
accugggcuuuugaaaaac

SEQ ID NO: 730115 - RNA, 18 nt, Human
agaagaaaaccaaggucc

SEQ ID NO: 730116 - RNA, 21 nt, Human
agucacagaagccccaaagaa

SEQ ID NO: 730117 - RNA, 25 nt, Human
auauggcagcgucuguaugaccagu

SEQ ID NO: 730118 - RNA, 20 nt, Human
augacccugugcaaguuuuc

SEQ ID NO: 730119 - RNA, 26 nt, Human
caaacaaaaaucacacuaaucaacgg

SEQ ID NO: 730120 - RNA, 22 nt, Human
caaacaaaaaucacacuagcca

SEQ ID NO: 730121 - RNA, 22 nt, Human
caaagaacuccuaaauuacaaa

SEQ ID NO: 730122 - RNA, 26 nt, Human
caaagaacuccuaaauuacaaauuca

SEQ ID NO: 730123 - RNA, 23 nt, Human
caacaguacuuaaaaggaaacaa

SEQ ID NO: 730124 - RNA, 18 nt, Human
caacuaaagaaaauggau

SEQ ID NO: 730125 - RNA, 24 nt, Human
caacugauaagcuuggcuuuacaa

SEQ ID NO: 730126 - RNA, 19 nt, Human
caagccgcagaagauuccg

SEQ ID NO: 730127 - RNA, 20 nt, Human
caagccgcagaagauuccga

SEQ ID NO: 730128 - RNA, 19 nt, Human
caagucacagaagccccaa

SEQ ID NO: 730129 - RNA, 22 nt, Human
caaguguuauguuccuuauauu

SEQ ID NO: 730130 - RNA, 23 nt, Human
cacauacucguccacugugugug

SEQ ID NO: 730131 - RNA, 24 nt, Human
caccgaguauauucuguuuauugu

SEQ ID NO: 730132 - RNA, 19 nt, Human
cacuagauucuuuguaugc

SEQ ID NO: 730133 - RNA, 20 nt, Human
cauugcugguugaguuugga

SEQ ID NO: 730134 - RNA, 21 nt, Human
ccugaauguaagcauuuccca

SEQ ID NO: 730135 - RNA, 24 nt, Human
cuuaacuuuuucaaaaggauccaa

SEQ ID NO: 730136 - RNA, 18 nt, Human
gcccaaacuaaauuauca

SEQ ID NO: 730137 - RNA, 25 nt, Human
ggaaccaaaaccucuuaacaacugg

SEQ ID NO: 730138 - RNA, 18 nt, Human
gugaacuauuauguccau

SEQ ID NO: 730139 - RNA, 23 nt, Human
gugcaaguuuucagaccuuccaa

SEQ ID NO: 730140 - RNA, 22 nt, Human
guuauauaauuacaaagaugac

SEQ ID NO: 730141 - RNA, 24 nt, Human
uaaaauagagaaauaagauaaaug

SEQ ID NO: 730142 - RNA, 22 nt, Human
uaagaaacacaaagaauaccac

SEQ ID NO: 730143 - RNA, 24 nt, Human
uaagaaauaagaaaauguuaaaaa

SEQ ID NO: 730144 - RNA, 24 nt, Human
uaagugaacuauuauguccauguu

SEQ ID NO: 730145 - RNA, 20 nt, Human
uacacaguauuuugcuguaa

SEQ ID NO: 730146 - RNA, 23 nt, Human
uacacaugaaauuaauuuuaauc

SEQ ID NO: 730147 - RNA, 21 nt, Human
uacacgaauaagauguaacuc

SEQ ID NO: 730148 - RNA, 22 nt, Human
uaccaagcccugagcacacuag

SEQ ID NO: 730149 - RNA, 19 nt, Human
uaccaguuagacggacaua

SEQ ID NO: 730150 - RNA, 25 nt, Human
uagaaaacaagcaaagauuaguuua

SEQ ID NO: 730151 - RNA, 21 nt, Human
uagaauuauagaugugauuua

SEQ ID NO: 730152 - RNA, 20 nt, Human
uagcaacguaaguuuaacca

SEQ ID NO: 730153 - RNA, 24 nt, Human
uaucuagaagaaaaccaagguccc

SEQ ID NO: 730154 - RNA, 20 nt, Human
uauguccauguuugcacaua

SEQ ID NO: 730155 - RNA, 21 nt, Human
uauuuucuuugggacagcugc

SEQ ID NO: 730156 - RNA, 18 nt, Human
uauuuugcuguaaauacc

SEQ ID NO: 730157 - RNA, 23 nt, Human
ucaauguaccaguuagacggaca

SEQ ID NO: 730158 - RNA, 23 nt, Human
ucacaacauaaaauagagaaaua

SEQ ID NO: 730159 - RNA, 18 nt, Human
ucacagaagccccaaaga

SEQ ID NO: 730160 - RNA, 22 nt, Human
ucacagaagccccaaagaacuc

SEQ ID NO: 730161 - RNA, 21 nt, Human
ucagcucauuguaccaagccc

SEQ ID NO: 730162 - RNA, 27 nt, Human
uccagaucacaaauaaucuuaagaguu

SEQ ID NO: 730163 - RNA, 20 nt, Human
ucccaagucacagaagcccc

SEQ ID NO: 730164 - RNA, 19 nt, Human
uccuaaaaccucaauuuuc

SEQ ID NO: 730165 - RNA, 23 nt, Human
ucuaacaaauacauaaauccaga

SEQ ID NO: 730166 - RNA, 27 nt, Human
ucucuaguguuaacaucaaaucacauu

SEQ ID NO: 730167 - RNA, 20 nt, Human
ugaaaauccuaaaaccucag

SEQ ID NO: 730168 - RNA, 21 nt, Human
ugagcacacuagauucuuugu

SEQ ID NO: 730169 - RNA, 21 nt, Human
ugauauagcaaaaucaaaggg

SEQ ID NO: 730170 - RNA, 22 nt, Human
ugaucaaauaauauuuuaguau

SEQ ID NO: 730171 - RNA, 20 nt, Human
ugcaucuuaguuugggguua

SEQ ID NO: 730172 - RNA, 19 nt, Human
ugccacacagaugauuauu

SEQ ID NO: 730173 - RNA, 22 nt, Human
uggaaagcaaaaaguacaacag

SEQ ID NO: 730174 - RNA, 22 nt, Human
uggccaaaauuuuagccuucau

SEQ ID NO: 730175 - RNA, 24 nt, Human
uguuuauuguuuaugauuuacaca

SEQ ID NO: 730176 - RNA, 21 nt, Human
uuaagcacauccacugguuuc

SEQ ID NO: 730177 - RNA, 21 nt, Human
uuauucacacuauggacaagc

SEQ ID NO: 730178 - RNA, 23 nt, Human
uucuuucuaaacuauggcauaua

SEQ ID NO: 730179 - RNA, 24 nt, Human
uugcauuccauuuuaacaauucgu

SEQ ID NO: 730180 - RNA, 20 nt, Human
uugccagccuuagcuuauac

SEQ ID NO: 730181 - RNA, 27 nt, Human
uuuaauacuuucugcaaaccuaaauuu

SEQ ID NO: 730182 - RNA, 20 nt, Human
uuucucagcauaugaaccaa

SEQ ID NO: 730183 - RNA, 21 nt, Human
aagcacugaaaaauuggaacu

SEQ ID NO: 730184 - RNA, 22 nt, Human
accgaaauuuagacaacgucca

SEQ ID NO: 730185 - RNA, 23 nt, Human
aggaugcuuucuauggagggaau

SEQ ID NO: 730186 - RNA, 19 nt, Human
agggaaggugcucugagga

SEQ ID NO: 730187 - RNA, 22 nt, Human
caacaguugcaugagaucuuaa

SEQ ID NO: 730188 - RNA, 23 nt, Human
cacucacuggagggagugucugg

SEQ ID NO: 730189 - RNA, 22 nt, Human
cagaaaaaacugaauggaacuu

SEQ ID NO: 730190 - RNA, 21 nt, Human
cagaaaauacaacaguugcau

SEQ ID NO: 730191 - RNA, 19 nt, Human
ccauggcuaccgaaauuua

SEQ ID NO: 730192 - RNA, 22 nt, Human
cuaaacguuauaauccacaaca

SEQ ID NO: 730193 - RNA, 19 nt, Human
cuccccgaaagggggcaga

SEQ ID NO: 730194 - RNA, 23 nt, Human
cugaauggaacuuguacuacuga

SEQ ID NO: 730195 - RNA, 21 nt, Human
cuguguuuuaaaugugcacuu

SEQ ID NO: 730196 - RNA, 19 nt, Human
gugcacuccccgaaagggg

SEQ ID NO: 730197 - RNA, 19 nt, Human
uacuacugagauucugugg

SEQ ID NO: 730198 - RNA, 31 nt, Human
uacuuuuuuuguuuuucuuuucuacaaaaag

SEQ ID NO: 730199 - RNA, 18 nt, Human
uaggaagccagggaaggu

SEQ ID NO: 730200 - RNA, 19 nt, Human
ucagaaaaaacugaaugga

SEQ ID NO: 730201 - RNA, 22 nt, Human
ucuguguuuuaaaugugcacuu

SEQ ID NO: 730202 - RNA, 18 nt, Human
ugcuuucuuauauucuug

SEQ ID NO: 730203 - RNA, 18 nt, Human
uggagaauggcuuccaga

SEQ ID NO: 730204 - RNA, 18 nt, Human
uggagggaauaagggcug

SEQ ID NO: 730205 - RNA, 24 nt, Human
uguaaagcacugaaaaauuggaac

SEQ ID NO: 730206 - RNA, 21 nt, Human
uucauuuaaaagguuaaauga

SEQ ID NO: 730207 - RNA, 24 nt, Human
uucuuugcuucacuuuaacagagg

SEQ ID NO: 730208 - RNA, 26 nt, Human
aaacugauacuuauuucaauucuuga

SEQ ID NO: 730209 - RNA, 24 nt, Human
aaagugcugggauuacaggcauga

SEQ ID NO: 730210 - RNA, 23 nt, Human
aaauagcuauguaaccguauuuu

SEQ ID NO: 730211 - RNA, 23 nt, Human
aaaucaguaccuuagacaagaca

SEQ ID NO: 730212 - RNA, 23 nt, Human
aagaauucucuauuacucuaacc

SEQ ID NO: 730213 - RNA, 19 nt, Human
aagugcugggauuacaggc

SEQ ID NO: 730214 - RNA, 21 nt, Human
aagugcugggauuacaggcau

SEQ ID NO: 730215 - RNA, 18 nt, Human
aauaagcuuagcuugaaa

SEQ ID NO: 730216 - RNA, 22 nt, Human
aaugacucccuuuguccuagaa

SEQ ID NO: 730217 - RNA, 23 nt, Human
acaaaaaaacauaacuggggagg

SEQ ID NO: 730218 - RNA, 22 nt, Human
acaaagucucugaggcucaaag

SEQ ID NO: 730219 - RNA, 23 nt, Human
acaccaccacgcccagcuaauuu

SEQ ID NO: 730220 - RNA, 24 nt, Human
accucgugauccgcccaccuuggc

SEQ ID NO: 730221 - RNA, 18 nt, Human
acuacacucuggccuggg

SEQ ID NO: 730222 - RNA, 24 nt, Human
acuauguuggucaggcugcccucg

SEQ ID NO: 730223 - RNA, 20 nt, Human
acugaguuuaugaguuugaa

SEQ ID NO: 730224 - RNA, 19 nt, Human
acugcagccuccgccuccu

SEQ ID NO: 730225 - RNA, 25 nt, Human
agacuguuauagagccagugaaacu

SEQ ID NO: 730226 - RNA, 21 nt, Human
agaguagauuacccccuacuc

SEQ ID NO: 730227 - RNA, 20 nt, Human
agcaaauaugcaaccaaaau

SEQ ID NO: 730228 - RNA, 20 nt, Human
agcuggguguggugguacau

SEQ ID NO: 730229 - RNA, 24 nt, Human
aggcuaaggugggaggguugcuug

SEQ ID NO: 730230 - RNA, 18 nt, Human
agggcuuaacaguguuug

SEQ ID NO: 730231 - RNA, 23 nt, Human
aggugggaggguugcuugagccc

SEQ ID NO: 730232 - RNA, 19 nt, Human
agguguuucaggagcccca

SEQ ID NO: 730233 - RNA, 18 nt, Human
aguagcugggauuacagg

SEQ ID NO: 730234 - RNA, 24 nt, Human
agugauucuccugucucagccucc

SEQ ID NO: 730235 - RNA, 21 nt, Human
agugcaauggcgugaucucag

SEQ ID NO: 730236 - RNA, 24 nt, Human
agugcaauggcgugaucucagcuc

SEQ ID NO: 730237 - RNA, 18 nt, Human
agugcugggauuacaggc

SEQ ID NO: 730238 - RNA, 19 nt, Human
aguuagaaacagguggccc

SEQ ID NO: 730239 - RNA, 19 nt, Human
aguucucuuaguguagagg

SEQ ID NO: 730240 - RNA, 22 nt, Human
auagagccagugaaacuugacu

SEQ ID NO: 730241 - RNA, 21 nt, Human
augggguuucacuauguuggu

SEQ ID NO: 730242 - RNA, 23 nt, Human
augggguuucacuauguugguca

SEQ ID NO: 730243 - RNA, 24 nt, Human
augggguuucacuauguuggucag

SEQ ID NO: 730244 - RNA, 18 nt, Human
auucuauuuccuaagaaa

SEQ ID NO: 730245 - RNA, 25 nt, Human
auucugcccaguucaaccaaaauga

SEQ ID NO: 730246 - RNA, 24 nt, Human
auugugccacuacacucuggccug

SEQ ID NO: 730247 - RNA, 20 nt, Human
auuuaugaaaaccuagauaa

SEQ ID NO: 730248 - RNA, 19 nt, Human
auuuuggaaguuuugugaa

SEQ ID NO: 730249 - RNA, 22 nt, Human
caaaacgagguguuucaggagc

SEQ ID NO: 730250 - RNA, 21 nt, Human
caaagucucugaggcucaaag

SEQ ID NO: 730251 - RNA, 25 nt, Human
caaagucucugaggcucaaaguuuu

SEQ ID NO: 730252 - RNA, 24 nt, Human
caaagugcugggauuacaggcaug

SEQ ID NO: 730253 - RNA, 22 nt, Human
caagugauucuccugucucagc

SEQ ID NO: 730254 - RNA, 22 nt, Human
caaguuagaaacagguggccca

SEQ ID NO: 730255 - RNA, 21 nt, Human
caauauagcagccacuagcca

SEQ ID NO: 730256 - RNA, 19 nt, Human
cacagcucucacagaagca

SEQ ID NO: 730257 - RNA, 24 nt, Human
caccacgcccagcuaauuuuugua

SEQ ID NO: 730258 - RNA, 23 nt, Human
cacuagcaacaucauuucucaag

SEQ ID NO: 730259 - RNA, 21 nt, Human
cacuauguuggucaggcugcc

SEQ ID NO: 730260 - RNA, 24 nt, Human
cacuauguuggucaggcugcccuc

SEQ ID NO: 730261 - RNA, 23 nt, Human
cacugcagccuccgccuccuggg

SEQ ID NO: 730262 - RNA, 24 nt, Human
cagauuaaaaugaaaaccauucaa

SEQ ID NO: 730263 - RNA, 23 nt, Human
cagccacagccacagccaacccg

SEQ ID NO: 730264 - RNA, 19 nt, Human
cagccuccgccuccugggc

SEQ ID NO: 730265 - RNA, 23 nt, Human
cagccuccgccuccugggcucaa

SEQ ID NO: 730266 - RNA, 18 nt, Human
caggaauucgaggcuaca

SEQ ID NO: 730267 - RNA, 23 nt, Human
caggagccccaaagcauaacauu

SEQ ID NO: 730268 - RNA, 23 nt, Human
ccaaagugcugggauuacaggca

SEQ ID NO: 730269 - RNA, 24 nt, Human
ccaaagugcugggauuacaggcau

SEQ ID NO: 730270 - RNA, 25 nt, Human
ccacagccacagccaacccggaagc

SEQ ID NO: 730271 - RNA, 20 nt, Human
ccacuacacucuggccuggg

SEQ ID NO: 730272 - RNA, 20 nt, Human
ccacuacacucuggccuggg

SEQ ID NO: 730273 - RNA, 20 nt, Human
ccacuacacucuggccuggg

SEQ ID NO: 730274 - RNA, 21 nt, Human
ccacuacacucuggccugggu

SEQ ID NO: 730275 - RNA, 23 nt, Human
ccacuacacucuggccuggguga

SEQ ID NO: 730276 - RNA, 23 nt, Human
ccacuacacucuggccuggguga

SEQ ID NO: 730277 - RNA, 24 nt, Human
ccacuacacucuggccugggugau

SEQ ID NO: 730278 - RNA, 24 nt, Human
cccaaagugcugggauuacaggca

SEQ ID NO: 730279 - RNA, 20 nt, Human
ccccaaagaaaaacuacccg

SEQ ID NO: 730280 - RNA, 20 nt, Human
cccccaaagaaaaacuaccc

SEQ ID NO: 730281 - RNA, 23 nt, Human
cccgaguagcugggauuacaggg

SEQ ID NO: 730282 - RNA, 21 nt, Human
ccgcagccacagccacagcca

SEQ ID NO: 730283 - RNA, 21 nt, Human
ccgccgcagccacagccacag

SEQ ID NO: 730284 - RNA, 24 nt, Human
ccgccuccugggcucaagugauuc

SEQ ID NO: 730285 - RNA, 21 nt, Human
ccgcuccgccccgcccgccuc

SEQ ID NO: 730286 - RNA, 19 nt, Human
ccuaagaaaaauaagaaaa

SEQ ID NO: 730287 - RNA, 23 nt, Human
ccuccaaauaacuuauuugauuu

SEQ ID NO: 730288 - RNA, 22 nt, Human
ccuccgccuccugggcucaagu

SEQ ID NO: 730289 - RNA, 21 nt, Human
ccuccugggcucaagugauuc

SEQ ID NO: 730290 - RNA, 24 nt, Human
ccuccugggcucaagugauucucc

SEQ ID NO: 730291 - RNA, 23 nt, Human
ccugggcucaagugauucuccuc

SEQ ID NO: 730292 - RNA, 23 nt, Human
ccugggcucaagugauucuccug

SEQ ID NO: 730293 - RNA, 22 nt, Human
ccuguagucccagcuacuaggg

SEQ ID NO: 730294 - RNA, 23 nt, Human
cgcucugucgccaggcuugagug

SEQ ID NO: 730295 - RNA, 23 nt, Human
cuauggcugugaacauuuaaacc

SEQ ID NO: 730296 - RNA, 23 nt, Human
cucaagugauucuccugucucag

SEQ ID NO: 730297 - RNA, 23 nt, Human
cucaaguuagaaacagguggccc

SEQ ID NO: 730298 - RNA, 24 nt, Human
cucacugcagccuccgccuccugg

SEQ ID NO: 730299 - RNA, 24 nt, Human
cucagccucccgaguagcugggau

SEQ ID NO: 730300 - RNA, 22 nt, Human
cuccugaccucgugauccgccc

SEQ ID NO: 730301 - RNA, 24 nt, Human
cuccugcgccgccgccgcagccac

SEQ ID NO: 730302 - RNA, 25 nt, Human
cuccugcgccgccgccgcagccaca

SEQ ID NO: 730303 - RNA, 21 nt, Human
cuccugggcucaagugauucu

SEQ ID NO: 730304 - RNA, 23 nt, Human
cugcagccuccgccuccugggcu

SEQ ID NO: 730305 - RNA, 18 nt, Human
cugcuccugcgccgccgc

SEQ ID NO: 730306 - RNA, 22 nt, Human
cuggcccuccgcuccgccccgc

SEQ ID NO: 730307 - RNA, 23 nt, Human
cugucucagccucccgaguagcu

SEQ ID NO: 730308 - RNA, 21 nt, Human
gaaaaagagaauguaaaaugu

SEQ ID NO: 730309 - RNA, 26 nt, Human
gaaacagguggcccaugcuguaauga

SEQ ID NO: 730310 - RNA, 20 nt, Human
gacccacgccggggcccgcu

SEQ ID NO: 730311 - RNA, 21 nt, Human
gaccucgugauccgcccaccu

SEQ ID NO: 730312 - RNA, 24 nt, Human
gaccucgugauccgcccaccuugg

SEQ ID NO: 730313 - RNA, 25 nt, Human
gaccucgugauccgcccaccuuggc

SEQ ID NO: 730314 - RNA, 24 nt, Human
gacggagucucgcucugucgccag

SEQ ID NO: 730315 - RNA, 24 nt, Human
gagaugggguuucacuauguuggu

SEQ ID NO: 730316 - RNA, 25 nt, Human
gaguagcugggauuacagggguaca

SEQ ID NO: 730317 - RNA, 21 nt, Human
gauacagugagaccccgucuc

SEQ ID NO: 730318 - RNA, 18 nt, Human
gauuacaggcaugagccc

SEQ ID NO: 730319 - RNA, 18 nt, Human
gauuacagggguacacca

SEQ ID NO: 730320 - RNA, 23 nt, Human
gcaacaucauuucucaaggacac

SEQ ID NO: 730321 - RNA, 19 nt, Human
gcauagcuaggacugaugc

SEQ ID NO: 730322 - RNA, 21 nt, Human
gccacagccacagccaacccg

SEQ ID NO: 730323 - RNA, 24 nt, Human
gccacuacacucuggccuggguga

SEQ ID NO: 730324 - RNA, 22 nt, Human
gcccagcuaauuuuuguauuuu

SEQ ID NO: 730325 - RNA, 20 nt, Human
gcccucgaacuccugaccuc

SEQ ID NO: 730326 - RNA, 20 nt, Human
gccgcagccacagccacagc

SEQ ID NO: 730327 - RNA, 22 nt, Human
gccugggugauacagugagacc

SEQ ID NO: 730328 - RNA, 18 nt, Human
gcuccugcgccgccgccg

SEQ ID NO: 730329 - RNA, 20 nt, Human
ggaggcuaaggugggagggu

SEQ ID NO: 730330 - RNA, 19 nt, Human
ggauuacaggcaugagccu

SEQ ID NO: 730331 - RNA, 18 nt, Human
ggauuuaacuagucugca

SEQ ID NO: 730332 - RNA, 22 nt, Human
ggccugggugauacagugagac

SEQ ID NO: 730333 - RNA, 22 nt, Human
gggaggguugcuugagcccagg

SEQ ID NO: 730334 - RNA, 25 nt, Human
gggcauuauaaacaucaguuagcca

SEQ ID NO: 730335 - RNA, 19 nt, Human
gggcucaagugauucuccu

SEQ ID NO: 730336 - RNA, 23 nt, Human
gggguuucacuauguuggucagg

SEQ ID NO: 730337 - RNA, 20 nt, Human
gguguggagagccugauuuc

SEQ ID NO: 730338 - RNA, 18 nt, Human
guagcugggauuacaggg

SEQ ID NO: 730339 - RNA, 20 nt, Human
guagcugggauuacaggggu

SEQ ID NO: 730340 - RNA, 20 nt, Human
gugaagaaagcuuuaccuuc

SEQ ID NO: 730341 - RNA, 24 nt, Human
gugauucuccugucucagccuccc

SEQ ID NO: 730342 - RNA, 19 nt, Human
uaaaagggcaaauucccca

SEQ ID NO: 730343 - RNA, 21 nt, Human
uaaaccuuacagaaaaacuga

SEQ ID NO: 730344 - RNA, 20 nt, Human
uaacaguguuuguaaaaaaa

SEQ ID NO: 730345 - RNA, 18 nt, Human
uaagaaacacacucuaua

SEQ ID NO: 730346 - RNA, 19 nt, Human
uaagaagagcccaaucaag

SEQ ID NO: 730347 - RNA, 21 nt, Human
uaagauuagaugaagauuagc

SEQ ID NO: 730348 - RNA, 23 nt, Human
uaaggugggaggguugcuugagc

SEQ ID NO: 730349 - RNA, 24 nt, Human
uaaggugggaggguugcuugagcc

SEQ ID NO: 730350 - RNA, 24 nt, Human
uaauuuuuguauuuuuaguagaga

SEQ ID NO: 730351 - RNA, 23 nt, Human
uacaaagucucugaggcucaaag

SEQ ID NO: 730352 - RNA, 21 nt, Human
uacaauuacagacacaugcug

SEQ ID NO: 730353 - RNA, 23 nt, Human
uacagaguagaggugaguuucaa

SEQ ID NO: 730354 - RNA, 23 nt, Human
uacagaucaaguauguccaauga

SEQ ID NO: 730355 - RNA, 23 nt, Human
uacaggcaugagccuccacgccc

SEQ ID NO: 730356 - RNA, 24 nt, Human
uacagggguacaccaccacgccca

SEQ ID NO: 730357 - RNA, 24 nt, Human
uacagugagaccccgucucuaaaa

SEQ ID NO: 730358 - RNA, 21 nt, Human
uaccuggauggagggcauuau

SEQ ID NO: 730359 - RNA, 27 nt, Human
uacuagugcccaccuucuuuucucaaa

SEQ ID NO: 730360 - RNA, 23 nt, Human
uagaaaacaaaaaaacauaacug

SEQ ID NO: 730361 - RNA, 20 nt, Human
uagaacaaaccauucugccc

SEQ ID NO: 730362 - RNA, 22 nt, Human
uagagaugggguuucacuaugu

SEQ ID NO: 730363 - RNA, 23 nt, Human
uagcuuagcaaauaugcaaccaa

SEQ ID NO: 730364 - RNA, 23 nt, Human
uaguagagaugggguuucacuau

SEQ ID NO: 730365 - RNA, 24 nt, Human
uaguagagaugggguuucacuaug

SEQ ID NO: 730366 - RNA, 18 nt, Human
uauguuggucaggcugcc

SEQ ID NO: 730367 - RNA, 24 nt, Human
uauguuggucaggcugcccucgaa

SEQ ID NO: 730368 - RNA, 23 nt, Human
ucaaugcccccaaagaaaaacua

SEQ ID NO: 730369 - RNA, 23 nt, Human
ucacugcagccuccgccuccugg

SEQ ID NO: 730370 - RNA, 24 nt, Human
ucacugcagccuccgccuccuggg

SEQ ID NO: 730371 - RNA, 25 nt, Human
ucacugcagccuccgccuccugggc

SEQ ID NO: 730372 - RNA, 26 nt, Human
ucacugcagccuccgccuccugggcu

SEQ ID NO: 730373 - RNA, 24 nt, Human
ucagcaucauuuaaucuguugcuc

SEQ ID NO: 730374 - RNA, 20 nt, Human
ucagccucccgaguagcugg

SEQ ID NO: 730375 - RNA, 24 nt, Human
ucccaaagugcugggauuacaggc

SEQ ID NO: 730376 - RNA, 25 nt, Human
uccccauacauugugaucugucaua

SEQ ID NO: 730377 - RNA, 23 nt, Human
uccccuaccagcuuacaugaaag

SEQ ID NO: 730378 - RNA, 23 nt, Human
ucccgaguagcugggauuacagg

SEQ ID NO: 730379 - RNA, 25 nt, Human
ucccgaguagcugggauuacagggg

SEQ ID NO: 730380 - RNA, 18 nt, Human
ucccuguagucccagcua

SEQ ID NO: 730381 - RNA, 23 nt, Human
ucccuguagucccagcuacuagg

SEQ ID NO: 730382 - RNA, 24 nt, Human
ucccuguagucccagcuacuaggg

SEQ ID NO: 730383 - RNA, 18 nt, Human
uccuagaaaacaaaaaaa

SEQ ID NO: 730384 - RNA, 22 nt, Human
uccugcgccgccgccgcagcca

SEQ ID NO: 730385 - RNA, 24 nt, Human
uccugcgccgccgccgcagccaca

SEQ ID NO: 730386 - RNA, 21 nt, Human
uccugggcucaagugauucuc

SEQ ID NO: 730387 - RNA, 22 nt, Human
uccugggcucaagugauucucc

SEQ ID NO: 730388 - RNA, 24 nt, Human
uccugggcucaagugauucuccug

SEQ ID NO: 730389 - RNA, 21 nt, Human
ucgcucugucgccaggcuuga

SEQ ID NO: 730390 - RNA, 20 nt, Human
ucucaaaaauccccuaccag

SEQ ID NO: 730391 - RNA, 24 nt, Human
ucuccugucucagccucccgagua

SEQ ID NO: 730392 - RNA, 23 nt, Human
ucucgcucugucgccaggcuuga

SEQ ID NO: 730393 - RNA, 24 nt, Human
ucucgcucugucgccaggcuugag

SEQ ID NO: 730394 - RNA, 19 nt, Human
ugaaaaguugguaaaaacu

SEQ ID NO: 730395 - RNA, 22 nt, Human
ugaaaaguugguaaaaacuuug

SEQ ID NO: 730396 - RNA, 22 nt, Human
ugaaaaguugguaaaaacuuug

SEQ ID NO: 730397 - RNA, 26 nt, Human
ugaaaaguugguaaaaacuuuguguu

SEQ ID NO: 730398 - RNA, 19 nt, Human
ugagaaguacuuucauguu

SEQ ID NO: 730399 - RNA, 19 nt, Human
ugagaccccgucucuaaaa

SEQ ID NO: 730400 - RNA, 19 nt, Human
ugaggguuacuuugucuua

SEQ ID NO: 730401 - RNA, 18 nt, Human
ugagugcaauggcgugau

SEQ ID NO: 730402 - RNA, 22 nt, Human
ugauacagugagaccccgucuc

SEQ ID NO: 730403 - RNA, 24 nt, Human
ugauacagugagaccccgucucua

SEQ ID NO: 730404 - RNA, 24 nt, Human
ugauccgcccaccuuggccuccca

SEQ ID NO: 730405 - RNA, 20 nt, Human
ugauucuccugucucagccu

SEQ ID NO: 730406 - RNA, 20 nt, Human
ugcugggauuacaggcauga

SEQ ID NO: 730407 - RNA, 19 nt, Human
ugcuucuuuuuauguuuuu

SEQ ID NO: 730408 - RNA, 19 nt, Human
uggcccuccgcuccgcccc

SEQ ID NO: 730409 - RNA, 27 nt, Human
uggcgggagacccacgccggggcccgc

SEQ ID NO: 730410 - RNA, 24 nt, Human
uggcgugaucucagcucacugcag

SEQ ID NO: 730411 - RNA, 20 nt, Human
uggcugugaacauuuaaacc

SEQ ID NO: 730412 - RNA, 18 nt, Human
ugggauuacaggcaugag

SEQ ID NO: 730413 - RNA, 19 nt, Human
ugggauuacaggcaugagc

SEQ ID NO: 730414 - RNA, 19 nt, Human
ugggauuacaggcaugagc

SEQ ID NO: 730415 - RNA, 24 nt, Human
ugggauuacaggcaugagccucca

SEQ ID NO: 730416 - RNA, 22 nt, Human
ugggauuacagggguacaccac

SEQ ID NO: 730417 - RNA, 24 nt, Human
ugggauuacagggguacaccacca

SEQ ID NO: 730418 - RNA, 18 nt, Human
ugggcucaagugauucuc

SEQ ID NO: 730419 - RNA, 24 nt, Human
ugggcucaagugauucuccugucu

SEQ ID NO: 730420 - RNA, 20 nt, Human
uggggagguuggcaagaccc

SEQ ID NO: 730421 - RNA, 24 nt, Human
ugggguuucacuauguuggucagg

SEQ ID NO: 730422 - RNA, 24 nt, Human
uggucaggcugcccucgaacuccu

SEQ ID NO: 730423 - RNA, 24 nt, Human
uggugguacaucccuguaguccca

SEQ ID NO: 730424 - RNA, 24 nt, Human
ugucucagccucccgaguagcugg

SEQ ID NO: 730425 - RNA, 21 nt, Human
ugucuugugguaacaacugug

SEQ ID NO: 730426 - RNA, 20 nt, Human
ugugaucugucauauuuagc

SEQ ID NO: 730427 - RNA, 23 nt, Human
uuaaaaugaaaaccauucaauaa

SEQ ID NO: 730428 - RNA, 24 nt, Human
uuaaaauuuugauagccuucuguu

SEQ ID NO: 730429 - RNA, 22 nt, Human
uuagcuacuugauaugagaauc

SEQ ID NO: 730430 - RNA, 18 nt, Human
uuagcugggugugguggu

SEQ ID NO: 730431 - RNA, 20 nt, Human
uuagcuggguguggugguac

SEQ ID NO: 730432 - RNA, 18 nt, Human
uuaguagagaugggguuu

SEQ ID NO: 730433 - RNA, 21 nt, Human
uuaguagagaugggguuucac

SEQ ID NO: 730434 - RNA, 21 nt, Human
uuaguagagaugggguuucac

SEQ ID NO: 730435 - RNA, 24 nt, Human
uuaguagagaugggguuucacuau

SEQ ID NO: 730436 - RNA, 19 nt, Human
uuaguguagagguagacug

SEQ ID NO: 730437 - RNA, 18 nt, Human
uugaaucuuucugaaguu

SEQ ID NO: 730438 - RNA, 23 nt, Human
uugagugcaauggcgugaucuca

SEQ ID NO: 730439 - RNA, 24 nt, Human
uugcuugagcccaggaauucgagg

SEQ ID NO: 730440 - RNA, 18 nt, Human
uuggccucccaaagugcu

SEQ ID NO: 730441 - RNA, 23 nt, Human
uuguauuuuuaguagagaugggg

SEQ ID NO: 730442 - RNA, 22 nt, Human
uuuucugacaaaaauucagaau

SEQ ID NO: 730443 - RNA, 20 nt, Human
uuuuguauuuuuaguagaga

SEQ ID NO: 730444 - RNA, 24 nt, Human
uuuuuaguagagaugggguuucac

SEQ ID NO: 730445 - RNA, 20 nt, Human
uuuuuguauuuuuaguagag

SEQ ID NO: 730446 - RNA, 22 nt, Human
aaaguccaguacuauacuccuc

SEQ ID NO: 730447 - RNA, 22 nt, Human
aaauacugaacaucacaaugug

SEQ ID NO: 730448 - RNA, 20 nt, Human
aaccccaccaccagcagagc

SEQ ID NO: 730449 - RNA, 21 nt, Human
aagacaaauaucaacaaaugu

SEQ ID NO: 730450 - RNA, 19 nt, Human
aagcaggccuccagaaauc

SEQ ID NO: 730451 - RNA, 20 nt, Human
acaguagaacgacaaucaga

SEQ ID NO: 730452 - RNA, 21 nt, Human
acgccagaccuucagaggccc

SEQ ID NO: 730453 - RNA, 22 nt, Human
acgccagaccuucagaggccca

SEQ ID NO: 730454 - RNA, 23 nt, Human
acugaacaucacaauguggacaa

SEQ ID NO: 730455 - RNA, 25 nt, Human
agaggcccagagcccaggucaucgg

SEQ ID NO: 730456 - RNA, 22 nt, Human
agcacuaaagauauauguugca

SEQ ID NO: 730457 - RNA, 23 nt, Human
agcagcaaccccaccaccagcag

SEQ ID NO: 730458 - RNA, 20 nt, Human
auguugcaacacagaaccaa

SEQ ID NO: 730459 - RNA, 25 nt, Human
caaccccaccaccagcagagcagcc

SEQ ID NO: 730460 - RNA, 22 nt, Human
caagccccacagcugacagaag

SEQ ID NO: 730461 - RNA, 18 nt, Human
caaguuacaaagaaaguc

SEQ ID NO: 730462 - RNA, 21 nt, Human
cacaaacaacacucaaauaua

SEQ ID NO: 730463 - RNA, 19 nt, Human
cacagguuuguuucuucac

SEQ ID NO: 730464 - RNA, 25 nt, Human
caccaccagcagagcagccacugga

SEQ ID NO: 730465 - RNA, 23 nt, Human
cacucagccuccuucccaaacac

SEQ ID NO: 730466 - RNA, 19 nt, Human
cacuguguccugucagaau

SEQ ID NO: 730467 - RNA, 20 nt, Human
cagaccuucagaggcccaga

SEQ ID NO: 730468 - RNA, 19 nt, Human
cagaugcucacuguguccu

SEQ ID NO: 730469 - RNA, 22 nt, Human
cagcagcaaccccaccaccagc

SEQ ID NO: 730470 - RNA, 21 nt, Human
cagccuccuucccaaacacag

SEQ ID NO: 730471 - RNA, 25 nt, Human
ccagccuuaaagcaggccuccagaa

SEQ ID NO: 730472 - RNA, 21 nt, Human
ccaguagucacucagccuccu

SEQ ID NO: 730473 - RNA, 24 nt, Human
cccaccaccagcagagcagccacu

SEQ ID NO: 730474 - RNA, 18 nt, Human
cccccuccucucuucagc

SEQ ID NO: 730475 - RNA, 19 nt, Human
cucaaauauauauauauau

SEQ ID NO: 730476 - RNA, 22 nt, Human
cucccccagucuaaaccucaac

SEQ ID NO: 730477 - RNA, 20 nt, Human
cucucuucagcucuccucug

SEQ ID NO: 730478 - RNA, 19 nt, Human
cuggcaucagaaaaaugcu

SEQ ID NO: 730479 - RNA, 22 nt, Human
cuugcagaacuggccagccuua

SEQ ID NO: 730480 - RNA, 23 nt, Human
gacaaucugaggccagcaauuaa

SEQ ID NO: 730481 - RNA, 21 nt, Human
gaguguagaacaggcacaacc

SEQ ID NO: 730482 - RNA, 23 nt, Human
gcccagagcccaggucaucggcc

SEQ ID NO: 730483 - RNA, 18 nt, Human
ggaauauucgugcuccuc

SEQ ID NO: 730484 - RNA, 22 nt, Human
gucaagccccacagcugacagg

SEQ ID NO: 730485 - RNA, 21 nt, Human
gugcagacccguugagggugg

SEQ ID NO: 730486 - RNA, 19 nt, Human
uaacauaggacuuuauuga

SEQ ID NO: 730487 - RNA, 22 nt, Human
uaacucaggaacauaaggacaa

SEQ ID NO: 730488 - RNA, 18 nt, Human
uagaguguagaacaggca

SEQ ID NO: 730489 - RNA, 22 nt, Human
uagugucaagccccacagcuga

SEQ ID NO: 730490 - RNA, 25 nt, Human
uagugucaagccccacagcugacag

SEQ ID NO: 730491 - RNA, 19 nt, Human
uauauauacaguagaacga

SEQ ID NO: 730492 - RNA, 19 nt, Human
ucacagguuuguuucuuca

SEQ ID NO: 730493 - RNA, 22 nt, Human
ucagcucuccucuggcugcucu

SEQ ID NO: 730494 - RNA, 22 nt, Human
ucuccuccuccuugccuuucuu

SEQ ID NO: 730495 - RNA, 22 nt, Human
ucucuucagcucuccucuggcu

SEQ ID NO: 730496 - RNA, 18 nt, Human
ugaaacacaaacaacacu

SEQ ID NO: 730497 - RNA, 23 nt, Human
ugaaacacaaacaacacucaaau

SEQ ID NO: 730498 - RNA, 23 nt, Human
ugaacaucacaauguggacaaga

SEQ ID NO: 730499 - RNA, 23 nt, Human
ugacagaaggggguccuccagag

SEQ ID NO: 730500 - RNA, 23 nt, Human
ugcaacacagaaccaacuauuaa

SEQ ID NO: 730501 - RNA, 23 nt, Human
uggccagccuuaaagcaggccuc

SEQ ID NO: 730502 - RNA, 24 nt, Human
uuacaaagaaaguccaguacuaua

SEQ ID NO: 730503 - RNA, 23 nt, Human
uuaggugauugaggauauaagcu

SEQ ID NO: 730504 - RNA, 22 nt, Human
uuauugaaacacaaacaacacu

SEQ ID NO: 730505 - RNA, 21 nt, Human
aaaaaaaaaacacaacgccag

SEQ ID NO: 730506 - RNA, 24 nt, Human
aaaaaaaaaacacaacgccaguga

SEQ ID NO: 730507 - RNA, 21 nt, Human
aaaaaccaaacccagcccaaa

SEQ ID NO: 730508 - RNA, 21 nt, Human
aaaagauguacaaauaaauga

SEQ ID NO: 730509 - RNA, 21 nt, Human
aaacauacacacagaguacaa

SEQ ID NO: 730510 - RNA, 18 nt, Human
aaacauggcucugcagaa

SEQ ID NO: 730511 - RNA, 18 nt, Human
aaacuggucagccccaaa

SEQ ID NO: 730512 - RNA, 18 nt, Human
aaacuuucagacacagaa

SEQ ID NO: 730513 - RNA, 23 nt, Human
aaacuuucagacacagaaaacag

SEQ ID NO: 730514 - RNA, 27 nt, Human
aaacuuucagacacagaaaacaggaca

SEQ ID NO: 730515 - RNA, 19 nt, Human
aaagaaaaaaaaaacacaa

SEQ ID NO: 730516 - RNA, 23 nt, Human
aaaguccagccugccccuggggg

SEQ ID NO: 730517 - RNA, 21 nt, Human
aaaugucagccagggucucac

SEQ ID NO: 730518 - RNA, 18 nt, Human
aacacagaaaaccaaaac

SEQ ID NO: 730519 - RNA, 20 nt, Human
aacacgcauguggaugaacc

SEQ ID NO: 730520 - RNA, 20 nt, Human
aacaugugagcccgcugaca

SEQ ID NO: 730521 - RNA, 22 nt, Human
aagaagucgucuggaaaaggug

SEQ ID NO: 730522 - RNA, 18 nt, Human
aagacgccaaacauacgg

SEQ ID NO: 730523 - RNA, 22 nt, Human
aagcuggugaauccugacccag

SEQ ID NO: 730524 - RNA, 19 nt, Human
aaggcgcacaggggagggg

SEQ ID NO: 730525 - RNA, 24 nt, Human
aaucgcugcuugaggaguucagga

SEQ ID NO: 730526 - RNA, 18 nt, Human
acacacaaacaggccuag

SEQ ID NO: 730527 - RNA, 18 nt, Human
acacagaaaaccaaaaca

SEQ ID NO: 730528 - RNA, 23 nt, Human
acacaggugcagacaggucaggu

SEQ ID NO: 730529 - RNA, 19 nt, Human
acccaacgcagcaguggcu

SEQ ID NO: 730530 - RNA, 18 nt, Human
accccgagucaccugagc

SEQ ID NO: 730531 - RNA, 20 nt, Human
accccgagucaccugagccc

SEQ ID NO: 730532 - RNA, 19 nt, Human
accccugaacucagacccc

SEQ ID NO: 730533 - RNA, 23 nt, Human
accuccaccccaggcccagcugg

SEQ ID NO: 730534 - RNA, 22 nt, Human
accuugggucuggaacccaucg

SEQ ID NO: 730535 - RNA, 23 nt, Human
acucuaguagcccaccccucccg

SEQ ID NO: 730536 - RNA, 20 nt, Human
acuuguaggucccgcccucc

SEQ ID NO: 730537 - RNA, 27 nt, Human
agaaaaaaaaaacacaacgccagugag

SEQ ID NO: 730538 - RNA, 19 nt, Human
agaagagacuugggggagg

SEQ ID NO: 730539 - RNA, 22 nt, Human
agaaggcaaacccaacgcagca

SEQ ID NO: 730540 - RNA, 21 nt, Human
agaugguuuugggaugucagg

SEQ ID NO: 730541 - RNA, 24 nt, Human
agcaaaaaccaaacccagcccaaa

SEQ ID NO: 730542 - RNA, 23 nt, Human
agccagggucucaccauagggcu

SEQ ID NO: 730543 - RNA, 21 nt, Human
agcccacucuccacuccaccu

SEQ ID NO: 730544 - RNA, 18 nt, Human
agcccuggccaggcuuuc

SEQ ID NO: 730545 - RNA, 18 nt, Human
agcucagggcccaugacc

SEQ ID NO: 730546 - RNA, 26 nt, Human
aggaaggcgcacaggggagggaccau

SEQ ID NO: 730547 - RNA, 20 nt, Human
aggacuucaaucauaggggg

SEQ ID NO: 730548 - RNA, 22 nt, Human
aggagcccuggccaggcuuucc

SEQ ID NO: 730549 - RNA, 22 nt, Human
aggaggggaaaugucagccagg

SEQ ID NO: 730550 - RNA, 20 nt, Human
aggcagaggagaagggagcc

SEQ ID NO: 730551 - RNA, 21 nt, Human
aggcagcccccaaaagcagga

SEQ ID NO: 730552 - RNA, 20 nt, Human
aggccccccacugguaacag

SEQ ID NO: 730553 - RNA, 23 nt, Human
aggccuuuccagggacaggggaa

SEQ ID NO: 730554 - RNA, 19 nt, Human
aggcuccaagugaccgaca

SEQ ID NO: 730555 - RNA, 19 nt, Human
agggccugaccugcucccc

SEQ ID NO: 730556 - RNA, 23 nt, Human
aggggagcacccgggggacucug

SEQ ID NO: 730557 - RNA, 22 nt, Human
aggggucugcagagggcacugg

SEQ ID NO: 730558 - RNA, 21 nt, Human
aggugggcgcccccccucccg

SEQ ID NO: 730559 - RNA, 25 nt, Human
caaaaagcccccgggaaggccuuuu

SEQ ID NO: 730560 - RNA, 22 nt, Human
caaacccagcccaaagacgcca

SEQ ID NO: 730561 - RNA, 24 nt, Human
caaagacgccaaacauacggacac

SEQ ID NO: 730562 - RNA, 21 nt, Human
caaagcuggacccgcccccgc

SEQ ID NO: 730563 - RNA, 23 nt, Human
caaaggauuuauuaaaacacaga

SEQ ID NO: 730564 - RNA, 24 nt, Human
caagacucagaaacgccuuccagg

SEQ ID NO: 730565 - RNA, 21 nt, Human
cacaccccugaacucagaccc

SEQ ID NO: 730566 - RNA, 18 nt, Human
caccccugaacucagacc

SEQ ID NO: 730567 - RNA, 23 nt, Human
cacccuggcugggacuccuggcg

SEQ ID NO: 730568 - RNA, 23 nt, Human
caccuccaccccaggcccagcug

SEQ ID NO: 730569 - RNA, 24 nt, Human
caccucuggcagaaggcaaaccca

SEQ ID NO: 730570 - RNA, 18 nt, Human
cacgggagugagcuucug

SEQ ID NO: 730571 - RNA, 20 nt, Human
cacucuccacuccaccuccu

SEQ ID NO: 730572 - RNA, 22 nt, Human
cacugguaacagaguccagggc

SEQ ID NO: 730573 - RNA, 19 nt, Human
cacuucugggcucuggccc

SEQ ID NO: 730574 - RNA, 21 nt, Human
cagaacucuccccacgccuuc

SEQ ID NO: 730575 - RNA, 22 nt, Human
cagaacucuccccacgccuucc

SEQ ID NO: 730576 - RNA, 19 nt, Human
cagaagcccuacucagcac

SEQ ID NO: 730577 - RNA, 20 nt, Human
cagcaagcccuuggugcugc

SEQ ID NO: 730578 - RNA, 21 nt, Human
cagcagcaaaaaccaaacccu

SEQ ID NO: 730579 - RNA, 18 nt, Human
cagcaguggcuccgaggc

SEQ ID NO: 730580 - RNA, 27 nt, Human
cagcccagggcccucccuuugccagcc

SEQ ID NO: 730581 - RNA, 22 nt, Human
cagcccuuuccuaacauuccca

SEQ ID NO: 730582 - RNA, 22 nt, Human
cagccucaggcaaaaagccccc

SEQ ID NO: 730583 - RNA, 20 nt, Human
cagcugccgaggccgaggcg

SEQ ID NO: 730584 - RNA, 22 nt, Human
cagcugccgaggccgaggcggg

SEQ ID NO: 730585 - RNA, 19 nt, Human
caggaaccagcugccgagg

SEQ ID NO: 730586 - RNA, 24 nt, Human
caggacacacacacacacccaacg

SEQ ID NO: 730587 - RNA, 20 nt, Human
caggaggcaccgcagagcac

SEQ ID NO: 730588 - RNA, 23 nt, Human
caggcccccaggggcagcccggu

SEQ ID NO: 730589 - RNA, 19 nt, Human
caggccuagggagggccug

SEQ ID NO: 730590 - RNA, 27 nt, Human
cagggcacagggcagggccagggucuc

SEQ ID NO: 730591 - RNA, 20 nt, Human
caucccagggcacagggcag

SEQ ID NO: 730592 - RNA, 20 nt, Human
ccacggacagcaccaccccu

SEQ ID NO: 730593 - RNA, 22 nt, Human
ccacucuccacuccaccuccuu

SEQ ID NO: 730594 - RNA, 21 nt, Human
ccagacaagccacggcucaca

SEQ ID NO: 730595 - RNA, 18 nt, Human
ccagcccagggcccuccc

SEQ ID NO: 730596 - RNA, 24 nt, Human
ccagcuggguuuuucacgcagccc

SEQ ID NO: 730597 - RNA, 23 nt, Human
ccaggcagugcagggggcccagg

SEQ ID NO: 730598 - RNA, 22 nt, Human
cccacagacccugacgcacacu

SEQ ID NO: 730599 - RNA, 24 nt, Human
cccacagacccugacgcacacugg

SEQ ID NO: 730600 - RNA, 20 nt, Human
cccacaugugggaagauggu

SEQ ID NO: 730601 - RNA, 22 nt, Human
cccaggcaggcccucuccaagg

SEQ ID NO: 730602 - RNA, 18 nt, Human
ccccaaaagcaggaggac

SEQ ID NO: 730603 - RNA, 23 nt, Human
ccccacuacgcccacgugcagug

SEQ ID NO: 730604 - RNA, 18 nt, Human
ccccaggcccagcugggu

SEQ ID NO: 730605 - RNA, 21 nt, Human
cccccaggggcagcccgguuc

SEQ ID NO: 730606 - RNA, 21 nt, Human
ccccccacugguaacagaguc

SEQ ID NO: 730607 - RNA, 19 nt, Human
cccccccagcccacccucc

SEQ ID NO: 730608 - RNA, 20 nt, Human
cccccccagcccacccuccc

SEQ ID NO: 730609 - RNA, 25 nt, Human
ccccccccagcccacccucccuggg

SEQ ID NO: 730610 - RNA, 18 nt, Human
cccccccucccgccgggc

SEQ ID NO: 730611 - RNA, 21 nt, Human
ccccgagucaccugagcccau

SEQ ID NO: 730612 - RNA, 18 nt, Human
ccccugaacucagacccc

SEQ ID NO: 730613 - RNA, 22 nt, Human
ccccugcccacagacccugacg

SEQ ID NO: 730614 - RNA, 21 nt, Human
cccucagucccaggcaggccc

SEQ ID NO: 730615 - RNA, 20 nt, Human
cccuggcccccucaguccca

SEQ ID NO: 730616 - RNA, 18 nt, Human
ccgcagagcacacaacac

SEQ ID NO: 730617 - RNA, 19 nt, Human
ccgcugacaaucaucucca

SEQ ID NO: 730618 - RNA, 19 nt, Human
ccuccaccccaggcccagc

SEQ ID NO: 730619 - RNA, 22 nt, Human
ccugacccagcccuggcccccu

SEQ ID NO: 730620 - RNA, 22 nt, Human
ccuggcggccuccagccuuggc

SEQ ID NO: 730621 - RNA, 25 nt, Human
ccuugcacccagcccagggcccucc

SEQ ID NO: 730622 - RNA, 24 nt, Human
ccuugggguggagacacagacccc

SEQ ID NO: 730623 - RNA, 20 nt, Human
cggcuccccaaaccugcccu

SEQ ID NO: 730624 - RNA, 23 nt, Human
cgggcagguggcccggcaggcgu

SEQ ID NO: 730625 - RNA, 23 nt, Human
cggggccacaggccccccacugg

SEQ ID NO: 730626 - RNA, 23 nt, Human
cgugccagccucggcccccaccc

SEQ ID NO: 730627 - RNA, 23 nt, Human
cucacuccaccccgagucaccgc

SEQ ID NO: 730628 - RNA, 18 nt, Human
cucagaucuuuucuccuc

SEQ ID NO: 730629 - RNA, 21 nt, Human
cuccacuccagggugcucccc

SEQ ID NO: 730630 - RNA, 21 nt, Human
cuccaggggugcuugggcucc

SEQ ID NO: 730631 - RNA, 21 nt, Human
cuccugggccagcucagggcc

SEQ ID NO: 730632 - RNA, 19 nt, Human
cucuaguagcccaccccuc

SEQ ID NO: 730633 - RNA, 18 nt, Human
cucuccacuccaccuccu

SEQ ID NO: 730634 - RNA, 24 nt, Human
cucucccaaacuggucagccccaa

SEQ ID NO: 730635 - RNA, 23 nt, Human
cugaguccacagggcagugccag

SEQ ID NO: 730636 - RNA, 25 nt, Human
cugcaccccaaggcaccuucccugg

SEQ ID NO: 730637 - RNA, 25 nt, Human
cugcagaagcccuacucagcacugg

SEQ ID NO: 730638 - RNA, 23 nt, Human
cuggcccagcugagcugggccuc

SEQ ID NO: 730639 - RNA, 20 nt, Human
cuggcccccucagucccagg

SEQ ID NO: 730640 - RNA, 24 nt, Human
cuggcgcgccuugcacccagccca

SEQ ID NO: 730641 - RNA, 19 nt, Human
cugugccuggggaaagggg

SEQ ID NO: 730642 - RNA, 23 nt, Human
cuuggucagcuccugaccucggc

SEQ ID NO: 730643 - RNA, 19 nt, Human
gacuugggggaggggccga

SEQ ID NO: 730644 - RNA, 23 nt, Human
gagcaaacaccuggcggccucca

SEQ ID NO: 730645 - RNA, 18 nt, Human
gagcccacucuccacucc

SEQ ID NO: 730646 - RNA, 22 nt, Human
gagcuucugacccgagccagga

SEQ ID NO: 730647 - RNA, 21 nt, Human
gaggccaggucaccaagacgg

SEQ ID NO: 730648 - RNA, 21 nt, Human
gaggccgaggcgggccuugcc

SEQ ID NO: 730649 - RNA, 21 nt, Human
gaggccugggagggaagcaga

SEQ ID NO: 730650 - RNA, 18 nt, Human
gagggccaaccccagugc

SEQ ID NO: 730651 - RNA, 22 nt, Human
gaggggccgaggccaggucacc

SEQ ID NO: 730652 - RNA, 22 nt, Human
gaggugggcaggguaggcaucc

SEQ ID NO: 730653 - RNA, 21 nt, Human
gcaaaaaccaaacccagccca

SEQ ID NO: 730654 - RNA, 23 nt, Human
gcaaaaaccaaacccagcccaaa

SEQ ID NO: 730655 - RNA, 26 nt, Human
gcaaaaaccaaacccagcccaaagac

SEQ ID NO: 730656 - RNA, 24 nt, Human
gcagaacucuccccacgccuucca

SEQ ID NO: 730657 - RNA, 25 nt, Human
gcagaacucuccccacgccuuccaa

SEQ ID NO: 730658 - RNA, 22 nt, Human
gcagaaggcaaacccaacgcaa

SEQ ID NO: 730659 - RNA, 18 nt, Human
gcagaccuggauccagac

SEQ ID NO: 730660 - RNA, 19 nt, Human
gcaggcccucuccaaggag

SEQ ID NO: 730661 - RNA, 20 nt, Human
gcaggcguggcucagcugga

SEQ ID NO: 730662 - RNA, 21 nt, Human
gcagggggcccaggcccaaag

SEQ ID NO: 730663 - RNA, 21 nt, Human
gccaaccccagugcuugccac

SEQ ID NO: 730664 - RNA, 19 nt, Human
gcccaaagacgccaaacau

SEQ ID NO: 730665 - RNA, 24 nt, Human
gcccaccccucccgggccccgggg

SEQ ID NO: 730666 - RNA, 19 nt, Human
gcccacucuccacuccacc

SEQ ID NO: 730667 - RNA, 21 nt, Human
gcccagcugagcugggccucg

SEQ ID NO: 730668 - RNA, 25 nt, Human
gcccagggcccucccuuugccagcc

SEQ ID NO: 730669 - RNA, 25 nt, Human
gccccagcccgugugcaccuccacc

SEQ ID NO: 730670 - RNA, 23 nt, Human
gccccccccccagcccacccucc

SEQ ID NO: 730671 - RNA, 22 nt, Human
gcccgcugacaaucaucuccac

SEQ ID NO: 730672 - RNA, 20 nt, Human
gcccuguccccugcccacag

SEQ ID NO: 730673 - RNA, 18 nt, Human
gcccuugggguggagaca

SEQ ID NO: 730674 - RNA, 21 nt, Human
gcgaagaccagacaagccacg

SEQ ID NO: 730675 - RNA, 21 nt, Human
gcgcugcaacacagggaaguc

SEQ ID NO: 730676 - RNA, 20 nt, Human
gcgcugggccggggacagac

SEQ ID NO: 730677 - RNA, 24 nt, Human
gcggggaggaggggaggugggcgc

SEQ ID NO: 730678 - RNA, 19 nt, Human
gcugccccccccccagccc

SEQ ID NO: 730679 - RNA, 18 nt, Human
ggaagaugguuuugggau

SEQ ID NO: 730680 - RNA, 19 nt, Human
ggacccucccuuccucucc

SEQ ID NO: 730681 - RNA, 20 nt, Human
ggagacacagaccccugccc

SEQ ID NO: 730682 - RNA, 19 nt, Human
ggagcccuggcgaggccug

SEQ ID NO: 730683 - RNA, 22 nt, Human
ggcaacgcuguguggaagaaca

SEQ ID NO: 730684 - RNA, 19 nt, Human
ggcagaggagaagggagcc

SEQ ID NO: 730685 - RNA, 20 nt, Human
ggcagcccgguuccaccucc

SEQ ID NO: 730686 - RNA, 18 nt, Human
ggcagggccagggucucc

SEQ ID NO: 730687 - RNA, 20 nt, Human
ggccaguggggacccucccu

SEQ ID NO: 730688 - RNA, 18 nt, Human
ggcugcaggugucaccgg

SEQ ID NO: 730689 - RNA, 20 nt, Human
gggaggggccgaggccaggu

SEQ ID NO: 730690 - RNA, 22 nt, Human
gggcagaggggcgugccagccu

SEQ ID NO: 730691 - RNA, 22 nt, Human
gggcagggaaaguccagccugc

SEQ ID NO: 730692 - RNA, 26 nt, Human
gggcagguggcccggcaggcguggcu

SEQ ID NO: 730693 - RNA, 24 nt, Human
gggcagugccaggacuaccuuggg

SEQ ID NO: 730694 - RNA, 22 nt, Human
ggggacucugggaaggcagccc

SEQ ID NO: 730695 - RNA, 19 nt, Human
ggggccacaggccccccac

SEQ ID NO: 730696 - RNA, 19 nt, Human
gggggcaacgcugugugga

SEQ ID NO: 730697 - RNA, 22 nt, Human
guagcccaccccucccgggccc

SEQ ID NO: 730698 - RNA, 23 nt, Human
guccagccugccccugggggaag

SEQ ID NO: 730699 - RNA, 20 nt, Human
guccugcugcucgggaccua

SEQ ID NO: 730700 - RNA, 19 nt, Human
gugaagagccggggccaca

SEQ ID NO: 730701 - RNA, 22 nt, Human
gugcagccucaggcaaaaagcc

SEQ ID NO: 730702 - RNA, 28 nt, Human
gugcagccucaggcaaaaagggaacgcc

SEQ ID NO: 730703 - RNA, 20 nt, Human
gugcuugccacugcuuguuu

SEQ ID NO: 730704 - RNA, 28 nt, Human
uaaaaaaaaaaucugaaaauuaaagaaa

SEQ ID NO: 730705 - RNA, 20 nt, Human
uaaaacacagaaaaccaaaa

SEQ ID NO: 730706 - RNA, 19 nt, Human
uaaaggugauuguguuggc

SEQ ID NO: 730707 - RNA, 23 nt, Human
uaccagcagcaaaaaccaaaccc

SEQ ID NO: 730708 - RNA, 24 nt, Human
uaccagcagcaaaaaccaaaccca

SEQ ID NO: 730709 - RNA, 22 nt, Human
uagcccaccccucccgggcccc

SEQ ID NO: 730710 - RNA, 24 nt, Human
uagggcuggacagcggcuccccaa

SEQ ID NO: 730711 - RNA, 24 nt, Human
ucacugcccuuaaccacaccucug

SEQ ID NO: 730712 - RNA, 18 nt, Human
ucagucccaggcaggccc

SEQ ID NO: 730713 - RNA, 21 nt, Human
uccacaccccugaacucagac

SEQ ID NO: 730714 - RNA, 24 nt, Human
uccaggucgaccuggggccaggag

SEQ ID NO: 730715 - RNA, 20 nt, Human
uccauacgucauccaacuuu

SEQ ID NO: 730716 - RNA, 23 nt, Human
ucccgggccccggggugcuggcc

SEQ ID NO: 730717 - RNA, 20 nt, Human
ucccuuugccagccuggggc

SEQ ID NO: 730718 - RNA, 21 nt, Human
uccugggccagcucagggccc

SEQ ID NO: 730719 - RNA, 22 nt, Human
uccugggccagcucagggccca

SEQ ID NO: 730720 - RNA, 19 nt, Human
ucgcagacuggcacuuugg

SEQ ID NO: 730721 - RNA, 25 nt, Human
ucuccaaggagcugagccccagccc

SEQ ID NO: 730722 - RNA, 20 nt, Human
ucuccaggggugcuugggcu

SEQ ID NO: 730723 - RNA, 21 nt, Human
ucuccaggggugcuugggcuc

SEQ ID NO: 730724 - RNA, 21 nt, Human
ucuuagcugggccugggccgg

SEQ ID NO: 730725 - RNA, 18 nt, Human
ugaauccugacccagccc

SEQ ID NO: 730726 - RNA, 18 nt, Human
ugacccgagccaggaccc

SEQ ID NO: 730727 - RNA, 21 nt, Human
ugacucuaguagcccaccccu

SEQ ID NO: 730728 - RNA, 26 nt, Human
ugagaggaaggcgcacaggggaggga

SEQ ID NO: 730729 - RNA, 21 nt, Human
ugagcccauggggcaaugccu

SEQ ID NO: 730730 - RNA, 18 nt, Human
ugagccccagcccgugug

SEQ ID NO: 730731 - RNA, 22 nt, Human
ugagggcagaggggcgugccag

SEQ ID NO: 730732 - RNA, 23 nt, Human
ugagggcagaggggcgugccagc

SEQ ID NO: 730733 - RNA, 18 nt, Human
ugaguuugggcugaugca

SEQ ID NO: 730734 - RNA, 20 nt, Human
ugaugagguggcacuucugg

SEQ ID NO: 730735 - RNA, 25 nt, Human
ugaugcaccacaaccuguaaacuuu

SEQ ID NO: 730736 - RNA, 21 nt, Human
ugcaaaagauguacaaauaaa

SEQ ID NO: 730737 - RNA, 19 nt, Human
ugcagagggcacugggucc

SEQ ID NO: 730738 - RNA, 19 nt, Human
ugcagggggcccaggccca

SEQ ID NO: 730739 - RNA, 19 nt, Human
ugccacugcuuguuugggg

SEQ ID NO: 730740 - RNA, 23 nt, Human
ugccagccuggggcugugccugg

SEQ ID NO: 730741 - RNA, 19 nt, Human
ugccggaccggcgcgcgcg

SEQ ID NO: 730742 - RNA, 22 nt, Human
uggaagaacacuugaauuauga

SEQ ID NO: 730743 - RNA, 24 nt, Human
uggaugaaccauaacaugugagcc

SEQ ID NO: 730744 - RNA, 20 nt, Human
uggcagaggauccaccuccc

SEQ ID NO: 730745 - RNA, 18 nt, Human
uggcaggaaggaggggaa

SEQ ID NO: 730746 - RNA, 18 nt, Human
uggcaggaaggaggggaa

SEQ ID NO: 730747 - RNA, 19 nt, Human
uggcaggaaggaggggaaa

SEQ ID NO: 730748 - RNA, 20 nt, Human
uggcuuccaaagcuggaccc

SEQ ID NO: 730749 - RNA, 23 nt, Human
uggcuucuggcucccauguaccc

SEQ ID NO: 730750 - RNA, 20 nt, Human
ugggagggaagcagagagga

SEQ ID NO: 730751 - RNA, 20 nt, Human
ugggcugaugcaccacaacc

SEQ ID NO: 730752 - RNA, 19 nt, Human
ugggggaagccaaguuugc

SEQ ID NO: 730753 - RNA, 19 nt, Human
uggguccagucccccucca

SEQ ID NO: 730754 - RNA, 19 nt, Human
uggguuaucgcaccuaaaa

SEQ ID NO: 730755 - RNA, 20 nt, Human
uguacccgagcccacucucc

SEQ ID NO: 730756 - RNA, 20 nt, Human
uguccccugcccacagaccc

SEQ ID NO: 730757 - RNA, 22 nt, Human
ugucuggugcugggaggcucca

SEQ ID NO: 730758 - RNA, 18 nt, Human
ugugccuggggaaagggg

SEQ ID NO: 730759 - RNA, 21 nt, Human
uucucagaucuuuucuccucu

SEQ ID NO: 730760 - RNA, 18 nt, Human
uugcacagaagagacuug

SEQ ID NO: 730761 - RNA, 19 nt, Human
uuucccuuuuugucccaag

SEQ ID NO: 730762 - RNA, 22 nt, Human
uuucccuuuuugucccaaggug

SEQ ID NO: 730763 - RNA, 21 nt, Human
uuucucucccaugugggucgg

SEQ ID NO: 730764 - RNA, 19 nt, Human
uuugggaugucagggcgcu

SEQ ID NO: 730765 - RNA, 24 nt, Human
aaagugcugggauuacaggcguga

SEQ ID NO: 730766 - RNA, 21 nt, Human
aacaagaauaacaugcuccac

SEQ ID NO: 730767 - RNA, 23 nt, Human
aaccaagcccacuaccgcuuagc

SEQ ID NO: 730768 - RNA, 18 nt, Human
aacugugugaccuggggc

SEQ ID NO: 730769 - RNA, 22 nt, Human
aaggaccuucagaaacaagaau

SEQ ID NO: 730770 - RNA, 19 nt, Human
aagugcugggauuacaggc

SEQ ID NO: 730771 - RNA, 19 nt, Human
aagugcugggauuacaggc

SEQ ID NO: 730772 - RNA, 26 nt, Human
aagugcugggauuacaggcgugagcc

SEQ ID NO: 730773 - RNA, 23 nt, Human
acaagacggccugugccaggucc

SEQ ID NO: 730774 - RNA, 25 nt, Human
acaggugcucaccaccacgccugac

SEQ ID NO: 730775 - RNA, 24 nt, Human
accacagucuacuaaacaucauca

SEQ ID NO: 730776 - RNA, 23 nt, Human
accagagacaagggcucucccca

SEQ ID NO: 730777 - RNA, 19 nt, Human
accugcagcuggcgcuugu

SEQ ID NO: 730778 - RNA, 22 nt, Human
acugcaaccucugccucccagg

SEQ ID NO: 730779 - RNA, 23 nt, Human
agagaaacagccugagccacagg

SEQ ID NO: 730780 - RNA, 19 nt, Human
agccggucccgcuggcgcc

SEQ ID NO: 730781 - RNA, 22 nt, Human
agccucuccaggccuggagcug

SEQ ID NO: 730782 - RNA, 20 nt, Human
agcgccuccucaucccaccc

SEQ ID NO: 730783 - RNA, 24 nt, Human
agcgccuccucaucccaccccagc

SEQ ID NO: 730784 - RNA, 21 nt, Human
agcuccaugacccugggccuc

SEQ ID NO: 730785 - RNA, 18 nt, Human
agcuccuccugggcagcc

SEQ ID NO: 730786 - RNA, 18 nt, Human
aggagcgccgcggugggg

SEQ ID NO: 730787 - RNA, 20 nt, Human
aggagcgccgcgguggggaa

SEQ ID NO: 730788 - RNA, 24 nt, Human
aggcgaucugccugccuuggccuc

SEQ ID NO: 730789 - RNA, 24 nt, Human
aguacaguggugcgauccuggcug

SEQ ID NO: 730790 - RNA, 18 nt, Human
aguagcugggauuacagg

SEQ ID NO: 730791 - RNA, 18 nt, Human
aucagggcgagcguggag

SEQ ID NO: 730792 - RNA, 21 nt, Human
aucugaaggguccuggcaggg

SEQ ID NO: 730793 - RNA, 22 nt, Human
augacccugggccuccguuuuc

SEQ ID NO: 730794 - RNA, 21 nt, Human
augcugggcuggggaccaggc

SEQ ID NO: 730795 - RNA, 18 nt, Human
augggucugguuagaaaa

SEQ ID NO: 730796 - RNA, 24 nt, Human
auuuuuguaguuuuaguagagacg

SEQ ID NO: 730797 - RNA, 21 nt, Human
caaagugcugggauuacaggc

SEQ ID NO: 730798 - RNA, 24 nt, Human
caaagugcugggauuacaggcgug

SEQ ID NO: 730799 - RNA, 25 nt, Human
caaccaagcccacuaccgcuuagcu

SEQ ID NO: 730800 - RNA, 24 nt, Human
caagacggccugugccaggucccu

SEQ ID NO: 730801 - RNA, 22 nt, Human
caagcaauucuccugccucagc

SEQ ID NO: 730802 - RNA, 22 nt, Human
cacaucuccccaaggaccuuca

SEQ ID NO: 730803 - RNA, 21 nt, Human
caccccagcuugaggccccca

SEQ ID NO: 730804 - RNA, 28 nt, Human
cagccucucaaggaggaacuuuaaugau

SEQ ID NO: 730805 - RNA, 22 nt, Human
cagcgagaugcugggcugggga

SEQ ID NO: 730806 - RNA, 18 nt, Human
cagcgccucccucaccuc

SEQ ID NO: 730807 - RNA, 18 nt, Human
cagcuccucggccugcug

SEQ ID NO: 730808 - RNA, 20 nt, Human
caggacccagugggugucac

SEQ ID NO: 730809 - RNA, 19 nt, Human
caggugcucaccaccacgc

SEQ ID NO: 730810 - RNA, 21 nt, Human
cauguccuggaccugcagcug

SEQ ID NO: 730811 - RNA, 19 nt, Human
ccaaaagaaggguccuccc

SEQ ID NO: 730812 - RNA, 19 nt, Human
ccacguuggucaggcuggu

SEQ ID NO: 730813 - RNA, 21 nt, Human
ccagcgagaugcugggcuggg

SEQ ID NO: 730814 - RNA, 23 nt, Human
cccagguucaagcaauucuccug

SEQ ID NO: 730815 - RNA, 21 nt, Human
ccccugucccaggcacagggg

SEQ ID NO: 730816 - RNA, 23 nt, Human
cccgaguagcugggauuacaggu

SEQ ID NO: 730817 - RNA, 24 nt, Human
cccgaguagcugggauuacaggug

SEQ ID NO: 730818 - RNA, 25 nt, Human
cccugcccugggccuggucccccuc

SEQ ID NO: 730819 - RNA, 21 nt, Human
ccgaguagcugggauuacagg

SEQ ID NO: 730820 - RNA, 20 nt, Human
ccgcagccgcugcaccucgc

SEQ ID NO: 730821 - RNA, 20 nt, Human
ccgcagcuccuccugggcag

SEQ ID NO: 730822 - RNA, 24 nt, Human
ccucccagguucaagcaauucucc

SEQ ID NO: 730823 - RNA, 19 nt, Human
ccucgcgcugggcguccuc

SEQ ID NO: 730824 - RNA, 22 nt, Human
ccucuagggcccgccgcucgcu

SEQ ID NO: 730825 - RNA, 21 nt, Human
ccugaccucaggcgaucugcc

SEQ ID NO: 730826 - RNA, 25 nt, Human
ccugcagcuggcgcuugugcagggc

SEQ ID NO: 730827 - RNA, 20 nt, Human
ccugcagcuucucccgcucc

SEQ ID NO: 730828 - RNA, 19 nt, Human
ccugccgcagcuccucggc

SEQ ID NO: 730829 - RNA, 23 nt, Human
ccugccucagccucccgaguagc

SEQ ID NO: 730830 - RNA, 24 nt, Human
ccugccucagccucccgaguagcu

SEQ ID NO: 730831 - RNA, 22 nt, Human
ccugccuuggccucucaaagug

SEQ ID NO: 730832 - RNA, 19 nt, Human
ccugggccuggucccccuc

SEQ ID NO: 730833 - RNA, 21 nt, Human
ccuggucccccuccucuuucc

SEQ ID NO: 730834 - RNA, 22 nt, Human
ccuggucccccuccucuuuccc

SEQ ID NO: 730835 - RNA, 21 nt, Human
ccuguagccagcgagaugcug

SEQ ID NO: 730836 - RNA, 25 nt, Human
ccuguagccgcagggauuccagggc

SEQ ID NO: 730837 - RNA, 20 nt, Human
ccuuagggucugcuguagcc

SEQ ID NO: 730838 - RNA, 19 nt, Human
cggccgggcgaggagcgcc

SEQ ID NO: 730839 - RNA, 18 nt, Human
cuaaggcggagagaucuc

SEQ ID NO: 730840 - RNA, 24 nt, Human
cucagccucccgaguagcugggau

SEQ ID NO: 730841 - RNA, 19 nt, Human
cuccagggccgccugcucc

SEQ ID NO: 730842 - RNA, 19 nt, Human
cuccaugacccugggccuc

SEQ ID NO: 730843 - RNA, 24 nt, Human
cuccccugucccaggcacaggggu

SEQ ID NO: 730844 - RNA, 18 nt, Human
cuccucuuucccacgauc

SEQ ID NO: 730845 - RNA, 26 nt, Human
cuccugaccucaggcgaucugccugc

SEQ ID NO: 730846 - RNA, 21 nt, Human
cucggccgggcgaggagcgcc

SEQ ID NO: 730847 - RNA, 23 nt, Human
cucuaguugucuauggcuguggg

SEQ ID NO: 730848 - RNA, 19 nt, Human
cucuucugcuaacugugug

SEQ ID NO: 730849 - RNA, 23 nt, Human
cugcaaccucugccucccagguu

SEQ ID NO: 730850 - RNA, 24 nt, Human
cugcaaccucugccucccagguuc

SEQ ID NO: 730851 - RNA, 24 nt, Human
cuggaccugcagcuggcgcuugug

SEQ ID NO: 730852 - RNA, 22 nt, Human
cuggacgccgcucucagagucu

SEQ ID NO: 730853 - RNA, 18 nt, Human
cuggcgccgcagcuccuc

SEQ ID NO: 730854 - RNA, 20 nt, Human
cugggccaccugcaggcugu

SEQ ID NO: 730855 - RNA, 22 nt, Human
cuguagccccucuccauccucu

SEQ ID NO: 730856 - RNA, 22 nt, Human
cugugccucaguuuaccaucca

SEQ ID NO: 730857 - RNA, 20 nt, Human
cuuaaaaugguaucuggcac

SEQ ID NO: 730858 - RNA, 21 nt, Human
cuugcucugucacacaggcug

SEQ ID NO: 730859 - RNA, 24 nt, Human
cuugcucugucacacaggcuggag

SEQ ID NO: 730860 - RNA, 24 nt, Human
cuuggccucucaaagugcugggau

SEQ ID NO: 730861 - RNA, 24 nt, Human
gaccucaggcgaucugccugccuu

SEQ ID NO: 730862 - RNA, 20 nt, Human
gagacgggauuucuccacgu

SEQ ID NO: 730863 - RNA, 22 nt, Human
gagcacucugaggaauuucccg

SEQ ID NO: 730864 - RNA, 21 nt, Human
gaggggggcuggacugcaggu

SEQ ID NO: 730865 - RNA, 18 nt, Human
gauuacaggcgugagcca

SEQ ID NO: 730866 - RNA, 22 nt, Human
gauuacaggcgugagccacugc

SEQ ID NO: 730867 - RNA, 22 nt, Human
gauuacaggcgugagccacugc

SEQ ID NO: 730868 - RNA, 22 nt, Human
gcaaccucugccucccagguuc

SEQ ID NO: 730869 - RNA, 19 nt, Human
gccccaguuuccugaaaug

SEQ ID NO: 730870 - RNA, 19 nt, Human
gccgcagcuccuccugggc

SEQ ID NO: 730871 - RNA, 22 nt, Human
gccgcugcaccucgcgcugggc

SEQ ID NO: 730872 - RNA, 18 nt, Human
gccucaguuuaccaucca

SEQ ID NO: 730873 - RNA, 18 nt, Human
gccucccucaccuccacc

SEQ ID NO: 730874 - RNA, 18 nt, Human
gccuccucaucccacccc

SEQ ID NO: 730875 - RNA, 21 nt, Human
gccuccucaucccaccccagc

SEQ ID NO: 730876 - RNA, 22 nt, Human
gccuuggccucucaaagugcug

SEQ ID NO: 730877 - RNA, 19 nt, Human
gcucaccaccacgccugac

SEQ ID NO: 730878 - RNA, 27 nt, Human
gcuccuuggccaggacugagcgcuucc

SEQ ID NO: 730879 - RNA, 21 nt, Human
gcugggaagccucuccaggcc

SEQ ID NO: 730880 - RNA, 23 nt, Human
gcuggucuggaacuccugaccuc

SEQ ID NO: 730881 - RNA, 20 nt, Human
ggaggcccaggacccagugg

SEQ ID NO: 730882 - RNA, 20 nt, Human
ggccugaggcaggaguuugg

SEQ ID NO: 730883 - RNA, 24 nt, Human
ggccugcugcugggccaccugcag

SEQ ID NO: 730884 - RNA, 18 nt, Human
ggcucugggggggggggc

SEQ ID NO: 730885 - RNA, 21 nt, Human
ggcucuucugcuaacugugug

SEQ ID NO: 730886 - RNA, 20 nt, Human
ggcugaccagagacaagggc

SEQ ID NO: 730887 - RNA, 24 nt, Human
ggcuggucuggaacuccugaccuc

SEQ ID NO: 730888 - RNA, 24 nt, Human
gggaagccgaagucagggccuggg

SEQ ID NO: 730889 - RNA, 19 nt, Human
ggggggcuggacugcaggu

SEQ ID NO: 730890 - RNA, 21 nt, Human
gguccagacgguaggaggccc

SEQ ID NO: 730891 - RNA, 18 nt, Human
guagcugggauuacaggu

SEQ ID NO: 730892 - RNA, 18 nt, Human
uaacaugcuccaccacag

SEQ ID NO: 730893 - RNA, 23 nt, Human
uaacugugugaccuggggcaagu

SEQ ID NO: 730894 - RNA, 25 nt, Human
uaagugacuauaccucccugagccc

SEQ ID NO: 730895 - RNA, 24 nt, Human
uaauuuuuguaguuuuaguagaga

SEQ ID NO: 730896 - RNA, 23 nt, Human
uacaaaaaacaguucugaacagu

SEQ ID NO: 730897 - RNA, 19 nt, Human
uacaggcgugagccacugc

SEQ ID NO: 730898 - RNA, 23 nt, Human
uacaggcgugagccacugcgccc

SEQ ID NO: 730899 - RNA, 22 nt, Human
uacaggugcucaccaccacgcc

SEQ ID NO: 730900 - RNA, 22 nt, Human
uagccagcgagaugcugggcug

SEQ ID NO: 730901 - RNA, 19 nt, Human
uaguagagacgggauuucu

SEQ ID NO: 730902 - RNA, 24 nt, Human
uaguagagacgggauuucuccacg

SEQ ID NO: 730903 - RNA, 20 nt, Human
uaucauggaguuaaaugaga

SEQ ID NO: 730904 - RNA, 24 nt, Human
uaucauggaguuaaaugagagaac

SEQ ID NO: 730905 - RNA, 22 nt, Human
ucaaagugcugggauuacaggc

SEQ ID NO: 730906 - RNA, 24 nt, Human
ucaaagugcugggauuacaggcgu

SEQ ID NO: 730907 - RNA, 20 nt, Human
ucacaucugcaaaaugaggu

SEQ ID NO: 730908 - RNA, 20 nt, Human
ucagccucccgaguagcugg

SEQ ID NO: 730909 - RNA, 22 nt, Human
uccacaaaauggagauaaccgc

SEQ ID NO: 730910 - RNA, 23 nt, Human
uccaccacagucuacuaaacauc

SEQ ID NO: 730911 - RNA, 22 nt, Human
uccagccggucccgcuggcgcc

SEQ ID NO: 730912 - RNA, 19 nt, Human
ucccaccccagcuugaggc

SEQ ID NO: 730913 - RNA, 22 nt, Human
ucccacgaucccaugcuccagg

SEQ ID NO: 730914 - RNA, 21 nt, Human
ucccagguucaagcaauucuc

SEQ ID NO: 730915 - RNA, 24 nt, Human
ucccagguucaagcaauucuccug

SEQ ID NO: 730916 - RNA, 18 nt, Human
ucccccuccucuuuccca

SEQ ID NO: 730917 - RNA, 19 nt, Human
ucccccuccucuuucccac

SEQ ID NO: 730918 - RNA, 23 nt, Human
ucccccuccucuuucccacgauc

SEQ ID NO: 730919 - RNA, 25 nt, Human
ucccccuccucuuucccacgauccc

SEQ ID NO: 730920 - RNA, 23 nt, Human
ucccgaguagcugggauuacagg

SEQ ID NO: 730921 - RNA, 24 nt, Human
ucccgaguagcugggauuacaggu

SEQ ID NO: 730922 - RNA, 21 nt, Human
ucccgcuggcgccgcagcucc

SEQ ID NO: 730923 - RNA, 24 nt, Human
uccuccugggcagccugcagcuuc

SEQ ID NO: 730924 - RNA, 26 nt, Human
uccugcacugcguccuccugcucuuc

SEQ ID NO: 730925 - RNA, 25 nt, Human
ucgcuaagcugcuuccgcagggugc

SEQ ID NO: 730926 - RNA, 20 nt, Human
ucggcggggugaacggccuc

SEQ ID NO: 730927 - RNA, 24 nt, Human
ucucaaagugcugggauuacaggc

SEQ ID NO: 730928 - RNA, 24 nt, Human
ucuccugccucagccucccgagua

SEQ ID NO: 730929 - RNA, 18 nt, Human
ucucugggaagccgaagu

SEQ ID NO: 730930 - RNA, 24 nt, Human
ucugacaagacggccugugccagg

SEQ ID NO: 730931 - RNA, 24 nt, Human
ucugagcacucugaggaauuuccc

SEQ ID NO: 730932 - RNA, 24 nt, Human
ucugcuaacugugugaccuggggc

SEQ ID NO: 730933 - RNA, 20 nt, Human
ucugcuguagccccucucca

SEQ ID NO: 730934 - RNA, 23 nt, Human
ucugcuguagccccucuccaucc

SEQ ID NO: 730935 - RNA, 19 nt, Human
ucugggggggggggcuguc

SEQ ID NO: 730936 - RNA, 19 nt, Human
ucuugcucugucacacagg

SEQ ID NO: 730937 - RNA, 23 nt, Human
ucuugcucugucacacaggcugg

SEQ ID NO: 730938 - RNA, 24 nt, Human
ucuugcucugucacacaggcugga

SEQ ID NO: 730939 - RNA, 18 nt, Human
ugacaagacggccugugc

SEQ ID NO: 730940 - RNA, 26 nt, Human
ugaccagagacaagggcucuccccaa

SEQ ID NO: 730941 - RNA, 18 nt, Human
ugaccucaggcgaucugc

SEQ ID NO: 730942 - RNA, 19 nt, Human
ugaccucaggcgaucugcc

SEQ ID NO: 730943 - RNA, 20 nt, Human
ugaccucaggcgaucugccu

SEQ ID NO: 730944 - RNA, 24 nt, Human
ugaccucaggcgaucugccugccu

SEQ ID NO: 730945 - RNA, 19 nt, Human
ugacugcaaccucugccuc

SEQ ID NO: 730946 - RNA, 24 nt, Human
ugacugcaaccucugccucccagg

SEQ ID NO: 730947 - RNA, 22 nt, Human
ugaggcaggaguuuggagagaa

SEQ ID NO: 730948 - RNA, 21 nt, Human
ugcacugcguccuccugcucu

SEQ ID NO: 730949 - RNA, 18 nt, Human
ugcagcuucucccgcucc

SEQ ID NO: 730950 - RNA, 20 nt, Human
ugccccgaaccuccuguagc

SEQ ID NO: 730951 - RNA, 23 nt, Human
ugccccgaaccuccuguagccag

SEQ ID NO: 730952 - RNA, 24 nt, Human
ugccucagccucccgaguagcugg

SEQ ID NO: 730953 - RNA, 24 nt, Human
ugccugacacaucuccccaaggac

SEQ ID NO: 730954 - RNA, 21 nt, Human
ugccuuggccucucaaagugc

SEQ ID NO: 730955 - RNA, 24 nt, Human
ugcugggauuacaggcgugagcca

SEQ ID NO: 730956 - RNA, 19 nt, Human
uggacugcagguguugcug

SEQ ID NO: 730957 - RNA, 24 nt, Human
uggaguacaguggugcgauccugg

SEQ ID NO: 730958 - RNA, 20 nt, Human
uggcccgagagcccccgcag

SEQ ID NO: 730959 - RNA, 18 nt, Human
ugggaagccucuccaggc

SEQ ID NO: 730960 - RNA, 21 nt, Human
ugggaagccucuccaggccug

SEQ ID NO: 730961 - RNA, 18 nt, Human
ugggauuacaggcgugag

SEQ ID NO: 730962 - RNA, 19 nt, Human
ugggauuacaggcgugagc

SEQ ID NO: 730963 - RNA, 21 nt, Human
ugggauuacaggcgugagcca

SEQ ID NO: 730964 - RNA, 22 nt, Human
ugggauuacaggcgugagccac

SEQ ID NO: 730965 - RNA, 22 nt, Human
ugggauuacaggcgugagccac

SEQ ID NO: 730966 - RNA, 24 nt, Human
ugggauuacaggcgugagccacug

SEQ ID NO: 730967 - RNA, 26 nt, Human
ugggauuacaggcgugagccacugcg

SEQ ID NO: 730968 - RNA, 19 nt, Human
ugggauuacaggugcucac

SEQ ID NO: 730969 - RNA, 21 nt, Human
ugggauuacaggugcucacca

SEQ ID NO: 730970 - RNA, 24 nt, Human
ugggauuacaggugcucaccacca

SEQ ID NO: 730971 - RNA, 22 nt, Human
ugggccucugaccccugcccug

SEQ ID NO: 730972 - RNA, 19 nt, Human
ugggccugcauggcgccgu

SEQ ID NO: 730973 - RNA, 21 nt, Human
uggguggguggcccaugucac

SEQ ID NO: 730974 - RNA, 26 nt, Human
uggguggguggcccauguuguaauga

SEQ ID NO: 730975 - RNA, 24 nt, Human
uggucaggcuggucuggaacuccu

SEQ ID NO: 730976 - RNA, 23 nt, Human
uggucuggaacuccugaccucag

SEQ ID NO: 730977 - RNA, 21 nt, Human
ugucacagaguuaucauggag

SEQ ID NO: 730978 - RNA, 18 nt, Human
uuaguagagacgggauuu

SEQ ID NO: 730979 - RNA, 21 nt, Human
uucaagcaauucuccugccuc

SEQ ID NO: 730980 - RNA, 24 nt, Human
uucaagcaauucuccugccucagc

SEQ ID NO: 730981 - RNA, 22 nt, Human
uuccagggccucaagcuucuca

SEQ ID NO: 730982 - RNA, 27 nt, Human
uuccugaaaugggucugguuagaaaaa

SEQ ID NO: 730983 - RNA, 19 nt, Human
uugcugggaagccucucca

SEQ ID NO: 730984 - RNA, 24 nt, Human
uuguuuguuuuuuugagacacagu

SEQ ID NO: 730985 - RNA, 18 nt, Human
uuuuguaguuuuaguaga

SEQ ID NO: 730986 - RNA, 20 nt, Human
uuuuuguaguuuuaguagag

SEQ ID NO: 730987 - RNA, 25 nt, Human
aaaaaaaaagauacagagggaagga

SEQ ID NO: 730988 - RNA, 24 nt, Human
aaaaaaaagauacagagggaagga

SEQ ID NO: 730989 - RNA, 21 nt, Human
aaaaacacaagaggggcugua

SEQ ID NO: 730990 - RNA, 19 nt, Human
aaaaacagaaaagaaccac

SEQ ID NO: 730991 - RNA, 18 nt, Human
aaaagacagagcaaccag

SEQ ID NO: 730992 - RNA, 22 nt, Human
aaaaggaguuagaaagucagga

SEQ ID NO: 730993 - RNA, 24 nt, Human
aaaaggggcaggcugcuccuaaaa

SEQ ID NO: 730994 - RNA, 23 nt, Human
aaaauacugcacaagacaacaaa

SEQ ID NO: 730995 - RNA, 24 nt, Human
aaaauuguauaaaaucaggagcuu

SEQ ID NO: 730996 - RNA, 21 nt, Human
aaacagaaaagaaccaccuga

SEQ ID NO: 730997 - RNA, 20 nt, Human
aaacagaaggaaagucuuga

SEQ ID NO: 730998 - RNA, 22 nt, Human
aaagcccaagaggaagaaccag

SEQ ID NO: 730999 - RNA, 22 nt, Human
aaagcccaagaggaagaaccag

SEQ ID NO: 731000 - RNA, 22 nt, Human
aaagguaggaucucaaccugcu

SEQ ID NO: 731001 - RNA, 19 nt, Human
aaagugcuaggauuacagg

SEQ ID NO: 731002 - RNA, 24 nt, Human
aaagugcuaggauuacaggcauga

SEQ ID NO: 731003 - RNA, 23 nt, Human
aaauaaagaaaaacacaagaggg

SEQ ID NO: 731004 - RNA, 19 nt, Human
aaauggagggucagguagg

SEQ ID NO: 731005 - RNA, 21 nt, Human
aacaaaacagaaggaaagucu

SEQ ID NO: 731006 - RNA, 18 nt, Human
aacacaggcuuggggaga

SEQ ID NO: 731007 - RNA, 19 nt, Human
aacaccagugagaagugag

SEQ ID NO: 731008 - RNA, 24 nt, Human
aacacuuugggaggccaagguggg

SEQ ID NO: 731009 - RNA, 21 nt, Human
aacagaagagagggcacugca

SEQ ID NO: 731010 - RNA, 21 nt, Human
aacauagggagacuccgucuc

SEQ ID NO: 731011 - RNA, 22 nt, Human
aaccuaauaaccccuccaaaga

SEQ ID NO: 731012 - RNA, 21 nt, Human
aaccucaugccaagcaucuaa

SEQ ID NO: 731013 - RNA, 19 nt, Human
aacugccuuuugauuacca

SEQ ID NO: 731014 - RNA, 24 nt, Human
aagacagccugauccacuuagaac

SEQ ID NO: 731015 - RNA, 21 nt, Human
aagagaucaagaugggcagug

SEQ ID NO: 731016 - RNA, 23 nt, Human
aagauuucuccucuacuccacca

SEQ ID NO: 731017 - RNA, 22 nt, Human
aagcaagggcagcuuuucagga

SEQ ID NO: 731018 - RNA, 20 nt, Human
aagcaggggcuccccagacu

SEQ ID NO: 731019 - RNA, 23 nt, Human
aagcauauaaaccacaaccucag

SEQ ID NO: 731020 - RNA, 18 nt, Human
aagccacuacaacagaag

SEQ ID NO: 731021 - RNA, 19 nt, Human
aaggcuucagguagcuagc

SEQ ID NO: 731022 - RNA, 23 nt, Human
aagggcuggcaggguggggggug

SEQ ID NO: 731023 - RNA, 22 nt, Human
aaguaacaggcccaaggucaca

SEQ ID NO: 731024 - RNA, 19 nt, Human
aaguagcugggacuacagg

SEQ ID NO: 731025 - RNA, 20 nt, Human
aaguagcugggacuacaggc

SEQ ID NO: 731026 - RNA, 26 nt, Human
aagugcuaggauuacaggcaugagcc

SEQ ID NO: 731027 - RNA, 22 nt, Human
aaguggcuuguggaaaaagcua

SEQ ID NO: 731028 - RNA, 24 nt, Human
acaaaacagaaggaaagucuugag

SEQ ID NO: 731029 - RNA, 21 nt, Human
acacaaaacaaaaguaucaac

SEQ ID NO: 731030 - RNA, 20 nt, Human
acacacacacacacacaaaa

SEQ ID NO: 731031 - RNA, 23 nt, Human
acacacacacacacacacacaca

SEQ ID NO: 731032 - RNA, 23 nt, Human
acacacacacacacacacacaca

SEQ ID NO: 731033 - RNA, 23 nt, Human
acacacacacacacacacacaca

SEQ ID NO: 731034 - RNA, 23 nt, Human
acacacacacacacacacacaca

SEQ ID NO: 731035 - RNA, 23 nt, Human
acacacacacacacacacacaca

SEQ ID NO: 731036 - RNA, 23 nt, Human
acacacacacacacacacacaca

SEQ ID NO: 731037 - RNA, 23 nt, Human
acacacacacacacacacacaca

SEQ ID NO: 731038 - RNA, 24 nt, Human
acacagauggaaggggaagccaga

SEQ ID NO: 731039 - RNA, 18 nt, Human
acaccacugcacuccagc

SEQ ID NO: 731040 - RNA, 20 nt, Human
acaccacugcacuccagccu

SEQ ID NO: 731041 - RNA, 19 nt, Human
acagaaaagaaccaccuga

SEQ ID NO: 731042 - RNA, 19 nt, Human
acaggcgccugccaccacg

SEQ ID NO: 731043 - RNA, 23 nt, Human
acagggcaccccccucaaccucc

SEQ ID NO: 731044 - RNA, 24 nt, Human
acaucacuaagugacauuugggag

SEQ ID NO: 731045 - RNA, 22 nt, Human
acauucuacacuagcaguucca

SEQ ID NO: 731046 - RNA, 25 nt, Human
acccgccucggcuucccaaagugcu

SEQ ID NO: 731047 - RNA, 18 nt, Human
accuugucuccaucucuc

SEQ ID NO: 731048 - RNA, 18 nt, Human
acgggguuucaccauguu

SEQ ID NO: 731049 - RNA, 19 nt, Human
acgggguuucaccauguua

SEQ ID NO: 731050 - RNA, 20 nt, Human
acgggguuucaccauguuag

SEQ ID NO: 731051 - RNA, 24 nt, Human
acgggguuucaccauguuagccag

SEQ ID NO: 731052 - RNA, 19 nt, Human
acucaguuucccuccucca

SEQ ID NO: 731053 - RNA, 23 nt, Human
acucauuuuguuucugguuuccu

SEQ ID NO: 731054 - RNA, 21 nt, Human
acucccacaaggaagugggga

SEQ ID NO: 731055 - RNA, 18 nt, Human
acugcacuccagccuagg

SEQ ID NO: 731056 - RNA, 24 nt, Human
acugcacuccagccuaggagacag

SEQ ID NO: 731057 - RNA, 20 nt, Human
acugcuuccauuauauuugu

SEQ ID NO: 731058 - RNA, 21 nt, Human
agaaaagaaccaccugagagc

SEQ ID NO: 731059 - RNA, 23 nt, Human
agaaaagaaccaccugagagcua

SEQ ID NO: 731060 - RNA, 23 nt, Human
agaagugguuuucagaaccuguu

SEQ ID NO: 731061 - RNA, 23 nt, Human
agacaaauacagcagggcucaag

SEQ ID NO: 731062 - RNA, 20 nt, Human
agagacuucuugcagcucug

SEQ ID NO: 731063 - RNA, 22 nt, Human
agagagaacaauggcuuggaaa

SEQ ID NO: 731064 - RNA, 21 nt, Human
agagagucugccuuuucauuc

SEQ ID NO: 731065 - RNA, 21 nt, Human
agaggaaaaggcuggacacag

SEQ ID NO: 731066 - RNA, 18 nt, Human
agaggagagggcaagugg

SEQ ID NO: 731067 - RNA, 21 nt, Human
agauacuagaaauuuucagcc

SEQ ID NO: 731068 - RNA, 23 nt, Human
agcauauaaaccacaaccucagu

SEQ ID NO: 731069 - RNA, 18 nt, Human
agccagaaagggagacug

SEQ ID NO: 731070 - RNA, 24 nt, Human
agccuaggcaacauagggagacuc

SEQ ID NO: 731071 - RNA, 22 nt, Human
aggaaaccagaguauguugaug

SEQ ID NO: 731072 - RNA, 18 nt, Human
aggaaaguaugggccaag

SEQ ID NO: 731073 - RNA, 22 nt, Human
aggaaguggggacuuuccgagg

SEQ ID NO: 731074 - RNA, 21 nt, Human
aggagagggcaaguggggcuu

SEQ ID NO: 731075 - RNA, 24 nt, Human
aggaucaccugagcccaagagcuc

SEQ ID NO: 731076 - RNA, 21 nt, Human
aggcaaagguggcccuccucc

SEQ ID NO: 731077 - RNA, 25 nt, Human
aggcuggagugcaguggcgcgaucu

SEQ ID NO: 731078 - RNA, 18 nt, Human
agggcaaguggggcuuuc

SEQ ID NO: 731079 - RNA, 18 nt, Human
agguagcuagcaccuuuc

SEQ ID NO: 731080 - RNA, 23 nt, Human
agguggcccuccuccccagccuc

SEQ ID NO: 731081 - RNA, 18 nt, Human
aggugggaggaucaccug

SEQ ID NO: 731082 - RNA, 18 nt, Human
aggugggaggaucaccug

SEQ ID NO: 731083 - RNA, 20 nt, Human
aggugggaggaucaccugag

SEQ ID NO: 731084 - RNA, 22 nt, Human
aguagagacgggguuucaccau

SEQ ID NO: 731085 - RNA, 25 nt, Human
aguagcugggacuacaggcgccugc

SEQ ID NO: 731086 - RNA, 22 nt, Human
agugaaaugggaaaacccucaa

SEQ ID NO: 731087 - RNA, 26 nt, Human
agugagggagcccagcucagaagaga

SEQ ID NO: 731088 - RNA, 19 nt, Human
agugcaguggcgcgaucuc

SEQ ID NO: 731089 - RNA, 19 nt, Human
aguggcucacgccuauaau

SEQ ID NO: 731090 - RNA, 23 nt, Human
aguggcucacgccuauaauccca

SEQ ID NO: 731091 - RNA, 19 nt, Human
auacagagggaaggaaacc

SEQ ID NO: 731092 - RNA, 26 nt, Human
auacagcagggcucaagcaggagggc

SEQ ID NO: 731093 - RNA, 22 nt, Human
auacugcacaagacaacaaaac

SEQ ID NO: 731094 - RNA, 20 nt, Human
aucacaccacugcacuccag

SEQ ID NO: 731095 - RNA, 22 nt, Human
aucacuaagugacauuugggag

SEQ ID NO: 731096 - RNA, 22 nt, Human
aucccaacacuuugggaggcca

SEQ ID NO: 731097 - RNA, 20 nt, Human
augcucugcagggcagaggg

SEQ ID NO: 731098 - RNA, 33 nt, Human
auguuaaaacacacacacacacacacacacagu

SEQ ID NO: 731099 - RNA, 24 nt, Human
auuuuaguagagacgggguuucac

SEQ ID NO: 731100 - RNA, 23 nt, Human
caaaaguaucaacauuucuccca

SEQ ID NO: 731101 - RNA, 18 nt, Human
caaacaaaacuaacaagc

SEQ ID NO: 731102 - RNA, 21 nt, Human
caaacaaaacuaacaagcuua

SEQ ID NO: 731103 - RNA, 24 nt, Human
caaacccaaucccagucccuaaag

SEQ ID NO: 731104 - RNA, 24 nt, Human
caaagugcuaggauuacaggcaug

SEQ ID NO: 731105 - RNA, 18 nt, Human
caaauaaguaccuggcac

SEQ ID NO: 731106 - RNA, 26 nt, Human
caaauaaguaccuggcaccuuagccc

SEQ ID NO: 731107 - RNA, 24 nt, Human
caacacuuugggaggccaaggugg

SEQ ID NO: 731108 - RNA, 24 nt, Human
caacauagggagacuccgucucua

SEQ ID NO: 731109 - RNA, 18 nt, Human
caaccaccuuccccagcc

SEQ ID NO: 731110 - RNA, 23 nt, Human
caagacaacaaaacagaaggaaa

SEQ ID NO: 731111 - RNA, 23 nt, Human
caagauacagaggaaaaggcugg

SEQ ID NO: 731112 - RNA, 21 nt, Human
caagcugaaacaccaaguauc

SEQ ID NO: 731113 - RNA, 20 nt, Human
caaggaaguggggacuuucc

SEQ ID NO: 731114 - RNA, 19 nt, Human
caagguagugcuccaaguc

SEQ ID NO: 731115 - RNA, 20 nt, Human
caaggugggaggaucaccug

SEQ ID NO: 731116 - RNA, 20 nt, Human
caagugaaaugggaaaaccc

SEQ ID NO: 731117 - RNA, 24 nt, Human
cacacacacaaaacaaaaguauca

SEQ ID NO: 731118 - RNA, 20 nt, Human
cacacacacacaaaacaaaa

SEQ ID NO: 731119 - RNA, 23 nt, Human
cacacacacacaaaacaaaagua

SEQ ID NO: 731120 - RNA, 20 nt, Human
cacacacacacacacacaca

SEQ ID NO: 731121 - RNA, 20 nt, Human
cacacacacacacacacaca

SEQ ID NO: 731122 - RNA, 20 nt, Human
cacacacacacacacacaca

SEQ ID NO: 731123 - RNA, 20 nt, Human
cacacacacacacacacaca

SEQ ID NO: 731124 - RNA, 20 nt, Human
cacacacacacacacacaca

SEQ ID NO: 731125 - RNA, 20 nt, Human
cacacacacacacacacaca

SEQ ID NO: 731126 - RNA, 20 nt, Human
cacacacacacacacacaca

SEQ ID NO: 731127 - RNA, 20 nt, Human
cacacacacacacacacaca

SEQ ID NO: 731128 - RNA, 20 nt, Human
cacacacacacacacacaca

SEQ ID NO: 731129 - RNA, 20 nt, Human
cacacacacacacacacaca

SEQ ID NO: 731130 - RNA, 20 nt, Human
cacacacacacacacacaca

SEQ ID NO: 731131 - RNA, 20 nt, Human
cacacacacacacacacaca

SEQ ID NO: 731132 - RNA, 20 nt, Human
cacacacacacacacacaca

SEQ ID NO: 731133 - RNA, 22 nt, Human
cacacacacacacacacacaca

SEQ ID NO: 731134 - RNA, 22 nt, Human
cacacacacacacacacacaca

SEQ ID NO: 731135 - RNA, 22 nt, Human
cacacacacacacacacacaca

SEQ ID NO: 731136 - RNA, 22 nt, Human
cacacacacacacacacacaca

SEQ ID NO: 731137 - RNA, 22 nt, Human
cacacacacacacacacacaca

SEQ ID NO: 731138 - RNA, 22 nt, Human
cacacacacacacacacacaca

SEQ ID NO: 731139 - RNA, 27 nt, Human
cacacacacacacacacacacacaaaa

SEQ ID NO: 731140 - RNA, 26 nt, Human
cacacacacacacacacacacacaca

SEQ ID NO: 731141 - RNA, 26 nt, Human
cacacacacacacacacacacacaca

SEQ ID NO: 731142 - RNA, 26 nt, Human
cacacacacacacacacacacacaca

SEQ ID NO: 731143 - RNA, 26 nt, Human
cacacacacacacacacacacacaca

SEQ ID NO: 731144 - RNA, 26 nt, Human
cacacacacacacacacacacacaca

SEQ ID NO: 731145 - RNA, 26 nt, Human
cacacacacacacacacacacacaca

SEQ ID NO: 731146 - RNA, 26 nt, Human
cacacacacacacacacacacacaca

SEQ ID NO: 731147 - RNA, 26 nt, Human
cacacacacacacacacacacacaca

SEQ ID NO: 731148 - RNA, 21 nt, Human
cacaccacugcacuccagccu

SEQ ID NO: 731149 - RNA, 21 nt, Human
cacaguaucgcucuggggaau

SEQ ID NO: 731150 - RNA, 21 nt, Human
caccagugagaagugagaaga

SEQ ID NO: 731151 - RNA, 18 nt, Human
caccauguuagccaggau

SEQ ID NO: 731152 - RNA, 22 nt, Human
caccauguuagccaggaugguc

SEQ ID NO: 731153 - RNA, 24 nt, Human
caccauguuagccaggauggucuc

SEQ ID NO: 731154 - RNA, 19 nt, Human
cacccagccgggacaaagc

SEQ ID NO: 731155 - RNA, 18 nt, Human
caccccccucaaccuccc

SEQ ID NO: 731156 - RNA, 23 nt, Human
cacccgccucggcuucccaaagu

SEQ ID NO: 731157 - RNA, 20 nt, Human
caccgcacccagccgggaca

SEQ ID NO: 731158 - RNA, 20 nt, Human
caccuguggucccagcuacu

SEQ ID NO: 731159 - RNA, 24 nt, Human
caccuguggucccagcuacuuggg

SEQ ID NO: 731160 - RNA, 24 nt, Human
cacgccuauaaucccaacacuuug

SEQ ID NO: 731161 - RNA, 21 nt, Human
cacuaagugacauuugggagg

SEQ ID NO: 731162 - RNA, 18 nt, Human
cacugcacuccagccuag

SEQ ID NO: 731163 - RNA, 19 nt, Human
cacugcacuccagccuagg

SEQ ID NO: 731164 - RNA, 19 nt, Human
cacugcacuccagccuagg

SEQ ID NO: 731165 - RNA, 24 nt, Human
cacugcacuccagccuaggagaca

SEQ ID NO: 731166 - RNA, 25 nt, Human
cacuguuuaaagccaagucauuccc

SEQ ID NO: 731167 - RNA, 20 nt, Human
cacuuggcccagggcagggc

SEQ ID NO: 731168 - RNA, 25 nt, Human
cagaaaagaaccaccugagagcuaa

SEQ ID NO: 731169 - RNA, 21 nt, Human
cagaaugauccguggguccaa

SEQ ID NO: 731170 - RNA, 22 nt, Human
cagagaaaggagguagccacau

SEQ ID NO: 731171 - RNA, 22 nt, Human
cagagaacguccucaaccaccu

SEQ ID NO: 731172 - RNA, 24 nt, Human
cagagauuuuuugcugcuccugcu

SEQ ID NO: 731173 - RNA, 22 nt, Human
cagauggaaggggaagccagaa

SEQ ID NO: 731174 - RNA, 24 nt, Human
cagcucggucccaaaauaaaaaua

SEQ ID NO: 731175 - RNA, 26 nt, Human
cagcucuguuccagagaaaccaagag

SEQ ID NO: 731176 - RNA, 21 nt, Human
cagcuggucaauggaagaggc

SEQ ID NO: 731177 - RNA, 21 nt, Human
caggcgccugccaccacgccc

SEQ ID NO: 731178 - RNA, 23 nt, Human
caggcgccugccaccacgcccgg

SEQ ID NO: 731179 - RNA, 20 nt, Human
caggcuucucuccccaccac

SEQ ID NO: 731180 - RNA, 20 nt, Human
cagggcaccccccucaaccu

SEQ ID NO: 731181 - RNA, 24 nt, Human
cagggugggggguggggucuuuag

SEQ ID NO: 731182 - RNA, 23 nt, Human
cauagaucaggauacuguccccu

SEQ ID NO: 731183 - RNA, 22 nt, Human
caugccauucuccugccucagc

SEQ ID NO: 731184 - RNA, 21 nt, Human
caugcuuucaacucuaagcau

SEQ ID NO: 731185 - RNA, 21 nt, Human
ccaaaacauauuucagucaaa

SEQ ID NO: 731186 - RNA, 19 nt, Human
ccaaagugcuaggauuaca

SEQ ID NO: 731187 - RNA, 24 nt, Human
ccaaagugcuaggauuacaggcau

SEQ ID NO: 731188 - RNA, 18 nt, Human
ccaaguaucagcaucucc

SEQ ID NO: 731189 - RNA, 23 nt, Human
ccacagggcaccccccucaaccu

SEQ ID NO: 731190 - RNA, 20 nt, Human
ccaccacgcccggcuaauuu

SEQ ID NO: 731191 - RNA, 28 nt, Human
ccacccacugcaagcuccaccucccggg

SEQ ID NO: 731192 - RNA, 19 nt, Human
ccacgggaguccucugggc

SEQ ID NO: 731193 - RNA, 24 nt, Human
ccacugcaagcuccaccucccggg

SEQ ID NO: 731194 - RNA, 27 nt, Human
ccacugcaagcuccaccucccggguuc

SEQ ID NO: 731195 - RNA, 20 nt, Human
ccacugcacuccagccuagg

SEQ ID NO: 731196 - RNA, 22 nt, Human
ccacugcacuccagccuaggag

SEQ ID NO: 731197 - RNA, 23 nt, Human
ccacugcacuccagccuaggaga

SEQ ID NO: 731198 - RNA, 24 nt, Human
ccacugcacuccagccuaggagac

SEQ ID NO: 731199 - RNA, 25 nt, Human
ccacugcacuccagccuaggagaca

SEQ ID NO: 731200 - RNA, 19 nt, Human
ccaggaaaugagaagcagg

SEQ ID NO: 731201 - RNA, 23 nt, Human
cccaaguagcugggacuacaggc

SEQ ID NO: 731202 - RNA, 23 nt, Human
cccaaguagcugggacuacaggc

SEQ ID NO: 731203 - RNA, 23 nt, Human
cccacucccuuuaccccuucaaa

SEQ ID NO: 731204 - RNA, 24 nt, Human
cccacugcaagcuccaccucccgg

SEQ ID NO: 731205 - RNA, 22 nt, Human
cccagagaaaggagguagccac

SEQ ID NO: 731206 - RNA, 21 nt, Human
cccagauaggccacuuggccc

SEQ ID NO: 731207 - RNA, 19 nt, Human
cccagggcagggcugggug

SEQ ID NO: 731208 - RNA, 22 nt, Human
ccccagccucagccugggggac

SEQ ID NO: 731209 - RNA, 23 nt, Human
ccccaugcuuucaacucuaagca

SEQ ID NO: 731210 - RNA, 21 nt, Human
cccuccuccagaaauuguccc

SEQ ID NO: 731211 - RNA, 22 nt, Human
ccuauaaucccaacacuuuggg

SEQ ID NO: 731212 - RNA, 22 nt, Human
ccuauaaucccaacacuuuggg

SEQ ID NO: 731213 - RNA, 22 nt, Human
ccucaaccuccccuuccuccag

SEQ ID NO: 731214 - RNA, 26 nt, Human
ccucaaccuccccuuccuccagcaaa

SEQ ID NO: 731215 - RNA, 22 nt, Human
ccucacuucaaugauuccccug

SEQ ID NO: 731216 - RNA, 24 nt, Human
ccucccggguucaugccauucucc

SEQ ID NO: 731217 - RNA, 23 nt, Human
ccuccucggcucccuaccccagc

SEQ ID NO: 731218 - RNA, 20 nt, Human
ccugaccucgugauccaccc

SEQ ID NO: 731219 - RNA, 20 nt, Human
ccugcaacacaggcuugggg

SEQ ID NO: 731220 - RNA, 23 nt, Human
ccugccucagccucccaaguagc

SEQ ID NO: 731221 - RNA, 24 nt, Human
ccugccucagccucccaaguagcu

SEQ ID NO: 731222 - RNA, 19 nt, Human
ccuggcaggaugcagggcc

SEQ ID NO: 731223 - RNA, 24 nt, Human
ccuggccaugcagaugcccagaga

SEQ ID NO: 731224 - RNA, 18 nt, Human
ccugugcaaauaaguacc

SEQ ID NO: 731225 - RNA, 25 nt, Human
ccuguggucccagcuacuugggugg

SEQ ID NO: 731226 - RNA, 19 nt, Human
ccuuauggcugcaggucac

SEQ ID NO: 731227 - RNA, 19 nt, Human
ccuuggccaggccuuccuu

SEQ ID NO: 731228 - RNA, 20 nt, Human
cgaccaaaacuccaguuuag

SEQ ID NO: 731229 - RNA, 22 nt, Human
cgagaaauaaagaaaaacacaa

SEQ ID NO: 731230 - RNA, 21 nt, Human
cgcacaggauuccuacaggac

SEQ ID NO: 731231 - RNA, 24 nt, Human
cgcccaggcuggagugcaguggcg

SEQ ID NO: 731232 - RNA, 24 nt, Human
cgccucggcuucccaaagugcuag

SEQ ID NO: 731233 - RNA, 24 nt, Human
cgcucugucgcccaggcuggagug

SEQ ID NO: 731234 - RNA, 24 nt, Human
cgggguuucaccauguuagccagg

SEQ ID NO: 731235 - RNA, 19 nt, Human
cuaaaagacagagcaaccg

SEQ ID NO: 731236 - RNA, 21 nt, Human
cuaagcauauaaaccacaacc

SEQ ID NO: 731237 - RNA, 25 nt, Human
cuaauuuuuuuaauuuuaguagaga

SEQ ID NO: 731238 - RNA, 21 nt, Human
cuacgaacugacucauuuugu

SEQ ID NO: 731239 - RNA, 22 nt, Human
cucacgccuauaaucccaacac

SEQ ID NO: 731240 - RNA, 24 nt, Human
cucacgccuauaaucccaacacuu

SEQ ID NO: 731241 - RNA, 24 nt, Human
cucagccucccaaguagcugggac

SEQ ID NO: 731242 - RNA, 19 nt, Human
cuccaucucaaaaaaaaaa

SEQ ID NO: 731243 - RNA, 21 nt, Human
cuccauggccuccucggcucc

SEQ ID NO: 731244 - RNA, 21 nt, Human
cucccggguucaugccauucu

SEQ ID NO: 731245 - RNA, 24 nt, Human
cuccugaccucgugauccacccgc

SEQ ID NO: 731246 - RNA, 21 nt, Human
cuccugggccuacugaggagg

SEQ ID NO: 731247 - RNA, 24 nt, Human
cucgcucugucgcccaggcuggag

SEQ ID NO: 731248 - RNA, 23 nt, Human
cucugucgcccaggcuggagugc

SEQ ID NO: 731249 - RNA, 20 nt, Human
cugagaaaaacagaaaagaa

SEQ ID NO: 731250 - RNA, 19 nt, Human
cuggcaggguggggggugg

SEQ ID NO: 731251 - RNA, 19 nt, Human
cuggcucugucaaucccca

SEQ ID NO: 731252 - RNA, 20 nt, Human
cugguucacagauguuaaaa

SEQ ID NO: 731253 - RNA, 28 nt, Human
cuuagccccaaaugcagggaaaagcaga

SEQ ID NO: 731254 - RNA, 18 nt, Human
gaaggagcacuccucucc

SEQ ID NO: 731255 - RNA, 23 nt, Human
gacacaguggcucacgccuauaa

SEQ ID NO: 731256 - RNA, 18 nt, Human
gacacuucugauaaauga

SEQ ID NO: 731257 - RNA, 22 nt, Human
gaccucgugauccacccgccuc

SEQ ID NO: 731258 - RNA, 22 nt, Human
gaccucgugauccacccgccuc

SEQ ID NO: 731259 - RNA, 24 nt, Human
gaccucgugauccacccgccucgg

SEQ ID NO: 731260 - RNA, 20 nt, Human
gagaacguccucaaccaccu

SEQ ID NO: 731261 - RNA, 24 nt, Human
gagacgggguuucaccauguuagc

SEQ ID NO: 731262 - RNA, 22 nt, Human
gagcccugaagguuggggcugc

SEQ ID NO: 731263 - RNA, 22 nt, Human
gaggaaaaggcuggacacagug

SEQ ID NO: 731264 - RNA, 20 nt, Human
gagggaaggaaaccagagua

SEQ ID NO: 731265 - RNA, 20 nt, Human
gagggugcuguccucuccac

SEQ ID NO: 731266 - RNA, 18 nt, Human
gaguacagaacacguugg

SEQ ID NO: 731267 - RNA, 24 nt, Human
gaucaccugagcccaagagcucaa

SEQ ID NO: 731268 - RNA, 22 nt, Human
gaucuccacccacugcaagcuc

SEQ ID NO: 731269 - RNA, 18 nt, Human
gauuacaggcaugagcca

SEQ ID NO: 731270 - RNA, 22 nt, Human
gauuacaggcaugagccaccgc

SEQ ID NO: 731271 - RNA, 23 nt, Human
gauuacaggcaugagccaccgca

SEQ ID NO: 731272 - RNA, 20 nt, Human
gcaaaccucaugccaagcau

SEQ ID NO: 731273 - RNA, 18 nt, Human
gcaagcucuauguacagc

SEQ ID NO: 731274 - RNA, 23 nt, Human
gcagaguccucuucaguuauuag

SEQ ID NO: 731275 - RNA, 25 nt, Human
gcagcuaaaagacagagcaaccagg

SEQ ID NO: 731276 - RNA, 19 nt, Human
gccaugaucacaccacugc

SEQ ID NO: 731277 - RNA, 23 nt, Human
gccaugaucacaccacugcacuu

SEQ ID NO: 731278 - RNA, 20 nt, Human
gcccaggcuggagugcagug

SEQ ID NO: 731279 - RNA, 18 nt, Human
gcccagggcagggcuggg

SEQ ID NO: 731280 - RNA, 18 nt, Human
gcccuccuccccagccuc

SEQ ID NO: 731281 - RNA, 23 nt, Human
gcccugaagguuggggcugcagu

SEQ ID NO: 731282 - RNA, 24 nt, Human
gcccugaagguuggggcugcagug

SEQ ID NO: 731283 - RNA, 24 nt, Human
gccucggcuucccaaagugcuagg

SEQ ID NO: 731284 - RNA, 19 nt, Human
gccugguucacagauguua

SEQ ID NO: 731285 - RNA, 23 nt, Human
gcuccaaucagguuuccagucuc

SEQ ID NO: 731286 - RNA, 20 nt, Human
gcugcuccugcucccugugc

SEQ ID NO: 731287 - RNA, 18 nt, Human
gcuggacacaguggcuca

SEQ ID NO: 731288 - RNA, 19 nt, Human
gcuggacacaguggcucac

SEQ ID NO: 731289 - RNA, 25 nt, Human
gcuggagugcaguggcgcgaucucc

SEQ ID NO: 731290 - RNA, 20 nt, Human
gcuggguguguggugggagc

SEQ ID NO: 731291 - RNA, 20 nt, Human
ggaagcaagggcagcuuuuc

SEQ ID NO: 731292 - RNA, 18 nt, Human
ggacaucacuaagugaca

SEQ ID NO: 731293 - RNA, 19 nt, Human
ggagcaccuggagagggug

SEQ ID NO: 731294 - RNA, 22 nt, Human
ggauuacaggcaugagccaccg

SEQ ID NO: 731295 - RNA, 23 nt, Human
ggcaggaagauucagaaugaucc

SEQ ID NO: 731296 - RNA, 24 nt, Human
ggcaggaagauucagaaugauccg

SEQ ID NO: 731297 - RNA, 18 nt, Human
ggcagggcugggugugug

SEQ ID NO: 731298 - RNA, 18 nt, Human
ggcaguggugguggugaa

SEQ ID NO: 731299 - RNA, 20 nt, Human
ggcaguggugguggugaagg

SEQ ID NO: 731300 - RNA, 18 nt, Human
ggcuggcagggugggggg

SEQ ID NO: 731301 - RNA, 23 nt, Human
gggcaguggugguggugaaggua

SEQ ID NO: 731302 - RNA, 22 nt, Human
ggggcuuucacaccacagggca

SEQ ID NO: 731303 - RNA, 23 nt, Human
gggguuucaccauguuagccagg

SEQ ID NO: 731304 - RNA, 18 nt, Human
gggugggggguggggucu

SEQ ID NO: 731305 - RNA, 20 nt, Human
ggucucgaucuccugaccuc

SEQ ID NO: 731306 - RNA, 24 nt, Human
ggugggagcaccuggagagggugc

SEQ ID NO: 731307 - RNA, 24 nt, Human
gguuucaccauguuagccaggaug

SEQ ID NO: 731308 - RNA, 23 nt, Human
guagagacgggguuucaccaugu

SEQ ID NO: 731309 - RNA, 20 nt, Human
gucaaacccaaucccagucc

SEQ ID NO: 731310 - RNA, 24 nt, Human
gugauccacccgccucggcuuccc

SEQ ID NO: 731311 - RNA, 20 nt, Human
guggaaaaagcuacauuaca

SEQ ID NO: 731312 - RNA, 23 nt, Human
guggccuugcacccucagcaggg

SEQ ID NO: 731313 - RNA, 18 nt, Human
guggcgcgaucuccaccc

SEQ ID NO: 731314 - RNA, 22 nt, Human
guuaaguguauccaaugccuag

SEQ ID NO: 731315 - RNA, 24 nt, Human
guucaaagucucuaucccuauccc

SEQ ID NO: 731316 - RNA, 20 nt, Human
uaaaacacacacacacacac

SEQ ID NO: 731317 - RNA, 21 nt, Human
uaaaccacaaccucagucuua

SEQ ID NO: 731318 - RNA, 19 nt, Human
uaaagagauggggugaggg

SEQ ID NO: 731319 - RNA, 18 nt, Human
uaaagccaagucauuccc

SEQ ID NO: 731320 - RNA, 23 nt, Human
uaacaggcccaaggucacacagc

SEQ ID NO: 731321 - RNA, 23 nt, Human
uaagacaggauccgauuucccac

SEQ ID NO: 731322 - RNA, 20 nt, Human
uaagauacuagaaauuuuca

SEQ ID NO: 731323 - RNA, 22 nt, Human
uaagauacuagaaauuuucagc

SEQ ID NO: 731324 - RNA, 18 nt, Human
uaagccacuacaacagaa

SEQ ID NO: 731325 - RNA, 18 nt, Human
uaagcuccuggccaugca

SEQ ID NO: 731326 - RNA, 25 nt, Human
uaagcuccuggccaugcagaugccc

SEQ ID NO: 731327 - RNA, 19 nt, Human
uaauaugaugugcuccagu

SEQ ID NO: 731328 - RNA, 23 nt, Human
uaauuuuuuuaauuuuaguagag

SEQ ID NO: 731329 - RNA, 24 nt, Human
uaauuuuuuuaauuuuaguagaga

SEQ ID NO: 731330 - RNA, 26 nt, Human
uaauuuuuuuaauuuuaguagagacg

SEQ ID NO: 731331 - RNA, 25 nt, Human
uacaacagaagagagggcacugcac

SEQ ID NO: 731332 - RNA, 21 nt, Human
uacacuagcaguuccaguagc

SEQ ID NO: 731333 - RNA, 24 nt, Human
uacaggcaugagccaccgcaccca

SEQ ID NO: 731334 - RNA, 23 nt, Human
uacaggcgccugccaccacgccc

SEQ ID NO: 731335 - RNA, 18 nt, Human
uaccugucuuaggaaggg

SEQ ID NO: 731336 - RNA, 20 nt, Human
uagaauuucaaacaaaacua

SEQ ID NO: 731337 - RNA, 22 nt, Human
uagagacgggguuucaccaugu

SEQ ID NO: 731338 - RNA, 27 nt, Human
uagaggagagggcaaguggggcuucaa

SEQ ID NO: 731339 - RNA, 25 nt, Human
uagauagugaaagagagagaacaau

SEQ ID NO: 731340 - RNA, 20 nt, Human
uagcaaaccucaugccaagc

SEQ ID NO: 731341 - RNA, 21 nt, Human
uagccacaucacagggacaac

SEQ ID NO: 731342 - RNA, 18 nt, Human
uaggauuacaggcaugag

SEQ ID NO: 731343 - RNA, 21 nt, Human
uaggauuacaggcaugagcca

SEQ ID NO: 731344 - RNA, 22 nt, Human
uaggauuacaggcaugagccac

SEQ ID NO: 731345 - RNA, 23 nt, Human
uaggauuacaggcaugagccacc

SEQ ID NO: 731346 - RNA, 24 nt, Human
uaggauuacaggcaugagccaccg

SEQ ID NO: 731347 - RNA, 24 nt, Human
uaggauuacaggcaugagccaccg

SEQ ID NO: 731348 - RNA, 26 nt, Human
uaggauuacaggcaugagccaccgca

SEQ ID NO: 731349 - RNA, 24 nt, Human
uaggccacuuggcccaggggaggu

SEQ ID NO: 731350 - RNA, 23 nt, Human
uaguaagcaagcucuauguacag

SEQ ID NO: 731351 - RNA, 24 nt, Human
uaguagagacgggguuucaccaug

SEQ ID NO: 731352 - RNA, 26 nt, Human
uaguagagacgggguuucaccauguu

SEQ ID NO: 731353 - RNA, 25 nt, Human
uaucaagcugaaacaccaaguauca

SEQ ID NO: 731354 - RNA, 21 nt, Human
ucaaacaaaacuaacaagcuu

SEQ ID NO: 731355 - RNA, 22 nt, Human
ucaaccugcucuguuacauaac

SEQ ID NO: 731356 - RNA, 26 nt, Human
ucaagguaaggauugagggaggugca

SEQ ID NO: 731357 - RNA, 25 nt, Human
ucaauccccacuugagucuucuuuc

SEQ ID NO: 731358 - RNA, 21 nt, Human
ucaaugauuccccuggcucca

SEQ ID NO: 731359 - RNA, 24 nt, Human
ucaccauguuagccaggauggucu

SEQ ID NO: 731360 - RNA, 21 nt, Human
ucacugucucuucugccccag

SEQ ID NO: 731361 - RNA, 21 nt, Human
ucagaaccuguucuggccaag

SEQ ID NO: 731362 - RNA, 18 nt, Human
ucagccucccaaguagcu

SEQ ID NO: 731363 - RNA, 20 nt, Human
ucagccucccaaguagcugg

SEQ ID NO: 731364 - RNA, 22 nt, Human
uccaacaccagugagaagugag

SEQ ID NO: 731365 - RNA, 19 nt, Human
uccacucugccccugaccc

SEQ ID NO: 731366 - RNA, 22 nt, Human
uccauggccuccucggcucccu

SEQ ID NO: 731367 - RNA, 24 nt, Human
ucccaaagugcuaggauuacaggc

SEQ ID NO: 731368 - RNA, 24 nt, Human
ucccaaguagcugggacuacaggc

SEQ ID NO: 731369 - RNA, 19 nt, Human
uccccagacuuuaagagaa

SEQ ID NO: 731370 - RNA, 21 nt, Human
uccccagccucagccuggggg

SEQ ID NO: 731371 - RNA, 27 nt, Human
uccccagccucagccugggggacccac

SEQ ID NO: 731372 - RNA, 21 nt, Human
ucccggguucaugccauucuc

SEQ ID NO: 731373 - RNA, 24 nt, Human
ucccggguucaugccauucuccug

SEQ ID NO: 731374 - RNA, 19 nt, Human
ucccuaaagaauuaggaaa

SEQ ID NO: 731375 - RNA, 22 nt, Human
uccuccccagccucagccuggg

SEQ ID NO: 731376 - RNA, 22 nt, Human
uccucuacuccaccaugccuuc

SEQ ID NO: 731377 - RNA, 22 nt, Human
ucgccaccuacgaacugacuca

SEQ ID NO: 731378 - RNA, 24 nt, Human
ucgcccaggcuggagugcaguggc

SEQ ID NO: 731379 - RNA, 24 nt, Human
ucgcucugucgcccaggcuggagu

SEQ ID NO: 731380 - RNA, 27 nt, Human
ucggucccaaaauaaaaauaagcaagg

SEQ ID NO: 731381 - RNA, 25 nt, Human
ucuaaucagagaacguccucaacca

SEQ ID NO: 731382 - RNA, 21 nt, Human
ucuacccacugcccucuccua

SEQ ID NO: 731383 - RNA, 21 nt, Human
ucucagggacacagauggaag

SEQ ID NO: 731384 - RNA, 21 nt, Human
ucucagggacacagauggaag

SEQ ID NO: 731385 - RNA, 21 nt, Human
ucuccacucugccccugaccc

SEQ ID NO: 731386 - RNA, 26 nt, Human
ucuccuagguuuggcucugcuggggu

SEQ ID NO: 731387 - RNA, 26 nt, Human
ucuccugccucagccucccaaguagc

SEQ ID NO: 731388 - RNA, 19 nt, Human
ucucgcucugucgcccagg

SEQ ID NO: 731389 - RNA, 23 nt, Human
ucucgcucugucgcccaggcugg

SEQ ID NO: 731390 - RNA, 24 nt, Human
ucucgcucugucgcccaggcugga

SEQ ID NO: 731391 - RNA, 26 nt, Human
ucucgcucugucgcccaggcuggagu

SEQ ID NO: 731392 - RNA, 27 nt, Human
ucucgcucugucgcccaggcuggagug

SEQ ID NO: 731393 - RNA, 26 nt, Human
ucugaacugcucuuuaaguggucuca

SEQ ID NO: 731394 - RNA, 19 nt, Human
ucugagaaaaacagaaaag

SEQ ID NO: 731395 - RNA, 18 nt, Human
ucugcagggcagaggguc

SEQ ID NO: 731396 - RNA, 21 nt, Human
ucuggcucugucaauccccac

SEQ ID NO: 731397 - RNA, 21 nt, Human
ucugggcugaaagcccaagag

SEQ ID NO: 731398 - RNA, 24 nt, Human
ucugucgcccaggcuggagugcag

SEQ ID NO: 731399 - RNA, 18 nt, Human
ugaaagagagagaacaau

SEQ ID NO: 731400 - RNA, 23 nt, Human
ugaaagcccaagaggaagaacca

SEQ ID NO: 731401 - RNA, 19 nt, Human
ugaaaugggaaaacccuca

SEQ ID NO: 731402 - RNA, 21 nt, Human
ugaaaugggaaaacccucaaa

SEQ ID NO: 731403 - RNA, 22 nt, Human
ugaagaauucucacacaaauca

SEQ ID NO: 731404 - RNA, 23 nt, Human
ugaagagucuggggaacuacaga

SEQ ID NO: 731405 - RNA, 20 nt, Human
ugaagggacagggaaguggc

SEQ ID NO: 731406 - RNA, 19 nt, Human
ugacaaagugcaggaaggg

SEQ ID NO: 731407 - RNA, 23 nt, Human
ugacaccuuccccacugugccau

SEQ ID NO: 731408 - RNA, 22 nt, Human
ugagaagacagaagucaacugg

SEQ ID NO: 731409 - RNA, 22 nt, Human
ugagaagacagaagucaacugg

SEQ ID NO: 731410 - RNA, 24 nt, Human
ugagaagauacagagaaacaccag

SEQ ID NO: 731411 - RNA, 21 nt, Human
ugagaagugagaagauacaga

SEQ ID NO: 731412 - RNA, 24 nt, Human
ugagagcugaggggaaaccuuagc

SEQ ID NO: 731413 - RNA, 20 nt, Human
ugaggaaauggagggucagg

SEQ ID NO: 731414 - RNA, 19 nt, Human
ugaggugggaggaucaccu

SEQ ID NO: 731415 - RNA, 20 nt, Human
ugaggugggaggaucaccug

SEQ ID NO: 731416 - RNA, 21 nt, Human
ugaggugggaggaucaccuga

SEQ ID NO: 731417 - RNA, 23 nt, Human
ugaggugggaggaucaccugagc

SEQ ID NO: 731418 - RNA, 24 nt, Human
ugaggugggaggaucaccugagcc

SEQ ID NO: 731419 - RNA, 21 nt, Human
ugaugagaaauccuaagacag

SEQ ID NO: 731420 - RNA, 25 nt, Human
ugcacaagacaacaaaacagaagga

SEQ ID NO: 731421 - RNA, 23 nt, Human
ugcagggcagagggucagagcag

SEQ ID NO: 731422 - RNA, 22 nt, Human
ugcagugagccaugaucacacc

SEQ ID NO: 731423 - RNA, 28 nt, Human
ugccaagcaucuaaucagagaacguccu

SEQ ID NO: 731424 - RNA, 21 nt, Human
ugcccagagacuucuugcagc

SEQ ID NO: 731425 - RNA, 26 nt, Human
ugcccagagacuucuugcagcucugu

SEQ ID NO: 731426 - RNA, 20 nt, Human
ugccuagaauuucaaacaaa

SEQ ID NO: 731427 - RNA, 22 nt, Human
ugccuagaauuucaaacaaaac

SEQ ID NO: 731428 - RNA, 24 nt, Human
ugccucagccucccaaguagcugg

SEQ ID NO: 731429 - RNA, 18 nt, Human
ugcuauggacaaaccaac

SEQ ID NO: 731430 - RNA, 20 nt, Human
uggaaggcagaauuaaugcc

SEQ ID NO: 731431 - RNA, 19 nt, Human
uggacacucaccugcccaa

SEQ ID NO: 731432 - RNA, 24 nt, Human
uggaggacucucuugacaaagugc

SEQ ID NO: 731433 - RNA, 23 nt, Human
uggagugcaguggcgcgaucucc

SEQ ID NO: 731434 - RNA, 25 nt, Human
uggcagggugggggguggggucuuu

SEQ ID NO: 731435 - RNA, 21 nt, Human
uggcaugcaccugugguccca

SEQ ID NO: 731436 - RNA, 24 nt, Human
uggcaugcaccuguggucccagcu

SEQ ID NO: 731437 - RNA, 24 nt, Human
uggccaugcagaugcccagagacu

SEQ ID NO: 731438 - RNA, 19 nt, Human
uggccucucagagcucccu

SEQ ID NO: 731439 - RNA, 19 nt, Human
uggcgcgaucuccacccac

SEQ ID NO: 731440 - RNA, 21 nt, Human
uggcucacccaagcagagcuc

SEQ ID NO: 731441 - RNA, 21 nt, Human
uggcucacgccuauaauccca

SEQ ID NO: 731442 - RNA, 24 nt, Human
uggcugaggugggaggaucaccug

SEQ ID NO: 731443 - RNA, 20 nt, Human
ugggaagauaaauuccagga

SEQ ID NO: 731444 - RNA, 18 nt, Human
ugggacaucacuaaguga

SEQ ID NO: 731445 - RNA, 21 nt, Human
ugggacuacaggcgccugcca

SEQ ID NO: 731446 - RNA, 22 nt, Human
ugggacuacaggcgccugccac

SEQ ID NO: 731447 - RNA, 24 nt, Human
ugggacuacaggcgccugccacca

SEQ ID NO: 731448 - RNA, 22 nt, Human
ugggaggaucaccugagcccug

SEQ ID NO: 731449 - RNA, 19 nt, Human
ugggaggccaaggugggag

SEQ ID NO: 731450 - RNA, 24 nt, Human
ugggaggccaaggugggaggauca

SEQ ID NO: 731451 - RNA, 18 nt, Human
uggggcagagaaucuacc

SEQ ID NO: 731452 - RNA, 19 nt, Human
uggggcuuucacaccacag

SEQ ID NO: 731453 - RNA, 20 nt, Human
ugggguauuuauguguaugu

SEQ ID NO: 731454 - RNA, 18 nt, Human
uggggugagggugggggg

SEQ ID NO: 731455 - RNA, 22 nt, Human
uggggugaggguggggggaacu

SEQ ID NO: 731456 - RNA, 18 nt, Human
uggguggcugagguggga

SEQ ID NO: 731457 - RNA, 24 nt, Human
uggguggcugaggugggaggauca

SEQ ID NO: 731458 - RNA, 21 nt, Human
ugguauugggugacuuucuga

SEQ ID NO: 731459 - RNA, 24 nt, Human
uggucaauggaagaggcagauaug

SEQ ID NO: 731460 - RNA, 21 nt, Human
uggugggagcaccuggagagg

SEQ ID NO: 731461 - RNA, 22 nt, Human
uggugggagcaccuggagaggg

SEQ ID NO: 731462 - RNA, 19 nt, Human
uguacgagaaauaaagaaa

SEQ ID NO: 731463 - RNA, 23 nt, Human
ugucuggcucacccaagcagagc

SEQ ID NO: 731464 - RNA, 23 nt, Human
ugucugggcccugguaucacuac

SEQ ID NO: 731465 - RNA, 19 nt, Human
ugucuuaggaaggggguga

SEQ ID NO: 731466 - RNA, 20 nt, Human
ugugcuggggaacacaugcc

SEQ ID NO: 731467 - RNA, 19 nt, Human
uguggaaaaagcuacauua

SEQ ID NO: 731468 - RNA, 23 nt, Human
uguggugggagcaccuggagagg

SEQ ID NO: 731469 - RNA, 26 nt, Human
uguguggugggagcaccuggagaggg

SEQ ID NO: 731470 - RNA, 28 nt, Human
uguuaaaacacacacacacacacacaca

SEQ ID NO: 731471 - RNA, 27 nt, Human
uguuaaaacacacacacacacacacag

SEQ ID NO: 731472 - RNA, 21 nt, Human
uguuccagagaaaccaagagc

SEQ ID NO: 731473 - RNA, 31 nt, Human
uuaaaacacacacacacacacacacacacag

SEQ ID NO: 731474 - RNA, 18 nt, Human
uuaguagagacgggguuu

SEQ ID NO: 731475 - RNA, 22 nt, Human
uuaguagagacgggguuucacc

SEQ ID NO: 731476 - RNA, 24 nt, Human
uuaguagagacgggguuucaccau

SEQ ID NO: 731477 - RNA, 23 nt, Human
uucaaaagguggucacugucucu

SEQ ID NO: 731478 - RNA, 24 nt, Human
uucacaagaguccauuucaucaaa

SEQ ID NO: 731479 - RNA, 19 nt, Human
uucagccagaaagggagac

SEQ ID NO: 731480 - RNA, 19 nt, Human
uucaugccauucuccugcc

SEQ ID NO: 731481 - RNA, 21 nt, Human
uuccaguagcaaaccucaugc

SEQ ID NO: 731482 - RNA, 21 nt, Human
uugagagcugaggggaaaccu

SEQ ID NO: 731483 - RNA, 24 nt, Human
uuggcccagggcagggcugggugu

SEQ ID NO: 731484 - RNA, 25 nt, Human
uuggguggcugaggugggaggauca

SEQ ID NO: 731485 - RNA, 24 nt, Human
uugucuggcucacccaagcagagc

SEQ ID NO: 731486 - RNA, 22 nt, Human
uuuaagagaaaucccagagaaa

SEQ ID NO: 731487 - RNA, 24 nt, Human
uuucacaccacagggcaccccccc

SEQ ID NO: 731488 - RNA, 19 nt, Human
uuucaccauguuagccagg

SEQ ID NO: 731489 - RNA, 20 nt, Human
uuucaccauguuagccagga

SEQ ID NO: 731490 - RNA, 19 nt, Human
uuuccagucucccagaggu

SEQ ID NO: 731491 - RNA, 24 nt, Human
uuucccuccuccagaaauuguccc

SEQ ID NO: 731492 - RNA, 19 nt, Human
uuucugaacugcucuuuau

SEQ ID NO: 731493 - RNA, 23 nt, Human
uuugagcucuucaaaaggugguc

SEQ ID NO: 731494 - RNA, 18 nt, Human
uuugcugcaccucucuac

SEQ ID NO: 731495 - RNA, 22 nt, Human
uuuuuuuuuucagacggagucu

SEQ ID NO: 731496 - RNA, 22 nt, Human
aaaaaagaaauggaaauccggg

SEQ ID NO: 731497 - RNA, 19 nt, Human
aaaaaggacugccaggcgg

SEQ ID NO: 731498 - RNA, 26 nt, Human
aaacagaaaauccaaacaggauggca

SEQ ID NO: 731499 - RNA, 18 nt, Human
aaacagaagcgacugaac

SEQ ID NO: 731500 - RNA, 24 nt, Human
aaagugcugcgauuagaggcguga

SEQ ID NO: 731501 - RNA, 20 nt, Human
aacacggccaagccaggccu

SEQ ID NO: 731502 - RNA, 21 nt, Human
aagcagacgcgagagccugau

SEQ ID NO: 731503 - RNA, 20 nt, Human
aagcagguguaguagcccac

SEQ ID NO: 731504 - RNA, 20 nt, Human
aagcugaagguuucugugcu

SEQ ID NO: 731505 - RNA, 24 nt, Human
aagucgaggcugcagugagccaag

SEQ ID NO: 731506 - RNA, 22 nt, Human
aaugacugucugacucaccaug

SEQ ID NO: 731507 - RNA, 19 nt, Human
aaugcuguuauacagggaa

SEQ ID NO: 731508 - RNA, 23 nt, Human
aauggccaacuuagcuccccaug

SEQ ID NO: 731509 - RNA, 25 nt, Human
acaaaaauaacgaggaggcauccac

SEQ ID NO: 731510 - RNA, 23 nt, Human
acaaaucaacaacuccccgccac

SEQ ID NO: 731511 - RNA, 20 nt, Human
acacaccacgcgccccagaa

SEQ ID NO: 731512 - RNA, 26 nt, Human
acacacccaguggaaguaaccacacc

SEQ ID NO: 731513 - RNA, 22 nt, Human
acaccacgcgccccagaaacau

SEQ ID NO: 731514 - RNA, 25 nt, Human
acaccacgcgccccagaaacauuca

SEQ ID NO: 731515 - RNA, 18 nt, Human
acaggguuucaucauguu

SEQ ID NO: 731516 - RNA, 21 nt, Human
acaggguuucaucauguuggc

SEQ ID NO: 731517 - RNA, 24 nt, Human
acaggguuucaucauguuggccag

SEQ ID NO: 731518 - RNA, 18 nt, Human
accacagcagaaucaaca

SEQ ID NO: 731519 - RNA, 27 nt, Human
accagaugcugugcggcuggaaauucc

SEQ ID NO: 731520 - RNA, 24 nt, Human
accgacaaaccgagaaagccgcag

SEQ ID NO: 731521 - RNA, 22 nt, Human
accggauuugggacaaggauuu

SEQ ID NO: 731522 - RNA, 23 nt, Human
acgcagcccaggguguggaaggg

SEQ ID NO: 731523 - RNA, 20 nt, Human
acucagaguccaaaaaagaa

SEQ ID NO: 731524 - RNA, 24 nt, Human
acuguacuccagccugggugacag

SEQ ID NO: 731525 - RNA, 19 nt, Human
agaaaaaaagaaauggaaa

SEQ ID NO: 731526 - RNA, 23 nt, Human
agaaguucugagugcccaccgug

SEQ ID NO: 731527 - RNA, 22 nt, Human
agaggaagugggcacccccagc

SEQ ID NO: 731528 - RNA, 23 nt, Human
agcaagacugucucaaaaaaaua

SEQ ID NO: 731529 - RNA, 22 nt, Human
agcaagggcacagugcuggcug

SEQ ID NO: 731530 - RNA, 19 nt, Human
agcaggagacccuuccuuc

SEQ ID NO: 731531 - RNA, 24 nt, Human
agccacaugggaggcugagguggg

SEQ ID NO: 731532 - RNA, 23 nt, Human
agccaggcaugguggcacgugcc

SEQ ID NO: 731533 - RNA, 24 nt, Human
agccugccucauacucagagucca

SEQ ID NO: 731534 - RNA, 19 nt, Human
aggaacggugggcucugag

SEQ ID NO: 731535 - RNA, 23 nt, Human
aggaguucaagaccagccugggc

SEQ ID NO: 731536 - RNA, 21 nt, Human
aggaugaggaagaggccccag

SEQ ID NO: 731537 - RNA, 20 nt, Human
aggaugcccacagcccuggg

SEQ ID NO: 731538 - RNA, 24 nt, Human
aggauugcuugagccgaggaguuc

SEQ ID NO: 731539 - RNA, 18 nt, Human
aggcagauuauuuuaaug

SEQ ID NO: 731540 - RNA, 21 nt, Human
aggcgugagccaccacaccca

SEQ ID NO: 731541 - RNA, 24 nt, Human
aggcugaggugggaggaucauuug

SEQ ID NO: 731542 - RNA, 24 nt, Human
aggcugaguaggaaggauugcuug

SEQ ID NO: 731543 - RNA, 23 nt, Human
aggcugcagugagccaagaucau

SEQ ID NO: 731544 - RNA, 19 nt, Human
agggagagggaggggacag

SEQ ID NO: 731545 - RNA, 24 nt, Human
agggggccuuccucuaaacagaag

SEQ ID NO: 731546 - RNA, 18 nt, Human
aguaucugggauuacagg

SEQ ID NO: 731547 - RNA, 24 nt, Human
agugcaauggcacgaucuuggcuc

SEQ ID NO: 731548 - RNA, 24 nt, Human
aucaugccacuguacuccagccug

SEQ ID NO: 731549 - RNA, 24 nt, Human
aucauguuggccaggcuggucucg

SEQ ID NO: 731550 - RNA, 18 nt, Human
auccuuuggacacaugua

SEQ ID NO: 731551 - RNA, 24 nt, Human
aucuugcccuguugcccaggcugg

SEQ ID NO: 731552 - RNA, 22 nt, Human
augccacuguacuccagccugg

SEQ ID NO: 731553 - RNA, 22 nt, Human
auggaaaacaacaaaaaaggac

SEQ ID NO: 731554 - RNA, 23 nt, Human
auggaaagccagugaagugacca

SEQ ID NO: 731555 - RNA, 18 nt, Human
auggucagaagccucugc

SEQ ID NO: 731556 - RNA, 24 nt, Human
auuuuuguauuuuugguagagaca

SEQ ID NO: 731557 - RNA, 27 nt, Human
caaaagcacagaccacgaccauggaca

SEQ ID NO: 731558 - RNA, 22 nt, Human
caaacaauucuccugccucagc

SEQ ID NO: 731559 - RNA, 22 nt, Human
caacaaaaaaauagccaggcau

SEQ ID NO: 731560 - RNA, 20 nt, Human
caacacugcagcguccugcc

SEQ ID NO: 731561 - RNA, 25 nt, Human
caagcagagcucaccggauuuggga

SEQ ID NO: 731562 - RNA, 20 nt, Human
cacaaacagaaaauccaaac

SEQ ID NO: 731563 - RNA, 22 nt, Human
cacacaccacgcgccccagaaa

SEQ ID NO: 731564 - RNA, 22 nt, Human
cacacaccacgcgcccccccug

SEQ ID NO: 731565 - RNA, 21 nt, Human
cacacaccuggccuguccucc

SEQ ID NO: 731566 - RNA, 20 nt, Human
cacacaggucagcgguuuua

SEQ ID NO: 731567 - RNA, 23 nt, Human
cacaccacgcgccccagaaacau

SEQ ID NO: 731568 - RNA, 18 nt, Human
cacacggcuccaguagcc

SEQ ID NO: 731569 - RNA, 26 nt, Human
cacagaacuagccagauucauuaggg

SEQ ID NO: 731570 - RNA, 21 nt, Human
cacagcagaaucaacagugac

SEQ ID NO: 731571 - RNA, 18 nt, Human
cacagguaggagggcagg

SEQ ID NO: 731572 - RNA, 21 nt, Human
cacauuuuggguugugcaaca

SEQ ID NO: 731573 - RNA, 19 nt, Human
caccacgcgccccagaaac

SEQ ID NO: 731574 - RNA, 24 nt, Human
caccacguuggcagauucagacuc

SEQ ID NO: 731575 - RNA, 19 nt, Human
caccagggccucucccagg

SEQ ID NO: 731576 - RNA, 19 nt, Human
caccagggccucucccagg

SEQ ID NO: 731577 - RNA, 21 nt, Human
caccaugguaauuuuucacaa

SEQ ID NO: 731578 - RNA, 18 nt, Human
cacguaacccaaaccauc

SEQ ID NO: 731579 - RNA, 22 nt, Human
cacugcaaccuccaucuccggg

SEQ ID NO: 731580 - RNA, 18 nt, Human
cacuggacccaccucugg

SEQ ID NO: 731581 - RNA, 19 nt, Human
cacuguacuccagccuggg

SEQ ID NO: 731582 - RNA, 19 nt, Human
cacuguacuccagccuggg

SEQ ID NO: 731583 - RNA, 19 nt, Human
cacuguacuccagccuggg

SEQ ID NO: 731584 - RNA, 21 nt, Human
cacuguacuccagccugggug

SEQ ID NO: 731585 - RNA, 22 nt, Human
cacuguacuccagccuggguga

SEQ ID NO: 731586 - RNA, 24 nt, Human
cacuguacuccagccugggugaca

SEQ ID NO: 731587 - RNA, 25 nt, Human
cacuguacuccagccugggugacag

SEQ ID NO: 731588 - RNA, 24 nt, Human
cagaacccugcaucgggcuccccu

SEQ ID NO: 731589 - RNA, 23 nt, Human
cagaacccugcaucgggcuccuc

SEQ ID NO: 731590 - RNA, 22 nt, Human
cagaagccucugccuaacacac

SEQ ID NO: 731591 - RNA, 21 nt, Human
cagcacgacugagcaagggca

SEQ ID NO: 731592 - RNA, 24 nt, Human
cagccacaugggaggcugaggugg

SEQ ID NO: 731593 - RNA, 22 nt, Human
cagccagacacagaacuagcca

SEQ ID NO: 731594 - RNA, 20 nt, Human
cagccuccugaguaucuggg

SEQ ID NO: 731595 - RNA, 23 nt, Human
cagcucaacaaaaaaauagccag

SEQ ID NO: 731596 - RNA, 19 nt, Human
caggaccacuggcgcccca

SEQ ID NO: 731597 - RNA, 18 nt, Human
caggcacccaccaucgca

SEQ ID NO: 731598 - RNA, 22 nt, Human
caggcucaccccacggggaccu

SEQ ID NO: 731599 - RNA, 18 nt, Human
cagggcccucuguccccu

SEQ ID NO: 731600 - RNA, 24 nt, Human
caggguuucaucauguuggccagg

SEQ ID NO: 731601 - RNA, 27 nt, Human
caucaaacucaaacauaggggcccgca

SEQ ID NO: 731602 - RNA, 24 nt, Human
caucauguuggccaggcuggucuc

SEQ ID NO: 731603 - RNA, 27 nt, Human
caucauguuggccaggcuggucucgaa

SEQ ID NO: 731604 - RNA, 20 nt, Human
caugggcuccaggcuccuuc

SEQ ID NO: 731605 - RNA, 21 nt, Human
cauguccugcaccccagcagg

SEQ ID NO: 731606 - RNA, 18 nt, Human
cauguuggccaggcuggu

SEQ ID NO: 731607 - RNA, 24 nt, Human
cauguuggccaggcuggucucgaa

SEQ ID NO: 731608 - RNA, 22 nt, Human
ccaaagugcugcgauuagaggc

SEQ ID NO: 731609 - RNA, 24 nt, Human
ccaaagugcugcgauuagaggcgu

SEQ ID NO: 731610 - RNA, 19 nt, Human
ccaaauggaaagccaguga

SEQ ID NO: 731611 - RNA, 20 nt, Human
ccacuguacuccagccuggg

SEQ ID NO: 731612 - RNA, 20 nt, Human
ccacuguacuccagccuggg

SEQ ID NO: 731613 - RNA, 21 nt, Human
ccacuguacuccagccugggu

SEQ ID NO: 731614 - RNA, 21 nt, Human
ccacuguacuccagccugggu

SEQ ID NO: 731615 - RNA, 24 nt, Human
ccacuguacuccagccugggugac

SEQ ID NO: 731616 - RNA, 27 nt, Human
ccagaccacaaucuucaaagaggccuc

SEQ ID NO: 731617 - RNA, 19 nt, Human
ccaggcuccuucugccagg

SEQ ID NO: 731618 - RNA, 19 nt, Human
cccacagguaggagggcag

SEQ ID NO: 731619 - RNA, 24 nt, Human
cccaggcaaagcguagaagcagac

SEQ ID NO: 731620 - RNA, 19 nt, Human
cccaggcuggagugcaaug

SEQ ID NO: 731621 - RNA, 19 nt, Human
ccccagcaugggagccuca

SEQ ID NO: 731622 - RNA, 26 nt, Human
ccccgccaccuccagggcauuuucua

SEQ ID NO: 731623 - RNA, 20 nt, Human
ccccgcgggcgccgcuccuc

SEQ ID NO: 731624 - RNA, 19 nt, Human
ccccggcgccuucacaaca

SEQ ID NO: 731625 - RNA, 21 nt, Human
cccugggguugcggggagcuc

SEQ ID NO: 731626 - RNA, 18 nt, Human
cccuugagugccgugcaa

SEQ ID NO: 731627 - RNA, 18 nt, Human
ccgccgguccagggccuc

SEQ ID NO: 731628 - RNA, 18 nt, Human
ccggcagccacauuacca

SEQ ID NO: 731629 - RNA, 22 nt, Human
ccucagaggcuguuuucacacu

SEQ ID NO: 731630 - RNA, 27 nt, Human
ccucaggccuccugcgcccucgggggu

SEQ ID NO: 731631 - RNA, 25 nt, Human
ccucucccaggcaaagcguagaagc

SEQ ID NO: 731632 - RNA, 19 nt, Human
ccugaguaucugggauuac

SEQ ID NO: 731633 - RNA, 23 nt, Human
ccugaguaucugggauuacaggc

SEQ ID NO: 731634 - RNA, 24 nt, Human
ccugaguaucugggauuacaggca

SEQ ID NO: 731635 - RNA, 23 nt, Human
ccuuaugccagaccacaaucuuc

SEQ ID NO: 731636 - RNA, 24 nt, Human
ccuuggguuuugccucuuggugcc

SEQ ID NO: 731637 - RNA, 18 nt, Human
cgacaaaccgagaaagcc

SEQ ID NO: 731638 - RNA, 21 nt, Human
cgagagccugaugcagucucc

SEQ ID NO: 731639 - RNA, 21 nt, Human
cgccacguaacccaaaccauc

SEQ ID NO: 731640 - RNA, 21 nt, Human
cgccaggaacgaggccaccag

SEQ ID NO: 731641 - RNA, 27 nt, Human
cgccaggaacgaggccaccagggccuc

SEQ ID NO: 731642 - RNA, 18 nt, Human
cgccgcaggcauagcgcu

SEQ ID NO: 731643 - RNA, 19 nt, Human
cggaacaguuuccaaccga

SEQ ID NO: 731644 - RNA, 24 nt, Human
cggaaucuugcccuguugcccagg

SEQ ID NO: 731645 - RNA, 20 nt, Human
cggcggcagcaagcagagcu

SEQ ID NO: 731646 - RNA, 25 nt, Human
cgguaucaacuuaccaccacagcag

SEQ ID NO: 731647 - RNA, 20 nt, Human
cggugggcucugagggagga

SEQ ID NO: 731648 - RNA, 23 nt, Human
cucacaaaucaacaacuccccgc

SEQ ID NO: 731649 - RNA, 23 nt, Human
cucacugcaaccuccaucuccgg

SEQ ID NO: 731650 - RNA, 25 nt, Human
cucagaguccaaaaaagaaaaggaa

SEQ ID NO: 731651 - RNA, 23 nt, Human
cuccgggguucaaacaauucucc

SEQ ID NO: 731652 - RNA, 24 nt, Human
cuccuggccuugugauccgccagc

SEQ ID NO: 731653 - RNA, 19 nt, Human
cucuuggugcccggcugug

SEQ ID NO: 731654 - RNA, 23 nt, Human
cugaguaucugggauuacaggca

SEQ ID NO: 731655 - RNA, 24 nt, Human
cugcaaccuccaucuccgggguuc

SEQ ID NO: 731656 - RNA, 23 nt, Human
cugccucagccuccugaguaucu

SEQ ID NO: 731657 - RNA, 20 nt, Human
cugcugccucccaaagugcu

SEQ ID NO: 731658 - RNA, 18 nt, Human
cuguggccucaugcccag

SEQ ID NO: 731659 - RNA, 24 nt, Human
cuugcccuguugcccaggcuggag

SEQ ID NO: 731660 - RNA, 20 nt, Human
cuuguuuacuucuuccaaca

SEQ ID NO: 731661 - RNA, 22 nt, Human
gaaaccgacuugggcauggaga

SEQ ID NO: 731662 - RNA, 19 nt, Human
gaaacuggaggaaauacuu

SEQ ID NO: 731663 - RNA, 19 nt, Human
gacacacaccacgcgcccc

SEQ ID NO: 731664 - RNA, 23 nt, Human
gacagagcaagacugucucaaaa

SEQ ID NO: 731665 - RNA, 21 nt, Human
gaccucagaacagccugccuc

SEQ ID NO: 731666 - RNA, 18 nt, Human
gacucaggaccacuggcg

SEQ ID NO: 731667 - RNA, 22 nt, Human
gacuguggcccuuuucaaggug

SEQ ID NO: 731668 - RNA, 18 nt, Human
gagacucaggaccacugg

SEQ ID NO: 731669 - RNA, 20 nt, Human
gagagugggacagggugggc

SEQ ID NO: 731670 - RNA, 21 nt, Human
gagagugggacagggugggcg

SEQ ID NO: 731671 - RNA, 23 nt, Human
gagccaccacacccagucuucua

SEQ ID NO: 731672 - RNA, 20 nt, Human
gagcucaccggauuugggac

SEQ ID NO: 731673 - RNA, 18 nt, Human
gaggcugcagugagccaa

SEQ ID NO: 731674 - RNA, 18 nt, Human
gagggauccgagagugga

SEQ ID NO: 731675 - RNA, 21 nt, Human
gaggugggaggaucauuugag

SEQ ID NO: 731676 - RNA, 18 nt, Human
gagugaggauccagcagc

SEQ ID NO: 731677 - RNA, 24 nt, Human
gaucauuugagcccaggaagucga

SEQ ID NO: 731678 - RNA, 18 nt, Human
gauuagaggcgugagcca

SEQ ID NO: 731679 - RNA, 24 nt, Human
gauugcuugagccgaggaguucaa

SEQ ID NO: 731680 - RNA, 18 nt, Human
gcaacaguguucucaucu

SEQ ID NO: 731681 - RNA, 22 nt, Human
gcaaccuccaucuccgggguuc

SEQ ID NO: 731682 - RNA, 20 nt, Human
gcacagcgcuggcggaucca

SEQ ID NO: 731683 - RNA, 23 nt, Human
gcacagcgcuggcggauccaggu

SEQ ID NO: 731684 - RNA, 22 nt, Human
gcacuggacccaccucuggcuc

SEQ ID NO: 731685 - RNA, 20 nt, Human
gccacauuaccacccuggga

SEQ ID NO: 731686 - RNA, 19 nt, Human
gccacuguacuccagccug

SEQ ID NO: 731687 - RNA, 24 nt, Human
gccacuguacuccagccuggguga

SEQ ID NO: 731688 - RNA, 24 nt, Human
gcccaggaagucgaggcugcagug

SEQ ID NO: 731689 - RNA, 19 nt, Human
gcccaggcuggagugcaau

SEQ ID NO: 731690 - RNA, 19 nt, Human
gcccuggagcucugggucc

SEQ ID NO: 731691 - RNA, 27 nt, Human
gcccuguugcccaggcuggagugcaau

SEQ ID NO: 731692 - RNA, 22 nt, Human
gccgcagcagggacuccgggcg

SEQ ID NO: 731693 - RNA, 18 nt, Human
gccgcggagacagcucgg

SEQ ID NO: 731694 - RNA, 27 nt, Human
gccuauauucucgacacuacaggaggc

SEQ ID NO: 731695 - RNA, 20 nt, Human
gccugccucauacucagagu

SEQ ID NO: 731696 - RNA, 22 nt, Human
gcggcggcagcaagcagagcuc

SEQ ID NO: 731697 - RNA, 18 nt, Human
gcuccaggcuccuucugc

SEQ ID NO: 731698 - RNA, 19 nt, Human
gcuggagugcaauggcacg

SEQ ID NO: 731699 - RNA, 22 nt, Human
gcuggugugggaagccgagggc

SEQ ID NO: 731700 - RNA, 19 nt, Human
ggaagggauaggagggcag

SEQ ID NO: 731701 - RNA, 23 nt, Human
ggauugcuugagccgaggaguuc

SEQ ID NO: 731702 - RNA, 21 nt, Human
ggccuccguggucauagcccu

SEQ ID NO: 731703 - RNA, 19 nt, Human
ggcgcgcgguggaggggcc

SEQ ID NO: 731704 - RNA, 18 nt, Human
ggcggcagcaagcagagc

SEQ ID NO: 731705 - RNA, 23 nt, Human
ggcuggucucgaacuccuggccu

SEQ ID NO: 731706 - RNA, 21 nt, Human
gggcagcaugggucaccguga

SEQ ID NO: 731707 - RNA, 20 nt, Human
gggcccucuguccccucccu

SEQ ID NO: 731708 - RNA, 19 nt, Human
gggccugagaggcgcgcgg

SEQ ID NO: 731709 - RNA, 23 nt, Human
gggcgcccgcgggaccggaaaug

SEQ ID NO: 731710 - RNA, 21 nt, Human
gggcuccaggcuccuucugcc

SEQ ID NO: 731711 - RNA, 23 nt, Human
gggguucaaacaauucuccugcc

SEQ ID NO: 731712 - RNA, 22 nt, Human
ggguuucaucauguuggccagg

SEQ ID NO: 731713 - RNA, 23 nt, Human
ggucucgaacuccuggccuugug

SEQ ID NO: 731714 - RNA, 22 nt, Human
guacuccagccugggugacaga

SEQ ID NO: 731715 - RNA, 26 nt, Human
guacuccagccugggugacagacaga

SEQ ID NO: 731716 - RNA, 21 nt, Human
guagagacaggguuucaucau

SEQ ID NO: 731717 - RNA, 22 nt, Human
guagagacaggguuucaucaug

SEQ ID NO: 731718 - RNA, 21 nt, Human
gugacacacaccacgcgcccc

SEQ ID NO: 731719 - RNA, 22 nt, Human
guggacccuggggugucgccca

SEQ ID NO: 731720 - RNA, 23 nt, Human
uaaaaagcugucuuguuggccug

SEQ ID NO: 731721 - RNA, 20 nt, Human
uaaaaugacugucugacuca

SEQ ID NO: 731722 - RNA, 21 nt, Human
uaaaggcagcuacaaagcuga

SEQ ID NO: 731723 - RNA, 23 nt, Human
uaauuuggcugugacguagacug

SEQ ID NO: 731724 - RNA, 24 nt, Human
uaauuuuuguauuuuugguagaga

SEQ ID NO: 731725 - RNA, 24 nt, Human
uacagggaauugggacucucggau

SEQ ID NO: 731726 - RNA, 21 nt, Human
uacuccagccugggugacaga

SEQ ID NO: 731727 - RNA, 26 nt, Human
uacugaaauaggucacaugcaaaaca

SEQ ID NO: 731728 - RNA, 25 nt, Human
uacuuuuaguucuccauaguuuugu

SEQ ID NO: 731729 - RNA, 22 nt, Human
uagaagcagacgcgagagccug

SEQ ID NO: 731730 - RNA, 22 nt, Human
uagacuguugauguaauuuuca

SEQ ID NO: 731731 - RNA, 22 nt, Human
uagagacaggguuucaucaugu

SEQ ID NO: 731732 - RNA, 18 nt, Human
uaggagggcagggugugg

SEQ ID NO: 731733 - RNA, 23 nt, Human
uaguagcccacgccuauauucuc

SEQ ID NO: 731734 - RNA, 24 nt, Human
ucaacacugcagcguccugcccaa

SEQ ID NO: 731735 - RNA, 24 nt, Human
ucaacguaaagaagccgaugaccc

SEQ ID NO: 731736 - RNA, 19 nt, Human
ucacccaggagcgcggcgg

SEQ ID NO: 731737 - RNA, 20 nt, Human
ucacugcaaccuccaucucc

SEQ ID NO: 731738 - RNA, 23 nt, Human
ucacugcaaccuccaucuccggg

SEQ ID NO: 731739 - RNA, 23 nt, Human
ucacugcaaccuccaucuccggg

SEQ ID NO: 731740 - RNA, 26 nt, Human
ucacugcaaccuccaucuccgggguu

SEQ ID NO: 731741 - RNA, 21 nt, Human
ucagaaccaggcgccugcacc

SEQ ID NO: 731742 - RNA, 22 nt, Human
ucagaagccucugccuaacaca

SEQ ID NO: 731743 - RNA, 22 nt, Human
ucagcaaggacggcgcccaggu

SEQ ID NO: 731744 - RNA, 23 nt, Human
ucaugccacuguacuccagccug

SEQ ID NO: 731745 - RNA, 19 nt, Human
uccaaaaaagaaaaggaac

SEQ ID NO: 731746 - RNA, 24 nt, Human
uccacaaacagaaaauccaaacag

SEQ ID NO: 731747 - RNA, 18 nt, Human
uccagccugggugacaga

SEQ ID NO: 731748 - RNA, 20 nt, Human
uccaggcuccuucugccagg

SEQ ID NO: 731749 - RNA, 19 nt, Human
uccauaguuuuguuuggua

SEQ ID NO: 731750 - RNA, 24 nt, Human
uccaucaucauggcagacuuuuuu

SEQ ID NO: 731751 - RNA, 24 nt, Human
ucccaaagugcugcgauuagaggc

SEQ ID NO: 731752 - RNA, 19 nt, Human
ucccaggugagaagccaaa

SEQ ID NO: 731753 - RNA, 21 nt, Human
uccgggguucaaacaauucuc

SEQ ID NO: 731754 - RNA, 24 nt, Human
uccgggguucaaacaauucuccug

SEQ ID NO: 731755 - RNA, 19 nt, Human
uccuccacacacaggucag

SEQ ID NO: 731756 - RNA, 23 nt, Human
uccucccaaguuaaacacgagag

SEQ ID NO: 731757 - RNA, 24 nt, Human
uccugaguaucugggauuacaggc

SEQ ID NO: 731758 - RNA, 19 nt, Human
ucgcagcgcagugagcaca

SEQ ID NO: 731759 - RNA, 24 nt, Human
ucgcugccccgcgggcgccgcucc

SEQ ID NO: 731760 - RNA, 18 nt, Human
ucucaaaaaaauaaaaag

SEQ ID NO: 731761 - RNA, 24 nt, Human
ucuccgccgcaggcauagcgcuag

SEQ ID NO: 731762 - RNA, 18 nt, Human
ucuccugccucagccucc

SEQ ID NO: 731763 - RNA, 19 nt, Human
ucugagugaucacccagga

SEQ ID NO: 731764 - RNA, 20 nt, Human
ucugccgccgguccagggcc

SEQ ID NO: 731765 - RNA, 23 nt, Human
ucuugcccuguugcccaggcugg

SEQ ID NO: 731766 - RNA, 24 nt, Human
ucuugcccuguugcccaggcugga

SEQ ID NO: 731767 - RNA, 23 nt, Human
ugaagcagguguaguagcccacg

SEQ ID NO: 731768 - RNA, 24 nt, Human
ugaagugaccaugggugccaaagg

SEQ ID NO: 731769 - RNA, 20 nt, Human
ugacccaauucgggaggugg

SEQ ID NO: 731770 - RNA, 24 nt, Human
ugaggaaagcagaaaaaaagaaau

SEQ ID NO: 731771 - RNA, 19 nt, Human
ugagggagagggaggggac

SEQ ID NO: 731772 - RNA, 22 nt, Human
ugaggguggaggggagggcacc

SEQ ID NO: 731773 - RNA, 23 nt, Human
ugaggugggaggaucauuugagc

SEQ ID NO: 731774 - RNA, 24 nt, Human
ugaggugggaggaucauuugagcc

SEQ ID NO: 731775 - RNA, 20 nt, Human
ugaguaggaaggauugcuuc

SEQ ID NO: 731776 - RNA, 21 nt, Human
ugcaaugcugcagcuugaggc

SEQ ID NO: 731777 - RNA, 18 nt, Human
ugcccaggcuggagugca

SEQ ID NO: 731778 - RNA, 21 nt, Human
ugcccaggcuggagugcaaug

SEQ ID NO: 731779 - RNA, 24 nt, Human
ugcccaggcuggagugcaauggca

SEQ ID NO: 731780 - RNA, 24 nt, Human
ugcccuguugcccaggcuggagug

SEQ ID NO: 731781 - RNA, 25 nt, Human
ugcccuguugcccaggcuggagugc

SEQ ID NO: 731782 - RNA, 24 nt, Human
ugccucagccuccugaguaucugg

SEQ ID NO: 731783 - RNA, 18 nt, Human
ugccucauacucagaguc

SEQ ID NO: 731784 - RNA, 23 nt, Human
ugccugugguuccagccacaugg

SEQ ID NO: 731785 - RNA, 24 nt, Human
ugccugugguuccagccacauggg

SEQ ID NO: 731786 - RNA, 24 nt, Human
ugcgauuagaggcgugagccacca

SEQ ID NO: 731787 - RNA, 21 nt, Human
ugcucagaaccaggcgccugc

SEQ ID NO: 731788 - RNA, 22 nt, Human
ugcucuguggccucaugcccag

SEQ ID NO: 731789 - RNA, 26 nt, Human
uggaaaacaacaaaaaaggacugcca

SEQ ID NO: 731790 - RNA, 19 nt, Human
uggaggaaauacuucagag

SEQ ID NO: 731791 - RNA, 23 nt, Human
uggagugcaauggcacgaucuug

SEQ ID NO: 731792 - RNA, 24 nt, Human
uggagugcaauggcacgaucuugg

SEQ ID NO: 731793 - RNA, 20 nt, Human
uggcagcuccuugugagggu

SEQ ID NO: 731794 - RNA, 24 nt, Human
uggccaggcuggucucgaacuccu

SEQ ID NO: 731795 - RNA, 21 nt, Human
ugggacaaggauuuuaaaggc

SEQ ID NO: 731796 - RNA, 18 nt, Human
ugggaggcugagguggga

SEQ ID NO: 731797 - RNA, 19 nt, Human
ugggaggcugaggugggag

SEQ ID NO: 731798 - RNA, 24 nt, Human
ugggaggcugaggugggaggauca

SEQ ID NO: 731799 - RNA, 19 nt, Human
ugggauuacaggcacccac

SEQ ID NO: 731800 - RNA, 21 nt, Human
ugggauuacaggcacccacca

SEQ ID NO: 731801 - RNA, 21 nt, Human
ugggauuacaggcacccacca

SEQ ID NO: 731802 - RNA, 22 nt, Human
ugggauuacaggcacccaccau

SEQ ID NO: 731803 - RNA, 18 nt, Human
ugggcgcgugacacacac

SEQ ID NO: 731804 - RNA, 18 nt, Human
uggggaaccggacaggug

SEQ ID NO: 731805 - RNA, 25 nt, Human
uggggagaaguucugagugcccacc

SEQ ID NO: 731806 - RNA, 19 nt, Human
ugggucagguggggagaag

SEQ ID NO: 731807 - RNA, 24 nt, Human
ugguagagacaggguuucaucaug

SEQ ID NO: 731808 - RNA, 19 nt, Human
uggucuggucucuacucca

SEQ ID NO: 731809 - RNA, 24 nt, Human
ugguggcacgugccugugguucca

SEQ ID NO: 731810 - RNA, 18 nt, Human
uggugugggaagccgagg

SEQ ID NO: 731811 - RNA, 21 nt, Human
ugucccacuccuguauccuca

SEQ ID NO: 731812 - RNA, 21 nt, Human
uguccucacaaaucaacaacu

SEQ ID NO: 731813 - RNA, 20 nt, Human
ugugcggcuggaaauuccaa

SEQ ID NO: 731814 - RNA, 19 nt, Human
ugugcugggaaugccauga

SEQ ID NO: 731815 - RNA, 20 nt, Human
uguugcccaggcuggagugc

SEQ ID NO: 731816 - RNA, 22 nt, Human
uguugcccaggcuggagugcaa

SEQ ID NO: 731817 - RNA, 26 nt, Human
uguuugguauaaaggaaauauaauuu

SEQ ID NO: 731818 - RNA, 24 nt, Human
uucaaacaauucuccugccucagc

SEQ ID NO: 731819 - RNA, 21 nt, Human
uucaaucuguccucacaaauc

SEQ ID NO: 731820 - RNA, 21 nt, Human
uuccuagaagcucaccuguga

SEQ ID NO: 731821 - RNA, 22 nt, Human
uugagccgaggaguucaagacc

SEQ ID NO: 731822 - RNA, 18 nt, Human
uugcccaggcuggagugc

SEQ ID NO: 731823 - RNA, 24 nt, Human
uugcccuguugcccaggcuggagu

SEQ ID NO: 731824 - RNA, 23 nt, Human
uugcucuguuucugaaugauuuu

SEQ ID NO: 731825 - RNA, 23 nt, Human
uugcuugagccgaggaguucaag

SEQ ID NO: 731826 - RNA, 24 nt, Human
uugguagagacaggguuucaucau

SEQ ID NO: 731827 - RNA, 19 nt, Human
uuggugcccggcugugcug

SEQ ID NO: 731828 - RNA, 23 nt, Human
uuggugcccggcugugcugggaa

SEQ ID NO: 731829 - RNA, 23 nt, Human
uugugcaacaguguucucaucuu

SEQ ID NO: 731830 - RNA, 24 nt, Human
uuucaucauguuggccaggcuggu

SEQ ID NO: 731831 - RNA, 24 nt, Human
uuugccucuuggugcccggcugug

SEQ ID NO: 731832 - RNA, 18 nt, Human
uuuguauuucccagguga

SEQ ID NO: 731833 - RNA, 22 nt, Human
uuuuugguagagacaggguuuc

SEQ ID NO: 731834 - RNA, 23 nt, Human
uuuuugguagagacaggguuuca

SEQ ID NO: 731835 - RNA, 20 nt, Human
uuuuuguauuuuugguagag

SEQ ID NO: 731836 - RNA, 21 nt, Human
aaacacgauggugaacagacc

SEQ ID NO: 731837 - RNA, 24 nt, Human
aaacacgauggugaacagaccagg

SEQ ID NO: 731838 - RNA, 23 nt, Human
aaagcaaacagaggaggcggccc

SEQ ID NO: 731839 - RNA, 21 nt, Human
aacagaaauguacaacauggg

SEQ ID NO: 731840 - RNA, 21 nt, Human
aacccgcucauaagcuucgaa

SEQ ID NO: 731841 - RNA, 22 nt, Human
aaccuuguguuuuccccaugug

SEQ ID NO: 731842 - RNA, 23 nt, Human
aagacuccuucuauccagggcac

SEQ ID NO: 731843 - RNA, 20 nt, Human
aagcaguugccuguuuggga

SEQ ID NO: 731844 - RNA, 23 nt, Human
aagucugccugcaggacccugcc

SEQ ID NO: 731845 - RNA, 18 nt, Human
aaucuuucuagcagcucc

SEQ ID NO: 731846 - RNA, 19 nt, Human
acaagccaugagccaaggc

SEQ ID NO: 731847 - RNA, 21 nt, Human
acagaggaggcggcccuggag

SEQ ID NO: 731848 - RNA, 25 nt, Human
acagcaaaaaauaaaaauaacaaaa

SEQ ID NO: 731849 - RNA, 23 nt, Human
acaggcaacaaccaggggauaug

SEQ ID NO: 731850 - RNA, 21 nt, Human
acauggaccuuggacaucccu

SEQ ID NO: 731851 - RNA, 19 nt, Human
accaggcacaggcaacaac

SEQ ID NO: 731852 - RNA, 19 nt, Human
accugcuggugucucccuc

SEQ ID NO: 731853 - RNA, 22 nt, Human
accuugugcuagucacaucaug

SEQ ID NO: 731854 - RNA, 18 nt, Human
accuuguguuuuccccau

SEQ ID NO: 731855 - RNA, 22 nt, Human
accuuguguuuuccccaugugg

SEQ ID NO: 731856 - RNA, 25 nt, Human
acuaugcugaagaggcccaagggca

SEQ ID NO: 731857 - RNA, 20 nt, Human
acuguuggggccaguugggg

SEQ ID NO: 731858 - RNA, 21 nt, Human
agaaaagaguuggugggcagg

SEQ ID NO: 731859 - RNA, 21 nt, Human
agacacaggcacccccaaucu

SEQ ID NO: 731860 - RNA, 18 nt, Human
agagagagagaagcugga

SEQ ID NO: 731861 - RNA, 21 nt, Human
agagggcagggaaggaucugg

SEQ ID NO: 731862 - RNA, 21 nt, Human
agcaaaaaauaaaaauaacaa

SEQ ID NO: 731863 - RNA, 27 nt, Human
agcaaggagagcagcaaaaccacucgg

SEQ ID NO: 731864 - RNA, 21 nt, Human
agccuaaugaagccugcagcc

SEQ ID NO: 731865 - RNA, 18 nt, Human
agcugcagagucgaagga

SEQ ID NO: 731866 - RNA, 21 nt, Human
aggcaacuccaugcgcugccu

SEQ ID NO: 731867 - RNA, 19 nt, Human
agggaacuguuggggccag

SEQ ID NO: 731868 - RNA, 21 nt, Human
agguggggcauccccggcccg

SEQ ID NO: 731869 - RNA, 24 nt, Human
aguggagcugggggccugcccccu

SEQ ID NO: 731870 - RNA, 22 nt, Human
auggggcuuaaauaacuuucau

SEQ ID NO: 731871 - RNA, 23 nt, Human
caaaauaauaaauaacugaagua

SEQ ID NO: 731872 - RNA, 19 nt, Human
caaagcaaacagaggaggc

SEQ ID NO: 731873 - RNA, 24 nt, Human
caaaggcuugggugugccaggcuc

SEQ ID NO: 731874 - RNA, 21 nt, Human
caagaucaugagugcugggga

SEQ ID NO: 731875 - RNA, 19 nt, Human
cacauaccacagguccggg

SEQ ID NO: 731876 - RNA, 21 nt, Human
caccucccagcagacacagcc

SEQ ID NO: 731877 - RNA, 21 nt, Human
cacucugaccaccucaaaggc

SEQ ID NO: 731878 - RNA, 20 nt, Human
cacugaccaggaggcuaugc

SEQ ID NO: 731879 - RNA, 26 nt, Human
cagaaaaugggcaugaugaugagcac

SEQ ID NO: 731880 - RNA, 21 nt, Human
cagaccaggcacaggcaacaa

SEQ ID NO: 731881 - RNA, 29 nt, Human
cagcagacacagcccccacgcugcuuccu

SEQ ID NO: 731882 - RNA, 20 nt, Human
cagcccccacgcugcuuccu

SEQ ID NO: 731883 - RNA, 22 nt, Human
cagcggacucccuuugggauuu

SEQ ID NO: 731884 - RNA, 19 nt, Human
caggacagcagagcuggcc

SEQ ID NO: 731885 - RNA, 18 nt, Human
caggcacaugagaaaguc

SEQ ID NO: 731886 - RNA, 24 nt, Human
caggcacccccaaucucacuuugg

SEQ ID NO: 731887 - RNA, 22 nt, Human
caggccccggaacggaggaagg

SEQ ID NO: 731888 - RNA, 20 nt, Human
cagggcccuggcacaggacu

SEQ ID NO: 731889 - RNA, 25 nt, Human
caggggauaugccugcucccagccc

SEQ ID NO: 731890 - RNA, 27 nt, Human
cagggugaggccacucccagacccacc

SEQ ID NO: 731891 - RNA, 22 nt, Human
cagugcagucaccccagguggg

SEQ ID NO: 731892 - RNA, 19 nt, Human
cauacacuauguacagcca

SEQ ID NO: 731893 - RNA, 21 nt, Human
ccacacaaacacgauggugaa

SEQ ID NO: 731894 - RNA, 22 nt, Human
ccaccacaucaggcacaugaga

SEQ ID NO: 731895 - RNA, 23 nt, Human
ccaccucccagcagacacagccc

SEQ ID NO: 731896 - RNA, 24 nt, Human
ccacgcugcuuccuacguggccca

SEQ ID NO: 731897 - RNA, 24 nt, Human
ccagacccaccgcugucccuuccc

SEQ ID NO: 731898 - RNA, 18 nt, Human
ccaggcacaggcaacaac

SEQ ID NO: 731899 - RNA, 23 nt, Human
ccagucuuaagaugggcacagaa

SEQ ID NO: 731900 - RNA, 20 nt, Human
cccaccgcugucccuuccca

SEQ ID NO: 731901 - RNA, 25 nt, Human
cccagaauuaggacaagccaugagc

SEQ ID NO: 731902 - RNA, 19 nt, Human
cccagacaggcagcagggc

SEQ ID NO: 731903 - RNA, 22 nt, Human
cccagacccaccgcugucccuu

SEQ ID NO: 731904 - RNA, 24 nt, Human
cccagagcugagagcuagcagggc

SEQ ID NO: 731905 - RNA, 18 nt, Human
cccagccgcccacaccug

SEQ ID NO: 731906 - RNA, 18 nt, Human
ccccagggaacuguuggg

SEQ ID NO: 731907 - RNA, 23 nt, Human
ccccagggaacuguuggggccag

SEQ ID NO: 731908 - RNA, 24 nt, Human
ccccagguggggcauccccggccc

SEQ ID NO: 731909 - RNA, 20 nt, Human
ccccauccaagccaccuccc

SEQ ID NO: 731910 - RNA, 25 nt, Human
cccccuaacauggaccuuggacauc

SEQ ID NO: 731911 - RNA, 21 nt, Human
cccccugucccagacacaggc

SEQ ID NO: 731912 - RNA, 18 nt, Human
ccccggggccugggcugu

SEQ ID NO: 731913 - RNA, 22 nt, Human
ccccggggccugggcugugggg

SEQ ID NO: 731914 - RNA, 19 nt, Human
cccugaaagagugggcaga

SEQ ID NO: 731915 - RNA, 21 nt, Human
cccuggcacaggacuaugcug

SEQ ID NO: 731916 - RNA, 20 nt, Human
ccuagaggccagggguagcu

SEQ ID NO: 731917 - RNA, 19 nt, Human
ccuccagucuuaagauggg

SEQ ID NO: 731918 - RNA, 20 nt, Human
ccucccagcagacacagccc

SEQ ID NO: 731919 - RNA, 19 nt, Human
ccugcaaggcccucaggac

SEQ ID NO: 731920 - RNA, 23 nt, Human
ccugcagggcaggcuccugucgg

SEQ ID NO: 731921 - RNA, 20 nt, Human
ccugcuggugucucccucca

SEQ ID NO: 731922 - RNA, 18 nt, Human
cgggggcgcugggcacaa

SEQ ID NO: 731923 - RNA, 21 nt, Human
cucgcagggccauaagaucac

SEQ ID NO: 731924 - RNA, 20 nt, Human
cugaccaucuccccaaagga

SEQ ID NO: 731925 - RNA, 25 nt, Human
cuggcacaggacuaugcugaagagg

SEQ ID NO: 731926 - RNA, 21 nt, Human
cuggcccccaagagcugaggg

SEQ ID NO: 731927 - RNA, 18 nt, Human
cuguccuccccauccaag

SEQ ID NO: 731928 - RNA, 21 nt, Human
gacaagccaugagccaaggcc

SEQ ID NO: 731929 - RNA, 18 nt, Human
gacacauaccacaggucc

SEQ ID NO: 731930 - RNA, 18 nt, Human
gagcgcccccgccuuccc

SEQ ID NO: 731931 - RNA, 19 nt, Human
gaggccacucccagaccca

SEQ ID NO: 731932 - RNA, 18 nt, Human
gagugagaagacacaugu

SEQ ID NO: 731933 - RNA, 26 nt, Human
gcaaagcaaacagaggaggcggcccu

SEQ ID NO: 731934 - RNA, 22 nt, Human
gcagagcuggccccgccgugag

SEQ ID NO: 731935 - RNA, 21 nt, Human
gcagggcaggcucugcccaca

SEQ ID NO: 731936 - RNA, 20 nt, Human
gcaggggacagaacaaaggu

SEQ ID NO: 731937 - RNA, 18 nt, Human
gccaggacagcagagcug

SEQ ID NO: 731938 - RNA, 20 nt, Human
gccuguuugggauggcaaag

SEQ ID NO: 731939 - RNA, 18 nt, Human
gcucacuagggcuaggac

SEQ ID NO: 731940 - RNA, 18 nt, Human
gcucccagcccagaccac

SEQ ID NO: 731941 - RNA, 19 nt, Human
gcugccuuugagaguucug

SEQ ID NO: 731942 - RNA, 20 nt, Human
gcugccuuugagaguucugg

SEQ ID NO: 731943 - RNA, 24 nt, Human
ggaaucuuucuagcagcuccaccu

SEQ ID NO: 731944 - RNA, 22 nt, Human
ggacagagccaacgugggggga

SEQ ID NO: 731945 - RNA, 18 nt, Human
ggacagggcccuggcaca

SEQ ID NO: 731946 - RNA, 22 nt, Human
ggacuguggggcagaaccccgg

SEQ ID NO: 731947 - RNA, 20 nt, Human
ggagaggagggccaggccca

SEQ ID NO: 731948 - RNA, 25 nt, Human
ggaggacagcaggagccuaaugaag

SEQ ID NO: 731949 - RNA, 24 nt, Human
ggcaacaaccaggggauaugccug

SEQ ID NO: 731950 - RNA, 19 nt, Human
ggcccgggggugggagcuc

SEQ ID NO: 731951 - RNA, 21 nt, Human
ggccggggcagcggacucccu

SEQ ID NO: 731952 - RNA, 23 nt, Human
ggccuagaggccagggguagcua

SEQ ID NO: 731953 - RNA, 22 nt, Human
ggccugggcuguggggugagcg

SEQ ID NO: 731954 - RNA, 19 nt, Human
ggcugaagguggcacucug

SEQ ID NO: 731955 - RNA, 19 nt, Human
gggaagaaacuucaagucc

SEQ ID NO: 731956 - RNA, 18 nt, Human
gggaaucaguccaagcuc

SEQ ID NO: 731957 - RNA, 18 nt, Human
gggauaugccugcuccca

SEQ ID NO: 731958 - RNA, 18 nt, Human
gggcagggaaggaucugg

SEQ ID NO: 731959 - RNA, 20 nt, Human
gggcauggcugguguaaggc

SEQ ID NO: 731960 - RNA, 20 nt, Human
gggcugaagguggcacucug

SEQ ID NO: 731961 - RNA, 20 nt, Human
gggcuggggaggggcggggg

SEQ ID NO: 731962 - RNA, 21 nt, Human
gggcuggggaggggcgggggu

SEQ ID NO: 731963 - RNA, 18 nt, Human
ggggcuuaaauaacuuuc

SEQ ID NO: 731964 - RNA, 19 nt, Human
gucaagucugccugcagga

SEQ ID NO: 731965 - RNA, 24 nt, Human
gucaggagaggagggccaggccca

SEQ ID NO: 731966 - RNA, 20 nt, Human
gugagaagacacauguggug

SEQ ID NO: 731967 - RNA, 22 nt, Human
gugcagucaccccagguggggc

SEQ ID NO: 731968 - RNA, 19 nt, Human
guggggggauccucccggg

SEQ ID NO: 731969 - RNA, 18 nt, Human
gugucucccuccaccaca

SEQ ID NO: 731970 - RNA, 22 nt, Human
uaaauaacuuucauacacuaug

SEQ ID NO: 731971 - RNA, 22 nt, Human
uaacaaaauaauaaauaacuga

SEQ ID NO: 731972 - RNA, 22 nt, Human
uaggaacagaaauguacaacau

SEQ ID NO: 731973 - RNA, 18 nt, Human
uaucaaagaagaaacaga

SEQ ID NO: 731974 - RNA, 20 nt, Human
uaucaaagaagaaacagaac

SEQ ID NO: 731975 - RNA, 18 nt, Human
ucaggggucuucucugau

SEQ ID NO: 731976 - RNA, 21 nt, Human
ucaggggucuucucugauccu

SEQ ID NO: 731977 - RNA, 23 nt, Human
ucaugagugcuggggauggggca

SEQ ID NO: 731978 - RNA, 22 nt, Human
uccaacucucaugaagcacaac

SEQ ID NO: 731979 - RNA, 19 nt, Human
uccaagccaccucccagca

SEQ ID NO: 731980 - RNA, 24 nt, Human
uccccgcaaccuuguguuuucccc

SEQ ID NO: 731981 - RNA, 21 nt, Human
ucccuaacgucacugcagcca

SEQ ID NO: 731982 - RNA, 22 nt, Human
ucccuccaccacaucaggcaca

SEQ ID NO: 731983 - RNA, 21 nt, Human
ucccugaaagagugggcagag

SEQ ID NO: 731984 - RNA, 18 nt, Human
ucccugggggcugugucg

SEQ ID NO: 731985 - RNA, 19 nt, Human
ucccugggggcugugucgg

SEQ ID NO: 731986 - RNA, 19 nt, Human
ucucaggggucuucucuga

SEQ ID NO: 731987 - RNA, 20 nt, Human
ucucgcagggccauaagauc

SEQ ID NO: 731988 - RNA, 21 nt, Human
ucucgcagggccauaagauca

SEQ ID NO: 731989 - RNA, 21 nt, Human
ugaagagauuccuaggcugaa

SEQ ID NO: 731990 - RNA, 26 nt, Human
ugaauaaccagagagagagaagcugg

SEQ ID NO: 731991 - RNA, 20 nt, Human
ugacccaucagaaacagcag

SEQ ID NO: 731992 - RNA, 23 nt, Human
ugacccaucagaaacagcagaaa

SEQ ID NO: 731993 - RNA, 23 nt, Human
ugagcaccucucgcagggccaac

SEQ ID NO: 731994 - RNA, 23 nt, Human
ugagugcuggggauggggcaggg

SEQ ID NO: 731995 - RNA, 18 nt, Human
ugaguggagcugggggcc

SEQ ID NO: 731996 - RNA, 20 nt, Human
ugaguggagcugggggccug

SEQ ID NO: 731997 - RNA, 22 nt, Human
ugauaggggcuucaagaucaug

SEQ ID NO: 731998 - RNA, 25 nt, Human
ugcaaaaucuguccuugcacacaag

SEQ ID NO: 731999 - RNA, 22 nt, Human
ugcaaagcaaacagaggaggcg

SEQ ID NO: 732000 - RNA, 21 nt, Human
ugcaggacccugccauugugc

SEQ ID NO: 732001 - RNA, 22 nt, Human
ugccagaggguuaaggguuagc

SEQ ID NO: 732002 - RNA, 20 nt, Human
ugccaggacagcagagcugg

SEQ ID NO: 732003 - RNA, 27 nt, Human
ugcccucugcccaggccacacaucccc

SEQ ID NO: 732004 - RNA, 21 nt, Human
ugccuuugagaguucuggcug

SEQ ID NO: 732005 - RNA, 18 nt, Human
ugggaagaaagucacugc

SEQ ID NO: 732006 - RNA, 20 nt, Human
ugggcagagaauccaacucc

SEQ ID NO: 732007 - RNA, 21 nt, Human
uggggaggggcgggggucagg

SEQ ID NO: 732008 - RNA, 22 nt, Human
uggggaggggcgggggucaggg

SEQ ID NO: 732009 - RNA, 23 nt, Human
uggggaggggcgggggucagggu

SEQ ID NO: 732010 - RNA, 18 nt, Human
uggggauggggcagggga

SEQ ID NO: 732011 - RNA, 24 nt, Human
uggggcaggggacagaacaaaggu

SEQ ID NO: 732012 - RNA, 18 nt, Human
uggggcauccccggcccg

SEQ ID NO: 732013 - RNA, 20 nt, Human
uggggcuuaaauaacuuuca

SEQ ID NO: 732014 - RNA, 20 nt, Human
ugggggacugcagggcuggg

SEQ ID NO: 732015 - RNA, 19 nt, Human
ugggggcugugucggggac

SEQ ID NO: 732016 - RNA, 20 nt, Human
uggugccgcgggcauggcug

SEQ ID NO: 732017 - RNA, 18 nt, Human
uggugggcagggcagggc

SEQ ID NO: 732018 - RNA, 24 nt, Human
uggugggcagggcagggcccugau

SEQ ID NO: 732019 - RNA, 18 nt, Human
ugucaagucugccugcag

SEQ ID NO: 732020 - RNA, 19 nt, Human
ugucaagucugccugcagg

SEQ ID NO: 732021 - RNA, 25 nt, Human
ugucccagacacaggcacccccaau

SEQ ID NO: 732022 - RNA, 27 nt, Human
uguccuccccauccaagccaccuccca

SEQ ID NO: 732023 - RNA, 21 nt, Human
uguggggcagaaccccggggc

SEQ ID NO: 732024 - RNA, 23 nt, Human
uguggggcagaaccccggggccu

SEQ ID NO: 732025 - RNA, 24 nt, Human
uguggggcagaaccccggggccug

SEQ ID NO: 732026 - RNA, 23 nt, Human
uguggggugagcgcccccgccuu

SEQ ID NO: 732027 - RNA, 20 nt, Human
uguuggggccaguuggggcu

SEQ ID NO: 732028 - RNA, 20 nt, Human
uuaaggguuagcugcaaggg

SEQ ID NO: 732029 - RNA, 24 nt, Human
uucaagaucaugagugcuggggau

SEQ ID NO: 732030 - RNA, 20 nt, Human
uuccccaugugguuuugugc

SEQ ID NO: 732031 - RNA, 19 nt, Human
uucccugcaaggcccucag

SEQ ID NO: 732032 - RNA, 21 nt, Human
uucgugcaagaacacgccuug

SEQ ID NO: 732033 - RNA, 23 nt, Human
uucuagcagcuccaccuuggccc

SEQ ID NO: 732034 - RNA, 23 nt, Human
uuucccugcaaaaucuguccuug

SEQ ID NO: 732035 - RNA, 24 nt, Human
aaagagacagggggagcaggugag

SEQ ID NO: 732036 - RNA, 22 nt, Human
aacgccgggaaaacugccuggc

SEQ ID NO: 732037 - RNA, 23 nt, Human
aacugccuggcagggccagccuc

SEQ ID NO: 732038 - RNA, 22 nt, Human
aagaccacuuccugcggaagcc

SEQ ID NO: 732039 - RNA, 21 nt, Human
aagagacagggggagcaggug

SEQ ID NO: 732040 - RNA, 24 nt, Human
aagagucugagacaggcaugggug

SEQ ID NO: 732041 - RNA, 18 nt, Human
aagcagaagagagagagg

SEQ ID NO: 732042 - RNA, 19 nt, Human
aagcagcgaagcccugggg

SEQ ID NO: 732043 - RNA, 18 nt, Human
aagccagcccugagauca

SEQ ID NO: 732044 - RNA, 21 nt, Human
aagccccuccugugggccccg

SEQ ID NO: 732045 - RNA, 19 nt, Human
aaggagggggauaggaggg

SEQ ID NO: 732046 - RNA, 19 nt, Human
aaguagagggguggggggu

SEQ ID NO: 732047 - RNA, 19 nt, Human
accacagccugcaccugcu

SEQ ID NO: 732048 - RNA, 25 nt, Human
acccaagucccagggccucaagcuc

SEQ ID NO: 732049 - RNA, 24 nt, Human
acccuaggccucacugccugaguu

SEQ ID NO: 732050 - RNA, 21 nt, Human
accugccccucacucuucacc

SEQ ID NO: 732051 - RNA, 20 nt, Human
accugggcugcaguucguca

SEQ ID NO: 732052 - RNA, 23 nt, Human
accugggcugcaguucgucaggg

SEQ ID NO: 732053 - RNA, 19 nt, Human
acgcagcacucagcaggcc

SEQ ID NO: 732054 - RNA, 22 nt, Human
acgcuagcaaggaggguucccc

SEQ ID NO: 732055 - RNA, 19 nt, Human
acggaggcagcgugggugg

SEQ ID NO: 732056 - RNA, 21 nt, Human
agacaaaacagaggugucuga

SEQ ID NO: 732057 - RNA, 21 nt, Human
agacagcacccaccgcgcccc

SEQ ID NO: 732058 - RNA, 22 nt, Human
agacagcacccaccgcgccccc

SEQ ID NO: 732059 - RNA, 23 nt, Human
agacagcacccaccgcgccccca

SEQ ID NO: 732060 - RNA, 24 nt, Human
agacuggagccggugccaggggga

SEQ ID NO: 732061 - RNA, 25 nt, Human
agagagaaggagggggauaggaggg

SEQ ID NO: 732062 - RNA, 18 nt, Human
agaggagcagaggcccgg

SEQ ID NO: 732063 - RNA, 18 nt, Human
agagggaggcagggagag

SEQ ID NO: 732064 - RNA, 21 nt, Human
agauagaggagcagaggcccg

SEQ ID NO: 732065 - RNA, 21 nt, Human
agauggccagcacuugaauca

SEQ ID NO: 732066 - RNA, 23 nt, Human
agcaccuggccacagccaaucuu

SEQ ID NO: 732067 - RNA, 21 nt, Human
agccaggcccccacagcagcc

SEQ ID NO: 732068 - RNA, 24 nt, Human
agccccuguccugcccucucccau

SEQ ID NO: 732069 - RNA, 21 nt, Human
agcccgaagguugggguugga

SEQ ID NO: 732070 - RNA, 21 nt, Human
agccuggucuagugggaggcc

SEQ ID NO: 732071 - RNA, 21 nt, Human
agcgaagcccuggggcccagg

SEQ ID NO: 732072 - RNA, 19 nt, Human
agcugcagccagcaggacc

SEQ ID NO: 732073 - RNA, 25 nt, Human
aggaaagcuuggucaggggggucug

SEQ ID NO: 732074 - RNA, 20 nt, Human
aggacccagcacuggggaca

SEQ ID NO: 732075 - RNA, 22 nt, Human
aggagcgccgcacaaaaccagg

SEQ ID NO: 732076 - RNA, 19 nt, Human
aggaggggcacaguggggg

SEQ ID NO: 732077 - RNA, 22 nt, Human
aggaggugaguuuggggaagcg

SEQ ID NO: 732078 - RNA, 27 nt, Human
aggagucggaucagggugguguccccc

SEQ ID NO: 732079 - RNA, 26 nt, Human
aggcagccccagggaggccggaaggg

SEQ ID NO: 732080 - RNA, 19 nt, Human
aggcaggaguagcuggucc

SEQ ID NO: 732081 - RNA, 18 nt, Human
aggccucacugccugagu

SEQ ID NO: 732082 - RNA, 19 nt, Human
aggcggccacagcaguggc

SEQ ID NO: 732083 - RNA, 21 nt, Human
aggcggccacccagcugaacc

SEQ ID NO: 732084 - RNA, 22 nt, Human
aggcuguggcucagucugcggg

SEQ ID NO: 732085 - RNA, 24 nt, Human
agggagcccaaugaucuccaccuc

SEQ ID NO: 732086 - RNA, 23 nt, Human
agggagggaggcagugguccagg

SEQ ID NO: 732087 - RNA, 24 nt, Human
agggaggggaggggaggagaggcc

SEQ ID NO: 732088 - RNA, 19 nt, Human
agggaggugggaaugggaa

SEQ ID NO: 732089 - RNA, 25 nt, Human
aggggcaggagggaggcaggggcgg

SEQ ID NO: 732090 - RNA, 21 nt, Human
aggggcccagcaugucaggcc

SEQ ID NO: 732091 - RNA, 18 nt, Human
agggggagggagggaggc

SEQ ID NO: 732092 - RNA, 21 nt, Human
agggggauaggaggggcacag

SEQ ID NO: 732093 - RNA, 18 nt, Human
agggguggaggcugcaag

SEQ ID NO: 732094 - RNA, 22 nt, Human
agguggcaggucugggcgggca

SEQ ID NO: 732095 - RNA, 21 nt, Human
agguggcccaggguccggggc

SEQ ID NO: 732096 - RNA, 20 nt, Human
augauggcugguggcagggg

SEQ ID NO: 732097 - RNA, 22 nt, Human
augguuggcaaggacagggagg

SEQ ID NO: 732098 - RNA, 20 nt, Human
caaaacagaggugucugaga

SEQ ID NO: 732099 - RNA, 19 nt, Human
caaaaccagggcccccugc

SEQ ID NO: 732100 - RNA, 22 nt, Human
caaacacccagcccagacccag

SEQ ID NO: 732101 - RNA, 24 nt, Human
caagaccaaagagacagggggagc

SEQ ID NO: 732102 - RNA, 22 nt, Human
caagcucagacaggagggcugg

SEQ ID NO: 732103 - RNA, 21 nt, Human
caagucccagggccucaagcu

SEQ ID NO: 732104 - RNA, 24 nt, Human
cacagcagccccucuugagauaga

SEQ ID NO: 732105 - RNA, 20 nt, Human
cacagucccggccccagacc

SEQ ID NO: 732106 - RNA, 22 nt, Human
caccaggaaguagagggguggg

SEQ ID NO: 732107 - RNA, 21 nt, Human
caccagggaaaggcagcccca

SEQ ID NO: 732108 - RNA, 21 nt, Human
caccccccugcaggggcgccu

SEQ ID NO: 732109 - RNA, 23 nt, Human
cacccccuccccagccgggccca

SEQ ID NO: 732110 - RNA, 20 nt, Human
cacggccgaggccugcuguc

SEQ ID NO: 732111 - RNA, 27 nt, Human
cacuggcguggcacucccugguugugu

SEQ ID NO: 732112 - RNA, 25 nt, Human
cagaaccaacagccugaggguccga

SEQ ID NO: 732113 - RNA, 24 nt, Human
cagaggcccgcagcccccggcgcu

SEQ ID NO: 732114 - RNA, 23 nt, Human
cagaggcccggggaggggacccu

SEQ ID NO: 732115 - RNA, 21 nt, Human
cagagggcacugggccccagc

SEQ ID NO: 732116 - RNA, 21 nt, Human
cagauccuaaaacgccgggaa

SEQ ID NO: 732117 - RNA, 23 nt, Human
cagaugcccccgagacagcaccc

SEQ ID NO: 732118 - RNA, 18 nt, Human
cagcacccaccgcgcccc

SEQ ID NO: 732119 - RNA, 24 nt, Human
cagcaggaguagccaggugcagcg

SEQ ID NO: 732120 - RNA, 18 nt, Human
cagcccccuccccagccc

SEQ ID NO: 732121 - RNA, 23 nt, Human
cagcccccuccccagcccccaca

SEQ ID NO: 732122 - RNA, 23 nt, Human
cagccugucgggccucaaaccag

SEQ ID NO: 732123 - RNA, 20 nt, Human
cagcucaaagccagggcagc

SEQ ID NO: 732124 - RNA, 22 nt, Human
cagcugaacccuggaucugccu

SEQ ID NO: 732125 - RNA, 23 nt, Human
cagcugagccgaggaggucacau

SEQ ID NO: 732126 - RNA, 22 nt, Human
cagcuuccugauucaagauccc

SEQ ID NO: 732127 - RNA, 23 nt, Human
caggagacgcccagcagcugcac

SEQ ID NO: 732128 - RNA, 20 nt, Human
caggcccccacagcagcccc

SEQ ID NO: 732129 - RNA, 22 nt, Human
cagggcccccugccacccccuc

SEQ ID NO: 732130 - RNA, 20 nt, Human
caggguccggggcuggcucc

SEQ ID NO: 732131 - RNA, 26 nt, Human
cagguccugagacccacagaggggcc

SEQ ID NO: 732132 - RNA, 18 nt, Human
cagucucugcugccgcuc

SEQ ID NO: 732133 - RNA, 21 nt, Human
cagucucugcugccgcuccug

SEQ ID NO: 732134 - RNA, 24 nt, Human
caguguccccagggcccacucagg

SEQ ID NO: 732135 - RNA, 27 nt, Human
caugccagaugcccccgagacagcacc

SEQ ID NO: 732136 - RNA, 20 nt, Human
ccaaagagacagggggagca

SEQ ID NO: 732137 - RNA, 24 nt, Human
ccaacagcccccuccccagccccc

SEQ ID NO: 732138 - RNA, 21 nt, Human
ccacagcaguggcguggggag

SEQ ID NO: 732139 - RNA, 19 nt, Human
ccaccacugacggucagag

SEQ ID NO: 732140 - RNA, 18 nt, Human
ccacuugcccggcccgug

SEQ ID NO: 732141 - RNA, 20 nt, Human
ccagacccucagcaagagca

SEQ ID NO: 732142 - RNA, 20 nt, Human
ccagcaccuggccacagcca

SEQ ID NO: 732143 - RNA, 21 nt, Human
ccagccccuguccugcccucu

SEQ ID NO: 732144 - RNA, 23 nt, Human
ccaggcuccccaguucuccaucc

SEQ ID NO: 732145 - RNA, 22 nt, Human
ccagggcccccugccacccccu

SEQ ID NO: 732146 - RNA, 21 nt, Human
ccaggugggguugaacccguu

SEQ ID NO: 732147 - RNA, 19 nt, Human
ccaguccacgcccugugcc

SEQ ID NO: 732148 - RNA, 24 nt, Human
ccaucccuggggccagggaccugg

SEQ ID NO: 732149 - RNA, 21 nt, Human
cccaagagucugagacaggca

SEQ ID NO: 732150 - RNA, 23 nt, Human
cccaaugaucuccaccuccacaa

SEQ ID NO: 732151 - RNA, 20 nt, Human
cccaaugaucuccaccuccc

SEQ ID NO: 732152 - RNA, 20 nt, Human
cccacauaggagacuggagc

SEQ ID NO: 732153 - RNA, 23 nt, Human
cccaccccugcccugggccucca

SEQ ID NO: 732154 - RNA, 21 nt, Human
cccaccgcgcccccaugacga

SEQ ID NO: 732155 - RNA, 27 nt, Human
cccagacccagguccugagacccacca

SEQ ID NO: 732156 - RNA, 21 nt, Human
cccagccuggcccaccacagc

SEQ ID NO: 732157 - RNA, 20 nt, Human
cccaggaggugaguuugggg

SEQ ID NO: 732158 - RNA, 24 nt, Human
cccaguccacgcccugugccgcac

SEQ ID NO: 732159 - RNA, 20 nt, Human
ccccagcccccacauaggag

SEQ ID NO: 732160 - RNA, 18 nt, Human
ccccagggcccacucagg

SEQ ID NO: 732161 - RNA, 24 nt, Human
cccccacagcagccccucuugaga

SEQ ID NO: 732162 - RNA, 24 nt, Human
cccccaggcagccuuuucuggucu

SEQ ID NO: 732163 - RNA, 23 nt, Human
cccccagucccaggaaaggcauc

SEQ ID NO: 732164 - RNA, 19 nt, Human
cccccuccccagcccccac

SEQ ID NO: 732165 - RNA, 18 nt, Human
cccccuccccagccgggc

SEQ ID NO: 732166 - RNA, 24 nt, Human
cccccuccccagccgggcccaggc

SEQ ID NO: 732167 - RNA, 18 nt, Human
cccccugcaggggcgccu

SEQ ID NO: 732168 - RNA, 21 nt, Human
cccccugccacccccucccca

SEQ ID NO: 732169 - RNA, 24 nt, Human
cccccugccacccccuccccagcc

SEQ ID NO: 732170 - RNA, 26 nt, Human
cccccugccacccccuccccagccgg

SEQ ID NO: 732171 - RNA, 24 nt, Human
ccccgggccagcagcuuuagccuu

SEQ ID NO: 732172 - RNA, 22 nt, Human
ccccguuaccugucacucgccg

SEQ ID NO: 732173 - RNA, 23 nt, Human
ccccucacucuucacccuucuaa

SEQ ID NO: 732174 - RNA, 19 nt, Human
ccccugccacccccucccc

SEQ ID NO: 732175 - RNA, 18 nt, Human
ccccugcccugggccucc

SEQ ID NO: 732176 - RNA, 18 nt, Human
ccccuggccccgacaccc

SEQ ID NO: 732177 - RNA, 22 nt, Human
ccccuguccugcccucucccau

SEQ ID NO: 732178 - RNA, 18 nt, Human
cccgagaugcccaaagcc

SEQ ID NO: 732179 - RNA, 18 nt, Human
cccgcagcccccggcgcu

SEQ ID NO: 732180 - RNA, 20 nt, Human
cccgucucaccccuggcccc

SEQ ID NO: 732181 - RNA, 23 nt, Human
cccgucucaccccuggccccgac

SEQ ID NO: 732182 - RNA, 24 nt, Human
cccucgggggugccccgcuccucu

SEQ ID NO: 732183 - RNA, 18 nt, Human
cccugcugcugcuggggc

SEQ ID NO: 732184 - RNA, 20 nt, Human
cccuggccccgacacccgcc

SEQ ID NO: 732185 - RNA, 22 nt, Human
cccugggccuccagagccgccc

SEQ ID NO: 732186 - RNA, 25 nt, Human
cccugugccgcacacggggcccucc

SEQ ID NO: 732187 - RNA, 18 nt, Human
ccgccggcgcccucgccg

SEQ ID NO: 732188 - RNA, 20 nt, Human
ccgccggcgcccucgccguu

SEQ ID NO: 732189 - RNA, 21 nt, Human
ccggcccaggcccugcagucu

SEQ ID NO: 732190 - RNA, 21 nt, Human
ccgggccagcagcuuuagccu

SEQ ID NO: 732191 - RNA, 23 nt, Human
ccggggagguggucaguggccca

SEQ ID NO: 732192 - RNA, 23 nt, Human
ccggguccugugggguauggggg

SEQ ID NO: 732193 - RNA, 19 nt, Human
ccggugccccgugccgagg

SEQ ID NO: 732194 - RNA, 21 nt, Human
ccucacucuucacccuucuaa

SEQ ID NO: 732195 - RNA, 21 nt, Human
ccuccaaacacccagcccaga

SEQ ID NO: 732196 - RNA, 18 nt, Human
ccuccagagccgcccagg

SEQ ID NO: 732197 - RNA, 24 nt, Human
ccuccagagccgcccagguuccca

SEQ ID NO: 732198 - RNA, 20 nt, Human
ccucccgggaggcccaggcu

SEQ ID NO: 732199 - RNA, 21 nt, Human
ccucgagccccagccuggccc

SEQ ID NO: 732200 - RNA, 19 nt, Human
ccugaccuggggcagggga

SEQ ID NO: 732201 - RNA, 26 nt, Human
ccugagacccacagaggggccagggg

SEQ ID NO: 732202 - RNA, 18 nt, Human
ccugcagucucugcugcc

SEQ ID NO: 732203 - RNA, 21 nt, Human
ccugcccgagaugcccaaagc

SEQ ID NO: 732204 - RNA, 20 nt, Human
ccugcggaagccgaggcccc

SEQ ID NO: 732205 - RNA, 21 nt, Human
ccuggacagcugggcccagga

SEQ ID NO: 732206 - RNA, 19 nt, Human
ccuggcccaccacagccug

SEQ ID NO: 732207 - RNA, 19 nt, Human
ccuggcgggcccggcuggc

SEQ ID NO: 732208 - RNA, 18 nt, Human
ccugggccuggcgggccc

SEQ ID NO: 732209 - RNA, 19 nt, Human
ccugggggacgaggaacag

SEQ ID NO: 732210 - RNA, 20 nt, Human
ccugugccgcacacggggcc

SEQ ID NO: 732211 - RNA, 21 nt, Human
ccuucuaguggggugcuucag

SEQ ID NO: 732212 - RNA, 18 nt, Human
cgaacucagaaccaacag

SEQ ID NO: 732213 - RNA, 18 nt, Human
cgaggaacagaugggugg

SEQ ID NO: 732214 - RNA, 22 nt, Human
cgcagcuggcuugcugcccccu

SEQ ID NO: 732215 - RNA, 22 nt, Human
cgcccagccccuguccugcccu

SEQ ID NO: 732216 - RNA, 18 nt, Human
cggaggcagcgugggugg

SEQ ID NO: 732217 - RNA, 20 nt, Human
cggcaggugggucacccccc

SEQ ID NO: 732218 - RNA, 20 nt, Human
cgggcccaggcuggugggug

SEQ ID NO: 732219 - RNA, 18 nt, Human
cguaugccccgccggcgc

SEQ ID NO: 732220 - RNA, 19 nt, Human
cguguaugucccucccucc

SEQ ID NO: 732221 - RNA, 20 nt, Human
cguugcacggccgaggccug

SEQ ID NO: 732222 - RNA, 23 nt, Human
cuauggcuggggauggccagggc

SEQ ID NO: 732223 - RNA, 19 nt, Human
cucacaugccagaugcccc

SEQ ID NO: 732224 - RNA, 20 nt, Human
cucaccccuggccccgacac

SEQ ID NO: 732225 - RNA, 19 nt, Human
cucacggcugcggcccagg

SEQ ID NO: 732226 - RNA, 18 nt, Human
cucacucuucacccuucu

SEQ ID NO: 732227 - RNA, 24 nt, Human
cucacucuucacccuucuaaucac

SEQ ID NO: 732228 - RNA, 21 nt, Human
cucagaggcccgcagcccccg

SEQ ID NO: 732229 - RNA, 18 nt, Human
cuccaaacacccagccca

SEQ ID NO: 732230 - RNA, 20 nt, Human
cucccaccccgaggcauccc

SEQ ID NO: 732231 - RNA, 19 nt, Human
cucccagcccaccagcacc

SEQ ID NO: 732232 - RNA, 20 nt, Human
cuccguguaugucccucccu

SEQ ID NO: 732233 - RNA, 18 nt, Human
cucgagccccagccuggc

SEQ ID NO: 732234 - RNA, 18 nt, Human
cugaaggccagcguccuc

SEQ ID NO: 732235 - RNA, 18 nt, Human
cugcagccagcaggaccc

SEQ ID NO: 732236 - RNA, 22 nt, Human
cugccaacagcccccuccccag

SEQ ID NO: 732237 - RNA, 18 nt, Human
cugcugccgcuccugggc

SEQ ID NO: 732238 - RNA, 22 nt, Human
cuggaggggcaggguggugugg

SEQ ID NO: 732239 - RNA, 19 nt, Human
cuggcaauggcacgcacgc

SEQ ID NO: 732240 - RNA, 20 nt, Human
cuggccacagccaaucuucc

SEQ ID NO: 732241 - RNA, 22 nt, Human
cuggcccaguauggaucaccuu

SEQ ID NO: 732242 - RNA, 19 nt, Human
cuggcugccgggggcccuc

SEQ ID NO: 732243 - RNA, 24 nt, Human
cugggcccaggaggucccugccug

SEQ ID NO: 732244 - RNA, 19 nt, Human
cugggccccagcucaaagc

SEQ ID NO: 732245 - RNA, 24 nt, Human
cugggcccuucuuugcaacgcuag

SEQ ID NO: 732246 - RNA, 21 nt, Human
cugggccuccagagccgccca

SEQ ID NO: 732247 - RNA, 21 nt, Human
cuguagccuggcaucaugcug

SEQ ID NO: 732248 - RNA, 19 nt, Human
cuguggggaggugggggag

SEQ ID NO: 732249 - RNA, 22 nt, Human
cuuccugcggaagccgaggccc

SEQ ID NO: 732250 - RNA, 23 nt, Human
cuugcccggcccguguccugccc

SEQ ID NO: 732251 - RNA, 20 nt, Human
gaacucagaaccaacagccu

SEQ ID NO: 732252 - RNA, 22 nt, Human
gaagccccuccugugggcccuu

SEQ ID NO: 732253 - RNA, 18 nt, Human
gacacagggcggggcaag

SEQ ID NO: 732254 - RNA, 23 nt, Human
gacacuggcguggcacucccugg

SEQ ID NO: 732255 - RNA, 20 nt, Human
gacccagcacuggggacaca

SEQ ID NO: 732256 - RNA, 21 nt, Human
gacugcaagaccaaagagaca

SEQ ID NO: 732257 - RNA, 18 nt, Human
gagaagcagaagagagag

SEQ ID NO: 732258 - RNA, 24 nt, Human
gagaagcagaagagagagagggag

SEQ ID NO: 732259 - RNA, 18 nt, Human
gagagagaaggaggggga

SEQ ID NO: 732260 - RNA, 21 nt, Human
gagaugggggcaggagagaga

SEQ ID NO: 732261 - RNA, 18 nt, Human
gagccagcgcagcugcuc

SEQ ID NO: 732262 - RNA, 19 nt, Human
gaggagcagaggcccgggg

SEQ ID NO: 732263 - RNA, 26 nt, Human
gaggaggucacauggcuucugggggu

SEQ ID NO: 732264 - RNA, 19 nt, Human
gaggcagccgcaucuccag

SEQ ID NO: 732265 - RNA, 23 nt, Human
gaggccucuuccaucccuucuag

SEQ ID NO: 732266 - RNA, 18 nt, Human
gagggaggggagggagga

SEQ ID NO: 732267 - RNA, 19 nt, Human
gagggcaagccaagggcag

SEQ ID NO: 732268 - RNA, 21 nt, Human
gaggggaggggaggagaggcc

SEQ ID NO: 732269 - RNA, 24 nt, Human
gcaaacccgggcagcugccuucca

SEQ ID NO: 732270 - RNA, 20 nt, Human
gcaagccaagggcagaggug

SEQ ID NO: 732271 - RNA, 21 nt, Human
gcacagugggggcuccagcgg

SEQ ID NO: 732272 - RNA, 20 nt, Human
gcacuggggccccucagaca

SEQ ID NO: 732273 - RNA, 19 nt, Human
gccagccucgaagccccuc

SEQ ID NO: 732274 - RNA, 18 nt, Human
gccagggccacaggggga

SEQ ID NO: 732275 - RNA, 23 nt, Human
gccagggggagggagggaggcag

SEQ ID NO: 732276 - RNA, 22 nt, Human
gcccccuccccagcccccacau

SEQ ID NO: 732277 - RNA, 19 nt, Human
gccccgggccagcagcuuu

SEQ ID NO: 732278 - RNA, 19 nt, Human
gcccgagagcauggcagga

SEQ ID NO: 732279 - RNA, 19 nt, Human
gcccugggccuccagagcc

SEQ ID NO: 732280 - RNA, 20 nt, Human
gcccuggggcccagggaauc

SEQ ID NO: 732281 - RNA, 26 nt, Human
gccucgaagccccuccugugggcccc

SEQ ID NO: 732282 - RNA, 22 nt, Human
gccugcuggaagacagugagcc

SEQ ID NO: 732283 - RNA, 18 nt, Human
gccugggcaugcaggggc

SEQ ID NO: 732284 - RNA, 23 nt, Human
gccugggggacgaggaacagaug

SEQ ID NO: 732285 - RNA, 19 nt, Human
gccuggucuagugggaggc

SEQ ID NO: 732286 - RNA, 25 nt, Human
gcgcggcuugggaagcugccgccuc

SEQ ID NO: 732287 - RNA, 22 nt, Human
gcgcuagcaggggacacuggcg

SEQ ID NO: 732288 - RNA, 20 nt, Human
gcgggugucuguggggaggu

SEQ ID NO: 732289 - RNA, 22 nt, Human
gcuccgugggcaccugccccuc

SEQ ID NO: 732290 - RNA, 22 nt, Human
gcugccaacagcccccucccca

SEQ ID NO: 732291 - RNA, 20 nt, Human
gcuggcaccaagaccacuuc

SEQ ID NO: 732292 - RNA, 20 nt, Human
gcuggggauggccagggccc

SEQ ID NO: 732293 - RNA, 21 nt, Human
gcugguggcagggggugacac

SEQ ID NO: 732294 - RNA, 23 nt, Human
ggaaggggcugagggaggggagg

SEQ ID NO: 732295 - RNA, 24 nt, Human
ggaaggggcugagggaggggaggg

SEQ ID NO: 732296 - RNA, 21 nt, Human
ggacuuggcagccacggggca

SEQ ID NO: 732297 - RNA, 18 nt, Human
ggagagagaaggaggggg

SEQ ID NO: 732298 - RNA, 20 nt, Human
ggagcaggggcaggagggag

SEQ ID NO: 732299 - RNA, 18 nt, Human
ggagcuggaaagggagcg

SEQ ID NO: 732300 - RNA, 24 nt, Human
ggaggaggagcgccgcacaaaacc

SEQ ID NO: 732301 - RNA, 19 nt, Human
ggaggaggaggaaacgcug

SEQ ID NO: 732302 - RNA, 21 nt, Human
ggaggcagcgugggugggggc

SEQ ID NO: 732303 - RNA, 21 nt, Human
ggagggaggacugagggaggg

SEQ ID NO: 732304 - RNA, 28 nt, Human
ggagggaggacugagggaggggaggggg

SEQ ID NO: 732305 - RNA, 28 nt, Human
ggagggaggacugagggaggggaggggg

SEQ ID NO: 732306 - RNA, 19 nt, Human
ggaggggaggagaggccag

SEQ ID NO: 732307 - RNA, 19 nt, Human
ggaggggaggggaggagag

SEQ ID NO: 732308 - RNA, 22 nt, Human
ggauggccagggcccccggagc

SEQ ID NO: 732309 - RNA, 21 nt, Human
ggcagagguggaaguagcugg

SEQ ID NO: 732310 - RNA, 20 nt, Human
ggcaggagggaggcaggggc

SEQ ID NO: 732311 - RNA, 19 nt, Human
ggcagggagagaggcggag

SEQ ID NO: 732312 - RNA, 21 nt, Human
ggccacagcaguggcgugggg

SEQ ID NO: 732313 - RNA, 20 nt, Human
ggcccagggaaucuacucca

SEQ ID NO: 732314 - RNA, 18 nt, Human
ggccccuccccaugaugg

SEQ ID NO: 732315 - RNA, 20 nt, Human
ggccggaaggggaggccagc

SEQ ID NO: 732316 - RNA, 21 nt, Human
ggccugggcaugcaggggcga

SEQ ID NO: 732317 - RNA, 22 nt, Human
ggcuucugggggugggucuggg

SEQ ID NO: 732318 - RNA, 19 nt, Human
gggaagcugcuggccacug

SEQ ID NO: 732319 - RNA, 20 nt, Human
gggacacaguuuugggggcc

SEQ ID NO: 732320 - RNA, 22 nt, Human
gggacacaugggggggcauggg

SEQ ID NO: 732321 - RNA, 19 nt, Human
gggaccagggccuggggcg

SEQ ID NO: 732322 - RNA, 20 nt, Human
gggaggcagggagagaggcg

SEQ ID NO: 732323 - RNA, 23 nt, Human
gggaggccgcuggccuguagccc

SEQ ID NO: 732324 - RNA, 18 nt, Human
gggcaaagucaucagcag

SEQ ID NO: 732325 - RNA, 20 nt, Human
gggcacagugggggcuccag

SEQ ID NO: 732326 - RNA, 21 nt, Human
gggcacagugggggcuccagc

SEQ ID NO: 732327 - RNA, 25 nt, Human
gggcaggcgucccaugugggcucca

SEQ ID NO: 732328 - RNA, 21 nt, Human
gggcaugggacaaggggcugg

SEQ ID NO: 732329 - RNA, 18 nt, Human
gggcccccugccaccccc

SEQ ID NO: 732330 - RNA, 19 nt, Human
gggcccgagagcauggcag

SEQ ID NO: 732331 - RNA, 24 nt, Human
gggccucaaaccagcuccacccaa

SEQ ID NO: 732332 - RNA, 18 nt, Human
gggccuggggcgggcucc

SEQ ID NO: 732333 - RNA, 25 nt, Human
ggggacagacaugcuggguguggag

SEQ ID NO: 732334 - RNA, 24 nt, Human
ggggagggaggacugagggagggg

SEQ ID NO: 732335 - RNA, 29 nt, Human
ggggagggaggacugagggaggggagggg

SEQ ID NO: 732336 - RNA, 29 nt, Human
ggggagggaggacugagggaggggagggg

SEQ ID NO: 732337 - RNA, 20 nt, Human
ggggagugagagagagccag

SEQ ID NO: 732338 - RNA, 21 nt, Human
ggggcaggagagagaaggagg

SEQ ID NO: 732339 - RNA, 22 nt, Human
ggggcaggcgucccaugugggc

SEQ ID NO: 732340 - RNA, 20 nt, Human
ggggcagggugguguggggc

SEQ ID NO: 732341 - RNA, 22 nt, Human
ggggccaggcacagggggcugg

SEQ ID NO: 732342 - RNA, 22 nt, Human
ggggccuggcugcccuguuucc

SEQ ID NO: 732343 - RNA, 20 nt, Human
ggggcuggauggcaccucug

SEQ ID NO: 732344 - RNA, 21 nt, Human
gggggauaggaggggcacagu

SEQ ID NO: 732345 - RNA, 26 nt, Human
gggggggcaugggacaaggggcuggu

SEQ ID NO: 732346 - RNA, 23 nt, Human
gggggguaguagaggggagaggg

SEQ ID NO: 732347 - RNA, 19 nt, Human
ggggugcccucaucccagg

SEQ ID NO: 732348 - RNA, 21 nt, Human
ggggugggucugggucccugg

SEQ ID NO: 732349 - RNA, 20 nt, Human
gggguuggauuugcucuugg

SEQ ID NO: 732350 - RNA, 20 nt, Human
gggucgcuggcacuggggcc

SEQ ID NO: 732351 - RNA, 18 nt, Human
gggugcagaggccagagg

SEQ ID NO: 732352 - RNA, 20 nt, Human
gggugggggguaguagaggg

SEQ ID NO: 732353 - RNA, 19 nt, Human
ggucagaggcggagcagga

SEQ ID NO: 732354 - RNA, 19 nt, Human
ggucaggggggucuggagg

SEQ ID NO: 732355 - RNA, 21 nt, Human
ggucaggggggucuggagggg

SEQ ID NO: 732356 - RNA, 21 nt, Human
ggugccagggggagggaggga

SEQ ID NO: 732357 - RNA, 24 nt, Human
gguggaggcugcaaggcccccaag

SEQ ID NO: 732358 - RNA, 19 nt, Human
ggugggucugggucccugg

SEQ ID NO: 732359 - RNA, 18 nt, Human
ggugucccgucucacccc

SEQ ID NO: 732360 - RNA, 19 nt, Human
guccacagggagcccaaug

SEQ ID NO: 732361 - RNA, 24 nt, Human
guccggggcuggcuccugccgucc

SEQ ID NO: 732362 - RNA, 21 nt, Human
gugccgcacacggggcccucc

SEQ ID NO: 732363 - RNA, 22 nt, Human
guggaaguagcugguccacagc

SEQ ID NO: 732364 - RNA, 24 nt, Human
guggaggcugcaaggcccccaaga

SEQ ID NO: 732365 - RNA, 21 nt, Human
gugggucugggucccuggggg

SEQ ID NO: 732366 - RNA, 21 nt, Human
gugggugacgugaugucuccu

SEQ ID NO: 732367 - RNA, 18 nt, Human
uaaaugccacuauggcug

SEQ ID NO: 732368 - RNA, 26 nt, Human
uaccugcccacaucagacuucccagu

SEQ ID NO: 732369 - RNA, 19 nt, Human
uagcaaggaggguuccccc

SEQ ID NO: 732370 - RNA, 24 nt, Human
uauguacagauccuaaaacgccgg

SEQ ID NO: 732371 - RNA, 25 nt, Human
uaugucccucccuccaggcuaagga

SEQ ID NO: 732372 - RNA, 24 nt, Human
ucacaggcaaacccgggcagcugc

SEQ ID NO: 732373 - RNA, 19 nt, Human
ucacaguggcugggaagcc

SEQ ID NO: 732374 - RNA, 20 nt, Human
ucacgggcagguggcccagg

SEQ ID NO: 732375 - RNA, 19 nt, Human
ucagacaaguccugccaug

SEQ ID NO: 732376 - RNA, 22 nt, Human
ucagaggcggagcaggaccagg

SEQ ID NO: 732377 - RNA, 22 nt, Human
ucagaggcggagcaggaccagg

SEQ ID NO: 732378 - RNA, 23 nt, Human
ucagaggcggagcaggaccaggu

SEQ ID NO: 732379 - RNA, 22 nt, Human
ucagcccaaagcagcgaagccc

SEQ ID NO: 732380 - RNA, 20 nt, Human
ucaggggccaugcaggucgc

SEQ ID NO: 732381 - RNA, 22 nt, Human
uccaaacacccagcccagaccc

SEQ ID NO: 732382 - RNA, 18 nt, Human
uccacacugcccucgugg

SEQ ID NO: 732383 - RNA, 22 nt, Human
uccacagcagacaaaacagagg

SEQ ID NO: 732384 - RNA, 20 nt, Human
uccacgucacaugagcgaca

SEQ ID NO: 732385 - RNA, 21 nt, Human
ucccagacgaggaagcggacc

SEQ ID NO: 732386 - RNA, 28 nt, Human
ucccccaggcagccuuuucuggucuugc

SEQ ID NO: 732387 - RNA, 22 nt, Human
ucccgggaggcccaggcugugg

SEQ ID NO: 732388 - RNA, 18 nt, Human
ucccucccgggaggccca

SEQ ID NO: 732389 - RNA, 18 nt, Human
ucccugagaagagcuggu

SEQ ID NO: 732390 - RNA, 24 nt, Human
ucccugccggcccaggcccugcag

SEQ ID NO: 732391 - RNA, 18 nt, Human
ucccugcugcaguccaca

SEQ ID NO: 732392 - RNA, 22 nt, Human
ucccugcugcaguccacaggga

SEQ ID NO: 732393 - RNA, 21 nt, Human
ucccuggggguaugaggggug

SEQ ID NO: 732394 - RNA, 21 nt, Human
ucccuggggguaugaggggug

SEQ ID NO: 732395 - RNA, 21 nt, Human
uccgugggcaccugccccuca

SEQ ID NO: 732396 - RNA, 22 nt, Human
uccuccccgggagcaggggcag

SEQ ID NO: 732397 - RNA, 25 nt, Human
uccucuggccaaugaagucacgccc

SEQ ID NO: 732398 - RNA, 18 nt, Human
uccuggacagcugggccc

SEQ ID NO: 732399 - RNA, 26 nt, Human
uccuugggcugggacagcacgggaca

SEQ ID NO: 732400 - RNA, 19 nt, Human
ucgaagccccuccuguggg

SEQ ID NO: 732401 - RNA, 24 nt, Human
ucgaugaucuccccacgguccccc

SEQ ID NO: 732402 - RNA, 22 nt, Human
ucgcccagccccuguccugccc

SEQ ID NO: 732403 - RNA, 22 nt, Human
ucgcccaggcucuuggacuugg

SEQ ID NO: 732404 - RNA, 23 nt, Human
ucgguggccacauggcuccagcc

SEQ ID NO: 732405 - RNA, 24 nt, Human
ucucgguggccacauggcuccagc

SEQ ID NO: 732406 - RNA, 20 nt, Human
ucucugcugccgcuccuggg

SEQ ID NO: 732407 - RNA, 24 nt, Human
ucucugcugccgcuccugggccug

SEQ ID NO: 732408 - RNA, 18 nt, Human
ucugagagccgggaggag

SEQ ID NO: 732409 - RNA, 18 nt, Human
ucugucagggugucccgu

SEQ ID NO: 732410 - RNA, 24 nt, Human
ucuugagcugcccgggcagggggu

SEQ ID NO: 732411 - RNA, 23 nt, Human
ugagaaggcggccacccagcuga

SEQ ID NO: 732412 - RNA, 30 nt, Human
ugagaaggcggccacccagcugaacccugg

SEQ ID NO: 732413 - RNA, 18 nt, Human
ugagagagagccagaggg

SEQ ID NO: 732414 - RNA, 22 nt, Human
ugagcaaacaacacgcccaccc

SEQ ID NO: 732415 - RNA, 19 nt, Human
ugagggguggggucucugg

SEQ ID NO: 732416 - RNA, 21 nt, Human
ugagggguggggucucuggug

SEQ ID NO: 732417 - RNA, 19 nt, Human
ugaugucuccugccugcug

SEQ ID NO: 732418 - RNA, 18 nt, Human
ugcaagaccaaagagaca

SEQ ID NO: 732419 - RNA, 21 nt, Human
ugcacggccgaggccugcugu

SEQ ID NO: 732420 - RNA, 22 nt, Human
ugccaagaugggcucagacucc

SEQ ID NO: 732421 - RNA, 19 nt, Human
ugccagaugcccccgagac

SEQ ID NO: 732422 - RNA, 21 nt, Human
ugccagaugcccccgagacag

SEQ ID NO: 732423 - RNA, 21 nt, Human
ugccaugaaucucaugugggg

SEQ ID NO: 732424 - RNA, 18 nt, Human
ugcccccugagcccugcc

SEQ ID NO: 732425 - RNA, 19 nt, Human
ugcccggcccguguccugc

SEQ ID NO: 732426 - RNA, 23 nt, Human
ugcccuagagggaggugggaaug

SEQ ID NO: 732427 - RNA, 19 nt, Human
ugcccugggccuccagagc

SEQ ID NO: 732428 - RNA, 18 nt, Human
ugccggcccaggcccugc

SEQ ID NO: 732429 - RNA, 24 nt, Human
ugcggcccaggcccaggcugggca

SEQ ID NO: 732430 - RNA, 21 nt, Human
ugcuaccaggaaucauggagg

SEQ ID NO: 732431 - RNA, 22 nt, Human
ugcugccgcuccugggccuggc

SEQ ID NO: 732432 - RNA, 24 nt, Human
ugcuggaggaggaggaaacgcugu

SEQ ID NO: 732433 - RNA, 25 nt, Human
ugcuggaggaggaggaaacgcuguc

SEQ ID NO: 732434 - RNA, 19 nt, Human
uggagagggggcggguguc

SEQ ID NO: 732435 - RNA, 22 nt, Human
uggaggaggaggaaacgcuguc

SEQ ID NO: 732436 - RNA, 24 nt, Human
uggcaaggacagggagggaguggc

SEQ ID NO: 732437 - RNA, 19 nt, Human
uggcaccaagaccacuucc

SEQ ID NO: 732438 - RNA, 21 nt, Human
uggccauagagaagccgacug

SEQ ID NO: 732439 - RNA, 21 nt, Human
uggcccaccacagccugcacc

SEQ ID NO: 732440 - RNA, 18 nt, Human
uggcccagcccucagcaa

SEQ ID NO: 732441 - RNA, 21 nt, Human
uggcccagcccucagcaagcc

SEQ ID NO: 732442 - RNA, 22 nt, Human
ugggaggccgcuggccuguagc

SEQ ID NO: 732443 - RNA, 21 nt, Human
ugggaggcgaacucagaacca

SEQ ID NO: 732444 - RNA, 18 nt, Human
ugggcagaacagcugcug

SEQ ID NO: 732445 - RNA, 21 nt, Human
ugggcaugcaggggcggcggg

SEQ ID NO: 732446 - RNA, 24 nt, Human
ugggcccaggaggucccugccugg

SEQ ID NO: 732447 - RNA, 27 nt, Human
ugggccccguuaccugucccgucaacg

SEQ ID NO: 732448 - RNA, 21 nt, Human
ugggccuccagagccgcccag

SEQ ID NO: 732449 - RNA, 18 nt, Human
uggggccagggaccuggg

SEQ ID NO: 732450 - RNA, 22 nt, Human
uggggccccucagacaaguccu

SEQ ID NO: 732451 - RNA, 19 nt, Human
uggggccuggggggcaggc

SEQ ID NO: 732452 - RNA, 23 nt, Human
uggggccuggggggcaggcgucc

SEQ ID NO: 732453 - RNA, 19 nt, Human
ugggggccuggcugcccug

SEQ ID NO: 732454 - RNA, 20 nt, Human
ugggggguaguagaggggag

SEQ ID NO: 732455 - RNA, 20 nt, Human
ugggggugggucuggguccc

SEQ ID NO: 732456 - RNA, 20 nt, Human
ugggggugggucuggguccc

SEQ ID NO: 732457 - RNA, 19 nt, Human
uggggugcggccugggcau

SEQ ID NO: 732458 - RNA, 23 nt, Human
ugggugacacagggcggggcaag

SEQ ID NO: 732459 - RNA, 18 nt, Human
ugggugggggcagaaagg

SEQ ID NO: 732460 - RNA, 21 nt, Human
ugucacugacagccacaugca

SEQ ID NO: 732461 - RNA, 22 nt, Human
ugucacugacagccacaugcac

SEQ ID NO: 732462 - RNA, 24 nt, Human
ugucccgcgcaccggguaccuuca

SEQ ID NO: 732463 - RNA, 23 nt, Human
uguggggaggugggggagugaga

SEQ ID NO: 732464 - RNA, 21 nt, Human
uuccaggcugcacaguggggg

SEQ ID NO: 732465 - RNA, 20 nt, Human
uuccugagcaaacaacacgc

SEQ ID NO: 732466 - RNA, 21 nt, Human
uuccuggacagcugggcccag

SEQ ID NO: 732467 - RNA, 22 nt, Human
uuccuggacagcugggcccagg

SEQ ID NO: 732468 - RNA, 23 nt, Human
uuccuggacagcugggcccagga

SEQ ID NO: 732469 - RNA, 19 nt, Human
uucucuauguacagauccu

SEQ ID NO: 732470 - RNA, 18 nt, Human
uuggucacagguggcagg

SEQ ID NO: 732471 - RNA, 24 nt, Human
uuuccaggcugcacagugggggga

SEQ ID NO: 732472 - RNA, 19 nt, Human
uuucccuccggaggagaga

SEQ ID NO: 732473 - RNA, 24 nt, Human
uuuccuccccgggagcaggggcag

SEQ ID NO: 732474 - RNA, 20 nt, Human
uuucuggucuugcccugccc

SEQ ID NO: 732475 - RNA, 24 nt, Human
aaaaaugaucacaccaggccaugc

SEQ ID NO: 732476 - RNA, 23 nt, Human
aaaagaauccacaucauuguuug

SEQ ID NO: 732477 - RNA, 24 nt, Human
aaaagaauccacaucauuguuugg

SEQ ID NO: 732478 - RNA, 26 nt, Human
aaacaaaggugauaauuagcagaaau

SEQ ID NO: 732479 - RNA, 18 nt, Human
aaacccaguaggaugacc

SEQ ID NO: 732480 - RNA, 19 nt, Human
aaagagcugggauuacagg

SEQ ID NO: 732481 - RNA, 25 nt, Human
aaagcacaaacaugauuagucagaa

SEQ ID NO: 732482 - RNA, 24 nt, Human
aaaguaaacauagcuugcaaaauc

SEQ ID NO: 732483 - RNA, 19 nt, Human
aacacaacaaaugguguca

SEQ ID NO: 732484 - RNA, 21 nt, Human
aacacagaaaaagaaaggacc

SEQ ID NO: 732485 - RNA, 21 nt, Human
aacaggaggaauccagcugga

SEQ ID NO: 732486 - RNA, 19 nt, Human
aaccccacaauccagcacc

SEQ ID NO: 732487 - RNA, 19 nt, Human
aagaaaaagacaacuacau

SEQ ID NO: 732488 - RNA, 22 nt, Human
aagaagcccacgcccacucuca

SEQ ID NO: 732489 - RNA, 24 nt, Human
aagaagcccacgcccacucucaac

SEQ ID NO: 732490 - RNA, 18 nt, Human
aagagcuacuacuguuac

SEQ ID NO: 732491 - RNA, 23 nt, Human
aagagcugggauuacaggcacau

SEQ ID NO: 732492 - RNA, 21 nt, Human
aagagugaggaggagaggagg

SEQ ID NO: 732493 - RNA, 19 nt, Human
aagcaaaacacagaaaaag

SEQ ID NO: 732494 - RNA, 26 nt, Human
aagcaaaacacagaaaaagaaaggac

SEQ ID NO: 732495 - RNA, 27 nt, Human
aagcaaaacacagaaaaagagggaccc

SEQ ID NO: 732496 - RNA, 27 nt, Human
aagcaaaacacagaaaaagccuuucgg

SEQ ID NO: 732497 - RNA, 21 nt, Human
aagcaguaucuuccccuccau

SEQ ID NO: 732498 - RNA, 21 nt, Human
aagcuacaacacuccuuguac

SEQ ID NO: 732499 - RNA, 23 nt, Human
aagggaagaggaggauggggagg

SEQ ID NO: 732500 - RNA, 20 nt, Human
aaggggaaagggaagaggag

SEQ ID NO: 732501 - RNA, 24 nt, Human
aagugauccuccugucuuggccuc

SEQ ID NO: 732502 - RNA, 21 nt, Human
aaugcaacaugauccucgugg

SEQ ID NO: 732503 - RNA, 21 nt, Human
acaaaacugucugccagggac

SEQ ID NO: 732504 - RNA, 22 nt, Human
acacagcagcaucaccuggaaa

SEQ ID NO: 732505 - RNA, 25 nt, Human
acacugcaacucagguuagcaacug

SEQ ID NO: 732506 - RNA, 19 nt, Human
acagaaggggugcgagcug

SEQ ID NO: 732507 - RNA, 20 nt, Human
acagaauuuuugaagugaau

SEQ ID NO: 732508 - RNA, 20 nt, Human
accugcugggagacugcagu

SEQ ID NO: 732509 - RNA, 19 nt, Human
acggauucucccuucugga

SEQ ID NO: 732510 - RNA, 22 nt, Human
acuacauuaaaauuuugucagg

SEQ ID NO: 732511 - RNA, 22 nt, Human
acucuacugugaaagcaaaauc

SEQ ID NO: 732512 - RNA, 19 nt, Human
acugcagccucgaccuccu

SEQ ID NO: 732513 - RNA, 19 nt, Human
acugcagugguugugaucc

SEQ ID NO: 732514 - RNA, 23 nt, Human
acugcaguugccuugguguucug

SEQ ID NO: 732515 - RNA, 19 nt, Human
agaaaugauggagaaagca

SEQ ID NO: 732516 - RNA, 21 nt, Human
agaagcuucuggagguaacag

SEQ ID NO: 732517 - RNA, 21 nt, Human
agaauccugucucuauuucuc

SEQ ID NO: 732518 - RNA, 18 nt, Human
agagcugggauuacaggc

SEQ ID NO: 732519 - RNA, 28 nt, Human
agaggagagaaggguggacagaaggggu

SEQ ID NO: 732520 - RNA, 18 nt, Human
agaggaggauggggaggg

SEQ ID NO: 732521 - RNA, 21 nt, Human
agaggaggggaggguggggag

SEQ ID NO: 732522 - RNA, 21 nt, Human
agauagcaccaaauacuaaca

SEQ ID NO: 732523 - RNA, 18 nt, Human
agccuagaguagaaagau

SEQ ID NO: 732524 - RNA, 19 nt, Human
agccuggcaaccuagacaa

SEQ ID NO: 732525 - RNA, 18 nt, Human
agccuuaaagcugugcuc

SEQ ID NO: 732526 - RNA, 19 nt, Human
agcgccgugcugggcucac

SEQ ID NO: 732527 - RNA, 24 nt, Human
agcuacuacuguuacccugaacag

SEQ ID NO: 732528 - RNA, 21 nt, Human
aggaauccagcuggaaaugcc

SEQ ID NO: 732529 - RNA, 18 nt, Human
aggagaggaggggagggu

SEQ ID NO: 732530 - RNA, 18 nt, Human
aggaggauggggagggug

SEQ ID NO: 732531 - RNA, 19 nt, Human
aggaggauggggagggugg

SEQ ID NO: 732532 - RNA, 20 nt, Human
aggaggauggggaggguggg

SEQ ID NO: 732533 - RNA, 24 nt, Human
aggaggguggggagaguggggagg

SEQ ID NO: 732534 - RNA, 21 nt, Human
aggaggugagaagaagccaaa

SEQ ID NO: 732535 - RNA, 18 nt, Human
aggcagggucuugcucug

SEQ ID NO: 732536 - RNA, 21 nt, Human
agggaagaggaggauggggag

SEQ ID NO: 732537 - RNA, 26 nt, Human
aggguggggagagugaggaggguggg

SEQ ID NO: 732538 - RNA, 20 nt, Human
aggguggggagaguggggag

SEQ ID NO: 732539 - RNA, 19 nt, Human
aggguguuguuaaagagcu

SEQ ID NO: 732540 - RNA, 21 nt, Human
aggugacuagagccuaugacc

SEQ ID NO: 732541 - RNA, 21 nt, Human
aguaggaugaccguuauuuug

SEQ ID NO: 732542 - RNA, 26 nt, Human
agugcccaauucauucccuguugugc

SEQ ID NO: 732543 - RNA, 24 nt, Human
aguggagugcccaauucauucccu

SEQ ID NO: 732544 - RNA, 23 nt, Human
auaaaaccaaacaaaauaaaaua

SEQ ID NO: 732545 - RNA, 18 nt, Human
auaaacacaguaggacau

SEQ ID NO: 732546 - RNA, 24 nt, Human
auagcucacugcagccucgaccuc

SEQ ID NO: 732547 - RNA, 23 nt, Human
auaucuagaaguaaacaaaacug

SEQ ID NO: 732548 - RNA, 27 nt, Human
aucagccaccccaccccaguaucucaa

SEQ ID NO: 732549 - RNA, 18 nt, Human
aucucggcuugggauggc

SEQ ID NO: 732550 - RNA, 20 nt, Human
augauaccugagaugccaca

SEQ ID NO: 732551 - RNA, 22 nt, Human
augauuagucagaauuugaggg

SEQ ID NO: 732552 - RNA, 22 nt, Human
augccacauaaauguaaccagu

SEQ ID NO: 732553 - RNA, 19 nt, Human
auggagaaagcaaaacaca

SEQ ID NO: 732554 - RNA, 23 nt, Human
auggggaggguggggauggggag

SEQ ID NO: 732555 - RNA, 22 nt, Human
auuacacccauccaaaauaaaa

SEQ ID NO: 732556 - RNA, 21 nt, Human
caaaaaaugaucacaccaggc

SEQ ID NO: 732557 - RNA, 25 nt, Human
caaaaagaauauauauguauguaau

SEQ ID NO: 732558 - RNA, 23 nt, Human
caaagagcugggauuacaggcac

SEQ ID NO: 732559 - RNA, 24 nt, Human
caaagagcugggauuacaggcaca

SEQ ID NO: 732560 - RNA, 19 nt, Human
caacaaaacagacuccucc

SEQ ID NO: 732561 - RNA, 19 nt, Human
caacaaaacagacuccucc

SEQ ID NO: 732562 - RNA, 20 nt, Human
caacacccaaaaagcugaag

SEQ ID NO: 732563 - RNA, 22 nt, Human
caagugauccuccugucuuggc

SEQ ID NO: 732564 - RNA, 27 nt, Human
caagugauccuccugucuuggccuccc

SEQ ID NO: 732565 - RNA, 22 nt, Human
caaugggagauuuuggacaggc

SEQ ID NO: 732566 - RNA, 21 nt, Human
cacagaaaaagaaaggaccuc

SEQ ID NO: 732567 - RNA, 23 nt, Human
caccaugauagcucacugcagcc

SEQ ID NO: 732568 - RNA, 23 nt, Human
cacgagcaccaagcagggggccg

SEQ ID NO: 732569 - RNA, 19 nt, Human
cacgcaggucaccucagug

SEQ ID NO: 732570 - RNA, 24 nt, Human
cacuaaucagccaccccaccccag

SEQ ID NO: 732571 - RNA, 19 nt, Human
cacugcagccucgaccucc

SEQ ID NO: 732572 - RNA, 20 nt, Human
cagauaauaugcugaaagua

SEQ ID NO: 732573 - RNA, 23 nt, Human
cagcagcagugaaaugauggccu

SEQ ID NO: 732574 - RNA, 24 nt, Human
cagccaccccaccccaguaucuca

SEQ ID NO: 732575 - RNA, 23 nt, Human
cagccucgaccuccugggcucaa

SEQ ID NO: 732576 - RNA, 24 nt, Human
cagccucgaccuccugggcucaag

SEQ ID NO: 732577 - RNA, 18 nt, Human
cagcucccugcacaugcc

SEQ ID NO: 732578 - RNA, 24 nt, Human
cagggucuugcucuguugcccagg

SEQ ID NO: 732579 - RNA, 21 nt, Human
cauauaacacaacaaauggug

SEQ ID NO: 732580 - RNA, 20 nt, Human
cauuuuguuuucaugagauu

SEQ ID NO: 732581 - RNA, 19 nt, Human
ccaaagagcugggauuaca

SEQ ID NO: 732582 - RNA, 23 nt, Human
ccaaagagcugggauuacaggca

SEQ ID NO: 732583 - RNA, 25 nt, Human
ccaaagagcugggauuacaggcaca

SEQ ID NO: 732584 - RNA, 23 nt, Human
ccaaagcacaaacaugauuaguc

SEQ ID NO: 732585 - RNA, 22 nt, Human
ccaacuaaagggccaacccuug

SEQ ID NO: 732586 - RNA, 18 nt, Human
ccaagcagggggccggcu

SEQ ID NO: 732587 - RNA, 19 nt, Human
ccacuccagggacggauuc

SEQ ID NO: 732588 - RNA, 23 nt, Human
ccagcgugcugccagugcugggg

SEQ ID NO: 732589 - RNA, 25 nt, Human
ccaguaucucaauacuauauuuucu

SEQ ID NO: 732590 - RNA, 18 nt, Human
cccaaaaagcugaaguga

SEQ ID NO: 732591 - RNA, 20 nt, Human
cccaaaaagcugaagugaga

SEQ ID NO: 732592 - RNA, 24 nt, Human
cccaaagagcugggauuacaggca

SEQ ID NO: 732593 - RNA, 19 nt, Human
cccagaaaugccucugaau

SEQ ID NO: 732594 - RNA, 18 nt, Human
ccccaaaacuauuccccc

SEQ ID NO: 732595 - RNA, 19 nt, Human
ccccaaaacuauucccccu

SEQ ID NO: 732596 - RNA, 18 nt, Human
ccccaaaccagcaaaacc

SEQ ID NO: 732597 - RNA, 20 nt, Human
ccccagcaggauccuuucuu

SEQ ID NO: 732598 - RNA, 21 nt, Human
cccuccauccacauuugucag

SEQ ID NO: 732599 - RNA, 22 nt, Human
ccuaggaaauaacagaaaucac

SEQ ID NO: 732600 - RNA, 26 nt, Human
ccuccugucuuggccucccaaagagc

SEQ ID NO: 732601 - RNA, 21 nt, Human
ccucgaccuccugggcucaag

SEQ ID NO: 732602 - RNA, 18 nt, Human
ccucgcugcgacuuaggg

SEQ ID NO: 732603 - RNA, 22 nt, Human
ccucuaaauggucauuauguuu

SEQ ID NO: 732604 - RNA, 22 nt, Human
ccugggcucaagugauccuccu

SEQ ID NO: 732605 - RNA, 23 nt, Human
ccugggcucaagugauccuccug

SEQ ID NO: 732606 - RNA, 25 nt, Human
cgaccuccugggcucaagugauccu

SEQ ID NO: 732607 - RNA, 22 nt, Human
cgagcaccaagcagggggccgg

SEQ ID NO: 732608 - RNA, 20 nt, Human
cgcccacucucaacaaaaca

SEQ ID NO: 732609 - RNA, 19 nt, Human
cgccgugcugggcucacuc

SEQ ID NO: 732610 - RNA, 18 nt, Human
cggcauaaaugguaagcc

SEQ ID NO: 732611 - RNA, 18 nt, Human
cgucagaacuccugaagc

SEQ ID NO: 732612 - RNA, 22 nt, Human
cguggccacuaaguaacaaaau

SEQ ID NO: 732613 - RNA, 21 nt, Human
cucacugcagccucgaccucc

SEQ ID NO: 732614 - RNA, 24 nt, Human
cucacugcagccucgaccuccugg

SEQ ID NO: 732615 - RNA, 22 nt, Human
cuccaagaucuaccucuacucu

SEQ ID NO: 732616 - RNA, 20 nt, Human
cuccacacagcagcaucacc

SEQ ID NO: 732617 - RNA, 20 nt, Human
cuccagcccugggacagaca

SEQ ID NO: 732618 - RNA, 19 nt, Human
cuccagggacggauucucc

SEQ ID NO: 732619 - RNA, 21 nt, Human
cuccagggacggauucucccu

SEQ ID NO: 732620 - RNA, 20 nt, Human
cuccucccugccugagaaga

SEQ ID NO: 732621 - RNA, 18 nt, Human
cucucucucuacaaaugu

SEQ ID NO: 732622 - RNA, 24 nt, Human
cugagggcauaaaaccaaacaaaa

SEQ ID NO: 732623 - RNA, 22 nt, Human
cugcagccucgaccuccugggc

SEQ ID NO: 732624 - RNA, 23 nt, Human
cugcagccucgaccuccugggcu

SEQ ID NO: 732625 - RNA, 22 nt, Human
cugcagugguugugaucccggc

SEQ ID NO: 732626 - RNA, 23 nt, Human
cugucuuggccucccaaagagcu

SEQ ID NO: 732627 - RNA, 21 nt, Human
cuucagaagcuacaacacucc

SEQ ID NO: 732628 - RNA, 24 nt, Human
cuuggccucccaaagagcugggau

SEQ ID NO: 732629 - RNA, 23 nt, Human
gaaaugccucugaauguauuuuu

SEQ ID NO: 732630 - RNA, 22 nt, Human
gaagaagccaaacgagccuaga

SEQ ID NO: 732631 - RNA, 24 nt, Human
gacagcagcagugaaaugauggcc

SEQ ID NO: 732632 - RNA, 21 nt, Human
gacaggcagagggcugcagga

SEQ ID NO: 732633 - RNA, 24 nt, Human
gacugcuuuccuaacaguaaauau

SEQ ID NO: 732634 - RNA, 19 nt, Human
gagaaagcaaaacacagaa

SEQ ID NO: 732635 - RNA, 21 nt, Human
gagaagaagccaaacgagccu

SEQ ID NO: 732636 - RNA, 21 nt, Human
gagaaggaggaggugagaaga

SEQ ID NO: 732637 - RNA, 18 nt, Human
gagagagaggcugagagc

SEQ ID NO: 732638 - RNA, 18 nt, Human
gagcuggucacgagcacc

SEQ ID NO: 732639 - RNA, 24 nt, Human
gaggagaaggcaaggggaaaggga

SEQ ID NO: 732640 - RNA, 18 nt, Human
gaggagaggaggggaggg

SEQ ID NO: 732641 - RNA, 18 nt, Human
gaggauggggaggguggg

SEQ ID NO: 732642 - RNA, 21 nt, Human
gaggauggggaggguggggau

SEQ ID NO: 732643 - RNA, 21 nt, Human
gauaguacaaguacaugcaau

SEQ ID NO: 732644 - RNA, 22 nt, Human
gaucuacuuuagcaaucauuug

SEQ ID NO: 732645 - RNA, 22 nt, Human
gaugaaaaagcaugggaaaaga

SEQ ID NO: 732646 - RNA, 24 nt, Human
gaugaguucgccuuuugcugcugc

SEQ ID NO: 732647 - RNA, 21 nt, Human
gauggagaaagcaaaacacag

SEQ ID NO: 732648 - RNA, 24 nt, Human
gcaccaugauagcucacugcagcc

SEQ ID NO: 732649 - RNA, 21 nt, Human
gcaucucagaaccuucuccac

SEQ ID NO: 732650 - RNA, 20 nt, Human
gcaugaaaacaaaagaaaac

SEQ ID NO: 732651 - RNA, 18 nt, Human
gccacuaaccccacaauc

SEQ ID NO: 732652 - RNA, 18 nt, Human
gcccagccaaagaacaga

SEQ ID NO: 732653 - RNA, 23 nt, Human
gccuagaacccacucccugucuu

SEQ ID NO: 732654 - RNA, 19 nt, Human
gccucgaccuccugggcuc

SEQ ID NO: 732655 - RNA, 18 nt, Human
gcucaccagacaugggcu

SEQ ID NO: 732656 - RNA, 25 nt, Human
gcucuguugcccaggcugaagugua

SEQ ID NO: 732657 - RNA, 20 nt, Human
ggagaaagcaaaacacagaa

SEQ ID NO: 732658 - RNA, 20 nt, Human
ggagagaaggguggacagaa

SEQ ID NO: 732659 - RNA, 23 nt, Human
ggagaggaggggaggguggggag

SEQ ID NO: 732660 - RNA, 19 nt, Human
ggaggguggggauggggag

SEQ ID NO: 732661 - RNA, 18 nt, Human
ggcagggcuuacacuccu

SEQ ID NO: 732662 - RNA, 18 nt, Human
ggcagggucuugcucugu

SEQ ID NO: 732663 - RNA, 24 nt, Human
ggcugugugaaaauaagaaaaaaa

SEQ ID NO: 732664 - RNA, 19 nt, Human
gggaaaagacaagucagaa

SEQ ID NO: 732665 - RNA, 18 nt, Human
gggaagcaucuccagccc

SEQ ID NO: 732666 - RNA, 22 nt, Human
gggcaauaaagggaacucugau

SEQ ID NO: 732667 - RNA, 19 nt, Human
gggcucaagugauccuccu

SEQ ID NO: 732668 - RNA, 18 nt, Human
ggggagagugaggagggu

SEQ ID NO: 732669 - RNA, 18 nt, Human
ggggagccuuaggcuugg

SEQ ID NO: 732670 - RNA, 18 nt, Human
ggggauggggaggguggg

SEQ ID NO: 732671 - RNA, 22 nt, Human
gggggaguggagugcccaauuc

SEQ ID NO: 732672 - RNA, 19 nt, Human
gggggccggcuggcugacu

SEQ ID NO: 732673 - RNA, 25 nt, Human
ggguggggauggggagggugggaag

SEQ ID NO: 732674 - RNA, 19 nt, Human
ggugcugaggacaaggauc

SEQ ID NO: 732675 - RNA, 21 nt, Human
gguggagggaagagaugaaag

SEQ ID NO: 732676 - RNA, 24 nt, Human
gguggggagagugaggaggguggg

SEQ ID NO: 732677 - RNA, 19 nt, Human
guagagaugaguucgccuu

SEQ ID NO: 732678 - RNA, 20 nt, Human
guccuguguggggagggccc

SEQ ID NO: 732679 - RNA, 21 nt, Human
gucugcucugagcgccccucu

SEQ ID NO: 732680 - RNA, 23 nt, Human
gugaggaggagaggaggggaggg

SEQ ID NO: 732681 - RNA, 20 nt, Human
gugcaaaagaauccacauca

SEQ ID NO: 732682 - RNA, 21 nt, Human
gugcccagggcaugccccaaa

SEQ ID NO: 732683 - RNA, 25 nt, Human
gugcugccagugcuggggggcaggg

SEQ ID NO: 732684 - RNA, 21 nt, Human
guggccacuaaguaacaaaau

SEQ ID NO: 732685 - RNA, 23 nt, Human
guucgccuuuugcugcugcugcc

SEQ ID NO: 732686 - RNA, 19 nt, Human
uaaaaagcagaaagauuug

SEQ ID NO: 732687 - RNA, 18 nt, Human
uaaaagcauccuuugcaa

SEQ ID NO: 732688 - RNA, 21 nt, Human
uaaaagcauuuuuagaaauug

SEQ ID NO: 732689 - RNA, 26 nt, Human
uaaaagcauuuuuagaaauuguuuuc

SEQ ID NO: 732690 - RNA, 19 nt, Human
uaaaauguccugcaugaaa

SEQ ID NO: 732691 - RNA, 22 nt, Human
uaaacagauaauaugcugaaag

SEQ ID NO: 732692 - RNA, 19 nt, Human
uaaagcaguaucuuccccu

SEQ ID NO: 732693 - RNA, 24 nt, Human
uaaccaaaaaaugaucacaccagg

SEQ ID NO: 732694 - RNA, 19 nt, Human
uaacuggugaaaugauucu

SEQ ID NO: 732695 - RNA, 24 nt, Human
uaagacacugagggcauaaaacca

SEQ ID NO: 732696 - RNA, 21 nt, Human
uaagauaaggaaaaagagcaa

SEQ ID NO: 732697 - RNA, 21 nt, Human
uacaacacuccuuguacccuu

SEQ ID NO: 732698 - RNA, 19 nt, Human
uacaacaggaggaauccag

SEQ ID NO: 732699 - RNA, 18 nt, Human
uacaaguacaugcaauuc

SEQ ID NO: 732700 - RNA, 21 nt, Human
uacauaauaacaaaaaaugua

SEQ ID NO: 732701 - RNA, 20 nt, Human
uaccauaagugguaaauaac

SEQ ID NO: 732702 - RNA, 24 nt, Human
uacccuuccuuuauaaaagguaag

SEQ ID NO: 732703 - RNA, 21 nt, Human
uagaagaaaacaaaggugaua

SEQ ID NO: 732704 - RNA, 23 nt, Human
uagaagaaaacugcaguugccuc

SEQ ID NO: 732705 - RNA, 24 nt, Human
uagaagaaaacugcaguugccuug

SEQ ID NO: 732706 - RNA, 24 nt, Human
uagcagaaaugcaacaugauccuc

SEQ ID NO: 732707 - RNA, 24 nt, Human
uagcucacugcagccucgaccucc

SEQ ID NO: 732708 - RNA, 26 nt, Human
uaggaaaagaaacaucuuggguagag

SEQ ID NO: 732709 - RNA, 24 nt, Human
uauaaucaaaucugagcuggcacc

SEQ ID NO: 732710 - RNA, 22 nt, Human
uaugaccaguuugaggacaggg

SEQ ID NO: 732711 - RNA, 21 nt, Human
uauggaaggagagagaggcug

SEQ ID NO: 732712 - RNA, 24 nt, Human
uauuucuccucuucugaucuuggg

SEQ ID NO: 732713 - RNA, 22 nt, Human
ucaacacccaaaaagcugaagu

SEQ ID NO: 732714 - RNA, 22 nt, Human
ucacauccauuuuccacuggcu

SEQ ID NO: 732715 - RNA, 23 nt, Human
ucacugcagccucgaccuccugg

SEQ ID NO: 732716 - RNA, 24 nt, Human
ucacugcagccucgaccuccuggg

SEQ ID NO: 732717 - RNA, 18 nt, Human
ucaggucccucuucucca

SEQ ID NO: 732718 - RNA, 24 nt, Human
ucauaugacaaugauccaacuaaa

SEQ ID NO: 732719 - RNA, 19 nt, Human
ucccaaagagcugggauua

SEQ ID NO: 732720 - RNA, 23 nt, Human
ucccaaagagcugggauuacagg

SEQ ID NO: 732721 - RNA, 24 nt, Human
ucccaaagagcugggauuacaggc

SEQ ID NO: 732722 - RNA, 21 nt, Human
uccugggcucaagugauccuc

SEQ ID NO: 732723 - RNA, 22 nt, Human
uccugggcucaagugauccucc

SEQ ID NO: 732724 - RNA, 22 nt, Human
uccugggcucaagugauccucc

SEQ ID NO: 732725 - RNA, 24 nt, Human
uccugggcucaagugauccuccug

SEQ ID NO: 732726 - RNA, 19 nt, Human
ucuaaaaagcagaaagauu

SEQ ID NO: 732727 - RNA, 25 nt, Human
ucucaauacuauauuuucucucccu

SEQ ID NO: 732728 - RNA, 22 nt, Human
ucucucgcucucucucuacaaa

SEQ ID NO: 732729 - RNA, 24 nt, Human
ucucugcccuguugggaggcugaa

SEQ ID NO: 732730 - RNA, 19 nt, Human
ucucuuucucuacucaugu

SEQ ID NO: 732731 - RNA, 20 nt, Human
ucugcaaguguuuucuacag

SEQ ID NO: 732732 - RNA, 24 nt, Human
ucuguugcccaggcugaaguguag

SEQ ID NO: 732733 - RNA, 19 nt, Human
ucuugcucuguugcccagg

SEQ ID NO: 732734 - RNA, 22 nt, Human
ucuugcucuguugcccaggcug

SEQ ID NO: 732735 - RNA, 23 nt, Human
ucuugcucuguugcccaggcuga

SEQ ID NO: 732736 - RNA, 24 nt, Human
ucuugcucuguugcccaggcugaa

SEQ ID NO: 732737 - RNA, 21 nt, Human
ugaaaaguaaaagagaggcaa

SEQ ID NO: 732738 - RNA, 22 nt, Human
ugaaagcaaaaucugucuaauc

SEQ ID NO: 732739 - RNA, 18 nt, Human
ugaaguggcuucaaaugu

SEQ ID NO: 732740 - RNA, 22 nt, Human
ugacaggaauuucagauucucc

SEQ ID NO: 732741 - RNA, 18 nt, Human
ugaccucugcucaccccu

SEQ ID NO: 732742 - RNA, 22 nt, Human
ugagaagaagccaaacgagccu

SEQ ID NO: 732743 - RNA, 23 nt, Human
ugagaagaagccaaacgagccua

SEQ ID NO: 732744 - RNA, 20 nt, Human
ugagaagagaagggagagag

SEQ ID NO: 732745 - RNA, 20 nt, Human
ugagacucuacugugaaagc

SEQ ID NO: 732746 - RNA, 21 nt, Human
ugagauacggaguaaaaagaa

SEQ ID NO: 732747 - RNA, 21 nt, Human
ugaggaggagaggaggggagg

SEQ ID NO: 732748 - RNA, 21 nt, Human
ugaggaggagaggaggggagg

SEQ ID NO: 732749 - RNA, 22 nt, Human
ugaggaggagaggaggggaggg

SEQ ID NO: 732750 - RNA, 24 nt, Human
ugaggaggagaggaggggagggug

SEQ ID NO: 732751 - RNA, 25 nt, Human
ugaggaggagaggaggggagggugg

SEQ ID NO: 732752 - RNA, 19 nt, Human
ugaggaggguggggagagu

SEQ ID NO: 732753 - RNA, 20 nt, Human
ugaggaggguggggagagug

SEQ ID NO: 732754 - RNA, 20 nt, Human
ugaggaggguggggagagug

SEQ ID NO: 732755 - RNA, 22 nt, Human
ugaggaggguggggagaguggg

SEQ ID NO: 732756 - RNA, 22 nt, Human
ugaggcagggucuugcucuguu

SEQ ID NO: 732757 - RNA, 21 nt, Human
ugagggcauaaaaccaaacaa

SEQ ID NO: 732758 - RNA, 22 nt, Human
ugaggguaaagcaggucuugga

SEQ ID NO: 732759 - RNA, 19 nt, Human
ugaguaacaaagucauaag

SEQ ID NO: 732760 - RNA, 20 nt, Human
ugauauuacacuaucaaaua

SEQ ID NO: 732761 - RNA, 21 nt, Human
ugauuugagucagcuuccccc

SEQ ID NO: 732762 - RNA, 23 nt, Human
ugcaucucagaaccuucuccaca

SEQ ID NO: 732763 - RNA, 24 nt, Human
ugcccagccaaagaacagaauuuu

SEQ ID NO: 732764 - RNA, 23 nt, Human
ugcccaggcugaaguguaguggc

SEQ ID NO: 732765 - RNA, 24 nt, Human
ugcccaggcugaaguguaguggca

SEQ ID NO: 732766 - RNA, 18 nt, Human
ugccuugguguucuguca

SEQ ID NO: 732767 - RNA, 24 nt, Human
ugcucuguugcccaggcugaagug

SEQ ID NO: 732768 - RNA, 20 nt, Human
ugcugccagugcuggggggc

SEQ ID NO: 732769 - RNA, 25 nt, Human
ugcugggcucacucacucuggccug

SEQ ID NO: 732770 - RNA, 21 nt, Human
uggaaaugccacuaaccccac

SEQ ID NO: 732771 - RNA, 19 nt, Human
uggcaccaugauagcucac

SEQ ID NO: 732772 - RNA, 23 nt, Human
uggcaccaugauagcucacugca

SEQ ID NO: 732773 - RNA, 19 nt, Human
uggcagggagcggagagcg

SEQ ID NO: 732774 - RNA, 18 nt, Human
uggccaccucagugacac

SEQ ID NO: 732775 - RNA, 20 nt, Human
uggccucccaaagagcuggg

SEQ ID NO: 732776 - RNA, 21 nt, Human
uggccucccaaagagcuggga

SEQ ID NO: 732777 - RNA, 18 nt, Human
ugggaaaagacaagucag

SEQ ID NO: 732778 - RNA, 18 nt, Human
ugggaagagugaggagga

SEQ ID NO: 732779 - RNA, 24 nt, Human
ugggaagagugaggaggagaggag

SEQ ID NO: 732780 - RNA, 23 nt, Human
ugggauuacaggcacaugcgcca

SEQ ID NO: 732781 - RNA, 24 nt, Human
ugggauuacaggcacaugcgccac

SEQ ID NO: 732782 - RNA, 26 nt, Human
ugggauuacaggcacaugcgccacca

SEQ ID NO: 732783 - RNA, 24 nt, Human
ugggcucaagugauccuccugucu

SEQ ID NO: 732784 - RNA, 19 nt, Human
uggggagagugaggagggu

SEQ ID NO: 732785 - RNA, 23 nt, Human
uggggagggugggaagagugagg

SEQ ID NO: 732786 - RNA, 18 nt, Human
uggggaggguggggaugg

SEQ ID NO: 732787 - RNA, 24 nt, Human
uggggaggguggggauggggaggg

SEQ ID NO: 732788 - RNA, 23 nt, Human
uggguaugaacacauuuaugacc

SEQ ID NO: 732789 - RNA, 19 nt, Human
ugguagcagaggaucucuu

SEQ ID NO: 732790 - RNA, 21 nt, Human
uguagaaauagauccuucuga

SEQ ID NO: 732791 - RNA, 18 nt, Human
uguauaaauauauacaua

SEQ ID NO: 732792 - RNA, 22 nt, Human
uguauccauauaacacaacaaa

SEQ ID NO: 732793 - RNA, 21 nt, Human
ugucaaagaaaaagacaacua

SEQ ID NO: 732794 - RNA, 22 nt, Human
ugucugccagggacucccaaaa

SEQ ID NO: 732795 - RNA, 20 nt, Human
ugugaagaagcccacgccca

SEQ ID NO: 732796 - RNA, 20 nt, Human
uguguauaaauauauacaua

SEQ ID NO: 732797 - RNA, 23 nt, Human
uguuuucuuugccuagaacccac

SEQ ID NO: 732798 - RNA, 18 nt, Human
uuaaagagagaauccugu

SEQ ID NO: 732799 - RNA, 24 nt, Human
uuaaucauauacaccuagcaaccc

SEQ ID NO: 732800 - RNA, 19 nt, Human
uuacaggcacaugcgccac

SEQ ID NO: 732801 - RNA, 19 nt, Human
uuacaggcacaugcgccac

SEQ ID NO: 732802 - RNA, 21 nt, Human
uuagaaauuuucaacacccaa

SEQ ID NO: 732803 - RNA, 22 nt, Human
uuaggacuauaaugagacucua

SEQ ID NO: 732804 - RNA, 23 nt, Human
uugaucuuaaaagcauccuuugc

SEQ ID NO: 732805 - RNA, 24 nt, Human
uugaucuuaaaagcauccuuugca

SEQ ID NO: 732806 - RNA, 24 nt, Human
uugcccaggcugaaguguaguggc

SEQ ID NO: 732807 - RNA, 20 nt, Human
uuggacaggcagagggcugc

SEQ ID NO: 732808 - RNA, 19 nt, Human
uugguuaaggcuguugaag

SEQ ID NO: 732809 - RNA, 24 nt, Human
uuucacuuuuacuugauuauaaac

SEQ ID NO: 732810 - RNA, 19 nt, Human
uuugcugcugcugcugaag

SEQ ID NO: 732811 - RNA, 24 nt, Human
uuuugaucuuaaaagcauccuuug

SEQ ID NO: 732812 - RNA, 25 nt, Human
aaaaaccacaagccaaaccuguggg

SEQ ID NO: 732813 - RNA, 22 nt, Human
aaaacuaagacguaacauucuu

SEQ ID NO: 732814 - RNA, 19 nt, Human
aaaagaaaacagucccggg

SEQ ID NO: 732815 - RNA, 23 nt, Human
aaagagacggggcauuuaaggag

SEQ ID NO: 732816 - RNA, 20 nt, Human
aaagcugauccuugaacacu

SEQ ID NO: 732817 - RNA, 19 nt, Human
aaagugggcucccaagccc

SEQ ID NO: 732818 - RNA, 19 nt, Human
aagcgaaacaccaaaaaca

SEQ ID NO: 732819 - RNA, 18 nt, Human
aaggagcccaaggggggc

SEQ ID NO: 732820 - RNA, 24 nt, Human
aaggcaaccaagccucggaguuca

SEQ ID NO: 732821 - RNA, 21 nt, Human
aaggugcaaaugucaaagugc

SEQ ID NO: 732822 - RNA, 22 nt, Human
acaaacaaaguggcccuggagc

SEQ ID NO: 732823 - RNA, 23 nt, Human
acacacacacacacacacacaca

SEQ ID NO: 732824 - RNA, 23 nt, Human
acacacacacacacacacacaca

SEQ ID NO: 732825 - RNA, 22 nt, Human
acagaaaagcgaaacaccaaaa

SEQ ID NO: 732826 - RNA, 23 nt, Human
acagggcagcccgcagcuaacuu

SEQ ID NO: 732827 - RNA, 22 nt, Human
accacagcccucaccucaaccc

SEQ ID NO: 732828 - RNA, 24 nt, Human
accaccccccagcaagacacacac

SEQ ID NO: 732829 - RNA, 20 nt, Human
accaggccuugcucccagca

SEQ ID NO: 732830 - RNA, 19 nt, Human
acccagugccgcaaaagcc

SEQ ID NO: 732831 - RNA, 20 nt, Human
accucaacccacuuuacugg

SEQ ID NO: 732832 - RNA, 21 nt, Human
acuugugcuaaagcucccuuc

SEQ ID NO: 732833 - RNA, 19 nt, Human
acuuuccucagagacgaac

SEQ ID NO: 732834 - RNA, 18 nt, Human
agaaaacuuacaaugcug

SEQ ID NO: 732835 - RNA, 19 nt, Human
agaaagaaaagcaguagaa

SEQ ID NO: 732836 - RNA, 18 nt, Human
agaagcagcgacagccag

SEQ ID NO: 732837 - RNA, 24 nt, Human
agcagcuacuaugguauuuugagg

SEQ ID NO: 732838 - RNA, 22 nt, Human
agccacgaugucaaaggcgucc

SEQ ID NO: 732839 - RNA, 18 nt, Human
agcuauuuaaagagcuga

SEQ ID NO: 732840 - RNA, 21 nt, Human
aggaaagggaggggaagaaga

SEQ ID NO: 732841 - RNA, 18 nt, Human
aggcucacugacgcauac

SEQ ID NO: 732842 - RNA, 23 nt, Human
agggaggggaagaagauuagcuu

SEQ ID NO: 732843 - RNA, 24 nt, Human
auccuucugaagggccagcgccag

SEQ ID NO: 732844 - RNA, 20 nt, Human
augucaaaugccccugaaac

SEQ ID NO: 732845 - RNA, 19 nt, Human
cacacaaacuaaaacucac

SEQ ID NO: 732846 - RNA, 20 nt, Human
cacacacacacacacacaca

SEQ ID NO: 732847 - RNA, 20 nt, Human
cacacacacacacacacaca

SEQ ID NO: 732848 - RNA, 20 nt, Human
cacacacacacacacacaca

SEQ ID NO: 732849 - RNA, 20 nt, Human
cacacacacacacacacaca

SEQ ID NO: 732850 - RNA, 20 nt, Human
cacacacacacacacacaca

SEQ ID NO: 732851 - RNA, 22 nt, Human
cacacacacacacacacacaca

SEQ ID NO: 732852 - RNA, 21 nt, Human
cacacacuggugacuguaaua

SEQ ID NO: 732853 - RNA, 23 nt, Human
caccccccagcaagacacacaca

SEQ ID NO: 732854 - RNA, 24 nt, Human
cacugauccacugagucaucccag

SEQ ID NO: 732855 - RNA, 21 nt, Human
cagacacagaggggaaguggg

SEQ ID NO: 732856 - RNA, 21 nt, Human
cagcaaaggcaaccaagccuc

SEQ ID NO: 732857 - RNA, 22 nt, Human
cagcaagacacacacaaacuaa

SEQ ID NO: 732858 - RNA, 19 nt, Human
caggggcagggccuguuuc

SEQ ID NO: 732859 - RNA, 24 nt, Human
cauccuguguccccucgggcugug

SEQ ID NO: 732860 - RNA, 18 nt, Human
caucugccucuccuaagg

SEQ ID NO: 732861 - RNA, 18 nt, Human
ccaaaaacaagacccagg

SEQ ID NO: 732862 - RNA, 19 nt, Human
ccacagggcagcccgcagc

SEQ ID NO: 732863 - RNA, 22 nt, Human
ccaccaagcagcaagacacucu

SEQ ID NO: 732864 - RNA, 18 nt, Human
ccacccagccccgcccua

SEQ ID NO: 732865 - RNA, 19 nt, Human
ccagugccgcaaaagccaa

SEQ ID NO: 732866 - RNA, 22 nt, Human
cccaagccccucuccuagaucc

SEQ ID NO: 732867 - RNA, 20 nt, Human
cccagccccgcccuaggugg

SEQ ID NO: 732868 - RNA, 23 nt, Human
ccccccagcaagacacacacaaa

SEQ ID NO: 732869 - RNA, 26 nt, Human
cccucauuccuugacaacuuccccaa

SEQ ID NO: 732870 - RNA, 21 nt, Human
ccucccaucucccacccagcc

SEQ ID NO: 732871 - RNA, 18 nt, Human
ccugggguuuccauccug

SEQ ID NO: 732872 - RNA, 21 nt, Human
cgaaacaccaaaaacaagacc

SEQ ID NO: 732873 - RNA, 20 nt, Human
cgcacacacacacacacaca

SEQ ID NO: 732874 - RNA, 21 nt, Human
cuaaaacucacccagugccgc

SEQ ID NO: 732875 - RNA, 22 nt, Human
cucacagcccaacuggacagcc

SEQ ID NO: 732876 - RNA, 24 nt, Human
cuccuggugggucugcgcuguguc

SEQ ID NO: 732877 - RNA, 21 nt, Human
cucuaauaauaauaaccugag

SEQ ID NO: 732878 - RNA, 27 nt, Human
cugggguuuccauccugugacgucucg

SEQ ID NO: 732879 - RNA, 19 nt, Human
cuuuauauuacuuuacagu

SEQ ID NO: 732880 - RNA, 26 nt, Human
gagcugggccucuuuccuccuggucg

SEQ ID NO: 732881 - RNA, 18 nt, Human
gagggaggcugaggagga

SEQ ID NO: 732882 - RNA, 24 nt, Human
gcagcccgcagcuaacuuccucag

SEQ ID NO: 732883 - RNA, 18 nt, Human
gccacagcucacagccca

SEQ ID NO: 732884 - RNA, 19 nt, Human
gccagcgccaguccugggu

SEQ ID NO: 732885 - RNA, 21 nt, Human
gccaguccugggugccacagc

SEQ ID NO: 732886 - RNA, 26 nt, Human
gcccaggggcuggggaagcacuggcc

SEQ ID NO: 732887 - RNA, 18 nt, Human
gcccucaccucaacccac

SEQ ID NO: 732888 - RNA, 22 nt, Human
gcgaaacaccaaaaacaagacc

SEQ ID NO: 732889 - RNA, 20 nt, Human
gcggcccaaagcagauuuuc

SEQ ID NO: 732890 - RNA, 21 nt, Human
gcucauaccaggccuugcucc

SEQ ID NO: 732891 - RNA, 18 nt, Human
gcugcggcccaaagcaga

SEQ ID NO: 732892 - RNA, 18 nt, Human
gcuugucuguuuuccacu

SEQ ID NO: 732893 - RNA, 19 nt, Human
ggaagcacuggccuggcuc

SEQ ID NO: 732894 - RNA, 20 nt, Human
ggauuccuccugaagcacca

SEQ ID NO: 732895 - RNA, 27 nt, Human
ggccuguuuccuccaaaggaaaccuuu

SEQ ID NO: 732896 - RNA, 20 nt, Human
ggcucccaagccccucuccu

SEQ ID NO: 732897 - RNA, 21 nt, Human
ggcugcagggcaggggagagc

SEQ ID NO: 732898 - RNA, 21 nt, Human
gggaagcacuggccuggcuca

SEQ ID NO: 732899 - RNA, 20 nt, Human
gggaagugggagaggaaagg

SEQ ID NO: 732900 - RNA, 22 nt, Human
gggagaggaaagggaggggaag

SEQ ID NO: 732901 - RNA, 22 nt, Human
gggaugucaaaugccccugaaa

SEQ ID NO: 732902 - RNA, 21 nt, Human
gggcugcagggcaggggagag

SEQ ID NO: 732903 - RNA, 19 nt, Human
ggggagagcugagaagugg

SEQ ID NO: 732904 - RNA, 21 nt, Human
guacauauauacauguuaaca

SEQ ID NO: 732905 - RNA, 18 nt, Human
gucaagggacuggguagc

SEQ ID NO: 732906 - RNA, 20 nt, Human
guugugcaaucacaggagau

SEQ ID NO: 732907 - RNA, 23 nt, Human
uaaacaccaaaaccuuccacgca

SEQ ID NO: 732908 - RNA, 21 nt, Human
uaaagugaggccccuuuuccc

SEQ ID NO: 732909 - RNA, 20 nt, Human
uaaccugagaaaacuuacaa

SEQ ID NO: 732910 - RNA, 22 nt, Human
uacagaaaagcgaaacaccaaa

SEQ ID NO: 732911 - RNA, 23 nt, Human
uacagaaaagcgaaacaccaaaa

SEQ ID NO: 732912 - RNA, 24 nt, Human
uacagaaaagcgaaacaccaaaaa

SEQ ID NO: 732913 - RNA, 20 nt, Human
uacauaauagagaaccagau

SEQ ID NO: 732914 - RNA, 25 nt, Human
uagaaaggagcccaaggggggcauc

SEQ ID NO: 732915 - RNA, 23 nt, Human
uagguggucuuuggauuccauuu

SEQ ID NO: 732916 - RNA, 21 nt, Human
uauaaacaccaaaaccuucca

SEQ ID NO: 732917 - RNA, 18 nt, Human
uaugguauuuugaggccc

SEQ ID NO: 732918 - RNA, 21 nt, Human
uauuaaaaagaaaacaguccc

SEQ ID NO: 732919 - RNA, 23 nt, Human
ucacaggagaugggcagcuauuu

SEQ ID NO: 732920 - RNA, 19 nt, Human
uccacaggaagaaaaauga

SEQ ID NO: 732921 - RNA, 22 nt, Human
uccagaaggugauagaaggcuc

SEQ ID NO: 732922 - RNA, 21 nt, Human
uccaucgucagcugagagcug

SEQ ID NO: 732923 - RNA, 22 nt, Human
ucccaagccccucuccuagauc

SEQ ID NO: 732924 - RNA, 21 nt, Human
ucccagcaggaauuuaaaacc

SEQ ID NO: 732925 - RNA, 24 nt, Human
uccccaaacccgacuccgguucug

SEQ ID NO: 732926 - RNA, 23 nt, Human
ucccuaucugcuuaauccuuaca

SEQ ID NO: 732927 - RNA, 21 nt, Human
ucccuuucaggaccacagccc

SEQ ID NO: 732928 - RNA, 18 nt, Human
uccugggugccacagcuc

SEQ ID NO: 732929 - RNA, 23 nt, Human
uccuucugaagggccagcgccag

SEQ ID NO: 732930 - RNA, 19 nt, Human
uccuugaacacuauguagc

SEQ ID NO: 732931 - RNA, 21 nt, Human
ugacaacuuccccaaacccga

SEQ ID NO: 732932 - RNA, 29 nt, Human
ugacaacuuccccaaacccgacuccgguu

SEQ ID NO: 732933 - RNA, 18 nt, Human
ugaccaggcccaggggcu

SEQ ID NO: 732934 - RNA, 19 nt, Human
ugacuuuguuccagaaggu

SEQ ID NO: 732935 - RNA, 18 nt, Human
ugaggaggaagcugcaga

SEQ ID NO: 732936 - RNA, 19 nt, Human
ugaggaggaagcugcagag

SEQ ID NO: 732937 - RNA, 19 nt, Human
ugcaaggagggaggcugag

SEQ ID NO: 732938 - RNA, 23 nt, Human
ugcagggcaggggagagcugaga

SEQ ID NO: 732939 - RNA, 23 nt, Human
ugcagugcuguauccugcugcca

SEQ ID NO: 732940 - RNA, 21 nt, Human
ugcgaugagcacccaccaagc

SEQ ID NO: 732941 - RNA, 21 nt, Human
uggcccagggcugcagggcag

SEQ ID NO: 732942 - RNA, 23 nt, Human
uggccuggcucacccuucaguga

SEQ ID NO: 732943 - RNA, 18 nt, Human
ugggaauacuuuagucuc

SEQ ID NO: 732944 - RNA, 18 nt, Human
ugggagaggaaagggagg

SEQ ID NO: 732945 - RNA, 21 nt, Human
ugggagaggaaagggagggga

SEQ ID NO: 732946 - RNA, 22 nt, Human
uggggaagcacuggccuggcuc

SEQ ID NO: 732947 - RNA, 18 nt, Human
ugggguuuccauccugug

SEQ ID NO: 732948 - RNA, 23 nt, Human
ugguauuuugaggcccagaucau

SEQ ID NO: 732949 - RNA, 19 nt, Human
ugucaaagugcuugguugu

SEQ ID NO: 732950 - RNA, 21 nt, Human
uguguagugaccaggcccagg

SEQ ID NO: 732951 - RNA, 22 nt, Human
uguguuugaagcagaaagaaaa

SEQ ID NO: 732952 - RNA, 19 nt, Human
uguugcugcccaggcagga

SEQ ID NO: 732953 - RNA, 21 nt, Human
uucaucucaguacauguuuuu

SEQ ID NO: 732954 - RNA, 21 nt, Human
uuccaaccucucuaauaauaa

SEQ ID NO: 732955 - RNA, 20 nt, Human
uuccagaaggugauagaagg

SEQ ID NO: 732956 - RNA, 20 nt, Human
uuccuugacaacuuccccaa

SEQ ID NO: 732957 - RNA, 20 nt, Human
uucucuggauuccuccugaa

SEQ ID NO: 732958 - RNA, 18 nt, Human
uuuauagccacacaaaac

SEQ ID NO: 732959 - RNA, 20 nt, Human
uuuuaaacguuauuuaacca

SEQ ID NO: 732960 - RNA, 26 nt, Human
aaaaaaaacuucaaugacuagagaag

SEQ ID NO: 732961 - RNA, 23 nt, Human
aaaaauccccaaaguuggcacau

SEQ ID NO: 732962 - RNA, 22 nt, Human
aaaagacauguuaucaaauaua

SEQ ID NO: 732963 - RNA, 20 nt, Human
aaacaggcaaaagccaguau

SEQ ID NO: 732964 - RNA, 22 nt, Human
aacccagcuauucccugagcgg

SEQ ID NO: 732965 - RNA, 18 nt, Human
aagcagaagaaaaacuau

SEQ ID NO: 732966 - RNA, 22 nt, Human
aagcagaagaaaaacuaugcag

SEQ ID NO: 732967 - RNA, 24 nt, Human
aagcagaagaaaaacuaugcagaa

SEQ ID NO: 732968 - RNA, 22 nt, Human
aauaaaaaguaagcagaagaaa

SEQ ID NO: 732969 - RNA, 23 nt, Human
aauugccagaagggauaugguua

SEQ ID NO: 732970 - RNA, 21 nt, Human
accuuuuccucuacaaacagg

SEQ ID NO: 732971 - RNA, 18 nt, Human
acuugguuuuaucaguaa

SEQ ID NO: 732972 - RNA, 21 nt, Human
agaaaacucuucauaucauca

SEQ ID NO: 732973 - RNA, 19 nt, Human
agaaagcaaaauaugauca

SEQ ID NO: 732974 - RNA, 19 nt, Human
agaacacagguagaaucaa

SEQ ID NO: 732975 - RNA, 22 nt, Human
agaacacagguagaaucaacau

SEQ ID NO: 732976 - RNA, 22 nt, Human
agauuaggaaauaucauacugc

SEQ ID NO: 732977 - RNA, 18 nt, Human
aggaagaagugcucccau

SEQ ID NO: 732978 - RNA, 23 nt, Human
agggaaaacguguguguucuggg

SEQ ID NO: 732979 - RNA, 18 nt, Human
agguagaaucaacauaug

SEQ ID NO: 732980 - RNA, 19 nt, Human
agucauuaaaaacuguagc

SEQ ID NO: 732981 - RNA, 22 nt, Human
agucauuaaaaacuguagccuu

SEQ ID NO: 732982 - RNA, 24 nt, Human
auagaacacuaagaagagauacca

SEQ ID NO: 732983 - RNA, 18 nt, Human
aucaaguauauaucggaa

SEQ ID NO: 732984 - RNA, 18 nt, Human
aucuguaaacaacuccuu

SEQ ID NO: 732985 - RNA, 23 nt, Human
auugugcuuuucccucuccuuga

SEQ ID NO: 732986 - RNA, 20 nt, Human
auuuacucacuaagaaaaca

SEQ ID NO: 732987 - RNA, 21 nt, Human
caaacaggcaaaagccaguau

SEQ ID NO: 732988 - RNA, 18 nt, Human
cacagccuaacaaaggaa

SEQ ID NO: 732989 - RNA, 19 nt, Human
cacauucaggaaguaaaau

SEQ ID NO: 732990 - RNA, 21 nt, Human
cagaacacagguagaaucaac

SEQ ID NO: 732991 - RNA, 21 nt, Human
cagaguacuaaaaccagccca

SEQ ID NO: 732992 - RNA, 18 nt, Human
cagcagggguuuuuguuu

SEQ ID NO: 732993 - RNA, 21 nt, Human
caguccucuuccuccccuagu

SEQ ID NO: 732994 - RNA, 20 nt, Human
caguucugaaaaguuacaga

SEQ ID NO: 732995 - RNA, 18 nt, Human
caugauggcggugguggu

SEQ ID NO: 732996 - RNA, 22 nt, Human
cauuuuauucccacuccccucu

SEQ ID NO: 732997 - RNA, 18 nt, Human
ccaccuuuuagucugauu

SEQ ID NO: 732998 - RNA, 20 nt, Human
cccacagcucacuauaaaga

SEQ ID NO: 732999 - RNA, 18 nt, Human
cccccgccuucuccccgc

SEQ ID NO: 733000 - RNA, 21 nt, Human
cccucugcaaaaccuuuuaag

SEQ ID NO: 733001 - RNA, 21 nt, Human
cgggguguccuauucuaacac

SEQ ID NO: 733002 - RNA, 22 nt, Human
cucaaggcuugauucaggauag

SEQ ID NO: 733003 - RNA, 23 nt, Human
cucacuauaaagaaaaaucccca

SEQ ID NO: 733004 - RNA, 18 nt, Human
cuccccuagucuggcucc

SEQ ID NO: 733005 - RNA, 22 nt, Human
cucuacaaacaggcaaaagcca

SEQ ID NO: 733006 - RNA, 20 nt, Human
cuugaugugagaucugcaag

SEQ ID NO: 733007 - RNA, 19 nt, Human
cuuugauuuaggcucaagg

SEQ ID NO: 733008 - RNA, 23 nt, Human
gaaauaucauacugcaccugaaa

SEQ ID NO: 733009 - RNA, 25 nt, Human
gagcgucaugauggcggugguggug

SEQ ID NO: 733010 - RNA, 24 nt, Human
gauaaauagaacacuaagaagaga

SEQ ID NO: 733011 - RNA, 21 nt, Human
gauuaggaaauaucauacugc

SEQ ID NO: 733012 - RNA, 25 nt, Human
gcacagccuaacaaagggggaacgc

SEQ ID NO: 733013 - RNA, 26 nt, Human
ggaaugucaauuguuauuuuugcuuu

SEQ ID NO: 733014 - RNA, 21 nt, Human
guaaagcacagccuaacaaag

SEQ ID NO: 733015 - RNA, 21 nt, Human
guuaagauggcaaccuaugcc

SEQ ID NO: 733016 - RNA, 23 nt, Human
guuuuuguuugcuuguuuuuguc

SEQ ID NO: 733017 - RNA, 18 nt, Human
uaaaaaguaagcagaaga

SEQ ID NO: 733018 - RNA, 18 nt, Human
uaagaaaacagauucauu

SEQ ID NO: 733019 - RNA, 19 nt, Human
uaagaaaacagauucauua

SEQ ID NO: 733020 - RNA, 23 nt, Human
uaagaaaacagauucauuagcag

SEQ ID NO: 733021 - RNA, 19 nt, Human
uaagaaaacucuucauauc

SEQ ID NO: 733022 - RNA, 23 nt, Human
uaagaaauaggaaagauuaggaa

SEQ ID NO: 733023 - RNA, 19 nt, Human
uaagauaaauagaacacua

SEQ ID NO: 733024 - RNA, 24 nt, Human
uaagcagaagaaaaacuaugcaga

SEQ ID NO: 733025 - RNA, 18 nt, Human
uaaggagaagccauagaa

SEQ ID NO: 733026 - RNA, 19 nt, Human
uaaguuggaaaacacucca

SEQ ID NO: 733027 - RNA, 22 nt, Human
uagaaaaagaauauaucaauau

SEQ ID NO: 733028 - RNA, 24 nt, Human
uagaacacuaagaagagauaccac

SEQ ID NO: 733029 - RNA, 20 nt, Human
uaggaaauaucauacugcac

SEQ ID NO: 733030 - RNA, 21 nt, Human
uaguuguagacaucuaagggc

SEQ ID NO: 733031 - RNA, 21 nt, Human
uauacauuugaagaaaaccac

SEQ ID NO: 733032 - RNA, 21 nt, Human
uauguaaagaaaaaaaaacuu

SEQ ID NO: 733033 - RNA, 26 nt, Human
uauguccuuaacaaugugguacaauu

SEQ ID NO: 733034 - RNA, 21 nt, Human
ucacugaaaauauuucuacac

SEQ ID NO: 733035 - RNA, 20 nt, Human
ucagaguacuaaaaccagcc

SEQ ID NO: 733036 - RNA, 21 nt, Human
uccaccuuuuucauguggaaa

SEQ ID NO: 733037 - RNA, 24 nt, Human
uccaccuuuuucauguggaaauug

SEQ ID NO: 733038 - RNA, 19 nt, Human
ucuaagggcaaacuugacc

SEQ ID NO: 733039 - RNA, 22 nt, Human
ucuaucauuauauguccuuaac

SEQ ID NO: 733040 - RNA, 19 nt, Human
ucucugagaaggaaauugc

SEQ ID NO: 733041 - RNA, 18 nt, Human
ucuuuugcgaguagcccu

SEQ ID NO: 733042 - RNA, 20 nt, Human
ugaaaaguuacagaguucug

SEQ ID NO: 733043 - RNA, 18 nt, Human
ugaagaaagcagaauuuu

SEQ ID NO: 733044 - RNA, 18 nt, Human
ugagaaguggggaaggca

SEQ ID NO: 733045 - RNA, 25 nt, Human
ugagcgucaugauggcggugguggu

SEQ ID NO: 733046 - RNA, 18 nt, Human
ugaguccauguuuuauug

SEQ ID NO: 733047 - RNA, 24 nt, Human
ugauacugcccucugcaaaaccuu

SEQ ID NO: 733048 - RNA, 23 nt, Human
ugauucaggauagguagcaacaa

SEQ ID NO: 733049 - RNA, 24 nt, Human
uggaacagaacacagguagaaucu

SEQ ID NO: 733050 - RNA, 23 nt, Human
uggguucccacagcucacuauaa

SEQ ID NO: 733051 - RNA, 20 nt, Human
uguaaagaaaaaaaaacuuc

SEQ ID NO: 733052 - RNA, 21 nt, Human
ugugacagagccacuacagag

SEQ ID NO: 733053 - RNA, 21 nt, Human
uuaauacuaaguuccaagaac

SEQ ID NO: 733054 - RNA, 21 nt, Human
uuagcaaauaagauaaauaga

SEQ ID NO: 733055 - RNA, 22 nt, Human
uuauguaaagaaaaaaaaacuu

SEQ ID NO: 733056 - RNA, 20 nt, Human
uucaauacuugguuuuauca

SEQ ID NO: 733057 - RNA, 24 nt, Human
uucacugaaaauauuucuacacaa

SEQ ID NO: 733058 - RNA, 26 nt, Human
uucauuagcaguaccuauacuuaaau

SEQ ID NO: 733059 - RNA, 19 nt, Human
uucccuuucacugaaaaua

SEQ ID NO: 733060 - RNA, 21 nt, Human
uugaagaaacgcacaaaaacc

SEQ ID NO: 733061 - RNA, 21 nt, Human
uugcuuguuuuuguccuucag

SEQ ID NO: 733062 - RNA, 20 nt, Human
uuggaaaacacuccaaaaua

SEQ ID NO: 733063 - RNA, 18 nt, Human
uuugcaaauucacagcag

SEQ ID NO: 733064 - RNA, 23 nt, Human
aaaaacaaaaccaaaagauacca

SEQ ID NO: 733065 - RNA, 18 nt, Human
aaaaaugaacuguaagag

SEQ ID NO: 733066 - RNA, 18 nt, Human
aaaacuucgaacaaaaaa

SEQ ID NO: 733067 - RNA, 20 nt, Human
aaaagccaccaaagucaaaa

SEQ ID NO: 733068 - RNA, 20 nt, Human
aaaaugcuguguacuuuuuu

SEQ ID NO: 733069 - RNA, 18 nt, Human
aaacaaauaccaaaaacc

SEQ ID NO: 733070 - RNA, 21 nt, Human
aaacaaauaccaaaaacccaa

SEQ ID NO: 733071 - RNA, 22 nt, Human
aaagauaccagugaaacugaag

SEQ ID NO: 733072 - RNA, 20 nt, Human
aaaugcgaacaugaaaaacc

SEQ ID NO: 733073 - RNA, 24 nt, Human
aacaaagcaagacucugucucaaa

SEQ ID NO: 733074 - RNA, 19 nt, Human
aacauggugaaaccccguc

SEQ ID NO: 733075 - RNA, 20 nt, Human
aacauggugaaaccccgucu

SEQ ID NO: 733076 - RNA, 21 nt, Human
aacauggugaaaccccgucuc

SEQ ID NO: 733077 - RNA, 19 nt, Human
aacuaagcauguugauucc

SEQ ID NO: 733078 - RNA, 20 nt, Human
aagaaacaaucuagggggaa

SEQ ID NO: 733079 - RNA, 18 nt, Human
aagaaaccuaaaccacaa

SEQ ID NO: 733080 - RNA, 19 nt, Human
aagcagcucccugggggaa

SEQ ID NO: 733081 - RNA, 24 nt, Human
aagcaugguggcacacaccuguaa

SEQ ID NO: 733082 - RNA, 21 nt, Human
aaggagacugacgcaugccaa

SEQ ID NO: 733083 - RNA, 18 nt, Human
aaggaugagagccaggcc

SEQ ID NO: 733084 - RNA, 22 nt, Human
aagguggcccuccucccacccc

SEQ ID NO: 733085 - RNA, 24 nt, Human
aaucgcuugaacccgggaggugga

SEQ ID NO: 733086 - RNA, 24 nt, Human
acaaagcaagacucugucucaaaa

SEQ ID NO: 733087 - RNA, 22 nt, Human
acaaauaccaaaaacccaacac

SEQ ID NO: 733088 - RNA, 20 nt, Human
acacugguaccagccccuuc

SEQ ID NO: 733089 - RNA, 22 nt, Human
accaaagucaaaaacaaaacca

SEQ ID NO: 733090 - RNA, 18 nt, Human
accacacuccagccuggg

SEQ ID NO: 733091 - RNA, 25 nt, Human
acccaguaaaacccaggcagagucu

SEQ ID NO: 733092 - RNA, 24 nt, Human
accccgucucuacuaaaaauacaa

SEQ ID NO: 733093 - RNA, 23 nt, Human
acugcuccauccccuuucuccug

SEQ ID NO: 733094 - RNA, 18 nt, Human
agacaaagaugauccaag

SEQ ID NO: 733095 - RNA, 21 nt, Human
agagccaggaaaacauaacuu

SEQ ID NO: 733096 - RNA, 24 nt, Human
agagugggaaaaugugugaagccu

SEQ ID NO: 733097 - RNA, 24 nt, Human
agcacuuugggaggcugaggcggg

SEQ ID NO: 733098 - RNA, 22 nt, Human
agccuggcuaacauggugaaac

SEQ ID NO: 733099 - RNA, 24 nt, Human
agccuggcuaacauggugaaaccc

SEQ ID NO: 733100 - RNA, 24 nt, Human
agccugggcaacaaagcaagacuc

SEQ ID NO: 733101 - RNA, 22 nt, Human
agccuugagguaagaaagugaa

SEQ ID NO: 733102 - RNA, 18 nt, Human
agcuccauagauaaggca

SEQ ID NO: 733103 - RNA, 18 nt, Human
agcugaggucuguggcug

SEQ ID NO: 733104 - RNA, 21 nt, Human
aggaaaacaucuucauucaga

SEQ ID NO: 733105 - RNA, 22 nt, Human
aggagcaauuccaagagacuac

SEQ ID NO: 733106 - RNA, 20 nt, Human
aggaguuugagaccagccug

SEQ ID NO: 733107 - RNA, 19 nt, Human
aggcacuggggaggccaag

SEQ ID NO: 733108 - RNA, 21 nt, Human
aggcacuggggaggccaaggg

SEQ ID NO: 733109 - RNA, 24 nt, Human
aggcaggagaaucgcuugaacccg

SEQ ID NO: 733110 - RNA, 24 nt, Human
aggcgggcagaucacaaggucagg

SEQ ID NO: 733111 - RNA, 20 nt, Human
aggcugaggcaggagaaucg

SEQ ID NO: 733112 - RNA, 24 nt, Human
aggcugaggcaggagaaucgcuug

SEQ ID NO: 733113 - RNA, 25 nt, Human
agguggagguugcagugacaacggu

SEQ ID NO: 733114 - RNA, 24 nt, Human
agguggagguugcagugagccgag

SEQ ID NO: 733115 - RNA, 21 nt, Human
aucacaaggucaggaguuuga

SEQ ID NO: 733116 - RNA, 24 nt, Human
auugccccaccacacuccagccug

SEQ ID NO: 733117 - RNA, 19 nt, Human
caaaacagaaaaacggcau

SEQ ID NO: 733118 - RNA, 23 nt, Human
caaaagacaaagaugauccaaga

SEQ ID NO: 733119 - RNA, 21 nt, Human
caaagcagcugcuucaaagac

SEQ ID NO: 733120 - RNA, 23 nt, Human
caaagucaaaaacaaaaccaaaa

SEQ ID NO: 733121 - RNA, 21 nt, Human
caaaugaacuaacagcaccug

SEQ ID NO: 733122 - RNA, 23 nt, Human
caacuacaaaaagccaccaaagu

SEQ ID NO: 733123 - RNA, 20 nt, Human
caagugcccacugaggcaac

SEQ ID NO: 733124 - RNA, 23 nt, Human
caauuacagcaaaacucacccca

SEQ ID NO: 733125 - RNA, 21 nt, Human
caauuagaaagagagaaggcc

SEQ ID NO: 733126 - RNA, 24 nt, Human
cacaaggucaggaguuugagacca

SEQ ID NO: 733127 - RNA, 24 nt, Human
cacacccguaauccuagcacuuug

SEQ ID NO: 733128 - RNA, 19 nt, Human
cacaccuguaaucccagcu

SEQ ID NO: 733129 - RNA, 23 nt, Human
cacacuacaagcuaccaagacaa

SEQ ID NO: 733130 - RNA, 18 nt, Human
caccaaagucaaaaacaa

SEQ ID NO: 733131 - RNA, 27 nt, Human
caccacacuccagccugggcaacaaag

SEQ ID NO: 733132 - RNA, 19 nt, Human
caccacugcuccauccccu

SEQ ID NO: 733133 - RNA, 21 nt, Human
caccccacccccgacaaucac

SEQ ID NO: 733134 - RNA, 19 nt, Human
cacccguaauccuagcacu

SEQ ID NO: 733135 - RNA, 24 nt, Human
cacccguaauccuagcacuuuggg

SEQ ID NO: 733136 - RNA, 21 nt, Human
caccuguaaucccagcuacuc

SEQ ID NO: 733137 - RNA, 24 nt, Human
caccuguaaucccagcuacucagg

SEQ ID NO: 733138 - RNA, 21 nt, Human
cacuggggaggccaagggccc

SEQ ID NO: 733139 - RNA, 23 nt, Human
cagccagucaggaaucugcccag

SEQ ID NO: 733140 - RNA, 24 nt, Human
cagcuacucaggaggcugaggcag

SEQ ID NO: 733141 - RNA, 19 nt, Human
caggccaaccacaaggcac

SEQ ID NO: 733142 - RNA, 20 nt, Human
caggccaaccacaaggcacc

SEQ ID NO: 733143 - RNA, 24 nt, Human
caggccaaccacaaggcaccgcuc

SEQ ID NO: 733144 - RNA, 21 nt, Human
cagggccuaccaaacauuuua

SEQ ID NO: 733145 - RNA, 20 nt, Human
caugccaacacuucuacaug

SEQ ID NO: 733146 - RNA, 23 nt, Human
ccaaaagauaccagugaaacuga

SEQ ID NO: 733147 - RNA, 19 nt, Human
ccaaaguauguucucuucu

SEQ ID NO: 733148 - RNA, 18 nt, Human
ccaaagucaaaaacaaaa

SEQ ID NO: 733149 - RNA, 19 nt, Human
ccaaagucaaaaacaaaac

SEQ ID NO: 733150 - RNA, 23 nt, Human
ccacaagggagaucccacuuccc

SEQ ID NO: 733151 - RNA, 23 nt, Human
ccacacuacaagcuaccaagaca

SEQ ID NO: 733152 - RNA, 22 nt, Human
ccaccccacccccgacaaucac

SEQ ID NO: 733153 - RNA, 25 nt, Human
ccacugcuccauccccuuucuccug

SEQ ID NO: 733154 - RNA, 18 nt, Human
ccauccugacugcaggcc

SEQ ID NO: 733155 - RNA, 18 nt, Human
ccaucuccccacugucag

SEQ ID NO: 733156 - RNA, 21 nt, Human
ccccaccacacuccagccugg

SEQ ID NO: 733157 - RNA, 26 nt, Human
ccccaccacacuccagccugggcaac

SEQ ID NO: 733158 - RNA, 18 nt, Human
ccccaggaguucgucucc

SEQ ID NO: 733159 - RNA, 21 nt, Human
ccccggaguuuuagcaacacu

SEQ ID NO: 733160 - RNA, 21 nt, Human
cccgggagguggagguugcag

SEQ ID NO: 733161 - RNA, 22 nt, Human
cccuuuucuucuuuccucugag

SEQ ID NO: 733162 - RNA, 19 nt, Human
ccuaaaccacaauguccua

SEQ ID NO: 733163 - RNA, 24 nt, Human
ccucccaccccacccccgacaauc

SEQ ID NO: 733164 - RNA, 23 nt, Human
ccucuuaccaguacugcucgagg

SEQ ID NO: 733165 - RNA, 23 nt, Human
ccuggcuaacauggugaaacccc

SEQ ID NO: 733166 - RNA, 24 nt, Human
ccuggcuaacauggugaaaccccg

SEQ ID NO: 733167 - RNA, 21 nt, Human
ccuguaaucccagcuacucag

SEQ ID NO: 733168 - RNA, 20 nt, Human
cgaggacaguaaagagaggg

SEQ ID NO: 733169 - RNA, 23 nt, Human
cgcagagauccuuuuggucaggg

SEQ ID NO: 733170 - RNA, 24 nt, Human
cgccgccagccgcaaggacuggca

SEQ ID NO: 733171 - RNA, 24 nt, Human
cgggagguggagguugcagugagc

SEQ ID NO: 733172 - RNA, 19 nt, Human
cuaaaacccaauagggccc

SEQ ID NO: 733173 - RNA, 23 nt, Human
cuaaacagaccaacuguaacuga

SEQ ID NO: 733174 - RNA, 24 nt, Human
cuaaaccacaauguccuaggagca

SEQ ID NO: 733175 - RNA, 20 nt, Human
cuagaguaacagcugcugac

SEQ ID NO: 733176 - RNA, 23 nt, Human
cuauagacccugcucuacacacu

SEQ ID NO: 733177 - RNA, 22 nt, Human
cuaugcaccacugcuccauccc

SEQ ID NO: 733178 - RNA, 24 nt, Human
cucacacccguaauccuagcacuu

SEQ ID NO: 733179 - RNA, 21 nt, Human
cuccaacuacaaaaagccacc

SEQ ID NO: 733180 - RNA, 22 nt, Human
cuccagggccuaccaaacauuu

SEQ ID NO: 733181 - RNA, 24 nt, Human
cuccugaccacacuacaagcuacc

SEQ ID NO: 733182 - RNA, 19 nt, Human
cuccuggcccuuuucuucu

SEQ ID NO: 733183 - RNA, 19 nt, Human
cucugucucaaaaaaaaaa

SEQ ID NO: 733184 - RNA, 20 nt, Human
cugaagcagcucccuggggg

SEQ ID NO: 733185 - RNA, 23 nt, Human
cugacaacagucaucccaggacu

SEQ ID NO: 733186 - RNA, 21 nt, Human
cuguaaucccagcuacucagg

SEQ ID NO: 733187 - RNA, 18 nt, Human
cuguacccaggaagaaac

SEQ ID NO: 733188 - RNA, 21 nt, Human
cuuagaguaaggcaacagaga

SEQ ID NO: 733189 - RNA, 23 nt, Human
cuuuacacugguaccagccccuu

SEQ ID NO: 733190 - RNA, 24 nt, Human
gaaucugcccagaguugaaaacca

SEQ ID NO: 733191 - RNA, 23 nt, Human
gagaaucgcuugaacccgggagg

SEQ ID NO: 733192 - RNA, 18 nt, Human
gagagaaggccccuccuc

SEQ ID NO: 733193 - RNA, 18 nt, Human
gagcagcagcagcucugg

SEQ ID NO: 733194 - RNA, 19 nt, Human
gagcuccauagauaaggca

SEQ ID NO: 733195 - RNA, 23 nt, Human
gagguugcagugagccgagauug

SEQ ID NO: 733196 - RNA, 23 nt, Human
gagugggaaaaugugugaagccu

SEQ ID NO: 733197 - RNA, 22 nt, Human
gaguucgucuccuguuacaacu

SEQ ID NO: 733198 - RNA, 21 nt, Human
gaucacaaggucaggaguuug

SEQ ID NO: 733199 - RNA, 22 nt, Human
gaucacaaggucaggaguuuga

SEQ ID NO: 733200 - RNA, 24 nt, Human
gaucacaaggucaggaguuugaga

SEQ ID NO: 733201 - RNA, 19 nt, Human
gcagacgucguaauuuaug

SEQ ID NO: 733202 - RNA, 19 nt, Human
gccaccaaagucaaaaaca

SEQ ID NO: 733203 - RNA, 25 nt, Human
gccagcuccagcugcuccacaaggg

SEQ ID NO: 733204 - RNA, 22 nt, Human
gccagcugaggucuguggcuga

SEQ ID NO: 733205 - RNA, 20 nt, Human
gccagggaucaaaccgccag

SEQ ID NO: 733206 - RNA, 24 nt, Human
gcccaaggccaccuucauuaacca

SEQ ID NO: 733207 - RNA, 24 nt, Human
gcuaacauggugaaaccccgucuc

SEQ ID NO: 733208 - RNA, 22 nt, Human
ggaaacaaauaccaaaaaccca

SEQ ID NO: 733209 - RNA, 20 nt, Human
ggacaguaaagagagggacu

SEQ ID NO: 733210 - RNA, 22 nt, Human
ggagguugcagugagccgagau

SEQ ID NO: 733211 - RNA, 24 nt, Human
ggagguugcagugagccgagauug

SEQ ID NO: 733212 - RNA, 22 nt, Human
ggaguuuucccaacuuugaaau

SEQ ID NO: 733213 - RNA, 21 nt, Human
ggcacacaccuguaaucccag

SEQ ID NO: 733214 - RNA, 23 nt, Human
ggcagaucacaaggucaggaguu

SEQ ID NO: 733215 - RNA, 24 nt, Human
gguugcucacacccguaauccuag

SEQ ID NO: 733216 - RNA, 18 nt, Human
gugcugguggaggcucug

SEQ ID NO: 733217 - RNA, 18 nt, Human
guggcccuccucccaccc

SEQ ID NO: 733218 - RNA, 21 nt, Human
guugcagugagccgagauugc

SEQ ID NO: 733219 - RNA, 23 nt, Human
uaaaaagaaauaaauguagcauu

SEQ ID NO: 733220 - RNA, 21 nt, Human
uaaaaauacaaaaauuagcca

SEQ ID NO: 733221 - RNA, 21 nt, Human
uaaaauuacuaaagccguuug

SEQ ID NO: 733222 - RNA, 22 nt, Human
uaacauggugaaaccccgucuc

SEQ ID NO: 733223 - RNA, 24 nt, Human
uaacauggugaaaccccgucucua

SEQ ID NO: 733224 - RNA, 21 nt, Human
uaagaaagugaagagcuacgc

SEQ ID NO: 733225 - RNA, 18 nt, Human
uaauuuucagcuuccagg

SEQ ID NO: 733226 - RNA, 18 nt, Human
uacaaaaagccaccaaag

SEQ ID NO: 733227 - RNA, 23 nt, Human
uacaaaaagccaccaaagucaaa

SEQ ID NO: 733228 - RNA, 20 nt, Human
uacaaauaugacuguccccu

SEQ ID NO: 733229 - RNA, 22 nt, Human
uacacacauacauucuaacuuu

SEQ ID NO: 733230 - RNA, 18 nt, Human
uacagaguuucucagaau

SEQ ID NO: 733231 - RNA, 20 nt, Human
uaccaaaaacccaacaccac

SEQ ID NO: 733232 - RNA, 21 nt, Human
uaccaaaaacccaacaccacu

SEQ ID NO: 733233 - RNA, 26 nt, Human
uaccaaaaacccaacaccacuaucaa

SEQ ID NO: 733234 - RNA, 24 nt, Human
uacccuauauaucuguuugagaau

SEQ ID NO: 733235 - RNA, 22 nt, Human
uagaauaaauucccuaugcaaa

SEQ ID NO: 733236 - RNA, 20 nt, Human
uagacccugcucuacacacu

SEQ ID NO: 733237 - RNA, 23 nt, Human
uagaguaaggcaacagagaucuu

SEQ ID NO: 733238 - RNA, 24 nt, Human
uagcacuuugggaggcugaggcgg

SEQ ID NO: 733239 - RNA, 19 nt, Human
uaggucagagccugagguu

SEQ ID NO: 733240 - RNA, 19 nt, Human
uauaucuguuugagaauga

SEQ ID NO: 733241 - RNA, 18 nt, Human
uaugcaaaaguucguagu

SEQ ID NO: 733242 - RNA, 21 nt, Human
uauuugcccaaguauuagguc

SEQ ID NO: 733243 - RNA, 24 nt, Human
ucacaaggucaggaguuugagacc

SEQ ID NO: 733244 - RNA, 22 nt, Human
ucagagccugagguuuuaaagg

SEQ ID NO: 733245 - RNA, 20 nt, Human
ucagcaucaauuauuugccc

SEQ ID NO: 733246 - RNA, 22 nt, Human
ucagggcaaauaaagccaccac

SEQ ID NO: 733247 - RNA, 19 nt, Human
uccaaccuaagucaaccaa

SEQ ID NO: 733248 - RNA, 20 nt, Human
uccaacuacaaaaagccacc

SEQ ID NO: 733249 - RNA, 20 nt, Human
uccagcagaugcuggaguuu

SEQ ID NO: 733250 - RNA, 25 nt, Human
ucccagccagcuccagcugcuccac

SEQ ID NO: 733251 - RNA, 20 nt, Human
ucccucccagccagcuccag

SEQ ID NO: 733252 - RNA, 18 nt, Human
ucccugggggaagcaggg

SEQ ID NO: 733253 - RNA, 24 nt, Human
ucccugggggaagcagggcaggca

SEQ ID NO: 733254 - RNA, 24 nt, Human
ucgcuugaacccgggagguggagg

SEQ ID NO: 733255 - RNA, 18 nt, Human
ucuaaaacccaauagggc

SEQ ID NO: 733256 - RNA, 19 nt, Human
ucuaaaacuucuaaaaccc

SEQ ID NO: 733257 - RNA, 24 nt, Human
ucuaaaacuucuaaaacccaauag

SEQ ID NO: 733258 - RNA, 22 nt, Human
ucuacacacuaucaaauuucca

SEQ ID NO: 733259 - RNA, 19 nt, Human
ucuagaaguuaugguucua

SEQ ID NO: 733260 - RNA, 20 nt, Human
ucucaaguaauucugcaagg

SEQ ID NO: 733261 - RNA, 21 nt, Human
ucucuacuaaaaauacaaaaa

SEQ ID NO: 733262 - RNA, 22 nt, Human
ucugaaaugcgagggguggggg

SEQ ID NO: 733263 - RNA, 18 nt, Human
ucuggcgacuccagggcc

SEQ ID NO: 733264 - RNA, 20 nt, Human
ucuggcgacuccagggccua

SEQ ID NO: 733265 - RNA, 23 nt, Human
ucugucucaaaaaaaaaaaaaaa

SEQ ID NO: 733266 - RNA, 23 nt, Human
ucuuaaguucacauccaccuaac

SEQ ID NO: 733267 - RNA, 20 nt, Human
ugaaaaacuaaauacacaca

SEQ ID NO: 733268 - RNA, 19 nt, Human
ugaaaaccaagacaaccau

SEQ ID NO: 733269 - RNA, 21 nt, Human
ugaaaccaguaguaaaauuac

SEQ ID NO: 733270 - RNA, 22 nt, Human
ugaaagagaaacuaaggaaacu

SEQ ID NO: 733271 - RNA, 21 nt, Human
ugaacaauuacagcaaaacuc

SEQ ID NO: 733272 - RNA, 21 nt, Human
ugaacgaaacuaacucagugu

SEQ ID NO: 733273 - RNA, 23 nt, Human
ugaagagcuacgcaucuacccaa

SEQ ID NO: 733274 - RNA, 22 nt, Human
ugacccaguaaaacccaggcag

SEQ ID NO: 733275 - RNA, 23 nt, Human
ugagaauggcaaaacagaaaaac

SEQ ID NO: 733276 - RNA, 23 nt, Human
ugagaccagccuggcuaacaugg

SEQ ID NO: 733277 - RNA, 19 nt, Human
ugagagccaggccacagag

SEQ ID NO: 733278 - RNA, 18 nt, Human
ugagaggaucuggccucu

SEQ ID NO: 733279 - RNA, 20 nt, Human
ugaggcaggagaaucgcuug

SEQ ID NO: 733280 - RNA, 24 nt, Human
ugaggcaggagaaucgcuugaacc

SEQ ID NO: 733281 - RNA, 25 nt, Human
ugaggcaggagaaucgcuugaaccc

SEQ ID NO: 733282 - RNA, 27 nt, Human
ugagguuuuaaaggaauuucaccuugg

SEQ ID NO: 733283 - RNA, 19 nt, Human
ugccagugaaggaauuuuc

SEQ ID NO: 733284 - RNA, 26 nt, Human
ugccccaccacacuccagccugggca

SEQ ID NO: 733285 - RNA, 22 nt, Human
uggaaagucuagcacacagcaa

SEQ ID NO: 733286 - RNA, 19 nt, Human
uggaaccacaaaacagucc

SEQ ID NO: 733287 - RNA, 23 nt, Human
uggaaccacaaaacaguccuaac

SEQ ID NO: 733288 - RNA, 20 nt, Human
uggaggcucuggaagaggca

SEQ ID NO: 733289 - RNA, 18 nt, Human
uggaucacggcuaugacc

SEQ ID NO: 733290 - RNA, 24 nt, Human
uggcaacuacauuaucuagaaguu

SEQ ID NO: 733291 - RNA, 22 nt, Human
uggcacacaccuguaaucccag

SEQ ID NO: 733292 - RNA, 24 nt, Human
uggcccuccucccaccccaccccc

SEQ ID NO: 733293 - RNA, 18 nt, Human
uggcuagacagagccuug

SEQ ID NO: 733294 - RNA, 20 nt, Human
uggcuagacagagccuugag

SEQ ID NO: 733295 - RNA, 19 nt, Human
ugggaaaaugugugaagcc

SEQ ID NO: 733296 - RNA, 20 nt, Human
ugggaggcugaggcgggcag

SEQ ID NO: 733297 - RNA, 24 nt, Human
ugggaggcugaggcgggcagauca

SEQ ID NO: 733298 - RNA, 23 nt, Human
ugggccuccacucgggcugccag

SEQ ID NO: 733299 - RNA, 19 nt, Human
ugguaccagccccuucuca

SEQ ID NO: 733300 - RNA, 18 nt, Human
uggugauaaagacaaucu

SEQ ID NO: 733301 - RNA, 24 nt, Human
ugguggaggcucuggaagaggcac

SEQ ID NO: 733302 - RNA, 23 nt, Human
ugguggcacacaccuguaauccc

SEQ ID NO: 733303 - RNA, 24 nt, Human
ugguggcacacaccuguaauccca

SEQ ID NO: 733304 - RNA, 21 nt, Human
ugugugagcucaugugugggc

SEQ ID NO: 733305 - RNA, 21 nt, Human
uuaaguucacauccaccuaac

SEQ ID NO: 733306 - RNA, 21 nt, Human
uuagaaagagagaaggccccu

SEQ ID NO: 733307 - RNA, 18 nt, Human
uucacauccaccuaacuc

SEQ ID NO: 733308 - RNA, 21 nt, Human
uucagggcaaauaaagccacc

SEQ ID NO: 733309 - RNA, 21 nt, Human
uuccaggccaaccacaaggca

SEQ ID NO: 733310 - RNA, 25 nt, Human
uuccaggccaaccacaaggcaccgc

SEQ ID NO: 733311 - RNA, 19 nt, Human
uuccagguucuggacuauu

SEQ ID NO: 733312 - RNA, 23 nt, Human
uucugagaggaucuggccucugc

SEQ ID NO: 733313 - RNA, 24 nt, Human
uugaacccgggagguggagguugc

SEQ ID NO: 733314 - RNA, 19 nt, Human
uugcagugagccgagauug

SEQ ID NO: 733315 - RNA, 20 nt, Human
uugcagugagccgagauugc

SEQ ID NO: 733316 - RNA, 21 nt, Human
uugcagugagccgagauugcc

SEQ ID NO: 733317 - RNA, 22 nt, Human
uugcagugagccgagauugccc

SEQ ID NO: 733318 - RNA, 23 nt, Human
uugcccaaguauuaggucccaaa

SEQ ID NO: 733319 - RNA, 24 nt, Human
uugcucacacccguaauccuagca

SEQ ID NO: 733320 - RNA, 25 nt, Human
uugggaggcugaggcgggcagauca

SEQ ID NO: 733321 - RNA, 23 nt, Human
uugucauggauggcuggcagccu

SEQ ID NO: 733322 - RNA, 20 nt, Human
uuucacacugaagcagcucc

SEQ ID NO: 733323 - RNA, 18 nt, Human
uuugagaaugaaagagaa

SEQ ID NO: 733324 - RNA, 19 nt, Human
aaaaacaaaauccgacccc

SEQ ID NO: 733325 - RNA, 20 nt, Human
aacaaaauccgaccccaucc

SEQ ID NO: 733326 - RNA, 18 nt, Human
aaccauuugaaacacuca

SEQ ID NO: 733327 - RNA, 23 nt, Human
acgcaaaugcaggaaaauaacca

SEQ ID NO: 733328 - RNA, 23 nt, Human
agucacuaaaaaacaaaauccga

SEQ ID NO: 733329 - RNA, 22 nt, Human
caaaugcaggaaaauaaccaga

SEQ ID NO: 733330 - RNA, 22 nt, Human
caacaguaagggcacagggcag

SEQ ID NO: 733331 - RNA, 20 nt, Human
cacaagcgcugcugcuccuc

SEQ ID NO: 733332 - RNA, 18 nt, Human
cagcuuaguaagaacuga

SEQ ID NO: 733333 - RNA, 20 nt, Human
cagggcaguauuuauuaaca

SEQ ID NO: 733334 - RNA, 23 nt, Human
ccacuuaacaugcuugacuuuug

SEQ ID NO: 733335 - RNA, 19 nt, Human
ccgaccccaucccuaaaac

SEQ ID NO: 733336 - RNA, 22 nt, Human
ccgaccccaucccuaaaaccaa

SEQ ID NO: 733337 - RNA, 19 nt, Human
gaccccaucccuaaaacca

SEQ ID NO: 733338 - RNA, 20 nt, Human
ggcggcggcggcggcggcgg

SEQ ID NO: 733339 - RNA, 21 nt, Human
gggcacagggcaguauuuauu

SEQ ID NO: 733340 - RNA, 20 nt, Human
guagucacuaaaaaacaaaa

SEQ ID NO: 733341 - RNA, 18 nt, Human
uauuauacaacaugacca

SEQ ID NO: 733342 - RNA, 22 nt, Human
ucaaaacuuaauuuuucacuau

SEQ ID NO: 733343 - RNA, 21 nt, Human
ucuggcggcggcggcggcggc

SEQ ID NO: 733344 - RNA, 26 nt, Human
ugaaccauuugaaacacucaacgcaa

SEQ ID NO: 733345 - RNA, 24 nt, Human
ugcaggaaaauaaccagauggcua

SEQ ID NO: 733346 - RNA, 18 nt, Human
uggcggcggcggcggcgg

SEQ ID NO: 733347 - RNA, 21 nt, Human
uguaauuguaaagacugacuc

SEQ ID NO: 733348 - RNA, 18 nt, Human
uuaacacaaacaaugaac

SEQ ID NO: 733349 - RNA, 19 nt, Human
uuuguagucacuaaaaaac

SEQ ID NO: 733350 - RNA, 21 nt, Human
aaaaaaaauuacccaucaaga

SEQ ID NO: 733351 - RNA, 23 nt, Human
aaaaaaacccaguacuaugauac

SEQ ID NO: 733352 - RNA, 21 nt, Human
aaaaaacaaaaccaaaaaaaa

SEQ ID NO: 733353 - RNA, 24 nt, Human
aaaaaacaaacaaacaaaaaagca

SEQ ID NO: 733354 - RNA, 22 nt, Human
aaaaaauagaaaccaaauaccc

SEQ ID NO: 733355 - RNA, 19 nt, Human
aaaaaauuuucuuuccuug

SEQ ID NO: 733356 - RNA, 21 nt, Human
aaaacuguuugaucgcuucag

SEQ ID NO: 733357 - RNA, 19 nt, Human
aaaagucacaaaaaccugu

SEQ ID NO: 733358 - RNA, 24 nt, Human
aaaauauuguuuaugucauguuuu

SEQ ID NO: 733359 - RNA, 18 nt, Human
aaacaaacaaaaaaaccc

SEQ ID NO: 733360 - RNA, 24 nt, Human
aaacaaacaaacaaaaaagcaggg

SEQ ID NO: 733361 - RNA, 23 nt, Human
aaacagggucaccuagaaaaaaa

SEQ ID NO: 733362 - RNA, 21 nt, Human
aaaccaaauaccccaccuggu

SEQ ID NO: 733363 - RNA, 19 nt, Human
aaagacaacuuccuggcca

SEQ ID NO: 733364 - RNA, 18 nt, Human
aaagcagggacugccccu

SEQ ID NO: 733365 - RNA, 20 nt, Human
aaauuuucuuuccuugaagc

SEQ ID NO: 733366 - RNA, 19 nt, Human
aacaaaaccaaaaaaaaau

SEQ ID NO: 733367 - RNA, 25 nt, Human
aaccaaaaaaaaauuuccuucuacu

SEQ ID NO: 733368 - RNA, 21 nt, Human
aaccaaauaccccaccuggua

SEQ ID NO: 733369 - RNA, 22 nt, Human
aaggggccaaggaucacaagug

SEQ ID NO: 733370 - RNA, 25 nt, Human
aaggggccaaggaucacaagugcaa

SEQ ID NO: 733371 - RNA, 20 nt, Human
acacaauaaaacaaacaaaa

SEQ ID NO: 733372 - RNA, 26 nt, Human
accaaauaccccaccugguaugcccc

SEQ ID NO: 733373 - RNA, 22 nt, Human
acuuucucaaaggcaaaggcug

SEQ ID NO: 733374 - RNA, 21 nt, Human
agaaaaauaccaaacacagug

SEQ ID NO: 733375 - RNA, 23 nt, Human
agaauggggaaaggggccaagga

SEQ ID NO: 733376 - RNA, 20 nt, Human
agagggaaggaaagaaaagg

SEQ ID NO: 733377 - RNA, 23 nt, Human
agaugucaaagguucacaaagcu

SEQ ID NO: 733378 - RNA, 21 nt, Human
aggaaaagacaaaucuauuca

SEQ ID NO: 733379 - RNA, 18 nt, Human
aggaaagaaaaggagaag

SEQ ID NO: 733380 - RNA, 21 nt, Human
agggacugccccugggggcuu

SEQ ID NO: 733381 - RNA, 22 nt, Human
auagcaucaugcccaaagacau

SEQ ID NO: 733382 - RNA, 22 nt, Human
augaaaaaacaaacaaacaaaa

SEQ ID NO: 733383 - RNA, 22 nt, Human
augaagacucaaacugggaaug

SEQ ID NO: 733384 - RNA, 21 nt, Human
augggccagcuccuuggcuca

SEQ ID NO: 733385 - RNA, 22 nt, Human
auuacuauugguuuuccuaauu

SEQ ID NO: 733386 - RNA, 22 nt, Human
auuguuuaugucauguuuugga

SEQ ID NO: 733387 - RNA, 22 nt, Human
caaaacccagcugauccacugu

SEQ ID NO: 733388 - RNA, 20 nt, Human
caaacaaaaaaacccaguac

SEQ ID NO: 733389 - RNA, 22 nt, Human
caaacaaacaaaaaagcagggu

SEQ ID NO: 733390 - RNA, 23 nt, Human
caaagacaacuuccuggccaaaa

SEQ ID NO: 733391 - RNA, 20 nt, Human
caacuuccuggccaaaaccc

SEQ ID NO: 733392 - RNA, 23 nt, Human
cacaaagacaacuuccuggccaa

SEQ ID NO: 733393 - RNA, 24 nt, Human
caguaaucccuuaaacaggcaugc

SEQ ID NO: 733394 - RNA, 23 nt, Human
caguuugccuccuuggcucacag

SEQ ID NO: 733395 - RNA, 19 nt, Human
ccaaaacccagcugaucca

SEQ ID NO: 733396 - RNA, 21 nt, Human
ccaaugggccagcuccuuggc

SEQ ID NO: 733397 - RNA, 23 nt, Human
ccacccuaaaacuguuugaucgc

SEQ ID NO: 733398 - RNA, 31 nt, Human
ccaguaaucccuuaaacaggcaugcucuccu

SEQ ID NO: 733399 - RNA, 18 nt, Human
cccuaagccccuuuaccc

SEQ ID NO: 733400 - RNA, 20 nt, Human
cccucccucacauguuccca

SEQ ID NO: 733401 - RNA, 21 nt, Human
ccuaagccccuuuacccuccc

SEQ ID NO: 733402 - RNA, 23 nt, Human
ccuagaaaaaaaacaaguuuaua

SEQ ID NO: 733403 - RNA, 18 nt, Human
cuaaggcuguggcugcug

SEQ ID NO: 733404 - RNA, 23 nt, Human
cugaauuauaaaaaacaaaacca

SEQ ID NO: 733405 - RNA, 19 nt, Human
cuuccuggccaaaacccag

SEQ ID NO: 733406 - RNA, 20 nt, Human
cuucuacuacuaagccaugc

SEQ ID NO: 733407 - RNA, 23 nt, Human
cuucuugaacaauuagcuccugg

SEQ ID NO: 733408 - RNA, 18 nt, Human
cuuggcucacaggagggg

SEQ ID NO: 733409 - RNA, 27 nt, Human
gaaaaaacaaacaaacaaaaaagcagg

SEQ ID NO: 733410 - RNA, 22 nt, Human
gaugguguugagaauggggaaa

SEQ ID NO: 733411 - RNA, 19 nt, Human
gcagaagacaggaacccca

SEQ ID NO: 733412 - RNA, 21 nt, Human
ggcaaaaagcuggggaagaga

SEQ ID NO: 733413 - RNA, 19 nt, Human
ggcaucaggcaaaaagcug

SEQ ID NO: 733414 - RNA, 21 nt, Human
gggaaguguaagucaacuuca

SEQ ID NO: 733415 - RNA, 22 nt, Human
gguaaaaggggaaacaaaaaaa

SEQ ID NO: 733416 - RNA, 21 nt, Human
gguggggugggagaaaugggu

SEQ ID NO: 733417 - RNA, 23 nt, Human
gguggggugggagaaaugggugg

SEQ ID NO: 733418 - RNA, 18 nt, Human
guacaguacguuuugguu

SEQ ID NO: 733419 - RNA, 18 nt, Human
gugcacaccccugugcgc

SEQ ID NO: 733420 - RNA, 24 nt, Human
uaaaaaaaauuacccaucaagaaa

SEQ ID NO: 733421 - RNA, 18 nt, Human
uaaaaaaaucccucaugc

SEQ ID NO: 733422 - RNA, 28 nt, Human
uaaaaaaaucccucaugcaaauuguaga

SEQ ID NO: 733423 - RNA, 24 nt, Human
uaaaacaaacaaaaaaacccagua

SEQ ID NO: 733424 - RNA, 22 nt, Human
uaaacaggcaugcucuccaucu

SEQ ID NO: 733425 - RNA, 20 nt, Human
uaacaggaugaaguucagua

SEQ ID NO: 733426 - RNA, 24 nt, Human
uaagagaaauaggggaaagccaca

SEQ ID NO: 733427 - RNA, 21 nt, Human
uaaggcuguggcugcugcaga

SEQ ID NO: 733428 - RNA, 19 nt, Human
uacuacuaagccaugcagg

SEQ ID NO: 733429 - RNA, 22 nt, Human
uagaaaccaaauaccccaccug

SEQ ID NO: 733430 - RNA, 24 nt, Human
uagauagcaucaugcccaaagaca

SEQ ID NO: 733431 - RNA, 21 nt, Human
uagcaucaugcccaaagacau

SEQ ID NO: 733432 - RNA, 21 nt, Human
uaggaccaguaaucccuuaaa

SEQ ID NO: 733433 - RNA, 19 nt, Human
uagugugcugggggaugaa

SEQ ID NO: 733434 - RNA, 28 nt, Human
uauccauauauauaauaaaccaguuugu

SEQ ID NO: 733435 - RNA, 22 nt, Human
ucacaggaggggaacauugugg

SEQ ID NO: 733436 - RNA, 19 nt, Human
ucaugcauuuuuaaagcca

SEQ ID NO: 733437 - RNA, 23 nt, Human
uccacacccccucaugaccccaa

SEQ ID NO: 733438 - RNA, 18 nt, Human
uccagagggauggauggu

SEQ ID NO: 733439 - RNA, 22 nt, Human
uccccagucugugaaagccuau

SEQ ID NO: 733440 - RNA, 20 nt, Human
ucuaacaggaugaaguucag

SEQ ID NO: 733441 - RNA, 18 nt, Human
ucucuguacgguacagua

SEQ ID NO: 733442 - RNA, 19 nt, Human
ucuucagaaauguucucac

SEQ ID NO: 733443 - RNA, 19 nt, Human
ucuucccuaaguauuaaga

SEQ ID NO: 733444 - RNA, 19 nt, Human
ugaaaaaacaaacaaacaa

SEQ ID NO: 733445 - RNA, 24 nt, Human
ugaaaaaacaaacaaacaaaaaag

SEQ ID NO: 733446 - RNA, 19 nt, Human
ugaccaaugggccagcucc

SEQ ID NO: 733447 - RNA, 21 nt, Human
ugaggaaaagacaaaucuauu

SEQ ID NO: 733448 - RNA, 24 nt, Human
ugagguaaaaggggaaacaaaaaa

SEQ ID NO: 733449 - RNA, 19 nt, Human
uggagagggaaggaaagaa

SEQ ID NO: 733450 - RNA, 24 nt, Human
uggccaagcuguuucuggaaggga

SEQ ID NO: 733451 - RNA, 22 nt, Human
uggccacacaauaaaacaaaca

SEQ ID NO: 733452 - RNA, 24 nt, Human
uggccacacaauaaaacaaacaaa

SEQ ID NO: 733453 - RNA, 18 nt, Human
uggggugggagaaauggg

SEQ ID NO: 733454 - RNA, 20 nt, Human
uggggugggagaaaugggug

SEQ ID NO: 733455 - RNA, 21 nt, Human
uggggugggagaaaugggugg

SEQ ID NO: 733456 - RNA, 21 nt, Human
ugguaugcccccuuuucccua

SEQ ID NO: 733457 - RNA, 21 nt, Human
uguaugauccuuuguccagag

SEQ ID NO: 733458 - RNA, 22 nt, Human
ugugcaguuugccuccuuggcu

SEQ ID NO: 733459 - RNA, 23 nt, Human
ugugcaguuugccuccuuggcuc

SEQ ID NO: 733460 - RNA, 25 nt, Human
uguucccacccucacuccacacccc

SEQ ID NO: 733461 - RNA, 21 nt, Human
uuaacauuugcccacaaauaa

SEQ ID NO: 733462 - RNA, 23 nt, Human
uucagugggacuuuuuuuccauu

SEQ ID NO: 733463 - RNA, 21 nt, Human
uuccugucagauucuucccua

SEQ ID NO: 733464 - RNA, 20 nt, Human
uucuugaacaauuagcuccu

SEQ ID NO: 733465 - RNA, 20 nt, Human
uugugcacaccccugugcgc

SEQ ID NO: 733466 - RNA, 22 nt, Human
uuuacaagcuugugcaguuugc

SEQ ID NO: 733467 - RNA, 18 nt, Human
uuugcuccuuuucucugu

SEQ ID NO: 733468 - RNA, 21 nt, Human
uuuguccagagggauggaugg

SEQ ID NO: 733469 - RNA, 22 nt, Human
uuugucuuucccaucuucagaa

SEQ ID NO: 733470 - RNA, 20 nt, Human
uuugugagcuacauaauuug

SEQ ID NO: 733471 - RNA, 23 nt, Human
aaaaaaguauucccacacugacu

SEQ ID NO: 733472 - RNA, 25 nt, Human
aaaugccaggacauuaagcugugag

SEQ ID NO: 733473 - RNA, 20 nt, Human
aacaagcccagagagaaggg

SEQ ID NO: 733474 - RNA, 20 nt, Human
aacacagcaagacccugucu

SEQ ID NO: 733475 - RNA, 21 nt, Human
aacacagcaagacccugucuc

SEQ ID NO: 733476 - RNA, 19 nt, Human
aacacagugaaaucccguc

SEQ ID NO: 733477 - RNA, 20 nt, Human
aacacagugaaaucccgucu

SEQ ID NO: 733478 - RNA, 21 nt, Human
aacacagugaaaucccgucuc

SEQ ID NO: 733479 - RNA, 21 nt, Human
aaccacagcaaagccgcaaaa

SEQ ID NO: 733480 - RNA, 18 nt, Human
aagccaccuccugcccag

SEQ ID NO: 733481 - RNA, 24 nt, Human
aagcccacaccccugcucaugucc

SEQ ID NO: 733482 - RNA, 21 nt, Human
aaggagaagggcaggaaaagg

SEQ ID NO: 733483 - RNA, 20 nt, Human
aaggagguggaggcugcagu

SEQ ID NO: 733484 - RNA, 20 nt, Human
aagggcaggaaaagguccag

SEQ ID NO: 733485 - RNA, 25 nt, Human
aagguccagggcacagggcaagcaa

SEQ ID NO: 733486 - RNA, 20 nt, Human
acagagcaagacccugucuc

SEQ ID NO: 733487 - RNA, 24 nt, Human
acagagcaagacccugucucaaaa

SEQ ID NO: 733488 - RNA, 23 nt, Human
acagagcgagacuccguauaaaa

SEQ ID NO: 733489 - RNA, 24 nt, Human
acagcaggugcuggaagaugacca

SEQ ID NO: 733490 - RNA, 18 nt, Human
acagcccagaacccacag

SEQ ID NO: 733491 - RNA, 21 nt, Human
acaggaacccagaguuccaca

SEQ ID NO: 733492 - RNA, 19 nt, Human
accacugcacuccagccug

SEQ ID NO: 733493 - RNA, 23 nt, Human
acccuaaaaccuuaagcaggauu

SEQ ID NO: 733494 - RNA, 19 nt, Human
accgcccccuuaaccccuc

SEQ ID NO: 733495 - RNA, 23 nt, Human
accuguagucccagcuacucggg

SEQ ID NO: 733496 - RNA, 18 nt, Human
acggccucugauucaggc

SEQ ID NO: 733497 - RNA, 24 nt, Human
acugcacuccagccugggugacag

SEQ ID NO: 733498 - RNA, 24 nt, Human
acugcacuccagccugggugacag

SEQ ID NO: 733499 - RNA, 26 nt, Human
acugcacuccagccugggugacagag

SEQ ID NO: 733500 - RNA, 26 nt, Human
acugcacuccagccugggugacagag

SEQ ID NO: 733501 - RNA, 21 nt, Human
acugggugugguggcacacgc

SEQ ID NO: 733502 - RNA, 22 nt, Human
acugggugugguggcacacgcc

SEQ ID NO: 733503 - RNA, 18 nt, Human
acuuuuauugcaaaaagu

SEQ ID NO: 733504 - RNA, 19 nt, Human
agaacacgccagggugccc

SEQ ID NO: 733505 - RNA, 18 nt, Human
agacaggagggucacuug

SEQ ID NO: 733506 - RNA, 20 nt, Human
agagaaacccaggggcugcc

SEQ ID NO: 733507 - RNA, 19 nt, Human
agagcuacagggcaggggg

SEQ ID NO: 733508 - RNA, 18 nt, Human
agaggaaggagaagggca

SEQ ID NO: 733509 - RNA, 18 nt, Human
agaggcuggugccugguu

SEQ ID NO: 733510 - RNA, 24 nt, Human
agagggaaacuggggagaggaggg

SEQ ID NO: 733511 - RNA, 24 nt, Human
agauggagcuugcagugagccgag

SEQ ID NO: 733512 - RNA, 19 nt, Human
agcacuuugggaggcugag

SEQ ID NO: 733513 - RNA, 19 nt, Human
agcacuuugggaggcugag

SEQ ID NO: 733514 - RNA, 23 nt, Human
agcacuuugggaggcugagacag

SEQ ID NO: 733515 - RNA, 20 nt, Human
agcagccccuaggaaguuaa

SEQ ID NO: 733516 - RNA, 23 nt, Human
agccacgccaucuggccagcaca

SEQ ID NO: 733517 - RNA, 24 nt, Human
agccaggcagaucacaaggucagg

SEQ ID NO: 733518 - RNA, 24 nt, Human
agccuggguaacacagcaagaccc

SEQ ID NO: 733519 - RNA, 24 nt, Human
agccugggugacagagcgagacuc

SEQ ID NO: 733520 - RNA, 19 nt, Human
agcugcggcauucacccuc

SEQ ID NO: 733521 - RNA, 20 nt, Human
agcugggcgugguggugggu

SEQ ID NO: 733522 - RNA, 19 nt, Human
aggagaggguagggcaggg

SEQ ID NO: 733523 - RNA, 27 nt, Human
aggcaaggacaaaaacucaagccaagg

SEQ ID NO: 733524 - RNA, 24 nt, Human
aggcagaucacaaggucaggagau

SEQ ID NO: 733525 - RNA, 21 nt, Human
aggcgggagaauggcgugaac

SEQ ID NO: 733526 - RNA, 24 nt, Human
aggcgggagaauggcgugaaccug

SEQ ID NO: 733527 - RNA, 24 nt, Human
aggcugagacaggagggucacuug

SEQ ID NO: 733528 - RNA, 23 nt, Human
aggggccaggagcuagggaggca

SEQ ID NO: 733529 - RNA, 21 nt, Human
agggucacuugaggccaggag

SEQ ID NO: 733530 - RNA, 19 nt, Human
agguggaggcugcagugag

SEQ ID NO: 733531 - RNA, 22 nt, Human
agguggaggcugcagugagcca

SEQ ID NO: 733532 - RNA, 25 nt, Human
agucaaggagguggaggcugcagug

SEQ ID NO: 733533 - RNA, 18 nt, Human
aguucaaauguauugucg

SEQ ID NO: 733534 - RNA, 21 nt, Human
auccuuuuguaucuacauaug

SEQ ID NO: 733535 - RNA, 24 nt, Human
aucgugccacugcacuccagccug

SEQ ID NO: 733536 - RNA, 19 nt, Human
augccuguaaucccagcac

SEQ ID NO: 733537 - RNA, 24 nt, Human
auuguaccacugcacuccagccug

SEQ ID NO: 733538 - RNA, 24 nt, Human
caaaaaagacugagaaaacaggaa

SEQ ID NO: 733539 - RNA, 22 nt, Human
caaacccagcccuuacgccccu

SEQ ID NO: 733540 - RNA, 21 nt, Human
caaagccgcaaaaaagacuga

SEQ ID NO: 733541 - RNA, 24 nt, Human
caacaagcccagagagaaggggug

SEQ ID NO: 733542 - RNA, 23 nt, Human
caagagccugugcuccuccugug

SEQ ID NO: 733543 - RNA, 23 nt, Human
cacaccccugcucaugucccacu

SEQ ID NO: 733544 - RNA, 21 nt, Human
cacagcaaagccgcaaaaaag

SEQ ID NO: 733545 - RNA, 22 nt, Human
caccaaagccaccuccugccca

SEQ ID NO: 733546 - RNA, 23 nt, Human
caccccucuucucaacaagccca

SEQ ID NO: 733547 - RNA, 19 nt, Human
cacccuccaagcccacacc

SEQ ID NO: 733548 - RNA, 19 nt, Human
caccucccagggccucccg

SEQ ID NO: 733549 - RNA, 23 nt, Human
caccucccagggccucccgggaa

SEQ ID NO: 733550 - RNA, 24 nt, Human
cacgccuauaauccuagcacuuug

SEQ ID NO: 733551 - RNA, 18 nt, Human
cacgccuguagucucagc

SEQ ID NO: 733552 - RNA, 22 nt, Human
cacuccagccugggugacagag

SEQ ID NO: 733553 - RNA, 22 nt, Human
cacuccagccugggugacagag

SEQ ID NO: 733554 - RNA, 24 nt, Human
cacuccagccugggugacagagcg

SEQ ID NO: 733555 - RNA, 19 nt, Human
cacugcacuccagccuggg

SEQ ID NO: 733556 - RNA, 19 nt, Human
cacugcacuccagccuggg

SEQ ID NO: 733557 - RNA, 19 nt, Human
cacugcacuccagccuggg

SEQ ID NO: 733558 - RNA, 19 nt, Human
cacugcacuccagccuggg

SEQ ID NO: 733559 - RNA, 19 nt, Human
cacugcacuccagccuggg

SEQ ID NO: 733560 - RNA, 22 nt, Human
cacugcacuccagccuggguga

SEQ ID NO: 733561 - RNA, 22 nt, Human
cacugcacuccagccuggguga

SEQ ID NO: 733562 - RNA, 23 nt, Human
cacugcacuccagccugggugac

SEQ ID NO: 733563 - RNA, 24 nt, Human
cacugcacuccagccugggugaca

SEQ ID NO: 733564 - RNA, 24 nt, Human
cacugcacuccagccugggugaca

SEQ ID NO: 733565 - RNA, 25 nt, Human
cacugcacuccagccugggugacag

SEQ ID NO: 733566 - RNA, 25 nt, Human
cacugcacuccagccugggugacag

SEQ ID NO: 733567 - RNA, 21 nt, Human
cacugucaggcugggcacccc

SEQ ID NO: 733568 - RNA, 20 nt, Human
cagaacccacagcagaggga

SEQ ID NO: 733569 - RNA, 19 nt, Human
cagauacucaauaaacacu

SEQ ID NO: 733570 - RNA, 18 nt, Human
cagcacuuugggaggcug

SEQ ID NO: 733571 - RNA, 24 nt, Human
cagcacuuugggaggcugagccag

SEQ ID NO: 733572 - RNA, 22 nt, Human
cagccagggcguucuaggacaa

SEQ ID NO: 733573 - RNA, 20 nt, Human
cagcccagaacccacagcag

SEQ ID NO: 733574 - RNA, 22 nt, Human
cagcuacucgggagguugaggc

SEQ ID NO: 733575 - RNA, 24 nt, Human
cagcuacucgggagguugaggcgg

SEQ ID NO: 733576 - RNA, 20 nt, Human
cagcucagugccuggaacgg

SEQ ID NO: 733577 - RNA, 19 nt, Human
caggcccagcaagggcuug

SEQ ID NO: 733578 - RNA, 26 nt, Human
cagugcuaagacugucuuccugcuga

SEQ ID NO: 733579 - RNA, 19 nt, Human
cauugcugcagaggcuggu

SEQ ID NO: 733580 - RNA, 21 nt, Human
ccaaccacagcaaagccgcaa

SEQ ID NO: 733581 - RNA, 22 nt, Human
ccaagcgcagcucuccugcacu

SEQ ID NO: 733582 - RNA, 20 nt, Human
ccacugcacuccagccuggg

SEQ ID NO: 733583 - RNA, 20 nt, Human
ccacugcacuccagccuggg

SEQ ID NO: 733584 - RNA, 20 nt, Human
ccacugcacuccagccuggg

SEQ ID NO: 733585 - RNA, 20 nt, Human
ccacugcacuccagccuggg

SEQ ID NO: 733586 - RNA, 20 nt, Human
ccacugcacuccagccuggg

SEQ ID NO: 733587 - RNA, 20 nt, Human
ccacugcacuccagccuggg

SEQ ID NO: 733588 - RNA, 20 nt, Human
ccacugcacuccagccuggg

SEQ ID NO: 733589 - RNA, 21 nt, Human
ccacugcacuccagccugggu

SEQ ID NO: 733590 - RNA, 21 nt, Human
ccacugcacuccagccugggu

SEQ ID NO: 733591 - RNA, 21 nt, Human
ccacugcacuccagccugggu

SEQ ID NO: 733592 - RNA, 21 nt, Human
ccacugcacuccagccugggu

SEQ ID NO: 733593 - RNA, 23 nt, Human
ccacugcacuccagccuggguga

SEQ ID NO: 733594 - RNA, 23 nt, Human
ccacugcacuccagccuggguga

SEQ ID NO: 733595 - RNA, 24 nt, Human
ccacugcacuccagccugggugac

SEQ ID NO: 733596 - RNA, 24 nt, Human
ccacugcacuccagccugggugac

SEQ ID NO: 733597 - RNA, 24 nt, Human
ccagaccauccuggcuaacacagu

SEQ ID NO: 733598 - RNA, 23 nt, Human
ccagggcacagggcaagcaacag

SEQ ID NO: 733599 - RNA, 20 nt, Human
ccaugcugcccacaggacuc

SEQ ID NO: 733600 - RNA, 20 nt, Human
cccaagucaucguccucucc

SEQ ID NO: 733601 - RNA, 22 nt, Human
cccacccgagaaggucuggggc

SEQ ID NO: 733602 - RNA, 24 nt, Human
cccauccucggccuucccagcacc

SEQ ID NO: 733603 - RNA, 29 nt, Human
ccccaccacgcuccacgcgcgagucucug

SEQ ID NO: 733604 - RNA, 22 nt, Human
ccccagagggguggccuuggcu

SEQ ID NO: 733605 - RNA, 22 nt, Human
ccccagaugacuguaugccuug

SEQ ID NO: 733606 - RNA, 23 nt, Human
ccccuucucccuucacgcguccc

SEQ ID NO: 733607 - RNA, 19 nt, Human
cccgagaugcccugugcug

SEQ ID NO: 733608 - RNA, 21 nt, Human
cccgugccgggccagacuggg

SEQ ID NO: 733609 - RNA, 23 nt, Human
cccucacuuccuucugcucucug

SEQ ID NO: 733610 - RNA, 22 nt, Human
ccgacagcaaugacauccacag

SEQ ID NO: 733611 - RNA, 20 nt, Human
ccgcugaacuccaacaaccu

SEQ ID NO: 733612 - RNA, 29 nt, Human
ccgcugaacuccaacaaccucuggguggg

SEQ ID NO: 733613 - RNA, 19 nt, Human
ccgggcgccaccgcccccc

SEQ ID NO: 733614 - RNA, 22 nt, Human
ccuaacccgacagcaaugacau

SEQ ID NO: 733615 - RNA, 22 nt, Human
ccuauaauccuagcacuuuggg

SEQ ID NO: 733616 - RNA, 20 nt, Human
ccucacgcgcaggcccagcc

SEQ ID NO: 733617 - RNA, 20 nt, Human
ccucaugcugacucugcucc

SEQ ID NO: 733618 - RNA, 18 nt, Human
ccuccaagcccacacccc

SEQ ID NO: 733619 - RNA, 22 nt, Human
ccucuucacccuccaagcccac

SEQ ID NO: 733620 - RNA, 23 nt, Human
ccuggcaggggccaggagcuagg

SEQ ID NO: 733621 - RNA, 23 nt, Human
ccuggcuaacacagugaaauccc

SEQ ID NO: 733622 - RNA, 22 nt, Human
ccuggguaacacagcaagaccc

SEQ ID NO: 733623 - RNA, 20 nt, Human
ccugggugacagagcaagac

SEQ ID NO: 733624 - RNA, 22 nt, Human
ccugggugacagagcgagacuc

SEQ ID NO: 733625 - RNA, 20 nt, Human
ccuguaaucccagcacuuug

SEQ ID NO: 733626 - RNA, 22 nt, Human
ccuguaaucccagcacuuuggg

SEQ ID NO: 733627 - RNA, 21 nt, Human
ccuguagucccagcuacucgg

SEQ ID NO: 733628 - RNA, 22 nt, Human
cgaagccacgcccacccgagaa

SEQ ID NO: 733629 - RNA, 24 nt, Human
cgagaucgugccacugcacuccag

SEQ ID NO: 733630 - RNA, 20 nt, Human
cgccaccgccccccgcgagc

SEQ ID NO: 733631 - RNA, 24 nt, Human
cgccuguagucucagcuauucagg

SEQ ID NO: 733632 - RNA, 22 nt, Human
cgcggggugggggugaccucca

SEQ ID NO: 733633 - RNA, 21 nt, Human
cgcugcagcgccaggccuccc

SEQ ID NO: 733634 - RNA, 21 nt, Human
cggcagcugccaaccacagca

SEQ ID NO: 733635 - RNA, 20 nt, Human
cggccggggucggccugggu

SEQ ID NO: 733636 - RNA, 18 nt, Human
cgggaugggcggggagac

SEQ ID NO: 733637 - RNA, 24 nt, Human
cgggcgccaccgccccccgcgagc

SEQ ID NO: 733638 - RNA, 24 nt, Human
cucaugccuguaaucccagcacuu

SEQ ID NO: 733639 - RNA, 24 nt, Human
cuccggccacaugggcugcuggug

SEQ ID NO: 733640 - RNA, 21 nt, Human
cuccguauaaaaaaaaaaaaa

SEQ ID NO: 733641 - RNA, 20 nt, Human
cuccugcacuggcucgcacc

SEQ ID NO: 733642 - RNA, 18 nt, Human
cucugcaguggcccucug

SEQ ID NO: 733643 - RNA, 20 nt, Human
cucuggagggcagcccucug

SEQ ID NO: 733644 - RNA, 20 nt, Human
cucuguaccugcugucccuc

SEQ ID NO: 733645 - RNA, 23 nt, Human
cucugugccgggcgccaccgccc

SEQ ID NO: 733646 - RNA, 26 nt, Human
cucugugccgggcgccaccgcccccc

SEQ ID NO: 733647 - RNA, 22 nt, Human
cugaagucaguguaaagacauc

SEQ ID NO: 733648 - RNA, 21 nt, Human
cugacucugcuccggccacau

SEQ ID NO: 733649 - RNA, 24 nt, Human
cugcaccgcccccuuaaccccucu

SEQ ID NO: 733650 - RNA, 22 nt, Human
cugcagugagccaugauuguac

SEQ ID NO: 733651 - RNA, 19 nt, Human
cugcaguggcccucugggc

SEQ ID NO: 733652 - RNA, 23 nt, Human
cugggcaugguggcucaugccug

SEQ ID NO: 733653 - RNA, 19 nt, Human
cugggugugguggcacacg

SEQ ID NO: 733654 - RNA, 18 nt, Human
cuucccacuucuucuaag

SEQ ID NO: 733655 - RNA, 24 nt, Human
cuugcagugagccgagaucgugcc

SEQ ID NO: 733656 - RNA, 22 nt, Human
cuugcucccucacuuccuucug

SEQ ID NO: 733657 - RNA, 18 nt, Human
gaaacuggggagaggagg

SEQ ID NO: 733658 - RNA, 22 nt, Human
gaaagcagcagagaggggaggc

SEQ ID NO: 733659 - RNA, 24 nt, Human
gaaccagcugggcguggugguuca

SEQ ID NO: 733660 - RNA, 24 nt, Human
gaacccacagcagagggaaacugg

SEQ ID NO: 733661 - RNA, 24 nt, Human
gagaagggguggacccugguuguc

SEQ ID NO: 733662 - RNA, 18 nt, Human
gagccgccccaccacgcu

SEQ ID NO: 733663 - RNA, 18 nt, Human
gagcuugcagugagccga

SEQ ID NO: 733664 - RNA, 23 nt, Human
gagcuugcagugagccgagaucg

SEQ ID NO: 733665 - RNA, 24 nt, Human
gaggagggggccugacccuggauc

SEQ ID NO: 733666 - RNA, 23 nt, Human
gaggcugcagugagccaugauug

SEQ ID NO: 733667 - RNA, 18 nt, Human
gauucuggacauggaagc

SEQ ID NO: 733668 - RNA, 24 nt, Human
gcaaagccgcaaaaaagacugaga

SEQ ID NO: 733669 - RNA, 22 nt, Human
gcaccccucuucucaacaagcc

SEQ ID NO: 733670 - RNA, 22 nt, Human
gcacccgcagcugucugcuugg

SEQ ID NO: 733671 - RNA, 24 nt, Human
gcacuccagccugggugacagagc

SEQ ID NO: 733672 - RNA, 24 nt, Human
gcacuccagccugggugacagagc

SEQ ID NO: 733673 - RNA, 18 nt, Human
gcagaccagccaagcccg

SEQ ID NO: 733674 - RNA, 25 nt, Human
gcagagcugggcucugaaccgcgag

SEQ ID NO: 733675 - RNA, 19 nt, Human
gccacugcacuccagccug

SEQ ID NO: 733676 - RNA, 24 nt, Human
gccacugcacuccagccuggguga

SEQ ID NO: 733677 - RNA, 23 nt, Human
gcccacaccccugcucauguccc

SEQ ID NO: 733678 - RNA, 20 nt, Human
gccgagaucgugccacugca

SEQ ID NO: 733679 - RNA, 24 nt, Human
gcggcggccggggucggccugggu

SEQ ID NO: 733680 - RNA, 21 nt, Human
gcugccccccacauguaccug

SEQ ID NO: 733681 - RNA, 22 nt, Human
gcugggcaugguggcucaugcc

SEQ ID NO: 733682 - RNA, 20 nt, Human
gcugucccucucuggaacag

SEQ ID NO: 733683 - RNA, 24 nt, Human
ggaaaaugcagucuaaaugcccuc

SEQ ID NO: 733684 - RNA, 20 nt, Human
ggaaccagcugggcguggug

SEQ ID NO: 733685 - RNA, 19 nt, Human
ggagaggccaggcagcccu

SEQ ID NO: 733686 - RNA, 24 nt, Human
ggagcuugcagugagccgagaucg

SEQ ID NO: 733687 - RNA, 22 nt, Human
ggaggacagacacaggagaggg

SEQ ID NO: 733688 - RNA, 22 nt, Human
ggaggcugcagugagccaugau

SEQ ID NO: 733689 - RNA, 24 nt, Human
ggaggcugcagugagccaugauug

SEQ ID NO: 733690 - RNA, 20 nt, Human
ggauaggaaauacuuuuauu

SEQ ID NO: 733691 - RNA, 21 nt, Human
ggauguggacacuggagggag

SEQ ID NO: 733692 - RNA, 19 nt, Human
ggcagcugggccuucccua

SEQ ID NO: 733693 - RNA, 24 nt, Human
ggcaugguggcucaugccuguaaa

SEQ ID NO: 733694 - RNA, 23 nt, Human
ggcguggugguucacgccuauaa

SEQ ID NO: 733695 - RNA, 23 nt, Human
ggcugggcaugguggcucaugcc

SEQ ID NO: 733696 - RNA, 23 nt, Human
gggaaacuggggagaggaggggg

SEQ ID NO: 733697 - RNA, 21 nt, Human
gggaaggagagggugagaggu

SEQ ID NO: 733698 - RNA, 25 nt, Human
gggagaggagggggccugacccugg

SEQ ID NO: 733699 - RNA, 18 nt, Human
gggcagggccccaccugg

SEQ ID NO: 733700 - RNA, 19 nt, Human
ggggaaaacagaacgcugg

SEQ ID NO: 733701 - RNA, 22 nt, Human
ggggcgccgcggcucucgaggg

SEQ ID NO: 733702 - RNA, 22 nt, Human
ggggcucccugagggaguuugc

SEQ ID NO: 733703 - RNA, 18 nt, Human
ggguagccccaagggagc

SEQ ID NO: 733704 - RNA, 22 nt, Human
gggugggcucagcagccccuag

SEQ ID NO: 733705 - RNA, 24 nt, Human
gggugugguggcacacgccuguag

SEQ ID NO: 733706 - RNA, 22 nt, Human
gguccagggcacagggcaagca

SEQ ID NO: 733707 - RNA, 21 nt, Human
gguggagaccuggguaggucc

SEQ ID NO: 733708 - RNA, 24 nt, Human
gguggcucaugccuguaaucccag

SEQ ID NO: 733709 - RNA, 19 nt, Human
ggugggaacaaguaggugc

SEQ ID NO: 733710 - RNA, 24 nt, Human
ggugguucacgccuauaauccuag

SEQ ID NO: 733711 - RNA, 18 nt, Human
guccaugucaucgcugcc

SEQ ID NO: 733712 - RNA, 23 nt, Human
gucccaucacugucaggcugggc

SEQ ID NO: 733713 - RNA, 22 nt, Human
gugcccgcugcagcgccaggcc

SEQ ID NO: 733714 - RNA, 22 nt, Human
gugcugggcccccauccucggc

SEQ ID NO: 733715 - RNA, 23 nt, Human
guggcacacgccuguagucucag

SEQ ID NO: 733716 - RNA, 26 nt, Human
uaaaaaggaggcaaggacaaaaacuc

SEQ ID NO: 733717 - RNA, 22 nt, Human
uaacacagcaagacccugucuc

SEQ ID NO: 733718 - RNA, 24 nt, Human
uaacacagcaagacccugucucua

SEQ ID NO: 733719 - RNA, 24 nt, Human
uaacacagugaaaucccgucucua

SEQ ID NO: 733720 - RNA, 20 nt, Human
uaacacugcucacauggcca

SEQ ID NO: 733721 - RNA, 23 nt, Human
uaacaucugugucucagugagcc

SEQ ID NO: 733722 - RNA, 18 nt, Human
uaacuuaauuugugcugu

SEQ ID NO: 733723 - RNA, 21 nt, Human
uaagccccuggcaggggccag

SEQ ID NO: 733724 - RNA, 18 nt, Human
uaagugacagugcuaaga

SEQ ID NO: 733725 - RNA, 25 nt, Human
uacagggcaggggggcucccugagg

SEQ ID NO: 733726 - RNA, 22 nt, Human
uaccacugcacuccagccuggg

SEQ ID NO: 733727 - RNA, 23 nt, Human
uaccuguagucccagcuacucgg

SEQ ID NO: 733728 - RNA, 24 nt, Human
uaccuguagucccagcuacucggg

SEQ ID NO: 733729 - RNA, 21 nt, Human
uacugggugugguggcacacg

SEQ ID NO: 733730 - RNA, 18 nt, Human
uagcacuuugggaggcug

SEQ ID NO: 733731 - RNA, 24 nt, Human
uaggagcagggggcuauggcugaa

SEQ ID NO: 733732 - RNA, 18 nt, Human
uaggccucuaccacgucc

SEQ ID NO: 733733 - RNA, 18 nt, Human
uagggaggcaggcucccc

SEQ ID NO: 733734 - RNA, 22 nt, Human
uaggucacagaccucaugcuga

SEQ ID NO: 733735 - RNA, 26 nt, Human
uagguugucgaggacgccgcggccgg

SEQ ID NO: 733736 - RNA, 21 nt, Human
uaguagaucagcauuaaauac

SEQ ID NO: 733737 - RNA, 20 nt, Human
uauaaaaaaaaaaaaaguau

SEQ ID NO: 733738 - RNA, 21 nt, Human
ucaacacaaguauucccacag

SEQ ID NO: 733739 - RNA, 18 nt, Human
ucacaaggucaggagauc

SEQ ID NO: 733740 - RNA, 24 nt, Human
ucacaaggucaggagauccagacc

SEQ ID NO: 733741 - RNA, 19 nt, Human
ucacaggaagcccagcugc

SEQ ID NO: 733742 - RNA, 23 nt, Human
ucacgccuauaauccuagcacuu

SEQ ID NO: 733743 - RNA, 20 nt, Human
ucacuguguuuauauaacuu

SEQ ID NO: 733744 - RNA, 22 nt, Human
ucacuugaggccaggaguguga

SEQ ID NO: 733745 - RNA, 23 nt, Human
ucagaacacacagcaagugcuca

SEQ ID NO: 733746 - RNA, 22 nt, Human
ucaugccuguaaucccagcacu

SEQ ID NO: 733747 - RNA, 21 nt, Human
ucaugggaggaccccuucucc

SEQ ID NO: 733748 - RNA, 24 nt, Human
uccaagagaaacccaggggcugcc

SEQ ID NO: 733749 - RNA, 22 nt, Human
uccacaggcuagagggacccau

SEQ ID NO: 733750 - RNA, 24 nt, Human
uccagccugggugacagagcaaga

SEQ ID NO: 733751 - RNA, 23 nt, Human
uccagccugggugacagagcgag

SEQ ID NO: 733752 - RNA, 24 nt, Human
uccagccugggugacagagcgaga

SEQ ID NO: 733753 - RNA, 20 nt, Human
uccagguucaggccauccuc

SEQ ID NO: 733754 - RNA, 22 nt, Human
uccccggaggcagcugggccuu

SEQ ID NO: 733755 - RNA, 21 nt, Human
uccccgugugcaggucgugcc

SEQ ID NO: 733756 - RNA, 18 nt, Human
uccucaggaaccagcugg

SEQ ID NO: 733757 - RNA, 23 nt, Human
ucgaagccacgcccacccgagaa

SEQ ID NO: 733758 - RNA, 23 nt, Human
ucgugccacugcacuccagccug

SEQ ID NO: 733759 - RNA, 21 nt, Human
ucuaggacaagacuuccuaac

SEQ ID NO: 733760 - RNA, 21 nt, Human
ucucaagguacagaaaccuuc

SEQ ID NO: 733761 - RNA, 22 nt, Human
ucucuacuaaaaauacacaaac

SEQ ID NO: 733762 - RNA, 19 nt, Human
ucucucagaaucucugcag

SEQ ID NO: 733763 - RNA, 25 nt, Human
ucuucacccuccaagcccacacccc

SEQ ID NO: 733764 - RNA, 22 nt, Human
ugacagagcaagacccugucuc

SEQ ID NO: 733765 - RNA, 21 nt, Human
ugacauccacaguguauggac

SEQ ID NO: 733766 - RNA, 25 nt, Human
ugagaaaaaaaauuacugggugugg

SEQ ID NO: 733767 - RNA, 18 nt, Human
ugagaaaacaggaaccca

SEQ ID NO: 733768 - RNA, 22 nt, Human
ugagaaaacaggaacccagagu

SEQ ID NO: 733769 - RNA, 20 nt, Human
ugagacaggagggucacuug

SEQ ID NO: 733770 - RNA, 25 nt, Human
ugagacaggagggucacuugaggcc

SEQ ID NO: 733771 - RNA, 20 nt, Human
ugagaggugaggacgcaaga

SEQ ID NO: 733772 - RNA, 22 nt, Human
ugagccgagaucgugccacugc

SEQ ID NO: 733773 - RNA, 18 nt, Human
ugaugguggagaccuggg

SEQ ID NO: 733774 - RNA, 22 nt, Human
ugcagugagccaugauuguacc

SEQ ID NO: 733775 - RNA, 24 nt, Human
ugcaguggcccucugggcugagca

SEQ ID NO: 733776 - RNA, 22 nt, Human
ugccccgcugaacuccaacaac

SEQ ID NO: 733777 - RNA, 21 nt, Human
ugccuaggagaacgggccucc

SEQ ID NO: 733778 - RNA, 23 nt, Human
ugccuguaaucccagcacuuugg

SEQ ID NO: 733779 - RNA, 23 nt, Human
ugccuguaaucccagcacuuugg

SEQ ID NO: 733780 - RNA, 21 nt, Human
ugcggugggaggacugcgagu

SEQ ID NO: 733781 - RNA, 22 nt, Human
ugcugggcccccauccucggcc

SEQ ID NO: 733782 - RNA, 21 nt, Human
ugcugucccucucuggaacag

SEQ ID NO: 733783 - RNA, 21 nt, Human
uggaaccaaccaccaaagcca

SEQ ID NO: 733784 - RNA, 18 nt, Human
uggaauuugggaccccac

SEQ ID NO: 733785 - RNA, 19 nt, Human
uggacauggaagccuacag

SEQ ID NO: 733786 - RNA, 21 nt, Human
uggcacacgccuguagucuca

SEQ ID NO: 733787 - RNA, 22 nt, Human
uggcucaugccuguaaucccag

SEQ ID NO: 733788 - RNA, 24 nt, Human
uggcucaugccuguaaucccagca

SEQ ID NO: 733789 - RNA, 18 nt, Human
ugggaacaaguaggugca

SEQ ID NO: 733790 - RNA, 29 nt, Human
ugggagauggagcuugcagugacaacggu

SEQ ID NO: 733791 - RNA, 24 nt, Human
ugggagauggagcuugcagugagc

SEQ ID NO: 733792 - RNA, 24 nt, Human
ugggaggcugagacaggaggguca

SEQ ID NO: 733793 - RNA, 24 nt, Human
ugggaggcugagccaggcagauca

SEQ ID NO: 733794 - RNA, 18 nt, Human
ugggcugggcaugguggc

SEQ ID NO: 733795 - RNA, 21 nt, Human
uggugccugguuuuccccaua

SEQ ID NO: 733796 - RNA, 24 nt, Human
ugguggcacacgccuguagucuca

SEQ ID NO: 733797 - RNA, 24 nt, Human
ugguggcucaugccuguaauccca

SEQ ID NO: 733798 - RNA, 24 nt, Human
uggugguggguaccuguaguccca

SEQ ID NO: 733799 - RNA, 22 nt, Human
uggugguucacgccuauaaucc

SEQ ID NO: 733800 - RNA, 19 nt, Human
ugguucacgccuauaaucc

SEQ ID NO: 733801 - RNA, 21 nt, Human
ugguucacgccuauaauccua

SEQ ID NO: 733802 - RNA, 24 nt, Human
ugguucacgccuauaauccuagca

SEQ ID NO: 733803 - RNA, 20 nt, Human
ugucagggguccugggacau

SEQ ID NO: 733804 - RNA, 24 nt, Human
uguccuugugcacaaaggaguggg

SEQ ID NO: 733805 - RNA, 18 nt, Human
ugugccgggcgccaccgc

SEQ ID NO: 733806 - RNA, 25 nt, Human
uguguuuauauaacuuaauuugugc

SEQ ID NO: 733807 - RNA, 23 nt, Human
uguuccaugcugcccacaggacu

SEQ ID NO: 733808 - RNA, 21 nt, Human
uuaaccaggaaaaugcagucu

SEQ ID NO: 733809 - RNA, 18 nt, Human
uuagcugggcgugguggu

SEQ ID NO: 733810 - RNA, 22 nt, Human
uucaacuuuggaaccaaccacc

SEQ ID NO: 733811 - RNA, 21 nt, Human
uuccaugcugcccacaggacu

SEQ ID NO: 733812 - RNA, 19 nt, Human
uucucaacaagcccagaga

SEQ ID NO: 733813 - RNA, 18 nt, Human
uugcagugagccgagauc

SEQ ID NO: 733814 - RNA, 21 nt, Human
uugcagugagccgagaucgug

SEQ ID NO: 733815 - RNA, 22 nt, Human
uugcagugagccgagaucgugc

SEQ ID NO: 733816 - RNA, 25 nt, Human
uugggaggcugagacaggaggguca

SEQ ID NO: 733817 - RNA, 25 nt, Human
uugggaggcugagccaggcagauca

SEQ ID NO: 733818 - RNA, 23 nt, Human
uuguaccacugcacuccagccug

SEQ ID NO: 733819 - RNA, 27 nt, Human
uuuaaccaggaaaaugcagucuaaaug

SEQ ID NO: 733820 - RNA, 25 nt, Human
aaaaaagaaaaaagaucuaugaagg

SEQ ID NO: 733821 - RNA, 21 nt, Human
aaaaaugaaaaaaagugccca

SEQ ID NO: 733822 - RNA, 25 nt, Human
aaagagaaaaaacaaguuuaaagaa

SEQ ID NO: 733823 - RNA, 20 nt, Human
aaaucuuauucccauuaaaa

SEQ ID NO: 733824 - RNA, 19 nt, Human
aacuugguaacacaggacc

SEQ ID NO: 733825 - RNA, 21 nt, Human
aagaaaaaagaucuaugaagg

SEQ ID NO: 733826 - RNA, 22 nt, Human
aagaagaaauuuuucauaggcu

SEQ ID NO: 733827 - RNA, 26 nt, Human
aagagaaaaaacaaguuuaaagaaga

SEQ ID NO: 733828 - RNA, 21 nt, Human
acaaaaggcgacacugccaca

SEQ ID NO: 733829 - RNA, 23 nt, Human
acaggauuauuguggaaauauua

SEQ ID NO: 733830 - RNA, 18 nt, Human
acaggccaaaggccuuug

SEQ ID NO: 733831 - RNA, 22 nt, Human
acaucucuauaaaguuuuuuug

SEQ ID NO: 733832 - RNA, 18 nt, Human
acccuguuuuaacauuuc

SEQ ID NO: 733833 - RNA, 24 nt, Human
agaaaaaacaaguuuaaagaagaa

SEQ ID NO: 733834 - RNA, 25 nt, Human
agaaaaaacaaguuuaaagaagaaa

SEQ ID NO: 733835 - RNA, 20 nt, Human
agaagcaaauagaaugguuu

SEQ ID NO: 733836 - RNA, 25 nt, Human
agagaaaaaacaaguuuaaagaaga

SEQ ID NO: 733837 - RNA, 18 nt, Human
agagggagcaaugcugau

SEQ ID NO: 733838 - RNA, 19 nt, Human
agggagcagcuuggcacag

SEQ ID NO: 733839 - RNA, 23 nt, Human
auaaaaccacaaaaggcgacacu

SEQ ID NO: 733840 - RNA, 20 nt, Human
auuuuguccaacuuuuucuu

SEQ ID NO: 733841 - RNA, 22 nt, Human
caaaaauaaauaaggaggauaa

SEQ ID NO: 733842 - RNA, 20 nt, Human
caaguccccuaaugaagaaa

SEQ ID NO: 733843 - RNA, 22 nt, Human
caauauuccuagccauuccaca

SEQ ID NO: 733844 - RNA, 20 nt, Human
cacuaugcugcuuccaauau

SEQ ID NO: 733845 - RNA, 21 nt, Human
cacuuuauuuaaaaauggagu

SEQ ID NO: 733846 - RNA, 20 nt, Human
cagaugaagaaguccauuuc

SEQ ID NO: 733847 - RNA, 19 nt, Human
cauaaaaccacaaaaggcg

SEQ ID NO: 733848 - RNA, 27 nt, Human
cauaaaaccacaaaaggcgacacugcc

SEQ ID NO: 733849 - RNA, 24 nt, Human
cccagcaaaucuuagugcaaacau

SEQ ID NO: 733850 - RNA, 24 nt, Human
cccauuaaaaaaaaaugaaaaaaa

SEQ ID NO: 733851 - RNA, 22 nt, Human
cgacacugccacaaucugcuuu

SEQ ID NO: 733852 - RNA, 23 nt, Human
cugccacaaucugcuuuuuccua

SEQ ID NO: 733853 - RNA, 23 nt, Human
cugcuuccaauauuccuagccau

SEQ ID NO: 733854 - RNA, 19 nt, Human
cuuaaaaaaaagaaaaaag

SEQ ID NO: 733855 - RNA, 23 nt, Human
gaaaguggaguaaaaacacugug

SEQ ID NO: 733856 - RNA, 22 nt, Human
gacugauggggucaagggggaa

SEQ ID NO: 733857 - RNA, 27 nt, Human
gagaaaaaacaaguuuaaagaagaaau

SEQ ID NO: 733858 - RNA, 18 nt, Human
gagcagcuuggcacagga

SEQ ID NO: 733859 - RNA, 20 nt, Human
gagcagcuuggcacaggaga

SEQ ID NO: 733860 - RNA, 23 nt, Human
ggagacuuagggguucagaaaug

SEQ ID NO: 733861 - RNA, 18 nt, Human
ggagcagcuuggcacagg

SEQ ID NO: 733862 - RNA, 23 nt, Human
gggaauuucuuuuucaacuguca

SEQ ID NO: 733863 - RNA, 23 nt, Human
uaaaaccacaaaaggcgacacug

SEQ ID NO: 733864 - RNA, 19 nt, Human
uaaauccuauuauuaagaa

SEQ ID NO: 733865 - RNA, 22 nt, Human
uaacugaauuaagauacacccc

SEQ ID NO: 733866 - RNA, 24 nt, Human
uaagaagcaaauagaaugguuuaa

SEQ ID NO: 733867 - RNA, 19 nt, Human
uagcacaggccaaaggccu

SEQ ID NO: 733868 - RNA, 26 nt, Human
uaggucacagcauggcuuaaaaaaaa

SEQ ID NO: 733869 - RNA, 25 nt, Human
uagugcaaacauaauaguuaauuuc

SEQ ID NO: 733870 - RNA, 20 nt, Human
uaguuaucauuuaaccuaaa

SEQ ID NO: 733871 - RNA, 20 nt, Human
uauaauugaaccaaacugug

SEQ ID NO: 733872 - RNA, 20 nt, Human
uauuuuguccaacuuuuucu

SEQ ID NO: 733873 - RNA, 23 nt, Human
uauuuuguccaacuuuuucuuca

SEQ ID NO: 733874 - RNA, 19 nt, Human
ucaacuaaucuuacgacua

SEQ ID NO: 733875 - RNA, 19 nt, Human
ucaacugucacauauaaac

SEQ ID NO: 733876 - RNA, 20 nt, Human
ucagaaauguuggcuauuua

SEQ ID NO: 733877 - RNA, 21 nt, Human
uccguaaaccccaagacaauu

SEQ ID NO: 733878 - RNA, 18 nt, Human
ucuguacagaugaagaag

SEQ ID NO: 733879 - RNA, 22 nt, Human
ucuugcaggguccuuauaaaug

SEQ ID NO: 733880 - RNA, 21 nt, Human
ugaagaaaauuuuaaccucau

SEQ ID NO: 733881 - RNA, 23 nt, Human
ugaagaaguccauuucagggagc

SEQ ID NO: 733882 - RNA, 18 nt, Human
uggcacaggagacuuagg

SEQ ID NO: 733883 - RNA, 24 nt, Human
uggggucaagggggaaaauccagg

SEQ ID NO: 733884 - RNA, 18 nt, Human
uguacaaaaaagacgguu

SEQ ID NO: 733885 - RNA, 23 nt, Human
uguacaaaaaagacgguuagucc

SEQ ID NO: 733886 - RNA, 19 nt, Human
uguccaccuaccacuccca

SEQ ID NO: 733887 - RNA, 20 nt, Human
ugugaaaggucugcuuuacu

SEQ ID NO: 733888 - RNA, 20 nt, Human
uguggaaauauuaaagacca

SEQ ID NO: 733889 - RNA, 24 nt, Human
uuaaaaccuuuuuucagucuuccu

SEQ ID NO: 733890 - RNA, 22 nt, Human
uuaaccuaaaaugagagaccaa

SEQ ID NO: 733891 - RNA, 24 nt, Human
uucaagggaauuucuuuuucaacu

SEQ ID NO: 733892 - RNA, 23 nt, Human
uucccauuaaaaaaaaaugaaaa

SEQ ID NO: 733893 - RNA, 23 nt, Human
uuucuuaaaacaaauauagcaca

SEQ ID NO: 733894 - RNA, 22 nt, Human
uuuuucaacaaucaagagaaag

SEQ ID NO: 733895 - RNA, 21 nt, Human
aaugucuccacaagaaaaaca

SEQ ID NO: 733896 - RNA, 18 nt, Human
acaagccagucuguggug

SEQ ID NO: 733897 - RNA, 22 nt, Human
accccaaaguagacuggaaaau

SEQ ID NO: 733898 - RNA, 20 nt, Human
auccacugcgagaaccccaa

SEQ ID NO: 733899 - RNA, 23 nt, Human
cuagcaugugagaaugugugaga

SEQ ID NO: 733900 - RNA, 24 nt, Human
gaaaucaaguacugaucuaaauaa

SEQ ID NO: 733901 - RNA, 20 nt, Human
ggcaaaagcaaucgaaugcg

SEQ ID NO: 733902 - RNA, 30 nt, Human; identical to SEQ ID NO: 119266

SEQ ID NO: 733903 - RNA, 21 nt, Human
gugugugugugugugugugag

SEQ ID NO: 733904 - RNA, 20 nt, Human
gugugugugugugugugugu

SEQ ID NO: 733905 - RNA, 25 nt, Human
uaaaaaacggcaaaagcaaucgaau

SEQ ID NO: 733906 - RNA, 19 nt, Human
uaagaacugcggugggagg

SEQ ID NO: 733907 - RNA, 23 nt, Human
uagaagggucuagcaugugagaa

SEQ ID NO: 733908 - RNA, 19 nt, Human
uccagaaugagaaagaugg

SEQ ID NO: 733909 - RNA, 23 nt, Human
ucgaaugcgagaaaauggccaag

SEQ ID NO: 733910 - RNA, 21 nt, Human
ugaugcaggagaguucagaua

SEQ ID NO: 733911 - RNA, 22 nt, Human
ugggaauugucagcuaaugucu

SEQ ID NO: 733912 - RNA, 18 nt, Human
ugugcgagaaagggugug

SEQ ID NO: 733913 - RNA, 28 nt, Human
ugugugagaguguguguguguguguggu

SEQ ID NO: 733914 - RNA, 20 nt, Human
ugugugcgugucuaugugug

SEQ ID NO: 733915 - RNA, 21 nt, Human
ugugugugcgugucuaugugu

SEQ ID NO: 733916 - RNA, 27 nt, Human
ugugugugugugcgagaaagggugugu

SEQ ID NO: 733917 - RNA, 18 nt, Human
ugugugugugugugugcg

SEQ ID NO: 733918 - RNA, 18 nt, Human
ugugugugugugugugug

SEQ ID NO: 733919 - RNA, 18 nt, Human
ugugugugugugugugug

SEQ ID NO: 733920 - RNA, 18 nt, Human
ugugugugugugugugug

SEQ ID NO: 733921 - RNA, 21 nt, Human
ugugugugugugugugugugu

SEQ ID NO: 733922 - RNA, 21 nt, Human
ugugugugugugugugugugu

SEQ ID NO: 733923 - RNA, 21 nt, Human
ugugugugugugugugugugu

SEQ ID NO: 733924 - RNA, 22 nt, Human
ugugugugugugugugugugug

SEQ ID NO: 733925 - RNA, 22 nt, Human
ugugugugugugugugugugug

SEQ ID NO: 733926 - RNA, 22 nt, Human
uguguguguguguguguguguu

SEQ ID NO: 733927 - RNA, 25 nt, Human
aaaagaccacccacccgccucccac

SEQ ID NO: 733928 - RNA, 19 nt, Human
aaacaaaaugagagaccag

SEQ ID NO: 733929 - RNA, 21 nt, Human
aaagaccacccacccgccucc

SEQ ID NO: 733930 - RNA, 24 nt, Human
aaagugcugagauuacaggcguga

SEQ ID NO: 733931 - RNA, 18 nt, Human
aacccagaaggaggaggu

SEQ ID NO: 733932 - RNA, 19 nt, Human
aagaacacuuugugacccu

SEQ ID NO: 733933 - RNA, 18 nt, Human
aagaacagauucuguucu

SEQ ID NO: 733934 - RNA, 19 nt, Human
aagaaugcauuugagagcu

SEQ ID NO: 733935 - RNA, 19 nt, Human
aagacuuuuccuaaaauuu

SEQ ID NO: 733936 - RNA, 25 nt, Human
aagcugguuuucuuccaguauguuu

SEQ ID NO: 733937 - RNA, 18 nt, Human
aaggacagaccacaauaa

SEQ ID NO: 733938 - RNA, 19 nt, Human
aaguagcugggauuacugg

SEQ ID NO: 733939 - RNA, 21 nt, Human
aaucacuugaacccagaagga

SEQ ID NO: 733940 - RNA, 23 nt, Human
aaucacuugaacccagaaggagg

SEQ ID NO: 733941 - RNA, 20 nt, Human
aaucccagcagcagaugugc

SEQ ID NO: 733942 - RNA, 18 nt, Human
acagagugagacuccguc

SEQ ID NO: 733943 - RNA, 20 nt, Human
acagagugagacuccgucuc

SEQ ID NO: 733944 - RNA, 22 nt, Human
acaguccuccugaagcgcuugc

SEQ ID NO: 733945 - RNA, 24 nt, Human
acaguccuccugaagcgcuugcuc

SEQ ID NO: 733946 - RNA, 19 nt, Human
accacuugggaacacauac

SEQ ID NO: 733947 - RNA, 20 nt, Human
accagacuucaagcucuggc

SEQ ID NO: 733948 - RNA, 22 nt, Human
accaggcuggucucgaacuccu

SEQ ID NO: 733949 - RNA, 23 nt, Human
accauguuaccaggcuggucucg

SEQ ID NO: 733950 - RNA, 24 nt, Human
accauguuggccaggcugcucuug

SEQ ID NO: 733951 - RNA, 24 nt, Human
accccacccaaaugagccaugcca

SEQ ID NO: 733952 - RNA, 24 nt, Human
accccgucucuacugaaaauacaa

SEQ ID NO: 733953 - RNA, 19 nt, Human
accccuccuuucuugacac

SEQ ID NO: 733954 - RNA, 24 nt, Human
accuugugauccgcccgccucagc

SEQ ID NO: 733955 - RNA, 18 nt, Human
acgggguuucaccauguu

SEQ ID NO: 733956 - RNA, 18 nt, Human
acgggguuucaccauguu

SEQ ID NO: 733957 - RNA, 19 nt, Human
acgggguuucaccauguua

SEQ ID NO: 733958 - RNA, 23 nt, Human
acgggguuucaccauguuaccag

SEQ ID NO: 733959 - RNA, 23 nt, Human
acgggguuucaccauguuggcca

SEQ ID NO: 733960 - RNA, 24 nt, Human
acgggguuucaccauguuggccag

SEQ ID NO: 733961 - RNA, 24 nt, Human
acuuugggaggcuggggugggcag

SEQ ID NO: 733962 - RNA, 20 nt, Human
agaaguauauacagugaaaa

SEQ ID NO: 733963 - RNA, 21 nt, Human
agagugaaagagaaaggucuu

SEQ ID NO: 733964 - RNA, 23 nt, Human
agauaccuggcugcagacagcag

SEQ ID NO: 733965 - RNA, 23 nt, Human
agaucguuugaggucaggaguuc

SEQ ID NO: 733966 - RNA, 22 nt, Human
agauuacaggcgugagccacca

SEQ ID NO: 733967 - RNA, 24 nt, Human
agauuacaggcgugagccaccaug

SEQ ID NO: 733968 - RNA, 24 nt, Human
agcacuuugggaggcugggguggg

SEQ ID NO: 733969 - RNA, 20 nt, Human
agccagaacaccacauuccu

SEQ ID NO: 733970 - RNA, 18 nt, Human
agccaugccagacagccc

SEQ ID NO: 733971 - RNA, 24 nt, Human
agccuggccaauauggggagaccc

SEQ ID NO: 733972 - RNA, 24 nt, Human
agccuguagucccagcuacucagg

SEQ ID NO: 733973 - RNA, 24 nt, Human
agcgauucuccugccucagccucc

SEQ ID NO: 733974 - RNA, 23 nt, Human
agcugagugugguggcacaagcc

SEQ ID NO: 733975 - RNA, 19 nt, Human
aggaggagguugcagugag

SEQ ID NO: 733976 - RNA, 24 nt, Human
aggaggagguugcagugagcugag

SEQ ID NO: 733977 - RNA, 23 nt, Human
aggaggcugaggcagaagaauca

SEQ ID NO: 733978 - RNA, 18 nt, Human
aggcagaagaaucacuug

SEQ ID NO: 733979 - RNA, 23 nt, Human
aggcagaagaaucacuugaaccc

SEQ ID NO: 733980 - RNA, 24 nt, Human
aggcagaagaaucacuugaaccca

SEQ ID NO: 733981 - RNA, 22 nt, Human
aggcagcauuuaagaucuguuu

SEQ ID NO: 733982 - RNA, 20 nt, Human
aggcaugcaccaccacgccc

SEQ ID NO: 733983 - RNA, 24 nt, Human
aggcugaggcagaagaaucacuug

SEQ ID NO: 733984 - RNA, 25 nt, Human
aggcuggagugcaguggcgugaucu

SEQ ID NO: 733985 - RNA, 25 nt, Human
aggcuggagugcaguggugugaucu

SEQ ID NO: 733986 - RNA, 20 nt, Human
aggcuggggugggcagaucg

SEQ ID NO: 733987 - RNA, 20 nt, Human
aggcugggugugguggcuca

SEQ ID NO: 733988 - RNA, 21 nt, Human
agggagcuacuaugcucaaac

SEQ ID NO: 733989 - RNA, 21 nt, Human
aguacuuaccccuccuuucuu

SEQ ID NO: 733990 - RNA, 22 nt, Human
aguagagacgggguuucaccau

SEQ ID NO: 733991 - RNA, 18 nt, Human
aguagcugggacuauagg

SEQ ID NO: 733992 - RNA, 24 nt, Human
agugcaauggcaugaucucggcuc

SEQ ID NO: 733993 - RNA, 19 nt, Human
agugcaguggcgugaucuc

SEQ ID NO: 733994 - RNA, 20 nt, Human
agugcaguggcgugaucucg

SEQ ID NO: 733995 - RNA, 23 nt, Human
agugcaguggcgugaucucggcu

SEQ ID NO: 733996 - RNA, 24 nt, Human
agugcaguggcgugaucucggcuc

SEQ ID NO: 733997 - RNA, 23 nt, Human
agugcaguggugugaucuuggcu

SEQ ID NO: 733998 - RNA, 24 nt, Human
agugcaguggugugaucuuggcuc

SEQ ID NO: 733999 - RNA, 18 nt, Human
aguggguuacuugaucca

SEQ ID NO: 734000 - RNA, 20 nt, Human
agugugguggcacaagccug

SEQ ID NO: 734001 - RNA, 20 nt, Human
aguuauuggggauuaggcag

SEQ ID NO: 734002 - RNA, 25 nt, Human
auaaaacaaaagcaaaguauacaca

SEQ ID NO: 734003 - RNA, 24 nt, Human
auaaaugucaaauucuccccaugg

SEQ ID NO: 734004 - RNA, 19 nt, Human
auccagaaaauccaaaagc

SEQ ID NO: 734005 - RNA, 24 nt, Human
aucguuugaggucaggaguucaag

SEQ ID NO: 734006 - RNA, 21 nt, Human
augcagccucugucuccuggg

SEQ ID NO: 734007 - RNA, 18 nt, Human
augccauuguacuccaga

SEQ ID NO: 734008 - RNA, 20 nt, Human
auggggagaccccgucucua

SEQ ID NO: 734009 - RNA, 18 nt, Human
caaaagaaaagacucaaa

SEQ ID NO: 734010 - RNA, 23 nt, Human
caaaagcaaaguauacacacucu

SEQ ID NO: 734011 - RNA, 24 nt, Human
caaaagcaaaguauacacacucua

SEQ ID NO: 734012 - RNA, 22 nt, Human
caaacuaagccgugggguaaac

SEQ ID NO: 734013 - RNA, 21 nt, Human
caaagcaagcccaaagggggc

SEQ ID NO: 734014 - RNA, 23 nt, Human
caaauauccauauguggacuuug

SEQ ID NO: 734015 - RNA, 20 nt, Human
caaccugagauaccuggcug

SEQ ID NO: 734016 - RNA, 22 nt, Human
caagcaaagacacaagaaugca

SEQ ID NO: 734017 - RNA, 22 nt, Human
caagcacacuucaugaggaacc

SEQ ID NO: 734018 - RNA, 22 nt, Human
caagcgauucuccugccucagc

SEQ ID NO: 734019 - RNA, 23 nt, Human
caaguagagaguacuuaccccuc

SEQ ID NO: 734020 - RNA, 22 nt, Human
caagugauucuccugccucagc

SEQ ID NO: 734021 - RNA, 19 nt, Human
cacacacagaacuaccaga

SEQ ID NO: 734022 - RNA, 21 nt, Human
cacacagaacuaccagaggag

SEQ ID NO: 734023 - RNA, 24 nt, Human
cacacuuguaaucccagcacuuug

SEQ ID NO: 734024 - RNA, 22 nt, Human
caccaccacgcccggcuaauuu

SEQ ID NO: 734025 - RNA, 19 nt, Human
caccaugaccucugccucc

SEQ ID NO: 734026 - RNA, 21 nt, Human
caccaugaccucugccucccg

SEQ ID NO: 734027 - RNA, 23 nt, Human
caccaugaccucugccucccggg

SEQ ID NO: 734028 - RNA, 19 nt, Human
caccaugccuggccucuuu

SEQ ID NO: 734029 - RNA, 23 nt, Human
caccauguuaccaggcuggucuc

SEQ ID NO: 734030 - RNA, 26 nt, Human
caccauguuaccaggcuggucucgaa

SEQ ID NO: 734031 - RNA, 22 nt, Human
caccauguuggccaggcugcuc

SEQ ID NO: 734032 - RNA, 23 nt, Human
caccauguuggccaggcugcucu

SEQ ID NO: 734033 - RNA, 24 nt, Human
caccauguuggccaggcugcucuu

SEQ ID NO: 734034 - RNA, 31 nt, Human
caccauguuggccaggcugcucuugaacucc

SEQ ID NO: 734035 - RNA, 24 nt, Human
cacucugucgcccaggcuggagug

SEQ ID NO: 734036 - RNA, 21 nt, Human
cacugcaaccuccgccuccca

SEQ ID NO: 734037 - RNA, 20 nt, Human
cacugcagugucccgcuugc

SEQ ID NO: 734038 - RNA, 23 nt, Human
cacuuguaaucccagcacuuugg

SEQ ID NO: 734039 - RNA, 24 nt, Human
cacuuguaaucccagcacuuuggg

SEQ ID NO: 734040 - RNA, 22 nt, Human
cagaacaccacauuccucagcu

SEQ ID NO: 734041 - RNA, 22 nt, Human
cagagcccaaagacacugaguc

SEQ ID NO: 734042 - RNA, 19 nt, Human
cagagcccaggauagccaa

SEQ ID NO: 734043 - RNA, 24 nt, Human
cagaucguuugaggucaggaguuc

SEQ ID NO: 734044 - RNA, 24 nt, Human
cagcacuuugggaggcuggggugg

SEQ ID NO: 734045 - RNA, 18 nt, Human
cagcaggaaccagacauc

SEQ ID NO: 734046 - RNA, 20 nt, Human
cagccuccugaguagcuggg

SEQ ID NO: 734047 - RNA, 20 nt, Human
cagccuccugaguaucuugg

SEQ ID NO: 734048 - RNA, 24 nt, Human
cagccuggccaauauggggagacc

SEQ ID NO: 734049 - RNA, 24 nt, Human
cagcuacucaggaggcugaggcag

SEQ ID NO: 734050 - RNA, 18 nt, Human
cagcucaagcaaagacac

SEQ ID NO: 734051 - RNA, 22 nt, Human
caguaacucuaaauccaauaac

SEQ ID NO: 734052 - RNA, 22 nt, Human
cagucccucccuuccacccucc

SEQ ID NO: 734053 - RNA, 18 nt, Human
caugccaucaucucucca

SEQ ID NO: 734054 - RNA, 23 nt, Human
cauguuaccaggcuggucucgaa

SEQ ID NO: 734055 - RNA, 24 nt, Human
cauguuggccaggcugcucuugaa

SEQ ID NO: 734056 - RNA, 20 nt, Human
cauuauaaucacauauaaca

SEQ ID NO: 734057 - RNA, 23 nt, Human
cauuguacuccagaaugggugac

SEQ ID NO: 734058 - RNA, 22 nt, Human
ccaaaacaaggcuaaagccugc

SEQ ID NO: 734059 - RNA, 20 nt, Human
ccaaaagaccacccacccgc

SEQ ID NO: 734060 - RNA, 22 nt, Human
ccaaagugcugagauuacaggc

SEQ ID NO: 734061 - RNA, 22 nt, Human
ccaaagugcugagauuacaggc

SEQ ID NO: 734062 - RNA, 24 nt, Human
ccaaagugcugagauuacaggcgu

SEQ ID NO: 734063 - RNA, 19 nt, Human
ccacccacccgccucccac

SEQ ID NO: 734064 - RNA, 24 nt, Human
ccagaaaauccaaaagcuuuggaa

SEQ ID NO: 734065 - RNA, 23 nt, Human
ccauuguacuccagaauggguga

SEQ ID NO: 734066 - RNA, 24 nt, Human
ccauuguacuccagaaugggugac

SEQ ID NO: 734067 - RNA, 18 nt, Human
ccauuucuccugacugcc

SEQ ID NO: 734068 - RNA, 24 nt, Human
cccaaagugcuacuguaaucacca

SEQ ID NO: 734069 - RNA, 20 nt, Human
cccaaguagcugggauuacu

SEQ ID NO: 734070 - RNA, 23 nt, Human
cccacccaaaugagccaugccag

SEQ ID NO: 734071 - RNA, 22 nt, Human
cccaggcuggagugcaguggcg

SEQ ID NO: 734072 - RNA, 23 nt, Human
cccagguucaagcgauucuccug

SEQ ID NO: 734073 - RNA, 21 nt, Human
ccccauggccaaaaggugagg

SEQ ID NO: 734074 - RNA, 23 nt, Human
cccggguucaagugauucuccuc

SEQ ID NO: 734075 - RNA, 23 nt, Human
cccggguucaagugauucuccug

SEQ ID NO: 734076 - RNA, 23 nt, Human
cccuagaaaaucccagcagcaga

SEQ ID NO: 734077 - RNA, 25 nt, Human
cccuccaaaagaccacccacccgcc

SEQ ID NO: 734078 - RNA, 24 nt, Human
ccgccucagccucccaaagugcug

SEQ ID NO: 734079 - RNA, 18 nt, Human
ccuaguguccucccaagu

SEQ ID NO: 734080 - RNA, 18 nt, Human
ccuccaaaagaccaccca

SEQ ID NO: 734081 - RNA, 24 nt, Human
ccucccagguucaagcgauucucc

SEQ ID NO: 734082 - RNA, 21 nt, Human
ccucccggguucaagugauuc

SEQ ID NO: 734083 - RNA, 24 nt, Human
ccucccggguucaagugauucucc

SEQ ID NO: 734084 - RNA, 19 nt, Human
ccucuauaacccaagugcu

SEQ ID NO: 734085 - RNA, 25 nt, Human
ccucuuuucagggccucuuggugau

SEQ ID NO: 734086 - RNA, 19 nt, Human
ccugaguagcugggacuau

SEQ ID NO: 734087 - RNA, 22 nt, Human
ccugaguagcugggacuauagg

SEQ ID NO: 734088 - RNA, 23 nt, Human
ccugaguaucuuggauuacaggc

SEQ ID NO: 734089 - RNA, 24 nt, Human
ccugaguaucuuggauuacaggca

SEQ ID NO: 734090 - RNA, 23 nt, Human
ccugcagagcccaaagacacuga

SEQ ID NO: 734091 - RNA, 23 nt, Human
ccuggccaauauggggagacccc

SEQ ID NO: 734092 - RNA, 24 nt, Human
ccuggccaauauggggagaccccg

SEQ ID NO: 734093 - RNA, 21 nt, Human
ccuguagucccagcuacucag

SEQ ID NO: 734094 - RNA, 24 nt, Human
cgcucuguugcccaggcuggagug

SEQ ID NO: 734095 - RNA, 23 nt, Human
cgggguuucaccauguuaccagg

SEQ ID NO: 734096 - RNA, 23 nt, Human
cguuugaggucaggaguucaaga

SEQ ID NO: 734097 - RNA, 18 nt, Human
cuaaagccugcagagccc

SEQ ID NO: 734098 - RNA, 23 nt, Human
cuaccucagccuccugaguagcu

SEQ ID NO: 734099 - RNA, 22 nt, Human
cucacacuuguaaucccagcac

SEQ ID NO: 734100 - RNA, 24 nt, Human
cucacacuuguaaucccagcacuu

SEQ ID NO: 734101 - RNA, 24 nt, Human
cucaccaugaccucugccucccgg

SEQ ID NO: 734102 - RNA, 24 nt, Human
cucacucugucgcccaggcuggag

SEQ ID NO: 734103 - RNA, 24 nt, Human
cucacugcaaccuccgccucccag

SEQ ID NO: 734104 - RNA, 20 nt, Human
cucacugggacuucugacca

SEQ ID NO: 734105 - RNA, 24 nt, Human
cucagccucccaaguagcugggau

SEQ ID NO: 734106 - RNA, 24 nt, Human
cucagccuccugaguagcugggac

SEQ ID NO: 734107 - RNA, 21 nt, Human
cucccaaagugcugagauuac

SEQ ID NO: 734108 - RNA, 18 nt, Human
cucccuuccacccucccc

SEQ ID NO: 734109 - RNA, 18 nt, Human
cucccuuccacccucccc

SEQ ID NO: 734110 - RNA, 21 nt, Human
cuccuggguucaagcaauucu

SEQ ID NO: 734111 - RNA, 21 nt, Human
cucgcucuguugcccaggcug

SEQ ID NO: 734112 - RNA, 24 nt, Human
cucgcucuguugcccaggcuggag

SEQ ID NO: 734113 - RNA, 25 nt, Human
cucucaguucucacccaaauacuuc

SEQ ID NO: 734114 - RNA, 24 nt, Human
cucuggaccuugugauccgcccgc

SEQ ID NO: 734115 - RNA, 19 nt, Human
cucuugaacucuggaccuu

SEQ ID NO: 734116 - RNA, 23 nt, Human
cugaccucagguuuuaaaaagug

SEQ ID NO: 734117 - RNA, 24 nt, Human
cugaguaucuuggauuacaggcau

SEQ ID NO: 734118 - RNA, 23 nt, Human
cugcaaccuccgccucccagguu

SEQ ID NO: 734119 - RNA, 24 nt, Human
cugcaaccuccgccucccagguuc

SEQ ID NO: 734120 - RNA, 24 nt, Human
cugcccaggcuggagugcaguggu

SEQ ID NO: 734121 - RNA, 23 nt, Human
cugccucagccucccaaguagcu

SEQ ID NO: 734122 - RNA, 23 nt, Human
cugccucagccuccugaguaucu

SEQ ID NO: 734123 - RNA, 23 nt, Human
cugcugaauaugcucagucauuc

SEQ ID NO: 734124 - RNA, 24 nt, Human
cuggagugcaauggcaugaucucg

SEQ ID NO: 734125 - RNA, 18 nt, Human
cuguccccuugaaguuga

SEQ ID NO: 734126 - RNA, 19 nt, Human
cugucgcccaggcuggagu

SEQ ID NO: 734127 - RNA, 21 nt, Human
gacagagugagacuccgucuc

SEQ ID NO: 734128 - RNA, 21 nt, Human
gaccacaguuauuggggauua

SEQ ID NO: 734129 - RNA, 24 nt, Human
gaccuugugauccgcccgccucag

SEQ ID NO: 734130 - RNA, 22 nt, Human
gacuauaggugcccgccaccau

SEQ ID NO: 734131 - RNA, 20 nt, Human
gagacgggguuucaccaugu

SEQ ID NO: 734132 - RNA, 24 nt, Human
gagacgggguuucaccauguuggc

SEQ ID NO: 734133 - RNA, 19 nt, Human
gagauaaagacuaaaagga

SEQ ID NO: 734134 - RNA, 25 nt, Human
gagggggaaggaaauaacuagagag

SEQ ID NO: 734135 - RNA, 22 nt, Human
gagguugcagugagcugagauc

SEQ ID NO: 734136 - RNA, 22 nt, Human
gaguaucuuggauuacaggcau

SEQ ID NO: 734137 - RNA, 23 nt, Human
gaucguuugaggucaggaguuca

SEQ ID NO: 734138 - RNA, 24 nt, Human
gaucguuugaggucaggaguucaa

SEQ ID NO: 734139 - RNA, 18 nt, Human
gauuacaggcgugagcca

SEQ ID NO: 734140 - RNA, 24 nt, Human
gauuacaggcgugagccaccaugc

SEQ ID NO: 734141 - RNA, 21 nt, Human
gauucuccugccucagccucc

SEQ ID NO: 734142 - RNA, 22 nt, Human
gcaaccuccgccucccagguuc

SEQ ID NO: 734143 - RNA, 20 nt, Human
gcaccaccacgcccggcuaa

SEQ ID NO: 734144 - RNA, 22 nt, Human
gcagaagaaucacuugaaccca

SEQ ID NO: 734145 - RNA, 18 nt, Human
gcagacagcaggaaccag

SEQ ID NO: 734146 - RNA, 24 nt, Human
gccaauauggggagaccccgucuc

SEQ ID NO: 734147 - RNA, 24 nt, Human
gccauuguacuccagaauggguga

SEQ ID NO: 734148 - RNA, 19 nt, Human
gcccaggauagccaaagag

SEQ ID NO: 734149 - RNA, 23 nt, Human
gcccaggcuggagugcaauggca

SEQ ID NO: 734150 - RNA, 24 nt, Human
gcccaggcuggagugcaauggcau

SEQ ID NO: 734151 - RNA, 24 nt, Human
gcccaggcuggagugcaguggcgu

SEQ ID NO: 734152 - RNA, 24 nt, Human
gcccaggcuggagugcaguggugu

SEQ ID NO: 734153 - RNA, 25 nt, Human
gccccaggcuccaccauuucuccug

SEQ ID NO: 734154 - RNA, 23 nt, Human
gccucagccucccaaagugcuga

SEQ ID NO: 734155 - RNA, 23 nt, Human
gcgauucuccugccucagccucc

SEQ ID NO: 734156 - RNA, 18 nt, Human
gcuaaagccugcagagcc

SEQ ID NO: 734157 - RNA, 21 nt, Human
gcucaagcaaagacacaagaa

SEQ ID NO: 734158 - RNA, 21 nt, Human
gcucaaugcagccucugucuc

SEQ ID NO: 734159 - RNA, 22 nt, Human
gcugaacacaggggccagacca

SEQ ID NO: 734160 - RNA, 19 nt, Human
gcuggagugcaguggcgug

SEQ ID NO: 734161 - RNA, 21 nt, Human
ggaaccagacauccacaaguu

SEQ ID NO: 734162 - RNA, 19 nt, Human
ggagcuacuaugcucaaac

SEQ ID NO: 734163 - RNA, 18 nt, Human
ggagguugcagugagcug

SEQ ID NO: 734164 - RNA, 22 nt, Human
ggagguugcagugagcugagau

SEQ ID NO: 734165 - RNA, 23 nt, Human
ggagguugcagugagcugagauc

SEQ ID NO: 734166 - RNA, 24 nt, Human
ggagguugcagugagcugagauca

SEQ ID NO: 734167 - RNA, 23 nt, Human
ggagucuugcucugcugcccagg

SEQ ID NO: 734168 - RNA, 22 nt, Human
ggauuacaggcaugcaccacca

SEQ ID NO: 734169 - RNA, 25 nt, Human
ggcagaucguuugaggucaggaguu

SEQ ID NO: 734170 - RNA, 20 nt, Human
ggcuaaagccugcagagccc

SEQ ID NO: 734171 - RNA, 22 nt, Human
ggcuggagugcaguggcgugau

SEQ ID NO: 734172 - RNA, 22 nt, Human
ggcuggagugcaguggugugau

SEQ ID NO: 734173 - RNA, 22 nt, Human
ggcuggccuagagacuuucaag

SEQ ID NO: 734174 - RNA, 24 nt, Human
ggcuggucucgaacuccugaccuc

SEQ ID NO: 734175 - RNA, 22 nt, Human
ggggaaucugcuagagaacugg

SEQ ID NO: 734176 - RNA, 22 nt, Human
gggguuucaccauguuaccagg

SEQ ID NO: 734177 - RNA, 23 nt, Human
gggguuucaccauguuggccagg

SEQ ID NO: 734178 - RNA, 24 nt, Human
gggugugguggcucacacuuguaa

SEQ ID NO: 734179 - RNA, 22 nt, Human
ggguucaagugauucuccugcc

SEQ ID NO: 734180 - RNA, 23 nt, Human
ggguucaagugauucuccugccu

SEQ ID NO: 734181 - RNA, 22 nt, Human
ggguuucaccauguuggccagg

SEQ ID NO: 734182 - RNA, 19 nt, Human
ggucucgaacuccugaccu

SEQ ID NO: 734183 - RNA, 24 nt, Human
gguggcucacacuuguaaucccag

SEQ ID NO: 734184 - RNA, 21 nt, Human
ggugggcagaucguuugaggu

SEQ ID NO: 734185 - RNA, 25 nt, Human
ggugggcagaucguuugaggucagg

SEQ ID NO: 734186 - RNA, 22 nt, Human
guaacacaacuacucaucuccu

SEQ ID NO: 734187 - RNA, 24 nt, Human
guacuccagaaugggugacagagu

SEQ ID NO: 734188 - RNA, 23 nt, Human
guagagacgggguuucaccaugu

SEQ ID NO: 734189 - RNA, 20 nt, Human
guaucuuggauuacaggcau

SEQ ID NO: 734190 - RNA, 24 nt, Human
gucaaauucuccccauggccaaaa

SEQ ID NO: 734191 - RNA, 24 nt, Human
gugauccgcccgccucagccuccc

SEQ ID NO: 734192 - RNA, 24 nt, Human
gugauucuccugccucagccuccc

SEQ ID NO: 734193 - RNA, 21 nt, Human
gugugguggcacaagccugua

SEQ ID NO: 734194 - RNA, 24 nt, Human
guugcagugagcugagaucaugcc

SEQ ID NO: 734195 - RNA, 24 nt, Human
guuugaggucaggaguucaagacc

SEQ ID NO: 734196 - RNA, 20 nt, Human
uaaagccugcagagcccaaa

SEQ ID NO: 734197 - RNA, 20 nt, Human
uaaaugacaacauuauaauc

SEQ ID NO: 734198 - RNA, 21 nt, Human
uaaaugacaacauuauaauca

SEQ ID NO: 734199 - RNA, 23 nt, Human
uaagguaugccuggggaaacccc

SEQ ID NO: 734200 - RNA, 23 nt, Human
uaaguuagugcagagaauagagu

SEQ ID NO: 734201 - RNA, 24 nt, Human
uaauagagacgggguuucaccaug

SEQ ID NO: 734202 - RNA, 24 nt, Human
uaauuuuuucuauuuuuaauagag

SEQ ID NO: 734203 - RNA, 24 nt, Human
uaauuuuuuguaucuuuaguagag

SEQ ID NO: 734204 - RNA, 20 nt, Human
uacacaacagacuuacaaug

SEQ ID NO: 734205 - RNA, 22 nt, Human
uacacacaaauauaugcauaca

SEQ ID NO: 734206 - RNA, 23 nt, Human
uacacacaaauauaugcauacac

SEQ ID NO: 734207 - RNA, 20 nt, Human
uacacacucuauacacacgu

SEQ ID NO: 734208 - RNA, 23 nt, Human
uacaggcaugcaccaccacgccc

SEQ ID NO: 734209 - RNA, 22 nt, Human
uacaggcgugagccaccaugcc

SEQ ID NO: 734210 - RNA, 22 nt, Human
uacaggcgugagccaccaugcc

SEQ ID NO: 734211 - RNA, 23 nt, Human
uacaggcgugagccaccaugccu

SEQ ID NO: 734212 - RNA, 19 nt, Human
uacauggaauuucugaaag

SEQ ID NO: 734213 - RNA, 21 nt, Human
uaccagaggaggguuuuucuc

SEQ ID NO: 734214 - RNA, 24 nt, Human
uaccucagccuccugaguagcugg

SEQ ID NO: 734215 - RNA, 22 nt, Human
uacuccagaaugggugacagag

SEQ ID NO: 734216 - RNA, 24 nt, Human
uacuccagaaugggugacagagug

SEQ ID NO: 734217 - RNA, 23 nt, Human
uacugaaaauacaaaaauuagcu

SEQ ID NO: 734218 - RNA, 23 nt, Human
uacuguaaucaccaauuccccug

SEQ ID NO: 734219 - RNA, 21 nt, Human
uagagacgggguuucaccaug

SEQ ID NO: 734220 - RNA, 22 nt, Human
uagagacgggguuucaccaugu

SEQ ID NO: 734221 - RNA, 22 nt, Human
uagagacgggguuucaccaugu

SEQ ID NO: 734222 - RNA, 24 nt, Human
uagagucucgcucuguugcccagg

SEQ ID NO: 734223 - RNA, 22 nt, Human
uagcaguaacucuaaauccaau

SEQ ID NO: 734224 - RNA, 18 nt, Human
uagccaaagaguuaaaag

SEQ ID NO: 734225 - RNA, 22 nt, Human
uagcucccucacugggacuucu

SEQ ID NO: 734226 - RNA, 22 nt, Human
uagcugagugugguggcacaag

SEQ ID NO: 734227 - RNA, 19 nt, Human
uagcugggauuacuggugc

SEQ ID NO: 734228 - RNA, 19 nt, Human
uaggugcccgccaccaugc

SEQ ID NO: 734229 - RNA, 24 nt, Human
uaguagagacgggguuucaccaug

SEQ ID NO: 734230 - RNA, 26 nt, Human
uauauacauauacacacaaauauaug

SEQ ID NO: 734231 - RNA, 21 nt, Human
uauugccacugcagugucccg

SEQ ID NO: 734232 - RNA, 21 nt, Human
ucaaaagugacucucuuuggu

SEQ ID NO: 734233 - RNA, 25 nt, Human
ucaaagguaaaagaacagauucugu

SEQ ID NO: 734234 - RNA, 19 nt, Human
ucaagugauucuccugccu

SEQ ID NO: 734235 - RNA, 24 nt, Human
ucaaugcagccucugucuccuggg

SEQ ID NO: 734236 - RNA, 19 nt, Human
ucacauauaacaaugagau

SEQ ID NO: 734237 - RNA, 23 nt, Human
ucaccaugaccucugccucccgg

SEQ ID NO: 734238 - RNA, 24 nt, Human
ucaccaugaccucugccucccggg

SEQ ID NO: 734239 - RNA, 19 nt, Human
ucacugcaaccuccgccuc

SEQ ID NO: 734240 - RNA, 24 nt, Human
ucacugcaaccuccgccucccagg

SEQ ID NO: 734241 - RNA, 25 nt, Human
ucacugcaaccuccgccucccaggu

SEQ ID NO: 734242 - RNA, 27 nt, Human
ucacugcaaccuccgccucccagguuc

SEQ ID NO: 734243 - RNA, 18 nt, Human
ucagccucccaaguagcu

SEQ ID NO: 734244 - RNA, 20 nt, Human
ucagccucccaaguagcugg

SEQ ID NO: 734245 - RNA, 23 nt, Human
ucagccuccugaguagcugggac

SEQ ID NO: 734246 - RNA, 22 nt, Human
ucaugccauuguacuccagaau

SEQ ID NO: 734247 - RNA, 24 nt, Human
uccagaaugggugacagagugaga

SEQ ID NO: 734248 - RNA, 23 nt, Human
uccaugaggaagaacacuuugug

SEQ ID NO: 734249 - RNA, 18 nt, Human
ucccaaagugcuacugua

SEQ ID NO: 734250 - RNA, 24 nt, Human
ucccaaagugcugagauuacaggc

SEQ ID NO: 734251 - RNA, 23 nt, Human
ucccaaguagcugggauuacugg

SEQ ID NO: 734252 - RNA, 22 nt, Human
ucccacucugacacaauaugga

SEQ ID NO: 734253 - RNA, 21 nt, Human
ucccagguucaagcgauucuc

SEQ ID NO: 734254 - RNA, 24 nt, Human
ucccagguucaagcgauucuccug

SEQ ID NO: 734255 - RNA, 20 nt, Human
uccccuuccucugccuagaa

SEQ ID NO: 734256 - RNA, 21 nt, Human
ucccggguucaagugauucuc

SEQ ID NO: 734257 - RNA, 24 nt, Human
ucccggguucaagugauucuccug

SEQ ID NO: 734258 - RNA, 20 nt, Human
ucccuugggaguguguccua

SEQ ID NO: 734259 - RNA, 21 nt, Human
uccgcccgccucagccuccca

SEQ ID NO: 734260 - RNA, 22 nt, Human
uccuccagccacaaucucaccu

SEQ ID NO: 734261 - RNA, 24 nt, Human
uccugaguagcugggacuauaggu

SEQ ID NO: 734262 - RNA, 24 nt, Human
uccugaguaucuuggauuacaggc

SEQ ID NO: 734263 - RNA, 21 nt, Human
uccuggguucaagcaauucuc

SEQ ID NO: 734264 - RNA, 23 nt, Human
uccuggguucaagcaauucuccu

SEQ ID NO: 734265 - RNA, 18 nt, Human
ucgcccaggcuggagugc

SEQ ID NO: 734266 - RNA, 24 nt, Human
ucgcucuguugcccaggcuggagu

SEQ ID NO: 734267 - RNA, 23 nt, Human
ucucacucugucgcccaggcugg

SEQ ID NO: 734268 - RNA, 24 nt, Human
ucucacucugucgcccaggcugga

SEQ ID NO: 734269 - RNA, 26 nt, Human
ucucacucugucgcccaggcuggagu

SEQ ID NO: 734270 - RNA, 24 nt, Human
ucuccuggguucaagcaauucucc

SEQ ID NO: 734271 - RNA, 19 nt, Human
ucucgaacuccugaccuca

SEQ ID NO: 734272 - RNA, 19 nt, Human
ucucgcucuguugcccagg

SEQ ID NO: 734273 - RNA, 23 nt, Human
ucucgcucuguugcccaggcugg

SEQ ID NO: 734274 - RNA, 24 nt, Human
ucucgcucuguugcccaggcugga

SEQ ID NO: 734275 - RNA, 26 nt, Human
ucucgcucuguugcccaggcuggagu

SEQ ID NO: 734276 - RNA, 27 nt, Human
ucucgcucuguugcccaggcuggagug

SEQ ID NO: 734277 - RNA, 21 nt, Human
ucucuacugaaaauacaaaaa

SEQ ID NO: 734278 - RNA, 19 nt, Human
ucucuccaaagcaagccca

SEQ ID NO: 734279 - RNA, 24 nt, Human
ucugcugcccaggcuggagugcag

SEQ ID NO: 734280 - RNA, 24 nt, Human
ucugucgcccaggcuggagugcaa

SEQ ID NO: 734281 - RNA, 24 nt, Human
ucugucuccuggguucaagcaauu

SEQ ID NO: 734282 - RNA, 23 nt, Human
ucuugcucugcugcccaggcugg

SEQ ID NO: 734283 - RNA, 24 nt, Human
ucuugcucugcugcccaggcugga

SEQ ID NO: 734284 - RNA, 24 nt, Human
ucuuuaguagagacgggguuucac

SEQ ID NO: 734285 - RNA, 18 nt, Human
ugaaaaccuaguguccuc

SEQ ID NO: 734286 - RNA, 22 nt, Human
ugaaacaaaaugagagaccaga

SEQ ID NO: 734287 - RNA, 18 nt, Human
ugagauaaagacuaaaag

SEQ ID NO: 734288 - RNA, 23 nt, Human
ugagauaauuacuggugauguga

SEQ ID NO: 734289 - RNA, 18 nt, Human
ugagauuacaggcgugag

SEQ ID NO: 734290 - RNA, 22 nt, Human
ugagauuacaggcgugagccac

SEQ ID NO: 734291 - RNA, 23 nt, Human
ugagauuacaggcgugagccacc

SEQ ID NO: 734292 - RNA, 24 nt, Human
ugagauuacaggcgugagccacca

SEQ ID NO: 734293 - RNA, 25 nt, Human
ugagauuacaggcgugagccaccau

SEQ ID NO: 734294 - RNA, 21 nt, Human
ugagcccucuauaacccaagu

SEQ ID NO: 734295 - RNA, 20 nt, Human
ugaggcagaagaaucacuug

SEQ ID NO: 734296 - RNA, 24 nt, Human
ugaggcagaagaaucacuugaacc

SEQ ID NO: 734297 - RNA, 25 nt, Human
ugaggcagaagaaucacuugaaccc

SEQ ID NO: 734298 - RNA, 24 nt, Human
ugagggggaaggaaauaacuagag

SEQ ID NO: 734299 - RNA, 20 nt, Human
ugaguauuuaaauaacaucc

SEQ ID NO: 734300 - RNA, 22 nt, Human
ugauccagaaaauccaaaagcu

SEQ ID NO: 734301 - RNA, 20 nt, Human
ugauucuccugccucagccu

SEQ ID NO: 734302 - RNA, 19 nt, Human
ugcaaguaaaaagguuauu

SEQ ID NO: 734303 - RNA, 18 nt, Human
ugcagagcccaaagacac

SEQ ID NO: 734304 - RNA, 22 nt, Human
ugcaguggcgugaucucggcuc

SEQ ID NO: 734305 - RNA, 22 nt, Human
ugcaguggugugaucuuggcuc

SEQ ID NO: 734306 - RNA, 19 nt, Human
ugcaucugagaugcaccaa

SEQ ID NO: 734307 - RNA, 21 nt, Human
ugcauuugagagcugacaggu

SEQ ID NO: 734308 - RNA, 19 nt, Human
ugccaaagaacaaagccaa

SEQ ID NO: 734309 - RNA, 18 nt, Human
ugcccaggcuggagugca

SEQ ID NO: 734310 - RNA, 18 nt, Human
ugcccaggcuggagugca

SEQ ID NO: 734311 - RNA, 21 nt, Human
ugcccaggcuggagugcagug

SEQ ID NO: 734312 - RNA, 21 nt, Human
ugcccaggcuggagugcagug

SEQ ID NO: 734313 - RNA, 22 nt, Human
ugcccaggcuggagugcagugg

SEQ ID NO: 734314 - RNA, 24 nt, Human
ugcccaggcuggagugcaguggug

SEQ ID NO: 734315 - RNA, 24 nt, Human
ugccucagccucccaaguagcugg

SEQ ID NO: 734316 - RNA, 25 nt, Human
ugccucagccuccugaguaucuugg

SEQ ID NO: 734317 - RNA, 22 nt, Human
ugccucccggguucaagugauu

SEQ ID NO: 734318 - RNA, 23 nt, Human
ugccuccuuuucauuugugaagc

SEQ ID NO: 734319 - RNA, 19 nt, Human
ugcgacucaucuuuguuuu

SEQ ID NO: 734320 - RNA, 24 nt, Human
ugcucugcugcccaggcuggagug

SEQ ID NO: 734321 - RNA, 24 nt, Human
ugcugagauuacaggcgugagcca

SEQ ID NO: 734322 - RNA, 19 nt, Human
uggaauaccaagcaugcca

SEQ ID NO: 734323 - RNA, 22 nt, Human
uggaauaccaagcaugccauca

SEQ ID NO: 734324 - RNA, 24 nt, Human
uggagucuugcucugcugcccagg

SEQ ID NO: 734325 - RNA, 19 nt, Human
uggagugcaauggcaugau

SEQ ID NO: 734326 - RNA, 24 nt, Human
uggagugcaauggcaugaucucgg

SEQ ID NO: 734327 - RNA, 19 nt, Human
uggagugcaguggcgugau

SEQ ID NO: 734328 - RNA, 23 nt, Human
uggagugcaguggcgugaucucg

SEQ ID NO: 734329 - RNA, 24 nt, Human
uggagugcaguggcgugaucucgg

SEQ ID NO: 734330 - RNA, 19 nt, Human
uggagugcaguggugugau

SEQ ID NO: 734331 - RNA, 23 nt, Human
uggagugcaguggugugaucuug

SEQ ID NO: 734332 - RNA, 24 nt, Human
uggagugcaguggugugaucuugg

SEQ ID NO: 734333 - RNA, 23 nt, Human
uggauuacaggcaugcaccacca

SEQ ID NO: 734334 - RNA, 21 nt, Human
uggccaggcugcucuugaacu

SEQ ID NO: 734335 - RNA, 22 nt, Human
uggccaggucaucauuuucaug

SEQ ID NO: 734336 - RNA, 20 nt, Human
uggcgugaucucggcucacc

SEQ ID NO: 734337 - RNA, 24 nt, Human
uggcgugaucucggcucaccauga

SEQ ID NO: 734338 - RNA, 29 nt, Human
uggcucaaugcagccucugucuccugggg

SEQ ID NO: 734339 - RNA, 21 nt, Human
uggcucacacuuguaauccca

SEQ ID NO: 734340 - RNA, 22 nt, Human
uggcucacacuuguaaucccag

SEQ ID NO: 734341 - RNA, 24 nt, Human
uggcucacacuuguaaucccagca

SEQ ID NO: 734342 - RNA, 26 nt, Human
uggcugcagacagcaggaaccagaca

SEQ ID NO: 734343 - RNA, 18 nt, Human
ugggaacacauacaacca

SEQ ID NO: 734344 - RNA, 23 nt, Human
ugggaacacauacaaccaaagcu

SEQ ID NO: 734345 - RNA, 21 nt, Human
ugggacuauaggugcccgcca

SEQ ID NO: 734346 - RNA, 22 nt, Human
ugggacuauaggugcccgccac

SEQ ID NO: 734347 - RNA, 24 nt, Human
ugggacuauaggugcccgccacca

SEQ ID NO: 734348 - RNA, 25 nt, Human
ugggacuauaggugcccgccaccau

SEQ ID NO: 734349 - RNA, 20 nt, Human
ugggaggcuggggugggcag

SEQ ID NO: 734350 - RNA, 23 nt, Human
ugggaggcuggggugggcagauc

SEQ ID NO: 734351 - RNA, 24 nt, Human
ugggaggcuggggugggcagaucg

SEQ ID NO: 734352 - RNA, 21 nt, Human
ugggauuacuggugcgugcca

SEQ ID NO: 734353 - RNA, 24 nt, Human
ugggcagaucguuugaggucagga

SEQ ID NO: 734354 - RNA, 24 nt, Human
uggggugggcagaucguuugaggu

SEQ ID NO: 734355 - RNA, 26 nt, Human
uggggugggcagaucguuugagguca

SEQ ID NO: 734356 - RNA, 20 nt, Human
ugggugacagagugagacuc

SEQ ID NO: 734357 - RNA, 21 nt, Human
uggguucaagcaauucuccua

SEQ ID NO: 734358 - RNA, 23 nt, Human
uggguucaagcaauucuccuacc

SEQ ID NO: 734359 - RNA, 24 nt, Human
ugguggcacaagccuguaguccca

SEQ ID NO: 734360 - RNA, 24 nt, Human
ugguggcucacacuuguaauccca

SEQ ID NO: 734361 - RNA, 23 nt, Human
uguaacacaacuacucaucuccu

SEQ ID NO: 734362 - RNA, 20 nt, Human
ugucgcccaggcuggagugc

SEQ ID NO: 734363 - RNA, 24 nt, Human
ugugauccgcccgccucagccucc

SEQ ID NO: 734364 - RNA, 23 nt, Human
ugugcgacucaucuuuguuuuuu

SEQ ID NO: 734365 - RNA, 24 nt, Human
uguguguaugucuauauagauaga

SEQ ID NO: 734366 - RNA, 21 nt, Human
uguugcccaggcuggagugca

SEQ ID NO: 734367 - RNA, 24 nt, Human
uguuuuuuguuuuuuuuuuuguuu

SEQ ID NO: 734368 - RNA, 24 nt, Human
uuaauagagacgggguuucaccau

SEQ ID NO: 734369 - RNA, 23 nt, Human
uuaaucccacucugacacaauau

SEQ ID NO: 734370 - RNA, 24 nt, Human
uuacaaacucucgggcugaacaca

SEQ ID NO: 734371 - RNA, 24 nt, Human
uuagcugacaauguuauaaaacaa

SEQ ID NO: 734372 - RNA, 18 nt, Human
uuagcugagugugguggc

SEQ ID NO: 734373 - RNA, 24 nt, Human
uuaggcugggugugguggcucaca

SEQ ID NO: 734374 - RNA, 18 nt, Human
uuaguagagacgggguuu

SEQ ID NO: 734375 - RNA, 22 nt, Human
uuaguagagacgggguuucacc

SEQ ID NO: 734376 - RNA, 24 nt, Human
uuaguagagacgggguuucaccau

SEQ ID NO: 734377 - RNA, 18 nt, Human
uuaguguuaaaaauuagg

SEQ ID NO: 734378 - RNA, 26 nt, Human
uuauuguuuuuguccccauguuuuca

SEQ ID NO: 734379 - RNA, 24 nt, Human
uucaagcaauucuccuaccucagc

SEQ ID NO: 734380 - RNA, 21 nt, Human
uucaagcgauucuccugccuc

SEQ ID NO: 734381 - RNA, 23 nt, Human
uucaagcgauucuccugccucag

SEQ ID NO: 734382 - RNA, 24 nt, Human
uucaagcgauucuccugccucagc

SEQ ID NO: 734383 - RNA, 21 nt, Human
uucaagugauucuccugccuc

SEQ ID NO: 734384 - RNA, 23 nt, Human
uucaagugauucuccugccucag

SEQ ID NO: 734385 - RNA, 24 nt, Human
uucaagugauucuccugccucagc

SEQ ID NO: 734386 - RNA, 26 nt, Human
uucacuguccaggagucaucccugcc

SEQ ID NO: 734387 - RNA, 18 nt, Human
uucagugcaguugucacu

SEQ ID NO: 734388 - RNA, 19 nt, Human
uuccagcaaguagagagua

SEQ ID NO: 734389 - RNA, 21 nt, Human
uuccaggaaagcaacuacucu

SEQ ID NO: 734390 - RNA, 23 nt, Human
uuccaggguuguuaaucccacuc

SEQ ID NO: 734391 - RNA, 27 nt, Human
uucccaaagugcuacuguaaucaccaa

SEQ ID NO: 734392 - RNA, 19 nt, Human
uucucuuucgucugcugcu

SEQ ID NO: 734393 - RNA, 24 nt, Human
uucucuuucgucugcugcuuuuuu

SEQ ID NO: 734394 - RNA, 19 nt, Human
uugaacccagaaggaggag

SEQ ID NO: 734395 - RNA, 18 nt, Human
uugcagugagcugagauc

SEQ ID NO: 734396 - RNA, 20 nt, Human
uugcagugagcugagaucau

SEQ ID NO: 734397 - RNA, 21 nt, Human
uugcagugagcugagaucaug

SEQ ID NO: 734398 - RNA, 24 nt, Human
uugcccaggcuggagugcaguggc

SEQ ID NO: 734399 - RNA, 24 nt, Human
uugcucugcugcccaggcuggagu

SEQ ID NO: 734400 - RNA, 19 nt, Human
uuuacacaucugagacacu

SEQ ID NO: 734401 - RNA, 21 nt, Human
uuucaccauguuggccaggcu

SEQ ID NO: 734402 - RNA, 19 nt, Human
uuucuagcucccucacugg

SEQ ID NO: 734403 - RNA, 23 nt, Human
uuugaggucaggaguucaagacc

SEQ ID NO: 734404 - RNA, 20 nt, Human
uuuugcaccuuuucucaaaa

SEQ ID NO: 734405 - RNA, 24 nt, Human
uuuuuaauagagacgggguuucac

SEQ ID NO: 734406 - RNA, 21 nt, Human
uuuuuguaucuuuaguagaga

SEQ ID NO: 734407 - RNA, 24 nt, Human
uuuuuuguaucuuuaguagagacg

SEQ ID NO: 734408 - RNA, 25 nt, Human
aaaaaaaaaagaaaaaagcaaaaaa

SEQ ID NO: 734409 - RNA, 23 nt, Human
aaaaaaagaaaaaagcaaaaaag

SEQ ID NO: 734410 - RNA, 24 nt, Human
aaaaaaagacaaagagauugcaaa

SEQ ID NO: 734411 - RNA, 22 nt, Human
aaaacacaugcuccagagccaa

SEQ ID NO: 734412 - RNA, 23 nt, Human
aaaugcugggaugacaggcauga

SEQ ID NO: 734413 - RNA, 20 nt, Human
aacaagacugaaugauagaa

SEQ ID NO: 734414 - RNA, 24 nt, Human
aacagagugagacuuggucucaaa

SEQ ID NO: 734415 - RNA, 25 nt, Human
aacagcaccucaacaagaugcagga

SEQ ID NO: 734416 - RNA, 20 nt, Human
aacaguuuuauaacaaaacc

SEQ ID NO: 734417 - RNA, 22 nt, Human
aacauggugaaacccgaaaccc

SEQ ID NO: 734418 - RNA, 24 nt, Human
aacccugcaacgacuugauuguaa

SEQ ID NO: 734419 - RNA, 24 nt, Human
aaccuggccaacauggugaaaccc

SEQ ID NO: 734420 - RNA, 18 nt, Human
aaucgcuugaaccuggga

SEQ ID NO: 734421 - RNA, 27 nt, Human
acaaaacaaaaacuguguuuuacaaac

SEQ ID NO: 734422 - RNA, 24 nt, Human
acagagugagacuuggucucaaaa

SEQ ID NO: 734423 - RNA, 19 nt, Human
accacaaauccauaacuua

SEQ ID NO: 734424 - RNA, 24 nt, Human
acccccggcccggccauucccagg

SEQ ID NO: 734425 - RNA, 24 nt, Human
acccugucuccacuaaaaauauaa

SEQ ID NO: 734426 - RNA, 21 nt, Human
accuggggucaggaguccaag

SEQ ID NO: 734427 - RNA, 19 nt, Human
accuguaggagugucccuu

SEQ ID NO: 734428 - RNA, 19 nt, Human
accuuccacaguuccuguc

SEQ ID NO: 734429 - RNA, 21 nt, Human
acuacaggcgcaugccaccgu

SEQ ID NO: 734430 - RNA, 24 nt, Human
acuccagccugggcaacagaguga

SEQ ID NO: 734431 - RNA, 24 nt, Human
acugcacuccagccugggcaacag

SEQ ID NO: 734432 - RNA, 24 nt, Human
acugcacuccagccugggcaacag

SEQ ID NO: 734433 - RNA, 19 nt, Human
agaaaaaagcaaaaaagaa

SEQ ID NO: 734434 - RNA, 27 nt, Human
agaaaauaccaaagacauccaaggcca

SEQ ID NO: 734435 - RNA, 22 nt, Human
agaaucgcuugaaccugggaga

SEQ ID NO: 734436 - RNA, 24 nt, Human
agacggagguugcagugagccaag

SEQ ID NO: 734437 - RNA, 23 nt, Human
agcacaaucucagcucacugcaa

SEQ ID NO: 734438 - RNA, 20 nt, Human
agcacuuuggaaggcugagg

SEQ ID NO: 734439 - RNA, 22 nt, Human
agccugggcaacagagugagac

SEQ ID NO: 734440 - RNA, 24 nt, Human
agccugggcaacagagugagacuu

SEQ ID NO: 734441 - RNA, 24 nt, Human
aggagcaaagcacacagcucugag

SEQ ID NO: 734442 - RNA, 22 nt, Human
aggcaagagaaucgcuugaacc

SEQ ID NO: 734443 - RNA, 24 nt, Human
aggcaagagaaucgcuugaaccug

SEQ ID NO: 734444 - RNA, 20 nt, Human
aggcagagguggaaauucgg

SEQ ID NO: 734445 - RNA, 23 nt, Human
aggcagagguggaaauucgggac

SEQ ID NO: 734446 - RNA, 18 nt, Human
aggcagguggaucaccug

SEQ ID NO: 734447 - RNA, 22 nt, Human
aggcagguggaucaccuggggu

SEQ ID NO: 734448 - RNA, 26 nt, Human
aggcagguggaucaccuggggucagg

SEQ ID NO: 734449 - RNA, 24 nt, Human
aggcugaggcaagagaaucgcuug

SEQ ID NO: 734450 - RNA, 21 nt, Human
aggcugaggcagguggaucac

SEQ ID NO: 734451 - RNA, 24 nt, Human
aggcugaggcagguggaucaccug

SEQ ID NO: 734452 - RNA, 25 nt, Human
aggcuggagugcagcagcacaaucu

SEQ ID NO: 734453 - RNA, 21 nt, Human
agguauacacucucaccugua

SEQ ID NO: 734454 - RNA, 24 nt, Human
aggugaucugccugccucagccuc

SEQ ID NO: 734455 - RNA, 18 nt, Human
agguucaacucaaaacac

SEQ ID NO: 734456 - RNA, 18 nt, Human
aguagcugggacuacagg

SEQ ID NO: 734457 - RNA, 19 nt, Human
aguagcugggacuacaggc

SEQ ID NO: 734458 - RNA, 24 nt, Human
agugauucuccugccucagccucc

SEQ ID NO: 734459 - RNA, 24 nt, Human
agugcagcagcacaaucucagcuc

SEQ ID NO: 734460 - RNA, 23 nt, Human
aucacaagauaaguccagccacu

SEQ ID NO: 734461 - RNA, 24 nt, Human
aucgugccacugcacuccagccug

SEQ ID NO: 734462 - RNA, 19 nt, Human
augccuguaaucccagcac

SEQ ID NO: 734463 - RNA, 24 nt, Human
augcuagccagccaggcuggucuc

SEQ ID NO: 734464 - RNA, 23 nt, Human
auggcgggcgccuguaaucccag

SEQ ID NO: 734465 - RNA, 25 nt, Human
auuccaugauuauacacauuggucc

SEQ ID NO: 734466 - RNA, 22 nt, Human
auugugcuguuucucuaucuuu

SEQ ID NO: 734467 - RNA, 24 nt, Human
auuuuugcauuuuuaguagagacg

SEQ ID NO: 734468 - RNA, 24 nt, Human
caaaacaaaaacuguguuuuacaa

SEQ ID NO: 734469 - RNA, 23 nt, Human
caaaacacaugcuccagagccaa

SEQ ID NO: 734470 - RNA, 24 nt, Human
caacauggugaaacccgaaacccu

SEQ ID NO: 734471 - RNA, 21 nt, Human
caagauaaguccagccacuua

SEQ ID NO: 734472 - RNA, 24 nt, Human
caagaucaaccuggccaacauggu

SEQ ID NO: 734473 - RNA, 24 nt, Human
caagaucgugccacugcacuccag

SEQ ID NO: 734474 - RNA, 22 nt, Human
caagugauucuccugccucagc

SEQ ID NO: 734475 - RNA, 22 nt, Human
caauccugacuuacaacaaaaa

SEQ ID NO: 734476 - RNA, 23 nt, Human
cacaaugcagccuuacacuaaag

SEQ ID NO: 734477 - RNA, 21 nt, Human
cacacagcucugaguccauag

SEQ ID NO: 734478 - RNA, 20 nt, Human
cacccccggcccggccauuc

SEQ ID NO: 734479 - RNA, 21 nt, Human
caccucaacaagaugcaggag

SEQ ID NO: 734480 - RNA, 19 nt, Human
caccuguuuguccuuuggc

SEQ ID NO: 734481 - RNA, 19 nt, Human
cacgccgcgcucaccgccc

SEQ ID NO: 734482 - RNA, 22 nt, Human
cacuccagccugggcaacagag

SEQ ID NO: 734483 - RNA, 24 nt, Human
cacuccagccugggcaacagagug

SEQ ID NO: 734484 - RNA, 23 nt, Human
cacucuugcucauguauuaagga

SEQ ID NO: 734485 - RNA, 21 nt, Human
cacugcaaccuucgccuccug

SEQ ID NO: 734486 - RNA, 18 nt, Human
cacugcacuccagccugg

SEQ ID NO: 734487 - RNA, 19 nt, Human
cacugcacuccagccuggg

SEQ ID NO: 734488 - RNA, 21 nt, Human
cacugcacuccagccugggca

SEQ ID NO: 734489 - RNA, 23 nt, Human
cacugcacuccagccugggcaac

SEQ ID NO: 734490 - RNA, 24 nt, Human
cacugcacuccagccugggcaaca

SEQ ID NO: 734491 - RNA, 19 nt, Human
cagaaaauaccaaagacau

SEQ ID NO: 734492 - RNA, 24 nt, Human
cagaaaugcaaagcuggaacagca

SEQ ID NO: 734493 - RNA, 18 nt, Human
cagaacacaaaacaaaaa

SEQ ID NO: 734494 - RNA, 19 nt, Human
cagaacacaaaacaaaaac

SEQ ID NO: 734495 - RNA, 20 nt, Human
cagaacacaaaacaaaaacu

SEQ ID NO: 734496 - RNA, 24 nt, Human
cagcacuuuggaaggcugaggcag

SEQ ID NO: 734497 - RNA, 26 nt, Human
cagcacuuuggaaggcugaggcaggu

SEQ ID NO: 734498 - RNA, 18 nt, Human
cagcagcacaaucucagc

SEQ ID NO: 734499 - RNA, 22 nt, Human
caggugaucugccugccucagc

SEQ ID NO: 734500 - RNA, 18 nt, Human
cagguggaucaccugggg

SEQ ID NO: 734501 - RNA, 23 nt, Human
caguaguucagucaucucccuga

SEQ ID NO: 734502 - RNA, 20 nt, Human
caugccuguaaucccagcac

SEQ ID NO: 734503 - RNA, 18 nt, Human
caugcuagccagccaggc

SEQ ID NO: 734504 - RNA, 18 nt, Human
cauuacauauacuuuuac

SEQ ID NO: 734505 - RNA, 20 nt, Human
cauuuucuuuccugccugcu

SEQ ID NO: 734506 - RNA, 23 nt, Human
ccaaaugcugggaugacaggcau

SEQ ID NO: 734507 - RNA, 20 nt, Human
ccacugcacuccagccuggg

SEQ ID NO: 734508 - RNA, 21 nt, Human
ccacugcacuccagccugggc

SEQ ID NO: 734509 - RNA, 22 nt, Human
ccacugcacuccagccugggca

SEQ ID NO: 734510 - RNA, 23 nt, Human
ccacugcacuccagccugggcaa

SEQ ID NO: 734511 - RNA, 24 nt, Human
ccacugcacuccagccugggcaac

SEQ ID NO: 734512 - RNA, 18 nt, Human
ccauggccccaaaucaca

SEQ ID NO: 734513 - RNA, 21 nt, Human
cccacccccggcccggccauu

SEQ ID NO: 734514 - RNA, 21 nt, Human
cccauuguucuguucaucuca

SEQ ID NO: 734515 - RNA, 22 nt, Human
ccccacgccgcgcucaccgccc

SEQ ID NO: 734516 - RNA, 24 nt, Human
ccccacgccgcgcucaccgccccc

SEQ ID NO: 734517 - RNA, 21 nt, Human
cccccaaacccacaaugcagc

SEQ ID NO: 734518 - RNA, 21 nt, Human
cccccggcccggccauuccca

SEQ ID NO: 734519 - RNA, 24 nt, Human
cccccggcccggccauucccaggc

SEQ ID NO: 734520 - RNA, 23 nt, Human
cccgaguagcugggacuacaggc

SEQ ID NO: 734521 - RNA, 24 nt, Human
cccgaguagcugggacuacaggcg

SEQ ID NO: 734522 - RNA, 24 nt, Human
cccggccauucccaggccaccucu

SEQ ID NO: 734523 - RNA, 20 nt, Human
cccggcccggccauucccag

SEQ ID NO: 734524 - RNA, 23 nt, Human
cccggccgcccccgccgccuccg

SEQ ID NO: 734525 - RNA, 19 nt, Human
ccgcccccgccgccuccgg

SEQ ID NO: 734526 - RNA, 27 nt, Human
ccgccgccgccgccacagcggcuccgg

SEQ ID NO: 734527 - RNA, 21 nt, Human
ccgcgcggugcggugcggcgc

SEQ ID NO: 734528 - RNA, 19 nt, Human
ccggcccccaccucuucuu

SEQ ID NO: 734529 - RNA, 22 nt, Human
ccucaggugaucugccugccuc

SEQ ID NO: 734530 - RNA, 18 nt, Human
ccucccaaaugcugggau

SEQ ID NO: 734531 - RNA, 21 nt, Human
ccuccuggauucaagugauuc

SEQ ID NO: 734532 - RNA, 24 nt, Human
ccuccuggauucaagugauucucc

SEQ ID NO: 734533 - RNA, 18 nt, Human
ccugacuuacaacaaaaa

SEQ ID NO: 734534 - RNA, 23 nt, Human
ccugccucagccucccaaaugcu

SEQ ID NO: 734535 - RNA, 24 nt, Human
ccugccucagccucccgaguagcu

SEQ ID NO: 734536 - RNA, 22 nt, Human
ccugccugcuuuuuuccuuagc

SEQ ID NO: 734537 - RNA, 23 nt, Human
ccuggauucaagugauucuccuc

SEQ ID NO: 734538 - RNA, 23 nt, Human
ccuggauucaagugauucuccug

SEQ ID NO: 734539 - RNA, 22 nt, Human
ccuggccaacauggugaaaccc

SEQ ID NO: 734540 - RNA, 23 nt, Human
ccuggccaacauggugaaacccg

SEQ ID NO: 734541 - RNA, 21 nt, Human
ccuggccucaggugaucugcc

SEQ ID NO: 734542 - RNA, 21 nt, Human
ccugggagacggagguugcag

SEQ ID NO: 734543 - RNA, 21 nt, Human
ccugggcaacagagugagacu

SEQ ID NO: 734544 - RNA, 20 nt, Human
ccuguaaucccagcacuuug

SEQ ID NO: 734545 - RNA, 22 nt, Human
ccuguaaucccagcuacucugg

SEQ ID NO: 734546 - RNA, 23 nt, Human
ccuguaaucccagcuacucugga

SEQ ID NO: 734547 - RNA, 22 nt, Human
cgaaacccugucuccacuaaaa

SEQ ID NO: 734548 - RNA, 18 nt, Human
cgccacagcggcuccggc

SEQ ID NO: 734549 - RNA, 23 nt, Human
cgccgcgcagagcggcaguccca

SEQ ID NO: 734550 - RNA, 24 nt, Human
cgccuguaaucccagcuacucugg

SEQ ID NO: 734551 - RNA, 24 nt, Human
cgcucugucucccaggcuggagug

SEQ ID NO: 734552 - RNA, 19 nt, Human
cggccgcccccgccgccuc

SEQ ID NO: 734553 - RNA, 21 nt, Human
cucaaacucacaggaugaggc

SEQ ID NO: 734554 - RNA, 22 nt, Human
cucaauucuaacuuuauggauu

SEQ ID NO: 734555 - RNA, 24 nt, Human
cucacugcaaccuucgccuccugg

SEQ ID NO: 734556 - RNA, 24 nt, Human
cucagccucccgaguagcugggac

SEQ ID NO: 734557 - RNA, 23 nt, Human
cucaggugaucugccugccucag

SEQ ID NO: 734558 - RNA, 24 nt, Human
cucaugccuguaaucccagcacuu

SEQ ID NO: 734559 - RNA, 29 nt, Human
cuccaauucuaucuuaaacauguaucucc

SEQ ID NO: 734560 - RNA, 24 nt, Human
cucgcucugucucccaggcuggag

SEQ ID NO: 734561 - RNA, 19 nt, Human
cugaagcucaaacucacag

SEQ ID NO: 734562 - RNA, 18 nt, Human
cugacaucucuuccuauu

SEQ ID NO: 734563 - RNA, 23 nt, Human
cugcaaccuucgccuccuggauu

SEQ ID NO: 734564 - RNA, 19 nt, Human
cuugaggaauugaagggaa

SEQ ID NO: 734565 - RNA, 18 nt, Human
cuugcucauguauuaagg

SEQ ID NO: 734566 - RNA, 21 nt, Human
gaaacccgaaacccugucucc

SEQ ID NO: 734567 - RNA, 24 nt, Human
gacuacaggcgcaugccaccgugc

SEQ ID NO: 734568 - RNA, 19 nt, Human
gacuauauacauuacauau

SEQ ID NO: 734569 - RNA, 23 nt, Human
gagaaugcagaauuuacuuaggu

SEQ ID NO: 734570 - RNA, 18 nt, Human
gagguugcagugagccaa

SEQ ID NO: 734571 - RNA, 23 nt, Human
gagguugcagugagccaagaucg

SEQ ID NO: 734572 - RNA, 18 nt, Human
gaucaccuggggucagga

SEQ ID NO: 734573 - RNA, 24 nt, Human
gaucaccuggggucaggaguccaa

SEQ ID NO: 734574 - RNA, 21 nt, Human
gaucugccugccucagccucc

SEQ ID NO: 734575 - RNA, 18 nt, Human
gaugacaggcaugagcca

SEQ ID NO: 734576 - RNA, 24 nt, Human
gauggcgggcgccuguaaucccag

SEQ ID NO: 734577 - RNA, 23 nt, Human
gcaaaaaagaagaaggcuuaaaa

SEQ ID NO: 734578 - RNA, 24 nt, Human
gcacuccagccugggcaacagagu

SEQ ID NO: 734579 - RNA, 20 nt, Human
gcagagcggcagucccacac

SEQ ID NO: 734580 - RNA, 18 nt, Human
gccaacauggugaaaccc

SEQ ID NO: 734581 - RNA, 20 nt, Human
gccaagaucgugccacugca

SEQ ID NO: 734582 - RNA, 22 nt, Human
gccacugcacuccagccugggc

SEQ ID NO: 734583 - RNA, 24 nt, Human
gccacugcacuccagccugggcaa

SEQ ID NO: 734584 - RNA, 19 nt, Human
gccagccaggcuggucucg

SEQ ID NO: 734585 - RNA, 22 nt, Human
gcccuguuaauuuuugcauuuu

SEQ ID NO: 734586 - RNA, 18 nt, Human
gccgcgcucaccgccccc

SEQ ID NO: 734587 - RNA, 21 nt, Human
gccgcgcucaccgcccccagc

SEQ ID NO: 734588 - RNA, 19 nt, Human
gcuagccagccaggcuggu

SEQ ID NO: 734589 - RNA, 19 nt, Human
gcuggagugcagcagcaca

SEQ ID NO: 734590 - RNA, 20 nt, Human
ggagguugcagugagccaag

SEQ ID NO: 734591 - RNA, 24 nt, Human
ggagguugcagugagccaagaucg

SEQ ID NO: 734592 - RNA, 21 nt, Human
ggaugacaggcaugagccacg

SEQ ID NO: 734593 - RNA, 23 nt, Human
ggcacgauggcgggcgccuguaa

SEQ ID NO: 734594 - RNA, 24 nt, Human
ggccacgguggcucaugccuguaa

SEQ ID NO: 734595 - RNA, 25 nt, Human
ggcgccuguaaucccagcuacucug

SEQ ID NO: 734596 - RNA, 21 nt, Human
ggcucaugccuguaaucccag

SEQ ID NO: 734597 - RNA, 24 nt, Human
ggcuggucucgaacuccuggccuc

SEQ ID NO: 734598 - RNA, 19 nt, Human
gggcguagagaaaggacug

SEQ ID NO: 734599 - RNA, 23 nt, Human
gguggcucaugccuguaauccca

SEQ ID NO: 734600 - RNA, 24 nt, Human
gguggcucaugccuguaaucccag

SEQ ID NO: 734601 - RNA, 23 nt, Human
gguuaauugggacacaacuauga

SEQ ID NO: 734602 - RNA, 20 nt, Human
gucucucucucuucuuccca

SEQ ID NO: 734603 - RNA, 18 nt, Human
gugaucugccugccucag

SEQ ID NO: 734604 - RNA, 24 nt, Human
gugaucugccugccucagccuccc

SEQ ID NO: 734605 - RNA, 24 nt, Human
gugauucuccugccucagccuccc

SEQ ID NO: 734606 - RNA, 21 nt, Human
gugccuggcucacuaguaugu

SEQ ID NO: 734607 - RNA, 22 nt, Human
guggcucccacacuuuccauuu

SEQ ID NO: 734608 - RNA, 22 nt, Human
uaaaaagaaguuucacuuauuu

SEQ ID NO: 734609 - RNA, 19 nt, Human
uaacucagcccauuguucu

SEQ ID NO: 734610 - RNA, 19 nt, Human
uaacuuacagcugauccaa

SEQ ID NO: 734611 - RNA, 24 nt, Human
uaauuuuugcauuuuuaguagaga

SEQ ID NO: 734612 - RNA, 20 nt, Human
uaccacucuauuagcucaau

SEQ ID NO: 734613 - RNA, 28 nt, Human
uagccagccaggcuggucucgaacuccu

SEQ ID NO: 734614 - RNA, 22 nt, Human
uaguagagacggucucaccaug

SEQ ID NO: 734615 - RNA, 23 nt, Human
uauucaucuauccaaaugucaca

SEQ ID NO: 734616 - RNA, 24 nt, Human
ucaaaacacaugcuccagagccaa

SEQ ID NO: 734617 - RNA, 19 nt, Human
ucaagugauucuccugccu

SEQ ID NO: 734618 - RNA, 23 nt, Human
ucaaugcaagaaaacugggcaua

SEQ ID NO: 734619 - RNA, 20 nt, Human
ucaccacccagacuugagga

SEQ ID NO: 734620 - RNA, 25 nt, Human
ucaccgcccccagccgccgccgccg

SEQ ID NO: 734621 - RNA, 25 nt, Human
ucaccuccuuuuuuuuuuuuuaaga

SEQ ID NO: 734622 - RNA, 19 nt, Human
ucacugcaaccuucgccuc

SEQ ID NO: 734623 - RNA, 23 nt, Human
ucacugcaaccuucgccuccugg

SEQ ID NO: 734624 - RNA, 27 nt, Human
ucacugcaaccuucgccuccuggauuc

SEQ ID NO: 734625 - RNA, 20 nt, Human
ucagaagacuucuuauucau

SEQ ID NO: 734626 - RNA, 23 nt, Human
ucagccucccgaguagcugggac

SEQ ID NO: 734627 - RNA, 22 nt, Human
ucaggugaucugccugccucag

SEQ ID NO: 734628 - RNA, 18 nt, Human
ucagugacaaaaaugccu

SEQ ID NO: 734629 - RNA, 22 nt, Human
ucaugccuguaaucccagcacu

SEQ ID NO: 734630 - RNA, 23 nt, Human
ucauggguucagaacuccaaaca

SEQ ID NO: 734631 - RNA, 21 nt, Human
uccaaucuuccauggccccaa

SEQ ID NO: 734632 - RNA, 23 nt, Human
uccagccugggcaacagagugag

SEQ ID NO: 734633 - RNA, 24 nt, Human
uccagccugggcaacagagugaga

SEQ ID NO: 734634 - RNA, 23 nt, Human
ucccaaaugcugggaugacaggc

SEQ ID NO: 734635 - RNA, 19 nt, Human
ucccaggcuggagugcagc

SEQ ID NO: 734636 - RNA, 19 nt, Human
ucccaguauucaucuaucc

SEQ ID NO: 734637 - RNA, 24 nt, Human
ucccgaguagcugggacuacaggc

SEQ ID NO: 734638 - RNA, 24 nt, Human
uccugccugcuuuuuuccuuagca

SEQ ID NO: 734639 - RNA, 21 nt, Human
uccuggauucaagugauucuc

SEQ ID NO: 734640 - RNA, 24 nt, Human
uccuggauucaagugauucuccug

SEQ ID NO: 734641 - RNA, 24 nt, Human
ucgcuugaaccugggagacggagg

SEQ ID NO: 734642 - RNA, 25 nt, Human
ucgcuugaaccugggagacggaggu

SEQ ID NO: 734643 - RNA, 23 nt, Human
ucgugccacugcacuccagccug

SEQ ID NO: 734644 - RNA, 18 nt, Human
ucucccaggcuggagugc

SEQ ID NO: 734645 - RNA, 19 nt, Human
ucucgaacuccuggccuca

SEQ ID NO: 734646 - RNA, 23 nt, Human
ucucgcucugucucccaggcugg

SEQ ID NO: 734647 - RNA, 24 nt, Human
ucucgcucugucucccaggcugga

SEQ ID NO: 734648 - RNA, 20 nt, Human
ucucucucuucuucccuccu

SEQ ID NO: 734649 - RNA, 21 nt, Human
ucugaguaguuguucccaguu

SEQ ID NO: 734650 - RNA, 19 nt, Human
ucugucucccaggcuggag

SEQ ID NO: 734651 - RNA, 24 nt, Human
ucugucucccaggcuggagugcag

SEQ ID NO: 734652 - RNA, 22 nt, Human
ucuguguuuugugcuagucugu

SEQ ID NO: 734653 - RNA, 18 nt, Human
ucuguucaucucaaaaug

SEQ ID NO: 734654 - RNA, 21 nt, Human
ugaaacccgaaacccugucuc

SEQ ID NO: 734655 - RNA, 24 nt, Human
ugaaccugggagacggagguugca

SEQ ID NO: 734656 - RNA, 19 nt, Human
ugacagaaaugcaaagcug

SEQ ID NO: 734657 - RNA, 21 nt, Human
ugacagaaaugcaaagcugga

SEQ ID NO: 734658 - RNA, 24 nt, Human
ugaccucuuuuccuucuccccuga

SEQ ID NO: 734659 - RNA, 19 nt, Human
ugagcaaaucagauccuau

SEQ ID NO: 734660 - RNA, 22 nt, Human
ugagccaagaucgugccacugc

SEQ ID NO: 734661 - RNA, 20 nt, Human
ugaggcaagagaaucgcuug

SEQ ID NO: 734662 - RNA, 24 nt, Human
ugaggcaagagaaucgcuugaacc

SEQ ID NO: 734663 - RNA, 25 nt, Human
ugaggcaagagaaucgcuugaaccu

SEQ ID NO: 734664 - RNA, 20 nt, Human
ugaggcagguggaucaccug

SEQ ID NO: 734665 - RNA, 24 nt, Human
ugaggcagguggaucaccuggggu

SEQ ID NO: 734666 - RNA, 26 nt, Human
ugaggcagguggaucaccugggguca

SEQ ID NO: 734667 - RNA, 21 nt, Human
ugaguccauagaugagugggc

SEQ ID NO: 734668 - RNA, 21 nt, Human
ugagugggcacaucaggccug

SEQ ID NO: 734669 - RNA, 24 nt, Human
ugaguucugauuuuccuaguuuug

SEQ ID NO: 734670 - RNA, 20 nt, Human
ugauucuccugccucagccu

SEQ ID NO: 734671 - RNA, 19 nt, Human
ugcaagaaaacugggcaua

SEQ ID NO: 734672 - RNA, 21 nt, Human
ugccagaacacaaaacaaaaa

SEQ ID NO: 734673 - RNA, 24 nt, Human
ugccagaacacaaaacaaaaacug

SEQ ID NO: 734674 - RNA, 20 nt, Human
ugcccaacccuagaaugagc

SEQ ID NO: 734675 - RNA, 23 nt, Human
ugccucagccucccaaaugcugg

SEQ ID NO: 734676 - RNA, 24 nt, Human
ugccucagccucccgaguagcugg

SEQ ID NO: 734677 - RNA, 18 nt, Human
ugccuguaaucccagcac

SEQ ID NO: 734678 - RNA, 23 nt, Human
ugccuguaaucccagcacuuugg

SEQ ID NO: 734679 - RNA, 19 nt, Human
ugcggugcggcgcggcccc

SEQ ID NO: 734680 - RNA, 23 nt, Human
ugcuccagagccaaucccaguau

SEQ ID NO: 734681 - RNA, 18 nt, Human
uggaacagcaccucaaca

SEQ ID NO: 734682 - RNA, 18 nt, Human
uggaaggcugaggcaggu

SEQ ID NO: 734683 - RNA, 24 nt, Human
uggaaggcugaggcagguggauca

SEQ ID NO: 734684 - RNA, 23 nt, Human
uggaucaccuggggucaggaguc

SEQ ID NO: 734685 - RNA, 24 nt, Human
uggaucaccuggggucaggagucc

SEQ ID NO: 734686 - RNA, 23 nt, Human
uggauucaagugauucuccugcc

SEQ ID NO: 734687 - RNA, 19 nt, Human
uggcauuaaauguauucaa

SEQ ID NO: 734688 - RNA, 18 nt, Human
uggccaacauggugaaac

SEQ ID NO: 734689 - RNA, 24 nt, Human
uggccggccacgguggcucaugcc

SEQ ID NO: 734690 - RNA, 24 nt, Human
uggccucaggugaucugccugccu

SEQ ID NO: 734691 - RNA, 21 nt, Human
uggcgggcgccuguaauccca

SEQ ID NO: 734692 - RNA, 22 nt, Human
uggcucaugccuguaaucccag

SEQ ID NO: 734693 - RNA, 24 nt, Human
uggcucaugccuguaaucccagca

SEQ ID NO: 734694 - RNA, 26 nt, Human
ugggaacagcagcuucagugacaaaa

SEQ ID NO: 734695 - RNA, 20 nt, Human
ugggaaggacugcuuuuggc

SEQ ID NO: 734696 - RNA, 20 nt, Human
ugggaauaaaaugaaaugau

SEQ ID NO: 734697 - RNA, 22 nt, Human
ugggacuacaggcgcaugccac

SEQ ID NO: 734698 - RNA, 23 nt, Human
ugggacuacaggcgcaugccacc

SEQ ID NO: 734699 - RNA, 23 nt, Human
ugggacuacaggcgcaugccacc

SEQ ID NO: 734700 - RNA, 24 nt, Human
ugggacuacaggcgcaugccaccg

SEQ ID NO: 734701 - RNA, 24 nt, Human
ugggagacggagguugcagugagc

SEQ ID NO: 734702 - RNA, 22 nt, Human
ugggaugacaggcaugagccac

SEQ ID NO: 734703 - RNA, 23 nt, Human
ugggaugacaggcaugagccacg

SEQ ID NO: 734704 - RNA, 24 nt, Human
ugggaugacaggcaugagccacgg

SEQ ID NO: 734705 - RNA, 21 nt, Human
uggucaaagaauacacgggug

SEQ ID NO: 734706 - RNA, 19 nt, Human
uuacugcaacuacuuacau

SEQ ID NO: 734707 - RNA, 23 nt, Human
uuaguagagacggucucaccaug

SEQ ID NO: 734708 - RNA, 21 nt, Human
uuauacacauugguccauuuc

SEQ ID NO: 734709 - RNA, 18 nt, Human
uuauuugcugccacucug

SEQ ID NO: 734710 - RNA, 21 nt, Human
uucaagugauucuccugccuc

SEQ ID NO: 734711 - RNA, 23 nt, Human
uucaagugauucuccugccucag

SEQ ID NO: 734712 - RNA, 24 nt, Human
uucaagugauucuccugccucagc

SEQ ID NO: 734713 - RNA, 19 nt, Human
uucccaguuucacccaaca

SEQ ID NO: 734714 - RNA, 18 nt, Human
uucugguucuaccauugg

SEQ ID NO: 734715 - RNA, 18 nt, Human
uugaaacccauagaacac

SEQ ID NO: 734716 - RNA, 22 nt, Human
uugaaagaccacaaauccauaa

SEQ ID NO: 734717 - RNA, 24 nt, Human
uugaaccugggagacggagguugc

SEQ ID NO: 734718 - RNA, 22 nt, Human
uugcagugagccaagaucgugc

SEQ ID NO: 734719 - RNA, 21 nt, Human
uugcugcuggccacuuccaau

SEQ ID NO: 734720 - RNA, 22 nt, Human
uuggaagauaaugcuggcuuca

SEQ ID NO: 734721 - RNA, 25 nt, Human
uuggaaggcugaggcagguggauca

SEQ ID NO: 734722 - RNA, 18 nt, Human
uuggucucaaaaaaaaaa

SEQ ID NO: 734723 - RNA, 19 nt, Human
uugguuaacacgaauucug

SEQ ID NO: 734724 - RNA, 21 nt, Human
uuuacauuucccccaaaccca

SEQ ID NO: 734725 - RNA, 23 nt, Human
uuuaguagagacggucucaccau

SEQ ID NO: 734726 - RNA, 20 nt, Human
uuuguccuuuggcaugggaa

SEQ ID NO: 734727 - RNA, 18 nt, Human
uuugugcuagucugucuu

SEQ ID NO: 734728 - RNA, 20 nt, Human
uuugugcuagucugucuucu

SEQ ID NO: 734729 - RNA, 23 nt, Human
uuuucugcaaaugcuuucaagaa

SEQ ID NO: 734730 - RNA, 20 nt, Human
uuuuugcauuuuuaguagag

SEQ ID NO: 734731 - RNA, 18 nt, Human
aaaacaaaaacuucuaaa

SEQ ID NO: 734732 - RNA, 23 nt, Human
aacagagcuguaccaacuccccc

SEQ ID NO: 734733 - RNA, 22 nt, Human
aacuccccccagaucuccccca

SEQ ID NO: 734734 - RNA, 18 nt, Human
aaggcggggcaggcaaga

SEQ ID NO: 734735 - RNA, 25 nt, Human
aaucccuucuuccucacuuccccac

SEQ ID NO: 734736 - RNA, 22 nt, Human
acaggucaggaccugggugggu

SEQ ID NO: 734737 - RNA, 22 nt, Human
acaguggaucccucuuccuguu

SEQ ID NO: 734738 - RNA, 25 nt, Human
accaacuccccccagaucuccccca

SEQ ID NO: 734739 - RNA, 22 nt, Human
acuacaaaccaccggaccaugg

SEQ ID NO: 734740 - RNA, 26 nt, Human
acuacaaaccaccggaccauggugcc

SEQ ID NO: 734741 - RNA, 18 nt, Human
acugggcauccuucccag

SEQ ID NO: 734742 - RNA, 18 nt, Human
agagggaccauuauuggu

SEQ ID NO: 734743 - RNA, 19 nt, Human
agagggaccauuauuggug

SEQ ID NO: 734744 - RNA, 19 nt, Human
agccuugggcuccuucagc

SEQ ID NO: 734745 - RNA, 24 nt, Human
agcguuccuccgcgcgccccgcuu

SEQ ID NO: 734746 - RNA, 22 nt, Human
aggcggccgaggaccgcagagc

SEQ ID NO: 734747 - RNA, 18 nt, Human
caccccuccuccucggcc

SEQ ID NO: 734748 - RNA, 21 nt, Human
cacugcaucugccugucccgc

SEQ ID NO: 734749 - RNA, 23 nt, Human
cagaucucccccaacaucagcac

SEQ ID NO: 734750 - RNA, 20 nt, Human
cagcucccgcggcgccgggg

SEQ ID NO: 734751 - RNA, 21 nt, Human
cagcucccgcggcgccgggga

SEQ ID NO: 734752 - RNA, 25 nt, Human
caguggaucccucuuccuguugucc

SEQ ID NO: 734753 - RNA, 18 nt, Human
caguuuaacucuagaauc

SEQ ID NO: 734754 - RNA, 23 nt, Human
cauuccccaaggcggggcaggca

SEQ ID NO: 734755 - RNA, 20 nt, Human
ccaacaucagcacgaacaaa

SEQ ID NO: 734756 - RNA, 20 nt, Human
ccaacuccccccagaucucc

SEQ ID NO: 734757 - RNA, 23 nt, Human
ccaacuccccccagaucuccccc

SEQ ID NO: 734758 - RNA, 21 nt, Human
ccaaggcggggcaggcaagaa

SEQ ID NO: 734759 - RNA, 21 nt, Human
cccaaggcggggcaggcaaga

SEQ ID NO: 734760 - RNA, 19 nt, Human
cccagcuaccacgaaguaa

SEQ ID NO: 734761 - RNA, 19 nt, Human
ccccaacaucagcacgaac

SEQ ID NO: 734762 - RNA, 21 nt, Human
ccccaacccccgcuccgggcc

SEQ ID NO: 734763 - RNA, 24 nt, Human
ccccagacauggcgcacccgacuu

SEQ ID NO: 734764 - RNA, 23 nt, Human
cccccaccccuccuccucggccc

SEQ ID NO: 734765 - RNA, 18 nt, Human
cccccagaucucccccaa

SEQ ID NO: 734766 - RNA, 19 nt, Human
ccccccccucacucacugc

SEQ ID NO: 734767 - RNA, 19 nt, Human
ccccgcguccccgccgcgc

SEQ ID NO: 734768 - RNA, 18 nt, Human
cccgccgcgcugcgccac

SEQ ID NO: 734769 - RNA, 19 nt, Human
cccgccgcgcugcgccacg

SEQ ID NO: 734770 - RNA, 22 nt, Human
cccggccccagacauggcgcac

SEQ ID NO: 734771 - RNA, 21 nt, Human
ccgccgcuacccccaccccuc

SEQ ID NO: 734772 - RNA, 20 nt, Human
ccgcguccccgccgcgcugc

SEQ ID NO: 734773 - RNA, 25 nt, Human
ccgcuuucucuacucccccaacccc

SEQ ID NO: 734774 - RNA, 19 nt, Human
ccggccggccggcccgcug

SEQ ID NO: 734775 - RNA, 28 nt, Human
ccggcucgguccucccagcucccgcggc

SEQ ID NO: 734776 - RNA, 18 nt, Human
ccgggccgcgggcgccgc

SEQ ID NO: 734777 - RNA, 19 nt, Human
ccuaggcuggagagggaag

SEQ ID NO: 734778 - RNA, 25 nt, Human
ccucacuuccccacccuaggcugga

SEQ ID NO: 734779 - RNA, 24 nt, Human
ccucccagcucccgcggcgccggg

SEQ ID NO: 734780 - RNA, 21 nt, Human
ccucccauucagggcaaaggc

SEQ ID NO: 734781 - RNA, 24 nt, Human
ccucuagcucccagugccugacuu

SEQ ID NO: 734782 - RNA, 20 nt, Human
ccugcaagcccagcuaccac

SEQ ID NO: 734783 - RNA, 22 nt, Human
cgcuacccccaccccuccuccu

SEQ ID NO: 734784 - RNA, 22 nt, Human
cggcccgcuggcggguggcucg

SEQ ID NO: 734785 - RNA, 18 nt, Human
cgggccggcgggcggcgg

SEQ ID NO: 734786 - RNA, 23 nt, Human
cggggcaggcaagaaaaauuagg

SEQ ID NO: 734787 - RNA, 22 nt, Human
cucacuuccccacccuaggcug

SEQ ID NO: 734788 - RNA, 21 nt, Human
cuccagaauaaauaauuuaaa

SEQ ID NO: 734789 - RNA, 19 nt, Human
cucccccaacccccgcucc

SEQ ID NO: 734790 - RNA, 22 nt, Human
cuccgccauggccccccccuca

SEQ ID NO: 734791 - RNA, 24 nt, Human
cuccgccauggccccccccucacu

SEQ ID NO: 734792 - RNA, 18 nt, Human
cuccgggccgcgggcgcc

SEQ ID NO: 734793 - RNA, 18 nt, Human
cuccuccgccauggcccc

SEQ ID NO: 734794 - RNA, 18 nt, Human
cuguaccaacucccccca

SEQ ID NO: 734795 - RNA, 23 nt, Human
cuuccuguuguccucgcuuggag

SEQ ID NO: 734796 - RNA, 21 nt, Human
cuuucucacucuccauaagaa

SEQ ID NO: 734797 - RNA, 21 nt, Human
gaagagggaccauuauuggug

SEQ ID NO: 734798 - RNA, 21 nt, Human
gaaggaacuacaaaccaccgg

SEQ ID NO: 734799 - RNA, 23 nt, Human
gaaggaagaagaggcggccgagg

SEQ ID NO: 734800 - RNA, 20 nt, Human
gacauggcgcacccgacuug

SEQ ID NO: 734801 - RNA, 19 nt, Human
gacccagcguuccuccgcg

SEQ ID NO: 734802 - RNA, 23 nt, Human
gagcuggcgggccggcgggcggc

SEQ ID NO: 734803 - RNA, 23 nt, Human
gagggcgcaggggcccacugggu

SEQ ID NO: 734804 - RNA, 21 nt, Human
gcaaaggcucaguagcucugc

SEQ ID NO: 734805 - RNA, 20 nt, Human
gcagaucuguggguacccug

SEQ ID NO: 734806 - RNA, 23 nt, Human
gccccgcuuucucuacuccccca

SEQ ID NO: 734807 - RNA, 25 nt, Human
gccccgcuuucucuacucccccaac

SEQ ID NO: 734808 - RNA, 24 nt, Human
gccgcgcugcucgcucggccggcu

SEQ ID NO: 734809 - RNA, 21 nt, Human
gccuugggcuccuucagcaac

SEQ ID NO: 734810 - RNA, 21 nt, Human
gcgcaggggcccacuggguuc

SEQ ID NO: 734811 - RNA, 20 nt, Human
gcggggcaggcaagaaaaag

SEQ ID NO: 734812 - RNA, 21 nt, Human
ggcauggagagccuugggcuc

SEQ ID NO: 734813 - RNA, 22 nt, Human
ggccggggagggcgcaggggcc

SEQ ID NO: 734814 - RNA, 18 nt, Human
ggcgcaguggaaggagau

SEQ ID NO: 734815 - RNA, 18 nt, Human
gggcaaaggcucaguagc

SEQ ID NO: 734816 - RNA, 20 nt, Human
ggguagguuggugauggggg

SEQ ID NO: 734817 - RNA, 19 nt, Human
ggugaugggggaaucagga

SEQ ID NO: 734818 - RNA, 20 nt, Human
gugaugggcucagcuggccg

SEQ ID NO: 734819 - RNA, 26 nt, Human
uaaaauaaaauacaaacacuuaggua

SEQ ID NO: 734820 - RNA, 21 nt, Human
uacaaaccaccggaccauggu

SEQ ID NO: 734821 - RNA, 21 nt, Human
uacccuggaggggaguucccg

SEQ ID NO: 734822 - RNA, 22 nt, Human
uagaaaggcauggagagccuug

SEQ ID NO: 734823 - RNA, 19 nt, Human
ucagcuggccggggagggc

SEQ ID NO: 734824 - RNA, 21 nt, Human
ucaggaccugggugggugagg

SEQ ID NO: 734825 - RNA, 21 nt, Human
ucaguagcucugcaucuuucc

SEQ ID NO: 734826 - RNA, 22 nt, Human
ucauaagcaagggggcuguggc

SEQ ID NO: 734827 - RNA, 18 nt, Human
uccauaagaaccucauaa

SEQ ID NO: 734828 - RNA, 20 nt, Human
uccccacccuaggcuggaga

SEQ ID NO: 734829 - RNA, 22 nt, Human
uccccccagaucucccccaaca

SEQ ID NO: 734830 - RNA, 18 nt, Human
uccccgcguccccgccgc

SEQ ID NO: 734831 - RNA, 21 nt, Human
uccccgcguccccgccgcgcu

SEQ ID NO: 734832 - RNA, 24 nt, Human
ucccggccggccggcccgcuggcg

SEQ ID NO: 734833 - RNA, 21 nt, Human
ucccuaccucccauucagggc

SEQ ID NO: 734834 - RNA, 24 nt, Human
ucucacucuccauaagaaccucau

SEQ ID NO: 734835 - RNA, 18 nt, Human
ugaaggaagaagaggcgg

SEQ ID NO: 734836 - RNA, 22 nt, Human
ugaccagggcaaugcagaucug

SEQ ID NO: 734837 - RNA, 23 nt, Human
ugaccagggcaaugcagaucugu

SEQ ID NO: 734838 - RNA, 21 nt, Human
ugcaagcccagcuaccacgaa

SEQ ID NO: 734839 - RNA, 23 nt, Human
ugcccuauuucccuucccuuucu

SEQ ID NO: 734840 - RNA, 22 nt, Human
ugcuccguucccugcaagccca

SEQ ID NO: 734841 - RNA, 18 nt, Human
uggaaggagauccgggcg

SEQ ID NO: 734842 - RNA, 19 nt, Human
uggagagggaagcuuaagg

SEQ ID NO: 734843 - RNA, 18 nt, Human
uggagccuuugacugggc

SEQ ID NO: 734844 - RNA, 23 nt, Human
uggcucggagggcgagcuggcgg

SEQ ID NO: 734845 - RNA, 20 nt, Human
ugggcauccuucccagccug

SEQ ID NO: 734846 - RNA, 20 nt, Human
uucccugcaagcccagcuac

SEQ ID NO: 734847 - RNA, 20 nt, Human
uuggagccuuugacugggca

SEQ ID NO: 734848 - RNA, 24 nt, Human
aaaaaaaaaaaaaauacaaaaacu

SEQ ID NO: 734849 - RNA, 21 nt, Human
aaaauaaaugaguaaagaccc

SEQ ID NO: 734850 - RNA, 20 nt, Human
aaacacacacccgccacccc

SEQ ID NO: 734851 - RNA, 20 nt, Human
aaacacacacccgccacccc

SEQ ID NO: 734852 - RNA, 18 nt, Human
aaaggccccagaguucag

SEQ ID NO: 734853 - RNA, 21 nt, Human
aaaggccccagaguucagucc

SEQ ID NO: 734854 - RNA, 20 nt, Human
aacauggcgagacccugucu

SEQ ID NO: 734855 - RNA, 19 nt, Human
aaccaggcacuccccucca

SEQ ID NO: 734856 - RNA, 20 nt, Human
aaccuggccaggcguagugg

SEQ ID NO: 734857 - RNA, 26 nt, Human
aagaagcccacagacuccuucacacc

SEQ ID NO: 734858 - RNA, 19 nt, Human
aagagcugugggaaccagg

SEQ ID NO: 734859 - RNA, 20 nt, Human
aagcacaccagaggccagaa

SEQ ID NO: 734860 - RNA, 26 nt, Human
aagcacaccagaggccagaagagaug

SEQ ID NO: 734861 - RNA, 21 nt, Human
aagccacaugucacuugggga

SEQ ID NO: 734862 - RNA, 23 nt, Human
aagccacaugucacuuggggaug

SEQ ID NO: 734863 - RNA, 20 nt, Human
aaucacacuccagccuggaa

SEQ ID NO: 734864 - RNA, 22 nt, Human
aauggauuccacaaaccauuaa

SEQ ID NO: 734865 - RNA, 25 nt, Human
acaaaaaaaaaaaaaaauacaaaaa

SEQ ID NO: 734866 - RNA, 21 nt, Human
acaccaccccaaaggccccag

SEQ ID NO: 734867 - RNA, 22 nt, Human
acaccaccccaaaggccccaga

SEQ ID NO: 734868 - RNA, 23 nt, Human
acaccaccccaaaggccccagag

SEQ ID NO: 734869 - RNA, 20 nt, Human
acagagcaagacccugucuc

SEQ ID NO: 734870 - RNA, 26 nt, Human
acagagcaagacccugucucccccaa

SEQ ID NO: 734871 - RNA, 18 nt, Human
accacgucaccagccccc

SEQ ID NO: 734872 - RNA, 22 nt, Human
accaggcacuccccuccacagg

SEQ ID NO: 734873 - RNA, 23 nt, Human
accauaugacccagagggagcca

SEQ ID NO: 734874 - RNA, 23 nt, Human
acccagaacuagggaaacucaac

SEQ ID NO: 734875 - RNA, 19 nt, Human
acccagagggagccaggcu

SEQ ID NO: 734876 - RNA, 22 nt, Human
accccagcagaggguaggauga

SEQ ID NO: 734877 - RNA, 22 nt, Human
acccugccacccagaacuaggg

SEQ ID NO: 734878 - RNA, 21 nt, Human
acccugucucccccaaaaaaa

SEQ ID NO: 734879 - RNA, 24 nt, Human
acuccagagcuuuguuuugggaag

SEQ ID NO: 734880 - RNA, 23 nt, Human
acuguaaacaguaagagcuguaa

SEQ ID NO: 734881 - RNA, 24 nt, Human
agaaagaauuucucagugcuugaa

SEQ ID NO: 734882 - RNA, 18 nt, Human
agaacaacgaagcuucca

SEQ ID NO: 734883 - RNA, 18 nt, Human
agacagcuucucucuucc

SEQ ID NO: 734884 - RNA, 26 nt, Human
agagcacugucucagcccaggccucc

SEQ ID NO: 734885 - RNA, 19 nt, Human
agagcucucccagacugac

SEQ ID NO: 734886 - RNA, 24 nt, Human
agagguugcagugagccaagaucg

SEQ ID NO: 734887 - RNA, 23 nt, Human
agcacuucccucccuccuuuggu

SEQ ID NO: 734888 - RNA, 24 nt, Human
agcacuuugggaggcccagguggg

SEQ ID NO: 734889 - RNA, 24 nt, Human
agcagugguggcucacgccugugg

SEQ ID NO: 734890 - RNA, 21 nt, Human
agccaguccacucucggcaca

SEQ ID NO: 734891 - RNA, 18 nt, Human
agcccgcagagguugcag

SEQ ID NO: 734892 - RNA, 20 nt, Human
agccuggaaucugacugccu

SEQ ID NO: 734893 - RNA, 22 nt, Human
agccugggcaacauggcgagac

SEQ ID NO: 734894 - RNA, 24 nt, Human
agccugggcaacauggcgagaccc

SEQ ID NO: 734895 - RNA, 22 nt, Human
aggaagcacagcaugaagccca

SEQ ID NO: 734896 - RNA, 24 nt, Human
aggaagcacagcaugaagcccagg

SEQ ID NO: 734897 - RNA, 19 nt, Human
aggagaccacacaaacacu

SEQ ID NO: 734898 - RNA, 25 nt, Human
aggcaaaaacaacaccgggacccca

SEQ ID NO: 734899 - RNA, 24 nt, Human
aggcagggagugggcggcagcaga

SEQ ID NO: 734900 - RNA, 24 nt, Human
aggcguaguggcucaugucuguaa

SEQ ID NO: 734901 - RNA, 21 nt, Human
agggugcugcuuuaauagauu

SEQ ID NO: 734902 - RNA, 18 nt, Human
aguaggagucucaccuuc

SEQ ID NO: 734903 - RNA, 24 nt, Human
aguggcucaugucuguaauccuag

SEQ ID NO: 734904 - RNA, 23 nt, Human
aguggcugacuguccugaccaug

SEQ ID NO: 734905 - RNA, 22 nt, Human
agugugccaugggccagagggc

SEQ ID NO: 734906 - RNA, 25 nt, Human
auaacugaccccaguauucccacag

SEQ ID NO: 734907 - RNA, 28 nt, Human
augacaacaaaacaaggaucaacgugcc

SEQ ID NO: 734908 - RNA, 24 nt, Human
auggagccgguggaaaguaaugcu

SEQ ID NO: 734909 - RNA, 19 nt, Human
augucuguaauccuagcac

SEQ ID NO: 734910 - RNA, 19 nt, Human
auugccagggaaaccuggu

SEQ ID NO: 734911 - RNA, 22 nt, Human
caaagccggcagaugccaguca

SEQ ID NO: 734912 - RNA, 22 nt, Human
caacauggcgagacccugucuc

SEQ ID NO: 734913 - RNA, 24 nt, Human
caacauggcgagacccugucucua

SEQ ID NO: 734914 - RNA, 24 nt, Human
caacucccaagccccaucccacag

SEQ ID NO: 734915 - RNA, 21 nt, Human
caagagcacugucucagccca

SEQ ID NO: 734916 - RNA, 21 nt, Human
caagcacaccagaggccagaa

SEQ ID NO: 734917 - RNA, 26 nt, Human
cacacagccacgcugcucucuaccca

SEQ ID NO: 734918 - RNA, 18 nt, Human
caccaaugcccuguaagc

SEQ ID NO: 734919 - RNA, 23 nt, Human
caccauaugacccagagggagcc

SEQ ID NO: 734920 - RNA, 21 nt, Human
caccccauuagccugucuuca

SEQ ID NO: 734921 - RNA, 24 nt, Human
caccccauuagccugucuucagcu

SEQ ID NO: 734922 - RNA, 22 nt, Human
caccgcaccagcagacuccaac

SEQ ID NO: 734923 - RNA, 22 nt, Human
caccgggaccccauggaagcga

SEQ ID NO: 734924 - RNA, 21 nt, Human
cacgucaccagcccccaggug

SEQ ID NO: 734925 - RNA, 21 nt, Human
cacuccccuccacaggggguc

SEQ ID NO: 734926 - RNA, 21 nt, Human
cacugcaacucccaagcccca

SEQ ID NO: 734927 - RNA, 21 nt, Human
cacuggaauucaaaauuuaca

SEQ ID NO: 734928 - RNA, 21 nt, Human
cacugggauacaagcagaaca

SEQ ID NO: 734929 - RNA, 21 nt, Human
cacuggguuugugccuucugc

SEQ ID NO: 734930 - RNA, 22 nt, Human
cacuguguuccagucuggguga

SEQ ID NO: 734931 - RNA, 24 nt, Human
cagacacugucuagcagcugaugc

SEQ ID NO: 734932 - RNA, 20 nt, Human
cagacuccuucacaccaccc

SEQ ID NO: 734933 - RNA, 26 nt, Human
cagacucuacuucugaagccacaugu

SEQ ID NO: 734934 - RNA, 21 nt, Human
cagagcaagacccugucuccc

SEQ ID NO: 734935 - RNA, 23 nt, Human
cagagggagccaggcugccaggu

SEQ ID NO: 734936 - RNA, 22 nt, Human
cagaguucaguccagaggccau

SEQ ID NO: 734937 - RNA, 23 nt, Human
cagcaauguaguccccaaaguac

SEQ ID NO: 734938 - RNA, 21 nt, Human
cagcagcgggccuguggggag

SEQ ID NO: 734939 - RNA, 20 nt, Human
cagcauuugcagcccccacu

SEQ ID NO: 734940 - RNA, 24 nt, Human
cagcccccacugugggccaagucc

SEQ ID NO: 734941 - RNA, 22 nt, Human
cagccuauggggaacgaggcaa

SEQ ID NO: 734942 - RNA, 18 nt, Human
cagcucccaucccacugc

SEQ ID NO: 734943 - RNA, 20 nt, Human
caugucuguaauccuagcac

SEQ ID NO: 734944 - RNA, 24 nt, Human
caugucuguaauccuagcacuuug

SEQ ID NO: 734945 - RNA, 21 nt, Human
ccaaacggcaggaaccuacau

SEQ ID NO: 734946 - RNA, 21 nt, Human
ccaacagaaaccuggccaggc

SEQ ID NO: 734947 - RNA, 20 nt, Human
ccaaccaggcacuccccucc

SEQ ID NO: 734948 - RNA, 22 nt, Human
ccaacuggcauccccaaaguca

SEQ ID NO: 734949 - RNA, 21 nt, Human
ccacccagaacuagggaaacu

SEQ ID NO: 734950 - RNA, 21 nt, Human
ccacucacaaggcagggagug

SEQ ID NO: 734951 - RNA, 24 nt, Human
ccacuguguuccagucugggugac

SEQ ID NO: 734952 - RNA, 21 nt, Human
ccagaggccagaagagaugcu

SEQ ID NO: 734953 - RNA, 18 nt, Human
ccagcagugguggcucac

SEQ ID NO: 734954 - RNA, 23 nt, Human
ccagggauggagggcaaagggca

SEQ ID NO: 734955 - RNA, 22 nt, Human
cccacagacuccuucacaccac

SEQ ID NO: 734956 - RNA, 28 nt, Human
cccacagacuccuucacaccaccccaaa

SEQ ID NO: 734957 - RNA, 19 nt, Human
ccccaaaaaaagaaaccug

SEQ ID NO: 734958 - RNA, 22 nt, Human
ccccaaaggccccagaguucag

SEQ ID NO: 734959 - RNA, 23 nt, Human
ccccagaguucaguccagaggcc

SEQ ID NO: 734960 - RNA, 18 nt, Human
cccccaaaaaaagaaacc

SEQ ID NO: 734961 - RNA, 22 nt, Human
cccccaaaaaaagaaaccugag

SEQ ID NO: 734962 - RNA, 25 nt, Human
cccucagccccgauuaucagaacuc

SEQ ID NO: 734963 - RNA, 20 nt, Human
cccuccucaccaccugggcc

SEQ ID NO: 734964 - RNA, 20 nt, Human
ccgcaccagcagacuccaac

SEQ ID NO: 734965 - RNA, 18 nt, Human
ccgcaguaauccuugcuc

SEQ ID NO: 734966 - RNA, 24 nt, Human
ccuggccaggcguaguggcucaug

SEQ ID NO: 734967 - RNA, 22 nt, Human
ccugggcaacauggcgagaccc

SEQ ID NO: 734968 - RNA, 19 nt, Human
ccugucucccccaaaaaaa

SEQ ID NO: 734969 - RNA, 21 nt, Human
ccuguggucccagcuacuugg

SEQ ID NO: 734970 - RNA, 18 nt, Human
ccuuccccucuuucuuga

SEQ ID NO: 734971 - RNA, 24 nt, Human
cgaagcuuccaucuguuuucuagg

SEQ ID NO: 734972 - RNA, 23 nt, Human
cgccuguggucccagcuacuugg

SEQ ID NO: 734973 - RNA, 24 nt, Human
cgccuguggucccagcuacuuggg

SEQ ID NO: 734974 - RNA, 23 nt, Human
cuacccaccaacuggcaucccca

SEQ ID NO: 734975 - RNA, 20 nt, Human
cuagcacuuugggaggccca

SEQ ID NO: 734976 - RNA, 20 nt, Human
cuaggcccaauuuaauaaca

SEQ ID NO: 734977 - RNA, 26 nt, Human
cucaccaccugggccaugagcucugg

SEQ ID NO: 734978 - RNA, 24 nt, Human
cucacgccuguggucccagcuacu

SEQ ID NO: 734979 - RNA, 25 nt, Human
cucacgccuguggucccagcuacuu

SEQ ID NO: 734980 - RNA, 22 nt, Human
cucagcccaggccuccagagga

SEQ ID NO: 734981 - RNA, 24 nt, Human
cucaugucuguaauccuagcacuu

SEQ ID NO: 734982 - RNA, 21 nt, Human
cucccaagccccaucccacag

SEQ ID NO: 734983 - RNA, 22 nt, Human
cucccaagccccaucccacagc

SEQ ID NO: 734984 - RNA, 20 nt, Human
cuccugccucuguacauggc

SEQ ID NO: 734985 - RNA, 25 nt, Human
cuccuucacaccaccccaaaggccc

SEQ ID NO: 734986 - RNA, 19 nt, Human
cugaccauggguggaagca

SEQ ID NO: 734987 - RNA, 19 nt, Human
cugcgggaggugaggcagc

SEQ ID NO: 734988 - RNA, 18 nt, Human
cugcugcaaacgcaggaa

SEQ ID NO: 734989 - RNA, 23 nt, Human
cugcugccaaggggauauucagu

SEQ ID NO: 734990 - RNA, 19 nt, Human
cugggugacagagcaagac

SEQ ID NO: 734991 - RNA, 21 nt, Human
cuguaauccuagcacuuuggg

SEQ ID NO: 734992 - RNA, 21 nt, Human
cugucugucugacuggauuuc

SEQ ID NO: 734993 - RNA, 20 nt, Human
cuucccucccuccuuugguc

SEQ ID NO: 734994 - RNA, 23 nt, Human
cuuucagacucuacuucugaagc

SEQ ID NO: 734995 - RNA, 20 nt, Human
gacagcccugccuggugugu

SEQ ID NO: 734996 - RNA, 19 nt, Human
gacccugccacccagaacu

SEQ ID NO: 734997 - RNA, 24 nt, Human
gagcccgcagagguugcagugagc

SEQ ID NO: 734998 - RNA, 18 nt, Human
gagcugacaacugacaag

SEQ ID NO: 734999 - RNA, 26 nt, Human
gagggaggccugucugcuacagagga

SEQ ID NO: 735000 - RNA, 18 nt, Human
gagguugcagugagccaa

SEQ ID NO: 735001 - RNA, 22 nt, Human
gcagagguugcagugagccaag

SEQ ID NO: 735002 - RNA, 21 nt, Human
gcagcagcgggccugugggga

SEQ ID NO: 735003 - RNA, 19 nt, Human
gcaggaggauugcgugagc

SEQ ID NO: 735004 - RNA, 21 nt, Human
gccaaggggauauucagugcc

SEQ ID NO: 735005 - RNA, 26 nt, Human
gccacuggguggagggggaaccccag

SEQ ID NO: 735006 - RNA, 24 nt, Human
gccacuguguuccagucuggguga

SEQ ID NO: 735007 - RNA, 23 nt, Human
gcccuucucaccauucuccuucc

SEQ ID NO: 735008 - RNA, 19 nt, Human
gccuaagucccaccagccc

SEQ ID NO: 735009 - RNA, 22 nt, Human
gcgggccuguggggagggaggc

SEQ ID NO: 735010 - RNA, 19 nt, Human
ggacccugccacccagaac

SEQ ID NO: 735011 - RNA, 22 nt, Human
ggaggccugucugcuacagagg

SEQ ID NO: 735012 - RNA, 18 nt, Human
ggagggcaaagggcaagc

SEQ ID NO: 735013 - RNA, 23 nt, Human
ggcaggaggauugcgugagcccg

SEQ ID NO: 735014 - RNA, 22 nt, Human
ggcaguggcagcauuugcagcc

SEQ ID NO: 735015 - RNA, 18 nt, Human
ggccauaagggcagcagc

SEQ ID NO: 735016 - RNA, 22 nt, Human
ggccccaucucugccagugugg

SEQ ID NO: 735017 - RNA, 23 nt, Human
ggccuguggggagggaggccugu

SEQ ID NO: 735018 - RNA, 23 nt, Human
gggcggcagcagagccacgggca

SEQ ID NO: 735019 - RNA, 23 nt, Human
ggguggagggggaaccccagcag

SEQ ID NO: 735020 - RNA, 18 nt, Human
gguaaaggaaaugacaca

SEQ ID NO: 735021 - RNA, 24 nt, Human
ggugcugggcguggccacugggug

SEQ ID NO: 735022 - RNA, 24 nt, Human
gguggcucacgccuguggucccag

SEQ ID NO: 735023 - RNA, 19 nt, Human
guggcagacagcccugccu

SEQ ID NO: 735024 - RNA, 23 nt, Human
guggcucacgccuguggucccag

SEQ ID NO: 735025 - RNA, 24 nt, Human
guguuccagucugggugacagagc

SEQ ID NO: 735026 - RNA, 22 nt, Human
guuaccaagaaacaaguggcac

SEQ ID NO: 735027 - RNA, 23 nt, Human
guucccaggacggaaaagccuua

SEQ ID NO: 735028 - RNA, 22 nt, Human
uaaacacacacccgccacccca

SEQ ID NO: 735029 - RNA, 22 nt, Human
uaaacacuuccagcagaaacuc

SEQ ID NO: 735030 - RNA, 19 nt, Human
uaacaugcugcuugucucc

SEQ ID NO: 735031 - RNA, 21 nt, Human
uaagggcagcagccuaugggg

SEQ ID NO: 735032 - RNA, 18 nt, Human
uacuccuggauggagccg

SEQ ID NO: 735033 - RNA, 26 nt, Human
uagaggccgcagcagcgggccugugg

SEQ ID NO: 735034 - RNA, 22 nt, Human
uagcacaggauaccaagagcac

SEQ ID NO: 735035 - RNA, 18 nt, Human
uagcacuucccucccucc

SEQ ID NO: 735036 - RNA, 24 nt, Human
uagcacuuugggaggcccaggugg

SEQ ID NO: 735037 - RNA, 22 nt, Human
uaguggcucaugucuguaaucc

SEQ ID NO: 735038 - RNA, 23 nt, Human
uaucuaacugccauucugcccac

SEQ ID NO: 735039 - RNA, 23 nt, Human
ucacaccaccccaaaggccccag

SEQ ID NO: 735040 - RNA, 22 nt, Human
ucacuuggggauggacaguguc

SEQ ID NO: 735041 - RNA, 20 nt, Human
ucagaacucuagcccgaggc

SEQ ID NO: 735042 - RNA, 21 nt, Human
ucaggacagccagggauggag

SEQ ID NO: 735043 - RNA, 27 nt, Human
ucagugccauuuugccaccugcaacgu

SEQ ID NO: 735044 - RNA, 22 nt, Human
uccaacagaaaccuggccaggc

SEQ ID NO: 735045 - RNA, 24 nt, Human
uccaacagaaaccuggccaggcgu

SEQ ID NO: 735046 - RNA, 19 nt, Human
uccagagcuuuguuuuggg

SEQ ID NO: 735047 - RNA, 19 nt, Human
uccagucugggugacagag

SEQ ID NO: 735048 - RNA, 24 nt, Human
uccagucugggugacagagcaaga

SEQ ID NO: 735049 - RNA, 22 nt, Human
uccaugccugggcuucucuaga

SEQ ID NO: 735050 - RNA, 26 nt, Human
ucccaagccccaucccacagcuugug

SEQ ID NO: 735051 - RNA, 19 nt, Human
ucccagacugacaguuccc

SEQ ID NO: 735052 - RNA, 21 nt, Human
ucccagacugacaguucccag

SEQ ID NO: 735053 - RNA, 22 nt, Human
ucccuucucucucuuaaauagg

SEQ ID NO: 735054 - RNA, 24 nt, Human
ucuaggacaagggaaaccauucug

SEQ ID NO: 735055 - RNA, 22 nt, Human
ucucuacaaaaaaaaaaaaaaa

SEQ ID NO: 735056 - RNA, 25 nt, Human
ucucuacccaccaacuggcaucccc

SEQ ID NO: 735057 - RNA, 21 nt, Human
ucucugcugcaaacgcaggaa

SEQ ID NO: 735058 - RNA, 20 nt, Human
ucugaagccacaugucacuu

SEQ ID NO: 735059 - RNA, 22 nt, Human
ucugcaccauaugacccagagg

SEQ ID NO: 735060 - RNA, 21 nt, Human
ucuguacauggcaaugugagg

SEQ ID NO: 735061 - RNA, 22 nt, Human
ucuugggcagaaguaggagaaa

SEQ ID NO: 735062 - RNA, 21 nt, Human
ugaaauucaaacuccaaagga

SEQ ID NO: 735063 - RNA, 21 nt, Human
ugacaacaaaacaaggaucaa

SEQ ID NO: 735064 - RNA, 24 nt, Human
ugacacacauucccccaauuugga

SEQ ID NO: 735065 - RNA, 22 nt, Human
ugacagagcaagacccugucuc

SEQ ID NO: 735066 - RNA, 18 nt, Human
ugaccacgucaccagccc

SEQ ID NO: 735067 - RNA, 18 nt, Human
ugaccacgucaccagccc

SEQ ID NO: 735068 - RNA, 23 nt, Human
ugagaaagaauuucucagugcuu

SEQ ID NO: 735069 - RNA, 21 nt, Human
ugagaacaacgaagcuuccaa

SEQ ID NO: 735070 - RNA, 21 nt, Human
ugagaacaacgaagcuuccag

SEQ ID NO: 735071 - RNA, 20 nt, Human
ugagacagaagagagaggcu

SEQ ID NO: 735072 - RNA, 23 nt, Human
ugagccaagaucgugccacugug

SEQ ID NO: 735073 - RNA, 18 nt, Human
ugaugagaaccagcacug

SEQ ID NO: 735074 - RNA, 22 nt, Human
ugauuuuuuuccuucagcaaug

SEQ ID NO: 735075 - RNA, 18 nt, Human
ugcaauaaguguggcggc

SEQ ID NO: 735076 - RNA, 22 nt, Human
ugccuaggcccaauuuaauaac

SEQ ID NO: 735077 - RNA, 18 nt, Human
ugccuccugggguacccu

SEQ ID NO: 735078 - RNA, 19 nt, Human
ugccuggaaggaaggggug

SEQ ID NO: 735079 - RNA, 21 nt, Human
ugccuggugcuggucacaguc

SEQ ID NO: 735080 - RNA, 18 nt, Human
uggaaaggcagacacugu

SEQ ID NO: 735081 - RNA, 19 nt, Human
uggaaaggcagacacuguc

SEQ ID NO: 735082 - RNA, 22 nt, Human
uggaaaugagggcuaccugucc

SEQ ID NO: 735083 - RNA, 22 nt, Human
uggaaggaagggguggccccau

SEQ ID NO: 735084 - RNA, 20 nt, Human
uggagggcaaagggcaagcu

SEQ ID NO: 735085 - RNA, 25 nt, Human
uggagggcaaagggcaagcuguggg

SEQ ID NO: 735086 - RNA, 19 nt, Human
uggcagaacccuaauugac

SEQ ID NO: 735087 - RNA, 24 nt, Human
uggcaggaggauugcgugagcccg

SEQ ID NO: 735088 - RNA, 22 nt, Human
uggccaggcguaguggcucaug

SEQ ID NO: 735089 - RNA, 18 nt, Human
uggccggagcuggcgcuc

SEQ ID NO: 735090 - RNA, 19 nt, Human
uggccuaagucccaccagc

SEQ ID NO: 735091 - RNA, 21 nt, Human
uggcucacgccugugguccca

SEQ ID NO: 735092 - RNA, 22 nt, Human
uggcucacgccuguggucccag

SEQ ID NO: 735093 - RNA, 24 nt, Human
uggcucacgccuguggucccagcu

SEQ ID NO: 735094 - RNA, 24 nt, Human
uggcucaugucuguaauccuagca

SEQ ID NO: 735095 - RNA, 18 nt, Human
uggcuucugaggccgacu

SEQ ID NO: 735096 - RNA, 22 nt, Human
ugggaagcuguggcaggaggau

SEQ ID NO: 735097 - RNA, 18 nt, Human
ugggagaacugcuugagc

SEQ ID NO: 735098 - RNA, 19 nt, Human
ugggagcagaggucuggaa

SEQ ID NO: 735099 - RNA, 19 nt, Human
ugggauccaaccaggcacu

SEQ ID NO: 735100 - RNA, 24 nt, Human
ugggcagaaguaggagaaaaggau

SEQ ID NO: 735101 - RNA, 19 nt, Human
uggggauggacagugucau

SEQ ID NO: 735102 - RNA, 24 nt, Human
ugguggcucacgccugugguccca

SEQ ID NO: 735103 - RNA, 23 nt, Human
uguaaacaccgcaccagcagacu

SEQ ID NO: 735104 - RNA, 19 nt, Human
ugucccaggcuggccggag

SEQ ID NO: 735105 - RNA, 23 nt, Human
ugucccaggcuggccggagcugg

SEQ ID NO: 735106 - RNA, 23 nt, Human
ugucuguaauccuagcacuuugg

SEQ ID NO: 735107 - RNA, 23 nt, Human
ugucuguaauccuagcacuuugg

SEQ ID NO: 735108 - RNA, 19 nt, Human
ugugccuggaaggaagggg

SEQ ID NO: 735109 - RNA, 20 nt, Human
uguggaaaccgucggggcug

SEQ ID NO: 735110 - RNA, 24 nt, Human
uguggcaggaggauugcgugagcc

SEQ ID NO: 735111 - RNA, 20 nt, Human
uguuaccaagaaacaagugg

SEQ ID NO: 735112 - RNA, 23 nt, Human
uuaaaggaaggggaugaagauga

SEQ ID NO: 735113 - RNA, 21 nt, Human
uuaaauggccagaggcaguga

SEQ ID NO: 735114 - RNA, 21 nt, Human
uuaccaagaaacaaguggcac

SEQ ID NO: 735115 - RNA, 19 nt, Human
uuacuccuggauggagccg

SEQ ID NO: 735116 - RNA, 23 nt, Human
uuaucaggcauggaaaugagggc

SEQ ID NO: 735117 - RNA, 24 nt, Human
uucauaacaaugcaacagaguaag

SEQ ID NO: 735118 - RNA, 23 nt, Human
uuccaugacucuuguuuguuacc

SEQ ID NO: 735119 - RNA, 20 nt, Human
uucucauccacuggacuugg

SEQ ID NO: 735120 - RNA, 21 nt, Human
uucuggucaguuuuuggcuuc

SEQ ID NO: 735121 - RNA, 22 nt, Human
uugcagugagccaagaucgugc

SEQ ID NO: 735122 - RNA, 23 nt, Human
uugguuggugcuaagcuaagaug

SEQ ID NO: 735123 - RNA, 21 nt, Human
uuugauuaaaggaaggggaug

SEQ ID NO: 735124 - RNA, 25 nt, Human
aaaaaauaaagcaacaaccuccucc

SEQ ID NO: 735125 - RNA, 22 nt, Human
aaaauaaacagcuccaugugaa

SEQ ID NO: 735126 - RNA, 24 nt, Human
aaaccauacacaacacuccagagc

SEQ ID NO: 735127 - RNA, 22 nt, Human
aaagcaacaaccuccuccacac

SEQ ID NO: 735128 - RNA, 24 nt, Human
aaauaacugugaggcaucaauuuc

SEQ ID NO: 735129 - RNA, 20 nt, Human
aaauagaacccaacagcacu

SEQ ID NO: 735130 - RNA, 18 nt, Human
aaccccauguccaccucu

SEQ ID NO: 735131 - RNA, 23 nt, Human
aagacagcucgccaauugucucc

SEQ ID NO: 735132 - RNA, 21 nt, Human
aagcucccuucaggccaacag

SEQ ID NO: 735133 - RNA, 22 nt, Human
aagggaaaacacaggccacacc

SEQ ID NO: 735134 - RNA, 24 nt, Human
acacaacacuccagagccuuaaaa

SEQ ID NO: 735135 - RNA, 22 nt, Human
acacaggccacacccaccuggc

SEQ ID NO: 735136 - RNA, 21 nt, Human
accuucucuggagaaaauaac

SEQ ID NO: 735137 - RNA, 18 nt, Human
agaaagaacagaagggaa

SEQ ID NO: 735138 - RNA, 21 nt, Human
agaagggaaaacacaggccac

SEQ ID NO: 735139 - RNA, 19 nt, Human
agaagggggcaggagcugc

SEQ ID NO: 735140 - RNA, 19 nt, Human
agaagggggcaggagcugc

SEQ ID NO: 735141 - RNA, 21 nt, Human
agaaguguggccagcuggggg

SEQ ID NO: 735142 - RNA, 21 nt, Human
agacggauaaaagagaggcca

SEQ ID NO: 735143 - RNA, 19 nt, Human
agagagaggauggggcagg

SEQ ID NO: 735144 - RNA, 20 nt, Human
agaguccuuuccguuucccu

SEQ ID NO: 735145 - RNA, 21 nt, Human
agccuuaaaaaaauaaagcaa

SEQ ID NO: 735146 - RNA, 18 nt, Human
agcuggcuugagaagccu

SEQ ID NO: 735147 - RNA, 19 nt, Human
aggaaaguugaggcagagc

SEQ ID NO: 735148 - RNA, 23 nt, Human
aggaacaaauaaauaaauaaaua

SEQ ID NO: 735149 - RNA, 19 nt, Human
aggaaggugcacaacagcu

SEQ ID NO: 735150 - RNA, 19 nt, Human
aggcagaaagaacagaagg

SEQ ID NO: 735151 - RNA, 20 nt, Human
agggaggagggguggggugg

SEQ ID NO: 735152 - RNA, 22 nt, Human
agggggcaggagcugcuggaau

SEQ ID NO: 735153 - RNA, 22 nt, Human
aggugcccgaaggcuagggacc

SEQ ID NO: 735154 - RNA, 20 nt, Human
auaaagcaacaaccuccucc

SEQ ID NO: 735155 - RNA, 23 nt, Human
auaaagcaacaaccuccuccaca

SEQ ID NO: 735156 - RNA, 19 nt, Human
auacacaacacuccagagc

SEQ ID NO: 735157 - RNA, 20 nt, Human
auccaaccccauguccaccu

SEQ ID NO: 735158 - RNA, 20 nt, Human
auucuggugagcuccuuagu

SEQ ID NO: 735159 - RNA, 22 nt, Human
caaaacaauccaaccccauguc

SEQ ID NO: 735160 - RNA, 24 nt, Human
caacacuccagagccuuaaaaaaa

SEQ ID NO: 735161 - RNA, 19 nt, Human
cacucuccagccuucaucc

SEQ ID NO: 735162 - RNA, 24 nt, Human
cacucuccagccuucauccucacc

SEQ ID NO: 735163 - RNA, 18 nt, Human
cacuuggccacaggugcc

SEQ ID NO: 735164 - RNA, 24 nt, Human
cagagaagggggcaggagcugcug

SEQ ID NO: 735165 - RNA, 23 nt, Human
cagagcccagccccagaaggagg

SEQ ID NO: 735166 - RNA, 20 nt, Human
cagagccuuaaaaaaauaaa

SEQ ID NO: 735167 - RNA, 22 nt, Human
cagcacucucagaggccuaagg

SEQ ID NO: 735168 - RNA, 19 nt, Human
cagcagagccuccucccuc

SEQ ID NO: 735169 - RNA, 22 nt, Human
cagcucuacagggaggaggggu

SEQ ID NO: 735170 - RNA, 18 nt, Human
cccucuccuccuauucuu

SEQ ID NO: 735171 - RNA, 25 nt, Human
ccuagcccagacccugcaccgguuc

SEQ ID NO: 735172 - RNA, 23 nt, Human
ccucaccaucuccaccagaggaa

SEQ ID NO: 735173 - RNA, 22 nt, Human
ccucccaucccggcuguagggc

SEQ ID NO: 735174 - RNA, 22 nt, Human
ccugcaccuucucuggagaaaa

SEQ ID NO: 735175 - RNA, 18 nt, Human
cucaccaucuccaccaga

SEQ ID NO: 735176 - RNA, 20 nt, Human
cucacucuccagccuucauc

SEQ ID NO: 735177 - RNA, 18 nt, Human
cucaggggggcccugggg

SEQ ID NO: 735178 - RNA, 18 nt, Human
cucugcggccagcagagc

SEQ ID NO: 735179 - RNA, 21 nt, Human
cucugcuccacuuggccacag

SEQ ID NO: 735180 - RNA, 23 nt, Human
cugacagcugcuggauuuucugc

SEQ ID NO: 735181 - RNA, 22 nt, Human
cuggacacacaaagaaguccaa

SEQ ID NO: 735182 - RNA, 19 nt, Human
cuggcccuggaggugcccg

SEQ ID NO: 735183 - RNA, 22 nt, Human
cuggccugcagagcccagcccc

SEQ ID NO: 735184 - RNA, 23 nt, Human
cuggcuugagaagccugagccug

SEQ ID NO: 735185 - RNA, 20 nt, Human
cuucugguucuagcugcugg

SEQ ID NO: 735186 - RNA, 19 nt, Human
gacacugggggcacgggua

SEQ ID NO: 735187 - RNA, 22 nt, Human
gagaagccugagccugcagucc

SEQ ID NO: 735188 - RNA, 21 nt, Human
gagaggccacgugccucccau

SEQ ID NO: 735189 - RNA, 21 nt, Human
gagcacaggguugguguggcu

SEQ ID NO: 735190 - RNA, 21 nt, Human
gaggaggggugggguggggau

SEQ ID NO: 735191 - RNA, 21 nt, Human
gaggcaucaauuuccaaggca

SEQ ID NO: 735192 - RNA, 22 nt, Human
gaggugcccgaaggcuagggac

SEQ ID NO: 735193 - RNA, 26 nt, Human
gcccagccccagaaggaggggaacgc

SEQ ID NO: 735194 - RNA, 23 nt, Human
gccuucauccucaccaucuccac

SEQ ID NO: 735195 - RNA, 21 nt, Human
ggacacacaaagaaguccaag

SEQ ID NO: 735196 - RNA, 20 nt, Human
ggagaaggugucagacagaa

SEQ ID NO: 735197 - RNA, 22 nt, Human
ggaggggugggguggggaugcu

SEQ ID NO: 735198 - RNA, 22 nt, Human
ggauggggcaggaccucuccug

SEQ ID NO: 735199 - RNA, 18 nt, Human
ggccaaacuggacacaca

SEQ ID NO: 735200 - RNA, 18 nt, Human
ggccacacccaccuggcc

SEQ ID NO: 735201 - RNA, 21 nt, Human
ggcccuggaggugcccgaagg

SEQ ID NO: 735202 - RNA, 19 nt, Human
uaagggcuuagggugaggc

SEQ ID NO: 735203 - RNA, 22 nt, Human
uaaucaaaacaauccaacccca

SEQ ID NO: 735204 - RNA, 22 nt, Human
uacaaaauaaauagacggauaa

SEQ ID NO: 735205 - RNA, 23 nt, Human
uacaggcagaaagaacagaaggg

SEQ ID NO: 735206 - RNA, 21 nt, Human
uaggaaaguugaggcagagcc

SEQ ID NO: 735207 - RNA, 19 nt, Human
uccaaaggcuaaauggaau

SEQ ID NO: 735208 - RNA, 18 nt, Human
uccaaccccauguccacc

SEQ ID NO: 735209 - RNA, 22 nt, Human
uccaagaaauccccucucuucu

SEQ ID NO: 735210 - RNA, 18 nt, Human
ucccacuucucccagcca

SEQ ID NO: 735211 - RNA, 20 nt, Human
ucccuguguucucugcggcc

SEQ ID NO: 735212 - RNA, 22 nt, Human
uccuggagaaguguggccagcu

SEQ ID NO: 735213 - RNA, 26 nt, Human
ucuccagccuucauccucaccaucuc

SEQ ID NO: 735214 - RNA, 21 nt, Human
ucucugcggccagcagagccu

SEQ ID NO: 735215 - RNA, 22 nt, Human
ucuuucggcuucugguucuagc

SEQ ID NO: 735216 - RNA, 23 nt, Human
ugaaaagaaaccauacacaacac

SEQ ID NO: 735217 - RNA, 24 nt, Human
ugaaaagaaaccauacacaacacu

SEQ ID NO: 735218 - RNA, 25 nt, Human
ugaggcagagcccucuccuccuauu

SEQ ID NO: 735219 - RNA, 21 nt, Human
ugcaacagaguccuuuccguu

SEQ ID NO: 735220 - RNA, 19 nt, Human
uggaauggacaguuugggc

SEQ ID NO: 735221 - RNA, 24 nt, Human
uggaauggacaguuugggcaggag

SEQ ID NO: 735222 - RNA, 24 nt, Human
uggacacacaaagaaguccaaggg

SEQ ID NO: 735223 - RNA, 21 nt, Human
uggacaguuugggcaggaggc

SEQ ID NO: 735224 - RNA, 21 nt, Human
uggauuuucugcgcucugacu

SEQ ID NO: 735225 - RNA, 21 nt, Human
ugggaugugaaaagaaaccau

SEQ ID NO: 735226 - RNA, 22 nt, Human
ugggcaggaggccaaacuggac

SEQ ID NO: 735227 - RNA, 18 nt, Human
uggguggcucggucccac

SEQ ID NO: 735228 - RNA, 22 nt, Human
ugugaaaagaaaccauacacaa

SEQ ID NO: 735229 - RNA, 19 nt, Human
uguggcaguuccggcaaag

SEQ ID NO: 735230 - RNA, 21 nt, Human
uuccaaggcaucuaaguuccu

SEQ ID NO: 735231 - RNA, 23 nt, Human
uuccugacucugagcugcucagg

SEQ ID NO: 735232 - RNA, 20 nt, Human
uugggcaggaggccaaacug

SEQ ID NO: 735233 - RNA, 20 nt, Human
aaaaaaagaaccaagauagu

SEQ ID NO: 735234 - RNA, 20 nt, Human
aaaaaagaaccaagauagug

SEQ ID NO: 735235 - RNA, 18 nt, Human
aaaaagcuucccucaagg

SEQ ID NO: 735236 - RNA, 22 nt, Human
aaagaaccaagauaguguccau

SEQ ID NO: 735237 - RNA, 21 nt, Human
aaauaaacuaagacgccgcuc

SEQ ID NO: 735238 - RNA, 22 nt, Human
aagcaggaaaagaaugucccaa

SEQ ID NO: 735239 - RNA, 21 nt, Human
aaggaaacaguuguuuaaaag

SEQ ID NO: 735240 - RNA, 21 nt, Human
aauauugauagaaagagccuu

SEQ ID NO: 735241 - RNA, 23 nt, Human
acguauguaugugcauauaugca

SEQ ID NO: 735242 - RNA, 19 nt, Human
acucaggagguugaacagu

SEQ ID NO: 735243 - RNA, 26 nt, Human
agacaugcuuuuccaguuacaagcuc

SEQ ID NO: 735244 - RNA, 19 nt, Human
agagagcagauaaagcaau

SEQ ID NO: 735245 - RNA, 24 nt, Human
auagaacaggucugguuaguacaa

SEQ ID NO: 735246 - RNA, 18 nt, Human
auccaugcaaauguagga

SEQ ID NO: 735247 - RNA, 26 nt, Human
caaagagaacugaaaacauguauaac

SEQ ID NO: 735248 - RNA, 23 nt, Human
caaugcaugcauccauccaugca

SEQ ID NO: 735249 - RNA, 18 nt, Human
cagacauuccagacaaag

SEQ ID NO: 735250 - RNA, 25 nt, Human
caucccgcaagucgaguccccuacu

SEQ ID NO: 735251 - RNA, 25 nt, Human
caucugaucaaugaucacauggugg

SEQ ID NO: 735252 - RNA, 18 nt, Human
cauguauaacagcugggu

SEQ ID NO: 735253 - RNA, 19 nt, Human
cauguugcucacaguaucc

SEQ ID NO: 735254 - RNA, 20 nt, Human
cccccaaagagaacugaaaa

SEQ ID NO: 735255 - RNA, 21 nt, Human
cgccgcucuaaaaaguggaga

SEQ ID NO: 735256 - RNA, 23 nt, Human
cuaauauuaaaaagcuucccuca

SEQ ID NO: 735257 - RNA, 24 nt, Human
cucacaguauccugauaugcauaa

SEQ ID NO: 735258 - RNA, 19 nt, Human
cuccagaaaugaaauaauc

SEQ ID NO: 735259 - RNA, 23 nt, Human
cugcuuaagcuacuaagcugugu

SEQ ID NO: 735260 - RNA, 24 nt, Human
gaguccccuacucacucaccacau

SEQ ID NO: 735261 - RNA, 21 nt, Human
gcacagaaaaaaguuaacucc

SEQ ID NO: 735262 - RNA, 24 nt, Human
gcuacuaagcugugucuuccucug

SEQ ID NO: 735263 - RNA, 22 nt, Human
ggacaccauguugcucacagua

SEQ ID NO: 735264 - RNA, 18 nt, Human
ggacaguuuucuauauua

SEQ ID NO: 735265 - RNA, 20 nt, Human
guacaauuuuccucaaugaa

SEQ ID NO: 735266 - RNA, 18 nt, Human
guauguaugugcauauau

SEQ ID NO: 735267 - RNA, 19 nt, Human
guggugagcaaagaggagu

SEQ ID NO: 735268 - RNA, 18 nt, Human
guguaccugaacccuaca

SEQ ID NO: 735269 - RNA, 21 nt, Human
uaagggacaccauguugcuca

SEQ ID NO: 735270 - RNA, 20 nt, Human
uacaagcucaaaauaggagu

SEQ ID NO: 735271 - RNA, 21 nt, Human
uagaaaaagcuucauuuggug

SEQ ID NO: 735272 - RNA, 21 nt, Human
uagaggcaagcuguugcggug

SEQ ID NO: 735273 - RNA, 21 nt, Human
uaggguaaggaaagcuugaaa

SEQ ID NO: 735274 - RNA, 23 nt, Human
uauacaacuggggaaaauaacca

SEQ ID NO: 735275 - RNA, 22 nt, Human
uauuaaaaagcuucccucaagg

SEQ ID NO: 735276 - RNA, 25 nt, Human
ucacucaccacaucugaucaaugau

SEQ ID NO: 735277 - RNA, 23 nt, Human
ucccaacaaaccaugaaacacuu

SEQ ID NO: 735278 - RNA, 19 nt, Human
ucccgcaagucgagucccc

SEQ ID NO: 735279 - RNA, 23 nt, Human
uccuccagaaaugaaauaaucaa

SEQ ID NO: 735280 - RNA, 23 nt, Human
ugcaaaguaaaaagauucugugc

SEQ ID NO: 735281 - RNA, 21 nt, Human
ugcacagaaaaaaguuaacuc

SEQ ID NO: 735282 - RNA, 21 nt, Human
ugccuuagccaguguaccuga

SEQ ID NO: 735283 - RNA, 18 nt, Human
uggacggauaaaaaaggu

SEQ ID NO: 735284 - RNA, 20 nt, Human
uggauagaaaaagcuucauu

SEQ ID NO: 735285 - RNA, 19 nt, Human
ugguggugagcaaagagga

SEQ ID NO: 735286 - RNA, 22 nt, Human
ugguggugagcaaagaggagua

SEQ ID NO: 735287 - RNA, 23 nt, Human
ugucuuccucuggaacuagaacc

SEQ ID NO: 735288 - RNA, 22 nt, Human
uucaacauuaucugcacagaaa

SEQ ID NO: 735289 - RNA, 19 nt, Human
uugcucacaguauccugau

SEQ ID NO: 735290 - RNA, 19 nt, Human
uuuaauagucucuuguucc

SEQ ID NO: 735291 - RNA, 19 nt, Human
uuuucagacauuccagaca

SEQ ID NO: 735292 - RNA, 20 nt, Human
aaaaauaagugagugacuca

SEQ ID NO: 735293 - RNA, 22 nt, Human
aacaucaaagguaagaaacaaa

SEQ ID NO: 735294 - RNA, 19 nt, Human
aacaucugagccagaagcc

SEQ ID NO: 735295 - RNA, 19 nt, Human
aaccggaagaaccaucccg

SEQ ID NO: 735296 - RNA, 19 nt, Human
aagaaccaucccgggagcc

SEQ ID NO: 735297 - RNA, 21 nt, Human
aagaguggagucaaacaggaa

SEQ ID NO: 735298 - RNA, 20 nt, Human
aagauugcuugagcccagga

SEQ ID NO: 735299 - RNA, 24 nt, Human
aagcaagaauugcuccgcagcagc

SEQ ID NO: 735300 - RNA, 20 nt, Human
aagcauuuucagaggaagag

SEQ ID NO: 735301 - RNA, 23 nt, Human
aagcccaaagucagugacaacag

SEQ ID NO: 735302 - RNA, 22 nt, Human
aagugggucaguucuucagccu

SEQ ID NO: 735303 - RNA, 19 nt, Human
aauugcuccgcagcagcag

SEQ ID NO: 735304 - RNA, 24 nt, Human
acauaaccaugaugauuuacauac

SEQ ID NO: 735305 - RNA, 20 nt, Human
accggggcguuucugggguc

SEQ ID NO: 735306 - RNA, 20 nt, Human
acuacaguucauucaaacaa

SEQ ID NO: 735307 - RNA, 18 nt, Human
acugcacuccagcuuggg

SEQ ID NO: 735308 - RNA, 22 nt, Human
acugcacuccagcuuggguaag

SEQ ID NO: 735309 - RNA, 24 nt, Human
acugcacuccagcuuggguaagag

SEQ ID NO: 735310 - RNA, 25 nt, Human
acuguucauaauauucuccauaauc

SEQ ID NO: 735311 - RNA, 24 nt, Human
acuugcagagagaguuuucuacug

SEQ ID NO: 735312 - RNA, 22 nt, Human
agaaaacaugaauauguucccc

SEQ ID NO: 735313 - RNA, 18 nt, Human
agaaagaaaaaaggcaga

SEQ ID NO: 735314 - RNA, 22 nt, Human
agacauugguacauccagauaa

SEQ ID NO: 735315 - RNA, 19 nt, Human
agaguggagucaaacagga

SEQ ID NO: 735316 - RNA, 20 nt, Human
agccuuagacagucagcagc

SEQ ID NO: 735317 - RNA, 24 nt, Human
agcuacuugggaggcugagguggg

SEQ ID NO: 735318 - RNA, 24 nt, Human
agcuuggguaagagagcaagacuc

SEQ ID NO: 735319 - RNA, 20 nt, Human
aggacaaccugauuuucaua

SEQ ID NO: 735320 - RNA, 28 nt, Human
aggcauauauuuccagaaggaaaccuuu

SEQ ID NO: 735321 - RNA, 24 nt, Human
aggcugaggugggaagauugcuug

SEQ ID NO: 735322 - RNA, 22 nt, Human
agguaaaaaauacagugcugga

SEQ ID NO: 735323 - RNA, 24 nt, Human
agguuaaguuauacauaaccauga

SEQ ID NO: 735324 - RNA, 22 nt, Human
aguaccaagaagcauuuucaga

SEQ ID NO: 735325 - RNA, 23 nt, Human
auaaagccuauaaaguauauacu

SEQ ID NO: 735326 - RNA, 24 nt, Human
auagcuacaagaguggaaaauaaa

SEQ ID NO: 735327 - RNA, 23 nt, Human
auauccagccugcaccacccacc

SEQ ID NO: 735328 - RNA, 24 nt, Human
aucaugucacugcacuccagcuug

SEQ ID NO: 735329 - RNA, 22 nt, Human
aucucuucccuugaucccccaa

SEQ ID NO: 735330 - RNA, 20 nt, Human
augaaaaugguguuaugcuc

SEQ ID NO: 735331 - RNA, 22 nt, Human
auucaggcaagucgggggaguc

SEQ ID NO: 735332 - RNA, 24 nt, Human
auucuguagucccagcuacuuggg

SEQ ID NO: 735333 - RNA, 19 nt, Human
auugcuugagcccaggagg

SEQ ID NO: 735334 - RNA, 27 nt, Human
caaaaaauaacuacaguucauucaaac

SEQ ID NO: 735335 - RNA, 19 nt, Human
caaagguaagaaacaaaaa

SEQ ID NO: 735336 - RNA, 24 nt, Human
caaagucagugacaacagaagucc

SEQ ID NO: 735337 - RNA, 19 nt, Human
caaaugacucuguacuccc

SEQ ID NO: 735338 - RNA, 23 nt, Human
caacgugaccagcgcgauucacc

SEQ ID NO: 735339 - RNA, 24 nt, Human
caagaucaugucacugcacuccag

SEQ ID NO: 735340 - RNA, 23 nt, Human
cacacauaccuaauggcacuaag

SEQ ID NO: 735341 - RNA, 20 nt, Human
caccaugccucuauggcaau

SEQ ID NO: 735342 - RNA, 23 nt, Human
caccucucccuuccuguaucuuc

SEQ ID NO: 735343 - RNA, 23 nt, Human
cacuccagcuuggguaagagagc

SEQ ID NO: 735344 - RNA, 24 nt, Human
cacugacugugccacagauaacau

SEQ ID NO: 735345 - RNA, 21 nt, Human
cacugaguuuucuauuugcaa

SEQ ID NO: 735346 - RNA, 19 nt, Human
cacugcacuccagcuuggg

SEQ ID NO: 735347 - RNA, 20 nt, Human
cacugcacuccagcuugggu

SEQ ID NO: 735348 - RNA, 21 nt, Human
cacugcacuccagcuugggua

SEQ ID NO: 735349 - RNA, 22 nt, Human
cacugcacuccagcuuggguaa

SEQ ID NO: 735350 - RNA, 22 nt, Human
cacugcacuccagcuuggguaa

SEQ ID NO: 735351 - RNA, 23 nt, Human
cacugcacuccagcuuggguaag

SEQ ID NO: 735352 - RNA, 22 nt, Human
cagaaccucucuucaaaggacu

SEQ ID NO: 735353 - RNA, 19 nt, Human
cagaggaagaguuccaucu

SEQ ID NO: 735354 - RNA, 18 nt, Human
cagaggacugcccaggug

SEQ ID NO: 735355 - RNA, 24 nt, Human
cagcagcaggaugcuuuuuagugg

SEQ ID NO: 735356 - RNA, 26 nt, Human
cagcagcaguaaaauugugcccacua

SEQ ID NO: 735357 - RNA, 19 nt, Human
cagcagcccaacagcgacu

SEQ ID NO: 735358 - RNA, 22 nt, Human
cagcagcccaacagcgacuggg

SEQ ID NO: 735359 - RNA, 24 nt, Human
cagcuacuugggaggcugaggugg

SEQ ID NO: 735360 - RNA, 24 nt, Human
cagcugaaaaacuguaaaaguuac

SEQ ID NO: 735361 - RNA, 21 nt, Human
cagcuggaucuucuugacuau

SEQ ID NO: 735362 - RNA, 22 nt, Human
cagucagccaagaucaugucac

SEQ ID NO: 735363 - RNA, 20 nt, Human
caugguaguggauguguggu

SEQ ID NO: 735364 - RNA, 21 nt, Human
cauuacaaaaccuucaagggg

SEQ ID NO: 735365 - RNA, 20 nt, Human
cauuuaccucaaacacagca

SEQ ID NO: 735366 - RNA, 20 nt, Human
ccaaaaccagaggacugccc

SEQ ID NO: 735367 - RNA, 18 nt, Human
ccaagaagccuuagacag

SEQ ID NO: 735368 - RNA, 19 nt, Human
ccagacccugcucccugcc

SEQ ID NO: 735369 - RNA, 21 nt, Human
ccaugguaguggauguguggu

SEQ ID NO: 735370 - RNA, 18 nt, Human
cccacgagcgacccucac

SEQ ID NO: 735371 - RNA, 24 nt, Human
cccacgagcgacccucaccaccau

SEQ ID NO: 735372 - RNA, 27 nt, Human
cccaggcgucucgggcuggggccgaac

SEQ ID NO: 735373 - RNA, 18 nt, Human
cccuugggaccccaggcg

SEQ ID NO: 735374 - RNA, 22 nt, Human
cccuugggaccccaggcgucuc

SEQ ID NO: 735375 - RNA, 21 nt, Human
ccgcagcagcccaacagcgac

SEQ ID NO: 735376 - RNA, 19 nt, Human
ccuccuacuuuccccucca

SEQ ID NO: 735377 - RNA, 22 nt, Human
ccugagaaggcccucaaaagac

SEQ ID NO: 735378 - RNA, 19 nt, Human
ccuguaucuucuguuguaa

SEQ ID NO: 735379 - RNA, 19 nt, Human
cgagaggaacccaaucugc

SEQ ID NO: 735380 - RNA, 18 nt, Human
cgagcgacccucaccacc

SEQ ID NO: 735381 - RNA, 20 nt, Human
cggaauuccaaagcacagcu

SEQ ID NO: 735382 - RNA, 23 nt, Human
cgggagcccaccgggcguucagc

SEQ ID NO: 735383 - RNA, 21 nt, Human
cuaaagcauucugauccaaag

SEQ ID NO: 735384 - RNA, 23 nt, Human
cuaaccguuacugcauuuaccuc

SEQ ID NO: 735385 - RNA, 20 nt, Human
cucaucagaagcaucacuga

SEQ ID NO: 735386 - RNA, 19 nt, Human
cucccaauacuggauguuu

SEQ ID NO: 735387 - RNA, 21 nt, Human
cuccgcagcagcaggaugcuu

SEQ ID NO: 735388 - RNA, 18 nt, Human
cugccaugcugaagcuug

SEQ ID NO: 735389 - RNA, 21 nt, Human
cuggggucucucccucuggcu

SEQ ID NO: 735390 - RNA, 24 nt, Human
cugguaguaggcaaugucaguguu

SEQ ID NO: 735391 - RNA, 19 nt, Human
cugguggagccccgggcgg

SEQ ID NO: 735392 - RNA, 20 nt, Human
cuguagucccagcuacuugg

SEQ ID NO: 735393 - RNA, 21 nt, Human
cuguagucccagcuacuuggg

SEQ ID NO: 735394 - RNA, 21 nt, Human
cuuccuguaucuucuguugua

SEQ ID NO: 735395 - RNA, 21 nt, Human
cuuccuguauuuccuccuccu

SEQ ID NO: 735396 - RNA, 21 nt, Human
cuucuuguacaggccuccuac

SEQ ID NO: 735397 - RNA, 23 nt, Human
cuugggaccccaggcgucucggg

SEQ ID NO: 735398 - RNA, 25 nt, Human
cuuguacaggccuccuacuuucccc

SEQ ID NO: 735399 - RNA, 19 nt, Human
gacucuguggcaaguuuuc

SEQ ID NO: 735400 - RNA, 23 nt, Human
gagaacucuguuuucauuauaca

SEQ ID NO: 735401 - RNA, 18 nt, Human
gagcgacccucaccacca

SEQ ID NO: 735402 - RNA, 22 nt, Human
gagcgacccucaccaccauccc

SEQ ID NO: 735403 - RNA, 24 nt, Human
gaggugggaagauugcuugagccc

SEQ ID NO: 735404 - RNA, 19 nt, Human
gaucaccggcuguuuuccu

SEQ ID NO: 735405 - RNA, 19 nt, Human
gccccgggcggaacacagg

SEQ ID NO: 735406 - RNA, 23 nt, Human
gcccuugugagugccagacccug

SEQ ID NO: 735407 - RNA, 20 nt, Human
gccuccuacuuuccccucca

SEQ ID NO: 735408 - RNA, 19 nt, Human
gcggaacacaggauccgaa

SEQ ID NO: 735409 - RNA, 23 nt, Human
gcuccagaaucuccuaacgcgca

SEQ ID NO: 735410 - RNA, 21 nt, Human
gcucgagaggaacccaaucug

SEQ ID NO: 735411 - RNA, 19 nt, Human
ggaauacaaaaaauaacua

SEQ ID NO: 735412 - RNA, 20 nt, Human
ggcaaguuuucugacaagga

SEQ ID NO: 735413 - RNA, 20 nt, Human
ggcacaaagaaccggaagaa

SEQ ID NO: 735414 - RNA, 18 nt, Human
ggucucucccucuggcuc

SEQ ID NO: 735415 - RNA, 24 nt, Human
gucacugcacuccagcuuggguaa

SEQ ID NO: 735416 - RNA, 20 nt, Human
gucuuggaaguucuguuugc

SEQ ID NO: 735417 - RNA, 21 nt, Human
gugcauccugggagccagugg

SEQ ID NO: 735418 - RNA, 18 nt, Human
gugcuuccucagauguug

SEQ ID NO: 735419 - RNA, 18 nt, Human
uaaacauaacagucauca

SEQ ID NO: 735420 - RNA, 22 nt, Human
uaacaugguccaaaauauucaa

SEQ ID NO: 735421 - RNA, 24 nt, Human
uaaucaaaauaagcacucgauuca

SEQ ID NO: 735422 - RNA, 19 nt, Human
uacaggcuccuucacuggg

SEQ ID NO: 735423 - RNA, 19 nt, Human
uacaguucauucaaacaaa

SEQ ID NO: 735424 - RNA, 18 nt, Human
uacauacacacauaccua

SEQ ID NO: 735425 - RNA, 19 nt, Human
uagcacauuucucaggcca

SEQ ID NO: 735426 - RNA, 25 nt, Human
uagcagacaccucucccuuccugua

SEQ ID NO: 735427 - RNA, 22 nt, Human
uaguggaugugugguuaaguuu

SEQ ID NO: 735428 - RNA, 25 nt, Human
uauagacaaacauaacauacacaug

SEQ ID NO: 735429 - RNA, 19 nt, Human
uaugccaagaagccuuaga

SEQ ID NO: 735430 - RNA, 23 nt, Human
ucaaacacagcacugacugugcc

SEQ ID NO: 735431 - RNA, 21 nt, Human
ucaaaggacuaaaagcuaaag

SEQ ID NO: 735432 - RNA, 24 nt, Human
ucaaugaccauuucaaaugacucu

SEQ ID NO: 735433 - RNA, 21 nt, Human
ucaccggcuguuuuccuucug

SEQ ID NO: 735434 - RNA, 20 nt, Human
ucacugcacuccagcuuggg

SEQ ID NO: 735435 - RNA, 21 nt, Human
ucacugcacuccagcuugggu

SEQ ID NO: 735436 - RNA, 24 nt, Human
ucacugcacuccagcuuggguaag

SEQ ID NO: 735437 - RNA, 22 nt, Human
ucaggccaagugcauaucuuga

SEQ ID NO: 735438 - RNA, 23 nt, Human
ucaugucacugcacuccagcuug

SEQ ID NO: 735439 - RNA, 19 nt, Human
uccaccccaugacaagagc

SEQ ID NO: 735440 - RNA, 18 nt, Human
uccagcuuggguaagaga

SEQ ID NO: 735441 - RNA, 25 nt, Human
uccauuuuucuuuaucauuuucuaa

SEQ ID NO: 735442 - RNA, 24 nt, Human
ucggaacugaacagcggaauucca

SEQ ID NO: 735443 - RNA, 23 nt, Human
ucuauaaauaacaaaaaguuauc

SEQ ID NO: 735444 - RNA, 21 nt, Human
ucuaugauuugccuguagagg

SEQ ID NO: 735445 - RNA, 18 nt, Human
ucucaucagaagcaucac

SEQ ID NO: 735446 - RNA, 18 nt, Human
ucuccucugccacucuga

SEQ ID NO: 735447 - RNA, 18 nt, Human
ucucgggcugggucgccg

SEQ ID NO: 735448 - RNA, 19 nt, Human
ucucuacuccaaaaccaga

SEQ ID NO: 735449 - RNA, 27 nt, Human
ucucugguaguaggcaaugucaguguu

SEQ ID NO: 735450 - RNA, 18 nt, Human
ucugucagcuggcuuccu

SEQ ID NO: 735451 - RNA, 24 nt, Human
ucuuccuaugccaagaagccuuag

SEQ ID NO: 735452 - RNA, 27 nt, Human
ucuucucugagaacucuguuuucauua

SEQ ID NO: 735453 - RNA, 23 nt, Human
ugaaaaacugggcucugugugaa

SEQ ID NO: 735454 - RNA, 24 nt, Human
ugaaaauauaaagcccaaagucag

SEQ ID NO: 735455 - RNA, 21 nt, Human
ugaaacagcauucuuaaccag

SEQ ID NO: 735456 - RNA, 24 nt, Human
ugaacaaaguuaaggacuugcaga

SEQ ID NO: 735457 - RNA, 23 nt, Human
ugaaucauaagaucaauauacug

SEQ ID NO: 735458 - RNA, 25 nt, Human
ugacaacagaaguccacauauaaau

SEQ ID NO: 735459 - RNA, 20 nt, Human
ugacugugccacagauaaca

SEQ ID NO: 735460 - RNA, 27 nt, Human
ugagcccaggaggcacaggaccaaagu

SEQ ID NO: 735461 - RNA, 21 nt, Human
ugaggaaggugaccauccacu

SEQ ID NO: 735462 - RNA, 18 nt, Human
ugaggugggaagauugcu

SEQ ID NO: 735463 - RNA, 24 nt, Human
ugaggugggaagauugcuugagcc

SEQ ID NO: 735464 - RNA, 22 nt, Human
ugagugacucacagucauaaga

SEQ ID NO: 735465 - RNA, 20 nt, Human
ugauccagagaguugagggc

SEQ ID NO: 735466 - RNA, 18 nt, Human
ugcaccacccaccaugcc

SEQ ID NO: 735467 - RNA, 18 nt, Human
ugcagucagccaagauca

SEQ ID NO: 735468 - RNA, 21 nt, Human
ugcccuaucauaucaucuccc

SEQ ID NO: 735469 - RNA, 22 nt, Human
ugccuguagagguuagaggugc

SEQ ID NO: 735470 - RNA, 24 nt, Human
ugcuauacaacugucaucagacag

SEQ ID NO: 735471 - RNA, 21 nt, Human
ugcuuuuuaguggcugacacu

SEQ ID NO: 735472 - RNA, 22 nt, Human
uggaccaaaacaagugguggca

SEQ ID NO: 735473 - RNA, 20 nt, Human
uggcaauuuccacuggcuuu

SEQ ID NO: 735474 - RNA, 22 nt, Human
uggcugacacuauaaagcuaac

SEQ ID NO: 735475 - RNA, 22 nt, Human
ugggaggcugaggugggaagau

SEQ ID NO: 735476 - RNA, 24 nt, Human
ugggaggcugaggugggaagauug

SEQ ID NO: 735477 - RNA, 22 nt, Human
ugggguugauucuguaguccca

SEQ ID NO: 735478 - RNA, 20 nt, Human
uggguaagagagcaagacuc

SEQ ID NO: 735479 - RNA, 23 nt, Human
ugguaguggaugugugguuaagu

SEQ ID NO: 735480 - RNA, 26 nt, Human
ugguaguggaugugugguuaaguuuu

SEQ ID NO: 735481 - RNA, 18 nt, Human
uguacaggacaaccugau

SEQ ID NO: 735482 - RNA, 22 nt, Human
ugucaggaauuucucugugagg

SEQ ID NO: 735483 - RNA, 18 nt, Human
ugugcagcagcuauagcu

SEQ ID NO: 735484 - RNA, 19 nt, Human
uguggcaaguuuucugaca

SEQ ID NO: 735485 - RNA, 24 nt, Human
uuacauaccuucuacaauguccaa

SEQ ID NO: 735486 - RNA, 23 nt, Human
uuagaugguuaauauaggaauac

SEQ ID NO: 735487 - RNA, 23 nt, Human
uucaaaggacuaaaagcuaaagg

SEQ ID NO: 735488 - RNA, 21 nt, Human
uuccgguuuaauucggaacug

SEQ ID NO: 735489 - RNA, 21 nt, Human
uuccuggaaugagugaacaaa

SEQ ID NO: 735490 - RNA, 20 nt, Human
uucuaaagcuucucaugaga

SEQ ID NO: 735491 - RNA, 19 nt, Human
uucucugagaacucuguuu

SEQ ID NO: 735492 - RNA, 24 nt, Human
uucuggggucucucccucuggcuc

SEQ ID NO: 735493 - RNA, 25 nt, Human
uugcagagagaguuuucuacuggaa

SEQ ID NO: 735494 - RNA, 24 nt, Human
uugccugucuucauuuuucuuacc

SEQ ID NO: 735495 - RNA, 22 nt, Human
uugcugaaucuauaguugcuuc

SEQ ID NO: 735496 - RNA, 18 nt, Human
uugcuugagcccaggagg

SEQ ID NO: 735497 - RNA, 20 nt, Human
uugggaggcugaggugggaa

SEQ ID NO: 735498 - RNA, 21 nt, Human
uuuucauuauacagcuggaca

SEQ ID NO: 735499 - RNA, 24 nt, Human
aaaaaacaaaauggauuucuccau

SEQ ID NO: 735500 - RNA, 19 nt, Human
aaacagaaccaaaauugcu

SEQ ID NO: 735501 - RNA, 25 nt, Human
aaacagcccuuaaauguuuaagggu

SEQ ID NO: 735502 - RNA, 19 nt, Human
aaagaguuaaggugucuuc

SEQ ID NO: 735503 - RNA, 23 nt, Human
aaagcgcucccgcccggaguuug

SEQ ID NO: 735504 - RNA, 23 nt, Human
aacaaagaguuaaggugucuuca

SEQ ID NO: 735505 - RNA, 19 nt, Human
aacccauucuucagcucug

SEQ ID NO: 735506 - RNA, 18 nt, Human
aacccugaauucucccua

SEQ ID NO: 735507 - RNA, 23 nt, Human
aacccugaauucucccuaaacag

SEQ ID NO: 735508 - RNA, 18 nt, Human
aacucagaagaaaggagu

SEQ ID NO: 735509 - RNA, 22 nt, Human
aagaacagaagauaaaccaaaa

SEQ ID NO: 735510 - RNA, 22 nt, Human
aagagaaaaaaagagggcuuua

SEQ ID NO: 735511 - RNA, 19 nt, Human
aagagaguggggaggugca

SEQ ID NO: 735512 - RNA, 19 nt, Human
aagcucuggguggucagug

SEQ ID NO: 735513 - RNA, 24 nt, Human
aaggagcuggugaccccaaaggau

SEQ ID NO: 735514 - RNA, 21 nt, Human
aaggcaaaagaaaacaaggac

SEQ ID NO: 735515 - RNA, 24 nt, Human
aaguuugguuaauaccaagcugaa

SEQ ID NO: 735516 - RNA, 22 nt, Human
aauacacacaacaaagaguuag

SEQ ID NO: 735517 - RNA, 19 nt, Human
acaaggcaaaagaaaacaa

SEQ ID NO: 735518 - RNA, 19 nt, Human
acagacuuaaguggguggg

SEQ ID NO: 735519 - RNA, 19 nt, Human
acauuauacaagauaguac

SEQ ID NO: 735520 - RNA, 21 nt, Human
accaaaaccaaacucacuauc

SEQ ID NO: 735521 - RNA, 25 nt, Human
accacagucaucuagaagucagguu

SEQ ID NO: 735522 - RNA, 20 nt, Human
accugucacuaaaaacaacu

SEQ ID NO: 735523 - RNA, 26 nt, Human
acucacuauccagucuuccucucaga

SEQ ID NO: 735524 - RNA, 22 nt, Human
acuucuaagggugcuccaggag

SEQ ID NO: 735525 - RNA, 23 nt, Human
agaaaaaaaaaaacagcccuuaa

SEQ ID NO: 735526 - RNA, 23 nt, Human
agacaacauacaaauaaaagucc

SEQ ID NO: 735527 - RNA, 19 nt, Human
agaugggugggggaaauca

SEQ ID NO: 735528 - RNA, 23 nt, Human
agcaaacaaaaccugucacuaaa

SEQ ID NO: 735529 - RNA, 21 nt, Human
agcccagaggaaacuggaacu

SEQ ID NO: 735530 - RNA, 20 nt, Human
agcuggugaccccaaaggau

SEQ ID NO: 735531 - RNA, 22 nt, Human
aggaaagagaaaaaaagagggc

SEQ ID NO: 735532 - RNA, 25 nt, Human
aggaagaacagaagauaaaccaaaa

SEQ ID NO: 735533 - RNA, 20 nt, Human
aggacaaacccccuggcagc

SEQ ID NO: 735534 - RNA, 20 nt, Human
aggaccagcaagggggggug

SEQ ID NO: 735535 - RNA, 20 nt, Human
aggagcugccagacugaaaa

SEQ ID NO: 735536 - RNA, 25 nt, Human
aggcaaaagaaaacaaggaccaaga

SEQ ID NO: 735537 - RNA, 20 nt, Human
aggcccuagcuccaggccug

SEQ ID NO: 735538 - RNA, 18 nt, Human
agggcgaaaaaaaagcca

SEQ ID NO: 735539 - RNA, 19 nt, Human
aggggggguguugaagggg

SEQ ID NO: 735540 - RNA, 22 nt, Human
aggucuccggcacgggcaacuc

SEQ ID NO: 735541 - RNA, 18 nt, Human
aguauaaacaccucugcc

SEQ ID NO: 735542 - RNA, 18 nt, Human
agucagguuuucucuucu

SEQ ID NO: 735543 - RNA, 22 nt, Human
auaaggucuccuccccucaaaa

SEQ ID NO: 735544 - RNA, 21 nt, Human
auacauuaccaaaauagcuuc

SEQ ID NO: 735545 - RNA, 23 nt, Human
auauagcuucuucaaacaaguua

SEQ ID NO: 735546 - RNA, 20 nt, Human
aucacauagaaauggccaag

SEQ ID NO: 735547 - RNA, 18 nt, Human
auggagacauggauguag

SEQ ID NO: 735548 - RNA, 22 nt, Human
auggagaugguacugguggugg

SEQ ID NO: 735549 - RNA, 20 nt, Human
caaaauagcuucacuaaaac

SEQ ID NO: 735550 - RNA, 24 nt, Human
caaacaaaaccugucacuaaaaac

SEQ ID NO: 735551 - RNA, 28 nt, Human
caaagcucaaaucaagucauggaaaccc

SEQ ID NO: 735552 - RNA, 18 nt, Human
caacagaagggacaaugg

SEQ ID NO: 735553 - RNA, 22 nt, Human
caagccaaugaggugugcagca

SEQ ID NO: 735554 - RNA, 23 nt, Human
caaggcaaaagaaaacaaggacc

SEQ ID NO: 735555 - RNA, 23 nt, Human
caaguuaccuaaagugccaggcu

SEQ ID NO: 735556 - RNA, 24 nt, Human
cacagcucucuucuaaagcucugg

SEQ ID NO: 735557 - RNA, 26 nt, Human
cacguuguuguuggcguugguggcgg

SEQ ID NO: 735558 - RNA, 24 nt, Human
cacuaaagaagucuguggcaugac

SEQ ID NO: 735559 - RNA, 21 nt, Human
cagagcccccuggucacuccc

SEQ ID NO: 735560 - RNA, 21 nt, Human
cagcagcuacaaucccaacac

SEQ ID NO: 735561 - RNA, 18 nt, Human
cagcagggaaaauggagc

SEQ ID NO: 735562 - RNA, 20 nt, Human
cagcccggauaaguaggcaa

SEQ ID NO: 735563 - RNA, 22 nt, Human
caggccccacuccagccgcgac

SEQ ID NO: 735564 - RNA, 22 nt, Human
cagugugagauaauggcugggg

SEQ ID NO: 735565 - RNA, 20 nt, Human
caguucucaaaaaaauaccu

SEQ ID NO: 735566 - RNA, 24 nt, Human
cauggaaacccugaauucucccua

SEQ ID NO: 735567 - RNA, 19 nt, Human
ccaaaaccaaaaccaaacu

SEQ ID NO: 735568 - RNA, 24 nt, Human
ccaaaaccaaaaccaaacucacua

SEQ ID NO: 735569 - RNA, 21 nt, Human
ccaaagggcgaaaaaaaagcc

SEQ ID NO: 735570 - RNA, 23 nt, Human
ccacucacacgcgcaggccccac

SEQ ID NO: 735571 - RNA, 18 nt, Human
ccagcagcuacaauccca

SEQ ID NO: 735572 - RNA, 22 nt, Human
ccaggguugggaauccugggcc

SEQ ID NO: 735573 - RNA, 23 nt, Human
cccaaagggcgaaaaaaaagccc

SEQ ID NO: 735574 - RNA, 23 nt, Human
ccccacuccagccgcgacuccgg

SEQ ID NO: 735575 - RNA, 18 nt, Human
cccccuggcagcgccugg

SEQ ID NO: 735576 - RNA, 25 nt, Human
cccgaggccgaggaagauccggagc

SEQ ID NO: 735577 - RNA, 22 nt, Human
cccggaguuugaggucuccggc

SEQ ID NO: 735578 - RNA, 20 nt, Human
cccugaaauaguacuaaaaa

SEQ ID NO: 735579 - RNA, 23 nt, Human
ccgcccggaguuugaggucuccg

SEQ ID NO: 735580 - RNA, 19 nt, Human
ccgcgccugauagaccccc

SEQ ID NO: 735581 - RNA, 25 nt, Human
ccggcuucggccgcggcugcucccg

SEQ ID NO: 735582 - RNA, 24 nt, Human
ccuccagcuaccaggacaaacccc

SEQ ID NO: 735583 - RNA, 24 nt, Human
cgacuccggccccugcuccggcuu

SEQ ID NO: 735584 - RNA, 20 nt, Human
cgacuccugagcugccaggu

SEQ ID NO: 735585 - RNA, 22 nt, Human
cgccagggacuggagauuggag

SEQ ID NO: 735586 - RNA, 21 nt, Human
cgcugucugggccuuggggac

SEQ ID NO: 735587 - RNA, 21 nt, Human
cucauaaacccugaaauagua

SEQ ID NO: 735588 - RNA, 18 nt, Human
cucccaccuagggguggg

SEQ ID NO: 735589 - RNA, 27 nt, Human
cucucuauauacauuucccagcuuuaa

SEQ ID NO: 735590 - RNA, 21 nt, Human
cugaauucucccuaaacagaa

SEQ ID NO: 735591 - RNA, 18 nt, Human
cugaccagauccgccagg

SEQ ID NO: 735592 - RNA, 20 nt, Human
cugagggaauaggaacaaag

SEQ ID NO: 735593 - RNA, 21 nt, Human
cuggaaaaaaaauuuaaguuu

SEQ ID NO: 735594 - RNA, 21 nt, Human
cugggucaaaauuagaagcac

SEQ ID NO: 735595 - RNA, 18 nt, Human
cuuaagccagugagucug

SEQ ID NO: 735596 - RNA, 22 nt, Human
cuuggagcugccuuccaggguu

SEQ ID NO: 735597 - RNA, 18 nt, Human
gaaagcagcaguaggagc

SEQ ID NO: 735598 - RNA, 18 nt, Human
gaccuccggagcaggauu

SEQ ID NO: 735599 - RNA, 19 nt, Human
gagcccccuggucacuccc

SEQ ID NO: 735600 - RNA, 23 nt, Human
gagggaccacuucuagcuggugu

SEQ ID NO: 735601 - RNA, 20 nt, Human
gauaaguaggcaauacuucu

SEQ ID NO: 735602 - RNA, 24 nt, Human
gaugaucaccguucuccggccucc

SEQ ID NO: 735603 - RNA, 22 nt, Human
gcaagccaaugaggugugcagc

SEQ ID NO: 735604 - RNA, 24 nt, Human
gcagcaaacaaaaccugucacuaa

SEQ ID NO: 735605 - RNA, 23 nt, Human
gccagagcccccuggucacuccc

SEQ ID NO: 735606 - RNA, 20 nt, Human
gccaggaagccggcuggggu

SEQ ID NO: 735607 - RNA, 19 nt, Human
gcuaaauacaagucacagg

SEQ ID NO: 735608 - RNA, 20 nt, Human
ggacaagcuacauuacccuc

SEQ ID NO: 735609 - RNA, 22 nt, Human
ggagcuccccaauggauaacuu

SEQ ID NO: 735610 - RNA, 20 nt, Human
ggccgaggaagauccggagc

SEQ ID NO: 735611 - RNA, 22 nt, Human
gggcucccagcagcuacaaucc

SEQ ID NO: 735612 - RNA, 19 nt, Human
gguggugggagccagcuac

SEQ ID NO: 735613 - RNA, 20 nt, Human
gguggugggagccagcuacg

SEQ ID NO: 735614 - RNA, 19 nt, Human
guaggaaaucauagauuuc

SEQ ID NO: 735615 - RNA, 20 nt, Human
guggcggcggcugcggcggc

SEQ ID NO: 735616 - RNA, 23 nt, Human
uaaaaccaaaaccaaaaccaaac

SEQ ID NO: 735617 - RNA, 18 nt, Human
uaaauuaaaauggcugug

SEQ ID NO: 735618 - RNA, 19 nt, Human
uaacuuaggaaagcagcag

SEQ ID NO: 735619 - RNA, 18 nt, Human
uaaggguuguuuuguugu

SEQ ID NO: 735620 - RNA, 19 nt, Human
uaaguaaggguuguuuugu

SEQ ID NO: 735621 - RNA, 24 nt, Human
uaaguuaagacaacauacaaauaa

SEQ ID NO: 735622 - RNA, 19 nt, Human
uacaagauaguacaaggca

SEQ ID NO: 735623 - RNA, 22 nt, Human
uacccaaauguguucugguuug

SEQ ID NO: 735624 - RNA, 19 nt, Human
uagaaaaucuguaagggug

SEQ ID NO: 735625 - RNA, 20 nt, Human
uagaggguggagagggaccu

SEQ ID NO: 735626 - RNA, 23 nt, Human
uagcuaaauuaaaauggcugugu

SEQ ID NO: 735627 - RNA, 25 nt, Human
uaggaagaacagaagauaaaccaaa

SEQ ID NO: 735628 - RNA, 22 nt, Human
uaguuuuuuuuuccccuuucaa

SEQ ID NO: 735629 - RNA, 19 nt, Human
uaugcaaagcucaaaucaa

SEQ ID NO: 735630 - RNA, 24 nt, Human
uaugcucauaaacccugaaauagu

SEQ ID NO: 735631 - RNA, 25 nt, Human
uaugcucauaaacccugaaauagua

SEQ ID NO: 735632 - RNA, 20 nt, Human
uaugguacaguauauacaaa

SEQ ID NO: 735633 - RNA, 26 nt, Human
ucacuaaaaacaacucaacaggccau

SEQ ID NO: 735634 - RNA, 19 nt, Human
ucagaagggugagaguuau

SEQ ID NO: 735635 - RNA, 19 nt, Human
uccacagaagcauuuaaag

SEQ ID NO: 735636 - RNA, 19 nt, Human
uccccucaaaaaaaggaaa

SEQ ID NO: 735637 - RNA, 19 nt, Human
ucccgcgccugauagaccc

SEQ ID NO: 735638 - RNA, 22 nt, Human
ucccgcgccugauagacccccg

SEQ ID NO: 735639 - RNA, 22 nt, Human
ucucaagggguaugguuuucug

SEQ ID NO: 735640 - RNA, 19 nt, Human
ucucugauucccagguugg

SEQ ID NO: 735641 - RNA, 23 nt, Human
ugaaggcccuagcuccaggccug

SEQ ID NO: 735642 - RNA, 24 nt, Human
ugacaccacagucaucuagaaguc

SEQ ID NO: 735643 - RNA, 21 nt, Human
ugagaaugcaguauaaacacc

SEQ ID NO: 735644 - RNA, 20 nt, Human
ugagagaagccagucccgcg

SEQ ID NO: 735645 - RNA, 23 nt, Human
ugagaguggauggaaggcaguca

SEQ ID NO: 735646 - RNA, 22 nt, Human
ugaggcuugacuacagcuaaau

SEQ ID NO: 735647 - RNA, 19 nt, Human
ugccagguccacagaagca

SEQ ID NO: 735648 - RNA, 24 nt, Human
ugcuuucuuucauuuaaauauuua

SEQ ID NO: 735649 - RNA, 19 nt, Human
uggaccuccggagcaggau

SEQ ID NO: 735650 - RNA, 26 nt, Human
uggagaugguacugguggugggagcc

SEQ ID NO: 735651 - RNA, 23 nt, Human
uggccaggaagccggcuggggug

SEQ ID NO: 735652 - RNA, 19 nt, Human
uggcggcaggagggggcuc

SEQ ID NO: 735653 - RNA, 18 nt, Human
uggcggcggcugcggcgg

SEQ ID NO: 735654 - RNA, 19 nt, Human
uggcguugguggcggcggc

SEQ ID NO: 735655 - RNA, 22 nt, Human
uggcuguguuacuuauuugaaa

SEQ ID NO: 735656 - RNA, 19 nt, Human
ugggaagagaguggggagg

SEQ ID NO: 735657 - RNA, 23 nt, Human
ugggaauccugggccagagcccc

SEQ ID NO: 735658 - RNA, 21 nt, Human
uggggugagaguggauggaag

SEQ ID NO: 735659 - RNA, 22 nt, Human
uggggugagaguggauggaagg

SEQ ID NO: 735660 - RNA, 27 nt, Human
uggguaaguaaggguuguuuuguuguu

SEQ ID NO: 735661 - RNA, 18 nt, Human
uggguggguggggaaggc

SEQ ID NO: 735662 - RNA, 18 nt, Human
ugguggcggcggcugcgg

SEQ ID NO: 735663 - RNA, 19 nt, Human
uguaaggguguauauauau

SEQ ID NO: 735664 - RNA, 20 nt, Human
ugugaaggcccuagcuccag

SEQ ID NO: 735665 - RNA, 18 nt, Human
uuaggcucuugguuagcc

SEQ ID NO: 735666 - RNA, 21 nt, Human
uuauaugcuaccuuuuugccu

SEQ ID NO: 735667 - RNA, 19 nt, Human
uucaaacaaguuaaaaggu

SEQ ID NO: 735668 - RNA, 21 nt, Human
uucaucuugcuuuaacuaaau

SEQ ID NO: 735669 - RNA, 22 nt, Human
uucccugaaaucgguuccucca

SEQ ID NO: 735670 - RNA, 24 nt, Human
uucuagacucaacauacaggagac

SEQ ID NO: 735671 - RNA, 20 nt, Human
uucuccggccuccguccuga

SEQ ID NO: 735672 - RNA, 23 nt, Human
uugccuggaagauguacuuucuc

SEQ ID NO: 735673 - RNA, 25 nt, Human
uuggaggacuagaggacugaugggu

SEQ ID NO: 735674 - RNA, 20 nt, Human
uuggcuuuagucauccccca

SEQ ID NO: 735675 - RNA, 22 nt, Human
uuucucuucuuuugguucuucu

SEQ ID NO: 735676 - RNA, 24 nt, Human
uuuguucauauccuguucaaaacc

SEQ ID NO: 735677 - RNA, 20 nt, Human
uuuuagaugacaccacaguc

SEQ ID NO: 735678 - RNA, 18 nt, Human
uuuuuuuuccccuuucaa

SEQ ID NO: 735679 - RNA, 19 nt, Human
aaaacaccuaagcaagccc

SEQ ID NO: 735680 - RNA, 19 nt, Human
aaaaggucuccacgccccu

SEQ ID NO: 735681 - RNA, 21 nt, Human
aaaauggaaaggagaaagccc

SEQ ID NO: 735682 - RNA, 20 nt, Human
aaauuguuuuuuaggccgag

SEQ ID NO: 735683 - RNA, 20 nt, Human
aacacaaaacaccuaagcaa

SEQ ID NO: 735684 - RNA, 18 nt, Human
aacacaguguccggagug

SEQ ID NO: 735685 - RNA, 25 nt, Human
aacaguaacaagugaaacaggcaac

SEQ ID NO: 735686 - RNA, 20 nt, Human
aacaugguacacgcacagaa

SEQ ID NO: 735687 - RNA, 20 nt, Human
aacauggugaaaucccaucu

SEQ ID NO: 735688 - RNA, 21 nt, Human
aacauggugaaaucccaucuc

SEQ ID NO: 735689 - RNA, 22 nt, Human
aaccagaggccuccaaggcccu

SEQ ID NO: 735690 - RNA, 19 nt, Human
aacccgcagaaucaaccca

SEQ ID NO: 735691 - RNA, 20 nt, Human
aacccggcuuuucacagugg

SEQ ID NO: 735692 - RNA, 19 nt, Human
aaccugcagaaucaaccca

SEQ ID NO: 735693 - RNA, 23 nt, Human
aagaaucgcuugaaccugggaga

SEQ ID NO: 735694 - RNA, 22 nt, Human
aagacaugucccagagaaaaca

SEQ ID NO: 735695 - RNA, 21 nt, Human
aagggacagggacaugccccg

SEQ ID NO: 735696 - RNA, 18 nt, Human
aaucccugaccugcccuc

SEQ ID NO: 735697 - RNA, 18 nt, Human
aaucgcuugaaccuggga

SEQ ID NO: 735698 - RNA, 20 nt, Human
aauguuuuuaaauacugguu

SEQ ID NO: 735699 - RNA, 19 nt, Human
acaccuaagcaagcccaac

SEQ ID NO: 735700 - RNA, 20 nt, Human
acacugcggagccagacagu

SEQ ID NO: 735701 - RNA, 20 nt, Human
acagaauaugggcuuuucau

SEQ ID NO: 735702 - RNA, 24 nt, Human
acagggcaagacuccaucucaaaa

SEQ ID NO: 735703 - RNA, 19 nt, Human
accauugcacuccagccug

SEQ ID NO: 735704 - RNA, 24 nt, Human
accauugcacuccagccuggguga

SEQ ID NO: 735705 - RNA, 19 nt, Human
acccacauagucaacccag

SEQ ID NO: 735706 - RNA, 23 nt, Human
acgcacagaaccccaaaggagca

SEQ ID NO: 735707 - RNA, 18 nt, Human
acugcagccuggaaggca

SEQ ID NO: 735708 - RNA, 21 nt, Human
agaagggggagggaacggggc

SEQ ID NO: 735709 - RNA, 20 nt, Human
agaaucucccucaaguacac

SEQ ID NO: 735710 - RNA, 21 nt, Human
agacggagguugcagugagcc

SEQ ID NO: 735711 - RNA, 24 nt, Human
agacggagguugcagugagccgag

SEQ ID NO: 735712 - RNA, 20 nt, Human
agagaggcccaccugccccu

SEQ ID NO: 735713 - RNA, 19 nt, Human
agcagcguuguagaaaguc

SEQ ID NO: 735714 - RNA, 23 nt, Human
agcaugguggcucacgccuguaa

SEQ ID NO: 735715 - RNA, 24 nt, Human
agccuggccaacauggugaaaucc

SEQ ID NO: 735716 - RNA, 24 nt, Human
agccugggugacagggcaagacuc

SEQ ID NO: 735717 - RNA, 25 nt, Human
aggacaaaacccaacacugcggagc

SEQ ID NO: 735718 - RNA, 26 nt, Human
aggacaucccagguuccuccugaaaa

SEQ ID NO: 735719 - RNA, 22 nt, Human
aggcagaagaaucgcuugaacc

SEQ ID NO: 735720 - RNA, 24 nt, Human
aggcagaagaaucgcuugaaccug

SEQ ID NO: 735721 - RNA, 22 nt, Human
aggcaggaucuuggcuccagcc

SEQ ID NO: 735722 - RNA, 21 nt, Human
aggcagugacggcggugaucc

SEQ ID NO: 735723 - RNA, 23 nt, Human
aggcccugcaguaaagggucucc

SEQ ID NO: 735724 - RNA, 19 nt, Human
aggcggggaggaugagcgc

SEQ ID NO: 735725 - RNA, 24 nt, Human
aggcugaggcagaagaaucgcuug

SEQ ID NO: 735726 - RNA, 19 nt, Human
agggggagggaacggggca

SEQ ID NO: 735727 - RNA, 20 nt, Human
aucaggacaucccagguucc

SEQ ID NO: 735728 - RNA, 24 nt, Human
aucccacccggagaagccucgcgg

SEQ ID NO: 735729 - RNA, 22 nt, Human
aucccagcacuuugggaggcca

SEQ ID NO: 735730 - RNA, 24 nt, Human
aucgcaccauugcacuccagccug

SEQ ID NO: 735731 - RNA, 21 nt, Human
auugcacuccagccuggguga

SEQ ID NO: 735732 - RNA, 24 nt, Human
caaaaaaggccuaaggaggccugc

SEQ ID NO: 735733 - RNA, 23 nt, Human
caaaacaccuaagcaagcccaac

SEQ ID NO: 735734 - RNA, 23 nt, Human
caaaacccaacacugcggagcca

SEQ ID NO: 735735 - RNA, 24 nt, Human
caacauggugaaaucccaucucua

SEQ ID NO: 735736 - RNA, 18 nt, Human
caaccagaggccuccaag

SEQ ID NO: 735737 - RNA, 24 nt, Human
caacccagcugaugaccucuaucu

SEQ ID NO: 735738 - RNA, 24 nt, Human
caacccagcugaugaccucuaucu

SEQ ID NO: 735739 - RNA, 25 nt, Human
caacccagcugaugaccucuaucua

SEQ ID NO: 735740 - RNA, 25 nt, Human
caacccagcugaugaccucuaucua

SEQ ID NO: 735741 - RNA, 25 nt, Human
caacccagcugaugaccucuaucua

SEQ ID NO: 735742 - RNA, 25 nt, Human
caacccagcugaugaucucuaucua

SEQ ID NO: 735743 - RNA, 23 nt, Human
cacaaaacaccuaagcaagccca

SEQ ID NO: 735744 - RNA, 23 nt, Human
cacauccaaagaggaagccuaga

SEQ ID NO: 735745 - RNA, 19 nt, Human
caccaggcacccggcccau

SEQ ID NO: 735746 - RNA, 22 nt, Human
caccaggcacccggcccauccc

SEQ ID NO: 735747 - RNA, 26 nt, Human
caccauugcacuccagccugggugac

SEQ ID NO: 735748 - RNA, 18 nt, Human
cacgcacagaaccccaaa

SEQ ID NO: 735749 - RNA, 24 nt, Human
cacgccuguaaucccagcacuuug

SEQ ID NO: 735750 - RNA, 19 nt, Human
cacgcguguaaucccagcu

SEQ ID NO: 735751 - RNA, 18 nt, Human
cacgucgugcacagcagc

SEQ ID NO: 735752 - RNA, 21 nt, Human
cacgucgugcacagcagcguu

SEQ ID NO: 735753 - RNA, 20 nt, Human
cacuccagccugggugacag

SEQ ID NO: 735754 - RNA, 20 nt, Human
cacuccagccugggugacag

SEQ ID NO: 735755 - RNA, 22 nt, Human
cacuccagccugggugacaggg

SEQ ID NO: 735756 - RNA, 23 nt, Human
cacuccagccugggugacagggc

SEQ ID NO: 735757 - RNA, 19 nt, Human
cagaaccccaaaggagcau

SEQ ID NO: 735758 - RNA, 27 nt, Human
cagaaggcugaggcagaagaaucgcuu

SEQ ID NO: 735759 - RNA, 18 nt, Human
cagaggccuccaaggccc

SEQ ID NO: 735760 - RNA, 21 nt, Human
cagcaacaugcauacggcauc

SEQ ID NO: 735761 - RNA, 21 nt, Human
cagcacuuugggaggccaugg

SEQ ID NO: 735762 - RNA, 24 nt, Human
cagcacuuugggaggccauggcag

SEQ ID NO: 735763 - RNA, 20 nt, Human
cagccucgacccccgaccga

SEQ ID NO: 735764 - RNA, 20 nt, Human
cagcguuggcacugacauuu

SEQ ID NO: 735765 - RNA, 24 nt, Human
cagcuacucagaaggcugaggcag

SEQ ID NO: 735766 - RNA, 24 nt, Human
cagcuucaccagcccucggcccug

SEQ ID NO: 735767 - RNA, 19 nt, Human
caggacaaaacccaacacu

SEQ ID NO: 735768 - RNA, 20 nt, Human
cagggcagagaauccuaaaa

SEQ ID NO: 735769 - RNA, 20 nt, Human
cagggcagguccacagcuga

SEQ ID NO: 735770 - RNA, 22 nt, Human
cagguuccuccugaaaacguca

SEQ ID NO: 735771 - RNA, 21 nt, Human
caguaacaguaacaagugaaa

SEQ ID NO: 735772 - RNA, 19 nt, Human
caucccagguuccuccuga

SEQ ID NO: 735773 - RNA, 23 nt, Human
cauccccggcucccaucuaggga

SEQ ID NO: 735774 - RNA, 26 nt, Human
caugcauacggcauccacgucgugca

SEQ ID NO: 735775 - RNA, 24 nt, Human
cauggcagguggaucacgagguca

SEQ ID NO: 735776 - RNA, 23 nt, Human
caugguuucccaaugcuuccccu

SEQ ID NO: 735777 - RNA, 19 nt, Human
cauugcacuccagccuggg

SEQ ID NO: 735778 - RNA, 19 nt, Human
cauugcacuccagccuggg

SEQ ID NO: 735779 - RNA, 21 nt, Human
cauugcacuccagccugggug

SEQ ID NO: 735780 - RNA, 22 nt, Human
cauugcacuccagccuggguga

SEQ ID NO: 735781 - RNA, 21 nt, Human
ccacagaaaagcugaaaccgc

SEQ ID NO: 735782 - RNA, 18 nt, Human
ccacagacguguccccag

SEQ ID NO: 735783 - RNA, 27 nt, Human
ccacccaccaggcacccggcccauccc

SEQ ID NO: 735784 - RNA, 19 nt, Human
ccacccgcccccggcugca

SEQ ID NO: 735785 - RNA, 20 nt, Human
ccagcccucggcccuguuug

SEQ ID NO: 735786 - RNA, 21 nt, Human
ccaguggauccuccccagggc

SEQ ID NO: 735787 - RNA, 20 nt, Human
ccauugcacuccagccuggg

SEQ ID NO: 735788 - RNA, 21 nt, Human
ccauugcacuccagccugggu

SEQ ID NO: 735789 - RNA, 21 nt, Human
ccauugcacuccagccugggu

SEQ ID NO: 735790 - RNA, 22 nt, Human
ccauugcacuccagccugggug

SEQ ID NO: 735791 - RNA, 24 nt, Human
ccauugcacuccagccugggugac

SEQ ID NO: 735792 - RNA, 25 nt, Human
ccauugcacuccagccugggugaca

SEQ ID NO: 735793 - RNA, 26 nt, Human
ccauugcacuccagccugggugacag

SEQ ID NO: 735794 - RNA, 21 nt, Human
cccaaggaauucugauucucc

SEQ ID NO: 735795 - RNA, 23 nt, Human
cccacaccuggggagcggggagc

SEQ ID NO: 735796 - RNA, 22 nt, Human
cccaucucuacuaaaaauacaa

SEQ ID NO: 735797 - RNA, 21 nt, Human
cccccacaccuggggagcggg

SEQ ID NO: 735798 - RNA, 23 nt, Human
cccccaggacugacagaggguag

SEQ ID NO: 735799 - RNA, 19 nt, Human
cccccgaccgagggacccg

SEQ ID NO: 735800 - RNA, 23 nt, Human
ccccgcccggugaugcccaagga

SEQ ID NO: 735801 - RNA, 22 nt, Human
ccccggcucccaucuagggauc

SEQ ID NO: 735802 - RNA, 20 nt, Human
cccggcccauccccggcucc

SEQ ID NO: 735803 - RNA, 20 nt, Human
cccugccaagggaacucuga

SEQ ID NO: 735804 - RNA, 25 nt, Human
ccgcccugcgagcagaggcguucgu

SEQ ID NO: 735805 - RNA, 20 nt, Human
ccggagaagccucgcgggcg

SEQ ID NO: 735806 - RNA, 21 nt, Human
ccgggaggugaccgaggccag

SEQ ID NO: 735807 - RNA, 18 nt, Human
ccuaagcaagcccaacuu

SEQ ID NO: 735808 - RNA, 22 nt, Human
ccuccugaaaacgucacccacc

SEQ ID NO: 735809 - RNA, 22 nt, Human
ccucugggugggacacugaucc

SEQ ID NO: 735810 - RNA, 23 nt, Human
ccugaaaacgucacccaccuuua

SEQ ID NO: 735811 - RNA, 25 nt, Human
ccugaaaagccugguuaaaccagaa

SEQ ID NO: 735812 - RNA, 24 nt, Human
ccugaccugcccucuuccugagag

SEQ ID NO: 735813 - RNA, 24 nt, Human
ccugcacauuugcacagauucagg

SEQ ID NO: 735814 - RNA, 23 nt, Human
ccuggccaacauggugaaauccc

SEQ ID NO: 735815 - RNA, 24 nt, Human
ccuggccaacauggugaaauccca

SEQ ID NO: 735816 - RNA, 21 nt, Human
ccugggagacggagguugcag

SEQ ID NO: 735817 - RNA, 22 nt, Human
ccuggggagcggggagcugcgg

SEQ ID NO: 735818 - RNA, 22 nt, Human
ccugggugacagggcaagacuc

SEQ ID NO: 735819 - RNA, 21 nt, Human
ccuguccacguacuuuggaaa

SEQ ID NO: 735820 - RNA, 25 nt, Human
ccuuccugcgggggcagauggaggc

SEQ ID NO: 735821 - RNA, 24 nt, Human
cgagaccagccuggccaacauggu

SEQ ID NO: 735822 - RNA, 22 nt, Human
cgaggucaguaguucgagacca

SEQ ID NO: 735823 - RNA, 21 nt, Human
cgcaccauugcacuccagccu

SEQ ID NO: 735824 - RNA, 18 nt, Human
cgcccggugaugcccaag

SEQ ID NO: 735825 - RNA, 23 nt, Human
cgccuguaaucccagcacuuugg

SEQ ID NO: 735826 - RNA, 24 nt, Human
cgccuguaaucccagcacuuuggg

SEQ ID NO: 735827 - RNA, 18 nt, Human
cuaaaauagcccgcagcc

SEQ ID NO: 735828 - RNA, 21 nt, Human
cuagagaggcccaccugcccc

SEQ ID NO: 735829 - RNA, 19 nt, Human
cucaaucaggugcuucacc

SEQ ID NO: 735830 - RNA, 20 nt, Human
cucaaucaggugcuucaccc

SEQ ID NO: 735831 - RNA, 23 nt, Human
cucacagcacccaguccacaauc

SEQ ID NO: 735832 - RNA, 22 nt, Human
cucacgccuguaaucccagcac

SEQ ID NO: 735833 - RNA, 24 nt, Human
cucacgccuguaaucccagcacuu

SEQ ID NO: 735834 - RNA, 22 nt, Human
cugcccgaggacagguguucca

SEQ ID NO: 735835 - RNA, 21 nt, Human
cugcgcacaacacaaaacacc

SEQ ID NO: 735836 - RNA, 18 nt, Human
cuggcuugugauaaggca

SEQ ID NO: 735837 - RNA, 25 nt, Human
cuuccugcgggggcagauggaggcg

SEQ ID NO: 735838 - RNA, 22 nt, Human
cuuggacaagccccacccaggu

SEQ ID NO: 735839 - RNA, 19 nt, Human
cuuguuggggcaugugaag

SEQ ID NO: 735840 - RNA, 23 nt, Human
cuuuggguggaaaacagccacug

SEQ ID NO: 735841 - RNA, 21 nt, Human
gaaggcccugaggaacugcuc

SEQ ID NO: 735842 - RNA, 23 nt, Human
gagaucgcaccauugcacuccag

SEQ ID NO: 735843 - RNA, 19 nt, Human
gaggccuccaaggcccugc

SEQ ID NO: 735844 - RNA, 23 nt, Human
gagguugcagugagccgagaucg

SEQ ID NO: 735845 - RNA, 20 nt, Human
gcaccauugcacuccagccu

SEQ ID NO: 735846 - RNA, 24 nt, Human
gcacuccagccugggugacagggc

SEQ ID NO: 735847 - RNA, 21 nt, Human
gcagggcagagaauccuaaaa

SEQ ID NO: 735848 - RNA, 22 nt, Human
gcaguaaagggucuccaccaca

SEQ ID NO: 735849 - RNA, 19 nt, Human
gcagugacggcggugaucc

SEQ ID NO: 735850 - RNA, 21 nt, Human
gcagugcuggcugauguccac

SEQ ID NO: 735851 - RNA, 24 nt, Human
gccaacauggugaaaucccaucuc

SEQ ID NO: 735852 - RNA, 22 nt, Human
gccacuagcagaucccguaaac

SEQ ID NO: 735853 - RNA, 21 nt, Human
gccaugagguuuugucucccu

SEQ ID NO: 735854 - RNA, 20 nt, Human
ggaaacggaagcagccucga

SEQ ID NO: 735855 - RNA, 21 nt, Human
ggaacaggcagugacggcggu

SEQ ID NO: 735856 - RNA, 18 nt, Human
ggaagcagccucgacccc

SEQ ID NO: 735857 - RNA, 22 nt, Human
ggacaaaacccaacacugcgga

SEQ ID NO: 735858 - RNA, 19 nt, Human
ggagaagggggagggaacg

SEQ ID NO: 735859 - RNA, 20 nt, Human
ggagguugcagugagccgag

SEQ ID NO: 735860 - RNA, 22 nt, Human
ggagguugcagugagccgagau

SEQ ID NO: 735861 - RNA, 24 nt, Human
ggagguugcagugagccgagaucg

SEQ ID NO: 735862 - RNA, 23 nt, Human
ggaguggguccguccgagcugga

SEQ ID NO: 735863 - RNA, 23 nt, Human
ggcagguggaucacgaggucagu

SEQ ID NO: 735864 - RNA, 21 nt, Human
ggcucacgccuguaaucccag

SEQ ID NO: 735865 - RNA, 19 nt, Human
gggaacaggcagugacggc

SEQ ID NO: 735866 - RNA, 20 nt, Human
gggaagccggagaggccgcc

SEQ ID NO: 735867 - RNA, 23 nt, Human
gggagggaacggggcaggcgggg

SEQ ID NO: 735868 - RNA, 22 nt, Human
gggcagaagacaugucccagag

SEQ ID NO: 735869 - RNA, 19 nt, Human
gggcaggcggcggggugaa

SEQ ID NO: 735870 - RNA, 18 nt, Human
gggcagguccacagcuga

SEQ ID NO: 735871 - RNA, 18 nt, Human
ggggagggaacggggcag

SEQ ID NO: 735872 - RNA, 19 nt, Human
gggggagggaacggggcag

SEQ ID NO: 735873 - RNA, 23 nt, Human
ggugaagguguccagggccugag

SEQ ID NO: 735874 - RNA, 24 nt, Human
gguggcacacgcguguaaucccag

SEQ ID NO: 735875 - RNA, 24 nt, Human
gguggcucacgccuguaaucccag

SEQ ID NO: 735876 - RNA, 24 nt, Human
gugacaagaacagaauaugggcuu

SEQ ID NO: 735877 - RNA, 21 nt, Human
guggaaaacagccacuguuca

SEQ ID NO: 735878 - RNA, 19 nt, Human
guugcagugagccgagauc

SEQ ID NO: 735879 - RNA, 25 nt, Human
uaacccgcagaaucaacccagcuga

SEQ ID NO: 735880 - RNA, 19 nt, Human
uaaccugcagaaucaaccc

SEQ ID NO: 735881 - RNA, 25 nt, Human
uaaccugcagaaucaacccagcuga

SEQ ID NO: 735882 - RNA, 19 nt, Human
uaaccugcggaaucaaccc

SEQ ID NO: 735883 - RNA, 19 nt, Human
uaaggcagcauucaggugg

SEQ ID NO: 735884 - RNA, 20 nt, Human
uaaguaggcaagccacuagc

SEQ ID NO: 735885 - RNA, 23 nt, Human
uacacgcacagaaccccaaagga

SEQ ID NO: 735886 - RNA, 23 nt, Human
uacaugguuucccaaugcuuccc

SEQ ID NO: 735887 - RNA, 20 nt, Human
uagaaagucccaccugcucc

SEQ ID NO: 735888 - RNA, 22 nt, Human
uagcagaucccguaaacguagu

SEQ ID NO: 735889 - RNA, 24 nt, Human
uaucuaacccacacaaucaaccca

SEQ ID NO: 735890 - RNA, 24 nt, Human
uaucuaacccacacaaucaaccca

SEQ ID NO: 735891 - RNA, 24 nt, Human
uaucuaacccacacaaucaaccca

SEQ ID NO: 735892 - RNA, 24 nt, Human
uaucuaacccacacaaucaaccca

SEQ ID NO: 735893 - RNA, 24 nt, Human
uaucuaacccacacaaucaaccca

SEQ ID NO: 735894 - RNA, 24 nt, Human
uaucuaacccacauagucaaccca

SEQ ID NO: 735895 - RNA, 18 nt, Human
ucacaggguuuacucccu

SEQ ID NO: 735896 - RNA, 22 nt, Human
ucacccaccuuuaaggguucug

SEQ ID NO: 735897 - RNA, 24 nt, Human
ucacgaggucaguaguucgagacc

SEQ ID NO: 735898 - RNA, 19 nt, Human
ucagaaucucccucaagua

SEQ ID NO: 735899 - RNA, 22 nt, Human
ucagccccgacugccacccacc

SEQ ID NO: 735900 - RNA, 20 nt, Human
uccacacagaauuuuggaaa

SEQ ID NO: 735901 - RNA, 24 nt, Human
uccacggccacggucacccggaag

SEQ ID NO: 735902 - RNA, 24 nt, Human
uccagccugggugacagggcaaga

SEQ ID NO: 735903 - RNA, 23 nt, Human
uccaucugcagcacgccuuggga

SEQ ID NO: 735904 - RNA, 24 nt, Human
ucccacaggagaagggggagggaa

SEQ ID NO: 735905 - RNA, 23 nt, Human
uccccggcucccaucuagggauc

SEQ ID NO: 735906 - RNA, 26 nt, Human
uccccggcucccaucuagggauccac

SEQ ID NO: 735907 - RNA, 22 nt, Human
ucccuaaguaggcaagccacua

SEQ ID NO: 735908 - RNA, 19 nt, Human
ucccucaaguacacgcaac

SEQ ID NO: 735909 - RNA, 20 nt, Human
uccgagcuggaguggucucc

SEQ ID NO: 735910 - RNA, 21 nt, Human
uccgagcuggaguggucuccg

SEQ ID NO: 735911 - RNA, 21 nt, Human
uccggaguggcuucccccagc

SEQ ID NO: 735912 - RNA, 18 nt, Human
uccugaaaagccugguua

SEQ ID NO: 735913 - RNA, 23 nt, Human
ucgcaccauugcacuccagccug

SEQ ID NO: 735914 - RNA, 24 nt, Human
ucgcuugaaccugggagacggagg

SEQ ID NO: 735915 - RNA, 25 nt, Human
ucgcuugaaccugggagacggaggu

SEQ ID NO: 735916 - RNA, 22 nt, Human
ucggagcccccacaccugggga

SEQ ID NO: 735917 - RNA, 24 nt, Human
ucuccaccacagacguguccccag

SEQ ID NO: 735918 - RNA, 21 nt, Human
ucucuacuaaaaauacaaaaa

SEQ ID NO: 735919 - RNA, 23 nt, Human
ucucugguucccagucaccccca

SEQ ID NO: 735920 - RNA, 22 nt, Human
ucuuccaggauacaugguaucc

SEQ ID NO: 735921 - RNA, 22 nt, Human
ugaaacaccagcguuggcacug

SEQ ID NO: 735922 - RNA, 25 nt, Human
ugaaacaggcaacuggauaucaggc

SEQ ID NO: 735923 - RNA, 24 nt, Human
ugaaccugggagacggagguugca

SEQ ID NO: 735924 - RNA, 21 nt, Human
ugaauaucuuuguuuaaaagg

SEQ ID NO: 735925 - RNA, 22 nt, Human
ugagccgagaucgcaccauugc

SEQ ID NO: 735926 - RNA, 20 nt, Human
ugaggcagaagaaucgcuug

SEQ ID NO: 735927 - RNA, 24 nt, Human
ugaggcagaagaaucgcuugaacc

SEQ ID NO: 735928 - RNA, 25 nt, Human
ugaggcagaagaaucgcuugaaccu

SEQ ID NO: 735929 - RNA, 19 nt, Human
ugauaaggcagcauucagg

SEQ ID NO: 735930 - RNA, 22 nt, Human
ugauaaggcagcauucaggugg

SEQ ID NO: 735931 - RNA, 23 nt, Human
ugauaaggcagcauucagguggc

SEQ ID NO: 735932 - RNA, 22 nt, Human
ugcacuccagccugggugacag

SEQ ID NO: 735933 - RNA, 18 nt, Human
ugccacagaaaagcugaa

SEQ ID NO: 735934 - RNA, 23 nt, Human
ugcccgaggacagguguuccagg

SEQ ID NO: 735935 - RNA, 21 nt, Human
ugcgcacaacacaaaacaccu

SEQ ID NO: 735936 - RNA, 21 nt, Human
uggaaacggaagcagccucga

SEQ ID NO: 735937 - RNA, 21 nt, Human
uggaaagcuaagcuggacuca

SEQ ID NO: 735938 - RNA, 24 nt, Human
uggaaugcaauuuuccaccugaaa

SEQ ID NO: 735939 - RNA, 18 nt, Human
uggacaagccccacccag

SEQ ID NO: 735940 - RNA, 18 nt, Human
uggacaagccccacccag

SEQ ID NO: 735941 - RNA, 22 nt, Human
uggacaagccccacccaggucc

SEQ ID NO: 735942 - RNA, 22 nt, Human
uggcacacgcguguaaucccag

SEQ ID NO: 735943 - RNA, 24 nt, Human
uggccaacauggugaaaucccauc

SEQ ID NO: 735944 - RNA, 20 nt, Human
uggccacgcacacuuuaaca

SEQ ID NO: 735945 - RNA, 22 nt, Human
uggcucacgccuguaaucccag

SEQ ID NO: 735946 - RNA, 24 nt, Human
uggcucacgccuguaaucccagca

SEQ ID NO: 735947 - RNA, 26 nt, Human
uggcuugugauaaggcagcauucagg

SEQ ID NO: 735948 - RNA, 24 nt, Human
ugggagacggagguugcagugagc

SEQ ID NO: 735949 - RNA, 18 nt, Human
ugggaggccauggcaggu

SEQ ID NO: 735950 - RNA, 24 nt, Human
ugggaggccauggcagguggauca

SEQ ID NO: 735951 - RNA, 20 nt, Human
uggguccguccgagcuggag

SEQ ID NO: 735952 - RNA, 24 nt, Human
ugguggcacacgcguguaauccca

SEQ ID NO: 735953 - RNA, 24 nt, Human
ugguggcucacgccuguaauccca

SEQ ID NO: 735954 - RNA, 18 nt, Human
ugguucccagucaccccc

SEQ ID NO: 735955 - RNA, 19 nt, Human
ugucccagagaaaacacag

SEQ ID NO: 735956 - RNA, 23 nt, Human
ugucugaagagcucucgauagga

SEQ ID NO: 735957 - RNA, 22 nt, Human
ugugcaagaacuggaaaaccgg

SEQ ID NO: 735958 - RNA, 19 nt, Human
uguuggggcaugugaaggg

SEQ ID NO: 735959 - RNA, 22 nt, Human
uguuggggcaugugaaggggcc

SEQ ID NO: 735960 - RNA, 18 nt, Human
uuagccuuaacagcuuca

SEQ ID NO: 735961 - RNA, 24 nt, Human
uuaggccgagcaugguggcucacg

SEQ ID NO: 735962 - RNA, 21 nt, Human
uuccaaaaggucuccacgccc

SEQ ID NO: 735963 - RNA, 19 nt, Human
uuccugcgggggcagaugg

SEQ ID NO: 735964 - RNA, 24 nt, Human
uugaaccugggagacggagguugc

SEQ ID NO: 735965 - RNA, 18 nt, Human
uugcagugagccgagauc

SEQ ID NO: 735966 - RNA, 19 nt, Human
uugcagugagccgagaucg

SEQ ID NO: 735967 - RNA, 20 nt, Human
uugcagugagccgagaucgc

SEQ ID NO: 735968 - RNA, 22 nt, Human
uugcagugagccgagaucgcac

SEQ ID NO: 735969 - RNA, 19 nt, Human
uuucucaggaauggugcug

SEQ ID NO: 735970 - RNA, 21 nt, Human
uuuucauaccacacacauaua

SEQ ID NO: 735971 - RNA, 25 nt, Human
uuuucauaccacacacauauauuuc

SEQ ID NO: 735972 - RNA, 22 nt, Human
uuuuuuaggccgagcauggugg

SEQ ID NO: 735973 - RNA, 24 nt, Human
aaaaaaaaaaaaaaaaaugccaag

SEQ ID NO: 735974 - RNA, 23 nt, Human
aaaaaaaaaaaaaaugccaacag

SEQ ID NO: 735975 - RNA, 18 nt, Human
aaaaagccaacagaggca

SEQ ID NO: 735976 - RNA, 22 nt, Human
aaaaagccaacagaggcaggug

SEQ ID NO: 735977 - RNA, 19 nt, Human
aaacaaacaaagaaaaccc

SEQ ID NO: 735978 - RNA, 20 nt, Human
aaacaaacaaagaaaacccc

SEQ ID NO: 735979 - RNA, 21 nt, Human
aaacaaacaaagaaaacccca

SEQ ID NO: 735980 - RNA, 23 nt, Human
aaacaaagaaaaccccaacccuu

SEQ ID NO: 735981 - RNA, 22 nt, Human
aaacaagacgggacuuaucuga

SEQ ID NO: 735982 - RNA, 21 nt, Human
aaacagaaggcucuggacccg

SEQ ID NO: 735983 - RNA, 19 nt, Human
aaaccccacccccaccccc

SEQ ID NO: 735984 - RNA, 22 nt, Human
aaagucccuuauagcgcugcuc

SEQ ID NO: 735985 - RNA, 23 nt, Human
aaauacagcgagacuccaucaca

SEQ ID NO: 735986 - RNA, 24 nt, Human
aacaaacccagcccaucgucucuc

SEQ ID NO: 735987 - RNA, 20 nt, Human
aacaaagaaaaccccaaccc

SEQ ID NO: 735988 - RNA, 20 nt, Human
aacaguaacuaagaaacccc

SEQ ID NO: 735989 - RNA, 20 nt, Human
aacauggcgaaacccugucu

SEQ ID NO: 735990 - RNA, 21 nt, Human
aacauggcgaaacccugucuc

SEQ ID NO: 735991 - RNA, 22 nt, Human
aacccaaucccuugccagcacc

SEQ ID NO: 735992 - RNA, 19 nt, Human
aacuccccagcccugaccc

SEQ ID NO: 735993 - RNA, 23 nt, Human
aacugaacuccucagcauuacug

SEQ ID NO: 735994 - RNA, 19 nt, Human
aagcaacccuggccagagc

SEQ ID NO: 735995 - RNA, 20 nt, Human
aagcaacccuggccagagcc

SEQ ID NO: 735996 - RNA, 20 nt, Human
aaggaggagagcagugcccu

SEQ ID NO: 735997 - RNA, 22 nt, Human
aaugccccagacacacauucug

SEQ ID NO: 735998 - RNA, 19 nt, Human
aauggcacauggccucagu

SEQ ID NO: 735999 - RNA, 24 nt, Human
aauugcuugaacccgggaggugga

SEQ ID NO: 736000 - RNA, 20 nt, Human
acaaaacuuucauacaaaaa

SEQ ID NO: 736001 - RNA, 18 nt, Human
acaaacaaacaaacaaag

SEQ ID NO: 736002 - RNA, 19 nt, Human
acaaacaaacaaacaaaga

SEQ ID NO: 736003 - RNA, 19 nt, Human
acaaacccagcccaucguc

SEQ ID NO: 736004 - RNA, 19 nt, Human
acaaaggcuaaaaacauac

SEQ ID NO: 736005 - RNA, 19 nt, Human
acacacagcucccgggccg

SEQ ID NO: 736006 - RNA, 25 nt, Human
acacugagccuucuccaaccggagg

SEQ ID NO: 736007 - RNA, 22 nt, Human
acagcacaaggggcugucucuc

SEQ ID NO: 736008 - RNA, 24 nt, Human
acaggcagcgccgcgcuccgaggu

SEQ ID NO: 736009 - RNA, 23 nt, Human
acauucugugauccaaccaaucu

SEQ ID NO: 736010 - RNA, 22 nt, Human
acccacucucucccuaacacag

SEQ ID NO: 736011 - RNA, 21 nt, Human
acccagaagacccuaagcaac

SEQ ID NO: 736012 - RNA, 23 nt, Human
acccagcccaucgucucuccccu

SEQ ID NO: 736013 - RNA, 21 nt, Human
acccagcucauggcgagcaca

SEQ ID NO: 736014 - RNA, 24 nt, Human
accccaacccuuuccuccccugaa

SEQ ID NO: 736015 - RNA, 18 nt, Human
accccacccccaccccca

SEQ ID NO: 736016 - RNA, 22 nt, Human
accccacccccacccccagccc

SEQ ID NO: 736017 - RNA, 18 nt, Human
acccccacccccagcccc

SEQ ID NO: 736018 - RNA, 21 nt, Human
acccccacccccagccccugu

SEQ ID NO: 736019 - RNA, 24 nt, Human
acccugucucuacuaaaaacacaa

SEQ ID NO: 736020 - RNA, 24 nt, Human
accggggagguggaggcugcagug

SEQ ID NO: 736021 - RNA, 24 nt, Human
accugaggucaggaguucaagacc

SEQ ID NO: 736022 - RNA, 19 nt, Human
accuugagugagaaucugg

SEQ ID NO: 736023 - RNA, 22 nt, Human
acgaucguggcuauuucugauc

SEQ ID NO: 736024 - RNA, 20 nt, Human
acugagccuucuccaagcaa

SEQ ID NO: 736025 - RNA, 18 nt, Human
acugcacuccagccuggg

SEQ ID NO: 736026 - RNA, 21 nt, Human
acugcacuccagccugggcaa

SEQ ID NO: 736027 - RNA, 25 nt, Human
acugcacuccagccugggcaacaag

SEQ ID NO: 736028 - RNA, 26 nt, Human
acuguaacaaaggcuaaaaacauacc

SEQ ID NO: 736029 - RNA, 22 nt, Human
agaagacccuaagcaacagccc

SEQ ID NO: 736030 - RNA, 20 nt, Human
agaaggcggcaggucaaccg

SEQ ID NO: 736031 - RNA, 22 nt, Human
agaauugcuugaacccgggagg

SEQ ID NO: 736032 - RNA, 21 nt, Human
agagacacccacacaaaccca

SEQ ID NO: 736033 - RNA, 24 nt, Human
agagauugugucacugcacuccag

SEQ ID NO: 736034 - RNA, 21 nt, Human
agagcauccucuacaccgcac

SEQ ID NO: 736035 - RNA, 26 nt, Human
agagcucuccuacacccagguggccc

SEQ ID NO: 736036 - RNA, 28 nt, Human
agaggcaggugugaugccucccaagggg

SEQ ID NO: 736037 - RNA, 19 nt, Human
agagggcgugugcauggga

SEQ ID NO: 736038 - RNA, 24 nt, Human
agcacuuugggaggcugagguggg

SEQ ID NO: 736039 - RNA, 19 nt, Human
agcauggugaaaccccauc

SEQ ID NO: 736040 - RNA, 20 nt, Human
agcauggugaaaccccaucu

SEQ ID NO: 736041 - RNA, 18 nt, Human
agccaagccaagcugucu

SEQ ID NO: 736042 - RNA, 23 nt, Human
agccgggcgugguggcaggugcc

SEQ ID NO: 736043 - RNA, 23 nt, Human
agccgggcgugguggcgugcacc

SEQ ID NO: 736044 - RNA, 24 nt, Human
agccuggccaacauggcgaaaccc

SEQ ID NO: 736045 - RNA, 22 nt, Human
agccuggccagcauggugaaac

SEQ ID NO: 736046 - RNA, 24 nt, Human
agccuggccagcauggugaaaccc

SEQ ID NO: 736047 - RNA, 24 nt, Human
agccugggaaauacagcgagacuc

SEQ ID NO: 736048 - RNA, 19 nt, Human
agcggauucuucuaaccgc

SEQ ID NO: 736049 - RNA, 18 nt, Human
agcuggggcugggggcag

SEQ ID NO: 736050 - RNA, 23 nt, Human
agcuggggcugggggcaguggcu

SEQ ID NO: 736051 - RNA, 24 nt, Human
agcugugugacccaagggacacuu

SEQ ID NO: 736052 - RNA, 20 nt, Human
agcuguuuggcccccuuucu

SEQ ID NO: 736053 - RNA, 20 nt, Human
aggaaagagaaagcagaggg

SEQ ID NO: 736054 - RNA, 20 nt, Human
aggaggagggagagccccgc

SEQ ID NO: 736055 - RNA, 18 nt, Human
aggcaggagaaucacuug

SEQ ID NO: 736056 - RNA, 22 nt, Human
aggcaggagaaucacuugaacc

SEQ ID NO: 736057 - RNA, 24 nt, Human
aggcaggagaauugcuugaacccg

SEQ ID NO: 736058 - RNA, 22 nt, Human
aggcaggaggcaggggacccca

SEQ ID NO: 736059 - RNA, 23 nt, Human
aggcaggaggcaggggaccccag

SEQ ID NO: 736060 - RNA, 20 nt, Human
aggcaggcccccugagggcc

SEQ ID NO: 736061 - RNA, 21 nt, Human
aggccgaggcggguggcucac

SEQ ID NO: 736062 - RNA, 19 nt, Human
aggccuguuugguuucaac

SEQ ID NO: 736063 - RNA, 19 nt, Human
aggcggguggcucaccuga

SEQ ID NO: 736064 - RNA, 22 nt, Human
aggcggguggcucaccugaggu

SEQ ID NO: 736065 - RNA, 24 nt, Human
aggcugaggcaggagaaucacuug

SEQ ID NO: 736066 - RNA, 21 nt, Human
aggcugaggcaggagaauugc

SEQ ID NO: 736067 - RNA, 24 nt, Human
aggcugaggcaggagaauugcuug

SEQ ID NO: 736068 - RNA, 23 nt, Human
aggcugccuagaggggagcccag

SEQ ID NO: 736069 - RNA, 23 nt, Human
aggggagcccagcagccuggugu

SEQ ID NO: 736070 - RNA, 18 nt, Human
agguaguaaagggggaaa

SEQ ID NO: 736071 - RNA, 19 nt, Human
aggucaggaguucgagacc

SEQ ID NO: 736072 - RNA, 22 nt, Human
agguggaggcugcagugaacgg

SEQ ID NO: 736073 - RNA, 19 nt, Human
agguggagguugcagugag

SEQ ID NO: 736074 - RNA, 24 nt, Human
agguggagguugcagugaguagag

SEQ ID NO: 736075 - RNA, 23 nt, Human
aggugggggggaucaccugaggu

SEQ ID NO: 736076 - RNA, 24 nt, Human
aggugggggggaucaccugagguc

SEQ ID NO: 736077 - RNA, 24 nt, Human
aggugugaugccucacgccuguaa

SEQ ID NO: 736078 - RNA, 19 nt, Human
aguaacuaagaaaccccac

SEQ ID NO: 736079 - RNA, 19 nt, Human
aguggcagcgccggcccuc

SEQ ID NO: 736080 - RNA, 23 nt, Human
aguggcucacgccuguaauccca

SEQ ID NO: 736081 - RNA, 19 nt, Human
auaccaagugcuccagggu

SEQ ID NO: 736082 - RNA, 18 nt, Human
aucaggauuuuaauuugg

SEQ ID NO: 736083 - RNA, 24 nt, Human
aucuggccguuucgccuuguggga

SEQ ID NO: 736084 - RNA, 21 nt, Human
augcaggucaucggguggggu

SEQ ID NO: 736085 - RNA, 23 nt, Human
augccucacgccuguaaucccag

SEQ ID NO: 736086 - RNA, 22 nt, Human
auggagggcggcuuccgggcca

SEQ ID NO: 736087 - RNA, 23 nt, Human
caaacaaacaaagaaaaccccaa

SEQ ID NO: 736088 - RNA, 20 nt, Human
caaacccagcccaucgucuc

SEQ ID NO: 736089 - RNA, 21 nt, Human
caaacccagcccaucgucucu

SEQ ID NO: 736090 - RNA, 24 nt, Human
caacacuuugggaggccgaggcgg

SEQ ID NO: 736091 - RNA, 19 nt, Human
caacagccaaagccaagcc

SEQ ID NO: 736092 - RNA, 24 nt, Human
caacauggcgaaacccugucucua

SEQ ID NO: 736093 - RNA, 27 nt, Human
caaccuuaaaacagaguuuguagaaca

SEQ ID NO: 736094 - RNA, 20 nt, Human
caacuccccagcccugaccc

SEQ ID NO: 736095 - RNA, 18 nt, Human
caagaaugaguccuucac

SEQ ID NO: 736096 - RNA, 23 nt, Human
caagcaacccuggccagagccac

SEQ ID NO: 736097 - RNA, 22 nt, Human
caaggucgggcggcagggugcc

SEQ ID NO: 736098 - RNA, 25 nt, Human
caaucuauuaccacggccccucuua

SEQ ID NO: 736099 - RNA, 23 nt, Human
cacacaaacccaaucccuugcca

SEQ ID NO: 736100 - RNA, 20 nt, Human
cacacacaggagguucaaga

SEQ ID NO: 736101 - RNA, 19 nt, Human
cacagcccagcucaugccu

SEQ ID NO: 736102 - RNA, 21 nt, Human
cacagcccagcucaugccugc

SEQ ID NO: 736103 - RNA, 26 nt, Human
cacagcccucaaggucgggcggcagg

SEQ ID NO: 736104 - RNA, 20 nt, Human
cacagcuccagccuucuuuu

SEQ ID NO: 736105 - RNA, 18 nt, Human
caccagguucaagaaggc

SEQ ID NO: 736106 - RNA, 22 nt, Human
cacccagaagacccuaagcaac

SEQ ID NO: 736107 - RNA, 22 nt, Human
cacccccagccccugugggagc

SEQ ID NO: 736108 - RNA, 23 nt, Human
caccucauggcuguccugccugc

SEQ ID NO: 736109 - RNA, 20 nt, Human
caccuccccacgcagggacc

SEQ ID NO: 736110 - RNA, 23 nt, Human
caccugaggucaggaguucaaga

SEQ ID NO: 736111 - RNA, 23 nt, Human
caccugaggucaggaguucgaga

SEQ ID NO: 736112 - RNA, 20 nt, Human
caccugccugcugggcccag

SEQ ID NO: 736113 - RNA, 18 nt, Human
caccugucaucccagcua

SEQ ID NO: 736114 - RNA, 24 nt, Human
caccugucaucccagcuacucagg

SEQ ID NO: 736115 - RNA, 24 nt, Human
cacgccuguaaucccaacacuuug

SEQ ID NO: 736116 - RNA, 24 nt, Human
cacgccuguaaucccagcacuuug

SEQ ID NO: 736117 - RNA, 20 nt, Human
cacgcggaacagccuaggga

SEQ ID NO: 736118 - RNA, 18 nt, Human
cacuaggauuggcacagc

SEQ ID NO: 736119 - RNA, 24 nt, Human
cacuccagccugggcaacaagagc

SEQ ID NO: 736120 - RNA, 18 nt, Human
cacugaaaucccguggcc

SEQ ID NO: 736121 - RNA, 18 nt, Human
cacugcacgccacuuggg

SEQ ID NO: 736122 - RNA, 19 nt, Human
cacugcacuccagccuggg

SEQ ID NO: 736123 - RNA, 20 nt, Human
cacugcacuccagccugggc

SEQ ID NO: 736124 - RNA, 21 nt, Human
cacugcacuccagccugggca

SEQ ID NO: 736125 - RNA, 22 nt, Human
cacugcacuccagccugggcaa

SEQ ID NO: 736126 - RNA, 23 nt, Human
cacugcacuccagccugggcaac

SEQ ID NO: 736127 - RNA, 24 nt, Human
cacugcacuccagccugggcaaca

SEQ ID NO: 736128 - RNA, 18 nt, Human
cagagcucuccuacaccc

SEQ ID NO: 736129 - RNA, 24 nt, Human
cagcacuuugggaggcugaggugg

SEQ ID NO: 736130 - RNA, 24 nt, Human
cagcagcaaggguuccuggggugc

SEQ ID NO: 736131 - RNA, 22 nt, Human
cagccaaagccaagccaagcug

SEQ ID NO: 736132 - RNA, 18 nt, Human
cagccacagccccacgcu

SEQ ID NO: 736133 - RNA, 22 nt, Human
cagccgggcgugguggcaggug

SEQ ID NO: 736134 - RNA, 23 nt, Human
cagccuagggaaaagcgaaucuc

SEQ ID NO: 736135 - RNA, 21 nt, Human
cagccuccagagccacugccu

SEQ ID NO: 736136 - RNA, 22 nt, Human
cagcgcuuagaggcagaggcca

SEQ ID NO: 736137 - RNA, 24 nt, Human
cagcuacucaggaggcugaggcag

SEQ ID NO: 736138 - RNA, 24 nt, Human
cagcuacucggaaggcugaggcag

SEQ ID NO: 736139 - RNA, 26 nt, Human
cagcucauggcgagcacacuggcagg

SEQ ID NO: 736140 - RNA, 21 nt, Human
cagcucccgggccgucugcag

SEQ ID NO: 736141 - RNA, 22 nt, Human
caggcacacacacgucccucug

SEQ ID NO: 736142 - RNA, 19 nt, Human
cagggcagaugcaaucuau

SEQ ID NO: 736143 - RNA, 20 nt, Human
caggggcccugagccccggc

SEQ ID NO: 736144 - RNA, 21 nt, Human
cagucaggggcccugagcccc

SEQ ID NO: 736145 - RNA, 26 nt, Human
cagucuaccccauuucacuuacagag

SEQ ID NO: 736146 - RNA, 22 nt, Human
caucaccgagcgggacacaaga

SEQ ID NO: 736147 - RNA, 20 nt, Human
caugcacagggcagaugcag

SEQ ID NO: 736148 - RNA, 25 nt, Human
caugcgcaugcacagggcagaugca

SEQ ID NO: 736149 - RNA, 18 nt, Human
cauggugaaaccccaucu

SEQ ID NO: 736150 - RNA, 19 nt, Human
cauggugaaaccccaucuc

SEQ ID NO: 736151 - RNA, 21 nt, Human
cauggugaaaccccaucucua

SEQ ID NO: 736152 - RNA, 21 nt, Human
ccaaugcguguugcuuggauu

SEQ ID NO: 736153 - RNA, 20 nt, Human
ccacacaaacccaaucccuu

SEQ ID NO: 736154 - RNA, 23 nt, Human
ccaccagguucaagaaggcggca

SEQ ID NO: 736155 - RNA, 26 nt, Human
ccacccagaagacccuaagcaacagg

SEQ ID NO: 736156 - RNA, 22 nt, Human
ccacggcagcgacaggcaggag

SEQ ID NO: 736157 - RNA, 22 nt, Human
ccacugucacucccaacucaga

SEQ ID NO: 736158 - RNA, 19 nt, Human
ccagagcucuccuacaccc

SEQ ID NO: 736159 - RNA, 23 nt, Human
ccagcaugcagguguugggguca

SEQ ID NO: 736160 - RNA, 27 nt, Human
ccagcccuuggcccacgauggcccaug

SEQ ID NO: 736161 - RNA, 20 nt, Human
ccaggcggggugcagcuggc

SEQ ID NO: 736162 - RNA, 25 nt, Human
ccagguccugggggaagagaggaaa

SEQ ID NO: 736163 - RNA, 23 nt, Human
ccaucggucacacgauugauucc

SEQ ID NO: 736164 - RNA, 18 nt, Human
cccacagaagagaagggc

SEQ ID NO: 736165 - RNA, 23 nt, Human
cccaccucuauuucaugagcaaa

SEQ ID NO: 736166 - RNA, 24 nt, Human
cccagcccugacccagcucauggc

SEQ ID NO: 736167 - RNA, 22 nt, Human
cccagccugcacaacuccccag

SEQ ID NO: 736168 - RNA, 30 nt, Human
cccagccugcacaacuccccagcccugacc

SEQ ID NO: 736169 - RNA, 23 nt, Human
cccagcucauggcgagcacacug

SEQ ID NO: 736170 - RNA, 19 nt, Human
cccaggcaguaagugcgag

SEQ ID NO: 736171 - RNA, 21 nt, Human
cccaucgucucuccccuugga

SEQ ID NO: 736172 - RNA, 22 nt, Human
ccccaacagccaaagccaagcc

SEQ ID NO: 736173 - RNA, 24 nt, Human
ccccaacagccaaagccaagccaa

SEQ ID NO: 736174 - RNA, 19 nt, Human
ccccaacccuuuccucccc

SEQ ID NO: 736175 - RNA, 24 nt, Human
ccccagacacacauucugugaucc

SEQ ID NO: 736176 - RNA, 26 nt, Human
cccccacccucgccagcccuuggccc

SEQ ID NO: 736177 - RNA, 19 nt, Human
ccccuccucccucuugguc

SEQ ID NO: 736178 - RNA, 20 nt, Human
ccccuccucccucuuggucu

SEQ ID NO: 736179 - RNA, 21 nt, Human
cccgggagguggagguugcag

SEQ ID NO: 736180 - RNA, 22 nt, Human
cccguggccacgugcaucccca

SEQ ID NO: 736181 - RNA, 18 nt, Human
cccuccccgucccugagg

SEQ ID NO: 736182 - RNA, 21 nt, Human
cccuggcuuccagcuaaggaa

SEQ ID NO: 736183 - RNA, 20 nt, Human
cccuuggauauggugaauuu

SEQ ID NO: 736184 - RNA, 22 nt, Human
ccgcacccacucucucccuaac

SEQ ID NO: 736185 - RNA, 18 nt, Human
ccucauggcuguccugcc

SEQ ID NO: 736186 - RNA, 30 nt, Human
ccuccccugaaauggcuauuucaagagucc

SEQ ID NO: 736187 - RNA, 23 nt, Human
ccucgcucugacauuucucuaaa

SEQ ID NO: 736188 - RNA, 27 nt, Human
ccucuacaccgcacccacucucucccu

SEQ ID NO: 736189 - RNA, 20 nt, Human
ccucugcacuccagccuggg

SEQ ID NO: 736190 - RNA, 24 nt, Human
ccucugcacuccagccugggaaau

SEQ ID NO: 736191 - RNA, 20 nt, Human
ccugaaauggcuauuucaag

SEQ ID NO: 736192 - RNA, 18 nt, Human
ccugaggcuggggcuggg

SEQ ID NO: 736193 - RNA, 22 nt, Human
ccugaggucaggaguucgagac

SEQ ID NO: 736194 - RNA, 24 nt, Human
ccugccccacagcgggagacuggg

SEQ ID NO: 736195 - RNA, 19 nt, Human
ccugccugcaucccuugcc

SEQ ID NO: 736196 - RNA, 21 nt, Human
ccugccugcugggcccagagg

SEQ ID NO: 736197 - RNA, 22 nt, Human
ccugccugcugggcccagaggg

SEQ ID NO: 736198 - RNA, 21 nt, Human
ccugcggagugcgaccucugg

SEQ ID NO: 736199 - RNA, 22 nt, Human
ccuggccaacauggcgaaaccc

SEQ ID NO: 736200 - RNA, 24 nt, Human
ccuggccaacauggcgaaacccug

SEQ ID NO: 736201 - RNA, 19 nt, Human
ccuggccagagccacuguc

SEQ ID NO: 736202 - RNA, 23 nt, Human
ccuggccagcauggugaaacccc

SEQ ID NO: 736203 - RNA, 24 nt, Human
ccuggccagcauggugaaacccca

SEQ ID NO: 736204 - RNA, 22 nt, Human
ccuguaaucccaacacuuuggg

SEQ ID NO: 736205 - RNA, 22 nt, Human
ccuguaaucccagcacuuuggg

SEQ ID NO: 736206 - RNA, 21 nt, Human
ccuguaaucccagcuacucgg

SEQ ID NO: 736207 - RNA, 26 nt, Human
ccugugguuaaacaugcgcaugcaca

SEQ ID NO: 736208 - RNA, 19 nt, Human
ccuucugacaacucaaggu

SEQ ID NO: 736209 - RNA, 22 nt, Human
ccuucuuuccucacaacugaac

SEQ ID NO: 736210 - RNA, 23 nt, Human
cgacaggcaggaggcaggggacc

SEQ ID NO: 736211 - RNA, 18 nt, Human
cgaccuugagugagaauc

SEQ ID NO: 736212 - RNA, 24 nt, Human
cgagaccagccuggccagcauggu

SEQ ID NO: 736213 - RNA, 26 nt, Human
cgaggcggguggcucaccugagguca

SEQ ID NO: 736214 - RNA, 23 nt, Human
cgccuguaaucccaacacuuugg

SEQ ID NO: 736215 - RNA, 23 nt, Human
cgccuguaaucccagcacuuugg

SEQ ID NO: 736216 - RNA, 20 nt, Human
cggaaggcugaggcaggaga

SEQ ID NO: 736217 - RNA, 21 nt, Human
cggcacugcugugacucuggc

SEQ ID NO: 736218 - RNA, 19 nt, Human
cggcauaguucagagggaa

SEQ ID NO: 736219 - RNA, 29 nt, Human
cgggagguggagguugcagugacaacggu

SEQ ID NO: 736220 - RNA, 24 nt, Human
cgggagguggagguugcagugagu

SEQ ID NO: 736221 - RNA, 24 nt, Human
cggguggcucaccugaggucagga

SEQ ID NO: 736222 - RNA, 23 nt, Human
cggucgucccccaccucuauuuc

SEQ ID NO: 736223 - RNA, 20 nt, Human
cgucugcaggcacacacacg

SEQ ID NO: 736224 - RNA, 19 nt, Human
cguuugccuucucuuucuc

SEQ ID NO: 736225 - RNA, 27 nt, Human
cuaaaaaaaaaaaaaaaaaaugccaaa

SEQ ID NO: 736226 - RNA, 19 nt, Human
cuaaaaagccaacagaggc

SEQ ID NO: 736227 - RNA, 19 nt, Human
cuaaaacuguaacaaaggc

SEQ ID NO: 736228 - RNA, 21 nt, Human
cuaacuaaaaagccaacagag

SEQ ID NO: 736229 - RNA, 21 nt, Human
cuacuaaaaacacaaaaauca

SEQ ID NO: 736230 - RNA, 24 nt, Human
cucaccugaggucaggaguucaag

SEQ ID NO: 736231 - RNA, 22 nt, Human
cucacgccuguaaucccaacac

SEQ ID NO: 736232 - RNA, 24 nt, Human
cucacgccuguaaucccaacacuu

SEQ ID NO: 736233 - RNA, 22 nt, Human
cucacgccuguaaucccagcac

SEQ ID NO: 736234 - RNA, 24 nt, Human
cucacgccuguaaucccagcacuu

SEQ ID NO: 736235 - RNA, 18 nt, Human
cucagaaucaaacaaaac

SEQ ID NO: 736236 - RNA, 22 nt, Human
cucagaaucaaacaaaacuuuc

SEQ ID NO: 736237 - RNA, 19 nt, Human
cuccaccacugggugugcc

SEQ ID NO: 736238 - RNA, 22 nt, Human
cuccagagccacugccugcucu

SEQ ID NO: 736239 - RNA, 19 nt, Human
cuccucagcauuacugggc

SEQ ID NO: 736240 - RNA, 23 nt, Human
cucuacaccgcacccacucucuc

SEQ ID NO: 736241 - RNA, 21 nt, Human
cucugcaccacagcccagcuc

SEQ ID NO: 736242 - RNA, 26 nt, Human
cucugcacuccagccugggaaauaca

SEQ ID NO: 736243 - RNA, 19 nt, Human
cugaaaucccguggccacg

SEQ ID NO: 736244 - RNA, 23 nt, Human
cugagccuucuccaagcaacccu

SEQ ID NO: 736245 - RNA, 21 nt, Human
cugcaucccuugcccaccccc

SEQ ID NO: 736246 - RNA, 21 nt, Human
cugcuucucuccagccacugu

SEQ ID NO: 736247 - RNA, 22 nt, Human
cuggagccguggcuggacgcug

SEQ ID NO: 736248 - RNA, 24 nt, Human
cuggagccguggcuggacgcugca

SEQ ID NO: 736249 - RNA, 23 nt, Human
cuggccagcauggugaaacccca

SEQ ID NO: 736250 - RNA, 18 nt, Human
cuggccuggaguaccugg

SEQ ID NO: 736251 - RNA, 22 nt, Human
cugggccucggugcugguuuua

SEQ ID NO: 736252 - RNA, 19 nt, Human
cugggucugcuugcucugc

SEQ ID NO: 736253 - RNA, 21 nt, Human
cugucaucccagcuacucagg

SEQ ID NO: 736254 - RNA, 21 nt, Human
cuguccugccugcaucccuug

SEQ ID NO: 736255 - RNA, 18 nt, Human
cuguuccugccccacagc

SEQ ID NO: 736256 - RNA, 20 nt, Human
cuuccgggccaguguuggcc

SEQ ID NO: 736257 - RNA, 21 nt, Human
cuuugggaggcugaggugggg

SEQ ID NO: 736258 - RNA, 23 nt, Human
gaaaccuuucacaaacucuuuac

SEQ ID NO: 736259 - RNA, 24 nt, Human
gaaacuuucucaaccuuaaaacag

SEQ ID NO: 736260 - RNA, 18 nt, Human
gaacaaagucugaaugca

SEQ ID NO: 736261 - RNA, 23 nt, Human
gagaaucacuugaaccggggagg

SEQ ID NO: 736262 - RNA, 20 nt, Human
gagagccccgcgggccuauu

SEQ ID NO: 736263 - RNA, 24 nt, Human
gagcucuccuacacccagguggcc

SEQ ID NO: 736264 - RNA, 18 nt, Human
gaggagugagcgagaggc

SEQ ID NO: 736265 - RNA, 24 nt, Human
gaggauggcaggaggagggagagc

SEQ ID NO: 736266 - RNA, 18 nt, Human
gaggggaggauggcagga

SEQ ID NO: 736267 - RNA, 18 nt, Human
gaggggccaccagagcuc

SEQ ID NO: 736268 - RNA, 26 nt, Human
gaggugggggggaucaccugagguca

SEQ ID NO: 736269 - RNA, 23 nt, Human
gagguugcagugaguagagauug

SEQ ID NO: 736270 - RNA, 18 nt, Human
gaguccaccccuuagggc

SEQ ID NO: 736271 - RNA, 24 nt, Human
gaucaccugaggucaggaguucga

SEQ ID NO: 736272 - RNA, 21 nt, Human
gaucugcuucucuccagccac

SEQ ID NO: 736273 - RNA, 18 nt, Human
gaugacaggccuucgugc

SEQ ID NO: 736274 - RNA, 24 nt, Human
gaugccucacgccuguaaucccag

SEQ ID NO: 736275 - RNA, 20 nt, Human
gcagcaggaguggcucuggg

SEQ ID NO: 736276 - RNA, 22 nt, Human
gcagcuacaggcagcgccgcgc

SEQ ID NO: 736277 - RNA, 23 nt, Human
gcaggagaaucacuugaaccggg

SEQ ID NO: 736278 - RNA, 18 nt, Human
gcagugcacucaggcucu

SEQ ID NO: 736279 - RNA, 19 nt, Human
gcaguggccggguaaguga

SEQ ID NO: 736280 - RNA, 24 nt, Human
gccaacauggcgaaacccugucuc

SEQ ID NO: 736281 - RNA, 24 nt, Human
gccagcauggugaaaccccaucuc

SEQ ID NO: 736282 - RNA, 24 nt, Human
gccaugucucucugcccacacaca

SEQ ID NO: 736283 - RNA, 22 nt, Human
gcccaacgaagucagcgcugcc

SEQ ID NO: 736284 - RNA, 18 nt, Human
gcccuggagccguggcug

SEQ ID NO: 736285 - RNA, 20 nt, Human
gcccugggugugccccuggu

SEQ ID NO: 736286 - RNA, 19 nt, Human
gccucugcacuccagccug

SEQ ID NO: 736287 - RNA, 21 nt, Human
gcgaaacccugucucuacuaa

SEQ ID NO: 736288 - RNA, 20 nt, Human
gcgcaugcacagggcagaug

SEQ ID NO: 736289 - RNA, 22 nt, Human
gcgcucccaaggacucucacuc

SEQ ID NO: 736290 - RNA, 21 nt, Human
gcgggacacaagauugcaaaa

SEQ ID NO: 736291 - RNA, 22 nt, Human
gcgugcaccugucaucccagcu

SEQ ID NO: 736292 - RNA, 23 nt, Human
gcucaccugaggucaggaguuca

SEQ ID NO: 736293 - RNA, 24 nt, Human
gcucaccugaggucaggaguucaa

SEQ ID NO: 736294 - RNA, 21 nt, Human
gcucaggggagcugcugguga

SEQ ID NO: 736295 - RNA, 18 nt, Human
gcuccgggaagcccugcu

SEQ ID NO: 736296 - RNA, 24 nt, Human
gcucuggacccagcaugcaggugu

SEQ ID NO: 736297 - RNA, 22 nt, Human
gcuguuuggcccccuuucuuuc

SEQ ID NO: 736298 - RNA, 26 nt, Human
gcuguuuggcccccuuucuuucuuuu

SEQ ID NO: 736299 - RNA, 22 nt, Human
gcuuccagcuaaggaaccccag

SEQ ID NO: 736300 - RNA, 20 nt, Human
gcuucgugaccauggaggcu

SEQ ID NO: 736301 - RNA, 23 nt, Human
ggaaggcugaggcaggagaauca

SEQ ID NO: 736302 - RNA, 19 nt, Human
ggacuggaaacgggacagg

SEQ ID NO: 736303 - RNA, 22 nt, Human
ggagacacacagcucccgggcc

SEQ ID NO: 736304 - RNA, 19 nt, Human
ggagaccacaggcagccuc

SEQ ID NO: 736305 - RNA, 24 nt, Human
ggagaucgugccucugcacuccag

SEQ ID NO: 736306 - RNA, 20 nt, Human
ggagcugcuggugaggcugc

SEQ ID NO: 736307 - RNA, 24 nt, Human
ggaggcugcagugaacggagaucg

SEQ ID NO: 736308 - RNA, 24 nt, Human
ggagggguguagaagggaaguugg

SEQ ID NO: 736309 - RNA, 19 nt, Human
ggagguagccaggaagggc

SEQ ID NO: 736310 - RNA, 22 nt, Human
ggagguugcagugaguagagau

SEQ ID NO: 736311 - RNA, 24 nt, Human
ggagguugcagugaguagagauug

SEQ ID NO: 736312 - RNA, 23 nt, Human
ggaucaccugaggucaggaguuc

SEQ ID NO: 736313 - RNA, 20 nt, Human
ggcaggaggagggagagccc

SEQ ID NO: 736314 - RNA, 19 nt, Human
ggcagggugccugcaaugg

SEQ ID NO: 736315 - RNA, 23 nt, Human
ggccaugucucucugcccacaca

SEQ ID NO: 736316 - RNA, 23 nt, Human
ggcccugggugugccccuggugu

SEQ ID NO: 736317 - RNA, 18 nt, Human
ggcgcagcuacaggcagc

SEQ ID NO: 736318 - RNA, 23 nt, Human
ggcgugguggcaggugccuguaa

SEQ ID NO: 736319 - RNA, 22 nt, Human
ggcucaccugaggucaggaguu

SEQ ID NO: 736320 - RNA, 18 nt, Human
gggaaaagcgaaucucac

SEQ ID NO: 736321 - RNA, 22 nt, Human
gggagcugcuggugaggcugcc

SEQ ID NO: 736322 - RNA, 23 nt, Human
gggaggcugccuagaggggagcc

SEQ ID NO: 736323 - RNA, 23 nt, Human
gggaucaccugaggucaggaguu

SEQ ID NO: 736324 - RNA, 24 nt, Human
gggaucaccugaggucaggaguuc

SEQ ID NO: 736325 - RNA, 18 nt, Human
gggcuggccuggaguacc

SEQ ID NO: 736326 - RNA, 18 nt, Human
gggcugggccacugccac

SEQ ID NO: 736327 - RNA, 18 nt, Human
ggggaggcugccuagagg

SEQ ID NO: 736328 - RNA, 23 nt, Human
ggggcaguggcucacgccuguaa

SEQ ID NO: 736329 - RNA, 21 nt, Human
ggggcugggggcaguggcuca

SEQ ID NO: 736330 - RNA, 24 nt, Human
gggggggaucaccugaggucagga

SEQ ID NO: 736331 - RNA, 19 nt, Human
gguccugggggaagagagg

SEQ ID NO: 736332 - RNA, 24 nt, Human
gguggcaggugccuguaaucccag

SEQ ID NO: 736333 - RNA, 21 nt, Human
gguggcucaccugaggucagg

SEQ ID NO: 736334 - RNA, 19 nt, Human
guauggagggcggcuuccg

SEQ ID NO: 736335 - RNA, 24 nt, Human
gucacugcacuccagccugggcaa

SEQ ID NO: 736336 - RNA, 26 nt, Human
gugcacccauugcagggaagguggcc

SEQ ID NO: 736337 - RNA, 20 nt, Human
guggcaggugguaagcccug

SEQ ID NO: 736338 - RNA, 27 nt, Human
guguccacccagaagacccuaagcaac

SEQ ID NO: 736339 - RNA, 21 nt, Human
guguuggggucaggccccggg

SEQ ID NO: 736340 - RNA, 22 nt, Human
guguuggggucaggccccgggc

SEQ ID NO: 736341 - RNA, 23 nt, Human
guucccgucacuuccuguuccug

SEQ ID NO: 736342 - RNA, 19 nt, Human
guuugccuucucuuucucc

SEQ ID NO: 736343 - RNA, 18 nt, Human
uaaaaagccaacagaggc

SEQ ID NO: 736344 - RNA, 21 nt, Human
uaaaacuguaacaaaggcuaa

SEQ ID NO: 736345 - RNA, 18 nt, Human
uaacaaaggcuaaaaaca

SEQ ID NO: 736346 - RNA, 23 nt, Human
uaacacaggcguuuccuccucaa

SEQ ID NO: 736347 - RNA, 21 nt, Human
uaacuaagaaaccccaccccc

SEQ ID NO: 736348 - RNA, 22 nt, Human
uaacuaagaaaccccaccccca

SEQ ID NO: 736349 - RNA, 21 nt, Human
uaagaaaccccacccccaccc

SEQ ID NO: 736350 - RNA, 18 nt, Human
uaaugcaugacuaagaac

SEQ ID NO: 736351 - RNA, 23 nt, Human
uacaaaaauccuguacauacagg

SEQ ID NO: 736352 - RNA, 21 nt, Human
uaccaaaaauauaaaaauuag

SEQ ID NO: 736353 - RNA, 27 nt, Human
uaccaagugcuccagggugguaaagac

SEQ ID NO: 736354 - RNA, 19 nt, Human
uagcuuccagcccuggcuu

SEQ ID NO: 736355 - RNA, 21 nt, Human
uagcuuccagcccuggcuucc

SEQ ID NO: 736356 - RNA, 20 nt, Human
uaguucagagggaaaaagga

SEQ ID NO: 736357 - RNA, 26 nt, Human
ucaaccuuaaaacagaguuuguagaa

SEQ ID NO: 736358 - RNA, 22 nt, Human
ucacccuugaaacuuucucaac

SEQ ID NO: 736359 - RNA, 19 nt, Human
ucaccggugcaaggaggag

SEQ ID NO: 736360 - RNA, 20 nt, Human
ucaccugaggucaggaguuc

SEQ ID NO: 736361 - RNA, 22 nt, Human
ucaccugaggucaggaguucaa

SEQ ID NO: 736362 - RNA, 20 nt, Human
ucacggucuggccagcggca

SEQ ID NO: 736363 - RNA, 22 nt, Human
ucacugcacgccacuugggggc

SEQ ID NO: 736364 - RNA, 20 nt, Human
ucacugcacuccagccuggg

SEQ ID NO: 736365 - RNA, 21 nt, Human
ucacugcacuccagccugggc

SEQ ID NO: 736366 - RNA, 24 nt, Human
ucacugcacuccagccugggcaac

SEQ ID NO: 736367 - RNA, 18 nt, Human
ucacugcacucugcaggc

SEQ ID NO: 736368 - RNA, 23 nt, Human
ucacuuccuguuccugccccguc

SEQ ID NO: 736369 - RNA, 18 nt, Human
ucagaaacuggacucucc

SEQ ID NO: 736370 - RNA, 25 nt, Human
ucagaacaccugccugcugggccca

SEQ ID NO: 736371 - RNA, 20 nt, Human
ucagaggagguagccaggaa

SEQ ID NO: 736372 - RNA, 18 nt, Human
ucagcagaagugaauggc

SEQ ID NO: 736373 - RNA, 23 nt, Human
ucagccgggcgugguggcaggug

SEQ ID NO: 736374 - RNA, 19 nt, Human
ucagcgcugccuuuccuuc

SEQ ID NO: 736375 - RNA, 21 nt, Human
ucaggccccgggcccaugggc

SEQ ID NO: 736376 - RNA, 18 nt, Human
ucaggcugcagugcacuc

SEQ ID NO: 736377 - RNA, 19 nt, Human
ucaugcaggucaucgggug

SEQ ID NO: 736378 - RNA, 22 nt, Human
ucaugucaggggucuggaauac

SEQ ID NO: 736379 - RNA, 19 nt, Human
ucccaaggacucucacuca

SEQ ID NO: 736380 - RNA, 19 nt, Human
ucccaggcacacugagccu

SEQ ID NO: 736381 - RNA, 27 nt, Human
uccccaacagccaaagccaagccaagc

SEQ ID NO: 736382 - RNA, 21 nt, Human
uccccagcccugacccagcuc

SEQ ID NO: 736383 - RNA, 26 nt, Human
ucccccaccucuauuucaugagcaaa

SEQ ID NO: 736384 - RNA, 22 nt, Human
uccccuuggauauggugaauuu

SEQ ID NO: 736385 - RNA, 19 nt, Human
ucccucuggugggagccag

SEQ ID NO: 736386 - RNA, 26 nt, Human
ucccugaggcuggggcugggguaccc

SEQ ID NO: 736387 - RNA, 25 nt, Human
ucccuuuccuggagagcaugugaua

SEQ ID NO: 736388 - RNA, 22 nt, Human
uccgucuaaaaaaaaaaaaaaa

SEQ ID NO: 736389 - RNA, 25 nt, Human
uccgucuaaaaaaaaaaaaaaaaaa

SEQ ID NO: 736390 - RNA, 25 nt, Human
ucggaaggcugaggcaggagaauca

SEQ ID NO: 736391 - RNA, 18 nt, Human
ucggcuuuagcuguguga

SEQ ID NO: 736392 - RNA, 20 nt, Human
ucgucccccaccucuauuuc

SEQ ID NO: 736393 - RNA, 22 nt, Human
ucuaggaaagagaaagcagagg

SEQ ID NO: 736394 - RNA, 22 nt, Human
ucucacucacugcacucugcag

SEQ ID NO: 736395 - RNA, 28 nt, Human
ucucacucacugcacucugcaggcuaga

SEQ ID NO: 736396 - RNA, 19 nt, Human
ucuccaagcaacccuggcc

SEQ ID NO: 736397 - RNA, 21 nt, Human
ucuccagccacugucacuccc

SEQ ID NO: 736398 - RNA, 19 nt, Human
ucugaaugcauuucagcua

SEQ ID NO: 736399 - RNA, 26 nt, Human
ucugcacuccagccugggaaauacag

SEQ ID NO: 736400 - RNA, 23 nt, Human
ucugcagucuggcagcauauggu

SEQ ID NO: 736401 - RNA, 19 nt, Human
ucugcaguuggcaucagag

SEQ ID NO: 736402 - RNA, 20 nt, Human
ucugcuucagaagggagcug

SEQ ID NO: 736403 - RNA, 23 nt, Human
ucugugauucccccacugggccu

SEQ ID NO: 736404 - RNA, 23 nt, Human
ugaacaucaggauuuuaauuugg

SEQ ID NO: 736405 - RNA, 24 nt, Human
ugaacaucaggauuuuaauuugga

SEQ ID NO: 736406 - RNA, 20 nt, Human
ugacccaagggacacuuugg

SEQ ID NO: 736407 - RNA, 23 nt, Human
ugacccaagggacacuuuggcac

SEQ ID NO: 736408 - RNA, 18 nt, Human
ugacccagcucauggcga

SEQ ID NO: 736409 - RNA, 18 nt, Human
ugagagggcuggauggga

SEQ ID NO: 736410 - RNA, 19 nt, Human
ugagaucacucaugcacca

SEQ ID NO: 736411 - RNA, 25 nt, Human
ugagcaaaucaucuaggauuaagga

SEQ ID NO: 736412 - RNA, 20 nt, Human
ugaggagggaccagccucag

SEQ ID NO: 736413 - RNA, 20 nt, Human
ugaggcaggagaaucacuug

SEQ ID NO: 736414 - RNA, 24 nt, Human
ugaggcaggagaaucacuugaacc

SEQ ID NO: 736415 - RNA, 24 nt, Human
ugaggcaggagaauugcuugaacc

SEQ ID NO: 736416 - RNA, 25 nt, Human
ugaggcaggagaauugcuugaaccc

SEQ ID NO: 736417 - RNA, 20 nt, Human
ugaggcugccuggaggggag

SEQ ID NO: 736418 - RNA, 18 nt, Human
ugagggaggaacagcgga

SEQ ID NO: 736419 - RNA, 25 nt, Human
ugaggugggggggaucaccugaggu

SEQ ID NO: 736420 - RNA, 22 nt, Human
ugaguagagauugugucacugc

SEQ ID NO: 736421 - RNA, 18 nt, Human
ugaguccuucacagcagc

SEQ ID NO: 736422 - RNA, 19 nt, Human
ugaguuuacggaggggcca

SEQ ID NO: 736423 - RNA, 18 nt, Human
ugcaaaaaugcaacagag

SEQ ID NO: 736424 - RNA, 19 nt, Human
ugcaccugucaucccagcu

SEQ ID NO: 736425 - RNA, 20 nt, Human
ugcccacccccacccucgcc

SEQ ID NO: 736426 - RNA, 21 nt, Human
ugccucacgccuguaauccca

SEQ ID NO: 736427 - RNA, 24 nt, Human
ugccucacgccuguaaucccagca

SEQ ID NO: 736428 - RNA, 18 nt, Human
ugccuggaggggaggcug

SEQ ID NO: 736429 - RNA, 23 nt, Human
ugccuguaaucccagcuacucgg

SEQ ID NO: 736430 - RNA, 19 nt, Human
ugcgagcccaucggucaca

SEQ ID NO: 736431 - RNA, 19 nt, Human
ugcuccagccggccaagag

SEQ ID NO: 736432 - RNA, 20 nt, Human
ugcucugcccagguccuggg

SEQ ID NO: 736433 - RNA, 21 nt, Human
ugcucugcccagguccugggg

SEQ ID NO: 736434 - RNA, 21 nt, Human
ugcucugucuguggucuuagc

SEQ ID NO: 736435 - RNA, 22 nt, Human
ugcugccugucaacauguccug

SEQ ID NO: 736436 - RNA, 18 nt, Human
ugcugcuggcuucaugca

SEQ ID NO: 736437 - RNA, 22 nt, Human
uggaaaaaagcccaacgaaguc

SEQ ID NO: 736438 - RNA, 22 nt, Human
uggaguaaacaaacccagccca

SEQ ID NO: 736439 - RNA, 19 nt, Human
uggaguccaccccuuaggg

SEQ ID NO: 736440 - RNA, 20 nt, Human
uggcaggaggagggagagcc

SEQ ID NO: 736441 - RNA, 22 nt, Human
uggcaggugccuguaaucccag

SEQ ID NO: 736442 - RNA, 24 nt, Human
uggccaacauggcgaaacccuguc

SEQ ID NO: 736443 - RNA, 24 nt, Human
uggccagcauggugaaaccccauc

SEQ ID NO: 736444 - RNA, 21 nt, Human
uggcccauggaguccuucccc

SEQ ID NO: 736445 - RNA, 19 nt, Human
uggcccugggugugccccu

SEQ ID NO: 736446 - RNA, 21 nt, Human
uggccuguguggcuccgggaa

SEQ ID NO: 736447 - RNA, 24 nt, Human
uggcucaccugaggucaggaguuc

SEQ ID NO: 736448 - RNA, 21 nt, Human
uggcucacgccuguaauccca

SEQ ID NO: 736449 - RNA, 24 nt, Human
uggcucacgccuguaaucccaaca

SEQ ID NO: 736450 - RNA, 21 nt, Human
uggcuccgggaagcccugcuc

SEQ ID NO: 736451 - RNA, 21 nt, Human
uggcuggacgcugcaggaggu

SEQ ID NO: 736452 - RNA, 24 nt, Human
uggcuuccagcuaaggaaccccuu

SEQ ID NO: 736453 - RNA, 21 nt, Human
ugggaaaaagugaaaccuauc

SEQ ID NO: 736454 - RNA, 27 nt, Human
ugggaaaaagugaaaccuaucuccaag

SEQ ID NO: 736455 - RNA, 18 nt, Human
ugggacccaggaagguca

SEQ ID NO: 736456 - RNA, 19 nt, Human
ugggaggccgaggcgggug

SEQ ID NO: 736457 - RNA, 24 nt, Human
ugggaggccgaggcggguggcuca

SEQ ID NO: 736458 - RNA, 25 nt, Human
ugggaggcugaggugggggggauca

SEQ ID NO: 736459 - RNA, 21 nt, Human
ugggcugggaggagugagcga

SEQ ID NO: 736460 - RNA, 20 nt, Human
uggggaauagugaggaccag

SEQ ID NO: 736461 - RNA, 20 nt, Human
ugggggaagagaggaaaccu

SEQ ID NO: 736462 - RNA, 20 nt, Human
ugggggaagagaggaaaccu

SEQ ID NO: 736463 - RNA, 18 nt, Human
ugggggggaucaccugag

SEQ ID NO: 736464 - RNA, 24 nt, Human
uggggucaggccccgggcccaugg

SEQ ID NO: 736465 - RNA, 18 nt, Human
uggggugacggccgggcg

SEQ ID NO: 736466 - RNA, 24 nt, Human
ugguggcaggugccuguaauccca

SEQ ID NO: 736467 - RNA, 24 nt, Human
ugucacugcacuccagccugggca

SEQ ID NO: 736468 - RNA, 20 nt, Human
ugucccaggcacacugagcc

SEQ ID NO: 736469 - RNA, 21 nt, Human
ugugaguuguuugcauuuugg

SEQ ID NO: 736470 - RNA, 27 nt, Human
uguggagaaaaaagugucaagaccagu

SEQ ID NO: 736471 - RNA, 19 nt, Human
uguggcuccgggaagcccu

SEQ ID NO: 736472 - RNA, 21 nt, Human
uguuccuggcccgcagcagca

SEQ ID NO: 736473 - RNA, 24 nt, Human
uguuggggucaggccccgggccca

SEQ ID NO: 736474 - RNA, 26 nt, Human
uguuuggcccccuuucuuucuuuugg

SEQ ID NO: 736475 - RNA, 20 nt, Human
uuaccacggccccucuuaga

SEQ ID NO: 736476 - RNA, 19 nt, Human
uuagccgggcgugguggcg

SEQ ID NO: 736477 - RNA, 22 nt, Human
uuagccgggcgugguggcgugc

SEQ ID NO: 736478 - RNA, 18 nt, Human
uucacaaacucuuuacag

SEQ ID NO: 736479 - RNA, 23 nt, Human
uucuagucaaugcacaggggauu

SEQ ID NO: 736480 - RNA, 22 nt, Human
uucuuggaaacacuacugggcu

SEQ ID NO: 736481 - RNA, 24 nt, Human
uugaacccgggagguggagguugc

SEQ ID NO: 736482 - RNA, 22 nt, Human
uugcagugaguagagauugugu

SEQ ID NO: 736483 - RNA, 24 nt, Human
uugcuugaacccgggagguggagg

SEQ ID NO: 736484 - RNA, 22 nt, Human
uuggcaucagagcgaggggugu

SEQ ID NO: 736485 - RNA, 19 nt, Human
uuggcccccuuucuuucuu

SEQ ID NO: 736486 - RNA, 24 nt, Human
uuuacagugugaaccugcauuccu

SEQ ID NO: 736487 - RNA, 19 nt, Human
aaaacugauaaaggacuca

SEQ ID NO: 736488 - RNA, 20 nt, Human
aaacaaacacaucaacagug

SEQ ID NO: 736489 - RNA, 22 nt, Human
aaacaagaccagccaggaccga

SEQ ID NO: 736490 - RNA, 21 nt, Human
aaagagugagcaagccuaaag

SEQ ID NO: 736491 - RNA, 24 nt, Human
aaagugcugggauuacaggcauga

SEQ ID NO: 736492 - RNA, 20 nt, Human
aaccuccaccuccugggcuc

SEQ ID NO: 736493 - RNA, 21 nt, Human
aagaacacaagcccacuccca

SEQ ID NO: 736494 - RNA, 21 nt, Human
aagggagagagccaaaucugc

SEQ ID NO: 736495 - RNA, 19 nt, Human
aagggggguugggaggggu

SEQ ID NO: 736496 - RNA, 21 nt, Human
aaggguucaauagggaaggua

SEQ ID NO: 736497 - RNA, 19 nt, Human
aagugcugggauuacaggc

SEQ ID NO: 736498 - RNA, 21 nt, Human
aagugcugggauuacaggcau

SEQ ID NO: 736499 - RNA, 22 nt, Human
acaaagacccaggacaagaaca

SEQ ID NO: 736500 - RNA, 20 nt, Human
acaaagggacugacagcccc

SEQ ID NO: 736501 - RNA, 21 nt, Human
acaagacaggcaggcccagag

SEQ ID NO: 736502 - RNA, 18 nt, Human
acacccaucaaaaagagu

SEQ ID NO: 736503 - RNA, 20 nt, Human
acaccucccagagcagggcc

SEQ ID NO: 736504 - RNA, 22 nt, Human
acagaacuggccccaugucucu

SEQ ID NO: 736505 - RNA, 18 nt, Human
acagaugcacaccaccau

SEQ ID NO: 736506 - RNA, 25 nt, Human
acagcaacagaacuggccccauguc

SEQ ID NO: 736507 - RNA, 21 nt, Human
acaggccaauacugggcuacu

SEQ ID NO: 736508 - RNA, 21 nt, Human
acagugcuaaagcccugucuc

SEQ ID NO: 736509 - RNA, 21 nt, Human
acaucaacagugaacuccaac

SEQ ID NO: 736510 - RNA, 18 nt, Human
accacuguggggguccug

SEQ ID NO: 736511 - RNA, 18 nt, Human
accagcacugugaccuca

SEQ ID NO: 736512 - RNA, 19 nt, Human
acccugggcuuccacaacc

SEQ ID NO: 736513 - RNA, 21 nt, Human
acccugggcuuccacaaccac

SEQ ID NO: 736514 - RNA, 20 nt, Human
accucaacccccugaguagc

SEQ ID NO: 736515 - RNA, 23 nt, Human
accucaacccccugaguagcuga

SEQ ID NO: 736516 - RNA, 23 nt, Human
accuuucuguaccccuggggaug

SEQ ID NO: 736517 - RNA, 23 nt, Human
acuccuaccucuagcuccagggg

SEQ ID NO: 736518 - RNA, 19 nt, Human
agaaagggagggaguggag

SEQ ID NO: 736519 - RNA, 22 nt, Human
agaagaggcuccagaaacaggc

SEQ ID NO: 736520 - RNA, 21 nt, Human
agaagccccagccagagggcc

SEQ ID NO: 736521 - RNA, 21 nt, Human
agaauccacagaacccagcac

SEQ ID NO: 736522 - RNA, 22 nt, Human
agacacccaucaaaaagaguga

SEQ ID NO: 736523 - RNA, 20 nt, Human
agacccaggacaagaacaca

SEQ ID NO: 736524 - RNA, 21 nt, Human
agagagaaagggagggagugg

SEQ ID NO: 736525 - RNA, 20 nt, Human
agagcagggccugaaaggga

SEQ ID NO: 736526 - RNA, 23 nt, Human
agagggcacagcaagggggguug

SEQ ID NO: 736527 - RNA, 22 nt, Human
agagggccaagucccaggcagg

SEQ ID NO: 736528 - RNA, 26 nt, Human
agaggggacaagcuauaugaagagag

SEQ ID NO: 736529 - RNA, 19 nt, Human
agaguccaaggggaggaga

SEQ ID NO: 736530 - RNA, 19 nt, Human
agagugagcaagccuaaag

SEQ ID NO: 736531 - RNA, 24 nt, Human
agccaaacaaacacaucaacagug

SEQ ID NO: 736532 - RNA, 22 nt, Human
agccacagcaacagaacuggcc

SEQ ID NO: 736533 - RNA, 18 nt, Human
agccaggagaaucgucug

SEQ ID NO: 736534 - RNA, 19 nt, Human
agccaggagaaucgucugg

SEQ ID NO: 736535 - RNA, 25 nt, Human
agcccagcuguguggggccggggcc

SEQ ID NO: 736536 - RNA, 22 nt, Human
agccccacagccucacagcccc

SEQ ID NO: 736537 - RNA, 19 nt, Human
agccgauauucgggugaga

SEQ ID NO: 736538 - RNA, 20 nt, Human
agccuggaaggugcagagau

SEQ ID NO: 736539 - RNA, 24 nt, Human
agcugguuuugaacuccugagcuc

SEQ ID NO: 736540 - RNA, 21 nt, Human
aggaagugggaugugggcugu

SEQ ID NO: 736541 - RNA, 18 nt, Human
aggcaggcccagagggga

SEQ ID NO: 736542 - RNA, 23 nt, Human
aggcagggugcaaagcugugggg

SEQ ID NO: 736543 - RNA, 24 nt, Human
aggcagggugcaaagcuguggggc

SEQ ID NO: 736544 - RNA, 21 nt, Human
aggccagcuccaagggccaca

SEQ ID NO: 736545 - RNA, 22 nt, Human
aggccaggccagaaugaaaaag

SEQ ID NO: 736546 - RNA, 19 nt, Human
aggcugcaguccugugguc

SEQ ID NO: 736547 - RNA, 19 nt, Human
agggagacaaggaucgugg

SEQ ID NO: 736548 - RNA, 24 nt, Human
agggcaggggcagccucugucuca

SEQ ID NO: 736549 - RNA, 19 nt, Human
aggggguggggcuguggga

SEQ ID NO: 736550 - RNA, 21 nt, Human
agggugcaaagcuguggggcg

SEQ ID NO: 736551 - RNA, 22 nt, Human
agguaaaaguugagaaagggaa

SEQ ID NO: 736552 - RNA, 24 nt, Human
agguagaccugucagcagcagcug

SEQ ID NO: 736553 - RNA, 20 nt, Human
agucugacgaggcaacaugg

SEQ ID NO: 736554 - RNA, 18 nt, Human
agugcugggauuacaggc

SEQ ID NO: 736555 - RNA, 24 nt, Human
auccuccuuggccuagccuugcug

SEQ ID NO: 736556 - RNA, 22 nt, Human
augacccuggaagccuggcagc

SEQ ID NO: 736557 - RNA, 21 nt, Human
caaaauaaacaagaccagcca

SEQ ID NO: 736558 - RNA, 21 nt, Human
caaacuccugcccuguccccc

SEQ ID NO: 736559 - RNA, 20 nt, Human
caaagcucucaccuccaaau

SEQ ID NO: 736560 - RNA, 22 nt, Human
caaauaaagccaccaagagucu

SEQ ID NO: 736561 - RNA, 24 nt, Human
caaaugccaagcucugcauuuaac

SEQ ID NO: 736562 - RNA, 23 nt, Human
caaauggauauuucuaaacugaa

SEQ ID NO: 736563 - RNA, 24 nt, Human
caacagugaacuccaacaccuccc

SEQ ID NO: 736564 - RNA, 18 nt, Human
caaccuauuaaacagaag

SEQ ID NO: 736565 - RNA, 24 nt, Human
caaccuccaccuccugggcucaag

SEQ ID NO: 736566 - RNA, 19 nt, Human
caagaacacaagcccacuc

SEQ ID NO: 736567 - RNA, 25 nt, Human
caagacaaagacccaggacaagaac

SEQ ID NO: 736568 - RNA, 26 nt, Human
caagacaccagacacuucaaaucaag

SEQ ID NO: 736569 - RNA, 21 nt, Human
caagccagggcagcauggagg

SEQ ID NO: 736570 - RNA, 22 nt, Human
caaggcagugacaagacaccag

SEQ ID NO: 736571 - RNA, 20 nt, Human
caagggcaagaagguagagu

SEQ ID NO: 736572 - RNA, 18 nt, Human
caaucuccacaagggcaa

SEQ ID NO: 736573 - RNA, 22 nt, Human
cacacagaggagcccgggugug

SEQ ID NO: 736574 - RNA, 24 nt, Human
cacaccaccaugcccagcuaauuu

SEQ ID NO: 736575 - RNA, 18 nt, Human
cacagaacccagcacaga

SEQ ID NO: 736576 - RNA, 21 nt, Human
cacagaagaaagucucuucau

SEQ ID NO: 736577 - RNA, 24 nt, Human
cacagaauccacagaacccagcac

SEQ ID NO: 736578 - RNA, 18 nt, Human
cacagcaagggggguugg

SEQ ID NO: 736579 - RNA, 21 nt, Human
cacagcaucuccugagccccu

SEQ ID NO: 736580 - RNA, 18 nt, Human
cacagccucacagccccu

SEQ ID NO: 736581 - RNA, 21 nt, Human
cacaguuggacaggccaauac

SEQ ID NO: 736582 - RNA, 24 nt, Human
caccacagaauccacagaacccag

SEQ ID NO: 736583 - RNA, 24 nt, Human
caccaugcccagcuaauuuuugua

SEQ ID NO: 736584 - RNA, 24 nt, Human
caccccuggguaguccuuacucug

SEQ ID NO: 736585 - RNA, 20 nt, Human
cacccuccucuugcucaaag

SEQ ID NO: 736586 - RNA, 24 nt, Human
caccucagccucccaaagugcugg

SEQ ID NO: 736587 - RNA, 18 nt, Human
caccucuucaagcugucc

SEQ ID NO: 736588 - RNA, 25 nt, Human
cacucuaucagcucucaacucuuua

SEQ ID NO: 736589 - RNA, 21 nt, Human
cacugcaaccuccaccuccug

SEQ ID NO: 736590 - RNA, 23 nt, Human
cacugcaaccuccaccuccuggg

SEQ ID NO: 736591 - RNA, 18 nt, Human
cacugcaggcaucaggcc

SEQ ID NO: 736592 - RNA, 19 nt, Human
cacugcaggcaucaggccu

SEQ ID NO: 736593 - RNA, 20 nt, Human
cacuggggccucacauuuca

SEQ ID NO: 736594 - RNA, 18 nt, Human
cacuguggggguccuggg

SEQ ID NO: 736595 - RNA, 24 nt, Human
cagaagccccagccagagggccaa

SEQ ID NO: 736596 - RNA, 23 nt, Human
cagaaguagguaaaaguugagaa

SEQ ID NO: 736597 - RNA, 23 nt, Human
cagacacuucaaaucaaggucau

SEQ ID NO: 736598 - RNA, 21 nt, Human
cagagccuggaaggugcagag

SEQ ID NO: 736599 - RNA, 20 nt, Human
cagagugggagcucagagaa

SEQ ID NO: 736600 - RNA, 19 nt, Human
cagcaacagaacuggcccc

SEQ ID NO: 736601 - RNA, 25 nt, Human
cagcacggaagcacuauggccucuu

SEQ ID NO: 736602 - RNA, 29 nt, Human
cagcacggaagcacuauggccucuuaacg

SEQ ID NO: 736603 - RNA, 20 nt, Human
cagcauggagguagcacaga

SEQ ID NO: 736604 - RNA, 18 nt, Human
cagccagggcaggggcag

SEQ ID NO: 736605 - RNA, 21 nt, Human
cagcugcccacuccauugccc

SEQ ID NO: 736606 - RNA, 23 nt, Human
caggacaaaauaaacaagaccag

SEQ ID NO: 736607 - RNA, 26 nt, Human
caggaccgaugccccaucccugcugg

SEQ ID NO: 736608 - RNA, 19 nt, Human
caggacgagggagcaauga

SEQ ID NO: 736609 - RNA, 18 nt, Human
cagggugcaaagcugugg

SEQ ID NO: 736610 - RNA, 19 nt, Human
cagugagauaagaugccca

SEQ ID NO: 736611 - RNA, 19 nt, Human
caucuccugagccccuacu

SEQ ID NO: 736612 - RNA, 18 nt, Human
caugaccccacacuagcc

SEQ ID NO: 736613 - RNA, 24 nt, Human
caugcugcccaagcugguuuugaa

SEQ ID NO: 736614 - RNA, 18 nt, Human
caugggccaugaccccac

SEQ ID NO: 736615 - RNA, 24 nt, Human
ccaaacaaacacaucaacagugaa

SEQ ID NO: 736616 - RNA, 23 nt, Human
ccaaagugcugggauuacaggca

SEQ ID NO: 736617 - RNA, 24 nt, Human
ccaaagugcugggauuacaggcau

SEQ ID NO: 736618 - RNA, 21 nt, Human
ccaaaguguugggaccugcau

SEQ ID NO: 736619 - RNA, 23 nt, Human
ccaaauggauauuucuaaacuga

SEQ ID NO: 736620 - RNA, 24 nt, Human
ccaacccaacaaacgcuccaaaug

SEQ ID NO: 736621 - RNA, 20 nt, Human
ccaacccaacaaacgcuuug

SEQ ID NO: 736622 - RNA, 19 nt, Human
ccaaccccagcccaaagug

SEQ ID NO: 736623 - RNA, 21 nt, Human
ccacaaacugcaccagcuggg

SEQ ID NO: 736624 - RNA, 25 nt, Human
ccacaccaugagcucagccagggca

SEQ ID NO: 736625 - RNA, 23 nt, Human
ccacagcaacagaacuggcccca

SEQ ID NO: 736626 - RNA, 21 nt, Human
ccacugucccuggcccagguc

SEQ ID NO: 736627 - RNA, 22 nt, Human
ccagcccugcccugccugacaa

SEQ ID NO: 736628 - RNA, 20 nt, Human
ccagcucuacucuaugaguu

SEQ ID NO: 736629 - RNA, 22 nt, Human
ccagcugccgguggguccagga

SEQ ID NO: 736630 - RNA, 22 nt, Human
ccaggccaggccagaaugaaaa

SEQ ID NO: 736631 - RNA, 24 nt, Human
ccaucugccgggcagguccugccc

SEQ ID NO: 736632 - RNA, 19 nt, Human
ccaugcugcccaagcuggu

SEQ ID NO: 736633 - RNA, 24 nt, Human
cccaaagugcugggauuacaggca

SEQ ID NO: 736634 - RNA, 19 nt, Human
cccaacccacaccaugagc

SEQ ID NO: 736635 - RNA, 19 nt, Human
cccacaccaugagcucagc

SEQ ID NO: 736636 - RNA, 20 nt, Human
cccagcccccagcugcccac

SEQ ID NO: 736637 - RNA, 20 nt, Human
cccauguacccacagccauu

SEQ ID NO: 736638 - RNA, 25 nt, Human
ccccacacuagcccucuggucccuc

SEQ ID NO: 736639 - RNA, 19 nt, Human
ccccagccagagggccaag

SEQ ID NO: 736640 - RNA, 22 nt, Human
ccccagcugcccacuccauugc

SEQ ID NO: 736641 - RNA, 26 nt, Human
ccccuggagcagacagaggggggauu

SEQ ID NO: 736642 - RNA, 22 nt, Human
cccucggcucagccggcccugg

SEQ ID NO: 736643 - RNA, 24 nt, Human
cccugucauccccaacccacacca

SEQ ID NO: 736644 - RNA, 18 nt, Human
cccugugugaaagguccc

SEQ ID NO: 736645 - RNA, 18 nt, Human
ccguguggauuuggaggg

SEQ ID NO: 736646 - RNA, 27 nt, Human
ccucacccuccucuugcucaaacugga

SEQ ID NO: 736647 - RNA, 19 nt, Human
ccucagucacuucccagaa

SEQ ID NO: 736648 - RNA, 19 nt, Human
ccuccaccuccugggcuca

SEQ ID NO: 736649 - RNA, 18 nt, Human
ccucccuccuuccacaaa

SEQ ID NO: 736650 - RNA, 21 nt, Human
ccuccucuugcucaaacugga

SEQ ID NO: 736651 - RNA, 24 nt, Human
ccuccugggcucaagccaucuucc

SEQ ID NO: 736652 - RNA, 20 nt, Human
ccucuagcuccaggggcaag

SEQ ID NO: 736653 - RNA, 20 nt, Human
ccugaaaugccuccucccca

SEQ ID NO: 736654 - RNA, 18 nt, Human
ccugaaugccauggaagg

SEQ ID NO: 736655 - RNA, 18 nt, Human
ccugcccucccuccuucc

SEQ ID NO: 736656 - RNA, 19 nt, Human
ccugcccucucuccaccca

SEQ ID NO: 736657 - RNA, 20 nt, Human
ccugggcucaagccaucuuc

SEQ ID NO: 736658 - RNA, 19 nt, Human
ccuuccacaaacugcacca

SEQ ID NO: 736659 - RNA, 19 nt, Human
ccuucccuaaagaccuggg

SEQ ID NO: 736660 - RNA, 31 nt, Human
cgccaugcugcccaagcugguuuugaacucc

SEQ ID NO: 736661 - RNA, 19 nt, Human
cgcuccaaaugagccgcca

SEQ ID NO: 736662 - RNA, 19 nt, Human
cguaauggucagcauccuc

SEQ ID NO: 736663 - RNA, 21 nt, Human
cguguagccacagcaacagaa

SEQ ID NO: 736664 - RNA, 22 nt, Human
cguguaugaacccagcccccag

SEQ ID NO: 736665 - RNA, 24 nt, Human
cuaaggggacagagacccaaucca

SEQ ID NO: 736666 - RNA, 24 nt, Human
cucaagccaucuucccaccucaac

SEQ ID NO: 736667 - RNA, 24 nt, Human
cucacugcaaccuccaccuccugg

SEQ ID NO: 736668 - RNA, 26 nt, Human
cucacugcaaccuccaccuccugggc

SEQ ID NO: 736669 - RNA, 18 nt, Human
cucauacaugacugcacu

SEQ ID NO: 736670 - RNA, 23 nt, Human
cuccacaagggcaagaagguaga

SEQ ID NO: 736671 - RNA, 21 nt, Human
cucccagagcagggccugaaa

SEQ ID NO: 736672 - RNA, 19 nt, Human
cuccugagccccuacugcg

SEQ ID NO: 736673 - RNA, 20 nt, Human
cugagcacuaacucagugcc

SEQ ID NO: 736674 - RNA, 22 nt, Human
cugagccccuacugcgugccca

SEQ ID NO: 736675 - RNA, 18 nt, Human
cugcaaccuccaccuccu

SEQ ID NO: 736676 - RNA, 23 nt, Human
cugcaaccuccaccuccugggcu

SEQ ID NO: 736677 - RNA, 24 nt, Human
cugcaaccuccaccuccugggcuc

SEQ ID NO: 736678 - RNA, 19 nt, Human
cugcccuaggguggggucc

SEQ ID NO: 736679 - RNA, 22 nt, Human
cugcuggggucuggcaaagcuc

SEQ ID NO: 736680 - RNA, 22 nt, Human
cuggagcacaguggcacuaucu

SEQ ID NO: 736681 - RNA, 18 nt, Human
cuggcaagccagggcagc

SEQ ID NO: 736682 - RNA, 21 nt, Human
cuggggcccuaaaccacugca

SEQ ID NO: 736683 - RNA, 21 nt, Human
cugugugcugagcacuaacuc

SEQ ID NO: 736684 - RNA, 23 nt, Human
cuucauaccagcccugcccugcc

SEQ ID NO: 736685 - RNA, 22 nt, Human
cuuccacaaccacccccauccu

SEQ ID NO: 736686 - RNA, 23 nt, Human
cuugccguugcucucagacuugc

SEQ ID NO: 736687 - RNA, 25 nt, Human
cuuggccuagccuugcugagcuggc

SEQ ID NO: 736688 - RNA, 22 nt, Human
gacagccccagaaucccaaggg

SEQ ID NO: 736689 - RNA, 20 nt, Human
gagagggcacagcaaggggg

SEQ ID NO: 736690 - RNA, 21 nt, Human
gagcccagcccggccugccau

SEQ ID NO: 736691 - RNA, 19 nt, Human
gagggcacagcaagggggg

SEQ ID NO: 736692 - RNA, 25 nt, Human
gagggcuaggguagcccuccucagu

SEQ ID NO: 736693 - RNA, 21 nt, Human
gaggggugcccaacacuacca

SEQ ID NO: 736694 - RNA, 18 nt, Human
gauuacaggcaugagcca

SEQ ID NO: 736695 - RNA, 21 nt, Human
gauuacaggcaugagccacug

SEQ ID NO: 736696 - RNA, 24 nt, Human
gauuacaggcaugagccacuguac

SEQ ID NO: 736697 - RNA, 21 nt, Human
gcacauccaaguaucugacca

SEQ ID NO: 736698 - RNA, 20 nt, Human
gcagaagcagggagccccug

SEQ ID NO: 736699 - RNA, 18 nt, Human
gcaugacauggaugcaaa

SEQ ID NO: 736700 - RNA, 19 nt, Human
gccagacaagggaugcgug

SEQ ID NO: 736701 - RNA, 20 nt, Human
gccagcuccaagggccacag

SEQ ID NO: 736702 - RNA, 20 nt, Human
gccaugcugcccaagcuggu

SEQ ID NO: 736703 - RNA, 18 nt, Human
gcccaacacuaccagccu

SEQ ID NO: 736704 - RNA, 22 nt, Human
gcccagcuaauuuuuguauuuu

SEQ ID NO: 736705 - RNA, 20 nt, Human
gcccagcuguguggggccgg

SEQ ID NO: 736706 - RNA, 21 nt, Human
gcccagugugccugcauccuc

SEQ ID NO: 736707 - RNA, 21 nt, Human
gccgggcagguccugcccucu

SEQ ID NO: 736708 - RNA, 18 nt, Human
gccucacccuccucuugc

SEQ ID NO: 736709 - RNA, 18 nt, Human
gccuccuccccaaaucca

SEQ ID NO: 736710 - RNA, 25 nt, Human
gcugcagucacuucagguagaccug

SEQ ID NO: 736711 - RNA, 18 nt, Human
ggaaagacacccaucaaa

SEQ ID NO: 736712 - RNA, 21 nt, Human
ggaagccccaggcugcagucc

SEQ ID NO: 736713 - RNA, 21 nt, Human
ggaccccuggucaccucccaa

SEQ ID NO: 736714 - RNA, 19 nt, Human
ggagagcaggugggcagaa

SEQ ID NO: 736715 - RNA, 22 nt, Human
ggagaucuguaaacuaaaccgc

SEQ ID NO: 736716 - RNA, 24 nt, Human
ggaggagaucuguaaacuaaaccg

SEQ ID NO: 736717 - RNA, 23 nt, Human
ggaggcuacaucuucaccccugg

SEQ ID NO: 736718 - RNA, 22 nt, Human
ggauuacaggcaugagccacug

SEQ ID NO: 736719 - RNA, 23 nt, Human
ggauuccugcugagacaaggggc

SEQ ID NO: 736720 - RNA, 19 nt, Human
ggcagggugcaaagcugug

SEQ ID NO: 736721 - RNA, 23 nt, Human
ggcagugacaagacaccagacac

SEQ ID NO: 736722 - RNA, 21 nt, Human
ggccaugggaaaaaggggugu

SEQ ID NO: 736723 - RNA, 21 nt, Human
ggccucacccuccucuugcuc

SEQ ID NO: 736724 - RNA, 24 nt, Human
ggcugcuuggcgugaacaaaacug

SEQ ID NO: 736725 - RNA, 21 nt, Human
gggagcuuggcugagcccagc

SEQ ID NO: 736726 - RNA, 23 nt, Human
gggagggaguggaguugaguugg

SEQ ID NO: 736727 - RNA, 21 nt, Human
gggcaacacccucggcucagc

SEQ ID NO: 736728 - RNA, 22 nt, Human
gggcaagcgagccccacagccu

SEQ ID NO: 736729 - RNA, 24 nt, Human
gggcauuugugggcuacaaguuug

SEQ ID NO: 736730 - RNA, 25 nt, Human
gggcuuugggggugaaacugcagcc

SEQ ID NO: 736731 - RNA, 18 nt, Human
ggggaagggagagagcca

SEQ ID NO: 736732 - RNA, 18 nt, Human
ggggccggaagccccagg

SEQ ID NO: 736733 - RNA, 20 nt, Human
ggggcugugggauaacagcu

SEQ ID NO: 736734 - RNA, 18 nt, Human
ggggguggggcuguggga

SEQ ID NO: 736735 - RNA, 21 nt, Human
gggguugggaggggucuccag

SEQ ID NO: 736736 - RNA, 21 nt, Human
gggguugggaggggucuccag

SEQ ID NO: 736737 - RNA, 19 nt, Human
gguccugaaugccauggaa

SEQ ID NO: 736738 - RNA, 21 nt, Human
guagagaugggauuucgccau

SEQ ID NO: 736739 - RNA, 21 nt, Human
guaguggccucacccuccucu

SEQ ID NO: 736740 - RNA, 19 nt, Human
guauuuuuuguagagaugg

SEQ ID NO: 736741 - RNA, 18 nt, Human
gugagugggagcuuggcu

SEQ ID NO: 736742 - RNA, 23 nt, Human
guggagugaacaaaaggucauuu

SEQ ID NO: 736743 - RNA, 20 nt, Human
guggauuuggagggaccugg

SEQ ID NO: 736744 - RNA, 18 nt, Human
gugggguccuggaggccg

SEQ ID NO: 736745 - RNA, 19 nt, Human
guguagccacagcaacaga

SEQ ID NO: 736746 - RNA, 22 nt, Human
guugggaggggucuccaguucc

SEQ ID NO: 736747 - RNA, 22 nt, Human
guuuugaacuccugagcucaag

SEQ ID NO: 736748 - RNA, 18 nt, Human
uaaccaaggcugcuuggc

SEQ ID NO: 736749 - RNA, 24 nt, Human
uaauuuuuguauuuuuuguagaga

SEQ ID NO: 736750 - RNA, 22 nt, Human
uacaacuccaugcagaaaccua

SEQ ID NO: 736751 - RNA, 22 nt, Human
uacaggcaugagccacuguacc

SEQ ID NO: 736752 - RNA, 19 nt, Human
uaccagcccugcccugccu

SEQ ID NO: 736753 - RNA, 19 nt, Human
uaccccagggccagggcaa

SEQ ID NO: 736754 - RNA, 19 nt, Human
uaccucuagcuccaggggc

SEQ ID NO: 736755 - RNA, 22 nt, Human
uacucaucucagugaugaugag

SEQ ID NO: 736756 - RNA, 20 nt, Human
uagagaugggauuucgccau

SEQ ID NO: 736757 - RNA, 21 nt, Human
uagcccucuggucccucacaa

SEQ ID NO: 736758 - RNA, 19 nt, Human
uagccugccugccagagag

SEQ ID NO: 736759 - RNA, 20 nt, Human
uaggcccuacaacuccaugc

SEQ ID NO: 736760 - RNA, 18 nt, Human
uagggaagguaccagcgg

SEQ ID NO: 736761 - RNA, 24 nt, Human
uagggugggguccuggaggccgcc

SEQ ID NO: 736762 - RNA, 18 nt, Human
uagguaaaaguugagaaa

SEQ ID NO: 736763 - RNA, 23 nt, Human
uauaugaagagaggcuucagcug

SEQ ID NO: 736764 - RNA, 19 nt, Human
uauucgggugagacaugug

SEQ ID NO: 736765 - RNA, 26 nt, Human
uauucuauuuaaucuccacaccaagc

SEQ ID NO: 736766 - RNA, 23 nt, Human
ucaaucagaccuauccugccuga

SEQ ID NO: 736767 - RNA, 20 nt, Human
ucacaaggguggauuggggg

SEQ ID NO: 736768 - RNA, 19 nt, Human
ucaccagggagccaccuuc

SEQ ID NO: 736769 - RNA, 20 nt, Human
ucaccuugucccagguagug

SEQ ID NO: 736770 - RNA, 22 nt, Human
ucacgggaucuuaggaucuuca

SEQ ID NO: 736771 - RNA, 23 nt, Human
ucacugcaaccuccaccuccugg

SEQ ID NO: 736772 - RNA, 24 nt, Human
ucacugcaaccuccaccuccuggg

SEQ ID NO: 736773 - RNA, 25 nt, Human
ucacugcaaccuccaccuccugggc

SEQ ID NO: 736774 - RNA, 27 nt, Human
ucacugcaaccuccaccuccugggcuc

SEQ ID NO: 736775 - RNA, 18 nt, Human
ucagcagcagcugugcaa

SEQ ID NO: 736776 - RNA, 26 nt, Human
ucagccagggcaggggcagccucugu

SEQ ID NO: 736777 - RNA, 18 nt, Human
ucagccucccaaagugcu

SEQ ID NO: 736778 - RNA, 25 nt, Human
ucagucccaccucuucaagcugucc

SEQ ID NO: 736779 - RNA, 22 nt, Human
ucauaccagcccugcccugccu

SEQ ID NO: 736780 - RNA, 19 nt, Human
uccaaguaucugaccaggc

SEQ ID NO: 736781 - RNA, 20 nt, Human
uccacaaccacccccauccu

SEQ ID NO: 736782 - RNA, 24 nt, Human
uccaccaccaccagcacugugacc

SEQ ID NO: 736783 - RNA, 24 nt, Human
ucccaaagugcugggauuacaggc

SEQ ID NO: 736784 - RNA, 23 nt, Human
ucccaccucagaaccccuuccac

SEQ ID NO: 736785 - RNA, 22 nt, Human
ucccaccucuucaagcugucca

SEQ ID NO: 736786 - RNA, 18 nt, Human
ucccauucuucacaggcc

SEQ ID NO: 736787 - RNA, 21 nt, Human
ucccccaaaauaggcccuaca

SEQ ID NO: 736788 - RNA, 22 nt, Human
ucccccaaaauaggcccuacaa

SEQ ID NO: 736789 - RNA, 20 nt, Human
uccccuuccucagaccagcc

SEQ ID NO: 736790 - RNA, 21 nt, Human
ucccuggcccaggucuaggac

SEQ ID NO: 736791 - RNA, 23 nt, Human
uccugagccccuacugcgugccc

SEQ ID NO: 736792 - RNA, 21 nt, Human
uccugcccucccuccuuccac

SEQ ID NO: 736793 - RNA, 20 nt, Human
uccugggcucaagccaucuu

SEQ ID NO: 736794 - RNA, 24 nt, Human
uccugggcucaagccaucuuccca

SEQ ID NO: 736795 - RNA, 21 nt, Human
uccugggcuucauaccagccc

SEQ ID NO: 736796 - RNA, 21 nt, Human
ucucagcagaagcuucugggg

SEQ ID NO: 736797 - RNA, 22 nt, Human
ucuccacccaccugucuaaccc

SEQ ID NO: 736798 - RNA, 19 nt, Human
ucuccugagccccuacugc

SEQ ID NO: 736799 - RNA, 23 nt, Human
ucuccuugguacagagugggagc

SEQ ID NO: 736800 - RNA, 20 nt, Human
ucucugggguucccugacuc

SEQ ID NO: 736801 - RNA, 24 nt, Human
ucuggcuccgucauccaggcugga

SEQ ID NO: 736802 - RNA, 18 nt, Human
ugaaaugccacuccugcu

SEQ ID NO: 736803 - RNA, 24 nt, Human
ugaacaugccauucaccuuguccc

SEQ ID NO: 736804 - RNA, 23 nt, Human
ugaagucagacugugccaaaccc

SEQ ID NO: 736805 - RNA, 22 nt, Human
ugacaaguuggaugaaaacuga

SEQ ID NO: 736806 - RNA, 20 nt, Human
ugacacugcaaauuaucuca

SEQ ID NO: 736807 - RNA, 25 nt, Human
ugacauggaugcaaaugucaauggg

SEQ ID NO: 736808 - RNA, 19 nt, Human
ugacuccuaccucuagcuc

SEQ ID NO: 736809 - RNA, 24 nt, Human
ugagaggggugcccaacacuacca

SEQ ID NO: 736810 - RNA, 21 nt, Human
ugagauaagaugcccacccag

SEQ ID NO: 736811 - RNA, 19 nt, Human
ugagcaagccuaaagaagg

SEQ ID NO: 736812 - RNA, 22 nt, Human
ugagccccuacugcgugcccag

SEQ ID NO: 736813 - RNA, 19 nt, Human
ugaggcugcagucacuuca

SEQ ID NO: 736814 - RNA, 19 nt, Human
ugaggugagugggagcuug

SEQ ID NO: 736815 - RNA, 19 nt, Human
ugaguaccagguccuugag

SEQ ID NO: 736816 - RNA, 18 nt, Human
ugcaaggcagugacaaga

SEQ ID NO: 736817 - RNA, 19 nt, Human
ugcaccugcugaacaugcc

SEQ ID NO: 736818 - RNA, 25 nt, Human
ugcagcagugagauaagaugcccac

SEQ ID NO: 736819 - RNA, 19 nt, Human
ugcaugagaaucugcaugu

SEQ ID NO: 736820 - RNA, 18 nt, Human
ugccaaaugaaggcuugc

SEQ ID NO: 736821 - RNA, 19 nt, Human
ugccagagagcagaagugc

SEQ ID NO: 736822 - RNA, 23 nt, Human
ugccauggaaggagagcaggugg

SEQ ID NO: 736823 - RNA, 24 nt, Human
ugcccaagcugguuuugaacuccu

SEQ ID NO: 736824 - RNA, 18 nt, Human
ugcccagcugccgguggg

SEQ ID NO: 736825 - RNA, 25 nt, Human
ugcccuagggugggguccuggaggc

SEQ ID NO: 736826 - RNA, 21 nt, Human
ugccgguggguccagggggca

SEQ ID NO: 736827 - RNA, 18 nt, Human
ugccuagccuaggucagg

SEQ ID NO: 736828 - RNA, 18 nt, Human
ugcgugcccagcuguagg

SEQ ID NO: 736829 - RNA, 19 nt, Human
ugcuggggucuggcaaagc

SEQ ID NO: 736830 - RNA, 21 nt, Human
ugcuuuuccaccaccaccagc

SEQ ID NO: 736831 - RNA, 20 nt, Human
uggaaaccucagcauccuga

SEQ ID NO: 736832 - RNA, 20 nt, Human
uggaagccuggcagcccucc

SEQ ID NO: 736833 - RNA, 21 nt, Human
uggaagccuggcagcccuccg

SEQ ID NO: 736834 - RNA, 23 nt, Human
uggcaaaaccaggccaggccaga

SEQ ID NO: 736835 - RNA, 24 nt, Human
uggcaaagcucucaccuccaaauu

SEQ ID NO: 736836 - RNA, 23 nt, Human
uggcagaguucugaggguggagu

SEQ ID NO: 736837 - RNA, 18 nt, Human
uggcaugacauggaugca

SEQ ID NO: 736838 - RNA, 24 nt, Human
uggccagaaaucuagaguccaagg

SEQ ID NO: 736839 - RNA, 20 nt, Human
uggccucacccuccucuugc

SEQ ID NO: 736840 - RNA, 21 nt, Human
uggcugagcccagcccggccu

SEQ ID NO: 736841 - RNA, 21 nt, Human
uggcugguuugugugggaggg

SEQ ID NO: 736842 - RNA, 22 nt, Human
uggcuuggacugaaaucacacc

SEQ ID NO: 736843 - RNA, 19 nt, Human
ugggaugugggcugugauc

SEQ ID NO: 736844 - RNA, 22 nt, Human
ugggauuacaggcaugagccac

SEQ ID NO: 736845 - RNA, 22 nt, Human
ugggauuacaggcaugagccac

SEQ ID NO: 736846 - RNA, 22 nt, Human
ugggauuacaggcaugagccac

SEQ ID NO: 736847 - RNA, 24 nt, Human
ugggauuacaggcaugagccacug

SEQ ID NO: 736848 - RNA, 26 nt, Human
ugggauuacaggcaugagccacugua

SEQ ID NO: 736849 - RNA, 18 nt, Human
ugggauuucgccaugcug

SEQ ID NO: 736850 - RNA, 21 nt, Human
ugggcuuccacaaccaccccc

SEQ ID NO: 736851 - RNA, 18 nt, Human
uggugugagagaucugga

SEQ ID NO: 736852 - RNA, 21 nt, Human
uguggcacacaggaggccucu

SEQ ID NO: 736853 - RNA, 20 nt, Human
uguggcauguggcccuuucu

SEQ ID NO: 736854 - RNA, 21 nt, Human
uguggcccuuggaaaucaagc

SEQ ID NO: 736855 - RNA, 20 nt, Human
ugugggauaacagcucuugg

SEQ ID NO: 736856 - RNA, 18 nt, Human
uguggggcgaggaaccug

SEQ ID NO: 736857 - RNA, 24 nt, Human
uguguaugcgugugugugcacgug

SEQ ID NO: 736858 - RNA, 23 nt, Human
ugugugcuguuggugugagagau

SEQ ID NO: 736859 - RNA, 21 nt, Human
uuaaucuccacaccaagcaug

SEQ ID NO: 736860 - RNA, 20 nt, Human
uuagccaggagaaucgucug

SEQ ID NO: 736861 - RNA, 22 nt, Human
uucaaagccaaacaaacacauc

SEQ ID NO: 736862 - RNA, 23 nt, Human
uucaaagccaaacaaacacauca

SEQ ID NO: 736863 - RNA, 24 nt, Human
uuccaccucaaugaguaccagguc

SEQ ID NO: 736864 - RNA, 23 nt, Human
uucccaccucaacccccugagua

SEQ ID NO: 736865 - RNA, 20 nt, Human
uuccuuuccucauuuacauc

SEQ ID NO: 736866 - RNA, 19 nt, Human
uucuugugacagugauggc

SEQ ID NO: 736867 - RNA, 22 nt, Human
uugcacacaugugugccugugu

SEQ ID NO: 736868 - RNA, 19 nt, Human
uuggccuagccuugcugag

SEQ ID NO: 736869 - RNA, 19 nt, Human
uuggucaaccagcacggaa

SEQ ID NO: 736870 - RNA, 21 nt, Human
uuguaacuugcccaagaucac

SEQ ID NO: 736871 - RNA, 24 nt, Human
uuguagagaugggauuucgccaug

SEQ ID NO: 736872 - RNA, 23 nt, Human
uuuccucagguguucuucugcuu

SEQ ID NO: 736873 - RNA, 24 nt, Human
uuuguagagaugggauuucgccau

SEQ ID NO: 736874 - RNA, 24 nt, Human
uuuugaacuccugagcucaagcag

SEQ ID NO: 736875 - RNA, 20 nt, Human
uuuuuguauuuuuuguagag

SEQ ID NO: 736876 - RNA, 23 nt, Human
uuuuuguauuuuuuguagagaug

SEQ ID NO: 736877 - RNA, 23 nt, Human
uuuuuuguagagaugggauuucg

SEQ ID NO: 736878 - RNA, 24 nt, Human
uuuuuuguagagaugggauuucgc

SEQ ID NO: 736879 - RNA, 21 nt, Human
aaaaaaacaaaaaacgcugug

SEQ ID NO: 736880 - RNA, 24 nt, Human
aaaacacaacccucucaggaacca

SEQ ID NO: 736881 - RNA, 20 nt, Human
aaaaccaaaccaaaugcagc

SEQ ID NO: 736882 - RNA, 24 nt, Human
aaacacaacccucucaggaaccaa

SEQ ID NO: 736883 - RNA, 20 nt, Human
aaacucccaguggccucacu

SEQ ID NO: 736884 - RNA, 19 nt, Human
aaaggccauuuccagcaga

SEQ ID NO: 736885 - RNA, 20 nt, Human
aaaguaaaaugacccugcug

SEQ ID NO: 736886 - RNA, 19 nt, Human
aacuagcccccgacaggcc

SEQ ID NO: 736887 - RNA, 23 nt, Human
aagaaaaccaaaccaaaugcagc

SEQ ID NO: 736888 - RNA, 25 nt, Human
aagaaaaccaaaccaaaugcagcug

SEQ ID NO: 736889 - RNA, 20 nt, Human
aagaaacauauaaaaguuca

SEQ ID NO: 736890 - RNA, 19 nt, Human
aagaugcuccuuccccaug

SEQ ID NO: 736891 - RNA, 23 nt, Human
aaggaaacaaaaacaaaacacaa

SEQ ID NO: 736892 - RNA, 26 nt, Human
aaggaaacaaaaacaaaacacaaccc

SEQ ID NO: 736893 - RNA, 19 nt, Human
aagugcuggucuccaccug

SEQ ID NO: 736894 - RNA, 18 nt, Human
acacacagguggugacgc

SEQ ID NO: 736895 - RNA, 22 nt, Human
acagcauggcugugcaccugug

SEQ ID NO: 736896 - RNA, 19 nt, Human
acagguccagagaaagcag

SEQ ID NO: 736897 - RNA, 21 nt, Human
acccaacuaugaccccccccc

SEQ ID NO: 736898 - RNA, 20 nt, Human
acccagccucacccuggacc

SEQ ID NO: 736899 - RNA, 23 nt, Human
accccaucugggccaaccuggga

SEQ ID NO: 736900 - RNA, 24 nt, Human
acccucuaacccaggcuuguucug

SEQ ID NO: 736901 - RNA, 20 nt, Human
acucccgcucuugccggagg

SEQ ID NO: 736902 - RNA, 21 nt, Human
acucccgcucuugccggaggc

SEQ ID NO: 736903 - RNA, 18 nt, Human
acugcauuucauuagacc

SEQ ID NO: 736904 - RNA, 20 nt, Human
acuguccccuucccuuuccu

SEQ ID NO: 736905 - RNA, 23 nt, Human
acuguccccuucccuuuccuugg

SEQ ID NO: 736906 - RNA, 21 nt, Human
agaaagcagcaggcuccggaa

SEQ ID NO: 736907 - RNA, 22 nt, Human
agaaggcuccaccagagcugcc

SEQ ID NO: 736908 - RNA, 24 nt, Human
agaaugcucgcaaucggugcccuc

SEQ ID NO: 736909 - RNA, 21 nt, Human
agacaaagaggaaaggccaaa

SEQ ID NO: 736910 - RNA, 21 nt, Human
agacacagagcuuagagccca

SEQ ID NO: 736911 - RNA, 20 nt, Human
agacagguccagagaaagca

SEQ ID NO: 736912 - RNA, 21 nt, Human
agaccuccaggcaaggccucg

SEQ ID NO: 736913 - RNA, 21 nt, Human
agcacacgauggcucacacaa

SEQ ID NO: 736914 - RNA, 22 nt, Human
agcacuggcaugggcugcccgc

SEQ ID NO: 736915 - RNA, 18 nt, Human
agcagccaacuuggccuc

SEQ ID NO: 736916 - RNA, 19 nt, Human
agccaggcaccagaaugcu

SEQ ID NO: 736917 - RNA, 26 nt, Human
agcugcugaaagaugcaggugaacag

SEQ ID NO: 736918 - RNA, 18 nt, Human
aggagcccaggacaggga

SEQ ID NO: 736919 - RNA, 22 nt, Human
aggagggguuggggcgcuggga

SEQ ID NO: 736920 - RNA, 18 nt, Human
aggcagggagggcaaauc

SEQ ID NO: 736921 - RNA, 19 nt, Human
aggccagaccacagcaugg

SEQ ID NO: 736922 - RNA, 18 nt, Human
aggccgucucccacuccu

SEQ ID NO: 736923 - RNA, 22 nt, Human
aggcgccggaaucgagggggcu

SEQ ID NO: 736924 - RNA, 23 nt, Human
agggaggucucucagucugggcc

SEQ ID NO: 736925 - RNA, 21 nt, Human
agggaugggcggcugggccgg

SEQ ID NO: 736926 - RNA, 18 nt, Human
aggggagcugcugaaaga

SEQ ID NO: 736927 - RNA, 21 nt, Human
agugaaacauuuacuucuuuu

SEQ ID NO: 736928 - RNA, 18 nt, Human
aguuaagaaaaccaaacc

SEQ ID NO: 736929 - RNA, 23 nt, Human
auaaaggcuugggauaaagaggg

SEQ ID NO: 736930 - RNA, 24 nt, Human
aucaagccaggagcuggaacccaa

SEQ ID NO: 736931 - RNA, 21 nt, Human
aucccaggccccacaagcagc

SEQ ID NO: 736932 - RNA, 19 nt, Human
auccuggcagaagccucug

SEQ ID NO: 736933 - RNA, 20 nt, Human
auccuggcagaagccucugc

SEQ ID NO: 736934 - RNA, 18 nt, Human
aucuuuucacuuucaaag

SEQ ID NO: 736935 - RNA, 24 nt, Human
augaauguuuaaaaaaaaacaaaa

SEQ ID NO: 736936 - RNA, 19 nt, Human
augacccugcugccaaauc

SEQ ID NO: 736937 - RNA, 18 nt, Human
augcuaaaacugucauca

SEQ ID NO: 736938 - RNA, 22 nt, Human
auggagccccagaagcagagcc

SEQ ID NO: 736939 - RNA, 24 nt, Human
auuagaccaaggagggguuggggc

SEQ ID NO: 736940 - RNA, 18 nt, Human
caaaaacaaaacacaacc

SEQ ID NO: 736941 - RNA, 24 nt, Human
caaaaagccucaaaguaaaaugac

SEQ ID NO: 736942 - RNA, 24 nt, Human
caaaacauaaacaaaaggaaacaa

SEQ ID NO: 736943 - RNA, 25 nt, Human
caaaacccccaaauccuuuuuuacu

SEQ ID NO: 736944 - RNA, 23 nt, Human
caaaaggaaacaaaaacaaaaca

SEQ ID NO: 736945 - RNA, 19 nt, Human
caaacaaaacccccaaauc

SEQ ID NO: 736946 - RNA, 24 nt, Human
caaacuaaacaggacagaggcuag

SEQ ID NO: 736947 - RNA, 22 nt, Human
caaagcaagcgggucaaugcca

SEQ ID NO: 736948 - RNA, 20 nt, Human
caacccucucaggaaccaaa

SEQ ID NO: 736949 - RNA, 26 nt, Human
caacuaugacccccccccucccccaa

SEQ ID NO: 736950 - RNA, 18 nt, Human
caacuuuaacaggcaaaa

SEQ ID NO: 736951 - RNA, 19 nt, Human
caaggccacugguggcuga

SEQ ID NO: 736952 - RNA, 24 nt, Human
cacaaggcaugaggucaaaagcuu

SEQ ID NO: 736953 - RNA, 23 nt, Human
cacacgcaccaccgcaucaggug

SEQ ID NO: 736954 - RNA, 22 nt, Human
cacagcuuuggaacugaacuga

SEQ ID NO: 736955 - RNA, 24 nt, Human
caccaagugggguggaaacaguga

SEQ ID NO: 736956 - RNA, 21 nt, Human
cacccagccucacccuggacc

SEQ ID NO: 736957 - RNA, 20 nt, Human
cacccaggaauggcuuggca

SEQ ID NO: 736958 - RNA, 19 nt, Human
caccccaucgcuucccagg

SEQ ID NO: 736959 - RNA, 21 nt, Human
cacgaugagcugugugggagg

SEQ ID NO: 736960 - RNA, 20 nt, Human
cacggggccugggaugggcc

SEQ ID NO: 736961 - RNA, 22 nt, Human
cacucuuguccccagaacacag

SEQ ID NO: 736962 - RNA, 22 nt, Human
cacugagccacuccuguccugg

SEQ ID NO: 736963 - RNA, 20 nt, Human
cacugcugagaaggcgcccu

SEQ ID NO: 736964 - RNA, 20 nt, Human
cacugugccuagggaugggc

SEQ ID NO: 736965 - RNA, 18 nt, Human
cacuuucaaaggcguccc

SEQ ID NO: 736966 - RNA, 19 nt, Human
cagauccagaagauaggag

SEQ ID NO: 736967 - RNA, 23 nt, Human
cagcagcaggaaagggaagugcu

SEQ ID NO: 736968 - RNA, 20 nt, Human
cagcagguggggcuccuccu

SEQ ID NO: 736969 - RNA, 18 nt, Human
cagccccuggggaaggga

SEQ ID NO: 736970 - RNA, 19 nt, Human
cagcucaggucacacacag

SEQ ID NO: 736971 - RNA, 23 nt, Human
cagcucaggucacacacaggugg

SEQ ID NO: 736972 - RNA, 19 nt, Human
caggcccuuuggaccuugg

SEQ ID NO: 736973 - RNA, 22 nt, Human
caguaaaacugcccuuucccag

SEQ ID NO: 736974 - RNA, 19 nt, Human
cagugaccaaggcagagcu

SEQ ID NO: 736975 - RNA, 20 nt, Human
cagugaccccuaagaacagc

SEQ ID NO: 736976 - RNA, 20 nt, Human
cauauaaaaguucagcuaua

SEQ ID NO: 736977 - RNA, 18 nt, Human
cauuagaccaaggagggg

SEQ ID NO: 736978 - RNA, 22 nt, Human
ccaaacaaaacccccaaauccu

SEQ ID NO: 736979 - RNA, 24 nt, Human
ccaaaccaaaugcagcuggcauug

SEQ ID NO: 736980 - RNA, 19 nt, Human
ccacagugccacucuuguc

SEQ ID NO: 736981 - RNA, 20 nt, Human
ccacagugccacucuugucc

SEQ ID NO: 736982 - RNA, 18 nt, Human
ccacccagccucacccug

SEQ ID NO: 736983 - RNA, 21 nt, Human
ccacuaagaccuccaggcaag

SEQ ID NO: 736984 - RNA, 20 nt, Human
ccagaccacagcauggcugg

SEQ ID NO: 736985 - RNA, 21 nt, Human
ccagcagguggggcuccuccu

SEQ ID NO: 736986 - RNA, 24 nt, Human
ccaggacagggacccugugugauu

SEQ ID NO: 736987 - RNA, 19 nt, Human
ccaggcuuguucugcagga

SEQ ID NO: 736988 - RNA, 22 nt, Human
ccagggccuucccgccgcuccc

SEQ ID NO: 736989 - RNA, 23 nt, Human
ccaguggccucacuuggggacca

SEQ ID NO: 736990 - RNA, 20 nt, Human
cccaacuaugaccccccccc

SEQ ID NO: 736991 - RNA, 24 nt, Human
cccacaggcccagggacucccgcu

SEQ ID NO: 736992 - RNA, 21 nt, Human
cccagcacacgauggcucaca

SEQ ID NO: 736993 - RNA, 24 nt, Human
cccagcacauccacuggcuuuaga

SEQ ID NO: 736994 - RNA, 18 nt, Human
cccaggacagggacccug

SEQ ID NO: 736995 - RNA, 23 nt, Human
cccaggcuuguucugcaggaagu

SEQ ID NO: 736996 - RNA, 19 nt, Human
cccauucaucacagaacac

SEQ ID NO: 736997 - RNA, 23 nt, Human
ccccacaggcccagggacucccg

SEQ ID NO: 736998 - RNA, 19 nt, Human
ccccagaagcagagcccac

SEQ ID NO: 736999 - RNA, 25 nt, Human
ccccagaagcagagcccacggggcc

SEQ ID NO: 737000 - RNA, 19 nt, Human
cccccccccucccccaacc

SEQ ID NO: 737001 - RNA, 19 nt, Human
cccccccucccccaaccug

SEQ ID NO: 737002 - RNA, 18 nt, Human
cccccucccccaaccugc

SEQ ID NO: 737003 - RNA, 22 nt, Human
ccccgacaggccaccauccacc

SEQ ID NO: 737004 - RNA, 18 nt, Human
ccccucccccaaccugcc

SEQ ID NO: 737005 - RNA, 18 nt, Human
cccggaggcugcgcaggc

SEQ ID NO: 737006 - RNA, 23 nt, Human
cccggcccccuccucuagguguu

SEQ ID NO: 737007 - RNA, 24 nt, Human
cccuagaaguggcuggaaggaccc

SEQ ID NO: 737008 - RNA, 26 nt, Human
cccuuucccaggcagcucuggggugg

SEQ ID NO: 737009 - RNA, 18 nt, Human
ccgccgcucccgccgcuc

SEQ ID NO: 737010 - RNA, 18 nt, Human
ccggcccccuccucuagg

SEQ ID NO: 737011 - RNA, 19 nt, Human
ccuaacgggcuucucccca

SEQ ID NO: 737012 - RNA, 21 nt, Human
ccucaagggugaaccagcuga

SEQ ID NO: 737013 - RNA, 23 nt, Human
ccucacccuggaccugcccccgc

SEQ ID NO: 737014 - RNA, 22 nt, Human
ccucccggcuccagcuuucggc

SEQ ID NO: 737015 - RNA, 23 nt, Human
ccucccggcuccagcuuucggcu

SEQ ID NO: 737016 - RNA, 23 nt, Human
ccuccuucucugccuuuuuacug

SEQ ID NO: 737017 - RNA, 23 nt, Human
ccucggagcagccaacuuggccu

SEQ ID NO: 737018 - RNA, 20 nt, Human
ccucggguccccacaggccc

SEQ ID NO: 737019 - RNA, 25 nt, Human
ccucuaacccaggcuuguucugcag

SEQ ID NO: 737020 - RNA, 24 nt, Human
ccugaacuguccccuucccuuucc

SEQ ID NO: 737021 - RNA, 20 nt, Human
ccugcagggcaggguaugga

SEQ ID NO: 737022 - RNA, 20 nt, Human
ccuuagaauugugagagcag

SEQ ID NO: 737023 - RNA, 22 nt, Human
ccuucuucucacccaaacuagc

SEQ ID NO: 737024 - RNA, 22 nt, Human
ccuuucccaggcagcucugggg

SEQ ID NO: 737025 - RNA, 20 nt, Human
ccuuuccccuuuguaaaaac

SEQ ID NO: 737026 - RNA, 21 nt, Human
cgcugggaggccugaggccug

SEQ ID NO: 737027 - RNA, 19 nt, Human
cggcuccagcuuucggcuc

SEQ ID NO: 737028 - RNA, 18 nt, Human
cgggaguggagaggaggg

SEQ ID NO: 737029 - RNA, 25 nt, Human
cuaagaugcuccuuccccauguucu

SEQ ID NO: 737030 - RNA, 19 nt, Human
cucacccuggaccugcccc

SEQ ID NO: 737031 - RNA, 23 nt, Human
cuccgcgcggcuguccucaaagc

SEQ ID NO: 737032 - RNA, 18 nt, Human
cuccucuuggccagcucc

SEQ ID NO: 737033 - RNA, 18 nt, Human
cucugccuuuuuacugga

SEQ ID NO: 737034 - RNA, 19 nt, Human
cugagcaccccaucgcuuc

SEQ ID NO: 737035 - RNA, 26 nt, Human
cugcccccgccgucugaagacaaacg

SEQ ID NO: 737036 - RNA, 20 nt, Human
cugcugcagccacuaagacc

SEQ ID NO: 737037 - RNA, 25 nt, Human
cuggaacccaacuaugacccccccc

SEQ ID NO: 737038 - RNA, 24 nt, Human
cuggagaagcuccucuuggccagc

SEQ ID NO: 737039 - RNA, 18 nt, Human
cuguucccacuaaggccc

SEQ ID NO: 737040 - RNA, 19 nt, Human
cuguucccacuaaggcccc

SEQ ID NO: 737041 - RNA, 25 nt, Human
cuuccagaagcugucacugaccauc

SEQ ID NO: 737042 - RNA, 20 nt, Human
cuucccgccgcucccgccgc

SEQ ID NO: 737043 - RNA, 23 nt, Human
cuucucugccuuuuuacuggagg

SEQ ID NO: 737044 - RNA, 21 nt, Human
cuuggcaaggagggccggugg

SEQ ID NO: 737045 - RNA, 24 nt, Human
cuuguccccagaacacaguuuggg

SEQ ID NO: 737046 - RNA, 21 nt, Human
cuuguccuccgcgcggcuguc

SEQ ID NO: 737047 - RNA, 24 nt, Human
cuuguucugcaggaagugaaaagg

SEQ ID NO: 737048 - RNA, 23 nt, Human
gaaaaacacagcaccccugcagg

SEQ ID NO: 737049 - RNA, 18 nt, Human
gaaaagcagacaagaagc

SEQ ID NO: 737050 - RNA, 21 nt, Human
gaaaagcagacaagaagcuca

SEQ ID NO: 737051 - RNA, 19 nt, Human
gaaacaaaaacaaaacaca

SEQ ID NO: 737052 - RNA, 21 nt, Human
gaaacaaaaacaaaacacaac

SEQ ID NO: 737053 - RNA, 21 nt, Human
gaaccaaacaaaacccccaaa

SEQ ID NO: 737054 - RNA, 18 nt, Human
gaaggaaggaaaaugaca

SEQ ID NO: 737055 - RNA, 19 nt, Human
gagaagccaacaguuaaga

SEQ ID NO: 737056 - RNA, 20 nt, Human
gagcccaagccugagcgcug

SEQ ID NO: 737057 - RNA, 18 nt, Human
gaggagcccaggacaggg

SEQ ID NO: 737058 - RNA, 21 nt, Human
gaggaguucugguaggagagc

SEQ ID NO: 737059 - RNA, 22 nt, Human
gaggcuucgggaaggucagcac

SEQ ID NO: 737060 - RNA, 19 nt, Human
gagggguuggggcgcuggg

SEQ ID NO: 737061 - RNA, 22 nt, Human
gagugucggcugugucgaggcc

SEQ ID NO: 737062 - RNA, 23 nt, Human
gaugggccugugguaugucagcu

SEQ ID NO: 737063 - RNA, 19 nt, Human
gcagagcugccagcgucag

SEQ ID NO: 737064 - RNA, 22 nt, Human
gcagcaggaaagggaagugcug

SEQ ID NO: 737065 - RNA, 19 nt, Human
gcccugggcucaucaagcc

SEQ ID NO: 737066 - RNA, 18 nt, Human
gccugggaugggccugug

SEQ ID NO: 737067 - RNA, 18 nt, Human
gcgugaucggaggaguuc

SEQ ID NO: 737068 - RNA, 21 nt, Human
gcucgcugaagucgcugcuuu

SEQ ID NO: 737069 - RNA, 22 nt, Human
gcucuggggugggcgcuguugg

SEQ ID NO: 737070 - RNA, 22 nt, Human
gcugggaggccugaggccugcc

SEQ ID NO: 737071 - RNA, 20 nt, Human
gcuucuccccaaacccuccc

SEQ ID NO: 737072 - RNA, 22 nt, Human
ggaaaagcagacaagaagcuca

SEQ ID NO: 737073 - RNA, 23 nt, Human
ggaagggacucaagcauaaaggc

SEQ ID NO: 737074 - RNA, 19 nt, Human
ggaaggucagcacuggcau

SEQ ID NO: 737075 - RNA, 21 nt, Human
ggacaaacucccaguggccuc

SEQ ID NO: 737076 - RNA, 19 nt, Human
ggaggaggagguagacgcu

SEQ ID NO: 737077 - RNA, 21 nt, Human
ggcgccuucuccugaagggcc

SEQ ID NO: 737078 - RNA, 24 nt, Human
ggcuggagaacaggugaccuuuuu

SEQ ID NO: 737079 - RNA, 18 nt, Human
gggagaaaggcguccaca

SEQ ID NO: 737080 - RNA, 18 nt, Human
gggagugaagcaaaggag

SEQ ID NO: 737081 - RNA, 21 nt, Human
gggguuggggcgcugggaggc

SEQ ID NO: 737082 - RNA, 22 nt, Human
gggucucugacuggagaagcuc

SEQ ID NO: 737083 - RNA, 18 nt, Human
gggugcauccccggcccc

SEQ ID NO: 737084 - RNA, 20 nt, Human
ggguuggggcgcugggaggc

SEQ ID NO: 737085 - RNA, 19 nt, Human
gguuggggcgcugggaggc

SEQ ID NO: 737086 - RNA, 21 nt, Human
gucacauuucagaagagagcu

SEQ ID NO: 737087 - RNA, 26 nt, Human
gucagcccuccacccagccucacccu

SEQ ID NO: 737088 - RNA, 19 nt, Human
gugaagagcaggucucaca

SEQ ID NO: 737089 - RNA, 20 nt, Human
gugcauccccggcccccucc

SEQ ID NO: 737090 - RNA, 21 nt, Human
guuggcucucauagcgagggg

SEQ ID NO: 737091 - RNA, 19 nt, Human
uaaaacugcccuuucccag

SEQ ID NO: 737092 - RNA, 20 nt, Human
uaaaaugacccugcugccaa

SEQ ID NO: 737093 - RNA, 22 nt, Human
uaaaaugacccugcugccaaau

SEQ ID NO: 737094 - RNA, 27 nt, Human
uaaacaaaaggaaacaaaaacaaaaca

SEQ ID NO: 737095 - RNA, 21 nt, Human
uaagaacagcugagaaaccug

SEQ ID NO: 737096 - RNA, 25 nt, Human
uacuacacaaggcaugaggucaaaa

SEQ ID NO: 737097 - RNA, 21 nt, Human
uacugugggucugauaccagg

SEQ ID NO: 737098 - RNA, 22 nt, Human
uacugugggucugauaccaggu

SEQ ID NO: 737099 - RNA, 23 nt, Human
uagagauggaagggagcggaggg

SEQ ID NO: 737100 - RNA, 20 nt, Human
uagagcccaagccugagcgc

SEQ ID NO: 737101 - RNA, 22 nt, Human
uaugacccccccccucccccaa

SEQ ID NO: 737102 - RNA, 20 nt, Human
uauuugaaaggagaaacaau

SEQ ID NO: 737103 - RNA, 24 nt, Human
ucacacgcaccaccgcaucaggug

SEQ ID NO: 737104 - RNA, 20 nt, Human
ucacaugcccgaagaccacc

SEQ ID NO: 737105 - RNA, 26 nt, Human
ucacccaaacuagcccccgacaggcc

SEQ ID NO: 737106 - RNA, 26 nt, Human
ucagcucaccccaucugggccaaccu

SEQ ID NO: 737107 - RNA, 23 nt, Human
ucaggaaccaaacaaaaccccca

SEQ ID NO: 737108 - RNA, 19 nt, Human
ucagugaccccuaagaaca

SEQ ID NO: 737109 - RNA, 20 nt, Human
ucccaggcagcucuggggug

SEQ ID NO: 737110 - RNA, 21 nt, Human
ucccaggccccacaagcagcc

SEQ ID NO: 737111 - RNA, 19 nt, Human
ucccaggcggggagccagg

SEQ ID NO: 737112 - RNA, 20 nt, Human
ucccccuuaaggaaccuaga

SEQ ID NO: 737113 - RNA, 19 nt, Human
ucccgcaggccugaacuca

SEQ ID NO: 737114 - RNA, 25 nt, Human
ucccgcucuugccggaggcgccgga

SEQ ID NO: 737115 - RNA, 26 nt, Human
ucccuccaucaccaagugguguucac

SEQ ID NO: 737116 - RNA, 19 nt, Human
uccuccucggguccccaca

SEQ ID NO: 737117 - RNA, 25 nt, Human
uccuggaggccaccaaguggggugg

SEQ ID NO: 737118 - RNA, 23 nt, Human
ucgggaguggagaggagggaggu

SEQ ID NO: 737119 - RNA, 25 nt, Human
ucuacacuagacacagagcuuagag

SEQ ID NO: 737120 - RNA, 24 nt, Human
ucucacaugcccgaagaccaccag

SEQ ID NO: 737121 - RNA, 18 nt, Human
ucuccccaaacccucccg

SEQ ID NO: 737122 - RNA, 19 nt, Human
ucucugccuuuuuacugga

SEQ ID NO: 737123 - RNA, 20 nt, Human
ucuuacuuaaaaacaagccc

SEQ ID NO: 737124 - RNA, 23 nt, Human
ugaauguuuaaaaaaaaacaaaa

SEQ ID NO: 737125 - RNA, 20 nt, Human
ugaccccccaaucccuaccu

SEQ ID NO: 737126 - RNA, 23 nt, Human
ugaccccccaaucccuaccucag

SEQ ID NO: 737127 - RNA, 22 nt, Human
ugacccccccccucccccaacc

SEQ ID NO: 737128 - RNA, 23 nt, Human
ugagagcaguaagaaguuacuuc

SEQ ID NO: 737129 - RNA, 22 nt, Human
ugaggaaucaggaggggaugca

SEQ ID NO: 737130 - RNA, 18 nt, Human
ugagggcaggaggggagc

SEQ ID NO: 737131 - RNA, 18 nt, Human
ugagggcaggaggggagc

SEQ ID NO: 737132 - RNA, 19 nt, Human
ugagggcaggaggggagcu

SEQ ID NO: 737133 - RNA, 23 nt, Human
ugcagggcaggguauggagcccc

SEQ ID NO: 737134 - RNA, 20 nt, Human
ugcccucagccccccaaguc

SEQ ID NO: 737135 - RNA, 18 nt, Human
ugccuagggaugggcggc

SEQ ID NO: 737136 - RNA, 18 nt, Human
ugcucagcuuccagaagc

SEQ ID NO: 737137 - RNA, 21 nt, Human
ugcugagaaggcgcccuggcu

SEQ ID NO: 737138 - RNA, 22 nt, Human
ugcuggucuccaccuguuccca

SEQ ID NO: 737139 - RNA, 19 nt, Human
ugcuuagguccgucacauu

SEQ ID NO: 737140 - RNA, 26 nt, Human
uggaaagacaaagaggaaaggccaaa

SEQ ID NO: 737141 - RNA, 22 nt, Human
uggaaugacagaaucuggagug

SEQ ID NO: 737142 - RNA, 25 nt, Human
uggagaagcugcccucccggaggcu

SEQ ID NO: 737143 - RNA, 19 nt, Human
uggcagaagccucugcaug

SEQ ID NO: 737144 - RNA, 21 nt, Human
uggcaugggcugcccgcucca

SEQ ID NO: 737145 - RNA, 19 nt, Human
ugggaggccugaggccugc

SEQ ID NO: 737146 - RNA, 19 nt, Human
ugggaggggucuggccaug

SEQ ID NO: 737147 - RNA, 20 nt, Human
ugggagguggagacaggucc

SEQ ID NO: 737148 - RNA, 22 nt, Human
ugggagguggagacagguccag

SEQ ID NO: 737149 - RNA, 21 nt, Human
ugggagugaagcaaaggagga

SEQ ID NO: 737150 - RNA, 23 nt, Human
uggggacagagagggcucauccc

SEQ ID NO: 737151 - RNA, 24 nt, Human
uguaaaaaccuuggcuacauuuua

SEQ ID NO: 737152 - RNA, 20 nt, Human
ugugcucagcuuccagaagc

SEQ ID NO: 737153 - RNA, 22 nt, Human
uguggggagaagccaacaguua

SEQ ID NO: 737154 - RNA, 23 nt, Human
uuaaaacaucucugcacuaagaa

SEQ ID NO: 737155 - RNA, 20 nt, Human
uuacuacacaaggcaugagg

SEQ ID NO: 737156 - RNA, 24 nt, Human
uuagagcccaagccugagcgcugu

SEQ ID NO: 737157 - RNA, 25 nt, Human
uucagaagagagcuggcuuucugga

SEQ ID NO: 737158 - RNA, 19 nt, Human
uucccacuaaggccccgug

SEQ ID NO: 737159 - RNA, 21 nt, Human
uucccaggcagcucuggggug

SEQ ID NO: 737160 - RNA, 18 nt, Human
uucucaaacagcaaguac

SEQ ID NO: 737161 - RNA, 21 nt, Human
uugcagugggagaaggaaaag

SEQ ID NO: 737162 - RNA, 19 nt, Human
uuuuuuauuuaaauaagga

SEQ ID NO: 737163 - RNA, 21 nt, Human
aagaagaagacgggagaaaga

SEQ ID NO: 737164 - RNA, 21 nt, Human
aagaagaagacgggagaaaga

SEQ ID NO: 737165 - RNA, 19 nt, Human
aagaagaggagcuggggcu

SEQ ID NO: 737166 - RNA, 22 nt, Human
aagcaaagagggugcaaggucc

SEQ ID NO: 737167 - RNA, 18 nt, Human
acaaugccugaaccccag

SEQ ID NO: 737168 - RNA, 20 nt, Human
accccgacagcuccggacac

SEQ ID NO: 737169 - RNA, 21 nt, Human
agaagaagacgggagaaagag

SEQ ID NO: 737170 - RNA, 25 nt, Human
agacagcgcuggggccggcggcacg

SEQ ID NO: 737171 - RNA, 23 nt, Human
agaggggagagggaggcaggagc

SEQ ID NO: 737172 - RNA, 20 nt, Human
agcaggcaaaaagacacaug

SEQ ID NO: 737173 - RNA, 21 nt, Human
agccgaagaggucugggcugg

SEQ ID NO: 737174 - RNA, 21 nt, Human
agcgcucuccuagccccacac

SEQ ID NO: 737175 - RNA, 22 nt, Human
agcuagaccuccagggaaaagu

SEQ ID NO: 737176 - RNA, 20 nt, Human
agcuccggacaccugcccuu

SEQ ID NO: 737177 - RNA, 18 nt, Human
aggaagcaaagagggugc

SEQ ID NO: 737178 - RNA, 21 nt, Human
aggaagcaaagagggugcaag

SEQ ID NO: 737179 - RNA, 24 nt, Human
aggaggaaaaaagacaaugccuga

SEQ ID NO: 737180 - RNA, 18 nt, Human
aggcagggaggacauggg

SEQ ID NO: 737181 - RNA, 21 nt, Human
agggaggacauggggaggagg

SEQ ID NO: 737182 - RNA, 20 nt, Human
aggggaacgggcaggagagc

SEQ ID NO: 737183 - RNA, 18 nt, Human
agguguaagggaauggcg

SEQ ID NO: 737184 - RNA, 19 nt, Human
aucaaugguccguguccuc

SEQ ID NO: 737185 - RNA, 22 nt, Human
aucuugggcucaugguggcccu

SEQ ID NO: 737186 - RNA, 19 nt, Human
caaguuccugaagccgaag

SEQ ID NO: 737187 - RNA, 25 nt, Human
cacacaggcccagaggucugaggcc

SEQ ID NO: 737188 - RNA, 18 nt, Human
cacagagagcucacacag

SEQ ID NO: 737189 - RNA, 24 nt, Human
cacagagagcucacacaggcccag

SEQ ID NO: 737190 - RNA, 21 nt, Human
caccacuccccagcgcuggag

SEQ ID NO: 737191 - RNA, 21 nt, Human
caccccgacagcuccggacac

SEQ ID NO: 737192 - RNA, 19 nt, Human
cacugccacccucccccgc

SEQ ID NO: 737193 - RNA, 21 nt, Human
cagccagagcucacagagagc

SEQ ID NO: 737194 - RNA, 24 nt, Human
cagccccucccacugccacccucc

SEQ ID NO: 737195 - RNA, 18 nt, Human
cagcucugauggcuucaa

SEQ ID NO: 737196 - RNA, 19 nt, Human
cagcugaaguuuggccaca

SEQ ID NO: 737197 - RNA, 20 nt, Human
caggcccugaggucagagag

SEQ ID NO: 737198 - RNA, 26 nt, Human
caucccagaccugagccccccccaaa

SEQ ID NO: 737199 - RNA, 23 nt, Human
ccaacacaagcagggucccaccc

SEQ ID NO: 737200 - RNA, 21 nt, Human
ccacccucccccgcccccaag

SEQ ID NO: 737201 - RNA, 21 nt, Human
ccacugccacccucccccgcc

SEQ ID NO: 737202 - RNA, 26 nt, Human
ccagagcucacagagagcucacaccg

SEQ ID NO: 737203 - RNA, 24 nt, Human
ccauacagccccucccacugccac

SEQ ID NO: 737204 - RNA, 20 nt, Human
cccaaaaccugucuggacuu

SEQ ID NO: 737205 - RNA, 21 nt, Human
cccaaccccagcucugauggc

SEQ ID NO: 737206 - RNA, 22 nt, Human
cccaagccccaguggcccuggc

SEQ ID NO: 737207 - RNA, 19 nt, Human
cccacacggccagaggagc

SEQ ID NO: 737208 - RNA, 19 nt, Human
ccccaagccccaguggccc

SEQ ID NO: 737209 - RNA, 25 nt, Human
ccccaagccccaguggcccuggccc

SEQ ID NO: 737210 - RNA, 24 nt, Human
ccccagacuuuccuguuccccagc

SEQ ID NO: 737211 - RNA, 19 nt, Human
ccccagcucugauggcuuc

SEQ ID NO: 737212 - RNA, 22 nt, Human
cccccaagccccaguggcccug

SEQ ID NO: 737213 - RNA, 18 nt, Human
cccccgggcccagccggg

SEQ ID NO: 737214 - RNA, 24 nt, Human
ccgcccccaagccccaguggcccu

SEQ ID NO: 737215 - RNA, 31 nt, Human
ccuccagcaggcaaaaagacacauggaaguu

SEQ ID NO: 737216 - RNA, 18 nt, Human
ccuccagggaaaaguggg

SEQ ID NO: 737217 - RNA, 25 nt, Human
ccucccacugccacccucccccgcc

SEQ ID NO: 737218 - RNA, 21 nt, Human
ccugagccccccccaaaaccu

SEQ ID NO: 737219 - RNA, 22 nt, Human
cgaaucuggaaggaaaccccau

SEQ ID NO: 737220 - RNA, 22 nt, Human
cgaggcaaguuccugaagccga

SEQ ID NO: 737221 - RNA, 22 nt, Human
cgcccccaagccccaguggccc

SEQ ID NO: 737222 - RNA, 23 nt, Human
cggcccaggggcaggggaacggg

SEQ ID NO: 737223 - RNA, 22 nt, Human
cggcggcacggggagcaggagc

SEQ ID NO: 737224 - RNA, 19 nt, Human
cgggucccaaggcagggag

SEQ ID NO: 737225 - RNA, 19 nt, Human
cucccccgcccccaagccc

SEQ ID NO: 737226 - RNA, 20 nt, Human
cucccccgcccccaagcccc

SEQ ID NO: 737227 - RNA, 21 nt, Human
cucuccauacagccccuccca

SEQ ID NO: 737228 - RNA, 20 nt, Human
cucuccuguggcuccccaga

SEQ ID NO: 737229 - RNA, 21 nt, Human
cucuccuguggcuccccagac

SEQ ID NO: 737230 - RNA, 19 nt, Human
cugcagcccaugguggaga

SEQ ID NO: 737231 - RNA, 25 nt, Human
gaaaaaagacaaugccugaacccca

SEQ ID NO: 737232 - RNA, 18 nt, Human
gaagaagaagacgggaga

SEQ ID NO: 737233 - RNA, 24 nt, Human
gaagaagaagacgggagaaagagu

SEQ ID NO: 737234 - RNA, 23 nt, Human
gaagcaaagagggugcaaggucc

SEQ ID NO: 737235 - RNA, 24 nt, Human
gacaaugccugaaccccagcuccu

SEQ ID NO: 737236 - RNA, 24 nt, Human
gaggccacagagcuagaccuccag

SEQ ID NO: 737237 - RNA, 21 nt, Human
gcaagaagaggagcuggggcu

SEQ ID NO: 737238 - RNA, 22 nt, Human
gcccccaagccccaguggcccu

SEQ ID NO: 737239 - RNA, 24 nt, Human
gcccugaggucagagagagggcca

SEQ ID NO: 737240 - RNA, 20 nt, Human
gcuccggacaccugcccuuc

SEQ ID NO: 737241 - RNA, 21 nt, Human
ggaaguguguggccaggcccu

SEQ ID NO: 737242 - RNA, 19 nt, Human
ggacagaaggacucaggca

SEQ ID NO: 737243 - RNA, 19 nt, Human
ggcaagaagaggagcuggg

SEQ ID NO: 737244 - RNA, 18 nt, Human
ggcccagaggucugaggc

SEQ ID NO: 737245 - RNA, 23 nt, Human
ggcgggggggcaugcaauauggg

SEQ ID NO: 737246 - RNA, 24 nt, Human
gggaaaaguggggaagaagaagac

SEQ ID NO: 737247 - RNA, 21 nt, Human
gggaauggcgggggggcaugc

SEQ ID NO: 737248 - RNA, 18 nt, Human
gggagcaggagcugaggc

SEQ ID NO: 737249 - RNA, 20 nt, Human
gggcaagaagaggagcuggg

SEQ ID NO: 737250 - RNA, 24 nt, Human
gggcuggggccuacuggagaaagg

SEQ ID NO: 737251 - RNA, 21 nt, Human
gggcuugagggcccgggggcc

SEQ ID NO: 737252 - RNA, 18 nt, Human
ggggagagggaggcagga

SEQ ID NO: 737253 - RNA, 23 nt, Human
gggggcccgggagacagcgcugg

SEQ ID NO: 737254 - RNA, 26 nt, Human
ggguagguguaagggaauggcggggg

SEQ ID NO: 737255 - RNA, 21 nt, Human
gguggagaggggagagggagg

SEQ ID NO: 737256 - RNA, 24 nt, Human
ggugggguagguguaagggaaugg

SEQ ID NO: 737257 - RNA, 22 nt, Human
uacaaggaggaaaaaagacaau

SEQ ID NO: 737258 - RNA, 19 nt, Human
uacgaggaucucuggaagg

SEQ ID NO: 737259 - RNA, 18 nt, Human
uauguguauauauauuuc

SEQ ID NO: 737260 - RNA, 21 nt, Human
ucacagagagcucacacaggc

SEQ ID NO: 737261 - RNA, 26 nt, Human
ucacagagagcucacacaggcccaga

SEQ ID NO: 737262 - RNA, 23 nt, Human
ucccaaccccagcucugauggcu

SEQ ID NO: 737263 - RNA, 18 nt, Human
ucccaaggcagggaggac

SEQ ID NO: 737264 - RNA, 26 nt, Human
ucccaaggcagggaggacauggggag

SEQ ID NO: 737265 - RNA, 20 nt, Human
ucccacugccacccuccccc

SEQ ID NO: 737266 - RNA, 20 nt, Human
uccccagggcugaugcuggg

SEQ ID NO: 737267 - RNA, 22 nt, Human
ucccccgggcccagccggggga

SEQ ID NO: 737268 - RNA, 18 nt, Human
uccccgcucucucacggc

SEQ ID NO: 737269 - RNA, 19 nt, Human
uccuccagcaggcaaaaag

SEQ ID NO: 737270 - RNA, 27 nt, Human
uccucuccauacagccccucccacugg

SEQ ID NO: 737271 - RNA, 26 nt, Human
ucuauacugcagcccaugguggagag

SEQ ID NO: 737272 - RNA, 23 nt, Human
ucucuggaaggcccucaccacuc

SEQ ID NO: 737273 - RNA, 24 nt, Human
ucucuggaaggcccucaccacucc

SEQ ID NO: 737274 - RNA, 24 nt, Human
ucugaggccacagagcuagaccuc

SEQ ID NO: 737275 - RNA, 24 nt, Human
ucuggaaggcccucaccacucccc

SEQ ID NO: 737276 - RNA, 22 nt, Human
ugaaaaaaccgaggaagcaaag

SEQ ID NO: 737277 - RNA, 21 nt, Human
ugagaggacgggucccaaggc

SEQ ID NO: 737278 - RNA, 19 nt, Human
ugaggagcuggauaugcgg

SEQ ID NO: 737279 - RNA, 24 nt, Human
ugaggccacagagcuagaccucca

SEQ ID NO: 737280 - RNA, 19 nt, Human
ugaggucagagagagggcc

SEQ ID NO: 737281 - RNA, 24 nt, Human
ugcagggcgaggcaaguuccugaa

SEQ ID NO: 737282 - RNA, 19 nt, Human
ugccacccucccccgcccc

SEQ ID NO: 737283 - RNA, 22 nt, Human
ugccucaggaaggauaucuugg

SEQ ID NO: 737284 - RNA, 23 nt, Human
ugcugggggugagaggacggguc

SEQ ID NO: 737285 - RNA, 20 nt, Human
uggaaggaaaccccauggca

SEQ ID NO: 737286 - RNA, 21 nt, Human
uggagaggcagcggagauucu

SEQ ID NO: 737287 - RNA, 23 nt, Human
ugggagccucucuccccagggcu

SEQ ID NO: 737288 - RNA, 19 nt, Human
uggggccggcggcacgggg

SEQ ID NO: 737289 - RNA, 21 nt, Human
uggggcuuguaaaaaauauau

SEQ ID NO: 737290 - RNA, 18 nt, Human
ugguccguguccuccagc

SEQ ID NO: 737291 - RNA, 24 nt, Human
uguccccgcucucucacggcgcca

SEQ ID NO: 737292 - RNA, 19 nt, Human
ugucuggacuuugaucagg

SEQ ID NO: 737293 - RNA, 21 nt, Human
uuccccagcucacucucucca

SEQ ID NO: 737294 - RNA, 21 nt, Human
uucugacggacagaaggacuc

SEQ ID NO: 737295 - RNA, 18 nt, Human
uugcagggcgaggcaagu

SEQ ID NO: 737296 - RNA, 20 nt, Human
accaagagacggagcaaacc

SEQ ID NO: 737297 - RNA, 21 nt, Human
accaagagacggagcaaaccc

SEQ ID NO: 737298 - RNA, 24 nt, Human
cagccucugcccaggcgucaagga

SEQ ID NO: 737299 - RNA, 19 nt, Human
cagggcuccuggcuggagc

SEQ ID NO: 737300 - RNA, 22 nt, Human
cagggcuccuggcuggagcccc

SEQ ID NO: 737301 - RNA, 19 nt, Human
cagggcucuaccgccccuc

SEQ ID NO: 737302 - RNA, 19 nt, Human
ccaagagacggagcaaacc

SEQ ID NO: 737303 - RNA, 18 nt, Human
cccugggcagcagggcuc

SEQ ID NO: 737304 - RNA, 20 nt, Human
ccuccggaggcgucauccuu

SEQ ID NO: 737305 - RNA, 18 nt, Human
ccuggcaccugccugugc

SEQ ID NO: 737306 - RNA, 22 nt, Human
ccuggcaccugccugugcucgc

SEQ ID NO: 737307 - RNA, 22 nt, Human
cgccuggggucacucacuguuc

SEQ ID NO: 737308 - RNA, 22 nt, Human
cugcagcugcagccucugccca

SEQ ID NO: 737309 - RNA, 24 nt, Human
gauggcuccuagcgcccagguggg

SEQ ID NO: 737310 - RNA, 18 nt, Human
gccacaggguccugcagc

SEQ ID NO: 737311 - RNA, 23 nt, Human
gccccugggcagcagggcuccug

SEQ ID NO: 737312 - RNA, 26 nt, Human
ggccacaggguccugcagcugcagcc

SEQ ID NO: 737313 - RNA, 21 nt, Human
ggcuggagccccgggauggcu

SEQ ID NO: 737314 - RNA, 20 nt, Human
uccggaggcgucauccuugc

SEQ ID NO: 737315 - RNA, 19 nt, Human
uccuggcuccuggcaccuu

SEQ ID NO: 737316 - RNA, 18 nt, Human
ucuccaguggccacaggg

SEQ ID NO: 737317 - RNA, 21 nt, Human
ucuccaguggccacagggucc

SEQ ID NO: 737318 - RNA, 22 nt, Human
ucuccaguggccacaggguccu

SEQ ID NO: 737319 - RNA, 18 nt, Human
ugccccguuuccaguagg

SEQ ID NO: 737320 - RNA, 23 nt, Human
ugccucugccucuguucaaguuc

SEQ ID NO: 737321 - RNA, 18 nt, Human
uggccacaggguccugca

SEQ ID NO: 737322 - RNA, 19 nt, Human
uggcuccuagcgcccaggu

SEQ ID NO: 737323 - RNA, 19 nt, Human
uggcuccuggcaccugccu

SEQ ID NO: 737324 - RNA, 18 nt, Human
aaaacauguugcgaaugu

SEQ ID NO: 737325 - RNA, 18 nt, Human
aaacagggcccaagcaca

SEQ ID NO: 737326 - RNA, 22 nt, Human
aaacauucaccauucucaaaac

SEQ ID NO: 737327 - RNA, 23 nt, Human
aaacauucaccauucucaaaaca

SEQ ID NO: 737328 - RNA, 18 nt, Human
aaaggaaacaacccauua

SEQ ID NO: 737329 - RNA, 24 nt, Human
aacagcaugagacucugucucaaa

SEQ ID NO: 737330 - RNA, 19 nt, Human
aacauggugaaacuccauc

SEQ ID NO: 737331 - RNA, 20 nt, Human
aacauggugaaacuccaucu

SEQ ID NO: 737332 - RNA, 21 nt, Human
aacauggugaaacuccaucuc

SEQ ID NO: 737333 - RNA, 24 nt, Human
aacauuucuuuuuuuuuucucccg

SEQ ID NO: 737334 - RNA, 22 nt, Human
aagcacaggucugggauuagug

SEQ ID NO: 737335 - RNA, 20 nt, Human
aaggagcccccgcccgucug

SEQ ID NO: 737336 - RNA, 24 nt, Human
aauugcuugaacuugggaggcaga

SEQ ID NO: 737337 - RNA, 21 nt, Human
acacaaaaacacuuagacugc

SEQ ID NO: 737338 - RNA, 21 nt, Human
acacugcacuccagccugggc

SEQ ID NO: 737339 - RNA, 23 nt, Human
acacugcacuccagccugggcaa

SEQ ID NO: 737340 - RNA, 24 nt, Human
acagcaugagacucugucucaaaa

SEQ ID NO: 737341 - RNA, 18 nt, Human
acagccaugccugacuuc

SEQ ID NO: 737342 - RNA, 22 nt, Human
acaggagacuauugcagguggc

SEQ ID NO: 737343 - RNA, 21 nt, Human
accaaagccucccugcccucc

SEQ ID NO: 737344 - RNA, 18 nt, Human
acccaacagacaggaugg

SEQ ID NO: 737345 - RNA, 24 nt, Human
acuccaucucuacuaaaaauauaa

SEQ ID NO: 737346 - RNA, 24 nt, Human
acugcacuccagccugggcaacag

SEQ ID NO: 737347 - RNA, 18 nt, Human
acugcuucugagaggaaa

SEQ ID NO: 737348 - RNA, 19 nt, Human
acuucgccuauuacuuuuc

SEQ ID NO: 737349 - RNA, 22 nt, Human
agaauugcuugaacuugggagg

SEQ ID NO: 737350 - RNA, 19 nt, Human
agagguugcagugagcuca

SEQ ID NO: 737351 - RNA, 20 nt, Human
agagguugcagugagcucag

SEQ ID NO: 737352 - RNA, 24 nt, Human
agagguugcagugagcucagaucg

SEQ ID NO: 737353 - RNA, 23 nt, Human
agaucacuugaggucaggaguuc

SEQ ID NO: 737354 - RNA, 25 nt, Human
agaucacuugaggucaggaguucuu

SEQ ID NO: 737355 - RNA, 19 nt, Human
agcacuuugggaggcuaag

SEQ ID NO: 737356 - RNA, 20 nt, Human
agcacuuugggaggcuaagg

SEQ ID NO: 737357 - RNA, 18 nt, Human
agccggagcgccugggcc

SEQ ID NO: 737358 - RNA, 22 nt, Human
agccuggccaacauggugaaac

SEQ ID NO: 737359 - RNA, 24 nt, Human
agccuggccaacauggugaaacuc

SEQ ID NO: 737360 - RNA, 24 nt, Human
agccugggcaacagcaugagacuc

SEQ ID NO: 737361 - RNA, 23 nt, Human
agcugggcaugguggugcaugcc

SEQ ID NO: 737362 - RNA, 26 nt, Human
aggagggcagaucacuugaggucagg

SEQ ID NO: 737363 - RNA, 23 nt, Human
aggcagagguugcagugagcuca

SEQ ID NO: 737364 - RNA, 21 nt, Human
aggcaggagaauugcuugaac

SEQ ID NO: 737365 - RNA, 24 nt, Human
aggcaggagaauugcuugaacuug

SEQ ID NO: 737366 - RNA, 21 nt, Human
aggcugaggcaggagaauugc

SEQ ID NO: 737367 - RNA, 24 nt, Human
aggcugaggcaggagaauugcuug

SEQ ID NO: 737368 - RNA, 22 nt, Human
agggcagaugguggaggagaca

SEQ ID NO: 737369 - RNA, 24 nt, Human
aucgggacacugcacuccagccug

SEQ ID NO: 737370 - RNA, 21 nt, Human
augcugccucucuuuacagcu

SEQ ID NO: 737371 - RNA, 18 nt, Human
auuguucuugacuucguc

SEQ ID NO: 737372 - RNA, 19 nt, Human
caaagccucccugcccucc

SEQ ID NO: 737373 - RNA, 23 nt, Human
caaagccucccugcccucccagg

SEQ ID NO: 737374 - RNA, 19 nt, Human
caacacacaccacauacuc

SEQ ID NO: 737375 - RNA, 20 nt, Human
caacagacaggauggauucu

SEQ ID NO: 737376 - RNA, 24 nt, Human
caacauggugaaacuccaucucua

SEQ ID NO: 737377 - RNA, 22 nt, Human
caaguggcuuugggagaaccca

SEQ ID NO: 737378 - RNA, 25 nt, Human
cacaauaauaguugcuaacacaguc

SEQ ID NO: 737379 - RNA, 23 nt, Human
cacacaccacauacucaucugug

SEQ ID NO: 737380 - RNA, 24 nt, Human
cacaccuggaauccuagcacuuug

SEQ ID NO: 737381 - RNA, 23 nt, Human
cacagucccaaugcugagacaga

SEQ ID NO: 737382 - RNA, 24 nt, Human
caccuacuugggaggcugaggcag

SEQ ID NO: 737383 - RNA, 23 nt, Human
caccuggaaaccucggugccaaa

SEQ ID NO: 737384 - RNA, 24 nt, Human
caccuggaauccuagcacuuuggg

SEQ ID NO: 737385 - RNA, 21 nt, Human
cacuccagccugggcaacagc

SEQ ID NO: 737386 - RNA, 18 nt, Human
cacugcacuccagccugg

SEQ ID NO: 737387 - RNA, 19 nt, Human
cacugcacuccagccuggg

SEQ ID NO: 737388 - RNA, 19 nt, Human
cacugcacuccagccuggg

SEQ ID NO: 737389 - RNA, 20 nt, Human
cacugcacuccagccugggc

SEQ ID NO: 737390 - RNA, 21 nt, Human
cacugcacuccagccugggca

SEQ ID NO: 737391 - RNA, 23 nt, Human
cacugcacuccagccugggcaac

SEQ ID NO: 737392 - RNA, 24 nt, Human
cacugcacuccagccugggcaaca

SEQ ID NO: 737393 - RNA, 26 nt, Human
cacugcacuccagccugggcaacagc

SEQ ID NO: 737394 - RNA, 24 nt, Human
cagaucacuugaggucaggaguuc

SEQ ID NO: 737395 - RNA, 18 nt, Human
cagcaacaucacaacauu

SEQ ID NO: 737396 - RNA, 21 nt, Human
caggagacuauugcagguggc

SEQ ID NO: 737397 - RNA, 19 nt, Human
cagggcccaagcacagguc

SEQ ID NO: 737398 - RNA, 25 nt, Human
caguuauuuuccucccaaguggcuu

SEQ ID NO: 737399 - RNA, 24 nt, Human
cauuaaacauucaccauucucaaa

SEQ ID NO: 737400 - RNA, 23 nt, Human
ccaaagcuugcugaaaagaggug

SEQ ID NO: 737401 - RNA, 23 nt, Human
ccacaauaauaguugcuaacaca

SEQ ID NO: 737402 - RNA, 19 nt, Human
ccacauacucaucugugcc

SEQ ID NO: 737403 - RNA, 21 nt, Human
ccacucggcucugcgcucugc

SEQ ID NO: 737404 - RNA, 25 nt, Human
ccacugccauaaaccauccucgccg

SEQ ID NO: 737405 - RNA, 18 nt, Human
ccacugcccagcgugcgc

SEQ ID NO: 737406 - RNA, 22 nt, Human
ccacugcccagcgugcgccacu

SEQ ID NO: 737407 - RNA, 24 nt, Human
ccacugcccagcgugcgccacucg

SEQ ID NO: 737408 - RNA, 24 nt, Human
ccaggccacugcccagcgugcgcc

SEQ ID NO: 737409 - RNA, 19 nt, Human
cccaggugcuccagagaca

SEQ ID NO: 737410 - RNA, 21 nt, Human
ccgcaaggagcccccgcccgu

SEQ ID NO: 737411 - RNA, 20 nt, Human
ccucacacuggaaacagggc

SEQ ID NO: 737412 - RNA, 19 nt, Human
ccugagagaggaaaccaag

SEQ ID NO: 737413 - RNA, 23 nt, Human
ccuggccaacauggugaaacucc

SEQ ID NO: 737414 - RNA, 24 nt, Human
ccuggccaacauggugaaacucca

SEQ ID NO: 737415 - RNA, 20 nt, Human
ccugggccgccgaacucccg

SEQ ID NO: 737416 - RNA, 19 nt, Human
ccuguaaucccaccuacuu

SEQ ID NO: 737417 - RNA, 23 nt, Human
ccuuuagggcuucagcuggccuc

SEQ ID NO: 737418 - RNA, 23 nt, Human
cgaggaggcggcuguaacccggc

SEQ ID NO: 737419 - RNA, 18 nt, Human
cgcagggaggcggggaga

SEQ ID NO: 737420 - RNA, 27 nt, Human
cucaaaaaaaaaaagauaauacugugg

SEQ ID NO: 737421 - RNA, 18 nt, Human
cucaacucccccaacaaa

SEQ ID NO: 737422 - RNA, 24 nt, Human
cucaacucccccaacaaaauguca

SEQ ID NO: 737423 - RNA, 24 nt, Human
cucacaccuggaauccuagcacuu

SEQ ID NO: 737424 - RNA, 19 nt, Human
cucugucucaaaaaaaaaa

SEQ ID NO: 737425 - RNA, 19 nt, Human
cucuugguucaucugcccu

SEQ ID NO: 737426 - RNA, 22 nt, Human
cugacuuccacacaacacacac

SEQ ID NO: 737427 - RNA, 23 nt, Human
cugcacacagccaugccugacuu

SEQ ID NO: 737428 - RNA, 22 nt, Human
cuggaaacagggcccaagcaca

SEQ ID NO: 737429 - RNA, 23 nt, Human
cuggccaacauggugaaacucca

SEQ ID NO: 737430 - RNA, 20 nt, Human
cuuccacacaacacacacca

SEQ ID NO: 737431 - RNA, 18 nt, Human
cuucgcgccgggcgcgcc

SEQ ID NO: 737432 - RNA, 26 nt, Human
cuucgcgcugggcaccuggaaaccuc

SEQ ID NO: 737433 - RNA, 24 nt, Human
cuuucacagauucuucugcuucuc

SEQ ID NO: 737434 - RNA, 21 nt, Human
gaaaccucaaagcuucuagac

SEQ ID NO: 737435 - RNA, 21 nt, Human
gaccagccuggccaacauggu

SEQ ID NO: 737436 - RNA, 18 nt, Human
gaggagacauugacauga

SEQ ID NO: 737437 - RNA, 20 nt, Human
gagggcucuggcugcguuug

SEQ ID NO: 737438 - RNA, 18 nt, Human
gaucacuugaggucagga

SEQ ID NO: 737439 - RNA, 22 nt, Human
gaucacuugaggucaggaguuc

SEQ ID NO: 737440 - RNA, 24 nt, Human
gaucacuugaggucaggaguucuu

SEQ ID NO: 737441 - RNA, 25 nt, Human
gaucacuugaggucaggaguucuug

SEQ ID NO: 737442 - RNA, 19 nt, Human
gauucuguuuccacagagc

SEQ ID NO: 737443 - RNA, 18 nt, Human
gcaaauccuuaaccauga

SEQ ID NO: 737444 - RNA, 18 nt, Human
gcaaggagcccccgcccg

SEQ ID NO: 737445 - RNA, 19 nt, Human
gcaccuggaaaccucggug

SEQ ID NO: 737446 - RNA, 24 nt, Human
gccaacauggugaaacuccaucuc

SEQ ID NO: 737447 - RNA, 20 nt, Human
gccuguaaucccaccuacuu

SEQ ID NO: 737448 - RNA, 19 nt, Human
gcgagggcgcagggaggcg

SEQ ID NO: 737449 - RNA, 19 nt, Human
gcgccgaggaggcggcugu

SEQ ID NO: 737450 - RNA, 19 nt, Human
gcgccugggccgccgaacu

SEQ ID NO: 737451 - RNA, 20 nt, Human
gcgcucugcgcucggcucac

SEQ ID NO: 737452 - RNA, 22 nt, Human
ggagagccgggggaggcucggg

SEQ ID NO: 737453 - RNA, 21 nt, Human
ggagggcagaucacuugaggu

SEQ ID NO: 737454 - RNA, 21 nt, Human
ggcacagacuggucaaggaca

SEQ ID NO: 737455 - RNA, 25 nt, Human
ggcagaucacuugaggucaggaguu

SEQ ID NO: 737456 - RNA, 23 nt, Human
ggcaugguggugcaugccuguaa

SEQ ID NO: 737457 - RNA, 18 nt, Human
gggcccaagcacaggucu

SEQ ID NO: 737458 - RNA, 20 nt, Human
ggggucuucucuguggcgcc

SEQ ID NO: 737459 - RNA, 20 nt, Human
gguagaaaacauguugcgaa

SEQ ID NO: 737460 - RNA, 18 nt, Human
guaaaacaccaccaacaa

SEQ ID NO: 737461 - RNA, 19 nt, Human
gucucaaaauaaauguguu

SEQ ID NO: 737462 - RNA, 18 nt, Human
guggugcaugccuguaau

SEQ ID NO: 737463 - RNA, 24 nt, Human
guuucauuucugugccaacauaca

SEQ ID NO: 737464 - RNA, 20 nt, Human
uaaaauaaaugacagacugu

SEQ ID NO: 737465 - RNA, 21 nt, Human
uaaaauuucagggcaugaagc

SEQ ID NO: 737466 - RNA, 21 nt, Human
uaacauuaauuuagaggauac

SEQ ID NO: 737467 - RNA, 18 nt, Human
uaagaacuuaaaaacuga

SEQ ID NO: 737468 - RNA, 24 nt, Human
uaaggagggcagaucacuugaggu

SEQ ID NO: 737469 - RNA, 26 nt, Human
uaaggagggcagaucacuugagguca

SEQ ID NO: 737470 - RNA, 19 nt, Human
uaccuguauuaauaauuug

SEQ ID NO: 737471 - RNA, 20 nt, Human
uacuggucugaggaccacac

SEQ ID NO: 737472 - RNA, 19 nt, Human
uacugugaugaaggaagag

SEQ ID NO: 737473 - RNA, 23 nt, Human
uagauaauacugcucucauacac

SEQ ID NO: 737474 - RNA, 24 nt, Human
uagcacuuugggaggcuaaggagg

SEQ ID NO: 737475 - RNA, 18 nt, Human
uauaaaauuucagggcau

SEQ ID NO: 737476 - RNA, 23 nt, Human
uauucuuccauauuccucuccca

SEQ ID NO: 737477 - RNA, 18 nt, Human
ucaaguaugugcccauac

SEQ ID NO: 737478 - RNA, 19 nt, Human
ucaccaaagccucccugcc

SEQ ID NO: 737479 - RNA, 21 nt, Human
ucacuccucaacucccccaac

SEQ ID NO: 737480 - RNA, 25 nt, Human
ucaggauuucccucuaccacacaaa

SEQ ID NO: 737481 - RNA, 22 nt, Human
uccacacaacacacaccacaua

SEQ ID NO: 737482 - RNA, 23 nt, Human
uccacacaacacacaccacauac

SEQ ID NO: 737483 - RNA, 24 nt, Human
ucccaaguggcuuugggagaaccc

SEQ ID NO: 737484 - RNA, 19 nt, Human
ucccaaugcugagacaggg

SEQ ID NO: 737485 - RNA, 21 nt, Human
ucccgggggucuucucugugg

SEQ ID NO: 737486 - RNA, 25 nt, Human
uccuguuuccugaguccaggguggg

SEQ ID NO: 737487 - RNA, 20 nt, Human
ucgcugagccacccuaagau

SEQ ID NO: 737488 - RNA, 19 nt, Human
ucucaaacuugagugcaua

SEQ ID NO: 737489 - RNA, 25 nt, Human
ucucuacuaaaaauauaaaaaaauu

SEQ ID NO: 737490 - RNA, 21 nt, Human
ucugucucaaaaaaaaaaaga

SEQ ID NO: 737491 - RNA, 24 nt, Human
ugaaaaaagaaaccucaaagcuuc

SEQ ID NO: 737492 - RNA, 21 nt, Human
ugaauuaucgugugauguguc

SEQ ID NO: 737493 - RNA, 18 nt, Human
ugacuuccacacaacaca

SEQ ID NO: 737494 - RNA, 19 nt, Human
ugagagaggaaaccaagga

SEQ ID NO: 737495 - RNA, 21 nt, Human
ugagagaggaaaccaaggacu

SEQ ID NO: 737496 - RNA, 23 nt, Human
ugaggaaaaaaugaugagccuca

SEQ ID NO: 737497 - RNA, 23 nt, Human
ugaggcaggagaauugcuugaac

SEQ ID NO: 737498 - RNA, 25 nt, Human
ugaggcaggagaauugcuugaacuu

SEQ ID NO: 737499 - RNA, 25 nt, Human
ugccauaaaccauccucgcugagcc

SEQ ID NO: 737500 - RNA, 19 nt, Human
ugcccaggccacugcccag

SEQ ID NO: 737501 - RNA, 20 nt, Human
ugcccaggccacugcccagc

SEQ ID NO: 737502 - RNA, 18 nt, Human
ugcccauacuugauaacc

SEQ ID NO: 737503 - RNA, 23 nt, Human
ugccuguaaucccaccuacuugg

SEQ ID NO: 737504 - RNA, 24 nt, Human
ugccuguaaucccaccuacuuggg

SEQ ID NO: 737505 - RNA, 18 nt, Human
ugcuauggugucucaaaa

SEQ ID NO: 737506 - RNA, 21 nt, Human
uggagggaacagagggggaug

SEQ ID NO: 737507 - RNA, 18 nt, Human
uggaguucagagaaaugg

SEQ ID NO: 737508 - RNA, 24 nt, Human
uggccaacauggugaaacuccauc

SEQ ID NO: 737509 - RNA, 19 nt, Human
uggcucacaccuggaaucc

SEQ ID NO: 737510 - RNA, 24 nt, Human
uggcucacaccuggaauccuagca

SEQ ID NO: 737511 - RNA, 22 nt, Human
ugggaggcagagguugcaguga

SEQ ID NO: 737512 - RNA, 24 nt, Human
ugggaggcagagguugcagugagc

SEQ ID NO: 737513 - RNA, 24 nt, Human
ugggaggcuaaggagggcagauca

SEQ ID NO: 737514 - RNA, 19 nt, Human
ugggaggcugaggcaggag

SEQ ID NO: 737515 - RNA, 22 nt, Human
ugggaggcugaggcaggagaau

SEQ ID NO: 737516 - RNA, 21 nt, Human
uggugcaugccuguaauccca

SEQ ID NO: 737517 - RNA, 24 nt, Human
ugguggugcaugccuguaauccca

SEQ ID NO: 737518 - RNA, 18 nt, Human
uguaaucccaccuacuug

SEQ ID NO: 737519 - RNA, 19 nt, Human
uguggcgccgaggaggcgg

SEQ ID NO: 737520 - RNA, 21 nt, Human
uguuggguuuauuucacaguc

SEQ ID NO: 737521 - RNA, 21 nt, Human
uguuuuaaucauucccuuuca

SEQ ID NO: 737522 - RNA, 21 nt, Human
uguuuuuaaaaaauaauggca

SEQ ID NO: 737523 - RNA, 24 nt, Human
uuagcugggcaugguggugcaugc

SEQ ID NO: 737524 - RNA, 23 nt, Human
uuauaaaauuucagggcaugaag

SEQ ID NO: 737525 - RNA, 18 nt, Human
uuccacacaacacacacc

SEQ ID NO: 737526 - RNA, 19 nt, Human
uucuuccauauuccucucc

SEQ ID NO: 737527 - RNA, 24 nt, Human
uugaacuugggaggcagagguugc

SEQ ID NO: 737528 - RNA, 25 nt, Human
uugcagugagcucagaucgggacac

SEQ ID NO: 737529 - RNA, 24 nt, Human
uugcuugaacuugggaggcagagg

SEQ ID NO: 737530 - RNA, 21 nt, Human
uugggaggcagagguugcagu

SEQ ID NO: 737531 - RNA, 23 nt, Human
uugggaggcugaggcaggagaau

SEQ ID NO: 737532 - RNA, 18 nt, Human
uuuaaauaucucagaagc

SEQ ID NO: 737533 - RNA, 23 nt, Human
uuucuaagaaggugauucauauu

SEQ ID NO: 737534 - RNA, 21 nt, Human
aaaauaacagagauugaugaa

SEQ ID NO: 737535 - RNA, 24 nt, Human
aagggcaguuuguuguccuggggg

SEQ ID NO: 737536 - RNA, 22 nt, Human
aauacagucuaacucaccauca

SEQ ID NO: 737537 - RNA, 21 nt, Human
aaucuacucaauucuuccuua

SEQ ID NO: 737538 - RNA, 21 nt, Human
aaugacaaaauaacagagauu

SEQ ID NO: 737539 - RNA, 18 nt, Human
aaugacucuuaagggcag

SEQ ID NO: 737540 - RNA, 24 nt, Human
acucaccaucaacaaucccucaga

SEQ ID NO: 737541 - RNA, 22 nt, Human
agccucugccgccccugcuugu

SEQ ID NO: 737542 - RNA, 19 nt, Human
aggaagggugcugucccgc

SEQ ID NO: 737543 - RNA, 19 nt, Human
agugcuuacucacuagcaa

SEQ ID NO: 737544 - RNA, 23 nt, Human
aucuucccauuucauuuuuuaaa

SEQ ID NO: 737545 - RNA, 22 nt, Human
auggguucuuccgucccggccc

SEQ ID NO: 737546 - RNA, 22 nt, Human
caaacaaaaugucaagauuaga

SEQ ID NO: 737547 - RNA, 22 nt, Human
caacuuucaaugaaaggacacc

SEQ ID NO: 737548 - RNA, 22 nt, Human
caaggcugggacgaaaagcaaa

SEQ ID NO: 737549 - RNA, 24 nt, Human
cacagggccugucuagaacaggca

SEQ ID NO: 737550 - RNA, 23 nt, Human
cauuuccaaauucuaugccaaau

SEQ ID NO: 737551 - RNA, 20 nt, Human
cauuuugcagcauauuuaca

SEQ ID NO: 737552 - RNA, 24 nt, Human
ccaaaagacuccaggcaaaucaaa

SEQ ID NO: 737553 - RNA, 22 nt, Human
ccauuguccccacacauuucuc

SEQ ID NO: 737554 - RNA, 20 nt, Human
cccacacauuucucaaauca

SEQ ID NO: 737555 - RNA, 28 nt, Human
ccgaauuccucagcaaaauacaacacau

SEQ ID NO: 737556 - RNA, 21 nt, Human
ccucuuuuagacaaagucaau

SEQ ID NO: 737557 - RNA, 23 nt, Human
cuacuaagucaacugcauuuuua

SEQ ID NO: 737558 - RNA, 21 nt, Human
cuccaggcaaaucaaaucuac

SEQ ID NO: 737559 - RNA, 19 nt, Human
cugaaaacuuuucuccauu

SEQ ID NO: 737560 - RNA, 24 nt, Human
ggccucuucuugggcucugucgca

SEQ ID NO: 737561 - RNA, 20 nt, Human
ggcgggaggaagggcuuuga

SEQ ID NO: 737562 - RNA, 22 nt, Human
gggcauuuggcgucgacagaaa

SEQ ID NO: 737563 - RNA, 18 nt, Human
gggugcugucccgcgcgg

SEQ ID NO: 737564 - RNA, 19 nt, Human
uaacaaaauucacugacau

SEQ ID NO: 737565 - RNA, 22 nt, Human
uaacucaccaucaacaaucccu

SEQ ID NO: 737566 - RNA, 25 nt, Human
uaagggcaguuuguuguccuggggg

SEQ ID NO: 737567 - RNA, 20 nt, Human
uacaacacauucagaaaucu

SEQ ID NO: 737568 - RNA, 20 nt, Human
uagaaaauucucaugccucc

SEQ ID NO: 737569 - RNA, 22 nt, Human
uagaaaauucucaugccuccaa

SEQ ID NO: 737570 - RNA, 25 nt, Human
uaguugagcucuuuuuuccuaauuu

SEQ ID NO: 737571 - RNA, 20 nt, Human
uaucuuauuaggaaauaauu

SEQ ID NO: 737572 - RNA, 21 nt, Human
uccaaaagacuccaggcaaau

SEQ ID NO: 737573 - RNA, 20 nt, Human
uccaaaagacuccaggcaag

SEQ ID NO: 737574 - RNA, 19 nt, Human
uccaucuuugcuacgguuc

SEQ ID NO: 737575 - RNA, 18 nt, Human
ucccuuucaguuguuacc

SEQ ID NO: 737576 - RNA, 24 nt, Human
ucuaugccaaauacagucuaaggg

SEQ ID NO: 737577 - RNA, 23 nt, Human
ucuccauuguccccacacauuuc

SEQ ID NO: 737578 - RNA, 21 nt, Human
ucugaaaacuuuucuccauug

SEQ ID NO: 737579 - RNA, 22 nt, Human
ugaaaggacaccagcuaugaua

SEQ ID NO: 737580 - RNA, 23 nt, Human
ugaagggucaagaccccacaggg

SEQ ID NO: 737581 - RNA, 21 nt, Human
ugacaaaauaacagagauuga

SEQ ID NO: 737582 - RNA, 20 nt, Human
ugagaccucauuccggagag

SEQ ID NO: 737583 - RNA, 20 nt, Human
ugcaaaggaggaauguaaua

SEQ ID NO: 737584 - RNA, 18 nt, Human
ugggacgaaaagcaaaac

SEQ ID NO: 737585 - RNA, 19 nt, Human
uguaauauuuaagguucau

SEQ ID NO: 737586 - RNA, 22 nt, Human
uuacauuuccaaauucuaugcc

SEQ ID NO: 737587 - RNA, 19 nt, Human
uuaguugagcucuuuuuuc

SEQ ID NO: 737588 - RNA, 18 nt, Human
uucuuccgucccggcccc

SEQ ID NO: 737589 - RNA, 22 nt, Human
uuuucuaaauuauacuagagua

SEQ ID NO: 737590 - RNA, 24 nt, Human
aaaaaaaaaacuguagcuauagga

SEQ ID NO: 737591 - RNA, 23 nt, Human
aaaaagaaauuuccaaaagaaaa

SEQ ID NO: 737592 - RNA, 23 nt, Human
aaaacaaaacaaaacaaaaaauc

SEQ ID NO: 737593 - RNA, 19 nt, Human
aaacaaaacaaaacaaaaa

SEQ ID NO: 737594 - RNA, 18 nt, Human
aaacaaaaguaaauauug

SEQ ID NO: 737595 - RNA, 20 nt, Human
aaacaagaaaugaaauguga

SEQ ID NO: 737596 - RNA, 27 nt, Human
aaacaagaaaugaaaugugagggaccc

SEQ ID NO: 737597 - RNA, 23 nt, Human
aaacacaaaauaaaaaaaaacaa

SEQ ID NO: 737598 - RNA, 24 nt, Human
aaacaguaaaaucaaaacauccaa

SEQ ID NO: 737599 - RNA, 25 nt, Human
aacaaaaaaauauaaugaaaguuuc

SEQ ID NO: 737600 - RNA, 21 nt, Human
aacuauauccaauuagaagca

SEQ ID NO: 737601 - RNA, 22 nt, Human
aacuauggcagaguuucugguu

SEQ ID NO: 737602 - RNA, 23 nt, Human
aauggaaaacaaaacaaaacaaa

SEQ ID NO: 737603 - RNA, 23 nt, Human
acaaaacaaaacaaaaaaucuuu

SEQ ID NO: 737604 - RNA, 24 nt, Human
acaaaacaaaacaaaaaaucuuua

SEQ ID NO: 737605 - RNA, 23 nt, Human
acagaaacaaaaguaaauauugc

SEQ ID NO: 737606 - RNA, 21 nt, Human
agacaaaucuguacaaucuaa

SEQ ID NO: 737607 - RNA, 19 nt, Human
aguucaugaaaagggcaac

SEQ ID NO: 737608 - RNA, 27 nt, Human
auaaaucucagaaaauggaaaacaaaa

SEQ ID NO: 737609 - RNA, 19 nt, Human
augaauaccaccccaaaau

SEQ ID NO: 737610 - RNA, 30 nt, Human
auguuuuuuuuuucuuuuuuguuuuuggcc

SEQ ID NO: 737611 - RNA, 19 nt, Human
caaaacaaaacaaaaaauc

SEQ ID NO: 737612 - RNA, 21 nt, Human
caacugggccgaacaagcagg

SEQ ID NO: 737613 - RNA, 20 nt, Human
caauuuaaaaaacuugaucg

SEQ ID NO: 737614 - RNA, 24 nt, Human
cacaauaucaucaauaucucaggg

SEQ ID NO: 737615 - RNA, 24 nt, Human
cacacuugcuaaaugagcuggaaa

SEQ ID NO: 737616 - RNA, 18 nt, Human
caccucaaauauuuacac

SEQ ID NO: 737617 - RNA, 23 nt, Human
cagaaaauggaaaacaaaacaaa

SEQ ID NO: 737618 - RNA, 27 nt, Human
cauaguaacuauauccaauuagaagcc

SEQ ID NO: 737619 - RNA, 20 nt, Human
cauccaacuuccuuauagaa

SEQ ID NO: 737620 - RNA, 21 nt, Human
caucuauaaacaguaaaauca

SEQ ID NO: 737621 - RNA, 27 nt, Human
cauguaaaaaucaaugaacuauggcag

SEQ ID NO: 737622 - RNA, 27 nt, Human
caugucaacaacaaaaaaauauaauga

SEQ ID NO: 737623 - RNA, 22 nt, Human
ccaccccaaaauccuggauggc

SEQ ID NO: 737624 - RNA, 19 nt, Human
ccugcaaaucugauguugc

SEQ ID NO: 737625 - RNA, 21 nt, Human
cucagaaaauggaaaacaaaa

SEQ ID NO: 737626 - RNA, 19 nt, Human
cuccacacuacuaguuuuc

SEQ ID NO: 737627 - RNA, 18 nt, Human
cuggaaaaauggguggcg

SEQ ID NO: 737628 - RNA, 18 nt, Human
cugguggcagcacaugau

SEQ ID NO: 737629 - RNA, 23 nt, Human
gaaacaaaaguaaauauugcaaa

SEQ ID NO: 737630 - RNA, 21 nt, Human
gaagcaaugaaaaaaaaaaac

SEQ ID NO: 737631 - RNA, 20 nt, Human
ggaaaacaaaacaaaacaaa

SEQ ID NO: 737632 - RNA, 24 nt, Human
uaaaaagaaauuuccaaaagaaaa

SEQ ID NO: 737633 - RNA, 21 nt, Human
uaaaagaacaauuuaaaaaac

SEQ ID NO: 737634 - RNA, 24 nt, Human
uaaaauuccaaauauaaauguguc

SEQ ID NO: 737635 - RNA, 23 nt, Human
uaaagcuaaacuguaagagcuaa

SEQ ID NO: 737636 - RNA, 21 nt, Human
uaagaucacauguauaaaaca

SEQ ID NO: 737637 - RNA, 23 nt, Human
uaagaucacauguauaaaacaag

SEQ ID NO: 737638 - RNA, 23 nt, Human
uacaccaaucuauaaaucucaga

SEQ ID NO: 737639 - RNA, 24 nt, Human
uauaacaaacacaaaauaaaaaaa

SEQ ID NO: 737640 - RNA, 21 nt, Human
ucacaugaauaccaccccaaa

SEQ ID NO: 737641 - RNA, 20 nt, Human
ucagguuuuaugcuuauugg

SEQ ID NO: 737642 - RNA, 19 nt, Human
uccacaaaacuuuauacag

SEQ ID NO: 737643 - RNA, 25 nt, Human
ucuauaaacaguaaaaucaaaacau

SEQ ID NO: 737644 - RNA, 20 nt, Human
ugaaaaaaaaaaacuguagc

SEQ ID NO: 737645 - RNA, 19 nt, Human
ugaauaaagcuaaacugua

SEQ ID NO: 737646 - RNA, 23 nt, Human
ugaauaaccaaaauaauuauaac

SEQ ID NO: 737647 - RNA, 24 nt, Human
ugaauaccaccccaaaauccugga

SEQ ID NO: 737648 - RNA, 19 nt, Human
ugacacacuugcuaaauga

SEQ ID NO: 737649 - RNA, 18 nt, Human
ugaccaugcuuauuuauu

SEQ ID NO: 737650 - RNA, 22 nt, Human
ugagaaauacagacaaaucugu

SEQ ID NO: 737651 - RNA, 23 nt, Human
ugagcagugaccuggugaaacau

SEQ ID NO: 737652 - RNA, 18 nt, Human
ugcuagagaaucugcuuu

SEQ ID NO: 737653 - RNA, 20 nt, Human
ugcuagagaaucugcuuuaa

SEQ ID NO: 737654 - RNA, 19 nt, Human
uggcaaauuuacaaagcag

SEQ ID NO: 737655 - RNA, 18 nt, Human
uguaaauaaauguuucau

SEQ ID NO: 737656 - RNA, 23 nt, Human
uguuuaaaaucuucaauguagua

SEQ ID NO: 737657 - RNA, 21 nt, Human
uuaaaaaacuugaucgcuuag

SEQ ID NO: 737658 - RNA, 19 nt, Human
uuaaagcuauacaccaauc

SEQ ID NO: 737659 - RNA, 22 nt, Human
uuaguuaaaaauuaaaauucca

SEQ ID NO: 737660 - RNA, 21 nt, Human
uuggccagguuaauucauguc

SEQ ID NO: 737661 - RNA, 20 nt, Human
uuguuuaguucaugaaaagg

SEQ ID NO: 737662 - RNA, 24 nt, Human
uuuacaauaauaaauauauacaaa

SEQ ID NO: 737663 - RNA, 19 nt, Human
uuuaguucaugaaaagggc

SEQ ID NO: 737664 - RNA, 24 nt, Human
uuuuauuuuaauaaauaacagugg

SEQ ID NO: 737665 - RNA, 20 nt, Human
uuuuuuguuuuuggccaggu

SEQ ID NO: 737666 - RNA, 18 nt, Human
uuuuuuuuuucuuuuuug

SEQ ID NO: 737667 - RNA, 18 nt, Human
aaaaacagaugcaacuug

SEQ ID NO: 737668 - RNA, 21 nt, Human
aaacccauucuuagaugcaaa

SEQ ID NO: 737669 - RNA, 24 nt, Human
aaaggagcaugaggcaaagguggu

SEQ ID NO: 737670 - RNA, 18 nt, Human
aacaguagacaucuaugg

SEQ ID NO: 737671 - RNA, 20 nt, Human
aacauagugagaccucaucu

SEQ ID NO: 737672 - RNA, 20 nt, Human
aagaaacccaaaaacuaaau

SEQ ID NO: 737673 - RNA, 23 nt, Human
aagaaacccaaaaacuaaaucac

SEQ ID NO: 737674 - RNA, 26 nt, Human
aagcauuucauuuaaagaaagaaucc

SEQ ID NO: 737675 - RNA, 19 nt, Human
aagccacaaaguccuaagc

SEQ ID NO: 737676 - RNA, 23 nt, Human
aagcugcagugagccaugacugu

SEQ ID NO: 737677 - RNA, 29 nt, Human
aauauaggacaaaggauuuacucaaaguu

SEQ ID NO: 737678 - RNA, 19 nt, Human
aauaugcaaaauuaccaua

SEQ ID NO: 737679 - RNA, 23 nt, Human
acaaacuggaagaagaacacuuu

SEQ ID NO: 737680 - RNA, 19 nt, Human
acucuagccugggugacag

SEQ ID NO: 737681 - RNA, 24 nt, Human
acuguacucuagccugggugacag

SEQ ID NO: 737682 - RNA, 25 nt, Human
agaaagaauccuaggccuuugcaga

SEQ ID NO: 737683 - RNA, 24 nt, Human
agacccucucuccaaaacaaauaa

SEQ ID NO: 737684 - RNA, 24 nt, Human
agcaguuugggagguggagguggg

SEQ ID NO: 737685 - RNA, 18 nt, Human
agccagguaugguggugc

SEQ ID NO: 737686 - RNA, 23 nt, Human
agcuacuuguggguugagguggg

SEQ ID NO: 737687 - RNA, 23 nt, Human
agcugggcaacauagugagaccu

SEQ ID NO: 737688 - RNA, 23 nt, Human
agcugggcaacauagugagaccu

SEQ ID NO: 737689 - RNA, 23 nt, Human
aggugggaggauugcuugaaccc

SEQ ID NO: 737690 - RNA, 23 nt, Human
agguggugacucagcccaaaaac

SEQ ID NO: 737691 - RNA, 19 nt, Human
agugggcauuuaaaauugc

SEQ ID NO: 737692 - RNA, 21 nt, Human
aguuugggagguggagguggg

SEQ ID NO: 737693 - RNA, 24 nt, Human
auaggacaaaggauuuacucaaag

SEQ ID NO: 737694 - RNA, 24 nt, Human
augcagugagacccugucucaaag

SEQ ID NO: 737695 - RNA, 22 nt, Human
augcuuugucaagucaauucca

SEQ ID NO: 737696 - RNA, 22 nt, Human
auuuaagacaucuugguaaccc

SEQ ID NO: 737697 - RNA, 26 nt, Human
caaaaacuaaaucacacaaccuucag

SEQ ID NO: 737698 - RNA, 22 nt, Human
caaaacaaauaaaaccaguggg

SEQ ID NO: 737699 - RNA, 19 nt, Human
caaacuggaagaagaacaa

SEQ ID NO: 737700 - RNA, 22 nt, Human
caaagaaacccaaaaacuaaau

SEQ ID NO: 737701 - RNA, 22 nt, Human
caaugcagugagacccugucuc

SEQ ID NO: 737702 - RNA, 18 nt, Human
cacacaagcaggaauaaa

SEQ ID NO: 737703 - RNA, 24 nt, Human
cacaccuguaaucccagcaguuug

SEQ ID NO: 737704 - RNA, 23 nt, Human
caccuguaaucccagcaguuugg

SEQ ID NO: 737705 - RNA, 24 nt, Human
caccuguaaucccagcaguuuggg

SEQ ID NO: 737706 - RNA, 19 nt, Human
cacuguacucuagccuggg

SEQ ID NO: 737707 - RNA, 19 nt, Human
cacuguacucuagccuggg

SEQ ID NO: 737708 - RNA, 19 nt, Human
cacuguacucuagccuggg

SEQ ID NO: 737709 - RNA, 22 nt, Human
cacuguacucuagccuggguga

SEQ ID NO: 737710 - RNA, 23 nt, Human
cacuguacucuagccugggugac

SEQ ID NO: 737711 - RNA, 21 nt, Human
cagaaugagacccucucucca

SEQ ID NO: 737712 - RNA, 19 nt, Human
cagcaagggcaaugcagug

SEQ ID NO: 737713 - RNA, 19 nt, Human
cauagagcaaaaauaaaug

SEQ ID NO: 737714 - RNA, 24 nt, Human
cauagugagaccucaucucuagaa

SEQ ID NO: 737715 - RNA, 25 nt, Human
ccaaaacaaauaaaaccagugggca

SEQ ID NO: 737716 - RNA, 22 nt, Human
ccaacaugugagaguuaaagau

SEQ ID NO: 737717 - RNA, 20 nt, Human
ccacuguacucuagccuggg

SEQ ID NO: 737718 - RNA, 20 nt, Human
ccacuguacucuagccuggg

SEQ ID NO: 737719 - RNA, 21 nt, Human
ccacuguacucuagccugggu

SEQ ID NO: 737720 - RNA, 24 nt, Human
ccacuguacucuagccugggugac

SEQ ID NO: 737721 - RNA, 19 nt, Human
ccaggcagugagcuuaagc

SEQ ID NO: 737722 - RNA, 25 nt, Human
cccaaaaacuaaaucacacaagcag

SEQ ID NO: 737723 - RNA, 18 nt, Human
cccaagaucuugagucaa

SEQ ID NO: 737724 - RNA, 24 nt, Human
cccacuguacucuagccuggguga

SEQ ID NO: 737725 - RNA, 21 nt, Human
ccccagaauuugaggucagca

SEQ ID NO: 737726 - RNA, 20 nt, Human
ccugaacacuuugggacugg

SEQ ID NO: 737727 - RNA, 21 nt, Human
cucacaccuguaaucccagca

SEQ ID NO: 737728 - RNA, 21 nt, Human
cucacaccuguaaucccagca

SEQ ID NO: 737729 - RNA, 20 nt, Human
cugcagugagccaugacugu

SEQ ID NO: 737730 - RNA, 24 nt, Human
cuuuauuauaacaaaaccuguaua

SEQ ID NO: 737731 - RNA, 23 nt, Human
gacagaaugagacccucucucca

SEQ ID NO: 737732 - RNA, 22 nt, Human
gagaccagcugggcaacauagu

SEQ ID NO: 737733 - RNA, 24 nt, Human
gaggugggaggauugcuugaaccc

SEQ ID NO: 737734 - RNA, 30 nt, Human
gaucacuugagcccaggcagugagcuuaaa

SEQ ID NO: 737735 - RNA, 20 nt, Human
ggacaccuuuuauuuuaaac

SEQ ID NO: 737736 - RNA, 21 nt, Human
ggcucacaccuguaaucccag

SEQ ID NO: 737737 - RNA, 24 nt, Human
gggcaugguggcucacaccuguaa

SEQ ID NO: 737738 - RNA, 19 nt, Human
guacucuagccugggugac

SEQ ID NO: 737739 - RNA, 23 nt, Human
guggcucacaccuguaaucccag

SEQ ID NO: 737740 - RNA, 24 nt, Human
guggguguugggcaugguggcuca

SEQ ID NO: 737741 - RNA, 21 nt, Human
guggugcauaccugugguggu

SEQ ID NO: 737742 - RNA, 19 nt, Human
gugguguagucccagcugc

SEQ ID NO: 737743 - RNA, 24 nt, Human
gugguguagucccagcugcuuggg

SEQ ID NO: 737744 - RNA, 22 nt, Human
guguugggcaugguggcucaca

SEQ ID NO: 737745 - RNA, 24 nt, Human
uaaaacaaacuggaagaagaacac

SEQ ID NO: 737746 - RNA, 20 nt, Human
uaaaaccugguaacaguaga

SEQ ID NO: 737747 - RNA, 22 nt, Human
uaaaucacacaagcaggaauaa

SEQ ID NO: 737748 - RNA, 25 nt, Human
uaacauucagugaugugagcuguau

SEQ ID NO: 737749 - RNA, 20 nt, Human
uaagcugcagugagccauga

SEQ ID NO: 737750 - RNA, 20 nt, Human
uaccauaaaagauacaagga

SEQ ID NO: 737751 - RNA, 22 nt, Human
uaccauaaaagauacaaggauu

SEQ ID NO: 737752 - RNA, 18 nt, Human
uacucuagccugggugac

SEQ ID NO: 737753 - RNA, 22 nt, Human
uacucuagccugggugacagaa

SEQ ID NO: 737754 - RNA, 24 nt, Human
uacucuagccugggugacagaaug

SEQ ID NO: 737755 - RNA, 22 nt, Human
uagaaaaaauuuuaaaaaucag

SEQ ID NO: 737756 - RNA, 19 nt, Human
uagguaacaagcuguagcc

SEQ ID NO: 737757 - RNA, 23 nt, Human
uaguaaaacaaacuggaagaaga

SEQ ID NO: 737758 - RNA, 20 nt, Human
uaucagacagacacugggaa

SEQ ID NO: 737759 - RNA, 27 nt, Human
ucaaagaauagcacugcaguuaaauga

SEQ ID NO: 737760 - RNA, 22 nt, Human
ucacacaagcaggaauaaacac

SEQ ID NO: 737761 - RNA, 20 nt, Human
ucagcaaacaugcucuaagc

SEQ ID NO: 737762 - RNA, 23 nt, Human
ucagccagguaugguggugcaua

SEQ ID NO: 737763 - RNA, 19 nt, Human
ucagcccaaaaacagaugc

SEQ ID NO: 737764 - RNA, 19 nt, Human
ucaguggguguugggcaug

SEQ ID NO: 737765 - RNA, 19 nt, Human
uccacagaauaaacaaaau

SEQ ID NO: 737766 - RNA, 23 nt, Human
ucccacuguacucuagccugggu

SEQ ID NO: 737767 - RNA, 24 nt, Human
ucuagccugggugacagaaugaga

SEQ ID NO: 737768 - RNA, 24 nt, Human
ucuccaaaacaaauaaaaccagug

SEQ ID NO: 737769 - RNA, 20 nt, Human
ugaacacuuugggacuggau

SEQ ID NO: 737770 - RNA, 18 nt, Human
ugacaaauguaacaagcc

SEQ ID NO: 737771 - RNA, 18 nt, Human
ugacaaauguaacaagcc

SEQ ID NO: 737772 - RNA, 18 nt, Human
ugacucagcccaaaaaca

SEQ ID NO: 737773 - RNA, 24 nt, Human
ugagcccaggcagugagcuuaagc

SEQ ID NO: 737774 - RNA, 18 nt, Human
ugaggucagcaagggcaa

SEQ ID NO: 737775 - RNA, 20 nt, Human
ugaggugggaggauugcuug

SEQ ID NO: 737776 - RNA, 23 nt, Human
ugaggugggaggauugcuugaac

SEQ ID NO: 737777 - RNA, 22 nt, Human
ugcagugagccaugacuguucc

SEQ ID NO: 737778 - RNA, 24 nt, Human
ugcgugaacugaggaguaugagac

SEQ ID NO: 737779 - RNA, 21 nt, Human
uggcucacaccuguaauccca

SEQ ID NO: 737780 - RNA, 22 nt, Human
uggcucacaccuguaaucccag

SEQ ID NO: 737781 - RNA, 24 nt, Human
uggcucacaccuguaaucccagca

SEQ ID NO: 737782 - RNA, 21 nt, Human
ugggaggcuggaguaagauca

SEQ ID NO: 737783 - RNA, 20 nt, Human
ugggcaaucuucaguuucau

SEQ ID NO: 737784 - RNA, 20 nt, Human
ugguggcaaaaugcagcccu

SEQ ID NO: 737785 - RNA, 24 nt, Human
ugguggcucacaccuguaauccca

SEQ ID NO: 737786 - RNA, 21 nt, Human
ugguggugcauaccuguggug

SEQ ID NO: 737787 - RNA, 24 nt, Human
ugguggugcauaccugugguggug

SEQ ID NO: 737788 - RNA, 21 nt, Human
ugguguagucccagcugcuug

SEQ ID NO: 737789 - RNA, 20 nt, Human
uguagucccagcugcuuggg

SEQ ID NO: 737790 - RNA, 22 nt, Human
uguauauuacccauuuaaacuc

SEQ ID NO: 737791 - RNA, 25 nt, Human
ugugagcuguauuaaacccagguau

SEQ ID NO: 737792 - RNA, 20 nt, Human
uguucccacuguacucuagc

SEQ ID NO: 737793 - RNA, 23 nt, Human
uuaaaugacaaauguaacaagcc

SEQ ID NO: 737794 - RNA, 19 nt, Human
uuaagacaucuugguaacc

SEQ ID NO: 737795 - RNA, 22 nt, Human
uuacagaacaaacugaaagaga

SEQ ID NO: 737796 - RNA, 24 nt, Human
uuaucagacagacacugggaauau

SEQ ID NO: 737797 - RNA, 20 nt, Human
uucaguuucauuauaaaaua

SEQ ID NO: 737798 - RNA, 20 nt, Human
uuucaaagaauagcacugca

SEQ ID NO: 737799 - RNA, 18 nt, Human
uuugaaguaucuuuuaga

SEQ ID NO: 737800 - RNA, 19 nt, Human
aaaaaaaccccacagauua

SEQ ID NO: 737801 - RNA, 20 nt, Human
aaaacauccuaaaaaucuaa

SEQ ID NO: 737802 - RNA, 24 nt, Human
aaacaucacauugugucucauaau

SEQ ID NO: 737803 - RNA, 19 nt, Human
aaaugaccuuauaccauga

SEQ ID NO: 737804 - RNA, 23 nt, Human
aaccuguguaaggaaggaauggc

SEQ ID NO: 737805 - RNA, 18 nt, Human
aagcccgaaguaaaacag

SEQ ID NO: 737806 - RNA, 27 nt, Human
aagugggaaucugccugaacccaagca

SEQ ID NO: 737807 - RNA, 25 nt, Human
aaugccuaauuaucaaaauaaugac

SEQ ID NO: 737808 - RNA, 21 nt, Human
acagaguuagcaauauguggc

SEQ ID NO: 737809 - RNA, 19 nt, Human
accccgcgcgcggccccgc

SEQ ID NO: 737810 - RNA, 20 nt, Human
acugcgcccggcgcuccuga

SEQ ID NO: 737811 - RNA, 23 nt, Human
acugcgcccggcgcuccugaggg

SEQ ID NO: 737812 - RNA, 20 nt, Human
agaaaaacucuccuaaaacu

SEQ ID NO: 737813 - RNA, 25 nt, Human
agaaaaacucuccuaaaacuauaga

SEQ ID NO: 737814 - RNA, 19 nt, Human
agaaacaaccaguggccuc

SEQ ID NO: 737815 - RNA, 18 nt, Human
agcaauuccuguaaucag

SEQ ID NO: 737816 - RNA, 20 nt, Human
agcagcuaggagaggaaggg

SEQ ID NO: 737817 - RNA, 25 nt, Human
agccaaguacauuuaguuuuauauu

SEQ ID NO: 737818 - RNA, 19 nt, Human
agcuuguuaagaguacugc

SEQ ID NO: 737819 - RNA, 21 nt, Human
aggaaacuguacucaggcucu

SEQ ID NO: 737820 - RNA, 21 nt, Human
aggaauggcuuguuauucuga

SEQ ID NO: 737821 - RNA, 18 nt, Human
aggagaggaagggcaaag

SEQ ID NO: 737822 - RNA, 18 nt, Human
aggagggacagaucccaa

SEQ ID NO: 737823 - RNA, 25 nt, Human
agggaaguagaaacaaccaguggcc

SEQ ID NO: 737824 - RNA, 23 nt, Human
agguugugguauuggaggcuguu

SEQ ID NO: 737825 - RNA, 24 nt, Human
aguuugcuuaugaggcaaaaacug

SEQ ID NO: 737826 - RNA, 21 nt, Human
auaaaacaacugguagaaaaa

SEQ ID NO: 737827 - RNA, 24 nt, Human
auaaauggcauuaugaaauaaaca

SEQ ID NO: 737828 - RNA, 20 nt, Human
auaaccuuccagaaauccaa

SEQ ID NO: 737829 - RNA, 20 nt, Human
aucacaauagggucauaguc

SEQ ID NO: 737830 - RNA, 22 nt, Human
aucgccacccagucucccgacc

SEQ ID NO: 737831 - RNA, 22 nt, Human
aucuuaaucuuaacacugcauu

SEQ ID NO: 737832 - RNA, 20 nt, Human
augcaguguuucccuaauuu

SEQ ID NO: 737833 - RNA, 21 nt, Human
auggucgauuaaaggcagcac

SEQ ID NO: 737834 - RNA, 18 nt, Human
auuaacagcauauuauaa

SEQ ID NO: 737835 - RNA, 19 nt, Human
auugcauaauuagccacag

SEQ ID NO: 737836 - RNA, 24 nt, Human
caaaaaaaccccacagauuauaga

SEQ ID NO: 737837 - RNA, 20 nt, Human
caaacuuagcucauuccuuu

SEQ ID NO: 737838 - RNA, 19 nt, Human
caaguaacuaugcauuagc

SEQ ID NO: 737839 - RNA, 25 nt, Human
caauuccaaacuauaucuguuaaug

SEQ ID NO: 737840 - RNA, 19 nt, Human
cacaaaauguaagcacuga

SEQ ID NO: 737841 - RNA, 18 nt, Human
caccacacaccugaaagc

SEQ ID NO: 737842 - RNA, 19 nt, Human
cacccugaagugaggaaac

SEQ ID NO: 737843 - RNA, 23 nt, Human
cacucuaaugaaaucacugcuau

SEQ ID NO: 737844 - RNA, 24 nt, Human
cacugagcauucuaauaaaccccc

SEQ ID NO: 737845 - RNA, 21 nt, Human
cagcuuuaacagaagcccgaa

SEQ ID NO: 737846 - RNA, 21 nt, Human
cauagaacagcuuuaacagaa

SEQ ID NO: 737847 - RNA, 19 nt, Human
cauuucggcucuuuucagg

SEQ ID NO: 737848 - RNA, 18 nt, Human
ccaaaaaaaccccacaga

SEQ ID NO: 737849 - RNA, 22 nt, Human
ccagcaccacacaccugaaagc

SEQ ID NO: 737850 - RNA, 24 nt, Human
ccagcaccacacaccugaaagcug

SEQ ID NO: 737851 - RNA, 19 nt, Human
ccagccugugugccagugu

SEQ ID NO: 737852 - RNA, 18 nt, Human
ccauaaaauccaaggcca

SEQ ID NO: 737853 - RNA, 21 nt, Human
cccacgguuguuaauaccagc

SEQ ID NO: 737854 - RNA, 25 nt, Human
ccccggucaggagggacagauccca

SEQ ID NO: 737855 - RNA, 23 nt, Human
cccgaccuuguccuuagcgggcc

SEQ ID NO: 737856 - RNA, 23 nt, Human
ccgccgucgccuccgcucggcug

SEQ ID NO: 737857 - RNA, 22 nt, Human
ccgcucggcugccuccagucgc

SEQ ID NO: 737858 - RNA, 24 nt, Human
ccgcucggcugccuccagucgcac

SEQ ID NO: 737859 - RNA, 24 nt, Human
ccgucgccuccgcucggcugccuc

SEQ ID NO: 737860 - RNA, 21 nt, Human
ccucaagaaacauuugaagaa

SEQ ID NO: 737861 - RNA, 18 nt, Human
ccuccaaaaaaaccccac

SEQ ID NO: 737862 - RNA, 21 nt, Human
ccucccccuccaaaaaaaccc

SEQ ID NO: 737863 - RNA, 25 nt, Human
cgagauaaaagagcauuuaaagcca

SEQ ID NO: 737864 - RNA, 23 nt, Human
cgcucggcugccuccagucgcac

SEQ ID NO: 737865 - RNA, 22 nt, Human
cgggccgaccccacagccgcgg

SEQ ID NO: 737866 - RNA, 22 nt, Human
cgucccggacccggccggaggc

SEQ ID NO: 737867 - RNA, 19 nt, Human
cuacuacaucaaaaucuug

SEQ ID NO: 737868 - RNA, 18 nt, Human
cuccaaaaaaaccccaca

SEQ ID NO: 737869 - RNA, 21 nt, Human
cugcaauuccaaacuauaucu

SEQ ID NO: 737870 - RNA, 19 nt, Human
cuggacagacuuuuccaug

SEQ ID NO: 737871 - RNA, 18 nt, Human
cuuaacacugcauuugga

SEQ ID NO: 737872 - RNA, 20 nt, Human
gaaaagcuuugauacguuga

SEQ ID NO: 737873 - RNA, 23 nt, Human
gaaaauagcaaaauuaucaugcc

SEQ ID NO: 737874 - RNA, 22 nt, Human
gaaagcuggguccagugcccgu

SEQ ID NO: 737875 - RNA, 22 nt, Human
gaaucaaugcuaagagaacuga

SEQ ID NO: 737876 - RNA, 21 nt, Human
gacauagucaugguuagaugc

SEQ ID NO: 737877 - RNA, 21 nt, Human
gagcauuuaaagccauugcaa

SEQ ID NO: 737878 - RNA, 21 nt, Human
gaucauuuaggucugauccaa

SEQ ID NO: 737879 - RNA, 18 nt, Human
gcagauggaucauuuagg

SEQ ID NO: 737880 - RNA, 25 nt, Human
gccucccccuccaaaaaaaccccac

SEQ ID NO: 737881 - RNA, 19 nt, Human
gcgcucguguugggaagaa

SEQ ID NO: 737882 - RNA, 23 nt, Human
gcucuuuucagguugugguauug

SEQ ID NO: 737883 - RNA, 24 nt, Human
ggaaaauagcaaaauuaucaugcc

SEQ ID NO: 737884 - RNA, 24 nt, Human
ggccucccccuccaaaaaaacccc

SEQ ID NO: 737885 - RNA, 28 nt, Human
gggaaguagaaacaaccaguggccuccc

SEQ ID NO: 737886 - RNA, 23 nt, Human
gggaccugaccgggaggaggagg

SEQ ID NO: 737887 - RNA, 18 nt, Human
gguagaaaaagaguggcc

SEQ ID NO: 737888 - RNA, 22 nt, Human
gguuaauuuuuaaaacuccauu

SEQ ID NO: 737889 - RNA, 22 nt, Human
gugguaaaaacugacuuuauca

SEQ ID NO: 737890 - RNA, 18 nt, Human
guuuuauuuuuccuuucu

SEQ ID NO: 737891 - RNA, 23 nt, Human
uaaaaaaaaugaaagcauccaaa

SEQ ID NO: 737892 - RNA, 26 nt, Human
uaaaagaagaugagauguugggaagu

SEQ ID NO: 737893 - RNA, 18 nt, Human
uaaacccccugugaaguu

SEQ ID NO: 737894 - RNA, 22 nt, Human
uaaaggaccuucauauuuaaca

SEQ ID NO: 737895 - RNA, 22 nt, Human
uaaaugccuaauuaucaaaaua

SEQ ID NO: 737896 - RNA, 23 nt, Human
uaaauggcauuaugaaauaaaca

SEQ ID NO: 737897 - RNA, 20 nt, Human
uaacacuauaguauacggca

SEQ ID NO: 737898 - RNA, 22 nt, Human
uaacuaacaccaaccagauggc

SEQ ID NO: 737899 - RNA, 21 nt, Human
uaagaaaaacucuccuaaaac

SEQ ID NO: 737900 - RNA, 22 nt, Human
uaagauagugguaaaaacugac

SEQ ID NO: 737901 - RNA, 19 nt, Human
uacgaccaaaagauggaug

SEQ ID NO: 737902 - RNA, 20 nt, Human
uacuacaucaaaaucuugcc

SEQ ID NO: 737903 - RNA, 22 nt, Human
uacuguacaaccauggcaugca

SEQ ID NO: 737904 - RNA, 18 nt, Human
uaggagaggaagggcaaa

SEQ ID NO: 737905 - RNA, 21 nt, Human
uauucccuggcgaaaucccgg

SEQ ID NO: 737906 - RNA, 22 nt, Human
uauuggaggcuguuuuuggaag

SEQ ID NO: 737907 - RNA, 20 nt, Human
ucaggcauuaaaaaaugucu

SEQ ID NO: 737908 - RNA, 21 nt, Human
ucauaguuuuauguucacuga

SEQ ID NO: 737909 - RNA, 19 nt, Human
uccaaaaaaaccccacaga

SEQ ID NO: 737910 - RNA, 21 nt, Human
uccaaagaaugugaaaaguac

SEQ ID NO: 737911 - RNA, 20 nt, Human
uccagugcccguuuuccagc

SEQ ID NO: 737912 - RNA, 23 nt, Human
uccauuguauuuaaccauuuuuu

SEQ ID NO: 737913 - RNA, 22 nt, Human
ucccaaccgccgucgccuccgc

SEQ ID NO: 737914 - RNA, 19 nt, Human
ucgcuggacagacuuuucc

SEQ ID NO: 737915 - RNA, 24 nt, Human
ucguguugggaagaagacuccugu

SEQ ID NO: 737916 - RNA, 19 nt, Human
ucuguguucuaaugugaag

SEQ ID NO: 737917 - RNA, 18 nt, Human
ucuuccacaguaauacua

SEQ ID NO: 737918 - RNA, 26 nt, Human
ugaaaacagaagacuggaaucaaugc

SEQ ID NO: 737919 - RNA, 20 nt, Human
ugaaaggugaucauugaugc

SEQ ID NO: 737920 - RNA, 19 nt, Human
ugaaguauguuuuauuuuu

SEQ ID NO: 737921 - RNA, 19 nt, Human
ugaagugaggaaacugcaa

SEQ ID NO: 737922 - RNA, 21 nt, Human
ugagagaagucaauauuuaga

SEQ ID NO: 737923 - RNA, 18 nt, Human
ugaggaaacugcaauucc

SEQ ID NO: 737924 - RNA, 20 nt, Human
ugauuuaaaaaaaaugaaag

SEQ ID NO: 737925 - RNA, 26 nt, Human
ugccuaauuaucaaaauaaugacaua

SEQ ID NO: 737926 - RNA, 18 nt, Human
uggaaaauagcaaaauua

SEQ ID NO: 737927 - RNA, 24 nt, Human
uggaauguagggggaaaaaccaac

SEQ ID NO: 737928 - RNA, 20 nt, Human
uggaugacaggaauguccuc

SEQ ID NO: 737929 - RNA, 22 nt, Human
ugguaagaagcacugaggagcu

SEQ ID NO: 737930 - RNA, 23 nt, Human
ugguuagaugcaaccuagaaauc

SEQ ID NO: 737931 - RNA, 20 nt, Human
ugucauaaccuuccagaaau

SEQ ID NO: 737932 - RNA, 23 nt, Human
uguguuaccaucuagccucgcaa

SEQ ID NO: 737933 - RNA, 19 nt, Human
uuaacugcgaaauucuggg

SEQ ID NO: 737934 - RNA, 24 nt, Human
uuagcgggccgaccccacagccgc

SEQ ID NO: 737935 - RNA, 18 nt, Human
uuagcucauuccuuuaau

SEQ ID NO: 737936 - RNA, 21 nt, Human
uuauugacuaaaugucaaagu

SEQ ID NO: 737937 - RNA, 19 nt, Human
uucaaaggugaaacuuacc

SEQ ID NO: 737938 - RNA, 18 nt, Human
uucggcucuuuucagguu

SEQ ID NO: 737939 - RNA, 21 nt, Human
uugaacacuggcaugcacacc

SEQ ID NO: 737940 - RNA, 18 nt, Human
uugaugucuuuucaaucc

SEQ ID NO: 737941 - RNA, 24 nt, Human
uuuacaucuaaaucuguauguuuu

SEQ ID NO: 737942 - RNA, 23 nt, Human
aaaaacagaaacaaaaaccaaaa

SEQ ID NO: 737943 - RNA, 19 nt, Human
aaaaauaaaaacagaaaca

SEQ ID NO: 737944 - RNA, 19 nt, Human
aaaacaccagagccggugg

SEQ ID NO: 737945 - RNA, 28 nt, Human
aaaacagaaacaaaaaccaaaaugaaac

SEQ ID NO: 737946 - RNA, 23 nt, Human
aaaaccaauuuugacaggagcca

SEQ ID NO: 737947 - RNA, 21 nt, Human
aaacagaaacaaaaaccaaaa

SEQ ID NO: 737948 - RNA, 27 nt, Human
aaacuacuaaacagacucaaucacuug

SEQ ID NO: 737949 - RNA, 22 nt, Human
aaagaaguguaauucuaccccu

SEQ ID NO: 737950 - RNA, 25 nt, Human
aaauaaaaacagaaacaaaaaccaa

SEQ ID NO: 737951 - RNA, 19 nt, Human
aacucaagcucaaguugcu

SEQ ID NO: 737952 - RNA, 22 nt, Human
aacuuuuuauuaccaaaaaaaa

SEQ ID NO: 737953 - RNA, 20 nt, Human
aagacagcaggccugggcaa

SEQ ID NO: 737954 - RNA, 21 nt, Human
aagaggaggugaacagcaagg

SEQ ID NO: 737955 - RNA, 21 nt, Human
aagggaguagacugacuuucc

SEQ ID NO: 737956 - RNA, 22 nt, Human
aauaccaccuccccuggacagc

SEQ ID NO: 737957 - RNA, 25 nt, Human
acagcccaagugucuccugccccuc

SEQ ID NO: 737958 - RNA, 23 nt, Human
accaggaccccgggccugcugag

SEQ ID NO: 737959 - RNA, 20 nt, Human
accaucaucuuucucccugg

SEQ ID NO: 737960 - RNA, 24 nt, Human
acccacacccccacccccccccac

SEQ ID NO: 737961 - RNA, 22 nt, Human
accucuuuucugucucccccag

SEQ ID NO: 737962 - RNA, 18 nt, Human
accuugcccgcccgaggc

SEQ ID NO: 737963 - RNA, 18 nt, Human
acggggcgggggcggcgc

SEQ ID NO: 737964 - RNA, 21 nt, Human
acucagucucugccucugagu

SEQ ID NO: 737965 - RNA, 21 nt, Human
acuggaaggaaaacuuaaccc

SEQ ID NO: 737966 - RNA, 22 nt, Human
agaccaggaaguacaaaccuag

SEQ ID NO: 737967 - RNA, 21 nt, Human
agaccgggcacagcgcuggga

SEQ ID NO: 737968 - RNA, 22 nt, Human
agaggaggugaacagcaaggag

SEQ ID NO: 737969 - RNA, 18 nt, Human
agaguccugccgcaccuc

SEQ ID NO: 737970 - RNA, 20 nt, Human
agcaggaggcgauuugcagg

SEQ ID NO: 737971 - RNA, 19 nt, Human
agcaucagggaggcggccc

SEQ ID NO: 737972 - RNA, 18 nt, Human
agcaucuggaugaaugaa

SEQ ID NO: 737973 - RNA, 18 nt, Human
agccaaugguucagccag

SEQ ID NO: 737974 - RNA, 27 nt, Human
aggaaggagguggaauugaagggaccc

SEQ ID NO: 737975 - RNA, 24 nt, Human
aggcauggccauucagaggguacu

SEQ ID NO: 737976 - RNA, 21 nt, Human
aggccaccuaugacuuaacuc

SEQ ID NO: 737977 - RNA, 27 nt, Human
aggccacggcggcggcggcggcggcgg

SEQ ID NO: 737978 - RNA, 18 nt, Human
aggccagggacguggaag

SEQ ID NO: 737979 - RNA, 23 nt, Human
aggccgccaucggaggugggcaa

SEQ ID NO: 737980 - RNA, 19 nt, Human
aggggagagcccaaacugu

SEQ ID NO: 737981 - RNA, 19 nt, Human
aggggagggggagcgaggg

SEQ ID NO: 737982 - RNA, 18 nt, Human
agguggcggcgguggcag

SEQ ID NO: 737983 - RNA, 23 nt, Human
agucaacaccacaccuagaauca

SEQ ID NO: 737984 - RNA, 23 nt, Human
auacggccggggccgccgcgggc

SEQ ID NO: 737985 - RNA, 18 nt, Human
aucuggaccccggcgggg

SEQ ID NO: 737986 - RNA, 19 nt, Human
augacuaaacccgauuccc

SEQ ID NO: 737987 - RNA, 27 nt, Human
augcacccacacccccaccccccccca

SEQ ID NO: 737988 - RNA, 24 nt, Human
augccaguaaaucccuacagaaca

SEQ ID NO: 737989 - RNA, 19 nt, Human
auguggggcgccgcgcccc

SEQ ID NO: 737990 - RNA, 26 nt, Human
caaaaaccaaaaugaaacaaaaauca

SEQ ID NO: 737991 - RNA, 19 nt, Human
caaaacaccagagccggug

SEQ ID NO: 737992 - RNA, 21 nt, Human
caacucaaagcauccaugcag

SEQ ID NO: 737993 - RNA, 21 nt, Human
caagaccgggcacagcgcugg

SEQ ID NO: 737994 - RNA, 22 nt, Human
caaggcaaacagcccaaguguc

SEQ ID NO: 737995 - RNA, 22 nt, Human
caauaucccaucuacaugcuaa

SEQ ID NO: 737996 - RNA, 19 nt, Human
cacaaggggccagcagggc

SEQ ID NO: 737997 - RNA, 19 nt, Human
cacacccccaccccccccc

SEQ ID NO: 737998 - RNA, 18 nt, Human
cacccacacccccacccc

SEQ ID NO: 737999 - RNA, 20 nt, Human
cacccacacccccacccccc

SEQ ID NO: 738000 - RNA, 26 nt, Human
cacccccacccccccccacacacaca

SEQ ID NO: 738001 - RNA, 19 nt, Human
cacccccccccacacacac

SEQ ID NO: 738002 - RNA, 21 nt, Human
cacccccccccacacacacaa

SEQ ID NO: 738003 - RNA, 24 nt, Human
cacccccccccacacacacaauuu

SEQ ID NO: 738004 - RNA, 18 nt, Human
caccccgcggggcagagc

SEQ ID NO: 738005 - RNA, 18 nt, Human
cacccggggccggggccg

SEQ ID NO: 738006 - RNA, 24 nt, Human
cacccggggccggggccgccguga

SEQ ID NO: 738007 - RNA, 25 nt, Human
cacccugaaaagugcuccccaucau

SEQ ID NO: 738008 - RNA, 22 nt, Human
cacgguccgcgcaccgcccccc

SEQ ID NO: 738009 - RNA, 22 nt, Human
cagaaacaaaaaccaaaaugaa

SEQ ID NO: 738010 - RNA, 24 nt, Human
cagccagggcuucccccaccuccc

SEQ ID NO: 738011 - RNA, 24 nt, Human
cagcccaagugucuccugccccuc

SEQ ID NO: 738012 - RNA, 20 nt, Human
cagcgcugggaugucggggu

SEQ ID NO: 738013 - RNA, 20 nt, Human
cagcuaccgcgggcccuccg

SEQ ID NO: 738014 - RNA, 19 nt, Human
caggaccccgggccugcug

SEQ ID NO: 738015 - RNA, 22 nt, Human
caggagaaccccaagagcggcg

SEQ ID NO: 738016 - RNA, 24 nt, Human
caggaguucauggcaaaguuuaaa

SEQ ID NO: 738017 - RNA, 19 nt, Human
caucaacuuccauucaucu

SEQ ID NO: 738018 - RNA, 22 nt, Human
caugcacccacacccccacccc

SEQ ID NO: 738019 - RNA, 24 nt, Human
caugcacccacacccccacccccc

SEQ ID NO: 738020 - RNA, 22 nt, Human
ccaaacagggcccaaauucuga

SEQ ID NO: 738021 - RNA, 20 nt, Human
ccacaggaugacuaaacccg

SEQ ID NO: 738022 - RNA, 20 nt, Human
ccacccccccccacacacac

SEQ ID NO: 738023 - RNA, 23 nt, Human
ccacccccccccacacacacaau

SEQ ID NO: 738024 - RNA, 19 nt, Human
ccagaucaaagaugacaac

SEQ ID NO: 738025 - RNA, 20 nt, Human
ccagcuaauucaucccucca

SEQ ID NO: 738026 - RNA, 21 nt, Human
ccaggggagggggagcgaggg

SEQ ID NO: 738027 - RNA, 18 nt, Human
ccauaaagcaaaugccaa

SEQ ID NO: 738028 - RNA, 19 nt, Human
ccaugcacccacaccccca

SEQ ID NO: 738029 - RNA, 21 nt, Human
ccaugcacccacacccccacc

SEQ ID NO: 738030 - RNA, 23 nt, Human
ccaugcacccacacccccacccc

SEQ ID NO: 738031 - RNA, 19 nt, Human
ccaugccaguaaaucccua

SEQ ID NO: 738032 - RNA, 18 nt, Human
cccaaccccuccccggga

SEQ ID NO: 738033 - RNA, 18 nt, Human
cccacacacacaauuugc

SEQ ID NO: 738034 - RNA, 20 nt, Human
cccacacccccacccccccc

SEQ ID NO: 738035 - RNA, 22 nt, Human
cccacacccccaccccccccca

SEQ ID NO: 738036 - RNA, 24 nt, Human
cccacacccccacccccccccaca

SEQ ID NO: 738037 - RNA, 23 nt, Human
cccagaggcgcccacccugccag

SEQ ID NO: 738038 - RNA, 21 nt, Human
cccauaacacacugcucagcu

SEQ ID NO: 738039 - RNA, 23 nt, Human
ccccacccccccccacacacaca

SEQ ID NO: 738040 - RNA, 23 nt, Human
ccccaccucccugcagccacccg

SEQ ID NO: 738041 - RNA, 22 nt, Human
ccccagaaccaucuggguaaca

SEQ ID NO: 738042 - RNA, 18 nt, Human
ccccagaggcgcccaccc

SEQ ID NO: 738043 - RNA, 22 nt, Human
ccccagaggcgcccacccugcc

SEQ ID NO: 738044 - RNA, 21 nt, Human
cccccacccccccccacacac

SEQ ID NO: 738045 - RNA, 20 nt, Human
cccccaccucccugcagcca

SEQ ID NO: 738046 - RNA, 19 nt, Human
cccccccccacacacacaa

SEQ ID NO: 738047 - RNA, 20 nt, Human
ccccuuccucccucguaccc

SEQ ID NO: 738048 - RNA, 21 nt, Human
cccgccccugggcgcccugga

SEQ ID NO: 738049 - RNA, 22 nt, Human
cccgccccugggcgcccuggaa

SEQ ID NO: 738050 - RNA, 19 nt, Human
cccggcccccgcgcccucu

SEQ ID NO: 738051 - RNA, 21 nt, Human
cccguuugcugagcaggaggc

SEQ ID NO: 738052 - RNA, 19 nt, Human
cccuccgacaccaucugga

SEQ ID NO: 738053 - RNA, 20 nt, Human
cccucguacccccgcccgcc

SEQ ID NO: 738054 - RNA, 19 nt, Human
ccgccccccggccgcggcg

SEQ ID NO: 738055 - RNA, 21 nt, Human
ccgcccgaggcuggcaccccg

SEQ ID NO: 738056 - RNA, 20 nt, Human
ccgcccgccccugggcgccc

SEQ ID NO: 738057 - RNA, 21 nt, Human
ccgcccgccccugggcgcccu

SEQ ID NO: 738058 - RNA, 24 nt, Human
ccgccgcgggccugggcgccccuu

SEQ ID NO: 738059 - RNA, 20 nt, Human
ccgccgggaccugcucgcga

SEQ ID NO: 738060 - RNA, 18 nt, Human
ccgccuggaaggggagga

SEQ ID NO: 738061 - RNA, 20 nt, Human
ccggcccccgcgcccucucc

SEQ ID NO: 738062 - RNA, 24 nt, Human
ccgguggcaaggggagagcccaaa

SEQ ID NO: 738063 - RNA, 24 nt, Human
ccucccugcagccacccggggccg

SEQ ID NO: 738064 - RNA, 19 nt, Human
ccuccuuaggccuugggag

SEQ ID NO: 738065 - RNA, 18 nt, Human
ccuggggucuugaagcac

SEQ ID NO: 738066 - RNA, 22 nt, Human
ccugugagcccaagucuugcuc

SEQ ID NO: 738067 - RNA, 21 nt, Human
cgacaccaucuggaccccggc

SEQ ID NO: 738068 - RNA, 24 nt, Human
cgccgcgccccccaaccccucccc

SEQ ID NO: 738069 - RNA, 21 nt, Human
cggcgcucgcgcggccccagg

SEQ ID NO: 738070 - RNA, 21 nt, Human
cggcucggucacuggcggcgg

SEQ ID NO: 738071 - RNA, 22 nt, Human
cgggacggagcuggcuccccag

SEQ ID NO: 738072 - RNA, 21 nt, Human
cggggcagagcugcgcccgcc

SEQ ID NO: 738073 - RNA, 21 nt, Human
cuacuaaacagacucaaucac

SEQ ID NO: 738074 - RNA, 18 nt, Human
cuauguccuuagcagagu

SEQ ID NO: 738075 - RNA, 22 nt, Human
cucaaagcauccaugcagguga

SEQ ID NO: 738076 - RNA, 23 nt, Human
cucaagcucaaguugcugaaauc

SEQ ID NO: 738077 - RNA, 19 nt, Human
cuccagcccucacuggaag

SEQ ID NO: 738078 - RNA, 22 nt, Human
cucccaacccccugcacucuuu

SEQ ID NO: 738079 - RNA, 21 nt, Human
cuccccagaggcgcccacccu

SEQ ID NO: 738080 - RNA, 23 nt, Human
cuccggggccggucgcucggccu

SEQ ID NO: 738081 - RNA, 18 nt, Human
cucgccagucgcagcuac

SEQ ID NO: 738082 - RNA, 20 nt, Human
cugcugagcaacccguuugc

SEQ ID NO: 738083 - RNA, 18 nt, Human
cugcuggcgccggggcgg

SEQ ID NO: 738084 - RNA, 20 nt, Human
cuggaaggggaggaaggcca

SEQ ID NO: 738085 - RNA, 18 nt, Human
cuggcggccggagcuggg

SEQ ID NO: 738086 - RNA, 20 nt, Human
cuuugggcucgcccaaggca

SEQ ID NO: 738087 - RNA, 23 nt, Human
gaagcaucuggaugaaugaagca

SEQ ID NO: 738088 - RNA, 20 nt, Human
gacaaguugccucuuguugg

SEQ ID NO: 738089 - RNA, 20 nt, Human
gacagcaggccugggcaaaa

SEQ ID NO: 738090 - RNA, 20 nt, Human
gaccaggaaguacaaaccua

SEQ ID NO: 738091 - RNA, 20 nt, Human
gagcccaagucuugcucccc

SEQ ID NO: 738092 - RNA, 23 nt, Human
gagcuaagcggggcuucagguac

SEQ ID NO: 738093 - RNA, 20 nt, Human
gagugcuuuguccucgcugg

SEQ ID NO: 738094 - RNA, 22 nt, Human
gauuugcaggccucuugccucc

SEQ ID NO: 738095 - RNA, 22 nt, Human
gcaccaauuaaauuacaccaau

SEQ ID NO: 738096 - RNA, 22 nt, Human
gcacccacacccccaccccccc

SEQ ID NO: 738097 - RNA, 19 nt, Human
gcaccgccccccggccgcg

SEQ ID NO: 738098 - RNA, 21 nt, Human
gcaggagggaggggagagggu

SEQ ID NO: 738099 - RNA, 22 nt, Human
gccacagcccacuggcugaguu

SEQ ID NO: 738100 - RNA, 23 nt, Human
gccacggcggcggcggcggcggc

SEQ ID NO: 738101 - RNA, 18 nt, Human
gccaucuugaacugaguu

SEQ ID NO: 738102 - RNA, 19 nt, Human
gccccaggggagggggagc

SEQ ID NO: 738103 - RNA, 20 nt, Human
gcgcagacggggcgggggcg

SEQ ID NO: 738104 - RNA, 28 nt, Human
gcgcggccccaggggaggggggaacgcc

SEQ ID NO: 738105 - RNA, 18 nt, Human
gcgcggcguaggccacgg

SEQ ID NO: 738106 - RNA, 20 nt, Human
gcgcugggaugucggggucc

SEQ ID NO: 738107 - RNA, 20 nt, Human
gcggcggcggcggccaggag

SEQ ID NO: 738108 - RNA, 21 nt, Human
gcggcggcggcggccaggagu

SEQ ID NO: 738109 - RNA, 20 nt, Human
gcggcuggccgagccccggg

SEQ ID NO: 738110 - RNA, 21 nt, Human
gcgguggcaggggaggcggug

SEQ ID NO: 738111 - RNA, 24 nt, Human
ggaagggaccgggaaauuccaagc

SEQ ID NO: 738112 - RNA, 18 nt, Human
ggaccaggaaagcugaca

SEQ ID NO: 738113 - RNA, 20 nt, Human
ggagaggguggcucgcagcg

SEQ ID NO: 738114 - RNA, 18 nt, Human
ggagcugggggagggggc

SEQ ID NO: 738115 - RNA, 20 nt, Human
ggccugggcgccccuucauu

SEQ ID NO: 738116 - RNA, 20 nt, Human
gggcgagguggcggcggugg

SEQ ID NO: 738117 - RNA, 22 nt, Human
gggcgagguggcggcgguggca

SEQ ID NO: 738118 - RNA, 25 nt, Human
gggcggugcagccagggccgggccc

SEQ ID NO: 738119 - RNA, 26 nt, Human
gggcggugcagccagggccgggcccc

SEQ ID NO: 738120 - RNA, 20 nt, Human
ggggagggggagcgaggggc

SEQ ID NO: 738121 - RNA, 24 nt, Human
ggggcgagccgggcuacagagggc

SEQ ID NO: 738122 - RNA, 18 nt, Human
gggggaggaagaagggag

SEQ ID NO: 738123 - RNA, 18 nt, Human
ggggggaggaagaaggga

SEQ ID NO: 738124 - RNA, 20 nt, Human
ggguggcucgcagcgcagga

SEQ ID NO: 738125 - RNA, 20 nt, Human
gguggcaggggaggcggugg

SEQ ID NO: 738126 - RNA, 22 nt, Human
gguugcggcuggccgagccccg

SEQ ID NO: 738127 - RNA, 19 nt, Human
gucauuuuuacuuaaagac

SEQ ID NO: 738128 - RNA, 25 nt, Human
guccucuaggaggugccauaaagca

SEQ ID NO: 738129 - RNA, 23 nt, Human
guggcggcgguggcaggggaggc

SEQ ID NO: 738130 - RNA, 18 nt, Human
gugguuauccagcuuguu

SEQ ID NO: 738131 - RNA, 21 nt, Human
guguuggcucaaggcugcaaa

SEQ ID NO: 738132 - RNA, 21 nt, Human
guugcugaaaucuacuugcca

SEQ ID NO: 738133 - RNA, 21 nt, Human
uaaaaacagaaacaaaaacca

SEQ ID NO: 738134 - RNA, 20 nt, Human
uaaaaagaaguguaauucuu

SEQ ID NO: 738135 - RNA, 25 nt, Human
uaaaaauaaaaacagaaacaaaaac

SEQ ID NO: 738136 - RNA, 22 nt, Human
uaaagcaaaugccaaacagggc

SEQ ID NO: 738137 - RNA, 21 nt, Human
uaacaaaugccucaccagugg

SEQ ID NO: 738138 - RNA, 19 nt, Human
uaacucccuagaagcaaac

SEQ ID NO: 738139 - RNA, 22 nt, Human
uaagccaaaacaccagagccgg

SEQ ID NO: 738140 - RNA, 24 nt, Human
uaauuccacagaagugaauaaagc

SEQ ID NO: 738141 - RNA, 19 nt, Human
uaccaaaaaaaauagaaau

SEQ ID NO: 738142 - RNA, 19 nt, Human
uacucaagacagcaggccu

SEQ ID NO: 738143 - RNA, 20 nt, Human
uacugacagcuacggacacg

SEQ ID NO: 738144 - RNA, 22 nt, Human
uaggaggugccauaaagcaaau

SEQ ID NO: 738145 - RNA, 18 nt, Human
uaucacauccaacucaaa

SEQ ID NO: 738146 - RNA, 21 nt, Human
ucaagacagcaggccugggca

SEQ ID NO: 738147 - RNA, 21 nt, Human
ucaagacagcaggccugggca

SEQ ID NO: 738148 - RNA, 18 nt, Human
ucagagcuaagcggggcu

SEQ ID NO: 738149 - RNA, 23 nt, Human
ucagcucaaccugaaggaacgca

SEQ ID NO: 738150 - RNA, 22 nt, Human
ucagguaccagcuaauucaucc

SEQ ID NO: 738151 - RNA, 21 nt, Human
uccaaagauguucccaagacc

SEQ ID NO: 738152 - RNA, 18 nt, Human
uccaggagaaccccaaga

SEQ ID NO: 738153 - RNA, 24 nt, Human
uccaugcacccacacccccacccc

SEQ ID NO: 738154 - RNA, 20 nt, Human
ucccaacccccugcacucuc

SEQ ID NO: 738155 - RNA, 24 nt, Human
ucccaacccccugcacucuuucaa

SEQ ID NO: 738156 - RNA, 22 nt, Human
uccccuuccucccucguacccc

SEQ ID NO: 738157 - RNA, 19 nt, Human
ucccuagaagcaaacuugc

SEQ ID NO: 738158 - RNA, 25 nt, Human
ucccucguacccccgcccgccccug

SEQ ID NO: 738159 - RNA, 22 nt, Human
uccgcgcaccgccccccggccg

SEQ ID NO: 738160 - RNA, 23 nt, Human
uccgcgcaccgccccccggccgc

SEQ ID NO: 738161 - RNA, 24 nt, Human
uccgcgcaccgccccccggccgcg

SEQ ID NO: 738162 - RNA, 21 nt, Human
ucgcccaaggcaaacagccca

SEQ ID NO: 738163 - RNA, 21 nt, Human
ucuccugccccuccuccagaa

SEQ ID NO: 738164 - RNA, 18 nt, Human
ugaaaagugcuccccauc

SEQ ID NO: 738165 - RNA, 22 nt, Human
ugaaggaacgcauaagccaaaa

SEQ ID NO: 738166 - RNA, 20 nt, Human
ugaaugaaaggaaauugagc

SEQ ID NO: 738167 - RNA, 24 nt, Human
ugacaaaagagaacacguguuugg

SEQ ID NO: 738168 - RNA, 20 nt, Human
ugacagugaaucuccugcuu

SEQ ID NO: 738169 - RNA, 19 nt, Human
ugacucacggaccuugccc

SEQ ID NO: 738170 - RNA, 23 nt, Human
ugagaaagaaagugacaaguugc

SEQ ID NO: 738171 - RNA, 24 nt, Human
ugagaaagaaagugacaaguugcc

SEQ ID NO: 738172 - RNA, 22 nt, Human
ugagcugggagggggaugggag

SEQ ID NO: 738173 - RNA, 24 nt, Human
ugaggcaggaaguagggagcuccc

SEQ ID NO: 738174 - RNA, 18 nt, Human
ugcaaagaucacagacca

SEQ ID NO: 738175 - RNA, 21 nt, Human
ugcacccacacccccaccccc

SEQ ID NO: 738176 - RNA, 22 nt, Human
ugcagccagggcuucccccacc

SEQ ID NO: 738177 - RNA, 22 nt, Human
ugcaggagggaggggagagggu

SEQ ID NO: 738178 - RNA, 24 nt, Human
ugccaaacagggcccaaauucuga

SEQ ID NO: 738179 - RNA, 18 nt, Human
ugccccuccuccagaagc

SEQ ID NO: 738180 - RNA, 24 nt, Human
ugcuccuuccacauaugcuuccuc

SEQ ID NO: 738181 - RNA, 24 nt, Human
ugcugagcaacccguuugcugagc

SEQ ID NO: 738182 - RNA, 20 nt, Human
ugcuggcgccggggcggcgg

SEQ ID NO: 738183 - RNA, 21 nt, Human
uggaaacuacuaaacagacuc

SEQ ID NO: 738184 - RNA, 25 nt, Human
uggaaggaaaacuuaaccccugcaa

SEQ ID NO: 738185 - RNA, 19 nt, Human
uggaaggggaggaaggcca

SEQ ID NO: 738186 - RNA, 18 nt, Human
uggacagcugguccucua

SEQ ID NO: 738187 - RNA, 28 nt, Human
uggacaguaucacauccaacucaaagca

SEQ ID NO: 738188 - RNA, 23 nt, Human
uggaccaggaccccgggccugcu

SEQ ID NO: 738189 - RNA, 20 nt, Human
uggaguggcaucuugucauu

SEQ ID NO: 738190 - RNA, 22 nt, Human
uggcagaagagcccaccucucc

SEQ ID NO: 738191 - RNA, 22 nt, Human
uggcaucuugucauugugaucu

SEQ ID NO: 738192 - RNA, 20 nt, Human
uggccaagugagacagugcc

SEQ ID NO: 738193 - RNA, 23 nt, Human
uggcgccggggcggcgguugcgg

SEQ ID NO: 738194 - RNA, 18 nt, Human
uggcggccggagcugggg

SEQ ID NO: 738195 - RNA, 29 nt, Human
uggcggcgguggcaggggaggggugcucc

SEQ ID NO: 738196 - RNA, 19 nt, Human
uggcucaaggcugcaaacu

SEQ ID NO: 738197 - RNA, 21 nt, Human
ugggauuggcugguagggaug

SEQ ID NO: 738198 - RNA, 25 nt, Human
ugggcaaaacucgccugaauuucac

SEQ ID NO: 738199 - RNA, 18 nt, Human
ugggcaaaccagggaccu

SEQ ID NO: 738200 - RNA, 21 nt, Human
ugggcgccccuucauuuucuu

SEQ ID NO: 738201 - RNA, 24 nt, Human
uggggcgccgcgccccccaacccc

SEQ ID NO: 738202 - RNA, 22 nt, Human
ugggggagggggcagggaggcc

SEQ ID NO: 738203 - RNA, 22 nt, Human
ugugcaaagaucacagaccauc

SEQ ID NO: 738204 - RNA, 23 nt, Human
uguuuuguuuuguuuacuuuuua

SEQ ID NO: 738205 - RNA, 21 nt, Human
uguuuuguuuuguuuuguuua

SEQ ID NO: 738206 - RNA, 25 nt, Human
uguuuuguuuuguuuuguuuugauu

SEQ ID NO: 738207 - RNA, 23 nt, Human
uuaacacagaucccacaggauga

SEQ ID NO: 738208 - RNA, 18 nt, Human
uuacuagucaaucacagc

SEQ ID NO: 738209 - RNA, 20 nt, Human
uuccccuucccuuucccgug

SEQ ID NO: 738210 - RNA, 20 nt, Human
uucccuuucccgugguagcc

SEQ ID NO: 738211 - RNA, 19 nt, Human
uuccucccaacccccugca

SEQ ID NO: 738212 - RNA, 24 nt, Human
uuccucccucguacccccgcccgc

SEQ ID NO: 738213 - RNA, 20 nt, Human
uugaaaggacagucaacacc

SEQ ID NO: 738214 - RNA, 20 nt, Human
uuggggggaggaagaaggga

SEQ ID NO: 738215 - RNA, 24 nt, Human
uuguccaucagguccuaaaagugu

SEQ ID NO: 738216 - RNA, 23 nt, Human
uuuccugacaaaagagaacacgu

SEQ ID NO: 738217 - RNA, 23 nt, Human
uuugaaaugccuuucagaccaau

SEQ ID NO: 738218 - RNA, 21 nt, Human
uuuggggggaggaagaaggga

SEQ ID NO: 738219 - RNA, 21 nt, Human
uuuguccucgcugggccggaa

SEQ ID NO: 738220 - RNA, 18 nt, Human
uuuguuuuguuuuguuua

SEQ ID NO: 738221 - RNA, 19 nt, Human
uuuguuuuguuuuguuuug

SEQ ID NO: 738222 - RNA, 19 nt, Human
uuuguuuuguuuuguuuug

SEQ ID NO: 738223 - RNA, 24 nt, Human
uuuuccccuguaggcuguucuggg

SEQ ID NO: 738224 - RNA, 23 nt, Human
uuuuucagucuguugucacagcc

SEQ ID NO: 738225 - RNA, 24 nt, Human
uuuuuuuucccuuuuaaccucuau

SEQ ID NO: 738226 - RNA, 18 nt, Human
caccccccugggcugccc

SEQ ID NO: 738227 - RNA, 24 nt, Human
cagggugggccccgcucacccccc

SEQ ID NO: 738228 - RNA, 21 nt, Human
ccccgcucaccccccugggcu

SEQ ID NO: 738229 - RNA, 24 nt, Human
cccgcucaccccccugggcugccc

SEQ ID NO: 738230 - RNA, 22 nt, Human
cgacuucugggcggggccuccc

SEQ ID NO: 738231 - RNA, 18 nt, Human
cgagcagccggacuggcc

SEQ ID NO: 738232 - RNA, 26 nt, Human
cgccagugcuggcccucagggcggcc

SEQ ID NO: 738233 - RNA, 20 nt, Human
cuuccgcccgccaaucccug

SEQ ID NO: 738234 - RNA, 20 nt, Human
gacuuccgcccgccaauccc

SEQ ID NO: 738235 - RNA, 18 nt, Human
gggccaggccugccgggg

SEQ ID NO: 738236 - RNA, 18 nt, Human
gggcggccccucagccgg

SEQ ID NO: 738237 - RNA, 21 nt, Human
ggggccucccgggccaggccu

SEQ ID NO: 738238 - RNA, 24 nt, Human
ggguguucccgccgacuucugggc

SEQ ID NO: 738239 - RNA, 21 nt, Human
gugggccccgcucaccccccu

SEQ ID NO: 738240 - RNA, 19 nt, Human
ucccugagcugggcagggu

SEQ ID NO: 738241 - RNA, 21 nt, Human
ugccgggggcggggcccgagc

SEQ ID NO: 738242 - RNA, 20 nt, Human
aaggaggaaagaggcagcag

SEQ ID NO: 738243 - RNA, 24 nt, Human
aauaaaaaaaaucaaacuuaaaac

SEQ ID NO: 738244 - RNA, 23 nt, Human
acaaaggccagccacguggccca

SEQ ID NO: 738245 - RNA, 23 nt, Human
accccgcccagaccccggggcuu

SEQ ID NO: 738246 - RNA, 21 nt, Human
agaaccacagggcccgcacug

SEQ ID NO: 738247 - RNA, 19 nt, Human
agcacagggccugccgcag

SEQ ID NO: 738248 - RNA, 21 nt, Human
agcagccaggcggcccagagc

SEQ ID NO: 738249 - RNA, 21 nt, Human
agccaucgggccugacguugg

SEQ ID NO: 738250 - RNA, 18 nt, Human
agccccuguccagcaccu

SEQ ID NO: 738251 - RNA, 20 nt, Human
agccgccuggaccugcugcu

SEQ ID NO: 738252 - RNA, 22 nt, Human
agccgccuggaccugcugcugg

SEQ ID NO: 738253 - RNA, 19 nt, Human
agccgcgccuucuuucucc

SEQ ID NO: 738254 - RNA, 21 nt, Human
agcguggcacagcggcggacg

SEQ ID NO: 738255 - RNA, 22 nt, Human
agcugcagucucugcugggcug

SEQ ID NO: 738256 - RNA, 23 nt, Human
aggaaggaguagaugggggucag

SEQ ID NO: 738257 - RNA, 23 nt, Human
aggaggaaagaggcagcagcagc

SEQ ID NO: 738258 - RNA, 23 nt, Human
aggcagggggcugugugggaagg

SEQ ID NO: 738259 - RNA, 18 nt, Human
aggccauguuccuguggc

SEQ ID NO: 738260 - RNA, 21 nt, Human
agggagggggcugcuggcuga

SEQ ID NO: 738261 - RNA, 23 nt, Human
agggaugaggggaccgggggcuu

SEQ ID NO: 738262 - RNA, 22 nt, Human
agggugccauccccagccccag

SEQ ID NO: 738263 - RNA, 18 nt, Human
aguccccaggaaggagua

SEQ ID NO: 738264 - RNA, 21 nt, Human
aucugcauuuccaccuguucc

SEQ ID NO: 738265 - RNA, 20 nt, Human
caaagcgcaggagccgcgug

SEQ ID NO: 738266 - RNA, 24 nt, Human
caccagcgcugaaaccagguccgc

SEQ ID NO: 738267 - RNA, 23 nt, Human
cagcaaugcgguugagaagggga

SEQ ID NO: 738268 - RNA, 19 nt, Human
cagcaccugcguuccuggu

SEQ ID NO: 738269 - RNA, 23 nt, Human
cagcagcaaugagaaucgguuuc

SEQ ID NO: 738270 - RNA, 24 nt, Human
cagcagcagcaaugagaaucgguu

SEQ ID NO: 738271 - RNA, 18 nt, Human
cagcagcagcagcuccgg

SEQ ID NO: 738272 - RNA, 23 nt, Human
cagcagcagcagcuccgggccuu

SEQ ID NO: 738273 - RNA, 20 nt, Human
cagcagcagcuccgggccug

SEQ ID NO: 738274 - RNA, 24 nt, Human
cagccgcgccuucuuucuccuccu

SEQ ID NO: 738275 - RNA, 21 nt, Human
cagcgcugaaaccagguccgc

SEQ ID NO: 738276 - RNA, 18 nt, Human
cagcuucccgccacugga

SEQ ID NO: 738277 - RNA, 25 nt, Human
caggcccagcccugguggcugagaa

SEQ ID NO: 738278 - RNA, 18 nt, Human
cagggagggggcugcugg

SEQ ID NO: 738279 - RNA, 18 nt, Human
cagggccugccgcagggc

SEQ ID NO: 738280 - RNA, 21 nt, Human
caugcacccucugggcauccc

SEQ ID NO: 738281 - RNA, 23 nt, Human
ccaccgggccagccccuccagcu

SEQ ID NO: 738282 - RNA, 20 nt, Human
ccacgcccgccucagcgcuu

SEQ ID NO: 738283 - RNA, 24 nt, Human
ccagcaguugggugcucugccugu

SEQ ID NO: 738284 - RNA, 26 nt, Human
ccccaccgaggguucuuuaucuccuu

SEQ ID NO: 738285 - RNA, 18 nt, Human
ccccaggcagggggcugu

SEQ ID NO: 738286 - RNA, 20 nt, Human
ccccuucuaacuggggaagc

SEQ ID NO: 738287 - RNA, 21 nt, Human
cccgcugcuccugccuccugg

SEQ ID NO: 738288 - RNA, 25 nt, Human
cccucuccagcugcagucucugcug

SEQ ID NO: 738289 - RNA, 19 nt, Human
ccgcacugucgcccgcugc

SEQ ID NO: 738290 - RNA, 21 nt, Human
ccgcacugucgcccgcugcuc

SEQ ID NO: 738291 - RNA, 19 nt, Human
ccgcgcgguccacgcccgc

SEQ ID NO: 738292 - RNA, 22 nt, Human
ccgcugcuccugccuccuggcu

SEQ ID NO: 738293 - RNA, 20 nt, Human
ccucccagauggcacagucc

SEQ ID NO: 738294 - RNA, 22 nt, Human
ccuccccgacagcccagcaccu

SEQ ID NO: 738295 - RNA, 22 nt, Human
ccuccccgacagcccagcaccu

SEQ ID NO: 738296 - RNA, 26 nt, Human
ccuccccgacagcccagcaccugcgu

SEQ ID NO: 738297 - RNA, 21 nt, Human
ccugacguugggagaaaaccc

SEQ ID NO: 738298 - RNA, 22 nt, Human
ccugcagcgagaaggcccagaa

SEQ ID NO: 738299 - RNA, 23 nt, Human
ccugcagcgagaaggcccagaac

SEQ ID NO: 738300 - RNA, 21 nt, Human
ccugguccucaggccccggcc

SEQ ID NO: 738301 - RNA, 23 nt, Human
cggcacgauggagacugugagcc

SEQ ID NO: 738302 - RNA, 21 nt, Human
cggcccagagcucccagaggc

SEQ ID NO: 738303 - RNA, 24 nt, Human
cggcccagagcucccagaggccga

SEQ ID NO: 738304 - RNA, 20 nt, Human
cggcggacggcacgauggag

SEQ ID NO: 738305 - RNA, 25 nt, Human
cggcgguauacggcgauccgggacc

SEQ ID NO: 738306 - RNA, 21 nt, Human
cgucagggagggggcugcugg

SEQ ID NO: 738307 - RNA, 19 nt, Human
cucagcgcuucgcgcgccu

SEQ ID NO: 738308 - RNA, 19 nt, Human
cuccucaaguucagccuca

SEQ ID NO: 738309 - RNA, 20 nt, Human
cuccucagcagccaggcggc

SEQ ID NO: 738310 - RNA, 21 nt, Human
cuccucucuguucagcuccag

SEQ ID NO: 738311 - RNA, 20 nt, Human
cucgucuccacggcgacgcg

SEQ ID NO: 738312 - RNA, 18 nt, Human
cucuacuuccugguccuc

SEQ ID NO: 738313 - RNA, 18 nt, Human
cucugcugggcugaccuc

SEQ ID NO: 738314 - RNA, 27 nt, Human
cucuuggucucaagggugccaucuuac

SEQ ID NO: 738315 - RNA, 21 nt, Human
cucuuucugcaccugcugcuc

SEQ ID NO: 738316 - RNA, 19 nt, Human
cugaggccucuggcucugc

SEQ ID NO: 738317 - RNA, 23 nt, Human
cugcagcugcugccgggaggccu

SEQ ID NO: 738318 - RNA, 23 nt, Human
cugcagucccaccagcgcugaaa

SEQ ID NO: 738319 - RNA, 23 nt, Human
cugccugcaguugaaaguccagg

SEQ ID NO: 738320 - RNA, 19 nt, Human
cugcugcugggccugcagc

SEQ ID NO: 738321 - RNA, 18 nt, Human
cugcugggccugcagcug

SEQ ID NO: 738322 - RNA, 24 nt, Human
cugcugggccugcagcugcugccg

SEQ ID NO: 738323 - RNA, 23 nt, Human
cugcugggcugaccuccggcugc

SEQ ID NO: 738324 - RNA, 25 nt, Human
cuggagcuccucugccagcagcugg

SEQ ID NO: 738325 - RNA, 21 nt, Human
cuggaggagcugccccuggua

SEQ ID NO: 738326 - RNA, 25 nt, Human
cuggcgcugagccuggagcuccucu

SEQ ID NO: 738327 - RNA, 20 nt, Human
cugucggggccucugccagg

SEQ ID NO: 738328 - RNA, 18 nt, Human
cuguggccucuuggucuc

SEQ ID NO: 738329 - RNA, 22 nt, Human
cuuaacucccgcgcgguccacg

SEQ ID NO: 738330 - RNA, 24 nt, Human
gaccugcugcugggccugcagcug

SEQ ID NO: 738331 - RNA, 20 nt, Human
gaccugcuucuuaacucccg

SEQ ID NO: 738332 - RNA, 23 nt, Human
gagaaucgguuucgaggggcgug

SEQ ID NO: 738333 - RNA, 25 nt, Human
gagcaugcacccucugggcaucccc

SEQ ID NO: 738334 - RNA, 19 nt, Human
gaggaaagaggcagcagca

SEQ ID NO: 738335 - RNA, 22 nt, Human
gaggcuucccgccccggcccag

SEQ ID NO: 738336 - RNA, 23 nt, Human
gagugggcaguguugagcuccag

SEQ ID NO: 738337 - RNA, 18 nt, Human
gcaaagcgcaggagccgc

SEQ ID NO: 738338 - RNA, 19 nt, Human
gcaaagcgcaggagccgcg

SEQ ID NO: 738339 - RNA, 20 nt, Human
gcacgaggaccaccccgccc

SEQ ID NO: 738340 - RNA, 24 nt, Human
gcagcagcagcuccgggccugugc

SEQ ID NO: 738341 - RNA, 23 nt, Human
gcagcgagaaggcccagaaccac

SEQ ID NO: 738342 - RNA, 24 nt, Human
gcagcugcugccgggaggccuuca

SEQ ID NO: 738343 - RNA, 20 nt, Human
gcaguugggugcucugccuc

SEQ ID NO: 738344 - RNA, 19 nt, Human
gcccagagcucccagaggc

SEQ ID NO: 738345 - RNA, 19 nt, Human
gccuggagcgcccacugca

SEQ ID NO: 738346 - RNA, 24 nt, Human
gcggcccagagcucccagaggccg

SEQ ID NO: 738347 - RNA, 25 nt, Human
gcggcgcgcacgaggaccaccccgc

SEQ ID NO: 738348 - RNA, 21 nt, Human
gcgucagggagggggcugcug

SEQ ID NO: 738349 - RNA, 23 nt, Human
gcucccagaggccgagaagccug

SEQ ID NO: 738350 - RNA, 23 nt, Human
gcugagucucugugccagcaguu

SEQ ID NO: 738351 - RNA, 19 nt, Human
gcugccagcuguugucucc

SEQ ID NO: 738352 - RNA, 19 nt, Human
gcugccaggggcugaggcu

SEQ ID NO: 738353 - RNA, 26 nt, Human
ggagcaugcacccucugggcaucccc

SEQ ID NO: 738354 - RNA, 24 nt, Human
ggaguagaugggggucagggacac

SEQ ID NO: 738355 - RNA, 22 nt, Human
ggcagcagcagcagcuccgggc

SEQ ID NO: 738356 - RNA, 19 nt, Human
ggcaugaaggaggaaagag

SEQ ID NO: 738357 - RNA, 23 nt, Human
ggccucuggcucugcgcaggcuc

SEQ ID NO: 738358 - RNA, 21 nt, Human
ggccugccgcagggccuggau

SEQ ID NO: 738359 - RNA, 23 nt, Human
ggcgccaaugggcuggcgcugag

SEQ ID NO: 738360 - RNA, 21 nt, Human
ggcugagucucugugccagca

SEQ ID NO: 738361 - RNA, 25 nt, Human
ggcugcuggcugagccaugccuagg

SEQ ID NO: 738362 - RNA, 19 nt, Human
gggaccagugcugucgggg

SEQ ID NO: 738363 - RNA, 20 nt, Human
gggagggggcugcuggcuga

SEQ ID NO: 738364 - RNA, 22 nt, Human
gggagggggcugcuggcugagc

SEQ ID NO: 738365 - RNA, 21 nt, Human
gggcaugaaggaggaaagagg

SEQ ID NO: 738366 - RNA, 24 nt, Human
gggcugaggcuucccgccccggcc

SEQ ID NO: 738367 - RNA, 23 nt, Human
gggcugugugggaccagugcugu

SEQ ID NO: 738368 - RNA, 20 nt, Human
gguggugguguugcacugcc

SEQ ID NO: 738369 - RNA, 20 nt, Human
guccgcagacagccccuguc

SEQ ID NO: 738370 - RNA, 20 nt, Human
gugagccgccuggaccugcu

SEQ ID NO: 738371 - RNA, 20 nt, Human
gugcgucuuccaccgggcca

SEQ ID NO: 738372 - RNA, 21 nt, Human
gugcucugccugugcaggagc

SEQ ID NO: 738373 - RNA, 20 nt, Human
guuccagcucuuucugcacc

SEQ ID NO: 738374 - RNA, 21 nt, Human
uacaaaggccagccacguggc

SEQ ID NO: 738375 - RNA, 23 nt, Human
ucagcagccaggcggcccagagc

SEQ ID NO: 738376 - RNA, 22 nt, Human
ucagggagggggcugcuggcug

SEQ ID NO: 738377 - RNA, 21 nt, Human
uccaccgggccagccccucca

SEQ ID NO: 738378 - RNA, 21 nt, Human
ucccagaggccgagaagccuc

SEQ ID NO: 738379 - RNA, 21 nt, Human
ucccgccccggcccagcacuu

SEQ ID NO: 738380 - RNA, 22 nt, Human
uccgcagacagccccuguccag

SEQ ID NO: 738381 - RNA, 24 nt, Human
uccucaaguucagccucaaggucc

SEQ ID NO: 738382 - RNA, 18 nt, Human
uccucucuguucagcucc

SEQ ID NO: 738383 - RNA, 25 nt, Human
uccugccuccuggcugccagcuguu

SEQ ID NO: 738384 - RNA, 19 nt, Human
uccuggaggagcugccccu

SEQ ID NO: 738385 - RNA, 20 nt, Human
uccuggcugccagcuguugu

SEQ ID NO: 738386 - RNA, 23 nt, Human
uccugguccucaggccccggcuc

SEQ ID NO: 738387 - RNA, 24 nt, Human
ucuccagcugcagucucugcuggg

SEQ ID NO: 738388 - RNA, 21 nt, Human
ucuccuccuuuccaguacaaa

SEQ ID NO: 738389 - RNA, 22 nt, Human
ucuccuccuuuccaguacaaag

SEQ ID NO: 738390 - RNA, 24 nt, Human
ucucugugccagcaguugggugcu

SEQ ID NO: 738391 - RNA, 19 nt, Human
ucugcugggcugaccuccg

SEQ ID NO: 738392 - RNA, 20 nt, Human
ugaccuccggcugcaguccc

SEQ ID NO: 738393 - RNA, 22 nt, Human
ugagugggcaguguugagcucc

SEQ ID NO: 738394 - RNA, 19 nt, Human
ugcacccucugggcauccc

SEQ ID NO: 738395 - RNA, 21 nt, Human
ugcagcugcugccgggaggcc

SEQ ID NO: 738396 - RNA, 20 nt, Human
ugccaggggcugaggcuucc

SEQ ID NO: 738397 - RNA, 22 nt, Human
ugccauccccagccccagcagc

SEQ ID NO: 738398 - RNA, 19 nt, Human
ugccccugguaggccugga

SEQ ID NO: 738399 - RNA, 20 nt, Human
ugccugcagcgagaaggccc

SEQ ID NO: 738400 - RNA, 20 nt, Human
ugcgauggcugccaggggcu

SEQ ID NO: 738401 - RNA, 19 nt, Human
ugcgcaggcugcucgcuug

SEQ ID NO: 738402 - RNA, 22 nt, Human
ugcucgcuugccgccgacagga

SEQ ID NO: 738403 - RNA, 21 nt, Human
ugcugcugggccugcagcugc

SEQ ID NO: 738404 - RNA, 19 nt, Human
uggcacagcggcggacggc

SEQ ID NO: 738405 - RNA, 20 nt, Human
uggccugaggccuccccgac

SEQ ID NO: 738406 - RNA, 18 nt, Human
uggcucugcgcaggcucc

SEQ ID NO: 738407 - RNA, 20 nt, Human
ugggagaaaacccggcggua

SEQ ID NO: 738408 - RNA, 23 nt, Human
ugggcauccccaccgaggguucu

SEQ ID NO: 738409 - RNA, 19 nt, Human
ugggccugcagcugcugcc

SEQ ID NO: 738410 - RNA, 21 nt, Human
ugggugcgauggcugccaggg

SEQ ID NO: 738411 - RNA, 18 nt, Human
uguaaugaguacuugcuu

SEQ ID NO: 738412 - RNA, 23 nt, Human
ugucggggccucugccaggaagg

SEQ ID NO: 738413 - RNA, 18 nt, Human
uucagcuccagccaccug

SEQ ID NO: 738414 - RNA, 18 nt, Human
uuccaccgggccagcccc

SEQ ID NO: 738415 - RNA, 20 nt, Human
uuccaccgggccagccccuc

SEQ ID NO: 738416 - RNA, 22 nt, Human
uuccuguggcuucugaggccuc

SEQ ID NO: 738417 - RNA, 23 nt, Human
uuccuguggcuucugaggccucu

SEQ ID NO: 738418 - RNA, 24 nt, Human
uugcacugcccucuccagcugcag

SEQ ID NO: 738419 - RNA, 21 nt, Human
uugcagcagcagcaaugagaa

SEQ ID NO: 738420 - RNA, 26 nt, Human
aaagcccuugucacugagcgcccuuc

SEQ ID NO: 738421 - RNA, 21 nt, Human
aaagggcccacccacaggggc

SEQ ID NO: 738422 - RNA, 22 nt, Human
aacuucgucccauccucuccug

SEQ ID NO: 738423 - RNA, 21 nt, Human
aagcggccuccugagccugcc

SEQ ID NO: 738424 - RNA, 23 nt, Human
aagcggccuccugagccugccaa

SEQ ID NO: 738425 - RNA, 22 nt, Human
aaggaaggcagaaccuagacaa

SEQ ID NO: 738426 - RNA, 24 nt, Human
aaggaaggcagaaccuagacaaaa

SEQ ID NO: 738427 - RNA, 23 nt, Human
aaggcagaaccuagacaaaauca

SEQ ID NO: 738428 - RNA, 20 nt, Human
accacugccugcagcagagc

SEQ ID NO: 738429 - RNA, 26 nt, Human
accagacccccugccagaagagccca

SEQ ID NO: 738430 - RNA, 24 nt, Human
acuucgucccauccucuccugggu

SEQ ID NO: 738431 - RNA, 24 nt, Human
agacccccugccagaagagcccag

SEQ ID NO: 738432 - RNA, 20 nt, Human
agagaccaucgccaccagca

SEQ ID NO: 738433 - RNA, 19 nt, Human
agaggucuuugagggagcu

SEQ ID NO: 738434 - RNA, 22 nt, Human
auggagaaagggcccacccaca

SEQ ID NO: 738435 - RNA, 19 nt, Human
auggcucuggcccucgucc

SEQ ID NO: 738436 - RNA, 22 nt, Human
augggaaggguacucagacagc

SEQ ID NO: 738437 - RNA, 20 nt, Human
caaaaucauccuccuccuga

SEQ ID NO: 738438 - RNA, 18 nt, Human
caaccucccccucuaaca

SEQ ID NO: 738439 - RNA, 20 nt, Human
caaccucccccucuaacaag

SEQ ID NO: 738440 - RNA, 22 nt, Human
cacagaggcgucuccaaggcag

SEQ ID NO: 738441 - RNA, 21 nt, Human
cacagcacaggaccugccuga

SEQ ID NO: 738442 - RNA, 18 nt, Human
cacaggaccugccugagc

SEQ ID NO: 738443 - RNA, 19 nt, Human
cacaggaccugccugagcc

SEQ ID NO: 738444 - RNA, 27 nt, Human
caccagacccccugccagaagagcccc

SEQ ID NO: 738445 - RNA, 21 nt, Human
cagacccccugccagaagagc

SEQ ID NO: 738446 - RNA, 23 nt, Human
cagacccccugccagaagagccc

SEQ ID NO: 738447 - RNA, 20 nt, Human
cagagaaacccugccugcug

SEQ ID NO: 738448 - RNA, 19 nt, Human
cagcagagcuggggcugca

SEQ ID NO: 738449 - RNA, 21 nt, Human
caggcccaaagucccuggagg

SEQ ID NO: 738450 - RNA, 19 nt, Human
cagggcagcucagagaaga

SEQ ID NO: 738451 - RNA, 23 nt, Human
caggggccugcagcacagcacag

SEQ ID NO: 738452 - RNA, 20 nt, Human
ccacacugcagccagagguc

SEQ ID NO: 738453 - RNA, 27 nt, Human
ccacaggggccugcagcacagcacagg

SEQ ID NO: 738454 - RNA, 23 nt, Human
ccagaagagcccagcuccaccau

SEQ ID NO: 738455 - RNA, 22 nt, Human
ccagaagccccucugugccucu

SEQ ID NO: 738456 - RNA, 24 nt, Human
ccagaagccccucugugccucuag

SEQ ID NO: 738457 - RNA, 18 nt, Human
cccagcuccaccaucugg

SEQ ID NO: 738458 - RNA, 23 nt, Human
cccaugguuaaggaaggcagaac

SEQ ID NO: 738459 - RNA, 22 nt, Human
cccuaccaggacacuccucuug

SEQ ID NO: 738460 - RNA, 19 nt, Human
cccuagagcaggggcaacc

SEQ ID NO: 738461 - RNA, 19 nt, Human
ccgggccgggcaugccacg

SEQ ID NO: 738462 - RNA, 22 nt, Human
ccuacaacaaggacuuuggaga

SEQ ID NO: 738463 - RNA, 24 nt, Human
ccuaccaggacacuccucuugcca

SEQ ID NO: 738464 - RNA, 22 nt, Human
ccuccugauaccccugcugcuc

SEQ ID NO: 738465 - RNA, 25 nt, Human
ccugcugacuugccucauuuccugc

SEQ ID NO: 738466 - RNA, 19 nt, Human
ccugcugcucugggaugcc

SEQ ID NO: 738467 - RNA, 20 nt, Human
ccugggugaugcuccagaag

SEQ ID NO: 738468 - RNA, 24 nt, Human
ccugggugaugcuccagaaggcuc

SEQ ID NO: 738469 - RNA, 22 nt, Human
cucagugggcccuggagauccu

SEQ ID NO: 738470 - RNA, 22 nt, Human
cucccaacuccaacuucguccc

SEQ ID NO: 738471 - RNA, 24 nt, Human
cuccugagccugccaagacggagc

SEQ ID NO: 738472 - RNA, 23 nt, Human
cuccugauaagcggccuccugag

SEQ ID NO: 738473 - RNA, 23 nt, Human
cugcagcaccuuaaaaaugaacu

SEQ ID NO: 738474 - RNA, 18 nt, Human
cugugggagccaggguag

SEQ ID NO: 738475 - RNA, 18 nt, Human
cuuagacugugggcagcc

SEQ ID NO: 738476 - RNA, 21 nt, Human
gaccacggccucacugcuucu

SEQ ID NO: 738477 - RNA, 19 nt, Human
gagcaggggcaaccucccc

SEQ ID NO: 738478 - RNA, 19 nt, Human
gaggauggggcagauggca

SEQ ID NO: 738479 - RNA, 20 nt, Human
gcaccagacccccugccaga

SEQ ID NO: 738480 - RNA, 19 nt, Human
gcagauggcagcuaagucc

SEQ ID NO: 738481 - RNA, 24 nt, Human
gcagcaccuuaaaaaugaacuuga

SEQ ID NO: 738482 - RNA, 19 nt, Human
gcaggggcaaccucccccu

SEQ ID NO: 738483 - RNA, 18 nt, Human
gccaggguaggaaguccc

SEQ ID NO: 738484 - RNA, 19 nt, Human
ggaaggguacucagacagc

SEQ ID NO: 738485 - RNA, 18 nt, Human
ggccugcagcacagcaca

SEQ ID NO: 738486 - RNA, 18 nt, Human
gggaaacugaggcacaaa

SEQ ID NO: 738487 - RNA, 19 nt, Human
gggaugccacugcccacuu

SEQ ID NO: 738488 - RNA, 20 nt, Human
gggauggauggcgcccacuu

SEQ ID NO: 738489 - RNA, 20 nt, Human
gggcagcucagagaagagug

SEQ ID NO: 738490 - RNA, 22 nt, Human
gggcccuggagauccuggugca

SEQ ID NO: 738491 - RNA, 18 nt, Human
gggcggugguucuguggu

SEQ ID NO: 738492 - RNA, 24 nt, Human
gugcagaguccccagggcagcuca

SEQ ID NO: 738493 - RNA, 24 nt, Human
uaaaaaugaacuugagauauagaa

SEQ ID NO: 738494 - RNA, 24 nt, Human
uaaggaaggcagaaccuagacaaa

SEQ ID NO: 738495 - RNA, 23 nt, Human
uaaguccacacugcagccagagg

SEQ ID NO: 738496 - RNA, 19 nt, Human
uaggaaggguacucaggug

SEQ ID NO: 738497 - RNA, 20 nt, Human
uauagaaccuucuggcacau

SEQ ID NO: 738498 - RNA, 21 nt, Human
uccaacuucgucccauccucu

SEQ ID NO: 738499 - RNA, 21 nt, Human
uccgggaagcaccagaccccc

SEQ ID NO: 738500 - RNA, 22 nt, Human
uccucuggcccuggacgcugcc

SEQ ID NO: 738501 - RNA, 30 nt, Human
uccugagccugccaagacggagcugcccuu

SEQ ID NO: 738502 - RNA, 21 nt, Human
ucucugcugccacuucaugga

SEQ ID NO: 738503 - RNA, 25 nt, Human
ucugaagcuagagcaggccgggguc

SEQ ID NO: 738504 - RNA, 20 nt, Human
ugaaccuagcagugccagaa

SEQ ID NO: 738505 - RNA, 18 nt, Human
ugccagaagagcccagcu

SEQ ID NO: 738506 - RNA, 21 nt, Human
ugccugagccaggcagcaagc

SEQ ID NO: 738507 - RNA, 20 nt, Human
uggaaggaaaagugcuucac

SEQ ID NO: 738508 - RNA, 20 nt, Human
ugggauggauggcgcccacu

SEQ ID NO: 738509 - RNA, 18 nt, Human
ugggcccuggagauccug

SEQ ID NO: 738510 - RNA, 21 nt, Human
ugguuaaggaaggcagaaccu

SEQ ID NO: 738511 - RNA, 19 nt, Human
ugucucagugggcccugga

SEQ ID NO: 738512 - RNA, 24 nt, Human
uguuucgcccuaaaggaagcccug

SEQ ID NO: 738513 - RNA, 23 nt, Human
uuaaaacaaguaucaggcagggc

SEQ ID NO: 738514 - RNA, 22 nt, Human
uucccacuuagacugugggcag

SEQ ID NO: 738515 - RNA, 24 nt, Human
uuccgcacgagaccacggccucac

SEQ ID NO: 738516 - RNA, 20 nt, Human
uuccugcccaugguuaagga

SEQ ID NO: 738517 - RNA, 23 nt, Human
aaaaaaaaaaaaaaagagaagag

SEQ ID NO: 738518 - RNA, 24 nt, Human
aaaaccagaaggaacccccgccag

SEQ ID NO: 738519 - RNA, 22 nt, Human
aaacaaacaaaaaaaacaggac

SEQ ID NO: 738520 - RNA, 23 nt, Human
aaagagaaugaggaggccaccag

SEQ ID NO: 738521 - RNA, 25 nt, Human
aacaaacaaacaaacaaaaaaaaca

SEQ ID NO: 738522 - RNA, 20 nt, Human
aacauggugaaaucccuucu

SEQ ID NO: 738523 - RNA, 20 nt, Human
aaccaacgaugagcccaucu

SEQ ID NO: 738524 - RNA, 23 nt, Human
aacucggucaacccagggugcag

SEQ ID NO: 738525 - RNA, 23 nt, Human
aagauacucuccccugggcacca

SEQ ID NO: 738526 - RNA, 23 nt, Human
aagcagcugugccuccgccccuc

SEQ ID NO: 738527 - RNA, 19 nt, Human
aaggcuggaagaagagccu

SEQ ID NO: 738528 - RNA, 21 nt, Human
aaggggaaagggccucuuaga

SEQ ID NO: 738529 - RNA, 21 nt, Human
acacgcaggguggguggacag

SEQ ID NO: 738530 - RNA, 21 nt, Human
acagagccccaaugcccagac

SEQ ID NO: 738531 - RNA, 21 nt, Human
acagcggcgggguccucacgc

SEQ ID NO: 738532 - RNA, 19 nt, Human
accacgcccaagccaauuu

SEQ ID NO: 738533 - RNA, 18 nt, Human
accagagcugcacgcagc

SEQ ID NO: 738534 - RNA, 27 nt, Human
acccaugcaccccaaggccccgagcaa

SEQ ID NO: 738535 - RNA, 18 nt, Human
accccaaggccccgagca

SEQ ID NO: 738536 - RNA, 23 nt, Human
accggaacacgggaguggaccug

SEQ ID NO: 738537 - RNA, 23 nt, Human
accucagcaccccugaguagcug

SEQ ID NO: 738538 - RNA, 20 nt, Human
accuuaggaguuugagacca

SEQ ID NO: 738539 - RNA, 25 nt, Human
acuccagccugggcagcaagaguga

SEQ ID NO: 738540 - RNA, 22 nt, Human
acucgcugggcucaagaagaca

SEQ ID NO: 738541 - RNA, 18 nt, Human
acugcacuccagccuggg

SEQ ID NO: 738542 - RNA, 21 nt, Human
acugcacuccagccugggcag

SEQ ID NO: 738543 - RNA, 24 nt, Human
acugcacuccagccugggcagcaa

SEQ ID NO: 738544 - RNA, 27 nt, Human
acugcacuccagccugggcagcaagag

SEQ ID NO: 738545 - RNA, 27 nt, Human
agaagagccugaccggccgccuagucc

SEQ ID NO: 738546 - RNA, 25 nt, Human
agacacggcccaggccccacucucc

SEQ ID NO: 738547 - RNA, 22 nt, Human
agacaggaggccggcucacaac

SEQ ID NO: 738548 - RNA, 20 nt, Human
agagcgcagucaaaagaagc

SEQ ID NO: 738549 - RNA, 24 nt, Human
agaggcuggggccuuggugggggc

SEQ ID NO: 738550 - RNA, 21 nt, Human
agcaggagucgggccccaggg

SEQ ID NO: 738551 - RNA, 24 nt, Human
agccacugcacuccagccugggca

SEQ ID NO: 738552 - RNA, 24 nt, Human
agcccggccaacauggugaaaucc

SEQ ID NO: 738553 - RNA, 21 nt, Human
agcgggggagcagguggcugu

SEQ ID NO: 738554 - RNA, 21 nt, Human
agcuuggugacaaggccacug

SEQ ID NO: 738555 - RNA, 18 nt, Human
aggagggagcgggggagc

SEQ ID NO: 738556 - RNA, 20 nt, Human
aggaguuugagaccagcccg

SEQ ID NO: 738557 - RNA, 18 nt, Human
aggcaggacgaucacuug

SEQ ID NO: 738558 - RNA, 24 nt, Human
aggcaggacgaucacuugaacccg

SEQ ID NO: 738559 - RNA, 22 nt, Human
aggcagguggaugaccuuaggg

SEQ ID NO: 738560 - RNA, 18 nt, Human
aggccgaggcagguggau

SEQ ID NO: 738561 - RNA, 24 nt, Human
aggcggagguugcagugacccgag

SEQ ID NO: 738562 - RNA, 24 nt, Human
aggcucacgccuguaaucucagca

SEQ ID NO: 738563 - RNA, 25 nt, Human
agggagcgggggagcagguggcugu

SEQ ID NO: 738564 - RNA, 21 nt, Human
agggagcugggugugaggacc

SEQ ID NO: 738565 - RNA, 23 nt, Human
aggggagggcuccucucuccaag

SEQ ID NO: 738566 - RNA, 23 nt, Human
aggggccgaggggauggccgggg

SEQ ID NO: 738567 - RNA, 22 nt, Human
agggggcaugcagacaggaggc

SEQ ID NO: 738568 - RNA, 21 nt, Human
agggguggggagcggcccugg

SEQ ID NO: 738569 - RNA, 21 nt, Human
aggugcauggggggagagagg

SEQ ID NO: 738570 - RNA, 23 nt, Human
aggugggagcagagggaggaggg

SEQ ID NO: 738571 - RNA, 23 nt, Human
aggugggccucggccacagugcu

SEQ ID NO: 738572 - RNA, 20 nt, Human
aguggaccugcugagcgucc

SEQ ID NO: 738573 - RNA, 23 nt, Human
aguggaggccagguggggcuggu

SEQ ID NO: 738574 - RNA, 18 nt, Human
aguggcucuggcgcaccu

SEQ ID NO: 738575 - RNA, 23 nt, Human
auauacaguaaaaacgaaccaac

SEQ ID NO: 738576 - RNA, 24 nt, Human
auccagcacccccacucccgccgc

SEQ ID NO: 738577 - RNA, 22 nt, Human
caaacaaacaaacaaaaaaaac

SEQ ID NO: 738578 - RNA, 26 nt, Human
caaaucagagagaacugcaagggggc

SEQ ID NO: 738579 - RNA, 24 nt, Human
caacauggugaaaucccuucucua

SEQ ID NO: 738580 - RNA, 20 nt, Human
caagcuccugccucccgcag

SEQ ID NO: 738581 - RNA, 18 nt, Human
caaggcaaagagaggagc

SEQ ID NO: 738582 - RNA, 21 nt, Human
caaggccacugaaugcuggcu

SEQ ID NO: 738583 - RNA, 22 nt, Human
caaggccacugaaugcuggcug

SEQ ID NO: 738584 - RNA, 18 nt, Human
cacaggacccuggggaac

SEQ ID NO: 738585 - RNA, 24 nt, Human
cacaggcacaagcuaccacgccca

SEQ ID NO: 738586 - RNA, 19 nt, Human
caccaggacugauggccag

SEQ ID NO: 738587 - RNA, 18 nt, Human
cacccagccaccagcccu

SEQ ID NO: 738588 - RNA, 18 nt, Human
cacccccacucccgccgc

SEQ ID NO: 738589 - RNA, 21 nt, Human
cacccugguagagggcgccuc

SEQ ID NO: 738590 - RNA, 22 nt, Human
caccucagcaccccugaguagc

SEQ ID NO: 738591 - RNA, 25 nt, Human
caccucagcaccccugaguagcugg

SEQ ID NO: 738592 - RNA, 19 nt, Human
caccuguaauccccagcua

SEQ ID NO: 738593 - RNA, 25 nt, Human
caccuguaauccccagcuacucagg

SEQ ID NO: 738594 - RNA, 24 nt, Human
cacgccuguaaucucagcacucug

SEQ ID NO: 738595 - RNA, 23 nt, Human
cacuccagccugggcagcaagag

SEQ ID NO: 738596 - RNA, 24 nt, Human
cacuccagccugggcagcaagagu

SEQ ID NO: 738597 - RNA, 25 nt, Human
cacuccagccugggcagcaagagug

SEQ ID NO: 738598 - RNA, 23 nt, Human
cacucccuuugccaucugcggcc

SEQ ID NO: 738599 - RNA, 18 nt, Human
cacugcacuccagccugg

SEQ ID NO: 738600 - RNA, 19 nt, Human
cacugcacuccagccuggg

SEQ ID NO: 738601 - RNA, 23 nt, Human
cacugcacuccagccugggcagc

SEQ ID NO: 738602 - RNA, 24 nt, Human
cacugcacuccagccugggcagca

SEQ ID NO: 738603 - RNA, 25 nt, Human
cagaagccugagacagaacaaacca

SEQ ID NO: 738604 - RNA, 21 nt, Human
cagagagcaggggagggcucc

SEQ ID NO: 738605 - RNA, 24 nt, Human
cagcacucugggaggccgaggcag

SEQ ID NO: 738606 - RNA, 26 nt, Human
cagcacucugggaggccgaggcaggu

SEQ ID NO: 738607 - RNA, 30 nt, Human
cagcagacacggcccaggccccacucuccu

SEQ ID NO: 738608 - RNA, 19 nt, Human
cagcaggcugcaugggccu

SEQ ID NO: 738609 - RNA, 22 nt, Human
cagcaggcugcaugggccucgg

SEQ ID NO: 738610 - RNA, 18 nt, Human
cagcagugggcucauggc

SEQ ID NO: 738611 - RNA, 25 nt, Human
cagcccacgagggacugugugccag

SEQ ID NO: 738612 - RNA, 18 nt, Human
cagccccucggcaaaguc

SEQ ID NO: 738613 - RNA, 20 nt, Human
cagcugugccuccgccccuc

SEQ ID NO: 738614 - RNA, 20 nt, Human
caggacccuggggaacgggg

SEQ ID NO: 738615 - RNA, 24 nt, Human
caggagccuaaggcaggacgauca

SEQ ID NO: 738616 - RNA, 21 nt, Human
caggcagagccagcggaggcc

SEQ ID NO: 738617 - RNA, 25 nt, Human
caggcagagccagcggaggccacac

SEQ ID NO: 738618 - RNA, 23 nt, Human
cagggccagcucugcgccacccc

SEQ ID NO: 738619 - RNA, 20 nt, Human
caguucucuucugcaggccu

SEQ ID NO: 738620 - RNA, 22 nt, Human
cauccagcacccccacucccgc

SEQ ID NO: 738621 - RNA, 20 nt, Human
cauccggaacaaggccaggc

SEQ ID NO: 738622 - RNA, 21 nt, Human
caugugcaggaguaugugcgu

SEQ ID NO: 738623 - RNA, 22 nt, Human
ccacagagccccaaugcccaga

SEQ ID NO: 738624 - RNA, 20 nt, Human
ccaccagguccucccuggca

SEQ ID NO: 738625 - RNA, 23 nt, Human
ccacccgcuccuaccgaucugga

SEQ ID NO: 738626 - RNA, 20 nt, Human
ccacugcacuccagccuggg

SEQ ID NO: 738627 - RNA, 21 nt, Human
ccacugcacuccagccugggc

SEQ ID NO: 738628 - RNA, 22 nt, Human
ccacugcacuccagccugggca

SEQ ID NO: 738629 - RNA, 22 nt, Human
ccacugcacuccagccugggca

SEQ ID NO: 738630 - RNA, 23 nt, Human
ccacugcacuccagccugggcag

SEQ ID NO: 738631 - RNA, 24 nt, Human
ccacugcacuccagccugggcagc

SEQ ID NO: 738632 - RNA, 20 nt, Human
ccagagccaggugagcagca

SEQ ID NO: 738633 - RNA, 21 nt, Human
ccagagccaggugagcagcag

SEQ ID NO: 738634 - RNA, 26 nt, Human
ccagaggcuggggccuuggugggggc

SEQ ID NO: 738635 - RNA, 21 nt, Human
ccaggcccacgguggccaugc

SEQ ID NO: 738636 - RNA, 22 nt, Human
ccaugcuguccacugcuggguc

SEQ ID NO: 738637 - RNA, 27 nt, Human
cccaaggccccgagcacugagggcccc

SEQ ID NO: 738638 - RNA, 19 nt, Human
cccagcaccgggcugagac

SEQ ID NO: 738639 - RNA, 23 nt, Human
cccagcagacacggcccaggccc

SEQ ID NO: 738640 - RNA, 24 nt, Human
cccagccccagccgcucagcccac

SEQ ID NO: 738641 - RNA, 22 nt, Human
cccaggagguuuaccuuuaaaa

SEQ ID NO: 738642 - RNA, 18 nt, Human
cccagggcuccgcagggg

SEQ ID NO: 738643 - RNA, 18 nt, Human
cccaggugugcugcuggc

SEQ ID NO: 738644 - RNA, 18 nt, Human
cccaugcaccccaaggcc

SEQ ID NO: 738645 - RNA, 19 nt, Human
cccaugcaccccaaggccc

SEQ ID NO: 738646 - RNA, 21 nt, Human
cccauggugaugccaggccuu

SEQ ID NO: 738647 - RNA, 22 nt, Human
ccccacugccccugaacaucug

SEQ ID NO: 738648 - RNA, 19 nt, Human
ccccagccccagccgcuca

SEQ ID NO: 738649 - RNA, 22 nt, Human
ccccagccccagccgcucagcc

SEQ ID NO: 738650 - RNA, 21 nt, Human
cccccggccaggcaccuccca

SEQ ID NO: 738651 - RNA, 24 nt, Human
cccccggccaggcaccucccagca

SEQ ID NO: 738652 - RNA, 20 nt, Human
ccccggauggcuacugcaag

SEQ ID NO: 738653 - RNA, 24 nt, Human
ccccugaguagcugggaccacagg

SEQ ID NO: 738654 - RNA, 21 nt, Human
ccccugggcaccagagggccc

SEQ ID NO: 738655 - RNA, 23 nt, Human
cccggccaacauggugaaauccc

SEQ ID NO: 738656 - RNA, 18 nt, Human
cccugggucaccaggccc

SEQ ID NO: 738657 - RNA, 22 nt, Human
cccuucucuacuaaaaauacaa

SEQ ID NO: 738658 - RNA, 22 nt, Human
ccgugccuggagccccccacug

SEQ ID NO: 738659 - RNA, 21 nt, Human
ccucaagcuccugccucccgc

SEQ ID NO: 738660 - RNA, 20 nt, Human
ccucggccaggcccagcacc

SEQ ID NO: 738661 - RNA, 24 nt, Human
ccugacacauggcucccagcagac

SEQ ID NO: 738662 - RNA, 23 nt, Human
ccugcccuugcccugguuccggu

SEQ ID NO: 738663 - RNA, 24 nt, Human
ccugggcucaagugaucuaucccc

SEQ ID NO: 738664 - RNA, 21 nt, Human
ccugugcacgagcgggagggg

SEQ ID NO: 738665 - RNA, 24 nt, Human
ccuguggccacaacagcauucacu

SEQ ID NO: 738666 - RNA, 21 nt, Human
ccuugugaugucaccaaagcc

SEQ ID NO: 738667 - RNA, 21 nt, Human
ccuuuaaaaaaacaaacaaac

SEQ ID NO: 738668 - RNA, 22 nt, Human
cgaagacccaaaaaccagaagg

SEQ ID NO: 738669 - RNA, 20 nt, Human
cgacgccgccgggcgcuguc

SEQ ID NO: 738670 - RNA, 22 nt, Human
cgagggacugugugccaggccc

SEQ ID NO: 738671 - RNA, 21 nt, Human
cgcaguggacaguggcucugg

SEQ ID NO: 738672 - RNA, 22 nt, Human
cgcccaggaggcggaccucaug

SEQ ID NO: 738673 - RNA, 23 nt, Human
cgccuguaaucucagcacucugg

SEQ ID NO: 738674 - RNA, 24 nt, Human
cgccuguaaucucagcacucuggg

SEQ ID NO: 738675 - RNA, 20 nt, Human
cgcugccgggcagaggggcc

SEQ ID NO: 738676 - RNA, 21 nt, Human
cggagcagccccucggcaaag

SEQ ID NO: 738677 - RNA, 21 nt, Human
cggcaauccucccaccucagc

SEQ ID NO: 738678 - RNA, 19 nt, Human
cggcccgaacuucacgcaa

SEQ ID NO: 738679 - RNA, 19 nt, Human
cgggccccagggcuggcag

SEQ ID NO: 738680 - RNA, 21 nt, Human
cgggguccggagcagccccuc

SEQ ID NO: 738681 - RNA, 19 nt, Human
cgucuauaccaacagagca

SEQ ID NO: 738682 - RNA, 22 nt, Human
cuaguccagauggagagaccuc

SEQ ID NO: 738683 - RNA, 23 nt, Human
cucacgccuguaaucucagcacu

SEQ ID NO: 738684 - RNA, 24 nt, Human
cucacgccuguaaucucagcacuc

SEQ ID NO: 738685 - RNA, 19 nt, Human
cuccaucucaaaaaaaaaa

SEQ ID NO: 738686 - RNA, 20 nt, Human
cuccccagcuccggcaaucc

SEQ ID NO: 738687 - RNA, 24 nt, Human
cucccccgugugugugugugugug

SEQ ID NO: 738688 - RNA, 19 nt, Human
cucccugggguucccucca

SEQ ID NO: 738689 - RNA, 23 nt, Human
cucuagcugcccagggcggcacc

SEQ ID NO: 738690 - RNA, 20 nt, Human
cucucagaguggggucagcu

SEQ ID NO: 738691 - RNA, 24 nt, Human
cucugcggcccgaacuucacgcaa

SEQ ID NO: 738692 - RNA, 19 nt, Human
cugaucuugaauuccuggg

SEQ ID NO: 738693 - RNA, 20 nt, Human
cuggcuuccuccucccuggg

SEQ ID NO: 738694 - RNA, 18 nt, Human
cuggggagccgagggcuc

SEQ ID NO: 738695 - RNA, 18 nt, Human
cugucucccugccugggc

SEQ ID NO: 738696 - RNA, 18 nt, Human
cugucucccugccugggc

SEQ ID NO: 738697 - RNA, 23 nt, Human
cuguuccagggccccucaaggcu

SEQ ID NO: 738698 - RNA, 20 nt, Human
cuugaauuccugggcucaag

SEQ ID NO: 738699 - RNA, 22 nt, Human
cuugcucugcggccugcccuuc

SEQ ID NO: 738700 - RNA, 20 nt, Human
cuugcuggccagggaggcgg

SEQ ID NO: 738701 - RNA, 18 nt, Human
gacacccagccaccagcc

SEQ ID NO: 738702 - RNA, 23 nt, Human
gacacgcaggguggguggacagg

SEQ ID NO: 738703 - RNA, 23 nt, Human
gagauugagccacugcacuccag

SEQ ID NO: 738704 - RNA, 21 nt, Human
gagcaggagucgggccccagg

SEQ ID NO: 738705 - RNA, 21 nt, Human
gagcaugugcaagugggcgug

SEQ ID NO: 738706 - RNA, 21 nt, Human
gagguugcagugacccgagau

SEQ ID NO: 738707 - RNA, 23 nt, Human
gagguugcagugacccgagauug

SEQ ID NO: 738708 - RNA, 20 nt, Human
gaguuuguuucccuuuuagg

SEQ ID NO: 738709 - RNA, 22 nt, Human
gcaaagcucuggcaccaggacu

SEQ ID NO: 738710 - RNA, 20 nt, Human
gcaagagugaaacuccaucu

SEQ ID NO: 738711 - RNA, 23 nt, Human
gcaaggcaaagagaggagccucc

SEQ ID NO: 738712 - RNA, 21 nt, Human
gcagaggacaaaaagcagcga

SEQ ID NO: 738713 - RNA, 18 nt, Human
gcaggagucgggccccag

SEQ ID NO: 738714 - RNA, 19 nt, Human
gccaaauacgcuguguccc

SEQ ID NO: 738715 - RNA, 24 nt, Human
gccaacauggugaaaucccuucuc

SEQ ID NO: 738716 - RNA, 19 nt, Human
gccaagguucuuacggcug

SEQ ID NO: 738717 - RNA, 19 nt, Human
gccacagaagccugagaca

SEQ ID NO: 738718 - RNA, 19 nt, Human
gccacugcacuccagccug

SEQ ID NO: 738719 - RNA, 22 nt, Human
gccacugcacuccagccugggc

SEQ ID NO: 738720 - RNA, 23 nt, Human
gccacugcacuccagccugggca

SEQ ID NO: 738721 - RNA, 25 nt, Human
gccagggccggaacgggagcggcga

SEQ ID NO: 738722 - RNA, 20 nt, Human
gcccggaggccguugagcgc

SEQ ID NO: 738723 - RNA, 19 nt, Human
gccgggaccccauucccca

SEQ ID NO: 738724 - RNA, 24 nt, Human
gccugacacccagccaccagcccu

SEQ ID NO: 738725 - RNA, 20 nt, Human
gccugcccuucuggcggcug

SEQ ID NO: 738726 - RNA, 21 nt, Human
gcggcacccaugcaccccaag

SEQ ID NO: 738727 - RNA, 21 nt, Human
gcgguggaugcccucugggcc

SEQ ID NO: 738728 - RNA, 19 nt, Human
gcucuggcgcaccugggcu

SEQ ID NO: 738729 - RNA, 24 nt, Human
gcugacaagggaaggagggagcgg

SEQ ID NO: 738730 - RNA, 20 nt, Human
gcuggggccuuggugggggc

SEQ ID NO: 738731 - RNA, 25 nt, Human
ggaacaugugcaggaguaugugcgu

SEQ ID NO: 738732 - RNA, 21 nt, Human
ggaaggagggagcgggggagc

SEQ ID NO: 738733 - RNA, 21 nt, Human
ggacauggcccggaccaggcc

SEQ ID NO: 738734 - RNA, 20 nt, Human
ggagccccagaggggcuggg

SEQ ID NO: 738735 - RNA, 18 nt, Human
ggagcggcgacagcggcg

SEQ ID NO: 738736 - RNA, 24 nt, Human
ggaggcucacgccuguaaucucag

SEQ ID NO: 738737 - RNA, 18 nt, Human
ggagggcacugaggccgc

SEQ ID NO: 738738 - RNA, 22 nt, Human
ggagguugcagugacccgagau

SEQ ID NO: 738739 - RNA, 24 nt, Human
ggagguugcagugacccgagauug

SEQ ID NO: 738740 - RNA, 19 nt, Human
ggaugccaaccucacaggg

SEQ ID NO: 738741 - RNA, 21 nt, Human
ggccagaggcuggggccuugg

SEQ ID NO: 738742 - RNA, 20 nt, Human
ggccucggccacagugcucg

SEQ ID NO: 738743 - RNA, 24 nt, Human
ggccugggugugcagggagcuggg

SEQ ID NO: 738744 - RNA, 25 nt, Human
ggccuugugaugucaccaaagccag

SEQ ID NO: 738745 - RNA, 21 nt, Human
ggcgacagcggcgggguccuc

SEQ ID NO: 738746 - RNA, 23 nt, Human
ggcgcggaggcucacgccuguaa

SEQ ID NO: 738747 - RNA, 18 nt, Human
ggcggcugcuguccagga

SEQ ID NO: 738748 - RNA, 23 nt, Human
ggcgucccuggggcuugggcaau

SEQ ID NO: 738749 - RNA, 20 nt, Human
ggcucacgccuguaaucuca

SEQ ID NO: 738750 - RNA, 21 nt, Human
ggcucacgccuguaaucucag

SEQ ID NO: 738751 - RNA, 21 nt, Human
ggcuggagugggccuugaccu

SEQ ID NO: 738752 - RNA, 23 nt, Human
ggcuggggccuuggugggggcgg

SEQ ID NO: 738753 - RNA, 19 nt, Human
gggaagacggggaccguag

SEQ ID NO: 738754 - RNA, 18 nt, Human
gggaaggcagaggguccc

SEQ ID NO: 738755 - RNA, 26 nt, Human
gggacgcugucagaguuuguuucccu

SEQ ID NO: 738756 - RNA, 18 nt, Human
gggccgaggggauggccg

SEQ ID NO: 738757 - RNA, 20 nt, Human
gggcggcacccaugcacccc

SEQ ID NO: 738758 - RNA, 25 nt, Human
ggggagagaggugcuuggggugggg

SEQ ID NO: 738759 - RNA, 19 nt, Human
ggggcaugcagacaggagg

SEQ ID NO: 738760 - RNA, 18 nt, Human
ggggcggggggcgggcgg

SEQ ID NO: 738761 - RNA, 18 nt, Human
ggggcggggggcgggcgg

SEQ ID NO: 738762 - RNA, 25 nt, Human
ggggcuggggccaccaaguggaggc

SEQ ID NO: 738763 - RNA, 20 nt, Human
gggucuggcgucccuggggc

SEQ ID NO: 738764 - RNA, 22 nt, Human
ggugcugucgggggccuugcuc

SEQ ID NO: 738765 - RNA, 18 nt, Human
ggugugaggaccaugcug

SEQ ID NO: 738766 - RNA, 18 nt, Human
ggugugcagggagcuggg

SEQ ID NO: 738767 - RNA, 18 nt, Human
guggagcuuggugacaag

SEQ ID NO: 738768 - RNA, 18 nt, Human
guggaggccagguggggc

SEQ ID NO: 738769 - RNA, 20 nt, Human
guggccacagggggcaugca

SEQ ID NO: 738770 - RNA, 21 nt, Human
gugugugugugugugugugug

SEQ ID NO: 738771 - RNA, 21 nt, Human
gugugugugugugugugugug

SEQ ID NO: 738772 - RNA, 18 nt, Human
guuuguuucccuuuuagg

SEQ ID NO: 738773 - RNA, 19 nt, Human
uaaggcaggacgaucacuu

SEQ ID NO: 738774 - RNA, 20 nt, Human
uaaggcaggacgaucacuug

SEQ ID NO: 738775 - RNA, 24 nt, Human
uaaggcaggacgaucacuugaacc

SEQ ID NO: 738776 - RNA, 18 nt, Human
uagcugcccagggcggca

SEQ ID NO: 738777 - RNA, 24 nt, Human
uaggguggaacucggucaacccag

SEQ ID NO: 738778 - RNA, 18 nt, Human
uaggugcgaaccacugcc

SEQ ID NO: 738779 - RNA, 22 nt, Human
uauuuuuuuuuauugagacagc

SEQ ID NO: 738780 - RNA, 19 nt, Human
ucaaaaaaaaaaaaaaaga

SEQ ID NO: 738781 - RNA, 24 nt, Human
ucacuugaacccgggaggcggagg

SEQ ID NO: 738782 - RNA, 19 nt, Human
ucagaguuuguuucccuuu

SEQ ID NO: 738783 - RNA, 21 nt, Human
ucagggcugccugacacccag

SEQ ID NO: 738784 - RNA, 23 nt, Human
uccaucucaaaaaaaaaaaaaaa

SEQ ID NO: 738785 - RNA, 25 nt, Human
ucccacagagccccaaugcccagag

SEQ ID NO: 738786 - RNA, 20 nt, Human
ucccagauccccggacaccc

SEQ ID NO: 738787 - RNA, 18 nt, Human
uccccagaugggucuggc

SEQ ID NO: 738788 - RNA, 25 nt, Human
uccccagaugggucuggcgucccug

SEQ ID NO: 738789 - RNA, 24 nt, Human
uccccagcuccggcaauccuccca

SEQ ID NO: 738790 - RNA, 19 nt, Human
uccccaggugugcugcugg

SEQ ID NO: 738791 - RNA, 27 nt, Human
ucccccgugugugugugugugugugug

SEQ ID NO: 738792 - RNA, 19 nt, Human
ucccuggggcuugggcaau

SEQ ID NO: 738793 - RNA, 21 nt, Human
ucccugggguucccuccacgg

SEQ ID NO: 738794 - RNA, 18 nt, Human
uccucccaccucagcacc

SEQ ID NO: 738795 - RNA, 18 nt, Human
uccugggcucaagugauc

SEQ ID NO: 738796 - RNA, 21 nt, Human
ucggagccugguggccacagg

SEQ ID NO: 738797 - RNA, 19 nt, Human
ucggcaaagucuggggagc

SEQ ID NO: 738798 - RNA, 18 nt, Human
ucucaggcuggagugggc

SEQ ID NO: 738799 - RNA, 22 nt, Human
ucucaggcuggagugggugggu

SEQ ID NO: 738800 - RNA, 22 nt, Human
ucucaggggagcugcuuucccg

SEQ ID NO: 738801 - RNA, 22 nt, Human
ucucccugccugggcugggacu

SEQ ID NO: 738802 - RNA, 22 nt, Human
ucucuacuaaaaauacaaaaaa

SEQ ID NO: 738803 - RNA, 22 nt, Human
ucugccuacauuuugguggcac

SEQ ID NO: 738804 - RNA, 22 nt, Human
ucugcggcccaggagguuuacc

SEQ ID NO: 738805 - RNA, 23 nt, Human
ucugggggaaggugcagcagcca

SEQ ID NO: 738806 - RNA, 23 nt, Human
ucuugggggggaugggggaugcc

SEQ ID NO: 738807 - RNA, 18 nt, Human
ugaaaggugcugacuguu

SEQ ID NO: 738808 - RNA, 20 nt, Human
ugaacaucugugaagauggu

SEQ ID NO: 738809 - RNA, 19 nt, Human
ugacacccagccaccagcc

SEQ ID NO: 738810 - RNA, 23 nt, Human
ugacccggcucaaguccacccaa

SEQ ID NO: 738811 - RNA, 19 nt, Human
ugagacagggucucaggcu

SEQ ID NO: 738812 - RNA, 24 nt, Human
ugagaccagcccggccaacauggu

SEQ ID NO: 738813 - RNA, 23 nt, Human
ugagcccuguucuagaucacacc

SEQ ID NO: 738814 - RNA, 19 nt, Human
ugagcugccccacagccga

SEQ ID NO: 738815 - RNA, 19 nt, Human
ugaggaggccaccaggucc

SEQ ID NO: 738816 - RNA, 20 nt, Human
ugagggccccagcgcagacg

SEQ ID NO: 738817 - RNA, 19 nt, Human
ugagucggcagcagugggc

SEQ ID NO: 738818 - RNA, 26 nt, Human
ugauggccagaggcuggggccuuuuc

SEQ ID NO: 738819 - RNA, 24 nt, Human
ugcacgagcgggagggguggcugg

SEQ ID NO: 738820 - RNA, 18 nt, Human
ugcagccccgagucagag

SEQ ID NO: 738821 - RNA, 21 nt, Human
ugcagggagcugggugugagg

SEQ ID NO: 738822 - RNA, 19 nt, Human
ugcagggcagcccuccaga

SEQ ID NO: 738823 - RNA, 18 nt, Human
ugcagggguggggagcgg

SEQ ID NO: 738824 - RNA, 21 nt, Human
ugcccagacuguggccugcaa

SEQ ID NO: 738825 - RNA, 18 nt, Human
ugccuccgccccucggcc

SEQ ID NO: 738826 - RNA, 24 nt, Human
ugcgaaccacugccuggacagagc

SEQ ID NO: 738827 - RNA, 21 nt, Human
ugcggacgaagacccaaaaac

SEQ ID NO: 738828 - RNA, 21 nt, Human
ugcgugagcaugugcaagugg

SEQ ID NO: 738829 - RNA, 25 nt, Human
ugcucugcggccugcccuucuggcg

SEQ ID NO: 738830 - RNA, 21 nt, Human
uggaagaagagccugaccggc

SEQ ID NO: 738831 - RNA, 20 nt, Human
uggagccccagaggggcugg

SEQ ID NO: 738832 - RNA, 19 nt, Human
uggagccccccacugcccc

SEQ ID NO: 738833 - RNA, 20 nt, Human
uggaggccagguggggcugg

SEQ ID NO: 738834 - RNA, 18 nt, Human
uggaugaccuuaggaguu

SEQ ID NO: 738835 - RNA, 21 nt, Human
uggcaggggccugccaaacag

SEQ ID NO: 738836 - RNA, 20 nt, Human
uggccacagggggcaugcag

SEQ ID NO: 738837 - RNA, 19 nt, Human
uggccagggaggcggggug

SEQ ID NO: 738838 - RNA, 18 nt, Human
uggcccagggcuccgcag

SEQ ID NO: 738839 - RNA, 19 nt, Human
uggccugggugugcaggga

SEQ ID NO: 738840 - RNA, 23 nt, Human
uggcucaggacaggggucaacag

SEQ ID NO: 738841 - RNA, 19 nt, Human
uggcugcuggaagcagcug

SEQ ID NO: 738842 - RNA, 22 nt, Human
ugggacagacgaucccagaucc

SEQ ID NO: 738843 - RNA, 24 nt, Human
ugggaccacaggcacaagcuacca

SEQ ID NO: 738844 - RNA, 18 nt, Human
ugggagcagagggaggag

SEQ ID NO: 738845 - RNA, 19 nt, Human
ugggauguggccagccacu

SEQ ID NO: 738846 - RNA, 18 nt, Human
ugggccucggcagaccag

SEQ ID NO: 738847 - RNA, 22 nt, Human
ugggccucggccacaggacccu

SEQ ID NO: 738848 - RNA, 22 nt, Human
ugggcgugcauuugugugugug

SEQ ID NO: 738849 - RNA, 19 nt, Human
ugggcucaagugaucuauc

SEQ ID NO: 738850 - RNA, 18 nt, Human
ugggcucguagccaggug

SEQ ID NO: 738851 - RNA, 22 nt, Human
ugggcugggacuguuccagggc

SEQ ID NO: 738852 - RNA, 18 nt, Human
uggggcuggugguggcga

SEQ ID NO: 738853 - RNA, 28 nt, Human
ugggucuggcgucccuggggcuugggca

SEQ ID NO: 738854 - RNA, 22 nt, Human
uggguggacaggcacuguuucc

SEQ ID NO: 738855 - RNA, 20 nt, Human
ugggugggugggugugugug

SEQ ID NO: 738856 - RNA, 24 nt, Human
uggugcagagccugggacggggcc

SEQ ID NO: 738857 - RNA, 18 nt, Human
ugguggcgaggccguggg

SEQ ID NO: 738858 - RNA, 19 nt, Human
uguaaaacacucaccuggg

SEQ ID NO: 738859 - RNA, 21 nt, Human
uguaauccccagcuacucagg

SEQ ID NO: 738860 - RNA, 21 nt, Human
ugugagcacaccaagggcccg

SEQ ID NO: 738861 - RNA, 18 nt, Human
ugugcacgagcgggaggg

SEQ ID NO: 738862 - RNA, 18 nt, Human
uguggugacgacgacuca

SEQ ID NO: 738863 - RNA, 20 nt, Human
uguguguacgugugagcgca

SEQ ID NO: 738864 - RNA, 19 nt, Human
uguguguguguacguguga

SEQ ID NO: 738865 - RNA, 18 nt, Human
ugugugugugugugugug

SEQ ID NO: 738866 - RNA, 18 nt, Human
ugugugugugugugugug

SEQ ID NO: 738867 - RNA, 18 nt, Human
ugugugugugugugugug

SEQ ID NO: 738868 - RNA, 18 nt, Human
ugugugugugugugugug

SEQ ID NO: 738869 - RNA, 18 nt, Human
ugugugugugugugugug

SEQ ID NO: 738870 - RNA, 18 nt, Human
ugugugugugugugugug

SEQ ID NO: 738871 - RNA, 21 nt, Human
ugugugugugugugugugugu

SEQ ID NO: 738872 - RNA, 21 nt, Human
ugugugugugugugugugugu

SEQ ID NO: 738873 - RNA, 21 nt, Human
ugugugugugugugugugugu

SEQ ID NO: 738874 - RNA, 21 nt, Human
ugugugugugugugugugugu

SEQ ID NO: 738875 - RNA, 21 nt, Human
ugugugugugugugugugugu

SEQ ID NO: 738876 - RNA, 22 nt, Human
ugugugugugugugugugugug

SEQ ID NO: 738877 - RNA, 22 nt, Human
ugugugugugugugugugugug

SEQ ID NO: 738878 - RNA, 25 nt, Human
uguuucccuuuuagguuucuugcuu

SEQ ID NO: 738879 - RNA, 22 nt, Human
uguuuucuacacugaucuugaa

SEQ ID NO: 738880 - RNA, 18 nt, Human
uucggaauccagggcccc

SEQ ID NO: 738881 - RNA, 24 nt, Human
uugaacccgggaggcggagguugc

SEQ ID NO: 738882 - RNA, 25 nt, Human
uugcagugacccgagauugagccac

SEQ ID NO: 738883 - RNA, 19 nt, Human
uuuguguguguguacgugu

SEQ ID NO: 738884 - RNA, 26 nt, Human
aaaaaaaaaagacaauaaagaauaau

SEQ ID NO: 738885 - RNA, 27 nt, Human
aaaaaaaaaagacaauaaagaauaaua

SEQ ID NO: 738886 - RNA, 21 nt, Human
aaaaaaccagaggaggagaug

SEQ ID NO: 738887 - RNA, 22 nt, Human
aaaaaagacaauaaagaauaau

SEQ ID NO: 738888 - RNA, 23 nt, Human
aaaaaagacaauaaagaauaaua

SEQ ID NO: 738889 - RNA, 25 nt, Human
aaaaagaaacgguuuccuggaggaa

SEQ ID NO: 738890 - RNA, 26 nt, Human
aaaaauaacagaaaacaaaaccaaaa

SEQ ID NO: 738891 - RNA, 24 nt, Human
aaaccaaaaaucauaauuuacacu

SEQ ID NO: 738892 - RNA, 23 nt, Human
aaaccuccagaaacaugccagaa

SEQ ID NO: 738893 - RNA, 19 nt, Human
aaaccugcugcuaucuucg

SEQ ID NO: 738894 - RNA, 19 nt, Human
aaaggaaaaaaaaaccaga

SEQ ID NO: 738895 - RNA, 20 nt, Human
aacaugccagaaaaucucaa

SEQ ID NO: 738896 - RNA, 24 nt, Human
aaccagcguccagugggguucgcg

SEQ ID NO: 738897 - RNA, 21 nt, Human
aacccagaagaggccgaggcu

SEQ ID NO: 738898 - RNA, 22 nt, Human
aacccucuucucucacccccac

SEQ ID NO: 738899 - RNA, 23 nt, Human
aaccuuuauuuccuuugaaaccu

SEQ ID NO: 738900 - RNA, 24 nt, Human
aaccuuuauuuccuuugaaaccuc

SEQ ID NO: 738901 - RNA, 24 nt, Human
aacuccuccccgccuggugccucc

SEQ ID NO: 738902 - RNA, 19 nt, Human
aagaacccucuucucucac

SEQ ID NO: 738903 - RNA, 21 nt, Human
aagaucguauaaaccguccug

SEQ ID NO: 738904 - RNA, 18 nt, Human
aaggaaaaaaagaaacgg

SEQ ID NO: 738905 - RNA, 26 nt, Human
aauaaagaauaauaaaaaaaaaaucc

SEQ ID NO: 738906 - RNA, 19 nt, Human
aauaacagaaaacaaaacc

SEQ ID NO: 738907 - RNA, 24 nt, Human
aauaacagaaaacaaaaccaaaaa

SEQ ID NO: 738908 - RNA, 21 nt, Human
acccucuucucucacccccac

SEQ ID NO: 738909 - RNA, 23 nt, Human
acgcugccuggggcacgcccacc

SEQ ID NO: 738910 - RNA, 18 nt, Human
agaaaaucucaagacagg

SEQ ID NO: 738911 - RNA, 22 nt, Human
agaaaccugcugugugaccucc

SEQ ID NO: 738912 - RNA, 24 nt, Human
agaaauccuuaaaaaauaacagaa

SEQ ID NO: 738913 - RNA, 26 nt, Human
agaacccucuucucucacccccaccc

SEQ ID NO: 738914 - RNA, 18 nt, Human
agaggaggagaugaaggc

SEQ ID NO: 738915 - RNA, 20 nt, Human
agaggaggagaugaaggcug

SEQ ID NO: 738916 - RNA, 19 nt, Human
agaggcagcagggccacgg

SEQ ID NO: 738917 - RNA, 19 nt, Human
aggaaaaaaaaaccagagg

SEQ ID NO: 738918 - RNA, 24 nt, Human
aggaaaaaaagaaacgguuuccug

SEQ ID NO: 738919 - RNA, 25 nt, Human
aggaaaaaaagaaacgguuuccugg

SEQ ID NO: 738920 - RNA, 20 nt, Human
aggcagcagaggucccugga

SEQ ID NO: 738921 - RNA, 18 nt, Human
aggcgcccuggucugugu

SEQ ID NO: 738922 - RNA, 24 nt, Human
agggggccagaggcugaucacagg

SEQ ID NO: 738923 - RNA, 23 nt, Human
auaaaaaaaaaauccaaaugaaa

SEQ ID NO: 738924 - RNA, 22 nt, Human
auaaauauauauauauauauau

SEQ ID NO: 738925 - RNA, 22 nt, Human
auaacagaaaacaaaaccaaaa

SEQ ID NO: 738926 - RNA, 19 nt, Human
auauauauauauauauaua

SEQ ID NO: 738927 - RNA, 19 nt, Human
auauauauauauauauaua

SEQ ID NO: 738928 - RNA, 19 nt, Human
auauauauauauauauaua

SEQ ID NO: 738929 - RNA, 19 nt, Human
auauauauauauauauaua

SEQ ID NO: 738930 - RNA, 22 nt, Human
aucuuuuucuguuugcuuuuaa

SEQ ID NO: 738931 - RNA, 21 nt, Human
caaauagaguuucucucucaa

SEQ ID NO: 738932 - RNA, 22 nt, Human
caacauaugaaaaaaaaaaccu

SEQ ID NO: 738933 - RNA, 22 nt, Human
caacucuacaugaaaaaauaaa

SEQ ID NO: 738934 - RNA, 19 nt, Human
cacaccggcaccuccgagu

SEQ ID NO: 738935 - RNA, 21 nt, Human
cacagacuguggccauacagg

SEQ ID NO: 738936 - RNA, 21 nt, Human
cacagccagaccugcuccgcc

SEQ ID NO: 738937 - RNA, 19 nt, Human
cacaguagcuggccagggc

SEQ ID NO: 738938 - RNA, 27 nt, Human
cacccauccacaccggcaccuccgagu

SEQ ID NO: 738939 - RNA, 20 nt, Human
cacccccacccauccacacc

SEQ ID NO: 738940 - RNA, 22 nt, Human
caccgggaccacagcugggcag

SEQ ID NO: 738941 - RNA, 22 nt, Human
cagagaaggggaugggggagaa

SEQ ID NO: 738942 - RNA, 20 nt, Human
cagccagaccugcuccgcca

SEQ ID NO: 738943 - RNA, 22 nt, Human
cagccagaccugcuccgccaac

SEQ ID NO: 738944 - RNA, 24 nt, Human
cagcccacaggggacacgccuugg

SEQ ID NO: 738945 - RNA, 19 nt, Human
cagcguccagugggguucg

SEQ ID NO: 738946 - RNA, 19 nt, Human
cagcucaccgggaccacag

SEQ ID NO: 738947 - RNA, 20 nt, Human
cagcuuggagggaggccuga

SEQ ID NO: 738948 - RNA, 19 nt, Human
caggagacgcgauaagaac

SEQ ID NO: 738949 - RNA, 22 nt, Human
cauaugaaaaaaaaaaccugcu

SEQ ID NO: 738950 - RNA, 24 nt, Human
caugccagaaaaucucaagacagg

SEQ ID NO: 738951 - RNA, 21 nt, Human
ccaccgccccggccuggccug

SEQ ID NO: 738952 - RNA, 24 nt, Human
ccacgcgggccucaccucucuggg

SEQ ID NO: 738953 - RNA, 21 nt, Human
ccagcccacaggggacacgcc

SEQ ID NO: 738954 - RNA, 23 nt, Human
ccagcccuguccugagggcuucg

SEQ ID NO: 738955 - RNA, 18 nt, Human
cccauccacaccggcacc

SEQ ID NO: 738956 - RNA, 18 nt, Human
ccccagagcccccuccuc

SEQ ID NO: 738957 - RNA, 19 nt, Human
cccucuggggcaugagggc

SEQ ID NO: 738958 - RNA, 24 nt, Human
cccuggucuguguccacgcgggcc

SEQ ID NO: 738959 - RNA, 23 nt, Human
ccuccagggggccagaggcugau

SEQ ID NO: 738960 - RNA, 19 nt, Human
ccucugguccucccacuga

SEQ ID NO: 738961 - RNA, 25 nt, Human
ccuggaacccagaagaggccgaggg

SEQ ID NO: 738962 - RNA, 23 nt, Human
ccuggagccgaggcgucuggaga

SEQ ID NO: 738963 - RNA, 19 nt, Human
ccuuuauuuccuuugaaac

SEQ ID NO: 738964 - RNA, 23 nt, Human
ccuuuauuuccuuugaaaccucc

SEQ ID NO: 738965 - RNA, 24 nt, Human
cggcagcugggagcugaguggagg

SEQ ID NO: 738966 - RNA, 23 nt, Human
cgggaggaggaggagagagucgg

SEQ ID NO: 738967 - RNA, 18 nt, Human
cguggugcagaaaccugc

SEQ ID NO: 738968 - RNA, 22 nt, Human
cuagcccaggugcaguggccuc

SEQ ID NO: 738969 - RNA, 23 nt, Human
cucacagccagaccugcuccgcc

SEQ ID NO: 738970 - RNA, 23 nt, Human
cucacccccacccauccacaccg

SEQ ID NO: 738971 - RNA, 23 nt, Human
cucagcuugagguuggggggaug

SEQ ID NO: 738972 - RNA, 25 nt, Human
cuccagcccuguccugagggcuucg

SEQ ID NO: 738973 - RNA, 21 nt, Human
cugacccugacucacagcccu

SEQ ID NO: 738974 - RNA, 18 nt, Human
cugauagaaaaagaucgu

SEQ ID NO: 738975 - RNA, 21 nt, Human
cuggcuccucucuccgucccc

SEQ ID NO: 738976 - RNA, 20 nt, Human
cuggugccucccaaaaaggg

SEQ ID NO: 738977 - RNA, 20 nt, Human
cuugguguugggggugaggg

SEQ ID NO: 738978 - RNA, 23 nt, Human
gaaaaaaaaaagacaauaaagaa

SEQ ID NO: 738979 - RNA, 19 nt, Human
gaagaugggaggagacaac

SEQ ID NO: 738980 - RNA, 21 nt, Human
gaaggcgggcggcggccuccc

SEQ ID NO: 738981 - RNA, 24 nt, Human
gagacaacugaaaaaaaaaaaaaa

SEQ ID NO: 738982 - RNA, 21 nt, Human
gagcauggugagggggucugg

SEQ ID NO: 738983 - RNA, 20 nt, Human
gaggaggaggagagagucgg

SEQ ID NO: 738984 - RNA, 22 nt, Human
gagggagagaggcagcagggcc

SEQ ID NO: 738985 - RNA, 20 nt, Human
gagggcccuggaugggucau

SEQ ID NO: 738986 - RNA, 21 nt, Human
gagggcccuggaugggucauc

SEQ ID NO: 738987 - RNA, 21 nt, Human
gagggcccuggaugggucauc

SEQ ID NO: 738988 - RNA, 20 nt, Human
gcagugcuccccggggagca

SEQ ID NO: 738989 - RNA, 18 nt, Human
gccccccagagaagggga

SEQ ID NO: 738990 - RNA, 19 nt, Human
gccugagaccacuucgccc

SEQ ID NO: 738991 - RNA, 25 nt, Human
gccugguuagcuggaagguggaggg

SEQ ID NO: 738992 - RNA, 18 nt, Human
gcuucgggagccccuccu

SEQ ID NO: 738993 - RNA, 21 nt, Human
ggagacgcgauaagaacccuc

SEQ ID NO: 738994 - RNA, 19 nt, Human
ggagccccuccuggaaccc

SEQ ID NO: 738995 - RNA, 23 nt, Human
ggagcgaaggcgggcggcggccu

SEQ ID NO: 738996 - RNA, 23 nt, Human
ggaggagagagucggcuccgucg

SEQ ID NO: 738997 - RNA, 21 nt, Human
ggaggaggggguuagggaggg

SEQ ID NO: 738998 - RNA, 24 nt, Human
ggaggaggggguuagggaggggau

SEQ ID NO: 738999 - RNA, 22 nt, Human
ggagggagagaggcagcagggc

SEQ ID NO: 739000 - RNA, 21 nt, Human
ggcagcgcugagguuuccucc

SEQ ID NO: 739001 - RNA, 22 nt, Human
ggccggguugccuggugcuggc

SEQ ID NO: 739002 - RNA, 18 nt, Human
ggcuccaccgccccggcc

SEQ ID NO: 739003 - RNA, 23 nt, Human
gggaaaaaaaaaagacaauaaag

SEQ ID NO: 739004 - RNA, 18 nt, Human
gggagcugaguggaggga

SEQ ID NO: 739005 - RNA, 19 nt, Human
gggauggggaaaaaaaaaa

SEQ ID NO: 739006 - RNA, 24 nt, Human
gggcaggggcagcgcugagguuuc

SEQ ID NO: 739007 - RNA, 19 nt, Human
gggcaugagggcugugcgc

SEQ ID NO: 739008 - RNA, 24 nt, Human
gggcugugcgcgcugacccugacu

SEQ ID NO: 739009 - RNA, 19 nt, Human
ggggaugggggagaagaug

SEQ ID NO: 739010 - RNA, 19 nt, Human
gggggugagggugggggca

SEQ ID NO: 739011 - RNA, 23 nt, Human
ggggugagggugggggcaggggc

SEQ ID NO: 739012 - RNA, 24 nt, Human
gggugggccccccagagaagggga

SEQ ID NO: 739013 - RNA, 18 nt, Human
ggugggggugggggacgg

SEQ ID NO: 739014 - RNA, 19 nt, Human
ggugguguuccgccgcugc

SEQ ID NO: 739015 - RNA, 21 nt, Human
guccccagagcccccuccucu

SEQ ID NO: 739016 - RNA, 21 nt, Human
guggaggggccuguggacccc

SEQ ID NO: 739017 - RNA, 23 nt, Human
guggaggggccuguggaccccua

SEQ ID NO: 739018 - RNA, 22 nt, Human
uaaaaaaaaaauccaaaugaaa

SEQ ID NO: 739019 - RNA, 24 nt, Human
uaaaaaauaacagaaaacaaaacc

SEQ ID NO: 739020 - RNA, 21 nt, Human
uaaagaaggaaaaaaagaaac

SEQ ID NO: 739021 - RNA, 18 nt, Human
uaacagaaaacaaaacca

SEQ ID NO: 739022 - RNA, 22 nt, Human
uaacagaaaacaaaaccaaaaa

SEQ ID NO: 739023 - RNA, 22 nt, Human
uaaguccccaaaaugauucgaa

SEQ ID NO: 739024 - RNA, 20 nt, Human
uagauggggacagcggggca

SEQ ID NO: 739025 - RNA, 19 nt, Human
uauauauauauauauauau

SEQ ID NO: 739026 - RNA, 19 nt, Human
uauauauauauauauauau

SEQ ID NO: 739027 - RNA, 22 nt, Human
uauugccuuuagagaaccagcg

SEQ ID NO: 739028 - RNA, 19 nt, Human
ucaagacagggauggggaa

SEQ ID NO: 739029 - RNA, 25 nt, Human
ucagggccaggucgugccgggagga

SEQ ID NO: 739030 - RNA, 23 nt, Human
uccacagacuguggccauacagg

SEQ ID NO: 739031 - RNA, 19 nt, Human
uccauggggagggcccugg

SEQ ID NO: 739032 - RNA, 21 nt, Human
uccauggggagggcccuggau

SEQ ID NO: 739033 - RNA, 19 nt, Human
ucccacugacccccagccc

SEQ ID NO: 739034 - RNA, 21 nt, Human
uccccggggagcauggugagg

SEQ ID NO: 739035 - RNA, 21 nt, Human
uccgccaacuccuccccgccu

SEQ ID NO: 739036 - RNA, 19 nt, Human
uccguccccaucagcuucg

SEQ ID NO: 739037 - RNA, 23 nt, Human
uccguguccauggggagggcccu

SEQ ID NO: 739038 - RNA, 19 nt, Human
uccuccagcccuguccuga

SEQ ID NO: 739039 - RNA, 21 nt, Human
uccuggaacccagaagaggcc

SEQ ID NO: 739040 - RNA, 21 nt, Human
ucggccccacaagccgcaacu

SEQ ID NO: 739041 - RNA, 24 nt, Human
ucggccccacaagccgcaacuuug

SEQ ID NO: 739042 - RNA, 21 nt, Human
ucggcugugugguggcuccac

SEQ ID NO: 739043 - RNA, 18 nt, Human
ucuaaggggugggggugg

SEQ ID NO: 739044 - RNA, 18 nt, Human
ucucaaauaaaucggcuc

SEQ ID NO: 739045 - RNA, 23 nt, Human
ugaaaaaaaaaaaaaaaaaggga

SEQ ID NO: 739046 - RNA, 21 nt, Human
ugagaccacuucgcccucugg

SEQ ID NO: 739047 - RNA, 19 nt, Human
ugaggccaucggaguuucc

SEQ ID NO: 739048 - RNA, 24 nt, Human
ugaggccaucggaguuuccguguc

SEQ ID NO: 739049 - RNA, 25 nt, Human
ugagggugggggcaggggcagcgcu

SEQ ID NO: 739050 - RNA, 19 nt, Human
ugcaaaggaaaaaaaaacc

SEQ ID NO: 739051 - RNA, 20 nt, Human
ugcaaaggaaaaaaaaacca

SEQ ID NO: 739052 - RNA, 23 nt, Human
ugcagaaaccugcugugugaccu

SEQ ID NO: 739053 - RNA, 23 nt, Human
ugccagaaaaucucaagacaggg

SEQ ID NO: 739054 - RNA, 21 nt, Human
ugccuggugcuggcucacagc

SEQ ID NO: 739055 - RNA, 20 nt, Human
ugcuccgccaacuccucccc

SEQ ID NO: 739056 - RNA, 24 nt, Human
ugcuuuuaaagaaggaaaaaaaga

SEQ ID NO: 739057 - RNA, 19 nt, Human
uggaacccagaagaggccg

SEQ ID NO: 739058 - RNA, 22 nt, Human
uggaccccuagcccaggugcag

SEQ ID NO: 739059 - RNA, 20 nt, Human
uggagccgaggcgucuggag

SEQ ID NO: 739060 - RNA, 23 nt, Human
uggaggaacagcgugguaccaca

SEQ ID NO: 739061 - RNA, 22 nt, Human
uggauagaacaucaaccucaaa

SEQ ID NO: 739062 - RNA, 21 nt, Human
uggcaucacaguagcuggcca

SEQ ID NO: 739063 - RNA, 20 nt, Human
uggccagggcugaggacgcu

SEQ ID NO: 739064 - RNA, 20 nt, Human
uggccugguuagcuggaagg

SEQ ID NO: 739065 - RNA, 21 nt, Human
uggccugguuagcuggaaggu

SEQ ID NO: 739066 - RNA, 19 nt, Human
uggcgccaacucuacauga

SEQ ID NO: 739067 - RNA, 22 nt, Human
ugggaggaggggguuagggagg

SEQ ID NO: 739068 - RNA, 21 nt, Human
ugggguucgcggggugcagug

SEQ ID NO: 739069 - RNA, 22 nt, Human
ugugugaccuccuggagccgag

SEQ ID NO: 739070 - RNA, 23 nt, Human
uguuccgccgcugcgacaccgac

SEQ ID NO: 739071 - RNA, 21 nt, Human
uuaaaaaauaacagaaaacaa

SEQ ID NO: 739072 - RNA, 21 nt, Human
uuccugaccccagagagaagg

SEQ ID NO: 739073 - RNA, 22 nt, Human
uugcaaaggaaaaaaaaaccag

SEQ ID NO: 739074 - RNA, 21 nt, Human
uugccucucucuauccucagg

SEQ ID NO: 739075 - RNA, 21 nt, Human
uugggggugagggugggggca

SEQ ID NO: 739076 - RNA, 26 nt, Human
aaaaaaaaaagaaauauagaaaaagg

SEQ ID NO: 739077 - RNA, 23 nt, Human
aaaaaacaacaacaacaacaaaa

SEQ ID NO: 739078 - RNA, 20 nt, Human
aaaaagcagaccaguguuuu

SEQ ID NO: 739079 - RNA, 19 nt, Human
aaaacaaagcaaaauuaaa

SEQ ID NO: 739080 - RNA, 21 nt, Human
aaaagaacagggaugaccaga

SEQ ID NO: 739081 - RNA, 24 nt, Human
aaaauaccuagcacuaacaccuuu

SEQ ID NO: 739082 - RNA, 19 nt, Human
aaacaacaacaacaacaaa

SEQ ID NO: 739083 - RNA, 21 nt, Human
aaagagccuauuccauuaggc

SEQ ID NO: 739084 - RNA, 22 nt, Human
aaccauggcuuaccucucuuug

SEQ ID NO: 739085 - RNA, 24 nt, Human
aaccucaguaaaugcuaaaaacaa

SEQ ID NO: 739086 - RNA, 19 nt, Human
aagcagaccaguguuuuga

SEQ ID NO: 739087 - RNA, 22 nt, Human
aagcagaccaguguuuugaaca

SEQ ID NO: 739088 - RNA, 21 nt, Human
aagcaguauauauucaugagg

SEQ ID NO: 739089 - RNA, 25 nt, Human
aagcauucccgccaaauaacagucc

SEQ ID NO: 739090 - RNA, 25 nt, Human
aagcauugcaaguguaacgaacccc

SEQ ID NO: 739091 - RNA, 22 nt, Human
acaaaauaaacaaguaaacuag

SEQ ID NO: 739092 - RNA, 20 nt, Human
acaacaaaaaaaaaacaccc

SEQ ID NO: 739093 - RNA, 20 nt, Human
acaacaacaacaacaaaaaa

SEQ ID NO: 739094 - RNA, 21 nt, Human
acaagaaaaaagcagaccagu

SEQ ID NO: 739095 - RNA, 24 nt, Human
accuauagugaaaagaaaaauuca

SEQ ID NO: 739096 - RNA, 22 nt, Human
agaaaaaaaaaacaacaacaac

SEQ ID NO: 739097 - RNA, 28 nt, Human
agaaaaaaaaaacaacaacaacaacaaa

SEQ ID NO: 739098 - RNA, 18 nt, Human
agaaaacuguaaaauacu

SEQ ID NO: 739099 - RNA, 22 nt, Human
agagaaaaaaaaaaaaaaagaa

SEQ ID NO: 739100 - RNA, 21 nt, Human
agaggucaagucaagaucuau

SEQ ID NO: 739101 - RNA, 22 nt, Human
agagguggucuuaaaaugucug

SEQ ID NO: 739102 - RNA, 23 nt, Human
agagguggucuuaaaaugucugu

SEQ ID NO: 739103 - RNA, 22 nt, Human
agaguugcuguaaaagacaggg

SEQ ID NO: 739104 - RNA, 23 nt, Human
agcaaucuguccaggaaaaaaaa

SEQ ID NO: 739105 - RNA, 19 nt, Human
agccuaaucuugaagaauc

SEQ ID NO: 739106 - RNA, 21 nt, Human
agccuaaucuugaagaaucau

SEQ ID NO: 739107 - RNA, 22 nt, Human
aggaaaaccuauagugaaaaga

SEQ ID NO: 739108 - RNA, 25 nt, Human
aggagaaaaaaaaaacaacaacaac

SEQ ID NO: 739109 - RNA, 23 nt, Human
agggaagcauagaaguaagacuu

SEQ ID NO: 739110 - RNA, 18 nt, Human
agggcucaaggucaggaa

SEQ ID NO: 739111 - RNA, 22 nt, Human
aggguaccuuuuugaauuaaaa

SEQ ID NO: 739112 - RNA, 19 nt, Human
auauauauauauauauaua

SEQ ID NO: 739113 - RNA, 19 nt, Human
auauauauauauauauaua

SEQ ID NO: 739114 - RNA, 19 nt, Human
auauauauauauauauaua

SEQ ID NO: 739115 - RNA, 19 nt, Human
auauauauauauauauaua

SEQ ID NO: 739116 - RNA, 19 nt, Human
auauauauauauauauaua

SEQ ID NO: 739117 - RNA, 26 nt, Human
aucagagagugucaagugagucagga

SEQ ID NO: 739118 - RNA, 24 nt, Human
aucuuaugauccauaaaacauuaa

SEQ ID NO: 739119 - RNA, 24 nt, Human
augcaauuuccugguauuuuucuu

SEQ ID NO: 739120 - RNA, 18 nt, Human
augccuaucacaauagaa

SEQ ID NO: 739121 - RNA, 19 nt, Human
auucaaugaguacucacuc

SEQ ID NO: 739122 - RNA, 21 nt, Human
caaaaaaaaaacaccucauaa

SEQ ID NO: 739123 - RNA, 25 nt, Human
caaaagagacagaaaaacuuuuuaa

SEQ ID NO: 739124 - RNA, 26 nt, Human
caaaauaaacaaguaaacuaccuaua

SEQ ID NO: 739125 - RNA, 20 nt, Human
caacaaaaaaaaaacaccuc

SEQ ID NO: 739126 - RNA, 21 nt, Human
caacaacaaaaaaaaaacacc

SEQ ID NO: 739127 - RNA, 18 nt, Human
caacucugaaauuaagca

SEQ ID NO: 739128 - RNA, 20 nt, Human
caagaguugcuguaaaagac

SEQ ID NO: 739129 - RNA, 21 nt, Human
cacaauaacaucugagacaaa

SEQ ID NO: 739130 - RNA, 19 nt, Human
caccuaaauguuguccuuc

SEQ ID NO: 739131 - RNA, 18 nt, Human
cacuggcagaauacugac

SEQ ID NO: 739132 - RNA, 23 nt, Human
cagaccaguguuuugaacauaaa

SEQ ID NO: 739133 - RNA, 22 nt, Human
cagagaaacuacaaagaaaggc

SEQ ID NO: 739134 - RNA, 27 nt, Human
cauaaauaacguucacaggagaaaaaa

SEQ ID NO: 739135 - RNA, 22 nt, Human
ccaggaaaaaaaaaaaaaaaaa

SEQ ID NO: 739136 - RNA, 23 nt, Human
cccacauacaugcuaaaugaaau

SEQ ID NO: 739137 - RNA, 22 nt, Human
ccuagcacuaacaccuuuaaaa

SEQ ID NO: 739138 - RNA, 19 nt, Human
ccuuacacagaccuuagcc

SEQ ID NO: 739139 - RNA, 19 nt, Human
cucacucucauuaaaccuc

SEQ ID NO: 739140 - RNA, 19 nt, Human
cuguaaacacagcccugga

SEQ ID NO: 739141 - RNA, 24 nt, Human
cuuaccucucuuugucccuuuaga

SEQ ID NO: 739142 - RNA, 23 nt, Human
cuuggcacuuggaaacuaguuuu

SEQ ID NO: 739143 - RNA, 21 nt, Human
cuuugugcugugacaaaaucc

SEQ ID NO: 739144 - RNA, 26 nt, Human
gagaaaaaaaaaacaacaacaacaac

SEQ ID NO: 739145 - RNA, 23 nt, Human
gagaaacuacaaagaaaggcuga

SEQ ID NO: 739146 - RNA, 19 nt, Human
gcaugaaauguuaacuucu

SEQ ID NO: 739147 - RNA, 19 nt, Human
guagggauuuaccaacaaa

SEQ ID NO: 739148 - RNA, 24 nt, Human
gugagggcucaaggucaggaaucu

SEQ ID NO: 739149 - RNA, 23 nt, Human
guggaaaacaagcuuacugcuua

SEQ ID NO: 739150 - RNA, 22 nt, Human
guguguguuuagggaacacaga

SEQ ID NO: 739151 - RNA, 26 nt, Human
guucacaggagaaaaaaaaaacaaca

SEQ ID NO: 739152 - RNA, 18 nt, Human
guuucagaaucugaacau

SEQ ID NO: 739153 - RNA, 21 nt, Human
guuugauaacaguacugucac

SEQ ID NO: 739154 - RNA, 21 nt, Human
guuuuggaguuuccgaauauu

SEQ ID NO: 739155 - RNA, 25 nt, Human
uaaaaagcauaauucuugcggauga

SEQ ID NO: 739156 - RNA, 23 nt, Human
uaaaagggacugccugcuuuuuu

SEQ ID NO: 739157 - RNA, 23 nt, Human
uaaaauaaaagauaaaaagcauu

SEQ ID NO: 739158 - RNA, 25 nt, Human
uaaauaacguucacaggagaaaaaa

SEQ ID NO: 739159 - RNA, 18 nt, Human
uaaaucccaaacaggaag

SEQ ID NO: 739160 - RNA, 22 nt, Human
uaaaucccaaacaggaaucucu

SEQ ID NO: 739161 - RNA, 28 nt, Human
uaaauccugaaaugaagaaucucaaaaa

SEQ ID NO: 739162 - RNA, 19 nt, Human
uaacgaaccccaaaugugc

SEQ ID NO: 739163 - RNA, 21 nt, Human
uaacgaaccccaaaugugcuc

SEQ ID NO: 739164 - RNA, 21 nt, Human
uaagaaaacuguaaaauacua

SEQ ID NO: 739165 - RNA, 23 nt, Human
uaauaaacaacccugauagagca

SEQ ID NO: 739166 - RNA, 23 nt, Human
uacaggaaaacaucgagauaaaa

SEQ ID NO: 739167 - RNA, 19 nt, Human
uacuuugugcugugacaaa

SEQ ID NO: 739168 - RNA, 22 nt, Human
uagaagcaggccaaacaggaag

SEQ ID NO: 739169 - RNA, 20 nt, Human
uagauauacacacaauucca

SEQ ID NO: 739170 - RNA, 23 nt, Human
uagugaaaagaaaaauucaacaa

SEQ ID NO: 739171 - RNA, 19 nt, Human
uauauauauauauauauau

SEQ ID NO: 739172 - RNA, 19 nt, Human
uauauauauauauauauau

SEQ ID NO: 739173 - RNA, 18 nt, Human
uaugcugaguuuuggagu

SEQ ID NO: 739174 - RNA, 19 nt, Human
ucaagucaagaucuaugcu

SEQ ID NO: 739175 - RNA, 20 nt, Human
ucaggaaaaugaacaaagca

SEQ ID NO: 739176 - RNA, 24 nt, Human
ucagugauucuugcuuucuguuuu

SEQ ID NO: 739177 - RNA, 20 nt, Human
uccacagugaugcacaaaga

SEQ ID NO: 739178 - RNA, 23 nt, Human
uccaggaaaaaaaaaaaaaaaaa

SEQ ID NO: 739179 - RNA, 22 nt, Human
uccaucaagacuacccagcaaa

SEQ ID NO: 739180 - RNA, 19 nt, Human
ucccuguuucccaccccaa

SEQ ID NO: 739181 - RNA, 20 nt, Human
ucuacagaaaucuccugacc

SEQ ID NO: 739182 - RNA, 21 nt, Human
ucuacagaaaucuccugacca

SEQ ID NO: 739183 - RNA, 23 nt, Human
ucuacauuuuaaaugagcauccc

SEQ ID NO: 739184 - RNA, 21 nt, Human
ucucuuggcacuuggaaacua

SEQ ID NO: 739185 - RNA, 21 nt, Human
ucugaacauugcuuucuuccc

SEQ ID NO: 739186 - RNA, 22 nt, Human
ucugaguacaaaacuuccugaa

SEQ ID NO: 739187 - RNA, 19 nt, Human
ucuguuuuguuacuguuua

SEQ ID NO: 739188 - RNA, 20 nt, Human
ucuugcuuucuguuuuguua

SEQ ID NO: 739189 - RNA, 18 nt, Human
ugaaacaccaccacuggc

SEQ ID NO: 739190 - RNA, 23 nt, Human
ugaaacaccaccacuggcagaau

SEQ ID NO: 739191 - RNA, 22 nt, Human
ugaaaugaagaaucucaaaaaa

SEQ ID NO: 739192 - RNA, 21 nt, Human
ugaacaaaaugaaacaccacc

SEQ ID NO: 739193 - RNA, 21 nt, Human
ugaacaaagcauugcaagugu

SEQ ID NO: 739194 - RNA, 19 nt, Human
ugaccagaggaaauaagua

SEQ ID NO: 739195 - RNA, 19 nt, Human
ugacuccaaucucuuggca

SEQ ID NO: 739196 - RNA, 20 nt, Human
ugacuccaaucucuuggcac

SEQ ID NO: 739197 - RNA, 22 nt, Human
ugacugugggaaucugaguaca

SEQ ID NO: 739198 - RNA, 23 nt, Human
ugagaagucaacaaaagagacag

SEQ ID NO: 739199 - RNA, 23 nt, Human
ugagaagucaacaaaagagacag

SEQ ID NO: 739200 - RNA, 19 nt, Human
ugagaaucuggcagggccu

SEQ ID NO: 739201 - RNA, 18 nt, Human
ugagagcaacugaccuag

SEQ ID NO: 739202 - RNA, 18 nt, Human
ugagggcucaaggucagg

SEQ ID NO: 739203 - RNA, 24 nt, Human
ugaucagucuugaauguuucuuga

SEQ ID NO: 739204 - RNA, 19 nt, Human
ugcugaguuuuggaguuuc

SEQ ID NO: 739205 - RNA, 22 nt, Human
uggcacaugcagaaaauuuaca

SEQ ID NO: 739206 - RNA, 22 nt, Human
uggcaggcuugcuaagaaaacu

SEQ ID NO: 739207 - RNA, 20 nt, Human
uggcauuugcaauaguuucc

SEQ ID NO: 739208 - RNA, 18 nt, Human
ugguaauucacaauaaca

SEQ ID NO: 739209 - RNA, 23 nt, Human
uguagugugagggcucaagguca

SEQ ID NO: 739210 - RNA, 21 nt, Human
uguauaguaacuauuaaaguu

SEQ ID NO: 739211 - RNA, 22 nt, Human
ugugcaaacuacgaagagguca

SEQ ID NO: 739212 - RNA, 18 nt, Human
uguuaugagaaucuggca

SEQ ID NO: 739213 - RNA, 19 nt, Human
uguucagugauucuugcuu

SEQ ID NO: 739214 - RNA, 23 nt, Human
uguucagugauucuugcuuucug

SEQ ID NO: 739215 - RNA, 20 nt, Human
uguuuuaggcugucagcuuu

SEQ ID NO: 739216 - RNA, 21 nt, Human
uuaaaccucaguaaaugcuaa

SEQ ID NO: 739217 - RNA, 18 nt, Human
uuaaauuuaagagcucau

SEQ ID NO: 739218 - RNA, 24 nt, Human
uuagaacaaucucagcagcaaugg

SEQ ID NO: 739219 - RNA, 20 nt, Human
uuccugaaaguuaacagggg

SEQ ID NO: 739220 - RNA, 19 nt, Human
uuuccacagugaugcacaa

SEQ ID NO: 739221 - RNA, 19 nt, Human
uuucucagguuaucaguuu

SEQ ID NO: 739222 - RNA, 26 nt, Human
aaaaugcuggcauuacacaggcggga

SEQ ID NO: 739223 - RNA, 19 nt, Human
aaagugcuggaauuauagg

SEQ ID NO: 739224 - RNA, 24 nt, Human
aaagugcuggaauuauaggcguga

SEQ ID NO: 739225 - RNA, 22 nt, Human
aaagugcugggaucaaggcaug

SEQ ID NO: 739226 - RNA, 21 nt, Human
aaccuugugaucugcccaccu

SEQ ID NO: 739227 - RNA, 24 nt, Human
aaccuugugaucugcccaccuugg

SEQ ID NO: 739228 - RNA, 20 nt, Human
aagacuacaagcacacacca

SEQ ID NO: 739229 - RNA, 23 nt, Human
aagacuacaagcacacaccaccg

SEQ ID NO: 739230 - RNA, 20 nt, Human
aagcacacaccaccacaccc

SEQ ID NO: 739231 - RNA, 21 nt, Human
aagcugaaguuggacaacaac

SEQ ID NO: 739232 - RNA, 21 nt, Human
aagugauccuucugucuuggc

SEQ ID NO: 739233 - RNA, 24 nt, Human
aagugauccuucugucuuggccuc

SEQ ID NO: 739234 - RNA, 24 nt, Human
aagugaucugccagccuuggccuc

SEQ ID NO: 739235 - RNA, 18 nt, Human
aauuauaggcgugagcca

SEQ ID NO: 739236 - RNA, 21 nt, Human
aauuauaggcgugagccacca

SEQ ID NO: 739237 - RNA, 22 nt, Human
aauuauaggcgugagccaccau

SEQ ID NO: 739238 - RNA, 22 nt, Human
acacggcaggagcuguagccuu

SEQ ID NO: 739239 - RNA, 24 nt, Human
accuugugaucugcccaccuuggc

SEQ ID NO: 739240 - RNA, 20 nt, Human
acggaguuucaccauauugg

SEQ ID NO: 739241 - RNA, 24 nt, Human
acggaguuucaccauauuggccag

SEQ ID NO: 739242 - RNA, 18 nt, Human
agacuacaagcacacacc

SEQ ID NO: 739243 - RNA, 22 nt, Human
agacuacaagcacacaccaccg

SEQ ID NO: 739244 - RNA, 20 nt, Human
agagcuccuugaugcagccc

SEQ ID NO: 739245 - RNA, 21 nt, Human
agcacacaccaccacacccag

SEQ ID NO: 739246 - RNA, 21 nt, Human
agccaagacuguccucuccau

SEQ ID NO: 739247 - RNA, 18 nt, Human
agccaccgcaccuggccc

SEQ ID NO: 739248 - RNA, 21 nt, Human
agcugggauuacaagcacaca

SEQ ID NO: 739249 - RNA, 19 nt, Human
aggaaggagaauggcccug

SEQ ID NO: 739250 - RNA, 20 nt, Human
aggauggggaaaggaggagu

SEQ ID NO: 739251 - RNA, 19 nt, Human
aggcacuuguagaaugaaa

SEQ ID NO: 739252 - RNA, 19 nt, Human
aggcaggagugcaguggca

SEQ ID NO: 739253 - RNA, 21 nt, Human
aggcgugagccaccaugccca

SEQ ID NO: 739254 - RNA, 25 nt, Human
aggcuggagugcagugguguaaucu

SEQ ID NO: 739255 - RNA, 19 nt, Human
aggugaaguaaaggaacaa

SEQ ID NO: 739256 - RNA, 19 nt, Human
aguagcugggauuacaagc

SEQ ID NO: 739257 - RNA, 23 nt, Human
aguauccaagacuacaagcacac

SEQ ID NO: 739258 - RNA, 24 nt, Human
agugauucucuugccucagccucc

SEQ ID NO: 739259 - RNA, 21 nt, Human
agugcaguggcacaaucacag

SEQ ID NO: 739260 - RNA, 20 nt, Human
agugcagugguguaaucucg

SEQ ID NO: 739261 - RNA, 23 nt, Human
agugcagugguguaaucucggcu

SEQ ID NO: 739262 - RNA, 24 nt, Human
agugcagugguguaaucucggcuc

SEQ ID NO: 739263 - RNA, 21 nt, Human
auaaaggucagccucuuggag

SEQ ID NO: 739264 - RNA, 18 nt, Human
auaagcagaacuguauuu

SEQ ID NO: 739265 - RNA, 24 nt, Human
aucugacuuuguugccugggcugg

SEQ ID NO: 739266 - RNA, 22 nt, Human
augcugaggaaggagaauggcc

SEQ ID NO: 739267 - RNA, 18 nt, Human
caaaaaguaaagagagcu

SEQ ID NO: 739268 - RNA, 20 nt, Human
caaaaugcuggcauuacaca

SEQ ID NO: 739269 - RNA, 27 nt, Human
caaagucacucaaguccuuaaaagccu

SEQ ID NO: 739270 - RNA, 24 nt, Human
caaagugcuggaauuauaggcgug

SEQ ID NO: 739271 - RNA, 23 nt, Human
caaagugcugggaucaaggcaug

SEQ ID NO: 739272 - RNA, 23 nt, Human
caacauaaugacagacauaggcu

SEQ ID NO: 739273 - RNA, 23 nt, Human
caaccuuuuucacuuuuugcacu

SEQ ID NO: 739274 - RNA, 23 nt, Human
caagacuguccucuccauacacu

SEQ ID NO: 739275 - RNA, 21 nt, Human
caagcacacaccaccacaccc

SEQ ID NO: 739276 - RNA, 20 nt, Human
caagugauucucuugccuca

SEQ ID NO: 739277 - RNA, 22 nt, Human
caagugauucucuugccucagc

SEQ ID NO: 739278 - RNA, 20 nt, Human
caauaauacacccacacaac

SEQ ID NO: 739279 - RNA, 23 nt, Human
cacacaccaccacacccagcuaa

SEQ ID NO: 739280 - RNA, 21 nt, Human
cacacaccaccgugccuacuu

SEQ ID NO: 739281 - RNA, 22 nt, Human
cacaggcgggagccaccgcacc

SEQ ID NO: 739282 - RNA, 24 nt, Human
caccacacccagcuaauuuuugua

SEQ ID NO: 739283 - RNA, 21 nt, Human
caccauauuggccaggcuggu

SEQ ID NO: 739284 - RNA, 24 nt, Human
caccauauuggccaggcuggucuc

SEQ ID NO: 739285 - RNA, 27 nt, Human
caccauauuggccaggcuggucuccaa

SEQ ID NO: 739286 - RNA, 18 nt, Human
caccauguugaccaggau

SEQ ID NO: 739287 - RNA, 22 nt, Human
caccauguugaccaggaugguc

SEQ ID NO: 739288 - RNA, 24 nt, Human
caccauguugaccaggauggucuc

SEQ ID NO: 739289 - RNA, 23 nt, Human
cacccacacaacuacacauccaa

SEQ ID NO: 739290 - RNA, 24 nt, Human
caccucagccuccagaguauccaa

SEQ ID NO: 739291 - RNA, 23 nt, Human
cacugccaacuugcaaaccaaca

SEQ ID NO: 739292 - RNA, 18 nt, Human
cagaacaaugucuaccga

SEQ ID NO: 739293 - RNA, 23 nt, Human
cagaacagccauuuucuccugcu

SEQ ID NO: 739294 - RNA, 22 nt, Human
cagaagagacucaggaauggca

SEQ ID NO: 739295 - RNA, 23 nt, Human
cagaauagcagagggucuggaug

SEQ ID NO: 739296 - RNA, 20 nt, Human
cagagccaagacuguccucu

SEQ ID NO: 739297 - RNA, 19 nt, Human
cagcccauaaaggucagcc

SEQ ID NO: 739298 - RNA, 20 nt, Human
cagccuccagaguauccaag

SEQ ID NO: 739299 - RNA, 20 nt, Human
cagccuccugaguagcuggg

SEQ ID NO: 739300 - RNA, 20 nt, Human
caggacucagucauagccau

SEQ ID NO: 739301 - RNA, 19 nt, Human
caguaucuauagcuagagg

SEQ ID NO: 739302 - RNA, 21 nt, Human
cagucauagccauaaccaaug

SEQ ID NO: 739303 - RNA, 23 nt, Human
cauaaccaaugcuuucccuagaa

SEQ ID NO: 739304 - RNA, 24 nt, Human
cauauuggccaggcuggucuccaa

SEQ ID NO: 739305 - RNA, 21 nt, Human
caucucaaaucacaaggccug

SEQ ID NO: 739306 - RNA, 22 nt, Human
ccaaagugcuggaauuauaggc

SEQ ID NO: 739307 - RNA, 24 nt, Human
ccaaagugcuggaauuauaggcgu

SEQ ID NO: 739308 - RNA, 23 nt, Human
ccaaagugcugggaucaaggcau

SEQ ID NO: 739309 - RNA, 23 nt, Human
ccaaagugcugggaucaaggcau

SEQ ID NO: 739310 - RNA, 21 nt, Human
ccaagacuacaagcacacacc

SEQ ID NO: 739311 - RNA, 20 nt, Human
ccaggcuggucuccaacucc

SEQ ID NO: 739312 - RNA, 21 nt, Human
cccugguucaagugauucucu

SEQ ID NO: 739313 - RNA, 19 nt, Human
ccucaaaauuacucaguua

SEQ ID NO: 739314 - RNA, 19 nt, Human
ccugaguagcugggauuac

SEQ ID NO: 739315 - RNA, 26 nt, Human
ccugaguucaagugaucugccagccu

SEQ ID NO: 739316 - RNA, 19 nt, Human
ccuggcccacugaucgccu

SEQ ID NO: 739317 - RNA, 18 nt, Human
ccuggcuuuaagugaucc

SEQ ID NO: 739318 - RNA, 18 nt, Human
ccuggcuuuaagugaucc

SEQ ID NO: 739319 - RNA, 24 nt, Human
ccuuccacagaacaaugucuaccg

SEQ ID NO: 739320 - RNA, 24 nt, Human
cggaguuucaccauauuggccagg

SEQ ID NO: 739321 - RNA, 20 nt, Human
cgggagccaccgcaccuggc

SEQ ID NO: 739322 - RNA, 24 nt, Human
cgugagccaccaugcccagccuau

SEQ ID NO: 739323 - RNA, 19 nt, Human
cuaauacaguagccaaagc

SEQ ID NO: 739324 - RNA, 23 nt, Human
cuaauuuuuguauuuuuaguaga

SEQ ID NO: 739325 - RNA, 22 nt, Human
cucacucuucuuuuugccccca

SEQ ID NO: 739326 - RNA, 25 nt, Human
cucacugcaaccucugacucccugg

SEQ ID NO: 739327 - RNA, 23 nt, Human
cucagccuccugaguagcuggga

SEQ ID NO: 739328 - RNA, 19 nt, Human
cucccugguucaagugauu

SEQ ID NO: 739329 - RNA, 20 nt, Human
cuccuaaccuugugaucugc

SEQ ID NO: 739330 - RNA, 20 nt, Human
cucucacucuucuuuuugcc

SEQ ID NO: 739331 - RNA, 19 nt, Human
cugaggaaggagaauggcc

SEQ ID NO: 739332 - RNA, 24 nt, Human
cugcaaccucugacucccugguuc

SEQ ID NO: 739333 - RNA, 19 nt, Human
cugcgccuggccucaucac

SEQ ID NO: 739334 - RNA, 19 nt, Human
cugggaucaaggcaugugc

SEQ ID NO: 739335 - RNA, 24 nt, Human
cugguucaagugauucucuugccu

SEQ ID NO: 739336 - RNA, 23 nt, Human
cugucuuggccucccaaagugcu

SEQ ID NO: 739337 - RNA, 22 nt, Human
cuuaaaagccuacugucuuuca

SEQ ID NO: 739338 - RNA, 18 nt, Human
cuuagguuuguguuugcu

SEQ ID NO: 739339 - RNA, 26 nt, Human
cuucccagcuguaauaagcccuguuu

SEQ ID NO: 739340 - RNA, 18 nt, Human
cuugaguuccuuuuaugg

SEQ ID NO: 739341 - RNA, 24 nt, Human
cuugccucagccuccugaguagcu

SEQ ID NO: 739342 - RNA, 21 nt, Human
cuuuguugccugggcuggucu

SEQ ID NO: 739343 - RNA, 18 nt, Human
gaauagcagagggucugg

SEQ ID NO: 739344 - RNA, 24 nt, Human
gaauuauaggcgugagccaccaug

SEQ ID NO: 739345 - RNA, 19 nt, Human
gacuuuguugccugggcug

SEQ ID NO: 739346 - RNA, 24 nt, Human
gaguagcugggauuacaagcacac

SEQ ID NO: 739347 - RNA, 24 nt, Human
gagugcaguggcacaaucacagcu

SEQ ID NO: 739348 - RNA, 20 nt, Human
gcaaaauuaauagaaauaaa

SEQ ID NO: 739349 - RNA, 19 nt, Human
gcacacaccaccacaccca

SEQ ID NO: 739350 - RNA, 20 nt, Human
gccacacauaguuauuaagc

SEQ ID NO: 739351 - RNA, 20 nt, Human
gccucagccuccugaguagc

SEQ ID NO: 739352 - RNA, 22 nt, Human
gccuuggccucccaaagugcug

SEQ ID NO: 739353 - RNA, 24 nt, Human
gcuuaguaacagcuggcuuaucac

SEQ ID NO: 739354 - RNA, 21 nt, Human
ggacaaugcacaauaacuccc

SEQ ID NO: 739355 - RNA, 18 nt, Human
ggagugcaguggcacaau

SEQ ID NO: 739356 - RNA, 19 nt, Human
ggcuggucuuaaacuccug

SEQ ID NO: 739357 - RNA, 19 nt, Human
ggcuuuaagugauccuucu

SEQ ID NO: 739358 - RNA, 20 nt, Human
gggcuggucuuaaacuccug

SEQ ID NO: 739359 - RNA, 20 nt, Human
ggggaaaggaggaguggcag

SEQ ID NO: 739360 - RNA, 21 nt, Human
gguucaagugauucucuugcc

SEQ ID NO: 739361 - RNA, 18 nt, Human
guagagacggaguuucac

SEQ ID NO: 739362 - RNA, 21 nt, Human
guagagauggggaucugacuu

SEQ ID NO: 739363 - RNA, 24 nt, Human
gucuugcucuguugccaggcugga

SEQ ID NO: 739364 - RNA, 19 nt, Human
gucuuggccucccaaagug

SEQ ID NO: 739365 - RNA, 24 nt, Human
gugauucucuugccucagccuccu

SEQ ID NO: 739366 - RNA, 25 nt, Human
uaaagagagcuccuugaugcagaac

SEQ ID NO: 739367 - RNA, 25 nt, Human
uaagggaaaaaaaggauggggaaag

SEQ ID NO: 739368 - RNA, 21 nt, Human
uaagguaaggccucaaaguca

SEQ ID NO: 739369 - RNA, 21 nt, Human
uaagugauccuucugucuugg

SEQ ID NO: 739370 - RNA, 20 nt, Human
uaauacacuuauuaccacca

SEQ ID NO: 739371 - RNA, 24 nt, Human
uaauuuuuguauuuuuaguagaga

SEQ ID NO: 739372 - RNA, 19 nt, Human
uaggacuaagaagaaauac

SEQ ID NO: 739373 - RNA, 24 nt, Human
uaguagagacuggcuuucaccaug

SEQ ID NO: 739374 - RNA, 21 nt, Human
uauggaaccaauagcaaaaca

SEQ ID NO: 739375 - RNA, 19 nt, Human
ucaagugauucucuugccu

SEQ ID NO: 739376 - RNA, 19 nt, Human
ucacugcaaccucugacuc

SEQ ID NO: 739377 - RNA, 24 nt, Human
ucacugcaaccucugacucccugg

SEQ ID NO: 739378 - RNA, 20 nt, Human
ucagccuccugaguagcugg

SEQ ID NO: 739379 - RNA, 18 nt, Human
ucaggaaagcugaaguug

SEQ ID NO: 739380 - RNA, 22 nt, Human
ucauuaacuuccuuuuuuuuuu

SEQ ID NO: 739381 - RNA, 23 nt, Human
uccaguagaaauuucuguaacga

SEQ ID NO: 739382 - RNA, 26 nt, Human
ucccaaaaugcuggcauuacacaggc

SEQ ID NO: 739383 - RNA, 24 nt, Human
ucccaaagugcuggaauuauaggc

SEQ ID NO: 739384 - RNA, 23 nt, Human
ucccaaagugcugggaucaaggc

SEQ ID NO: 739385 - RNA, 19 nt, Human
ucccagcuguaauaagccc

SEQ ID NO: 739386 - RNA, 21 nt, Human
ucccugguucaagugauucuc

SEQ ID NO: 739387 - RNA, 21 nt, Human
ucccugguucaagugauucuc

SEQ ID NO: 739388 - RNA, 18 nt, Human
uccugaguagcugggauu

SEQ ID NO: 739389 - RNA, 18 nt, Human
uccugaguucaagugauc

SEQ ID NO: 739390 - RNA, 18 nt, Human
ucuacaucuacauugucu

SEQ ID NO: 739391 - RNA, 21 nt, Human
ucuacauugucuaauacagua

SEQ ID NO: 739392 - RNA, 25 nt, Human
ucuacauugucuaauacaguagcca

SEQ ID NO: 739393 - RNA, 24 nt, Human
ucucacucugucaaccaggcagga

SEQ ID NO: 739394 - RNA, 18 nt, Human
ucucaggaaagcugaagu

SEQ ID NO: 739395 - RNA, 23 nt, Human
ucuccaacuccugaguucaagug

SEQ ID NO: 739396 - RNA, 18 nt, Human
ucugacuuuguugccugg

SEQ ID NO: 739397 - RNA, 24 nt, Human
ucugcccaccuuggccucccaaaa

SEQ ID NO: 739398 - RNA, 21 nt, Human
ucugucuuggccucccaaagu

SEQ ID NO: 739399 - RNA, 18 nt, Human
ucuguugccaggcuggag

SEQ ID NO: 739400 - RNA, 23 nt, Human
ucuguugccaggcuggagugcag

SEQ ID NO: 739401 - RNA, 20 nt, Human
ucuugaguuccuuuuaugga

SEQ ID NO: 739402 - RNA, 21 nt, Human
ucuugcucuguugccaggcug

SEQ ID NO: 739403 - RNA, 22 nt, Human
ucuugcucuguugccaggcugg

SEQ ID NO: 739404 - RNA, 23 nt, Human
ucuugcucuguugccaggcugga

SEQ ID NO: 739405 - RNA, 20 nt, Human
ucuuggccucccaaagugcu

SEQ ID NO: 739406 - RNA, 23 nt, Human
ugaaaacuacuaagguuucuagg

SEQ ID NO: 739407 - RNA, 21 nt, Human
ugaaauugucccccauugaga

SEQ ID NO: 739408 - RNA, 19 nt, Human
ugaacauggaucuucuuuc

SEQ ID NO: 739409 - RNA, 23 nt, Human
ugacagacauaggcugaagcagg

SEQ ID NO: 739410 - RNA, 19 nt, Human
ugacuccuaacauuaguag

SEQ ID NO: 739411 - RNA, 27 nt, Human
ugacuccuaacauuaguagcaccccuu

SEQ ID NO: 739412 - RNA, 19 nt, Human
ugaggaaggagaauggccc

SEQ ID NO: 739413 - RNA, 21 nt, Human
ugaggaaggagaauggcccug

SEQ ID NO: 739414 - RNA, 22 nt, Human
ugaggaaggagaauggcccugg

SEQ ID NO: 739415 - RNA, 18 nt, Human
ugaguucaagugaucugc

SEQ ID NO: 739416 - RNA, 22 nt, Human
ugaucugccagccuuggccucc

SEQ ID NO: 739417 - RNA, 24 nt, Human
ugaucugcccaccuuggccuccca

SEQ ID NO: 739418 - RNA, 23 nt, Human
ugcagugguguaaucucggcuca

SEQ ID NO: 739419 - RNA, 21 nt, Human
ugcauuggaggauauuuagug

SEQ ID NO: 739420 - RNA, 23 nt, Human
ugccaggcuggagugcaguggug

SEQ ID NO: 739421 - RNA, 24 nt, Human
ugccaggcuggagugcaguggugu

SEQ ID NO: 739422 - RNA, 24 nt, Human
ugccucagccuccugaguagcugg

SEQ ID NO: 739423 - RNA, 24 nt, Human
ugccugggcuggucuuaaacuccu

SEQ ID NO: 739424 - RNA, 23 nt, Human
ugcgccuggccucaucacagugu

SEQ ID NO: 739425 - RNA, 19 nt, Human
ugcugggaucaaggcaugu

SEQ ID NO: 739426 - RNA, 18 nt, Human
uggaaccaauagcaaaac

SEQ ID NO: 739427 - RNA, 19 nt, Human
uggaaccaauagcaaaaca

SEQ ID NO: 739428 - RNA, 18 nt, Human
uggaauuauaggcgugag

SEQ ID NO: 739429 - RNA, 22 nt, Human
uggaauuauaggcgugagccac

SEQ ID NO: 739430 - RNA, 24 nt, Human
uggaauuauaggcgugagccacca

SEQ ID NO: 739431 - RNA, 25 nt, Human
uggaauuauaggcgugagccaccau

SEQ ID NO: 739432 - RNA, 23 nt, Human
uggagugcagugguguaaucucg

SEQ ID NO: 739433 - RNA, 24 nt, Human
uggagugcagugguguaaucucgg

SEQ ID NO: 739434 - RNA, 18 nt, Human
uggcaacagaauagcaga

SEQ ID NO: 739435 - RNA, 20 nt, Human
uggcacaaucacagcucacu

SEQ ID NO: 739436 - RNA, 24 nt, Human
uggcacaaucacagcucacuauca

SEQ ID NO: 739437 - RNA, 24 nt, Human
uggccaggcuggucuccaacuccu

SEQ ID NO: 739438 - RNA, 18 nt, Human
uggccucccaaagugcug

SEQ ID NO: 739439 - RNA, 24 nt, Human
uggcuuuaagugauccuucugucu

SEQ ID NO: 739440 - RNA, 20 nt, Human
ugggaucaaggcaugugcca

SEQ ID NO: 739441 - RNA, 21 nt, Human
ugggauuacaagcacacacca

SEQ ID NO: 739442 - RNA, 24 nt, Human
ugggauuacaagcacacaccacca

SEQ ID NO: 739443 - RNA, 23 nt, Human
ugggcuggucuuaaacuccuggc

SEQ ID NO: 739444 - RNA, 22 nt, Human
uggggaaaggaggaguggcagu

SEQ ID NO: 739445 - RNA, 24 nt, Human
uggguagagacggaguuucaccau

SEQ ID NO: 739446 - RNA, 18 nt, Human
ugguucaagugauucucu

SEQ ID NO: 739447 - RNA, 24 nt, Human
uguucauuucagguuuccuacaug

SEQ ID NO: 739448 - RNA, 23 nt, Human
uguucuacaucuacauugucuaa

SEQ ID NO: 739449 - RNA, 24 nt, Human
uuaguagagacuggcuuucaccau

SEQ ID NO: 739450 - RNA, 20 nt, Human
uucaagugaucugccagccu

SEQ ID NO: 739451 - RNA, 23 nt, Human
uucaagugauucucuugccucag

SEQ ID NO: 739452 - RNA, 19 nt, Human
uucauccuacaucuuucua

SEQ ID NO: 739453 - RNA, 21 nt, Human
uucaucuaacagagccaagac

SEQ ID NO: 739454 - RNA, 18 nt, Human
uucccuagaaauggcucu

SEQ ID NO: 739455 - RNA, 19 nt, Human
uucucugugguagguucua

SEQ ID NO: 739456 - RNA, 22 nt, Human
uucuugaguuccuuuuauggga

SEQ ID NO: 739457 - RNA, 21 nt, Human
uugccaggcuggagugcagug

SEQ ID NO: 739458 - RNA, 24 nt, Human
uugccaggcuggagugcaguggug

SEQ ID NO: 739459 - RNA, 18 nt, Human
uuggccucccaaagugcu

SEQ ID NO: 739460 - RNA, 24 nt, Human
uuucaccauauuggccaggcuggu

SEQ ID NO: 739461 - RNA, 19 nt, Human
uuucaccauguugaccagg

SEQ ID NO: 739462 - RNA, 23 nt, Human
uuugacagaagaaugcugccacu

SEQ ID NO: 739463 - RNA, 20 nt, Human
uuuguagagauggggaucug

SEQ ID NO: 739464 - RNA, 24 nt, Human
uuuguugccugggcuggucuuaaa

SEQ ID NO: 739465 - RNA, 24 nt, Human
uuuuuaguagagacuggcuuucac

SEQ ID NO: 739466 - RNA, 18 nt, Human
uuuuuggguagagacgga

SEQ ID NO: 739467 - RNA, 20 nt, Human
uuuuuguauuuuuaguagag

SEQ ID NO: 739468 - RNA, 20 nt, Human
uuuuuuguagagauggggau

SEQ ID NO: 739469 - RNA, 26 nt, Human
aaagccuugcuuucaaguucucuaaa

SEQ ID NO: 739470 - RNA, 20 nt, Human
aaagggguaaagaaaaaagg

SEQ ID NO: 739471 - RNA, 25 nt, Human
aaagguaaaaaccugaaaacccacc

SEQ ID NO: 739472 - RNA, 21 nt, Human
aacacaggcagcucagaaaca

SEQ ID NO: 739473 - RNA, 26 nt, Human
aagcaaccuuuuggguuggugaaggc

SEQ ID NO: 739474 - RNA, 18 nt, Human
aagugccaagugcucuuc

SEQ ID NO: 739475 - RNA, 21 nt, Human
acacagggagaacacaggcag

SEQ ID NO: 739476 - RNA, 23 nt, Human
accucuuagcugggaggcuuugu

SEQ ID NO: 739477 - RNA, 20 nt, Human
acucaacaaagucucagucc

SEQ ID NO: 739478 - RNA, 21 nt, Human
agaaaaaagguaaaaaccuga

SEQ ID NO: 739479 - RNA, 24 nt, Human
agaaaaaagguaaaaaccugaaaa

SEQ ID NO: 739480 - RNA, 19 nt, Human
agaacacaggcagcucaga

SEQ ID NO: 739481 - RNA, 20 nt, Human
agaggaaaaagggaaagcga

SEQ ID NO: 739482 - RNA, 20 nt, Human
aggcaggcuuaggagucuag

SEQ ID NO: 739483 - RNA, 19 nt, Human
aguaaagggguaaagaaaa

SEQ ID NO: 739484 - RNA, 22 nt, Human
aguccuaaugaagcccaaacca

SEQ ID NO: 739485 - RNA, 19 nt, Human
auggacuguacugggaggg

SEQ ID NO: 739486 - RNA, 22 nt, Human
caaaucauuugaguaagaguuu

SEQ ID NO: 739487 - RNA, 19 nt, Human
caagucccagaaagaacuc

SEQ ID NO: 739488 - RNA, 23 nt, Human
cagaaagaacucaacaaagucuc

SEQ ID NO: 739489 - RNA, 24 nt, Human
cagaaagaacucaacaaagucuca

SEQ ID NO: 739490 - RNA, 21 nt, Human
cagacagaauuuaaaagacuc

SEQ ID NO: 739491 - RNA, 24 nt, Human
caguccuaaugaagcccaaaccaa

SEQ ID NO: 739492 - RNA, 18 nt, Human
cauaacacagcuuaaucg

SEQ ID NO: 739493 - RNA, 27 nt, Human
caugaagauaagugccaagugcucuuc

SEQ ID NO: 739494 - RNA, 24 nt, Human
ccagaaagaacucaacaaagucuc

SEQ ID NO: 739495 - RNA, 25 nt, Human
ccagaaagaacucaacaaagucuca

SEQ ID NO: 739496 - RNA, 21 nt, Human
ccagaagcucuuucugucuga

SEQ ID NO: 739497 - RNA, 19 nt, Human
ccaugaagauaagugccaa

SEQ ID NO: 739498 - RNA, 23 nt, Human
cccagaaagaacucaacaaaguc

SEQ ID NO: 739499 - RNA, 21 nt, Human
ccuggaaauuccugccaccuu

SEQ ID NO: 739500 - RNA, 24 nt, Human
cuaaaauuggagccaaugaugccu

SEQ ID NO: 739501 - RNA, 25 nt, Human
cuagucccuucucucacccacacag

SEQ ID NO: 739502 - RNA, 22 nt, Human
cuccaagucccagaaagaacuc

SEQ ID NO: 739503 - RNA, 28 nt, Human
cugccaccuuuuucucuccuucucaacc

SEQ ID NO: 739504 - RNA, 18 nt, Human
gaaaaagggaaagcgaua

SEQ ID NO: 739505 - RNA, 22 nt, Human
gaagcucuuucugucugacccu

SEQ ID NO: 739506 - RNA, 22 nt, Human
gacaaggcagcauucuugggga

SEQ ID NO: 739507 - RNA, 24 nt, Human
gagaacacaggcagcucagaaaca

SEQ ID NO: 739508 - RNA, 22 nt, Human
gagcgcugggaauguucagagc

SEQ ID NO: 739509 - RNA, 24 nt, Human
gauuuuauuagacuaguaguuuua

SEQ ID NO: 739510 - RNA, 18 nt, Human
gggaauguucagagccug

SEQ ID NO: 739511 - RNA, 21 nt, Human
guaaaaaccugaaaacccacc

SEQ ID NO: 739512 - RNA, 18 nt, Human
gugcauuuuaaaaaagac

SEQ ID NO: 739513 - RNA, 21 nt, Human
guucaaccaagccuucugauu

SEQ ID NO: 739514 - RNA, 25 nt, Human
uaaaaaccugaaaacccaccauaac

SEQ ID NO: 739515 - RNA, 24 nt, Human
uaaauacauacauacuucugcaca

SEQ ID NO: 739516 - RNA, 23 nt, Human
uaaugaagcccaaaccaagugac

SEQ ID NO: 739517 - RNA, 24 nt, Human
uaguaggcagacagaauuuaaaag

SEQ ID NO: 739518 - RNA, 19 nt, Human
uauaaggacacaagucaac

SEQ ID NO: 739519 - RNA, 26 nt, Human
ucaguccuaaugaagcccaaaccaag

SEQ ID NO: 739520 - RNA, 25 nt, Human
uccacagacaaggcagcauucuugg

SEQ ID NO: 739521 - RNA, 21 nt, Human
uccacucuccaagucccagaa

SEQ ID NO: 739522 - RNA, 19 nt, Human
ucccagaagcucuuucugu

SEQ ID NO: 739523 - RNA, 22 nt, Human
uccuaaugaagcccaaaccaag

SEQ ID NO: 739524 - RNA, 19 nt, Human
ucgcuaggccagcucaacu

SEQ ID NO: 739525 - RNA, 26 nt, Human
ugaauaucauccacucuccaaguccc

SEQ ID NO: 739526 - RNA, 22 nt, Human
uggaaauuuuacaacauaccau

SEQ ID NO: 739527 - RNA, 21 nt, Human
ugggaggggcggagggagagg

SEQ ID NO: 739528 - RNA, 26 nt, Human
uggguuggugaaggcaagagaguucu

SEQ ID NO: 739529 - RNA, 18 nt, Human
uuaaaacuaguaggcaga

SEQ ID NO: 739530 - RNA, 20 nt, Human
uucugauucugccucuagac

SEQ ID NO: 739531 - RNA, 18 nt, Human
uucuguaaagggccauau

SEQ ID NO: 739532 - RNA, 19 nt, Human
uuggaggaagguaaaguga

SEQ ID NO: 739533 - RNA, 21 nt, Human
aaagcccaacccccagggcuc

SEQ ID NO: 739534 - RNA, 18 nt, Human
aaagucuuuccaucacau

SEQ ID NO: 739535 - RNA, 24 nt, Human
aacaagggggugccgagaaaggga

SEQ ID NO: 739536 - RNA, 22 nt, Human
aacacacacacagggacacaca

SEQ ID NO: 739537 - RNA, 23 nt, Human
aaccccgcaaagaauucacugcc

SEQ ID NO: 739538 - RNA, 22 nt, Human
aagacccuacuccuauucccac

SEQ ID NO: 739539 - RNA, 18 nt, Human
aagcagaaagaggcuggg

SEQ ID NO: 739540 - RNA, 20 nt, Human
acacacucacaaccaggcca

SEQ ID NO: 739541 - RNA, 20 nt, Human
acaccccuauccaaaaauug

SEQ ID NO: 739542 - RNA, 22 nt, Human
acccggugcaggcccccucagg

SEQ ID NO: 739543 - RNA, 25 nt, Human
acccuacuccuauucccaccacccc

SEQ ID NO: 739544 - RNA, 20 nt, Human
acccucucaacucuuugcug

SEQ ID NO: 739545 - RNA, 25 nt, Human
accgcucugccccucaguguccccu

SEQ ID NO: 739546 - RNA, 22 nt, Human
accgugaagcccucugaguccu

SEQ ID NO: 739547 - RNA, 20 nt, Human
accuuauggcacugcacguc

SEQ ID NO: 739548 - RNA, 27 nt, Human
acucacccugcccuccuccuauucccu

SEQ ID NO: 739549 - RNA, 20 nt, Human
acuugggaaugggggcugcc

SEQ ID NO: 739550 - RNA, 20 nt, Human
agagaaauacaccccuaucc

SEQ ID NO: 739551 - RNA, 24 nt, Human
agagaaauacaccccuauccaaaa

SEQ ID NO: 739552 - RNA, 26 nt, Human
agagaccuggugaggaccacccagaa

SEQ ID NO: 739553 - RNA, 21 nt, Human
agagagaacuugggaaugggg

SEQ ID NO: 739554 - RNA, 19 nt, Human
agagagauggaggggaggg

SEQ ID NO: 739555 - RNA, 19 nt, Human
agagaggucuggagcccag

SEQ ID NO: 739556 - RNA, 18 nt, Human
agauggaggggaggggac

SEQ ID NO: 739557 - RNA, 23 nt, Human
agcacagagagcaucacuagaca

SEQ ID NO: 739558 - RNA, 20 nt, Human
agcccaacccccagggcucc

SEQ ID NO: 739559 - RNA, 19 nt, Human
aggaaacgggggucugggg

SEQ ID NO: 739560 - RNA, 19 nt, Human
aggaaacgggggucugggg

SEQ ID NO: 739561 - RNA, 18 nt, Human
aggaccacccagaagggc

SEQ ID NO: 739562 - RNA, 22 nt, Human
aggagggagagaggucuggagc

SEQ ID NO: 739563 - RNA, 26 nt, Human
aggccugaguccaagagaucuuguug

SEQ ID NO: 739564 - RNA, 20 nt, Human
aggcugggauaaaagagaga

SEQ ID NO: 739565 - RNA, 21 nt, Human
agggaggaaccuggucacagc

SEQ ID NO: 739566 - RNA, 21 nt, Human
agggagggagagcacuguagg

SEQ ID NO: 739567 - RNA, 19 nt, Human
agggccccaagagaagcag

SEQ ID NO: 739568 - RNA, 24 nt, Human
auccaacucuccccccgcccccaa

SEQ ID NO: 739569 - RNA, 18 nt, Human
aucccaaccucaugggcu

SEQ ID NO: 739570 - RNA, 18 nt, Human
caacagggaaccaaccuc

SEQ ID NO: 739571 - RNA, 24 nt, Human
caacaguagcagcccaggccucca

SEQ ID NO: 739572 - RNA, 25 nt, Human
caacaguagcagcccaggccuccag

SEQ ID NO: 739573 - RNA, 18 nt, Human
caacccccagggcuccau

SEQ ID NO: 739574 - RNA, 26 nt, Human
caaggauccugcgccugccgaacccc

SEQ ID NO: 739575 - RNA, 18 nt, Human
cacacacucacaaccagg

SEQ ID NO: 739576 - RNA, 18 nt, Human
caccaccccagccaaguc

SEQ ID NO: 739577 - RNA, 19 nt, Human
caccaccuaggauugcccc

SEQ ID NO: 739578 - RNA, 21 nt, Human
caccaccuaggauugccccca

SEQ ID NO: 739579 - RNA, 18 nt, Human
cacccagcucagagaccu

SEQ ID NO: 739580 - RNA, 19 nt, Human
caccgcucugccccucagu

SEQ ID NO: 739581 - RNA, 20 nt, Human
caccuugccccccaaaaccg

SEQ ID NO: 739582 - RNA, 20 nt, Human
cacucacaaccaggccaggc

SEQ ID NO: 739583 - RNA, 21 nt, Human
cacucacccugcccuccuccu

SEQ ID NO: 739584 - RNA, 20 nt, Human
cacucauguuuuuguggggg

SEQ ID NO: 739585 - RNA, 23 nt, Human
caggaaccucucaggucagccuu

SEQ ID NO: 739586 - RNA, 22 nt, Human
caggccuccagaaggacugggg

SEQ ID NO: 739587 - RNA, 21 nt, Human
caggcuccauggccuaggagg

SEQ ID NO: 739588 - RNA, 22 nt, Human
caguagguggcaggccugcccu

SEQ ID NO: 739589 - RNA, 19 nt, Human
cagugcaccaaaggucaag

SEQ ID NO: 739590 - RNA, 22 nt, Human
caguuucagcaaacccggugca

SEQ ID NO: 739591 - RNA, 18 nt, Human
caugugccucacucucgc

SEQ ID NO: 739592 - RNA, 18 nt, Human
ccaacaagggggugccga

SEQ ID NO: 739593 - RNA, 24 nt, Human
ccaacucuccccccgcccccaaaa

SEQ ID NO: 739594 - RNA, 23 nt, Human
ccacaggugggaggggggagggg

SEQ ID NO: 739595 - RNA, 20 nt, Human
ccacucacccugcccuccuc

SEQ ID NO: 739596 - RNA, 20 nt, Human
ccacucacccugcccuccuc

SEQ ID NO: 739597 - RNA, 19 nt, Human
ccagcucucuccaccuugc

SEQ ID NO: 739598 - RNA, 24 nt, Human
cccaccaccccagccaagucaacc

SEQ ID NO: 739599 - RNA, 20 nt, Human
cccagcucagagaccuggug

SEQ ID NO: 739600 - RNA, 19 nt, Human
ccccaaaacaagggccucc

SEQ ID NO: 739601 - RNA, 20 nt, Human
ccccaaaacaagggccuccg

SEQ ID NO: 739602 - RNA, 21 nt, Human
ccccaaaacucagucuugggg

SEQ ID NO: 739603 - RNA, 21 nt, Human
ccccacucacccugcccuccu

SEQ ID NO: 739604 - RNA, 18 nt, Human
ccccagggcuccaugcac

SEQ ID NO: 739605 - RNA, 21 nt, Human
cccccacucacccugcccucc

SEQ ID NO: 739606 - RNA, 19 nt, Human
cccccagcguugcucagcu

SEQ ID NO: 739607 - RNA, 20 nt, Human
ccccgaggcggcgagcgccu

SEQ ID NO: 739608 - RNA, 19 nt, Human
ccccucccgcaacacacac

SEQ ID NO: 739609 - RNA, 21 nt, Human
cccggcaccgcucugccccuc

SEQ ID NO: 739610 - RNA, 21 nt, Human
cccucaggcuccauggccuag

SEQ ID NO: 739611 - RNA, 20 nt, Human
cccucaguguccccuucccu

SEQ ID NO: 739612 - RNA, 18 nt, Human
ccgcagaggucccagggc

SEQ ID NO: 739613 - RNA, 18 nt, Human
ccgcgugccaggcgcccc

SEQ ID NO: 739614 - RNA, 23 nt, Human
ccgcucccuguggaccuugaccc

SEQ ID NO: 739615 - RNA, 24 nt, Human
ccgcugcagggugcgcggccccaa

SEQ ID NO: 739616 - RNA, 21 nt, Human
ccucagggcgccaggaaccuc

SEQ ID NO: 739617 - RNA, 23 nt, Human
ccucaugccaggccuacccuggg

SEQ ID NO: 739618 - RNA, 22 nt, Human
ccuccgaggcccggucugcagg

SEQ ID NO: 739619 - RNA, 19 nt, Human
ccuccuauucccuccuuuu

SEQ ID NO: 739620 - RNA, 24 nt, Human
ccuccuauucccuccuuuuagggg

SEQ ID NO: 739621 - RNA, 20 nt, Human
ccucugaguccuucuguggg

SEQ ID NO: 739622 - RNA, 21 nt, Human
ccucugaguccuucugugggu

SEQ ID NO: 739623 - RNA, 21 nt, Human
ccucugcgaaaugggaggaau

SEQ ID NO: 739624 - RNA, 18 nt, Human
ccugcgggauccuggcca

SEQ ID NO: 739625 - RNA, 24 nt, Human
ccugggaagacagggcccccuucc

SEQ ID NO: 739626 - RNA, 22 nt, Human
ccuggugaggaccacccagaag

SEQ ID NO: 739627 - RNA, 22 nt, Human
cggucugcaggggccaugugcc

SEQ ID NO: 739628 - RNA, 26 nt, Human
cgucccccucccccaaggccggccca

SEQ ID NO: 739629 - RNA, 23 nt, Human
cuacaauggguacaaaaaguucc

SEQ ID NO: 739630 - RNA, 21 nt, Human
cuauccaaaaauugagggugg

SEQ ID NO: 739631 - RNA, 19 nt, Human
cucacaaccaggccaggcu

SEQ ID NO: 739632 - RNA, 23 nt, Human
cuccagaaggacuggggcaccuu

SEQ ID NO: 739633 - RNA, 19 nt, Human
cucccccaaggccggccca

SEQ ID NO: 739634 - RNA, 23 nt, Human
cucccugccccuguggccuaggc

SEQ ID NO: 739635 - RNA, 19 nt, Human
cuccgccaugagcuuccca

SEQ ID NO: 739636 - RNA, 21 nt, Human
cucuccccccgcccccaaaaa

SEQ ID NO: 739637 - RNA, 24 nt, Human
cucucuccaccuugccccccaaaa

SEQ ID NO: 739638 - RNA, 18 nt, Human
cugaccucagaaacuggg

SEQ ID NO: 739639 - RNA, 21 nt, Human
cugcaaccccagaauuuuggg

SEQ ID NO: 739640 - RNA, 25 nt, Human
cugcaaccccagaauuuugggguuc

SEQ ID NO: 739641 - RNA, 22 nt, Human
cugcaguagguggcaggccugc

SEQ ID NO: 739642 - RNA, 22 nt, Human
cugcccuccuccuauucccucc

SEQ ID NO: 739643 - RNA, 18 nt, Human
cugcgccugccgaacccc

SEQ ID NO: 739644 - RNA, 21 nt, Human
cugggacccuccgaggcccgg

SEQ ID NO: 739645 - RNA, 22 nt, Human
cuguugcccugcgggauccugg

SEQ ID NO: 739646 - RNA, 22 nt, Human
cuuccagccccaguccuccccu

SEQ ID NO: 739647 - RNA, 19 nt, Human
cuucccagcccccuaaccu

SEQ ID NO: 739648 - RNA, 23 nt, Human
cuucccggauuacuacccucucc

SEQ ID NO: 739649 - RNA, 21 nt, Human
cuugggggugggaggaagaga

SEQ ID NO: 739650 - RNA, 24 nt, Human
gaaauacaccccuauccaaaaauu

SEQ ID NO: 739651 - RNA, 23 nt, Human
gaauccaacagggaaccaaccuc

SEQ ID NO: 739652 - RNA, 19 nt, Human
gacccuacuccuauuccca

SEQ ID NO: 739653 - RNA, 20 nt, Human
gacccuacuccuauucccac

SEQ ID NO: 739654 - RNA, 18 nt, Human
gacgcaguggcgccagcu

SEQ ID NO: 739655 - RNA, 21 nt, Human
gagcaugaaagcagaaagagg

SEQ ID NO: 739656 - RNA, 21 nt, Human
gaggaagagagugaaaaagag

SEQ ID NO: 739657 - RNA, 18 nt, Human
gaggcugggggaauagag

SEQ ID NO: 739658 - RNA, 22 nt, Human
gcaggugcugagccaccucagg

SEQ ID NO: 739659 - RNA, 20 nt, Human
gcaguggucgccaggauggc

SEQ ID NO: 739660 - RNA, 25 nt, Human
gccagcucucuccaccuugcccccc

SEQ ID NO: 739661 - RNA, 22 nt, Human
gcccccaaaacaagggccuccg

SEQ ID NO: 739662 - RNA, 19 nt, Human
gccgcaccggggcccuggg

SEQ ID NO: 739663 - RNA, 21 nt, Human
gcgcggccccaaggauccugc

SEQ ID NO: 739664 - RNA, 21 nt, Human
gcggccccaaggauccugcgc

SEQ ID NO: 739665 - RNA, 20 nt, Human
ggaaaugggguuggaagggg

SEQ ID NO: 739666 - RNA, 22 nt, Human
ggaagagagauggaggggaggg

SEQ ID NO: 739667 - RNA, 25 nt, Human
ggaagugggcagugcaccaaagguc

SEQ ID NO: 739668 - RNA, 20 nt, Human
ggacacacacucacaaccag

SEQ ID NO: 739669 - RNA, 20 nt, Human
ggacgggggccgcggcugca

SEQ ID NO: 739670 - RNA, 22 nt, Human
ggagagaggucuggagcccagg

SEQ ID NO: 739671 - RNA, 20 nt, Human
ggagagugccugagaggcag

SEQ ID NO: 739672 - RNA, 21 nt, Human
ggaggaggcuggucaggggcu

SEQ ID NO: 739673 - RNA, 22 nt, Human
ggaggggacacuggggacucug

SEQ ID NO: 739674 - RNA, 21 nt, Human
ggaggggaggggacacugggg

SEQ ID NO: 739675 - RNA, 23 nt, Human
ggaggggggaggggaggggaggg

SEQ ID NO: 739676 - RNA, 26 nt, Human
ggaggggggaggggaggggaggggcc

SEQ ID NO: 739677 - RNA, 24 nt, Human
ggaggugagcacagagagcaucac

SEQ ID NO: 739678 - RNA, 20 nt, Human
ggcaacgcuucccaagaaca

SEQ ID NO: 739679 - RNA, 18 nt, Human
ggcccgaaccagcugcgc

SEQ ID NO: 739680 - RNA, 23 nt, Human
ggcucugucaguuucagcaaacc

SEQ ID NO: 739681 - RNA, 18 nt, Human
gggaaaugggguuggaag

SEQ ID NO: 739682 - RNA, 18 nt, Human
gggaggggccgcugcagg

SEQ ID NO: 739683 - RNA, 20 nt, Human
gggcgaggagagugccugag

SEQ ID NO: 739684 - RNA, 19 nt, Human
ggggaauagagugcgggaa

SEQ ID NO: 739685 - RNA, 19 nt, Human
ggggaggggacacugggga

SEQ ID NO: 739686 - RNA, 20 nt, Human
ggggaggggaggggaggggc

SEQ ID NO: 739687 - RNA, 22 nt, Human
ggggaggggccgcugcagggug

SEQ ID NO: 739688 - RNA, 21 nt, Human
gggggugggaggaagagagug

SEQ ID NO: 739689 - RNA, 21 nt, Human
ggggucugggggagggugggu

SEQ ID NO: 739690 - RNA, 19 nt, Human
ggguagagccgagaagccg

SEQ ID NO: 739691 - RNA, 20 nt, Human
ggugaggguagagccgagaa

SEQ ID NO: 739692 - RNA, 23 nt, Human
guccaagugggcugccacggggg

SEQ ID NO: 739693 - RNA, 22 nt, Human
gucugggggaggguggguaggc

SEQ ID NO: 739694 - RNA, 24 nt, Human
guuucagcaaacccggugcaggcc

SEQ ID NO: 739695 - RNA, 23 nt, Human
uaaacuucugccuuagccccacc

SEQ ID NO: 739696 - RNA, 21 nt, Human
uacagugaggggugaauggaa

SEQ ID NO: 739697 - RNA, 21 nt, Human
uaccugaauccaacagggaac

SEQ ID NO: 739698 - RNA, 18 nt, Human
uaggaagaugaugugcug

SEQ ID NO: 739699 - RNA, 24 nt, Human
uaggagggagagaggucuggagcc

SEQ ID NO: 739700 - RNA, 22 nt, Human
uagguaagacccuacuccuauu

SEQ ID NO: 739701 - RNA, 22 nt, Human
uaguugccagcucucuccaccu

SEQ ID NO: 739702 - RNA, 18 nt, Human
uauggggucuauggggaa

SEQ ID NO: 739703 - RNA, 18 nt, Human
ucacuagacacagggugg

SEQ ID NO: 739704 - RNA, 19 nt, Human
ucacugccaccaggaagac

SEQ ID NO: 739705 - RNA, 27 nt, Human
ucacugccaccaggaagacuucccgga

SEQ ID NO: 739706 - RNA, 21 nt, Human
ucagcaaacccggugcaggcc

SEQ ID NO: 739707 - RNA, 22 nt, Human
ucagucuugggggugggaggaa

SEQ ID NO: 739708 - RNA, 25 nt, Human
ucagugacccucucaacucuuugcu

SEQ ID NO: 739709 - RNA, 22 nt, Human
uccaaaaauugagggugggggu

SEQ ID NO: 739710 - RNA, 22 nt, Human
uccaacucuccccccgccccca

SEQ ID NO: 739711 - RNA, 21 nt, Human
uccaaggugaaggaauaaggc

SEQ ID NO: 739712 - RNA, 21 nt, Human
uccaugcacauagcccccagc

SEQ ID NO: 739713 - RNA, 22 nt, Human
uccaugcacauagcccccagcg

SEQ ID NO: 739714 - RNA, 20 nt, Human
ucccaggcucagugacccuc

SEQ ID NO: 739715 - RNA, 22 nt, Human
ucccucgcggauggacgggggc

SEQ ID NO: 739716 - RNA, 23 nt, Human
ucccugccccuguggccuaggcc

SEQ ID NO: 739717 - RNA, 24 nt, Human
ucccugggugcuggacuuccagcc

SEQ ID NO: 739718 - RNA, 22 nt, Human
uccgccaugagcuucccaggcu

SEQ ID NO: 739719 - RNA, 23 nt, Human
uccuaaacuucugccuuagcccc

SEQ ID NO: 739720 - RNA, 21 nt, Human
uccugccaaucugcccaggga

SEQ ID NO: 739721 - RNA, 24 nt, Human
uccugcgccugccgaaccccgcaa

SEQ ID NO: 739722 - RNA, 20 nt, Human
ucuagggcagguacagugag

SEQ ID NO: 739723 - RNA, 23 nt, Human
ucuagggcagguacagugagggg

SEQ ID NO: 739724 - RNA, 21 nt, Human
ucucagggccugcguuuccca

SEQ ID NO: 739725 - RNA, 19 nt, Human
ucucaggucagccuuguuc

SEQ ID NO: 739726 - RNA, 19 nt, Human
ucugggggaggguggguag

SEQ ID NO: 739727 - RNA, 21 nt, Human
ucugggggaggguggguaggc

SEQ ID NO: 739728 - RNA, 18 nt, Human
ugaaaaagagagagauau

SEQ ID NO: 739729 - RNA, 19 nt, Human
ugaaagcagaaagaggcug

SEQ ID NO: 739730 - RNA, 18 nt, Human
ugaauccaacagggaacc

SEQ ID NO: 739731 - RNA, 19 nt, Human
ugaauggaaugggcagugg

SEQ ID NO: 739732 - RNA, 21 nt, Human
ugaggaaacgggggucugggg

SEQ ID NO: 739733 - RNA, 22 nt, Human
ugaggaaacgggggucuggggg

SEQ ID NO: 739734 - RNA, 20 nt, Human
ugcaguagguggcaggccug

SEQ ID NO: 739735 - RNA, 19 nt, Human
ugcagucagggcagaagug

SEQ ID NO: 739736 - RNA, 24 nt, Human
ugcagucagggcagaaguggaagc

SEQ ID NO: 739737 - RNA, 23 nt, Human
ugccaccaggaagacuucccgga

SEQ ID NO: 739738 - RNA, 22 nt, Human
ugccacgggggcagugcuggag

SEQ ID NO: 739739 - RNA, 20 nt, Human
ugcccccacucacccugccc

SEQ ID NO: 739740 - RNA, 20 nt, Human
ugcccccacucacccugccc

SEQ ID NO: 739741 - RNA, 24 nt, Human
ugccgagaaagggagcaugacucc

SEQ ID NO: 739742 - RNA, 20 nt, Human
ugcgcgacuuuggaggggcc

SEQ ID NO: 739743 - RNA, 23 nt, Human
ugcuggacuuccagccccagucc

SEQ ID NO: 739744 - RNA, 23 nt, Human
ugcuuuucccuuccugucuuggg

SEQ ID NO: 739745 - RNA, 18 nt, Human
uggaagaaaaggugagac

SEQ ID NO: 739746 - RNA, 20 nt, Human
uggaagaaaaggugagacuu

SEQ ID NO: 739747 - RNA, 25 nt, Human
uggaagaaaaggugagacuuugggg

SEQ ID NO: 739748 - RNA, 18 nt, Human
uggaaggggagagcagua

SEQ ID NO: 739749 - RNA, 20 nt, Human
uggaccuugacccugcucag

SEQ ID NO: 739750 - RNA, 18 nt, Human
uggcugaggccggggcag

SEQ ID NO: 739751 - RNA, 19 nt, Human
ugggaaaggaaaacaaaaa

SEQ ID NO: 739752 - RNA, 21 nt, Human
ugggaagugggcagugcaccc

SEQ ID NO: 739753 - RNA, 21 nt, Human
ugggaaugggggcugccuguu

SEQ ID NO: 739754 - RNA, 21 nt, Human
ugggacccuaauaucccaacc

SEQ ID NO: 739755 - RNA, 19 nt, Human
ugggacccuccgaggcccg

SEQ ID NO: 739756 - RNA, 23 nt, Human
ugggcaguggucgccaggauggc

SEQ ID NO: 739757 - RNA, 19 nt, Human
ugggcuggggaaauggggu

SEQ ID NO: 739758 - RNA, 20 nt, Human
uggggaaaugggguuggaaa

SEQ ID NO: 739759 - RNA, 23 nt, Human
ugggggaggggcugggcagguag

SEQ ID NO: 739760 - RNA, 19 nt, Human
ugggggaggguggguaggc

SEQ ID NO: 739761 - RNA, 24 nt, Human
ugguagagauauauauuuauauau

SEQ ID NO: 739762 - RNA, 18 nt, Human
ugguuggacgucccaaag

SEQ ID NO: 739763 - RNA, 18 nt, Human
uguccugccaaucugccc

SEQ ID NO: 739764 - RNA, 21 nt, Human
ugugcagaggguuagaggcca

SEQ ID NO: 739765 - RNA, 21 nt, Human
ugugguuggacgucccaaagc

SEQ ID NO: 739766 - RNA, 22 nt, Human
uguugggggaggggcugggcag

SEQ ID NO: 739767 - RNA, 20 nt, Human
uguugggggaggggcugggg

SEQ ID NO: 739768 - RNA, 20 nt, Human
uuagggggguccaagugggc

SEQ ID NO: 739769 - RNA, 27 nt, Human
uucccaccaccccagccaagucaaccc

SEQ ID NO: 739770 - RNA, 24 nt, Human
uucccaggcucagugacccucuca

SEQ ID NO: 739771 - RNA, 22 nt, Human
uucccugggugcuggacuucca

SEQ ID NO: 739772 - RNA, 21 nt, Human
uuccuaaacuucugccuuagc

SEQ ID NO: 739773 - RNA, 24 nt, Human
uucuucaagggcaaucacauccaa

SEQ ID NO: 739774 - RNA, 21 nt, Human
uugcccccacucacccugccc

SEQ ID NO: 739775 - RNA, 24 nt, Human
uugcugcaaccccagaauuuuggg

SEQ ID NO: 739776 - RNA, 23 nt, Human
uugcuggugaauuagaaauuugc

SEQ ID NO: 739777 - RNA, 21 nt, Human
uugggggaggggcugggcagg

SEQ ID NO: 739778 - RNA, 21 nt, Human
aaaaaaaaaauugucagaggg

SEQ ID NO: 739779 - RNA, 22 nt, Human
aaaaagcagagggaggagggga

SEQ ID NO: 739780 - RNA, 21 nt, Human
aaaaguacaugagggagacug

SEQ ID NO: 739781 - RNA, 21 nt, Human
aaacaucaacacaacagaaga

SEQ ID NO: 739782 - RNA, 27 nt, Human
aaagaugagcaucccucagaagccccc

SEQ ID NO: 739783 - RNA, 22 nt, Human
aaagcagcauuuacguuuauag

SEQ ID NO: 739784 - RNA, 18 nt, Human
aacagguaggaggguggg

SEQ ID NO: 739785 - RNA, 26 nt, Human
aacccaccccugcaagccaaaacuca

SEQ ID NO: 739786 - RNA, 24 nt, Human
aacucauccuccagccuacuucua

SEQ ID NO: 739787 - RNA, 23 nt, Human
aacuucaaaucuaaacccacccc

SEQ ID NO: 739788 - RNA, 33 nt, Human
aagaaggaaacaucaacacaacagaagaaaaag

SEQ ID NO: 739789 - RNA, 25 nt, Human
aagcaaagaaaaaugagucccuuca

SEQ ID NO: 739790 - RNA, 20 nt, Human
acaagguacccagggaaacc

SEQ ID NO: 739791 - RNA, 22 nt, Human
acacaacagaagaaaauauacc

SEQ ID NO: 739792 - RNA, 24 nt, Human
acacugcccaucccagccgggugc

SEQ ID NO: 739793 - RNA, 22 nt, Human
acagaagaaaauauacccuuca

SEQ ID NO: 739794 - RNA, 25 nt, Human
accaaccaaccaauucuagccacac

SEQ ID NO: 739795 - RNA, 19 nt, Human
acccaccccugcaagccaa

SEQ ID NO: 739796 - RNA, 18 nt, Human
accuguuucucuguguaa

SEQ ID NO: 739797 - RNA, 21 nt, Human
agaggaaaaaagcagagggag

SEQ ID NO: 739798 - RNA, 23 nt, Human
agagggggcuaaguacuaggaag

SEQ ID NO: 739799 - RNA, 21 nt, Human
agcaagugcucuggugacaac

SEQ ID NO: 739800 - RNA, 29 nt, Human
aggaaaaaagcagagggaggagggacccc

SEQ ID NO: 739801 - RNA, 24 nt, Human
aggaaacaucaacacaacagaaga

SEQ ID NO: 739802 - RNA, 20 nt, Human
aggaacagagccuuggccca

SEQ ID NO: 739803 - RNA, 21 nt, Human
aggaauccccccagacaauca

SEQ ID NO: 739804 - RNA, 28 nt, Human
aggaauccccccagacaaucaccaaauc

SEQ ID NO: 739805 - RNA, 18 nt, Human
aggagggugggagggcag

SEQ ID NO: 739806 - RNA, 22 nt, Human
aggagggugggagggcagucaa

SEQ ID NO: 739807 - RNA, 19 nt, Human
aggcaaagaggcagccaga

SEQ ID NO: 739808 - RNA, 27 nt, Human
aggcaagaagaggggcaaaagggaccc

SEQ ID NO: 739809 - RNA, 21 nt, Human
aggcaagaccagaugggccca

SEQ ID NO: 739810 - RNA, 25 nt, Human
aggcaggaacagagccuuggcccag

SEQ ID NO: 739811 - RNA, 19 nt, Human
agggacaaauugagaggag

SEQ ID NO: 739812 - RNA, 21 nt, Human
agggagacuguuaaagaugag

SEQ ID NO: 739813 - RNA, 19 nt, Human
auccccuccuucuccucug

SEQ ID NO: 739814 - RNA, 25 nt, Human
augaagcaaaauaucuguaaaugug

SEQ ID NO: 739815 - RNA, 18 nt, Human
augcuuagucaguuuugc

SEQ ID NO: 739816 - RNA, 20 nt, Human
auucuggaaguuaaagaaaa

SEQ ID NO: 739817 - RNA, 19 nt, Human
auuuaugggucuccucccc

SEQ ID NO: 739818 - RNA, 22 nt, Human
caaaacucaauucuuuggcugu

SEQ ID NO: 739819 - RNA, 22 nt, Human
caaaaggaagacugucccaacu

SEQ ID NO: 739820 - RNA, 22 nt, Human
caaagaaaaaugagucccuuca

SEQ ID NO: 739821 - RNA, 18 nt, Human
caacacaacagaagaaaa

SEQ ID NO: 739822 - RNA, 26 nt, Human
caacacaacagaagaaaauauacccu

SEQ ID NO: 739823 - RNA, 23 nt, Human
caaccaaccaauucuagccacac

SEQ ID NO: 739824 - RNA, 19 nt, Human
caagcuaaugggaagcagc

SEQ ID NO: 739825 - RNA, 22 nt, Human
caagggaacauuuaugggucuc

SEQ ID NO: 739826 - RNA, 22 nt, Human
caaucuacaagcuaaugggaag

SEQ ID NO: 739827 - RNA, 21 nt, Human
caccccugcaagccaaaacuc

SEQ ID NO: 739828 - RNA, 23 nt, Human
caccccugcaagccaaaacucaa

SEQ ID NO: 739829 - RNA, 20 nt, Human
caggaacagagccuuggccc

SEQ ID NO: 739830 - RNA, 24 nt, Human
cagggaaacccaggaaucccccca

SEQ ID NO: 739831 - RNA, 19 nt, Human
ccaagauaacagugccaaa

SEQ ID NO: 739832 - RNA, 24 nt, Human
cccaccccugcaagccaaaacuca

SEQ ID NO: 739833 - RNA, 24 nt, Human
ccccaaaaugguggcacuuccacc

SEQ ID NO: 739834 - RNA, 19 nt, Human
cccccagcugacugcugcc

SEQ ID NO: 739835 - RNA, 21 nt, Human
ccccugcaagccaaaacucaa

SEQ ID NO: 739836 - RNA, 18 nt, Human
ccuucuccucuguggggu

SEQ ID NO: 739837 - RNA, 20 nt, Human
cuaaacccaccccugcaagc

SEQ ID NO: 739838 - RNA, 23 nt, Human
cucagaagcccccagcugacugc

SEQ ID NO: 739839 - RNA, 21 nt, Human
cugcaagccaaaacucaauuc

SEQ ID NO: 739840 - RNA, 20 nt, Human
cuguaaaugugcucaccucc

SEQ ID NO: 739841 - RNA, 21 nt, Human
cuguaaaugugcucaccuccc

SEQ ID NO: 739842 - RNA, 21 nt, Human
cuuaacauuuugucccagcaa

SEQ ID NO: 739843 - RNA, 20 nt, Human
gaagagcagaggaaaaaagc

SEQ ID NO: 739844 - RNA, 22 nt, Human
gacaggaaaaagaaaucccuga

SEQ ID NO: 739845 - RNA, 21 nt, Human
gagaaaagaaacaaggaacgu

SEQ ID NO: 739846 - RNA, 19 nt, Human
gagaauuugcgaaggcagg

SEQ ID NO: 739847 - RNA, 26 nt, Human
gagcagaggaaaaaagcagagggagg

SEQ ID NO: 739848 - RNA, 23 nt, Human
gagcuggauguaaaaaauauuau

SEQ ID NO: 739849 - RNA, 23 nt, Human
gauguugcugcagaggggugggu

SEQ ID NO: 739850 - RNA, 18 nt, Human
gcagaggaaaaaagcaga

SEQ ID NO: 739851 - RNA, 19 nt, Human
gcagaggaaaaaagcagag

SEQ ID NO: 739852 - RNA, 21 nt, Human
gccagaguauggcucaaucua

SEQ ID NO: 739853 - RNA, 21 nt, Human
gcuaaugggaagcagcacgaa

SEQ ID NO: 739854 - RNA, 23 nt, Human
ggaaggcaaagaggcagccagag

SEQ ID NO: 739855 - RNA, 21 nt, Human
ggaauccccccagacaaucac

SEQ ID NO: 739856 - RNA, 22 nt, Human
ggaauccccccagacaaucacu

SEQ ID NO: 739857 - RNA, 21 nt, Human
ggcaaagaggcagccagagua

SEQ ID NO: 739858 - RNA, 19 nt, Human
gggauaacguaacgucacc

SEQ ID NO: 739859 - RNA, 19 nt, Human
gggcugaaagcaaagaaaa

SEQ ID NO: 739860 - RNA, 25 nt, Human
guaaaacagcaaaaguacaugaggg

SEQ ID NO: 739861 - RNA, 18 nt, Human
guaaaugugcucaccucc

SEQ ID NO: 739862 - RNA, 18 nt, Human
gucccagcaaaaaauguu

SEQ ID NO: 739863 - RNA, 21 nt, Human
guguaaaacagcaaaaguaca

SEQ ID NO: 739864 - RNA, 21 nt, Human
uaaaaaaaaaauugucagagg

SEQ ID NO: 739865 - RNA, 22 nt, Human
uacacaaagccaccagaacgag

SEQ ID NO: 739866 - RNA, 21 nt, Human
uacaugggcugaaagcaaaga

SEQ ID NO: 739867 - RNA, 24 nt, Human
uacaugggcugaaagcaaagaaaa

SEQ ID NO: 739868 - RNA, 25 nt, Human
uagaaacacagaagagggagggaca

SEQ ID NO: 739869 - RNA, 19 nt, Human
uagcucaaaaaucccaaua

SEQ ID NO: 739870 - RNA, 19 nt, Human
uaggaaaaugccaaagugg

SEQ ID NO: 739871 - RNA, 24 nt, Human
uaggaaaaugccaaagugggaauu

SEQ ID NO: 739872 - RNA, 18 nt, Human
uaggaaggcaaagaggca

SEQ ID NO: 739873 - RNA, 24 nt, Human
uaugagcuacaaaaagcagcauuu

SEQ ID NO: 739874 - RNA, 22 nt, Human
ucaaaaaucccaauacuggggg

SEQ ID NO: 739875 - RNA, 23 nt, Human
ucagagggggcuaaguacuagga

SEQ ID NO: 739876 - RNA, 22 nt, Human
uccaccacuagaacagcuuggc

SEQ ID NO: 739877 - RNA, 18 nt, Human
ucccaacucauccuccag

SEQ ID NO: 739878 - RNA, 22 nt, Human
ucccucagaagcccccagcuga

SEQ ID NO: 739879 - RNA, 18 nt, Human
ucccuguggcgcugagaa

SEQ ID NO: 739880 - RNA, 23 nt, Human
ucuaaacuugacaguuuggagau

SEQ ID NO: 739881 - RNA, 18 nt, Human
ucuaucauaugugauaaa

SEQ ID NO: 739882 - RNA, 24 nt, Human
ugaaagcaaagaaaaaugaguccc

SEQ ID NO: 739883 - RNA, 20 nt, Human
ugaaaggcaagaagaggggc

SEQ ID NO: 739884 - RNA, 27 nt, Human
ugaccaaccaaccaauucuagccacac

SEQ ID NO: 739885 - RNA, 21 nt, Human
ugagcaucccucagaagcccc

SEQ ID NO: 739886 - RNA, 18 nt, Human
ugagcugggcagagggcc

SEQ ID NO: 739887 - RNA, 27 nt, Human
ugccuggaacaagguacccagggaaac

SEQ ID NO: 739888 - RNA, 22 nt, Human
ugcucuggugacaacccacugg

SEQ ID NO: 739889 - RNA, 20 nt, Human
ugcugcccauuagcucaaaa

SEQ ID NO: 739890 - RNA, 21 nt, Human
uggacugacugccuggaacaa

SEQ ID NO: 739891 - RNA, 18 nt, Human
uggagaugccucuucugg

SEQ ID NO: 739892 - RNA, 19 nt, Human
uggcucaacacccccaagg

SEQ ID NO: 739893 - RNA, 26 nt, Human
ugggugaaaggcaagaagaggggcaa

SEQ ID NO: 739894 - RNA, 19 nt, Human
ugucaagugaccaaccaac

SEQ ID NO: 739895 - RNA, 19 nt, Human
ugucaagugaccaaccaac

SEQ ID NO: 739896 - RNA, 20 nt, Human
ugucuaaacugagcugggca

SEQ ID NO: 739897 - RNA, 26 nt, Human
ugucuaaacugagcugggggaggagu

SEQ ID NO: 739898 - RNA, 21 nt, Human
uuacagcauauauaucucuau

SEQ ID NO: 739899 - RNA, 23 nt, Human
uucaaaucuaaacccaccccugc

SEQ ID NO: 739900 - RNA, 20 nt, Human
uucacuuuagacacaugagc

SEQ ID NO: 739901 - RNA, 23 nt, Human
uucuuuggcugucagacacugcc

SEQ ID NO: 739902 - RNA, 20 nt, Human
uuuacagaagggaagagcag

SEQ ID NO: 739903 - RNA, 18 nt, Human
uuuacagcauauauaucu

SEQ ID NO: 739904 - RNA, 24 nt, Human
uuuauuuuuauuuuuacuuuuaaa

SEQ ID NO: 739905 - RNA, 21 nt, Human
uuuguuuucauuuuauaaccu

SEQ ID NO: 739906 - RNA, 26 nt, Human
aaaaaaaaaagaauacagcaggauag

SEQ ID NO: 739907 - RNA, 19 nt, Human
aaaauuaagagaaggaagg

SEQ ID NO: 739908 - RNA, 25 nt, Human
aaacaagaagaggucagaagggacc

SEQ ID NO: 739909 - RNA, 21 nt, Human
aaacugaauccauuuuccuug

SEQ ID NO: 739910 - RNA, 23 nt, Human
aaauaauacagcacuuguaauaa

SEQ ID NO: 739911 - RNA, 22 nt, Human
aaaugccagugcuaaaacugaa

SEQ ID NO: 739912 - RNA, 24 nt, Human
aacagaaagugaagaaaagggacc

SEQ ID NO: 739913 - RNA, 20 nt, Human
aacagagcaagacuccaucu

SEQ ID NO: 739914 - RNA, 25 nt, Human
aacauuuuauuguaaauagcucuuc

SEQ ID NO: 739915 - RNA, 23 nt, Human
aacuugauaacaguuucuugcug

SEQ ID NO: 739916 - RNA, 24 nt, Human
aagaugauccuguccuuggcuuug

SEQ ID NO: 739917 - RNA, 26 nt, Human
aagcaaaaagaaaaaacaagcaaacc

SEQ ID NO: 739918 - RNA, 26 nt, Human
aagcaaaaagaaaaaacaaggggacc

SEQ ID NO: 739919 - RNA, 21 nt, Human
aagcagccauuugaaaaacag

SEQ ID NO: 739920 - RNA, 20 nt, Human
aagcugcuuuaugagaucag

SEQ ID NO: 739921 - RNA, 20 nt, Human
aagcuucagugcuauagugc

SEQ ID NO: 739922 - RNA, 18 nt, Human
aagucuuuuauuugucuu

SEQ ID NO: 739923 - RNA, 24 nt, Human
aaucacuugaauccaggaggcgga

SEQ ID NO: 739924 - RNA, 24 nt, Human
acacaacuuaggaaaaggggaacc

SEQ ID NO: 739925 - RNA, 22 nt, Human
acacaacuuaggaaaaguacca

SEQ ID NO: 739926 - RNA, 20 nt, Human
acacauauucucuaugcaug

SEQ ID NO: 739927 - RNA, 21 nt, Human
acaccuguaauccuagcacuu

SEQ ID NO: 739928 - RNA, 23 nt, Human
acaccuguaauccuagcacuuug

SEQ ID NO: 739929 - RNA, 24 nt, Human
acagagcaagacuccaucucaaaa

SEQ ID NO: 739930 - RNA, 24 nt, Human
accagcauagugaaacccugucuc

SEQ ID NO: 739931 - RNA, 24 nt, Human
acccggagaagcuguuuaaaggag

SEQ ID NO: 739932 - RNA, 24 nt, Human
acccugucucuacuaaaaauacaa

SEQ ID NO: 739933 - RNA, 18 nt, Human
acgaugcggaugucucug

SEQ ID NO: 739934 - RNA, 19 nt, Human
acucaguaauacacaacuu

SEQ ID NO: 739935 - RNA, 19 nt, Human
acuccagcagcucauucug

SEQ ID NO: 739936 - RNA, 21 nt, Human
acuccgaagguccccagccuu

SEQ ID NO: 739937 - RNA, 24 nt, Human
acuugaggucaggaguucgagacc

SEQ ID NO: 739938 - RNA, 20 nt, Human
acuuuuucuuuacacaauau

SEQ ID NO: 739939 - RNA, 18 nt, Human
agaaaugacacacucuuc

SEQ ID NO: 739940 - RNA, 20 nt, Human
agaacuguuccaugucacuu

SEQ ID NO: 739941 - RNA, 22 nt, Human
agaaucacuugaauccaggagg

SEQ ID NO: 739942 - RNA, 24 nt, Human
agaaugcucuaggcaugugaggau

SEQ ID NO: 739943 - RNA, 19 nt, Human
agaguuguucguccaaagc

SEQ ID NO: 739944 - RNA, 23 nt, Human
agaucacuugaggucaggaguuc

SEQ ID NO: 739945 - RNA, 25 nt, Human
agaucacuugaggucaggaguucga

SEQ ID NO: 739946 - RNA, 23 nt, Human
agcaaaaagaaaaaacaagcaaa

SEQ ID NO: 739947 - RNA, 19 nt, Human
agcaaaucccuguaguaag

SEQ ID NO: 739948 - RNA, 22 nt, Human
agcaccucugcuuggagcuguu

SEQ ID NO: 739949 - RNA, 24 nt, Human
agcacuuugggaggcugaggcagg

SEQ ID NO: 739950 - RNA, 21 nt, Human
agcauagugaaacccugucuc

SEQ ID NO: 739951 - RNA, 24 nt, Human
agcaugggcaacagagcaagacuc

SEQ ID NO: 739952 - RNA, 23 nt, Human
agccaggugugguggugugcacc

SEQ ID NO: 739953 - RNA, 26 nt, Human
aggcagaucacuugaggucaggaguu

SEQ ID NO: 739954 - RNA, 18 nt, Human
aggcaggagaaucacuug

SEQ ID NO: 739955 - RNA, 23 nt, Human
aggcaggagaaucacuugaaucc

SEQ ID NO: 739956 - RNA, 22 nt, Human
aggcaggcagaucacuugaggu

SEQ ID NO: 739957 - RNA, 26 nt, Human
aggcaggcagaucacuugaggucagg

SEQ ID NO: 739958 - RNA, 24 nt, Human
aggcggagcuugccaugagccgag

SEQ ID NO: 739959 - RNA, 24 nt, Human
aggcugaggcaggcagaucacuug

SEQ ID NO: 739960 - RNA, 24 nt, Human
agggagagaugcaaacugaaucca

SEQ ID NO: 739961 - RNA, 24 nt, Human
agggagagaugcaaacugaaucca

SEQ ID NO: 739962 - RNA, 24 nt, Human
aggugugguggugugcaccuguaa

SEQ ID NO: 739963 - RNA, 24 nt, Human
agguugaggcaggagaaucacuug

SEQ ID NO: 739964 - RNA, 22 nt, Human
aguccauuguugauagaggaau

SEQ ID NO: 739965 - RNA, 23 nt, Human
agugaagaaaaauggaaaagucu

SEQ ID NO: 739966 - RNA, 24 nt, Human
aguggcuuacaccuguaauccuag

SEQ ID NO: 739967 - RNA, 20 nt, Human
auaaauaaaacuucaaaaau

SEQ ID NO: 739968 - RNA, 24 nt, Human
auagaggcggcggcggcggcagca

SEQ ID NO: 739969 - RNA, 23 nt, Human
auaggaaccacccuuccagcccc

SEQ ID NO: 739970 - RNA, 21 nt, Human
auccagcaggaggccgggcac

SEQ ID NO: 739971 - RNA, 26 nt, Human
augcucuuuggagggccugauauucu

SEQ ID NO: 739972 - RNA, 22 nt, Human
caaacugaauccauuuuccuug

SEQ ID NO: 739973 - RNA, 21 nt, Human
caacaacacaagaaagucaaa

SEQ ID NO: 739974 - RNA, 21 nt, Human
caagacuccaucucaaaaaaa

SEQ ID NO: 739975 - RNA, 22 nt, Human
caaugcacuccagcaugggcaa

SEQ ID NO: 739976 - RNA, 23 nt, Human
caaugcacuccagcaugggcaac

SEQ ID NO: 739977 - RNA, 24 nt, Human
caaugcacuccagcaugggcaaca

SEQ ID NO: 739978 - RNA, 19 nt, Human
cacagccugcagcuccuuc

SEQ ID NO: 739979 - RNA, 21 nt, Human
cacauauccacaauuuugcug

SEQ ID NO: 739980 - RNA, 19 nt, Human
cacauccuuaacaccuucu

SEQ ID NO: 739981 - RNA, 22 nt, Human
caccaacacuguagaggcaccc

SEQ ID NO: 739982 - RNA, 24 nt, Human
caccaacacuguagaggcacccuc

SEQ ID NO: 739983 - RNA, 23 nt, Human
caccuguaaucccagcuacuagg

SEQ ID NO: 739984 - RNA, 24 nt, Human
caccuguaaucccagcuacuaggg

SEQ ID NO: 739985 - RNA, 19 nt, Human
caccuguaauccuagcacu

SEQ ID NO: 739986 - RNA, 24 nt, Human
caccuguaauccuagcacuuuggg

SEQ ID NO: 739987 - RNA, 23 nt, Human
cacuccagcaugggcaacagagc

SEQ ID NO: 739988 - RNA, 23 nt, Human
cacuugaggucaggaguucgaga

SEQ ID NO: 739989 - RNA, 19 nt, Human
cagagagguuaagugacug

SEQ ID NO: 739990 - RNA, 24 nt, Human
cagaucacuugaggucaggaguuc

SEQ ID NO: 739991 - RNA, 22 nt, Human
cagcaccgugugcuugcgcugc

SEQ ID NO: 739992 - RNA, 23 nt, Human
cagcagcagcagcagcagcauca

SEQ ID NO: 739993 - RNA, 24 nt, Human
cagcauagugaaacccugucucua

SEQ ID NO: 739994 - RNA, 20 nt, Human
cagccauuugaaaaacagua

SEQ ID NO: 739995 - RNA, 24 nt, Human
cagccccacuagaguaucagcaau

SEQ ID NO: 739996 - RNA, 20 nt, Human
caguuuccgggccuccuccc

SEQ ID NO: 739997 - RNA, 21 nt, Human
caguuugcuccaagccuuugu

SEQ ID NO: 739998 - RNA, 24 nt, Human
cauaaagacagaaaagcaaauccc

SEQ ID NO: 739999 - RNA, 22 nt, Human
cauaccacuuuuucaaaaauuu

SEQ ID NO: 740000 - RNA, 18 nt, Human
cauagugaaacccugucu

SEQ ID NO: 740001 - RNA, 19 nt, Human
cauagugaaacccugucuc

SEQ ID NO: 740002 - RNA, 19 nt, Human
caugugauuuacaguauca

SEQ ID NO: 740003 - RNA, 19 nt, Human
cauguucccuauagauguu

SEQ ID NO: 740004 - RNA, 20 nt, Human
ccaaugcacuccagcauggg

SEQ ID NO: 740005 - RNA, 21 nt, Human
ccaaugcacuccagcaugggc

SEQ ID NO: 740006 - RNA, 24 nt, Human
ccaaugcacuccagcaugggcaac

SEQ ID NO: 740007 - RNA, 18 nt, Human
ccacuagaguaucagcaa

SEQ ID NO: 740008 - RNA, 21 nt, Human
ccagaucuuaagcaaaaagaa

SEQ ID NO: 740009 - RNA, 20 nt, Human
ccaggucuucaauuuuggcu

SEQ ID NO: 740010 - RNA, 18 nt, Human
ccagugugaauccugccc

SEQ ID NO: 740011 - RNA, 19 nt, Human
ccaucugagaaugggugaa

SEQ ID NO: 740012 - RNA, 19 nt, Human
cccacuagaguaucagcaa

SEQ ID NO: 740013 - RNA, 19 nt, Human
cccaugcugagacccggag

SEQ ID NO: 740014 - RNA, 22 nt, Human
ccccauaaauaaaacuucaaaa

SEQ ID NO: 740015 - RNA, 24 nt, Human
ccuccgaauaucccgcuccgacuc

SEQ ID NO: 740016 - RNA, 18 nt, Human
ccucgugcuucacucccc

SEQ ID NO: 740017 - RNA, 21 nt, Human
ccucuugcuguuuuucacuua

SEQ ID NO: 740018 - RNA, 22 nt, Human
ccugaccagcauagugaaaccc

SEQ ID NO: 740019 - RNA, 20 nt, Human
ccugaguuuaaaacaaucau

SEQ ID NO: 740020 - RNA, 22 nt, Human
ccuguaaucccagcuacuaggg

SEQ ID NO: 740021 - RNA, 19 nt, Human
ccuguaguaagaaaccaga

SEQ ID NO: 740022 - RNA, 20 nt, Human
ccugugguaaaagugggguu

SEQ ID NO: 740023 - RNA, 24 nt, Human
cgagaccagccugaccagcauagu

SEQ ID NO: 740024 - RNA, 25 nt, Human
cgagucggaugcagccuccgaaccc

SEQ ID NO: 740025 - RNA, 23 nt, Human
cggcagcagcagcagcagcagca

SEQ ID NO: 740026 - RNA, 23 nt, Human
cggcggcagcagcagcagcagca

SEQ ID NO: 740027 - RNA, 23 nt, Human
cguccaaagccuccuucugaagu

SEQ ID NO: 740028 - RNA, 21 nt, Human
cuaauaaugucccaaguagcu

SEQ ID NO: 740029 - RNA, 23 nt, Human
cuagccccauaaauaaaacuuca

SEQ ID NO: 740030 - RNA, 20 nt, Human
cuaguuccuggauucucaua

SEQ ID NO: 740031 - RNA, 23 nt, Human
cuaguucuuccuccagauagccu

SEQ ID NO: 740032 - RNA, 24 nt, Human
cucacagccugcagcuccuucauc

SEQ ID NO: 740033 - RNA, 23 nt, Human
cuccagauagccuuuuauuuugc

SEQ ID NO: 740034 - RNA, 19 nt, Human
cuccaucucaaaaaaaaaa

SEQ ID NO: 740035 - RNA, 23 nt, Human
cucccagaucuuaagcaaaaaga

SEQ ID NO: 740036 - RNA, 21 nt, Human
cuccucuugcuguuuuucacu

SEQ ID NO: 740037 - RNA, 20 nt, Human
cucuguggcaaacccgacuc

SEQ ID NO: 740038 - RNA, 20 nt, Human
cucuucuagcucuagguuuc

SEQ ID NO: 740039 - RNA, 21 nt, Human
cugacagucauacucucugcu

SEQ ID NO: 740040 - RNA, 21 nt, Human
cugccagggacagcacagugc

SEQ ID NO: 740041 - RNA, 20 nt, Human
cugccgguuuuuuuuuuccc

SEQ ID NO: 740042 - RNA, 20 nt, Human
cuggaugucuguuuuaucuu

SEQ ID NO: 740043 - RNA, 21 nt, Human
cuggcccuaaacacaucuaaa

SEQ ID NO: 740044 - RNA, 24 nt, Human
cuggucucuggcguccuguaguuc

SEQ ID NO: 740045 - RNA, 24 nt, Human
cugucaccagcaccgugugcuugc

SEQ ID NO: 740046 - RNA, 20 nt, Human
cuguguuuuugcccaaauca

SEQ ID NO: 740047 - RNA, 22 nt, Human
cuguugguuuuuaauuucuuuc

SEQ ID NO: 740048 - RNA, 20 nt, Human
cuuccagccccacuagagua

SEQ ID NO: 740049 - RNA, 19 nt, Human
cuuccugggaucuuaucca

SEQ ID NO: 740050 - RNA, 20 nt, Human
cuuggacaaucauccuagcu

SEQ ID NO: 740051 - RNA, 21 nt, Human
cuuggagcuguucuugagccu

SEQ ID NO: 740052 - RNA, 25 nt, Human
cuuggcuucucguucagcgucgaug

SEQ ID NO: 740053 - RNA, 22 nt, Human
gaaaaaacaagcaaaccuuuug

SEQ ID NO: 740054 - RNA, 20 nt, Human
gaaaaacaguauuuuggaaa

SEQ ID NO: 740055 - RNA, 20 nt, Human
gaacaaaaagugggacccca

SEQ ID NO: 740056 - RNA, 18 nt, Human
gaauuuggagauuaaaug

SEQ ID NO: 740057 - RNA, 18 nt, Human
gacuggcucuccuguggu

SEQ ID NO: 740058 - RNA, 22 nt, Human
gagaagcuguuuaaaggaggga

SEQ ID NO: 740059 - RNA, 23 nt, Human
gagaagcuguuuaaaggagggag

SEQ ID NO: 740060 - RNA, 22 nt, Human
gagagaugcaaacugaauccau

SEQ ID NO: 740061 - RNA, 22 nt, Human
gagagaugcaaacugaauccau

SEQ ID NO: 740062 - RNA, 23 nt, Human
gagauugugccaaugcacuccag

SEQ ID NO: 740063 - RNA, 24 nt, Human
gagcacucacaccaucugagaaug

SEQ ID NO: 740064 - RNA, 18 nt, Human
gagcagacuugagccucu

SEQ ID NO: 740065 - RNA, 19 nt, Human
gaggaaacugaggcacaga

SEQ ID NO: 740066 - RNA, 24 nt, Human
gaucacuugaggucaggaguucga

SEQ ID NO: 740067 - RNA, 21 nt, Human
gcagaucacuugaggucagga

SEQ ID NO: 740068 - RNA, 22 nt, Human
gcaggagaaucacuugaaucca

SEQ ID NO: 740069 - RNA, 26 nt, Human
gccaaugcacuccagcaugggcaaca

SEQ ID NO: 740070 - RNA, 19 nt, Human
gcucagagccucguccacc

SEQ ID NO: 740071 - RNA, 18 nt, Human
gcucuccugugguaaaag

SEQ ID NO: 740072 - RNA, 19 nt, Human
gcugagacccggagaagcu

SEQ ID NO: 740073 - RNA, 21 nt, Human
gcugagacccggagaagcugu

SEQ ID NO: 740074 - RNA, 18 nt, Human
gcuucuaguuccuggauu

SEQ ID NO: 740075 - RNA, 20 nt, Human
ggagaagcuguuuaaaggag

SEQ ID NO: 740076 - RNA, 20 nt, Human
ggagaagcuguuuaaaggag

SEQ ID NO: 740077 - RNA, 24 nt, Human
ggagcuugccaugagccgagauug

SEQ ID NO: 740078 - RNA, 23 nt, Human
ggcacaguggcuuacaccuguaa

SEQ ID NO: 740079 - RNA, 24 nt, Human
gguggugugcaccuguaaucccag

SEQ ID NO: 740080 - RNA, 21 nt, Human
ggugugcaccuguaaucccag

SEQ ID NO: 740081 - RNA, 22 nt, Human
gguuuagaagcacuugucuucc

SEQ ID NO: 740082 - RNA, 18 nt, Human
gucgcggagagcacagag

SEQ ID NO: 740083 - RNA, 19 nt, Human
gucuccucaaucgcugccc

SEQ ID NO: 740084 - RNA, 19 nt, Human
gucucucucucucuucuag

SEQ ID NO: 740085 - RNA, 21 nt, Human
gugaaacccugucucuacuaa

SEQ ID NO: 740086 - RNA, 19 nt, Human
gugcugccauguuacuguu

SEQ ID NO: 740087 - RNA, 21 nt, Human
gugcuucacuccccacccacc

SEQ ID NO: 740088 - RNA, 21 nt, Human
guucggaaccaucaccugccc

SEQ ID NO: 740089 - RNA, 22 nt, Human
guugcacucagccuccuugacc

SEQ ID NO: 740090 - RNA, 21 nt, Human
uaaaaauacaaaaauuagcca

SEQ ID NO: 740091 - RNA, 22 nt, Human
uaaaaugaccccccugcacagc

SEQ ID NO: 740092 - RNA, 22 nt, Human
uaaauggaggggaucgucucuc

SEQ ID NO: 740093 - RNA, 23 nt, Human
uaaccggugauuuucugccuccu

SEQ ID NO: 740094 - RNA, 18 nt, Human
uaagagaaggaaggugug

SEQ ID NO: 740095 - RNA, 22 nt, Human
uaagcaaaaagaaaaaacaagc

SEQ ID NO: 740096 - RNA, 21 nt, Human
uaagcagauuagguauauaaa

SEQ ID NO: 740097 - RNA, 18 nt, Human
uacaaaguagcuucuagu

SEQ ID NO: 740098 - RNA, 24 nt, Human
uacacaauauauguuuauaguucu

SEQ ID NO: 740099 - RNA, 19 nt, Human
uacuguuucuuauccugga

SEQ ID NO: 740100 - RNA, 24 nt, Human
uagcacuuugggaggcugaggcag

SEQ ID NO: 740101 - RNA, 25 nt, Human
uagcacuuugggaggcugaggcagg

SEQ ID NO: 740102 - RNA, 23 nt, Human
uagcaugagaugaucuauuuccu

SEQ ID NO: 740103 - RNA, 23 nt, Human
uagcuguuguucucauaugacuu

SEQ ID NO: 740104 - RNA, 28 nt, Human
uagcuuggucgaggucauucagagauuc

SEQ ID NO: 740105 - RNA, 18 nt, Human
uaggaaccacccuuccag

SEQ ID NO: 740106 - RNA, 24 nt, Human
uagguuucgaaacuccagcagcuc

SEQ ID NO: 740107 - RNA, 22 nt, Human
uaucauagaaaugacacacucu

SEQ ID NO: 740108 - RNA, 22 nt, Human
ucaaaaaaaaaaaaaaaagaaa

SEQ ID NO: 740109 - RNA, 24 nt, Human
ucaaaugaaacauuuuauuguaaa

SEQ ID NO: 740110 - RNA, 21 nt, Human
ucacccaagauaucaagcugc

SEQ ID NO: 740111 - RNA, 20 nt, Human
ucacuugaggucaggaguuc

SEQ ID NO: 740112 - RNA, 18 nt, Human
ucacuuuccaauuccauc

SEQ ID NO: 740113 - RNA, 18 nt, Human
ucagggauguucacaucc

SEQ ID NO: 740114 - RNA, 23 nt, Human
ucaguuugcuccaagccuuuguu

SEQ ID NO: 740115 - RNA, 20 nt, Human
ucauugauucugcuguguuu

SEQ ID NO: 740116 - RNA, 23 nt, Human
uccaaucauuuagaaauaguuac

SEQ ID NO: 740117 - RNA, 24 nt, Human
uccaaucauuuagaaauaguuacu

SEQ ID NO: 740118 - RNA, 23 nt, Human
uccacaagcuccaccuuuugcag

SEQ ID NO: 740119 - RNA, 25 nt, Human
uccacuucucugccagggacagcac

SEQ ID NO: 740120 - RNA, 19 nt, Human
uccagcaggaggccgggca

SEQ ID NO: 740121 - RNA, 20 nt, Human
uccagcaugggcaacagagc

SEQ ID NO: 740122 - RNA, 20 nt, Human
uccaggaggcggagcuugcc

SEQ ID NO: 740123 - RNA, 24 nt, Human
uccaucagccuccgaauaucccgc

SEQ ID NO: 740124 - RNA, 23 nt, Human
uccaucucaaaaaaaaaaaaaaa

SEQ ID NO: 740125 - RNA, 20 nt, Human
ucccucugucucugguuggc

SEQ ID NO: 740126 - RNA, 19 nt, Human
uccuccagaauaaaagaag

SEQ ID NO: 740127 - RNA, 19 nt, Human
uccucgugcuucacucccc

SEQ ID NO: 740128 - RNA, 19 nt, Human
uccugguuuugaaucucuc

SEQ ID NO: 740129 - RNA, 20 nt, Human
uccugugguaaaaguggggu

SEQ ID NO: 740130 - RNA, 24 nt, Human
uccuuggcuuugauuucauccauc

SEQ ID NO: 740131 - RNA, 25 nt, Human
ucgaaucugcuuuuauuucacaugu

SEQ ID NO: 740132 - RNA, 18 nt, Human
ucgcucggguccuuugac

SEQ ID NO: 740133 - RNA, 19 nt, Human
ucgcugcccuggaagccca

SEQ ID NO: 740134 - RNA, 18 nt, Human
ucgcuuccaggucuucaa

SEQ ID NO: 740135 - RNA, 23 nt, Human
ucguccaccugcuucuuggccgu

SEQ ID NO: 740136 - RNA, 18 nt, Human
ucucaaaaaaaaaaaaaa

SEQ ID NO: 740137 - RNA, 21 nt, Human
ucuccaagcaagguauuccug

SEQ ID NO: 740138 - RNA, 23 nt, Human
ucucuacuaaaaauacaaaaauu

SEQ ID NO: 740139 - RNA, 21 nt, Human
ucucuguggcaaacccgacuc

SEQ ID NO: 740140 - RNA, 21 nt, Human
ucugagaaugggugaauuugg

SEQ ID NO: 740141 - RNA, 23 nt, Human
ucugcuguguuuuugcccaaauc

SEQ ID NO: 740142 - RNA, 18 nt, Human
ucuucauuagcuuggucg

SEQ ID NO: 740143 - RNA, 19 nt, Human
ucuuccaugcgcugcaagg

SEQ ID NO: 740144 - RNA, 18 nt, Human
ucuuccucagcauuugcc

SEQ ID NO: 740145 - RNA, 24 nt, Human
ugaccagcauagugaaacccuguc

SEQ ID NO: 740146 - RNA, 20 nt, Human
ugaccugaaguuuuagaaac

SEQ ID NO: 740147 - RNA, 21 nt, Human
ugacuggaacacauauccaca

SEQ ID NO: 740148 - RNA, 22 nt, Human
ugacuggaacacauauccacaa

SEQ ID NO: 740149 - RNA, 20 nt, Human
ugagaaugggugaauuugga

SEQ ID NO: 740150 - RNA, 22 nt, Human
ugagccgagauugugccaaugc

SEQ ID NO: 740151 - RNA, 20 nt, Human
ugaggcaggagaaucacuug

SEQ ID NO: 740152 - RNA, 24 nt, Human
ugaggcaggagaaucacuugaauc

SEQ ID NO: 740153 - RNA, 25 nt, Human
ugaggcaggagaaucacuugaaucc

SEQ ID NO: 740154 - RNA, 20 nt, Human
ugaggcaggcagaucacuug

SEQ ID NO: 740155 - RNA, 26 nt, Human
ugaggcaggcagaucacuugagguca

SEQ ID NO: 740156 - RNA, 19 nt, Human
ugaguuuaaaacaaucaua

SEQ ID NO: 740157 - RNA, 22 nt, Human
ugaugggcuugcuguaagagcu

SEQ ID NO: 740158 - RNA, 21 nt, Human
ugcaacagaaagugaagaaaa

SEQ ID NO: 740159 - RNA, 19 nt, Human
ugcaaucaagagagcuggg

SEQ ID NO: 740160 - RNA, 19 nt, Human
ugcaccuguaaucccagcu

SEQ ID NO: 740161 - RNA, 22 nt, Human
ugcacuccagcaugggcaacag

SEQ ID NO: 740162 - RNA, 26 nt, Human
ugccaaugcacuccagcaugggcaac

SEQ ID NO: 740163 - RNA, 21 nt, Human
ugccagggacagcacagugcu

SEQ ID NO: 740164 - RNA, 23 nt, Human
ugccaugagccgagauugugcca

SEQ ID NO: 740165 - RNA, 25 nt, Human
ugcccaagacacaucuuugcuugau

SEQ ID NO: 740166 - RNA, 24 nt, Human
uggaacacauauccacaauuuugc

SEQ ID NO: 740167 - RNA, 22 nt, Human
uggagcuuggcuuugaguucug

SEQ ID NO: 740168 - RNA, 25 nt, Human
uggcuaguguugggucaccaacacu

SEQ ID NO: 740169 - RNA, 19 nt, Human
uggcuuacaccuguaaucc

SEQ ID NO: 740170 - RNA, 24 nt, Human
uggcuuacaccuguaauccuagca

SEQ ID NO: 740171 - RNA, 20 nt, Human
ugggaccccagcauucuagu

SEQ ID NO: 740172 - RNA, 24 nt, Human
ugggaccccagcauucuaguuuuu

SEQ ID NO: 740173 - RNA, 24 nt, Human
ugggacugaugcucacuccgaagg

SEQ ID NO: 740174 - RNA, 20 nt, Human
ugggaggcugaggcaggcag

SEQ ID NO: 740175 - RNA, 24 nt, Human
ugggaggcugaggcaggcagauca

SEQ ID NO: 740176 - RNA, 21 nt, Human
ugguaaggucuccucaaucgc

SEQ ID NO: 740177 - RNA, 24 nt, Human
ugguggugugcaccuguaauccca

SEQ ID NO: 740178 - RNA, 18 nt, Human
uguaaucccagcuacuag

SEQ ID NO: 740179 - RNA, 20 nt, Human
uguaguucuuguuguaaccg

SEQ ID NO: 740180 - RNA, 22 nt, Human
ugucaaacaguuuccgggccuc

SEQ ID NO: 740181 - RNA, 18 nt, Human
ugucaccagcaccgugug

SEQ ID NO: 740182 - RNA, 18 nt, Human
ugucucuguuccugaguu

SEQ ID NO: 740183 - RNA, 18 nt, Human
uguguuuuugcccaaauc

SEQ ID NO: 740184 - RNA, 23 nt, Human
uguguuuuugcccaaaucauaua

SEQ ID NO: 740185 - RNA, 21 nt, Human
uguucuguugcucaaugaccu

SEQ ID NO: 740186 - RNA, 21 nt, Human
uguugcacucagccuccuuga

SEQ ID NO: 740187 - RNA, 25 nt, Human
uguuuugaucuuuuaaaaugauguu

SEQ ID NO: 740188 - RNA, 21 nt, Human
uuaagcagccauuugaaaaac

SEQ ID NO: 740189 - RNA, 23 nt, Human
uuagaagcacuugucuuccuggg

SEQ ID NO: 740190 - RNA, 20 nt, Human
uuagguauauaaaccauacc

SEQ ID NO: 740191 - RNA, 22 nt, Human
uuaucuucuuccauauuuucug

SEQ ID NO: 740192 - RNA, 21 nt, Human
uuauggucacugugauccacu

SEQ ID NO: 740193 - RNA, 18 nt, Human
uuauuuugcagaacuguu

SEQ ID NO: 740194 - RNA, 24 nt, Human
uuccaggucuucaauuuuggcuuu

SEQ ID NO: 740195 - RNA, 21 nt, Human
uuccauauaaaaaaguagagc

SEQ ID NO: 740196 - RNA, 21 nt, Human
uuccgggccuccucccgggcc

SEQ ID NO: 740197 - RNA, 21 nt, Human
uuccuggauucucauauaugc

SEQ ID NO: 740198 - RNA, 20 nt, Human
uuccugggaucuuauccaug

SEQ ID NO: 740199 - RNA, 20 nt, Human
uucuuggugggacugaugcu

SEQ ID NO: 740200 - RNA, 19 nt, Human
uugcacucagccuccuuga

SEQ ID NO: 740201 - RNA, 18 nt, Human
uuggacaaucauccuagc

SEQ ID NO: 740202 - RNA, 25 nt, Human
uugggaggcugaggcaggcagauca

SEQ ID NO: 740203 - RNA, 19 nt, Human
uugguagaaauuuacucau

SEQ ID NO: 740204 - RNA, 23 nt, Human
uuggugggugggaaagcaaaauu

SEQ ID NO: 740205 - RNA, 23 nt, Human
uuguugauagaggaaugcagaug

SEQ ID NO: 740206 - RNA, 24 nt, Human
uuguuuaaugacuggcucuccugu

SEQ ID NO: 740207 - RNA, 22 nt, Human
uuuacucauaugggcccugcaa

SEQ ID NO: 740208 - RNA, 22 nt, Human
uuucuuguucuucauuagcuug

SEQ ID NO: 740209 - RNA, 19 nt, Human
uuugcaaaugccagugcua

SEQ ID NO: 740210 - RNA, 26 nt, Human
uuuuuguuuguuuguuuugaucuuuu

SEQ ID NO: 740211 - RNA, 21 nt, Human
aacacugugguucgcuuccag

SEQ ID NO: 740212 - RNA, 19 nt, Human
aagaggaaaaaaauagaaa

SEQ ID NO: 740213 - RNA, 21 nt, Human
aaggagcaccucacugccugc

SEQ ID NO: 740214 - RNA, 20 nt, Human
acacugugguucgcuuccag

SEQ ID NO: 740215 - RNA, 25 nt, Human
acagaaagcagccacaucagugagc

SEQ ID NO: 740216 - RNA, 19 nt, Human
accucacugccugccucca

SEQ ID NO: 740217 - RNA, 18 nt, Human
agcagaggcaugaaggcg

SEQ ID NO: 740218 - RNA, 19 nt, Human
agcugccagccugcuggcc

SEQ ID NO: 740219 - RNA, 19 nt, Human
agcugguuugaucaacccc

SEQ ID NO: 740220 - RNA, 19 nt, Human
aggggaugggggguguugg

SEQ ID NO: 740221 - RNA, 22 nt, Human
agggggagaaggggugggggcc

SEQ ID NO: 740222 - RNA, 22 nt, Human
aggugccgggggcuuggaagcu

SEQ ID NO: 740223 - RNA, 22 nt, Human
augcguucugggcuucacucgg

SEQ ID NO: 740224 - RNA, 18 nt, Human
caaccccugacucccccu

SEQ ID NO: 740225 - RNA, 20 nt, Human
caagaggaaaaaaauagaaa

SEQ ID NO: 740226 - RNA, 20 nt, Human
caaggcacauuuccaacucg

SEQ ID NO: 740227 - RNA, 20 nt, Human
caagggcacaggggcagaga

SEQ ID NO: 740228 - RNA, 22 nt, Human
caagggugaggggagauggggg

SEQ ID NO: 740229 - RNA, 19 nt, Human
cacaucagugagcacagcc

SEQ ID NO: 740230 - RNA, 20 nt, Human
caccucacugccugccucca

SEQ ID NO: 740231 - RNA, 18 nt, Human
cacuggggugaguucuuc

SEQ ID NO: 740232 - RNA, 24 nt, Human
cacuggggugaguucuucuggccc

SEQ ID NO: 740233 - RNA, 26 nt, Human
cagaaagcagccacaucagugagcac

SEQ ID NO: 740234 - RNA, 20 nt, Human
cagagacagaaagcagccac

SEQ ID NO: 740235 - RNA, 21 nt, Human
cagagacagaaagcagccaca

SEQ ID NO: 740236 - RNA, 22 nt, Human
cagagugggcccagcucuugcc

SEQ ID NO: 740237 - RNA, 18 nt, Human
cagcggcacugguuuggg

SEQ ID NO: 740238 - RNA, 19 nt, Human
cccacaucucagcugggaa

SEQ ID NO: 740239 - RNA, 22 nt, Human
cccacuguccugcucagccauu

SEQ ID NO: 740240 - RNA, 23 nt, Human
ccccaacaccugcauccagaggg

SEQ ID NO: 740241 - RNA, 22 nt, Human
cccuguaaccaggaaacuaccc

SEQ ID NO: 740242 - RNA, 21 nt, Human
ccgcugaagcucagguuucug

SEQ ID NO: 740243 - RNA, 22 nt, Human
ccucacugccugccuccaaggg

SEQ ID NO: 740244 - RNA, 21 nt, Human
ccugcagccacagccaucugu

SEQ ID NO: 740245 - RNA, 22 nt, Human
ccugcagccacagccaucuguc

SEQ ID NO: 740246 - RNA, 22 nt, Human
ccugggacugagggugagggac

SEQ ID NO: 740247 - RNA, 25 nt, Human
ccuguaaccaggaaacuaccccaac

SEQ ID NO: 740248 - RNA, 18 nt, Human
ccuguggccaacccagaa

SEQ ID NO: 740249 - RNA, 21 nt, Human
cgcaggcacugaguggggcug

SEQ ID NO: 740250 - RNA, 24 nt, Human
cuaagcucaugaaguauuugccgg

SEQ ID NO: 740251 - RNA, 21 nt, Human
cugagucagggucagcccagg

SEQ ID NO: 740252 - RNA, 22 nt, Human
cuggccacccacccacccuucc

SEQ ID NO: 740253 - RNA, 18 nt, Human
cugggacugagggugagg

SEQ ID NO: 740254 - RNA, 21 nt, Human
cugugguucgcuuccagcucc

SEQ ID NO: 740255 - RNA, 23 nt, Human
cuuacuggaguugcgggguaggg

SEQ ID NO: 740256 - RNA, 18 nt, Human
cuucccagcgggcucccc

SEQ ID NO: 740257 - RNA, 19 nt, Human
cuuggaagcuggagaaaug

SEQ ID NO: 740258 - RNA, 22 nt, Human
gaaagcagccacaucagugagc

SEQ ID NO: 740259 - RNA, 21 nt, Human
gacaaggaugcgcaggggaug

SEQ ID NO: 740260 - RNA, 21 nt, Human
gagcugagcagaggugccggg

SEQ ID NO: 740261 - RNA, 25 nt, Human
gagcugccagccugcuggccaccca

SEQ ID NO: 740262 - RNA, 22 nt, Human
gcacuggggugaguucuucugg

SEQ ID NO: 740263 - RNA, 19 nt, Human
gcaggaugcacacagccuu

SEQ ID NO: 740264 - RNA, 22 nt, Human
gcccugcuuacuggaguugcgg

SEQ ID NO: 740265 - RNA, 21 nt, Human
gccgugaucagaccaggaggg

SEQ ID NO: 740266 - RNA, 19 nt, Human
gcugaagggggagaagggg

SEQ ID NO: 740267 - RNA, 20 nt, Human
ggaagcuggagaaaugaugg

SEQ ID NO: 740268 - RNA, 21 nt, Human
ggaccagcucucccuccuuca

SEQ ID NO: 740269 - RNA, 19 nt, Human
ggagcccaccauaguggga

SEQ ID NO: 740270 - RNA, 20 nt, Human
ggcacaggggcagagacaga

SEQ ID NO: 740271 - RNA, 21 nt, Human
ggcagugcccugcuuacugga

SEQ ID NO: 740272 - RNA, 18 nt, Human
gggaaaggagcaccucac

SEQ ID NO: 740273 - RNA, 19 nt, Human
gggaaaggagcaccucacu

SEQ ID NO: 740274 - RNA, 22 nt, Human
ggggagaaggggugggggccug

SEQ ID NO: 740275 - RNA, 21 nt, Human
ggggguguuggccgcugaagc

SEQ ID NO: 740276 - RNA, 25 nt, Human
gggguguuggccgcugaccacuggg

SEQ ID NO: 740277 - RNA, 22 nt, Human
ggugcaaggcacauuuccaacu

SEQ ID NO: 740278 - RNA, 22 nt, Human
gguuucugaaggcagucucccu

SEQ ID NO: 740279 - RNA, 19 nt, Human
gucauuguccuguucugag

SEQ ID NO: 740280 - RNA, 19 nt, Human
uaaagcuuguacagccuuu

SEQ ID NO: 740281 - RNA, 18 nt, Human
uaccccaaccucucagcc

SEQ ID NO: 740282 - RNA, 23 nt, Human
uaccccaaccucucagccagcuc

SEQ ID NO: 740283 - RNA, 24 nt, Human
uauccagggcuguccucccgaguc

SEQ ID NO: 740284 - RNA, 24 nt, Human
ucacaucagccccgugcuccaaau

SEQ ID NO: 740285 - RNA, 19 nt, Human
ucagccccgugcuccaaau

SEQ ID NO: 740286 - RNA, 20 nt, Human
uccaccaguccccaaaugag

SEQ ID NO: 740287 - RNA, 18 nt, Human
ucccagcgggcuccccuc

SEQ ID NO: 740288 - RNA, 23 nt, Human
uccccaacaccugcauccagagg

SEQ ID NO: 740289 - RNA, 23 nt, Human
ucccucugcaggaugcacacagc

SEQ ID NO: 740290 - RNA, 20 nt, Human
uccucaguguuccccaacac

SEQ ID NO: 740291 - RNA, 19 nt, Human
uccugggcucccuguggcc

SEQ ID NO: 740292 - RNA, 20 nt, Human
ucucccugacaaaucugacc

SEQ ID NO: 740293 - RNA, 24 nt, Human
ucugaggcuggaugggaugccucc

SEQ ID NO: 740294 - RNA, 19 nt, Human
ugaccuguacccacaucuc

SEQ ID NO: 740295 - RNA, 20 nt, Human
ugagaggagagaggccccua

SEQ ID NO: 740296 - RNA, 21 nt, Human
ugagaggagagaggccccuau

SEQ ID NO: 740297 - RNA, 24 nt, Human
ugagcagaggugccgggggcuugg

SEQ ID NO: 740298 - RNA, 20 nt, Human
ugagggacgcaggcacugag

SEQ ID NO: 740299 - RNA, 18 nt, Human
ugagggugagggacgcag

SEQ ID NO: 740300 - RNA, 21 nt, Human
ugagucagggucagcccaggc

SEQ ID NO: 740301 - RNA, 24 nt, Human
ugcaagaggaaaaaaauagaaauu

SEQ ID NO: 740302 - RNA, 22 nt, Human
ugcccugcagccacagccaucu

SEQ ID NO: 740303 - RNA, 19 nt, Human
ugccgggggcuuggaagcu

SEQ ID NO: 740304 - RNA, 22 nt, Human
ugcggcgggccgggcugggcgc

SEQ ID NO: 740305 - RNA, 19 nt, Human
uggcagagagugcagggag

SEQ ID NO: 740306 - RNA, 21 nt, Human
uggccaaucccuuaucaggcc

SEQ ID NO: 740307 - RNA, 21 nt, Human
uggcccggcagcagcacgcag

SEQ ID NO: 740308 - RNA, 22 nt, Human
ugggaaguggcugaagggggag

SEQ ID NO: 740309 - RNA, 18 nt, Human
ugggagcugagcagaggu

SEQ ID NO: 740310 - RNA, 21 nt, Human
uguacagccuuuuuuuccccu

SEQ ID NO: 740311 - RNA, 19 nt, Human
uguccuguucugagucagg

SEQ ID NO: 740312 - RNA, 19 nt, Human
uguuacaucgaugcauaua

SEQ ID NO: 740313 - RNA, 23 nt, Human
uugcgggguagggucuggucucc

SEQ ID NO: 740314 - RNA, 20 nt, Human
uuggaagcuggagaaaugau

SEQ ID NO: 740315 - RNA, 21 nt, Human
uugggucacaagagcugguuu

SEQ ID NO: 740316 - RNA, 22 nt, Human
aaagugcuaggauuauaggugg

SEQ ID NO: 740317 - RNA, 24 nt, Human
aaagugcuaggauuauagguggga

SEQ ID NO: 740318 - RNA, 18 nt, Human
aaagugcugggauuacaa

SEQ ID NO: 740319 - RNA, 24 nt, Human
aaagugcugggauuacaagcguga

SEQ ID NO: 740320 - RNA, 19 nt, Human
aacauggagaaaccccauc

SEQ ID NO: 740321 - RNA, 20 nt, Human
aacauggagaaaccccaucu

SEQ ID NO: 740322 - RNA, 21 nt, Human
aacauggagaaaccccaucuc

SEQ ID NO: 740323 - RNA, 20 nt, Human
aaccuccgccucccugguuc

SEQ ID NO: 740324 - RNA, 22 nt, Human
aaccugucucucucuauaccuc

SEQ ID NO: 740325 - RNA, 24 nt, Human
aaccugucucucucuauaccucug

SEQ ID NO: 740326 - RNA, 24 nt, Human
aagcaauccacccgcguuggccuc

SEQ ID NO: 740327 - RNA, 18 nt, Human
aagcagcagccaguggga

SEQ ID NO: 740328 - RNA, 22 nt, Human
aagcagcagccagugggaggcc

SEQ ID NO: 740329 - RNA, 19 nt, Human
aagggaaugagaaaaaggg

SEQ ID NO: 740330 - RNA, 19 nt, Human
aaggggccaggagcaaacg

SEQ ID NO: 740331 - RNA, 22 nt, Human
aaggggccaggagcaaacgcag

SEQ ID NO: 740332 - RNA, 19 nt, Human
aaguagcugggacuacagg

SEQ ID NO: 740333 - RNA, 20 nt, Human
aaguagcugggacuacaggc

SEQ ID NO: 740334 - RNA, 24 nt, Human
aaguagcugggacuacaggcacac

SEQ ID NO: 740335 - RNA, 19 nt, Human
aagugcugggauuacaagc

SEQ ID NO: 740336 - RNA, 19 nt, Human
aagugcugggauuacaagc

SEQ ID NO: 740337 - RNA, 24 nt, Human
aaucacuugaaccugggaggugga

SEQ ID NO: 740338 - RNA, 19 nt, Human
acaacggugcgaccucggc

SEQ ID NO: 740339 - RNA, 19 nt, Human
acacagcaaggccccgucu

SEQ ID NO: 740340 - RNA, 20 nt, Human
acacagcaaggccccgucuc

SEQ ID NO: 740341 - RNA, 24 nt, Human
acacagcaaggccccgucucaaaa

SEQ ID NO: 740342 - RNA, 19 nt, Human
acacucccccagaggccgc

SEQ ID NO: 740343 - RNA, 21 nt, Human
acagaccaguggcucccacgc

SEQ ID NO: 740344 - RNA, 22 nt, Human
acagagacccuccccugccccc

SEQ ID NO: 740345 - RNA, 22 nt, Human
acagagcacacaggggccagaa

SEQ ID NO: 740346 - RNA, 18 nt, Human
acagcucacugcagccuc

SEQ ID NO: 740347 - RNA, 25 nt, Human
acaguagggcgccgggccuuuggga

SEQ ID NO: 740348 - RNA, 24 nt, Human
acagugcugggauuauagcacugu

SEQ ID NO: 740349 - RNA, 19 nt, Human
accacguccugggaaggcu

SEQ ID NO: 740350 - RNA, 24 nt, Human
accauguuggccaggauggucucg

SEQ ID NO: 740351 - RNA, 18 nt, Human
acccagugagugguggcc

SEQ ID NO: 740352 - RNA, 24 nt, Human
accccaucucuacuaaaaauacaa

SEQ ID NO: 740353 - RNA, 21 nt, Human
acccuccccugcccccuccac

SEQ ID NO: 740354 - RNA, 19 nt, Human
accuacagagacccucccc

SEQ ID NO: 740355 - RNA, 18 nt, Human
accucuggccagacacag

SEQ ID NO: 740356 - RNA, 24 nt, Human
accuugugauccaccugccucggc

SEQ ID NO: 740357 - RNA, 22 nt, Human
acgcagcccugggccccggccc

SEQ ID NO: 740358 - RNA, 19 nt, Human
acugcagccucaacuuccu

SEQ ID NO: 740359 - RNA, 22 nt, Human
agaaaggcacacauagauucuc

SEQ ID NO: 740360 - RNA, 22 nt, Human
agaaucauggccgggcgcggug

SEQ ID NO: 740361 - RNA, 23 nt, Human
agacaaaagcuggaaggugaagg

SEQ ID NO: 740362 - RNA, 26 nt, Human
agacaggaucucacucugucuuccag

SEQ ID NO: 740363 - RNA, 21 nt, Human
agacccuccccugcccccucc

SEQ ID NO: 740364 - RNA, 24 nt, Human
agcacuuugggaggccgagguggg

SEQ ID NO: 740365 - RNA, 18 nt, Human
agccaggcguaguggugc

SEQ ID NO: 740366 - RNA, 19 nt, Human
agcccccaggcccucuccc

SEQ ID NO: 740367 - RNA, 23 nt, Human
agccucagccucucaaguagcug

SEQ ID NO: 740368 - RNA, 22 nt, Human
agccuggguaaugaagugagac

SEQ ID NO: 740369 - RNA, 23 nt, Human
agccuggguaaugaagugagacu

SEQ ID NO: 740370 - RNA, 22 nt, Human
agcugcccuacgacuuccgaga

SEQ ID NO: 740371 - RNA, 22 nt, Human
agcuggcaaugcuuucggacca

SEQ ID NO: 740372 - RNA, 24 nt, Human
aggaugaggcaggaggaacacuug

SEQ ID NO: 740373 - RNA, 18 nt, Human
aggcaaaagacaggcccu

SEQ ID NO: 740374 - RNA, 22 nt, Human
aggcaggagaaucacuugaacc

SEQ ID NO: 740375 - RNA, 24 nt, Human
aggcaggagaaucacuugaaccug

SEQ ID NO: 740376 - RNA, 18 nt, Human
aggcaggaggaacacuug

SEQ ID NO: 740377 - RNA, 21 nt, Human
aggccgagguggguggaucac

SEQ ID NO: 740378 - RNA, 24 nt, Human
aggcguaguggugcgcaccuguaa

SEQ ID NO: 740379 - RNA, 24 nt, Human
aggcugaggcaggagaaucacuug

SEQ ID NO: 740380 - RNA, 24 nt, Human
aggggccugggggcucaggcugcg

SEQ ID NO: 740381 - RNA, 20 nt, Human
agggggggggagcagguggg

SEQ ID NO: 740382 - RNA, 24 nt, Human
agggggggggagcagguggggggu

SEQ ID NO: 740383 - RNA, 18 nt, Human
aggucaaaugugcacgua

SEQ ID NO: 740384 - RNA, 24 nt, Human
agguggagguuguggugagccaag

SEQ ID NO: 740385 - RNA, 24 nt, Human
agguggguggaucacaaggucggg

SEQ ID NO: 740386 - RNA, 23 nt, Human
aguagcugggacuacaggcacgu

SEQ ID NO: 740387 - RNA, 21 nt, Human
agugcaguggcacaaucacag

SEQ ID NO: 740388 - RNA, 24 nt, Human
agugcugggauuacaagcgugagc

SEQ ID NO: 740389 - RNA, 19 nt, Human
agugcugggauuauagcac

SEQ ID NO: 740390 - RNA, 26 nt, Human
agugcugggauuauagcacugugagc

SEQ ID NO: 740391 - RNA, 20 nt, Human
agugggcagaccccaaccac

SEQ ID NO: 740392 - RNA, 24 nt, Human
aguggggcaaccguggaaggccac

SEQ ID NO: 740393 - RNA, 24 nt, Human
aguggugcgcaccuguaaucccag

SEQ ID NO: 740394 - RNA, 22 nt, Human
auaaagucccaggaggucccuc

SEQ ID NO: 740395 - RNA, 24 nt, Human
augaagugagacugugucucaaaa

SEQ ID NO: 740396 - RNA, 23 nt, Human
augaggcaggaggaacacuugag

SEQ ID NO: 740397 - RNA, 19 nt, Human
augcugcagagccccgggc

SEQ ID NO: 740398 - RNA, 18 nt, Human
augggguuucaccauguu

SEQ ID NO: 740399 - RNA, 22 nt, Human
augggguuucaccauguuggcc

SEQ ID NO: 740400 - RNA, 18 nt, Human
auuugcuuucucuuucuc

SEQ ID NO: 740401 - RNA, 24 nt, Human
auuuuuguguuuuuaguagagaug

SEQ ID NO: 740402 - RNA, 18 nt, Human
caaagcuggcucugccac

SEQ ID NO: 740403 - RNA, 26 nt, Human
caaaguggggcaaccguggaaggcca

SEQ ID NO: 740404 - RNA, 25 nt, Human
caaccacacucccccagaggccgcc

SEQ ID NO: 740405 - RNA, 25 nt, Human
caacuuccugggcucaagugauccu

SEQ ID NO: 740406 - RNA, 25 nt, Human
caagaucgugccuugcacuccagcc

SEQ ID NO: 740407 - RNA, 21 nt, Human
caagcagcaggcagcgaccau

SEQ ID NO: 740408 - RNA, 18 nt, Human
caaggcaaggggagugag

SEQ ID NO: 740409 - RNA, 21 nt, Human
caaguagcugggacuacaggc

SEQ ID NO: 740410 - RNA, 20 nt, Human
caagugauucucuugccuca

SEQ ID NO: 740411 - RNA, 22 nt, Human
caagugauucucuugccucagc

SEQ ID NO: 740412 - RNA, 23 nt, Human
cacaaggccaggcugccucccag

SEQ ID NO: 740413 - RNA, 19 nt, Human
cacaccuguaaccccagcu

SEQ ID NO: 740414 - RNA, 22 nt, Human
cacacucccccagaggccgcca

SEQ ID NO: 740415 - RNA, 26 nt, Human
cacagcaaggccccgucucaaaaaaa

SEQ ID NO: 740416 - RNA, 21 nt, Human
cacaggacaagccuggucuuc

SEQ ID NO: 740417 - RNA, 21 nt, Human
cacaggccagacaaaagcugg

SEQ ID NO: 740418 - RNA, 23 nt, Human
caccaugccuagcuaauuuuugu

SEQ ID NO: 740419 - RNA, 22 nt, Human
caccauguuggccaggaugguc

SEQ ID NO: 740420 - RNA, 24 nt, Human
caccauguuggccaggauggucuc

SEQ ID NO: 740421 - RNA, 18 nt, Human
cacccgaccccacuccca

SEQ ID NO: 740422 - RNA, 20 nt, Human
cacccgcguuggccucccaa

SEQ ID NO: 740423 - RNA, 23 nt, Human
caccugccucggccucccaaagu

SEQ ID NO: 740424 - RNA, 18 nt, Human
caccuguaaccccagcua

SEQ ID NO: 740425 - RNA, 24 nt, Human
caccuguaaccccagcuacucagg

SEQ ID NO: 740426 - RNA, 21 nt, Human
caccuguaaucccagcuacuc

SEQ ID NO: 740427 - RNA, 24 nt, Human
caccuguaaucccagcuacucagg

SEQ ID NO: 740428 - RNA, 19 nt, Human
caccuugagugucggcuuc

SEQ ID NO: 740429 - RNA, 20 nt, Human
caccuugggccccacggugc

SEQ ID NO: 740430 - RNA, 26 nt, Human
cacgcaggcaccugggacucacagcu

SEQ ID NO: 740431 - RNA, 24 nt, Human
cacgccuguaaucccagcacuuug

SEQ ID NO: 740432 - RNA, 22 nt, Human
cacuccagccuggguaaugaag

SEQ ID NO: 740433 - RNA, 23 nt, Human
cacuccagccuggguaaugaagu

SEQ ID NO: 740434 - RNA, 24 nt, Human
cacuccagccuggguaaugaagug

SEQ ID NO: 740435 - RNA, 23 nt, Human
cacucugucuuccaggaugagug

SEQ ID NO: 740436 - RNA, 19 nt, Human
cacugcagccucaacuucc

SEQ ID NO: 740437 - RNA, 23 nt, Human
cacugccuggcuggaacguucca

SEQ ID NO: 740438 - RNA, 21 nt, Human
cacuugaaccugggaggugga

SEQ ID NO: 740439 - RNA, 22 nt, Human
cagaaccgggcucugcccccau

SEQ ID NO: 740440 - RNA, 18 nt, Human
cagacacaggacagagca

SEQ ID NO: 740441 - RNA, 18 nt, Human
cagaccaguggcucccac

SEQ ID NO: 740442 - RNA, 20 nt, Human
cagaccccaaccacacuccc

SEQ ID NO: 740443 - RNA, 21 nt, Human
cagaccccaaccacacucccc

SEQ ID NO: 740444 - RNA, 21 nt, Human
cagaccucagaaugugaccuu

SEQ ID NO: 740445 - RNA, 22 nt, Human
cagagacccuccccugcccccu

SEQ ID NO: 740446 - RNA, 24 nt, Human
cagcacuuugggaggccgaggugg

SEQ ID NO: 740447 - RNA, 20 nt, Human
cagccccacgaacaccuuga

SEQ ID NO: 740448 - RNA, 20 nt, Human
cagcccugggccccggcccu

SEQ ID NO: 740449 - RNA, 24 nt, Human
cagccucaacuuccugggcucaag

SEQ ID NO: 740450 - RNA, 24 nt, Human
cagccugaccaacauggagaaacc

SEQ ID NO: 740451 - RNA, 24 nt, Human
cagcuacucaggaggcugaggcag

SEQ ID NO: 740452 - RNA, 18 nt, Human
caggaccggagcggcggg

SEQ ID NO: 740453 - RNA, 23 nt, Human
caggagccagccccacgaacacc

SEQ ID NO: 740454 - RNA, 24 nt, Human
caggaggcugaggcaggagaauca

SEQ ID NO: 740455 - RNA, 22 nt, Human
caguagggcgccgggccuuugg

SEQ ID NO: 740456 - RNA, 20 nt, Human
cagugcccagcuuccucugc

SEQ ID NO: 740457 - RNA, 19 nt, Human
cagugcccaguuccuccac

SEQ ID NO: 740458 - RNA, 20 nt, Human
cagugcugggauuauagcac

SEQ ID NO: 740459 - RNA, 22 nt, Human
caucacagcacacgcaggcacc

SEQ ID NO: 740460 - RNA, 24 nt, Human
cauggccgggcgcgguggcucacg

SEQ ID NO: 740461 - RNA, 20 nt, Human
caugugcacccagaccucag

SEQ ID NO: 740462 - RNA, 19 nt, Human
cauuuggaaacucuggcag

SEQ ID NO: 740463 - RNA, 22 nt, Human
ccaaagugcuaggauuauaggu

SEQ ID NO: 740464 - RNA, 22 nt, Human
ccaaagugcugggauuacaagc

SEQ ID NO: 740465 - RNA, 24 nt, Human
ccaaagugcugggauuacaagcgu

SEQ ID NO: 740466 - RNA, 18 nt, Human
ccacagugcugggauuau

SEQ ID NO: 740467 - RNA, 20 nt, Human
ccacagugcugggauuauag

SEQ ID NO: 740468 - RNA, 21 nt, Human
ccacagugcugggauuauagc

SEQ ID NO: 740469 - RNA, 20 nt, Human
ccacccgaccccacucccaa

SEQ ID NO: 740470 - RNA, 24 nt, Human
ccacuggggacccccacccgaccc

SEQ ID NO: 740471 - RNA, 19 nt, Human
ccaggauguguccugcugu

SEQ ID NO: 740472 - RNA, 22 nt, Human
ccaggcagccccauucugcaga

SEQ ID NO: 740473 - RNA, 19 nt, Human
ccaggccacugaggauggg

SEQ ID NO: 740474 - RNA, 22 nt, Human
ccagggauucgaggcugcagug

SEQ ID NO: 740475 - RNA, 22 nt, Human
cccaaccacacucccccagagg

SEQ ID NO: 740476 - RNA, 18 nt, Human
cccacccgaccccacucc

SEQ ID NO: 740477 - RNA, 19 nt, Human
cccacccgaccccacuccc

SEQ ID NO: 740478 - RNA, 21 nt, Human
cccacccgaccccacucccaa

SEQ ID NO: 740479 - RNA, 22 nt, Human
ccccacgaacaccuugaguguc

SEQ ID NO: 740480 - RNA, 23 nt, Human
ccccagaggccgccaccuccagc

SEQ ID NO: 740481 - RNA, 19 nt, Human
ccccaugagagaucccaga

SEQ ID NO: 740482 - RNA, 19 nt, Human
cccccaggcccucucccac

SEQ ID NO: 740483 - RNA, 20 nt, Human
cccccaggcccucucccacc

SEQ ID NO: 740484 - RNA, 19 nt, Human
ccccgucucaaaaaaaaaa

SEQ ID NO: 740485 - RNA, 26 nt, Human
ccccugcucugugucaccuguucugg

SEQ ID NO: 740486 - RNA, 23 nt, Human
cccgaguagcugggacuacaggc

SEQ ID NO: 740487 - RNA, 24 nt, Human
cccgaguagcugggacuacaggca

SEQ ID NO: 740488 - RNA, 19 nt, Human
cccggccccuccacaggac

SEQ ID NO: 740489 - RNA, 21 nt, Human
cccugguucaagugauucucu

SEQ ID NO: 740490 - RNA, 21 nt, Human
ccggugggccuuguuccuuuu

SEQ ID NO: 740491 - RNA, 19 nt, Human
ccuacagagacccuccccu

SEQ ID NO: 740492 - RNA, 21 nt, Human
ccucaacuuccugggcucaag

SEQ ID NO: 740493 - RNA, 26 nt, Human
ccuccagccucagccucucaaguagc

SEQ ID NO: 740494 - RNA, 24 nt, Human
ccugaccaacauggagaaacccca

SEQ ID NO: 740495 - RNA, 19 nt, Human
ccugaccuugugauccacc

SEQ ID NO: 740496 - RNA, 21 nt, Human
ccugaccuugugauccaccug

SEQ ID NO: 740497 - RNA, 23 nt, Human
ccugccaagacccggccccucca

SEQ ID NO: 740498 - RNA, 21 nt, Human
ccugcucugugucaccuguuc

SEQ ID NO: 740499 - RNA, 25 nt, Human
ccugcuggccucauacugggccaau

SEQ ID NO: 740500 - RNA, 18 nt, Human
ccugggagguggagguug

SEQ ID NO: 740501 - RNA, 22 nt, Human
ccugggcucaagcaauccaccc

SEQ ID NO: 740502 - RNA, 20 nt, Human
ccugggcucaagugauccuc

SEQ ID NO: 740503 - RNA, 19 nt, Human
ccugggcugugccaaaagg

SEQ ID NO: 740504 - RNA, 21 nt, Human
ccuguaaccccagcuacucag

SEQ ID NO: 740505 - RNA, 22 nt, Human
ccuguaaccccagcuacucagg

SEQ ID NO: 740506 - RNA, 21 nt, Human
ccuguaaucccagcuacucag

SEQ ID NO: 740507 - RNA, 20 nt, Human
ccuugcacuccagccugggu

SEQ ID NO: 740508 - RNA, 21 nt, Human
ccuugcacuccagccugggua

SEQ ID NO: 740509 - RNA, 22 nt, Human
ccuugcacuccagccuggguaa

SEQ ID NO: 740510 - RNA, 23 nt, Human
ccuugcacuccagccuggguaau

SEQ ID NO: 740511 - RNA, 24 nt, Human
ccuugcacuccagccuggguaaug

SEQ ID NO: 740512 - RNA, 20 nt, Human
cgagaugacuaaacccacca

SEQ ID NO: 740513 - RNA, 26 nt, Human
cgagguggguggaucacaaggucggg

SEQ ID NO: 740514 - RNA, 23 nt, Human
cgccuguaaucccagcacuuugg

SEQ ID NO: 740515 - RNA, 24 nt, Human
cgccuguaaucccagcacuuuggg

SEQ ID NO: 740516 - RNA, 18 nt, Human
cgcugccggccgugggca

SEQ ID NO: 740517 - RNA, 19 nt, Human
cggcacacaccuguaaccc

SEQ ID NO: 740518 - RNA, 23 nt, Human
cggcacacaccuguaaccccagc

SEQ ID NO: 740519 - RNA, 18 nt, Human
cgugccacgccaccaugc

SEQ ID NO: 740520 - RNA, 24 nt, Human
cuacagagacccuccccugccccc

SEQ ID NO: 740521 - RNA, 24 nt, Human
cucaaguagcugggacuacaggca

SEQ ID NO: 740522 - RNA, 22 nt, Human
cucacgccuguaaucccagcac

SEQ ID NO: 740523 - RNA, 24 nt, Human
cucacgccuguaaucccagcacuu

SEQ ID NO: 740524 - RNA, 24 nt, Human
cucacugcagccucaacuuccugg

SEQ ID NO: 740525 - RNA, 24 nt, Human
cucagccucucaaguagcugggac

SEQ ID NO: 740526 - RNA, 24 nt, Human
cucagcuucccgaguagcugggac

SEQ ID NO: 740527 - RNA, 24 nt, Human
cuccagccucagccucucaaguag

SEQ ID NO: 740528 - RNA, 24 nt, Human
cucccaggcccuucaggagccagc

SEQ ID NO: 740529 - RNA, 18 nt, Human
cuccccugcccccuccac

SEQ ID NO: 740530 - RNA, 21 nt, Human
cuccccugcccccuccacucc

SEQ ID NO: 740531 - RNA, 18 nt, Human
cucccugguucaagugau

SEQ ID NO: 740532 - RNA, 24 nt, Human
cuccugaccuugugauccaccugc

SEQ ID NO: 740533 - RNA, 21 nt, Human
cucucccaccuacagagaccc

SEQ ID NO: 740534 - RNA, 24 nt, Human
cugcaaccuccgccucccugguuc

SEQ ID NO: 740535 - RNA, 23 nt, Human
cugcagccucaacuuccugggcu

SEQ ID NO: 740536 - RNA, 19 nt, Human
cugcccccauacgcugccc

SEQ ID NO: 740537 - RNA, 19 nt, Human
cugcccccauacgcugccc

SEQ ID NO: 740538 - RNA, 23 nt, Human
cugccucggccucccaaagugcu

SEQ ID NO: 740539 - RNA, 18 nt, Human
cugcucuugaacuccugg

SEQ ID NO: 740540 - RNA, 19 nt, Human
cugcuugcccccugccaag

SEQ ID NO: 740541 - RNA, 19 nt, Human
cuggccucauacugggcca

SEQ ID NO: 740542 - RNA, 19 nt, Human
cugggccaugggaggaaac

SEQ ID NO: 740543 - RNA, 24 nt, Human
cugguucaagugauucucuugccu

SEQ ID NO: 740544 - RNA, 21 nt, Human
cuguaaucccagcuacucagg

SEQ ID NO: 740545 - RNA, 22 nt, Human
cuuccgagaugacuaaacccac

SEQ ID NO: 740546 - RNA, 21 nt, Human
cuugaaccugggagguggagg

SEQ ID NO: 740547 - RNA, 23 nt, Human
cuugcacuccagccuggguaaug

SEQ ID NO: 740548 - RNA, 24 nt, Human
cuugccucagcuucccgaguagcu

SEQ ID NO: 740549 - RNA, 18 nt, Human
gaaagggaguuucaggcc

SEQ ID NO: 740550 - RNA, 24 nt, Human
gaaugagaaaaagggcaggucacg

SEQ ID NO: 740551 - RNA, 19 nt, Human
gaccucggcucacugcaac

SEQ ID NO: 740552 - RNA, 22 nt, Human
gaccuugugauccaccugccuc

SEQ ID NO: 740553 - RNA, 22 nt, Human
gaccuugugauccaccugccuc

SEQ ID NO: 740554 - RNA, 24 nt, Human
gaccuugugauccaccugccucgg

SEQ ID NO: 740555 - RNA, 24 nt, Human
gacuacaggcacaccccaucaugc

SEQ ID NO: 740556 - RNA, 23 nt, Human
gagaaucacuugaaccugggagg

SEQ ID NO: 740557 - RNA, 18 nt, Human
gagaugggguuucaccau

SEQ ID NO: 740558 - RNA, 24 nt, Human
gagaugggguuucaccauguuggc

SEQ ID NO: 740559 - RNA, 23 nt, Human
gagccggggccgaagacccuaaa

SEQ ID NO: 740560 - RNA, 22 nt, Human
gagguggguggaucacaagguc

SEQ ID NO: 740561 - RNA, 23 nt, Human
gagguuguggugagccaagaucg

SEQ ID NO: 740562 - RNA, 20 nt, Human
gaguagcugggacuacaggc

SEQ ID NO: 740563 - RNA, 25 nt, Human
gaguagcugggacuacaggcacgug

SEQ ID NO: 740564 - RNA, 24 nt, Human
gagugcaguggcacaaucacagcu

SEQ ID NO: 740565 - RNA, 22 nt, Human
gaucacaaggucgggaguucaa

SEQ ID NO: 740566 - RNA, 24 nt, Human
gaucacaaggucgggaguucaaga

SEQ ID NO: 740567 - RNA, 19 nt, Human
gaucauggcacuguauucc

SEQ ID NO: 740568 - RNA, 24 nt, Human
gaucgugccuugcacuccagccug

SEQ ID NO: 740569 - RNA, 18 nt, Human
gauuacaagcgugagcca

SEQ ID NO: 740570 - RNA, 22 nt, Human
gauuacaagcgugagccacugc

SEQ ID NO: 740571 - RNA, 23 nt, Human
gauuacaagcgugagccacugca

SEQ ID NO: 740572 - RNA, 18 nt, Human
gauuauaggugggagcca

SEQ ID NO: 740573 - RNA, 21 nt, Human
gauuauaggugggagccacug

SEQ ID NO: 740574 - RNA, 21 nt, Human
gauucucuugccucagcuucc

SEQ ID NO: 740575 - RNA, 19 nt, Human
gcaaaagacaggcccugcu

SEQ ID NO: 740576 - RNA, 22 nt, Human
gcaaccuccgccucccugguuc

SEQ ID NO: 740577 - RNA, 23 nt, Human
gcaggagaaucacuugaaccugg

SEQ ID NO: 740578 - RNA, 21 nt, Human
gccacugugcucggccucuga

SEQ ID NO: 740579 - RNA, 20 nt, Human
gccagagccggggccgaaga

SEQ ID NO: 740580 - RNA, 21 nt, Human
gccagagccggggccgaagac

SEQ ID NO: 740581 - RNA, 18 nt, Human
gccucaacuuccugggcu

SEQ ID NO: 740582 - RNA, 24 nt, Human
gccucagcuucccgaguagcuggg

SEQ ID NO: 740583 - RNA, 19 nt, Human
gccugggggcucaggcugc

SEQ ID NO: 740584 - RNA, 20 nt, Human
gcgggccucaggcuuggcag

SEQ ID NO: 740585 - RNA, 22 nt, Human
gcguuggccucccaaagugcua

SEQ ID NO: 740586 - RNA, 20 nt, Human
gcuauggaucugcaaagggg

SEQ ID NO: 740587 - RNA, 20 nt, Human
gcuggcaaugcuuucggacc

SEQ ID NO: 740588 - RNA, 20 nt, Human
gcugugaucagcccugaccu

SEQ ID NO: 740589 - RNA, 23 nt, Human
ggaacaaccacugccuggcugga

SEQ ID NO: 740590 - RNA, 22 nt, Human
ggaagugggcagaccccaacca

SEQ ID NO: 740591 - RNA, 19 nt, Human
ggaccaggcugucuagcag

SEQ ID NO: 740592 - RNA, 24 nt, Human
ggacccccacccgaccccacuccc

SEQ ID NO: 740593 - RNA, 23 nt, Human
ggaccggagcggcgggucucggc

SEQ ID NO: 740594 - RNA, 24 nt, Human
ggacuacaggcacaccccaucaug

SEQ ID NO: 740595 - RNA, 20 nt, Human
ggagguuguggugagccaag

SEQ ID NO: 740596 - RNA, 24 nt, Human
ggagguuguggugagccaagaucg

SEQ ID NO: 740597 - RNA, 23 nt, Human
ggaugaggcuguaugccagcagc

SEQ ID NO: 740598 - RNA, 21 nt, Human
ggcagaccccaaccacacucc

SEQ ID NO: 740599 - RNA, 19 nt, Human
ggcagccagggacgccaga

SEQ ID NO: 740600 - RNA, 20 nt, Human
ggcaggaccggagcggcggg

SEQ ID NO: 740601 - RNA, 25 nt, Human
ggcauggcggcacacaccuguaacc

SEQ ID NO: 740602 - RNA, 18 nt, Human
ggccuggccacaucuagc

SEQ ID NO: 740603 - RNA, 24 nt, Human
ggccuuguuccuuuucaggccuua

SEQ ID NO: 740604 - RNA, 23 nt, Human
ggcgcgguggcucacgccuguaa

SEQ ID NO: 740605 - RNA, 24 nt, Human
gggcauggcggcacacaccuguaa

SEQ ID NO: 740606 - RNA, 22 nt, Human
gggcucaagugauccuccagcc

SEQ ID NO: 740607 - RNA, 18 nt, Human
ggggagugagguaggaag

SEQ ID NO: 740608 - RNA, 18 nt, Human
ggggggggagcagguggg

SEQ ID NO: 740609 - RNA, 22 nt, Human
gggguacagcagggcucccugc

SEQ ID NO: 740610 - RNA, 18 nt, Human
gggguugggacgugggga

SEQ ID NO: 740611 - RNA, 22 nt, Human
gggguuucaccauguuggccag

SEQ ID NO: 740612 - RNA, 22 nt, Human
gggucucacgguguugcccagg

SEQ ID NO: 740613 - RNA, 24 nt, Human
ggguggaucacaaggucgggaguu

SEQ ID NO: 740614 - RNA, 18 nt, Human
ggguuucaccauguuggc

SEQ ID NO: 740615 - RNA, 19 nt, Human
ggucucgaucuccugaccu

SEQ ID NO: 740616 - RNA, 20 nt, Human
ggucucgaucuccugaccuu

SEQ ID NO: 740617 - RNA, 19 nt, Human
ggugcuuugcuagcuccug

SEQ ID NO: 740618 - RNA, 23 nt, Human
gguggcucacgccuguaauccca

SEQ ID NO: 740619 - RNA, 24 nt, Human
gguggcucacgccuguaaucccag

SEQ ID NO: 740620 - RNA, 23 nt, Human
gguguugcccagguuggucugga

SEQ ID NO: 740621 - RNA, 21 nt, Human
gguucaagugauucucuugcc

SEQ ID NO: 740622 - RNA, 24 nt, Human
gguuucaccauguuggccaggaug

SEQ ID NO: 740623 - RNA, 23 nt, Human
guagagaugggguuucaccaugu

SEQ ID NO: 740624 - RNA, 24 nt, Human
gucucguucuaucaccaggcugga

SEQ ID NO: 740625 - RNA, 22 nt, Human
gugagguaggaagucagaccug

SEQ ID NO: 740626 - RNA, 24 nt, Human
gugauccaccugccucggccuccc

SEQ ID NO: 740627 - RNA, 22 nt, Human
gugauccuccagccucagccuc

SEQ ID NO: 740628 - RNA, 24 nt, Human
gugauucucuugccucagcuuccc

SEQ ID NO: 740629 - RNA, 23 nt, Human
guggcacaaucacagcucacugc

SEQ ID NO: 740630 - RNA, 23 nt, Human
guggcucacgccuguaaucccag

SEQ ID NO: 740631 - RNA, 23 nt, Human
gugggccuuguuccuuuucaggc

SEQ ID NO: 740632 - RNA, 23 nt, Human
guucugcacccagugcccagcuu

SEQ ID NO: 740633 - RNA, 21 nt, Human
guucuggcugccacuggacac

SEQ ID NO: 740634 - RNA, 21 nt, Human
uaaaaauacaaaaauuagcca

SEQ ID NO: 740635 - RNA, 22 nt, Human
uaagggaaugagaaaaagggca

SEQ ID NO: 740636 - RNA, 24 nt, Human
uaauuuuuguguuuuuaguagaga

SEQ ID NO: 740637 - RNA, 22 nt, Human
uacaagcgugagccacugcacc

SEQ ID NO: 740638 - RNA, 22 nt, Human
uaccucuggccagacacaggaa

SEQ ID NO: 740639 - RNA, 19 nt, Human
uagaagguaaaagccgucc

SEQ ID NO: 740640 - RNA, 22 nt, Human
uagagaugggguuucaccaugu

SEQ ID NO: 740641 - RNA, 22 nt, Human
uaggauuauaggugggagccac

SEQ ID NO: 740642 - RNA, 22 nt, Human
uaggauuauaggugggagccac

SEQ ID NO: 740643 - RNA, 22 nt, Human
uaggauuauaggugggagccac

SEQ ID NO: 740644 - RNA, 24 nt, Human
uaggauuauaggugggagccacug

SEQ ID NO: 740645 - RNA, 24 nt, Human
uaguagagaugggguuucaccaug

SEQ ID NO: 740646 - RNA, 22 nt, Human
uauauugcccaggcugcucuug

SEQ ID NO: 740647 - RNA, 24 nt, Human
uauauugcccaggcugcucuugaa

SEQ ID NO: 740648 - RNA, 19 nt, Human
ucaagagcaaaggcuuuuu

SEQ ID NO: 740649 - RNA, 19 nt, Human
ucaagugauucucuugccu

SEQ ID NO: 740650 - RNA, 21 nt, Human
ucacaaggucgggaguucaag

SEQ ID NO: 740651 - RNA, 24 nt, Human
ucacaaggucgggaguucaagacc

SEQ ID NO: 740652 - RNA, 21 nt, Human
ucacacugcuugucuuggcca

SEQ ID NO: 740653 - RNA, 22 nt, Human
ucacaucccaggcaacauguca

SEQ ID NO: 740654 - RNA, 24 nt, Human
ucaccauguuggccaggauggucu

SEQ ID NO: 740655 - RNA, 19 nt, Human
ucacugagaauguuuuaca

SEQ ID NO: 740656 - RNA, 19 nt, Human
ucacugcaaccuccgccuc

SEQ ID NO: 740657 - RNA, 24 nt, Human
ucacugcaaccuccgccucccugg

SEQ ID NO: 740658 - RNA, 24 nt, Human
ucacugcaaccuccgccucccugg

SEQ ID NO: 740659 - RNA, 25 nt, Human
ucacugcaaccuccgccucccuggu

SEQ ID NO: 740660 - RNA, 28 nt, Human
ucacugcaaccuccgccucccugguuca

SEQ ID NO: 740661 - RNA, 23 nt, Human
ucacugcagccucaacuuccugg

SEQ ID NO: 740662 - RNA, 24 nt, Human
ucacugcagccucaacuuccuggg

SEQ ID NO: 740663 - RNA, 24 nt, Human
ucacuggccgccaagaucagggcu

SEQ ID NO: 740664 - RNA, 19 nt, Human
ucacuugaaccugggaggu

SEQ ID NO: 740665 - RNA, 24 nt, Human
ucacuugaaccugggagguggagg

SEQ ID NO: 740666 - RNA, 23 nt, Human
ucagcuucccgaguagcugggac

SEQ ID NO: 740667 - RNA, 21 nt, Human
ucaggcuuggcagccagggac

SEQ ID NO: 740668 - RNA, 23 nt, Human
ucagggccuggaagcgcugccgg

SEQ ID NO: 740669 - RNA, 24 nt, Human
ucaucaccaccuugggccccacgg

SEQ ID NO: 740670 - RNA, 21 nt, Human
uccacagugcugggauuauag

SEQ ID NO: 740671 - RNA, 24 nt, Human
uccagccuggguaaugaagugaga

SEQ ID NO: 740672 - RNA, 18 nt, Human
uccauagcugcccuacga

SEQ ID NO: 740673 - RNA, 23 nt, Human
ucccaaagugcuaggauuauagg

SEQ ID NO: 740674 - RNA, 18 nt, Human
ucccaaagugcugggauu

SEQ ID NO: 740675 - RNA, 24 nt, Human
ucccaaagugcugggauuacaagc

SEQ ID NO: 740676 - RNA, 22 nt, Human
ucccagcccccaggcccucucc

SEQ ID NO: 740677 - RNA, 21 nt, Human
ucccccagaggccgccaccuc

SEQ ID NO: 740678 - RNA, 24 nt, Human
uccccccucacuggacugcaugag

SEQ ID NO: 740679 - RNA, 19 nt, Human
uccccugcccccuccacuc

SEQ ID NO: 740680 - RNA, 24 nt, Human
ucccgaguagcugggacuacaggc

SEQ ID NO: 740681 - RNA, 21 nt, Human
ucccugguucaagugauucuc

SEQ ID NO: 740682 - RNA, 21 nt, Human
ucccugguucaagugauucuc

SEQ ID NO: 740683 - RNA, 18 nt, Human
uccugggcucaagcaauc

SEQ ID NO: 740684 - RNA, 19 nt, Human
uccugggcucaagcaaucc

SEQ ID NO: 740685 - RNA, 21 nt, Human
uccugggcucaagugauccuc

SEQ ID NO: 740686 - RNA, 22 nt, Human
uccugggcucaagugauccucc

SEQ ID NO: 740687 - RNA, 22 nt, Human
uccugggcucaagugauccucc

SEQ ID NO: 740688 - RNA, 24 nt, Human
uccuguuccuuugccagcaccguc

SEQ ID NO: 740689 - RNA, 18 nt, Human
ucggcagggggagggaag

SEQ ID NO: 740690 - RNA, 21 nt, Human
ucucaaaaaaaaaaggggggg

SEQ ID NO: 740691 - RNA, 24 nt, Human
ucucaaguagcugggacuacaggc

SEQ ID NO: 740692 - RNA, 19 nt, Human
ucucacgguguugcccagg

SEQ ID NO: 740693 - RNA, 23 nt, Human
ucucacgguguugcccagguugg

SEQ ID NO: 740694 - RNA, 20 nt, Human
ucucacucugucuuccagga

SEQ ID NO: 740695 - RNA, 23 nt, Human
ucucccaccuuuuuaaugccagu

SEQ ID NO: 740696 - RNA, 22 nt, Human
ucucguucuaucaccaggcugg

SEQ ID NO: 740697 - RNA, 23 nt, Human
ucucguucuaucaccaggcugga

SEQ ID NO: 740698 - RNA, 21 nt, Human
ucucuacuaaaaauacaaaaa

SEQ ID NO: 740699 - RNA, 22 nt, Human
ucucuuucucuucuuuaccuaa

SEQ ID NO: 740700 - RNA, 22 nt, Human
ucugcggccugggcaucccaaa

SEQ ID NO: 740701 - RNA, 19 nt, Human
ucuugaacuccugggcuca

SEQ ID NO: 740702 - RNA, 23 nt, Human
ucuugaacuccugggcucaagca

SEQ ID NO: 740703 - RNA, 24 nt, Human
ugaaccugggagguggagguugug

SEQ ID NO: 740704 - RNA, 21 nt, Human
ugaaucuagacagaauacugg

SEQ ID NO: 740705 - RNA, 20 nt, Human
ugagacaggaucucacucug

SEQ ID NO: 740706 - RNA, 21 nt, Human
ugagacaggaucucacucugu

SEQ ID NO: 740707 - RNA, 21 nt, Human
ugagccaagaucgugccuugc

SEQ ID NO: 740708 - RNA, 20 nt, Human
ugaggcaggagaaucacuug

SEQ ID NO: 740709 - RNA, 24 nt, Human
ugaggcaggagaaucacuugaacc

SEQ ID NO: 740710 - RNA, 25 nt, Human
ugaggcaggagaaucacuugaaccu

SEQ ID NO: 740711 - RNA, 24 nt, Human
ugaggcaggaggaacacuugagcc

SEQ ID NO: 740712 - RNA, 25 nt, Human
ugaggcaggaggaacacuugagccc

SEQ ID NO: 740713 - RNA, 23 nt, Human
ugaggggcauuuucauugcaagu

SEQ ID NO: 740714 - RNA, 21 nt, Human
ugaggucacaguguauugggg

SEQ ID NO: 740715 - RNA, 22 nt, Human
ugaggucacaguguauuggggg

SEQ ID NO: 740716 - RNA, 23 nt, Human
ugaugaggggcauuuucauugca

SEQ ID NO: 740717 - RNA, 22 nt, Human
ugauggaaaauaaacucuguuc

SEQ ID NO: 740718 - RNA, 19 nt, Human
ugccaagacccggccccuc

SEQ ID NO: 740719 - RNA, 24 nt, Human
ugccacuggacacucagagccugu

SEQ ID NO: 740720 - RNA, 20 nt, Human
ugccagcaccgucuugcagc

SEQ ID NO: 740721 - RNA, 24 nt, Human
ugcccaggcugcucuugaacuccu

SEQ ID NO: 740722 - RNA, 24 nt, Human
ugcccagguuggucuggaacuccu

SEQ ID NO: 740723 - RNA, 24 nt, Human
ugccucagcuucccgaguagcugg

SEQ ID NO: 740724 - RNA, 21 nt, Human
ugccucggccucccaaagugc

SEQ ID NO: 740725 - RNA, 24 nt, Human
ugccucggccucccaaagugcugg

SEQ ID NO: 740726 - RNA, 19 nt, Human
ugccuugcacuccagccug

SEQ ID NO: 740727 - RNA, 27 nt, Human
ugcugggauuacaagcgugagccacug

SEQ ID NO: 740728 - RNA, 22 nt, Human
uggaaaugcuguccuguguagg

SEQ ID NO: 740729 - RNA, 18 nt, Human
uggaacguuccagaaccc

SEQ ID NO: 740730 - RNA, 19 nt, Human
uggaaugcugcagagcccc

SEQ ID NO: 740731 - RNA, 24 nt, Human
uggagaccacguccugggaaggcu

SEQ ID NO: 740732 - RNA, 22 nt, Human
uggaucacaaggucgggaguuc

SEQ ID NO: 740733 - RNA, 20 nt, Human
uggcacaaucacagcucacu

SEQ ID NO: 740734 - RNA, 24 nt, Human
uggcacaaucacagcucacugcag

SEQ ID NO: 740735 - RNA, 22 nt, Human
uggcaggaugaagaagcuggag

SEQ ID NO: 740736 - RNA, 24 nt, Human
uggccaggauggucucgaucuccu

SEQ ID NO: 740737 - RNA, 23 nt, Human
uggcggcacacaccuguaacccc

SEQ ID NO: 740738 - RNA, 22 nt, Human
uggcucacgccuguaaucccag

SEQ ID NO: 740739 - RNA, 24 nt, Human
uggcucacgccuguaaucccagca

SEQ ID NO: 740740 - RNA, 18 nt, Human
uggcugaagccccugcuc

SEQ ID NO: 740741 - RNA, 24 nt, Human
ugggaagagcagagaaaucaucac

SEQ ID NO: 740742 - RNA, 23 nt, Human
ugggaaggcugggguacagcagg

SEQ ID NO: 740743 - RNA, 18 nt, Human
ugggacuacaggcacacc

SEQ ID NO: 740744 - RNA, 19 nt, Human
ugggacuacaggcacaccc

SEQ ID NO: 740745 - RNA, 21 nt, Human
ugggacuacaggcacacccca

SEQ ID NO: 740746 - RNA, 21 nt, Human
ugggacuacaggcacacccca

SEQ ID NO: 740747 - RNA, 21 nt, Human
ugggacuacaggcacgugcca

SEQ ID NO: 740748 - RNA, 22 nt, Human
ugggacuacaggcacgugccac

SEQ ID NO: 740749 - RNA, 26 nt, Human
ugggacuacaggcacgugccacgcca

SEQ ID NO: 740750 - RNA, 27 nt, Human
ugggacuacaggcacgugccacgccac

SEQ ID NO: 740751 - RNA, 23 nt, Human
ugggaggccgagguggguggauc

SEQ ID NO: 740752 - RNA, 24 nt, Human
ugggaggccgagguggguggauca

SEQ ID NO: 740753 - RNA, 20 nt, Human
ugggagguggagguuguggu

SEQ ID NO: 740754 - RNA, 24 nt, Human
ugggagguggagguuguggugagc

SEQ ID NO: 740755 - RNA, 19 nt, Human
ugggauuacaagcgugagc

SEQ ID NO: 740756 - RNA, 21 nt, Human
ugggauuacaagcgugagcca

SEQ ID NO: 740757 - RNA, 22 nt, Human
ugggauuacaagcgugagccac

SEQ ID NO: 740758 - RNA, 22 nt, Human
ugggauuacaagcgugagccac

SEQ ID NO: 740759 - RNA, 24 nt, Human
ugggauuacaagcgugagccacug

SEQ ID NO: 740760 - RNA, 24 nt, Human
ugggauuacaagcgugagccacug

SEQ ID NO: 740761 - RNA, 24 nt, Human
ugggauuauagcacugugagcugc

SEQ ID NO: 740762 - RNA, 26 nt, Human
ugggauuauagcacugugagcugcca

SEQ ID NO: 740763 - RNA, 27 nt, Human
ugggauuauagcacugugagcugccaa

SEQ ID NO: 740764 - RNA, 24 nt, Human
ugggcucaagugauccuccagccu

SEQ ID NO: 740765 - RNA, 23 nt, Human
uggggagaugucaggcccgucac

SEQ ID NO: 740766 - RNA, 23 nt, Human
uggggcaaccguggaaggccaca

SEQ ID NO: 740767 - RNA, 23 nt, Human
uggggccaagcagcaggcagcga

SEQ ID NO: 740768 - RNA, 24 nt, Human
uggggucucacgguguugcccagg

SEQ ID NO: 740769 - RNA, 24 nt, Human
ugggguuucaccauguuggccagg

SEQ ID NO: 740770 - RNA, 21 nt, Human
uggugcgcaccuguaauccca

SEQ ID NO: 740771 - RNA, 18 nt, Human
ugguucaagugauucucu

SEQ ID NO: 740772 - RNA, 19 nt, Human
uguaaccccagcuacucag

SEQ ID NO: 740773 - RNA, 25 nt, Human
uguaaccccagcuacucaggaggau

SEQ ID NO: 740774 - RNA, 24 nt, Human
ugucucaaaacaaaacaaaaaaag

SEQ ID NO: 740775 - RNA, 20 nt, Human
ugucuccaggauguguccug

SEQ ID NO: 740776 - RNA, 25 nt, Human
uguguccugcugucugccccguggg

SEQ ID NO: 740777 - RNA, 21 nt, Human
uguguuuuuaguagagauggg

SEQ ID NO: 740778 - RNA, 21 nt, Human
uguucugcacccagugcccag

SEQ ID NO: 740779 - RNA, 19 nt, Human
uguugcccagguuggucug

SEQ ID NO: 740780 - RNA, 28 nt, Human
uuaagggaaugagaaaaagggcagguca

SEQ ID NO: 740781 - RNA, 23 nt, Human
uuaccuuagaaagacaaaguggg

SEQ ID NO: 740782 - RNA, 18 nt, Human
uuaguagagaugggguuu

SEQ ID NO: 740783 - RNA, 22 nt, Human
uuaguagagaugggguuucacc

SEQ ID NO: 740784 - RNA, 24 nt, Human
uuaguagagaugggguuucaccau

SEQ ID NO: 740785 - RNA, 23 nt, Human
uucaagugauucucuugccucag

SEQ ID NO: 740786 - RNA, 19 nt, Human
uuccauaaagucccaggag

SEQ ID NO: 740787 - RNA, 22 nt, Human
uuccuggguccuguuccuuugc

SEQ ID NO: 740788 - RNA, 24 nt, Human
uugaaccugggagguggagguugu

SEQ ID NO: 740789 - RNA, 21 nt, Human
uugcacuccagccuggguaau

SEQ ID NO: 740790 - RNA, 18 nt, Human
uugcccccugccaagacc

SEQ ID NO: 740791 - RNA, 25 nt, Human
uugggaggccgagguggguggauca

SEQ ID NO: 740792 - RNA, 22 nt, Human
uuguggugagccaagaucgugc

SEQ ID NO: 740793 - RNA, 19 nt, Human
uuucaccauguuggccagg

SEQ ID NO: 740794 - RNA, 20 nt, Human
uuucaccauguuggccagga

SEQ ID NO: 740795 - RNA, 23 nt, Human
uuuccugaauucugugcccaggg

SEQ ID NO: 740796 - RNA, 27 nt, Human
uuugcuuucucuuucucuucuuuaccu

SEQ ID NO: 740797 - RNA, 21 nt, Human
uuugucuccccaaccuugucu

SEQ ID NO: 740798 - RNA, 19 nt, Human
uuuguguggagucucguuc

SEQ ID NO: 740799 - RNA, 24 nt, Human
uuuguguuuuuaguagagaugggg

SEQ ID NO: 740800 - RNA, 24 nt, Human
uuuuuaguagagaugggguuucac

SEQ ID NO: 740801 - RNA, 20 nt, Human
uuuuuguguuuuuaguagag

SEQ ID NO: 740802 - RNA, 18 nt, Human
uuuuuugguagggaagag

SEQ ID NO: 740803 - RNA, 21 nt, Human
aaaaauaaggcagaaaacuca

SEQ ID NO: 740804 - RNA, 22 nt, Human
aaaaggaaacagaauuuaagca

SEQ ID NO: 740805 - RNA, 23 nt, Human
aaaauaaggcagaaaacucagaa

SEQ ID NO: 740806 - RNA, 21 nt, Human
aaacagcuuuacucagacuuu

SEQ ID NO: 740807 - RNA, 23 nt, Human
aacaaagguaagaaaaaaggaaa

SEQ ID NO: 740808 - RNA, 20 nt, Human
aagaaaccuguaucuuacug

SEQ ID NO: 740809 - RNA, 23 nt, Human
aagcaaauauaaaauacaaaaaa

SEQ ID NO: 740810 - RNA, 26 nt, Human
aagcaaauauaaaauacaaaaaacag

SEQ ID NO: 740811 - RNA, 23 nt, Human
aaggucccagguaccucugccuu

SEQ ID NO: 740812 - RNA, 20 nt, Human
acaaaaaacagcuuuacuca

SEQ ID NO: 740813 - RNA, 24 nt, Human
acaaauccuggcucagccuaacca

SEQ ID NO: 740814 - RNA, 29 nt, Human
agacagcaaacaaagguaagagggacccc

SEQ ID NO: 740815 - RNA, 19 nt, Human
aggaaaugcauguaaccac

SEQ ID NO: 740816 - RNA, 20 nt, Human
aggcagaaaacucagaauuu

SEQ ID NO: 740817 - RNA, 26 nt, Human
aggcguuggggcugagcuagcgagcc

SEQ ID NO: 740818 - RNA, 23 nt, Human
agguaugauuacagacacacuca

SEQ ID NO: 740819 - RNA, 26 nt, Human
agucacauucacugguaauucuacau

SEQ ID NO: 740820 - RNA, 22 nt, Human
agugaucaaaacaugaaaggaa

SEQ ID NO: 740821 - RNA, 18 nt, Human
auaacagaagaaacaagu

SEQ ID NO: 740822 - RNA, 21 nt, Human
caaauauaagaacuaaacauu

SEQ ID NO: 740823 - RNA, 25 nt, Human
caagaauaaacagacaucuuaggug

SEQ ID NO: 740824 - RNA, 19 nt, Human
cacauucacugguaauucu

SEQ ID NO: 740825 - RNA, 23 nt, Human
cagcuuuacucagacuuuuugac

SEQ ID NO: 740826 - RNA, 23 nt, Human
cccaaacauuagugguguggagg

SEQ ID NO: 740827 - RNA, 19 nt, Human
ccuaaaauauagauuccua

SEQ ID NO: 740828 - RNA, 26 nt, Human
ccuggcucagccuaaccagccuuggc

SEQ ID NO: 740829 - RNA, 24 nt, Human
cgaaaucaguuaacaaauauaaga

SEQ ID NO: 740830 - RNA, 19 nt, Human
cgcacaaacgcuccgggcc

SEQ ID NO: 740831 - RNA, 19 nt, Human
cgggccggauauccucagc

SEQ ID NO: 740832 - RNA, 20 nt, Human
cuaggcucuaauccugagau

SEQ ID NO: 740833 - RNA, 27 nt, Human
cucauugcccagacucaggauccugcu

SEQ ID NO: 740834 - RNA, 22 nt, Human
cuccgcgccgcacaaacgcucc

SEQ ID NO: 740835 - RNA, 25 nt, Human
cucugggcagcggcaacccuggucc

SEQ ID NO: 740836 - RNA, 22 nt, Human
cugaaggucuccuuguggcugg

SEQ ID NO: 740837 - RNA, 18 nt, Human
cugggcaccaugcccagg

SEQ ID NO: 740838 - RNA, 24 nt, Human
gaaaugcauguaaccacuuugaua

SEQ ID NO: 740839 - RNA, 27 nt, Human
gcacaaacgcuccgggccggauauccu

SEQ ID NO: 740840 - RNA, 22 nt, Human
ggagcagagcccaaacuucugc

SEQ ID NO: 740841 - RNA, 24 nt, Human
ggauccugcuucuugcccagauug

SEQ ID NO: 740842 - RNA, 18 nt, Human
ggccggauauccucagcc

SEQ ID NO: 740843 - RNA, 24 nt, Human
gggaacccguacaacagcccaagc

SEQ ID NO: 740844 - RNA, 27 nt, Human
gguuuggagcagagcccaaacuucugc

SEQ ID NO: 740845 - RNA, 23 nt, Human
guauaacagaagaaacaaguucc

SEQ ID NO: 740846 - RNA, 18 nt, Human
gucccuugucagaaaaca

SEQ ID NO: 740847 - RNA, 21 nt, Human
guguagccggaaguucaugca

SEQ ID NO: 740848 - RNA, 21 nt, Human
guugcaauguagauuuagauu

SEQ ID NO: 740849 - RNA, 28 nt, Human
uaaauaacaaacuucaauacgauguuga

SEQ ID NO: 740850 - RNA, 21 nt, Human
uaacaaacuucaauacgaugu

SEQ ID NO: 740851 - RNA, 24 nt, Human
uaccucugccuucccauauuugaa

SEQ ID NO: 740852 - RNA, 24 nt, Human
uagccucauucaugugaagacaac

SEQ ID NO: 740853 - RNA, 22 nt, Human
uagugacaguaaaauggcagaa

SEQ ID NO: 740854 - RNA, 21 nt, Human
uauucaagacaccgaaaucag

SEQ ID NO: 740855 - RNA, 18 nt, Human
uauucauagaaaaugauu

SEQ ID NO: 740856 - RNA, 24 nt, Human
ucacauucacugguaauucuacau

SEQ ID NO: 740857 - RNA, 21 nt, Human
uccacuccaguggaaacuaaa

SEQ ID NO: 740858 - RNA, 22 nt, Human
uccacuccaguggaaacuaaag

SEQ ID NO: 740859 - RNA, 18 nt, Human
ucccaagaaaaauaaggc

SEQ ID NO: 740860 - RNA, 18 nt, Human
uccucagccuucagaguc

SEQ ID NO: 740861 - RNA, 20 nt, Human
ucucaaacuacaaagugccu

SEQ ID NO: 740862 - RNA, 21 nt, Human
ucugggcaccaugcccaggga

SEQ ID NO: 740863 - RNA, 19 nt, Human
ugacugccauguccuccuu

SEQ ID NO: 740864 - RNA, 23 nt, Human
ugagauucugacucauucagucu

SEQ ID NO: 740865 - RNA, 28 nt, Human
ugauaguauaacagaagaaacaaguucc

SEQ ID NO: 740866 - RNA, 20 nt, Human
ugaucaaaacaugaaaggaa

SEQ ID NO: 740867 - RNA, 19 nt, Human
ugaugacaaauccuggcuc

SEQ ID NO: 740868 - RNA, 18 nt, Human
ugauuuggcagaguccuc

SEQ ID NO: 740869 - RNA, 21 nt, Human
ugccauguccuccuuuagaag

SEQ ID NO: 740870 - RNA, 22 nt, Human
ugggaaaauucuacccugcaca

SEQ ID NO: 740871 - RNA, 20 nt, Human
ugggcagcggcaacccuggu

SEQ ID NO: 740872 - RNA, 23 nt, Human
ugguuaucccaagaaaaauaagg

SEQ ID NO: 740873 - RNA, 23 nt, Human
uguagguaugauuacagacacac

SEQ ID NO: 740874 - RNA, 18 nt, Human
uuaucccaagaaaaauaa

SEQ ID NO: 740875 - RNA, 20 nt, Human
uuccuaggcucuaauccuga

SEQ ID NO: 740876 - RNA, 22 nt, Human
uucucaaacuacaaagugccug

SEQ ID NO: 740877 - RNA, 19 nt, Human
aaaaaaaaaaaaaagaaaa

SEQ ID NO: 740878 - RNA, 20 nt, Human
aaaagcgcuuggcacacagu

SEQ ID NO: 740879 - RNA, 21 nt, Human
aaacagucaaugggauuaguc

SEQ ID NO: 740880 - RNA, 24 nt, Human
aaagaaaaaaaaaguaauaaauua

SEQ ID NO: 740881 - RNA, 27 nt, Human
aaagcucccucaccagagugcccuucg

SEQ ID NO: 740882 - RNA, 18 nt, Human
aacacagaugacuugucc

SEQ ID NO: 740883 - RNA, 30 nt, Human
aacaccuauucauccaucaaagcuccagcc

SEQ ID NO: 740884 - RNA, 24 nt, Human
aacagagugagacucugucucaaa

SEQ ID NO: 740885 - RNA, 19 nt, Human
aacauggugaaaccccguc

SEQ ID NO: 740886 - RNA, 20 nt, Human
aacauggugaaaccccgucu

SEQ ID NO: 740887 - RNA, 23 nt, Human
aagccacccuugucccccauucu

SEQ ID NO: 740888 - RNA, 19 nt, Human
aagcgaugucuccaccuuc

SEQ ID NO: 740889 - RNA, 24 nt, Human
aagcugaggcaggacaaucgcuug

SEQ ID NO: 740890 - RNA, 22 nt, Human
aaucaugaggucaggaguucga

SEQ ID NO: 740891 - RNA, 24 nt, Human
aaucaugaggucaggaguucgaga

SEQ ID NO: 740892 - RNA, 18 nt, Human
aaucgcuugaacuuggga

SEQ ID NO: 740893 - RNA, 24 nt, Human
aaucgcuugaacuugggaggcgga

SEQ ID NO: 740894 - RNA, 22 nt, Human
acaaacacagaugacuugucca

SEQ ID NO: 740895 - RNA, 24 nt, Human
acaaacacagaugacuuguccaaa

SEQ ID NO: 740896 - RNA, 20 nt, Human
acaaggccaggccaaggcag

SEQ ID NO: 740897 - RNA, 21 nt, Human
acacggcaucuuguccagggu

SEQ ID NO: 740898 - RNA, 18 nt, Human
acacugaguguuucugga

SEQ ID NO: 740899 - RNA, 21 nt, Human
acagagugagacucugucuca

SEQ ID NO: 740900 - RNA, 24 nt, Human
acagagugagacucugucucaaaa

SEQ ID NO: 740901 - RNA, 22 nt, Human
accaacauggugaaaccccguc

SEQ ID NO: 740902 - RNA, 20 nt, Human
accagacccuccauucaagc

SEQ ID NO: 740903 - RNA, 24 nt, Human
accccgucuguacuaaaaauacaa

SEQ ID NO: 740904 - RNA, 20 nt, Human
accccucugcccagauccgg

SEQ ID NO: 740905 - RNA, 24 nt, Human
acgccgcugcacuccagcccgggc

SEQ ID NO: 740906 - RNA, 25 nt, Human
acgccgcugcacuccagcccgggca

SEQ ID NO: 740907 - RNA, 19 nt, Human
acuccauccccucaaaugg

SEQ ID NO: 740908 - RNA, 28 nt, Human
acucugucucaaaaaaaaaaaaaaaaaa

SEQ ID NO: 740909 - RNA, 24 nt, Human
acugaguguuucuggaaguagcug

SEQ ID NO: 740910 - RNA, 18 nt, Human
agaaaaacuggaaaacac

SEQ ID NO: 740911 - RNA, 24 nt, Human
agcaaggaccgagauggcuucucg

SEQ ID NO: 740912 - RNA, 24 nt, Human
agcccgggcaacagagugagacuc

SEQ ID NO: 740913 - RNA, 24 nt, Human
agccugaccaacauggugaaaccc

SEQ ID NO: 740914 - RNA, 23 nt, Human
agcugggcauaguggugggcgcc

SEQ ID NO: 740915 - RNA, 24 nt, Human
aggcaaaucaugaggucaggaguu

SEQ ID NO: 740916 - RNA, 18 nt, Human
aggcagacucuauauaua

SEQ ID NO: 740917 - RNA, 23 nt, Human
aggcagccgagaaauuccgagga

SEQ ID NO: 740918 - RNA, 21 nt, Human
aggcaggacaaucgcuugaac

SEQ ID NO: 740919 - RNA, 24 nt, Human
aggcaggacaaucgcuugaacuug

SEQ ID NO: 740920 - RNA, 24 nt, Human
aggcaggcaaaucaugaggucagg

SEQ ID NO: 740921 - RNA, 24 nt, Human
aggccaaggcagagccugagggga

SEQ ID NO: 740922 - RNA, 25 nt, Human
aggcggagguugcagugacaacggu

SEQ ID NO: 740923 - RNA, 20 nt, Human
aggcggagguugcagugagc

SEQ ID NO: 740924 - RNA, 24 nt, Human
aggcggagguugcagugagcugag

SEQ ID NO: 740925 - RNA, 19 nt, Human
aggcuggcugagggagaag

SEQ ID NO: 740926 - RNA, 20 nt, Human
agggcagaggcagccgagaa

SEQ ID NO: 740927 - RNA, 21 nt, Human
aggggccgggagagggucggg

SEQ ID NO: 740928 - RNA, 21 nt, Human
aggugccuggggcaagaccug

SEQ ID NO: 740929 - RNA, 18 nt, Human
agugcccaccuggggagc

SEQ ID NO: 740930 - RNA, 24 nt, Human
aguggcucacgccuguaaucccag

SEQ ID NO: 740931 - RNA, 24 nt, Human
aguggugggcgccuguaaucccag

SEQ ID NO: 740932 - RNA, 24 nt, Human
aucacgccgcugcacuccagcccg

SEQ ID NO: 740933 - RNA, 19 nt, Human
aucaugaggucaggaguuc

SEQ ID NO: 740934 - RNA, 19 nt, Human
auggagggaaccccuaaca

SEQ ID NO: 740935 - RNA, 18 nt, Human
caaacagagucccaggug

SEQ ID NO: 740936 - RNA, 25 nt, Human
caaaggcaggcaaaucaugagguca

SEQ ID NO: 740937 - RNA, 19 nt, Human
caaagugcauccuucucag

SEQ ID NO: 740938 - RNA, 21 nt, Human
caacauggugaaaccccgucu

SEQ ID NO: 740939 - RNA, 22 nt, Human
caacauggugaaaccccgucug

SEQ ID NO: 740940 - RNA, 18 nt, Human
caagcacauucucugagc

SEQ ID NO: 740941 - RNA, 21 nt, Human
caagcgaugucuccaccuucc

SEQ ID NO: 740942 - RNA, 20 nt, Human
caaggaaacugaggcacaga

SEQ ID NO: 740943 - RNA, 24 nt, Human
caaggaaacugaggcacagagugg

SEQ ID NO: 740944 - RNA, 26 nt, Human
caaggcagagccugaggggaggggac

SEQ ID NO: 740945 - RNA, 21 nt, Human
cacagcaucaugggggaugag

SEQ ID NO: 740946 - RNA, 23 nt, Human
cacagugaagcugaaauucaaac

SEQ ID NO: 740947 - RNA, 20 nt, Human
caccaccuccagccuucuca

SEQ ID NO: 740948 - RNA, 24 nt, Human
caccagacccuccauucaagcucc

SEQ ID NO: 740949 - RNA, 24 nt, Human
cacgccuguaaucccagcacuuug

SEQ ID NO: 740950 - RNA, 19 nt, Human
cacggccaagggcuuacuc

SEQ ID NO: 740951 - RNA, 20 nt, Human
cacuccagcccgggcaacag

SEQ ID NO: 740952 - RNA, 22 nt, Human
cacuccagcccgggcaacagag

SEQ ID NO: 740953 - RNA, 24 nt, Human
cacuccagcccgggcaacagagug

SEQ ID NO: 740954 - RNA, 21 nt, Human
cagcacuuugggaggcaaagg

SEQ ID NO: 740955 - RNA, 24 nt, Human
cagcacuuugggaggcaaaggcag

SEQ ID NO: 740956 - RNA, 19 nt, Human
cagcuccaggauggaagga

SEQ ID NO: 740957 - RNA, 20 nt, Human
caggauggaaggagggggug

SEQ ID NO: 740958 - RNA, 22 nt, Human
caggcaaaucaugaggucagga

SEQ ID NO: 740959 - RNA, 18 nt, Human
cagggccugcaaacagag

SEQ ID NO: 740960 - RNA, 23 nt, Human
ccaccaagcucuugcgguucccg

SEQ ID NO: 740961 - RNA, 19 nt, Human
ccaggguagacuggacaag

SEQ ID NO: 740962 - RNA, 24 nt, Human
ccccauccaggcaugacuuuacgg

SEQ ID NO: 740963 - RNA, 21 nt, Human
cccgcaggacuggcauacugg

SEQ ID NO: 740964 - RNA, 22 nt, Human
cccgggcugagacugcgagagc

SEQ ID NO: 740965 - RNA, 20 nt, Human
ccgcugcacuccagcccggg

SEQ ID NO: 740966 - RNA, 21 nt, Human
ccgcugcacuccagcccgggc

SEQ ID NO: 740967 - RNA, 22 nt, Human
ccgcugcacuccagcccgggca

SEQ ID NO: 740968 - RNA, 24 nt, Human
ccgcugcacuccagcccgggcaac

SEQ ID NO: 740969 - RNA, 20 nt, Human
ccgggcaaaggggaaauuua

SEQ ID NO: 740970 - RNA, 19 nt, Human
ccucaaacacacggcaucu

SEQ ID NO: 740971 - RNA, 24 nt, Human
ccucgcuggggucucagcugcuuu

SEQ ID NO: 740972 - RNA, 23 nt, Human
ccugaccaacauggugaaacccc

SEQ ID NO: 740973 - RNA, 24 nt, Human
ccugaccaacauggugaaaccccg

SEQ ID NO: 740974 - RNA, 18 nt, Human
ccuguaaucccagccacu

SEQ ID NO: 740975 - RNA, 24 nt, Human
cgagaccagccugaccaacauggu

SEQ ID NO: 740976 - RNA, 24 nt, Human
cgccuguaaucccagcacuuuggg

SEQ ID NO: 740977 - RNA, 24 nt, Human
cgccuguaaucccagccacuuggg

SEQ ID NO: 740978 - RNA, 23 nt, Human
cgcugcacuccagcccgggcaac

SEQ ID NO: 740979 - RNA, 24 nt, Human
cgcugcacuccagcccgggcaaca

SEQ ID NO: 740980 - RNA, 21 nt, Human
cgcuugaacuugggaggcgga

SEQ ID NO: 740981 - RNA, 21 nt, Human
cggaaaaaacauugcacaaga

SEQ ID NO: 740982 - RNA, 19 nt, Human
cggcagccacguccucggc

SEQ ID NO: 740983 - RNA, 21 nt, Human
cgggcaacagagugagacucu

SEQ ID NO: 740984 - RNA, 22 nt, Human
cguggcaggcucagcuccuucu

SEQ ID NO: 740985 - RNA, 19 nt, Human
cguugcacggcccgggcug

SEQ ID NO: 740986 - RNA, 22 nt, Human
cuauucauccaucaaagcucca

SEQ ID NO: 740987 - RNA, 18 nt, Human
cucaaaaaaaaaaaaaaa

SEQ ID NO: 740988 - RNA, 22 nt, Human
cucacgccuguaaucccagcac

SEQ ID NO: 740989 - RNA, 24 nt, Human
cucacgccuguaaucccagcacuu

SEQ ID NO: 740990 - RNA, 19 nt, Human
cucccauaucccuucucca

SEQ ID NO: 740991 - RNA, 19 nt, Human
cucugucucaaaaaaaaaa

SEQ ID NO: 740992 - RNA, 21 nt, Human
cucuugcgguucccgcugcgg

SEQ ID NO: 740993 - RNA, 19 nt, Human
cugcacuccagcccgggca

SEQ ID NO: 740994 - RNA, 22 nt, Human
cugcacuccagcccgggcaaca

SEQ ID NO: 740995 - RNA, 23 nt, Human
cugcacuccagcccgggcaacag

SEQ ID NO: 740996 - RNA, 23 nt, Human
cuuacucugcugggccucaaaca

SEQ ID NO: 740997 - RNA, 20 nt, Human
cuucuggagcccgcggcgcc

SEQ ID NO: 740998 - RNA, 21 nt, Human
cuuuuauucacugccagcucc

SEQ ID NO: 740999 - RNA, 20 nt, Human
gaaauucaaacuugagccuc

SEQ ID NO: 741000 - RNA, 18 nt, Human
gaagccagcaggauugga

SEQ ID NO: 741001 - RNA, 20 nt, Human
gacucagaaagggaagcaga

SEQ ID NO: 741002 - RNA, 23 nt, Human
gagagcggggucggaggcggggu

SEQ ID NO: 741003 - RNA, 23 nt, Human
gagaucacgccgcugcacuccag

SEQ ID NO: 741004 - RNA, 18 nt, Human
gagcgugccccgagacag

SEQ ID NO: 741005 - RNA, 22 nt, Human
gagguugcagugagcugagauc

SEQ ID NO: 741006 - RNA, 24 nt, Human
gcaacagagugagacucugucuca

SEQ ID NO: 741007 - RNA, 18 nt, Human
gcacagagugggaaagcc

SEQ ID NO: 741008 - RNA, 22 nt, Human
gcacagccuuggucuacccucc

SEQ ID NO: 741009 - RNA, 20 nt, Human
gcgagggaccaucuucugcc

SEQ ID NO: 741010 - RNA, 20 nt, Human
gcggggugaccggccgccuu

SEQ ID NO: 741011 - RNA, 19 nt, Human
gcuccagcucccauauccc

SEQ ID NO: 741012 - RNA, 24 nt, Human
gcugcacuccagcccgggcaacag

SEQ ID NO: 741013 - RNA, 22 nt, Human
ggacacugaguguuucuggaag

SEQ ID NO: 741014 - RNA, 26 nt, Human
ggagggcguuccuaccaccaagcucu

SEQ ID NO: 741015 - RNA, 20 nt, Human
ggaggggaaugagaccaggu

SEQ ID NO: 741016 - RNA, 22 nt, Human
ggagguugcagugagcugagau

SEQ ID NO: 741017 - RNA, 23 nt, Human
ggagguugcagugagcugagauc

SEQ ID NO: 741018 - RNA, 24 nt, Human
ggagguugcagugagcugagauca

SEQ ID NO: 741019 - RNA, 23 nt, Human
ggcaggcaaaucaugaggucagg

SEQ ID NO: 741020 - RNA, 23 nt, Human
ggcauaguggugggcgccuguaa

SEQ ID NO: 741021 - RNA, 24 nt, Human
ggcccgggcugagacugcgagagc

SEQ ID NO: 741022 - RNA, 24 nt, Human
ggcgccuguaaucccagccacuug

SEQ ID NO: 741023 - RNA, 24 nt, Human
gggcccaguggcucacgccuguaa

SEQ ID NO: 741024 - RNA, 20 nt, Human
ggguagacuggacaaggcca

SEQ ID NO: 741025 - RNA, 23 nt, Human
gguagguguggggaggggaauga

SEQ ID NO: 741026 - RNA, 20 nt, Human
ggugaucgugggacaggucu

SEQ ID NO: 741027 - RNA, 19 nt, Human
guugcagugagcugagauc

SEQ ID NO: 741028 - RNA, 25 nt, Human
uacagaaaaacuggaaaacacaaac

SEQ ID NO: 741029 - RNA, 18 nt, Human
uagcugggcauaguggug

SEQ ID NO: 741030 - RNA, 19 nt, Human
uaucagugcccaccugggg

SEQ ID NO: 741031 - RNA, 26 nt, Human
uauucauccaucaaagcuccagcucc

SEQ ID NO: 741032 - RNA, 24 nt, Human
ucaaaaaaaaaaaaaaaaaaagaa

SEQ ID NO: 741033 - RNA, 18 nt, Human
ucaaagcuccagcuccca

SEQ ID NO: 741034 - RNA, 24 nt, Human
ucaaagcuccagcucccauauccc

SEQ ID NO: 741035 - RNA, 21 nt, Human
ucaacuccauccccucaaaug

SEQ ID NO: 741036 - RNA, 19 nt, Human
ucagaauccaguccaucgc

SEQ ID NO: 741037 - RNA, 21 nt, Human
ucagcccagagggcagggccu

SEQ ID NO: 741038 - RNA, 20 nt, Human
ucagcuccuucuggagcccg

SEQ ID NO: 741039 - RNA, 24 nt, Human
ucaugaggucaggaguucgagacc

SEQ ID NO: 741040 - RNA, 23 nt, Human
ucaugggggaugagcuggggcug

SEQ ID NO: 741041 - RNA, 25 nt, Human
uccaaagugcauccuucucagccca

SEQ ID NO: 741042 - RNA, 20 nt, Human
uccaccuuccagcaaggacc

SEQ ID NO: 741043 - RNA, 21 nt, Human
uccauagccggaagaugggag

SEQ ID NO: 741044 - RNA, 18 nt, Human
ucccagagccacacagug

SEQ ID NO: 741045 - RNA, 18 nt, Human
uccccauccaggcaugac

SEQ ID NO: 741046 - RNA, 18 nt, Human
uccccauccaggcaugac

SEQ ID NO: 741047 - RNA, 18 nt, Human
ucccucaccagagugccc

SEQ ID NO: 741048 - RNA, 21 nt, Human
ucgaagguccccguugcacgg

SEQ ID NO: 741049 - RNA, 24 nt, Human
ucgcuugaacuugggaggcggagg

SEQ ID NO: 741050 - RNA, 21 nt, Human
ucugagcugcggaagugcuug

SEQ ID NO: 741051 - RNA, 23 nt, Human
ucuggaaguagcuggacguaauc

SEQ ID NO: 741052 - RNA, 24 nt, Human
ucuguacuaaaaauacaaaaaauu

SEQ ID NO: 741053 - RNA, 23 nt, Human
ucugucucaaaaaaaaaaaaaaa

SEQ ID NO: 741054 - RNA, 28 nt, Human
ugaacaccuauucauccaucaaagcucc

SEQ ID NO: 741055 - RNA, 20 nt, Human
ugacaccaccuccagccuuc

SEQ ID NO: 741056 - RNA, 18 nt, Human
ugacaccagaacacaagc

SEQ ID NO: 741057 - RNA, 24 nt, Human
ugacaccagacccuccauucaagc

SEQ ID NO: 741058 - RNA, 24 nt, Human
ugaccaacauggugaaaccccguc

SEQ ID NO: 741059 - RNA, 18 nt, Human
ugaccggccgccuuccuc

SEQ ID NO: 741060 - RNA, 20 nt, Human
ugacgagaggguggagcugg

SEQ ID NO: 741061 - RNA, 22 nt, Human
ugagaggaauuguuuacggaca

SEQ ID NO: 741062 - RNA, 22 nt, Human
ugagcugagaucacgccgcugc

SEQ ID NO: 741063 - RNA, 23 nt, Human
ugaggcaggacaaucgcuugaac

SEQ ID NO: 741064 - RNA, 20 nt, Human
ugaugacaccaccuccagcc

SEQ ID NO: 741065 - RNA, 21 nt, Human
ugccccauccagccccgauug

SEQ ID NO: 741066 - RNA, 20 nt, Human
ugccuggggcaagaccuggc

SEQ ID NO: 741067 - RNA, 24 nt, Human
uggaaagcucccucaccagagugc

SEQ ID NO: 741068 - RNA, 21 nt, Human
uggaaggagggggugaaucau

SEQ ID NO: 741069 - RNA, 18 nt, Human
uggaagggaagcuggugg

SEQ ID NO: 741070 - RNA, 21 nt, Human
uggaggcugccuuggcaguuc

SEQ ID NO: 741071 - RNA, 22 nt, Human
uggcucacgccuguaaucccag

SEQ ID NO: 741072 - RNA, 24 nt, Human
uggcucacgccuguaaucccagca

SEQ ID NO: 741073 - RNA, 19 nt, Human
ugggaggcaaaggcaggca

SEQ ID NO: 741074 - RNA, 24 nt, Human
ugggaggcaaaggcaggcaaauca

SEQ ID NO: 741075 - RNA, 24 nt, Human
ugggaggcggagguugcagugagc

SEQ ID NO: 741076 - RNA, 19 nt, Human
uggguagguguggggaggg

SEQ ID NO: 741077 - RNA, 21 nt, Human
uggugggaaguggccuucaga

SEQ ID NO: 741078 - RNA, 21 nt, Human
uggugggcgccuguaauccca

SEQ ID NO: 741079 - RNA, 18 nt, Human
uuagcugggcauaguggu

SEQ ID NO: 741080 - RNA, 24 nt, Human
uuagcugggcauaguggugggcgc

SEQ ID NO: 741081 - RNA, 18 nt, Human
uucugccgucugcccucc

SEQ ID NO: 741082 - RNA, 22 nt, Human
uucugggugucaggcugguggc

SEQ ID NO: 741083 - RNA, 24 nt, Human
uugaacuugggaggcggagguugc

SEQ ID NO: 741084 - RNA, 21 nt, Human
uugacaccagaacacaagcga

SEQ ID NO: 741085 - RNA, 18 nt, Human
uugcagugagcugagauc

SEQ ID NO: 741086 - RNA, 20 nt, Human
uugcagugagcugagaucac

SEQ ID NO: 741087 - RNA, 21 nt, Human
uugcagugagcugagaucacg

SEQ ID NO: 741088 - RNA, 24 nt, Human
uugggaagcugaggcaggacaauc

SEQ ID NO: 741089 - RNA, 20 nt, Human
uuuacaaagccacccuuguc

SEQ ID NO: 741090 - RNA, 28 nt, Human
uuuacggaaaaaacauugcacaagaaaa

SEQ ID NO: 741091 - RNA, 22 nt, Human
uuuagggcagaggcagccgaga

SEQ ID NO: 741092 - RNA, 20 nt, Human
uuucuggcuugaacuucauc

SEQ ID NO: 741093 - RNA, 21 nt, Human
aaaaacaaaaaaacaacaaaa

SEQ ID NO: 741094 - RNA, 30 nt, Human
aaaaacaaaaacaaaaaaacaacaaaaaag

SEQ ID NO: 741095 - RNA, 22 nt, Human
aaaaacaacaaaaaaacccccu

SEQ ID NO: 741096 - RNA, 19 nt, Human
aaaaacccccuguaacuaa

SEQ ID NO: 741097 - RNA, 26 nt, Human
aaaacaaaaaaacaacaaaaaaaccc

SEQ ID NO: 741098 - RNA, 27 nt, Human
aaaacaaaaacaaaaacaaaaaaacaa

SEQ ID NO: 741099 - RNA, 23 nt, Human
aaacaaaaacaaaaaaacaacaa

SEQ ID NO: 741100 - RNA, 22 nt, Human
aaacaagcagacaaacaacacc

SEQ ID NO: 741101 - RNA, 25 nt, Human
aaaccccaccacccccgcaaaacaa

SEQ ID NO: 741102 - RNA, 19 nt, Human
aaacccccagcucacuccc

SEQ ID NO: 741103 - RNA, 21 nt, Human
aaacccccagcucacucccac

SEQ ID NO: 741104 - RNA, 22 nt, Human
aaacguggagauuaauucaugc

SEQ ID NO: 741105 - RNA, 21 nt, Human
aaagauguucucuuuugccuu

SEQ ID NO: 741106 - RNA, 22 nt, Human
aaauauuaaaaaguugcaaaau

SEQ ID NO: 741107 - RNA, 25 nt, Human
aacaaaaaaacccccuguaacuaac

SEQ ID NO: 741108 - RNA, 21 nt, Human
aacagagcaagacuccgucuc

SEQ ID NO: 741109 - RNA, 24 nt, Human
aacagagcaagacuccgucucaaa

SEQ ID NO: 741110 - RNA, 24 nt, Human
aaccccaccacccccgcaaaacaa

SEQ ID NO: 741111 - RNA, 19 nt, Human
aacccccagcucacuccca

SEQ ID NO: 741112 - RNA, 27 nt, Human
aacuccaucaacccaaaccuuucuaac

SEQ ID NO: 741113 - RNA, 23 nt, Human
aagaucgcgccacugcacuccag

SEQ ID NO: 741114 - RNA, 20 nt, Human
aagcagacaaacaacaccga

SEQ ID NO: 741115 - RNA, 23 nt, Human
aagcagacaaacaacaccgagca

SEQ ID NO: 741116 - RNA, 25 nt, Human
aagcagacaaacaacaccgagcaga

SEQ ID NO: 741117 - RNA, 26 nt, Human
aagcagacaaacaacaccgagcagag

SEQ ID NO: 741118 - RNA, 20 nt, Human
aagcgccucugagcaaaggc

SEQ ID NO: 741119 - RNA, 20 nt, Human
aauauggugaaaccccgucu

SEQ ID NO: 741120 - RNA, 21 nt, Human
aauauggugaaaccccgucuc

SEQ ID NO: 741121 - RNA, 24 nt, Human
aauugcucgaacccgggaggcgga

SEQ ID NO: 741122 - RNA, 22 nt, Human
acaaaaacaaaaaaacaacaaa

SEQ ID NO: 741123 - RNA, 24 nt, Human
acaaaaacaaaaaaacaacaaaaa

SEQ ID NO: 741124 - RNA, 21 nt, Human
acaacaaaaaaacccccugua

SEQ ID NO: 741125 - RNA, 23 nt, Human
acagagcaagacuccgucucaaa

SEQ ID NO: 741126 - RNA, 23 nt, Human
accacccccgcaaaacaaaaaca

SEQ ID NO: 741127 - RNA, 23 nt, Human
accccaccacccccgcaaaacaa

SEQ ID NO: 741128 - RNA, 19 nt, Human
accccaggggcgugcggga

SEQ ID NO: 741129 - RNA, 26 nt, Human
acccccgcaaaacaaaaacaaaaacc

SEQ ID NO: 741130 - RNA, 24 nt, Human
accccgucucuacuaaaaauacaa

SEQ ID NO: 741131 - RNA, 22 nt, Human
accgaugugcaaaagguuucug

SEQ ID NO: 741132 - RNA, 25 nt, Human
acuccaucaacccaaaccuuucuaa

SEQ ID NO: 741133 - RNA, 21 nt, Human
acuccgucucaaaccccacca

SEQ ID NO: 741134 - RNA, 24 nt, Human
acugcacuccagccuaggcaacag

SEQ ID NO: 741135 - RNA, 24 nt, Human
acugcacuccagccuaggcaacag

SEQ ID NO: 741136 - RNA, 18 nt, Human
agacaaacaacaccgagc

SEQ ID NO: 741137 - RNA, 24 nt, Human
agacaaacaacaccgagcagagca

SEQ ID NO: 741138 - RNA, 20 nt, Human
agacagacccugacucccuc

SEQ ID NO: 741139 - RNA, 24 nt, Human
agagcaagacuccgucucaaaccc

SEQ ID NO: 741140 - RNA, 24 nt, Human
agcacuuugggaggcggagguggg

SEQ ID NO: 741141 - RNA, 19 nt, Human
agcagacaaacaacaccga

SEQ ID NO: 741142 - RNA, 23 nt, Human
agccaggcguggugacacacgcc

SEQ ID NO: 741143 - RNA, 18 nt, Human
agccccggccgcagccuc

SEQ ID NO: 741144 - RNA, 24 nt, Human
agccuaggcaacagagcaagacuc

SEQ ID NO: 741145 - RNA, 19 nt, Human
agccuggccaauaugguga

SEQ ID NO: 741146 - RNA, 22 nt, Human
agccuggccaauauggugaaac

SEQ ID NO: 741147 - RNA, 24 nt, Human
agccuggccaauauggugaaaccc

SEQ ID NO: 741148 - RNA, 23 nt, Human
agcgaggcaagcagaagcccugg

SEQ ID NO: 741149 - RNA, 20 nt, Human
aggaguuugagaccagccug

SEQ ID NO: 741150 - RNA, 18 nt, Human
aggcaggagaauugcucg

SEQ ID NO: 741151 - RNA, 24 nt, Human
aggcaggagaauugcucgaacccg

SEQ ID NO: 741152 - RNA, 23 nt, Human
aggcauguguauaugugugugua

SEQ ID NO: 741153 - RNA, 21 nt, Human
aggcggagguggguggaucac

SEQ ID NO: 741154 - RNA, 24 nt, Human
aggcggagguugcagggggccaag

SEQ ID NO: 741155 - RNA, 24 nt, Human
aggcguggugacacacgccuguaa

SEQ ID NO: 741156 - RNA, 18 nt, Human
aggcugaggcaggagaau

SEQ ID NO: 741157 - RNA, 21 nt, Human
aggcugaggcaggagaauugc

SEQ ID NO: 741158 - RNA, 19 nt, Human
aggcuggggcagcgagagg

SEQ ID NO: 741159 - RNA, 21 nt, Human
agggaagggccccgacuggcg

SEQ ID NO: 741160 - RNA, 22 nt, Human
agggagcugaugccugucacag

SEQ ID NO: 741161 - RNA, 18 nt, Human
aggggacugcccuucagu

SEQ ID NO: 741162 - RNA, 24 nt, Human
agguggguggaucacaaggucagg

SEQ ID NO: 741163 - RNA, 21 nt, Human
aucacaaggucaggaguuuga

SEQ ID NO: 741164 - RNA, 23 nt, Human
aucgcgccacugcacuccagccu

SEQ ID NO: 741165 - RNA, 20 nt, Human
auggugaaaccccgucucua

SEQ ID NO: 741166 - RNA, 23 nt, Human
caaaaaaacaacaaaaaaacccc

SEQ ID NO: 741167 - RNA, 19 nt, Human
caaaaaaacccccuguaac

SEQ ID NO: 741168 - RNA, 23 nt, Human
caaaacaaaaacaaaaacaaaaa

SEQ ID NO: 741169 - RNA, 19 nt, Human
caaaacccccagcucacuc

SEQ ID NO: 741170 - RNA, 18 nt, Human
caaacaggacgcuuccuu

SEQ ID NO: 741171 - RNA, 22 nt, Human
caaaccccaccacccccgcaaa

SEQ ID NO: 741172 - RNA, 21 nt, Human
caaagcuauggacaaaacccc

SEQ ID NO: 741173 - RNA, 23 nt, Human
caaauagaaaacuauguuaaaau

SEQ ID NO: 741174 - RNA, 24 nt, Human
caacaaaaaaacccccuguaacua

SEQ ID NO: 741175 - RNA, 27 nt, Human
caacaaaaaaacccccuguaacuaaca

SEQ ID NO: 741176 - RNA, 18 nt, Human
caagcagaagcccugggc

SEQ ID NO: 741177 - RNA, 24 nt, Human
caagcagacaaacaacaccgagca

SEQ ID NO: 741178 - RNA, 24 nt, Human
caauauggugaaaccccgucucua

SEQ ID NO: 741179 - RNA, 24 nt, Human
cacaaggucaggaguuugagacca

SEQ ID NO: 741180 - RNA, 20 nt, Human
cacaugucuuuaggaauucg

SEQ ID NO: 741181 - RNA, 20 nt, Human
caccacccccgcaaaacaaa

SEQ ID NO: 741182 - RNA, 18 nt, Human
caccaggugggaggggac

SEQ ID NO: 741183 - RNA, 19 nt, Human
caccaggugggaggggacu

SEQ ID NO: 741184 - RNA, 21 nt, Human
caccaggugggaggggacugc

SEQ ID NO: 741185 - RNA, 22 nt, Human
cacccccgcaaaacaaaaacaa

SEQ ID NO: 741186 - RNA, 23 nt, Human
cacccccgcaaaacaaaaacaaa

SEQ ID NO: 741187 - RNA, 18 nt, Human
cacgccuguaaucccagc

SEQ ID NO: 741188 - RNA, 19 nt, Human
cacgccuguaaucccagcu

SEQ ID NO: 741189 - RNA, 24 nt, Human
cacuaaaaaugaagucuuuuuaua

SEQ ID NO: 741190 - RNA, 23 nt, Human
cacuccagccuaggcaacagagc

SEQ ID NO: 741191 - RNA, 19 nt, Human
cacugcacuccagccuagg

SEQ ID NO: 741192 - RNA, 21 nt, Human
cacugcacuccagccuaggca

SEQ ID NO: 741193 - RNA, 22 nt, Human
cacugcacuccagccuaggcaa

SEQ ID NO: 741194 - RNA, 23 nt, Human
cacugcacuccagccuaggcaac

SEQ ID NO: 741195 - RNA, 27 nt, Human
cacugcacuccagccuaggcaacagag

SEQ ID NO: 741196 - RNA, 22 nt, Human
cagacaucuuggcaucuauacu

SEQ ID NO: 741197 - RNA, 21 nt, Human
cagagaccaaggagcccgagc

SEQ ID NO: 741198 - RNA, 24 nt, Human
cagagcaagacuccgucucaaacc

SEQ ID NO: 741199 - RNA, 26 nt, Human
cagagcaagacuccgucucaaacccc

SEQ ID NO: 741200 - RNA, 23 nt, Human
cagcaaggugcggcugagguggg

SEQ ID NO: 741201 - RNA, 21 nt, Human
cagcacuuugggaggcggagg

SEQ ID NO: 741202 - RNA, 24 nt, Human
cagcacuuugggaggcggaggugg

SEQ ID NO: 741203 - RNA, 18 nt, Human
cagcaggcccagcagacg

SEQ ID NO: 741204 - RNA, 22 nt, Human
cagcgaggcaagcagaagcccu

SEQ ID NO: 741205 - RNA, 24 nt, Human
cagcuacucgggaggcugaggcag

SEQ ID NO: 741206 - RNA, 20 nt, Human
caggcccagcagacggggcc

SEQ ID NO: 741207 - RNA, 23 nt, Human
cauaccagugggcuucugccugc

SEQ ID NO: 741208 - RNA, 19 nt, Human
cauguguauaugugugugu

SEQ ID NO: 741209 - RNA, 24 nt, Human
cauguguauauguguguguauaua

SEQ ID NO: 741210 - RNA, 24 nt, Human
ccaaagcuauggacaaaaccccca

SEQ ID NO: 741211 - RNA, 26 nt, Human
ccacuaaucacugguaggaucauuuc

SEQ ID NO: 741212 - RNA, 19 nt, Human
ccacugcacuccagccuag

SEQ ID NO: 741213 - RNA, 20 nt, Human
ccacugcacuccagccuagg

SEQ ID NO: 741214 - RNA, 21 nt, Human
ccacugcacuccagccuaggc

SEQ ID NO: 741215 - RNA, 24 nt, Human
ccacugcacuccagccuaggcaac

SEQ ID NO: 741216 - RNA, 20 nt, Human
ccaggccagggaguacauug

SEQ ID NO: 741217 - RNA, 19 nt, Human
cccacaccugugucuaccu

SEQ ID NO: 741218 - RNA, 22 nt, Human
cccaccacccccgcaaaacaaa

SEQ ID NO: 741219 - RNA, 26 nt, Human
cccaccacccccgcaaaacaaaaaca

SEQ ID NO: 741220 - RNA, 20 nt, Human
cccauaccagugggcuucug

SEQ ID NO: 741221 - RNA, 21 nt, Human
cccauagccccggccgcagcc

SEQ ID NO: 741222 - RNA, 19 nt, Human
ccccaccacccccgcaaaa

SEQ ID NO: 741223 - RNA, 20 nt, Human
ccccaccacccccgcaaaac

SEQ ID NO: 741224 - RNA, 21 nt, Human
ccccaccacccccgcaaaaca

SEQ ID NO: 741225 - RNA, 22 nt, Human
cccccgcaaaacaaaaacaaaa

SEQ ID NO: 741226 - RNA, 25 nt, Human
ccccgcaaaacaaaaacaaaaacaa

SEQ ID NO: 741227 - RNA, 19 nt, Human
ccccugggagcacaggcug

SEQ ID NO: 741228 - RNA, 23 nt, Human
cccgugcgcaccgccacucuccu

SEQ ID NO: 741229 - RNA, 24 nt, Human
cccgugcgcaccgccacucuccug

SEQ ID NO: 741230 - RNA, 18 nt, Human
cccugggagcacaggcug

SEQ ID NO: 741231 - RNA, 23 nt, Human
cccuuaagcccuaaaacgacaac

SEQ ID NO: 741232 - RNA, 22 nt, Human
cccuuccgccgccccaggccgc

SEQ ID NO: 741233 - RNA, 22 nt, Human
ccgcaaaacaaaaacaaaaaca

SEQ ID NO: 741234 - RNA, 18 nt, Human
ccgccgccccaggccgcc

SEQ ID NO: 741235 - RNA, 18 nt, Human
ccgccgccccaggccgcc

SEQ ID NO: 741236 - RNA, 19 nt, Human
ccgccgccccaggccgccu

SEQ ID NO: 741237 - RNA, 24 nt, Human
ccgcggccccgguggagagggcgg

SEQ ID NO: 741238 - RNA, 21 nt, Human
ccgcugcuggccgagccacag

SEQ ID NO: 741239 - RNA, 21 nt, Human
ccgugcgcaccgccacucucc

SEQ ID NO: 741240 - RNA, 23 nt, Human
ccucacagagaccaaggagcccg

SEQ ID NO: 741241 - RNA, 20 nt, Human
ccucugagcaaaggcacggg

SEQ ID NO: 741242 - RNA, 23 nt, Human
ccuggccaauauggugaaacccc

SEQ ID NO: 741243 - RNA, 24 nt, Human
ccuggccaauauggugaaaccccg

SEQ ID NO: 741244 - RNA, 20 nt, Human
ccuguaacuaacaaaagagg

SEQ ID NO: 741245 - RNA, 21 nt, Human
ccuguaaucccagcuacucgg

SEQ ID NO: 741246 - RNA, 20 nt, Human
ccuguaauuccagcacuuug

SEQ ID NO: 741247 - RNA, 22 nt, Human
ccuguaauuccagcacuuuggg

SEQ ID NO: 741248 - RNA, 19 nt, Human
ccuuaagcccuaaaacgac

SEQ ID NO: 741249 - RNA, 18 nt, Human
ccuuccgccgccccaggc

SEQ ID NO: 741250 - RNA, 22 nt, Human
cgagacggagucucgcucuguc

SEQ ID NO: 741251 - RNA, 20 nt, Human
cgcaaaacaaaaacaaaaac

SEQ ID NO: 741252 - RNA, 22 nt, Human
cgcaaaacaaaaacaaaaacaa

SEQ ID NO: 741253 - RNA, 18 nt, Human
cgcaaacaagcagacaaa

SEQ ID NO: 741254 - RNA, 24 nt, Human
cgccacugcacuccagccuaggca

SEQ ID NO: 741255 - RNA, 23 nt, Human
cgccuguaaucccagcuacucgg

SEQ ID NO: 741256 - RNA, 24 nt, Human
cgccuguaaucccagcuacucggg

SEQ ID NO: 741257 - RNA, 23 nt, Human
cggagguggguggaucacaaggu

SEQ ID NO: 741258 - RNA, 21 nt, Human
cggggggcgccccuuccgccg

SEQ ID NO: 741259 - RNA, 19 nt, Human
cgucucaaaccccaccacc

SEQ ID NO: 741260 - RNA, 19 nt, Human
cgucucaaaccccaccacc

SEQ ID NO: 741261 - RNA, 21 nt, Human
cucacucccacaggaggggau

SEQ ID NO: 741262 - RNA, 24 nt, Human
cucaugccuguaauuccagcacuu

SEQ ID NO: 741263 - RNA, 21 nt, Human
cuccuggaaccgcugcuggcc

SEQ ID NO: 741264 - RNA, 19 nt, Human
cucugagcaaaggcacggg

SEQ ID NO: 741265 - RNA, 20 nt, Human
cucugcccauagccccggcc

SEQ ID NO: 741266 - RNA, 19 nt, Human
cugacucccuccacauggc

SEQ ID NO: 741267 - RNA, 22 nt, Human
cugcccauagccccggccgcag

SEQ ID NO: 741268 - RNA, 21 nt, Human
cuuggucccuuaacaauguau

SEQ ID NO: 741269 - RNA, 23 nt, Human
gagacccgcuccaucccucacag

SEQ ID NO: 741270 - RNA, 19 nt, Human
gaggcccauaccagugggc

SEQ ID NO: 741271 - RNA, 20 nt, Human
gaggcccauaccagugggcu

SEQ ID NO: 741272 - RNA, 30 nt, Human
gaggcggagguggguggaucacaaggucaa

SEQ ID NO: 741273 - RNA, 22 nt, Human
gagguggguggaucacaagguc

SEQ ID NO: 741274 - RNA, 19 nt, Human
gagguugcagggggccaag

SEQ ID NO: 741275 - RNA, 21 nt, Human
gaucacaaggucaggaguuug

SEQ ID NO: 741276 - RNA, 22 nt, Human
gaucacaaggucaggaguuuga

SEQ ID NO: 741277 - RNA, 24 nt, Human
gaucacaaggucaggaguuugaga

SEQ ID NO: 741278 - RNA, 22 nt, Human
gauccaaucacaacauggaugu

SEQ ID NO: 741279 - RNA, 18 nt, Human
gauugggccgggcgcggu

SEQ ID NO: 741280 - RNA, 24 nt, Human
gcacuccagccuaggcaacagagc

SEQ ID NO: 741281 - RNA, 20 nt, Human
gcauguguauaugugugugu

SEQ ID NO: 741282 - RNA, 19 nt, Human
gccaagaucgcgccacugc

SEQ ID NO: 741283 - RNA, 24 nt, Human
gccaauauggugaaaccccgucuc

SEQ ID NO: 741284 - RNA, 22 nt, Human
gcccauagccccggccgcagcc

SEQ ID NO: 741285 - RNA, 22 nt, Human
gccccaggccgccuugcacccc

SEQ ID NO: 741286 - RNA, 18 nt, Human
gccuaggccccugggagc

SEQ ID NO: 741287 - RNA, 23 nt, Human
gccuguaaucccagcuacucggg

SEQ ID NO: 741288 - RNA, 21 nt, Human
gcgaggcaagcagaagcccug

SEQ ID NO: 741289 - RNA, 23 nt, Human
gcuuccagacagacccugacucc

SEQ ID NO: 741290 - RNA, 22 nt, Human
gcuuccucagacggaacucggg

SEQ ID NO: 741291 - RNA, 22 nt, Human
ggaggggacugcccuucagucc

SEQ ID NO: 741292 - RNA, 24 nt, Human
ggagguugcagggggccaagaucg

SEQ ID NO: 741293 - RNA, 26 nt, Human
ggaguacauuguucaaaucgggauua

SEQ ID NO: 741294 - RNA, 21 nt, Human
ggccgggcgcgguggcucaug

SEQ ID NO: 741295 - RNA, 23 nt, Human
ggccgggcgcgguggcucaugcc

SEQ ID NO: 741296 - RNA, 22 nt, Human
ggccugagacagcccugaaggc

SEQ ID NO: 741297 - RNA, 23 nt, Human
ggcgcgguggcucaugccuguaa

SEQ ID NO: 741298 - RNA, 18 nt, Human
ggggaggcggccaggcgg

SEQ ID NO: 741299 - RNA, 24 nt, Human
ggugacacacgccuguaaucccag

SEQ ID NO: 741300 - RNA, 23 nt, Human
gguggaucacaaggucaggaguu

SEQ ID NO: 741301 - RNA, 23 nt, Human
gguggcucaugccuguaauucca

SEQ ID NO: 741302 - RNA, 24 nt, Human
gguggcucaugccuguaauuccag

SEQ ID NO: 741303 - RNA, 24 nt, Human
guauauguguguguauauauauau

SEQ ID NO: 741304 - RNA, 23 nt, Human
gugacacacgccuguaaucccag

SEQ ID NO: 741305 - RNA, 19 nt, Human
gugcggcugaggugggacc

SEQ ID NO: 741306 - RNA, 23 nt, Human
guggaucacaaggucaggaguuu

SEQ ID NO: 741307 - RNA, 23 nt, Human
guggcucaugccuguaauuccag

SEQ ID NO: 741308 - RNA, 26 nt, Human
guguauauauauauauauuucuuaaa

SEQ ID NO: 741309 - RNA, 21 nt, Human
uaaaacucucaauagccacua

SEQ ID NO: 741310 - RNA, 19 nt, Human
uaacaaaagaggaaccugu

SEQ ID NO: 741311 - RNA, 22 nt, Human
uaagcccuaaaacgacaacaaa

SEQ ID NO: 741312 - RNA, 21 nt, Human
uaccagugggcuucugccugc

SEQ ID NO: 741313 - RNA, 21 nt, Human
uaccuggggcugagugcacug

SEQ ID NO: 741314 - RNA, 22 nt, Human
uaccuggggcugagugcacugg

SEQ ID NO: 741315 - RNA, 22 nt, Human
uaccuggggcugagugcacugg

SEQ ID NO: 741316 - RNA, 21 nt, Human
uagaaaauaauggccaacauc

SEQ ID NO: 741317 - RNA, 21 nt, Human
uagaaucaggagacccgcucc

SEQ ID NO: 741318 - RNA, 21 nt, Human
uaggucggagcggugccgcgg

SEQ ID NO: 741319 - RNA, 20 nt, Human
uauguguguguauauauaua

SEQ ID NO: 741320 - RNA, 23 nt, Human
ucaaaaaaacuacgauuaaaaaa

SEQ ID NO: 741321 - RNA, 24 nt, Human
ucaaaaaaacuacgauuaaaaaaa

SEQ ID NO: 741322 - RNA, 24 nt, Human
ucacaaggucaggaguuugagacc

SEQ ID NO: 741323 - RNA, 18 nt, Human
ucacagagaccaaggagc

SEQ ID NO: 741324 - RNA, 25 nt, Human
ucagcacccggaccccaggggcgug

SEQ ID NO: 741325 - RNA, 22 nt, Human
ucaugccuguaauuccagcacu

SEQ ID NO: 741326 - RNA, 24 nt, Human
uccacaugucuuuaggaauucgaa

SEQ ID NO: 741327 - RNA, 19 nt, Human
ucccuccacauggcugccu

SEQ ID NO: 741328 - RNA, 22 nt, Human
ucccuggcggugcucucuggcu

SEQ ID NO: 741329 - RNA, 21 nt, Human
ucccuuaacaauguauaaccc

SEQ ID NO: 741330 - RNA, 22 nt, Human
uccgccgccccaggccgccuug

SEQ ID NO: 741331 - RNA, 24 nt, Human
ucgaacccgggaggcggagguugc

SEQ ID NO: 741332 - RNA, 20 nt, Human
ucggcagccgccgcuuccuc

SEQ ID NO: 741333 - RNA, 23 nt, Human
ucgggaggcugaggcaggagaau

SEQ ID NO: 741334 - RNA, 19 nt, Human
ucucauucuuguucuguuu

SEQ ID NO: 741335 - RNA, 20 nt, Human
ucuccuggaaccgcugcugg

SEQ ID NO: 741336 - RNA, 25 nt, Human
ucucuacuaaaaauacaaaaaaauu

SEQ ID NO: 741337 - RNA, 19 nt, Human
ugaccaagggauuuuacag

SEQ ID NO: 741338 - RNA, 23 nt, Human
ugagaccagccuggccaauaugg

SEQ ID NO: 741339 - RNA, 24 nt, Human
ugagaccagccuggccaauauggu

SEQ ID NO: 741340 - RNA, 24 nt, Human
ugaggcaggagaauugcucgaacc

SEQ ID NO: 741341 - RNA, 25 nt, Human
ugaggcaggagaauugcucgaaccc

SEQ ID NO: 741342 - RNA, 21 nt, Human
ugcauccauaucguuugcacg

SEQ ID NO: 741343 - RNA, 24 nt, Human
ugcccauagccccggccgcagccu

SEQ ID NO: 741344 - RNA, 18 nt, Human
ugccuggaugugacacag

SEQ ID NO: 741345 - RNA, 23 nt, Human
ugccuguaauuccagcacuuugg

SEQ ID NO: 741346 - RNA, 23 nt, Human
ugccuguaauuccagcacuuugg

SEQ ID NO: 741347 - RNA, 19 nt, Human
ugcgcaccgccacucuccu

SEQ ID NO: 741348 - RNA, 20 nt, Human
ugcgcgagcgccucccuggc

SEQ ID NO: 741349 - RNA, 19 nt, Human
ugcugaccguggccuugcg

SEQ ID NO: 741350 - RNA, 22 nt, Human
uggaauaucuuaacauaugaaa

SEQ ID NO: 741351 - RNA, 21 nt, Human
uggaucacaaggucaggaguu

SEQ ID NO: 741352 - RNA, 19 nt, Human
uggccaacaucucuuuaaa

SEQ ID NO: 741353 - RNA, 24 nt, Human
uggccaauauggugaaaccccguc

SEQ ID NO: 741354 - RNA, 18 nt, Human
uggcgcugccgcggcccc

SEQ ID NO: 741355 - RNA, 22 nt, Human
uggcucaugccuguaauuccag

SEQ ID NO: 741356 - RNA, 24 nt, Human
uggcucaugccuguaauuccagca

SEQ ID NO: 741357 - RNA, 19 nt, Human
uggcugguuaggagacugu

SEQ ID NO: 741358 - RNA, 19 nt, Human
ugggaggcggaggugggug

SEQ ID NO: 741359 - RNA, 24 nt, Human
ugggaggcggagguggguggauca

SEQ ID NO: 741360 - RNA, 23 nt, Human
uggggacagcagccagagcaugg

SEQ ID NO: 741361 - RNA, 25 nt, Human
uggggacagcagccagagcaugggg

SEQ ID NO: 741362 - RNA, 24 nt, Human
uggugacacacgccuguaauccca

SEQ ID NO: 741363 - RNA, 23 nt, Human
uggugagaaaagaauaauuccuu

SEQ ID NO: 741364 - RNA, 24 nt, Human
uguagaaucaggagacccgcucca

SEQ ID NO: 741365 - RNA, 23 nt, Human
uguauauauauauauauuucuua

SEQ ID NO: 741366 - RNA, 18 nt, Human
uguguauauauauauaua

SEQ ID NO: 741367 - RNA, 18 nt, Human
uguguauaugugugugua

SEQ ID NO: 741368 - RNA, 24 nt, Human
ugugucuaccucaguuccagcagg

SEQ ID NO: 741369 - RNA, 18 nt, Human
uguguguguauauauaua

SEQ ID NO: 741370 - RNA, 18 nt, Human
uguguguguauauauaua

SEQ ID NO: 741371 - RNA, 22 nt, Human
uugcagggggccaagaucgcgc

SEQ ID NO: 741372 - RNA, 21 nt, Human
uugcgcgagcgccucccuggc

SEQ ID NO: 741373 - RNA, 24 nt, Human
uugcucgaacccgggaggcggagg

SEQ ID NO: 741374 - RNA, 24 nt, Human
aaagugcugggauuacaggcguga

SEQ ID NO: 741375 - RNA, 22 nt, Human
aacagccaacucuccuacauau

SEQ ID NO: 741376 - RNA, 20 nt, Human
aacauggcgaaacuccgccu

SEQ ID NO: 741377 - RNA, 21 nt, Human
aacauggcgaaacuccgccuc

SEQ ID NO: 741378 - RNA, 22 nt, Human
aacuagaacccagcugacuucc

SEQ ID NO: 741379 - RNA, 19 nt, Human
aagagaaugaggagaaggg

SEQ ID NO: 741380 - RNA, 19 nt, Human
aagcaaaggugaaagcaga

SEQ ID NO: 741381 - RNA, 21 nt, Human
aagcaaaggugaaagcagaaa

SEQ ID NO: 741382 - RNA, 18 nt, Human
aagcaggagaaucgcuug

SEQ ID NO: 741383 - RNA, 24 nt, Human
aagcaggagaaucgcuugaacccg

SEQ ID NO: 741384 - RNA, 25 nt, Human
aagcaggagaaucgcuugaacccgg

SEQ ID NO: 741385 - RNA, 21 nt, Human
aaggcccaggaaggccuccag

SEQ ID NO: 741386 - RNA, 19 nt, Human
aagugcugggauuacaggc

SEQ ID NO: 741387 - RNA, 19 nt, Human
aagugcugggauuacaggc

SEQ ID NO: 741388 - RNA, 26 nt, Human
aagugcugggauuacaggcgugagcc

SEQ ID NO: 741389 - RNA, 21 nt, Human
aauacuaaaggcaacugucac

SEQ ID NO: 741390 - RNA, 24 nt, Human
aaucgcuugaacccgggaggcaga

SEQ ID NO: 741391 - RNA, 21 nt, Human
acacugcacuucagccugggc

SEQ ID NO: 741392 - RNA, 23 nt, Human
acacugcacuucagccugggcaa

SEQ ID NO: 741393 - RNA, 24 nt, Human
acacugcacuucagccugggcaac

SEQ ID NO: 741394 - RNA, 21 nt, Human
acagcacuucuagggucaccu

SEQ ID NO: 741395 - RNA, 19 nt, Human
acauggcgaaacuccgccu

SEQ ID NO: 741396 - RNA, 23 nt, Human
accagaguaaaaggaaaagacug

SEQ ID NO: 741397 - RNA, 22 nt, Human
accccagcuacucaggaggcca

SEQ ID NO: 741398 - RNA, 24 nt, Human
acuagaacccagcugacuuccccc

SEQ ID NO: 741399 - RNA, 18 nt, Human
acucaacacagccauucc

SEQ ID NO: 741400 - RNA, 24 nt, Human
acuccgccucuacuaaaaauacaa

SEQ ID NO: 741401 - RNA, 20 nt, Human
acugcaagcucugccuccca

SEQ ID NO: 741402 - RNA, 18 nt, Human
acugcacuucagccuggg

SEQ ID NO: 741403 - RNA, 21 nt, Human
acugcacuucagccugggcaa

SEQ ID NO: 741404 - RNA, 25 nt, Human
acugcacuucagccugggcaacaag

SEQ ID NO: 741405 - RNA, 23 nt, Human
agaaacaaucccuauuuaagagc

SEQ ID NO: 741406 - RNA, 18 nt, Human
agaaacuccaucucaaaa

SEQ ID NO: 741407 - RNA, 21 nt, Human
agaacccagcugacuuccccc

SEQ ID NO: 741408 - RNA, 19 nt, Human
agaacugcuccaugucacc

SEQ ID NO: 741409 - RNA, 18 nt, Human
agacaguagcauacuugg

SEQ ID NO: 741410 - RNA, 18 nt, Human
agagguugcagugagccg

SEQ ID NO: 741411 - RNA, 23 nt, Human
agagguugcagugagccgagauc

SEQ ID NO: 741412 - RNA, 24 nt, Human
agagguugcagugagccgagauca

SEQ ID NO: 741413 - RNA, 19 nt, Human
agcacgccuucccauccug

SEQ ID NO: 741414 - RNA, 18 nt, Human
agccaggcgcgguggugc

SEQ ID NO: 741415 - RNA, 18 nt, Human
aggaaauugagucacagg

SEQ ID NO: 741416 - RNA, 20 nt, Human
aggaaggauuugggccucag

SEQ ID NO: 741417 - RNA, 25 nt, Human
aggaaggccuccaggaaaaggcugc

SEQ ID NO: 741418 - RNA, 22 nt, Human
aggagaagggagaguugacaag

SEQ ID NO: 741419 - RNA, 21 nt, Human
aggcagagguugcagugagcc

SEQ ID NO: 741420 - RNA, 24 nt, Human
aggcagagguugcagugagccgag

SEQ ID NO: 741421 - RNA, 18 nt, Human
aggcaggacacagaggac

SEQ ID NO: 741422 - RNA, 22 nt, Human
aggccgaggcggggggaucacu

SEQ ID NO: 741423 - RNA, 20 nt, Human
aggcggggggaucacugagg

SEQ ID NO: 741424 - RNA, 21 nt, Human
aggcggggggaucacugaggu

SEQ ID NO: 741425 - RNA, 25 nt, Human
aggcuggagugcaguggugcaaucu

SEQ ID NO: 741426 - RNA, 24 nt, Human
aggggggccgggugugguggcuca

SEQ ID NO: 741427 - RNA, 21 nt, Human
aggugguguagccaccauacc

SEQ ID NO: 741428 - RNA, 20 nt, Human
aguaaaaggaaaagacugga

SEQ ID NO: 741429 - RNA, 20 nt, Human
agugcaguggugcaaucucg

SEQ ID NO: 741430 - RNA, 24 nt, Human
agugcaguggugcaaucucggcuc

SEQ ID NO: 741431 - RNA, 18 nt, Human
agugcugggauuacaggc

SEQ ID NO: 741432 - RNA, 18 nt, Human
auaaaacacuguagcccc

SEQ ID NO: 741433 - RNA, 18 nt, Human
auaaaacacuguagcccc

SEQ ID NO: 741434 - RNA, 24 nt, Human
aucacaacacugcacuucagccug

SEQ ID NO: 741435 - RNA, 24 nt, Human
augauccgcccgccucggccuccc

SEQ ID NO: 741436 - RNA, 18 nt, Human
augggguuucaccauguu

SEQ ID NO: 741437 - RNA, 19 nt, Human
augggguuucaccauguua

SEQ ID NO: 741438 - RNA, 20 nt, Human
augggguuucaccauguuag

SEQ ID NO: 741439 - RNA, 24 nt, Human
augggguuucaccauguuagccag

SEQ ID NO: 741440 - RNA, 24 nt, Human
caaagcaggagaaucgcuugaacc

SEQ ID NO: 741441 - RNA, 24 nt, Human
caaagugcugggauuacaggcgug

SEQ ID NO: 741442 - RNA, 22 nt, Human
caacacagccauuccccuagaa

SEQ ID NO: 741443 - RNA, 19 nt, Human
caagaaggugcuucaucuu

SEQ ID NO: 741444 - RNA, 24 nt, Human
caagcacgccuucccauccugccc

SEQ ID NO: 741445 - RNA, 19 nt, Human
caccacacccagccucuuc

SEQ ID NO: 741446 - RNA, 18 nt, Human
caccauguuagccaggau

SEQ ID NO: 741447 - RNA, 22 nt, Human
caccauguuagccaggaugguc

SEQ ID NO: 741448 - RNA, 23 nt, Human
caccauguuagccaggauggucu

SEQ ID NO: 741449 - RNA, 24 nt, Human
caccauguuagccaggauggucuu

SEQ ID NO: 741450 - RNA, 18 nt, Human
cacccaccaccaugccug

SEQ ID NO: 741451 - RNA, 18 nt, Human
caccccucuccuccccuu

SEQ ID NO: 741452 - RNA, 19 nt, Human
cacugcacuucagccuggg

SEQ ID NO: 741453 - RNA, 20 nt, Human
cacugcacuucagccugggc

SEQ ID NO: 741454 - RNA, 21 nt, Human
cacugcacuucagccugggca

SEQ ID NO: 741455 - RNA, 22 nt, Human
cacugcacuucagccugggcaa

SEQ ID NO: 741456 - RNA, 23 nt, Human
cacugcacuucagccugggcaac

SEQ ID NO: 741457 - RNA, 24 nt, Human
cacugcacuucagccugggcaaca

SEQ ID NO: 741458 - RNA, 24 nt, Human
cagaacuuugggaggccgaggcgg

SEQ ID NO: 741459 - RNA, 18 nt, Human
cagagaucuacccugugu

SEQ ID NO: 741460 - RNA, 22 nt, Human
cagaguaaaaggaaaagacugg

SEQ ID NO: 741461 - RNA, 18 nt, Human
cagccugggcaacaagag

SEQ ID NO: 741462 - RNA, 20 nt, Human
caggacuccagcgccugcug

SEQ ID NO: 741463 - RNA, 19 nt, Human
caggauauucagaagugcu

SEQ ID NO: 741464 - RNA, 21 nt, Human
caguagcauacuuggcccugg

SEQ ID NO: 741465 - RNA, 22 nt, Human
caugccauucuccugccucagc

SEQ ID NO: 741466 - RNA, 18 nt, Human
cauguuaaaucauuuccu

SEQ ID NO: 741467 - RNA, 22 nt, Human
ccaaagugcugggauuacaggc

SEQ ID NO: 741468 - RNA, 22 nt, Human
ccaaagugcugggauuacaggc

SEQ ID NO: 741469 - RNA, 24 nt, Human
ccaaagugcugggauuacaggcgu

SEQ ID NO: 741470 - RNA, 18 nt, Human
ccaacucuccuacauaug

SEQ ID NO: 741471 - RNA, 19 nt, Human
ccaacucuccuacauaugc

SEQ ID NO: 741472 - RNA, 22 nt, Human
ccagcgccugcugugguggggu

SEQ ID NO: 741473 - RNA, 21 nt, Human
ccaggcacccaccaccaugcc

SEQ ID NO: 741474 - RNA, 20 nt, Human
cccagguucaugccauucuc

SEQ ID NO: 741475 - RNA, 19 nt, Human
cccauccugcccugccgga

SEQ ID NO: 741476 - RNA, 21 nt, Human
ccccacagccguucuuaccua

SEQ ID NO: 741477 - RNA, 21 nt, Human
cccccacagccguucuuaccu

SEQ ID NO: 741478 - RNA, 23 nt, Human
ccccuuguaagcaugagucccgc

SEQ ID NO: 741479 - RNA, 22 nt, Human
cccugccggagcaccccucucc

SEQ ID NO: 741480 - RNA, 18 nt, Human
ccucaggauauucagaag

SEQ ID NO: 741481 - RNA, 23 nt, Human
ccugaccaacauggcgaaacucc

SEQ ID NO: 741482 - RNA, 24 nt, Human
ccugaccaacauggcgaaacuccg

SEQ ID NO: 741483 - RNA, 21 nt, Human
ccugcaaccccagcuacucag

SEQ ID NO: 741484 - RNA, 22 nt, Human
ccugcaaccccagcuacucagg

SEQ ID NO: 741485 - RNA, 23 nt, Human
ccugccucagccucccgaguagc

SEQ ID NO: 741486 - RNA, 21 nt, Human
cgaggacuccaaauuuucugu

SEQ ID NO: 741487 - RNA, 25 nt, Human
cgaggcggggggaucacugagguca

SEQ ID NO: 741488 - RNA, 24 nt, Human
cgcccaggcuggagugcaguggug

SEQ ID NO: 741489 - RNA, 21 nt, Human
cgcccugucuuuaugacaccu

SEQ ID NO: 741490 - RNA, 24 nt, Human
cgccucggccucccaaagugcugg

SEQ ID NO: 741491 - RNA, 24 nt, Human
cgggaggcagagguugcagugagc

SEQ ID NO: 741492 - RNA, 25 nt, Human
cuagaacccagcugacuucccccac

SEQ ID NO: 741493 - RNA, 20 nt, Human
cuaggcuacaaaccuguacu

SEQ ID NO: 741494 - RNA, 22 nt, Human
cucacacccauaaucccagaac

SEQ ID NO: 741495 - RNA, 22 nt, Human
cucaccuaaauuucacaacaau

SEQ ID NO: 741496 - RNA, 24 nt, Human
cucagccucccgaguagcugggac

SEQ ID NO: 741497 - RNA, 18 nt, Human
cucaugauccgcccgccu

SEQ ID NO: 741498 - RNA, 24 nt, Human
cuccugaccucaugauccgcccgc

SEQ ID NO: 741499 - RNA, 23 nt, Human
cucuccuccccuuagugaggaag

SEQ ID NO: 741500 - RNA, 20 nt, Human
cucugucgcccaggcuggag

SEQ ID NO: 741501 - RNA, 24 nt, Human
cugcaagcucugccucccagguuc

SEQ ID NO: 741502 - RNA, 23 nt, Human
cugccucagccucccgaguagcu

SEQ ID NO: 741503 - RNA, 23 nt, Human
cuguauuuuuaguagagaugggg

SEQ ID NO: 741504 - RNA, 22 nt, Human
cuuaggacuccuaggcuacaaa

SEQ ID NO: 741505 - RNA, 18 nt, Human
cuucaucuuauuuuagug

SEQ ID NO: 741506 - RNA, 20 nt, Human
cuugaagucuccuugguggg

SEQ ID NO: 741507 - RNA, 20 nt, Human
cuuguaagcaugagucccgc

SEQ ID NO: 741508 - RNA, 24 nt, Human
gaaaaauuucaaaacacuuugcaa

SEQ ID NO: 741509 - RNA, 19 nt, Human
gaaacuccgccucuacuaa

SEQ ID NO: 741510 - RNA, 20 nt, Human
gaaauccgagaacacucuuc

SEQ ID NO: 741511 - RNA, 21 nt, Human
gaaggggggccggguguggug

SEQ ID NO: 741512 - RNA, 22 nt, Human
gaccucaugauccgcccgccuc

SEQ ID NO: 741513 - RNA, 26 nt, Human
gacuccagcgccugcugugguggggu

SEQ ID NO: 741514 - RNA, 22 nt, Human
gacuccaggcacccaccaccau

SEQ ID NO: 741515 - RNA, 23 nt, Human
gagaaucgcuugaacccgggagg

SEQ ID NO: 741516 - RNA, 23 nt, Human
gagaucacaacacugcacuucag

SEQ ID NO: 741517 - RNA, 21 nt, Human
gagauggagucuugcucuguc

SEQ ID NO: 741518 - RNA, 18 nt, Human
gagaugggguuucaccau

SEQ ID NO: 741519 - RNA, 24 nt, Human
gagaugggguuucaccauguuagc

SEQ ID NO: 741520 - RNA, 19 nt, Human
gaggacuccaaauuuucug

SEQ ID NO: 741521 - RNA, 24 nt, Human
gaggcggggggaucacugagguca

SEQ ID NO: 741522 - RNA, 20 nt, Human
gaguagcugggacuccaggc

SEQ ID NO: 741523 - RNA, 18 nt, Human
gagugcugacuuccucuc

SEQ ID NO: 741524 - RNA, 23 nt, Human
gaucacugaggucagaaguucga

SEQ ID NO: 741525 - RNA, 18 nt, Human
gauuacaggcgugagcca

SEQ ID NO: 741526 - RNA, 21 nt, Human
gauuacaggcgugagccacca

SEQ ID NO: 741527 - RNA, 22 nt, Human
gauuacaggcgugagccaccac

SEQ ID NO: 741528 - RNA, 20 nt, Human
gcaccccucuccuccccuua

SEQ ID NO: 741529 - RNA, 19 nt, Human
gcccaggcuggagugcagu

SEQ ID NO: 741530 - RNA, 20 nt, Human
gcccaggcuggagugcagug

SEQ ID NO: 741531 - RNA, 23 nt, Human
gcccaggcuggagugcaguggug

SEQ ID NO: 741532 - RNA, 22 nt, Human
gcccuggguuugacauaaaacu

SEQ ID NO: 741533 - RNA, 25 nt, Human
gccucccagguucaugccauucucc

SEQ ID NO: 741534 - RNA, 25 nt, Human
gcucugucgcccaggcuggagugca

SEQ ID NO: 741535 - RNA, 21 nt, Human
gcuuggggagauaaagaaggc

SEQ ID NO: 741536 - RNA, 27 nt, Human
ggacuccagcgccugcugugguggggu

SEQ ID NO: 741537 - RNA, 21 nt, Human
ggacuccuaggcuacaaaccu

SEQ ID NO: 741538 - RNA, 23 nt, Human
ggagucuugcucugucgcccagg

SEQ ID NO: 741539 - RNA, 19 nt, Human
ggauuacaggcgugagcca

SEQ ID NO: 741540 - RNA, 25 nt, Human
ggcgcgguggugcacaccugcaacc

SEQ ID NO: 741541 - RNA, 19 nt, Human
gggaggccgaggcgggggg

SEQ ID NO: 741542 - RNA, 22 nt, Human
gggggccgggugugguggcuca

SEQ ID NO: 741543 - RNA, 24 nt, Human
gggggccgggugugguggcucaca

SEQ ID NO: 741544 - RNA, 22 nt, Human
gggguuucaccauguuagccag

SEQ ID NO: 741545 - RNA, 20 nt, Human
ggucuugaucuccugaccuc

SEQ ID NO: 741546 - RNA, 24 nt, Human
gguggugcacaccugcaaccccag

SEQ ID NO: 741547 - RNA, 23 nt, Human
ggugugguggcucacacccauaa

SEQ ID NO: 741548 - RNA, 24 nt, Human
gguuucaccauguuagccaggaug

SEQ ID NO: 741549 - RNA, 23 nt, Human
guagagaugggguuucaccaugu

SEQ ID NO: 741550 - RNA, 20 nt, Human
gucaguuguccauauggcuc

SEQ ID NO: 741551 - RNA, 24 nt, Human
gucuugcucugucgcccaggcugg

SEQ ID NO: 741552 - RNA, 24 nt, Human
gugagccaccacacccagccucuu

SEQ ID NO: 741553 - RNA, 18 nt, Human
guggugggguaggguggg

SEQ ID NO: 741554 - RNA, 19 nt, Human
guugcagugagccgagauc

SEQ ID NO: 741555 - RNA, 20 nt, Human
uaaaaauacaaaauuagcca

SEQ ID NO: 741556 - RNA, 22 nt, Human
uaaaaauacaaaauuagccagg

SEQ ID NO: 741557 - RNA, 23 nt, Human
uaaaaauacaaaauuagccaggc

SEQ ID NO: 741558 - RNA, 21 nt, Human
uaaagaaggcccaggaaggcc

SEQ ID NO: 741559 - RNA, 22 nt, Human
uaaggugaaauccgagaacacu

SEQ ID NO: 741560 - RNA, 24 nt, Human
uaauuuagaaacaaucccuauuua

SEQ ID NO: 741561 - RNA, 28 nt, Human
uaauuuuuuucuguauuuuuaguagaga

SEQ ID NO: 741562 - RNA, 23 nt, Human
uacacaaaccuaggugguguagc

SEQ ID NO: 741563 - RNA, 24 nt, Human
uacaggcgugagccaccacaccca

SEQ ID NO: 741564 - RNA, 22 nt, Human
uagagaugggguuucaccaugu

SEQ ID NO: 741565 - RNA, 20 nt, Human
uagcaugauccccaguuuaa

SEQ ID NO: 741566 - RNA, 22 nt, Human
uagccccaaguuaaguucccuc

SEQ ID NO: 741567 - RNA, 24 nt, Human
uaguagagaugggguuucaccaug

SEQ ID NO: 741568 - RNA, 26 nt, Human
uaguagagaugggguuucaccauguu

SEQ ID NO: 741569 - RNA, 22 nt, Human
uauuauuauaaucagauuucug

SEQ ID NO: 741570 - RNA, 23 nt, Human
uauucacucaccuaaauuucaca

SEQ ID NO: 741571 - RNA, 23 nt, Human
ucacaacacugcacuucagccug

SEQ ID NO: 741572 - RNA, 24 nt, Human
ucaccauguuagccaggauggucu

SEQ ID NO: 741573 - RNA, 21 nt, Human
ucaccuguguucagagaucua

SEQ ID NO: 741574 - RNA, 25 nt, Human
ucacuagguuauuucaccauugugc

SEQ ID NO: 741575 - RNA, 18 nt, Human
ucacugcaagcucugccu

SEQ ID NO: 741576 - RNA, 18 nt, Human
ucacugcaagcucugccu

SEQ ID NO: 741577 - RNA, 19 nt, Human
ucacugcaagcucugccuc

SEQ ID NO: 741578 - RNA, 24 nt, Human
ucacugcaagcucugccucccagg

SEQ ID NO: 741579 - RNA, 23 nt, Human
ucagccucccgaguagcugggac

SEQ ID NO: 741580 - RNA, 21 nt, Human
ucaggcaggacacagaggaca

SEQ ID NO: 741581 - RNA, 23 nt, Human
ucauauauucacucaccuaaaag

SEQ ID NO: 741582 - RNA, 18 nt, Human
ucaugucacaaucccgcc

SEQ ID NO: 741583 - RNA, 24 nt, Human
ucccaaagugcugggauuacaggc

SEQ ID NO: 741584 - RNA, 21 nt, Human
ucccaaggaagucaccggacc

SEQ ID NO: 741585 - RNA, 22 nt, Human
ucccaaggaagucaccggaccu

SEQ ID NO: 741586 - RNA, 18 nt, Human
ucccaggacuccagcgcc

SEQ ID NO: 741587 - RNA, 20 nt, Human
ucccagguucaugccauucu

SEQ ID NO: 741588 - RNA, 21 nt, Human
ucccagguucaugccauucuc

SEQ ID NO: 741589 - RNA, 24 nt, Human
ucccagguucaugccauucuccug

SEQ ID NO: 741590 - RNA, 19 nt, Human
ucccauccugcccugccgg

SEQ ID NO: 741591 - RNA, 23 nt, Human
uccccaguuuaaaggugaggaaa

SEQ ID NO: 741592 - RNA, 19 nt, Human
uccccuagaaguuacagca

SEQ ID NO: 741593 - RNA, 24 nt, Human
ucccgaguagcugggacuccaggc

SEQ ID NO: 741594 - RNA, 22 nt, Human
ucgcccaggcuggagugcagug

SEQ ID NO: 741595 - RNA, 18 nt, Human
ucgcuugaacccgggagg

SEQ ID NO: 741596 - RNA, 18 nt, Human
ucggccucccaaagugcu

SEQ ID NO: 741597 - RNA, 23 nt, Human
ucuacauauagaaagcuagggac

SEQ ID NO: 741598 - RNA, 24 nt, Human
ucuccugccucagccucccgagua

SEQ ID NO: 741599 - RNA, 23 nt, Human
ucuugcucugucgcccaggcugg

SEQ ID NO: 741600 - RNA, 24 nt, Human
ucuugcucugucgcccaggcugga

SEQ ID NO: 741601 - RNA, 20 nt, Human
ugaaaugcuaacuagcauga

SEQ ID NO: 741602 - RNA, 19 nt, Human
ugacaccuuuauuuaugcc

SEQ ID NO: 741603 - RNA, 20 nt, Human
ugaggagaagggagaguuga

SEQ ID NO: 741604 - RNA, 19 nt, Human
ugcaaccccagcuacucag

SEQ ID NO: 741605 - RNA, 20 nt, Human
ugcacacauggagaagaggc

SEQ ID NO: 741606 - RNA, 22 nt, Human
ugcaguggugcaaucucggcuc

SEQ ID NO: 741607 - RNA, 24 nt, Human
ugccucagccucccgaguagcugg

SEQ ID NO: 741608 - RNA, 20 nt, Human
ugccuggcauagacauaggg

SEQ ID NO: 741609 - RNA, 24 nt, Human
ugcugggauuacaggcgugagcca

SEQ ID NO: 741610 - RNA, 23 nt, Human
uggagucuugcucugucgcccag

SEQ ID NO: 741611 - RNA, 24 nt, Human
uggagucuugcucugucgcccagg

SEQ ID NO: 741612 - RNA, 23 nt, Human
uggagugcaguggugcaaucucg

SEQ ID NO: 741613 - RNA, 24 nt, Human
uggagugcaguggugcaaucucgg

SEQ ID NO: 741614 - RNA, 22 nt, Human
uggcucacacccauaaucccag

SEQ ID NO: 741615 - RNA, 18 nt, Human
ugggaggaggcugaacug

SEQ ID NO: 741616 - RNA, 24 nt, Human
ugggaggccgaggcggggggauca
